United States Patent Application Publication US 2014/0004565 A1 - sequence listing, part 94

SEQ ID NO: 2329143 - RNA, 19 nt, Artificial Sequence
  Description of Artificial Sequence: Synthetic oligonucleotide
cggccgaccguccgcgcua

SEQ ID NO: 2329144 - RNA, 19 nt, Artificial Sequence
  Description of Artificial Sequence: Synthetic oligonucleotide
cccgcuugcugaggauguu

SEQ ID NO: 2329145 - RNA, 19 nt, Artificial Sequence
  Description of Artificial Sequence: Synthetic oligonucleotide
cgccacccgcagcggugau

SEQ ID NO: 2329146 - RNA, 19 nt, Artificial Sequence
  Description of Artificial Sequence: Synthetic oligonucleotide
ucuauagagauacugggug

SEQ ID NO: 2329147 - RNA, 19 nt, Artificial Sequence
  Description of Artificial Sequence: Synthetic oligonucleotide
accagagagacucagugcg

SEQ ID NO: 2329148 - RNA, 19 nt, Artificial Sequence
  Description of Artificial Sequence: Synthetic oligonucleotide
ucuccugaaagccagcuca

SEQ ID NO: 2329149 - RNA, 19 nt, Artificial Sequence
  Description of Artificial Sequence: Synthetic oligonucleotide
ugucaucuagccaggaccg

SEQ ID NO: 2329150 - RNA, 19 nt, Artificial Sequence
  Description of Artificial Sequence: Synthetic oligonucleotide
cuauagagauacugggugg

SEQ ID NO: 2329151 - RNA, 19 nt, Artificial Sequence
  Description of Artificial Sequence: Synthetic oligonucleotide
aguagagaaaggugagagg

SEQ ID NO: 2329152 - RNA, 19 nt, Artificial Sequence
  Description of Artificial Sequence: Synthetic oligonucleotide
ucgaacccgccccagaagg

SEQ ID NO: 2329153 - RNA, 19 nt, Artificial Sequence
  Description of Artificial Sequence: Synthetic oligonucleotide
ggucuauagagauacuggg

SEQ ID NO: 2329154 - RNA, 19 nt, Artificial Sequence
  Description of Artificial Sequence: Synthetic oligonucleotide
  modified_base (8)..(8): a, c, u, g, unknown or other
uucccggnuacccaggccc

SEQ ID NO: 2329155 - RNA, 19 nt, Artificial Sequence
  Description of Artificial Sequence: Synthetic oligonucleotide
cuuauugcugccuggcgcc

SEQ ID NO: 2329156 - RNA, 19 nt, Artificial Sequence
  Description of Artificial Sequence: Synthetic oligonucleotide
accgcaauggagugucucc

SEQ ID NO: 2329157 - RNA, 19 nt, Artificial Sequence
  Description of Artificial Sequence: Synthetic oligonucleotide
agggagucaguccuuauug

SEQ ID NO: 2329158 - RNA, 19 nt, Artificial Sequence
  Description of Artificial Sequence: Synthetic oligonucleotide
ggggcuuggacauaggcgg

SEQ ID NO: 2329159 - RNA, 19 nt, Artificial Sequence
  Description of Artificial Sequence: Synthetic oligonucleotide
  modified_base (16)..(16): a, c, u, g, unknown or other
agcaggucuucccggnuac

SEQ ID NO: 2329160 - RNA, 19 nt, Artificial Sequence
  Description of Artificial Sequence: Synthetic oligonucleotide
uagggugcaucuuugggca

SEQ ID NO: 2329161 - RNA, 19 nt, Artificial Sequence
  Description of Artificial Sequence: Synthetic oligonucleotide
gaggggagcggccuggugg

SEQ ID NO: 2329162 - RNA, 19 nt, Artificial Sequence
  Description of Artificial Sequence: Synthetic oligonucleotide
augaggaucgggucagagg

SEQ ID NO: 2329163 - RNA, 19 nt, Artificial Sequence
  Description of Artificial Sequence: Synthetic oligonucleotide
ucuuugggcagcuguagga

SEQ ID NO: 2329164 - RNA, 19 nt, Artificial Sequence
  Description of Artificial Sequence: Synthetic oligonucleotide
uccuuauugcugccuggcg

SEQ ID NO: 2329165 - RNA, 19 nt, Artificial Sequence
  Description of Artificial Sequence: Synthetic oligonucleotide
agauagggugcaucuuugg

SEQ ID NO: 2329166 - RNA, 19 nt, Artificial Sequence
  Description of Artificial Sequence: Synthetic oligonucleotide
agagauacugggugggcug

SEQ ID NO: 2329167 - RNA, 19 nt, Artificial Sequence
  Description of Artificial Sequence: Synthetic oligonucleotide
ucuuaggccggcucccagg

SEQ ID NO: 2329168 - RNA, 19 nt, Artificial Sequence
  Description of Artificial Sequence: Synthetic oligonucleotide
cucagugcgucuuucuuug

SEQ ID NO: 2329169 - RNA, 19 nt, Artificial Sequence
  Description of Artificial Sequence: Synthetic oligonucleotide
aucuuugggcagcuguagg

SEQ ID NO: 2329170 - RNA, 19 nt, Artificial Sequence
  Description of Artificial Sequence: Synthetic oligonucleotide
  modified_base (10)..(10): a, c, u, g, unknown or other
ucuucccggnuacccaggc

SEQ ID NO: 2329171 - RNA, 19 nt, Artificial Sequence
  Description of Artificial Sequence: Synthetic oligonucleotide
uccuuggagucacuggaug

SEQ ID NO: 2329172 - RNA, 19 nt, Artificial Sequence
  Description of Artificial Sequence: Synthetic oligonucleotide
aguuuagggauggcgcccc

SEQ ID NO: 2329173 - RNA, 19 nt, Artificial Sequence
  Description of Artificial Sequence: Synthetic oligonucleotide
  modified_base (2)..(2): a, c, u, g, unknown or other
gnuacccaggcccuguaca

SEQ ID NO: 2329174 - RNA, 19 nt, Artificial Sequence
  Description of Artificial Sequence: Synthetic oligonucleotide
auaggcgggguugggagcc

SEQ ID NO: 2329175 - RNA, 19 nt, Artificial Sequence
  Description of Artificial Sequence: Synthetic oligonucleotide
uugggucagaggacaaacc

SEQ ID NO: 2329176 - RNA, 19 nt, Artificial Sequence
  Description of Artificial Sequence: Synthetic oligonucleotide
gguaguuuagggauggcgc

SEQ ID NO: 2329177 - RNA, 19 nt, Artificial Sequence
  Description of Artificial Sequence: Synthetic oligonucleotide
ugcgucuuucuuuggggag

SEQ ID NO: 2329178 - RNA, 19 nt, Artificial Sequence
  Description of Artificial Sequence: Synthetic oligonucleotide
gaaggaugaggaucggguc

SEQ ID NO: 2329179 - RNA, 19 nt, Artificial Sequence
  Description of Artificial Sequence: Synthetic oligonucleotide
ugaguggccucugagccag

SEQ ID NO: 2329180 - RNA, 19 nt, Artificial Sequence
  Description of Artificial Sequence: Synthetic oligonucleotide
ugcaccuggaugcucgaac

SEQ ID NO: 2329181 - RNA, 19 nt, Artificial Sequence
  Description of Artificial Sequence: Synthetic oligonucleotide
aguccuuauugcugccugg

SEQ ID NO: 2329182 - RNA, 19 nt, Artificial Sequence
  Description of Artificial Sequence: Synthetic oligonucleotide
uuuucuuaggccggcuccc

SEQ ID NO: 2329183 - RNA, 19 nt, Artificial Sequence
  Description of Artificial Sequence: Synthetic oligonucleotide
uaggccggcucccagggcc

SEQ ID NO: 2329184 - RNA, 19 nt, Artificial Sequence
  Description of Artificial Sequence: Synthetic oligonucleotide
uuggacauaggcgggguug

SEQ ID NO: 2329185 - RNA, 19 nt, Artificial Sequence
  Description of Artificial Sequence: Synthetic oligonucleotide
caucuagccaggaccgucc

SEQ ID NO: 2329186 - RNA, 19 nt, Artificial Sequence
  Description of Artificial Sequence: Synthetic oligonucleotide
cccagaaggaugaggaucg

SEQ ID NO: 2329187 - RNA, 19 nt, Artificial Sequence
  Description of Artificial Sequence: Synthetic oligonucleotide
ggucuguugggucagagga

SEQ ID NO: 2329188 - RNA, 19 nt, Artificial Sequence
  Description of Artificial Sequence: Synthetic oligonucleotide
uuggagucacuggauggcg

SEQ ID NO: 2329189 - RNA, 19 nt, Artificial Sequence
  Description of Artificial Sequence: Synthetic oligonucleotide
agguggggcuccaugaggc

SEQ ID NO: 2329190 - RNA, 19 nt, Artificial Sequence
  Description of Artificial Sequence: Synthetic oligonucleotide
cuuaggccggcucccaggg

SEQ ID NO: 2329191 - RNA, 19 nt, Artificial Sequence
  Description of Artificial Sequence: Synthetic oligonucleotide
gggucuauagagauacugg

SEQ ID NO: 2329192 - RNA, 19 nt, Artificial Sequence
  Description of Artificial Sequence: Synthetic oligonucleotide
caggaggucuccugaaagc

SEQ ID NO: 2329193 - RNA, 19 nt, Artificial Sequence
  Description of Artificial Sequence: Synthetic oligonucleotide
acaaaccagagagacucag

SEQ ID NO: 2329194 - RNA, 19 nt, Artificial Sequence
  Description of Artificial Sequence: Synthetic oligonucleotide
aggucuguugggucagagg

SEQ ID NO: 2329195 - RNA, 19 nt, Artificial Sequence
  Description of Artificial Sequence: Synthetic oligonucleotide
aucuagccaggaccguccc

SEQ ID NO: 2329196 - RNA, 19 nt, Artificial Sequence
  Description of Artificial Sequence: Synthetic oligonucleotide
uggacauaggcgggguugg

SEQ ID NO: 2329197 - RNA, 19 nt, Artificial Sequence
  Description of Artificial Sequence: Synthetic oligonucleotide
ucuagccaggaccgucccg

SEQ ID NO: 2329198 - RNA, 19 nt, Artificial Sequence
  Description of Artificial Sequence: Synthetic oligonucleotide
aggugagagggagaguggg

SEQ ID NO: 2329199 - RNA, 19 nt, Artificial Sequence
  Description of Artificial Sequence: Synthetic oligonucleotide
aggggcuuggacauaggcg

SEQ ID NO: 2329200 - RNA, 19 nt, Artificial Sequence
  Description of Artificial Sequence: Synthetic oligonucleotide
cacccaguagagaaaggug

SEQ ID NO: 2329201 - RNA, 19 nt, Artificial Sequence
  Description of Artificial Sequence: Synthetic oligonucleotide
aggaccgucccguggggac

SEQ ID NO: 2329202 - RNA, 19 nt, Artificial Sequence
  Description of Artificial Sequence: Synthetic oligonucleotide
  modified_base (14)..(14): a, c, u, g, unknown or other
caggucuucccggnuaccc

SEQ ID NO: 2329203 - RNA, 19 nt, Artificial Sequence
  Description of Artificial Sequence: Synthetic oligonucleotide
cagugcgucuuucuuuggg

SEQ ID NO: 2329204 - RNA, 19 nt, Artificial Sequence
  Description of Artificial Sequence: Synthetic oligonucleotide
gggauggcgccccaggugg

SEQ ID NO: 2329205 - RNA, 19 nt, Artificial Sequence
  Description of Artificial Sequence: Synthetic oligonucleotide
cagauagggugcaucuuug

SEQ ID NO: 2329206 - RNA, 19 nt, Artificial Sequence
  Description of Artificial Sequence: Synthetic oligonucleotide
guugggucagaggacaaac

SEQ ID NO: 2329207 - RNA, 19 nt, Artificial Sequence
  Description of Artificial Sequence: Synthetic oligonucleotide
accuggaugcucgaacccg

SEQ ID NO: 2329208 - RNA, 19 nt, Artificial Sequence
  Description of Artificial Sequence: Synthetic oligonucleotide
aggggagcggccugguggg

SEQ ID NO: 2329209 - RNA, 19 nt, Artificial Sequence
  Description of Artificial Sequence: Synthetic oligonucleotide
uucuuaggccggcucccag

SEQ ID NO: 2329210 - RNA, 19 nt, Artificial Sequence
  Description of Artificial Sequence: Synthetic oligonucleotide
gcccuguacauccagggag

SEQ ID NO: 2329211 - RNA, 19 nt, Artificial Sequence
  Description of Artificial Sequence: Synthetic oligonucleotide
gacucagggguccaggucu

SEQ ID NO: 2329212 - RNA, 19 nt, Artificial Sequence
  Description of Artificial Sequence: Synthetic oligonucleotide
cucuaagcugcuucugguc

SEQ ID NO: 2329213 - RNA, 19 nt, Artificial Sequence
  Description of Artificial Sequence: Synthetic oligonucleotide
ugagggauccuuggaguca

SEQ ID NO: 2329214 - RNA, 19 nt, Artificial Sequence
  Description of Artificial Sequence: Synthetic oligonucleotide
uggaugcucgaacccgccc

SEQ ID NO: 2329215 - RNA, 19 nt, Artificial Sequence
  Description of Artificial Sequence: Synthetic oligonucleotide
ugcgcugguguaugcagcu

SEQ ID NO: 2329216 - RNA, 19 nt, Artificial Sequence
  Description of Artificial Sequence: Synthetic oligonucleotide
ucagugcgucuuucuuugg

SEQ ID NO: 2329217 - RNA, 19 nt, Artificial Sequence
  Description of Artificial Sequence: Synthetic oligonucleotide
ggguaguuuagggauggcg

SEQ ID NO: 2329218 - RNA, 19 nt, Artificial Sequence
  Description of Artificial Sequence: Synthetic oligonucleotide
ccuuauugcugccuggcgc

SEQ ID NO: 2329219 - RNA, 19 nt, Artificial Sequence
  Description of Artificial Sequence: Synthetic oligonucleotide
cugagggauccuuggaguc

SEQ ID NO: 2329220 - RNA, 19 nt, Artificial Sequence
  Description of Artificial Sequence: Synthetic oligonucleotide
acucagugcgucuuucuuu

SEQ ID NO: 2329221 - RNA, 19 nt, Artificial Sequence
  Description of Artificial Sequence: Synthetic oligonucleotide
cugggcaagcggcuggcgg

SEQ ID NO: 2329222 - RNA, 19 nt, Artificial Sequence
  Description of Artificial Sequence: Synthetic oligonucleotide
cauaggcgggguugggagc

SEQ ID NO: 2329223 - RNA, 19 nt, Artificial Sequence
  Description of Artificial Sequence: Synthetic oligonucleotide
gcaggaggucuccugaaag

SEQ ID NO: 2329224 - RNA, 19 nt, Artificial Sequence
  Description of Artificial Sequence: Synthetic oligonucleotide
ucaucuagccaggaccguc

SEQ ID NO: 2329225 - RNA, 19 nt, Artificial Sequence
  Description of Artificial Sequence: Synthetic oligonucleotide
caucuuugggcagcuguag

SEQ ID NO: 2329226 - RNA, 19 nt, Artificial Sequence
  Description of Artificial Sequence: Synthetic oligonucleotide
uuuagggauggcgccccag

SEQ ID NO: 2329227 - RNA, 19 nt, Artificial Sequence
  Description of Artificial Sequence: Synthetic oligonucleotide
ggaugcucgaacccgcccc

SEQ ID NO: 2329228 - RNA, 19 nt, Artificial Sequence
  Description of Artificial Sequence: Synthetic oligonucleotide
agcuaggaucugcacccag

SEQ ID NO: 2329229 - RNA, 19 nt, Artificial Sequence
  Description of Artificial Sequence: Synthetic oligonucleotide
gauggcgcccuccuccuga

SEQ ID NO: 2329230 - RNA, 19 nt, Artificial Sequence
  Description of Artificial Sequence: Synthetic oligonucleotide
ugggacucagggguccagg

SEQ ID NO: 2329231 - RNA, 19 nt, Artificial Sequence
  Description of Artificial Sequence: Synthetic oligonucleotide
aaagccagcucagcuccgu

SEQ ID NO: 2329232 - RNA, 19 nt, Artificial Sequence
  Description of Artificial Sequence: Synthetic oligonucleotide
ggggucuauagagauacug

SEQ ID NO: 2329233 - RNA, 19 nt, Artificial Sequence
  Description of Artificial Sequence: Synthetic oligonucleotide
  modified_base (12)..(12): a, c, u, g, unknown or other
ggucuucccggnuacccag

SEQ ID NO: 2329234 - RNA, 19 nt, Artificial Sequence
  Description of Artificial Sequence: Synthetic oligonucleotide
  modified_base (7)..(7): a, c, u, g, unknown or other
ucccggnuacccaggcccu

SEQ ID NO: 2329235 - RNA, 19 nt, Artificial Sequence
  Description of Artificial Sequence: Synthetic oligonucleotide
gagcagauagggugcaucu

SEQ ID NO: 2329236 - RNA, 19 nt, Artificial Sequence
  Description of Artificial Sequence: Synthetic oligonucleotide
cugcgcugguguaugcagc

SEQ ID NO: 2329237 - RNA, 19 nt, Artificial Sequence
  Description of Artificial Sequence: Synthetic oligonucleotide
gaugcucgaacccgcccca

SEQ ID NO: 2329238 - RNA, 19 nt, Artificial Sequence
  Description of Artificial Sequence: Synthetic oligonucleotide
auacugggugggcugaguu

SEQ ID NO: 2329239 - RNA, 19 nt, Artificial Sequence
  Description of Artificial Sequence: Synthetic oligonucleotide
guccuuauugcugccuggc

SEQ ID NO: 2329240 - RNA, 19 nt, Artificial Sequence
  Description of Artificial Sequence: Synthetic oligonucleotide
gagggauccuuggagucac

SEQ ID NO: 2329241 - RNA, 19 nt, Artificial Sequence
  Description of Artificial Sequence: Synthetic oligonucleotide
ggaucugcacccaguagag

SEQ ID NO: 2329242 - RNA, 19 nt, Artificial Sequence
  Description of Artificial Sequence: Synthetic oligonucleotide
cuggaugcucgaacccgcc

SEQ ID NO: 2329243 - RNA, 19 nt, Artificial Sequence
  Description of Artificial Sequence: Synthetic oligonucleotide
aggaucgggucagagggca

SEQ ID NO: 2329244 - RNA, 19 nt, Artificial Sequence
  Description of Artificial Sequence: Synthetic oligonucleotide
gcagccgugcugucaaggg

SEQ ID NO: 2329245 - RNA, 19 nt, Artificial Sequence
  Description of Artificial Sequence: Synthetic oligonucleotide
aggcggagcuaggaucugc

SEQ ID NO: 2329246 - RNA, 19 nt, Artificial Sequence
  Description of Artificial Sequence: Synthetic oligonucleotide
  modified_base (9)..(9): a, c, u, g, unknown or other
cuucccggnuacccaggcc

SEQ ID NO: 2329247 - RNA, 19 nt, Artificial Sequence
  Description of Artificial Sequence: Synthetic oligonucleotide
uccugaaagccagcucagc

SEQ ID NO: 2329248 - RNA, 19 nt, Artificial Sequence
  Description of Artificial Sequence: Synthetic oligonucleotide
cccaguagagaaaggugag

SEQ ID NO: 2329249 - RNA, 19 nt, Artificial Sequence
  Description of Artificial Sequence: Synthetic oligonucleotide
gcagcugaccgcaauggag

SEQ ID NO: 2329250 - RNA, 19 nt, Artificial Sequence
  Description of Artificial Sequence: Synthetic oligonucleotide
ggcggaugugcuuggagac

SEQ ID NO: 2329251 - RNA, 19 nt, Artificial Sequence
  Description of Artificial Sequence: Synthetic oligonucleotide
uguugggucagaggacaaa

SEQ ID NO: 2329252 - RNA, 19 nt, Artificial Sequence
  Description of Artificial Sequence: Synthetic oligonucleotide
ggcaccaggacugcauggg

SEQ ID NO: 2329253 - RNA, 19 nt, Artificial Sequence
  Description of Artificial Sequence: Synthetic oligonucleotide
ugaggcagccgugcuguca

SEQ ID NO: 2329254 - RNA, 19 nt, Artificial Sequence
  Description of Artificial Sequence: Synthetic oligonucleotide
cucgaacccgccccagaag

SEQ ID NO: 2329255 - RNA, 19 nt, Artificial Sequence
  Description of Artificial Sequence: Synthetic oligonucleotide
cauccagggagucaguccu

SEQ ID NO: 2329256 - RNA, 19 nt, Artificial Sequence
  Description of Artificial Sequence: Synthetic oligonucleotide
uuucuuaggccggcuccca

SEQ ID NO: 2329257 - RNA, 19 nt, Artificial Sequence
  Description of Artificial Sequence: Synthetic oligonucleotide
gugcgucuuucuuugggga

SEQ ID NO: 2329258 - RNA, 19 nt, Artificial Sequence
  Description of Artificial Sequence: Synthetic oligonucleotide
ggacagggguuccuccugg

SEQ ID NO: 2329259 - RNA, 19 nt, Artificial Sequence
  Description of Artificial Sequence: Synthetic oligonucleotide
ugcucgaacccgccccaga

SEQ ID NO: 2329260 - RNA, 19 nt, Artificial Sequence
  Description of Artificial Sequence: Synthetic oligonucleotide
cuaggaucugcacccagua

SEQ ID NO: 2329261 - RNA, 19 nt, Artificial Sequence
  Description of Artificial Sequence: Synthetic oligonucleotide
uacugggugggcugaguuu

SEQ ID NO: 2329262 - RNA, 19 nt, Artificial Sequence
  Description of Artificial Sequence: Synthetic oligonucleotide
gacauaggcgggguuggga

SEQ ID NO: 2329263 - RNA, 19 nt, Artificial Sequence
  Description of Artificial Sequence: Synthetic oligonucleotide
agaggacaaaccagagaga

SEQ ID NO: 2329264 - RNA, 19 nt, Artificial Sequence
  Description of Artificial Sequence: Synthetic oligonucleotide
gagaaaggugagagggaga

SEQ ID NO: 2329265 - RNA, 19 nt, Artificial Sequence
  Description of Artificial Sequence: Synthetic oligonucleotide
ggcaggagggcccacucac

SEQ ID NO: 2329266 - RNA, 19 nt, Artificial Sequence
  Description of Artificial Sequence: Synthetic oligonucleotide
uuaggccggcucccagggc

SEQ ID NO: 2329267 - RNA, 19 nt, Artificial Sequence
  Description of Artificial Sequence: Synthetic oligonucleotide
gagauacugggugggcuga

SEQ ID NO: 2329268 - RNA, 19 nt, Artificial Sequence
  Description of Artificial Sequence: Synthetic oligonucleotide
ggcgcccuccuccugaggc

SEQ ID NO: 2329269 - RNA, 19 nt, Artificial Sequence
  Description of Artificial Sequence: Synthetic oligonucleotide
gcgucuuucuuuggggagg

SEQ ID NO: 2329270 - RNA, 19 nt, Artificial Sequence
  Description of Artificial Sequence: Synthetic oligonucleotide
agagacucagugcgucuuu

SEQ ID NO: 2329271 - RNA, 19 nt, Artificial Sequence
  Description of Artificial Sequence: Synthetic oligonucleotide
agggugcaucuuugggcag

SEQ ID NO: 2329272 - RNA, 19 nt, Artificial Sequence
  Description of Artificial Sequence: Synthetic oligonucleotide
gucuauagagauacugggu

SEQ ID NO: 2329273 - RNA, 19 nt, Artificial Sequence
  Description of Artificial Sequence: Synthetic oligonucleotide
gggguugggagccacuguc

SEQ ID NO: 2329274 - RNA, 19 nt, Artificial Sequence
  Description of Artificial Sequence: Synthetic oligonucleotide
aggacaaaccagagagacu

SEQ ID NO: 2329275 - RNA, 19 nt, Artificial Sequence
  Description of Artificial Sequence: Synthetic oligonucleotide
gagggagagugggugggac

SEQ ID NO: 2329276 - RNA, 19 nt, Artificial Sequence
  Description of Artificial Sequence: Synthetic oligonucleotide
uauugcugccuggcgccug

SEQ ID NO: 2329277 - RNA, 19 nt, Artificial Sequence
  Description of Artificial Sequence: Synthetic oligonucleotide
agugucuccuugucaucua

SEQ ID NO: 2329278 - RNA, 19 nt, Artificial Sequence
  Description of Artificial Sequence: Synthetic oligonucleotide
ccuggaugcucgaacccgc

SEQ ID NO: 2329279 - RNA, 19 nt, Artificial Sequence
  Description of Artificial Sequence: Synthetic oligonucleotide
gaggaucgggucagagggc

SEQ ID NO: 2329280 - RNA, 19 nt, Artificial Sequence
  Description of Artificial Sequence: Synthetic oligonucleotide
gucuccugaaagccagcuc

SEQ ID NO: 2329281 - RNA, 19 nt, Artificial Sequence
  Description of Artificial Sequence: Synthetic oligonucleotide
uuauugcugccuggcgccu

SEQ ID NO: 2329282 - RNA, 19 nt, Artificial Sequence
  Description of Artificial Sequence: Synthetic oligonucleotide
aggucuccugaaagccagc

SEQ ID NO: 2329283 - RNA, 19 nt, Artificial Sequence
  Description of Artificial Sequence: Synthetic oligonucleotide
agauacugggugggcugag

SEQ ID NO: 2329284 - RNA, 19 nt, Artificial Sequence
  Description of Artificial Sequence: Synthetic oligonucleotide
gugucugcgcugguguaug

SEQ ID NO: 2329285 - RNA, 19 nt, Artificial Sequence
  Description of Artificial Sequence: Synthetic oligonucleotide
ggagucaguccuuauugcu

SEQ ID NO: 2329286 - RNA, 19 nt, Artificial Sequence
  Description of Artificial Sequence: Synthetic oligonucleotide
  modified_base (11)..(11): a, c, u, g, unknown or other
gucuucccggnuacccagg

SEQ ID NO: 2329287 - RNA, 19 nt, Artificial Sequence
  Description of Artificial Sequence: Synthetic oligonucleotide
gggcggaugugcuuggaga

SEQ ID NO: 2329288 - RNA, 19 nt, Artificial Sequence
  Description of Artificial Sequence: Synthetic oligonucleotide
cggagcuaggaucugcacc

SEQ ID NO: 2329289 - RNA, 19 nt, Artificial Sequence
  Description of Artificial Sequence: Synthetic oligonucleotide
  modified_base (13)..(13): a, c, u, g, unknown or other
aggucuucccggnuaccca

SEQ ID NO: 2329290 - RNA, 19 nt, Artificial Sequence
  Description of Artificial Sequence: Synthetic oligonucleotide
cucaccucugacagcaggu

SEQ ID NO: 2329291 - RNA, 19 nt, Artificial Sequence
  Description of Artificial Sequence: Synthetic oligonucleotide
gcagcuguaggaugcagcu

SEQ ID NO: 2329292 - RNA, 19 nt, Artificial Sequence
  Description of Artificial Sequence: Synthetic oligonucleotide
cugaguggccucugagcca

SEQ ID NO: 2329293 - RNA, 19 nt, Artificial Sequence
  Description of Artificial Sequence: Synthetic oligonucleotide
ggcuuggacauaggcgggg

SEQ ID NO: 2329294 - RNA, 19 nt, Artificial Sequence
  Description of Artificial Sequence: Synthetic oligonucleotide
agaggggagcggccuggug

SEQ ID NO: 2329295 - RNA, 19 nt, Artificial Sequence
  Description of Artificial Sequence: Synthetic oligonucleotide
ggcagccgugcugucaagg

SEQ ID NO: 2329296 - RNA, 19 nt, Artificial Sequence
  Description of Artificial Sequence: Synthetic oligonucleotide
gaucugcacccaguagaga

SEQ ID NO: 2329297 - RNA, 19 nt, Artificial Sequence
  Description of Artificial Sequence: Synthetic oligonucleotide
ucccguggggacagggguu

SEQ ID NO: 2329298 - RNA, 19 nt, Artificial Sequence
  Description of Artificial Sequence: Synthetic oligonucleotide
gcuuggagaccuugcucug

SEQ ID NO: 2329299 - RNA, 19 nt, Artificial Sequence
  Description of Artificial Sequence: Synthetic oligonucleotide
cacuguccaggcagcugac

SEQ ID NO: 2329300 - RNA, 19 nt, Artificial Sequence
  Description of Artificial Sequence: Synthetic oligonucleotide
  modified_base (3)..(3): a, c, u, g, unknown or other
ggnuacccaggcccuguac

SEQ ID NO: 2329301 - RNA, 19 nt, Artificial Sequence
  Description of Artificial Sequence: Synthetic oligonucleotide
ugcugccuggcgccugagu

SEQ ID NO: 2329302 - RNA, 19 nt, Artificial Sequence
  Description of Artificial Sequence: Synthetic oligonucleotide
gaccgucccguggggacag

SEQ ID NO: 2329303 - RNA, 19 nt, Artificial Sequence
  Description of Artificial Sequence: Synthetic oligonucleotide
ggaugcagcuggugucugc

SEQ ID NO: 2329304 - RNA, 19 nt, Artificial Sequence
  Description of Artificial Sequence: Synthetic oligonucleotide
caauggagugucuccuugu

SEQ ID NO: 2329305 - RNA, 19 nt, Artificial Sequence
  Description of Artificial Sequence: Synthetic oligonucleotide
cuuuggggagggugaggca

SEQ ID NO: 2329306 - RNA, 19 nt, Artificial Sequence
  Description of Artificial Sequence: Synthetic oligonucleotide
agaccuugcucuggcugcu

SEQ ID NO: 2329307 - RNA, 19 nt, Artificial Sequence
  Description of Artificial Sequence: Synthetic oligonucleotide
ugggcagcuguaggaugca

SEQ ID NO: 2329308 - RNA, 19 nt, Artificial Sequence
  Description of Artificial Sequence: Synthetic oligonucleotide
guccaggcagcugaccgca

SEQ ID NO: 2329309 - RNA, 19 nt, Artificial Sequence
  Description of Artificial Sequence: Synthetic oligonucleotide
uggcgcccuccuccugagg

SEQ ID NO: 2329310 - RNA, 19 nt, Artificial Sequence
  Description of Artificial Sequence: Synthetic oligonucleotide
gggacagggguuccuccug

SEQ ID NO: 2329311 - RNA, 19 nt, Artificial Sequence
  Description of Artificial Sequence: Synthetic oligonucleotide
gguccaggucuguuggguc

SEQ ID NO: 2329312 - RNA, 19 nt, Artificial Sequence
  Description of Artificial Sequence: Synthetic oligonucleotide
uacccaggcccuguacauc

SEQ ID NO: 2329313 - RNA, 19 nt, Artificial Sequence
  Description of Artificial Sequence: Synthetic oligonucleotide
cuagccaggaccgucccgu

SEQ ID NO: 2329314 - RNA, 19 nt, Artificial Sequence
  Description of Artificial Sequence: Synthetic oligonucleotide
cacucaccucugacagcag

SEQ ID NO: 2329315 - RNA, 19 nt, Artificial Sequence
  Description of Artificial Sequence: Synthetic oligonucleotide
ccacucaccucugacagca

SEQ ID NO: 2329316 - RNA, 19 nt, Artificial Sequence
  Description of Artificial Sequence: Synthetic oligonucleotide
acucagggguccaggucug

SEQ ID NO: 2329317 - RNA, 19 nt, Artificial Sequence
  Description of Artificial Sequence: Synthetic oligonucleotide
gggugcaucuuugggcagc

SEQ ID NO: 2329318 - RNA, 19 nt, Artificial Sequence
  Description of Artificial Sequence: Synthetic oligonucleotide
gggguccaggucuguuggg

SEQ ID NO: 2329319 - RNA, 19 nt, Artificial Sequence
  Description of Artificial Sequence: Synthetic oligonucleotide
ggacucagggguccagguc

SEQ ID NO: 2329320 - RNA, 19 nt, Artificial Sequence
  Description of Artificial Sequence: Synthetic oligonucleotide
gucccguggggacaggggu

SEQ ID NO: 2329321 - RNA, 19 nt, Artificial Sequence
  Description of Artificial Sequence: Synthetic oligonucleotide
gcagauagggugcaucuuu

SEQ ID NO: 2329322 - RNA, 19 nt, Artificial Sequence
  Description of Artificial Sequence: Synthetic oligonucleotide
cugagccagaggggagcgg

SEQ ID NO: 2329323 - RNA, 19 nt, Artificial Sequence
  Description of Artificial Sequence: Synthetic oligonucleotide
gcuggaccgcugcugcacc

SEQ ID NO: 2329324 - RNA, 19 nt, Artificial Sequence
  Description of Artificial Sequence: Synthetic oligonucleotide
cguguccaacucuaagcug

SEQ ID NO: 2329325 - RNA, 19 nt, Artificial Sequence
  Description of Artificial Sequence: Synthetic oligonucleotide
guuuagggauggcgcccca

SEQ ID NO: 2329326 - RNA, 19 nt, Artificial Sequence
  Description of Artificial Sequence: Synthetic oligonucleotide
acccgccccagaaggauga

SEQ ID NO: 2329327 - RNA, 19 nt, Artificial Sequence
  Description of Artificial Sequence: Synthetic oligonucleotide
gggcuuggacauaggcggg

SEQ ID NO: 2329328 - RNA, 19 nt, Artificial Sequence
  Description of Artificial Sequence: Synthetic oligonucleotide
gauacugggugggcugagu

SEQ ID NO: 2329329 - RNA, 19 nt, Artificial Sequence
  Description of Artificial Sequence: Synthetic oligonucleotide
ggcagcugaccgcaaugga

SEQ ID NO: 2329330 - RNA, 19 nt, Artificial Sequence
  Description of Artificial Sequence: Synthetic oligonucleotide
gcaagcggcuggcgggcgg

SEQ ID NO: 2329331 - RNA, 19 nt, Artificial Sequence
  Description of Artificial Sequence: Synthetic oligonucleotide
uggcgccccagguggggcu

SEQ ID NO: 2329332 - RNA, 19 nt, Artificial Sequence
  Description of Artificial Sequence: Synthetic oligonucleotide
gcacccaguagagaaaggu

SEQ ID NO: 2329333 - RNA, 19 nt, Artificial Sequence
  Description of Artificial Sequence: Synthetic oligonucleotide
aggcagccgugcugucaag

SEQ ID NO: 2329334 - RNA, 19 nt, Artificial Sequence
  Description of Artificial Sequence: Synthetic oligonucleotide
cuguugggucagaggacaa

SEQ ID NO: 2329335 - RNA, 19 nt, Artificial Sequence
  Description of Artificial Sequence: Synthetic oligonucleotide
ggcccuguacauccaggga

SEQ ID NO: 2329336 - RNA, 19 nt, Artificial Sequence
  Description of Artificial Sequence: Synthetic oligonucleotide
gaggcggagcuaggaucug

SEQ ID NO: 2329337 - RNA, 19 nt, Artificial Sequence
  Description of Artificial Sequence: Synthetic oligonucleotide
gcggaugugcuuggagacc

SEQ ID NO: 2329338 - RNA, 19 nt, Artificial Sequence
  Description of Artificial Sequence: Synthetic oligonucleotide
uggagcagauagggugcau

SEQ ID NO: 2329339 - RNA, 19 nt, Artificial Sequence
  Description of Artificial Sequence: Synthetic oligonucleotide
gucacuggauggcgcccuc

SEQ ID NO: 2329340 - RNA, 19 nt, Artificial Sequence
  Description of Artificial Sequence: Synthetic oligonucleotide
augcucgaacccgccccag

SEQ ID NO: 2329341 - RNA, 19 nt, Artificial Sequence
  Description of Artificial Sequence: Synthetic oligonucleotide
gagagacucagugcgucuu

SEQ ID NO: 2329342 - RNA, 19 nt, Artificial Sequence
  Description of Artificial Sequence: Synthetic oligonucleotide
ccagcucagcuccgugucc

SEQ ID NO: 2329343 - RNA, 19 nt, Artificial Sequence
  Description of Artificial Sequence: Synthetic oligonucleotide
gagcuaggaucugcaccca

SEQ ID NO: 2329344 - RNA, 19 nt, Artificial Sequence
  Description of Artificial Sequence: Synthetic oligonucleotide
ggaggcggagcuaggaucu

SEQ ID NO: 2329345 - RNA, 19 nt, Artificial Sequence
  Description of Artificial Sequence: Synthetic oligonucleotide
cgccccagaaggaugagga

SEQ ID NO: 2329346 - RNA, 19 nt, Artificial Sequence
  Description of Artificial Sequence: Synthetic oligonucleotide
cgucuuucuuuggggaggg

SEQ ID NO: 2329347 - RNA, 19 nt, Artificial Sequence
  Description of Artificial Sequence: Synthetic oligonucleotide
cuggagcagauagggugca

SEQ ID NO: 2329348 - RNA, 19 nt, Artificial Sequence
  Description of Artificial Sequence: Synthetic oligonucleotide
ggcaggaggucuccugaaa

SEQ ID NO: 2329349 - RNA, 19 nt, Artificial Sequence
  Description of Artificial Sequence: Synthetic oligonucleotide
gaacccgccccagaaggau

SEQ ID NO: 2329350 - RNA, 19 nt, Artificial Sequence
  Description of Artificial Sequence: Synthetic oligonucleotide
aggcuggagcagauagggu

SEQ ID NO: 2329351 - RNA, 19 nt, Artificial Sequence
  Description of Artificial Sequence: Synthetic oligonucleotide
ggcgggcggaugugcuugg

SEQ ID NO: 2329352 - RNA, 19 nt, Artificial Sequence
  Description of Artificial Sequence: Synthetic oligonucleotide
cagccgggguccaggccug

SEQ ID NO: 2329353 - RNA, 19 nt, Artificial Sequence
  Description of Artificial Sequence: Synthetic oligonucleotide
ggcggagcuaggaucugca

SEQ ID NO: 2329354 - RNA, 19 nt, Artificial Sequence
  Description of Artificial Sequence: Synthetic oligonucleotide
gccggaggcugagggaucc

SEQ ID NO: 2329355 - RNA, 19 nt, Artificial Sequence
  Description of Artificial Sequence: Synthetic oligonucleotide
gcggagcuaggaucugcac

SEQ ID NO: 2329356 - RNA, 19 nt, Artificial Sequence
  Description of Artificial Sequence: Synthetic oligonucleotide
ccguguccaacucuaagcu

SEQ ID NO: 2329357 - RNA, 19 nt, Artificial Sequence
  Description of Artificial Sequence: Synthetic oligonucleotide
uugcugccuggcgccugag

SEQ ID NO: 2329358 - RNA, 19 nt, Artificial Sequence
  Description of Artificial Sequence: Synthetic oligonucleotide
ccaguagagaaaggugaga

SEQ ID NO: 2329359 - RNA, 19 nt, Artificial Sequence
  Description of Artificial Sequence: Synthetic oligonucleotide
ccagaaggaugaggaucgg

SEQ ID NO: 2329360 - RNA, 19 nt, Artificial Sequence
  Description of Artificial Sequence: Synthetic oligonucleotide
ggaucgggucagagggcag

SEQ ID NO: 2329361 - RNA, 19 nt, Artificial Sequence
  Description of Artificial Sequence: Synthetic oligonucleotide
agcuggugucugcgcuggu

SEQ ID NO: 2329362 - RNA, 19 nt, Artificial Sequence
  Description of Artificial Sequence: Synthetic oligonucleotide
ggauggcgccccagguggg

SEQ ID NO: 2329363 - RNA, 19 nt, Artificial Sequence
  Description of Artificial Sequence: Synthetic oligonucleotide
gcaggagggcccacucacc

SEQ ID NO: 2329364 - RNA, 19 nt, Artificial Sequence
  Description of Artificial Sequence: Synthetic oligonucleotide
gguccaggccugggcaagc

SEQ ID NO: 2329365 - RNA, 19 nt, Artificial Sequence
  Description of Artificial Sequence: Synthetic oligonucleotide
gcuaggaucugcacccagu

SEQ ID NO: 2329366 - RNA, 19 nt, Artificial Sequence
  Description of Artificial Sequence: Synthetic oligonucleotide
ccuguacauccagggaguc

SEQ ID NO: 2329367 - RNA, 19 nt, Artificial Sequence
  Description of Artificial Sequence: Synthetic oligonucleotide
agcggcuggcgggcggaug

SEQ ID NO: 2329368 - RNA, 19 nt, Artificial Sequence
  Description of Artificial Sequence: Synthetic oligonucleotide
caagcggcuggcgggcgga

SEQ ID NO: 2329369 - RNA, 19 nt, Artificial Sequence
  Description of Artificial Sequence: Synthetic oligonucleotide
  modified_base (15)..(15): a, c, u, g, unknown or other
gcaggucuucccggnuacc

SEQ ID NO: 2329370 - RNA, 19 nt, Artificial Sequence
  Description of Artificial Sequence: Synthetic oligonucleotide
gggcaagcggcuggcgggc

SEQ ID NO: 2329371 - RNA, 19 nt, Artificial Sequence
  Description of Artificial Sequence: Synthetic oligonucleotide
caggcuugaggggcuugga

SEQ ID NO: 2329372 - RNA, 19 nt, Artificial Sequence
  Description of Artificial Sequence: Synthetic oligonucleotide
caggccugggcaagcggcu

SEQ ID NO: 2329373 - RNA, 19 nt, Artificial Sequence
  Description of Artificial Sequence: Synthetic oligonucleotide
caggaggcggagcuaggau

SEQ ID NO: 2329374 - RNA, 19 nt, Artificial Sequence
  Description of Artificial Sequence: Synthetic oligonucleotide
cgcugguguaugcagcuga

SEQ ID NO: 2329375 - RNA, 19 nt, Artificial Sequence
  Description of Artificial Sequence: Synthetic oligonucleotide
ggcaagcggcuggcgggcg

SEQ ID NO: 2329376 - RNA, 19 nt, Artificial Sequence
  Description of Artificial Sequence: Synthetic oligonucleotide
ggagagugggugggacuca

SEQ ID NO: 2329377 - RNA, 19 nt, Artificial Sequence
  Description of Artificial Sequence: Synthetic oligonucleotide
cccuguacauccagggagu

SEQ ID NO: 2329378 - RNA, 19 nt, Artificial Sequence
  Description of Artificial Sequence: Synthetic oligonucleotide
ggcuggcgggcggaugugc

SEQ ID NO: 2329379 - RNA, 19 nt, Artificial Sequence
  Description of Artificial Sequence: Synthetic oligonucleotide
cuuggacauaggcgggguu

SEQ ID NO: 2329380 - RNA, 19 nt, Artificial Sequence
  Description of Artificial Sequence: Synthetic oligonucleotide
gcugcaccuggaugcucga

SEQ ID NO: 2329381 - RNA, 19 nt, Artificial Sequence
  Description of Artificial Sequence: Synthetic oligonucleotide
gucaucuagccaggaccgu

SEQ ID NO: 2329382 - RNA, 19 nt, Artificial Sequence
  Description of Artificial Sequence: Synthetic oligonucleotide
agccgggguccaggccugg

SEQ ID NO: 2329383 - RNA, 19 nt, Artificial Sequence
  Description of Artificial Sequence: Synthetic oligonucleotide
ggggccggaggcugaggga

SEQ ID NO: 2329384 - RNA, 19 nt, Artificial Sequence
  Description of Artificial Sequence: Synthetic oligonucleotide
caggaccgucccgugggga

SEQ ID NO: 2329385 - RNA, 19 nt, Artificial Sequence
  Description of Artificial Sequence: Synthetic oligonucleotide
agggauccuuggagucacu

SEQ ID NO: 2329386 - RNA, 19 nt, Artificial Sequence
  Description of Artificial Sequence: Synthetic oligonucleotide
ggaccgucccguggggaca

SEQ ID NO: 2329387 - RNA, 19 nt, Artificial Sequence
  Description of Artificial Sequence: Synthetic oligonucleotide
gguggggcuccaugaggcu

SEQ ID NO: 2329388 - RNA, 19 nt, Artificial Sequence
  Description of Artificial Sequence: Synthetic oligonucleotide
gccugggcaagcggcuggc

SEQ ID NO: 2329389 - RNA, 19 nt, Artificial Sequence
  Description of Artificial Sequence: Synthetic oligonucleotide
accgucccguggggacagg

SEQ ID NO: 2329390 - RNA, 19 nt, Artificial Sequence
  Description of Artificial Sequence: Synthetic oligonucleotide
ccgucccguggggacaggg

SEQ ID NO: 2329391 - RNA, 19 nt, Artificial Sequence
  Description of Artificial Sequence: Synthetic oligonucleotide
ccugggcaagcggcuggcg

SEQ ID NO: 2329392 - RNA, 19 nt, Artificial Sequence
  Description of Artificial Sequence: Synthetic oligonucleotide
gcgcugguguaugcagcug

SEQ ID NO: 2329393 - RNA, 19 nt, Artificial Sequence
  Description of Artificial Sequence: Synthetic oligonucleotide
cugcaccuggaugcucgaa

SEQ ID NO: 2329394 - RNA, 19 nt, Artificial Sequence
  Description of Artificial Sequence: Synthetic oligonucleotide
ggggagcggccuggugggg

SEQ ID NO: 2329395 - RNA, 19 nt, Artificial Sequence
  Description of Artificial Sequence: Synthetic oligonucleotide
ccuugucaucuagccagga

SEQ ID NO: 2329396 - RNA, 19 nt, Artificial Sequence
  Description of Artificial Sequence: Synthetic oligonucleotide
cgagggcccuggcucuccg

SEQ ID NO: 2329397 - RNA, 19 nt, Artificial Sequence
  Description of Artificial Sequence: Synthetic oligonucleotide
cgaacccgccccagaagga

SEQ ID NO: 2329398 - RNA, 19 nt, Artificial Sequence
  Description of Artificial Sequence: Synthetic oligonucleotide
gggccggaggcugagggau

SEQ ID NO: 2329399 - RNA, 19 nt, Artificial Sequence
  Description of Artificial Sequence: Synthetic oligonucleotide
cgcccuccuccugaggcag

SEQ ID NO: 2329400 - RNA, 19 nt, Artificial Sequence
  Description of Artificial Sequence: Synthetic oligonucleotide
ggggccgagggcccuggcu

SEQ ID NO: 2329401 - RNA, 19 nt, Artificial Sequence
  Description of Artificial Sequence: Synthetic oligonucleotide
  modified_base (6)..(6): a, c, u, g, unknown or other
cccggnuacccaggcccug

SEQ ID NO: 2329402 - RNA, 19 nt, Artificial Sequence
  Description of Artificial Sequence: Synthetic oligonucleotide
gcuccguguccaacucuaa

SEQ ID NO: 2329403 - RNA, 19 nt, Artificial Sequence
  Description of Artificial Sequence: Synthetic oligonucleotide
cuggcgggcggaugugcuu

SEQ ID NO: 2329404 - RNA, 19 nt, Artificial Sequence
  Description of Artificial Sequence: Synthetic oligonucleotide
gccccagaaggaugaggau

SEQ ID NO: 2329405 - RNA, 19 nt, Artificial Sequence
  Description of Artificial Sequence: Synthetic oligonucleotide
ggccggaggcugagggauc

SEQ ID NO: 2329406 - RNA, 19 nt, Artificial Sequence
  Description of Artificial Sequence: Synthetic oligonucleotide
ccgcaauggagugucuccu

SEQ ID NO: 2329407 - RNA, 19 nt, Artificial Sequence
  Description of Artificial Sequence: Synthetic oligonucleotide
ccuggcgccugaguggccu

SEQ ID NO: 2329408 - RNA, 19 nt, Artificial Sequence
  Description of Artificial Sequence: Synthetic oligonucleotide
cccgccccagaaggaugag

SEQ ID NO: 2329409 - RNA, 19 nt, Artificial Sequence
  Description of Artificial Sequence: Synthetic oligonucleotide
ggggcuccaugaggcugga

SEQ ID NO: 2329410 - RNA, 19 nt, Artificial Sequence
  Description of Artificial Sequence: Synthetic oligonucleotide
  modified_base (5)..(5): a, c, u, g, unknown or other
ccggnuacccaggcccugu

SEQ ID NO: 2329411 - RNA, 19 nt, Artificial Sequence
  Description of Artificial Sequence: Synthetic oligonucleotide
gccuggcgccugaguggcc

SEQ ID NO: 2329412 - RNA, 19 nt, Artificial Sequence
  Description of Artificial Sequence: Synthetic oligonucleotide
ccaggucuguugggucaga

SEQ ID NO: 2329413 - RNA, 19 nt, Artificial Sequence
  Description of Artificial Sequence: Synthetic oligonucleotide
gcgggcggaugugcuugga

SEQ ID NO: 2329414 - RNA, 19 nt, Artificial Sequence
  Description of Artificial Sequence: Synthetic oligonucleotide
  modified_base (4)..(4): a, c, u, g, unknown or other
cggnuacccaggcccugua

SEQ ID NO: 2329415 - RNA, 19 nt, Artificial Sequence
  Description of Artificial Sequence: Synthetic oligonucleotide
ggcgggguugggagccacu

SEQ ID NO: 2329416 - RNA, 19 nt, Artificial Sequence
  Description of Artificial Sequence: Synthetic oligonucleotide
cggcuggcgggcggaugug

SEQ ID NO: 2329417 - RNA, 19 nt, Artificial Sequence
  Description of Artificial Sequence: Synthetic oligonucleotide
ccccaggcuugaggggcuu

SEQ ID NO: 2329418 - RNA, 19 nt, Artificial Sequence
  Description of Artificial Sequence: Synthetic oligonucleotide
gauauuugagaucuucucg

SEQ ID NO: 2329419 - RNA, 19 nt, Artificial Sequence
  Description of Artificial Sequence: Synthetic oligonucleotide
agauauuugagaucuucuc

SEQ ID NO: 2329420 - RNA, 19 nt, Artificial Sequence
  Description of Artificial Sequence: Synthetic oligonucleotide
uucuugacgccuuagaccu

SEQ ID NO: 2329421 - RNA, 19 nt, Artificial Sequence
  Description of Artificial Sequence: Synthetic oligonucleotide
aagucuucucuguggaugg

SEQ ID NO: 2329422 - RNA, 19 nt, Artificial Sequence
  Description of Artificial Sequence: Synthetic oligonucleotide
ugagcauacguuuucguca

SEQ ID NO: 2329423 - RNA, 19 nt, Artificial Sequence
  Description of Artificial Sequence: Synthetic oligonucleotide
gguucaauggggcagaucc

SEQ ID NO: 2329424 - RNA, 19 nt, Artificial Sequence
  Description of Artificial Sequence: Synthetic oligonucleotide
auauuugagaucuucucga

SEQ ID NO: 2329425 - RNA, 19 nt, Artificial Sequence
  Description of Artificial Sequence: Synthetic oligonucleotide
auauguuccaccaaggcug

SEQ ID NO: 2329426 - RNA, 19 nt, Artificial Sequence
  Description of Artificial Sequence: Synthetic oligonucleotide
gaccuuacgacuucgcugc

SEQ ID NO: 2329427 - RNA, 19 nt, Artificial Sequence
  Description of Artificial Sequence: Synthetic oligonucleotide
agggcuuagggacagggac

SEQ ID NO: 2329428 - RNA, 19 nt, Artificial Sequence
  Description of Artificial Sequence: Synthetic oligonucleotide
acguuuucgucauauguuc

SEQ ID NO: 2329429 - RNA, 19 nt, Artificial Sequence
  Description of Artificial Sequence: Synthetic oligonucleotide
gaguagucucaguagaugc

SEQ ID NO: 2329430 - RNA, 19 nt, Artificial Sequence
  Description of Artificial Sequence: Synthetic oligonucleotide
acucaagaacagcaguggc

SEQ ID NO: 2329431 - RNA, 19 nt, Artificial Sequence
  Description of Artificial Sequence: Synthetic oligonucleotide
aauggguucaauggggcag

SEQ ID NO: 2329432 - RNA, 19 nt, Artificial Sequence
  Description of Artificial Sequence: Synthetic oligonucleotide
auacguuuucgucauaugu

SEQ ID NO: 2329433 - RNA, 19 nt, Artificial Sequence
  Description of Artificial Sequence: Synthetic oligonucleotide
cuucuugacgccuuagacc

SEQ ID NO: 2329434 - RNA, 19 nt, Artificial Sequence
  Description of Artificial Sequence: Synthetic oligonucleotide
uguucugugcucucagagg

SEQ ID NO: 2329435 - RNA, 19 nt, Artificial Sequence
  Description of Artificial Sequence: Synthetic oligonucleotide
ucuagggguaccaggaaug

SEQ ID NO: 2329436 - RNA, 19 nt, Artificial Sequence
  Description of Artificial Sequence: Synthetic oligonucleotide
uggguacucaagaacagca

SEQ ID NO: 2329437 - RNA, 19 nt, Artificial Sequence
  Description of Artificial Sequence: Synthetic oligonucleotide
uuuccacaggccuucgugg

SEQ ID NO: 2329438 - RNA, 19 nt, Artificial Sequence
  Description of Artificial Sequence: Synthetic oligonucleotide
cauccauaccucuaugggg

SEQ ID NO: 2329439 - RNA, 19 nt, Artificial Sequence
  Description of Artificial Sequence: Synthetic oligonucleotide
gagcuuugcuucuugacgc

SEQ ID NO: 2329440 - RNA, 19 nt, Artificial Sequence
  Description of Artificial Sequence: Synthetic oligonucleotide
gagaaggacagauauuuga

SEQ ID NO: 2329441 - RNA, 19 nt, Artificial Sequence
  Description of Artificial Sequence: Synthetic oligonucleotide
gagaaagcugcagucaggg

SEQ ID NO: 2329442 - RNA, 19 nt, Artificial Sequence
  Description of Artificial Sequence: Synthetic oligonucleotide
acagauauuugagaucuuc

SEQ ID NO: 2329443 - RNA, 19 nt, Artificial Sequence
  Description of Artificial Sequence: Synthetic oligonucleotide
cuucucgaaguccacagcc

SEQ ID NO: 2329444 - RNA, 19 nt, Artificial Sequence
  Description of Artificial Sequence: Synthetic oligonucleotide
acugguuuggucagguucc

SEQ ID NO: 2329445 - RNA, 19 nt, Artificial Sequence
  Description of Artificial Sequence: Synthetic oligonucleotide
aauggggcagaucccaacu

SEQ ID NO: 2329446 - RNA, 19 nt, Artificial Sequence
  Description of Artificial Sequence: Synthetic oligonucleotide
uucgucauauguuccacca

SEQ ID NO: 2329447 - RNA, 19 nt, Artificial Sequence
  Description of Artificial Sequence: Synthetic oligonucleotide
ggcuguacaaggcaggugg

SEQ ID NO: 2329448 - RNA, 19 nt, Artificial Sequence
  Description of Artificial Sequence: Synthetic oligonucleotide
uggcccaauagcucuaggg

SEQ ID NO: 2329449 - RNA, 19 nt, Artificial Sequence
  Description of Artificial Sequence: Synthetic oligonucleotide
aagaacagcaguggcuuuc

SEQ ID NO: 2329450 - RNA, 19 nt, Artificial Sequence
  Description of Artificial Sequence: Synthetic oligonucleotide
guagaugccgcaucucgcg

SEQ ID NO: 2329451 - RNA, 19 nt, Artificial Sequence
  Description of Artificial Sequence: Synthetic oligonucleotide
aggacagauauuugagauc

SEQ ID NO: 2329452 - RNA, 19 nt, Artificial Sequence
  Description of Artificial Sequence: Synthetic oligonucleotide
uacgacuucgcugcggugg

SEQ ID NO: 2329453 - RNA, 19 nt, Artificial Sequence
  Description of Artificial Sequence: Synthetic oligonucleotide
aguagucucaguagaugcc

SEQ ID NO: 2329454 - RNA, 19 nt, Artificial Sequence
  Description of Artificial Sequence: Synthetic oligonucleotide
ggagcuuugcuucuugacg

SEQ ID NO: 2329455 - RNA, 19 nt, Artificial Sequence
  Description of Artificial Sequence: Synthetic oligonucleotide
uacguuuucgucauauguu

SEQ ID NO: 2329456 - RNA, 19 nt, Artificial Sequence
  Description of Artificial Sequence: Synthetic oligonucleotide
agcugcugagaguucaggg

SEQ ID NO: 2329457 - RNA, 19 nt, Artificial Sequence
  Description of Artificial Sequence: Synthetic oligonucleotide
uggaagugacaugagcagg

SEQ ID NO: 2329458 - RNA, 19 nt, Artificial Sequence
  Description of Artificial Sequence: Synthetic oligonucleotide
guagucucaguagaugccg

SEQ ID NO: 2329459 - RNA, 19 nt, Artificial Sequence
  Description of Artificial Sequence: Synthetic oligonucleotide
gacugguuuggucagguuc

SEQ ID NO: 2329460 - RNA, 19 nt, Artificial Sequence
  Description of Artificial Sequence: Synthetic oligonucleotide
uuagggacagggacagaag

SEQ ID NO: 2329461 - RNA, 19 nt, Artificial Sequence
  Description of Artificial Sequence: Synthetic oligonucleotide
aagugacaugagcagguca

SEQ ID NO: 2329462 - RNA, 19 nt, Artificial Sequence
  Description of Artificial Sequence: Synthetic oligonucleotide
aguggcuuuccacaggccu

SEQ ID NO: 2329463 - RNA, 19 nt, Artificial Sequence
  Description of Artificial Sequence: Synthetic oligonucleotide
gacaugagcaggucaagga

SEQ ID NO: 2329464 - RNA, 19 nt, Artificial Sequence
  Description of Artificial Sequence: Synthetic oligonucleotide
aguagaugccgcaucucgc

SEQ ID NO: 2329465 - RNA, 19 nt, Artificial Sequence
  Description of Artificial Sequence: Synthetic oligonucleotide
acgccuuagaccuucugug

SEQ ID NO: 2329466 - RNA, 19 nt, Artificial Sequence
  Description of Artificial Sequence: Synthetic oligonucleotide
ugagaucuucucgaagucc

SEQ ID NO: 2329467 - RNA, 19 nt, Artificial Sequence
  Description of Artificial Sequence: Synthetic oligonucleotide
uuucgucauauguuccacc

SEQ ID NO: 2329468 - RNA, 19 nt, Artificial Sequence
  Description of Artificial Sequence: Synthetic oligonucleotide
ugauggguucugcagcagc

SEQ ID NO: 2329469 - RNA, 19 nt, Artificial Sequence
  Description of Artificial Sequence: Synthetic oligonucleotide
cuuggguacucaagaacag

SEQ ID NO: 2329470 - RNA, 19 nt, Artificial Sequence
  Description of Artificial Sequence: Synthetic oligonucleotide
aggaauggguucaaugggg

SEQ ID NO: 2329471 - RNA, 19 nt, Artificial Sequence
  Description of Artificial Sequence: Synthetic oligonucleotide
uccgaauggccucacgaac

SEQ ID NO: 2329472 - RNA, 19 nt, Artificial Sequence
  Description of Artificial Sequence: Synthetic oligonucleotide
cuguucugugcucucagag

SEQ ID NO: 2329473 - RNA, 19 nt, Artificial Sequence
  Description of Artificial Sequence: Synthetic oligonucleotide
cuuuccacaggccuucgug

SEQ ID NO: 2329474 - RNA, 19 nt, Artificial Sequence
  Description of Artificial Sequence: Synthetic oligonucleotide
aauagcucuagggguacca

SEQ ID NO: 2329475 - RNA, 19 nt, Artificial Sequence
  Description of Artificial Sequence: Synthetic oligonucleotide
agaacagcaguggcuuucc

SEQ ID NO: 2329476 - RNA, 19 nt, Artificial Sequence
  Description of Artificial Sequence: Synthetic oligonucleotide
uucaauggggcagauccca

SEQ ID NO: 2329477 - RNA, 19 nt, Artificial Sequence
  Description of Artificial Sequence: Synthetic oligonucleotide
ggcccaauagcucuagggg

SEQ ID NO: 2329478 - RNA, 19 nt, Artificial Sequence
  Description of Artificial Sequence: Synthetic oligonucleotide
gguggccucaccuacguag

SEQ ID NO: 2329479 - RNA, 19 nt, Artificial Sequence
  Description of Artificial Sequence: Synthetic oligonucleotide
uacaaggcaggugggacag

SEQ ID NO: 2329480 - RNA, 19 nt, Artificial Sequence
  Description of Artificial Sequence: Synthetic oligonucleotide
uggagucagcaguaguaag

SEQ ID NO: 2329481 - RNA, 19 nt, Artificial Sequence
  Description of Artificial Sequence: Synthetic oligonucleotide
uguacaaggcaggugggac

SEQ ID NO: 2329482 - RNA, 19 nt, Artificial Sequence
  Description of Artificial Sequence: Synthetic oligonucleotide
guacucaagaacagcagug

SEQ ID NO: 2329483 - RNA, 19 nt, Artificial Sequence
  Description of Artificial Sequence: Synthetic oligonucleotide
uagaugccgcaucucgcgg

SEQ ID NO: 2329484 - RNA, 19 nt, Artificial Sequence
  Description of Artificial Sequence: Synthetic oligonucleotide
gucauauguuccaccaagg

SEQ ID NO: 2329485 - RNA, 19 nt, Artificial Sequence
  Description of Artificial Sequence: Synthetic oligonucleotide
uucaaggccaggaucccuc

SEQ ID NO: 2329486 - RNA, 19 nt, Artificial Sequence
  Description of Artificial Sequence: Synthetic oligonucleotide
uacguagcgggcugggacc

SEQ ID NO: 2329487 - RNA, 19 nt, Artificial Sequence
  Description of Artificial Sequence: Synthetic oligonucleotide
guuuucgucauauguucca

SEQ ID NO: 2329488 - RNA, 19 nt, Artificial Sequence
  Description of Artificial Sequence: Synthetic oligonucleotide
aucagcugagcauacguuu

SEQ ID NO: 2329489 - RNA, 19 nt, Artificial Sequence
  Description of Artificial Sequence: Synthetic oligonucleotide
uguggaugggccagcccag

SEQ ID NO: 2329490 - RNA, 19 nt, Artificial Sequence
  Description of Artificial Sequence: Synthetic oligonucleotide
acgacuucgcugcgguggc

SEQ ID NO: 2329491 - RNA, 19 nt, Artificial Sequence
  Description of Artificial Sequence: Synthetic oligonucleotide
gaugccgcaucucgcgggg

SEQ ID NO: 2329492 - RNA, 19 nt, Artificial Sequence
  Description of Artificial Sequence: Synthetic oligonucleotide
ucgaaguccacagccaagu

SEQ ID NO: 2329493 - RNA, 19 nt, Artificial Sequence
  Description of Artificial Sequence: Synthetic oligonucleotide
agaugccgcaucucgcggg

SEQ ID NO: 2329494 - RNA, 19 nt, Artificial Sequence
  Description of Artificial Sequence: Synthetic oligonucleotide
aucuguucugugcucucag

SEQ ID NO: 2329495 - RNA, 19 nt, Artificial Sequence
  Description of Artificial Sequence: Synthetic oligonucleotide
agagggcuuagggacaggg

SEQ ID NO: 2329496 - RNA, 19 nt, Artificial Sequence
  Description of Artificial Sequence: Synthetic oligonucleotide
uucucuguggaugggccag

SEQ ID NO: 2329497 - RNA, 19 nt, Artificial Sequence
  Description of Artificial Sequence: Synthetic oligonucleotide
uuuucgucauauguuccac

SEQ ID NO: 2329498 - RNA, 19 nt, Artificial Sequence
  Description of Artificial Sequence: Synthetic oligonucleotide
uuggguacucaagaacagc

SEQ ID NO: 2329499 - RNA, 19 nt, Artificial Sequence
  Description of Artificial Sequence: Synthetic oligonucleotide
uagucucaguagaugccgc

SEQ ID NO: 2329500 - RNA, 19 nt, Artificial Sequence
  Description of Artificial Sequence: Synthetic oligonucleotide
ucaccuacguagcgggcug

SEQ ID NO: 2329501 - RNA, 19 nt, Artificial Sequence
  Description of Artificial Sequence: Synthetic oligonucleotide
ucagcugagcauacguuuu

SEQ ID NO: 2329502 - RNA, 19 nt, Artificial Sequence
  Description of Artificial Sequence: Synthetic oligonucleotide
uggaguagucucaguagau

SEQ ID NO: 2329503 - RNA, 19 nt, Artificial Sequence
  Description of Artificial Sequence: Synthetic oligonucleotide
cauacguuuucgucauaug

SEQ ID NO: 2329504 - RNA, 19 nt, Artificial Sequence
  Description of Artificial Sequence: Synthetic oligonucleotide
cugggagaaagcugcaguc

SEQ ID NO: 2329505 - RNA, 19 nt, Artificial Sequence
  Description of Artificial Sequence: Synthetic oligonucleotide
ggaccuuacgacuucgcug

SEQ ID NO: 2329506 - RNA, 19 nt, Artificial Sequence
  Description of Artificial Sequence: Synthetic oligonucleotide
cuagggguaccaggaaugg

SEQ ID NO: 2329507 - RNA, 19 nt, Artificial Sequence
  Description of Artificial Sequence: Synthetic oligonucleotide
agugacaugagcaggucaa

SEQ ID NO: 2329508 - RNA, 19 nt, Artificial Sequence
  Description of Artificial Sequence: Synthetic oligonucleotide
aaggcuguacaaggcaggu

SEQ ID NO: 2329509 - RNA, 19 nt, Artificial Sequence
  Description of Artificial Sequence: Synthetic oligonucleotide
ccauccauaccucuauggg

SEQ ID NO: 2329510 - RNA, 19 nt, Artificial Sequence
  Description of Artificial Sequence: Synthetic oligonucleotide
auggccucacgaaccagcc

SEQ ID NO: 2329511 - RNA, 19 nt, Artificial Sequence
  Description of Artificial Sequence: Synthetic oligonucleotide
agcugagcauacguuuucg

SEQ ID NO: 2329512 - RNA, 19 nt, Artificial Sequence
  Description of Artificial Sequence: Synthetic oligonucleotide
ucuguucugugcucucaga

SEQ ID NO: 2329513 - RNA, 19 nt, Artificial Sequence
  Description of Artificial Sequence: Synthetic oligonucleotide
cuuggagccagucccucug

SEQ ID NO: 2329514 - RNA, 19 nt, Artificial Sequence
  Description of Artificial Sequence: Synthetic oligonucleotide
gaauggguucaauggggca

SEQ ID NO: 2329515 - RNA, 19 nt, Artificial Sequence
  Description of Artificial Sequence: Synthetic oligonucleotide
aggcuugaggacugguuug

SEQ ID NO: 2329516 - RNA, 19 nt, Artificial Sequence
  Description of Artificial Sequence: Synthetic oligonucleotide
gcugcugagaguucagggc

SEQ ID NO: 2329517 - RNA, 19 nt, Artificial Sequence
  Description of Artificial Sequence: Synthetic oligonucleotide
aguaagggcaggcccggcu

SEQ ID NO: 2329518 - RNA, 19 nt, Artificial Sequence
  Description of Artificial Sequence: Synthetic oligonucleotide
caagauccauccauaccuc

SEQ ID NO: 2329519 - RNA, 19 nt, Artificial Sequence
  Description of Artificial Sequence: Synthetic oligonucleotide
uagaccuucugugccaccu

SEQ ID NO: 2329520 - RNA, 19 nt, Artificial Sequence
  Description of Artificial Sequence: Synthetic oligonucleotide
cauauguuccaccaaggcu

SEQ ID NO: 2329521 - RNA, 19 nt, Artificial Sequence
  Description of Artificial Sequence: Synthetic oligonucleotide
agggguaccaggaaugggu

SEQ ID NO: 2329522 - RNA, 19 nt, Artificial Sequence
  Description of Artificial Sequence: Synthetic oligonucleotide
cuuccgaauggccucacga

SEQ ID NO: 2329523 - RNA, 19 nt, Artificial Sequence
  Description of Artificial Sequence: Synthetic oligonucleotide
ccaccaaggcuguacaagg

SEQ ID NO: 2329524 - RNA, 19 nt, Artificial Sequence
  Description of Artificial Sequence: Synthetic oligonucleotide
ggcagaucccaacuguuug

SEQ ID NO: 2329525 - RNA, 19 nt, Artificial Sequence
  Description of Artificial Sequence: Synthetic oligonucleotide
cuggaguagucucaguaga

SEQ ID NO: 2329526 - RNA, 19 nt, Artificial Sequence
  Description of Artificial Sequence: Synthetic oligonucleotide
ugggugcaccuuccgaaug

SEQ ID NO: 2329527 - RNA, 19 nt, Artificial Sequence
  Description of Artificial Sequence: Synthetic oligonucleotide
cauuucuggaggagaagga

SEQ ID NO: 2329528 - RNA, 19 nt, Artificial Sequence
  Description of Artificial Sequence: Synthetic oligonucleotide
gauggguucugcagcagca

SEQ ID NO: 2329529 - RNA, 19 nt, Artificial Sequence
  Description of Artificial Sequence: Synthetic oligonucleotide
cagcaagauccauccauac

SEQ ID NO: 2329530 - RNA, 19 nt, Artificial Sequence
  Description of Artificial Sequence: Synthetic oligonucleotide
agucucaguagaugccgca

SEQ ID NO: 2329531 - RNA, 19 nt, Artificial Sequence
  Description of Artificial Sequence: Synthetic oligonucleotide
gcuucuugacgccuuagac

SEQ ID NO: 2329532 - RNA, 19 nt, Artificial Sequence
  Description of Artificial Sequence: Synthetic oligonucleotide
gcucucagaggcuugagga

SEQ ID NO: 2329533 - RNA, 19 nt, Artificial Sequence
  Description of Artificial Sequence: Synthetic oligonucleotide
ggccucacgaaccagccug

SEQ ID NO: 2329534 - RNA, 19 nt, Artificial Sequence
  Description of Artificial Sequence: Synthetic oligonucleotide
uccacaggccuucgugggc

SEQ ID NO: 2329535 - RNA, 19 nt, Artificial Sequence
  Description of Artificial Sequence: Synthetic oligonucleotide
ucuguggaugggccagccc

SEQ ID NO: 2329536 - RNA, 19 nt, Artificial Sequence
  Description of Artificial Sequence: Synthetic oligonucleotide
uagggguaccaggaauggg

SEQ ID NO: 2329537 - RNA, 19 nt, Artificial Sequence
  Description of Artificial Sequence: Synthetic oligonucleotide
cagaucccaacuguuugcc

SEQ ID NO: 2329538 - RNA, 19 nt, Artificial Sequence
  Description of Artificial Sequence: Synthetic oligonucleotide
guaguaagggcaggcccgg

SEQ ID NO: 2329539 - RNA, 19 nt, Artificial Sequence
  Description of Artificial Sequence: Synthetic oligonucleotide
cuuagggacagggacagaa

SEQ ID NO: 2329540 - RNA, 19 nt, Artificial Sequence
  Description of Artificial Sequence: Synthetic oligonucleotide
ugugcucucagaggcuuga

SEQ ID NO: 2329541 - RNA, 19 nt, Artificial Sequence
  Description of Artificial Sequence: Synthetic oligonucleotide
ggacagauauuugagaucu

SEQ ID NO: 2329542 - RNA, 19 nt, Artificial Sequence
  Description of Artificial Sequence: Synthetic oligonucleotide
aguggagucagcaguagua

SEQ ID NO: 2329543 - RNA, 19 nt, Artificial Sequence
  Description of Artificial Sequence: Synthetic oligonucleotide
aggucaaggaccacugcug

SEQ ID NO: 2329544 - RNA, 19 nt, Artificial Sequence
  Description of Artificial Sequence: Synthetic oligonucleotide
ucgucauauguuccaccaa

SEQ ID NO: 2329545 - RNA, 19 nt, Artificial Sequence
  Description of Artificial Sequence: Synthetic oligonucleotide
ucaauggggcagaucccaa

SEQ ID NO: 2329546 - RNA, 19 nt, Artificial Sequence
  Description of Artificial Sequence: Synthetic oligonucleotide
auagcucuagggguaccag

SEQ ID NO: 2329547 - RNA, 19 nt, Artificial Sequence
  Description of Artificial Sequence: Synthetic oligonucleotide
gaggcugauggguucugca

SEQ ID NO: 2329548 - RNA, 19 nt, Artificial Sequence
  Description of Artificial Sequence: Synthetic oligonucleotide
caauggggcagaucccaac

SEQ ID NO: 2329549 - RNA, 19 nt, Artificial Sequence
  Description of Artificial Sequence: Synthetic oligonucleotide
ugggaccuuacgacuucgc

SEQ ID NO: 2329550 - RNA, 19 nt, Artificial Sequence
  Description of Artificial Sequence: Synthetic oligonucleotide
cuugacgccuuagaccuuc

SEQ ID NO: 2329551 - RNA, 19 nt, Artificial Sequence
  Description of Artificial Sequence: Synthetic oligonucleotide
ccgaauggccucacgaacc

SEQ ID NO: 2329552 - RNA, 19 nt, Artificial Sequence
  Description of Artificial Sequence: Synthetic oligonucleotide
ugggagcuuugcuucuuga

SEQ ID NO: 2329553 - RNA, 19 nt, Artificial Sequence
  Description of Artificial Sequence: Synthetic oligonucleotide
cuuagaccuucugugccac

SEQ ID NO: 2329554 - RNA, 19 nt, Artificial Sequence
  Description of Artificial Sequence: Synthetic oligonucleotide
gccucaccuacguagcggg

SEQ ID NO: 2329555 - RNA, 19 nt, Artificial Sequence
  Description of Artificial Sequence: Synthetic oligonucleotide
cgucauauguuccaccaag

SEQ ID NO: 2329556 - RNA, 19 nt, Artificial Sequence
  Description of Artificial Sequence: Synthetic oligonucleotide
cacagccaagucuucucug

SEQ ID NO: 2329557 - RNA, 19 nt, Artificial Sequence
  Description of Artificial Sequence: Synthetic oligonucleotide
cagauauuugagaucuucu

SEQ ID NO: 2329558 - RNA, 19 nt, Artificial Sequence
  Description of Artificial Sequence: Synthetic oligonucleotide
ccaaggcuguacaaggcag

SEQ ID NO: 2329559 - RNA, 19 nt, Artificial Sequence
  Description of Artificial Sequence: Synthetic oligonucleotide
guuccaccaaggcuguaca

SEQ ID NO: 2329560 - RNA, 19 nt, Artificial Sequence
  Description of Artificial Sequence: Synthetic oligonucleotide
ggaggagaaggacagauau

SEQ ID NO: 2329561 - RNA, 19 nt, Artificial Sequence
  Description of Artificial Sequence: Synthetic oligonucleotide
agaucccaacuguuugcca

SEQ ID NO: 2329562 - RNA, 19 nt, Artificial Sequence
  Description of Artificial Sequence: Synthetic oligonucleotide
uggccauuucuggaggaga

SEQ ID NO: 2329563 - RNA, 19 nt, Artificial Sequence
  Description of Artificial Sequence: Synthetic oligonucleotide
ggaauggguucaauggggc

SEQ ID NO: 2329564 - RNA, 19 nt, Artificial Sequence
  Description of Artificial Sequence: Synthetic oligonucleotide
acuucgcugcgguggcuuc

SEQ ID NO: 2329565 - RNA, 19 nt, Artificial Sequence
  Description of Artificial Sequence: Synthetic oligonucleotide
gccuuagaccuucugugcc

SEQ ID NO: 2329566 - RNA, 19 nt, Artificial Sequence
  Description of Artificial Sequence: Synthetic oligonucleotide
gguuccucuggccccuugg

SEQ ID NO: 2329567 - RNA, 19 nt, Artificial Sequence
  Description of Artificial Sequence: Synthetic oligonucleotide
uguuugccaggcaggcauc

SEQ ID NO: 2329568 - RNA, 19 nt, Artificial Sequence
  Description of Artificial Sequence: Synthetic oligonucleotide
auggccauuucuggaggag

SEQ ID NO: 2329569 - RNA, 19 nt, Artificial Sequence
  Description of Artificial Sequence: Synthetic oligonucleotide
gguaccaggaauggguuca

SEQ ID NO: 2329570 - RNA, 19 nt, Artificial Sequence
  Description of Artificial Sequence: Synthetic oligonucleotide
ucugugcucucagaggcuu

SEQ ID NO: 2329571 - RNA, 19 nt, Artificial Sequence
  Description of Artificial Sequence: Synthetic oligonucleotide
gucuucucuguggaugggc

SEQ ID NO: 2329572 - RNA, 19 nt, Artificial Sequence
  Description of Artificial Sequence: Synthetic oligonucleotide
gaccgguggccucaccuac

SEQ ID NO: 2329573 - RNA, 19 nt, Artificial Sequence
  Description of Artificial Sequence: Synthetic oligonucleotide
guucaauggggcagauccc

SEQ ID NO: 2329574 - RNA, 19 nt, Artificial Sequence
  Description of Artificial Sequence: Synthetic oligonucleotide
agucaggggucccuccagu

SEQ ID NO: 2329575 - RNA, 19 nt, Artificial Sequence
  Description of Artificial Sequence: Synthetic oligonucleotide
ggagaaagcugcagucagg

SEQ ID NO: 2329576 - RNA, 19 nt, Artificial Sequence
  Description of Artificial Sequence: Synthetic oligonucleotide
gucaggggucccuccagug

SEQ ID NO: 2329577 - RNA, 19 nt, Artificial Sequence
  Description of Artificial Sequence: Synthetic oligonucleotide
ggcuuagggacagggacag

SEQ ID NO: 2329578 - RNA, 19 nt, Artificial Sequence
  Description of Artificial Sequence: Synthetic oligonucleotide
gguacucaagaacagcagu

SEQ ID NO: 2329579 - RNA, 19 nt, Artificial Sequence
  Description of Artificial Sequence: Synthetic oligonucleotide
cucagcaagauccauccau

SEQ ID NO: 2329580 - RNA, 19 nt, Artificial Sequence
  Description of Artificial Sequence: Synthetic oligonucleotide
uuacgacuucgcugcggug

SEQ ID NO: 2329581 - RNA, 19 nt, Artificial Sequence
  Description of Artificial Sequence: Synthetic oligonucleotide
ucccaacuguuugccaggc

SEQ ID NO: 2329582 - RNA, 19 nt, Artificial Sequence
  Description of Artificial Sequence: Synthetic oligonucleotide
gacucagcugcugagaguu

SEQ ID NO: 2329583 - RNA, 19 nt, Artificial Sequence
  Description of Artificial Sequence: Synthetic oligonucleotide
gaggacugguuuggucagg

SEQ ID NO: 2329584 - RNA, 19 nt, Artificial Sequence
  Description of Artificial Sequence: Synthetic oligonucleotide
agucuucucuguggauggg

SEQ ID NO: 2329585 - RNA, 19 nt, Artificial Sequence
  Description of Artificial Sequence: Synthetic oligonucleotide
ucaguagaugccgcaucuc

SEQ ID NO: 2329586 - RNA, 19 nt, Artificial Sequence
  Description of Artificial Sequence: Synthetic oligonucleotide
gagcauacguuuucgucau

SEQ ID NO: 2329587 - RNA, 19 nt, Artificial Sequence
  Description of Artificial Sequence: Synthetic oligonucleotide
gccuucgugggcuugccug

SEQ ID NO: 2329588 - RNA, 19 nt, Artificial Sequence
  Description of Artificial Sequence: Synthetic oligonucleotide
accuuacgacuucgcugcg

SEQ ID NO: 2329589 - RNA, 19 nt, Artificial Sequence
  Description of Artificial Sequence: Synthetic oligonucleotide
aggacugguuuggucaggu

SEQ ID NO: 2329590 - RNA, 19 nt, Artificial Sequence
  Description of Artificial Sequence: Synthetic oligonucleotide
agcgggcugggaccuuacg

SEQ ID NO: 2329591 - RNA, 19 nt, Artificial Sequence
  Description of Artificial Sequence: Synthetic oligonucleotide
gggagcuuugcuucuugac

SEQ ID NO: 2329592 - RNA, 19 nt, Artificial Sequence
  Description of Artificial Sequence: Synthetic oligonucleotide
cugggaccuuacgacuucg

SEQ ID NO: 2329593 - RNA, 19 nt, Artificial Sequence
  Description of Artificial Sequence: Synthetic oligonucleotide
ggguacucaagaacagcag

SEQ ID NO: 2329594 - RNA, 19 nt, Artificial Sequence
  Description of Artificial Sequence: Synthetic oligonucleotide
cuuacgacuucgcugcggu

SEQ ID NO: 2329595 - RNA, 19 nt, Artificial Sequence
  Description of Artificial Sequence: Synthetic oligonucleotide
cagcugagcauacguuuuc

SEQ ID NO: 2329596 - RNA, 19 nt, Artificial Sequence
  Description of Artificial Sequence: Synthetic oligonucleotide
gcagggagagaagucuggg

SEQ ID NO: 2329597 - RNA, 19 nt, Artificial Sequence
  Description of Artificial Sequence: Synthetic oligonucleotide
accucgcaggggugggcac

SEQ ID NO: 2329598 - RNA, 19 nt, Artificial Sequence
  Description of Artificial Sequence: Synthetic oligonucleotide
cguuuucgucauauguucc

SEQ ID NO: 2329599 - RNA, 19 nt, Artificial Sequence
  Description of Artificial Sequence: Synthetic oligonucleotide
uggagccagucccucuguc

SEQ ID NO: 2329600 - RNA, 19 nt, Artificial Sequence
  Description of Artificial Sequence: Synthetic oligonucleotide
cucaguagaugccgcaucu

SEQ ID NO: 2329601 - RNA, 19 nt, Artificial Sequence
  Description of Artificial Sequence: Synthetic oligonucleotide
cugggagcuuugcuucuug

SEQ ID NO: 2329602 - RNA, 19 nt, Artificial Sequence
  Description of Artificial Sequence: Synthetic oligonucleotide
uucgugggcuugccuggcu

SEQ ID NO: 2329603 - RNA, 19 nt, Artificial Sequence
  Description of Artificial Sequence: Synthetic oligonucleotide
uggggucagagggcuuagg

SEQ ID NO: 2329604 - RNA, 19 nt, Artificial Sequence
  Description of Artificial Sequence: Synthetic oligonucleotide
cuggcccaauagcucuagg

SEQ ID NO: 2329605 - RNA, 19 nt, Artificial Sequence
  Description of Artificial Sequence: Synthetic oligonucleotide
guggagucagcaguaguaa

SEQ ID NO: 2329606 - RNA, 19 nt, Artificial Sequence
  Description of Artificial Sequence: Synthetic oligonucleotide
cuguuugccaggcaggcau

SEQ ID NO: 2329607 - RNA, 19 nt, Artificial Sequence
  Description of Artificial Sequence: Synthetic oligonucleotide
uggccucacgaaccagccu

SEQ ID NO: 2329608 - RNA, 19 nt, Artificial Sequence
  Description of Artificial Sequence: Synthetic oligonucleotide
caauggugagcaccuggga

SEQ ID NO: 2329609 - RNA, 19 nt, Artificial Sequence
  Description of Artificial Sequence: Synthetic oligonucleotide
accuacguagcgggcuggg

SEQ ID NO: 2329610 - RNA, 19 nt, Artificial Sequence
  Description of Artificial Sequence: Synthetic oligonucleotide
caggucaaggaccacugcu

SEQ ID NO: 2329611 - RNA, 19 nt, Artificial Sequence
  Description of Artificial Sequence: Synthetic oligonucleotide
caggcccggcuucaaggcc

SEQ ID NO: 2329612 - RNA, 19 nt, Artificial Sequence
  Description of Artificial Sequence: Synthetic oligonucleotide
cacgaaccagccuggagua

SEQ ID NO: 2329613 - RNA, 19 nt, Artificial Sequence
  Description of Artificial Sequence: Synthetic oligonucleotide
acuguuugccaggcaggca

SEQ ID NO: 2329614 - RNA, 19 nt, Artificial Sequence
  Description of Artificial Sequence: Synthetic oligonucleotide
ucgugggcuugccuggcuu

SEQ ID NO: 2329615 - RNA, 19 nt, Artificial Sequence
  Description of Artificial Sequence: Synthetic oligonucleotide
agcugcagucagggguccc

SEQ ID NO: 2329616 - RNA, 19 nt, Artificial Sequence
  Description of Artificial Sequence: Synthetic oligonucleotide
cucuguggaugggccagcc

SEQ ID NO: 2329617 - RNA, 19 nt, Artificial Sequence
  Description of Artificial Sequence: Synthetic oligonucleotide
gaguggagucagcaguagu

SEQ ID NO: 2329618 - RNA, 19 nt, Artificial Sequence
  Description of Artificial Sequence: Synthetic oligonucleotide
gcuguacaaggcagguggg

SEQ ID NO: 2329619 - RNA, 19 nt, Artificial Sequence
  Description of Artificial Sequence: Synthetic oligonucleotide
aggccuucgugggcuugcc

SEQ ID NO: 2329620 - RNA, 19 nt, Artificial Sequence
  Description of Artificial Sequence: Synthetic oligonucleotide
ggccucaccuacguagcgg

SEQ ID NO: 2329621 - RNA, 19 nt, Artificial Sequence
  Description of Artificial Sequence: Synthetic oligonucleotide
ggccugucaguuucucagc

SEQ ID NO: 2329622 - RNA, 19 nt, Artificial Sequence
  Description of Artificial Sequence: Synthetic oligonucleotide
uccaagcugugggaccggu

SEQ ID NO: 2329623 - RNA, 19 nt, Artificial Sequence
  Description of Artificial Sequence: Synthetic oligonucleotide
aggcuguacaaggcaggug

SEQ ID NO: 2329624 - RNA, 19 nt, Artificial Sequence
  Description of Artificial Sequence: Synthetic oligonucleotide
ggaagugacaugagcaggu

SEQ ID NO: 2329625 - RNA, 19 nt, Artificial Sequence
  Description of Artificial Sequence: Synthetic oligonucleotide
cugauggguucugcagcag

SEQ ID NO: 2329626 - RNA, 19 nt, Artificial Sequence
  Description of Artificial Sequence: Synthetic oligonucleotide
ggaguggagucagcaguag

SEQ ID NO: 2329627 - RNA, 19 nt, Artificial Sequence
  Description of Artificial Sequence: Synthetic oligonucleotide
cuucgugggcuugccuggc

SEQ ID NO: 2329628 - RNA, 19 nt, Artificial Sequence
  Description of Artificial Sequence: Synthetic oligonucleotide
cuguacaaggcagguggga

SEQ ID NO: 2329629 - RNA, 19 nt, Artificial Sequence
  Description of Artificial Sequence: Synthetic oligonucleotide
gcaccuuccgaauggccuc

SEQ ID NO: 2329630 - RNA, 19 nt, Artificial Sequence
  Description of Artificial Sequence: Synthetic oligonucleotide
acgaaccagccuggaguag

SEQ ID NO: 2329631 - RNA, 19 nt, Artificial Sequence
  Description of Artificial Sequence: Synthetic oligonucleotide
gccugucaguuucucagca

SEQ ID NO: 2329632 - RNA, 19 nt, Artificial Sequence
  Description of Artificial Sequence: Synthetic oligonucleotide
caggccuucgugggcuugc

SEQ ID NO: 2329633 - RNA, 19 nt, Artificial Sequence
  Description of Artificial Sequence: Synthetic oligonucleotide
caucuguucugugcucuca

SEQ ID NO: 2329634 - RNA, 19 nt, Artificial Sequence
  Description of Artificial Sequence: Synthetic oligonucleotide
ucuugacgccuuagaccuu

SEQ ID NO: 2329635 - RNA, 19 nt, Artificial Sequence
  Description of Artificial Sequence: Synthetic oligonucleotide
uaguaagggcaggcccggc

SEQ ID NO: 2329636 - RNA, 19 nt, Artificial Sequence
  Description of Artificial Sequence: Synthetic oligonucleotide
gggcuugccuggcuuggag

SEQ ID NO: 2329637 - RNA, 19 nt, Artificial Sequence
  Description of Artificial Sequence: Synthetic oligonucleotide
aggcccggcuucaaggcca

SEQ ID NO: 2329638 - RNA, 19 nt, Artificial Sequence
  Description of Artificial Sequence: Synthetic oligonucleotide
ggugcaccuuccgaauggc

SEQ ID NO: 2329639 - RNA, 19 nt, Artificial Sequence
  Description of Artificial Sequence: Synthetic oligonucleotide
gcccaauagcucuaggggu

SEQ ID NO: 2329640 - RNA, 19 nt, Artificial Sequence
  Description of Artificial Sequence: Synthetic oligonucleotide
uggagugcaggaggcugau

SEQ ID NO: 2329641 - RNA, 19 nt, Artificial Sequence
  Description of Artificial Sequence: Synthetic oligonucleotide
ccuuagaccuucugugcca

SEQ ID NO: 2329642 - RNA, 19 nt, Artificial Sequence
  Description of Artificial Sequence: Synthetic oligonucleotide
caccuacguagcgggcugg

SEQ ID NO: 2329643 - RNA, 19 nt, Artificial Sequence
  Description of Artificial Sequence: Synthetic oligonucleotide
cgccuuagaccuucugugc

SEQ ID NO: 2329644 - RNA, 19 nt, Artificial Sequence
  Description of Artificial Sequence: Synthetic oligonucleotide
cuggaggagaaggacagau

SEQ ID NO: 2329645 - RNA, 19 nt, Artificial Sequence
  Description of Artificial Sequence: Synthetic oligonucleotide
uagcgggcugggaccuuac

SEQ ID NO: 2329646 - RNA, 19 nt, Artificial Sequence
  Description of Artificial Sequence: Synthetic oligonucleotide
agguuccucuggccccuug

SEQ ID NO: 2329647 - RNA, 19 nt, Artificial Sequence
  Description of Artificial Sequence: Synthetic oligonucleotide
cucuagggguaccaggaau

SEQ ID NO: 2329648 - RNA, 19 nt, Artificial Sequence
  Description of Artificial Sequence: Synthetic oligonucleotide
gccaucagcugagcauacg

SEQ ID NO: 2329649 - RNA, 19 nt, Artificial Sequence
  Description of Artificial Sequence: Synthetic oligonucleotide
ugguuuggucagguuccuc

SEQ ID NO: 2329650 - RNA, 19 nt, Artificial Sequence
  Description of Artificial Sequence: Synthetic oligonucleotide
acguagcgggcugggaccu

SEQ ID NO: 2329651 - RNA, 19 nt, Artificial Sequence
  Description of Artificial Sequence: Synthetic oligonucleotide
gcgggcugggaccuuacga

SEQ ID NO: 2329652 - RNA, 19 nt, Artificial Sequence
  Description of Artificial Sequence: Synthetic oligonucleotide
ccuuacgacuucgcugcgg

SEQ ID NO: 2329653 - RNA, 19 nt, Artificial Sequence
  Description of Artificial Sequence: Synthetic oligonucleotide
ugggcuugccuggcuugga

SEQ ID NO: 2329654 - RNA, 19 nt, Artificial Sequence
  Description of Artificial Sequence: Synthetic oligonucleotide
gccaccugggugcaccuuc

SEQ ID NO: 2329655 - RNA, 19 nt, Artificial Sequence
  Description of Artificial Sequence: Synthetic oligonucleotide
caucagcugagcauacguu

SEQ ID NO: 2329656 - RNA, 19 nt, Artificial Sequence
  Description of Artificial Sequence: Synthetic oligonucleotide
cccaauagcucuaggggua

SEQ ID NO: 2329657 - RNA, 19 nt, Artificial Sequence
  Description of Artificial Sequence: Synthetic oligonucleotide
ccaauagcucuagggguac

SEQ ID NO: 2329658 - RNA, 19 nt, Artificial Sequence
  Description of Artificial Sequence: Synthetic oligonucleotide
uaccaggaauggguucaau

SEQ ID NO: 2329659 - RNA, 19 nt, Artificial Sequence
  Description of Artificial Sequence: Synthetic oligonucleotide
guaagggcaggcccggcuu

SEQ ID NO: 2329660 - RNA, 19 nt, Artificial Sequence
  Description of Artificial Sequence: Synthetic oligonucleotide
gccucacgaaccagccugg

SEQ ID NO: 2329661 - RNA, 19 nt, Artificial Sequence
  Description of Artificial Sequence: Synthetic oligonucleotide
ccaccugggugcaccuucc

SEQ ID NO: 2329662 - RNA, 19 nt, Artificial Sequence
  Description of Artificial Sequence: Synthetic oligonucleotide
cucaccuacguagcgggcu

SEQ ID NO: 2329663 - RNA, 19 nt, Artificial Sequence
  Description of Artificial Sequence: Synthetic oligonucleotide
gcugggaccuuacgacuuc

SEQ ID NO: 2329664 - RNA, 19 nt, Artificial Sequence
  Description of Artificial Sequence: Synthetic oligonucleotide
gggcuuagggacagggaca

SEQ ID NO: 2329665 - RNA, 19 nt, Artificial Sequence
  Description of Artificial Sequence: Synthetic oligonucleotide
gggaccuuacgacuucgcu

SEQ ID NO: 2329666 - RNA, 19 nt, Artificial Sequence
  Description of Artificial Sequence: Synthetic oligonucleotide
ccuuccgaauggccucacg

SEQ ID NO: 2329667 - RNA, 19 nt, Artificial Sequence
  Description of Artificial Sequence: Synthetic oligonucleotide
ugggaccgguggccucacc

SEQ ID NO: 2329668 - RNA, 19 nt, Artificial Sequence
  Description of Artificial Sequence: Synthetic oligonucleotide
acaggccuucgugggcuug

SEQ ID NO: 2329669 - RNA, 19 nt, Artificial Sequence
  Description of Artificial Sequence: Synthetic oligonucleotide
ggggcuccaagcuguggga

SEQ ID NO: 2329670 - RNA, 19 nt, Artificial Sequence
  Description of Artificial Sequence: Synthetic oligonucleotide
agcauacguuuucgucaua

SEQ ID NO: 2329671 - RNA, 19 nt, Artificial Sequence
  Description of Artificial Sequence: Synthetic oligonucleotide
cugugggaccgguggccuc

SEQ ID NO: 2329672 - RNA, 19 nt, Artificial Sequence
  Description of Artificial Sequence: Synthetic oligonucleotide
gcaucuguucugugcucuc

SEQ ID NO: 2329673 - RNA, 19 nt, Artificial Sequence
  Description of Artificial Sequence: Synthetic oligonucleotide
gaggagaaggacagauauu

SEQ ID NO: 2329674 - RNA, 19 nt, Artificial Sequence
  Description of Artificial Sequence: Synthetic oligonucleotide
gcauacguuuucgucauau

SEQ ID NO: 2329675 - RNA, 19 nt, Artificial Sequence
  Description of Artificial Sequence: Synthetic oligonucleotide
cugcagucaggggucccuc

SEQ ID NO: 2329676 - RNA, 19 nt, Artificial Sequence
  Description of Artificial Sequence: Synthetic oligonucleotide
guuugccaggcaggcaucu

SEQ ID NO: 2329677 - RNA, 19 nt, Artificial Sequence
  Description of Artificial Sequence: Synthetic oligonucleotide
ggacagcuccucuggaagu

SEQ ID NO: 2329678 - RNA, 19 nt, Artificial Sequence
  Description of Artificial Sequence: Synthetic oligonucleotide
gcugagcauacguuuucgu

SEQ ID NO: 2329679 - RNA, 19 nt, Artificial Sequence
  Description of Artificial Sequence: Synthetic oligonucleotide
ccucaccuacguagcgggc

SEQ ID NO: 2329680 - RNA, 19 nt, Artificial Sequence
  Description of Artificial Sequence: Synthetic oligonucleotide
ccugggagaaagcugcagu

SEQ ID NO: 2329681 - RNA, 19 nt, Artificial Sequence
  Description of Artificial Sequence: Synthetic oligonucleotide
gcaccuggcccaauagcuc

SEQ ID NO: 2329682 - RNA, 19 nt, Artificial Sequence
  Description of Artificial Sequence: Synthetic oligonucleotide
ggaugggccagcccagggu

SEQ ID NO: 2329683 - RNA, 19 nt, Artificial Sequence
  Description of Artificial Sequence: Synthetic oligonucleotide
caccucgcaggggugggca

SEQ ID NO: 2329684 - RNA, 19 nt, Artificial Sequence
  Description of Artificial Sequence: Synthetic oligonucleotide
cugggugcaccuuccgaau

SEQ ID NO: 2329685 - RNA, 19 nt, Artificial Sequence
  Description of Artificial Sequence: Synthetic oligonucleotide
ccuugggaguggagucagc

SEQ ID NO: 2329686 - RNA, 19 nt, Artificial Sequence
  Description of Artificial Sequence: Synthetic oligonucleotide
gcucuagggguaccaggaa

SEQ ID NO: 2329687 - RNA, 19 nt, Artificial Sequence
  Description of Artificial Sequence: Synthetic oligonucleotide
ggaccgguggccucaccua

SEQ ID NO: 2329688 - RNA, 19 nt, Artificial Sequence
  Description of Artificial Sequence: Synthetic oligonucleotide
ccugucaguuucucagcaa

SEQ ID NO: 2329689 - RNA, 19 nt, Artificial Sequence
  Description of Artificial Sequence: Synthetic oligonucleotide
guagcgggcugggaccuua

SEQ ID NO: 2329690 - RNA, 19 nt, Artificial Sequence
  Description of Artificial Sequence: Synthetic oligonucleotide
gacuucgcugcgguggcuu

SEQ ID NO: 2329691 - RNA, 19 nt, Artificial Sequence
  Description of Artificial Sequence: Synthetic oligonucleotide
ccuggcccaauagcucuag

SEQ ID NO: 2329692 - RNA, 19 nt, Artificial Sequence
  Description of Artificial Sequence: Synthetic oligonucleotide
gggcugggaccuuacgacu

SEQ ID NO: 2329693 - RNA, 19 nt, Artificial Sequence
  Description of Artificial Sequence: Synthetic oligonucleotide
gacagauauuugagaucuu

SEQ ID NO: 2329694 - RNA, 19 nt, Artificial Sequence
  Description of Artificial Sequence: Synthetic oligonucleotide
ccucgcaggggugggcacc

SEQ ID NO: 2329695 - RNA, 19 nt, Artificial Sequence
  Description of Artificial Sequence: Synthetic oligonucleotide
ggaccacugcugacucagc

SEQ ID NO: 2329696 - RNA, 19 nt, Artificial Sequence
  Description of Artificial Sequence: Synthetic oligonucleotide
cacugcugacucagcugcu

SEQ ID NO: 2329697 - RNA, 19 nt, Artificial Sequence
  Description of Artificial Sequence: Synthetic oligonucleotide
cccggcuucaaggccagga

SEQ ID NO: 2329698 - RNA, 19 nt, Artificial Sequence
  Description of Artificial Sequence: Synthetic oligonucleotide
ucgcaggggugggcaccug

SEQ ID NO: 2329699 - RNA, 19 nt, Artificial Sequence
  Description of Artificial Sequence: Synthetic oligonucleotide
cugguuuggucagguuccu

SEQ ID NO: 2329700 - RNA, 19 nt, Artificial Sequence
  Description of Artificial Sequence: Synthetic oligonucleotide
cucgcaggggugggcaccu

SEQ ID NO: 2329701 - RNA, 19 nt, Artificial Sequence
  Description of Artificial Sequence: Synthetic oligonucleotide
gcccuccuuggguacucaa

SEQ ID NO: 2329702 - RNA, 19 nt, Artificial Sequence
  Description of Artificial Sequence: Synthetic oligonucleotide
ggcugggaccuuacgacuu

SEQ ID NO: 2329703 - RNA, 19 nt, Artificial Sequence
  Description of Artificial Sequence: Synthetic oligonucleotide
gggcagaucccaacuguuu

SEQ ID NO: 2329704 - RNA, 19 nt, Artificial Sequence
  Description of Artificial Sequence: Synthetic oligonucleotide
gcugugggaccgguggccu

SEQ ID NO: 2329705 - RNA, 19 nt, Artificial Sequence
  Description of Artificial Sequence: Synthetic oligonucleotide
ggggcagaucccaacuguu

SEQ ID NO: 2329706 - RNA, 19 nt, Artificial Sequence
  Description of Artificial Sequence: Synthetic oligonucleotide
ccuuggagccagucccucu

SEQ ID NO: 2329707 - RNA, 19 nt, Artificial Sequence
  Description of Artificial Sequence: Synthetic oligonucleotide
ccuacguagcgggcuggga

SEQ ID NO: 2329708 - RNA, 19 nt, Artificial Sequence
  Description of Artificial Sequence: Synthetic oligonucleotide
cgaaccagccuggaguagu

SEQ ID NO: 2329709 - RNA, 19 nt, Artificial Sequence
  Description of Artificial Sequence: Synthetic oligonucleotide
ucccuccagugggccuguc

SEQ ID NO: 2329710 - RNA, 19 nt, Artificial Sequence
  Description of Artificial Sequence: Synthetic oligonucleotide
ggccuucgugggcuugccu

SEQ ID NO: 2329711 - RNA, 19 nt, Artificial Sequence
  Description of Artificial Sequence: Synthetic oligonucleotide
ccggcuucaaggccaggau

SEQ ID NO: 2329712 - RNA, 19 nt, Artificial Sequence
  Description of Artificial Sequence: Synthetic oligonucleotide
ggugagcaccugggagaaa

SEQ ID NO: 2329713 - RNA, 19 nt, Artificial Sequence
  Description of Artificial Sequence: Synthetic oligonucleotide
ccucacgaaccagccugga

SEQ ID NO: 2329714 - RNA, 19 nt, Artificial Sequence
  Description of Artificial Sequence: Synthetic oligonucleotide
ccgguggccucaccuacgu

SEQ ID NO: 2329715 - RNA, 19 nt, Artificial Sequence
  Description of Artificial Sequence: Synthetic oligonucleotide
ccccuuggagccagucccu

SEQ ID NO: 2329716 - RNA, 19 nt, Artificial Sequence
  Description of Artificial Sequence: Synthetic oligonucleotide
gucccuccagugggccugu

SEQ ID NO: 2329717 - RNA, 19 nt, Artificial Sequence
  Description of Artificial Sequence: Synthetic oligonucleotide
gcccggcuucaaggccagg

SEQ ID NO: 2329718 - RNA, 19 nt, Artificial Sequence
  Description of Artificial Sequence: Synthetic oligonucleotide
gguuggggucagagggcuu

SEQ ID NO: 2329719 - RNA, 19 nt, Artificial Sequence
  Description of Artificial Sequence: Synthetic oligonucleotide
cagguuccucuggccccuu

SEQ ID NO: 2329720 - RNA, 19 nt, Artificial Sequence
  Description of Artificial Sequence: Synthetic oligonucleotide
cgguggccucaccuacgua

SEQ ID NO: 2329721 - RNA, 19 nt, Artificial Sequence
  Description of Artificial Sequence: Synthetic oligonucleotide
cgacuucgcugcgguggcu

SEQ ID NO: 2329722 - RNA, 19 nt, Artificial Sequence
  Description of Artificial Sequence: Synthetic oligonucleotide
cguagcgggcugggaccuu

SEQ ID NO: 2329723 - RNA, 19 nt, Artificial Sequence
  Description of Artificial Sequence: Synthetic oligonucleotide
aauucggaaaccuaaaauc

SEQ ID NO: 2329724 - RNA, 19 nt, Artificial Sequence
  Description of Artificial Sequence: Synthetic oligonucleotide
uuuacuucaccccugagcc

SEQ ID NO: 2329725 - RNA, 19 nt, Artificial Sequence
  Description of Artificial Sequence: Synthetic oligonucleotide
uccagaaucaaguacaccc

SEQ ID NO: 2329726 - RNA, 19 nt, Artificial Sequence
  Description of Artificial Sequence: Synthetic oligonucleotide
cuaaaauccaccuugagga

SEQ ID NO: 2329727 - RNA, 19 nt, Artificial Sequence
  Description of Artificial Sequence: Synthetic oligonucleotide
aaugguuuuccuugagccg

SEQ ID NO: 2329728 - RNA, 19 nt, Artificial Sequence
  Description of Artificial Sequence: Synthetic oligonucleotide
ucuaucugggacuugaaga

SEQ ID NO: 2329729 - RNA, 19 nt, Artificial Sequence
  Description of Artificial Sequence: Synthetic oligonucleotide
auucggaaaccuaaaaucc

SEQ ID NO: 2329730 - RNA, 19 nt, Artificial Sequence
  Description of Artificial Sequence: Synthetic oligonucleotide
ucccugaauaaauacaaag

SEQ ID NO: 2329731 - RNA, 19 nt, Artificial Sequence
  Description of Artificial Sequence: Synthetic oligonucleotide
gaaucaaguacacccggcg

SEQ ID NO: 2329732 - RNA, 19 nt, Artificial Sequence
  Description of Artificial Sequence: Synthetic oligonucleotide
auucggguguuguaggugc

SEQ ID NO: 2329733 - RNA, 19 nt, Artificial Sequence
  Description of Artificial Sequence: Synthetic oligonucleotide
uggagcauauuccagaauc

SEQ ID NO: 2329734 - RNA, 19 nt, Artificial Sequence
  Description of Artificial Sequence: Synthetic oligonucleotide
ucuuuaaacagcucgcccu

SEQ ID NO: 2329735 - RNA, 19 nt, Artificial Sequence
  Description of Artificial Sequence: Synthetic oligonucleotide
aagccuacgggaguguucc

SEQ ID NO: 2329736 - RNA, 19 nt, Artificial Sequence
  Description of Artificial Sequence: Synthetic oligonucleotide
gauauucggguguuguagg

SEQ ID NO: 2329737 - RNA, 19 nt, Artificial Sequence
  Description of Artificial Sequence: Synthetic oligonucleotide
accuucucguuauacgucc

SEQ ID NO: 2329738 - RNA, 19 nt, Artificial Sequence
  Description of Artificial Sequence: Synthetic oligonucleotide
gaagccgucugacaaacag

SEQ ID NO: 2329739 - RNA, 19 nt, Artificial Sequence
  Description of Artificial Sequence: Synthetic oligonucleotide
agauucucuggcuugaugu

SEQ ID NO: 2329740 - RNA, 19 nt, Artificial Sequence
  Description of Artificial Sequence: Synthetic oligonucleotide
auaaauacaaaggaacaga

SEQ ID NO: 2329741 - RNA, 19 nt, Artificial Sequence
  Description of Artificial Sequence: Synthetic oligonucleotide
cuaucugggacuugaagag

SEQ ID NO: 2329742 - RNA, 19 nt, Artificial Sequence
  Description of Artificial Sequence: Synthetic oligonucleotide
uucuucucgugacaguagg

SEQ ID NO: 2329743 - RNA, 19 nt, Artificial Sequence
  Description of Artificial Sequence: Synthetic oligonucleotide
uaccuaagaagcuuggaga

SEQ ID NO: 2329744 - RNA, 19 nt, Artificial Sequence
  Description of Artificial Sequence: Synthetic oligonucleotide
uuuuccuugagccgggcca

SEQ ID NO: 2329745 - RNA, 19 nt, Artificial Sequence
  Description of Artificial Sequence: Synthetic oligonucleotide
aaguaguccagagucccgc

SEQ ID NO: 2329746 - RNA, 19 nt, Artificial Sequence
  Description of Artificial Sequence: Synthetic oligonucleotide
ucuacuucccuccggagcu

SEQ ID NO: 2329747 - RNA, 19 nt, Artificial Sequence
  Description of Artificial Sequence: Synthetic oligonucleotide
uccucuauuaucguggcug

SEQ ID NO: 2329748 - RNA, 19 nt, Artificial Sequence
  Description of Artificial Sequence: Synthetic oligonucleotide
agggaugguaccuaagaag

SEQ ID NO: 2329749 - RNA, 19 nt, Artificial Sequence
  Description of Artificial Sequence: Synthetic oligonucleotide
guaccuaagaagcuuggag

SEQ ID NO: 2329750 - RNA, 19 nt, Artificial Sequence
  Description of Artificial Sequence: Synthetic oligonucleotide
uccagagucccgcacauug

SEQ ID NO: 2329751 - RNA, 19 nt, Artificial Sequence
  Description of Artificial Sequence: Synthetic oligonucleotide
ucuaaucucuguuuccucu

SEQ ID NO: 2329752 - RNA, 19 nt, Artificial Sequence
  Description of Artificial Sequence: Synthetic oligonucleotide
aaacaggaggcacaagccu

SEQ ID NO: 2329753 - RNA, 19 nt, Artificial Sequence
  Description of Artificial Sequence: Synthetic oligonucleotide
uguaggugcgacuggaucu

SEQ ID NO: 2329754 - RNA, 19 nt, Artificial Sequence
  Description of Artificial Sequence: Synthetic oligonucleotide
ugagggaugguaccuaaga

SEQ ID NO: 2329755 - RNA, 19 nt, Artificial Sequence
  Description of Artificial Sequence: Synthetic oligonucleotide
acaggcguaggauauucgg

SEQ ID NO: 2329756 - RNA, 19 nt, Artificial Sequence
  Description of Artificial Sequence: Synthetic oligonucleotide
uccaccuucucguuauacg

SEQ ID NO: 2329757 - RNA, 19 nt, Artificial Sequence
  Description of Artificial Sequence: Synthetic oligonucleotide
uucggaaaccuaaaaucca

SEQ ID NO: 2329758 - RNA, 19 nt, Artificial Sequence
  Description of Artificial Sequence: Synthetic oligonucleotide
aaucaaguacacccggcga

SEQ ID NO: 2329759 - RNA, 19 nt, Artificial Sequence
  Description of Artificial Sequence: Synthetic oligonucleotide
aauacaccacagauccacc

SEQ ID NO: 2329760 - RNA, 19 nt, Artificial Sequence
  Description of Artificial Sequence: Synthetic oligonucleotide
augguuuuccuugagccgg

SEQ ID NO: 2329761 - RNA, 19 nt, Artificial Sequence
  Description of Artificial Sequence: Synthetic oligonucleotide
ucaucuaaucucuguuucc

SEQ ID NO: 2329762 - RNA, 19 nt, Artificial Sequence
  Description of Artificial Sequence: Synthetic oligonucleotide
cuauuaucguggcuguacg

SEQ ID NO: 2329763 - RNA, 19 nt, Artificial Sequence
  Description of Artificial Sequence: Synthetic oligonucleotide
uacgcugcucaucuaaucu

SEQ ID NO: 2329764 - RNA, 19 nt, Artificial Sequence
  Description of Artificial Sequence: Synthetic oligonucleotide
ugcgaucuuuacuucaccc

SEQ ID NO: 2329765 - RNA, 19 nt, Artificial Sequence
  Description of Artificial Sequence: Synthetic oligonucleotide
ucuauuaucguggcuguac

SEQ ID NO: 2329766 - RNA, 19 nt, Artificial Sequence
  Description of Artificial Sequence: Synthetic oligonucleotide
ucggaaaccuaaaauccac

SEQ ID NO: 2329767 - RNA, 19 nt, Artificial Sequence
  Description of Artificial Sequence: Synthetic oligonucleotide
ccuaaaauccaccuugagg

SEQ ID NO: 2329768 - RNA, 19 nt, Artificial Sequence
  Description of Artificial Sequence: Synthetic oligonucleotide
cccugaauaaauacaaagg

SEQ ID NO: 2329769 - RNA, 19 nt, Artificial Sequence
  Description of Artificial Sequence: Synthetic oligonucleotide
ugaaacgccugguugacau

SEQ ID NO: 2329770 - RNA, 19 nt, Artificial Sequence
  Description of Artificial Sequence: Synthetic oligonucleotide
agaaucaaguacacccggc

SEQ ID NO: 2329771 - RNA, 19 nt, Artificial Sequence
  Description of Artificial Sequence: Synthetic oligonucleotide
gaugcguuuguaagucucg

SEQ ID NO: 2329772 - RNA, 19 nt, Artificial Sequence
  Description of Artificial Sequence: Synthetic oligonucleotide
uucucgugacaguagguca

SEQ ID NO: 2329773 - RNA, 19 nt, Artificial Sequence
  Description of Artificial Sequence: Synthetic oligonucleotide
uauacguccucccuucaau

SEQ ID NO: 2329774 - RNA, 19 nt, Artificial Sequence
  Description of Artificial Sequence: Synthetic oligonucleotide
uauuaucguggcuguacgc

SEQ ID NO: 2329775 - RNA, 19 nt, Artificial Sequence
  Description of Artificial Sequence: Synthetic oligonucleotide
cucuuuaaacagcucgccc

SEQ ID NO: 2329776 - RNA, 19 nt, Artificial Sequence
  Description of Artificial Sequence: Synthetic oligonucleotide
cuaagaagcuuggagauca

SEQ ID NO: 2329777 - RNA, 19 nt, Artificial Sequence
  Description of Artificial Sequence: Synthetic oligonucleotide
cagaaucaaguacacccgg

SEQ ID NO: 2329778 - RNA, 19 nt, Artificial Sequence
  Description of Artificial Sequence: Synthetic oligonucleotide
uuaaacagcucgcccugug

SEQ ID NO: 2329779 - RNA, 19 nt, Artificial Sequence
  Description of Artificial Sequence: Synthetic oligonucleotide
uggugaaacgccugguuga

SEQ ID NO: 2329780 - RNA, 19 nt, Artificial Sequence
  Description of Artificial Sequence: Synthetic oligonucleotide
aguccuugauggugaaacg

SEQ ID NO: 2329781 - RNA, 19 nt, Artificial Sequence
  Description of Artificial Sequence: Synthetic oligonucleotide
auacguccucccuucaauc

SEQ ID NO: 2329782 - RNA, 19 nt, Artificial Sequence
  Description of Artificial Sequence: Synthetic oligonucleotide
cucccuucaaucauuucug

SEQ ID NO: 2329783 - RNA, 19 nt, Artificial Sequence
  Description of Artificial Sequence: Synthetic oligonucleotide
ugguaccuaagaagcuugg

SEQ ID NO: 2329784 - RNA, 19 nt, Artificial Sequence
  Description of Artificial Sequence: Synthetic oligonucleotide
cuuuaaacagcucgcccug

SEQ ID NO: 2329785 - RNA, 19 nt, Artificial Sequence
  Description of Artificial Sequence: Synthetic oligonucleotide
aucuaaucucuguuuccuc

SEQ ID NO: 2329786 - RNA, 19 nt, Artificial Sequence
  Description of Artificial Sequence: Synthetic oligonucleotide
accuaagaagcuuggagau

SEQ ID NO: 2329787 - RNA, 19 nt, Artificial Sequence
  Description of Artificial Sequence: Synthetic oligonucleotide
uuaucguggcuguacgcug

SEQ ID NO: 2329788 - RNA, 19 nt, Artificial Sequence
  Description of Artificial Sequence: Synthetic oligonucleotide
agaucaaguccugggcucc

SEQ ID NO: 2329789 - RNA, 19 nt, Artificial Sequence
  Description of Artificial Sequence: Synthetic oligonucleotide
uaguuguacaggcguagga

SEQ ID NO: 2329790 - RNA, 19 nt, Artificial Sequence
  Description of Artificial Sequence: Synthetic oligonucleotide
uacaggcguaggauauucg

SEQ ID NO: 2329791 - RNA, 19 nt, Artificial Sequence
  Description of Artificial Sequence: Synthetic oligonucleotide
auuaucguggcuguacgcu

SEQ ID NO: 2329792 - RNA, 19 nt, Artificial Sequence
  Description of Artificial Sequence: Synthetic oligonucleotide
caggcguaggauauucggg

SEQ ID NO: 2329793 - RNA, 19 nt, Artificial Sequence
  Description of Artificial Sequence: Synthetic oligonucleotide
accccaauacaccacagau

SEQ ID NO: 2329794 - RNA, 19 nt, Artificial Sequence
  Description of Artificial Sequence: Synthetic oligonucleotide
ucucguuauacguccuccc

SEQ ID NO: 2329795 - RNA, 19 nt, Artificial Sequence
  Description of Artificial Sequence: Synthetic oligonucleotide
guggaaguaguuguacagg

SEQ ID NO: 2329796 - RNA, 19 nt, Artificial Sequence
  Description of Artificial Sequence: Synthetic oligonucleotide
guuuguaagucucguugug

SEQ ID NO: 2329797 - RNA, 19 nt, Artificial Sequence
  Description of Artificial Sequence: Synthetic oligonucleotide
ggaggcacaagccuacggg

SEQ ID NO: 2329798 - RNA, 19 nt, Artificial Sequence
  Description of Artificial Sequence: Synthetic oligonucleotide
cuaaucucuguuuccucug

SEQ ID NO: 2329799 - RNA, 19 nt, Artificial Sequence
  Description of Artificial Sequence: Synthetic oligonucleotide
aggcguaggauauucgggu

SEQ ID NO: 2329800 - RNA, 19 nt, Artificial Sequence
  Description of Artificial Sequence: Synthetic oligonucleotide
gccaacuccucuauuaucg

SEQ ID NO: 2329801 - RNA, 19 nt, Artificial Sequence
  Description of Artificial Sequence: Synthetic oligonucleotide
gggaugguaccuaagaagc

SEQ ID NO: 2329802 - RNA, 19 nt, Artificial Sequence
  Description of Artificial Sequence: Synthetic oligonucleotide
cacgaugaaaugguuuucc

SEQ ID NO: 2329803 - RNA, 19 nt, Artificial Sequence
  Description of Artificial Sequence: Synthetic oligonucleotide
augaaaugguuuuccuuga

SEQ ID NO: 2329804 - RNA, 19 nt, Artificial Sequence
  Description of Artificial Sequence: Synthetic oligonucleotide
aucaaguacacccggcgau

SEQ ID NO: 2329805 - RNA, 19 nt, Artificial Sequence
  Description of Artificial Sequence: Synthetic oligonucleotide
acgggaguguucccgcacc

SEQ ID NO: 2329806 - RNA, 19 nt, Artificial Sequence
  Description of Artificial Sequence: Synthetic oligonucleotide
uuguaggugcgacuggauc

SEQ ID NO: 2329807 - RNA, 19 nt, Artificial Sequence
  Description of Artificial Sequence: Synthetic oligonucleotide
gaucucuacuucccuccgg

SEQ ID NO: 2329808 - RNA, 19 nt, Artificial Sequence
  Description of Artificial Sequence: Synthetic oligonucleotide
aagccgucugacaaacagg

SEQ ID NO: 2329809 - RNA, 19 nt, Artificial Sequence
  Description of Artificial Sequence: Synthetic oligonucleotide
uucucguuauacguccucc

SEQ ID NO: 2329810 - RNA, 19 nt, Artificial Sequence
  Description of Artificial Sequence: Synthetic oligonucleotide
ugcucaucuaaucucuguu

SEQ ID NO: 2329811 - RNA, 19 nt, Artificial Sequence
  Description of Artificial Sequence: Synthetic oligonucleotide
acgcugcucaucuaaucuc

SEQ ID NO: 2329812 - RNA, 19 nt, Artificial Sequence
  Description of Artificial Sequence: Synthetic oligonucleotide
uaagucucguuguggcugc

SEQ ID NO: 2329813 - RNA, 19 nt, Artificial Sequence
  Description of Artificial Sequence: Synthetic oligonucleotide
gaauucggaaaccuaaaau

SEQ ID NO: 2329814 - RNA, 19 nt, Artificial Sequence
  Description of Artificial Sequence: Synthetic oligonucleotide
aucaucguggaaguaguug

SEQ ID NO: 2329815 - RNA, 19 nt, Artificial Sequence
  Description of Artificial Sequence: Synthetic oligonucleotide
cacccggcgaucaucgugg

SEQ ID NO: 2329816 - RNA, 19 nt, Artificial Sequence
  Description of Artificial Sequence: Synthetic oligonucleotide
gagaucaaguccugggcuc

SEQ ID NO: 2329817 - RNA, 19 nt, Artificial Sequence
  Description of Artificial Sequence: Synthetic oligonucleotide
aucucuacuucccuccgga

SEQ ID NO: 2329818 - RNA, 19 nt, Artificial Sequence
  Description of Artificial Sequence: Synthetic oligonucleotide
ucguggaaguaguuguaca

SEQ ID NO: 2329819 - RNA, 19 nt, Artificial Sequence
  Description of Artificial Sequence: Synthetic oligonucleotide
ccgucugacaaacaggagg

SEQ ID NO: 2329820 - RNA, 19 nt, Artificial Sequence
  Description of Artificial Sequence: Synthetic oligonucleotide
uguuguaggugcgacugga

SEQ ID NO: 2329821 - RNA, 19 nt, Artificial Sequence
  Description of Artificial Sequence: Synthetic oligonucleotide
cuugagccgggccagguac

SEQ ID NO: 2329822 - RNA, 19 nt, Artificial Sequence
  Description of Artificial Sequence: Synthetic oligonucleotide
uacguccucccuucaauca

SEQ ID NO: 2329823 - RNA, 19 nt, Artificial Sequence
  Description of Artificial Sequence: Synthetic oligonucleotide
aggaagccgucugacaaac

SEQ ID NO: 2329824 - RNA, 19 nt, Artificial Sequence
  Description of Artificial Sequence: Synthetic oligonucleotide
uuucaaaggguggcugucc

SEQ ID NO: 2329825 - RNA, 19 nt, Artificial Sequence
  Description of Artificial Sequence: Synthetic oligonucleotide
ggauauucggguguuguag

SEQ ID NO: 2329826 - RNA, 19 nt, Artificial Sequence
  Description of Artificial Sequence: Synthetic oligonucleotide
uaggauauucggguguugu

SEQ ID NO: 2329827 - RNA, 19 nt, Artificial Sequence
  Description of Artificial Sequence: Synthetic oligonucleotide
accuaaaauccaccuugag

SEQ ID NO: 2329828 - RNA, 19 nt, Artificial Sequence
  Description of Artificial Sequence: Synthetic oligonucleotide
gcguuuguaagucucguug

SEQ ID NO: 2329829 - RNA, 19 nt, Artificial Sequence
  Description of Artificial Sequence: Synthetic oligonucleotide
gagauucucuggcuugaug

SEQ ID NO: 2329830 - RNA, 19 nt, Artificial Sequence
  Description of Artificial Sequence: Synthetic oligonucleotide
ugguuuuccuugagccggg

SEQ ID NO: 2329831 - RNA, 19 nt, Artificial Sequence
  Description of Artificial Sequence: Synthetic oligonucleotide
gagcucccugaauaaauac

SEQ ID NO: 2329832 - RNA, 19 nt, Artificial Sequence
  Description of Artificial Sequence: Synthetic oligonucleotide
uuauacguccucccuucaa

SEQ ID NO: 2329833 - RNA, 19 nt, Artificial Sequence
  Description of Artificial Sequence: Synthetic oligonucleotide
aaucucuguuuccucugaa

SEQ ID NO: 2329834 - RNA, 19 nt, Artificial Sequence
  Description of Artificial Sequence: Synthetic oligonucleotide
auauucggguguuguaggu

SEQ ID NO: 2329835 - RNA, 19 nt, Artificial Sequence
  Description of Artificial Sequence: Synthetic oligonucleotide
cacguucccaaacuucccc

SEQ ID NO: 2329836 - RNA, 19 nt, Artificial Sequence
  Description of Artificial Sequence: Synthetic oligonucleotide
caaguaguccagagucccg

SEQ ID NO: 2329837 - RNA, 19 nt, Artificial Sequence
  Description of Artificial Sequence: Synthetic oligonucleotide
acgaugaaaugguuuuccu

SEQ ID NO: 2329838 - RNA, 19 nt, Artificial Sequence
  Description of Artificial Sequence: Synthetic oligonucleotide
cuucuucucgugacaguag

SEQ ID NO: 2329839 - RNA, 19 nt, Artificial Sequence
  Description of Artificial Sequence: Synthetic oligonucleotide
aguacacccggcgaucauc

SEQ ID NO: 2329840 - RNA, 19 nt, Artificial Sequence
  Description of Artificial Sequence: Synthetic oligonucleotide
agucugcgaucuuuacuuc

SEQ ID NO: 2329841 - RNA, 19 nt, Artificial Sequence
  Description of Artificial Sequence: Synthetic oligonucleotide
uauucggguguuguaggug

SEQ ID NO: 2329842 - RNA, 19 nt, Artificial Sequence
  Description of Artificial Sequence: Synthetic oligonucleotide
uaggucagggcaucugcca

SEQ ID NO: 2329843 - RNA, 19 nt, Artificial Sequence
  Description of Artificial Sequence: Synthetic oligonucleotide
gggcaaguaguccagaguc

SEQ ID NO: 2329844 - RNA, 19 nt, Artificial Sequence
  Description of Artificial Sequence: Synthetic oligonucleotide
guaguuguacaggcguagg

SEQ ID NO: 2329845 - RNA, 19 nt, Artificial Sequence
  Description of Artificial Sequence: Synthetic oligonucleotide
ugcgacuggaucucuacuu

SEQ ID NO: 2329846 - RNA, 19 nt, Artificial Sequence
  Description of Artificial Sequence: Synthetic oligonucleotide
aaccuaaaauccaccuuga

SEQ ID NO: 2329847 - RNA, 19 nt, Artificial Sequence
  Description of Artificial Sequence: Synthetic oligonucleotide
gacuggaucucuacuuccc

SEQ ID NO: 2329848 - RNA, 19 nt, Artificial Sequence
  Description of Artificial Sequence: Synthetic oligonucleotide
gaggcacaagccuacggga

SEQ ID NO: 2329849 - RNA, 19 nt, Artificial Sequence
  Description of Artificial Sequence: Synthetic oligonucleotide
guacacccggcgaucaucg

SEQ ID NO: 2329850 - RNA, 19 nt, Artificial Sequence
  Description of Artificial Sequence: Synthetic oligonucleotide
gguguuguaggugcgacug

SEQ ID NO: 2329851 - RNA, 19 nt, Artificial Sequence
  Description of Artificial Sequence: Synthetic oligonucleotide
ugacaguaggucagggcau

SEQ ID NO: 2329852 - RNA, 19 nt, Artificial Sequence
  Description of Artificial Sequence: Synthetic oligonucleotide
acgcccgaugucaaagucc

SEQ ID NO: 2329853 - RNA, 19 nt, Artificial Sequence
  Description of Artificial Sequence: Synthetic oligonucleotide
ucguuauacguccucccuu

SEQ ID NO: 2329854 - RNA, 19 nt, Artificial Sequence
  Description of Artificial Sequence: Synthetic oligonucleotide
gaucuuuacuucaccccug

SEQ ID NO: 2329855 - RNA, 19 nt, Artificial Sequence
  Description of Artificial Sequence: Synthetic oligonucleotide
ucugagggaugguaccuaa

SEQ ID NO: 2329856 - RNA, 19 nt, Artificial Sequence
  Description of Artificial Sequence: Synthetic oligonucleotide
gucucguuguggcugcugc

SEQ ID NO: 2329857 - RNA, 19 nt, Artificial Sequence
  Description of Artificial Sequence: Synthetic oligonucleotide
acaggaggcacaagccuac

SEQ ID NO: 2329858 - RNA, 19 nt, Artificial Sequence
  Description of Artificial Sequence: Synthetic oligonucleotide
gagggaugguaccuaagaa

SEQ ID NO: 2329859 - RNA, 19 nt, Artificial Sequence
  Description of Artificial Sequence: Synthetic oligonucleotide
agccgucugacaaacagga

SEQ ID NO: 2329860 - RNA, 19 nt, Artificial Sequence
  Description of Artificial Sequence: Synthetic oligonucleotide
cuuccccuugcccagagga

SEQ ID NO: 2329861 - RNA, 19 nt, Artificial Sequence
  Description of Artificial Sequence: Synthetic oligonucleotide
cuguggagcauauuccaga

SEQ ID NO: 2329862 - RNA, 19 nt, Artificial Sequence
  Description of Artificial Sequence: Synthetic oligonucleotide
accgaauucggaaaccuaa

SEQ ID NO: 2329863 - RNA, 19 nt, Artificial Sequence
  Description of Artificial Sequence: Synthetic oligonucleotide
acacccggcgaucaucgug

SEQ ID NO: 2329864 - RNA, 19 nt, Artificial Sequence
  Description of Artificial Sequence: Synthetic oligonucleotide
uuccucugaagcucuuuaa

SEQ ID NO: 2329865 - RNA, 19 nt, Artificial Sequence
  Description of Artificial Sequence: Synthetic oligonucleotide
caggcagggcucaggaagc

SEQ ID NO: 2329866 - RNA, 19 nt, Artificial Sequence
  Description of Artificial Sequence: Synthetic oligonucleotide
augguaccuaagaagcuug

SEQ ID NO: 2329867 - RNA, 19 nt, Artificial Sequence
  Description of Artificial Sequence: Synthetic oligonucleotide
uuccagaaucaaguacacc

SEQ ID NO: 2329868 - RNA, 19 nt, Artificial Sequence
  Description of Artificial Sequence: Synthetic oligonucleotide
gcgaucuuuacuucacccc

SEQ ID NO: 2329869 - RNA, 19 nt, Artificial Sequence
  Description of Artificial Sequence: Synthetic oligonucleotide
accacagauccaccuucuc

SEQ ID NO: 2329870 - RNA, 19 nt, Artificial Sequence
  Description of Artificial Sequence: Synthetic oligonucleotide
ccacagauccaccuucucg

SEQ ID NO: 2329871 - RNA, 19 nt, Artificial Sequence
  Description of Artificial Sequence: Synthetic oligonucleotide
guuuuccuugagccgggcc

SEQ ID NO: 2329872 - RNA, 19 nt, Artificial Sequence
  Description of Artificial Sequence: Synthetic oligonucleotide
cagcucguagcagagcacc

SEQ ID NO: 2329873 - RNA, 19 nt, Artificial Sequence
  Description of Artificial Sequence: Synthetic oligonucleotide
acguucccaaacuuccccu

SEQ ID NO: 2329874 - RNA, 19 nt, Artificial Sequence
  Description of Artificial Sequence: Synthetic oligonucleotide
gaaacgccugguugacaug

SEQ ID NO: 2329875 - RNA, 19 nt, Artificial Sequence
  Description of Artificial Sequence: Synthetic oligonucleotide
gcugcuuucaaaggguggc

SEQ ID NO: 2329876 - RNA, 19 nt, Artificial Sequence
  Description of Artificial Sequence: Synthetic oligonucleotide
agcucccugaauaaauaca

SEQ ID NO: 2329877 - RNA, 19 nt, Artificial Sequence
  Description of Artificial Sequence: Synthetic oligonucleotide
ugguugacaugcugggcuc

SEQ ID NO: 2329878 - RNA, 19 nt, Artificial Sequence
  Description of Artificial Sequence: Synthetic oligonucleotide
uuuaaacagcucgcccugu

SEQ ID NO: 2329879 - RNA, 19 nt, Artificial Sequence
  Description of Artificial Sequence: Synthetic oligonucleotide
gcgaucaucguggaaguag

SEQ ID NO: 2329880 - RNA, 19 nt, Artificial Sequence
  Description of Artificial Sequence: Synthetic oligonucleotide
ggaguguucccgcacccag

SEQ ID NO: 2329881 - RNA, 19 nt, Artificial Sequence
  Description of Artificial Sequence: Synthetic oligonucleotide
uacgggaguguucccgcac

SEQ ID NO: 2329882 - RNA, 19 nt, Artificial Sequence
  Description of Artificial Sequence: Synthetic oligonucleotide
agcucguagcagagcaccc

SEQ ID NO: 2329883 - RNA, 19 nt, Artificial Sequence
  Description of Artificial Sequence: Synthetic oligonucleotide
agggcaccgaauucggaaa

SEQ ID NO: 2329884 - RNA, 19 nt, Artificial Sequence
  Description of Artificial Sequence: Synthetic oligonucleotide
agggccacgaugaaauggu

SEQ ID NO: 2329885 - RNA, 19 nt, Artificial Sequence
  Description of Artificial Sequence: Synthetic oligonucleotide
cugcgaucuuuacuucacc

SEQ ID NO: 2329886 - RNA, 19 nt, Artificial Sequence
  Description of Artificial Sequence: Synthetic oligonucleotide
ggaaaccuaaaauccaccu

SEQ ID NO: 2329887 - RNA, 19 nt, Artificial Sequence
  Description of Artificial Sequence: Synthetic oligonucleotide
gacgcccgaugucaaaguc

SEQ ID NO: 2329888 - RNA, 19 nt, Artificial Sequence
  Description of Artificial Sequence: Synthetic oligonucleotide
ugauggugaaacgccuggu

SEQ ID NO: 2329889 - RNA, 19 nt, Artificial Sequence
  Description of Artificial Sequence: Synthetic oligonucleotide
ggaucucuacuucccuccg

SEQ ID NO: 2329890 - RNA, 19 nt, Artificial Sequence
  Description of Artificial Sequence: Synthetic oligonucleotide
uaagaagcuuggagaucaa

SEQ ID NO: 2329891 - RNA, 19 nt, Artificial Sequence
  Description of Artificial Sequence: Synthetic oligonucleotide
ucaaguccugggcucccaa

SEQ ID NO: 2329892 - RNA, 19 nt, Artificial Sequence
  Description of Artificial Sequence: Synthetic oligonucleotide
aacagagcccggagagcuc

SEQ ID NO: 2329893 - RNA, 19 nt, Artificial Sequence
  Description of Artificial Sequence: Synthetic oligonucleotide
cuucucguuauacguccuc

SEQ ID NO: 2329894 - RNA, 19 nt, Artificial Sequence
  Description of Artificial Sequence: Synthetic oligonucleotide
ucagggccacgaugaaaug

SEQ ID NO: 2329895 - RNA, 19 nt, Artificial Sequence
  Description of Artificial Sequence: Synthetic oligonucleotide
ucucguuguggcugcugcu

SEQ ID NO: 2329896 - RNA, 19 nt, Artificial Sequence
  Description of Artificial Sequence: Synthetic oligonucleotide
aggauauucggguguugua

SEQ ID NO: 2329897 - RNA, 19 nt, Artificial Sequence
  Description of Artificial Sequence: Synthetic oligonucleotide
aaguaguuguacaggcgua

SEQ ID NO: 2329898 - RNA, 19 nt, Artificial Sequence
  Description of Artificial Sequence: Synthetic oligonucleotide
guacgcugcucaucuaauc

SEQ ID NO: 2329899 - RNA, 19 nt, Artificial Sequence
  Description of Artificial Sequence: Synthetic oligonucleotide
aggaugcguuuguaagucu

SEQ ID NO: 2329900 - RNA, 19 nt, Artificial Sequence
  Description of Artificial Sequence: Synthetic oligonucleotide
cccaagggcaccgaauucg

SEQ ID NO: 2329901 - RNA, 19 nt, Artificial Sequence
  Description of Artificial Sequence: Synthetic oligonucleotide
ugcguuuguaagucucguu

SEQ ID NO: 2329902 - RNA, 19 nt, Artificial Sequence
  Description of Artificial Sequence: Synthetic oligonucleotide
ucccaagggcaccgaauuc

SEQ ID NO: 2329903 - RNA, 19 nt, Artificial Sequence
  Description of Artificial Sequence: Synthetic oligonucleotide
uugagccgggccagguaca

SEQ ID NO: 2329904 - RNA, 19 nt, Artificial Sequence
  Description of Artificial Sequence: Synthetic oligonucleotide
guacaggcguaggauauuc

SEQ ID NO: 2329905 - RNA, 19 nt, Artificial Sequence
  Description of Artificial Sequence: Synthetic oligonucleotide
acguccucccuucaaucau

SEQ ID NO: 2329906 - RNA, 19 nt, Artificial Sequence
  Description of Artificial Sequence: Synthetic oligonucleotide
aggcacaagccuacgggag

SEQ ID NO: 2329907 - RNA, 19 nt, Artificial Sequence
  Description of Artificial Sequence: Synthetic oligonucleotide
ccggcgaucaucguggaag

SEQ ID NO: 2329908 - RNA, 19 nt, Artificial Sequence
  Description of Artificial Sequence: Synthetic oligonucleotide
gaugguaccuaagaagcuu

SEQ ID NO: 2329909 - RNA, 19 nt, Artificial Sequence
  Description of Artificial Sequence: Synthetic oligonucleotide
gacaguaggucagggcauc

SEQ ID NO: 2329910 - RNA, 19 nt, Artificial Sequence
  Description of Artificial Sequence: Synthetic oligonucleotide
ugcugggcuccaucuggcc

SEQ ID NO: 2329911 - RNA, 19 nt, Artificial Sequence
  Description of Artificial Sequence: Synthetic oligonucleotide
ggugcgacuggaucucuac

SEQ ID NO: 2329912 - RNA, 19 nt, Artificial Sequence
  Description of Artificial Sequence: Synthetic oligonucleotide
cuguacgcugcucaucuaa

SEQ ID NO: 2329913 - RNA, 19 nt, Artificial Sequence
  Description of Artificial Sequence: Synthetic oligonucleotide
ccaagggcaccgaauucgg

SEQ ID NO: 2329914 - RNA, 19 nt, Artificial Sequence
  Description of Artificial Sequence: Synthetic oligonucleotide
ggcguaggauauucgggug

SEQ ID NO: 2329915 - RNA, 19 nt, Artificial Sequence
  Description of Artificial Sequence: Synthetic oligonucleotide
uccaaccccuccuucucua

SEQ ID NO: 2329916 - RNA, 19 nt, Artificial Sequence
  Description of Artificial Sequence: Synthetic oligonucleotide
gaucaaguccugggcuccc

SEQ ID NO: 2329917 - RNA, 19 nt, Artificial Sequence
  Description of Artificial Sequence: Synthetic oligonucleotide
guuauacguccucccuuca

SEQ ID NO: 2329918 - RNA, 19 nt, Artificial Sequence
  Description of Artificial Sequence: Synthetic oligonucleotide
gauggugaaacgccugguu

SEQ ID NO: 2329919 - RNA, 19 nt, Artificial Sequence
  Description of Artificial Sequence: Synthetic oligonucleotide
caccuugaggaugcguuug

SEQ ID NO: 2329920 - RNA, 19 nt, Artificial Sequence
  Description of Artificial Sequence: Synthetic oligonucleotide
cucguagcagagcacccca

SEQ ID NO: 2329921 - RNA, 19 nt, Artificial Sequence
  Description of Artificial Sequence: Synthetic oligonucleotide
agccuacgggaguguuccc

SEQ ID NO: 2329922 - RNA, 19 nt, Artificial Sequence
  Description of Artificial Sequence: Synthetic oligonucleotide
augcguuuguaagucucgu

SEQ ID NO: 2329923 - RNA, 19 nt, Artificial Sequence
  Description of Artificial Sequence: Synthetic oligonucleotide
ggagcauauuccagaauca

SEQ ID NO: 2329924 - RNA, 19 nt, Artificial Sequence
  Description of Artificial Sequence: Synthetic oligonucleotide
ccuguggagcauauuccag

SEQ ID NO: 2329925 - RNA, 19 nt, Artificial Sequence
  Description of Artificial Sequence: Synthetic oligonucleotide
ucguagcagagcaccccaa

SEQ ID NO: 2329926 - RNA, 19 nt, Artificial Sequence
  Description of Artificial Sequence: Synthetic oligonucleotide
guaggugcgacuggaucuc

SEQ ID NO: 2329927 - RNA, 19 nt, Artificial Sequence
  Description of Artificial Sequence: Synthetic oligonucleotide
cccgaugucaaaguccuug

SEQ ID NO: 2329928 - RNA, 19 nt, Artificial Sequence
  Description of Artificial Sequence: Synthetic oligonucleotide
caucuaaucucuguuuccu

SEQ ID NO: 2329929 - RNA, 19 nt, Artificial Sequence
  Description of Artificial Sequence: Synthetic oligonucleotide
acagauccaccuucucguu

SEQ ID NO: 2329930 - RNA, 19 nt, Artificial Sequence
  Description of Artificial Sequence: Synthetic oligonucleotide
agagcucccugaauaaaua

SEQ ID NO: 2329931 - RNA, 19 nt, Artificial Sequence
  Description of Artificial Sequence: Synthetic oligonucleotide
ggagaucaaguccugggcu

SEQ ID NO: 2329932 - RNA, 19 nt, Artificial Sequence
  Description of Artificial Sequence: Synthetic oligonucleotide
ugggccagguccagccgcu

SEQ ID NO: 2329933 - RNA, 19 nt, Artificial Sequence
  Description of Artificial Sequence: Synthetic oligonucleotide
aaacuuccccuugcccaga

SEQ ID NO: 2329934 - RNA, 19 nt, Artificial Sequence
  Description of Artificial Sequence: Synthetic oligonucleotide
ggaugcguuuguaagucuc

SEQ ID NO: 2329935 - RNA, 19 nt, Artificial Sequence
  Description of Artificial Sequence: Synthetic oligonucleotide
ccuacgggaguguucccgc

SEQ ID NO: 2329936 - RNA, 19 nt, Artificial Sequence
  Description of Artificial Sequence: Synthetic oligonucleotide
cguuauacguccucccuuc

SEQ ID NO: 2329937 - RNA, 19 nt, Artificial Sequence
  Description of Artificial Sequence: Synthetic oligonucleotide
gagagcucccugaauaaau

SEQ ID NO: 2329938 - RNA, 19 nt, Artificial Sequence
  Description of Artificial Sequence: Synthetic oligonucleotide
cggaaaccuaaaauccacc

SEQ ID NO: 2329939 - RNA, 19 nt, Artificial Sequence
  Description of Artificial Sequence: Synthetic oligonucleotide
ucggguguuguaggugcga

SEQ ID NO: 2329940 - RNA, 19 nt, Artificial Sequence
  Description of Artificial Sequence: Synthetic oligonucleotide
ccaggggugcuucaggauc

SEQ ID NO: 2329941 - RNA, 19 nt, Artificial Sequence
  Description of Artificial Sequence: Synthetic oligonucleotide
ggguaugcacagaccaacc

SEQ ID NO: 2329942 - RNA, 19 nt, Artificial Sequence
  Description of Artificial Sequence: Synthetic oligonucleotide
guguucccgcacccagggg

SEQ ID NO: 2329943 - RNA, 19 nt, Artificial Sequence
  Description of Artificial Sequence: Synthetic oligonucleotide
gcgacuggaucucuacuuc

SEQ ID NO: 2329944 - RNA, 19 nt, Artificial Sequence
  Description of Artificial Sequence: Synthetic oligonucleotide
gccuacgggaguguucccg

SEQ ID NO: 2329945 - RNA, 19 nt, Artificial Sequence
  Description of Artificial Sequence: Synthetic oligonucleotide
gagcccggagagcucccug

SEQ ID NO: 2329946 - RNA, 19 nt, Artificial Sequence
  Description of Artificial Sequence: Synthetic oligonucleotide
ggugaaacgccugguugac

SEQ ID NO: 2329947 - RNA, 19 nt, Artificial Sequence
  Description of Artificial Sequence: Synthetic oligonucleotide
caccccugagccccagcag

SEQ ID NO: 2329948 - RNA, 19 nt, Artificial Sequence
  Description of Artificial Sequence: Synthetic oligonucleotide
caccccaauacaccacaga

SEQ ID NO: 2329949 - RNA, 19 nt, Artificial Sequence
  Description of Artificial Sequence: Synthetic oligonucleotide
aacgccugguugacaugcu

SEQ ID NO: 2329950 - RNA, 19 nt, Artificial Sequence
  Description of Artificial Sequence: Synthetic oligonucleotide
caguaggucagggcaucug

SEQ ID NO: 2329951 - RNA, 19 nt, Artificial Sequence
  Description of Artificial Sequence: Synthetic oligonucleotide
ggcuguacgcugcucaucu

SEQ ID NO: 2329952 - RNA, 19 nt, Artificial Sequence
  Description of Artificial Sequence: Synthetic oligonucleotide
guucccgcacccaggggug

SEQ ID NO: 2329953 - RNA, 19 nt, Artificial Sequence
  Description of Artificial Sequence: Synthetic oligonucleotide
cuucccuccggagcuggug

SEQ ID NO: 2329954 - RNA, 19 nt, Artificial Sequence
  Description of Artificial Sequence: Synthetic oligonucleotide
agucccgcacauugucuuu

SEQ ID NO: 2329955 - RNA, 19 nt, Artificial Sequence
  Description of Artificial Sequence: Synthetic oligonucleotide
gcccuguggagcauauucc

SEQ ID NO: 2329956 - RNA, 19 nt, Artificial Sequence
  Description of Artificial Sequence: Synthetic oligonucleotide
caggaagccgucugacaaa

SEQ ID NO: 2329957 - RNA, 19 nt, Artificial Sequence
  Description of Artificial Sequence: Synthetic oligonucleotide
gccagguacacguucccaa

SEQ ID NO: 2329958 - RNA, 19 nt, Artificial Sequence
  Description of Artificial Sequence: Synthetic oligonucleotide
gcacaagccuacgggagug

SEQ ID NO: 2329959 - RNA, 19 nt, Artificial Sequence
  Description of Artificial Sequence: Synthetic oligonucleotide
gggcaccgaauucggaaac

SEQ ID NO: 2329960 - RNA, 19 nt, Artificial Sequence
  Description of Artificial Sequence: Synthetic oligonucleotide
uacacccggcgaucaucgu

SEQ ID NO: 2329961 - RNA, 19 nt, Artificial Sequence
  Description of Artificial Sequence: Synthetic oligonucleotide
gcucguagcagagcacccc

SEQ ID NO: 2329962 - RNA, 19 nt, Artificial Sequence
  Description of Artificial Sequence: Synthetic oligonucleotide
caagggcaccgaauucgga

SEQ ID NO: 2329963 - RNA, 19 nt, Artificial Sequence
  Description of Artificial Sequence: Synthetic oligonucleotide
cugcucaucuaaucucugu

SEQ ID NO: 2329964 - RNA, 19 nt, Artificial Sequence
  Description of Artificial Sequence: Synthetic oligonucleotide
gagccgggccagguacacg

SEQ ID NO: 2329965 - RNA, 19 nt, Artificial Sequence
  Description of Artificial Sequence: Synthetic oligonucleotide
cgcccuguggagcauauuc

SEQ ID NO: 2329966 - RNA, 19 nt, Artificial Sequence
  Description of Artificial Sequence: Synthetic oligonucleotide
acaagccuacgggaguguu

SEQ ID NO: 2329967 - RNA, 19 nt, Artificial Sequence
  Description of Artificial Sequence: Synthetic oligonucleotide
gucugacaaacaggaggca

SEQ ID NO: 2329968 - RNA, 19 nt, Artificial Sequence
  Description of Artificial Sequence: Synthetic oligonucleotide
caccgaauucggaaaccua

SEQ ID NO: 2329969 - RNA, 19 nt, Artificial Sequence
  Description of Artificial Sequence: Synthetic oligonucleotide
cuacgggaguguucccgca

SEQ ID NO: 2329970 - RNA, 19 nt, Artificial Sequence
  Description of Artificial Sequence: Synthetic oligonucleotide
uaggugcgacuggaucucu

SEQ ID NO: 2329971 - RNA, 19 nt, Artificial Sequence
  Description of Artificial Sequence: Synthetic oligonucleotide
gcuuucaaaggguggcugu

SEQ ID NO: 2329972 - RNA, 19 nt, Artificial Sequence
  Description of Artificial Sequence: Synthetic oligonucleotide
cagagcccggagagcuccc

SEQ ID NO: 2329973 - RNA, 19 nt, Artificial Sequence
  Description of Artificial Sequence: Synthetic oligonucleotide
cgcucugagggaugguacc

SEQ ID NO: 2329974 - RNA, 19 nt, Artificial Sequence
  Description of Artificial Sequence: Synthetic oligonucleotide
aagucucguuguggcugcu

SEQ ID NO: 2329975 - RNA, 19 nt, Artificial Sequence
  Description of Artificial Sequence: Synthetic oligonucleotide
ccuaagaagcuuggagauc

SEQ ID NO: 2329976 - RNA, 19 nt, Artificial Sequence
  Description of Artificial Sequence: Synthetic oligonucleotide
cuucaggaucugggccagg

SEQ ID NO: 2329977 - RNA, 19 nt, Artificial Sequence
  Description of Artificial Sequence: Synthetic oligonucleotide
cagcucgcccuguggagca

SEQ ID NO: 2329978 - RNA, 19 nt, Artificial Sequence
  Description of Artificial Sequence: Synthetic oligonucleotide
uucccgcacccaggggugc

SEQ ID NO: 2329979 - RNA, 19 nt, Artificial Sequence
  Description of Artificial Sequence: Synthetic oligonucleotide
cuacuucccuccggagcug

SEQ ID NO: 2329980 - RNA, 19 nt, Artificial Sequence
  Description of Artificial Sequence: Synthetic oligonucleotide
gguacacguucccaaacuu

SEQ ID NO: 2329981 - RNA, 19 nt, Artificial Sequence
  Description of Artificial Sequence: Synthetic oligonucleotide
gugaaacgccugguugaca

SEQ ID NO: 2329982 - RNA, 19 nt, Artificial Sequence
  Description of Artificial Sequence: Synthetic oligonucleotide
cucccaagggcaccgaauu

SEQ ID NO: 2329983 - RNA, 19 nt, Artificial Sequence
  Description of Artificial Sequence: Synthetic oligonucleotide
gggccagguacacguuccc

SEQ ID NO: 2329984 - RNA, 19 nt, Artificial Sequence
  Description of Artificial Sequence: Synthetic oligonucleotide
gcucaucuaaucucuguuu

SEQ ID NO: 2329985 - RNA, 19 nt, Artificial Sequence
  Description of Artificial Sequence: Synthetic oligonucleotide
gugcgacuggaucucuacu

SEQ ID NO: 2329986 - RNA, 19 nt, Artificial Sequence
  Description of Artificial Sequence: Synthetic oligonucleotide
ccgaauucggaaaccuaaa

SEQ ID NO: 2329987 - RNA, 19 nt, Artificial Sequence
  Description of Artificial Sequence: Synthetic oligonucleotide
ggggcaaguaguccagagu

SEQ ID NO: 2329988 - RNA, 19 nt, Artificial Sequence
  Description of Artificial Sequence: Synthetic oligonucleotide
ccggagagcucccugaaua

SEQ ID NO: 2329989 - RNA, 19 nt, Artificial Sequence
  Description of Artificial Sequence: Synthetic oligonucleotide
ggcacaagccuacgggagu

SEQ ID NO: 2329990 - RNA, 19 nt, Artificial Sequence
  Description of Artificial Sequence: Synthetic oligonucleotide
ggagagcucccugaauaaa

SEQ ID NO: 2329991 - RNA, 19 nt, Artificial Sequence
  Description of Artificial Sequence: Synthetic oligonucleotide
gcguaggauauucgggugu

SEQ ID NO: 2329992 - RNA, 19 nt, Artificial Sequence
  Description of Artificial Sequence: Synthetic oligonucleotide
cgaauucggaaaccuaaaa

SEQ ID NO: 2329993 - RNA, 19 nt, Artificial Sequence
  Description of Artificial Sequence: Synthetic oligonucleotide
cgaucuuuacuucaccccu

SEQ ID NO: 2329994 - RNA, 19 nt, Artificial Sequence
  Description of Artificial Sequence: Synthetic oligonucleotide
acccggcgaucaucgugga

SEQ ID NO: 2329995 - RNA, 19 nt, Artificial Sequence
  Description of Artificial Sequence: Synthetic oligonucleotide
ggaugguaccuaagaagcu

SEQ ID NO: 2329996 - RNA, 19 nt, Artificial Sequence
  Description of Artificial Sequence: Synthetic oligonucleotide
ugagccccagcaggagauu

SEQ ID NO: 2329997 - RNA, 19 nt, Artificial Sequence
  Description of Artificial Sequence: Synthetic oligonucleotide
gccgucugacaaacaggag

SEQ ID NO: 2329998 - RNA, 19 nt, Artificial Sequence
  Description of Artificial Sequence: Synthetic oligonucleotide
gaucaucguggaaguaguu

SEQ ID NO: 2329999 - RNA, 19 nt, Artificial Sequence
  Description of Artificial Sequence: Synthetic oligonucleotide
ccugggcucccaagggcac

SEQ ID NO: 2330000 - RNA, 19 nt, Artificial Sequence
  Description of Artificial Sequence: Synthetic oligonucleotide
caucugccaacuccucuau

SEQ ID NO: 2330001 - RNA, 19 nt, Artificial Sequence
  Description of Artificial Sequence: Synthetic oligonucleotide
gcacccaggggugcuucag

SEQ ID NO: 2330002 - RNA, 19 nt, Artificial Sequence
  Description of Artificial Sequence: Synthetic oligonucleotide
guuguaggugcgacuggau

SEQ ID NO: 2330003 - RNA, 19 nt, Artificial Sequence
  Description of Artificial Sequence: Synthetic oligonucleotide
cucuauuaucguggcugua

SEQ ID NO: 2330004 - RNA, 19 nt, Artificial Sequence
  Description of Artificial Sequence: Synthetic oligonucleotide
gcaccgaauucggaaaccu

SEQ ID NO: 2330005 - RNA, 19 nt, Artificial Sequence
  Description of Artificial Sequence: Synthetic oligonucleotide
cugcuuucaaaggguggcu

SEQ ID NO: 2330006 - RNA, 19 nt, Artificial Sequence
  Description of Artificial Sequence: Synthetic oligonucleotide
guccagccgcucugaggga

SEQ ID NO: 2330007 - RNA, 19 nt, Artificial Sequence
  Description of Artificial Sequence: Synthetic oligonucleotide
ggguguuguaggugcgacu

SEQ ID NO: 2330008 - RNA, 19 nt, Artificial Sequence
  Description of Artificial Sequence: Synthetic oligonucleotide
ccagccgcucugagggaug

SEQ ID NO: 2330009 - RNA, 19 nt, Artificial Sequence
  Description of Artificial Sequence: Synthetic oligonucleotide
cuccucuauuaucguggcu

SEQ ID NO: 2330010 - RNA, 19 nt, Artificial Sequence
  Description of Artificial Sequence: Synthetic oligonucleotide
cucguuguggcugcugcuu

SEQ ID NO: 2330011 - RNA, 19 nt, Artificial Sequence
  Description of Artificial Sequence: Synthetic oligonucleotide
ggacgcccgaugucaaagu

SEQ ID NO: 2330012 - RNA, 19 nt, Artificial Sequence
  Description of Artificial Sequence: Synthetic oligonucleotide
aggugcgacuggaucucua

SEQ ID NO: 2330013 - RNA, 19 nt, Artificial Sequence
  Description of Artificial Sequence: Synthetic oligonucleotide
ccggagcuggugcuccaac

SEQ ID NO: 2330014 - RNA, 19 nt, Artificial Sequence
  Description of Artificial Sequence: Synthetic oligonucleotide
ccaacuccucuauuaucgu

SEQ ID NO: 2330015 - RNA, 19 nt, Artificial Sequence
  Description of Artificial Sequence: Synthetic oligonucleotide
ggaagccgucugacaaaca

SEQ ID NO: 2330016 - RNA, 19 nt, Artificial Sequence
  Description of Artificial Sequence: Synthetic oligonucleotide
cgaugaaaugguuuuccuu

SEQ ID NO: 2330017 - RNA, 19 nt, Artificial Sequence
  Description of Artificial Sequence: Synthetic oligonucleotide
ggcucccaagggcaccgaa

SEQ ID NO: 2330018 - RNA, 19 nt, Artificial Sequence
  Description of Artificial Sequence: Synthetic oligonucleotide
cggguguuguaggugcgac

SEQ ID NO: 2330019 - RNA, 19 nt, Artificial Sequence
  Description of Artificial Sequence: Synthetic oligonucleotide
ggccacgaugaaaugguuu

SEQ ID NO: 2330020 - RNA, 19 nt, Artificial Sequence
  Description of Artificial Sequence: Synthetic oligonucleotide
ucgcccuguggagcauauu

SEQ ID NO: 2330021 - RNA, 19 nt, Artificial Sequence
  Description of Artificial Sequence: Synthetic oligonucleotide
cucgcccuguggagcauau

SEQ ID NO: 2330022 - RNA, 19 nt, Artificial Sequence
  Description of Artificial Sequence: Synthetic oligonucleotide
gcuguacgcugcucaucua

SEQ ID NO: 2330023 - RNA, 19 nt, Artificial Sequence
  Description of Artificial Sequence: Synthetic oligonucleotide
ggaccuucagggccacgau

SEQ ID NO: 2330024 - RNA, 19 nt, Artificial Sequence
  Description of Artificial Sequence: Synthetic oligonucleotide
cacaagccuacgggagugu

SEQ ID NO: 2330025 - RNA, 19 nt, Artificial Sequence
  Description of Artificial Sequence: Synthetic oligonucleotide
gcccggagagcucccugaa

SEQ ID NO: 2330026 - RNA, 19 nt, Artificial Sequence
  Description of Artificial Sequence: Synthetic oligonucleotide
agcucgcccuguggagcau

SEQ ID NO: 2330027 - RNA, 19 nt, Artificial Sequence
  Description of Artificial Sequence: Synthetic oligonucleotide
ccuucucguuauacguccu

SEQ ID NO: 2330028 - RNA, 19 nt, Artificial Sequence
  Description of Artificial Sequence: Synthetic oligonucleotide
ggcgaucaucguggaagua

SEQ ID NO: 2330029 - RNA, 19 nt, Artificial Sequence
  Description of Artificial Sequence: Synthetic oligonucleotide
ggagauucucuggcuugau

SEQ ID NO: 2330030 - RNA, 19 nt, Artificial Sequence
  Description of Artificial Sequence: Synthetic oligonucleotide
gcucccaagggcaccgaau

SEQ ID NO: 2330031 - RNA, 19 nt, Artificial Sequence
  Description of Artificial Sequence: Synthetic oligonucleotide
gcucgcccuguggagcaua

SEQ ID NO: 2330032 - RNA, 19 nt, Artificial Sequence
  Description of Artificial Sequence: Synthetic oligonucleotide
cccggcgaucaucguggaa

SEQ ID NO: 2330033 - RNA, 19 nt, Artificial Sequence
  Description of Artificial Sequence: Synthetic oligonucleotide
gggccacgaugaaaugguu

SEQ ID NO: 2330034 - RNA, 19 nt, Artificial Sequence
  Description of Artificial Sequence: Synthetic oligonucleotide
cccggagagcucccugaau

SEQ ID NO: 2330035 - RNA, 19 nt, Artificial Sequence
  Description of Artificial Sequence: Synthetic oligonucleotide
gcccgaugucaaaguccuu

SEQ ID NO: 2330036 - RNA, 19 nt, Artificial Sequence
  Description of Artificial Sequence: Synthetic oligonucleotide
uggugaaccccgaagaugc

SEQ ID NO: 2330037 - RNA, 19 nt, Artificial Sequence
  Description of Artificial Sequence: Synthetic oligonucleotide
ugaaggauuguggugaacc

SEQ ID NO: 2330038 - RNA, 19 nt, Artificial Sequence
  Description of Artificial Sequence: Synthetic oligonucleotide
accccgaagaugcugaugg

SEQ ID NO: 2330039 - RNA, 19 nt, Artificial Sequence
  Description of Artificial Sequence: Synthetic oligonucleotide
aggaagagcuucugggacc

SEQ ID NO: 2330040 - RNA, 19 nt, Artificial Sequence
  Description of Artificial Sequence: Synthetic oligonucleotide
guaggaucgucugugaccg

SEQ ID NO: 2330041 - RNA, 19 nt, Artificial Sequence
  Description of Artificial Sequence: Synthetic oligonucleotide
ugaaccccgaagaugcuga

SEQ ID NO: 2330042 - RNA, 19 nt, Artificial Sequence
  Description of Artificial Sequence: Synthetic oligonucleotide
ggggucauagaccucaggg

SEQ ID NO: 2330043 - RNA, 19 nt, Artificial Sequence
  Description of Artificial Sequence: Synthetic oligonucleotide
cagacauucccuuugggga

SEQ ID NO: 2330044 - RNA, 19 nt, Artificial Sequence
  Description of Artificial Sequence: Synthetic oligonucleotide
gcagacauucccuuugggg

SEQ ID NO: 2330045 - RNA, 19 nt, Artificial Sequence
  Description of Artificial Sequence: Synthetic oligonucleotide
ugauggcgcagacauuccc

SEQ ID NO: 2330046 - RNA, 19 nt, Artificial Sequence
  Description of Artificial Sequence: Synthetic oligonucleotide
uguggugaaccccgaagau

SEQ ID NO: 2330047 - RNA, 19 nt, Artificial Sequence
  Description of Artificial Sequence: Synthetic oligonucleotide
ggucauagaccucaggguc

SEQ ID NO: 2330048 - RNA, 19 nt, Artificial Sequence
  Description of Artificial Sequence: Synthetic oligonucleotide
aggaucgucugugaccggg

SEQ ID NO: 2330049 - RNA, 19 nt, Artificial Sequence
  Description of Artificial Sequence: Synthetic oligonucleotide
agacauucccuuuggggau

SEQ ID NO: 2330050 - RNA, 19 nt, Artificial Sequence
  Description of Artificial Sequence: Synthetic oligonucleotide
ucauagaccucagggucug

SEQ ID NO: 2330051 - RNA, 19 nt, Artificial Sequence
  Description of Artificial Sequence: Synthetic oligonucleotide
ggugcagcggcguaggauc

SEQ ID NO: 2330052 - RNA, 19 nt, Artificial Sequence
  Description of Artificial Sequence: Synthetic oligonucleotide
agcggcguaggaucgucug

SEQ ID NO: 2330053 - RNA, 19 nt, Artificial Sequence
  Description of Artificial Sequence: Synthetic oligonucleotide
aggggucauagaccucagg

SEQ ID NO: 2330054 - RNA, 19 nt, Artificial Sequence
  Description of Artificial Sequence: Synthetic oligonucleotide
gcugauggcgcagacauuc

SEQ ID NO: 2330055 - RNA, 19 nt, Artificial Sequence
  Description of Artificial Sequence: Synthetic oligonucleotide
cguaggaucgucugugacc

SEQ ID NO: 2330056 - RNA, 19 nt, Artificial Sequence
  Description of Artificial Sequence: Synthetic oligonucleotide
aaccccgaagaugcugaug

SEQ ID NO: 2330057 - RNA, 19 nt, Artificial Sequence
  Description of Artificial Sequence: Synthetic oligonucleotide
ggcgcagacauucccuuug

SEQ ID NO: 2330058 - RNA, 19 nt, Artificial Sequence
  Description of Artificial Sequence: Synthetic oligonucleotide
gugaaccccgaagaugcug

SEQ ID NO: 2330059 - RNA, 19 nt, Artificial Sequence
  Description of Artificial Sequence: Synthetic oligonucleotide
auggcgcagacauucccuu

SEQ ID NO: 2330060 - RNA, 19 nt, Artificial Sequence
  Description of Artificial Sequence: Synthetic oligonucleotide
uaggaucgucugugaccgg

SEQ ID NO: 2330061 - RNA, 19 nt, Artificial Sequence
  Description of Artificial Sequence: Synthetic oligonucleotide
gauggcgcagacauucccu

SEQ ID NO: 2330062 - RNA, 19 nt, Artificial Sequence
  Description of Artificial Sequence: Synthetic oligonucleotide
gcgcagacauucccuuugg

SEQ ID NO: 2330063 - RNA, 19 nt, Artificial Sequence
  Description of Artificial Sequence: Synthetic oligonucleotide
gugcagcggcguaggaucg

SEQ ID NO: 2330064 - RNA, 19 nt, Artificial Sequence
  Description of Artificial Sequence: Synthetic oligonucleotide
ggaucgucugugaccgggg

SEQ ID NO: 2330065 - RNA, 19 nt, Artificial Sequence
  Description of Artificial Sequence: Synthetic oligonucleotide
gucauagaccucagggucu

SEQ ID NO: 2330066 - RNA, 19 nt, Artificial Sequence
  Description of Artificial Sequence: Synthetic oligonucleotide
gggucauagaccucagggu

SEQ ID NO: 2330067 - RNA, 19 nt, Artificial Sequence
  Description of Artificial Sequence: Synthetic oligonucleotide
cugaaggauuguggugaac

SEQ ID NO: 2330068 - RNA, 19 nt, Artificial Sequence
  Description of Artificial Sequence: Synthetic oligonucleotide
cauagaccucagggucugg

SEQ ID NO: 2330069 - RNA, 19 nt, Artificial Sequence
  Description of Artificial Sequence: Synthetic oligonucleotide
gcguaggaucgucugugac

SEQ ID NO: 2330070 - RNA, 19 nt, Artificial Sequence
  Description of Artificial Sequence: Synthetic oligonucleotide
uggcgcagacauucccuuu

SEQ ID NO: 2330071 - RNA, 19 nt, Artificial Sequence
  Description of Artificial Sequence: Synthetic oligonucleotide
agagcuucugggaccuuuu

SEQ ID NO: 2330072 - RNA, 19 nt, Artificial Sequence
  Description of Artificial Sequence: Synthetic oligonucleotide
ugcagcggcguaggaucgu

SEQ ID NO: 2330073 - RNA, 19 nt, Artificial Sequence
  Description of Artificial Sequence: Synthetic oligonucleotide
ggcguaggaucgucuguga

SEQ ID NO: 2330074 - RNA, 19 nt, Artificial Sequence
  Description of Artificial Sequence: Synthetic oligonucleotide
cgcagacauucccuuuggg

SEQ ID NO: 2330075 - RNA, 19 nt, Artificial Sequence
  Description of Artificial Sequence: Synthetic oligonucleotide
gaaccccgaagaugcugau

SEQ ID NO: 2330076 - RNA, 19 nt, Artificial Sequence
  Description of Artificial Sequence: Synthetic oligonucleotide
cauucccuuuggggaugac

SEQ ID NO: 2330077 - RNA, 19 nt, Artificial Sequence
  Description of Artificial Sequence: Synthetic oligonucleotide
cggcguaggaucgucugug

SEQ ID NO: 2330078 - RNA, 19 nt, Artificial Sequence
  Description of Artificial Sequence: Synthetic oligonucleotide
gcagcggcguaggaucguc

SEQ ID NO: 2330079 - RNA, 19 nt, Artificial Sequence
  Description of Artificial Sequence: Synthetic oligonucleotide
cagcggcguaggaucgucu

SEQ ID NO: 2330080 - RNA, 19 nt, Artificial Sequence
  Description of Artificial Sequence: Synthetic oligonucleotide
gcggcguaggaucgucugu

SEQ ID NO: 2330081 - RNA, 19 nt, Artificial Sequence
  Description of Artificial Sequence: Synthetic oligonucleotide
ggugaaccccgaagaugcu

SEQ ID NO: 2330082 - RNA, 19 nt, Artificial Sequence
  Description of Artificial Sequence: Synthetic oligonucleotide
aaugucauugaacacagcg

SEQ ID NO: 2330083 - RNA, 19 nt, Artificial Sequence
  Description of Artificial Sequence: Synthetic oligonucleotide
uauaagaucaaccuuuucc

SEQ ID NO: 2330084 - RNA, 19 nt, Artificial Sequence
  Description of Artificial Sequence: Synthetic oligonucleotide
aucaaaagaugacagauac

SEQ ID NO: 2330085 - RNA, 19 nt, Artificial Sequence
  Description of Artificial Sequence: Synthetic oligonucleotide
aacgaaaugucauugaaca

SEQ ID NO: 2330086 - RNA, 19 nt, Artificial Sequence
  Description of Artificial Sequence: Synthetic oligonucleotide
aaaacggcccuccacaccc

SEQ ID NO: 2330087 - RNA, 19 nt, Artificial Sequence
  Description of Artificial Sequence: Synthetic oligonucleotide
aaggucaaacuccacaagc

SEQ ID NO: 2330088 - RNA, 19 nt, Artificial Sequence
  Description of Artificial Sequence: Synthetic oligonucleotide
agggauaucauacaggauc

SEQ ID NO: 2330089 - RNA, 19 nt, Artificial Sequence
  Description of Artificial Sequence: Synthetic oligonucleotide
aagaucaaccuuuuccacc

SEQ ID NO: 2330090 - RNA, 19 nt, Artificial Sequence
  Description of Artificial Sequence: Synthetic oligonucleotide
ugucauugaacacagcggg

SEQ ID NO: 2330091 - RNA, 19 nt, Artificial Sequence
  Description of Artificial Sequence: Synthetic oligonucleotide
aacguccuagagcagaccc

SEQ ID NO: 2330092 - RNA, 19 nt, Artificial Sequence
  Description of Artificial Sequence: Synthetic oligonucleotide
aaaguagcaguccacccac

SEQ ID NO: 2330093 - RNA, 19 nt, Artificial Sequence
  Description of Artificial Sequence: Synthetic oligonucleotide
auugaugucugacaagugg

SEQ ID NO: 2330094 - RNA, 19 nt, Artificial Sequence
  Description of Artificial Sequence: Synthetic oligonucleotide
aaacuugaucuccagcucg

SEQ ID NO: 2330095 - RNA, 19 nt, Artificial Sequence
  Description of Artificial Sequence: Synthetic oligonucleotide
aacacagcgggguacuugc

SEQ ID NO: 2330096 - RNA, 19 nt, Artificial Sequence
  Description of Artificial Sequence: Synthetic oligonucleotide
cuugcuugugaacagagcg

SEQ ID NO: 2330097 - RNA, 19 nt, Artificial Sequence
  Description of Artificial Sequence: Synthetic oligonucleotide
agaacuuucuucaaagagc

SEQ ID NO: 2330098 - RNA, 19 nt, Artificial Sequence
  Description of Artificial Sequence: Synthetic oligonucleotide
uuuucagcgagucuuggag

SEQ ID NO: 2330099 - RNA, 19 nt, Artificial Sequence
  Description of Artificial Sequence: Synthetic oligonucleotide
uucacaauguguuucaccu

SEQ ID NO: 2330100 - RNA, 19 nt, Artificial Sequence
  Description of Artificial Sequence: Synthetic oligonucleotide
agucuuucuaaccccaggc

SEQ ID NO: 2330101 - RNA, 19 nt, Artificial Sequence
  Description of Artificial Sequence: Synthetic oligonucleotide
ugaauugacaagcugcugu

SEQ ID NO: 2330102 - RNA, 19 nt, Artificial Sequence
  Description of Artificial Sequence: Synthetic oligonucleotide
uugucuauaagaucaaccu

SEQ ID NO: 2330103 - RNA, 19 nt, Artificial Sequence
  Description of Artificial Sequence: Synthetic oligonucleotide
aaacuggacccucugauug

SEQ ID NO: 2330104 - RNA, 19 nt, Artificial Sequence
  Description of Artificial Sequence: Synthetic oligonucleotide
gauacuccaguucacaaug

SEQ ID NO: 2330105 - RNA, 19 nt, Artificial Sequence
  Description of Artificial Sequence: Synthetic oligonucleotide
ucauacaggaucauagcca

SEQ ID NO: 2330106 - RNA, 19 nt, Artificial Sequence
  Description of Artificial Sequence: Synthetic oligonucleotide
acuuucuucaaagagcuuc

SEQ ID NO: 2330107 - RNA, 19 nt, Artificial Sequence
  Description of Artificial Sequence: Synthetic oligonucleotide
aaaagaugacagauacucc

SEQ ID NO: 2330108 - RNA, 19 nt, Artificial Sequence
  Description of Artificial Sequence: Synthetic oligonucleotide
uugcuuaaggucaaacucc

SEQ ID NO: 2330109 - RNA, 19 nt, Artificial Sequence
  Description of Artificial Sequence: Synthetic oligonucleotide
ugucauagaaaucauucuc

SEQ ID NO: 2330110 - RNA, 19 nt, Artificial Sequence
  Description of Artificial Sequence: Synthetic oligonucleotide
agccaauucgaucuugagc

SEQ ID NO: 2330111 - RNA, 19 nt, Artificial Sequence
  Description of Artificial Sequence: Synthetic oligonucleotide
uggauguucaaacuugucu

SEQ ID NO: 2330112 - RNA, 19 nt, Artificial Sequence
  Description of Artificial Sequence: Synthetic oligonucleotide
auagccagucuuucuaacc

SEQ ID NO: 2330113 - RNA, 19 nt, Artificial Sequence
  Description of Artificial Sequence: Synthetic oligonucleotide
ugacagauacuccaguuca

SEQ ID NO: 2330114 - RNA, 19 nt, Artificial Sequence
  Description of Artificial Sequence: Synthetic oligonucleotide
ugacaaguggaacugcucc

SEQ ID NO: 2330115 - RNA, 19 nt, Artificial Sequence
  Description of Artificial Sequence: Synthetic oligonucleotide
uggguaaagggaaaguagc

SEQ ID NO: 2330116 - RNA, 19 nt, Artificial Sequence
  Description of Artificial Sequence: Synthetic oligonucleotide
uuaucaaaagaugacagau

SEQ ID NO: 2330117 - RNA, 19 nt, Artificial Sequence
  Description of Artificial Sequence: Synthetic oligonucleotide
auaucauacaggaucauag

SEQ ID NO: 2330118 - RNA, 19 nt, Artificial Sequence
  Description of Artificial Sequence: Synthetic oligonucleotide
ugcuucucaaaagugaucc

SEQ ID NO: 2330119 - RNA, 19 nt, Artificial Sequence
  Description of Artificial Sequence: Synthetic oligonucleotide
aauguguuucaccuuuuca

SEQ ID NO: 2330120 - RNA, 19 nt, Artificial Sequence
  Description of Artificial Sequence: Synthetic oligonucleotide
ucuuggagcucugugaggg

SEQ ID NO: 2330121 - RNA, 19 nt, Artificial Sequence
  Description of Artificial Sequence: Synthetic oligonucleotide
uugagcaccagcugaauug

SEQ ID NO: 2330122 - RNA, 19 nt, Artificial Sequence
  Description of Artificial Sequence: Synthetic oligonucleotide
uuaaggucaaacuccacaa

SEQ ID NO: 2330123 - RNA, 19 nt, Artificial Sequence
  Description of Artificial Sequence: Synthetic oligonucleotide
agagcgagaacuuucuuca

SEQ ID NO: 2330124 - RNA, 19 nt, Artificial Sequence
  Description of Artificial Sequence: Synthetic oligonucleotide
uugaugucugacaagugga

SEQ ID NO: 2330125 - RNA, 19 nt, Artificial Sequence
  Description of Artificial Sequence: Synthetic oligonucleotide
ugucagggauaucauacag

SEQ ID NO: 2330126 - RNA, 19 nt, Artificial Sequence
  Description of Artificial Sequence: Synthetic oligonucleotide
cauacaggaucauagccag

SEQ ID NO: 2330127 - RNA, 19 nt, Artificial Sequence
  Description of Artificial Sequence: Synthetic oligonucleotide
cuuuggauguucaaacuug

SEQ ID NO: 2330128 - RNA, 19 nt, Artificial Sequence
  Description of Artificial Sequence: Synthetic oligonucleotide
ucauagaaaucauucucca

SEQ ID NO: 2330129 - RNA, 19 nt, Artificial Sequence
  Description of Artificial Sequence: Synthetic oligonucleotide
acuacugacuucucucugg

SEQ ID NO: 2330130 - RNA, 19 nt, Artificial Sequence
  Description of Artificial Sequence: Synthetic oligonucleotide
agagcagacccauuuauca

SEQ ID NO: 2330131 - RNA, 19 nt, Artificial Sequence
  Description of Artificial Sequence: Synthetic oligonucleotide
ugugaacagagcgagaacu

SEQ ID NO: 2330132 - RNA, 19 nt, Artificial Sequence
  Description of Artificial Sequence: Synthetic oligonucleotide
cagccaagaacuucaaucc

SEQ ID NO: 2330133 - RNA, 19 nt, Artificial Sequence
  Description of Artificial Sequence: Synthetic oligonucleotide
uagaaaucauucuccaugu

SEQ ID NO: 2330134 - RNA, 19 nt, Artificial Sequence
  Description of Artificial Sequence: Synthetic oligonucleotide
ucgaucuugagcaccagcu

SEQ ID NO: 2330135 - RNA, 19 nt, Artificial Sequence
  Description of Artificial Sequence: Synthetic oligonucleotide
uaucauacaggaucauagc

SEQ ID NO: 2330136 - RNA, 19 nt, Artificial Sequence
  Description of Artificial Sequence: Synthetic oligonucleotide
gaaaucauucuccauguaa

SEQ ID NO: 2330137 - RNA, 19 nt, Artificial Sequence
  Description of Artificial Sequence: Synthetic oligonucleotide
uaaagggaaaguagcaguc

SEQ ID NO: 2330138 - RNA, 19 nt, Artificial Sequence
  Description of Artificial Sequence: Synthetic oligonucleotide
uagccagucuuucuaaccc

SEQ ID NO: 2330139 - RNA, 19 nt, Artificial Sequence
  Description of Artificial Sequence: Synthetic oligonucleotide
agacccauuuaucaaaaga

SEQ ID NO: 2330140 - RNA, 19 nt, Artificial Sequence
  Description of Artificial Sequence: Synthetic oligonucleotide
agaucaaccuuuuccacca

SEQ ID NO: 2330141 - RNA, 19 nt, Artificial Sequence
  Description of Artificial Sequence: Synthetic oligonucleotide
uaagugaugcgguagcagu

SEQ ID NO: 2330142 - RNA, 19 nt, Artificial Sequence
  Description of Artificial Sequence: Synthetic oligonucleotide
uuuggauguucaaacuugu

SEQ ID NO: 2330143 - RNA, 19 nt, Artificial Sequence
  Description of Artificial Sequence: Synthetic oligonucleotide
gucauagaaaucauucucc

SEQ ID NO: 2330144 - RNA, 19 nt, Artificial Sequence
  Description of Artificial Sequence: Synthetic oligonucleotide
aacuucaauccauucucca

SEQ ID NO: 2330145 - RNA, 19 nt, Artificial Sequence
  Description of Artificial Sequence: Synthetic oligonucleotide
gccaauucgaucuugagca

SEQ ID NO: 2330146 - RNA, 19 nt, Artificial Sequence
  Description of Artificial Sequence: Synthetic oligonucleotide
ucguccucacuccagaaga

SEQ ID NO: 2330147 - RNA, 19 nt, Artificial Sequence
  Description of Artificial Sequence: Synthetic oligonucleotide
aucauucuccauguaauuc

SEQ ID NO: 2330148 - RNA, 19 nt, Artificial Sequence
  Description of Artificial Sequence: Synthetic oligonucleotide
acgaaaugucauugaacac

SEQ ID NO: 2330149 - RNA, 19 nt, Artificial Sequence
  Description of Artificial Sequence: Synthetic oligonucleotide
cuccauguaauucucugag

SEQ ID NO: 2330150 - RNA, 19 nt, Artificial Sequence
  Description of Artificial Sequence: Synthetic oligonucleotide
uccucacuccagaagaggc

SEQ ID NO: 2330151 - RNA, 19 nt, Artificial Sequence
  Description of Artificial Sequence: Synthetic oligonucleotide
ucuaaccccaggccaaaag

SEQ ID NO: 2330152 - RNA, 19 nt, Artificial Sequence
  Description of Artificial Sequence: Synthetic oligonucleotide
ucuuuggauguucaaacuu

SEQ ID NO: 2330153 - RNA, 19 nt, Artificial Sequence
  Description of Artificial Sequence: Synthetic oligonucleotide
gacacuacugacuucucuc

SEQ ID NO: 2330154 - RNA, 19 nt, Artificial Sequence
  Description of Artificial Sequence: Synthetic oligonucleotide
ugcuuaaggucaaacucca

SEQ ID NO: 2330155 - RNA, 19 nt, Artificial Sequence
  Description of Artificial Sequence: Synthetic oligonucleotide
cauguaauucucugagggc

SEQ ID NO: 2330156 - RNA, 19 nt, Artificial Sequence
  Description of Artificial Sequence: Synthetic oligonucleotide
gaaaguagcaguccaccca

SEQ ID NO: 2330157 - RNA, 19 nt, Artificial Sequence
  Description of Artificial Sequence: Synthetic oligonucleotide
aguagcaguccacccaccg

SEQ ID NO: 2330158 - RNA, 19 nt, Artificial Sequence
  Description of Artificial Sequence: Synthetic oligonucleotide
cuccacaagcuucacagcc

SEQ ID NO: 2330159 - RNA, 19 nt, Artificial Sequence
  Description of Artificial Sequence: Synthetic oligonucleotide
ccauguaauucucugaggg

SEQ ID NO: 2330160 - RNA, 19 nt, Artificial Sequence
  Description of Artificial Sequence: Synthetic oligonucleotide
cuaaccccaggccaaaagc

SEQ ID NO: 2330161 - RNA, 19 nt, Artificial Sequence
  Description of Artificial Sequence: Synthetic oligonucleotide
uauuuccugaacguccuag

SEQ ID NO: 2330162 - RNA, 19 nt, Artificial Sequence
  Description of Artificial Sequence: Synthetic oligonucleotide
ucugacaaguggaacugcu

SEQ ID NO: 2330163 - RNA, 19 nt, Artificial Sequence
  Description of Artificial Sequence: Synthetic oligonucleotide
auguaauucucugagggca

SEQ ID NO: 2330164 - RNA, 19 nt, Artificial Sequence
  Description of Artificial Sequence: Synthetic oligonucleotide
agcccagccaauucgaucu

SEQ ID NO: 2330165 - RNA, 19 nt, Artificial Sequence
  Description of Artificial Sequence: Synthetic oligonucleotide
agaacgaaaugucauugaa

SEQ ID NO: 2330166 - RNA, 19 nt, Artificial Sequence
  Description of Artificial Sequence: Synthetic oligonucleotide
ugcuugugaacagagcgag

SEQ ID NO: 2330167 - RNA, 19 nt, Artificial Sequence
  Description of Artificial Sequence: Synthetic oligonucleotide
agaugugucauaagccucg

SEQ ID NO: 2330168 - RNA, 19 nt, Artificial Sequence
  Description of Artificial Sequence: Synthetic oligonucleotide
aaggaaggauggguaaagg

SEQ ID NO: 2330169 - RNA, 19 nt, Artificial Sequence
  Description of Artificial Sequence: Synthetic oligonucleotide
uguccguuccauguggcgg

SEQ ID NO: 2330170 - RNA, 19 nt, Artificial Sequence
  Description of Artificial Sequence: Synthetic oligonucleotide
uaagaucaaccuuuuccac

SEQ ID NO: 2330171 - RNA, 19 nt, Artificial Sequence
  Description of Artificial Sequence: Synthetic oligonucleotide
auugaacacagcgggguac

SEQ ID NO: 2330172 - RNA, 19 nt, Artificial Sequence
  Description of Artificial Sequence: Synthetic oligonucleotide
ugucuauaagaucaaccuu

SEQ ID NO: 2330173 - RNA, 19 nt, Artificial Sequence
  Description of Artificial Sequence: Synthetic oligonucleotide
uggacccucugauugaugu

SEQ ID NO: 2330174 - RNA, 19 nt, Artificial Sequence
  Description of Artificial Sequence: Synthetic oligonucleotide
uccaccaaacuugaucucc

SEQ ID NO: 2330175 - RNA, 19 nt, Artificial Sequence
  Description of Artificial Sequence: Synthetic oligonucleotide
uuucagcgagucuuggagc

SEQ ID NO: 2330176 - RNA, 19 nt, Artificial Sequence
  Description of Artificial Sequence: Synthetic oligonucleotide
gaaggaaggauggguaaag

SEQ ID NO: 2330177 - RNA, 19 nt, Artificial Sequence
  Description of Artificial Sequence: Synthetic oligonucleotide
aauucgaucuugagcacca

SEQ ID NO: 2330178 - RNA, 19 nt, Artificial Sequence
  Description of Artificial Sequence: Synthetic oligonucleotide
gaaccuccaguccaucucc

SEQ ID NO: 2330179 - RNA, 19 nt, Artificial Sequence
  Description of Artificial Sequence: Synthetic oligonucleotide
cauuuaucaaaagaugaca

SEQ ID NO: 2330180 - RNA, 19 nt, Artificial Sequence
  Description of Artificial Sequence: Synthetic oligonucleotide
uacaggaucauagccaguc

SEQ ID NO: 2330181 - RNA, 19 nt, Artificial Sequence
  Description of Artificial Sequence: Synthetic oligonucleotide
ucuauaagaucaaccuuuu

SEQ ID NO: 2330182 - RNA, 19 nt, Artificial Sequence
  Description of Artificial Sequence: Synthetic oligonucleotide
uugcuugugaacagagcga

SEQ ID NO: 2330183 - RNA, 19 nt, Artificial Sequence
  Description of Artificial Sequence: Synthetic oligonucleotide
ucuugcuugugaacagagc

SEQ ID NO: 2330184 - RNA, 19 nt, Artificial Sequence
  Description of Artificial Sequence: Synthetic oligonucleotide
auggguaaagggaaaguag

SEQ ID NO: 2330185 - RNA, 19 nt, Artificial Sequence
  Description of Artificial Sequence: Synthetic oligonucleotide
gaacgaaaugucauugaac

SEQ ID NO: 2330186 - RNA, 19 nt, Artificial Sequence
  Description of Artificial Sequence: Synthetic oligonucleotide
agggcuucagccuuggaaa

SEQ ID NO: 2330187 - RNA, 19 nt, Artificial Sequence
  Description of Artificial Sequence: Synthetic oligonucleotide
guuucaccuuuucagcgag

SEQ ID NO: 2330188 - RNA, 19 nt, Artificial Sequence
  Description of Artificial Sequence: Synthetic oligonucleotide
uuccauguggcgguaagug

SEQ ID NO: 2330189 - RNA, 19 nt, Artificial Sequence
  Description of Artificial Sequence: Synthetic oligonucleotide
acaagcugcuguuccauca

SEQ ID NO: 2330190 - RNA, 19 nt, Artificial Sequence
  Description of Artificial Sequence: Synthetic oligonucleotide
agucucuugcuugugaaca

SEQ ID NO: 2330191 - RNA, 19 nt, Artificial Sequence
  Description of Artificial Sequence: Synthetic oligonucleotide
agugaugcgguagcagugg

SEQ ID NO: 2330192 - RNA, 19 nt, Artificial Sequence
  Description of Artificial Sequence: Synthetic oligonucleotide
ugaacguccuagagcagac

SEQ ID NO: 2330193 - RNA, 19 nt, Artificial Sequence
  Description of Artificial Sequence: Synthetic oligonucleotide
ugucauaagccucgucagu

SEQ ID NO: 2330194 - RNA, 19 nt, Artificial Sequence
  Description of Artificial Sequence: Synthetic oligonucleotide
uagcaguccacccaccgaa

SEQ ID NO: 2330195 - RNA, 19 nt, Artificial Sequence
  Description of Artificial Sequence: Synthetic oligonucleotide
guggcgguaagugaugcgg

SEQ ID NO: 2330196 - RNA, 19 nt, Artificial Sequence
  Description of Artificial Sequence: Synthetic oligonucleotide
uccuagagcagacccauuu

SEQ ID NO: 2330197 - RNA, 19 nt, Artificial Sequence
  Description of Artificial Sequence: Synthetic oligonucleotide
cagagcgagaacuuucuuc

SEQ ID NO: 2330198 - RNA, 19 nt, Artificial Sequence
  Description of Artificial Sequence: Synthetic oligonucleotide
cucacuccagaagaggcgg

SEQ ID NO: 2330199 - RNA, 19 nt, Artificial Sequence
  Description of Artificial Sequence: Synthetic oligonucleotide
agauacuccaguucacaau

SEQ ID NO: 2330200 - RNA, 19 nt, Artificial Sequence
  Description of Artificial Sequence: Synthetic oligonucleotide
gucuuucuaaccccaggcc

SEQ ID NO: 2330201 - RNA, 19 nt, Artificial Sequence
  Description of Artificial Sequence: Synthetic oligonucleotide
aacagagcgagaacuuucu

SEQ ID NO: 2330202 - RNA, 19 nt, Artificial Sequence
  Description of Artificial Sequence: Synthetic oligonucleotide
uccacaagcuucacagccu

SEQ ID NO: 2330203 - RNA, 19 nt, Artificial Sequence
  Description of Artificial Sequence: Synthetic oligonucleotide
gguaaagggaaaguagcag

SEQ ID NO: 2330204 - RNA, 19 nt, Artificial Sequence
  Description of Artificial Sequence: Synthetic oligonucleotide
gaagcgcucguccucacuc

SEQ ID NO: 2330205 - RNA, 19 nt, Artificial Sequence
  Description of Artificial Sequence: Synthetic oligonucleotide
guaaagggaaaguagcagu

SEQ ID NO: 2330206 - RNA, 19 nt, Artificial Sequence
  Description of Artificial Sequence: Synthetic oligonucleotide
cagcucgaaggaaggaugg

SEQ ID NO: 2330207 - RNA, 19 nt, Artificial Sequence
  Description of Artificial Sequence: Synthetic oligonucleotide
acacuacugacuucucucu

SEQ ID NO: 2330208 - RNA, 19 nt, Artificial Sequence
  Description of Artificial Sequence: Synthetic oligonucleotide
agcagacccauuuaucaaa

SEQ ID NO: 2330209 - RNA, 19 nt, Artificial Sequence
  Description of Artificial Sequence: Synthetic oligonucleotide
aacuggacccucugauuga

SEQ ID NO: 2330210 - RNA, 19 nt, Artificial Sequence
  Description of Artificial Sequence: Synthetic oligonucleotide
agugauccuuuauuuccug

SEQ ID NO: 2330211 - RNA, 19 nt, Artificial Sequence
  Description of Artificial Sequence: Synthetic oligonucleotide
gaacuucaauccauucucc

SEQ ID NO: 2330212 - RNA, 19 nt, Artificial Sequence
  Description of Artificial Sequence: Synthetic oligonucleotide
aagugauccuuuauuuccu

SEQ ID NO: 2330213 - RNA, 19 nt, Artificial Sequence
  Description of Artificial Sequence: Synthetic oligonucleotide
agaugacagauacuccagu

SEQ ID NO: 2330214 - RNA, 19 nt, Artificial Sequence
  Description of Artificial Sequence: Synthetic oligonucleotide
uguggcgguaagugaugcg

SEQ ID NO: 2330215 - RNA, 19 nt, Artificial Sequence
  Description of Artificial Sequence: Synthetic oligonucleotide
acccauuuaucaaaagaug

SEQ ID NO: 2330216 - RNA, 19 nt, Artificial Sequence
  Description of Artificial Sequence: Synthetic oligonucleotide
aggccaaaagcccagccaa

SEQ ID NO: 2330217 - RNA, 19 nt, Artificial Sequence
  Description of Artificial Sequence: Synthetic oligonucleotide
caagcucucuccaucuuuc

SEQ ID NO: 2330218 - RNA, 19 nt, Artificial Sequence
  Description of Artificial Sequence: Synthetic oligonucleotide
gacuguucggacgauguca

SEQ ID NO: 2330219 - RNA, 19 nt, Artificial Sequence
  Description of Artificial Sequence: Synthetic oligonucleotide
caauucgaucuugagcacc

SEQ ID NO: 2330220 - RNA, 19 nt, Artificial Sequence
  Description of Artificial Sequence: Synthetic oligonucleotide
ugacuucucucugggacag

SEQ ID NO: 2330221 - RNA, 19 nt, Artificial Sequence
  Description of Artificial Sequence: Synthetic oligonucleotide
gaugucugacaaguggaac

SEQ ID NO: 2330222 - RNA, 19 nt, Artificial Sequence
  Description of Artificial Sequence: Synthetic oligonucleotide
aagugaugcgguagcagug

SEQ ID NO: 2330223 - RNA, 19 nt, Artificial Sequence
  Description of Artificial Sequence: Synthetic oligonucleotide
gacaaguggaacugcucca

SEQ ID NO: 2330224 - RNA, 19 nt, Artificial Sequence
  Description of Artificial Sequence: Synthetic oligonucleotide
ucaagcucucuccaucuuu

SEQ ID NO: 2330225 - RNA, 19 nt, Artificial Sequence
  Description of Artificial Sequence: Synthetic oligonucleotide
uaagccucgucaguacuug

SEQ ID NO: 2330226 - RNA, 19 nt, Artificial Sequence
  Description of Artificial Sequence: Synthetic oligonucleotide
ucgaaggaaggauggguaa

SEQ ID NO: 2330227 - RNA, 19 nt, Artificial Sequence
  Description of Artificial Sequence: Synthetic oligonucleotide
guaagugaugcgguagcag

SEQ ID NO: 2330228 - RNA, 19 nt, Artificial Sequence
  Description of Artificial Sequence: Synthetic oligonucleotide
uucggacgaugucauagaa

SEQ ID NO: 2330229 - RNA, 19 nt, Artificial Sequence
  Description of Artificial Sequence: Synthetic oligonucleotide
gauggguaaagggaaagua

SEQ ID NO: 2330230 - RNA, 19 nt, Artificial Sequence
  Description of Artificial Sequence: Synthetic oligonucleotide
cauucuccauguaauucuc

SEQ ID NO: 2330231 - RNA, 19 nt, Artificial Sequence
  Description of Artificial Sequence: Synthetic oligonucleotide
uucaccuuuucagcgaguc

SEQ ID NO: 2330232 - RNA, 19 nt, Artificial Sequence
  Description of Artificial Sequence: Synthetic oligonucleotide
auguggcgguaagugaugc

SEQ ID NO: 2330233 - RNA, 19 nt, Artificial Sequence
  Description of Artificial Sequence: Synthetic oligonucleotide
ugagcaccagcugaauuga

SEQ ID NO: 2330234 - RNA, 19 nt, Artificial Sequence
  Description of Artificial Sequence: Synthetic oligonucleotide
uuggaaaaccagggcauca

SEQ ID NO: 2330235 - RNA, 19 nt, Artificial Sequence
  Description of Artificial Sequence: Synthetic oligonucleotide
uugugaacagagcgagaac

SEQ ID NO: 2330236 - RNA, 19 nt, Artificial Sequence
  Description of Artificial Sequence: Synthetic oligonucleotide
gguacuugcuaagaggcug

SEQ ID NO: 2330237 - RNA, 19 nt, Artificial Sequence
  Description of Artificial Sequence: Synthetic oligonucleotide
augucagggauaucauaca

SEQ ID NO: 2330238 - RNA, 19 nt, Artificial Sequence
  Description of Artificial Sequence: Synthetic oligonucleotide
gucaguacuugcuuaaggu

SEQ ID NO: 2330239 - RNA, 19 nt, Artificial Sequence
  Description of Artificial Sequence: Synthetic oligonucleotide
ucucaaaagugauccuuua

SEQ ID NO: 2330240 - RNA, 19 nt, Artificial Sequence
  Description of Artificial Sequence: Synthetic oligonucleotide
gaaaaccagggcaucaaaa

SEQ ID NO: 2330241 - RNA, 19 nt, Artificial Sequence
  Description of Artificial Sequence: Synthetic oligonucleotide
cccauuuaucaaaagauga

SEQ ID NO: 2330242 - RNA, 19 nt, Artificial Sequence
  Description of Artificial Sequence: Synthetic oligonucleotide
acaguguccguuccaugug

SEQ ID NO: 2330243 - RNA, 19 nt, Artificial Sequence
  Description of Artificial Sequence: Synthetic oligonucleotide
ggugugagucucuugcuug

SEQ ID NO: 2330244 - RNA, 19 nt, Artificial Sequence
  Description of Artificial Sequence: Synthetic oligonucleotide
gacccauuuaucaaaagau

SEQ ID NO: 2330245 - RNA, 19 nt, Artificial Sequence
  Description of Artificial Sequence: Synthetic oligonucleotide
uuggauguucaaacuuguc

SEQ ID NO: 2330246 - RNA, 19 nt, Artificial Sequence
  Description of Artificial Sequence: Synthetic oligonucleotide
ucggacgaugucauagaaa

SEQ ID NO: 2330247 - RNA, 19 nt, Artificial Sequence
  Description of Artificial Sequence: Synthetic oligonucleotide
gaacagagcgagaacuuuc

SEQ ID NO: 2330248 - RNA, 19 nt, Artificial Sequence
  Description of Artificial Sequence: Synthetic oligonucleotide
caguguccguuccaugugg

SEQ ID NO: 2330249 - RNA, 19 nt, Artificial Sequence
  Description of Artificial Sequence: Synthetic oligonucleotide
aggauggguaaagggaaag

SEQ ID NO: 2330250 - RNA, 19 nt, Artificial Sequence
  Description of Artificial Sequence: Synthetic oligonucleotide
gggguacuugcuaagaggc

SEQ ID NO: 2330251 - RNA, 19 nt, Artificial Sequence
  Description of Artificial Sequence: Synthetic oligonucleotide
aguccacccaccgaaccuc

SEQ ID NO: 2330252 - RNA, 19 nt, Artificial Sequence
  Description of Artificial Sequence: Synthetic oligonucleotide
agggaaaguagcaguccac

SEQ ID NO: 2330253 - RNA, 19 nt, Artificial Sequence
  Description of Artificial Sequence: Synthetic oligonucleotide
aacuugaucuccagcucga

SEQ ID NO: 2330254 - RNA, 19 nt, Artificial Sequence
  Description of Artificial Sequence: Synthetic oligonucleotide
gagucucuugcuugugaac

SEQ ID NO: 2330255 - RNA, 19 nt, Artificial Sequence
  Description of Artificial Sequence: Synthetic oligonucleotide
ugaugcgguagcaguggcu

SEQ ID NO: 2330256 - RNA, 19 nt, Artificial Sequence
  Description of Artificial Sequence: Synthetic oligonucleotide
cuauaagaucaaccuuuuc

SEQ ID NO: 2330257 - RNA, 19 nt, Artificial Sequence
  Description of Artificial Sequence: Synthetic oligonucleotide
ucuuucacaccagcaaaua

SEQ ID NO: 2330258 - RNA, 19 nt, Artificial Sequence
  Description of Artificial Sequence: Synthetic oligonucleotide
cucguccucacuccagaag

SEQ ID NO: 2330259 - RNA, 19 nt, Artificial Sequence
  Description of Artificial Sequence: Synthetic oligonucleotide
caaaagugauccuuuauuu

SEQ ID NO: 2330260 - RNA, 19 nt, Artificial Sequence
  Description of Artificial Sequence: Synthetic oligonucleotide
caucuuucacaccagcaaa

SEQ ID NO: 2330261 - RNA, 19 nt, Artificial Sequence
  Description of Artificial Sequence: Synthetic oligonucleotide
cugacaaguggaacugcuc

SEQ ID NO: 2330262 - RNA, 19 nt, Artificial Sequence
  Description of Artificial Sequence: Synthetic oligonucleotide
acuccaguucacaaugugu

SEQ ID NO: 2330263 - RNA, 19 nt, Artificial Sequence
  Description of Artificial Sequence: Synthetic oligonucleotide
caauguguuucaccuuuuc

SEQ ID NO: 2330264 - RNA, 19 nt, Artificial Sequence
  Description of Artificial Sequence: Synthetic oligonucleotide
acagcgggguacuugcuaa

SEQ ID NO: 2330265 - RNA, 19 nt, Artificial Sequence
  Description of Artificial Sequence: Synthetic oligonucleotide
gucuauaagaucaaccuuu

SEQ ID NO: 2330266 - RNA, 19 nt, Artificial Sequence
  Description of Artificial Sequence: Synthetic oligonucleotide
caccccacagccaagaacu

SEQ ID NO: 2330267 - RNA, 19 nt, Artificial Sequence
  Description of Artificial Sequence: Synthetic oligonucleotide
cauguggcgguaagugaug

SEQ ID NO: 2330268 - RNA, 19 nt, Artificial Sequence
  Description of Artificial Sequence: Synthetic oligonucleotide
ugaacagagcgagaacuuu

SEQ ID NO: 2330269 - RNA, 19 nt, Artificial Sequence
  Description of Artificial Sequence: Synthetic oligonucleotide
uggugugagucucuugcuu

SEQ ID NO: 2330270 - RNA, 19 nt, Artificial Sequence
  Description of Artificial Sequence: Synthetic oligonucleotide
gucuuggagcucugugagg

SEQ ID NO: 2330271 - RNA, 19 nt, Artificial Sequence
  Description of Artificial Sequence: Synthetic oligonucleotide
gaacacagcgggguacuug

SEQ ID NO: 2330272 - RNA, 19 nt, Artificial Sequence
  Description of Artificial Sequence: Synthetic oligonucleotide
aacggcccuccacacccag

SEQ ID NO: 2330273 - RNA, 19 nt, Artificial Sequence
  Description of Artificial Sequence: Synthetic oligonucleotide
ugugugucuuuggauguuc

SEQ ID NO: 2330274 - RNA, 19 nt, Artificial Sequence
  Description of Artificial Sequence: Synthetic oligonucleotide
uggaaaaccagggcaucaa

SEQ ID NO: 2330275 - RNA, 19 nt, Artificial Sequence
  Description of Artificial Sequence: Synthetic oligonucleotide
uggcgguaagugaugcggu

SEQ ID NO: 2330276 - RNA, 19 nt, Artificial Sequence
  Description of Artificial Sequence: Synthetic oligonucleotide
auggugugagucucuugcu

SEQ ID NO: 2330277 - RNA, 19 nt, Artificial Sequence
  Description of Artificial Sequence: Synthetic oligonucleotide
gagcagacccauuuaucaa

SEQ ID NO: 2330278 - RNA, 19 nt, Artificial Sequence
  Description of Artificial Sequence: Synthetic oligonucleotide
guccucacuccagaagagg

SEQ ID NO: 2330279 - RNA, 19 nt, Artificial Sequence
  Description of Artificial Sequence: Synthetic oligonucleotide
cagccaauucgaucuugag

SEQ ID NO: 2330280 - RNA, 19 nt, Artificial Sequence
  Description of Artificial Sequence: Synthetic oligonucleotide
ggaacugcuccaggaagcg

SEQ ID NO: 2330281 - RNA, 19 nt, Artificial Sequence
  Description of Artificial Sequence: Synthetic oligonucleotide
ugggacaguguccguucca

SEQ ID NO: 2330282 - RNA, 19 nt, Artificial Sequence
  Description of Artificial Sequence: Synthetic oligonucleotide
gaucauagccagucuuucu

SEQ ID NO: 2330283 - RNA, 19 nt, Artificial Sequence
  Description of Artificial Sequence: Synthetic oligonucleotide
cagcugaauugacaagcug

SEQ ID NO: 2330284 - RNA, 19 nt, Artificial Sequence
  Description of Artificial Sequence: Synthetic oligonucleotide
cuuggagcucugugagggc

SEQ ID NO: 2330285 - RNA, 19 nt, Artificial Sequence
  Description of Artificial Sequence: Synthetic oligonucleotide
guucggacgaugucauaga

SEQ ID NO: 2330286 - RNA, 19 nt, Artificial Sequence
  Description of Artificial Sequence: Synthetic oligonucleotide
gaauugacaagcugcuguu

SEQ ID NO: 2330287 - RNA, 19 nt, Artificial Sequence
  Description of Artificial Sequence: Synthetic oligonucleotide
ugugagucucuugcuugug

SEQ ID NO: 2330288 - RNA, 19 nt, Artificial Sequence
  Description of Artificial Sequence: Synthetic oligonucleotide
ucacuccagaagaggcgga

SEQ ID NO: 2330289 - RNA, 19 nt, Artificial Sequence
  Description of Artificial Sequence: Synthetic oligonucleotide
agcucgaaggaaggauggg

SEQ ID NO: 2330290 - RNA, 19 nt, Artificial Sequence
  Description of Artificial Sequence: Synthetic oligonucleotide
gacaagcugcuguuccauc

SEQ ID NO: 2330291 - RNA, 19 nt, Artificial Sequence
  Description of Artificial Sequence: Synthetic oligonucleotide
gcggaugucagggauauca

SEQ ID NO: 2330292 - RNA, 19 nt, Artificial Sequence
  Description of Artificial Sequence: Synthetic oligonucleotide
augcgguagcaguggcugg

SEQ ID NO: 2330293 - RNA, 19 nt, Artificial Sequence
  Description of Artificial Sequence: Synthetic oligonucleotide
aucuuucacaccagcaaau

SEQ ID NO: 2330294 - RNA, 19 nt, Artificial Sequence
  Description of Artificial Sequence: Synthetic oligonucleotide
agggcagccagaacgaaau

SEQ ID NO: 2330295 - RNA, 19 nt, Artificial Sequence
  Description of Artificial Sequence: Synthetic oligonucleotide
gucauaagccucgucagua

SEQ ID NO: 2330296 - RNA, 19 nt, Artificial Sequence
  Description of Artificial Sequence: Synthetic oligonucleotide
aguacuugcuuaaggucaa

SEQ ID NO: 2330297 - RNA, 19 nt, Artificial Sequence
  Description of Artificial Sequence: Synthetic oligonucleotide
ugcuccaggaagcgcucgu

SEQ ID NO: 2330298 - RNA, 19 nt, Artificial Sequence
  Description of Artificial Sequence: Synthetic oligonucleotide
ccucacuccagaagaggcg

SEQ ID NO: 2330299 - RNA, 19 nt, Artificial Sequence
  Description of Artificial Sequence: Synthetic oligonucleotide
cugaacguccuagagcaga

SEQ ID NO: 2330300 - RNA, 19 nt, Artificial Sequence
  Description of Artificial Sequence: Synthetic oligonucleotide
cugaauugacaagcugcug

SEQ ID NO: 2330301 - RNA, 19 nt, Artificial Sequence
  Description of Artificial Sequence: Synthetic oligonucleotide
agccagaacgaaaugucau

SEQ ID NO: 2330302 - RNA, 19 nt, Artificial Sequence
  Description of Artificial Sequence: Synthetic oligonucleotide
gacccucugauugaugucu

SEQ ID NO: 2330303 - RNA, 19 nt, Artificial Sequence
  Description of Artificial Sequence: Synthetic oligonucleotide
ugcgguagcaguggcuggu

SEQ ID NO: 2330304 - RNA, 19 nt, Artificial Sequence
  Description of Artificial Sequence: Synthetic oligonucleotide
agcuucaagcucucuccau

SEQ ID NO: 2330305 - RNA, 19 nt, Artificial Sequence
  Description of Artificial Sequence: Synthetic oligonucleotide
cucgucaguacuugcuuaa

SEQ ID NO: 2330306 - RNA, 19 nt, Artificial Sequence
  Description of Artificial Sequence: Synthetic oligonucleotide
guagcaguccacccaccga

SEQ ID NO: 2330307 - RNA, 19 nt, Artificial Sequence
  Description of Artificial Sequence: Synthetic oligonucleotide
cugagggcagccagaacga

SEQ ID NO: 2330308 - RNA, 19 nt, Artificial Sequence
  Description of Artificial Sequence: Synthetic oligonucleotide
acuguucggacgaugucau

SEQ ID NO: 2330309 - RNA, 19 nt, Artificial Sequence
  Description of Artificial Sequence: Synthetic oligonucleotide
gcaccagcugaauugacaa

SEQ ID NO: 2330310 - RNA, 19 nt, Artificial Sequence
  Description of Artificial Sequence: Synthetic oligonucleotide
gaacguccuagagcagacc

SEQ ID NO: 2330311 - RNA, 19 nt, Artificial Sequence
  Description of Artificial Sequence: Synthetic oligonucleotide
caggccaaaagcccagcca

SEQ ID NO: 2330312 - RNA, 19 nt, Artificial Sequence
  Description of Artificial Sequence: Synthetic oligonucleotide
aaagcccagccaauucgau

SEQ ID NO: 2330313 - RNA, 19 nt, Artificial Sequence
  Description of Artificial Sequence: Synthetic oligonucleotide
guacuugcuaagaggcuga

SEQ ID NO: 2330314 - RNA, 19 nt, Artificial Sequence
  Description of Artificial Sequence: Synthetic oligonucleotide
gaaacuggacccucugauu

SEQ ID NO: 2330315 - RNA, 19 nt, Artificial Sequence
  Description of Artificial Sequence: Synthetic oligonucleotide
acuccagaagaggcggaug

SEQ ID NO: 2330316 - RNA, 19 nt, Artificial Sequence
  Description of Artificial Sequence: Synthetic oligonucleotide
cgggguacuugcuaagagg

SEQ ID NO: 2330317 - RNA, 19 nt, Artificial Sequence
  Description of Artificial Sequence: Synthetic oligonucleotide
cgucaguacuugcuuaagg

SEQ ID NO: 2330318 - RNA, 19 nt, Artificial Sequence
  Description of Artificial Sequence: Synthetic oligonucleotide
aggcugaaacuggacccuc

SEQ ID NO: 2330319 - RNA, 19 nt, Artificial Sequence
  Description of Artificial Sequence: Synthetic oligonucleotide
ccaguucacaauguguuuc

SEQ ID NO: 2330320 - RNA, 19 nt, Artificial Sequence
  Description of Artificial Sequence: Synthetic oligonucleotide
cuagagcagacccauuuau

SEQ ID NO: 2330321 - RNA, 19 nt, Artificial Sequence
  Description of Artificial Sequence: Synthetic oligonucleotide
gucugacaaguggaacugc

SEQ ID NO: 2330322 - RNA, 19 nt, Artificial Sequence
  Description of Artificial Sequence: Synthetic oligonucleotide
uggacacuacugacuucuc

SEQ ID NO: 2330323 - RNA, 19 nt, Artificial Sequence
  Description of Artificial Sequence: Synthetic oligonucleotide
auaagccucgucaguacuu

SEQ ID NO: 2330324 - RNA, 19 nt, Artificial Sequence
  Description of Artificial Sequence: Synthetic oligonucleotide
agcgcucguccucacucca

SEQ ID NO: 2330325 - RNA, 19 nt, Artificial Sequence
  Description of Artificial Sequence: Synthetic oligonucleotide
ucuugagcaccagcugaau

SEQ ID NO: 2330326 - RNA, 19 nt, Artificial Sequence
  Description of Artificial Sequence: Synthetic oligonucleotide
gcgggguacuugcuaagag

SEQ ID NO: 2330327 - RNA, 19 nt, Artificial Sequence
  Description of Artificial Sequence: Synthetic oligonucleotide
auacuccaguucacaaugu

SEQ ID NO: 2330328 - RNA, 19 nt, Artificial Sequence
  Description of Artificial Sequence: Synthetic oligonucleotide
ccuuuauuuccugaacguc

SEQ ID NO: 2330329 - RNA, 19 nt, Artificial Sequence
  Description of Artificial Sequence: Synthetic oligonucleotide
acagagcgagaacuuucuu

SEQ ID NO: 2330330 - RNA, 19 nt, Artificial Sequence
  Description of Artificial Sequence: Synthetic oligonucleotide
acagccugguggacacuac

SEQ ID NO: 2330331 - RNA, 19 nt, Artificial Sequence
  Description of Artificial Sequence: Synthetic oligonucleotide
uggagcucugugagggcuu

SEQ ID NO: 2330332 - RNA, 19 nt, Artificial Sequence
  Description of Artificial Sequence: Synthetic oligonucleotide
ggaucauagccagucuuuc

SEQ ID NO: 2330333 - RNA, 19 nt, Artificial Sequence
  Description of Artificial Sequence: Synthetic oligonucleotide
gcaguccacccaccgaacc

SEQ ID NO: 2330334 - RNA, 19 nt, Artificial Sequence
  Description of Artificial Sequence: Synthetic oligonucleotide
acgaugucauagaaaucau

SEQ ID NO: 2330335 - RNA, 19 nt, Artificial Sequence
  Description of Artificial Sequence: Synthetic oligonucleotide
cugguggacacuacugacu

SEQ ID NO: 2330336 - RNA, 19 nt, Artificial Sequence
  Description of Artificial Sequence: Synthetic oligonucleotide
agccucgucaguacuugcu

SEQ ID NO: 2330337 - RNA, 19 nt, Artificial Sequence
  Description of Artificial Sequence: Synthetic oligonucleotide
uccacccaccgaaccucca

SEQ ID NO: 2330338 - RNA, 19 nt, Artificial Sequence
  Description of Artificial Sequence: Synthetic oligonucleotide
aggcggaugucagggauau

SEQ ID NO: 2330339 - RNA, 19 nt, Artificial Sequence
  Description of Artificial Sequence: Synthetic oligonucleotide
agcgggguacuugcuaaga

SEQ ID NO: 2330340 - RNA, 19 nt, Artificial Sequence
  Description of Artificial Sequence: Synthetic oligonucleotide
aaccuccaguccaucucca

SEQ ID NO: 2330341 - RNA, 19 nt, Artificial Sequence
  Description of Artificial Sequence: Synthetic oligonucleotide
cagcgggguacuugcuaag

SEQ ID NO: 2330342 - RNA, 19 nt, Artificial Sequence
  Description of Artificial Sequence: Synthetic oligonucleotide
gcgguaagugaugcgguag

SEQ ID NO: 2330343 - RNA, 19 nt, Artificial Sequence
  Description of Artificial Sequence: Synthetic oligonucleotide
acuggacccucugauugau

SEQ ID NO: 2330344 - RNA, 19 nt, Artificial Sequence
  Description of Artificial Sequence: Synthetic oligonucleotide
cauugaacacagcggggua

SEQ ID NO: 2330345 - RNA, 19 nt, Artificial Sequence
  Description of Artificial Sequence: Synthetic oligonucleotide
cuggacccucugauugaug

SEQ ID NO: 2330346 - RNA, 19 nt, Artificial Sequence
  Description of Artificial Sequence: Synthetic oligonucleotide
aucaccccacagccaagaa

SEQ ID NO: 2330347 - RNA, 19 nt, Artificial Sequence
  Description of Artificial Sequence: Synthetic oligonucleotide
gguaagugaugcgguagca

SEQ ID NO: 2330348 - RNA, 19 nt, Artificial Sequence
  Description of Artificial Sequence: Synthetic oligonucleotide
gagcgagaacuuucuucaa

SEQ ID NO: 2330349 - RNA, 19 nt, Artificial Sequence
  Description of Artificial Sequence: Synthetic oligonucleotide
uucuaaccccaggccaaaa

SEQ ID NO: 2330350 - RNA, 19 nt, Artificial Sequence
  Description of Artificial Sequence: Synthetic oligonucleotide
ccucugauugaugucugac

SEQ ID NO: 2330351 - RNA, 19 nt, Artificial Sequence
  Description of Artificial Sequence: Synthetic oligonucleotide
accgaaccuccaguccauc

SEQ ID NO: 2330352 - RNA, 19 nt, Artificial Sequence
  Description of Artificial Sequence: Synthetic oligonucleotide
ggaugucagggauaucaua

SEQ ID NO: 2330353 - RNA, 19 nt, Artificial Sequence
  Description of Artificial Sequence: Synthetic oligonucleotide
gugugucuuuggauguuca

SEQ ID NO: 2330354 - RNA, 19 nt, Artificial Sequence
  Description of Artificial Sequence: Synthetic oligonucleotide
gugugagucucuugcuugu

SEQ ID NO: 2330355 - RNA, 19 nt, Artificial Sequence
  Description of Artificial Sequence: Synthetic oligonucleotide
ccaauucgaucuugagcac

SEQ ID NO: 2330356 - RNA, 19 nt, Artificial Sequence
  Description of Artificial Sequence: Synthetic oligonucleotide
acguccuagagcagaccca

SEQ ID NO: 2330357 - RNA, 19 nt, Artificial Sequence
  Description of Artificial Sequence: Synthetic oligonucleotide
ggacaguguccguuccaug

SEQ ID NO: 2330358 - RNA, 19 nt, Artificial Sequence
  Description of Artificial Sequence: Synthetic oligonucleotide
gccugguggacacuacuga

SEQ ID NO: 2330359 - RNA, 19 nt, Artificial Sequence
  Description of Artificial Sequence: Synthetic oligonucleotide
caucaccccacagccaaga

SEQ ID NO: 2330360 - RNA, 19 nt, Artificial Sequence
  Description of Artificial Sequence: Synthetic oligonucleotide
ccuuuucagcgagucuugg

SEQ ID NO: 2330361 - RNA, 19 nt, Artificial Sequence
  Description of Artificial Sequence: Synthetic oligonucleotide
acccucugauugaugucug

SEQ ID NO: 2330362 - RNA, 19 nt, Artificial Sequence
  Description of Artificial Sequence: Synthetic oligonucleotide
cccaccgaaccuccagucc

SEQ ID NO: 2330363 - RNA, 19 nt, Artificial Sequence
  Description of Artificial Sequence: Synthetic oligonucleotide
guccguuccauguggcggu

SEQ ID NO: 2330364 - RNA, 19 nt, Artificial Sequence
  Description of Artificial Sequence: Synthetic oligonucleotide
gagcaccagcugaauugac

SEQ ID NO: 2330365 - RNA, 19 nt, Artificial Sequence
  Description of Artificial Sequence: Synthetic oligonucleotide
auacaggaucauagccagu

SEQ ID NO: 2330366 - RNA, 19 nt, Artificial Sequence
  Description of Artificial Sequence: Synthetic oligonucleotide
aaacggcccuccacaccca

SEQ ID NO: 2330367 - RNA, 19 nt, Artificial Sequence
  Description of Artificial Sequence: Synthetic oligonucleotide
ccaccgaaccuccagucca

SEQ ID NO: 2330368 - RNA, 19 nt, Artificial Sequence
  Description of Artificial Sequence: Synthetic oligonucleotide
guccacccaccgaaccucc

SEQ ID NO: 2330369 - RNA, 19 nt, Artificial Sequence
  Description of Artificial Sequence: Synthetic oligonucleotide
caggaucauagccagucuu

SEQ ID NO: 2330370 - RNA, 19 nt, Artificial Sequence
  Description of Artificial Sequence: Synthetic oligonucleotide
cuugagcaccagcugaauu

SEQ ID NO: 2330371 - RNA, 19 nt, Artificial Sequence
  Description of Artificial Sequence: Synthetic oligonucleotide
gguggacacuacugacuuc

SEQ ID NO: 2330372 - RNA, 19 nt, Artificial Sequence
  Description of Artificial Sequence: Synthetic oligonucleotide
cacagcgggguacuugcua

SEQ ID NO: 2330373 - RNA, 19 nt, Artificial Sequence
  Description of Artificial Sequence: Synthetic oligonucleotide
ccacccaccgaaccuccag

SEQ ID NO: 2330374 - RNA, 19 nt, Artificial Sequence
  Description of Artificial Sequence: Synthetic oligonucleotide
cguccucacuccagaagag

SEQ ID NO: 2330375 - RNA, 19 nt, Artificial Sequence
  Description of Artificial Sequence: Synthetic oligonucleotide
ggacgaugucauagaaauc

SEQ ID NO: 2330376 - RNA, 19 nt, Artificial Sequence
  Description of Artificial Sequence: Synthetic oligonucleotide
caguccacccaccgaaccu

SEQ ID NO: 2330377 - RNA, 19 nt, Artificial Sequence
  Description of Artificial Sequence: Synthetic oligonucleotide
gugaacagagcgagaacuu

SEQ ID NO: 2330378 - RNA, 19 nt, Artificial Sequence
  Description of Artificial Sequence: Synthetic oligonucleotide
gggcuucagccuuggaaaa

SEQ ID NO: 2330379 - RNA, 19 nt, Artificial Sequence
  Description of Artificial Sequence: Synthetic oligonucleotide
gggcagccagaacgaaaug

SEQ ID NO: 2330380 - RNA, 19 nt, Artificial Sequence
  Description of Artificial Sequence: Synthetic oligonucleotide
ccauggugugagucucuug

SEQ ID NO: 2330381 - RNA, 19 nt, Artificial Sequence
  Description of Artificial Sequence: Synthetic oligonucleotide
guuccauguggcgguaagu

SEQ ID NO: 2330382 - RNA, 19 nt, Artificial Sequence
  Description of Artificial Sequence: Synthetic oligonucleotide
cacagccugguggacacua

SEQ ID NO: 2330383 - RNA, 19 nt, Artificial Sequence
  Description of Artificial Sequence: Synthetic oligonucleotide
ggauggguaaagggaaagu

SEQ ID NO: 2330384 - RNA, 19 nt, Artificial Sequence
  Description of Artificial Sequence: Synthetic oligonucleotide
gcuuaaggucaaacuccac

SEQ ID NO: 2330385 - RNA, 19 nt, Artificial Sequence
  Description of Artificial Sequence: Synthetic oligonucleotide
ggcgguaagugaugcggua

SEQ ID NO: 2330386 - RNA, 19 nt, Artificial Sequence
  Description of Artificial Sequence: Synthetic oligonucleotide
gccagaacgaaaugucauu

SEQ ID NO: 2330387 - RNA, 19 nt, Artificial Sequence
  Description of Artificial Sequence: Synthetic oligonucleotide
ccugugugucuuuggaugu

SEQ ID NO: 2330388 - RNA, 19 nt, Artificial Sequence
  Description of Artificial Sequence: Synthetic oligonucleotide
cagggauaucauacaggau

SEQ ID NO: 2330389 - RNA, 19 nt, Artificial Sequence
  Description of Artificial Sequence: Synthetic oligonucleotide
ccuagagcagacccauuua

SEQ ID NO: 2330390 - RNA, 19 nt, Artificial Sequence
  Description of Artificial Sequence: Synthetic oligonucleotide
acacagcgggguacuugcu

SEQ ID NO: 2330391 - RNA, 19 nt, Artificial Sequence
  Description of Artificial Sequence: Synthetic oligonucleotide
agcgagucuuggagcucug

SEQ ID NO: 2330392 - RNA, 19 nt, Artificial Sequence
  Description of Artificial Sequence: Synthetic oligonucleotide
uccguuccauguggcggua

SEQ ID NO: 2330393 - RNA, 19 nt, Artificial Sequence
  Description of Artificial Sequence: Synthetic oligonucleotide
ggcccuccacacccagcag

SEQ ID NO: 2330394 - RNA, 19 nt, Artificial Sequence
  Description of Artificial Sequence: Synthetic oligonucleotide
cacccaccgaaccuccagu

SEQ ID NO: 2330395 - RNA, 19 nt, Artificial Sequence
  Description of Artificial Sequence: Synthetic oligonucleotide
ccgacuguucggacgaugu

SEQ ID NO: 2330396 - RNA, 19 nt, Artificial Sequence
  Description of Artificial Sequence: Synthetic oligonucleotide
cacagccuccaugguguga

SEQ ID NO: 2330397 - RNA, 19 nt, Artificial Sequence
  Description of Artificial Sequence: Synthetic oligonucleotide
ccucgucaguacuugcuua

SEQ ID NO: 2330398 - RNA, 19 nt, Artificial Sequence
  Description of Artificial Sequence: Synthetic oligonucleotide
gcucguccucacuccagaa

SEQ ID NO: 2330399 - RNA, 19 nt, Artificial Sequence
  Description of Artificial Sequence: Synthetic oligonucleotide
cuguucggacgaugucaua

SEQ ID NO: 2330400 - RNA, 19 nt, Artificial Sequence
  Description of Artificial Sequence: Synthetic oligonucleotide
cucugggacaguguccguu

SEQ ID NO: 2330401 - RNA, 19 nt, Artificial Sequence
  Description of Artificial Sequence: Synthetic oligonucleotide
caccgaaccuccaguccau

SEQ ID NO: 2330402 - RNA, 19 nt, Artificial Sequence
  Description of Artificial Sequence: Synthetic oligonucleotide
cgacuguucggacgauguc

SEQ ID NO: 2330403 - RNA, 19 nt, Artificial Sequence
  Description of Artificial Sequence: Synthetic oligonucleotide
cccgacuguucggacgaug

SEQ ID NO: 2330404 - RNA, 19 nt, Artificial Sequence
  Description of Artificial Sequence: Synthetic oligonucleotide
ggaagcgcucguccucacu

SEQ ID NO: 2330405 - RNA, 19 nt, Artificial Sequence
  Description of Artificial Sequence: Synthetic oligonucleotide
gcgcucguccucacuccag

SEQ ID NO: 2330406 - RNA, 19 nt, Artificial Sequence
  Description of Artificial Sequence: Synthetic oligonucleotide
gccucgucaguacuugcuu

SEQ ID NO: 2330407 - RNA, 19 nt, Artificial Sequence
  Description of Artificial Sequence: Synthetic oligonucleotide
cacuccagaagaggcggau

SEQ ID NO: 2330408 - RNA, 19 nt, Artificial Sequence
  Description of Artificial Sequence: Synthetic oligonucleotide
ggauaucauacaggaucau

SEQ ID NO: 2330409 - RNA, 19 nt, Artificial Sequence
  Description of Artificial Sequence: Synthetic oligonucleotide
gccaaaagcccagccaauu

SEQ ID NO: 2330410 - RNA, 19 nt, Artificial Sequence
  Description of Artificial Sequence: Synthetic oligonucleotide
gacuucucucugggacagu

SEQ ID NO: 2330411 - RNA, 19 nt, Artificial Sequence
  Description of Artificial Sequence: Synthetic oligonucleotide
ccgaaccuccaguccaucu

SEQ ID NO: 2330412 - RNA, 19 nt, Artificial Sequence
  Description of Artificial Sequence: Synthetic oligonucleotide
gcgguagcaguggcugguc

SEQ ID NO: 2330413 - RNA, 19 nt, Artificial Sequence
  Description of Artificial Sequence: Synthetic oligonucleotide
cgcucguccucacuccaga

SEQ ID NO: 2330414 - RNA, 19 nt, Artificial Sequence
  Description of Artificial Sequence: Synthetic oligonucleotide
cguccuagagcagacccau

SEQ ID NO: 2330415 - RNA, 19 nt, Artificial Sequence
  Description of Artificial Sequence: Synthetic oligonucleotide
ggcggaugucagggauauc

SEQ ID NO: 2330416 - RNA, 19 nt, Artificial Sequence
  Description of Artificial Sequence: Synthetic oligonucleotide
gcgagucuuggagcucugu

SEQ ID NO: 2330417 - RNA, 19 nt, Artificial Sequence
  Description of Artificial Sequence: Synthetic oligonucleotide
guccuagagcagacccauu

SEQ ID NO: 2330418 - RNA, 19 nt, Artificial Sequence
  Description of Artificial Sequence: Synthetic oligonucleotide
gcugguccugugugucuuu

SEQ ID NO: 2330419 - RNA, 19 nt, Artificial Sequence
  Description of Artificial Sequence: Synthetic oligonucleotide
ccguuccauguggcgguaa

SEQ ID NO: 2330420 - RNA, 19 nt, Artificial Sequence
  Description of Artificial Sequence: Synthetic oligonucleotide
ccccgacuguucggacgau

SEQ ID NO: 2330421 - RNA, 19 nt, Artificial Sequence
  Description of Artificial Sequence: Synthetic oligonucleotide
aaauacauuaaagagaggc

SEQ ID NO: 2330422 - RNA, 19 nt, Artificial Sequence
  Description of Artificial Sequence: Synthetic oligonucleotide
aaaggucugaaauaaauac

SEQ ID NO: 2330423 - RNA, 19 nt, Artificial Sequence
  Description of Artificial Sequence: Synthetic oligonucleotide
aauacaauuuacaacauug

SEQ ID NO: 2330424 - RNA, 19 nt, Artificial Sequence
  Description of Artificial Sequence: Synthetic oligonucleotide
agucugauuauacaagugc

SEQ ID NO: 2330425 - RNA, 19 nt, Artificial Sequence
  Description of Artificial Sequence: Synthetic oligonucleotide
auaaauacauuaaagagag

SEQ ID NO: 2330426 - RNA, 19 nt, Artificial Sequence
  Description of Artificial Sequence: Synthetic oligonucleotide
aguggcaugcacuaggucc

SEQ ID NO: 2330427 - RNA, 19 nt, Artificial Sequence
  Description of Artificial Sequence: Synthetic oligonucleotide
acaauuuacaacauugucc

SEQ ID NO: 2330428 - RNA, 19 nt, Artificial Sequence
  Description of Artificial Sequence: Synthetic oligonucleotide
caauuuacaacauuguccc

SEQ ID NO: 2330429 - RNA, 19 nt, Artificial Sequence
  Description of Artificial Sequence: Synthetic oligonucleotide
uuuaaaucagauccgagga

SEQ ID NO: 2330430 - RNA, 19 nt, Artificial Sequence
  Description of Artificial Sequence: Synthetic oligonucleotide
ggugguuuaaaucagaucc

SEQ ID NO: 2330431 - RNA, 19 nt, Artificial Sequence
  Description of Artificial Sequence: Synthetic oligonucleotide
uauacaagugcuaagugac

SEQ ID NO: 2330432 - RNA, 19 nt, Artificial Sequence
  Description of Artificial Sequence: Synthetic oligonucleotide
guuuaaaucagauccgagg

SEQ ID NO: 2330433 - RNA, 19 nt, Artificial Sequence
  Description of Artificial Sequence: Synthetic oligonucleotide
auuaaagagaggcaaagcu

SEQ ID NO: 2330434 - RNA, 19 nt, Artificial Sequence
  Description of Artificial Sequence: Synthetic oligonucleotide
uacugugaaacuaaguggc

SEQ ID NO: 2330435 - RNA, 19 nt, Artificial Sequence
  Description of Artificial Sequence: Synthetic oligonucleotide
agcaaaaccagaaauacgg

SEQ ID NO: 2330436 - RNA, 19 nt, Artificial Sequence
  Description of Artificial Sequence: Synthetic oligonucleotide
uuuucaauacaauuuacaa

SEQ ID NO: 2330437 - RNA, 19 nt, Artificial Sequence
  Description of Artificial Sequence: Synthetic oligonucleotide
uuaaagagaggcaaagcug

SEQ ID NO: 2330438 - RNA, 19 nt, Artificial Sequence
  Description of Artificial Sequence: Synthetic oligonucleotide
ugcacuagguccuacaaag

SEQ ID NO: 2330439 - RNA, 19 nt, Artificial Sequence
  Description of Artificial Sequence: Synthetic oligonucleotide
uuuuauuugugucucauuu

SEQ ID NO: 2330440 - RNA, 19 nt, Artificial Sequence
  Description of Artificial Sequence: Synthetic oligonucleotide
uaaagagaggcaaagcugu

SEQ ID NO: 2330441 - RNA, 19 nt, Artificial Sequence
  Description of Artificial Sequence: Synthetic oligonucleotide
aaaccagaaauacggaugu

SEQ ID NO: 2330442 - RNA, 19 nt, Artificial Sequence
  Description of Artificial Sequence: Synthetic oligonucleotide
aaaugaagcggucagcuaa

SEQ ID NO: 2330443 - RNA, 19 nt, Artificial Sequence
  Description of Artificial Sequence: Synthetic oligonucleotide
uuauacaagugcuaaguga

SEQ ID NO: 2330444 - RNA, 19 nt, Artificial Sequence
  Description of Artificial Sequence: Synthetic oligonucleotide
ugagaaaugaagcggucag

SEQ ID NO: 2330445 - RNA, 19 nt, Artificial Sequence
  Description of Artificial Sequence: Synthetic oligonucleotide
cuacugugaaacuaagugg

SEQ ID NO: 2330446 - RNA, 19 nt, Artificial Sequence
  Description of Artificial Sequence: Synthetic oligonucleotide
aaaaccagaaauacggaug

SEQ ID NO: 2330447 - RNA, 19 nt, Artificial Sequence
  Description of Artificial Sequence: Synthetic oligonucleotide
aauuuacaacauugucccc

SEQ ID NO: 2330448 - RNA, 19 nt, Artificial Sequence
  Description of Artificial Sequence: Synthetic oligonucleotide
agaggcaaagcugugaaac

SEQ ID NO: 2330449 - RNA, 19 nt, Artificial Sequence
  Description of Artificial Sequence: Synthetic oligonucleotide
aaauacggauguauuuucc

SEQ ID NO: 2330450 - RNA, 19 nt, Artificial Sequence
  Description of Artificial Sequence: Synthetic oligonucleotide
uacggauguauuuuccugg

SEQ ID NO: 2330451 - RNA, 19 nt, Artificial Sequence
  Description of Artificial Sequence: Synthetic oligonucleotide
aauacggauguauuuuccu

SEQ ID NO: 2330452 - RNA, 19 nt, Artificial Sequence
  Description of Artificial Sequence: Synthetic oligonucleotide
uugaaggccucuuugaacu

SEQ ID NO: 2330453 - RNA, 19 nt, Artificial Sequence
  Description of Artificial Sequence: Synthetic oligonucleotide
aaaucagauccgaggaugc

SEQ ID NO: 2330454 - RNA, 19 nt, Artificial Sequence
  Description of Artificial Sequence: Synthetic oligonucleotide
uacaauuuacaacauuguc

SEQ ID NO: 2330455 - RNA, 19 nt, Artificial Sequence
  Description of Artificial Sequence: Synthetic oligonucleotide
gauucuugccuagagaagc

SEQ ID NO: 2330456 - RNA, 19 nt, Artificial Sequence
  Description of Artificial Sequence: Synthetic oligonucleotide
augguggugguuuaaauca

SEQ ID NO: 2330457 - RNA, 19 nt, Artificial Sequence
  Description of Artificial Sequence: Synthetic oligonucleotide
ucagauccgaggaugcgcg

SEQ ID NO: 2330458 - RNA, 19 nt, Artificial Sequence
  Description of Artificial Sequence: Synthetic oligonucleotide
ugacagaaaggucugaaau

SEQ ID NO: 2330459 - RNA, 19 nt, Artificial Sequence
  Description of Artificial Sequence: Synthetic oligonucleotide
cuagguccuacaaaguggg

SEQ ID NO: 2330460 - RNA, 19 nt, Artificial Sequence
  Description of Artificial Sequence: Synthetic oligonucleotide
uccagucugauuauacaag

SEQ ID NO: 2330461 - RNA, 19 nt, Artificial Sequence
  Description of Artificial Sequence: Synthetic oligonucleotide
ugucucauuuucaauacaa

SEQ ID NO: 2330462 - RNA, 19 nt, Artificial Sequence
  Description of Artificial Sequence: Synthetic oligonucleotide
aauacauuaaagagaggca

SEQ ID NO: 2330463 - RNA, 19 nt, Artificial Sequence
  Description of Artificial Sequence: Synthetic oligonucleotide
gaaacuaaguggcaugcac

SEQ ID NO: 2330464 - RNA, 19 nt, Artificial Sequence
  Description of Artificial Sequence: Synthetic oligonucleotide
uaaaucagauccgaggaug

SEQ ID NO: 2330465 - RNA, 19 nt, Artificial Sequence
  Description of Artificial Sequence: Synthetic oligonucleotide
auuauacaagugcuaagug

SEQ ID NO: 2330466 - RNA, 19 nt, Artificial Sequence
  Description of Artificial Sequence: Synthetic oligonucleotide
ugcuaagugacagaaaggu

SEQ ID NO: 2330467 - RNA, 19 nt, Artificial Sequence
  Description of Artificial Sequence: Synthetic oligonucleotide
cuaaguggcaugcacuagg

SEQ ID NO: 2330468 - RNA, 19 nt, Artificial Sequence
  Description of Artificial Sequence: Synthetic oligonucleotide
ugugaaacuaaguggcaug

SEQ ID NO: 2330469 - RNA, 19 nt, Artificial Sequence
  Description of Artificial Sequence: Synthetic oligonucleotide
auuguccccauuuccaguc

SEQ ID NO: 2330470 - RNA, 19 nt, Artificial Sequence
  Description of Artificial Sequence: Synthetic oligonucleotide
ugauuauacaagugcuaag

SEQ ID NO: 2330471 - RNA, 19 nt, Artificial Sequence
  Description of Artificial Sequence: Synthetic oligonucleotide
acaacauuguccccauuuc

SEQ ID NO: 2330472 - RNA, 19 nt, Artificial Sequence
  Description of Artificial Sequence: Synthetic oligonucleotide
ugcacuagguccuacugug

SEQ ID NO: 2330473 - RNA, 19 nt, Artificial Sequence
  Description of Artificial Sequence: Synthetic oligonucleotide
uuuuccugggcuuucacau

SEQ ID NO: 2330474 - RNA, 19 nt, Artificial Sequence
  Description of Artificial Sequence: Synthetic oligonucleotide
agcgucugagaaaugaagc

SEQ ID NO: 2330475 - RNA, 19 nt, Artificial Sequence
  Description of Artificial Sequence: Synthetic oligonucleotide
gaagcggucagcuaacgca

SEQ ID NO: 2330476 - RNA, 19 nt, Artificial Sequence
  Description of Artificial Sequence: Synthetic oligonucleotide
uaagugacagaaaggucug

SEQ ID NO: 2330477 - RNA, 19 nt, Artificial Sequence
  Description of Artificial Sequence: Synthetic oligonucleotide
ugugucucauuuucaauac

SEQ ID NO: 2330478 - RNA, 19 nt, Artificial Sequence
  Description of Artificial Sequence: Synthetic oligonucleotide
gucugaaauaaauacauua

SEQ ID NO: 2330479 - RNA, 19 nt, Artificial Sequence
  Description of Artificial Sequence: Synthetic oligonucleotide
uugucuuucgcuccgugcu

SEQ ID NO: 2330480 - RNA, 19 nt, Artificial Sequence
  Description of Artificial Sequence: Synthetic oligonucleotide
aacauggcgaacacauugg

SEQ ID NO: 2330481 - RNA, 19 nt, Artificial Sequence
  Description of Artificial Sequence: Synthetic oligonucleotide
uugugucucauuuucaaua

SEQ ID NO: 2330482 - RNA, 19 nt, Artificial Sequence
  Description of Artificial Sequence: Synthetic oligonucleotide
cuaagugacagaaaggucu

SEQ ID NO: 2330483 - RNA, 19 nt, Artificial Sequence
  Description of Artificial Sequence: Synthetic oligonucleotide
gaaauacggauguauuuuc

SEQ ID NO: 2330484 - RNA, 19 nt, Artificial Sequence
  Description of Artificial Sequence: Synthetic oligonucleotide
uucagcucaaguucuucag

SEQ ID NO: 2330485 - RNA, 19 nt, Artificial Sequence
  Description of Artificial Sequence: Synthetic oligonucleotide
acauuaaagagaggcaaag

SEQ ID NO: 2330486 - RNA, 19 nt, Artificial Sequence
  Description of Artificial Sequence: Synthetic oligonucleotide
uacaacauuguccccauuu

SEQ ID NO: 2330487 - RNA, 19 nt, Artificial Sequence
  Description of Artificial Sequence: Synthetic oligonucleotide
uagagaagccagcauguca

SEQ ID NO: 2330488 - RNA, 19 nt, Artificial Sequence
  Description of Artificial Sequence: Synthetic oligonucleotide
uguugcuuccucgucaaag

SEQ ID NO: 2330489 - RNA, 19 nt, Artificial Sequence
  Description of Artificial Sequence: Synthetic oligonucleotide
aaugaagcggucagcuaac

SEQ ID NO: 2330490 - RNA, 19 nt, Artificial Sequence
  Description of Artificial Sequence: Synthetic oligonucleotide
acuagguccuacaaagugg

SEQ ID NO: 2330491 - RNA, 19 nt, Artificial Sequence
  Description of Artificial Sequence: Synthetic oligonucleotide
aacuaaguggcaugcacua

SEQ ID NO: 2330492 - RNA, 19 nt, Artificial Sequence
  Description of Artificial Sequence: Synthetic oligonucleotide
auuuccagucugauuauac

SEQ ID NO: 2330493 - RNA, 19 nt, Artificial Sequence
  Description of Artificial Sequence: Synthetic oligonucleotide
auuuucaauacaauuuaca

SEQ ID NO: 2330494 - RNA, 19 nt, Artificial Sequence
  Description of Artificial Sequence: Synthetic oligonucleotide
aaauccagcaaaaccagaa

SEQ ID NO: 2330495 - RNA, 19 nt, Artificial Sequence
  Description of Artificial Sequence: Synthetic oligonucleotide
ugggagaagcgucugagaa

SEQ ID NO: 2330496 - RNA, 19 nt, Artificial Sequence
  Description of Artificial Sequence: Synthetic oligonucleotide
ccuacugugaaacuaagug

SEQ ID NO: 2330497 - RNA, 19 nt, Artificial Sequence
  Description of Artificial Sequence: Synthetic oligonucleotide
ucuugccuagagaagccag

SEQ ID NO: 2330498 - RNA, 19 nt, Artificial Sequence
  Description of Artificial Sequence: Synthetic oligonucleotide
cauuuucaauacaauuuac

SEQ ID NO: 2330499 - RNA, 19 nt, Artificial Sequence
  Description of Artificial Sequence: Synthetic oligonucleotide
uuuccagucugauuauaca

SEQ ID NO: 2330500 - RNA, 19 nt, Artificial Sequence
  Description of Artificial Sequence: Synthetic oligonucleotide
aucagauccgaggaugcgc

SEQ ID NO: 2330501 - RNA, 19 nt, Artificial Sequence
  Description of Artificial Sequence: Synthetic oligonucleotide
ucugauuauacaagugcua

SEQ ID NO: 2330502 - RNA, 19 nt, Artificial Sequence
  Description of Artificial Sequence: Synthetic oligonucleotide
uacauuaaagagaggcaaa

SEQ ID NO: 2330503 - RNA, 19 nt, Artificial Sequence
  Description of Artificial Sequence: Synthetic oligonucleotide
uccagcaaaaccagaaaua

SEQ ID NO: 2330504 - RNA, 19 nt, Artificial Sequence
  Description of Artificial Sequence: Synthetic oligonucleotide
agcucaaguucuucagucg

SEQ ID NO: 2330505 - RNA, 19 nt, Artificial Sequence
  Description of Artificial Sequence: Synthetic oligonucleotide
auacauuaaagagaggcaa

SEQ ID NO: 2330506 - RNA, 19 nt, Artificial Sequence
  Description of Artificial Sequence: Synthetic oligonucleotide
uuucagcucaaguucuuca

SEQ ID NO: 2330507 - RNA, 19 nt, Artificial Sequence
  Description of Artificial Sequence: Synthetic oligonucleotide
uuccagucugauuauacaa

SEQ ID NO: 2330508 - RNA, 19 nt, Artificial Sequence
  Description of Artificial Sequence: Synthetic oligonucleotide
agaaaugaagcggucagcu

SEQ ID NO: 2330509 - RNA, 19 nt, Artificial Sequence
  Description of Artificial Sequence: Synthetic oligonucleotide
ucaaguucuucagucgucc

SEQ ID NO: 2330510 - RNA, 19 nt, Artificial Sequence
  Description of Artificial Sequence: Synthetic oligonucleotide
uuaaaucagauccgaggau

SEQ ID NO: 2330511 - RNA, 19 nt, Artificial Sequence
  Description of Artificial Sequence: Synthetic oligonucleotide
aacauuguccccauuucca

SEQ ID NO: 2330512 - RNA, 19 nt, Artificial Sequence
  Description of Artificial Sequence: Synthetic oligonucleotide
auacggauguauuuuccug

SEQ ID NO: 2330513 - RNA, 19 nt, Artificial Sequence
  Description of Artificial Sequence: Synthetic oligonucleotide
aggaguuucagcucaaguu

SEQ ID NO: 2330514 - RNA, 19 nt, Artificial Sequence
  Description of Artificial Sequence: Synthetic oligonucleotide
aauccagcaaaaccagaaa

SEQ ID NO: 2330515 - RNA, 19 nt, Artificial Sequence
  Description of Artificial Sequence: Synthetic oligonucleotide
auuugugucucauuuucaa

SEQ ID NO: 2330516 - RNA, 19 nt, Artificial Sequence
  Description of Artificial Sequence: Synthetic oligonucleotide
cuacaaagugggagaagcg

SEQ ID NO: 2330517 - RNA, 19 nt, Artificial Sequence
  Description of Artificial Sequence: Synthetic oligonucleotide
guugcuuccucgucaaagc

SEQ ID NO: 2330518 - RNA, 19 nt, Artificial Sequence
  Description of Artificial Sequence: Synthetic oligonucleotide
gauuauacaagugcuaagu

SEQ ID NO: 2330519 - RNA, 19 nt, Artificial Sequence
  Description of Artificial Sequence: Synthetic oligonucleotide
aaacuaaguggcaugcacu

SEQ ID NO: 2330520 - RNA, 19 nt, Artificial Sequence
  Description of Artificial Sequence: Synthetic oligonucleotide
agaagccagcaugucaugc

SEQ ID NO: 2330521 - RNA, 19 nt, Artificial Sequence
  Description of Artificial Sequence: Synthetic oligonucleotide
cagcaaaaccagaaauacg

SEQ ID NO: 2330522 - RNA, 19 nt, Artificial Sequence
  Description of Artificial Sequence: Synthetic oligonucleotide
acagaaaggucugaaauaa

SEQ ID NO: 2330523 - RNA, 19 nt, Artificial Sequence
  Description of Artificial Sequence: Synthetic oligonucleotide
acggauguauuuuccuggg

SEQ ID NO: 2330524 - RNA, 19 nt, Artificial Sequence
  Description of Artificial Sequence: Synthetic oligonucleotide
uuuauuugugucucauuuu

SEQ ID NO: 2330525 - RNA, 19 nt, Artificial Sequence
  Description of Artificial Sequence: Synthetic oligonucleotide
acauuguccccauuuccag

SEQ ID NO: 2330526 - RNA, 19 nt, Artificial Sequence
  Description of Artificial Sequence: Synthetic oligonucleotide
uacaaagugggagaagcgu

SEQ ID NO: 2330527 - RNA, 19 nt, Artificial Sequence
  Description of Artificial Sequence: Synthetic oligonucleotide
caacauuguccccauuucc

SEQ ID NO: 2330528 - RNA, 19 nt, Artificial Sequence
  Description of Artificial Sequence: Synthetic oligonucleotide
aaucagauccgaggaugcg

SEQ ID NO: 2330529 - RNA, 19 nt, Artificial Sequence
  Description of Artificial Sequence: Synthetic oligonucleotide
aagcgucugagaaaugaag

SEQ ID NO: 2330530 - RNA, 19 nt, Artificial Sequence
  Description of Artificial Sequence: Synthetic oligonucleotide
acaaagugggagaagcguc

SEQ ID NO: 2330531 - RNA, 19 nt, Artificial Sequence
  Description of Artificial Sequence: Synthetic oligonucleotide
cuagguccuacugugaaac

SEQ ID NO: 2330532 - RNA, 19 nt, Artificial Sequence
  Description of Artificial Sequence: Synthetic oligonucleotide
agaaauacggauguauuuu

SEQ ID NO: 2330533 - RNA, 19 nt, Artificial Sequence
  Description of Artificial Sequence: Synthetic oligonucleotide
cauuaaagagaggcaaagc

SEQ ID NO: 2330534 - RNA, 19 nt, Artificial Sequence
  Description of Artificial Sequence: Synthetic oligonucleotide
ucaauacaauuuacaacau

SEQ ID NO: 2330535 - RNA, 19 nt, Artificial Sequence
  Description of Artificial Sequence: Synthetic oligonucleotide
cacuagguccuacaaagug

SEQ ID NO: 2330536 - RNA, 19 nt, Artificial Sequence
  Description of Artificial Sequence: Synthetic oligonucleotide
auccagcaaaaccagaaau

SEQ ID NO: 2330537 - RNA, 19 nt, Artificial Sequence
  Description of Artificial Sequence: Synthetic oligonucleotide
ugcaaguccuccuugucaa

SEQ ID NO: 2330538 - RNA, 19 nt, Artificial Sequence
  Description of Artificial Sequence: Synthetic oligonucleotide
agaaaggucugaaauaaau

SEQ ID NO: 2330539 - RNA, 19 nt, Artificial Sequence
  Description of Artificial Sequence: Synthetic oligonucleotide
agaagcgucugagaaauga

SEQ ID NO: 2330540 - RNA, 19 nt, Artificial Sequence
  Description of Artificial Sequence: Synthetic oligonucleotide
uaaguggcaugcacuaggu

SEQ ID NO: 2330541 - RNA, 19 nt, Artificial Sequence
  Description of Artificial Sequence: Synthetic oligonucleotide
gugguuuaaaucagauccg

SEQ ID NO: 2330542 - RNA, 19 nt, Artificial Sequence
  Description of Artificial Sequence: Synthetic oligonucleotide
ggaguuucagcucaaguuc

SEQ ID NO: 2330543 - RNA, 19 nt, Artificial Sequence
  Description of Artificial Sequence: Synthetic oligonucleotide
aaguggcaugcacuagguc

SEQ ID NO: 2330544 - RNA, 19 nt, Artificial Sequence
  Description of Artificial Sequence: Synthetic oligonucleotide
gauguugcacgcugagggc

SEQ ID NO: 2330545 - RNA, 19 nt, Artificial Sequence
  Description of Artificial Sequence: Synthetic oligonucleotide
aggucugaaauaaauacau

SEQ ID NO: 2330546 - RNA, 19 nt, Artificial Sequence
  Description of Artificial Sequence: Synthetic oligonucleotide
cuugucuuucgcuccgugc

SEQ ID NO: 2330547 - RNA, 19 nt, Artificial Sequence
  Description of Artificial Sequence: Synthetic oligonucleotide
ucagcucaaguucuucagu

SEQ ID NO: 2330548 - RNA, 19 nt, Artificial Sequence
  Description of Artificial Sequence: Synthetic oligonucleotide
auucuugccuagagaagcc

SEQ ID NO: 2330549 - RNA, 19 nt, Artificial Sequence
  Description of Artificial Sequence: Synthetic oligonucleotide
agguccuacaaagugggag

SEQ ID NO: 2330550 - RNA, 19 nt, Artificial Sequence
  Description of Artificial Sequence: Synthetic oligonucleotide
ugguuuaaaucagauccga

SEQ ID NO: 2330551 - RNA, 19 nt, Artificial Sequence
  Description of Artificial Sequence: Synthetic oligonucleotide
ugaagcggucagcuaacgc

SEQ ID NO: 2330552 - RNA, 19 nt, Artificial Sequence
  Description of Artificial Sequence: Synthetic oligonucleotide
guugaaggccucuuugaac

SEQ ID NO: 2330553 - RNA, 19 nt, Artificial Sequence
  Description of Artificial Sequence: Synthetic oligonucleotide
ugguggugguuuaaaucag

SEQ ID NO: 2330554 - RNA, 19 nt, Artificial Sequence
  Description of Artificial Sequence: Synthetic oligonucleotide
cuugccuagagaagccagc

SEQ ID NO: 2330555 - RNA, 19 nt, Artificial Sequence
  Description of Artificial Sequence: Synthetic oligonucleotide
uuuacaacauuguccccau

SEQ ID NO: 2330556 - RNA, 19 nt, Artificial Sequence
  Description of Artificial Sequence: Synthetic oligonucleotide
gacagaaaggucugaaaua

SEQ ID NO: 2330557 - RNA, 19 nt, Artificial Sequence
  Description of Artificial Sequence: Synthetic oligonucleotide
ugggauucuugccuagaga

SEQ ID NO: 2330558 - RNA, 19 nt, Artificial Sequence
  Description of Artificial Sequence: Synthetic oligonucleotide
auuuuccugggcuuucaca

SEQ ID NO: 2330559 - RNA, 19 nt, Artificial Sequence
  Description of Artificial Sequence: Synthetic oligonucleotide
uuugugucucauuuucaau

SEQ ID NO: 2330560 - RNA, 19 nt, Artificial Sequence
  Description of Artificial Sequence: Synthetic oligonucleotide
agagaggcaaagcugugaa

SEQ ID NO: 2330561 - RNA, 19 nt, Artificial Sequence
  Description of Artificial Sequence: Synthetic oligonucleotide
cucauuuucaauacaauuu

SEQ ID NO: 2330562 - RNA, 19 nt, Artificial Sequence
  Description of Artificial Sequence: Synthetic oligonucleotide
auacaauuuacaacauugu

SEQ ID NO: 2330563 - RNA, 19 nt, Artificial Sequence
  Description of Artificial Sequence: Synthetic oligonucleotide
gcgucugagaaaugaagcg

SEQ ID NO: 2330564 - RNA, 19 nt, Artificial Sequence
  Description of Artificial Sequence: Synthetic oligonucleotide
aagcggucagcuaacgcag

SEQ ID NO: 2330565 - RNA, 19 nt, Artificial Sequence
  Description of Artificial Sequence: Synthetic oligonucleotide
gugaaacuaaguggcaugc

SEQ ID NO: 2330566 - RNA, 19 nt, Artificial Sequence
  Description of Artificial Sequence: Synthetic oligonucleotide
uccuacugugaaacuaagu

SEQ ID NO: 2330567 - RNA, 19 nt, Artificial Sequence
  Description of Artificial Sequence: Synthetic oligonucleotide
augcaaguccuccuuguca

SEQ ID NO: 2330568 - RNA, 19 nt, Artificial Sequence
  Description of Artificial Sequence: Synthetic oligonucleotide
ucaugcaaguccuccuugu

SEQ ID NO: 2330569 - RNA, 19 nt, Artificial Sequence
  Description of Artificial Sequence: Synthetic oligonucleotide
ucugagaaaugaagcgguc

SEQ ID NO: 2330570 - RNA, 19 nt, Artificial Sequence
  Description of Artificial Sequence: Synthetic oligonucleotide
uugcuuccucgucaaagca

SEQ ID NO: 2330571 - RNA, 19 nt, Artificial Sequence
  Description of Artificial Sequence: Synthetic oligonucleotide
auguugcacgcugagggcg

SEQ ID NO: 2330572 - RNA, 19 nt, Artificial Sequence
  Description of Artificial Sequence: Synthetic oligonucleotide
aagagaggcaaagcuguga

SEQ ID NO: 2330573 - RNA, 19 nt, Artificial Sequence
  Description of Artificial Sequence: Synthetic oligonucleotide
gaagccagcaugucaugca

SEQ ID NO: 2330574 - RNA, 19 nt, Artificial Sequence
  Description of Artificial Sequence: Synthetic oligonucleotide
agugggagaagcgucugag

SEQ ID NO: 2330575 - RNA, 19 nt, Artificial Sequence
  Description of Artificial Sequence: Synthetic oligonucleotide
ggucagcuaacgcagcagg

SEQ ID NO: 2330576 - RNA, 19 nt, Artificial Sequence
  Description of Artificial Sequence: Synthetic oligonucleotide
gaaaggucugaaauaaaua

SEQ ID NO: 2330577 - RNA, 19 nt, Artificial Sequence
  Description of Artificial Sequence: Synthetic oligonucleotide
aaaauccagcaaaaccaga

SEQ ID NO: 2330578 - RNA, 19 nt, Artificial Sequence
  Description of Artificial Sequence: Synthetic oligonucleotide
cagucugauuauacaagug

SEQ ID NO: 2330579 - RNA, 19 nt, Artificial Sequence
  Description of Artificial Sequence: Synthetic oligonucleotide
uccuggauggugccuguug

SEQ ID NO: 2330580 - RNA, 19 nt, Artificial Sequence
  Description of Artificial Sequence: Synthetic oligonucleotide
ccuacaaagugggagaagc

SEQ ID NO: 2330581 - RNA, 19 nt, Artificial Sequence
  Description of Artificial Sequence: Synthetic oligonucleotide
cagcucaaguucuucaguc

SEQ ID NO: 2330582 - RNA, 19 nt, Artificial Sequence
  Description of Artificial Sequence: Synthetic oligonucleotide
uguugcacgcugagggcgc

SEQ ID NO: 2330583 - RNA, 19 nt, Artificial Sequence
  Description of Artificial Sequence: Synthetic oligonucleotide
accagaaauacggauguau

SEQ ID NO: 2330584 - RNA, 19 nt, Artificial Sequence
  Description of Artificial Sequence: Synthetic oligonucleotide
ucguccuugucuuucgcuc

SEQ ID NO: 2330585 - RNA, 19 nt, Artificial Sequence
  Description of Artificial Sequence: Synthetic oligonucleotide
uauuuuccugggcuuucac

SEQ ID NO: 2330586 - RNA, 19 nt, Artificial Sequence
  Description of Artificial Sequence: Synthetic oligonucleotide
uaacgcagcaggaguuuca

SEQ ID NO: 2330587 - RNA, 19 nt, Artificial Sequence
  Description of Artificial Sequence: Synthetic oligonucleotide
uggugguuuaaaucagauc

SEQ ID NO: 2330588 - RNA, 19 nt, Artificial Sequence
  Description of Artificial Sequence: Synthetic oligonucleotide
gggauucuugccuagagaa

SEQ ID NO: 2330589 - RNA, 19 nt, Artificial Sequence
  Description of Artificial Sequence: Synthetic oligonucleotide
gagaaaugaagcggucagc

SEQ ID NO: 2330590 - RNA, 19 nt, Artificial Sequence
  Description of Artificial Sequence: Synthetic oligonucleotide
gugggauucuugccuagag

SEQ ID NO: 2330591 - RNA, 19 nt, Artificial Sequence
  Description of Artificial Sequence: Synthetic oligonucleotide
gauccgaggaugcgcgcag

SEQ ID NO: 2330592 - RNA, 19 nt, Artificial Sequence
  Description of Artificial Sequence: Synthetic oligonucleotide
cugauuauacaagugcuaa

SEQ ID NO: 2330593 - RNA, 19 nt, Artificial Sequence
  Description of Artificial Sequence: Synthetic oligonucleotide
ugucaugcaaguccuccuu

SEQ ID NO: 2330594 - RNA, 19 nt, Artificial Sequence
  Description of Artificial Sequence: Synthetic oligonucleotide
uuccugggcuuucacauuu

SEQ ID NO: 2330595 - RNA, 19 nt, Artificial Sequence
  Description of Artificial Sequence: Synthetic oligonucleotide
aaagagaggcaaagcugug

SEQ ID NO: 2330596 - RNA, 19 nt, Artificial Sequence
  Description of Artificial Sequence: Synthetic oligonucleotide
augcacuagguccuacugu

SEQ ID NO: 2330597 - RNA, 19 nt, Artificial Sequence
  Description of Artificial Sequence: Synthetic oligonucleotide
ugaaacuaaguggcaugca

SEQ ID NO: 2330598 - RNA, 19 nt, Artificial Sequence
  Description of Artificial Sequence: Synthetic oligonucleotide
gugcuaagugacagaaagg

SEQ ID NO: 2330599 - RNA, 19 nt, Artificial Sequence
  Description of Artificial Sequence: Synthetic oligonucleotide
uugccuagagaagccagca

SEQ ID NO: 2330600 - RNA, 19 nt, Artificial Sequence
  Description of Artificial Sequence: Synthetic oligonucleotide
gccuagagaagccagcaug

SEQ ID NO: 2330601 - RNA, 19 nt, Artificial Sequence
  Description of Artificial Sequence: Synthetic oligonucleotide
uguccccauuuccagucug

SEQ ID NO: 2330602 - RNA, 19 nt, Artificial Sequence
  Description of Artificial Sequence: Synthetic oligonucleotide
acauggcgaacacauugga

SEQ ID NO: 2330603 - RNA, 19 nt, Artificial Sequence
  Description of Artificial Sequence: Synthetic oligonucleotide
aagugggagaagcgucuga

SEQ ID NO: 2330604 - RNA, 19 nt, Artificial Sequence
  Description of Artificial Sequence: Synthetic oligonucleotide
ugcgcgcaggagacgaugc

SEQ ID NO: 2330605 - RNA, 19 nt, Artificial Sequence
  Description of Artificial Sequence: Synthetic oligonucleotide
cucaaguucuucagucguc

SEQ ID NO: 2330606 - RNA, 19 nt, Artificial Sequence
  Description of Artificial Sequence: Synthetic oligonucleotide
ggugccuguugcuuccucg

SEQ ID NO: 2330607 - RNA, 19 nt, Artificial Sequence
  Description of Artificial Sequence: Synthetic oligonucleotide
uguauuuuccugggcuuuc

SEQ ID NO: 2330608 - RNA, 19 nt, Artificial Sequence
  Description of Artificial Sequence: Synthetic oligonucleotide
acaugguggugguuuaaau

SEQ ID NO: 2330609 - RNA, 19 nt, Artificial Sequence
  Description of Artificial Sequence: Synthetic oligonucleotide
guccuugucuuucgcuccg

SEQ ID NO: 2330610 - RNA, 19 nt, Artificial Sequence
  Description of Artificial Sequence: Synthetic oligonucleotide
gucaugcaaguccuccuug

SEQ ID NO: 2330611 - RNA, 19 nt, Artificial Sequence
  Description of Artificial Sequence: Synthetic oligonucleotide
agugacagaaaggucugaa

SEQ ID NO: 2330612 - RNA, 19 nt, Artificial Sequence
  Description of Artificial Sequence: Synthetic oligonucleotide
acuaaguggcaugcacuag

SEQ ID NO: 2330613 - RNA, 19 nt, Artificial Sequence
  Description of Artificial Sequence: Synthetic oligonucleotide
gguccuacaaagugggaga

SEQ ID NO: 2330614 - RNA, 19 nt, Artificial Sequence
  Description of Artificial Sequence: Synthetic oligonucleotide
acgcagcaggaguuucagc

SEQ ID NO: 2330615 - RNA, 19 nt, Artificial Sequence
  Description of Artificial Sequence: Synthetic oligonucleotide
gguuuaaaucagauccgag

SEQ ID NO: 2330616 - RNA, 19 nt, Artificial Sequence
  Description of Artificial Sequence: Synthetic oligonucleotide
gaggaugcgcgcaggagac

SEQ ID NO: 2330617 - RNA, 19 nt, Artificial Sequence
  Description of Artificial Sequence: Synthetic oligonucleotide
acuagguccuacugugaaa

SEQ ID NO: 2330618 - RNA, 19 nt, Artificial Sequence
  Description of Artificial Sequence: Synthetic oligonucleotide
cccauuuccagucugauua

SEQ ID NO: 2330619 - RNA, 19 nt, Artificial Sequence
  Description of Artificial Sequence: Synthetic oligonucleotide
uccuacaaagugggagaag

SEQ ID NO: 2330620 - RNA, 19 nt, Artificial Sequence
  Description of Artificial Sequence: Synthetic oligonucleotide
uucuugccuagagaagcca

SEQ ID NO: 2330621 - RNA, 19 nt, Artificial Sequence
  Description of Artificial Sequence: Synthetic oligonucleotide
caaaaccagaaauacggau

SEQ ID NO: 2330622 - RNA, 19 nt, Artificial Sequence
  Description of Artificial Sequence: Synthetic oligonucleotide
gagaagccagcaugucaug

SEQ ID NO: 2330623 - RNA, 19 nt, Artificial Sequence
  Description of Artificial Sequence: Synthetic oligonucleotide
gauguauuuuccugggcuu

SEQ ID NO: 2330624 - RNA, 19 nt, Artificial Sequence
  Description of Artificial Sequence: Synthetic oligonucleotide
gucugauuauacaagugcu

SEQ ID NO: 2330625 - RNA, 19 nt, Artificial Sequence
  Description of Artificial Sequence: Synthetic oligonucleotide
augcacuagguccuacaaa

SEQ ID NO: 2330626 - RNA, 19 nt, Artificial Sequence
  Description of Artificial Sequence: Synthetic oligonucleotide
caugcaaguccuccuuguc

SEQ ID NO: 2330627 - RNA, 19 nt, Artificial Sequence
  Description of Artificial Sequence: Synthetic oligonucleotide
cugagaaaugaagcgguca

SEQ ID NO: 2330628 - RNA, 19 nt, Artificial Sequence
  Description of Artificial Sequence: Synthetic oligonucleotide
uccgaggaugcgcgcagga

SEQ ID NO: 2330629 - RNA, 19 nt, Artificial Sequence
  Description of Artificial Sequence: Synthetic oligonucleotide
guaggcgucggugggauuc

SEQ ID NO: 2330630 - RNA, 19 nt, Artificial Sequence
  Description of Artificial Sequence: Synthetic oligonucleotide
gugacagaaaggucugaaa

SEQ ID NO: 2330631 - RNA, 19 nt, Artificial Sequence
  Description of Artificial Sequence: Synthetic oligonucleotide
augaagcggucagcuaacg

SEQ ID NO: 2330632 - RNA, 19 nt, Artificial Sequence
  Description of Artificial Sequence: Synthetic oligonucleotide
gaagcgucugagaaaugaa

SEQ ID NO: 2330633 - RNA, 19 nt, Artificial Sequence
  Description of Artificial Sequence: Synthetic oligonucleotide
ugaaggccucuuugaacuc

SEQ ID NO: 2330634 - RNA, 19 nt, Artificial Sequence
  Description of Artificial Sequence: Synthetic oligonucleotide
acugugaaacuaaguggca

SEQ ID NO: 2330635 - RNA, 19 nt, Artificial Sequence
  Description of Artificial Sequence: Synthetic oligonucleotide
gaggcaaagcugugaaacu

SEQ ID NO: 2330636 - RNA, 19 nt, Artificial Sequence
  Description of Artificial Sequence: Synthetic oligonucleotide
uagguccuacugugaaacu

SEQ ID NO: 2330637 - RNA, 19 nt, Artificial Sequence
  Description of Artificial Sequence: Synthetic oligonucleotide
uagguccuacaaaguggga

SEQ ID NO: 2330638 - RNA, 19 nt, Artificial Sequence
  Description of Artificial Sequence: Synthetic oligonucleotide
auacaagugcuaagugaca

SEQ ID NO: 2330639 - RNA, 19 nt, Artificial Sequence
  Description of Artificial Sequence: Synthetic oligonucleotide
ugccuagagaagccagcau

SEQ ID NO: 2330640 - RNA, 19 nt, Artificial Sequence
  Description of Artificial Sequence: Synthetic oligonucleotide
gugucucauuuucaauaca

SEQ ID NO: 2330641 - RNA, 19 nt, Artificial Sequence
  Description of Artificial Sequence: Synthetic oligonucleotide
ggauucuugccuagagaag

SEQ ID NO: 2330642 - RNA, 19 nt, Artificial Sequence
  Description of Artificial Sequence: Synthetic oligonucleotide
auccagguaggcgucggug

SEQ ID NO: 2330643 - RNA, 19 nt, Artificial Sequence
  Description of Artificial Sequence: Synthetic oligonucleotide
aggcaaagcugugaaacua

SEQ ID NO: 2330644 - RNA, 19 nt, Artificial Sequence
  Description of Artificial Sequence: Synthetic oligonucleotide
caugcacuagguccuacaa

SEQ ID NO: 2330645 - RNA, 19 nt, Artificial Sequence
  Description of Artificial Sequence: Synthetic oligonucleotide
gccucuuugaacuccugga

SEQ ID NO: 2330646 - RNA, 19 nt, Artificial Sequence
  Description of Artificial Sequence: Synthetic oligonucleotide
ucggugggauucuugccua

SEQ ID NO: 2330647 - RNA, 19 nt, Artificial Sequence
  Description of Artificial Sequence: Synthetic oligonucleotide
cagcaggaguuucagcuca

SEQ ID NO: 2330648 - RNA, 19 nt, Artificial Sequence
  Description of Artificial Sequence: Synthetic oligonucleotide
uuuccugggcuuucacauu

SEQ ID NO: 2330649 - RNA, 19 nt, Artificial Sequence
  Description of Artificial Sequence: Synthetic oligonucleotide
guuucagcucaaguucuuc

SEQ ID NO: 2330650 - RNA, 19 nt, Artificial Sequence
  Description of Artificial Sequence: Synthetic oligonucleotide
cgucugagaaaugaagcgg

SEQ ID NO: 2330651 - RNA, 19 nt, Artificial Sequence
  Description of Artificial Sequence: Synthetic oligonucleotide
agauccgaggaugcgcgca

SEQ ID NO: 2330652 - RNA, 19 nt, Artificial Sequence
  Description of Artificial Sequence: Synthetic oligonucleotide
guccuacugugaaacuaag

SEQ ID NO: 2330653 - RNA, 19 nt, Artificial Sequence
  Description of Artificial Sequence: Synthetic oligonucleotide
gucggugggauucuugccu

SEQ ID NO: 2330654 - RNA, 19 nt, Artificial Sequence
  Description of Artificial Sequence: Synthetic oligonucleotide
agguccuacugugaaacua

SEQ ID NO: 2330655 - RNA, 19 nt, Artificial Sequence
  Description of Artificial Sequence: Synthetic oligonucleotide
gucugagaaaugaagcggu

SEQ ID NO: 2330656 - RNA, 19 nt, Artificial Sequence
  Description of Artificial Sequence: Synthetic oligonucleotide
cuaacgcagcaggaguuuc

SEQ ID NO: 2330657 - RNA, 19 nt, Artificial Sequence
  Description of Artificial Sequence: Synthetic oligonucleotide
caaagcugugaaacuaagu

SEQ ID NO: 2330658 - RNA, 19 nt, Artificial Sequence
  Description of Artificial Sequence: Synthetic oligonucleotide
gcaaagcugugaaacuaag

SEQ ID NO: 2330659 - RNA, 19 nt, Artificial Sequence
  Description of Artificial Sequence: Synthetic oligonucleotide
cagaaauacggauguauuu

SEQ ID NO: 2330660 - RNA, 19 nt, Artificial Sequence
  Description of Artificial Sequence: Synthetic oligonucleotide
ucgacaugguggugguuua

SEQ ID NO: 2330661 - RNA, 19 nt, Artificial Sequence
  Description of Artificial Sequence: Synthetic oligonucleotide
auguauuuuccugggcuuu

SEQ ID NO: 2330662 - RNA, 19 nt, Artificial Sequence
  Description of Artificial Sequence: Synthetic oligonucleotide
agcggucagcuaacgcagc

SEQ ID NO: 2330663 - RNA, 19 nt, Artificial Sequence
  Description of Artificial Sequence: Synthetic oligonucleotide
cacuagguccuacugugaa

SEQ ID NO: 2330664 - RNA, 19 nt, Artificial Sequence
  Description of Artificial Sequence: Synthetic oligonucleotide
gagaggcaaagcugugaaa

SEQ ID NO: 2330665 - RNA, 19 nt, Artificial Sequence
  Description of Artificial Sequence: Synthetic oligonucleotide
aagugcuaagugacagaaa

SEQ ID NO: 2330666 - RNA, 19 nt, Artificial Sequence
  Description of Artificial Sequence: Synthetic oligonucleotide
gacaugguggugguuuaaa

SEQ ID NO: 2330667 - RNA, 19 nt, Artificial Sequence
  Description of Artificial Sequence: Synthetic oligonucleotide
gcgucggugggauucuugc

SEQ ID NO: 2330668 - RNA, 19 nt, Artificial Sequence
  Description of Artificial Sequence: Synthetic oligonucleotide
ugccuguugcuuccucguc

SEQ ID NO: 2330669 - RNA, 19 nt, Artificial Sequence
  Description of Artificial Sequence: Synthetic oligonucleotide
gcgaacacauuggauguug

SEQ ID NO: 2330670 - RNA, 19 nt, Artificial Sequence
  Description of Artificial Sequence: Synthetic oligonucleotide
cagaaaggucugaaauaaa

SEQ ID NO: 2330671 - RNA, 19 nt, Artificial Sequence
  Description of Artificial Sequence: Synthetic oligonucleotide
guauuuuccugggcuuuca

SEQ ID NO: 2330672 - RNA, 19 nt, Artificial Sequence
  Description of Artificial Sequence: Synthetic oligonucleotide
gugggagaagcgucugaga

SEQ ID NO: 2330673 - RNA, 19 nt, Artificial Sequence
  Description of Artificial Sequence: Synthetic oligonucleotide
ucauggcauccagguaggc

SEQ ID NO: 2330674 - RNA, 19 nt, Artificial Sequence
  Description of Artificial Sequence: Synthetic oligonucleotide
cagauccgaggaugcgcgc

SEQ ID NO: 2330675 - RNA, 19 nt, Artificial Sequence
  Description of Artificial Sequence: Synthetic oligonucleotide
ggagaagcgucugagaaau

SEQ ID NO: 2330676 - RNA, 19 nt, Artificial Sequence
  Description of Artificial Sequence: Synthetic oligonucleotide
gcuaagugacagaaagguc

SEQ ID NO: 2330677 - RNA, 19 nt, Artificial Sequence
  Description of Artificial Sequence: Synthetic oligonucleotide
caauacaauuuacaacauu

SEQ ID NO: 2330678 - RNA, 19 nt, Artificial Sequence
  Description of Artificial Sequence: Synthetic oligonucleotide
aaccagaaauacggaugua

SEQ ID NO: 2330679 - RNA, 19 nt, Artificial Sequence
  Description of Artificial Sequence: Synthetic oligonucleotide
uuacaacauuguccccauu

SEQ ID NO: 2330680 - RNA, 19 nt, Artificial Sequence
  Description of Artificial Sequence: Synthetic oligonucleotide
agccagcaugucaugcaag

SEQ ID NO: 2330681 - RNA, 19 nt, Artificial Sequence
  Description of Artificial Sequence: Synthetic oligonucleotide
gucagcuaacgcagcagga

SEQ ID NO: 2330682 - RNA, 19 nt, Artificial Sequence
  Description of Artificial Sequence: Synthetic oligonucleotide
gguccuacugugaaacuaa

SEQ ID NO: 2330683 - RNA, 19 nt, Artificial Sequence
  Description of Artificial Sequence: Synthetic oligonucleotide
uccccauuuccagucugau

SEQ ID NO: 2330684 - RNA, 19 nt, Artificial Sequence
  Description of Artificial Sequence: Synthetic oligonucleotide
agcuaacgcagcaggaguu

SEQ ID NO: 2330685 - RNA, 19 nt, Artificial Sequence
  Description of Artificial Sequence: Synthetic oligonucleotide
gcaaaaccagaaauacgga

SEQ ID NO: 2330686 - RNA, 19 nt, Artificial Sequence
  Description of Artificial Sequence: Synthetic oligonucleotide
augcgcgcaggagacgaug

SEQ ID NO: 2330687 - RNA, 19 nt, Artificial Sequence
  Description of Artificial Sequence: Synthetic oligonucleotide
cgaacacauuggauguugc

SEQ ID NO: 2330688 - RNA, 19 nt, Artificial Sequence
  Description of Artificial Sequence: Synthetic oligonucleotide
ugcacgcugagggcgcuuc

SEQ ID NO: 2330689 - RNA, 19 nt, Artificial Sequence
  Description of Artificial Sequence: Synthetic oligonucleotide
gcucaaguucuucagucgu

SEQ ID NO: 2330690 - RNA, 19 nt, Artificial Sequence
  Description of Artificial Sequence: Synthetic oligonucleotide
aggaugcgcgcaggagacg

SEQ ID NO: 2330691 - RNA, 19 nt, Artificial Sequence
  Description of Artificial Sequence: Synthetic oligonucleotide
auccgaggaugcgcgcagg

SEQ ID NO: 2330692 - RNA, 19 nt, Artificial Sequence
  Description of Artificial Sequence: Synthetic oligonucleotide
gccuguugcuuccucguca

SEQ ID NO: 2330693 - RNA, 19 nt, Artificial Sequence
  Description of Artificial Sequence: Synthetic oligonucleotide
gggagaagcgucugagaaa

SEQ ID NO: 2330694 - RNA, 19 nt, Artificial Sequence
  Description of Artificial Sequence: Synthetic oligonucleotide
gagaagcgucugagaaaug

SEQ ID NO: 2330695 - RNA, 19 nt, Artificial Sequence
  Description of Artificial Sequence: Synthetic oligonucleotide
cauuguccccauuuccagu

SEQ ID NO: 2330696 - RNA, 19 nt, Artificial Sequence
  Description of Artificial Sequence: Synthetic oligonucleotide
gguggugguuuaaaucaga

SEQ ID NO: 2330697 - RNA, 19 nt, Artificial Sequence
  Description of Artificial Sequence: Synthetic oligonucleotide
uggugccuguugcuuccuc

SEQ ID NO: 2330698 - RNA, 19 nt, Artificial Sequence
  Description of Artificial Sequence: Synthetic oligonucleotide
caggaguuucagcucaagu

SEQ ID NO: 2330699 - RNA, 19 nt, Artificial Sequence
  Description of Artificial Sequence: Synthetic oligonucleotide
ggcaaagcugugaaacuaa

SEQ ID NO: 2330700 - RNA, 19 nt, Artificial Sequence
  Description of Artificial Sequence: Synthetic oligonucleotide
uccugggcuuucacauuuu

SEQ ID NO: 2330701 - RNA, 19 nt, Artificial Sequence
  Description of Artificial Sequence: Synthetic oligonucleotide
guggcaugcacuagguccu

SEQ ID NO: 2330702 - RNA, 19 nt, Artificial Sequence
  Description of Artificial Sequence: Synthetic oligonucleotide
cguccuugucuuucgcucc

SEQ ID NO: 2330703 - RNA, 19 nt, Artificial Sequence
  Description of Artificial Sequence: Synthetic oligonucleotide
gcaugcacuagguccuaca

SEQ ID NO: 2330704 - RNA, 19 nt, Artificial Sequence
  Description of Artificial Sequence: Synthetic oligonucleotide
aguuucagcucaaguucuu

SEQ ID NO: 2330705 - RNA, 19 nt, Artificial Sequence
  Description of Artificial Sequence: Synthetic oligonucleotide
cagcuaacgcagcaggagu

SEQ ID NO: 2330706 - RNA, 19 nt, Artificial Sequence
  Description of Artificial Sequence: Synthetic oligonucleotide
gucucauuuucaauacaau

SEQ ID NO: 2330707 - RNA, 19 nt, Artificial Sequence
  Description of Artificial Sequence: Synthetic oligonucleotide
ccagucugauuauacaagu

SEQ ID NO: 2330708 - RNA, 19 nt, Artificial Sequence
  Description of Artificial Sequence: Synthetic oligonucleotide
ccuagagaagccagcaugu

SEQ ID NO: 2330709 - RNA, 19 nt, Artificial Sequence
  Description of Artificial Sequence: Synthetic oligonucleotide
uaggcgucggugggauucu

SEQ ID NO: 2330710 - RNA, 19 nt, Artificial Sequence
  Description of Artificial Sequence: Synthetic oligonucleotide
ggaugcgcgcaggagacga

SEQ ID NO: 2330711 - RNA, 19 nt, Artificial Sequence
  Description of Artificial Sequence: Synthetic oligonucleotide
guggugguuuaaaucagau

SEQ ID NO: 2330712 - RNA, 19 nt, Artificial Sequence
  Description of Artificial Sequence: Synthetic oligonucleotide
agguaggcgucggugggau

SEQ ID NO: 2330713 - RNA, 19 nt, Artificial Sequence
  Description of Artificial Sequence: Synthetic oligonucleotide
uccuugucuuucgcuccgu

SEQ ID NO: 2330714 - RNA, 19 nt, Artificial Sequence
  Description of Artificial Sequence: Synthetic oligonucleotide
cugugaaacuaaguggcau

SEQ ID NO: 2330715 - RNA, 19 nt, Artificial Sequence
  Description of Artificial Sequence: Synthetic oligonucleotide
gccagcaugucaugcaagu

SEQ ID NO: 2330716 - RNA, 19 nt, Artificial Sequence
  Description of Artificial Sequence: Synthetic oligonucleotide
gcugugaaacuaaguggca

SEQ ID NO: 2330717 - RNA, 19 nt, Artificial Sequence
  Description of Artificial Sequence: Synthetic oligonucleotide
gugccuguugcuuccucgu

SEQ ID NO: 2330718 - RNA, 19 nt, Artificial Sequence
  Description of Artificial Sequence: Synthetic oligonucleotide
gcauccagguaggcgucgg

SEQ ID NO: 2330719 - RNA, 19 nt, Artificial Sequence
  Description of Artificial Sequence: Synthetic oligonucleotide
guccccauuuccagucuga

SEQ ID NO: 2330720 - RNA, 19 nt, Artificial Sequence
  Description of Artificial Sequence: Synthetic oligonucleotide
ggcauccagguaggcgucg

SEQ ID NO: 2330721 - RNA, 19 nt, Artificial Sequence
  Description of Artificial Sequence: Synthetic oligonucleotide
gcgcgcaggagacgaugcg

SEQ ID NO: 2330722 - RNA, 19 nt, Artificial Sequence
  Description of Artificial Sequence: Synthetic oligonucleotide
cauuuccagucugauuaua

SEQ ID NO: 2330723 - RNA, 19 nt, Artificial Sequence
  Description of Artificial Sequence: Synthetic oligonucleotide
gcaggaguuucagcucaag

SEQ ID NO: 2330724 - RNA, 19 nt, Artificial Sequence
  Description of Artificial Sequence: Synthetic oligonucleotide
cgcagcaggaguuucagcu

SEQ ID NO: 2330725 - RNA, 19 nt, Artificial Sequence
  Description of Artificial Sequence: Synthetic oligonucleotide
gcggucagcuaacgcagca

SEQ ID NO: 2330726 - RNA, 19 nt, Artificial Sequence
  Description of Artificial Sequence: Synthetic oligonucleotide
gcgcaggagacgaugcgac

SEQ ID NO: 2330727 - RNA, 19 nt, Artificial Sequence
  Description of Artificial Sequence: Synthetic oligonucleotide
ccuugucuuucgcuccgug

SEQ ID NO: 2330728 - RNA, 19 nt, Artificial Sequence
  Description of Artificial Sequence: Synthetic oligonucleotide
ggugggauucuugccuaga

SEQ ID NO: 2330729 - RNA, 19 nt, Artificial Sequence
  Description of Artificial Sequence: Synthetic oligonucleotide
ccagaaauacggauguauu

SEQ ID NO: 2330730 - RNA, 19 nt, Artificial Sequence
  Description of Artificial Sequence: Synthetic oligonucleotide
cgaggaugcgcgcaggaga

SEQ ID NO: 2330731 - RNA, 19 nt, Artificial Sequence
  Description of Artificial Sequence: Synthetic oligonucleotide
cgucggugggauucuugcc

SEQ ID NO: 2330732 - RNA, 19 nt, Artificial Sequence
  Description of Artificial Sequence: Synthetic oligonucleotide
ccuguugcuuccucgucaa

SEQ ID NO: 2330733 - RNA, 19 nt, Artificial Sequence
  Description of Artificial Sequence: Synthetic oligonucleotide
agcaggaguuucagcucaa

SEQ ID NO: 2330734 - RNA, 19 nt, Artificial Sequence
  Description of Artificial Sequence: Synthetic oligonucleotide
gcaugcacuagguccuacu

SEQ ID NO: 2330735 - RNA, 19 nt, Artificial Sequence
  Description of Artificial Sequence: Synthetic oligonucleotide
auggugccuguugcuuccu

SEQ ID NO: 2330736 - RNA, 19 nt, Artificial Sequence
  Description of Artificial Sequence: Synthetic oligonucleotide
ggcgucggugggauucuug

SEQ ID NO: 2330737 - RNA, 19 nt, Artificial Sequence
  Description of Artificial Sequence: Synthetic oligonucleotide
cgcaggagacgaugcgacc

SEQ ID NO: 2330738 - RNA, 19 nt, Artificial Sequence
  Description of Artificial Sequence: Synthetic oligonucleotide
uggcaugcacuagguccua

SEQ ID NO: 2330739 - RNA, 19 nt, Artificial Sequence
  Description of Artificial Sequence: Synthetic oligonucleotide
cagguaggcgucgguggga

SEQ ID NO: 2330740 - RNA, 19 nt, Artificial Sequence
  Description of Artificial Sequence: Synthetic oligonucleotide
ccgaggaugcgcgcaggag

SEQ ID NO: 2330741 - RNA, 19 nt, Artificial Sequence
  Description of Artificial Sequence: Synthetic oligonucleotide
ggcaugcacuagguccuac

SEQ ID NO: 2330742 - RNA, 19 nt, Artificial Sequence
  Description of Artificial Sequence: Synthetic oligonucleotide
gcacuagguccuacuguga

SEQ ID NO: 2330743 - RNA, 19 nt, Artificial Sequence
  Description of Artificial Sequence: Synthetic oligonucleotide
cggucagcuaacgcagcag

SEQ ID NO: 2330744 - RNA, 19 nt, Artificial Sequence
  Description of Artificial Sequence: Synthetic oligonucleotide
cauccagguaggcgucggu

SEQ ID NO: 2330745 - RNA, 19 nt, Artificial Sequence
  Description of Artificial Sequence: Synthetic oligonucleotide
cggugggauucuugccuag

SEQ ID NO: 2330746 - RNA, 19 nt, Artificial Sequence
  Description of Artificial Sequence: Synthetic oligonucleotide
uugcacgcugagggcgcuu

SEQ ID NO: 2330747 - RNA, 19 nt, Artificial Sequence
  Description of Artificial Sequence: Synthetic oligonucleotide
gcacuagguccuacaaagu

SEQ ID NO: 2330748 - RNA, 19 nt, Artificial Sequence
  Description of Artificial Sequence: Synthetic oligonucleotide
gaugcgcgcaggagacgau

SEQ ID NO: 2330749 - RNA, 19 nt, Artificial Sequence
  Description of Artificial Sequence: Synthetic oligonucleotide
guugcacgcugagggcgcu

SEQ ID NO: 2330750 - RNA, 19 nt, Artificial Sequence
  Description of Artificial Sequence: Synthetic oligonucleotide
gcuaacgcagcaggaguuu

SEQ ID NO: 2330751 - RNA, 19 nt, Artificial Sequence
  Description of Artificial Sequence: Synthetic oligonucleotide
ccauuuccagucugauuau

SEQ ID NO: 2330752 - RNA, 19 nt, Artificial Sequence
  Description of Artificial Sequence: Synthetic oligonucleotide
gcaaguccuccuugucaau

SEQ ID NO: 2330753 - RNA, 19 nt, Artificial Sequence
  Description of Artificial Sequence: Synthetic oligonucleotide
cgcgcaggagacgaugcga

SEQ ID NO: 2330754 - RNA, 19 nt, Artificial Sequence
  Description of Artificial Sequence: Synthetic oligonucleotide
aggcgucggugggauucuu

SEQ ID NO: 2330755 - RNA, 19 nt, Artificial Sequence
  Description of Artificial Sequence: Synthetic oligonucleotide
cacgcugagggcgcuucuu

SEQ ID NO: 2330756 - RNA, 19 nt, Artificial Sequence
  Description of Artificial Sequence: Synthetic oligonucleotide
ggcgaacacauuggauguu

SEQ ID NO: 2330757 - RNA, 19 nt, Artificial Sequence
  Description of Artificial Sequence: Synthetic oligonucleotide
ccccauuuccagucugauu

SEQ ID NO: 2330758 - RNA, 19 nt, Artificial Sequence
  Description of Artificial Sequence: Synthetic oligonucleotide
gcacgcugagggcgcuucu

SEQ ID NO: 2330759 - RNA, 19 nt, Artificial Sequence
  Description of Artificial Sequence: Synthetic oligonucleotide
gguaggcgucggugggauu

SEQ ID NO: 2330760 - RNA, 19 nt, Artificial Sequence
  Description of Artificial Sequence: Synthetic oligonucleotide
uuuucgaucaaguacaggg

SEQ ID NO: 2330761 - RNA, 19 nt, Artificial Sequence
  Description of Artificial Sequence: Synthetic oligonucleotide
auaugguugucauagaugg

SEQ ID NO: 2330762 - RNA, 19 nt, Artificial Sequence
  Description of Artificial Sequence: Synthetic oligonucleotide
aacacuaggaggucagugc

SEQ ID NO: 2330763 - RNA, 19 nt, Artificial Sequence
  Description of Artificial Sequence: Synthetic oligonucleotide
aauaauuauggcaagcaag

SEQ ID NO: 2330764 - RNA, 19 nt, Artificial Sequence
  Description of Artificial Sequence: Synthetic oligonucleotide
uaaacucuaauccaaccag

SEQ ID NO: 2330765 - RNA, 19 nt, Artificial Sequence
  Description of Artificial Sequence: Synthetic oligonucleotide
  modified_base (10)..(10): a, c, u, g, unknown or other
cucauauucncccuuuucg

SEQ ID NO: 2330766 - RNA, 19 nt, Artificial Sequence
  Description of Artificial Sequence: Synthetic oligonucleotide
ucaaccuaacacuaggagg

SEQ ID NO: 2330767 - RNA, 19 nt, Artificial Sequence
  Description of Artificial Sequence: Synthetic oligonucleotide
uuuaucaucugacaagcac

SEQ ID NO: 2330768 - RNA, 19 nt, Artificial Sequence
  Description of Artificial Sequence: Synthetic oligonucleotide
uucuuauggacgcuggagg

SEQ ID NO: 2330769 - RNA, 19 nt, Artificial Sequence
  Description of Artificial Sequence: Synthetic oligonucleotide
cucuaauccaaccagguag

SEQ ID NO: 2330770 - RNA, 19 nt, Artificial Sequence
  Description of Artificial Sequence: Synthetic oligonucleotide
uuaucaucugacaagcaca

SEQ ID NO: 2330771 - RNA, 19 nt, Artificial Sequence
  Description of Artificial Sequence: Synthetic oligonucleotide
aauccaaccagguagucaa

SEQ ID NO: 2330772 - RNA, 19 nt, Artificial Sequence
  Description of Artificial Sequence: Synthetic oligonucleotide
agugccaauaauuauggca

SEQ ID NO: 2330773 - RNA, 19 nt, Artificial Sequence
  Description of Artificial Sequence: Synthetic oligonucleotide
uuucguagacacuuuauca

SEQ ID NO: 2330774 - RNA, 19 nt, Artificial Sequence
  Description of Artificial Sequence: Synthetic oligonucleotide
aauuauggcaagcaagcau

SEQ ID NO: 2330775 - RNA, 19 nt, Artificial Sequence
  Description of Artificial Sequence: Synthetic oligonucleotide
  modified_base (7)..(7): a, c, u, g, unknown or other
auauucncccuuuucgauc

SEQ ID NO: 2330776 - RNA, 19 nt, Artificial Sequence
  Description of Artificial Sequence: Synthetic oligonucleotide
aaucuggacgauucgguag

SEQ ID NO: 2330777 - RNA, 19 nt, Artificial Sequence
  Description of Artificial Sequence: Synthetic oligonucleotide
aacagaaggauguggucuc

SEQ ID NO: 2330778 - RNA, 19 nt, Artificial Sequence
  Description of Artificial Sequence: Synthetic oligonucleotide
aggauucccguucucagcc

SEQ ID NO: 2330779 - RNA, 19 nt, Artificial Sequence
  Description of Artificial Sequence: Synthetic oligonucleotide
uagucaaccuaacacuagg

SEQ ID NO: 2330780 - RNA, 19 nt, Artificial Sequence
  Description of Artificial Sequence: Synthetic oligonucleotide
aucuugugccaauuggugc

SEQ ID NO: 2330781 - RNA, 19 nt, Artificial Sequence
  Description of Artificial Sequence: Synthetic oligonucleotide
aagacgguagagcauggag

SEQ ID NO: 2330782 - RNA, 19 nt, Artificial Sequence
  Description of Artificial Sequence: Synthetic oligonucleotide
aaggauguggucucgggug

SEQ ID NO: 2330783 - RNA, 19 nt, Artificial Sequence
  Description of Artificial Sequence: Synthetic oligonucleotide
uuuccuaaacucuaaucca

SEQ ID NO: 2330784 - RNA, 19 nt, Artificial Sequence
  Description of Artificial Sequence: Synthetic oligonucleotide
  modified_base (18)..(18): a, c, u, g, unknown or other
agugcagccucauauucnc

SEQ ID NO: 2330785 - RNA, 19 nt, Artificial Sequence
  Description of Artificial Sequence: Synthetic oligonucleotide
uucgaucaaguacagggcc

SEQ ID NO: 2330786 - RNA, 19 nt, Artificial Sequence
  Description of Artificial Sequence: Synthetic oligonucleotide
ugagcuguaggccaagaac

SEQ ID NO: 2330787 - RNA, 19 nt, Artificial Sequence
  Description of Artificial Sequence: Synthetic oligonucleotide
uugaacagaaggauguggu

SEQ ID NO: 2330788 - RNA, 19 nt, Artificial Sequence
  Description of Artificial Sequence: Synthetic oligonucleotide
  modified_base (16)..(16): a, c, u, g, unknown or other
ugcagccucauauucnccc

SEQ ID NO: 2330789 - RNA, 19 nt, Artificial Sequence
  Description of Artificial Sequence: Synthetic oligonucleotide
ugaaucagcagcugguuga

SEQ ID NO: 2330790 - RNA, 19 nt, Artificial Sequence
  Description of Artificial Sequence: Synthetic oligonucleotide
auagaugguuagugcagcc

SEQ ID NO: 2330791 - RNA, 19 nt, Artificial Sequence
  Description of Artificial Sequence: Synthetic oligonucleotide
  modified_base (9)..(9): a, c, u, g, unknown or other
ucauauucncccuuuucga

SEQ ID NO: 2330792 - RNA, 19 nt, Artificial Sequence
  Description of Artificial Sequence: Synthetic oligonucleotide
ucaaguacagggcccagug

SEQ ID NO: 2330793 - RNA, 19 nt, Artificial Sequence
  Description of Artificial Sequence: Synthetic oligonucleotide
uuucgaucaaguacagggc

SEQ ID NO: 2330794 - RNA, 19 nt, Artificial Sequence
  Description of Artificial Sequence: Synthetic oligonucleotide
cacugcauaagauggacag

SEQ ID NO: 2330795 - RNA, 19 nt, Artificial Sequence
  Description of Artificial Sequence: Synthetic oligonucleotide
  modified_base (6)..(6): a, c, u, g, unknown or other
uauucncccuuuucgauca

SEQ ID NO: 2330796 - RNA, 19 nt, Artificial Sequence
  Description of Artificial Sequence: Synthetic oligonucleotide
cacuuuaucaucugacaag

SEQ ID NO: 2330797 - RNA, 19 nt, Artificial Sequence
  Description of Artificial Sequence: Synthetic oligonucleotide
agaugguuagugcagccuc

SEQ ID NO: 2330798 - RNA, 19 nt, Artificial Sequence
  Description of Artificial Sequence: Synthetic oligonucleotide
aaacucuaauccaaccagg

SEQ ID NO: 2330799 - RNA, 19 nt, Artificial Sequence
  Description of Artificial Sequence: Synthetic oligonucleotide
cagguagucaaccuaacac

SEQ ID NO: 2330800 - RNA, 19 nt, Artificial Sequence
  Description of Artificial Sequence: Synthetic oligonucleotide
ucuaauccaaccagguagu

SEQ ID NO: 2330801 - RNA, 19 nt, Artificial Sequence
  Description of Artificial Sequence: Synthetic oligonucleotide
ugucauagaugguuagugc

SEQ ID NO: 2330802 - RNA, 19 nt, Artificial Sequence
  Description of Artificial Sequence: Synthetic oligonucleotide
aucgcgcuccaucagaagg

SEQ ID NO: 2330803 - RNA, 19 nt, Artificial Sequence
  Description of Artificial Sequence: Synthetic oligonucleotide
auaagauggacaguggcug

SEQ ID NO: 2330804 - RNA, 19 nt, Artificial Sequence
  Description of Artificial Sequence: Synthetic oligonucleotide
aagcacacccagcuguuuc

SEQ ID NO: 2330805 - RNA, 19 nt, Artificial Sequence
  Description of Artificial Sequence: Synthetic oligonucleotide
gauaugguugucauagaug

SEQ ID NO: 2330806 - RNA, 19 nt, Artificial Sequence
  Description of Artificial Sequence: Synthetic oligonucleotide
gaggccaucaggaagugag

SEQ ID NO: 2330807 - RNA, 19 nt, Artificial Sequence
  Description of Artificial Sequence: Synthetic oligonucleotide
agguaggacagccugccac

SEQ ID NO: 2330808 - RNA, 19 nt, Artificial Sequence
  Description of Artificial Sequence: Synthetic oligonucleotide
uguaggguagucagcagcu

SEQ ID NO: 2330809 - RNA, 19 nt, Artificial Sequence
  Description of Artificial Sequence: Synthetic oligonucleotide
uagcggauuggcaagagaa

SEQ ID NO: 2330810 - RNA, 19 nt, Artificial Sequence
  Description of Artificial Sequence: Synthetic oligonucleotide
ucuugugccaauuggugcu

SEQ ID NO: 2330811 - RNA, 19 nt, Artificial Sequence
  Description of Artificial Sequence: Synthetic oligonucleotide
ugcauaagauggacagugg

SEQ ID NO: 2330812 - RNA, 19 nt, Artificial Sequence
  Description of Artificial Sequence: Synthetic oligonucleotide
gaagugagcaucauugaac

SEQ ID NO: 2330813 - RNA, 19 nt, Artificial Sequence
  Description of Artificial Sequence: Synthetic oligonucleotide
aagaaccuggcuuggguca

SEQ ID NO: 2330814 - RNA, 19 nt, Artificial Sequence
  Description of Artificial Sequence: Synthetic oligonucleotide
ugcacugaacuccagccca

SEQ ID NO: 2330815 - RNA, 19 nt, Artificial Sequence
  Description of Artificial Sequence: Synthetic oligonucleotide
agguagucaaccuaacacu

SEQ ID NO: 2330816 - RNA, 19 nt, Artificial Sequence
  Description of Artificial Sequence: Synthetic oligonucleotide
cauaucagaguccuuccag

SEQ ID NO: 2330817 - RNA, 19 nt, Artificial Sequence
  Description of Artificial Sequence: Synthetic oligonucleotide
gagcuguaggccaagaacc

SEQ ID NO: 2330818 - RNA, 19 nt, Artificial Sequence
  Description of Artificial Sequence: Synthetic oligonucleotide
agacgguagagcauggagc

SEQ ID NO: 2330819 - RNA, 19 nt, Artificial Sequence
  Description of Artificial Sequence: Synthetic oligonucleotide
aagagacaccccuuccauc

SEQ ID NO: 2330820 - RNA, 19 nt, Artificial Sequence
  Description of Artificial Sequence: Synthetic oligonucleotide
uucguagacacuuuaucau

SEQ ID NO: 2330821 - RNA, 19 nt, Artificial Sequence
  Description of Artificial Sequence: Synthetic oligonucleotide
uggcaagagaaguucuagg

SEQ ID NO: 2330822 - RNA, 19 nt, Artificial Sequence
  Description of Artificial Sequence: Synthetic oligonucleotide
uguuuccuaaacucuaauc

SEQ ID NO: 2330823 - RNA, 19 nt, Artificial Sequence
  Description of Artificial Sequence: Synthetic oligonucleotide
gucaaccuaacacuaggag

SEQ ID NO: 2330824 - RNA, 19 nt, Artificial Sequence
  Description of Artificial Sequence: Synthetic oligonucleotide
agucacagguaggacagcc

SEQ ID NO: 2330825 - RNA, 19 nt, Artificial Sequence
  Description of Artificial Sequence: Synthetic oligonucleotide
ugggucacugcauaagaug

SEQ ID NO: 2330826 - RNA, 19 nt, Artificial Sequence
  Description of Artificial Sequence: Synthetic oligonucleotide
ucaggauucccguucucag

SEQ ID NO: 2330827 - RNA, 19 nt, Artificial Sequence
  Description of Artificial Sequence: Synthetic oligonucleotide
uugauggccgaaugaauca

SEQ ID NO: 2330828 - RNA, 19 nt, Artificial Sequence
  Description of Artificial Sequence: Synthetic oligonucleotide
uuccuaaacucuaauccaa

SEQ ID NO: 2330829 - RNA, 19 nt, Artificial Sequence
  Description of Artificial Sequence: Synthetic oligonucleotide
cuuagucacagguaggaca

SEQ ID NO: 2330830 - RNA, 19 nt, Artificial Sequence
  Description of Artificial Sequence: Synthetic oligonucleotide
cuaaacucuaauccaacca

SEQ ID NO: 2330831 - RNA, 19 nt, Artificial Sequence
  Description of Artificial Sequence: Synthetic oligonucleotide
gugaguuggguuucaaggc

SEQ ID NO: 2330832 - RNA, 19 nt, Artificial Sequence
  Description of Artificial Sequence: Synthetic oligonucleotide
uucgguagcggauuggcaa

SEQ ID NO: 2330833 - RNA, 19 nt, Artificial Sequence
  Description of Artificial Sequence: Synthetic oligonucleotide
ucgaucaaguacagggccc

SEQ ID NO: 2330834 - RNA, 19 nt, Artificial Sequence
  Description of Artificial Sequence: Synthetic oligonucleotide
cuuccaguggccuucggug

SEQ ID NO: 2330835 - RNA, 19 nt, Artificial Sequence
  Description of Artificial Sequence: Synthetic oligonucleotide
ugguugaagacaucucucu

SEQ ID NO: 2330836 - RNA, 19 nt, Artificial Sequence
  Description of Artificial Sequence: Synthetic oligonucleotide
auucuuauggacgcuggag

SEQ ID NO: 2330837 - RNA, 19 nt, Artificial Sequence
  Description of Artificial Sequence: Synthetic oligonucleotide
gacaguggcugccuugcgg

SEQ ID NO: 2330838 - RNA, 19 nt, Artificial Sequence
  Description of Artificial Sequence: Synthetic oligonucleotide
uuggcaagagaaguucuag

SEQ ID NO: 2330839 - RNA, 19 nt, Artificial Sequence
  Description of Artificial Sequence: Synthetic oligonucleotide
gacuuggucaggauucccg

SEQ ID NO: 2330840 - RNA, 19 nt, Artificial Sequence
  Description of Artificial Sequence: Synthetic oligonucleotide
ggccgaaugaaucagcagc

SEQ ID NO: 2330841 - RNA, 19 nt, Artificial Sequence
  Description of Artificial Sequence: Synthetic oligonucleotide
  modified_base (3)..(3): a, c, u, g, unknown or other
ucncccuuuucgaucaagu

SEQ ID NO: 2330842 - RNA, 19 nt, Artificial Sequence
  Description of Artificial Sequence: Synthetic oligonucleotide
uagcauggcaccacuggcc

SEQ ID NO: 2330843 - RNA, 19 nt, Artificial Sequence
  Description of Artificial Sequence: Synthetic oligonucleotide
uccuaaacucuaauccaac

SEQ ID NO: 2330844 - RNA, 19 nt, Artificial Sequence
  Description of Artificial Sequence: Synthetic oligonucleotide
ugaagacgguagagcaugg

SEQ ID NO: 2330845 - RNA, 19 nt, Artificial Sequence
  Description of Artificial Sequence: Synthetic oligonucleotide
gaaguucuaggacuugguc

SEQ ID NO: 2330846 - RNA, 19 nt, Artificial Sequence
  Description of Artificial Sequence: Synthetic oligonucleotide
uggacgauucgguagcgga

SEQ ID NO: 2330847 - RNA, 19 nt, Artificial Sequence
  Description of Artificial Sequence: Synthetic oligonucleotide
ucgggugugcuucuuaguc

SEQ ID NO: 2330848 - RNA, 19 nt, Artificial Sequence
  Description of Artificial Sequence: Synthetic oligonucleotide
cuguaggguagucagcagc

SEQ ID NO: 2330849 - RNA, 19 nt, Artificial Sequence
  Description of Artificial Sequence: Synthetic oligonucleotide
  modified_base (19)..(19): a, c, u, g, unknown or other
uagugcagccucauauucn

SEQ ID NO: 2330850 - RNA, 19 nt, Artificial Sequence
  Description of Artificial Sequence: Synthetic oligonucleotide
uccuguaggguagucagca

SEQ ID NO: 2330851 - RNA, 19 nt, Artificial Sequence
  Description of Artificial Sequence: Synthetic oligonucleotide
ucguagacacuuuaucauc

SEQ ID NO: 2330852 - RNA, 19 nt, Artificial Sequence
  Description of Artificial Sequence: Synthetic oligonucleotide
ucccuuguggucuggaggu

SEQ ID NO: 2330853 - RNA, 19 nt, Artificial Sequence
  Description of Artificial Sequence: Synthetic oligonucleotide
uaacacuaggaggucagug

SEQ ID NO: 2330854 - RNA, 19 nt, Artificial Sequence
  Description of Artificial Sequence: Synthetic oligonucleotide
augaaucagcagcugguug

SEQ ID NO: 2330855 - RNA, 19 nt, Artificial Sequence
  Description of Artificial Sequence: Synthetic oligonucleotide
ucucgggugugcuucuuag

SEQ ID NO: 2330856 - RNA, 19 nt, Artificial Sequence
  Description of Artificial Sequence: Synthetic oligonucleotide
gauucgguagcggauuggc

SEQ ID NO: 2330857 - RNA, 19 nt, Artificial Sequence
  Description of Artificial Sequence: Synthetic oligonucleotide
acacuaggaggucagugcu

SEQ ID NO: 2330858 - RNA, 19 nt, Artificial Sequence
  Description of Artificial Sequence: Synthetic oligonucleotide
uccaucugaagacgguaga

SEQ ID NO: 2330859 - RNA, 19 nt, Artificial Sequence
  Description of Artificial Sequence: Synthetic oligonucleotide
ggaugagccgcucagucag

SEQ ID NO: 2330860 - RNA, 19 nt, Artificial Sequence
  Description of Artificial Sequence: Synthetic oligonucleotide
ugaacagaaggaugugguc

SEQ ID NO: 2330861 - RNA, 19 nt, Artificial Sequence
  Description of Artificial Sequence: Synthetic oligonucleotide
uaauccaaccagguaguca

SEQ ID NO: 2330862 - RNA, 19 nt, Artificial Sequence
  Description of Artificial Sequence: Synthetic oligonucleotide
cugaagacgguagagcaug

SEQ ID NO: 2330863 - RNA, 19 nt, Artificial Sequence
  Description of Artificial Sequence: Synthetic oligonucleotide
ucacugcauaagauggaca

SEQ ID NO: 2330864 - RNA, 19 nt, Artificial Sequence
  Description of Artificial Sequence: Synthetic oligonucleotide
ugccaauaauuauggcaag

SEQ ID NO: 2330865 - RNA, 19 nt, Artificial Sequence
  Description of Artificial Sequence: Synthetic oligonucleotide
ugcugcacugaacuccagc

SEQ ID NO: 2330866 - RNA, 19 nt, Artificial Sequence
  Description of Artificial Sequence: Synthetic oligonucleotide
gugagcaucauugaacaga

SEQ ID NO: 2330867 - RNA, 19 nt, Artificial Sequence
  Description of Artificial Sequence: Synthetic oligonucleotide
ucgguagcggauuggcaag

SEQ ID NO: 2330868 - RNA, 19 nt, Artificial Sequence
  Description of Artificial Sequence: Synthetic oligonucleotide
uggcaguucuccccugggg

SEQ ID NO: 2330869 - RNA, 19 nt, Artificial Sequence
  Description of Artificial Sequence: Synthetic oligonucleotide
aaugaaucagcagcugguu

SEQ ID NO: 2330870 - RNA, 19 nt, Artificial Sequence
  Description of Artificial Sequence: Synthetic oligonucleotide
ucgcgcuccaucagaaggc

SEQ ID NO: 2330871 - RNA, 19 nt, Artificial Sequence
  Description of Artificial Sequence: Synthetic oligonucleotide
cugguugaagacaucucuc

SEQ ID NO: 2330872 - RNA, 19 nt, Artificial Sequence
  Description of Artificial Sequence: Synthetic oligonucleotide
uccaaccagguagucaacc

SEQ ID NO: 2330873 - RNA, 19 nt, Artificial Sequence
  Description of Artificial Sequence: Synthetic oligonucleotide
agcaagcauaucagagucc

SEQ ID NO: 2330874 - RNA, 19 nt, Artificial Sequence
  Description of Artificial Sequence: Synthetic oligonucleotide
gcauaagauggacaguggc

SEQ ID NO: 2330875 - RNA, 19 nt, Artificial Sequence
  Description of Artificial Sequence: Synthetic oligonucleotide
uccccuggggacucgcugg

SEQ ID NO: 2330876 - RNA, 19 nt, Artificial Sequence
  Description of Artificial Sequence: Synthetic oligonucleotide
agugagcaucauugaacag

SEQ ID NO: 2330877 - RNA, 19 nt, Artificial Sequence
  Description of Artificial Sequence: Synthetic oligonucleotide
gacaagcacacccagcugu

SEQ ID NO: 2330878 - RNA, 19 nt, Artificial Sequence
  Description of Artificial Sequence: Synthetic oligonucleotide
ggcaagagaaguucuagga

SEQ ID NO: 2330879 - RNA, 19 nt, Artificial Sequence
  Description of Artificial Sequence: Synthetic oligonucleotide
caagaaccuggcuuggguc

SEQ ID NO: 2330880 - RNA, 19 nt, Artificial Sequence
  Description of Artificial Sequence: Synthetic oligonucleotide
cucgcuggccuccuguagg

SEQ ID NO: 2330881 - RNA, 19 nt, Artificial Sequence
  Description of Artificial Sequence: Synthetic oligonucleotide
uaugguugucauagauggu

SEQ ID NO: 2330882 - RNA, 19 nt, Artificial Sequence
  Description of Artificial Sequence: Synthetic oligonucleotide
uagucagcagcucccuugu

SEQ ID NO: 2330883 - RNA, 19 nt, Artificial Sequence
  Description of Artificial Sequence: Synthetic oligonucleotide
ccuaaacucuaauccaacc

SEQ ID NO: 2330884 - RNA, 19 nt, Artificial Sequence
  Description of Artificial Sequence: Synthetic oligonucleotide
agcauggcaccacuggccu

SEQ ID NO: 2330885 - RNA, 19 nt, Artificial Sequence
  Description of Artificial Sequence: Synthetic oligonucleotide
aggaagugagcaucauuga

SEQ ID NO: 2330886 - RNA, 19 nt, Artificial Sequence
  Description of Artificial Sequence: Synthetic oligonucleotide
aaccuaacacuaggagguc

SEQ ID NO: 2330887 - RNA, 19 nt, Artificial Sequence
  Description of Artificial Sequence: Synthetic oligonucleotide
acauucuuauggacgcugg

SEQ ID NO: 2330888 - RNA, 19 nt, Artificial Sequence
  Description of Artificial Sequence: Synthetic oligonucleotide
aaccagguagucaaccuaa

SEQ ID NO: 2330889 - RNA, 19 nt, Artificial Sequence
  Description of Artificial Sequence: Synthetic oligonucleotide
gaacagaaggauguggucu

SEQ ID NO: 2330890 - RNA, 19 nt, Artificial Sequence
  Description of Artificial Sequence: Synthetic oligonucleotide
ugacaagcacacccagcug

SEQ ID NO: 2330891 - RNA, 19 nt, Artificial Sequence
  Description of Artificial Sequence: Synthetic oligonucleotide
aggacuuggucaggauucc

SEQ ID NO: 2330892 - RNA, 19 nt, Artificial Sequence
  Description of Artificial Sequence: Synthetic oligonucleotide
uucggugugcugcacugaa

SEQ ID NO: 2330893 - RNA, 19 nt, Artificial Sequence
  Description of Artificial Sequence: Synthetic oligonucleotide
acugaacuccagcccaucu

SEQ ID NO: 2330894 - RNA, 19 nt, Artificial Sequence
  Description of Artificial Sequence: Synthetic oligonucleotide
caauaauuauggcaagcaa

SEQ ID NO: 2330895 - RNA, 19 nt, Artificial Sequence
  Description of Artificial Sequence: Synthetic oligonucleotide
aguccuuccaguggccuuc

SEQ ID NO: 2330896 - RNA, 19 nt, Artificial Sequence
  Description of Artificial Sequence: Synthetic oligonucleotide
uggacaguggcugccuugc

SEQ ID NO: 2330897 - RNA, 19 nt, Artificial Sequence
  Description of Artificial Sequence: Synthetic oligonucleotide
acuaggaggucagugcuga

SEQ ID NO: 2330898 - RNA, 19 nt, Artificial Sequence
  Description of Artificial Sequence: Synthetic oligonucleotide
cuuuucgaucaaguacagg

SEQ ID NO: 2330899 - RNA, 19 nt, Artificial Sequence
  Description of Artificial Sequence: Synthetic oligonucleotide
caggauucccguucucagc

SEQ ID NO: 2330900 - RNA, 19 nt, Artificial Sequence
  Description of Artificial Sequence: Synthetic oligonucleotide
cccagugccaauaauuaug

SEQ ID NO: 2330901 - RNA, 19 nt, Artificial Sequence
  Description of Artificial Sequence: Synthetic oligonucleotide
uggccgaaugaaucagcag

SEQ ID NO: 2330902 - RNA, 19 nt, Artificial Sequence
  Description of Artificial Sequence: Synthetic oligonucleotide
  modified_base (4)..(4): a, c, u, g, unknown or other
uucncccuuuucgaucaag

SEQ ID NO: 2330903 - RNA, 19 nt, Artificial Sequence
  Description of Artificial Sequence: Synthetic oligonucleotide
aucaucugacaagcacacc

SEQ ID NO: 2330904 - RNA, 19 nt, Artificial Sequence
  Description of Artificial Sequence: Synthetic oligonucleotide
ucgcuggccuccuguaggg

SEQ ID NO: 2330905 - RNA, 19 nt, Artificial Sequence
  Description of Artificial Sequence: Synthetic oligonucleotide
uucuaggacuuggucagga

SEQ ID NO: 2330906 - RNA, 19 nt, Artificial Sequence
  Description of Artificial Sequence: Synthetic oligonucleotide
caaggcaucgcgcuccauc

SEQ ID NO: 2330907 - RNA, 19 nt, Artificial Sequence
  Description of Artificial Sequence: Synthetic oligonucleotide
uagaugguuagugcagccu

SEQ ID NO: 2330908 - RNA, 19 nt, Artificial Sequence
  Description of Artificial Sequence: Synthetic oligonucleotide
cuugggucacugcauaaga

SEQ ID NO: 2330909 - RNA, 19 nt, Artificial Sequence
  Description of Artificial Sequence: Synthetic oligonucleotide
acaucucucugggcguugc

SEQ ID NO: 2330910 - RNA, 19 nt, Artificial Sequence
  Description of Artificial Sequence: Synthetic oligonucleotide
ucuuagucacagguaggac

SEQ ID NO: 2330911 - RNA, 19 nt, Artificial Sequence
  Description of Artificial Sequence: Synthetic oligonucleotide
cacauucuuauggacgcug

SEQ ID NO: 2330912 - RNA, 19 nt, Artificial Sequence
  Description of Artificial Sequence: Synthetic oligonucleotide
gaaugaaucagcagcuggu

SEQ ID NO: 2330913 - RNA, 19 nt, Artificial Sequence
  Description of Artificial Sequence: Synthetic oligonucleotide
agagcauggagcagcuguc

SEQ ID NO: 2330914 - RNA, 19 nt, Artificial Sequence
  Description of Artificial Sequence: Synthetic oligonucleotide
agaaccuggcuugggucac

SEQ ID NO: 2330915 - RNA, 19 nt, Artificial Sequence
  Description of Artificial Sequence: Synthetic oligonucleotide
ucuggacgauucgguagcg

SEQ ID NO: 2330916 - RNA, 19 nt, Artificial Sequence
  Description of Artificial Sequence: Synthetic oligonucleotide
cccuuuucgaucaaguaca

SEQ ID NO: 2330917 - RNA, 19 nt, Artificial Sequence
  Description of Artificial Sequence: Synthetic oligonucleotide
cuuauggacgcuggaggug

SEQ ID NO: 2330918 - RNA, 19 nt, Artificial Sequence
  Description of Artificial Sequence: Synthetic oligonucleotide
auggacaguggcugccuug

SEQ ID NO: 2330919 - RNA, 19 nt, Artificial Sequence
  Description of Artificial Sequence: Synthetic oligonucleotide
cgaaugaaucagcagcugg

SEQ ID NO: 2330920 - RNA, 19 nt, Artificial Sequence
  Description of Artificial Sequence: Synthetic oligonucleotide
acacccagcuguuuccuaa

SEQ ID NO: 2330921 - RNA, 19 nt, Artificial Sequence
  Description of Artificial Sequence: Synthetic oligonucleotide
acgauucgguagcggauug

SEQ ID NO: 2330922 - RNA, 19 nt, Artificial Sequence
  Description of Artificial Sequence: Synthetic oligonucleotide
agaaguucuaggacuuggu

SEQ ID NO: 2330923 - RNA, 19 nt, Artificial Sequence
  Description of Artificial Sequence: Synthetic oligonucleotide
cuuuaucaucugacaagca

SEQ ID NO: 2330924 - RNA, 19 nt, Artificial Sequence
  Description of Artificial Sequence: Synthetic oligonucleotide
agucaaccuaacacuagga

SEQ ID NO: 2330925 - RNA, 19 nt, Artificial Sequence
  Description of Artificial Sequence: Synthetic oligonucleotide
agcggauuggcaagagaag

SEQ ID NO: 2330926 - RNA, 19 nt, Artificial Sequence
  Description of Artificial Sequence: Synthetic oligonucleotide
uucaaggcaucgcgcucca

SEQ ID NO: 2330927 - RNA, 19 nt, Artificial Sequence
  Description of Artificial Sequence: Synthetic oligonucleotide
augagccgcucagucaggg

SEQ ID NO: 2330928 - RNA, 19 nt, Artificial Sequence
  Description of Artificial Sequence: Synthetic oligonucleotide
gugcuucuuagucacaggu

SEQ ID NO: 2330929 - RNA, 19 nt, Artificial Sequence
  Description of Artificial Sequence: Synthetic oligonucleotide
guaggacagccugccaccg

SEQ ID NO: 2330930 - RNA, 19 nt, Artificial Sequence
  Description of Artificial Sequence: Synthetic oligonucleotide
aggauaugguugucauaga

SEQ ID NO: 2330931 - RNA, 19 nt, Artificial Sequence
  Description of Artificial Sequence: Synthetic oligonucleotide
ggaagugagcaucauugaa

SEQ ID NO: 2330932 - RNA, 19 nt, Artificial Sequence
  Description of Artificial Sequence: Synthetic oligonucleotide
gguuagugcagccucauau

SEQ ID NO: 2330933 - RNA, 19 nt, Artificial Sequence
  Description of Artificial Sequence: Synthetic oligonucleotide
auggccgaaugaaucagca

SEQ ID NO: 2330934 - RNA, 19 nt, Artificial Sequence
  Description of Artificial Sequence: Synthetic oligonucleotide
aggccaucaggaagugagc

SEQ ID NO: 2330935 - RNA, 19 nt, Artificial Sequence
  Description of Artificial Sequence: Synthetic oligonucleotide
acgcuggaggugcaguuga

SEQ ID NO: 2330936 - RNA, 19 nt, Artificial Sequence
  Description of Artificial Sequence: Synthetic oligonucleotide
cuggcaguucuccccuggg

SEQ ID NO: 2330937 - RNA, 19 nt, Artificial Sequence
  Description of Artificial Sequence: Synthetic oligonucleotide
cacuaggaggucagugcug

SEQ ID NO: 2330938 - RNA, 19 nt, Artificial Sequence
  Description of Artificial Sequence: Synthetic oligonucleotide
ggauuggcaagagaaguuc

SEQ ID NO: 2330939 - RNA, 19 nt, Artificial Sequence
  Description of Artificial Sequence: Synthetic oligonucleotide
uaggacagccugccaccgc

SEQ ID NO: 2330940 - RNA, 19 nt, Artificial Sequence
  Description of Artificial Sequence: Synthetic oligonucleotide
uggagcagcuguccaccac

SEQ ID NO: 2330941 - RNA, 19 nt, Artificial Sequence
  Description of Artificial Sequence: Synthetic oligonucleotide
cagaaggauguggucucgg

SEQ ID NO: 2330942 - RNA, 19 nt, Artificial Sequence
  Description of Artificial Sequence: Synthetic oligonucleotide
ccaccgcuggccaagagac

SEQ ID NO: 2330943 - RNA, 19 nt, Artificial Sequence
  Description of Artificial Sequence: Synthetic oligonucleotide
gacgcuggaggugcaguug

SEQ ID NO: 2330944 - RNA, 19 nt, Artificial Sequence
  Description of Artificial Sequence: Synthetic oligonucleotide
accuaacacuaggagguca

SEQ ID NO: 2330945 - RNA, 19 nt, Artificial Sequence
  Description of Artificial Sequence: Synthetic oligonucleotide
gaugagccgcucagucagg

SEQ ID NO: 2330946 - RNA, 19 nt, Artificial Sequence
  Description of Artificial Sequence: Synthetic oligonucleotide
gguagccccacaucuugug

SEQ ID NO: 2330947 - RNA, 19 nt, Artificial Sequence
  Description of Artificial Sequence: Synthetic oligonucleotide
uauggacgcuggaggugca

SEQ ID NO: 2330948 - RNA, 19 nt, Artificial Sequence
  Description of Artificial Sequence: Synthetic oligonucleotide
ucggugugcugcacugaac

SEQ ID NO: 2330949 - RNA, 19 nt, Artificial Sequence
  Description of Artificial Sequence: Synthetic oligonucleotide
aguugauggccgaaugaau

SEQ ID NO: 2330950 - RNA, 19 nt, Artificial Sequence
  Description of Artificial Sequence: Synthetic oligonucleotide
cauucuuauggacgcugga

SEQ ID NO: 2330951 - RNA, 19 nt, Artificial Sequence
  Description of Artificial Sequence: Synthetic oligonucleotide
gauuggcaagagaaguucu

SEQ ID NO: 2330952 - RNA, 19 nt, Artificial Sequence
  Description of Artificial Sequence: Synthetic oligonucleotide
agccccacaucuugugcca

SEQ ID NO: 2330953 - RNA, 19 nt, Artificial Sequence
  Description of Artificial Sequence: Synthetic oligonucleotide
gggugaguuggguuucaag

SEQ ID NO: 2330954 - RNA, 19 nt, Artificial Sequence
  Description of Artificial Sequence: Synthetic oligonucleotide
aucaaguacagggcccagu

SEQ ID NO: 2330955 - RNA, 19 nt, Artificial Sequence
  Description of Artificial Sequence: Synthetic oligonucleotide
guagcggauuggcaagaga

SEQ ID NO: 2330956 - RNA, 19 nt, Artificial Sequence
  Description of Artificial Sequence: Synthetic oligonucleotide
gaggucagugcugagcugu

SEQ ID NO: 2330957 - RNA, 19 nt, Artificial Sequence
  Description of Artificial Sequence: Synthetic oligonucleotide
gggguagccccacaucuug

SEQ ID NO: 2330958 - RNA, 19 nt, Artificial Sequence
  Description of Artificial Sequence: Synthetic oligonucleotide
  modified_base (8)..(8): a, c, u, g, unknown or other
cauauucncccuuuucgau

SEQ ID NO: 2330959 - RNA, 19 nt, Artificial Sequence
  Description of Artificial Sequence: Synthetic oligonucleotide
caagggccuggcacagggg

SEQ ID NO: 2330960 - RNA, 19 nt, Artificial Sequence
  Description of Artificial Sequence: Synthetic oligonucleotide
caaucuggacgauucggua

SEQ ID NO: 2330961 - RNA, 19 nt, Artificial Sequence
  Description of Artificial Sequence: Synthetic oligonucleotide
caguugauggccgaaugaa

SEQ ID NO: 2330962 - RNA, 19 nt, Artificial Sequence
  Description of Artificial Sequence: Synthetic oligonucleotide
ccaucagaaggcuccgggc

SEQ ID NO: 2330963 - RNA, 19 nt, Artificial Sequence
  Description of Artificial Sequence: Synthetic oligonucleotide
auuggcaagagaaguucua

SEQ ID NO: 2330964 - RNA, 19 nt, Artificial Sequence
  Description of Artificial Sequence: Synthetic oligonucleotide
ggcaagcaagcauaucaga

SEQ ID NO: 2330965 - RNA, 19 nt, Artificial Sequence
  Description of Artificial Sequence: Synthetic oligonucleotide
ucagaaggcuccgggccac

SEQ ID NO: 2330966 - RNA, 19 nt, Artificial Sequence
  Description of Artificial Sequence: Synthetic oligonucleotide
cccaaucuggacgauucgg

SEQ ID NO: 2330967 - RNA, 19 nt, Artificial Sequence
  Description of Artificial Sequence: Synthetic oligonucleotide
ccacaucuagcauggcacc

SEQ ID NO: 2330968 - RNA, 19 nt, Artificial Sequence
  Description of Artificial Sequence: Synthetic oligonucleotide
gaaucagcagcugguugaa

SEQ ID NO: 2330969 - RNA, 19 nt, Artificial Sequence
  Description of Artificial Sequence: Synthetic oligonucleotide
gguagucaaccuaacacua

SEQ ID NO: 2330970 - RNA, 19 nt, Artificial Sequence
  Description of Artificial Sequence: Synthetic oligonucleotide
cuggacgauucgguagcgg

SEQ ID NO: 2330971 - RNA, 19 nt, Artificial Sequence
  Description of Artificial Sequence: Synthetic oligonucleotide
gcaguugauggccgaauga

SEQ ID NO: 2330972 - RNA, 19 nt, Artificial Sequence
  Description of Artificial Sequence: Synthetic oligonucleotide
cuaauccaaccagguaguc

SEQ ID NO: 2330973 - RNA, 19 nt, Artificial Sequence
  Description of Artificial Sequence: Synthetic oligonucleotide
ggauaugguugucauagau

SEQ ID NO: 2330974 - RNA, 19 nt, Artificial Sequence
  Description of Artificial Sequence: Synthetic oligonucleotide
gaagacgguagagcaugga

SEQ ID NO: 2330975 - RNA, 19 nt, Artificial Sequence
  Description of Artificial Sequence: Synthetic oligonucleotide
cuaggaggucagugcugag

SEQ ID NO: 2330976 - RNA, 19 nt, Artificial Sequence
  Description of Artificial Sequence: Synthetic oligonucleotide
gcuugggucacugcauaag

SEQ ID NO: 2330977 - RNA, 19 nt, Artificial Sequence
  Description of Artificial Sequence: Synthetic oligonucleotide
cuggccaagagacaccccu

SEQ ID NO: 2330978 - RNA, 19 nt, Artificial Sequence
  Description of Artificial Sequence: Synthetic oligonucleotide
aguacagggcccagugcca

SEQ ID NO: 2330979 - RNA, 19 nt, Artificial Sequence
  Description of Artificial Sequence: Synthetic oligonucleotide
cucugggcguugcuacccc

SEQ ID NO: 2330980 - RNA, 19 nt, Artificial Sequence
  Description of Artificial Sequence: Synthetic oligonucleotide
ccuuuucgaucaaguacag

SEQ ID NO: 2330981 - RNA, 19 nt, Artificial Sequence
  Description of Artificial Sequence: Synthetic oligonucleotide
cccuuccaucugaagacgg

SEQ ID NO: 2330982 - RNA, 19 nt, Artificial Sequence
  Description of Artificial Sequence: Synthetic oligonucleotide
ccaucugaagacgguagag

SEQ ID NO: 2330983 - RNA, 19 nt, Artificial Sequence
  Description of Artificial Sequence: Synthetic oligonucleotide
uggccaagagacaccccuu

SEQ ID NO: 2330984 - RNA, 19 nt, Artificial Sequence
  Description of Artificial Sequence: Synthetic oligonucleotide
  modified_base (11)..(11): a, c, u, g, unknown or other
ccucauauucncccuuuuc

SEQ ID NO: 2330985 - RNA, 19 nt, Artificial Sequence
  Description of Artificial Sequence: Synthetic oligonucleotide
caaccagguagucaaccua

SEQ ID NO: 2330986 - RNA, 19 nt, Artificial Sequence
  Description of Artificial Sequence: Synthetic oligonucleotide
auccaaccagguagucaac

SEQ ID NO: 2330987 - RNA, 19 nt, Artificial Sequence
  Description of Artificial Sequence: Synthetic oligonucleotide
auucgguagcggauuggca

SEQ ID NO: 2330988 - RNA, 19 nt, Artificial Sequence
  Description of Artificial Sequence: Synthetic oligonucleotide
aucuagcauggcaccacug

SEQ ID NO: 2330989 - RNA, 19 nt, Artificial Sequence
  Description of Artificial Sequence: Synthetic oligonucleotide
  modified_base (2)..(2): a, c, u, g, unknown or other
cncccuuuucgaucaagua

SEQ ID NO: 2330990 - RNA, 19 nt, Artificial Sequence
  Description of Artificial Sequence: Synthetic oligonucleotide
gcauaucagaguccuucca

SEQ ID NO: 2330991 - RNA, 19 nt, Artificial Sequence
  Description of Artificial Sequence: Synthetic oligonucleotide
gcauggagcagcuguccac

SEQ ID NO: 2330992 - RNA, 19 nt, Artificial Sequence
  Description of Artificial Sequence: Synthetic oligonucleotide
gcaguucuccccuggggac

SEQ ID NO: 2330993 - RNA, 19 nt, Artificial Sequence
  Description of Artificial Sequence: Synthetic oligonucleotide
gcaagcauaucagaguccu

SEQ ID NO: 2330994 - RNA, 19 nt, Artificial Sequence
  Description of Artificial Sequence: Synthetic oligonucleotide
gacaucucucugggcguug

SEQ ID NO: 2330995 - RNA, 19 nt, Artificial Sequence
  Description of Artificial Sequence: Synthetic oligonucleotide
uggggacucgcuggccucc

SEQ ID NO: 2330996 - RNA, 19 nt, Artificial Sequence
  Description of Artificial Sequence: Synthetic oligonucleotide
ccuucggugugcugcacug

SEQ ID NO: 2330997 - RNA, 19 nt, Artificial Sequence
  Description of Artificial Sequence: Synthetic oligonucleotide
ugcggaugagccgcucagu

SEQ ID NO: 2330998 - RNA, 19 nt, Artificial Sequence
  Description of Artificial Sequence: Synthetic oligonucleotide
uccgggccacauucuuaug

SEQ ID NO: 2330999 - RNA, 19 nt, Artificial Sequence
  Description of Artificial Sequence: Synthetic oligonucleotide
cugagcuguaggccaagaa

SEQ ID NO: 2331000 - RNA, 19 nt, Artificial Sequence
  Description of Artificial Sequence: Synthetic oligonucleotide
ggguuucaaggcaucgcgc

SEQ ID NO: 2331001 - RNA, 19 nt, Artificial Sequence
  Description of Artificial Sequence: Synthetic oligonucleotide
gugccaauuggugcuggca

SEQ ID NO: 2331002 - RNA, 19 nt, Artificial Sequence
  Description of Artificial Sequence: Synthetic oligonucleotide
ggugugcugcacugaacuc

SEQ ID NO: 2331003 - RNA, 19 nt, Artificial Sequence
  Description of Artificial Sequence: Synthetic oligonucleotide
gguagcggauuggcaagag

SEQ ID NO: 2331004 - RNA, 19 nt, Artificial Sequence
  Description of Artificial Sequence: Synthetic oligonucleotide
caagagacaccccuuccau

SEQ ID NO: 2331005 - RNA, 19 nt, Artificial Sequence
  Description of Artificial Sequence: Synthetic oligonucleotide
ggccaagagacaccccuuc

SEQ ID NO: 2331006 - RNA, 19 nt, Artificial Sequence
  Description of Artificial Sequence: Synthetic oligonucleotide
gcucccuuguggucuggag

SEQ ID NO: 2331007 - RNA, 19 nt, Artificial Sequence
  Description of Artificial Sequence: Synthetic oligonucleotide
cuggggacucgcuggccuc

SEQ ID NO: 2331008 - RNA, 19 nt, Artificial Sequence
  Description of Artificial Sequence: Synthetic oligonucleotide
auggacgcuggaggugcag

SEQ ID NO: 2331009 - RNA, 19 nt, Artificial Sequence
  Description of Artificial Sequence: Synthetic oligonucleotide
aguggccuucggugugcug

SEQ ID NO: 2331010 - RNA, 19 nt, Artificial Sequence
  Description of Artificial Sequence: Synthetic oligonucleotide
ggacaguggcugccuugcg

SEQ ID NO: 2331011 - RNA, 19 nt, Artificial Sequence
  Description of Artificial Sequence: Synthetic oligonucleotide
agggcccagugccaauaau

SEQ ID NO: 2331012 - RNA, 19 nt, Artificial Sequence
  Description of Artificial Sequence: Synthetic oligonucleotide
ucccguucucagccuccac

SEQ ID NO: 2331013 - RNA, 19 nt, Artificial Sequence
  Description of Artificial Sequence: Synthetic oligonucleotide
guaggguagucagcagcuc

SEQ ID NO: 2331014 - RNA, 19 nt, Artificial Sequence
  Description of Artificial Sequence: Synthetic oligonucleotide
acaagcacacccagcuguu

SEQ ID NO: 2331015 - RNA, 19 nt, Artificial Sequence
  Description of Artificial Sequence: Synthetic oligonucleotide
uacagggcccagugccaau

SEQ ID NO: 2331016 - RNA, 19 nt, Artificial Sequence
  Description of Artificial Sequence: Synthetic oligonucleotide
gacucgcuggccuccugua

SEQ ID NO: 2331017 - RNA, 19 nt, Artificial Sequence
  Description of Artificial Sequence: Synthetic oligonucleotide
gacgauucgguagcggauu

SEQ ID NO: 2331018 - RNA, 19 nt, Artificial Sequence
  Description of Artificial Sequence: Synthetic oligonucleotide
gggccuggcacagggguag

SEQ ID NO: 2331019 - RNA, 19 nt, Artificial Sequence
  Description of Artificial Sequence: Synthetic oligonucleotide
  modified_base (5)..(5): a, c, u, g, unknown or other
auucncccuuuucgaucaa

SEQ ID NO: 2331020 - RNA, 19 nt, Artificial Sequence
  Description of Artificial Sequence: Synthetic oligonucleotide
gaguuggguuucaaggcau

SEQ ID NO: 2331021 - RNA, 19 nt, Artificial Sequence
  Description of Artificial Sequence: Synthetic oligonucleotide
uggcaccacuggccugcag

SEQ ID NO: 2331022 - RNA, 19 nt, Artificial Sequence
  Description of Artificial Sequence: Synthetic oligonucleotide
gccaagaaccuggcuuggg

SEQ ID NO: 2331023 - RNA, 19 nt, Artificial Sequence
  Description of Artificial Sequence: Synthetic oligonucleotide
  modified_base (17)..(17): a, c, u, g, unknown or other
gugcagccucauauucncc

SEQ ID NO: 2331024 - RNA, 19 nt, Artificial Sequence
  Description of Artificial Sequence: Synthetic oligonucleotide
  modified_base (13)..(13): a, c, u, g, unknown or other
agccucauauucncccuuu

SEQ ID NO: 2331025 - RNA, 19 nt, Artificial Sequence
  Description of Artificial Sequence: Synthetic oligonucleotide
ccagguagucaaccuaaca

SEQ ID NO: 2331026 - RNA, 19 nt, Artificial Sequence
  Description of Artificial Sequence: Synthetic oligonucleotide
gacaccccuuccaucugaa

SEQ ID NO: 2331027 - RNA, 19 nt, Artificial Sequence
  Description of Artificial Sequence: Synthetic oligonucleotide
caggggugaguuggguuuc

SEQ ID NO: 2331028 - RNA, 19 nt, Artificial Sequence
  Description of Artificial Sequence: Synthetic oligonucleotide
agacaucucucugggcguu

SEQ ID NO: 2331029 - RNA, 19 nt, Artificial Sequence
  Description of Artificial Sequence: Synthetic oligonucleotide
gggaggauaugguugucau

SEQ ID NO: 2331030 - RNA, 19 nt, Artificial Sequence
  Description of Artificial Sequence: Synthetic oligonucleotide
ggccaagaaccuggcuugg

SEQ ID NO: 2331031 - RNA, 19 nt, Artificial Sequence
  Description of Artificial Sequence: Synthetic oligonucleotide
ggaggauaugguugucaua

SEQ ID NO: 2331032 - RNA, 19 nt, Artificial Sequence
  Description of Artificial Sequence: Synthetic oligonucleotide
ccccaaucuggacgauucg

SEQ ID NO: 2331033 - RNA, 19 nt, Artificial Sequence
  Description of Artificial Sequence: Synthetic oligonucleotide
ggacuuggucaggauuccc

SEQ ID NO: 2331034 - RNA, 19 nt, Artificial Sequence
  Description of Artificial Sequence: Synthetic oligonucleotide
ggcccagugccaauaauua

SEQ ID NO: 2331035 - RNA, 19 nt, Artificial Sequence
  Description of Artificial Sequence: Synthetic oligonucleotide
cacugaacuccagcccauc

SEQ ID NO: 2331036 - RNA, 19 nt, Artificial Sequence
  Description of Artificial Sequence: Synthetic oligonucleotide
gcggauuggcaagagaagu

SEQ ID NO: 2331037 - RNA, 19 nt, Artificial Sequence
  Description of Artificial Sequence: Synthetic oligonucleotide
gcuguccaccacaucuagc

SEQ ID NO: 2331038 - RNA, 19 nt, Artificial Sequence
  Description of Artificial Sequence: Synthetic oligonucleotide
gccgaaugaaucagcagcu

SEQ ID NO: 2331039 - RNA, 19 nt, Artificial Sequence
  Description of Artificial Sequence: Synthetic oligonucleotide
guaggccaagaaccuggcu

SEQ ID NO: 2331040 - RNA, 19 nt, Artificial Sequence
  Description of Artificial Sequence: Synthetic oligonucleotide
agaaggcuccgggccacau

SEQ ID NO: 2331041 - RNA, 19 nt, Artificial Sequence
  Description of Artificial Sequence: Synthetic oligonucleotide
gucucgggugugcuucuua

SEQ ID NO: 2331042 - RNA, 19 nt, Artificial Sequence
  Description of Artificial Sequence: Synthetic oligonucleotide
ccgaaugaaucagcagcug

SEQ ID NO: 2331043 - RNA, 19 nt, Artificial Sequence
  Description of Artificial Sequence: Synthetic oligonucleotide
aggggugaguuggguuuca

SEQ ID NO: 2331044 - RNA, 19 nt, Artificial Sequence
  Description of Artificial Sequence: Synthetic oligonucleotide
cuucggugugcugcacuga

SEQ ID NO: 2331045 - RNA, 19 nt, Artificial Sequence
  Description of Artificial Sequence: Synthetic oligonucleotide
ggauguggucucgggugug

SEQ ID NO: 2331046 - RNA, 19 nt, Artificial Sequence
  Description of Artificial Sequence: Synthetic oligonucleotide
cagguaggacagccugcca

SEQ ID NO: 2331047 - RNA, 19 nt, Artificial Sequence
  Description of Artificial Sequence: Synthetic oligonucleotide
uggccuccuguaggguagu

SEQ ID NO: 2331048 - RNA, 19 nt, Artificial Sequence
  Description of Artificial Sequence: Synthetic oligonucleotide
  modified_base (15)..(15): a, c, u, g, unknown or other
gcagccucauauucncccu

SEQ ID NO: 2331049 - RNA, 19 nt, Artificial Sequence
  Description of Artificial Sequence: Synthetic oligonucleotide
cucgggugugcuucuuagu

SEQ ID NO: 2331050 - RNA, 19 nt, Artificial Sequence
  Description of Artificial Sequence: Synthetic oligonucleotide
cuaacacuaggaggucagu

SEQ ID NO: 2331051 - RNA, 19 nt, Artificial Sequence
  Description of Artificial Sequence: Synthetic oligonucleotide
ggucaggauucccguucuc

SEQ ID NO: 2331052 - RNA, 19 nt, Artificial Sequence
  Description of Artificial Sequence: Synthetic oligonucleotide
caccgcuggccaagagaca

SEQ ID NO: 2331053 - RNA, 19 nt, Artificial Sequence
  Description of Artificial Sequence: Synthetic oligonucleotide
cacacccagcuguuuccua

SEQ ID NO: 2331054 - RNA, 19 nt, Artificial Sequence
  Description of Artificial Sequence: Synthetic oligonucleotide
cgauucgguagcggauugg

SEQ ID NO: 2331055 - RNA, 19 nt, Artificial Sequence
  Description of Artificial Sequence: Synthetic oligonucleotide
cacuggccugcaggcuggg

SEQ ID NO: 2331056 - RNA, 19 nt, Artificial Sequence
  Description of Artificial Sequence: Synthetic oligonucleotide
gugcugcacugaacuccag

SEQ ID NO: 2331057 - RNA, 19 nt, Artificial Sequence
  Description of Artificial Sequence: Synthetic oligonucleotide
ugcacccagggaggccauc

SEQ ID NO: 2331058 - RNA, 19 nt, Artificial Sequence
  Description of Artificial Sequence: Synthetic oligonucleotide
ccgcuggccaagagacacc

SEQ ID NO: 2331059 - RNA, 19 nt, Artificial Sequence
  Description of Artificial Sequence: Synthetic oligonucleotide
cagggcccagugccaauaa

SEQ ID NO: 2331060 - RNA, 19 nt, Artificial Sequence
  Description of Artificial Sequence: Synthetic oligonucleotide
gcaucgcgcuccaucagaa

SEQ ID NO: 2331061 - RNA, 19 nt, Artificial Sequence
  Description of Artificial Sequence: Synthetic oligonucleotide
ggacucgcuggccuccugu

SEQ ID NO: 2331062 - RNA, 19 nt, Artificial Sequence
  Description of Artificial Sequence: Synthetic oligonucleotide
cgaucaaguacagggccca

SEQ ID NO: 2331063 - RNA, 19 nt, Artificial Sequence
  Description of Artificial Sequence: Synthetic oligonucleotide
aggucagugcugagcugua

SEQ ID NO: 2331064 - RNA, 19 nt, Artificial Sequence
  Description of Artificial Sequence: Synthetic oligonucleotide
auggcaccacuggccugca

SEQ ID NO: 2331065 - RNA, 19 nt, Artificial Sequence
  Description of Artificial Sequence: Synthetic oligonucleotide
ccuuccaucugaagacggu

SEQ ID NO: 2331066 - RNA, 19 nt, Artificial Sequence
  Description of Artificial Sequence: Synthetic oligonucleotide
ggauucccguucucagccu

SEQ ID NO: 2331067 - RNA, 19 nt, Artificial Sequence
  Description of Artificial Sequence: Synthetic oligonucleotide
caagcauaucagaguccuu

SEQ ID NO: 2331068 - RNA, 19 nt, Artificial Sequence
  Description of Artificial Sequence: Synthetic oligonucleotide
gcccagugccaauaauuau

SEQ ID NO: 2331069 - RNA, 19 nt, Artificial Sequence
  Description of Artificial Sequence: Synthetic oligonucleotide
ggaggccaucaggaaguga

SEQ ID NO: 2331070 - RNA, 19 nt, Artificial Sequence
  Description of Artificial Sequence: Synthetic oligonucleotide
caguucuccccuggggacu

SEQ ID NO: 2331071 - RNA, 19 nt, Artificial Sequence
  Description of Artificial Sequence: Synthetic oligonucleotide
gcuggccaagagacacccc

SEQ ID NO: 2331072 - RNA, 19 nt, Artificial Sequence
  Description of Artificial Sequence: Synthetic oligonucleotide
gcucagucaggggugaguu

SEQ ID NO: 2331073 - RNA, 19 nt, Artificial Sequence
  Description of Artificial Sequence: Synthetic oligonucleotide
ggacgauucgguagcggau

SEQ ID NO: 2331074 - RNA, 19 nt, Artificial Sequence
  Description of Artificial Sequence: Synthetic oligonucleotide
caucucucugggcguugcu

SEQ ID NO: 2331075 - RNA, 19 nt, Artificial Sequence
  Description of Artificial Sequence: Synthetic oligonucleotide
ccuuccaguggccuucggu

SEQ ID NO: 2331076 - RNA, 19 nt, Artificial Sequence
  Description of Artificial Sequence: Synthetic oligonucleotide
gccuucggugugcugcacu

SEQ ID NO: 2331077 - RNA, 19 nt, Artificial Sequence
  Description of Artificial Sequence: Synthetic oligonucleotide
cagaaggcuccgggccaca

SEQ ID NO: 2331078 - RNA, 19 nt, Artificial Sequence
  Description of Artificial Sequence: Synthetic oligonucleotide
gccgcucagucagggguga

SEQ ID NO: 2331079 - RNA, 19 nt, Artificial Sequence
  Description of Artificial Sequence: Synthetic oligonucleotide
gcacagggguagccccaca

SEQ ID NO: 2331080 - RNA, 19 nt, Artificial Sequence
  Description of Artificial Sequence: Synthetic oligonucleotide
cugccaccgcuggccaaga

SEQ ID NO: 2331081 - RNA, 19 nt, Artificial Sequence
  Description of Artificial Sequence: Synthetic oligonucleotide
ggggugaguuggguuucaa

SEQ ID NO: 2331082 - RNA, 19 nt, Artificial Sequence
  Description of Artificial Sequence: Synthetic oligonucleotide
ggguagccccacaucuugu

SEQ ID NO: 2331083 - RNA, 19 nt, Artificial Sequence
  Description of Artificial Sequence: Synthetic oligonucleotide
cggauuggcaagagaaguu

SEQ ID NO: 2331084 - RNA, 19 nt, Artificial Sequence
  Description of Artificial Sequence: Synthetic oligonucleotide
cccuuguggucuggagguc

SEQ ID NO: 2331085 - RNA, 19 nt, Artificial Sequence
  Description of Artificial Sequence: Synthetic oligonucleotide
cccuggggacucgcuggcc

SEQ ID NO: 2331086 - RNA, 19 nt, Artificial Sequence
  Description of Artificial Sequence: Synthetic oligonucleotide
gcgcuccaucagaaggcuc

SEQ ID NO: 2331087 - RNA, 19 nt, Artificial Sequence
  Description of Artificial Sequence: Synthetic oligonucleotide
ccuccacaagggccuggca

SEQ ID NO: 2331088 - RNA, 19 nt, Artificial Sequence
  Description of Artificial Sequence: Synthetic oligonucleotide
ggccuccuguaggguaguc

SEQ ID NO: 2331089 - RNA, 19 nt, Artificial Sequence
  Description of Artificial Sequence: Synthetic oligonucleotide
gccccacaucuugugccaa

SEQ ID NO: 2331090 - RNA, 19 nt, Artificial Sequence
  Description of Artificial Sequence: Synthetic oligonucleotide
ccgcucagucaggggugag

SEQ ID NO: 2331091 - RNA, 19 nt, Artificial Sequence
  Description of Artificial Sequence: Synthetic oligonucleotide
caguggccuucggugugcu

SEQ ID NO: 2331092 - RNA, 19 nt, Artificial Sequence
  Description of Artificial Sequence: Synthetic oligonucleotide
ccacauucuuauggacgcu

SEQ ID NO: 2331093 - RNA, 19 nt, Artificial Sequence
  Description of Artificial Sequence: Synthetic oligonucleotide
ggggacucgcuggccuccu

SEQ ID NO: 2331094 - RNA, 19 nt, Artificial Sequence
  Description of Artificial Sequence: Synthetic oligonucleotide
cgcgcuccaucagaaggcu

SEQ ID NO: 2331095 - RNA, 19 nt, Artificial Sequence
  Description of Artificial Sequence: Synthetic oligonucleotide
gccuugcggaugagccgcu

SEQ ID NO: 2331096 - RNA, 19 nt, Artificial Sequence
  Description of Artificial Sequence: Synthetic oligonucleotide
  modified_base (1)..(1): a, c, u, g, unknown or other
ncccuuuucgaucaaguac

SEQ ID NO: 2331097 - RNA, 19 nt, Artificial Sequence
  Description of Artificial Sequence: Synthetic oligonucleotide
auuuccaugaguccuaagc

SEQ ID NO: 2331098 - RNA, 19 nt, Artificial Sequence
  Description of Artificial Sequence: Synthetic oligonucleotide
aaagcgaucauuuccauga

SEQ ID NO: 2331099 - RNA, 19 nt, Artificial Sequence
  Description of Artificial Sequence: Synthetic oligonucleotide
cuuacaaaagaucuuggcg

SEQ ID NO: 2331100 - RNA, 19 nt, Artificial Sequence
  Description of Artificial Sequence: Synthetic oligonucleotide
ucuucaauggucuuuccgg

SEQ ID NO: 2331101 - RNA, 19 nt, Artificial Sequence
  Description of Artificial Sequence: Synthetic oligonucleotide
uucugcaucacuuugcugc

SEQ ID NO: 2331102 - RNA, 19 nt, Artificial Sequence
  Description of Artificial Sequence: Synthetic oligonucleotide
aaggcuguucccuauuggc

SEQ ID NO: 2331103 - RNA, 19 nt, Artificial Sequence
  Description of Artificial Sequence: Synthetic oligonucleotide
aaagaucuuggcgaaagcg

SEQ ID NO: 2331104 - RNA, 19 nt, Artificial Sequence
  Description of Artificial Sequence: Synthetic oligonucleotide
aaaagaucuuggcgaaagc

SEQ ID NO: 2331105 - RNA, 19 nt, Artificial Sequence
  Description of Artificial Sequence: Synthetic oligonucleotide
gaucuugugaaugaacugg

SEQ ID NO: 2331106 - RNA, 19 nt, Artificial Sequence
  Description of Artificial Sequence: Synthetic oligonucleotide
ucuggugacaccacaacag

SEQ ID NO: 2331107 - RNA, 19 nt, Artificial Sequence
  Description of Artificial Sequence: Synthetic oligonucleotide
uacacugcugugaagagug

SEQ ID NO: 2331108 - RNA, 19 nt, Artificial Sequence
  Description of Artificial Sequence: Synthetic oligonucleotide
uuuagggcaccacagagcu

SEQ ID NO: 2331109 - RNA, 19 nt, Artificial Sequence
  Description of Artificial Sequence: Synthetic oligonucleotide
cuugugaaugaacuggugg

SEQ ID NO: 2331110 - RNA, 19 nt, Artificial Sequence
  Description of Artificial Sequence: Synthetic oligonucleotide
gaugcgguacaccucagcg

SEQ ID NO: 2331111 - RNA, 19 nt, Artificial Sequence
  Description of Artificial Sequence: Synthetic oligonucleotide
ucagcuaccccacagcucu

SEQ ID NO: 2331112 - RNA, 19 nt, Artificial Sequence
  Description of Artificial Sequence: Synthetic oligonucleotide
ucagaugugcuccgggugg

SEQ ID NO: 2331113 - RNA, 19 nt, Artificial Sequence
  Description of Artificial Sequence: Synthetic oligonucleotide
ucaauggucuuuccggucc

SEQ ID NO: 2331114 - RNA, 19 nt, Artificial Sequence
  Description of Artificial Sequence: Synthetic oligonucleotide
aucacuuugcugccaaugg

SEQ ID NO: 2331115 - RNA, 19 nt, Artificial Sequence
  Description of Artificial Sequence: Synthetic oligonucleotide
uguucuuuagggcaccaca

SEQ ID NO: 2331116 - RNA, 19 nt, Artificial Sequence
  Description of Artificial Sequence: Synthetic oligonucleotide
uuccaugaguccuaagcgg

SEQ ID NO: 2331117 - RNA, 19 nt, Artificial Sequence
  Description of Artificial Sequence: Synthetic oligonucleotide
ucgucuaccacagugauuc

SEQ ID NO: 2331118 - RNA, 19 nt, Artificial Sequence
  Description of Artificial Sequence: Synthetic oligonucleotide
ucagcaucgucuaccacag

SEQ ID NO: 2331119 - RNA, 19 nt, Artificial Sequence
  Description of Artificial Sequence: Synthetic oligonucleotide
aacacuagcaggucugcgu

SEQ ID NO: 2331120 - RNA, 19 nt, Artificial Sequence
  Description of Artificial Sequence: Synthetic oligonucleotide
uggcccuuacaaaagaucu

SEQ ID NO: 2331121 - RNA, 19 nt, Artificial Sequence
  Description of Artificial Sequence: Synthetic oligonucleotide
ugugaaugaacuggugggg

SEQ ID NO: 2331122 - RNA, 19 nt, Artificial Sequence
  Description of Artificial Sequence: Synthetic oligonucleotide
uguuccgcccuccauagca

SEQ ID NO: 2331123 - RNA, 19 nt, Artificial Sequence
  Description of Artificial Sequence: Synthetic oligonucleotide
agcaucgucuaccacagug

SEQ ID NO: 2331124 - RNA, 19 nt, Artificial Sequence
  Description of Artificial Sequence: Synthetic oligonucleotide
agagaugagucucagcccu

SEQ ID NO: 2331125 - RNA, 19 nt, Artificial Sequence
  Description of Artificial Sequence: Synthetic oligonucleotide
gacaccacaacaggcaagg

SEQ ID NO: 2331126 - RNA, 19 nt, Artificial Sequence
  Description of Artificial Sequence: Synthetic oligonucleotide
augguggucucacagaacu

SEQ ID NO: 2331127 - RNA, 19 nt, Artificial Sequence
  Description of Artificial Sequence: Synthetic oligonucleotide
ucaaguagccccuucugcu

SEQ ID NO: 2331128 - RNA, 19 nt, Artificial Sequence
  Description of Artificial Sequence: Synthetic oligonucleotide
cuauuggcugcccaguucc

SEQ ID NO: 2331129 - RNA, 19 nt, Artificial Sequence
  Description of Artificial Sequence: Synthetic oligonucleotide
uugaggaugcgguacaccu

SEQ ID NO: 2331130 - RNA, 19 nt, Artificial Sequence
  Description of Artificial Sequence: Synthetic oligonucleotide
agaucugguacacugcugu

SEQ ID NO: 2331131 - RNA, 19 nt, Artificial Sequence
  Description of Artificial Sequence: Synthetic oligonucleotide
ucuuugaagagaaggccgu

SEQ ID NO: 2331132 - RNA, 19 nt, Artificial Sequence
  Description of Artificial Sequence: Synthetic oligonucleotide
gagucucagcccuucaggg

SEQ ID NO: 2331133 - RNA, 19 nt, Artificial Sequence
  Description of Artificial Sequence: Synthetic oligonucleotide
uagggcaccacagagcucc

SEQ ID NO: 2331134 - RNA, 19 nt, Artificial Sequence
  Description of Artificial Sequence: Synthetic oligonucleotide
augagcgugaugcccaggg

SEQ ID NO: 2331135 - RNA, 19 nt, Artificial Sequence
  Description of Artificial Sequence: Synthetic oligonucleotide
gaucucaucgcagaucuug

SEQ ID NO: 2331136 - RNA, 19 nt, Artificial Sequence
  Description of Artificial Sequence: Synthetic oligonucleotide
uccaugaguccuaagcgga

SEQ ID NO: 2331137 - RNA, 19 nt, Artificial Sequence
  Description of Artificial Sequence: Synthetic oligonucleotide
gaagagaaggccguucugc

SEQ ID NO: 2331138 - RNA, 19 nt, Artificial Sequence
  Description of Artificial Sequence: Synthetic oligonucleotide
agggaucucacugccaagc

SEQ ID NO: 2331139 - RNA, 19 nt, Artificial Sequence
  Description of Artificial Sequence: Synthetic oligonucleotide
caaaagaucuuggcgaaag

SEQ ID NO: 2331140 - RNA, 19 nt, Artificial Sequence
  Description of Artificial Sequence: Synthetic oligonucleotide
uucuggugacaccacaaca

SEQ ID NO: 2331141 - RNA, 19 nt, Artificial Sequence
  Description of Artificial Sequence: Synthetic oligonucleotide
cuuuagggcaccacagagc

SEQ ID NO: 2331142 - RNA, 19 nt, Artificial Sequence
  Description of Artificial Sequence: Synthetic oligonucleotide
agaguggaaacuugucaag

SEQ ID NO: 2331143 - RNA, 19 nt, Artificial Sequence
  Description of Artificial Sequence: Synthetic oligonucleotide
augacaaacacuagcaggu

SEQ ID NO: 2331144 - RNA, 19 nt, Artificial Sequence
  Description of Artificial Sequence: Synthetic oligonucleotide
ugguacacugcugugaaga

SEQ ID NO: 2331145 - RNA, 19 nt, Artificial Sequence
  Description of Artificial Sequence: Synthetic oligonucleotide
uuccuuucagaugugcucc

SEQ ID NO: 2331146 - RNA, 19 nt, Artificial Sequence
  Description of Artificial Sequence: Synthetic oligonucleotide
uuuucuggugacaccacaa

SEQ ID NO: 2331147 - RNA, 19 nt, Artificial Sequence
  Description of Artificial Sequence: Synthetic oligonucleotide
aacaggcaaggcuguuccc

SEQ ID NO: 2331148 - RNA, 19 nt, Artificial Sequence
  Description of Artificial Sequence: Synthetic oligonucleotide
uccuaagcggaugacagca

SEQ ID NO: 2331149 - RNA, 19 nt, Artificial Sequence
  Description of Artificial Sequence: Synthetic oligonucleotide
aagaucuuggcgaaagcga

SEQ ID NO: 2331150 - RNA, 19 nt, Artificial Sequence
  Description of Artificial Sequence: Synthetic oligonucleotide
agaagguggccguggacac

SEQ ID NO: 2331151 - RNA, 19 nt, Artificial Sequence
  Description of Artificial Sequence: Synthetic oligonucleotide
ugauucggaaguugggugu

SEQ ID NO: 2331152 - RNA, 19 nt, Artificial Sequence
  Description of Artificial Sequence: Synthetic oligonucleotide
gaucucacugccaagccug

SEQ ID NO: 2331153 - RNA, 19 nt, Artificial Sequence
  Description of Artificial Sequence: Synthetic oligonucleotide
cuugguguuguccccacag

SEQ ID NO: 2331154 - RNA, 19 nt, Artificial Sequence
  Description of Artificial Sequence: Synthetic oligonucleotide
ugcccauucagcaucuccu

SEQ ID NO: 2331155 - RNA, 19 nt, Artificial Sequence
  Description of Artificial Sequence: Synthetic oligonucleotide
uacaaaagaucuuggcgaa

SEQ ID NO: 2331156 - RNA, 19 nt, Artificial Sequence
  Description of Artificial Sequence: Synthetic oligonucleotide
gaaagcgaucauuuccaug

SEQ ID NO: 2331157 - RNA, 19 nt, Artificial Sequence
  Description of Artificial Sequence: Synthetic oligonucleotide
acagugauucggaaguugg

SEQ ID NO: 2331158 - RNA, 19 nt, Artificial Sequence
  Description of Artificial Sequence: Synthetic oligonucleotide
gaagccggcuccuacagca

SEQ ID NO: 2331159 - RNA, 19 nt, Artificial Sequence
  Description of Artificial Sequence: Synthetic oligonucleotide
uuggcgaaagcgaucauuu

SEQ ID NO: 2331160 - RNA, 19 nt, Artificial Sequence
  Description of Artificial Sequence: Synthetic oligonucleotide
ugucaaguagccccuucug

SEQ ID NO: 2331161 - RNA, 19 nt, Artificial Sequence
  Description of Artificial Sequence: Synthetic oligonucleotide
gaugucagagaugagucuc

SEQ ID NO: 2331162 - RNA, 19 nt, Artificial Sequence
  Description of Artificial Sequence: Synthetic oligonucleotide
ucuugugaaugaacuggug

SEQ ID NO: 2331163 - RNA, 19 nt, Artificial Sequence
  Description of Artificial Sequence: Synthetic oligonucleotide
aguccuaagcggaugacag

SEQ ID NO: 2331164 - RNA, 19 nt, Artificial Sequence
  Description of Artificial Sequence: Synthetic oligonucleotide
cuugaugagcgugaugccc

SEQ ID NO: 2331165 - RNA, 19 nt, Artificial Sequence
  Description of Artificial Sequence: Synthetic oligonucleotide
uaccacagugauucggaag

SEQ ID NO: 2331166 - RNA, 19 nt, Artificial Sequence
  Description of Artificial Sequence: Synthetic oligonucleotide
uucuuuagggcaccacaga

SEQ ID NO: 2331167 - RNA, 19 nt, Artificial Sequence
  Description of Artificial Sequence: Synthetic oligonucleotide
uugucaaguagccccuucu

SEQ ID NO: 2331168 - RNA, 19 nt, Artificial Sequence
  Description of Artificial Sequence: Synthetic oligonucleotide
caacaggcaaggcuguucc

SEQ ID NO: 2331169 - RNA, 19 nt, Artificial Sequence
  Description of Artificial Sequence: Synthetic oligonucleotide
aaguagccccuucugcuug

SEQ ID NO: 2331170 - RNA, 19 nt, Artificial Sequence
  Description of Artificial Sequence: Synthetic oligonucleotide
ucaucgcagaucuugugaa

SEQ ID NO: 2331171 - RNA, 19 nt, Artificial Sequence
  Description of Artificial Sequence: Synthetic oligonucleotide
ucugugacaggcuugccuu

SEQ ID NO: 2331172 - RNA, 19 nt, Artificial Sequence
  Description of Artificial Sequence: Synthetic oligonucleotide
cuaagcggaugacagcagc

SEQ ID NO: 2331173 - RNA, 19 nt, Artificial Sequence
  Description of Artificial Sequence: Synthetic oligonucleotide
ggucucacagaacuucucg

SEQ ID NO: 2331174 - RNA, 19 nt, Artificial Sequence
  Description of Artificial Sequence: Synthetic oligonucleotide
ggcgaaagcgaucauuucc

SEQ ID NO: 2331175 - RNA, 19 nt, Artificial Sequence
  Description of Artificial Sequence: Synthetic oligonucleotide
ugcugugaagaguggaaac

SEQ ID NO: 2331176 - RNA, 19 nt, Artificial Sequence
  Description of Artificial Sequence: Synthetic oligonucleotide
aauguccaucuucucccug

SEQ ID NO: 2331177 - RNA, 19 nt, Artificial Sequence
  Description of Artificial Sequence: Synthetic oligonucleotide
augcgguacaccucagcgg

SEQ ID NO: 2331178 - RNA, 19 nt, Artificial Sequence
  Description of Artificial Sequence: Synthetic oligonucleotide
gucaaguagccccuucugc

SEQ ID NO: 2331179 - RNA, 19 nt, Artificial Sequence
  Description of Artificial Sequence: Synthetic oligonucleotide
gagaaggccguucugcauc

SEQ ID NO: 2331180 - RNA, 19 nt, Artificial Sequence
  Description of Artificial Sequence: Synthetic oligonucleotide
guucuuuagggcaccacag

SEQ ID NO: 2331181 - RNA, 19 nt, Artificial Sequence
  Description of Artificial Sequence: Synthetic oligonucleotide
cuuucuuggguacccugcc

SEQ ID NO: 2331182 - RNA, 19 nt, Artificial Sequence
  Description of Artificial Sequence: Synthetic oligonucleotide
ugacaccacaacaggcaag

SEQ ID NO: 2331183 - RNA, 19 nt, Artificial Sequence
  Description of Artificial Sequence: Synthetic oligonucleotide
aagcgaucauuuccaugag

SEQ ID NO: 2331184 - RNA, 19 nt, Artificial Sequence
  Description of Artificial Sequence: Synthetic oligonucleotide
acaccuggcccuuacaaaa

SEQ ID NO: 2331185 - RNA, 19 nt, Artificial Sequence
  Description of Artificial Sequence: Synthetic oligonucleotide
uucccuauuggcugcccag

SEQ ID NO: 2331186 - RNA, 19 nt, Artificial Sequence
  Description of Artificial Sequence: Synthetic oligonucleotide
uaugcccuugaugagcgug

SEQ ID NO: 2331187 - RNA, 19 nt, Artificial Sequence
  Description of Artificial Sequence: Synthetic oligonucleotide
cagagaugagucucagccc

SEQ ID NO: 2331188 - RNA, 19 nt, Artificial Sequence
  Description of Artificial Sequence: Synthetic oligonucleotide
uucagggcccucaucuaug

SEQ ID NO: 2331189 - RNA, 19 nt, Artificial Sequence
  Description of Artificial Sequence: Synthetic oligonucleotide
uuuccgguccuggcgaagg

SEQ ID NO: 2331190 - RNA, 19 nt, Artificial Sequence
  Description of Artificial Sequence: Synthetic oligonucleotide
ucacuggcgauguuggcuc

SEQ ID NO: 2331191 - RNA, 19 nt, Artificial Sequence
  Description of Artificial Sequence: Synthetic oligonucleotide
aucgcagaucuugugaaug

SEQ ID NO: 2331192 - RNA, 19 nt, Artificial Sequence
  Description of Artificial Sequence: Synthetic oligonucleotide
aguggaaacuugucaagua

SEQ ID NO: 2331193 - RNA, 19 nt, Artificial Sequence
  Description of Artificial Sequence: Synthetic oligonucleotide
agaagccggcuccuacagc

SEQ ID NO: 2331194 - RNA, 19 nt, Artificial Sequence
  Description of Artificial Sequence: Synthetic oligonucleotide
ucgcagaucuugugaauga

SEQ ID NO: 2331195 - RNA, 19 nt, Artificial Sequence
  Description of Artificial Sequence: Synthetic oligonucleotide
uugguguuguccccacagc

SEQ ID NO: 2331196 - RNA, 19 nt, Artificial Sequence
  Description of Artificial Sequence: Synthetic oligonucleotide
ccuuacaaaagaucuuggc

SEQ ID NO: 2331197 - RNA, 19 nt, Artificial Sequence
  Description of Artificial Sequence: Synthetic oligonucleotide
ucuccaagaagguggccgu

SEQ ID NO: 2331198 - RNA, 19 nt, Artificial Sequence
  Description of Artificial Sequence: Synthetic oligonucleotide
acaacaggcaaggcuguuc

SEQ ID NO: 2331199 - RNA, 19 nt, Artificial Sequence
  Description of Artificial Sequence: Synthetic oligonucleotide
cagagcuccacagugucag

SEQ ID NO: 2331200 - RNA, 19 nt, Artificial Sequence
  Description of Artificial Sequence: Synthetic oligonucleotide
ggaaacuugucaaguagcc

SEQ ID NO: 2331201 - RNA, 19 nt, Artificial Sequence
  Description of Artificial Sequence: Synthetic oligonucleotide
caucgcagaagccggcucc

SEQ ID NO: 2331202 - RNA, 19 nt, Artificial Sequence
  Description of Artificial Sequence: Synthetic oligonucleotide
acagaacuucucggcagcc

SEQ ID NO: 2331203 - RNA, 19 nt, Artificial Sequence
  Description of Artificial Sequence: Synthetic oligonucleotide
ugcccaguuccuuucagau

SEQ ID NO: 2331204 - RNA, 19 nt, Artificial Sequence
  Description of Artificial Sequence: Synthetic oligonucleotide
ucucaucgcagaucuugug

SEQ ID NO: 2331205 - RNA, 19 nt, Artificial Sequence
  Description of Artificial Sequence: Synthetic oligonucleotide
aaggccguucugcaucacu

SEQ ID NO: 2331206 - RNA, 19 nt, Artificial Sequence
  Description of Artificial Sequence: Synthetic oligonucleotide
cacagaacuucucggcagc

SEQ ID NO: 2331207 - RNA, 19 nt, Artificial Sequence
  Description of Artificial Sequence: Synthetic oligonucleotide
gugaucucaucgcagaucu

SEQ ID NO: 2331208 - RNA, 19 nt, Artificial Sequence
  Description of Artificial Sequence: Synthetic oligonucleotide
cuccggguggcucugcagg

SEQ ID NO: 2331209 - RNA, 19 nt, Artificial Sequence
  Description of Artificial Sequence: Synthetic oligonucleotide
cuggcccuuacaaaagauc

SEQ ID NO: 2331210 - RNA, 19 nt, Artificial Sequence
  Description of Artificial Sequence: Synthetic oligonucleotide
gucuaccacagugauucgg

SEQ ID NO: 2331211 - RNA, 19 nt, Artificial Sequence
  Description of Artificial Sequence: Synthetic oligonucleotide
cucccugaugaugucagag

SEQ ID NO: 2331212 - RNA, 19 nt, Artificial Sequence
  Description of Artificial Sequence: Synthetic oligonucleotide
uuggguacccugcccguga

SEQ ID NO: 2331213 - RNA, 19 nt, Artificial Sequence
  Description of Artificial Sequence: Synthetic oligonucleotide
uccuguuccgcccuccaua

SEQ ID NO: 2331214 - RNA, 19 nt, Artificial Sequence
  Description of Artificial Sequence: Synthetic oligonucleotide
cucaucgcagaucuuguga

SEQ ID NO: 2331215 - RNA, 19 nt, Artificial Sequence
  Description of Artificial Sequence: Synthetic oligonucleotide
cauagcagaucugguacac

SEQ ID NO: 2331216 - RNA, 19 nt, Artificial Sequence
  Description of Artificial Sequence: Synthetic oligonucleotide
ugagcgugaugcccagggc

SEQ ID NO: 2331217 - RNA, 19 nt, Artificial Sequence
  Description of Artificial Sequence: Synthetic oligonucleotide
ugaugagcgugaugcccag

SEQ ID NO: 2331218 - RNA, 19 nt, Artificial Sequence
  Description of Artificial Sequence: Synthetic oligonucleotide
guuguccccacagcggagg

SEQ ID NO: 2331219 - RNA, 19 nt, Artificial Sequence
  Description of Artificial Sequence: Synthetic oligonucleotide
ugcccgugaucucaucgca

SEQ ID NO: 2331220 - RNA, 19 nt, Artificial Sequence
  Description of Artificial Sequence: Synthetic oligonucleotide
ugaggaugcgguacaccuc

SEQ ID NO: 2331221 - RNA, 19 nt, Artificial Sequence
  Description of Artificial Sequence: Synthetic oligonucleotide
agcgaucauuuccaugagu

SEQ ID NO: 2331222 - RNA, 19 nt, Artificial Sequence
  Description of Artificial Sequence: Synthetic oligonucleotide
uuccgcccuccauagcagg

SEQ ID NO: 2331223 - RNA, 19 nt, Artificial Sequence
  Description of Artificial Sequence: Synthetic oligonucleotide
guuuucuggugacaccaca

SEQ ID NO: 2331224 - RNA, 19 nt, Artificial Sequence
  Description of Artificial Sequence: Synthetic oligonucleotide
agaaggccguucugcauca

SEQ ID NO: 2331225 - RNA, 19 nt, Artificial Sequence
  Description of Artificial Sequence: Synthetic oligonucleotide
cucggcagccaccucacug

SEQ ID NO: 2331226 - RNA, 19 nt, Artificial Sequence
  Description of Artificial Sequence: Synthetic oligonucleotide
ucggaaguugggugucugc

SEQ ID NO: 2331227 - RNA, 19 nt, Artificial Sequence
  Description of Artificial Sequence: Synthetic oligonucleotide
cugcccgugaucucaucgc

SEQ ID NO: 2331228 - RNA, 19 nt, Artificial Sequence
  Description of Artificial Sequence: Synthetic oligonucleotide
cacagagcuccacaguguc

SEQ ID NO: 2331229 - RNA, 19 nt, Artificial Sequence
  Description of Artificial Sequence: Synthetic oligonucleotide
cagcaucucugugacaggc

SEQ ID NO: 2331230 - RNA, 19 nt, Artificial Sequence
  Description of Artificial Sequence: Synthetic oligonucleotide
ggaaguugggugucugcag

SEQ ID NO: 2331231 - RNA, 19 nt, Artificial Sequence
  Description of Artificial Sequence: Synthetic oligonucleotide
aguuccuuucagaugugcu

SEQ ID NO: 2331232 - RNA, 19 nt, Artificial Sequence
  Description of Artificial Sequence: Synthetic oligonucleotide
cauagcagguggugaugag

SEQ ID NO: 2331233 - RNA, 19 nt, Artificial Sequence
  Description of Artificial Sequence: Synthetic oligonucleotide
gcucuuugaagagaaggcc

SEQ ID NO: 2331234 - RNA, 19 nt, Artificial Sequence
  Description of Artificial Sequence: Synthetic oligonucleotide
agccggcuccuacagcaac

SEQ ID NO: 2331235 - RNA, 19 nt, Artificial Sequence
  Description of Artificial Sequence: Synthetic oligonucleotide
gguacacugcugugaagag

SEQ ID NO: 2331236 - RNA, 19 nt, Artificial Sequence
  Description of Artificial Sequence: Synthetic oligonucleotide
acaggcaaggcuguucccu

SEQ ID NO: 2331237 - RNA, 19 nt, Artificial Sequence
  Description of Artificial Sequence: Synthetic oligonucleotide
cagaagccggcuccuacag

SEQ ID NO: 2331238 - RNA, 19 nt, Artificial Sequence
  Description of Artificial Sequence: Synthetic oligonucleotide
gcgaucauuuccaugaguc

SEQ ID NO: 2331239 - RNA, 19 nt, Artificial Sequence
  Description of Artificial Sequence: Synthetic oligonucleotide
uucucggcagccaccucac

SEQ ID NO: 2331240 - RNA, 19 nt, Artificial Sequence
  Description of Artificial Sequence: Synthetic oligonucleotide
agcagguggugaugagguc

SEQ ID NO: 2331241 - RNA, 19 nt, Artificial Sequence
  Description of Artificial Sequence: Synthetic oligonucleotide
gucagagaugagucucagc

SEQ ID NO: 2331242 - RNA, 19 nt, Artificial Sequence
  Description of Artificial Sequence: Synthetic oligonucleotide
caauguucuuuagggcacc

SEQ ID NO: 2331243 - RNA, 19 nt, Artificial Sequence
  Description of Artificial Sequence: Synthetic oligonucleotide
gacaccuggcccuuacaaa

SEQ ID NO: 2331244 - RNA, 19 nt, Artificial Sequence
  Description of Artificial Sequence: Synthetic oligonucleotide
gcccuuacaaaagaucuug

SEQ ID NO: 2331245 - RNA, 19 nt, Artificial Sequence
  Description of Artificial Sequence: Synthetic oligonucleotide
cacagugauucggaaguug

SEQ ID NO: 2331246 - RNA, 19 nt, Artificial Sequence
  Description of Artificial Sequence: Synthetic oligonucleotide
gucccuggagcuucugccc

SEQ ID NO: 2331247 - RNA, 19 nt, Artificial Sequence
  Description of Artificial Sequence: Synthetic oligonucleotide
agcggaggucugugguccc

SEQ ID NO: 2331248 - RNA, 19 nt, Artificial Sequence
  Description of Artificial Sequence: Synthetic oligonucleotide
agcucagcagggaucucac

SEQ ID NO: 2331249 - RNA, 19 nt, Artificial Sequence
  Description of Artificial Sequence: Synthetic oligonucleotide
ucuuggguacccugcccgu

SEQ ID NO: 2331250 - RNA, 19 nt, Artificial Sequence
  Description of Artificial Sequence: Synthetic oligonucleotide
gaguccuaagcggaugaca

SEQ ID NO: 2331251 - RNA, 19 nt, Artificial Sequence
  Description of Artificial Sequence: Synthetic oligonucleotide
gauucggaaguuggguguc

SEQ ID NO: 2331252 - RNA, 19 nt, Artificial Sequence
  Description of Artificial Sequence: Synthetic oligonucleotide
accuggcccuuacaaaaga

SEQ ID NO: 2331253 - RNA, 19 nt, Artificial Sequence
  Description of Artificial Sequence: Synthetic oligonucleotide
acuggcgauguuggcuccc

SEQ ID NO: 2331254 - RNA, 19 nt, Artificial Sequence
  Description of Artificial Sequence: Synthetic oligonucleotide
guccuaagcggaugacagc

SEQ ID NO: 2331255 - RNA, 19 nt, Artificial Sequence
  Description of Artificial Sequence: Synthetic oligonucleotide
ugacaaacacuagcagguc

SEQ ID NO: 2331256 - RNA, 19 nt, Artificial Sequence
  Description of Artificial Sequence: Synthetic oligonucleotide
uagccccuucugcuugagg

SEQ ID NO: 2331257 - RNA, 19 nt, Artificial Sequence
  Description of Artificial Sequence: Synthetic oligonucleotide
ggugacaccacaacaggca

SEQ ID NO: 2331258 - RNA, 19 nt, Artificial Sequence
  Description of Artificial Sequence: Synthetic oligonucleotide
gaugagucucagcccuuca

SEQ ID NO: 2331259 - RNA, 19 nt, Artificial Sequence
  Description of Artificial Sequence: Synthetic oligonucleotide
uccggguggcucugcaggc

SEQ ID NO: 2331260 - RNA, 19 nt, Artificial Sequence
  Description of Artificial Sequence: Synthetic oligonucleotide
gcgauguuggcucccauca

SEQ ID NO: 2331261 - RNA, 19 nt, Artificial Sequence
  Description of Artificial Sequence: Synthetic oligonucleotide
acuagcaggucugcguccu

SEQ ID NO: 2331262 - RNA, 19 nt, Artificial Sequence
  Description of Artificial Sequence: Synthetic oligonucleotide
ugaggucagcuaccccaca

SEQ ID NO: 2331263 - RNA, 19 nt, Artificial Sequence
  Description of Artificial Sequence: Synthetic oligonucleotide
caagaagguggccguggac

SEQ ID NO: 2331264 - RNA, 19 nt, Artificial Sequence
  Description of Artificial Sequence: Synthetic oligonucleotide
ucccaucagcacacugaug

SEQ ID NO: 2331265 - RNA, 19 nt, Artificial Sequence
  Description of Artificial Sequence: Synthetic oligonucleotide
gugucagcaucgucuacca

SEQ ID NO: 2331266 - RNA, 19 nt, Artificial Sequence
  Description of Artificial Sequence: Synthetic oligonucleotide
acaccacaacaggcaaggc

SEQ ID NO: 2331267 - RNA, 19 nt, Artificial Sequence
  Description of Artificial Sequence: Synthetic oligonucleotide
cugcuugaggaugcgguac

SEQ ID NO: 2331268 - RNA, 19 nt, Artificial Sequence
  Description of Artificial Sequence: Synthetic oligonucleotide
cagcggaggucuguggucc

SEQ ID NO: 2331269 - RNA, 19 nt, Artificial Sequence
  Description of Artificial Sequence: Synthetic oligonucleotide
aggcuugccuucauagcag

SEQ ID NO: 2331270 - RNA, 19 nt, Artificial Sequence
  Description of Artificial Sequence: Synthetic oligonucleotide
uccgcccuccauagcaggu

SEQ ID NO: 2331271 - RNA, 19 nt, Artificial Sequence
  Description of Artificial Sequence: Synthetic oligonucleotide
caccucacuggcgauguug

SEQ ID NO: 2331272 - RNA, 19 nt, Artificial Sequence
  Description of Artificial Sequence: Synthetic oligonucleotide
uuccgguccuggcgaaggc

SEQ ID NO: 2331273 - RNA, 19 nt, Artificial Sequence
  Description of Artificial Sequence: Synthetic oligonucleotide
gaugagcgugaugcccagg

SEQ ID NO: 2331274 - RNA, 19 nt, Artificial Sequence
  Description of Artificial Sequence: Synthetic oligonucleotide
gaguggaaacuugucaagu

SEQ ID NO: 2331275 - RNA, 19 nt, Artificial Sequence
  Description of Artificial Sequence: Synthetic oligonucleotide
ggugaugaggucagcuacc

SEQ ID NO: 2331276 - RNA, 19 nt, Artificial Sequence
  Description of Artificial Sequence: Synthetic oligonucleotide
cagcaacaauguucuuuag

SEQ ID NO: 2331277 - RNA, 19 nt, Artificial Sequence
  Description of Artificial Sequence: Synthetic oligonucleotide
uggacaccuggcccuuaca

SEQ ID NO: 2331278 - RNA, 19 nt, Artificial Sequence
  Description of Artificial Sequence: Synthetic oligonucleotide
aguagccccuucugcuuga

SEQ ID NO: 2331279 - RNA, 19 nt, Artificial Sequence
  Description of Artificial Sequence: Synthetic oligonucleotide
aucucaucgcagaucuugu

SEQ ID NO: 2331280 - RNA, 19 nt, Artificial Sequence
  Description of Artificial Sequence: Synthetic oligonucleotide
ugaguccuaagcggaugac

SEQ ID NO: 2331281 - RNA, 19 nt, Artificial Sequence
  Description of Artificial Sequence: Synthetic oligonucleotide
ccugcccgugaucucaucg

SEQ ID NO: 2331282 - RNA, 19 nt, Artificial Sequence
  Description of Artificial Sequence: Synthetic oligonucleotide
ucucccugaugaugucaga

SEQ ID NO: 2331283 - RNA, 19 nt, Artificial Sequence
  Description of Artificial Sequence: Synthetic oligonucleotide
auagcagaucugguacacu

SEQ ID NO: 2331284 - RNA, 19 nt, Artificial Sequence
  Description of Artificial Sequence: Synthetic oligonucleotide
augucagagaugagucuca

SEQ ID NO: 2331285 - RNA, 19 nt, Artificial Sequence
  Description of Artificial Sequence: Synthetic oligonucleotide
uccgguccuggcgaaggcc

SEQ ID NO: 2331286 - RNA, 19 nt, Artificial Sequence
  Description of Artificial Sequence: Synthetic oligonucleotide
aggcaggacagcaucucug

SEQ ID NO: 2331287 - RNA, 19 nt, Artificial Sequence
  Description of Artificial Sequence: Synthetic oligonucleotide
gcuguucccuauuggcugc

SEQ ID NO: 2331288 - RNA, 19 nt, Artificial Sequence
  Description of Artificial Sequence: Synthetic oligonucleotide
cccaucagcacacugaugu

SEQ ID NO: 2331289 - RNA, 19 nt, Artificial Sequence
  Description of Artificial Sequence: Synthetic oligonucleotide
ucccuauuggcugcccagu

SEQ ID NO: 2331290 - RNA, 19 nt, Artificial Sequence
  Description of Artificial Sequence: Synthetic oligonucleotide
gcuuucuuggguacccugc

SEQ ID NO: 2331291 - RNA, 19 nt, Artificial Sequence
  Description of Artificial Sequence: Synthetic oligonucleotide
cgaucauuuccaugagucc

SEQ ID NO: 2331292 - RNA, 19 nt, Artificial Sequence
  Description of Artificial Sequence: Synthetic oligonucleotide
ccuguuccgcccuccauag

SEQ ID NO: 2331293 - RNA, 19 nt, Artificial Sequence
  Description of Artificial Sequence: Synthetic oligonucleotide
aucucacugccaagccugg

SEQ ID NO: 2331294 - RNA, 19 nt, Artificial Sequence
  Description of Artificial Sequence: Synthetic oligonucleotide
gcgaaagcgaucauuucca

SEQ ID NO: 2331295 - RNA, 19 nt, Artificial Sequence
  Description of Artificial Sequence: Synthetic oligonucleotide
guucccuauuggcugccca

SEQ ID NO: 2331296 - RNA, 19 nt, Artificial Sequence
  Description of Artificial Sequence: Synthetic oligonucleotide
gccguucugcaucacuuug

SEQ ID NO: 2331297 - RNA, 19 nt, Artificial Sequence
  Description of Artificial Sequence: Synthetic oligonucleotide
uuagggcaccacagagcuc

SEQ ID NO: 2331298 - RNA, 19 nt, Artificial Sequence
  Description of Artificial Sequence: Synthetic oligonucleotide
acaaaagaucuuggcgaaa

SEQ ID NO: 2331299 - RNA, 19 nt, Artificial Sequence
  Description of Artificial Sequence: Synthetic oligonucleotide
gaagguggccguggacacc

SEQ ID NO: 2331300 - RNA, 19 nt, Artificial Sequence
  Description of Artificial Sequence: Synthetic oligonucleotide
ugcuccggguggcucugca

SEQ ID NO: 2331301 - RNA, 19 nt, Artificial Sequence
  Description of Artificial Sequence: Synthetic oligonucleotide
uguucccuauuggcugccc

SEQ ID NO: 2331302 - RNA, 19 nt, Artificial Sequence
  Description of Artificial Sequence: Synthetic oligonucleotide
guuccgcccuccauagcag

SEQ ID NO: 2331303 - RNA, 19 nt, Artificial Sequence
  Description of Artificial Sequence: Synthetic oligonucleotide
ugguggucucacagaacuu

SEQ ID NO: 2331304 - RNA, 19 nt, Artificial Sequence
  Description of Artificial Sequence: Synthetic oligonucleotide
gcagaucuugugaaugaac

SEQ ID NO: 2331305 - RNA, 19 nt, Artificial Sequence
  Description of Artificial Sequence: Synthetic oligonucleotide
uuccuguuccgcccuccau

SEQ ID NO: 2331306 - RNA, 19 nt, Artificial Sequence
  Description of Artificial Sequence: Synthetic oligonucleotide
ggaggucuguggucccugg

SEQ ID NO: 2331307 - RNA, 19 nt, Artificial Sequence
  Description of Artificial Sequence: Synthetic oligonucleotide
caccacaacaggcaaggcu

SEQ ID NO: 2331308 - RNA, 19 nt, Artificial Sequence
  Description of Artificial Sequence: Synthetic oligonucleotide
gguggccguggacaccugg

SEQ ID NO: 2331309 - RNA, 19 nt, Artificial Sequence
  Description of Artificial Sequence: Synthetic oligonucleotide
cacagcggaggccaucgca

SEQ ID NO: 2331310 - RNA, 19 nt, Artificial Sequence
  Description of Artificial Sequence: Synthetic oligonucleotide
ccuugaugagcgugaugcc

SEQ ID NO: 2331311 - RNA, 19 nt, Artificial Sequence
  Description of Artificial Sequence: Synthetic oligonucleotide
agcggaggccaucgcagaa

SEQ ID NO: 2331312 - RNA, 19 nt, Artificial Sequence
  Description of Artificial Sequence: Synthetic oligonucleotide
accccacagcucuccaaga

SEQ ID NO: 2331313 - RNA, 19 nt, Artificial Sequence
  Description of Artificial Sequence: Synthetic oligonucleotide
cuuggguacccugcccgug

SEQ ID NO: 2331314 - RNA, 19 nt, Artificial Sequence
  Description of Artificial Sequence: Synthetic oligonucleotide
augcccuugaugagcguga

SEQ ID NO: 2331315 - RNA, 19 nt, Artificial Sequence
  Description of Artificial Sequence: Synthetic oligonucleotide
gaggucuguggucccugga

SEQ ID NO: 2331316 - RNA, 19 nt, Artificial Sequence
  Description of Artificial Sequence: Synthetic oligonucleotide
ggacaccuggcccuuacaa

SEQ ID NO: 2331317 - RNA, 19 nt, Artificial Sequence
  Description of Artificial Sequence: Synthetic oligonucleotide
accucagcggaggucugug

SEQ ID NO: 2331318 - RNA, 19 nt, Artificial Sequence
  Description of Artificial Sequence: Synthetic oligonucleotide
cugcguccugcacagccuc

SEQ ID NO: 2331319 - RNA, 19 nt, Artificial Sequence
  Description of Artificial Sequence: Synthetic oligonucleotide
ucuuggcgaaagcgaucau

SEQ ID NO: 2331320 - RNA, 19 nt, Artificial Sequence
  Description of Artificial Sequence: Synthetic oligonucleotide
cuguggucccuggagcuuc

SEQ ID NO: 2331321 - RNA, 19 nt, Artificial Sequence
  Description of Artificial Sequence: Synthetic oligonucleotide
cuaccacagugauucggaa

SEQ ID NO: 2331322 - RNA, 19 nt, Artificial Sequence
  Description of Artificial Sequence: Synthetic oligonucleotide
ggccguggacaccuggccc

SEQ ID NO: 2331323 - RNA, 19 nt, Artificial Sequence
  Description of Artificial Sequence: Synthetic oligonucleotide
acagagcuccacaguguca

SEQ ID NO: 2331324 - RNA, 19 nt, Artificial Sequence
  Description of Artificial Sequence: Synthetic oligonucleotide
uggguacccugcccgugau

SEQ ID NO: 2331325 - RNA, 19 nt, Artificial Sequence
  Description of Artificial Sequence: Synthetic oligonucleotide
ccuaagcggaugacagcag

SEQ ID NO: 2331326 - RNA, 19 nt, Artificial Sequence
  Description of Artificial Sequence: Synthetic oligonucleotide
ggcgauguuggcucccauc

SEQ ID NO: 2331327 - RNA, 19 nt, Artificial Sequence
  Description of Artificial Sequence: Synthetic oligonucleotide
aucgcagaagccggcuccu

SEQ ID NO: 2331328 - RNA, 19 nt, Artificial Sequence
  Description of Artificial Sequence: Synthetic oligonucleotide
aggcaaggcuguucccuau

SEQ ID NO: 2331329 - RNA, 19 nt, Artificial Sequence
  Description of Artificial Sequence: Synthetic oligonucleotide
ugacagcagccuugguguu

SEQ ID NO: 2331330 - RNA, 19 nt, Artificial Sequence
  Description of Artificial Sequence: Synthetic oligonucleotide
gcucccaucagcacacuga

SEQ ID NO: 2331331 - RNA, 19 nt, Artificial Sequence
  Description of Artificial Sequence: Synthetic oligonucleotide
gcagaucugguacacugcu

SEQ ID NO: 2331332 - RNA, 19 nt, Artificial Sequence
  Description of Artificial Sequence: Synthetic oligonucleotide
gucagcuaccccacagcuc

SEQ ID NO: 2331333 - RNA, 19 nt, Artificial Sequence
  Description of Artificial Sequence: Synthetic oligonucleotide
ccuauuggcugcccaguuc

SEQ ID NO: 2331334 - RNA, 19 nt, Artificial Sequence
  Description of Artificial Sequence: Synthetic oligonucleotide
cagcucagcagggaucuca

SEQ ID NO: 2331335 - RNA, 19 nt, Artificial Sequence
  Description of Artificial Sequence: Synthetic oligonucleotide
cucacuggcgauguuggcu

SEQ ID NO: 2331336 - RNA, 19 nt, Artificial Sequence
  Description of Artificial Sequence: Synthetic oligonucleotide
ggucagcuaccccacagcu

SEQ ID NO: 2331337 - RNA, 19 nt, Artificial Sequence
  Description of Artificial Sequence: Synthetic oligonucleotide
cuguucccuauuggcugcc

SEQ ID NO: 2331338 - RNA, 19 nt, Artificial Sequence
  Description of Artificial Sequence: Synthetic oligonucleotide
agccaccucacuggcgaug

SEQ ID NO: 2331339 - RNA, 19 nt, Artificial Sequence
  Description of Artificial Sequence: Synthetic oligonucleotide
auuggcugcccaguuccuu

SEQ ID NO: 2331340 - RNA, 19 nt, Artificial Sequence
  Description of Artificial Sequence: Synthetic oligonucleotide
gcggaugacagcagccuug

SEQ ID NO: 2331341 - RNA, 19 nt, Artificial Sequence
  Description of Artificial Sequence: Synthetic oligonucleotide
cccacagcggaggccaucg

SEQ ID NO: 2331342 - RNA, 19 nt, Artificial Sequence
  Description of Artificial Sequence: Synthetic oligonucleotide
agcgugaugcccagggcuu

SEQ ID NO: 2331343 - RNA, 19 nt, Artificial Sequence
  Description of Artificial Sequence: Synthetic oligonucleotide
gcugugaagaguggaaacu

SEQ ID NO: 2331344 - RNA, 19 nt, Artificial Sequence
  Description of Artificial Sequence: Synthetic oligonucleotide
cuguuccgcccuccauagc

SEQ ID NO: 2331345 - RNA, 19 nt, Artificial Sequence
  Description of Artificial Sequence: Synthetic oligonucleotide
cucagcggaggucuguggu

SEQ ID NO: 2331346 - RNA, 19 nt, Artificial Sequence
  Description of Artificial Sequence: Synthetic oligonucleotide
cuuccuguuccgcccucca

SEQ ID NO: 2331347 - RNA, 19 nt, Artificial Sequence
  Description of Artificial Sequence: Synthetic oligonucleotide
cuagcaggucugcguccug

SEQ ID NO: 2331348 - RNA, 19 nt, Artificial Sequence
  Description of Artificial Sequence: Synthetic oligonucleotide
caucgucuaccacagugau

SEQ ID NO: 2331349 - RNA, 19 nt, Artificial Sequence
  Description of Artificial Sequence: Synthetic oligonucleotide
guacacugcugugaagagu

SEQ ID NO: 2331350 - RNA, 19 nt, Artificial Sequence
  Description of Artificial Sequence: Synthetic oligonucleotide
cagaacuucucggcagcca

SEQ ID NO: 2331351 - RNA, 19 nt, Artificial Sequence
  Description of Artificial Sequence: Synthetic oligonucleotide
ggcucccaucagcacacug

SEQ ID NO: 2331352 - RNA, 19 nt, Artificial Sequence
  Description of Artificial Sequence: Synthetic oligonucleotide
guacaccucagcggagguc

SEQ ID NO: 2331353 - RNA, 19 nt, Artificial Sequence
  Description of Artificial Sequence: Synthetic oligonucleotide
ggaucucacugccaagccu

SEQ ID NO: 2331354 - RNA, 19 nt, Artificial Sequence
  Description of Artificial Sequence: Synthetic oligonucleotide
cucccaucagcacacugau

SEQ ID NO: 2331355 - RNA, 19 nt, Artificial Sequence
  Description of Artificial Sequence: Synthetic oligonucleotide
ccuuucagaugugcuccgg

SEQ ID NO: 2331356 - RNA, 19 nt, Artificial Sequence
  Description of Artificial Sequence: Synthetic oligonucleotide
ugcccuugaugagcgugau

SEQ ID NO: 2331357 - RNA, 19 nt, Artificial Sequence
  Description of Artificial Sequence: Synthetic oligonucleotide
guagccccuucugcuugag

SEQ ID NO: 2331358 - RNA, 19 nt, Artificial Sequence
  Description of Artificial Sequence: Synthetic oligonucleotide
cuucagggcccucaucuau

SEQ ID NO: 2331359 - RNA, 19 nt, Artificial Sequence
  Description of Artificial Sequence: Synthetic oligonucleotide
cuaccccacagcucuccaa

SEQ ID NO: 2331360 - RNA, 19 nt, Artificial Sequence
  Description of Artificial Sequence: Synthetic oligonucleotide
ccucagcggaggucugugg

SEQ ID NO: 2331361 - RNA, 19 nt, Artificial Sequence
  Description of Artificial Sequence: Synthetic oligonucleotide
cccgugaucucaucgcaga

SEQ ID NO: 2331362 - RNA, 19 nt, Artificial Sequence
  Description of Artificial Sequence: Synthetic oligonucleotide
cuuggcgaaagcgaucauu

SEQ ID NO: 2331363 - RNA, 19 nt, Artificial Sequence
  Description of Artificial Sequence: Synthetic oligonucleotide
aucgucuaccacagugauu

SEQ ID NO: 2331364 - RNA, 19 nt, Artificial Sequence
  Description of Artificial Sequence: Synthetic oligonucleotide
caaguagccccuucugcuu

SEQ ID NO: 2331365 - RNA, 19 nt, Artificial Sequence
  Description of Artificial Sequence: Synthetic oligonucleotide
gcggaggccaucgcagaag

SEQ ID NO: 2331366 - RNA, 19 nt, Artificial Sequence
  Description of Artificial Sequence: Synthetic oligonucleotide
gcagcucuuugaagagaag

SEQ ID NO: 2331367 - RNA, 19 nt, Artificial Sequence
  Description of Artificial Sequence: Synthetic oligonucleotide
cagcggaggccaucgcaga

SEQ ID NO: 2331368 - RNA, 19 nt, Artificial Sequence
  Description of Artificial Sequence: Synthetic oligonucleotide
aggaugcgguacaccucag

SEQ ID NO: 2331369 - RNA, 19 nt, Artificial Sequence
  Description of Artificial Sequence: Synthetic oligonucleotide
acuugucaaguagccccuu

SEQ ID NO: 2331370 - RNA, 19 nt, Artificial Sequence
  Description of Artificial Sequence: Synthetic oligonucleotide
ccauagcagguggugauga

SEQ ID NO: 2331371 - RNA, 19 nt, Artificial Sequence
  Description of Artificial Sequence: Synthetic oligonucleotide
caucgcagaucuugugaau

SEQ ID NO: 2331372 - RNA, 19 nt, Artificial Sequence
  Description of Artificial Sequence: Synthetic oligonucleotide
gaaggccguucugcaucac

SEQ ID NO: 2331373 - RNA, 19 nt, Artificial Sequence
  Description of Artificial Sequence: Synthetic oligonucleotide
gcccgugaucucaucgcag

SEQ ID NO: 2331374 - RNA, 19 nt, Artificial Sequence
  Description of Artificial Sequence: Synthetic oligonucleotide
cgugaucucaucgcagauc

SEQ ID NO: 2331375 - RNA, 19 nt, Artificial Sequence
  Description of Artificial Sequence: Synthetic oligonucleotide
caauggucuuuccgguccu

SEQ ID NO: 2331376 - RNA, 19 nt, Artificial Sequence
  Description of Artificial Sequence: Synthetic oligonucleotide
caggcaggacagcaucucu

SEQ ID NO: 2331377 - RNA, 19 nt, Artificial Sequence
  Description of Artificial Sequence: Synthetic oligonucleotide
gcccucaucuaugcccuug

SEQ ID NO: 2331378 - RNA, 19 nt, Artificial Sequence
  Description of Artificial Sequence: Synthetic oligonucleotide
gguacaccucagcggaggu

SEQ ID NO: 2331379 - RNA, 19 nt, Artificial Sequence
  Description of Artificial Sequence: Synthetic oligonucleotide
caccacagagcuccacagu

SEQ ID NO: 2331380 - RNA, 19 nt, Artificial Sequence
  Description of Artificial Sequence: Synthetic oligonucleotide
ccaucgcagaagccggcuc

SEQ ID NO: 2331381 - RNA, 19 nt, Artificial Sequence
  Description of Artificial Sequence: Synthetic oligonucleotide
cagcuaccccacagcucuc

SEQ ID NO: 2331382 - RNA, 19 nt, Artificial Sequence
  Description of Artificial Sequence: Synthetic oligonucleotide
gccguggacaccuggcccu

SEQ ID NO: 2331383 - RNA, 19 nt, Artificial Sequence
  Description of Artificial Sequence: Synthetic oligonucleotide
ccaagccugguuuucuggu

SEQ ID NO: 2331384 - RNA, 19 nt, Artificial Sequence
  Description of Artificial Sequence: Synthetic oligonucleotide
cgucuaccacagugauucg

SEQ ID NO: 2331385 - RNA, 19 nt, Artificial Sequence
  Description of Artificial Sequence: Synthetic oligonucleotide
ggacagcaucucugugaca

SEQ ID NO: 2331386 - RNA, 19 nt, Artificial Sequence
  Description of Artificial Sequence: Synthetic oligonucleotide
ucgcagaagccggcuccua

SEQ ID NO: 2331387 - RNA, 19 nt, Artificial Sequence
  Description of Artificial Sequence: Synthetic oligonucleotide
cuuugaagagaaggccguu

SEQ ID NO: 2331388 - RNA, 19 nt, Artificial Sequence
  Description of Artificial Sequence: Synthetic oligonucleotide
cggaaguugggugucugca

SEQ ID NO: 2331389 - RNA, 19 nt, Artificial Sequence
  Description of Artificial Sequence: Synthetic oligonucleotide
uggcucccaucagcacacu

SEQ ID NO: 2331390 - RNA, 19 nt, Artificial Sequence
  Description of Artificial Sequence: Synthetic oligonucleotide
gccggcuccuacagcaaca

SEQ ID NO: 2331391 - RNA, 19 nt, Artificial Sequence
  Description of Artificial Sequence: Synthetic oligonucleotide
gcguccugcacagccucac

SEQ ID NO: 2331392 - RNA, 19 nt, Artificial Sequence
  Description of Artificial Sequence: Synthetic oligonucleotide
gcgguacaccucagcggag

SEQ ID NO: 2331393 - RNA, 19 nt, Artificial Sequence
  Description of Artificial Sequence: Synthetic oligonucleotide
ucagcccuucagggcccuc

SEQ ID NO: 2331394 - RNA, 19 nt, Artificial Sequence
  Description of Artificial Sequence: Synthetic oligonucleotide
ggguacccugcccgugauc

SEQ ID NO: 2331395 - RNA, 19 nt, Artificial Sequence
  Description of Artificial Sequence: Synthetic oligonucleotide
cuaugcccuugaugagcgu

SEQ ID NO: 2331396 - RNA, 19 nt, Artificial Sequence
  Description of Artificial Sequence: Synthetic oligonucleotide
caccuuccuguuccgcccu

SEQ ID NO: 2331397 - RNA, 19 nt, Artificial Sequence
  Description of Artificial Sequence: Synthetic oligonucleotide
cacugaugucaauguccau

SEQ ID NO: 2331398 - RNA, 19 nt, Artificial Sequence
  Description of Artificial Sequence: Synthetic oligonucleotide
ccgcccuccauagcaggug

SEQ ID NO: 2331399 - RNA, 19 nt, Artificial Sequence
  Description of Artificial Sequence: Synthetic oligonucleotide
ccacagcggaggccaucgc

SEQ ID NO: 2331400 - RNA, 19 nt, Artificial Sequence
  Description of Artificial Sequence: Synthetic oligonucleotide
acccugcccgugaucucau

SEQ ID NO: 2331401 - RNA, 19 nt, Artificial Sequence
  Description of Artificial Sequence: Synthetic oligonucleotide
gcccauucagcaucuccuu

SEQ ID NO: 2331402 - RNA, 19 nt, Artificial Sequence
  Description of Artificial Sequence: Synthetic oligonucleotide
ccuugguguuguccccaca

SEQ ID NO: 2331403 - RNA, 19 nt, Artificial Sequence
  Description of Artificial Sequence: Synthetic oligonucleotide
gugcuccggguggcucugc

SEQ ID NO: 2331404 - RNA, 19 nt, Artificial Sequence
  Description of Artificial Sequence: Synthetic oligonucleotide
ggcccuuacaaaagaucuu

SEQ ID NO: 2331405 - RNA, 19 nt, Artificial Sequence
  Description of Artificial Sequence: Synthetic oligonucleotide
ccgguccuggcgaaggccu

SEQ ID NO: 2331406 - RNA, 19 nt, Artificial Sequence
  Description of Artificial Sequence: Synthetic oligonucleotide
ccacaacaggcaaggcugu

SEQ ID NO: 2331407 - RNA, 19 nt, Artificial Sequence
  Description of Artificial Sequence: Synthetic oligonucleotide
ccaucuucucccugaugau

SEQ ID NO: 2331408 - RNA, 19 nt, Artificial Sequence
  Description of Artificial Sequence: Synthetic oligonucleotide
ggucugcguccugcacagc

SEQ ID NO: 2331409 - RNA, 19 nt, Artificial Sequence
  Description of Artificial Sequence: Synthetic oligonucleotide
cgcagaucuugugaaugaa

SEQ ID NO: 2331410 - RNA, 19 nt, Artificial Sequence
  Description of Artificial Sequence: Synthetic oligonucleotide
caccucagcggaggucugu

SEQ ID NO: 2331411 - RNA, 19 nt, Artificial Sequence
  Description of Artificial Sequence: Synthetic oligonucleotide
cggaggucuguggucccug

SEQ ID NO: 2331412 - RNA, 19 nt, Artificial Sequence
  Description of Artificial Sequence: Synthetic oligonucleotide
cgaaagcgaucauuuccau

SEQ ID NO: 2331413 - RNA, 19 nt, Artificial Sequence
  Description of Artificial Sequence: Synthetic oligonucleotide
cccugcccgugaucucauc

SEQ ID NO: 2331414 - RNA, 19 nt, Artificial Sequence
  Description of Artificial Sequence: Synthetic oligonucleotide
cagcaucgucuaccacagu

SEQ ID NO: 2331415 - RNA, 19 nt, Artificial Sequence
  Description of Artificial Sequence: Synthetic oligonucleotide
ccgugaucucaucgcagau

SEQ ID NO: 2331416 - RNA, 19 nt, Artificial Sequence
  Description of Artificial Sequence: Synthetic oligonucleotide
cucagcccuucagggcccu

SEQ ID NO: 2331417 - RNA, 19 nt, Artificial Sequence
  Description of Artificial Sequence: Synthetic oligonucleotide
ccucaucuaugcccuugau

SEQ ID NO: 2331418 - RNA, 19 nt, Artificial Sequence
  Description of Artificial Sequence: Synthetic oligonucleotide
cccuauuggcugcccaguu

SEQ ID NO: 2331419 - RNA, 19 nt, Artificial Sequence
  Description of Artificial Sequence: Synthetic oligonucleotide
gcggaggucuguggucccu

SEQ ID NO: 2331420 - RNA, 19 nt, Artificial Sequence
  Description of Artificial Sequence: Synthetic oligonucleotide
ccacagugauucggaaguu

SEQ ID NO: 2331421 - RNA, 19 nt, Artificial Sequence
  Description of Artificial Sequence: Synthetic oligonucleotide
gcgugaugcccagggcuuu

SEQ ID NO: 2331422 - RNA, 19 nt, Artificial Sequence
  Description of Artificial Sequence: Synthetic oligonucleotide
cggcuccuacagcaacaau

SEQ ID NO: 2331423 - RNA, 19 nt, Artificial Sequence
  Description of Artificial Sequence: Synthetic oligonucleotide
cguggacaccuggcccuua

SEQ ID NO: 2331424 - RNA, 19 nt, Artificial Sequence
  Description of Artificial Sequence: Synthetic oligonucleotide
aacuuaauaaaauaguuga

SEQ ID NO: 2331425 - RNA, 19 nt, Artificial Sequence
  Description of Artificial Sequence: Synthetic oligonucleotide
aauuuauagacugaagagc

SEQ ID NO: 2331426 - RNA, 19 nt, Artificial Sequence
  Description of Artificial Sequence: Synthetic oligonucleotide
uucuauaucaaauuuaagc

SEQ ID NO: 2331427 - RNA, 19 nt, Artificial Sequence
  Description of Artificial Sequence: Synthetic oligonucleotide
aaaauauguuuucucagcg

SEQ ID NO: 2331428 - RNA, 19 nt, Artificial Sequence
  Description of Artificial Sequence: Synthetic oligonucleotide
aaaggaaaaugauugcuac

SEQ ID NO: 2331429 - RNA, 19 nt, Artificial Sequence
  Description of Artificial Sequence: Synthetic oligonucleotide
aagaucaugaagcucaauc

SEQ ID NO: 2331430 - RNA, 19 nt, Artificial Sequence
  Description of Artificial Sequence: Synthetic oligonucleotide
aauauaaggacuugauuug

SEQ ID NO: 2331431 - RNA, 19 nt, Artificial Sequence
  Description of Artificial Sequence: Synthetic oligonucleotide
auaagaucuucuuucaucg

SEQ ID NO: 2331432 - RNA, 19 nt, Artificial Sequence
  Description of Artificial Sequence: Synthetic oligonucleotide
uccuaaacuaucuuuauag

SEQ ID NO: 2331433 - RNA, 19 nt, Artificial Sequence
  Description of Artificial Sequence: Synthetic oligonucleotide
uaugcauuauauuuuauca

SEQ ID NO: 2331434 - RNA, 19 nt, Artificial Sequence
  Description of Artificial Sequence: Synthetic oligonucleotide
uuauuuaauaacaaaggaa

SEQ ID NO: 2331435 - RNA, 19 nt, Artificial Sequence
  Description of Artificial Sequence: Synthetic oligonucleotide
uuaauaacaaaggaaaaug

SEQ ID NO: 2331436 - RNA, 19 nt, Artificial Sequence
  Description of Artificial Sequence: Synthetic oligonucleotide
uuuaacugaaucuugcuca

SEQ ID NO: 2331437 - RNA, 19 nt, Artificial Sequence
  Description of Artificial Sequence: Synthetic oligonucleotide
aaugauugcuaccuacugg

SEQ ID NO: 2331438 - RNA, 19 nt, Artificial Sequence
  Description of Artificial Sequence: Synthetic oligonucleotide
uaaacuaucuuuauaggcu

SEQ ID NO: 2331439 - RNA, 19 nt, Artificial Sequence
  Description of Artificial Sequence: Synthetic oligonucleotide
aaauuuaagcuuuacacuu

SEQ ID NO: 2331440 - RNA, 19 nt, Artificial Sequence
  Description of Artificial Sequence: Synthetic oligonucleotide
aaugcaaacgcuuaagaau

SEQ ID NO: 2331441 - RNA, 19 nt, Artificial Sequence
  Description of Artificial Sequence: Synthetic oligonucleotide
agaauuuauagacugaaga

SEQ ID NO: 2331442 - RNA, 19 nt, Artificial Sequence
  Description of Artificial Sequence: Synthetic oligonucleotide
aacgcuuaagaauugcauc

SEQ ID NO: 2331443 - RNA, 19 nt, Artificial Sequence
  Description of Artificial Sequence: Synthetic oligonucleotide
ugcaucauaucucuuaugc

SEQ ID NO: 2331444 - RNA, 19 nt, Artificial Sequence
  Description of Artificial Sequence: Synthetic oligonucleotide
aauaaaauaguugaugcau

SEQ ID NO: 2331445 - RNA, 19 nt, Artificial Sequence
  Description of Artificial Sequence: Synthetic oligonucleotide
uagaguucagucaugagug

SEQ ID NO: 2331446 - RNA, 19 nt, Artificial Sequence
  Description of Artificial Sequence: Synthetic oligonucleotide
aaggaaaaugauugcuacc

SEQ ID NO: 2331447 - RNA, 19 nt, Artificial Sequence
  Description of Artificial Sequence: Synthetic oligonucleotide
aguuuuauucauuagcucu

SEQ ID NO: 2331448 - RNA, 19 nt, Artificial Sequence
  Description of Artificial Sequence: Synthetic oligonucleotide
acuuucugaauauaaggac

SEQ ID NO: 2331449 - RNA, 19 nt, Artificial Sequence
  Description of Artificial Sequence: Synthetic oligonucleotide
cuaaacuaucuuuauaggc

SEQ ID NO: 2331450 - RNA, 19 nt, Artificial Sequence
  Description of Artificial Sequence: Synthetic oligonucleotide
cauggcaacaucuugcugg

SEQ ID NO: 2331451 - RNA, 19 nt, Artificial Sequence
  Description of Artificial Sequence: Synthetic oligonucleotide
auaugcauuauauuuuauc

SEQ ID NO: 2331452 - RNA, 19 nt, Artificial Sequence
  Description of Artificial Sequence: Synthetic oligonucleotide
uaaaauauguuuucucagc

SEQ ID NO: 2331453 - RNA, 19 nt, Artificial Sequence
  Description of Artificial Sequence: Synthetic oligonucleotide
auaaaauauguuuucucag

SEQ ID NO: 2331454 - RNA, 19 nt, Artificial Sequence
  Description of Artificial Sequence: Synthetic oligonucleotide
aaucuuauguaauguaaca

SEQ ID NO: 2331455 - RNA, 19 nt, Artificial Sequence
  Description of Artificial Sequence: Synthetic oligonucleotide
aauauguuuucucagcgau

SEQ ID NO: 2331456 - RNA, 19 nt, Artificial Sequence
  Description of Artificial Sequence: Synthetic oligonucleotide
aaacuuaauaaaauaguug

SEQ ID NO: 2331457 - RNA, 19 nt, Artificial Sequence
  Description of Artificial Sequence: Synthetic oligonucleotide
uuuauucuagucacaauac

SEQ ID NO: 2331458 - RNA, 19 nt, Artificial Sequence
  Description of Artificial Sequence: Synthetic oligonucleotide
aacauucuaaaauauguua

SEQ ID NO: 2331459 - RNA, 19 nt, Artificial Sequence
  Description of Artificial Sequence: Synthetic oligonucleotide
auaaggacuugauuugagc

SEQ ID NO: 2331460 - RNA, 19 nt, Artificial Sequence
  Description of Artificial Sequence: Synthetic oligonucleotide
uuaagcuuuacacuuucug

SEQ ID NO: 2331461 - RNA, 19 nt, Artificial Sequence
  Description of Artificial Sequence: Synthetic oligonucleotide
aaacacaaaucuuauguaa

SEQ ID NO: 2331462 - RNA, 19 nt, Artificial Sequence
  Description of Artificial Sequence: Synthetic oligonucleotide
ugcauaauaugcauuauau

SEQ ID NO: 2331463 - RNA, 19 nt, Artificial Sequence
  Description of Artificial Sequence: Synthetic oligonucleotide
uuuucauagaguucaguca

SEQ ID NO: 2331464 - RNA, 19 nt, Artificial Sequence
  Description of Artificial Sequence: Synthetic oligonucleotide
aagaauugcaucauaucuc

SEQ ID NO: 2331465 - RNA, 19 nt, Artificial Sequence
  Description of Artificial Sequence: Synthetic oligonucleotide
cuuauguaauguaacauuc

SEQ ID NO: 2331466 - RNA, 19 nt, Artificial Sequence
  Description of Artificial Sequence: Synthetic oligonucleotide
uuggauacuuuccauaaga

SEQ ID NO: 2331467 - RNA, 19 nt, Artificial Sequence
  Description of Artificial Sequence: Synthetic oligonucleotide
caucauaucucuuaugcug

SEQ ID NO: 2331468 - RNA, 19 nt, Artificial Sequence
  Description of Artificial Sequence: Synthetic oligonucleotide
ucaucugacaaugcaaacg

SEQ ID NO: 2331469 - RNA, 19 nt, Artificial Sequence
  Description of Artificial Sequence: Synthetic oligonucleotide
aaaugauugcuaccuacug

SEQ ID NO: 2331470 - RNA, 19 nt, Artificial Sequence
  Description of Artificial Sequence: Synthetic oligonucleotide
ucuuuauaggcuuuuauuu

SEQ ID NO: 2331471 - RNA, 19 nt, Artificial Sequence
  Description of Artificial Sequence: Synthetic oligonucleotide
gauugaaucuuuuacuguc

SEQ ID NO: 2331472 - RNA, 19 nt, Artificial Sequence
  Description of Artificial Sequence: Synthetic oligonucleotide
uacacuuucugaauauaag

SEQ ID NO: 2331473 - RNA, 19 nt, Artificial Sequence
  Description of Artificial Sequence: Synthetic oligonucleotide
uuucauagaguucagucau

SEQ ID NO: 2331474 - RNA, 19 nt, Artificial Sequence
  Description of Artificial Sequence: Synthetic oligonucleotide
ugaugcuauaacuuuauuc

SEQ ID NO: 2331475 - RNA, 19 nt, Artificial Sequence
  Description of Artificial Sequence: Synthetic oligonucleotide
uuauaugaugcuauaacuu

SEQ ID NO: 2331476 - RNA, 19 nt, Artificial Sequence
  Description of Artificial Sequence: Synthetic oligonucleotide
uucaauaaaauauguuuuc

SEQ ID NO: 2331477 - RNA, 19 nt, Artificial Sequence
  Description of Artificial Sequence: Synthetic oligonucleotide
uaagcuuuacacuuucuga

SEQ ID NO: 2331478 - RNA, 19 nt, Artificial Sequence
  Description of Artificial Sequence: Synthetic oligonucleotide
acugucauaguuuuauuca

SEQ ID NO: 2331479 - RNA, 19 nt, Artificial Sequence
  Description of Artificial Sequence: Synthetic oligonucleotide
gaaaaugauugcuaccuac

SEQ ID NO: 2331480 - RNA, 19 nt, Artificial Sequence
  Description of Artificial Sequence: Synthetic oligonucleotide
uggauuuuggauacuuucc

SEQ ID NO: 2331481 - RNA, 19 nt, Artificial Sequence
  Description of Artificial Sequence: Synthetic oligonucleotide
auguuugugauuguugucg

SEQ ID NO: 2331482 - RNA, 19 nt, Artificial Sequence
  Description of Artificial Sequence: Synthetic oligonucleotide
aauugcaucauaucucuua

SEQ ID NO: 2331483 - RNA, 19 nt, Artificial Sequence
  Description of Artificial Sequence: Synthetic oligonucleotide
cuuucuaucucuccuaaac

SEQ ID NO: 2331484 - RNA, 19 nt, Artificial Sequence
  Description of Artificial Sequence: Synthetic oligonucleotide
aaagaauuuauagacugaa

SEQ ID NO: 2331485 - RNA, 19 nt, Artificial Sequence
  Description of Artificial Sequence: Synthetic oligonucleotide
agaauugcaucauaucucu

SEQ ID NO: 2331486 - RNA, 19 nt, Artificial Sequence
  Description of Artificial Sequence: Synthetic oligonucleotide
caucugacaaugcaaacgc

SEQ ID NO: 2331487 - RNA, 19 nt, Artificial Sequence
  Description of Artificial Sequence: Synthetic oligonucleotide
ugauuugagcuuccaaaag

SEQ ID NO: 2331488 - RNA, 19 nt, Artificial Sequence
  Description of Artificial Sequence: Synthetic oligonucleotide
aaauauguuuucucagcga

SEQ ID NO: 2331489 - RNA, 19 nt, Artificial Sequence
  Description of Artificial Sequence: Synthetic oligonucleotide
ugauguuugugauuguugu

SEQ ID NO: 2331490 - RNA, 19 nt, Artificial Sequence
  Description of Artificial Sequence: Synthetic oligonucleotide
aguagcuacaauuuguuuu

SEQ ID NO: 2331491 - RNA, 19 nt, Artificial Sequence
  Description of Artificial Sequence: Synthetic oligonucleotide
aguuuggaauucuccaugg

SEQ ID NO: 2331492 - RNA, 19 nt, Artificial Sequence
  Description of Artificial Sequence: Synthetic oligonucleotide
uauguaauguaacauucua

SEQ ID NO: 2331493 - RNA, 19 nt, Artificial Sequence
  Description of Artificial Sequence: Synthetic oligonucleotide
agaucaugaagcucaaucu

SEQ ID NO: 2331494 - RNA, 19 nt, Artificial Sequence
  Description of Artificial Sequence: Synthetic oligonucleotide
gaucaugaagcucaaucug

SEQ ID NO: 2331495 - RNA, 19 nt, Artificial Sequence
  Description of Artificial Sequence: Synthetic oligonucleotide
uauaugaugcuauaacuuu

SEQ ID NO: 2331496 - RNA, 19 nt, Artificial Sequence
  Description of Artificial Sequence: Synthetic oligonucleotide
aaucuugcucaucugacaa

SEQ ID NO: 2331497 - RNA, 19 nt, Artificial Sequence
  Description of Artificial Sequence: Synthetic oligonucleotide
auuuauagacugaagagca

SEQ ID NO: 2331498 - RNA, 19 nt, Artificial Sequence
  Description of Artificial Sequence: Synthetic oligonucleotide
uauaaggacuugauuugag

SEQ ID NO: 2331499 - RNA, 19 nt, Artificial Sequence
  Description of Artificial Sequence: Synthetic oligonucleotide
uguuggauguuccauugca

SEQ ID NO: 2331500 - RNA, 19 nt, Artificial Sequence
  Description of Artificial Sequence: Synthetic oligonucleotide
uucuagucacaauacagga

SEQ ID NO: 2331501 - RNA, 19 nt, Artificial Sequence
  Description of Artificial Sequence: Synthetic oligonucleotide
ucuuauguaauguaacauu

SEQ ID NO: 2331502 - RNA, 19 nt, Artificial Sequence
  Description of Artificial Sequence: Synthetic oligonucleotide
uuugagcuuccaaaagucc

SEQ ID NO: 2331503 - RNA, 19 nt, Artificial Sequence
  Description of Artificial Sequence: Synthetic oligonucleotide
aucaaauuuaagcuuuaca

SEQ ID NO: 2331504 - RNA, 19 nt, Artificial Sequence
  Description of Artificial Sequence: Synthetic oligonucleotide
cauaagaucuucuuucauc

SEQ ID NO: 2331505 - RNA, 19 nt, Artificial Sequence
  Description of Artificial Sequence: Synthetic oligonucleotide
uuauguaauguaacauucu

SEQ ID NO: 2331506 - RNA, 19 nt, Artificial Sequence
  Description of Artificial Sequence: Synthetic oligonucleotide
uugagcuuccaaaagucca

SEQ ID NO: 2331507 - RNA, 19 nt, Artificial Sequence
  Description of Artificial Sequence: Synthetic oligonucleotide
augauugcuaccuacugga

SEQ ID NO: 2331508 - RNA, 19 nt, Artificial Sequence
  Description of Artificial Sequence: Synthetic oligonucleotide
agaaacuuaauaaaauagu

SEQ ID NO: 2331509 - RNA, 19 nt, Artificial Sequence
  Description of Artificial Sequence: Synthetic oligonucleotide
auucuagucacaauacagg

SEQ ID NO: 2331510 - RNA, 19 nt, Artificial Sequence
  Description of Artificial Sequence: Synthetic oligonucleotide
uuuauuguaugccugccuu

SEQ ID NO: 2331511 - RNA, 19 nt, Artificial Sequence
  Description of Artificial Sequence: Synthetic oligonucleotide
ugcauuauauuuuaucauu

SEQ ID NO: 2331512 - RNA, 19 nt, Artificial Sequence
  Description of Artificial Sequence: Synthetic oligonucleotide
uuugaugagaucucguuuu

SEQ ID NO: 2331513 - RNA, 19 nt, Artificial Sequence
  Description of Artificial Sequence: Synthetic oligonucleotide
ucaauaaaauauguuuucu

SEQ ID NO: 2331514 - RNA, 19 nt, Artificial Sequence
  Description of Artificial Sequence: Synthetic oligonucleotide
uuauucauuagcucugaaa

SEQ ID NO: 2331515 - RNA, 19 nt, Artificial Sequence
  Description of Artificial Sequence: Synthetic oligonucleotide
cacaauacaggaauaaaga

SEQ ID NO: 2331516 - RNA, 19 nt, Artificial Sequence
  Description of Artificial Sequence: Synthetic oligonucleotide
ggaauaaagaauuuauaga

SEQ ID NO: 2331517 - RNA, 19 nt, Artificial Sequence
  Description of Artificial Sequence: Synthetic oligonucleotide
aaacuaucuuuauaggcuu

SEQ ID NO: 2331518 - RNA, 19 nt, Artificial Sequence
  Description of Artificial Sequence: Synthetic oligonucleotide
auugcuaccuacuggagaa

SEQ ID NO: 2331519 - RNA, 19 nt, Artificial Sequence
  Description of Artificial Sequence: Synthetic oligonucleotide
acacaaaucuuauguaaug

SEQ ID NO: 2331520 - RNA, 19 nt, Artificial Sequence
  Description of Artificial Sequence: Synthetic oligonucleotide
cauuccuccuauuuaacug

SEQ ID NO: 2331521 - RNA, 19 nt, Artificial Sequence
  Description of Artificial Sequence: Synthetic oligonucleotide
ucucuuaugcuguaccucu

SEQ ID NO: 2331522 - RNA, 19 nt, Artificial Sequence
  Description of Artificial Sequence: Synthetic oligonucleotide
uugauuugagcuuccaaaa

SEQ ID NO: 2331523 - RNA, 19 nt, Artificial Sequence
  Description of Artificial Sequence: Synthetic oligonucleotide
uuuggauacuuuccauaag

SEQ ID NO: 2331524 - RNA, 19 nt, Artificial Sequence
  Description of Artificial Sequence: Synthetic oligonucleotide
aauaguugaugcauuauuu

SEQ ID NO: 2331525 - RNA, 19 nt, Artificial Sequence
  Description of Artificial Sequence: Synthetic oligonucleotide
cugcauauuucccuugugg

SEQ ID NO: 2331526 - RNA, 19 nt, Artificial Sequence
  Description of Artificial Sequence: Synthetic oligonucleotide
aggaaaaugauugcuaccu

SEQ ID NO: 2331527 - RNA, 19 nt, Artificial Sequence
  Description of Artificial Sequence: Synthetic oligonucleotide
aaaaugauugcuaccuacu

SEQ ID NO: 2331528 - RNA, 19 nt, Artificial Sequence
  Description of Artificial Sequence: Synthetic oligonucleotide
ugaauauaaggacuugauu

SEQ ID NO: 2331529 - RNA, 19 nt, Artificial Sequence
  Description of Artificial Sequence: Synthetic oligonucleotide
auuugagcuuccaaaaguc

SEQ ID NO: 2331530 - RNA, 19 nt, Artificial Sequence
  Description of Artificial Sequence: Synthetic oligonucleotide
uuuuauuguaugccugccu

SEQ ID NO: 2331531 - RNA, 19 nt, Artificial Sequence
  Description of Artificial Sequence: Synthetic oligonucleotide
agcgauugaaucuuuuacu

SEQ ID NO: 2331532 - RNA, 19 nt, Artificial Sequence
  Description of Artificial Sequence: Synthetic oligonucleotide
cuuuauucuagucacaaua

SEQ ID NO: 2331533 - RNA, 19 nt, Artificial Sequence
  Description of Artificial Sequence: Synthetic oligonucleotide
ugagcauuugcuuucuauc

SEQ ID NO: 2331534 - RNA, 19 nt, Artificial Sequence
  Description of Artificial Sequence: Synthetic oligonucleotide
ucugaauauaaggacuuga

SEQ ID NO: 2331535 - RNA, 19 nt, Artificial Sequence
  Description of Artificial Sequence: Synthetic oligonucleotide
uaugaugcuauaacuuuau

SEQ ID NO: 2331536 - RNA, 19 nt, Artificial Sequence
  Description of Artificial Sequence: Synthetic oligonucleotide
uugucguuuugcaacuugc

SEQ ID NO: 2331537 - RNA, 19 nt, Artificial Sequence
  Description of Artificial Sequence: Synthetic oligonucleotide
cuugauuugagcuuccaaa

SEQ ID NO: 2331538 - RNA, 19 nt, Artificial Sequence
  Description of Artificial Sequence: Synthetic oligonucleotide
ucuaucucuccuaaacuau

SEQ ID NO: 2331539 - RNA, 19 nt, Artificial Sequence
  Description of Artificial Sequence: Synthetic oligonucleotide
aacuuuauucuagucacaa

SEQ ID NO: 2331540 - RNA, 19 nt, Artificial Sequence
  Description of Artificial Sequence: Synthetic oligonucleotide
uucuaucucuccuaaacua

SEQ ID NO: 2331541 - RNA, 19 nt, Artificial Sequence
  Description of Artificial Sequence: Synthetic oligonucleotide
uuguaugccugccuuauau

SEQ ID NO: 2331542 - RNA, 19 nt, Artificial Sequence
  Description of Artificial Sequence: Synthetic oligonucleotide
aauuggaagagaacuuucu

SEQ ID NO: 2331543 - RNA, 19 nt, Artificial Sequence
  Description of Artificial Sequence: Synthetic oligonucleotide
aaucuuuuacugucauagu

SEQ ID NO: 2331544 - RNA, 19 nt, Artificial Sequence
  Description of Artificial Sequence: Synthetic oligonucleotide
ucugcaauuggaagagaac

SEQ ID NO: 2331545 - RNA, 19 nt, Artificial Sequence
  Description of Artificial Sequence: Synthetic oligonucleotide
aguucagucaugagugagc

SEQ ID NO: 2331546 - RNA, 19 nt, Artificial Sequence
  Description of Artificial Sequence: Synthetic oligonucleotide
uaucucuccuaaacuaucu

SEQ ID NO: 2331547 - RNA, 19 nt, Artificial Sequence
  Description of Artificial Sequence: Synthetic oligonucleotide
uuugugcugcauauuuccc

SEQ ID NO: 2331548 - RNA, 19 nt, Artificial Sequence
  Description of Artificial Sequence: Synthetic oligonucleotide
uugggcuguuucuauauca

SEQ ID NO: 2331549 - RNA, 19 nt, Artificial Sequence
  Description of Artificial Sequence: Synthetic oligonucleotide
acaaugcaaacgcuuaaga

SEQ ID NO: 2331550 - RNA, 19 nt, Artificial Sequence
  Description of Artificial Sequence: Synthetic oligonucleotide
ucuagucacaauacaggaa

SEQ ID NO: 2331551 - RNA, 19 nt, Artificial Sequence
  Description of Artificial Sequence: Synthetic oligonucleotide
ugcagcaguagcuacaauu

SEQ ID NO: 2331552 - RNA, 19 nt, Artificial Sequence
  Description of Artificial Sequence: Synthetic oligonucleotide
ugagcuuccaaaaguccac

SEQ ID NO: 2331553 - RNA, 19 nt, Artificial Sequence
  Description of Artificial Sequence: Synthetic oligonucleotide
ugauuguugucguuuugca

SEQ ID NO: 2331554 - RNA, 19 nt, Artificial Sequence
  Description of Artificial Sequence: Synthetic oligonucleotide
uuauagacugaagagcaaa

SEQ ID NO: 2331555 - RNA, 19 nt, Artificial Sequence
  Description of Artificial Sequence: Synthetic oligonucleotide
guuguuggauguuccauug

SEQ ID NO: 2331556 - RNA, 19 nt, Artificial Sequence
  Description of Artificial Sequence: Synthetic oligonucleotide
uuaucauuuguuccucaaa

SEQ ID NO: 2331557 - RNA, 19 nt, Artificial Sequence
  Description of Artificial Sequence: Synthetic oligonucleotide
ugaagagcuuuuauuguau

SEQ ID NO: 2331558 - RNA, 19 nt, Artificial Sequence
  Description of Artificial Sequence: Synthetic oligonucleotide
cacuuucugaauauaagga

SEQ ID NO: 2331559 - RNA, 19 nt, Artificial Sequence
  Description of Artificial Sequence: Synthetic oligonucleotide
ucagucaugagugagcauu

SEQ ID NO: 2331560 - RNA, 19 nt, Artificial Sequence
  Description of Artificial Sequence: Synthetic oligonucleotide
aacacaaaucuuauguaau

SEQ ID NO: 2331561 - RNA, 19 nt, Artificial Sequence
  Description of Artificial Sequence: Synthetic oligonucleotide
aggacuugauuugagcuuc

SEQ ID NO: 2331562 - RNA, 19 nt, Artificial Sequence
  Description of Artificial Sequence: Synthetic oligonucleotide
uugaagagcuuuuauugua

SEQ ID NO: 2331563 - RNA, 19 nt, Artificial Sequence
  Description of Artificial Sequence: Synthetic oligonucleotide
cuuauaugaugcuauaacu

SEQ ID NO: 2331564 - RNA, 19 nt, Artificial Sequence
  Description of Artificial Sequence: Synthetic oligonucleotide
uuaugcuguaccucuauuu

SEQ ID NO: 2331565 - RNA, 19 nt, Artificial Sequence
  Description of Artificial Sequence: Synthetic oligonucleotide
acaaaucuuauguaaugua

SEQ ID NO: 2331566 - RNA, 19 nt, Artificial Sequence
  Description of Artificial Sequence: Synthetic oligonucleotide
ugaagcucaaucugcaauu

SEQ ID NO: 2331567 - RNA, 19 nt, Artificial Sequence
  Description of Artificial Sequence: Synthetic oligonucleotide
gauuugagcuuccaaaagu

SEQ ID NO: 2331568 - RNA, 19 nt, Artificial Sequence
  Description of Artificial Sequence: Synthetic oligonucleotide
auugcaucauaucucuuau

SEQ ID NO: 2331569 - RNA, 19 nt, Artificial Sequence
  Description of Artificial Sequence: Synthetic oligonucleotide
guggauuuuggauacuuuc

SEQ ID NO: 2331570 - RNA, 19 nt, Artificial Sequence
  Description of Artificial Sequence: Synthetic oligonucleotide
auaauaugcauuauauuuu

SEQ ID NO: 2331571 - RNA, 19 nt, Artificial Sequence
  Description of Artificial Sequence: Synthetic oligonucleotide
gacaaugcaaacgcuuaag

SEQ ID NO: 2331572 - RNA, 19 nt, Artificial Sequence
  Description of Artificial Sequence: Synthetic oligonucleotide
acauucuaaaauauguuau

SEQ ID NO: 2331573 - RNA, 19 nt, Artificial Sequence
  Description of Artificial Sequence: Synthetic oligonucleotide
auaguugaugcauuauuuu

SEQ ID NO: 2331574 - RNA, 19 nt, Artificial Sequence
  Description of Artificial Sequence: Synthetic oligonucleotide
cugauguuugugauuguug

SEQ ID NO: 2331575 - RNA, 19 nt, Artificial Sequence
  Description of Artificial Sequence: Synthetic oligonucleotide
uauuugugcugcauauuuc

SEQ ID NO: 2331576 - RNA, 19 nt, Artificial Sequence
  Description of Artificial Sequence: Synthetic oligonucleotide
uaucucuuaugcuguaccu

SEQ ID NO: 2331577 - RNA, 19 nt, Artificial Sequence
  Description of Artificial Sequence: Synthetic oligonucleotide
uuuauagacugaagagcaa

SEQ ID NO: 2331578 - RNA, 19 nt, Artificial Sequence
  Description of Artificial Sequence: Synthetic oligonucleotide
uuagcuucugcagcaguag

SEQ ID NO: 2331579 - RNA, 19 nt, Artificial Sequence
  Description of Artificial Sequence: Synthetic oligonucleotide
augaagcucaaucugcaau

SEQ ID NO: 2331580 - RNA, 19 nt, Artificial Sequence
  Description of Artificial Sequence: Synthetic oligonucleotide
ugagugagcauuugcuuuc

SEQ ID NO: 2331581 - RNA, 19 nt, Artificial Sequence
  Description of Artificial Sequence: Synthetic oligonucleotide
uuuaagcuuuacacuuucu

SEQ ID NO: 2331582 - RNA, 19 nt, Artificial Sequence
  Description of Artificial Sequence: Synthetic oligonucleotide
uggauacuuuccauaagau

SEQ ID NO: 2331583 - RNA, 19 nt, Artificial Sequence
  Description of Artificial Sequence: Synthetic oligonucleotide
uguaugccugccuuauaug

SEQ ID NO: 2331584 - RNA, 19 nt, Artificial Sequence
  Description of Artificial Sequence: Synthetic oligonucleotide
cuauaacuuuauucuaguc

SEQ ID NO: 2331585 - RNA, 19 nt, Artificial Sequence
  Description of Artificial Sequence: Synthetic oligonucleotide
cagcgauugaaucuuuuac

SEQ ID NO: 2331586 - RNA, 19 nt, Artificial Sequence
  Description of Artificial Sequence: Synthetic oligonucleotide
ugugauuguugucguuuug

SEQ ID NO: 2331587 - RNA, 19 nt, Artificial Sequence
  Description of Artificial Sequence: Synthetic oligonucleotide
agcuuccaaaaguccacac

SEQ ID NO: 2331588 - RNA, 19 nt, Artificial Sequence
  Description of Artificial Sequence: Synthetic oligonucleotide
ugcaauuggaagagaacuu

SEQ ID NO: 2331589 - RNA, 19 nt, Artificial Sequence
  Description of Artificial Sequence: Synthetic oligonucleotide
cuuucugaauauaaggacu

SEQ ID NO: 2331590 - RNA, 19 nt, Artificial Sequence
  Description of Artificial Sequence: Synthetic oligonucleotide
uuaacugaaucuugcucau

SEQ ID NO: 2331591 - RNA, 19 nt, Artificial Sequence
  Description of Artificial Sequence: Synthetic oligonucleotide
uguuugugauuguugucgu

SEQ ID NO: 2331592 - RNA, 19 nt, Artificial Sequence
  Description of Artificial Sequence: Synthetic oligonucleotide
ugauugcuaccuacuggag

SEQ ID NO: 2331593 - RNA, 19 nt, Artificial Sequence
  Description of Artificial Sequence: Synthetic oligonucleotide
gucaugagugagcauuugc

SEQ ID NO: 2331594 - RNA, 19 nt, Artificial Sequence
  Description of Artificial Sequence: Synthetic oligonucleotide
ccuuauaugaugcuauaac

SEQ ID NO: 2331595 - RNA, 19 nt, Artificial Sequence
  Description of Artificial Sequence: Synthetic oligonucleotide
ggcaacaucuugcuggugc

SEQ ID NO: 2331596 - RNA, 19 nt, Artificial Sequence
  Description of Artificial Sequence: Synthetic oligonucleotide
gcgauugaaucuuuuacug

SEQ ID NO: 2331597 - RNA, 19 nt, Artificial Sequence
  Description of Artificial Sequence: Synthetic oligonucleotide
ccuaaacuaucuuuauagg

SEQ ID NO: 2331598 - RNA, 19 nt, Artificial Sequence
  Description of Artificial Sequence: Synthetic oligonucleotide
ugcaaacgcuuaagaauug

SEQ ID NO: 2331599 - RNA, 19 nt, Artificial Sequence
  Description of Artificial Sequence: Synthetic oligonucleotide
ugucauaguuuuauucauu

SEQ ID NO: 2331600 - RNA, 19 nt, Artificial Sequence
  Description of Artificial Sequence: Synthetic oligonucleotide
aucucuuaugcuguaccuc

SEQ ID NO: 2331601 - RNA, 19 nt, Artificial Sequence
  Description of Artificial Sequence: Synthetic oligonucleotide
ucucuccuaaacuaucuuu

SEQ ID NO: 2331602 - RNA, 19 nt, Artificial Sequence
  Description of Artificial Sequence: Synthetic oligonucleotide
cuaucucuccuaaacuauc

SEQ ID NO: 2331603 - RNA, 19 nt, Artificial Sequence
  Description of Artificial Sequence: Synthetic oligonucleotide
ugccugccuuauaugaugc

SEQ ID NO: 2331604 - RNA, 19 nt, Artificial Sequence
  Description of Artificial Sequence: Synthetic oligonucleotide
ugacaaugcaaacgcuuaa

SEQ ID NO: 2331605 - RNA, 19 nt, Artificial Sequence
  Description of Artificial Sequence: Synthetic oligonucleotide
gugauuguugucguuuugc

SEQ ID NO: 2331606 - RNA, 19 nt, Artificial Sequence
  Description of Artificial Sequence: Synthetic oligonucleotide
ucccuuguggauuuuggau

SEQ ID NO: 2331607 - RNA, 19 nt, Artificial Sequence
  Description of Artificial Sequence: Synthetic oligonucleotide
aucuuauguaauguaacau

SEQ ID NO: 2331608 - RNA, 19 nt, Artificial Sequence
  Description of Artificial Sequence: Synthetic oligonucleotide
ucuuaugcuguaccucuau

SEQ ID NO: 2331609 - RNA, 19 nt, Artificial Sequence
  Description of Artificial Sequence: Synthetic oligonucleotide
uaugccugccuuauaugau

SEQ ID NO: 2331610 - RNA, 19 nt, Artificial Sequence
  Description of Artificial Sequence: Synthetic oligonucleotide
gaguucagucaugagugag

SEQ ID NO: 2331611 - RNA, 19 nt, Artificial Sequence
  Description of Artificial Sequence: Synthetic oligonucleotide
uuucaucgucuuuagguuu

SEQ ID NO: 2331612 - RNA, 19 nt, Artificial Sequence
  Description of Artificial Sequence: Synthetic oligonucleotide
auauaaggacuugauuuga

SEQ ID NO: 2331613 - RNA, 19 nt, Artificial Sequence
  Description of Artificial Sequence: Synthetic oligonucleotide
ucagcgauugaaucuuuua

SEQ ID NO: 2331614 - RNA, 19 nt, Artificial Sequence
  Description of Artificial Sequence: Synthetic oligonucleotide
gcuuuuauuguaugccugc

SEQ ID NO: 2331615 - RNA, 19 nt, Artificial Sequence
  Description of Artificial Sequence: Synthetic oligonucleotide
accuacuggagaaaagaag

SEQ ID NO: 2331616 - RNA, 19 nt, Artificial Sequence
  Description of Artificial Sequence: Synthetic oligonucleotide
ccuacuggagaaaagaaga

SEQ ID NO: 2331617 - RNA, 19 nt, Artificial Sequence
  Description of Artificial Sequence: Synthetic oligonucleotide
guugucguuuugcaacuug

SEQ ID NO: 2331618 - RNA, 19 nt, Artificial Sequence
  Description of Artificial Sequence: Synthetic oligonucleotide
ucuccuaaacuaucuuuau

SEQ ID NO: 2331619 - RNA, 19 nt, Artificial Sequence
  Description of Artificial Sequence: Synthetic oligonucleotide
aguuguuggauguuccauu

SEQ ID NO: 2331620 - RNA, 19 nt, Artificial Sequence
  Description of Artificial Sequence: Synthetic oligonucleotide
aauuuaagcuuuacacuuu

SEQ ID NO: 2331621 - RNA, 19 nt, Artificial Sequence
  Description of Artificial Sequence: Synthetic oligonucleotide
ugcuuucuaucucuccuaa

SEQ ID NO: 2331622 - RNA, 19 nt, Artificial Sequence
  Description of Artificial Sequence: Synthetic oligonucleotide
gauuguugucguuuugcaa

SEQ ID NO: 2331623 - RNA, 19 nt, Artificial Sequence
  Description of Artificial Sequence: Synthetic oligonucleotide
ugggcuguuucuauaucaa

SEQ ID NO: 2331624 - RNA, 19 nt, Artificial Sequence
  Description of Artificial Sequence: Synthetic oligonucleotide
aucauuuguuccucaaauu

SEQ ID NO: 2331625 - RNA, 19 nt, Artificial Sequence
  Description of Artificial Sequence: Synthetic oligonucleotide
gaagcucaaucugcaauug

SEQ ID NO: 2331626 - RNA, 19 nt, Artificial Sequence
  Description of Artificial Sequence: Synthetic oligonucleotide
cauagaguucagucaugag

SEQ ID NO: 2331627 - RNA, 19 nt, Artificial Sequence
  Description of Artificial Sequence: Synthetic oligonucleotide
cuugcucaucugacaaugc

SEQ ID NO: 2331628 - RNA, 19 nt, Artificial Sequence
  Description of Artificial Sequence: Synthetic oligonucleotide
augcuguaccucuauuucu

SEQ ID NO: 2331629 - RNA, 19 nt, Artificial Sequence
  Description of Artificial Sequence: Synthetic oligonucleotide
uauuguaugccugccuuau

SEQ ID NO: 2331630 - RNA, 19 nt, Artificial Sequence
  Description of Artificial Sequence: Synthetic oligonucleotide
cuagucacaauacaggaau

SEQ ID NO: 2331631 - RNA, 19 nt, Artificial Sequence
  Description of Artificial Sequence: Synthetic oligonucleotide
uggugcauuugccucucug

SEQ ID NO: 2331632 - RNA, 19 nt, Artificial Sequence
  Description of Artificial Sequence: Synthetic oligonucleotide
uucaucgucuuuagguuuu

SEQ ID NO: 2331633 - RNA, 19 nt, Artificial Sequence
  Description of Artificial Sequence: Synthetic oligonucleotide
ugcugcauauuucccuugu

SEQ ID NO: 2331634 - RNA, 19 nt, Artificial Sequence
  Description of Artificial Sequence: Synthetic oligonucleotide
ugugcugcauauuucccuu

SEQ ID NO: 2331635 - RNA, 19 nt, Artificial Sequence
  Description of Artificial Sequence: Synthetic oligonucleotide
agcaguagcuacaauuugu

SEQ ID NO: 2331636 - RNA, 19 nt, Artificial Sequence
  Description of Artificial Sequence: Synthetic oligonucleotide
ugcauuccuccuauuuaac

SEQ ID NO: 2331637 - RNA, 19 nt, Artificial Sequence
  Description of Artificial Sequence: Synthetic oligonucleotide
uaagaucuucuuucaucgu

SEQ ID NO: 2331638 - RNA, 19 nt, Artificial Sequence
  Description of Artificial Sequence: Synthetic oligonucleotide
gagcauuugcuuucuaucu

SEQ ID NO: 2331639 - RNA, 19 nt, Artificial Sequence
  Description of Artificial Sequence: Synthetic oligonucleotide
ccuauuuaacugaaucuug

SEQ ID NO: 2331640 - RNA, 19 nt, Artificial Sequence
  Description of Artificial Sequence: Synthetic oligonucleotide
uucccuuguggauuuugga

SEQ ID NO: 2331641 - RNA, 19 nt, Artificial Sequence
  Description of Artificial Sequence: Synthetic oligonucleotide
guuuggaauucuccauggc

SEQ ID NO: 2331642 - RNA, 19 nt, Artificial Sequence
  Description of Artificial Sequence: Synthetic oligonucleotide
aauaugcauuauauuuuau

SEQ ID NO: 2331643 - RNA, 19 nt, Artificial Sequence
  Description of Artificial Sequence: Synthetic oligonucleotide
augcaaacgcuuaagaauu

SEQ ID NO: 2331644 - RNA, 19 nt, Artificial Sequence
  Description of Artificial Sequence: Synthetic oligonucleotide
auugaaucuuuuacuguca

SEQ ID NO: 2331645 - RNA, 19 nt, Artificial Sequence
  Description of Artificial Sequence: Synthetic oligonucleotide
caaacgcuuaagaauugca

SEQ ID NO: 2331646 - RNA, 19 nt, Artificial Sequence
  Description of Artificial Sequence: Synthetic oligonucleotide
ggauacuuuccauaagauc

SEQ ID NO: 2331647 - RNA, 19 nt, Artificial Sequence
  Description of Artificial Sequence: Synthetic oligonucleotide
uuucaagaucaugaagcuc

SEQ ID NO: 2331648 - RNA, 19 nt, Artificial Sequence
  Description of Artificial Sequence: Synthetic oligonucleotide
uuauuguaugccugccuua

SEQ ID NO: 2331649 - RNA, 19 nt, Artificial Sequence
  Description of Artificial Sequence: Synthetic oligonucleotide
auaaaauaguugaugcauu

SEQ ID NO: 2331650 - RNA, 19 nt, Artificial Sequence
  Description of Artificial Sequence: Synthetic oligonucleotide
aagagcaaacacaaaucuu

SEQ ID NO: 2331651 - RNA, 19 nt, Artificial Sequence
  Description of Artificial Sequence: Synthetic oligonucleotide
uugcaucauaucucuuaug

SEQ ID NO: 2331652 - RNA, 19 nt, Artificial Sequence
  Description of Artificial Sequence: Synthetic oligonucleotide
cuaccuacuggagaaaaga

SEQ ID NO: 2331653 - RNA, 19 nt, Artificial Sequence
  Description of Artificial Sequence: Synthetic oligonucleotide
ucaagaucaugaagcucaa

SEQ ID NO: 2331654 - RNA, 19 nt, Artificial Sequence
  Description of Artificial Sequence: Synthetic oligonucleotide
ccuccuauuuaacugaauc

SEQ ID NO: 2331655 - RNA, 19 nt, Artificial Sequence
  Description of Artificial Sequence: Synthetic oligonucleotide
ugaaucuuuuacugucaua

SEQ ID NO: 2331656 - RNA, 19 nt, Artificial Sequence
  Description of Artificial Sequence: Synthetic oligonucleotide
ugccucucuguuucuuuag

SEQ ID NO: 2331657 - RNA, 19 nt, Artificial Sequence
  Description of Artificial Sequence: Synthetic oligonucleotide
cucuccuaaacuaucuuua

SEQ ID NO: 2331658 - RNA, 19 nt, Artificial Sequence
  Description of Artificial Sequence: Synthetic oligonucleotide
uucucagcgauugaaucuu

SEQ ID NO: 2331659 - RNA, 19 nt, Artificial Sequence
  Description of Artificial Sequence: Synthetic oligonucleotide
guucagucaugagugagca

SEQ ID NO: 2331660 - RNA, 19 nt, Artificial Sequence
  Description of Artificial Sequence: Synthetic oligonucleotide
auguaacauucuaaaauau

SEQ ID NO: 2331661 - RNA, 19 nt, Artificial Sequence
  Description of Artificial Sequence: Synthetic oligonucleotide
agaguucagucaugaguga

SEQ ID NO: 2331662 - RNA, 19 nt, Artificial Sequence
  Description of Artificial Sequence: Synthetic oligonucleotide
ugcauuugccucucuguuu

SEQ ID NO: 2331663 - RNA, 19 nt, Artificial Sequence
  Description of Artificial Sequence: Synthetic oligonucleotide
ccuaguuguuggauguucc

SEQ ID NO: 2331664 - RNA, 19 nt, Artificial Sequence
  Description of Artificial Sequence: Synthetic oligonucleotide
cuccuauuuaacugaaucu

SEQ ID NO: 2331665 - RNA, 19 nt, Artificial Sequence
  Description of Artificial Sequence: Synthetic oligonucleotide
uugugauuguugucguuuu

SEQ ID NO: 2331666 - RNA, 19 nt, Artificial Sequence
  Description of Artificial Sequence: Synthetic oligonucleotide
uugcuuucuaucucuccua

SEQ ID NO: 2331667 - RNA, 19 nt, Artificial Sequence
  Description of Artificial Sequence: Synthetic oligonucleotide
cauaucucuuaugcuguac

SEQ ID NO: 2331668 - RNA, 19 nt, Artificial Sequence
  Description of Artificial Sequence: Synthetic oligonucleotide
auaugaugcuauaacuuua

SEQ ID NO: 2331669 - RNA, 19 nt, Artificial Sequence
  Description of Artificial Sequence: Synthetic oligonucleotide
uccuaguuguuggauguuc

SEQ ID NO: 2331670 - RNA, 19 nt, Artificial Sequence
  Description of Artificial Sequence: Synthetic oligonucleotide
cuaguuguuggauguucca

SEQ ID NO: 2331671 - RNA, 19 nt, Artificial Sequence
  Description of Artificial Sequence: Synthetic oligonucleotide
cugacaaugcaaacgcuua

SEQ ID NO: 2331672 - RNA, 19 nt, Artificial Sequence
  Description of Artificial Sequence: Synthetic oligonucleotide
uaguuguuggauguuccau

SEQ ID NO: 2331673 - RNA, 19 nt, Artificial Sequence
  Description of Artificial Sequence: Synthetic oligonucleotide
aucugcaauuggaagagaa

SEQ ID NO: 2331674 - RNA, 19 nt, Artificial Sequence
  Description of Artificial Sequence: Synthetic oligonucleotide
ggaagagaacuuucuuaug

SEQ ID NO: 2331675 - RNA, 19 nt, Artificial Sequence
  Description of Artificial Sequence: Synthetic oligonucleotide
gcauuugccucucuguuuc

SEQ ID NO: 2331676 - RNA, 19 nt, Artificial Sequence
  Description of Artificial Sequence: Synthetic oligonucleotide
uuacugucauaguuuuauu

SEQ ID NO: 2331677 - RNA, 19 nt, Artificial Sequence
  Description of Artificial Sequence: Synthetic oligonucleotide
uuguggauuuuggauacuu

SEQ ID NO: 2331678 - RNA, 19 nt, Artificial Sequence
  Description of Artificial Sequence: Synthetic oligonucleotide
cagcaguagcuacaauuug

SEQ ID NO: 2331679 - RNA, 19 nt, Artificial Sequence
  Description of Artificial Sequence: Synthetic oligonucleotide
ucauaucucuuaugcugua

SEQ ID NO: 2331680 - RNA, 19 nt, Artificial Sequence
  Description of Artificial Sequence: Synthetic oligonucleotide
uguauuugugcugcauauu

SEQ ID NO: 2331681 - RNA, 19 nt, Artificial Sequence
  Description of Artificial Sequence: Synthetic oligonucleotide
ugcuaccuacuggagaaaa

SEQ ID NO: 2331682 - RNA, 19 nt, Artificial Sequence
  Description of Artificial Sequence: Synthetic oligonucleotide
cugcaauuggaagagaacu

SEQ ID NO: 2331683 - RNA, 19 nt, Artificial Sequence
  Description of Artificial Sequence: Synthetic oligonucleotide
ugccuuauaugaugcuaua

SEQ ID NO: 2331684 - RNA, 19 nt, Artificial Sequence
  Description of Artificial Sequence: Synthetic oligonucleotide
cuuuuacugucauaguuuu

SEQ ID NO: 2331685 - RNA, 19 nt, Artificial Sequence
  Description of Artificial Sequence: Synthetic oligonucleotide
uugccucucuguuucuuua

SEQ ID NO: 2331686 - RNA, 19 nt, Artificial Sequence
  Description of Artificial Sequence: Synthetic oligonucleotide
cuuuacacuuucugaauau

SEQ ID NO: 2331687 - RNA, 19 nt, Artificial Sequence
  Description of Artificial Sequence: Synthetic oligonucleotide
cucugaaaugucuuccugu

SEQ ID NO: 2331688 - RNA, 19 nt, Artificial Sequence
  Description of Artificial Sequence: Synthetic oligonucleotide
cuugggcuguuucuauauc

SEQ ID NO: 2331689 - RNA, 19 nt, Artificial Sequence
  Description of Artificial Sequence: Synthetic oligonucleotide
aacuaucuuuauaggcuuu

SEQ ID NO: 2331690 - RNA, 19 nt, Artificial Sequence
  Description of Artificial Sequence: Synthetic oligonucleotide
cacaaaucuuauguaaugu

SEQ ID NO: 2331691 - RNA, 19 nt, Artificial Sequence
  Description of Artificial Sequence: Synthetic oligonucleotide
augaugcuauaacuuuauu

SEQ ID NO: 2331692 - RNA, 19 nt, Artificial Sequence
  Description of Artificial Sequence: Synthetic oligonucleotide
cuuucaucgucuuuagguu

SEQ ID NO: 2331693 - RNA, 19 nt, Artificial Sequence
  Description of Artificial Sequence: Synthetic oligonucleotide
gauguuccauugcauuccu

SEQ ID NO: 2331694 - RNA, 19 nt, Artificial Sequence
  Description of Artificial Sequence: Synthetic oligonucleotide
agucaugagugagcauuug

SEQ ID NO: 2331695 - RNA, 19 nt, Artificial Sequence
  Description of Artificial Sequence: Synthetic oligonucleotide
cuguauuugugcugcauau

SEQ ID NO: 2331696 - RNA, 19 nt, Artificial Sequence
  Description of Artificial Sequence: Synthetic oligonucleotide
gcuauaacuuuauucuagu

SEQ ID NO: 2331697 - RNA, 19 nt, Artificial Sequence
  Description of Artificial Sequence: Synthetic oligonucleotide
gcaaacgcuuaagaauugc

SEQ ID NO: 2331698 - RNA, 19 nt, Artificial Sequence
  Description of Artificial Sequence: Synthetic oligonucleotide
uccuguauuugugcugcau

SEQ ID NO: 2331699 - RNA, 19 nt, Artificial Sequence
  Description of Artificial Sequence: Synthetic oligonucleotide
gcuuuacacuuucugaaua

SEQ ID NO: 2331700 - RNA, 19 nt, Artificial Sequence
  Description of Artificial Sequence: Synthetic oligonucleotide
auuguaugccugccuuaua

SEQ ID NO: 2331701 - RNA, 19 nt, Artificial Sequence
  Description of Artificial Sequence: Synthetic oligonucleotide
cuccuaaacuaucuuuaua

SEQ ID NO: 2331702 - RNA, 19 nt, Artificial Sequence
  Description of Artificial Sequence: Synthetic oligonucleotide
guuccauugcauuccuccu

SEQ ID NO: 2331703 - RNA, 19 nt, Artificial Sequence
  Description of Artificial Sequence: Synthetic oligonucleotide
uaacugaaucuugcucauc

SEQ ID NO: 2331704 - RNA, 19 nt, Artificial Sequence
  Description of Artificial Sequence: Synthetic oligonucleotide
gugcugcauauuucccuug

SEQ ID NO: 2331705 - RNA, 19 nt, Artificial Sequence
  Description of Artificial Sequence: Synthetic oligonucleotide
ucucagcgauugaaucuuu

SEQ ID NO: 2331706 - RNA, 19 nt, Artificial Sequence
  Description of Artificial Sequence: Synthetic oligonucleotide
gcuaccuacuggagaaaag

SEQ ID NO: 2331707 - RNA, 19 nt, Artificial Sequence
  Description of Artificial Sequence: Synthetic oligonucleotide
auauguuuucucagcgauu

SEQ ID NO: 2331708 - RNA, 19 nt, Artificial Sequence
  Description of Artificial Sequence: Synthetic oligonucleotide
gacuugauuugagcuucca

SEQ ID NO: 2331709 - RNA, 19 nt, Artificial Sequence
  Description of Artificial Sequence: Synthetic oligonucleotide
gcuguuucuauaucaaauu

SEQ ID NO: 2331710 - RNA, 19 nt, Artificial Sequence
  Description of Artificial Sequence: Synthetic oligonucleotide
gcaacaucuugcuggugca

SEQ ID NO: 2331711 - RNA, 19 nt, Artificial Sequence
  Description of Artificial Sequence: Synthetic oligonucleotide
ggugcauuugccucucugu

SEQ ID NO: 2331712 - RNA, 19 nt, Artificial Sequence
  Description of Artificial Sequence: Synthetic oligonucleotide
gagcaaacacaaaucuuau

SEQ ID NO: 2331713 - RNA, 19 nt, Artificial Sequence
  Description of Artificial Sequence: Synthetic oligonucleotide
ggaaaaugauugcuaccua

SEQ ID NO: 2331714 - RNA, 19 nt, Artificial Sequence
  Description of Artificial Sequence: Synthetic oligonucleotide
auguuccauugcauuccuc

SEQ ID NO: 2331715 - RNA, 19 nt, Artificial Sequence
  Description of Artificial Sequence: Synthetic oligonucleotide
gcuuaagaauugcaucaua

SEQ ID NO: 2331716 - RNA, 19 nt, Artificial Sequence
  Description of Artificial Sequence: Synthetic oligonucleotide
agugagcauuugcuuucua

SEQ ID NO: 2331717 - RNA, 19 nt, Artificial Sequence
  Description of Artificial Sequence: Synthetic oligonucleotide
gcauauuucccuuguggau

SEQ ID NO: 2331718 - RNA, 19 nt, Artificial Sequence
  Description of Artificial Sequence: Synthetic oligonucleotide
uugcuaccuacuggagaaa

SEQ ID NO: 2331719 - RNA, 19 nt, Artificial Sequence
  Description of Artificial Sequence: Synthetic oligonucleotide
cccuuguggauuuuggaua

SEQ ID NO: 2331720 - RNA, 19 nt, Artificial Sequence
  Description of Artificial Sequence: Synthetic oligonucleotide
cucuuaugcuguaccucua

SEQ ID NO: 2331721 - RNA, 19 nt, Artificial Sequence
  Description of Artificial Sequence: Synthetic oligonucleotide
gccuuauaugaugcuauaa

SEQ ID NO: 2331722 - RNA, 19 nt, Artificial Sequence
  Description of Artificial Sequence: Synthetic oligonucleotide
gggcuguuucuauaucaaa

SEQ ID NO: 2331723 - RNA, 19 nt, Artificial Sequence
  Description of Artificial Sequence: Synthetic oligonucleotide
ccuguauuugugcugcaua

SEQ ID NO: 2331724 - RNA, 19 nt, Artificial Sequence
  Description of Artificial Sequence: Synthetic oligonucleotide
uggcaacaucuugcuggug

SEQ ID NO: 2331725 - RNA, 19 nt, Artificial Sequence
  Description of Artificial Sequence: Synthetic oligonucleotide
cuuaugcuguaccucuauu

SEQ ID NO: 2331726 - RNA, 19 nt, Artificial Sequence
  Description of Artificial Sequence: Synthetic oligonucleotide
gcaauuggaagagaacuuu

SEQ ID NO: 2331727 - RNA, 19 nt, Artificial Sequence
  Description of Artificial Sequence: Synthetic oligonucleotide
guuugugauuguugucguu

SEQ ID NO: 2331728 - RNA, 19 nt, Artificial Sequence
  Description of Artificial Sequence: Synthetic oligonucleotide
gagugagcauuugcuuucu

SEQ ID NO: 2331729 - RNA, 19 nt, Artificial Sequence
  Description of Artificial Sequence: Synthetic oligonucleotide
ccacacugaaguuuggaau

SEQ ID NO: 2331730 - RNA, 19 nt, Artificial Sequence
  Description of Artificial Sequence: Synthetic oligonucleotide
gcuuucuaucucuccuaaa

SEQ ID NO: 2331731 - RNA, 19 nt, Artificial Sequence
  Description of Artificial Sequence: Synthetic oligonucleotide
cuguaccucuauuucuuuu

SEQ ID NO: 2331732 - RNA, 19 nt, Artificial Sequence
  Description of Artificial Sequence: Synthetic oligonucleotide
caguagcuacaauuuguuu

SEQ ID NO: 2331733 - RNA, 19 nt, Artificial Sequence
  Description of Artificial Sequence: Synthetic oligonucleotide
cagucaugagugagcauuu

SEQ ID NO: 2331734 - RNA, 19 nt, Artificial Sequence
  Description of Artificial Sequence: Synthetic oligonucleotide
cucagcgauugaaucuuuu

SEQ ID NO: 2331735 - RNA, 19 nt, Artificial Sequence
  Description of Artificial Sequence: Synthetic oligonucleotide
gaauugcaucauaucucuu

SEQ ID NO: 2331736 - RNA, 19 nt, Artificial Sequence
  Description of Artificial Sequence: Synthetic oligonucleotide
ccugccuuauaugaugcua

SEQ ID NO: 2331737 - RNA, 19 nt, Artificial Sequence
  Description of Artificial Sequence: Synthetic oligonucleotide
gcaguagcuacaauuuguu

SEQ ID NO: 2331738 - RNA, 19 nt, Artificial Sequence
  Description of Artificial Sequence: Synthetic oligonucleotide
cgauugaaucuuuuacugu

SEQ ID NO: 2331739 - RNA, 19 nt, Artificial Sequence
  Description of Artificial Sequence: Synthetic oligonucleotide
cuuguggauuuuggauacu

SEQ ID NO: 2331740 - RNA, 19 nt, Artificial Sequence
  Description of Artificial Sequence: Synthetic oligonucleotide
caagaucaugaagcucaau

SEQ ID NO: 2331741 - RNA, 19 nt, Artificial Sequence
  Description of Artificial Sequence: Synthetic oligonucleotide
cuggugcauuugccucucu

SEQ ID NO: 2331742 - RNA, 19 nt, Artificial Sequence
  Description of Artificial Sequence: Synthetic oligonucleotide
cgcuuaagaauugcaucau

SEQ ID NO: 2331743 - RNA, 19 nt, Artificial Sequence
  Description of Artificial Sequence: Synthetic oligonucleotide
uuuaagauaucuuugaucu

SEQ ID NO: 2331744 - RNA, 19 nt, Artificial Sequence
  Description of Artificial Sequence: Synthetic oligonucleotide
uguaagaagccucucaugg

SEQ ID NO: 2331745 - RNA, 19 nt, Artificial Sequence
  Description of Artificial Sequence: Synthetic oligonucleotide
ugugcagugaaacagcucc

SEQ ID NO: 2331746 - RNA, 19 nt, Artificial Sequence
  Description of Artificial Sequence: Synthetic oligonucleotide
ugaguuacgagcaagacua

SEQ ID NO: 2331747 - RNA, 19 nt, Artificial Sequence
  Description of Artificial Sequence: Synthetic oligonucleotide
agcaagacuacgcaguucc

SEQ ID NO: 2331748 - RNA, 19 nt, Artificial Sequence
  Description of Artificial Sequence: Synthetic oligonucleotide
aucacuaagggcuaccggc

SEQ ID NO: 2331749 - RNA, 19 nt, Artificial Sequence
  Description of Artificial Sequence: Synthetic oligonucleotide
accguuguugcccagaauc

SEQ ID NO: 2331750 - RNA, 19 nt, Artificial Sequence
  Description of Artificial Sequence: Synthetic oligonucleotide
caagucauggaaaugaguc

SEQ ID NO: 2331751 - RNA, 19 nt, Artificial Sequence
  Description of Artificial Sequence: Synthetic oligonucleotide
uuugucucuacuuuccacc

SEQ ID NO: 2331752 - RNA, 19 nt, Artificial Sequence
  Description of Artificial Sequence: Synthetic oligonucleotide
uuugcaaugaagccuccag

SEQ ID NO: 2331753 - RNA, 19 nt, Artificial Sequence
  Description of Artificial Sequence: Synthetic oligonucleotide
ugucguuucaccagggaag

SEQ ID NO: 2331754 - RNA, 19 nt, Artificial Sequence
  Description of Artificial Sequence: Synthetic oligonucleotide
uaagauaucuuugaucuga

SEQ ID NO: 2331755 - RNA, 19 nt, Artificial Sequence
  Description of Artificial Sequence: Synthetic oligonucleotide
ucuacuuuccaccucuucu

SEQ ID NO: 2331756 - RNA, 19 nt, Artificial Sequence
  Description of Artificial Sequence: Synthetic oligonucleotide
ucggguguaggguagaucc

SEQ ID NO: 2331757 - RNA, 19 nt, Artificial Sequence
  Description of Artificial Sequence: Synthetic oligonucleotide
ugaaacagcuccaucugag

SEQ ID NO: 2331758 - RNA, 19 nt, Artificial Sequence
  Description of Artificial Sequence: Synthetic oligonucleotide
uuuguguucggguguaggg

SEQ ID NO: 2331759 - RNA, 19 nt, Artificial Sequence
  Description of Artificial Sequence: Synthetic oligonucleotide
agaaaccuggacuaaaacu

SEQ ID NO: 2331760 - RNA, 19 nt, Artificial Sequence
  Description of Artificial Sequence: Synthetic oligonucleotide
auggaaaugagucuucugu

SEQ ID NO: 2331761 - RNA, 19 nt, Artificial Sequence
  Description of Artificial Sequence: Synthetic oligonucleotide
gaaaccuggacuaaaacuc

SEQ ID NO: 2331762 - RNA, 19 nt, Artificial Sequence
  Description of Artificial Sequence: Synthetic oligonucleotide
auaucuuugaucugaugug

SEQ ID NO: 2331763 - RNA, 19 nt, Artificial Sequence
  Description of Artificial Sequence: Synthetic oligonucleotide
gaugaaaccguuguugccc

SEQ ID NO: 2331764 - RNA, 19 nt, Artificial Sequence
  Description of Artificial Sequence: Synthetic oligonucleotide
uuugcgagccuuaggaagc

SEQ ID NO: 2331765 - RNA, 19 nt, Artificial Sequence
  Description of Artificial Sequence: Synthetic oligonucleotide
uuucuuuagagucgcggcc

SEQ ID NO: 2331766 - RNA, 19 nt, Artificial Sequence
  Description of Artificial Sequence: Synthetic oligonucleotide
uggaccucugcacugauga

SEQ ID NO: 2331767 - RNA, 19 nt, Artificial Sequence
  Description of Artificial Sequence: Synthetic oligonucleotide
gauucuccccacuacaaug

SEQ ID NO: 2331768 - RNA, 19 nt, Artificial Sequence
  Description of Artificial Sequence: Synthetic oligonucleotide
agaugaaaccguuguugcc

SEQ ID NO: 2331769 - RNA, 19 nt, Artificial Sequence
  Description of Artificial Sequence: Synthetic oligonucleotide
auuugucucuacuuuccac

SEQ ID NO: 2331770 - RNA, 19 nt, Artificial Sequence
  Description of Artificial Sequence: Synthetic oligonucleotide
ugcaagggaggccucauag

SEQ ID NO: 2331771 - RNA, 19 nt, Artificial Sequence
  Description of Artificial Sequence: Synthetic oligonucleotide
uguaucugguuuucaaggc

SEQ ID NO: 2331772 - RNA, 19 nt, Artificial Sequence
  Description of Artificial Sequence: Synthetic oligonucleotide
caagacagaauccagccug

SEQ ID NO: 2331773 - RNA, 19 nt, Artificial Sequence
  Description of Artificial Sequence: Synthetic oligonucleotide
uggacuaaaacucccugac

SEQ ID NO: 2331774 - RNA, 19 nt, Artificial Sequence
  Description of Artificial Sequence: Synthetic oligonucleotide
ucccauguauguuccaugg

SEQ ID NO: 2331775 - RNA, 19 nt, Artificial Sequence
  Description of Artificial Sequence: Synthetic oligonucleotide
ugaaccuccgugauucucc

SEQ ID NO: 2331776 - RNA, 19 nt, Artificial Sequence
  Description of Artificial Sequence: Synthetic oligonucleotide
guagauccagaugaaaccg

SEQ ID NO: 2331777 - RNA, 19 nt, Artificial Sequence
  Description of Artificial Sequence: Synthetic oligonucleotide
auguauguuccauggcccc

SEQ ID NO: 2331778 - RNA, 19 nt, Artificial Sequence
  Description of Artificial Sequence: Synthetic oligonucleotide
uguugaaccuccgugauuc

SEQ ID NO: 2331779 - RNA, 19 nt, Artificial Sequence
  Description of Artificial Sequence: Synthetic oligonucleotide
uguuccauggccccgcaug

SEQ ID NO: 2331780 - RNA, 19 nt, Artificial Sequence
  Description of Artificial Sequence: Synthetic oligonucleotide
acagaauccagccuggaau

SEQ ID NO: 2331781 - RNA, 19 nt, Artificial Sequence
  Description of Artificial Sequence: Synthetic oligonucleotide
aauccuguauccgugguga

SEQ ID NO: 2331782 - RNA, 19 nt, Artificial Sequence
  Description of Artificial Sequence: Synthetic oligonucleotide
guuugcgagccuuaggaag

SEQ ID NO: 2331783 - RNA, 19 nt, Artificial Sequence
  Description of Artificial Sequence: Synthetic oligonucleotide
aaguguuucuuuagagucg

SEQ ID NO: 2331784 - RNA, 19 nt, Artificial Sequence
  Description of Artificial Sequence: Synthetic oligonucleotide
uacgcaguuccgaagccgg

SEQ ID NO: 2331785 - RNA, 19 nt, Artificial Sequence
  Description of Artificial Sequence: Synthetic oligonucleotide
uggcuuuaagauaucuuug

SEQ ID NO: 2331786 - RNA, 19 nt, Artificial Sequence
  Description of Artificial Sequence: Synthetic oligonucleotide
guuucuuuagagucgcggc

SEQ ID NO: 2331787 - RNA, 19 nt, Artificial Sequence
  Description of Artificial Sequence: Synthetic oligonucleotide
ggaaaugagucuucugucg

SEQ ID NO: 2331788 - RNA, 19 nt, Artificial Sequence
  Description of Artificial Sequence: Synthetic oligonucleotide
agagucgcggcccaggcuc

SEQ ID NO: 2331789 - RNA, 19 nt, Artificial Sequence
  Description of Artificial Sequence: Synthetic oligonucleotide
aauuugucucuacuuucca

SEQ ID NO: 2331790 - RNA, 19 nt, Artificial Sequence
  Description of Artificial Sequence: Synthetic oligonucleotide
aaaacucccugaccuagcu

SEQ ID NO: 2331791 - RNA, 19 nt, Artificial Sequence
  Description of Artificial Sequence: Synthetic oligonucleotide
ucaccucucgaucacuaag

SEQ ID NO: 2331792 - RNA, 19 nt, Artificial Sequence
  Description of Artificial Sequence: Synthetic oligonucleotide
ugcccagaaucacugaagc

SEQ ID NO: 2331793 - RNA, 19 nt, Artificial Sequence
  Description of Artificial Sequence: Synthetic oligonucleotide
cagaugaaaccguuguugc

SEQ ID NO: 2331794 - RNA, 19 nt, Artificial Sequence
  Description of Artificial Sequence: Synthetic oligonucleotide
gaauuugucucuacuuucc

SEQ ID NO: 2331795 - RNA, 19 nt, Artificial Sequence
  Description of Artificial Sequence: Synthetic oligonucleotide
agacgcaaugagcuucucc

SEQ ID NO: 2331796 - RNA, 19 nt, Artificial Sequence
  Description of Artificial Sequence: Synthetic oligonucleotide
agguucauggaugagagga

SEQ ID NO: 2331797 - RNA, 19 nt, Artificial Sequence
  Description of Artificial Sequence: Synthetic oligonucleotide
uucuguugaaccuccguga

SEQ ID NO: 2331798 - RNA, 19 nt, Artificial Sequence
  Description of Artificial Sequence: Synthetic oligonucleotide
gacuaaaacucccugaccu

SEQ ID NO: 2331799 - RNA, 19 nt, Artificial Sequence
  Description of Artificial Sequence: Synthetic oligonucleotide
agguuugcgagccuuagga

SEQ ID NO: 2331800 - RNA, 19 nt, Artificial Sequence
  Description of Artificial Sequence: Synthetic oligonucleotide
ugagaacacugccuggacc

SEQ ID NO: 2331801 - RNA, 19 nt, Artificial Sequence
  Description of Artificial Sequence: Synthetic oligonucleotide
uuacgagcaagacuacgca

SEQ ID NO: 2331802 - RNA, 19 nt, Artificial Sequence
  Description of Artificial Sequence: Synthetic oligonucleotide
gacuacgcaguuccgaagc

SEQ ID NO: 2331803 - RNA, 19 nt, Artificial Sequence
  Description of Artificial Sequence: Synthetic oligonucleotide
ucuccauuguaucugguuu

SEQ ID NO: 2331804 - RNA, 19 nt, Artificial Sequence
  Description of Artificial Sequence: Synthetic oligonucleotide
ggaagccucaucuccaucg

SEQ ID NO: 2331805 - RNA, 19 nt, Artificial Sequence
  Description of Artificial Sequence: Synthetic oligonucleotide
aaccaaguguuucuuuaga

SEQ ID NO: 2331806 - RNA, 19 nt, Artificial Sequence
  Description of Artificial Sequence: Synthetic oligonucleotide
aagacuacgcaguuccgaa

SEQ ID NO: 2331807 - RNA, 19 nt, Artificial Sequence
  Description of Artificial Sequence: Synthetic oligonucleotide
uggcaagucauggaaauga

SEQ ID NO: 2331808 - RNA, 19 nt, Artificial Sequence
  Description of Artificial Sequence: Synthetic oligonucleotide
uguuucuagcaugaucucc

SEQ ID NO: 2331809 - RNA, 19 nt, Artificial Sequence
  Description of Artificial Sequence: Synthetic oligonucleotide
gaucacuaagggcuaccgg

SEQ ID NO: 2331810 - RNA, 19 nt, Artificial Sequence
  Description of Artificial Sequence: Synthetic oligonucleotide
uuaagauaucuuugaucug

SEQ ID NO: 2331811 - RNA, 19 nt, Artificial Sequence
  Description of Artificial Sequence: Synthetic oligonucleotide
gaaggagaaaccuggacua

SEQ ID NO: 2331812 - RNA, 19 nt, Artificial Sequence
  Description of Artificial Sequence: Synthetic oligonucleotide
aaccuggacuaaaacuccc

SEQ ID NO: 2331813 - RNA, 19 nt, Artificial Sequence
  Description of Artificial Sequence: Synthetic oligonucleotide
acuacgcaguuccgaagcc

SEQ ID NO: 2331814 - RNA, 19 nt, Artificial Sequence
  Description of Artificial Sequence: Synthetic oligonucleotide
guuacgagcaagacuacgc

SEQ ID NO: 2331815 - RNA, 19 nt, Artificial Sequence
  Description of Artificial Sequence: Synthetic oligonucleotide
uucauggaugagaggagca

SEQ ID NO: 2331816 - RNA, 19 nt, Artificial Sequence
  Description of Artificial Sequence: Synthetic oligonucleotide
augaauccuguauccgugg

SEQ ID NO: 2331817 - RNA, 19 nt, Artificial Sequence
  Description of Artificial Sequence: Synthetic oligonucleotide
ucugcagaucuucuccuca

SEQ ID NO: 2331818 - RNA, 19 nt, Artificial Sequence
  Description of Artificial Sequence: Synthetic oligonucleotide
ugguuuucaaggcuuucac

SEQ ID NO: 2331819 - RNA, 19 nt, Artificial Sequence
  Description of Artificial Sequence: Synthetic oligonucleotide
uccuguaagaagccucuca

SEQ ID NO: 2331820 - RNA, 19 nt, Artificial Sequence
  Description of Artificial Sequence: Synthetic oligonucleotide
cuacuuuccaccucuucug

SEQ ID NO: 2331821 - RNA, 19 nt, Artificial Sequence
  Description of Artificial Sequence: Synthetic oligonucleotide
aguacaggaugcugguguc

SEQ ID NO: 2331822 - RNA, 19 nt, Artificial Sequence
  Description of Artificial Sequence: Synthetic oligonucleotide
cucucgaucacuaagggcu

SEQ ID NO: 2331823 - RNA, 19 nt, Artificial Sequence
  Description of Artificial Sequence: Synthetic oligonucleotide
uccuacuucuccauuguau

SEQ ID NO: 2331824 - RNA, 19 nt, Artificial Sequence
  Description of Artificial Sequence: Synthetic oligonucleotide
uacgagcaagacuacgcag

SEQ ID NO: 2331825 - RNA, 19 nt, Artificial Sequence
  Description of Artificial Sequence: Synthetic oligonucleotide
uugcccagaaucacugaag

SEQ ID NO: 2331826 - RNA, 19 nt, Artificial Sequence
  Description of Artificial Sequence: Synthetic oligonucleotide
uggaaaugagucuucuguc

SEQ ID NO: 2331827 - RNA, 19 nt, Artificial Sequence
  Description of Artificial Sequence: Synthetic oligonucleotide
caccucucgaucacuaagg

SEQ ID NO: 2331828 - RNA, 19 nt, Artificial Sequence
  Description of Artificial Sequence: Synthetic oligonucleotide
uauuucuggcuuuaagaua

SEQ ID NO: 2331829 - RNA, 19 nt, Artificial Sequence
  Description of Artificial Sequence: Synthetic oligonucleotide
gugucauacagcaucauuc

SEQ ID NO: 2331830 - RNA, 19 nt, Artificial Sequence
  Description of Artificial Sequence: Synthetic oligonucleotide
cuaaaacucccugaccuag

SEQ ID NO: 2331831 - RNA, 19 nt, Artificial Sequence
  Description of Artificial Sequence: Synthetic oligonucleotide
ccauauuucaggcuccucg

SEQ ID NO: 2331832 - RNA, 19 nt, Artificial Sequence
  Description of Artificial Sequence: Synthetic oligonucleotide
gaaucacugaagcaccaca

SEQ ID NO: 2331833 - RNA, 19 nt, Artificial Sequence
  Description of Artificial Sequence: Synthetic oligonucleotide
uaaaacucccugaccuagc

SEQ ID NO: 2331834 - RNA, 19 nt, Artificial Sequence
  Description of Artificial Sequence: Synthetic oligonucleotide
uucuuuagagucgcggccc

SEQ ID NO: 2331835 - RNA, 19 nt, Artificial Sequence
  Description of Artificial Sequence: Synthetic oligonucleotide
cuuugaucugaugugcaag

SEQ ID NO: 2331836 - RNA, 19 nt, Artificial Sequence
  Description of Artificial Sequence: Synthetic oligonucleotide
agcaugaucuccuccauua

SEQ ID NO: 2331837 - RNA, 19 nt, Artificial Sequence
  Description of Artificial Sequence: Synthetic oligonucleotide
ucugagaacacugccugga

SEQ ID NO: 2331838 - RNA, 19 nt, Artificial Sequence
  Description of Artificial Sequence: Synthetic oligonucleotide
auuucaggcuccucgugug

SEQ ID NO: 2331839 - RNA, 19 nt, Artificial Sequence
  Description of Artificial Sequence: Synthetic oligonucleotide
gacgcaaugagcuucuccu

SEQ ID NO: 2331840 - RNA, 19 nt, Artificial Sequence
  Description of Artificial Sequence: Synthetic oligonucleotide
guaagaagccucucauggc

SEQ ID NO: 2331841 - RNA, 19 nt, Artificial Sequence
  Description of Artificial Sequence: Synthetic oligonucleotide
uguauguuccauggccccg

SEQ ID NO: 2331842 - RNA, 19 nt, Artificial Sequence
  Description of Artificial Sequence: Synthetic oligonucleotide
uuuggcguguuucuagcau

SEQ ID NO: 2331843 - RNA, 19 nt, Artificial Sequence
  Description of Artificial Sequence: Synthetic oligonucleotide
aguuacgagcaagacuacg

SEQ ID NO: 2331844 - RNA, 19 nt, Artificial Sequence
  Description of Artificial Sequence: Synthetic oligonucleotide
ucuucuguugaaccuccgu

SEQ ID NO: 2331845 - RNA, 19 nt, Artificial Sequence
  Description of Artificial Sequence: Synthetic oligonucleotide
uuggcguguuucuagcaug

SEQ ID NO: 2331846 - RNA, 19 nt, Artificial Sequence
  Description of Artificial Sequence: Synthetic oligonucleotide
uuagagucgcggcccaggc

SEQ ID NO: 2331847 - RNA, 19 nt, Artificial Sequence
  Description of Artificial Sequence: Synthetic oligonucleotide
gaugcuggugucauacagc

SEQ ID NO: 2331848 - RNA, 19 nt, Artificial Sequence
  Description of Artificial Sequence: Synthetic oligonucleotide
uccguggugaucguguccc

SEQ ID NO: 2331849 - RNA, 19 nt, Artificial Sequence
  Description of Artificial Sequence: Synthetic oligonucleotide
gaauccuguauccguggug

SEQ ID NO: 2331850 - RNA, 19 nt, Artificial Sequence
  Description of Artificial Sequence: Synthetic oligonucleotide
ccauguauguuccauggcc

SEQ ID NO: 2331851 - RNA, 19 nt, Artificial Sequence
  Description of Artificial Sequence: Synthetic oligonucleotide
ucuggcuuuaagauaucuu

SEQ ID NO: 2331852 - RNA, 19 nt, Artificial Sequence
  Description of Artificial Sequence: Synthetic oligonucleotide
aaaugagucuucugucguu

SEQ ID NO: 2331853 - RNA, 19 nt, Artificial Sequence
  Description of Artificial Sequence: Synthetic oligonucleotide
aaucacugaagcaccacau

SEQ ID NO: 2331854 - RNA, 19 nt, Artificial Sequence
  Description of Artificial Sequence: Synthetic oligonucleotide
uugucucuacuuuccaccu

SEQ ID NO: 2331855 - RNA, 19 nt, Artificial Sequence
  Description of Artificial Sequence: Synthetic oligonucleotide
aaaccguuguugcccagaa

SEQ ID NO: 2331856 - RNA, 19 nt, Artificial Sequence
  Description of Artificial Sequence: Synthetic oligonucleotide
gagcaagacagaauccagc

SEQ ID NO: 2331857 - RNA, 19 nt, Artificial Sequence
  Description of Artificial Sequence: Synthetic oligonucleotide
aucugagaacacugccugg

SEQ ID NO: 2331858 - RNA, 19 nt, Artificial Sequence
  Description of Artificial Sequence: Synthetic oligonucleotide
cagaucagcuuguucacuc

SEQ ID NO: 2331859 - RNA, 19 nt, Artificial Sequence
  Description of Artificial Sequence: Synthetic oligonucleotide
aggagcaagacagaaucca

SEQ ID NO: 2331860 - RNA, 19 nt, Artificial Sequence
  Description of Artificial Sequence: Synthetic oligonucleotide
gagaacacugccuggaccu

SEQ ID NO: 2331861 - RNA, 19 nt, Artificial Sequence
  Description of Artificial Sequence: Synthetic oligonucleotide
auauuucaggcuccucgug

SEQ ID NO: 2331862 - RNA, 19 nt, Artificial Sequence
  Description of Artificial Sequence: Synthetic oligonucleotide
auccguggugaucgugucc

SEQ ID NO: 2331863 - RNA, 19 nt, Artificial Sequence
  Description of Artificial Sequence: Synthetic oligonucleotide
gagguuugcgagccuuagg

SEQ ID NO: 2331864 - RNA, 19 nt, Artificial Sequence
  Description of Artificial Sequence: Synthetic oligonucleotide
gucguuucaccagggaagg

SEQ ID NO: 2331865 - RNA, 19 nt, Artificial Sequence
  Description of Artificial Sequence: Synthetic oligonucleotide
cuccccacuacaaugucuc

SEQ ID NO: 2331866 - RNA, 19 nt, Artificial Sequence
  Description of Artificial Sequence: Synthetic oligonucleotide
gaagccucaucuccaucgc

SEQ ID NO: 2331867 - RNA, 19 nt, Artificial Sequence
  Description of Artificial Sequence: Synthetic oligonucleotide
cucacugagagguuugcga

SEQ ID NO: 2331868 - RNA, 19 nt, Artificial Sequence
  Description of Artificial Sequence: Synthetic oligonucleotide
aaccuccgugauucucccc

SEQ ID NO: 2331869 - RNA, 19 nt, Artificial Sequence
  Description of Artificial Sequence: Synthetic oligonucleotide
accuccgugauucucccca

SEQ ID NO: 2331870 - RNA, 19 nt, Artificial Sequence
  Description of Artificial Sequence: Synthetic oligonucleotide
ucugaguuacgagcaagac

SEQ ID NO: 2331871 - RNA, 19 nt, Artificial Sequence
  Description of Artificial Sequence: Synthetic oligonucleotide
ucucacugagagguuugcg

SEQ ID NO: 2331872 - RNA, 19 nt, Artificial Sequence
  Description of Artificial Sequence: Synthetic oligonucleotide
ugauucuccccacuacaau

SEQ ID NO: 2331873 - RNA, 19 nt, Artificial Sequence
  Description of Artificial Sequence: Synthetic oligonucleotide
ucugucguuucaccaggga

SEQ ID NO: 2331874 - RNA, 19 nt, Artificial Sequence
  Description of Artificial Sequence: Synthetic oligonucleotide
uuccgaagccgggagauca

SEQ ID NO: 2331875 - RNA, 19 nt, Artificial Sequence
  Description of Artificial Sequence: Synthetic oligonucleotide
ucuccccacuacaaugucu

SEQ ID NO: 2331876 - RNA, 19 nt, Artificial Sequence
  Description of Artificial Sequence: Synthetic oligonucleotide
cuuuguguucggguguagg

SEQ ID NO: 2331877 - RNA, 19 nt, Artificial Sequence
  Description of Artificial Sequence: Synthetic oligonucleotide
uguguucggguguagggua

SEQ ID NO: 2331878 - RNA, 19 nt, Artificial Sequence
  Description of Artificial Sequence: Synthetic oligonucleotide
ucuccucucccauguaugu

SEQ ID NO: 2331879 - RNA, 19 nt, Artificial Sequence
  Description of Artificial Sequence: Synthetic oligonucleotide
caagggaggccucauagca

SEQ ID NO: 2331880 - RNA, 19 nt, Artificial Sequence
  Description of Artificial Sequence: Synthetic oligonucleotide
ccuguauccguggugaucg

SEQ ID NO: 2331881 - RNA, 19 nt, Artificial Sequence
  Description of Artificial Sequence: Synthetic oligonucleotide
cauggaugagaggagcaag

SEQ ID NO: 2331882 - RNA, 19 nt, Artificial Sequence
  Description of Artificial Sequence: Synthetic oligonucleotide
uggcguguuucuagcauga

SEQ ID NO: 2331883 - RNA, 19 nt, Artificial Sequence
  Description of Artificial Sequence: Synthetic oligonucleotide
cuguaagaagccucucaug

SEQ ID NO: 2331884 - RNA, 19 nt, Artificial Sequence
  Description of Artificial Sequence: Synthetic oligonucleotide
cauggccccgcaugaaucc

SEQ ID NO: 2331885 - RNA, 19 nt, Artificial Sequence
  Description of Artificial Sequence: Synthetic oligonucleotide
agcaguacaggaugcuggu

SEQ ID NO: 2331886 - RNA, 19 nt, Artificial Sequence
  Description of Artificial Sequence: Synthetic oligonucleotide
uuucaggcuccucgugugc

SEQ ID NO: 2331887 - RNA, 19 nt, Artificial Sequence
  Description of Artificial Sequence: Synthetic oligonucleotide
agggaggccucauagcagu

SEQ ID NO: 2331888 - RNA, 19 nt, Artificial Sequence
  Description of Artificial Sequence: Synthetic oligonucleotide
gaauccagccuggaauuug

SEQ ID NO: 2331889 - RNA, 19 nt, Artificial Sequence
  Description of Artificial Sequence: Synthetic oligonucleotide
aauccagccuggaauuugu

SEQ ID NO: 2331890 - RNA, 19 nt, Artificial Sequence
  Description of Artificial Sequence: Synthetic oligonucleotide
agacuacgcaguuccgaag

SEQ ID NO: 2331891 - RNA, 19 nt, Artificial Sequence
  Description of Artificial Sequence: Synthetic oligonucleotide
ggcuuuaagauaucuuuga

SEQ ID NO: 2331892 - RNA, 19 nt, Artificial Sequence
  Description of Artificial Sequence: Synthetic oligonucleotide
caucauucucugaguuacg

SEQ ID NO: 2331893 - RNA, 19 nt, Artificial Sequence
  Description of Artificial Sequence: Synthetic oligonucleotide
uccucgugugcagugaaac

SEQ ID NO: 2331894 - RNA, 19 nt, Artificial Sequence
  Description of Artificial Sequence: Synthetic oligonucleotide
acgcaaugagcuucuccuc

SEQ ID NO: 2331895 - RNA, 19 nt, Artificial Sequence
  Description of Artificial Sequence: Synthetic oligonucleotide
gaaccuccgugauucuccc

SEQ ID NO: 2331896 - RNA, 19 nt, Artificial Sequence
  Description of Artificial Sequence: Synthetic oligonucleotide
uuguguucggguguagggu

SEQ ID NO: 2331897 - RNA, 19 nt, Artificial Sequence
  Description of Artificial Sequence: Synthetic oligonucleotide
augaaaccguuguugccca

SEQ ID NO: 2331898 - RNA, 19 nt, Artificial Sequence
  Description of Artificial Sequence: Synthetic oligonucleotide
gaucagcuuguucacucuc

SEQ ID NO: 2331899 - RNA, 19 nt, Artificial Sequence
  Description of Artificial Sequence: Synthetic oligonucleotide
gagaucaccucucgaucac

SEQ ID NO: 2331900 - RNA, 19 nt, Artificial Sequence
  Description of Artificial Sequence: Synthetic oligonucleotide
acuaaaacucccugaccua

SEQ ID NO: 2331901 - RNA, 19 nt, Artificial Sequence
  Description of Artificial Sequence: Synthetic oligonucleotide
cagugaaacagcuccaucu

SEQ ID NO: 2331902 - RNA, 19 nt, Artificial Sequence
  Description of Artificial Sequence: Synthetic oligonucleotide
ugaggucuccuuccuguaa

SEQ ID NO: 2331903 - RNA, 19 nt, Artificial Sequence
  Description of Artificial Sequence: Synthetic oligonucleotide
uccucaucuuuguguucgg

SEQ ID NO: 2331904 - RNA, 19 nt, Artificial Sequence
  Description of Artificial Sequence: Synthetic oligonucleotide
ucauggaugagaggagcaa

SEQ ID NO: 2331905 - RNA, 19 nt, Artificial Sequence
  Description of Artificial Sequence: Synthetic oligonucleotide
gaggccucauagcaguaca

SEQ ID NO: 2331906 - RNA, 19 nt, Artificial Sequence
  Description of Artificial Sequence: Synthetic oligonucleotide
cuacgcaguuccgaagccg

SEQ ID NO: 2331907 - RNA, 19 nt, Artificial Sequence
  Description of Artificial Sequence: Synthetic oligonucleotide
aucugaugugcaagggagg

SEQ ID NO: 2331908 - RNA, 19 nt, Artificial Sequence
  Description of Artificial Sequence: Synthetic oligonucleotide
uccgugauucuccccacua

SEQ ID NO: 2331909 - RNA, 19 nt, Artificial Sequence
  Description of Artificial Sequence: Synthetic oligonucleotide
acgagcaagacuacgcagu

SEQ ID NO: 2331910 - RNA, 19 nt, Artificial Sequence
  Description of Artificial Sequence: Synthetic oligonucleotide
uaggguagauccagaugaa

SEQ ID NO: 2331911 - RNA, 19 nt, Artificial Sequence
  Description of Artificial Sequence: Synthetic oligonucleotide
cucccauguauguuccaug

SEQ ID NO: 2331912 - RNA, 19 nt, Artificial Sequence
  Description of Artificial Sequence: Synthetic oligonucleotide
gucuucugucguuucacca

SEQ ID NO: 2331913 - RNA, 19 nt, Artificial Sequence
  Description of Artificial Sequence: Synthetic oligonucleotide
auucuccccacuacaaugu

SEQ ID NO: 2331914 - RNA, 19 nt, Artificial Sequence
  Description of Artificial Sequence: Synthetic oligonucleotide
cuggcuuuaagauaucuuu

SEQ ID NO: 2331915 - RNA, 19 nt, Artificial Sequence
  Description of Artificial Sequence: Synthetic oligonucleotide
agcaucauucucugaguua

SEQ ID NO: 2331916 - RNA, 19 nt, Artificial Sequence
  Description of Artificial Sequence: Synthetic oligonucleotide
ucaggcuccucgugugcag

SEQ ID NO: 2331917 - RNA, 19 nt, Artificial Sequence
  Description of Artificial Sequence: Synthetic oligonucleotide
ccagaugaaaccguuguug

SEQ ID NO: 2331918 - RNA, 19 nt, Artificial Sequence
  Description of Artificial Sequence: Synthetic oligonucleotide
cacagacgcaaugagcuuc

SEQ ID NO: 2331919 - RNA, 19 nt, Artificial Sequence
  Description of Artificial Sequence: Synthetic oligonucleotide
guugcccagaaucacugaa

SEQ ID NO: 2331920 - RNA, 19 nt, Artificial Sequence
  Description of Artificial Sequence: Synthetic oligonucleotide
uguauccguggugaucgug

SEQ ID NO: 2331921 - RNA, 19 nt, Artificial Sequence
  Description of Artificial Sequence: Synthetic oligonucleotide
agagguuugcgagccuuag

SEQ ID NO: 2331922 - RNA, 19 nt, Artificial Sequence
  Description of Artificial Sequence: Synthetic oligonucleotide
uguugcccagaaucacuga

SEQ ID NO: 2331923 - RNA, 19 nt, Artificial Sequence
  Description of Artificial Sequence: Synthetic oligonucleotide
uccauggccccgcaugaau

SEQ ID NO: 2331924 - RNA, 19 nt, Artificial Sequence
  Description of Artificial Sequence: Synthetic oligonucleotide
ggacuaaaacucccugacc

SEQ ID NO: 2331925 - RNA, 19 nt, Artificial Sequence
  Description of Artificial Sequence: Synthetic oligonucleotide
gugaaacagcuccaucuga

SEQ ID NO: 2331926 - RNA, 19 nt, Artificial Sequence
  Description of Artificial Sequence: Synthetic oligonucleotide
uccaccucuucuguugaac

SEQ ID NO: 2331927 - RNA, 19 nt, Artificial Sequence
  Description of Artificial Sequence: Synthetic oligonucleotide
ucgaucacuaagggcuacc

SEQ ID NO: 2331928 - RNA, 19 nt, Artificial Sequence
  Description of Artificial Sequence: Synthetic oligonucleotide
ugaccuagcuuuccauauu

SEQ ID NO: 2331929 - RNA, 19 nt, Artificial Sequence
  Description of Artificial Sequence: Synthetic oligonucleotide
agcuccaucugagaacacu

SEQ ID NO: 2331930 - RNA, 19 nt, Artificial Sequence
  Description of Artificial Sequence: Synthetic oligonucleotide
ucucgaucacuaagggcua

SEQ ID NO: 2331931 - RNA, 19 nt, Artificial Sequence
  Description of Artificial Sequence: Synthetic oligonucleotide
ucucccauguauguuccau

SEQ ID NO: 2331932 - RNA, 19 nt, Artificial Sequence
  Description of Artificial Sequence: Synthetic oligonucleotide
aaacucccugaccuagcuu

SEQ ID NO: 2331933 - RNA, 19 nt, Artificial Sequence
  Description of Artificial Sequence: Synthetic oligonucleotide
gguaccaaccaaguguuuc

SEQ ID NO: 2331934 - RNA, 19 nt, Artificial Sequence
  Description of Artificial Sequence: Synthetic oligonucleotide
guauguuccauggccccgc

SEQ ID NO: 2331935 - RNA, 19 nt, Artificial Sequence
  Description of Artificial Sequence: Synthetic oligonucleotide
guaucugguuuucaaggcu

SEQ ID NO: 2331936 - RNA, 19 nt, Artificial Sequence
  Description of Artificial Sequence: Synthetic oligonucleotide
agcucauccucugcagauc

SEQ ID NO: 2331937 - RNA, 19 nt, Artificial Sequence
  Description of Artificial Sequence: Synthetic oligonucleotide
cugagaacacugccuggac

SEQ ID NO: 2331938 - RNA, 19 nt, Artificial Sequence
  Description of Artificial Sequence: Synthetic oligonucleotide
gguuuucaaggcuuucaca

SEQ ID NO: 2331939 - RNA, 19 nt, Artificial Sequence
  Description of Artificial Sequence: Synthetic oligonucleotide
aaggagaaaccuggacuaa

SEQ ID NO: 2331940 - RNA, 19 nt, Artificial Sequence
  Description of Artificial Sequence: Synthetic oligonucleotide
uauguuccauggccccgca

SEQ ID NO: 2331941 - RNA, 19 nt, Artificial Sequence
  Description of Artificial Sequence: Synthetic oligonucleotide
ugaaaccguuguugcccag

SEQ ID NO: 2331942 - RNA, 19 nt, Artificial Sequence
  Description of Artificial Sequence: Synthetic oligonucleotide
aguuccgaagccgggagau

SEQ ID NO: 2331943 - RNA, 19 nt, Artificial Sequence
  Description of Artificial Sequence: Synthetic oligonucleotide
guuucaccagggaaggaga

SEQ ID NO: 2331944 - RNA, 19 nt, Artificial Sequence
  Description of Artificial Sequence: Synthetic oligonucleotide
cauauuucaggcuccucgu

SEQ ID NO: 2331945 - RNA, 19 nt, Artificial Sequence
  Description of Artificial Sequence: Synthetic oligonucleotide
ugcagugaaacagcuccau

SEQ ID NO: 2331946 - RNA, 19 nt, Artificial Sequence
  Description of Artificial Sequence: Synthetic oligonucleotide
ggagcaagacagaauccag

SEQ ID NO: 2331947 - RNA, 19 nt, Artificial Sequence
  Description of Artificial Sequence: Synthetic oligonucleotide
uauccguggugaucguguc

SEQ ID NO: 2331948 - RNA, 19 nt, Artificial Sequence
  Description of Artificial Sequence: Synthetic oligonucleotide
ugagagguuugcgagccuu

SEQ ID NO: 2331949 - RNA, 19 nt, Artificial Sequence
  Description of Artificial Sequence: Synthetic oligonucleotide
uucuccccacuacaauguc

SEQ ID NO: 2331950 - RNA, 19 nt, Artificial Sequence
  Description of Artificial Sequence: Synthetic oligonucleotide
accggcuccagguuugcaa

SEQ ID NO: 2331951 - RNA, 19 nt, Artificial Sequence
  Description of Artificial Sequence: Synthetic oligonucleotide
gaaaccguuguugcccaga

SEQ ID NO: 2331952 - RNA, 19 nt, Artificial Sequence
  Description of Artificial Sequence: Synthetic oligonucleotide
cccuccuguuccaaaagcc

SEQ ID NO: 2331953 - RNA, 19 nt, Artificial Sequence
  Description of Artificial Sequence: Synthetic oligonucleotide
guaccaaccaaguguuucu

SEQ ID NO: 2331954 - RNA, 19 nt, Artificial Sequence
  Description of Artificial Sequence: Synthetic oligonucleotide
auggcaagucauggaaaug

SEQ ID NO: 2331955 - RNA, 19 nt, Artificial Sequence
  Description of Artificial Sequence: Synthetic oligonucleotide
cugucguuucaccagggaa

SEQ ID NO: 2331956 - RNA, 19 nt, Artificial Sequence
  Description of Artificial Sequence: Synthetic oligonucleotide
caggcucucacugagaggu

SEQ ID NO: 2331957 - RNA, 19 nt, Artificial Sequence
  Description of Artificial Sequence: Synthetic oligonucleotide
accuagcuuuccauauuuc

SEQ ID NO: 2331958 - RNA, 19 nt, Artificial Sequence
  Description of Artificial Sequence: Synthetic oligonucleotide
guuccauggccccgcauga

SEQ ID NO: 2331959 - RNA, 19 nt, Artificial Sequence
  Description of Artificial Sequence: Synthetic oligonucleotide
ggccucauagcaguacagg

SEQ ID NO: 2331960 - RNA, 19 nt, Artificial Sequence
  Description of Artificial Sequence: Synthetic oligonucleotide
cugaguuacgagcaagacu

SEQ ID NO: 2331961 - RNA, 19 nt, Artificial Sequence
  Description of Artificial Sequence: Synthetic oligonucleotide
ccuagcuuuccauauuuca

SEQ ID NO: 2331962 - RNA, 19 nt, Artificial Sequence
  Description of Artificial Sequence: Synthetic oligonucleotide
cguguuucuagcaugaucu

SEQ ID NO: 2331963 - RNA, 19 nt, Artificial Sequence
  Description of Artificial Sequence: Synthetic oligonucleotide
uugaaccuccgugauucuc

SEQ ID NO: 2331964 - RNA, 19 nt, Artificial Sequence
  Description of Artificial Sequence: Synthetic oligonucleotide
uagagucgcggcccaggcu

SEQ ID NO: 2331965 - RNA, 19 nt, Artificial Sequence
  Description of Artificial Sequence: Synthetic oligonucleotide
ucuuuguguucggguguag

SEQ ID NO: 2331966 - RNA, 19 nt, Artificial Sequence
  Description of Artificial Sequence: Synthetic oligonucleotide
cugaugugcaagggaggcc

SEQ ID NO: 2331967 - RNA, 19 nt, Artificial Sequence
  Description of Artificial Sequence: Synthetic oligonucleotide
agaacacugccuggaccuc

SEQ ID NO: 2331968 - RNA, 19 nt, Artificial Sequence
  Description of Artificial Sequence: Synthetic oligonucleotide
gccuuuggcguguuucuag

SEQ ID NO: 2331969 - RNA, 19 nt, Artificial Sequence
  Description of Artificial Sequence: Synthetic oligonucleotide
gggaaggagaaaccuggac

SEQ ID NO: 2331970 - RNA, 19 nt, Artificial Sequence
  Description of Artificial Sequence: Synthetic oligonucleotide
uagcaugaucuccuccauu

SEQ ID NO: 2331971 - RNA, 19 nt, Artificial Sequence
  Description of Artificial Sequence: Synthetic oligonucleotide
cuccccuccgggcagguuc

SEQ ID NO: 2331972 - RNA, 19 nt, Artificial Sequence
  Description of Artificial Sequence: Synthetic oligonucleotide
cagaaucacugaagcacca

SEQ ID NO: 2331973 - RNA, 19 nt, Artificial Sequence
  Description of Artificial Sequence: Synthetic oligonucleotide
caagacuacgcaguuccga

SEQ ID NO: 2331974 - RNA, 19 nt, Artificial Sequence
  Description of Artificial Sequence: Synthetic oligonucleotide
aaccguuguugcccagaau

SEQ ID NO: 2331975 - RNA, 19 nt, Artificial Sequence
  Description of Artificial Sequence: Synthetic oligonucleotide
uccccacuacaaugucucc

SEQ ID NO: 2331976 - RNA, 19 nt, Artificial Sequence
  Description of Artificial Sequence: Synthetic oligonucleotide
cuuuggcguguuucuagca

SEQ ID NO: 2331977 - RNA, 19 nt, Artificial Sequence
  Description of Artificial Sequence: Synthetic oligonucleotide
aucaccucucgaucacuaa

SEQ ID NO: 2331978 - RNA, 19 nt, Artificial Sequence
  Description of Artificial Sequence: Synthetic oligonucleotide
uccuguauccguggugauc

SEQ ID NO: 2331979 - RNA, 19 nt, Artificial Sequence
  Description of Artificial Sequence: Synthetic oligonucleotide
ggcaagucauggaaaugag

SEQ ID NO: 2331980 - RNA, 19 nt, Artificial Sequence
  Description of Artificial Sequence: Synthetic oligonucleotide
uccgaagccgggagaucac

SEQ ID NO: 2331981 - RNA, 19 nt, Artificial Sequence
  Description of Artificial Sequence: Synthetic oligonucleotide
ccgcaugaauccuguaucc

SEQ ID NO: 2331982 - RNA, 19 nt, Artificial Sequence
  Description of Artificial Sequence: Synthetic oligonucleotide
uugcgagccuuaggaagcc

SEQ ID NO: 2331983 - RNA, 19 nt, Artificial Sequence
  Description of Artificial Sequence: Synthetic oligonucleotide
accaaccaaguguuucuuu

SEQ ID NO: 2331984 - RNA, 19 nt, Artificial Sequence
  Description of Artificial Sequence: Synthetic oligonucleotide
ccuuuggcguguuucuagc

SEQ ID NO: 2331985 - RNA, 19 nt, Artificial Sequence
  Description of Artificial Sequence: Synthetic oligonucleotide
gaccuagcuuuccauauuu

SEQ ID NO: 2331986 - RNA, 19 nt, Artificial Sequence
  Description of Artificial Sequence: Synthetic oligonucleotide
gcaguuccgaagccgggag

SEQ ID NO: 2331987 - RNA, 19 nt, Artificial Sequence
  Description of Artificial Sequence: Synthetic oligonucleotide
gcaagggaggccucauagc

SEQ ID NO: 2331988 - RNA, 19 nt, Artificial Sequence
  Description of Artificial Sequence: Synthetic oligonucleotide
gggagaucaccucucgauc

SEQ ID NO: 2331989 - RNA, 19 nt, Artificial Sequence
  Description of Artificial Sequence: Synthetic oligonucleotide
acagacgcaaugagcuucu

SEQ ID NO: 2331990 - RNA, 19 nt, Artificial Sequence
  Description of Artificial Sequence: Synthetic oligonucleotide
ccucucgaucacuaagggc

SEQ ID NO: 2331991 - RNA, 19 nt, Artificial Sequence
  Description of Artificial Sequence: Synthetic oligonucleotide
agauccagaugaaaccguu

SEQ ID NO: 2331992 - RNA, 19 nt, Artificial Sequence
  Description of Artificial Sequence: Synthetic oligonucleotide
uccccuccgggcagguuca

SEQ ID NO: 2331993 - RNA, 19 nt, Artificial Sequence
  Description of Artificial Sequence: Synthetic oligonucleotide
uguucggguguaggguaga

SEQ ID NO: 2331994 - RNA, 19 nt, Artificial Sequence
  Description of Artificial Sequence: Synthetic oligonucleotide
cccgcaugaauccuguauc

SEQ ID NO: 2331995 - RNA, 19 nt, Artificial Sequence
  Description of Artificial Sequence: Synthetic oligonucleotide
cuggaauuugucucuacuu

SEQ ID NO: 2331996 - RNA, 19 nt, Artificial Sequence
  Description of Artificial Sequence: Synthetic oligonucleotide
guguucggguguaggguag

SEQ ID NO: 2331997 - RNA, 19 nt, Artificial Sequence
  Description of Artificial Sequence: Synthetic oligonucleotide
cuggaccucugcacugaug

SEQ ID NO: 2331998 - RNA, 19 nt, Artificial Sequence
  Description of Artificial Sequence: Synthetic oligonucleotide
uucggguguaggguagauc

SEQ ID NO: 2331999 - RNA, 19 nt, Artificial Sequence
  Description of Artificial Sequence: Synthetic oligonucleotide
guuugcaaugaagccucca

SEQ ID NO: 2332000 - RNA, 19 nt, Artificial Sequence
  Description of Artificial Sequence: Synthetic oligonucleotide
gaucaccucucgaucacua

SEQ ID NO: 2332001 - RNA, 19 nt, Artificial Sequence
  Description of Artificial Sequence: Synthetic oligonucleotide
accuggacuaaaacucccu

SEQ ID NO: 2332002 - RNA, 19 nt, Artificial Sequence
  Description of Artificial Sequence: Synthetic oligonucleotide
aggccucauagcaguacag

SEQ ID NO: 2332003 - RNA, 19 nt, Artificial Sequence
  Description of Artificial Sequence: Synthetic oligonucleotide
gcguguuucuagcaugauc

SEQ ID NO: 2332004 - RNA, 19 nt, Artificial Sequence
  Description of Artificial Sequence: Synthetic oligonucleotide
cguuucaccagggaaggag

SEQ ID NO: 2332005 - RNA, 19 nt, Artificial Sequence
  Description of Artificial Sequence: Synthetic oligonucleotide
ugugcaagggaggccucau

SEQ ID NO: 2332006 - RNA, 19 nt, Artificial Sequence
  Description of Artificial Sequence: Synthetic oligonucleotide
aggguagauccagaugaaa

SEQ ID NO: 2332007 - RNA, 19 nt, Artificial Sequence
  Description of Artificial Sequence: Synthetic oligonucleotide
acucccugaccuagcuuuc

SEQ ID NO: 2332008 - RNA, 19 nt, Artificial Sequence
  Description of Artificial Sequence: Synthetic oligonucleotide
aggcuccucgugugcagug

SEQ ID NO: 2332009 - RNA, 19 nt, Artificial Sequence
  Description of Artificial Sequence: Synthetic oligonucleotide
agccucucauggccagcuc

SEQ ID NO: 2332010 - RNA, 19 nt, Artificial Sequence
  Description of Artificial Sequence: Synthetic oligonucleotide
guauccguggugaucgugu

SEQ ID NO: 2332011 - RNA, 19 nt, Artificial Sequence
  Description of Artificial Sequence: Synthetic oligonucleotide
cugaccuagcuuuccauau

SEQ ID NO: 2332012 - RNA, 19 nt, Artificial Sequence
  Description of Artificial Sequence: Synthetic oligonucleotide
gccacagacgcaaugagcu

SEQ ID NO: 2332013 - RNA, 19 nt, Artificial Sequence
  Description of Artificial Sequence: Synthetic oligonucleotide
uaccaaccaaguguuucuu

SEQ ID NO: 2332014 - RNA, 19 nt, Artificial Sequence
  Description of Artificial Sequence: Synthetic oligonucleotide
gaguuacgagcaagacuac

SEQ ID NO: 2332015 - RNA, 19 nt, Artificial Sequence
  Description of Artificial Sequence: Synthetic oligonucleotide
cucccugaccuagcuuucc

SEQ ID NO: 2332016 - RNA, 19 nt, Artificial Sequence
  Description of Artificial Sequence: Synthetic oligonucleotide
cucgaucacuaagggcuac

SEQ ID NO: 2332017 - RNA, 19 nt, Artificial Sequence
  Description of Artificial Sequence: Synthetic oligonucleotide
uuccaccucuucuguugaa

SEQ ID NO: 2332018 - RNA, 19 nt, Artificial Sequence
  Description of Artificial Sequence: Synthetic oligonucleotide
cacuacaaugucuccuacu

SEQ ID NO: 2332019 - RNA, 19 nt, Artificial Sequence
  Description of Artificial Sequence: Synthetic oligonucleotide
ccuuaggaagccucaucuc

SEQ ID NO: 2332020 - RNA, 19 nt, Artificial Sequence
  Description of Artificial Sequence: Synthetic oligonucleotide
ggaccucugcacugaugag

SEQ ID NO: 2332021 - RNA, 19 nt, Artificial Sequence
  Description of Artificial Sequence: Synthetic oligonucleotide
uuccuguaagaagccucuc

SEQ ID NO: 2332022 - RNA, 19 nt, Artificial Sequence
  Description of Artificial Sequence: Synthetic oligonucleotide
ucguuucaccagggaagga

SEQ ID NO: 2332023 - RNA, 19 nt, Artificial Sequence
  Description of Artificial Sequence: Synthetic oligonucleotide
gguuugcgagccuuaggaa

SEQ ID NO: 2332024 - RNA, 19 nt, Artificial Sequence
  Description of Artificial Sequence: Synthetic oligonucleotide
guguaggguagauccagau

SEQ ID NO: 2332025 - RNA, 19 nt, Artificial Sequence
  Description of Artificial Sequence: Synthetic oligonucleotide
gccgggagaucaccucucg

SEQ ID NO: 2332026 - RNA, 19 nt, Artificial Sequence
  Description of Artificial Sequence: Synthetic oligonucleotide
uaagggcuaccggcuccag

SEQ ID NO: 2332027 - RNA, 19 nt, Artificial Sequence
  Description of Artificial Sequence: Synthetic oligonucleotide
auccuguauccguggugau

SEQ ID NO: 2332028 - RNA, 19 nt, Artificial Sequence
  Description of Artificial Sequence: Synthetic oligonucleotide
cuaagggcuaccggcucca

SEQ ID NO: 2332029 - RNA, 19 nt, Artificial Sequence
  Description of Artificial Sequence: Synthetic oligonucleotide
cccgguaccaaccaagugu

SEQ ID NO: 2332030 - RNA, 19 nt, Artificial Sequence
  Description of Artificial Sequence: Synthetic oligonucleotide
gcaagacuacgcaguuccg

SEQ ID NO: 2332031 - RNA, 19 nt, Artificial Sequence
  Description of Artificial Sequence: Synthetic oligonucleotide
gccucucauggccagcuca

SEQ ID NO: 2332032 - RNA, 19 nt, Artificial Sequence
  Description of Artificial Sequence: Synthetic oligonucleotide
ccccuccuguuccaaaagc

SEQ ID NO: 2332033 - RNA, 19 nt, Artificial Sequence
  Description of Artificial Sequence: Synthetic oligonucleotide
gaugugcaagggaggccuc

SEQ ID NO: 2332034 - RNA, 19 nt, Artificial Sequence
  Description of Artificial Sequence: Synthetic oligonucleotide
acgcaguuccgaagccggg

SEQ ID NO: 2332035 - RNA, 19 nt, Artificial Sequence
  Description of Artificial Sequence: Synthetic oligonucleotide
ccaggcucucacugagagg

SEQ ID NO: 2332036 - RNA, 19 nt, Artificial Sequence
  Description of Artificial Sequence: Synthetic oligonucleotide
gagaggagcaagacagaau

SEQ ID NO: 2332037 - RNA, 19 nt, Artificial Sequence
  Description of Artificial Sequence: Synthetic oligonucleotide
ccauggccccgcaugaauc

SEQ ID NO: 2332038 - RNA, 19 nt, Artificial Sequence
  Description of Artificial Sequence: Synthetic oligonucleotide
cgaucacuaagggcuaccg

SEQ ID NO: 2332039 - RNA, 19 nt, Artificial Sequence
  Description of Artificial Sequence: Synthetic oligonucleotide
gcuaccggcuccagguuug

SEQ ID NO: 2332040 - RNA, 19 nt, Artificial Sequence
  Description of Artificial Sequence: Synthetic oligonucleotide
gugugcagugaaacagcuc

SEQ ID NO: 2332041 - RNA, 19 nt, Artificial Sequence
  Description of Artificial Sequence: Synthetic oligonucleotide
uuccauggccccgcaugaa

SEQ ID NO: 2332042 - RNA, 19 nt, Artificial Sequence
  Description of Artificial Sequence: Synthetic oligonucleotide
ucgcggcccaggcucucac

SEQ ID NO: 2332043 - RNA, 19 nt, Artificial Sequence
  Description of Artificial Sequence: Synthetic oligonucleotide
gagagguuugcgagccuua

SEQ ID NO: 2332044 - RNA, 19 nt, Artificial Sequence
  Description of Artificial Sequence: Synthetic oligonucleotide
gaagcaccacauggcaagu

SEQ ID NO: 2332045 - RNA, 19 nt, Artificial Sequence
  Description of Artificial Sequence: Synthetic oligonucleotide
cuaccggcuccagguuugc

SEQ ID NO: 2332046 - RNA, 19 nt, Artificial Sequence
  Description of Artificial Sequence: Synthetic oligonucleotide
ccgugauucuccccacuac

SEQ ID NO: 2332047 - RNA, 19 nt, Artificial Sequence
  Description of Artificial Sequence: Synthetic oligonucleotide
auguuccauggccccgcau

SEQ ID NO: 2332048 - RNA, 19 nt, Artificial Sequence
  Description of Artificial Sequence: Synthetic oligonucleotide
gcaagacagaauccagccu

SEQ ID NO: 2332049 - RNA, 19 nt, Artificial Sequence
  Description of Artificial Sequence: Synthetic oligonucleotide
cucucauggccagcucauc

SEQ ID NO: 2332050 - RNA, 19 nt, Artificial Sequence
  Description of Artificial Sequence: Synthetic oligonucleotide
ccacuacaaugucuccuac

SEQ ID NO: 2332051 - RNA, 19 nt, Artificial Sequence
  Description of Artificial Sequence: Synthetic oligonucleotide
cagcucauccucugcagau

SEQ ID NO: 2332052 - RNA, 19 nt, Artificial Sequence
  Description of Artificial Sequence: Synthetic oligonucleotide
gguuugcaaugaagccucc

SEQ ID NO: 2332053 - RNA, 19 nt, Artificial Sequence
  Description of Artificial Sequence: Synthetic oligonucleotide
cccacuacaaugucuccua

SEQ ID NO: 2332054 - RNA, 19 nt, Artificial Sequence
  Description of Artificial Sequence: Synthetic oligonucleotide
ggccucaccccuccuguuc

SEQ ID NO: 2332055 - RNA, 19 nt, Artificial Sequence
  Description of Artificial Sequence: Synthetic oligonucleotide
cuccgggcagguucaugga

SEQ ID NO: 2332056 - RNA, 19 nt, Artificial Sequence
  Description of Artificial Sequence: Synthetic oligonucleotide
cuagcaugaucuccuccau

SEQ ID NO: 2332057 - RNA, 19 nt, Artificial Sequence
  Description of Artificial Sequence: Synthetic oligonucleotide
guugaaccuccgugauucu

SEQ ID NO: 2332058 - RNA, 19 nt, Artificial Sequence
  Description of Artificial Sequence: Synthetic oligonucleotide
gcaguacaggaugcuggug

SEQ ID NO: 2332059 - RNA, 19 nt, Artificial Sequence
  Description of Artificial Sequence: Synthetic oligonucleotide
ccuggaauuugucucuacu

SEQ ID NO: 2332060 - RNA, 19 nt, Artificial Sequence
  Description of Artificial Sequence: Synthetic oligonucleotide
agccuuuggcguguuucua

SEQ ID NO: 2332061 - RNA, 19 nt, Artificial Sequence
  Description of Artificial Sequence: Synthetic oligonucleotide
cagcuccaucugagaacac

SEQ ID NO: 2332062 - RNA, 19 nt, Artificial Sequence
  Description of Artificial Sequence: Synthetic oligonucleotide
cuccucgugugcagugaaa

SEQ ID NO: 2332063 - RNA, 19 nt, Artificial Sequence
  Description of Artificial Sequence: Synthetic oligonucleotide
gcaagucauggaaaugagu

SEQ ID NO: 2332064 - RNA, 19 nt, Artificial Sequence
  Description of Artificial Sequence: Synthetic oligonucleotide
gucccauccuucagcaccu

SEQ ID NO: 2332065 - RNA, 19 nt, Artificial Sequence
  Description of Artificial Sequence: Synthetic oligonucleotide
gugcaagggaggccucaua

SEQ ID NO: 2332066 - RNA, 19 nt, Artificial Sequence
  Description of Artificial Sequence: Synthetic oligonucleotide
ccgaagccgggagaucacc

SEQ ID NO: 2332067 - RNA, 19 nt, Artificial Sequence
  Description of Artificial Sequence: Synthetic oligonucleotide
ccuccgugauucuccccac

SEQ ID NO: 2332068 - RNA, 19 nt, Artificial Sequence
  Description of Artificial Sequence: Synthetic oligonucleotide
cgagccuuaggaagccuca

SEQ ID NO: 2332069 - RNA, 19 nt, Artificial Sequence
  Description of Artificial Sequence: Synthetic oligonucleotide
gcuccucgugugcagugaa

SEQ ID NO: 2332070 - RNA, 19 nt, Artificial Sequence
  Description of Artificial Sequence: Synthetic oligonucleotide
ccccgguaccaaccaagug

SEQ ID NO: 2332071 - RNA, 19 nt, Artificial Sequence
  Description of Artificial Sequence: Synthetic oligonucleotide
gagccuuaggaagccucau

SEQ ID NO: 2332072 - RNA, 19 nt, Artificial Sequence
  Description of Artificial Sequence: Synthetic oligonucleotide
cagacgcaaugagcuucuc

SEQ ID NO: 2332073 - RNA, 19 nt, Artificial Sequence
  Description of Artificial Sequence: Synthetic oligonucleotide
ccauuguaucugguuuuca

SEQ ID NO: 2332074 - RNA, 19 nt, Artificial Sequence
  Description of Artificial Sequence: Synthetic oligonucleotide
gggcagguucauggaugag

SEQ ID NO: 2332075 - RNA, 19 nt, Artificial Sequence
  Description of Artificial Sequence: Synthetic oligonucleotide
ggcuccucgugugcaguga

SEQ ID NO: 2332076 - RNA, 19 nt, Artificial Sequence
  Description of Artificial Sequence: Synthetic oligonucleotide
cgggcagguucauggauga

SEQ ID NO: 2332077 - RNA, 19 nt, Artificial Sequence
  Description of Artificial Sequence: Synthetic oligonucleotide
ccgguaccaaccaaguguu

SEQ ID NO: 2332078 - RNA, 19 nt, Artificial Sequence
  Description of Artificial Sequence: Synthetic oligonucleotide
cuccgugauucuccccacu

SEQ ID NO: 2332079 - RNA, 19 nt, Artificial Sequence
  Description of Artificial Sequence: Synthetic oligonucleotide
ccucugcagaucuucuccu

SEQ ID NO: 2332080 - RNA, 19 nt, Artificial Sequence
  Description of Artificial Sequence: Synthetic oligonucleotide
ccguggugaucgugucccc

SEQ ID NO: 2332081 - RNA, 19 nt, Artificial Sequence
  Description of Artificial Sequence: Synthetic oligonucleotide
guucggguguaggguagau

SEQ ID NO: 2332082 - RNA, 19 nt, Artificial Sequence
  Description of Artificial Sequence: Synthetic oligonucleotide
gucgcggcccaggcucuca

SEQ ID NO: 2332083 - RNA, 19 nt, Artificial Sequence
  Description of Artificial Sequence: Synthetic oligonucleotide
cuguauccguggugaucgu

SEQ ID NO: 2332084 - RNA, 19 nt, Artificial Sequence
  Description of Artificial Sequence: Synthetic oligonucleotide
cugagagguuugcgagccu

SEQ ID NO: 2332085 - RNA, 19 nt, Artificial Sequence
  Description of Artificial Sequence: Synthetic oligonucleotide
agcuccccuccgggcaggu

SEQ ID NO: 2332086 - RNA, 19 nt, Artificial Sequence
  Description of Artificial Sequence: Synthetic oligonucleotide
ggcuaccggcuccagguuu

SEQ ID NO: 2332087 - RNA, 19 nt, Artificial Sequence
  Description of Artificial Sequence: Synthetic oligonucleotide
ggcucucacugagagguuu

SEQ ID NO: 2332088 - RNA, 19 nt, Artificial Sequence
  Description of Artificial Sequence: Synthetic oligonucleotide
gagucgcggcccaggcucu

SEQ ID NO: 2332089 - RNA, 19 nt, Artificial Sequence
  Description of Artificial Sequence: Synthetic oligonucleotide
ccaaaagccuuuggcgugu

SEQ ID NO: 2332090 - RNA, 19 nt, Artificial Sequence
  Description of Artificial Sequence: Synthetic oligonucleotide
ccccgcaugaauccuguau

SEQ ID NO: 2332091 - RNA, 19 nt, Artificial Sequence
  Description of Artificial Sequence: Synthetic oligonucleotide
ccgggagaucaccucucga

SEQ ID NO: 2332092 - RNA, 19 nt, Artificial Sequence
  Description of Artificial Sequence: Synthetic oligonucleotide
ccccacuacaaugucuccu

SEQ ID NO: 2332093 - RNA, 19 nt, Artificial Sequence
  Description of Artificial Sequence: Synthetic oligonucleotide
cggguguaggguagaucca

SEQ ID NO: 2332094 - RNA, 19 nt, Artificial Sequence
  Description of Artificial Sequence: Synthetic oligonucleotide
ccggcuccagguuugcaau

SEQ ID NO: 2332095 - RNA, 19 nt, Artificial Sequence
  Description of Artificial Sequence: Synthetic oligonucleotide
cgcaguuccgaagccggga

SEQ ID NO: 2332096 - RNA, 19 nt, Artificial Sequence
  Description of Artificial Sequence: Synthetic oligonucleotide
cgaagccgggagaucaccu

SEQ ID NO: 2332097 - RNA, 19 nt, Artificial Sequence
  Description of Artificial Sequence: Synthetic oligonucleotide
cccugaccuagcuuuccau

SEQ ID NO: 2332098 - RNA, 19 nt, Artificial Sequence
  Description of Artificial Sequence: Synthetic oligonucleotide
gcccaggcucucacugaga

SEQ ID NO: 2332099 - RNA, 19 nt, Artificial Sequence
  Description of Artificial Sequence: Synthetic oligonucleotide
cccuccgggcagguucaug

SEQ ID NO: 2332100 - RNA, 19 nt, Artificial Sequence
  Description of Artificial Sequence: Synthetic oligonucleotide
cgagcaagacuacgcaguu

SEQ ID NO: 2332101 - RNA, 19 nt, Artificial Sequence
  Description of Artificial Sequence: Synthetic oligonucleotide
ccacagacgcaaugagcuu

SEQ ID NO: 2332102 - RNA, 19 nt, Artificial Sequence
  Description of Artificial Sequence: Synthetic oligonucleotide
ggcguguuucuagcaugau

SEQ ID NO: 2332103 - RNA, 19 nt, Artificial Sequence
  Description of Artificial Sequence: Synthetic oligonucleotide
gggcuaccggcuccagguu

SEQ ID NO: 2332104 - RNA, 19 nt, Artificial Sequence
  Description of Artificial Sequence: Synthetic oligonucleotide
gccccgcaugaauccugua

SEQ ID NO: 2332105 - RNA, 19 nt, Artificial Sequence
  Description of Artificial Sequence: Synthetic oligonucleotide
cgguaccaaccaaguguuu

SEQ ID NO: 2332106 - RNA, 19 nt, Artificial Sequence
  Description of Artificial Sequence: Synthetic oligonucleotide
cgcggcccaggcucucacu

SEQ ID NO: 2332107 - RNA, 19 nt, Artificial Sequence
  Description of Artificial Sequence: Synthetic oligonucleotide
ccccuccgggcagguucau

SEQ ID NO: 2332108 - RNA, 19 nt, Artificial Sequence
  Description of Artificial Sequence: Synthetic oligonucleotide
aaaauauggaugcugcagc

SEQ ID NO: 2332109 - RNA, 19 nt, Artificial Sequence
  Description of Artificial Sequence: Synthetic oligonucleotide
aguucugcugcuuagauac

SEQ ID NO: 2332110 - RNA, 19 nt, Artificial Sequence
  Description of Artificial Sequence: Synthetic oligonucleotide
aauauuuggaaaaugguag

SEQ ID NO: 2332111 - RNA, 19 nt, Artificial Sequence
  Description of Artificial Sequence: Synthetic oligonucleotide
uuuauauccugucuguaag

SEQ ID NO: 2332112 - RNA, 19 nt, Artificial Sequence
  Description of Artificial Sequence: Synthetic oligonucleotide
cuuagauacucaaacacag

SEQ ID NO: 2332113 - RNA, 19 nt, Artificial Sequence
  Description of Artificial Sequence: Synthetic oligonucleotide
ugguaguuaaguuucuugg

SEQ ID NO: 2332114 - RNA, 19 nt, Artificial Sequence
  Description of Artificial Sequence: Synthetic oligonucleotide
aguuagcugagguagguac

SEQ ID NO: 2332115 - RNA, 19 nt, Artificial Sequence
  Description of Artificial Sequence: Synthetic oligonucleotide
uucuuauuguccaaggcug

SEQ ID NO: 2332116 - RNA, 19 nt, Artificial Sequence
  Description of Artificial Sequence: Synthetic oligonucleotide
uacuguugcagcuacggcg

SEQ ID NO: 2332117 - RNA, 19 nt, Artificial Sequence
  Description of Artificial Sequence: Synthetic oligonucleotide
aaagacgcagccaaucgcc

SEQ ID NO: 2332118 - RNA, 19 nt, Artificial Sequence
  Description of Artificial Sequence: Synthetic oligonucleotide
uuuuccuggccacagaggc

SEQ ID NO: 2332119 - RNA, 19 nt, Artificial Sequence
  Description of Artificial Sequence: Synthetic oligonucleotide
aauacaggaaucaaauaug

SEQ ID NO: 2332120 - RNA, 19 nt, Artificial Sequence
  Description of Artificial Sequence: Synthetic oligonucleotide
auauggaugcugcagcagc

SEQ ID NO: 2332121 - RNA, 19 nt, Artificial Sequence
  Description of Artificial Sequence: Synthetic oligonucleotide
ugcuuagauacucaaacac

SEQ ID NO: 2332122 - RNA, 19 nt, Artificial Sequence
  Description of Artificial Sequence: Synthetic oligonucleotide
ucauaucuugccaaguggc

SEQ ID NO: 2332123 - RNA, 19 nt, Artificial Sequence
  Description of Artificial Sequence: Synthetic oligonucleotide
agugguacuucuuauuguc

SEQ ID NO: 2332124 - RNA, 19 nt, Artificial Sequence
  Description of Artificial Sequence: Synthetic oligonucleotide
ugucaaauccccaacuucu

SEQ ID NO: 2332125 - RNA, 19 nt, Artificial Sequence
  Description of Artificial Sequence: Synthetic oligonucleotide
gauguuuggaaauuucgac

SEQ ID NO: 2332126 - RNA, 19 nt, Artificial Sequence
  Description of Artificial Sequence: Synthetic oligonucleotide
  modified_base (10)..(10): a, c, u, g, unknown or other
agcgguaccnccugguggc

SEQ ID NO: 2332127 - RNA, 19 nt, Artificial Sequence
  Description of Artificial Sequence: Synthetic oligonucleotide
augcuaaaauacuugcugg

SEQ ID NO: 2332128 - RNA, 19 nt, Artificial Sequence
  Description of Artificial Sequence: Synthetic oligonucleotide
uucaugcuaaaauacuugc

SEQ ID NO: 2332129 - RNA, 19 nt, Artificial Sequence
  Description of Artificial Sequence: Synthetic oligonucleotide
ucuucaccaagcauggaag

SEQ ID NO: 2332130 - RNA, 19 nt, Artificial Sequence
  Description of Artificial Sequence: Synthetic oligonucleotide
uauccugucuguaaguucu

SEQ ID NO: 2332131 - RNA, 19 nt, Artificial Sequence
  Description of Artificial Sequence: Synthetic oligonucleotide
guagauaagaguuuauauc

SEQ ID NO: 2332132 - RNA, 19 nt, Artificial Sequence
  Description of Artificial Sequence: Synthetic oligonucleotide
uuaagaagcccaaggcagg

SEQ ID NO: 2332133 - RNA, 19 nt, Artificial Sequence
  Description of Artificial Sequence: Synthetic oligonucleotide
auuuucaccccacugaagu

SEQ ID NO: 2332134 - RNA, 19 nt, Artificial Sequence
  Description of Artificial Sequence: Synthetic oligonucleotide
guuucuugguacuacagug

SEQ ID NO: 2332135 - RNA, 19 nt, Artificial Sequence
  Description of Artificial Sequence: Synthetic oligonucleotide
agcagcucagcaaagacgc

SEQ ID NO: 2332136 - RNA, 19 nt, Artificial Sequence
  Description of Artificial Sequence: Synthetic oligonucleotide
agggucuggaauuuucacc

SEQ ID NO: 2332137 - RNA, 19 nt, Artificial Sequence
  Description of Artificial Sequence: Synthetic oligonucleotide
aagaguuuauauccugucu

SEQ ID NO: 2332138 - RNA, 19 nt, Artificial Sequence
  Description of Artificial Sequence: Synthetic oligonucleotide
aaauauuuggaaaauggua

SEQ ID NO: 2332139 - RNA, 19 nt, Artificial Sequence
  Description of Artificial Sequence: Synthetic oligonucleotide
ucgaaugcugucaaaauau

SEQ ID NO: 2332140 - RNA, 19 nt, Artificial Sequence
  Description of Artificial Sequence: Synthetic oligonucleotide
ugauucaugcuaaaauacu

SEQ ID NO: 2332141 - RNA, 19 nt, Artificial Sequence
  Description of Artificial Sequence: Synthetic oligonucleotide
ugcuaguuagcugagguag

SEQ ID NO: 2332142 - RNA, 19 nt, Artificial Sequence
  Description of Artificial Sequence: Synthetic oligonucleotide
gauuuuccuggccacagag

SEQ ID NO: 2332143 - RNA, 19 nt, Artificial Sequence
  Description of Artificial Sequence: Synthetic oligonucleotide
ugucuguaaguucugcugc

SEQ ID NO: 2332144 - RNA, 19 nt, Artificial Sequence
  Description of Artificial Sequence: Synthetic oligonucleotide
aaggcuggaaggaugcugc

SEQ ID NO: 2332145 - RNA, 19 nt, Artificial Sequence
  Description of Artificial Sequence: Synthetic oligonucleotide
uuucgacucugucucaggg

SEQ ID NO: 2332146 - RNA, 19 nt, Artificial Sequence
  Description of Artificial Sequence: Synthetic oligonucleotide
gaggcaacccuuuaagaag

SEQ ID NO: 2332147 - RNA, 19 nt, Artificial Sequence
  Description of Artificial Sequence: Synthetic oligonucleotide
gagauguuuggaaauuucg

SEQ ID NO: 2332148 - RNA, 19 nt, Artificial Sequence
  Description of Artificial Sequence: Synthetic oligonucleotide
ucuacuguugcagcuacgg

SEQ ID NO: 2332149 - RNA, 19 nt, Artificial Sequence
  Description of Artificial Sequence: Synthetic oligonucleotide
aaauauggaugcugcagca

SEQ ID NO: 2332150 - RNA, 19 nt, Artificial Sequence
  Description of Artificial Sequence: Synthetic oligonucleotide
ucuuauuguccaaggcugg

SEQ ID NO: 2332151 - RNA, 19 nt, Artificial Sequence
  Description of Artificial Sequence: Synthetic oligonucleotide
gaaugcugucaaaauaugg

SEQ ID NO: 2332152 - RNA, 19 nt, Artificial Sequence
  Description of Artificial Sequence: Synthetic oligonucleotide
gauacucaaacacagugaa

SEQ ID NO: 2332153 - RNA, 19 nt, Artificial Sequence
  Description of Artificial Sequence: Synthetic oligonucleotide
ugcugucaaaauauggaug

SEQ ID NO: 2332154 - RNA, 19 nt, Artificial Sequence
  Description of Artificial Sequence: Synthetic oligonucleotide
cuugguacuacagugguac

SEQ ID NO: 2332155 - RNA, 19 nt, Artificial Sequence
  Description of Artificial Sequence: Synthetic oligonucleotide
cuguguaguagucaccugg

SEQ ID NO: 2332156 - RNA, 19 nt, Artificial Sequence
  Description of Artificial Sequence: Synthetic oligonucleotide
uacuucuuauuguccaagg

SEQ ID NO: 2332157 - RNA, 19 nt, Artificial Sequence
  Description of Artificial Sequence: Synthetic oligonucleotide
acugauucaugcuaaaaua

SEQ ID NO: 2332158 - RNA, 19 nt, Artificial Sequence
  Description of Artificial Sequence: Synthetic oligonucleotide
auagagcugauccacguca

SEQ ID NO: 2332159 - RNA, 19 nt, Artificial Sequence
  Description of Artificial Sequence: Synthetic oligonucleotide
uaguuaaguuucuugguac

SEQ ID NO: 2332160 - RNA, 19 nt, Artificial Sequence
  Description of Artificial Sequence: Synthetic oligonucleotide
auguuuggaaauuucgacu

SEQ ID NO: 2332161 - RNA, 19 nt, Artificial Sequence
  Description of Artificial Sequence: Synthetic oligonucleotide
uggaauuuucaccccacug

SEQ ID NO: 2332162 - RNA, 19 nt, Artificial Sequence
  Description of Artificial Sequence: Synthetic oligonucleotide
augucagccucucagcagg

SEQ ID NO: 2332163 - RNA, 19 nt, Artificial Sequence
  Description of Artificial Sequence: Synthetic oligonucleotide
gcugucaaaauauggaugc

SEQ ID NO: 2332164 - RNA, 19 nt, Artificial Sequence
  Description of Artificial Sequence: Synthetic oligonucleotide
uucaaauuauggaucacuu

SEQ ID NO: 2332165 - RNA, 19 nt, Artificial Sequence
  Description of Artificial Sequence: Synthetic oligonucleotide
agucaggugcuuucgacuc

SEQ ID NO: 2332166 - RNA, 19 nt, Artificial Sequence
  Description of Artificial Sequence: Synthetic oligonucleotide
ugucaaaauauggaugcug

SEQ ID NO: 2332167 - RNA, 19 nt, Artificial Sequence
  Description of Artificial Sequence: Synthetic oligonucleotide
ugucauguugucuugucaa

SEQ ID NO: 2332168 - RNA, 19 nt, Artificial Sequence
  Description of Artificial Sequence: Synthetic oligonucleotide
augguaguuaaguuucuug

SEQ ID NO: 2332169 - RNA, 19 nt, Artificial Sequence
  Description of Artificial Sequence: Synthetic oligonucleotide
ucuugucaaauccccaacu

SEQ ID NO: 2332170 - RNA, 19 nt, Artificial Sequence
  Description of Artificial Sequence: Synthetic oligonucleotide
ucgcaugucagccucucag

SEQ ID NO: 2332171 - RNA, 19 nt, Artificial Sequence
  Description of Artificial Sequence: Synthetic oligonucleotide
aagucuggaucucuaauuu

SEQ ID NO: 2332172 - RNA, 19 nt, Artificial Sequence
  Description of Artificial Sequence: Synthetic oligonucleotide
ucaugcuaaaauacuugcu

SEQ ID NO: 2332173 - RNA, 19 nt, Artificial Sequence
  Description of Artificial Sequence: Synthetic oligonucleotide
auauccugucuguaaguuc

SEQ ID NO: 2332174 - RNA, 19 nt, Artificial Sequence
  Description of Artificial Sequence: Synthetic oligonucleotide
ucaaauuauggaucacuuc

SEQ ID NO: 2332175 - RNA, 19 nt, Artificial Sequence
  Description of Artificial Sequence: Synthetic oligonucleotide
cuggacaucuucaccaagc

SEQ ID NO: 2332176 - RNA, 19 nt, Artificial Sequence
  Description of Artificial Sequence: Synthetic oligonucleotide
agcuguucgcaugucagcc

SEQ ID NO: 2332177 - RNA, 19 nt, Artificial Sequence
  Description of Artificial Sequence: Synthetic oligonucleotide
uaagaguuuauauccuguc

SEQ ID NO: 2332178 - RNA, 19 nt, Artificial Sequence
  Description of Artificial Sequence: Synthetic oligonucleotide
ugcuaaaauacuugcuggu

SEQ ID NO: 2332179 - RNA, 19 nt, Artificial Sequence
  Description of Artificial Sequence: Synthetic oligonucleotide
uccaaggcuggaaggaugc

SEQ ID NO: 2332180 - RNA, 19 nt, Artificial Sequence
  Description of Artificial Sequence: Synthetic oligonucleotide
aauauggaugcugcagcag

SEQ ID NO: 2332181 - RNA, 19 nt, Artificial Sequence
  Description of Artificial Sequence: Synthetic oligonucleotide
cauaucuugccaaguggcc

SEQ ID NO: 2332182 - RNA, 19 nt, Artificial Sequence
  Description of Artificial Sequence: Synthetic oligonucleotide
cuucauaucuugccaagug

SEQ ID NO: 2332183 - RNA, 19 nt, Artificial Sequence
  Description of Artificial Sequence: Synthetic oligonucleotide
cuuuaagaagcccaaggca

SEQ ID NO: 2332184 - RNA, 19 nt, Artificial Sequence
  Description of Artificial Sequence: Synthetic oligonucleotide
aguuucuugguacuacagu

SEQ ID NO: 2332185 - RNA, 19 nt, Artificial Sequence
  Description of Artificial Sequence: Synthetic oligonucleotide
uagucuguguaguagucac

SEQ ID NO: 2332186 - RNA, 19 nt, Artificial Sequence
  Description of Artificial Sequence: Synthetic oligonucleotide
uuaaguuucuugguacuac

SEQ ID NO: 2332187 - RNA, 19 nt, Artificial Sequence
  Description of Artificial Sequence: Synthetic oligonucleotide
aaauacuugcuggugccug

SEQ ID NO: 2332188 - RNA, 19 nt, Artificial Sequence
  Description of Artificial Sequence: Synthetic oligonucleotide
uccacgucagauuuuccug

SEQ ID NO: 2332189 - RNA, 19 nt, Artificial Sequence
  Description of Artificial Sequence: Synthetic oligonucleotide
aaauuucgacuccaggguu

SEQ ID NO: 2332190 - RNA, 19 nt, Artificial Sequence
  Description of Artificial Sequence: Synthetic oligonucleotide
uguguaguagucaccuggu

SEQ ID NO: 2332191 - RNA, 19 nt, Artificial Sequence
  Description of Artificial Sequence: Synthetic oligonucleotide
gcugcuuagauacucaaac

SEQ ID NO: 2332192 - RNA, 19 nt, Artificial Sequence
  Description of Artificial Sequence: Synthetic oligonucleotide
ugacuugucauguugucuu

SEQ ID NO: 2332193 - RNA, 19 nt, Artificial Sequence
  Description of Artificial Sequence: Synthetic oligonucleotide
uuuggaaauuucgacucca

SEQ ID NO: 2332194 - RNA, 19 nt, Artificial Sequence
  Description of Artificial Sequence: Synthetic oligonucleotide
aggguuuccauauccucag

SEQ ID NO: 2332195 - RNA, 19 nt, Artificial Sequence
  Description of Artificial Sequence: Synthetic oligonucleotide
uuauauccugucuguaagu

SEQ ID NO: 2332196 - RNA, 19 nt, Artificial Sequence
  Description of Artificial Sequence: Synthetic oligonucleotide
cugucuguaaguucugcug

SEQ ID NO: 2332197 - RNA, 19 nt, Artificial Sequence
  Description of Artificial Sequence: Synthetic oligonucleotide
ucucuaauuucucuucaua

SEQ ID NO: 2332198 - RNA, 19 nt, Artificial Sequence
  Description of Artificial Sequence: Synthetic oligonucleotide
ugaaccccaagcuuuaauu

SEQ ID NO: 2332199 - RNA, 19 nt, Artificial Sequence
  Description of Artificial Sequence: Synthetic oligonucleotide
uacggcgaguagauaagag

SEQ ID NO: 2332200 - RNA, 19 nt, Artificial Sequence
  Description of Artificial Sequence: Synthetic oligonucleotide
gaaguacugauucaugcua

SEQ ID NO: 2332201 - RNA, 19 nt, Artificial Sequence
  Description of Artificial Sequence: Synthetic oligonucleotide
ucgacucugucucaggguc

SEQ ID NO: 2332202 - RNA, 19 nt, Artificial Sequence
  Description of Artificial Sequence: Synthetic oligonucleotide
uugucauguugucuuguca

SEQ ID NO: 2332203 - RNA, 19 nt, Artificial Sequence
  Description of Artificial Sequence: Synthetic oligonucleotide
aggcaacccuuuaagaagc

SEQ ID NO: 2332204 - RNA, 19 nt, Artificial Sequence
  Description of Artificial Sequence: Synthetic oligonucleotide
uggacaucuucaccaagca

SEQ ID NO: 2332205 - RNA, 19 nt, Artificial Sequence
  Description of Artificial Sequence: Synthetic oligonucleotide
  modified_base (11)..(11): a, c, u, g, unknown or other
gagcgguaccnccuggugg

SEQ ID NO: 2332206 - RNA, 19 nt, Artificial Sequence
  Description of Artificial Sequence: Synthetic oligonucleotide
guugucuugucaaaucccc

SEQ ID NO: 2332207 - RNA, 19 nt, Artificial Sequence
  Description of Artificial Sequence: Synthetic oligonucleotide
ugucuugucaaauccccaa

SEQ ID NO: 2332208 - RNA, 19 nt, Artificial Sequence
  Description of Artificial Sequence: Synthetic oligonucleotide
uccuuaucagauagagcug

SEQ ID NO: 2332209 - RNA, 19 nt, Artificial Sequence
  Description of Artificial Sequence: Synthetic oligonucleotide
cauguugucuugucaaauc

SEQ ID NO: 2332210 - RNA, 19 nt, Artificial Sequence
  Description of Artificial Sequence: Synthetic oligonucleotide
caggguaggagauguuugg

SEQ ID NO: 2332211 - RNA, 19 nt, Artificial Sequence
  Description of Artificial Sequence: Synthetic oligonucleotide
uauggaugcugcagcagcu

SEQ ID NO: 2332212 - RNA, 19 nt, Artificial Sequence
  Description of Artificial Sequence: Synthetic oligonucleotide
ucaccaagcauggaagucu

SEQ ID NO: 2332213 - RNA, 19 nt, Artificial Sequence
  Description of Artificial Sequence: Synthetic oligonucleotide
agcuacggcgaguagauaa

SEQ ID NO: 2332214 - RNA, 19 nt, Artificial Sequence
  Description of Artificial Sequence: Synthetic oligonucleotide
aucagauagagcugaucca

SEQ ID NO: 2332215 - RNA, 19 nt, Artificial Sequence
  Description of Artificial Sequence: Synthetic oligonucleotide
acacagugaaccccaagcu

SEQ ID NO: 2332216 - RNA, 19 nt, Artificial Sequence
  Description of Artificial Sequence: Synthetic oligonucleotide
auacaggaaucaaauaugu

SEQ ID NO: 2332217 - RNA, 19 nt, Artificial Sequence
  Description of Artificial Sequence: Synthetic oligonucleotide
cugagguagguacugcagc

SEQ ID NO: 2332218 - RNA, 19 nt, Artificial Sequence
  Description of Artificial Sequence: Synthetic oligonucleotide
agauagagcugauccacgu

SEQ ID NO: 2332219 - RNA, 19 nt, Artificial Sequence
  Description of Artificial Sequence: Synthetic oligonucleotide
ugugcucaauacaggaauc

SEQ ID NO: 2332220 - RNA, 19 nt, Artificial Sequence
  Description of Artificial Sequence: Synthetic oligonucleotide
aaauccccaacuucucgaa

SEQ ID NO: 2332221 - RNA, 19 nt, Artificial Sequence
  Description of Artificial Sequence: Synthetic oligonucleotide
auccacgucagauuuuccu

SEQ ID NO: 2332222 - RNA, 19 nt, Artificial Sequence
  Description of Artificial Sequence: Synthetic oligonucleotide
gaucucuaauuucucuuca

SEQ ID NO: 2332223 - RNA, 19 nt, Artificial Sequence
  Description of Artificial Sequence: Synthetic oligonucleotide
aagacgcagccaaucgccc

SEQ ID NO: 2332224 - RNA, 19 nt, Artificial Sequence
  Description of Artificial Sequence: Synthetic oligonucleotide
ugugugcucaauacaggaa

SEQ ID NO: 2332225 - RNA, 19 nt, Artificial Sequence
  Description of Artificial Sequence: Synthetic oligonucleotide
aauuuucaccccacugaag

SEQ ID NO: 2332226 - RNA, 19 nt, Artificial Sequence
  Description of Artificial Sequence: Synthetic oligonucleotide
uugccagcuccuuaaauau

SEQ ID NO: 2332227 - RNA, 19 nt, Artificial Sequence
  Description of Artificial Sequence: Synthetic oligonucleotide
uuucaccccacugaaguac

SEQ ID NO: 2332228 - RNA, 19 nt, Artificial Sequence
  Description of Artificial Sequence: Synthetic oligonucleotide
acgucagauuuuccuggcc

SEQ ID NO: 2332229 - RNA, 19 nt, Artificial Sequence
  Description of Artificial Sequence: Synthetic oligonucleotide
ugccaaguggccuccagcu

SEQ ID NO: 2332230 - RNA, 19 nt, Artificial Sequence
  Description of Artificial Sequence: Synthetic oligonucleotide
uccauguggaggcaacccu

SEQ ID NO: 2332231 - RNA, 19 nt, Artificial Sequence
  Description of Artificial Sequence: Synthetic oligonucleotide
acggcgaguagauaagagu

SEQ ID NO: 2332232 - RNA, 19 nt, Artificial Sequence
  Description of Artificial Sequence: Synthetic oligonucleotide
guaguuaaguuucuuggua

SEQ ID NO: 2332233 - RNA, 19 nt, Artificial Sequence
  Description of Artificial Sequence: Synthetic oligonucleotide
aaaauacuugcuggugccu

SEQ ID NO: 2332234 - RNA, 19 nt, Artificial Sequence
  Description of Artificial Sequence: Synthetic oligonucleotide
aucgcccaaacaucuacug

SEQ ID NO: 2332235 - RNA, 19 nt, Artificial Sequence
  Description of Artificial Sequence: Synthetic oligonucleotide
gugcuuucgacucugucuc

SEQ ID NO: 2332236 - RNA, 19 nt, Artificial Sequence
  Description of Artificial Sequence: Synthetic oligonucleotide
gcaaagacgcagccaaucg

SEQ ID NO: 2332237 - RNA, 19 nt, Artificial Sequence
  Description of Artificial Sequence: Synthetic oligonucleotide
caaucgcccaaacaucuac

SEQ ID NO: 2332238 - RNA, 19 nt, Artificial Sequence
  Description of Artificial Sequence: Synthetic oligonucleotide
uuuucuccugaugugugcu

SEQ ID NO: 2332239 - RNA, 19 nt, Artificial Sequence
  Description of Artificial Sequence: Synthetic oligonucleotide
agauacucaaacacaguga

SEQ ID NO: 2332240 - RNA, 19 nt, Artificial Sequence
  Description of Artificial Sequence: Synthetic oligonucleotide
ucucgaaugcugucaaaau

SEQ ID NO: 2332241 - RNA, 19 nt, Artificial Sequence
  Description of Artificial Sequence: Synthetic oligonucleotide
auaucuugccaaguggccu

SEQ ID NO: 2332242 - RNA, 19 nt, Artificial Sequence
  Description of Artificial Sequence: Synthetic oligonucleotide
uccggucuguguuuucucc

SEQ ID NO: 2332243 - RNA, 19 nt, Artificial Sequence
  Description of Artificial Sequence: Synthetic oligonucleotide
agcuccuuaaauauuugga

SEQ ID NO: 2332244 - RNA, 19 nt, Artificial Sequence
  Description of Artificial Sequence: Synthetic oligonucleotide
aaauuauggaucacuucuu

SEQ ID NO: 2332245 - RNA, 19 nt, Artificial Sequence
  Description of Artificial Sequence: Synthetic oligonucleotide
gcugcugcuaguuagcuga

SEQ ID NO: 2332246 - RNA, 19 nt, Artificial Sequence
  Description of Artificial Sequence: Synthetic oligonucleotide
uggaggcaacccuuuaaga

SEQ ID NO: 2332247 - RNA, 19 nt, Artificial Sequence
  Description of Artificial Sequence: Synthetic oligonucleotide
uugccaaguggccuccagc

SEQ ID NO: 2332248 - RNA, 19 nt, Artificial Sequence
  Description of Artificial Sequence: Synthetic oligonucleotide
uauauccugucuguaaguu

SEQ ID NO: 2332249 - RNA, 19 nt, Artificial Sequence
  Description of Artificial Sequence: Synthetic oligonucleotide
aaguucugcugcuuagaua

SEQ ID NO: 2332250 - RNA, 19 nt, Artificial Sequence
  Description of Artificial Sequence: Synthetic oligonucleotide
gauagagcugauccacguc

SEQ ID NO: 2332251 - RNA, 19 nt, Artificial Sequence
  Description of Artificial Sequence: Synthetic oligonucleotide
cuuucgacucugucucagg

SEQ ID NO: 2332252 - RNA, 19 nt, Artificial Sequence
  Description of Artificial Sequence: Synthetic oligonucleotide
ucuucauaucuugccaagu

SEQ ID NO: 2332253 - RNA, 19 nt, Artificial Sequence
  Description of Artificial Sequence: Synthetic oligonucleotide
ugcagcuacggcgaguaga

SEQ ID NO: 2332254 - RNA, 19 nt, Artificial Sequence
  Description of Artificial Sequence: Synthetic oligonucleotide
cuucucuggacaucuucac

SEQ ID NO: 2332255 - RNA, 19 nt, Artificial Sequence
  Description of Artificial Sequence: Synthetic oligonucleotide
aaguacugauucaugcuaa

SEQ ID NO: 2332256 - RNA, 19 nt, Artificial Sequence
  Description of Artificial Sequence: Synthetic oligonucleotide
aagcccaaggcaggguagg

SEQ ID NO: 2332257 - RNA, 19 nt, Artificial Sequence
  Description of Artificial Sequence: Synthetic oligonucleotide
agauaagaguuuauauccu

SEQ ID NO: 2332258 - RNA, 19 nt, Artificial Sequence
  Description of Artificial Sequence: Synthetic oligonucleotide
gaugcugcugcuaguuagc

SEQ ID NO: 2332259 - RNA, 19 nt, Artificial Sequence
  Description of Artificial Sequence: Synthetic oligonucleotide
cuugucauguugucuuguc

SEQ ID NO: 2332260 - RNA, 19 nt, Artificial Sequence
  Description of Artificial Sequence: Synthetic oligonucleotide
auacucaaacacagugaac

SEQ ID NO: 2332261 - RNA, 19 nt, Artificial Sequence
  Description of Artificial Sequence: Synthetic oligonucleotide
cccuuuaagaagcccaagg

SEQ ID NO: 2332262 - RNA, 19 nt, Artificial Sequence
  Description of Artificial Sequence: Synthetic oligonucleotide
auuucgacuccaggguuuc

SEQ ID NO: 2332263 - RNA, 19 nt, Artificial Sequence
  Description of Artificial Sequence: Synthetic oligonucleotide
aaugguaguuaaguuucuu

SEQ ID NO: 2332264 - RNA, 19 nt, Artificial Sequence
  Description of Artificial Sequence: Synthetic oligonucleotide
auuuuccuggccacagagg

SEQ ID NO: 2332265 - RNA, 19 nt, Artificial Sequence
  Description of Artificial Sequence: Synthetic oligonucleotide
  modified_base (17)..(17): a, c, u, g, unknown or other
ucaggcgagcgguaccncc

SEQ ID NO: 2332266 - RNA, 19 nt, Artificial Sequence
  Description of Artificial Sequence: Synthetic oligonucleotide
gacuugucauguugucuug

SEQ ID NO: 2332267 - RNA, 19 nt, Artificial Sequence
  Description of Artificial Sequence: Synthetic oligonucleotide
caaauccccaacuucucga

SEQ ID NO: 2332268 - RNA, 19 nt, Artificial Sequence
  Description of Artificial Sequence: Synthetic oligonucleotide
uuaucagauagagcugauc

SEQ ID NO: 2332269 - RNA, 19 nt, Artificial Sequence
  Description of Artificial Sequence: Synthetic oligonucleotide
gucagauuuuccuggccac

SEQ ID NO: 2332270 - RNA, 19 nt, Artificial Sequence
  Description of Artificial Sequence: Synthetic oligonucleotide
ugcugcuuagauacucaaa

SEQ ID NO: 2332271 - RNA, 19 nt, Artificial Sequence
  Description of Artificial Sequence: Synthetic oligonucleotide
agcccagucaggugcuuuc

SEQ ID NO: 2332272 - RNA, 19 nt, Artificial Sequence
  Description of Artificial Sequence: Synthetic oligonucleotide
ccugaugugugcucaauac

SEQ ID NO: 2332273 - RNA, 19 nt, Artificial Sequence
  Description of Artificial Sequence: Synthetic oligonucleotide
agguacugcagcccaguca

SEQ ID NO: 2332274 - RNA, 19 nt, Artificial Sequence
  Description of Artificial Sequence: Synthetic oligonucleotide
agguagguacugcagccca

SEQ ID NO: 2332275 - RNA, 19 nt, Artificial Sequence
  Description of Artificial Sequence: Synthetic oligonucleotide
auagucuguguaguaguca

SEQ ID NO: 2332276 - RNA, 19 nt, Artificial Sequence
  Description of Artificial Sequence: Synthetic oligonucleotide
gaguagauaagaguuuaua

SEQ ID NO: 2332277 - RNA, 19 nt, Artificial Sequence
  Description of Artificial Sequence: Synthetic oligonucleotide
aguacugauucaugcuaaa

SEQ ID NO: 2332278 - RNA, 19 nt, Artificial Sequence
  Description of Artificial Sequence: Synthetic oligonucleotide
aaucgcccaaacaucuacu

SEQ ID NO: 2332279 - RNA, 19 nt, Artificial Sequence
  Description of Artificial Sequence: Synthetic oligonucleotide
cuacuguugcagcuacggc

SEQ ID NO: 2332280 - RNA, 19 nt, Artificial Sequence
  Description of Artificial Sequence: Synthetic oligonucleotide
aauuucgacuccaggguuu

SEQ ID NO: 2332281 - RNA, 19 nt, Artificial Sequence
  Description of Artificial Sequence: Synthetic oligonucleotide
ucagauuuuccuggccaca

SEQ ID NO: 2332282 - RNA, 19 nt, Artificial Sequence
  Description of Artificial Sequence: Synthetic oligonucleotide
acugaaguacugauucaug

SEQ ID NO: 2332283 - RNA, 19 nt, Artificial Sequence
  Description of Artificial Sequence: Synthetic oligonucleotide
uuuucaccccacugaagua

SEQ ID NO: 2332284 - RNA, 19 nt, Artificial Sequence
  Description of Artificial Sequence: Synthetic oligonucleotide
uucgacuccaggguuucca

SEQ ID NO: 2332285 - RNA, 19 nt, Artificial Sequence
  Description of Artificial Sequence: Synthetic oligonucleotide
cagauuuuccuggccacag

SEQ ID NO: 2332286 - RNA, 19 nt, Artificial Sequence
  Description of Artificial Sequence: Synthetic oligonucleotide
uccugaugugugcucaaua

SEQ ID NO: 2332287 - RNA, 19 nt, Artificial Sequence
  Description of Artificial Sequence: Synthetic oligonucleotide
cacgucagauuuuccuggc

SEQ ID NO: 2332288 - RNA, 19 nt, Artificial Sequence
  Description of Artificial Sequence: Synthetic oligonucleotide
gucuugucaaauccccaac

SEQ ID NO: 2332289 - RNA, 19 nt, Artificial Sequence
  Description of Artificial Sequence: Synthetic oligonucleotide
ggaggcaacccuuuaagaa

SEQ ID NO: 2332290 - RNA, 19 nt, Artificial Sequence
  Description of Artificial Sequence: Synthetic oligonucleotide
cugcuuagauacucaaaca

SEQ ID NO: 2332291 - RNA, 19 nt, Artificial Sequence
  Description of Artificial Sequence: Synthetic oligonucleotide
gcuaaaauacuugcuggug

SEQ ID NO: 2332292 - RNA, 19 nt, Artificial Sequence
  Description of Artificial Sequence: Synthetic oligonucleotide
gauucaugcuaaaauacuu

SEQ ID NO: 2332293 - RNA, 19 nt, Artificial Sequence
  Description of Artificial Sequence: Synthetic oligonucleotide
ucagggucuuccucacuga

SEQ ID NO: 2332294 - RNA, 19 nt, Artificial Sequence
  Description of Artificial Sequence: Synthetic oligonucleotide
cagcucagcaaagacgcag

SEQ ID NO: 2332295 - RNA, 19 nt, Artificial Sequence
  Description of Artificial Sequence: Synthetic oligonucleotide
agccaaucgcccaaacauc

SEQ ID NO: 2332296 - RNA, 19 nt, Artificial Sequence
  Description of Artificial Sequence: Synthetic oligonucleotide
gaagcccaaggcaggguag

SEQ ID NO: 2332297 - RNA, 19 nt, Artificial Sequence
  Description of Artificial Sequence: Synthetic oligonucleotide
cucgaaugcugucaaaaua

SEQ ID NO: 2332298 - RNA, 19 nt, Artificial Sequence
  Description of Artificial Sequence: Synthetic oligonucleotide
agauuuuccuggccacaga

SEQ ID NO: 2332299 - RNA, 19 nt, Artificial Sequence
  Description of Artificial Sequence: Synthetic oligonucleotide
ccacgucagauuuuccugg

SEQ ID NO: 2332300 - RNA, 19 nt, Artificial Sequence
  Description of Artificial Sequence: Synthetic oligonucleotide
ucacuuugccagcuccuua

SEQ ID NO: 2332301 - RNA, 19 nt, Artificial Sequence
  Description of Artificial Sequence: Synthetic oligonucleotide
uccggacagcagcucagca

SEQ ID NO: 2332302 - RNA, 19 nt, Artificial Sequence
  Description of Artificial Sequence: Synthetic oligonucleotide
auacuugcuggugccuggg

SEQ ID NO: 2332303 - RNA, 19 nt, Artificial Sequence
  Description of Artificial Sequence: Synthetic oligonucleotide
cuguucgcaugucagccuc

SEQ ID NO: 2332304 - RNA, 19 nt, Artificial Sequence
  Description of Artificial Sequence: Synthetic oligonucleotide
gguacuacagugguacuuc

SEQ ID NO: 2332305 - RNA, 19 nt, Artificial Sequence
  Description of Artificial Sequence: Synthetic oligonucleotide
gcuuagauacucaaacaca

SEQ ID NO: 2332306 - RNA, 19 nt, Artificial Sequence
  Description of Artificial Sequence: Synthetic oligonucleotide
cuucaaauuauggaucacu

SEQ ID NO: 2332307 - RNA, 19 nt, Artificial Sequence
  Description of Artificial Sequence: Synthetic oligonucleotide
ucuuccucacugacuuguc

SEQ ID NO: 2332308 - RNA, 19 nt, Artificial Sequence
  Description of Artificial Sequence: Synthetic oligonucleotide
uacuacagugguacuucuu

SEQ ID NO: 2332309 - RNA, 19 nt, Artificial Sequence
  Description of Artificial Sequence: Synthetic oligonucleotide
agcugauccacgucagauu

SEQ ID NO: 2332310 - RNA, 19 nt, Artificial Sequence
  Description of Artificial Sequence: Synthetic oligonucleotide
gugugcucaauacaggaau

SEQ ID NO: 2332311 - RNA, 19 nt, Artificial Sequence
  Description of Artificial Sequence: Synthetic oligonucleotide
ugguacuacagugguacuu

SEQ ID NO: 2332312 - RNA, 19 nt, Artificial Sequence
  Description of Artificial Sequence: Synthetic oligonucleotide
uguucgcaugucagccucu

SEQ ID NO: 2332313 - RNA, 19 nt, Artificial Sequence
  Description of Artificial Sequence: Synthetic oligonucleotide
cuugccaaguggccuccag

SEQ ID NO: 2332314 - RNA, 19 nt, Artificial Sequence
  Description of Artificial Sequence: Synthetic oligonucleotide
uggccacauagucugugua

SEQ ID NO: 2332315 - RNA, 19 nt, Artificial Sequence
  Description of Artificial Sequence: Synthetic oligonucleotide
ggugcuuucgacucugucu

SEQ ID NO: 2332316 - RNA, 19 nt, Artificial Sequence
  Description of Artificial Sequence: Synthetic oligonucleotide
uucgcaugucagccucuca

SEQ ID NO: 2332317 - RNA, 19 nt, Artificial Sequence
  Description of Artificial Sequence: Synthetic oligonucleotide
  modified_base (3)..(3): a, c, u, g, unknown or other
ccnccugguggccacauag

SEQ ID NO: 2332318 - RNA, 19 nt, Artificial Sequence
  Description of Artificial Sequence: Synthetic oligonucleotide
aguuuauauccugucugua

SEQ ID NO: 2332319 - RNA, 19 nt, Artificial Sequence
  Description of Artificial Sequence: Synthetic oligonucleotide
gaaccccaagcuuuaauuu

SEQ ID NO: 2332320 - RNA, 19 nt, Artificial Sequence
  Description of Artificial Sequence: Synthetic oligonucleotide
acuugucauguugucuugu

SEQ ID NO: 2332321 - RNA, 19 nt, Artificial Sequence
  Description of Artificial Sequence: Synthetic oligonucleotide
cacuuugccagcuccuuaa

SEQ ID NO: 2332322 - RNA, 19 nt, Artificial Sequence
  Description of Artificial Sequence: Synthetic oligonucleotide
guccauguggaggcaaccc

SEQ ID NO: 2332323 - RNA, 19 nt, Artificial Sequence
  Description of Artificial Sequence: Synthetic oligonucleotide
caacuucucgaaugcuguc

SEQ ID NO: 2332324 - RNA, 19 nt, Artificial Sequence
  Description of Artificial Sequence: Synthetic oligonucleotide
agagcugauccacgucaga

SEQ ID NO: 2332325 - RNA, 19 nt, Artificial Sequence
  Description of Artificial Sequence: Synthetic oligonucleotide
gguaguuaaguuucuuggu

SEQ ID NO: 2332326 - RNA, 19 nt, Artificial Sequence
  Description of Artificial Sequence: Synthetic oligonucleotide
cagccaaucgcccaaacau

SEQ ID NO: 2332327 - RNA, 19 nt, Artificial Sequence
  Description of Artificial Sequence: Synthetic oligonucleotide
uagguacugcagcccaguc

SEQ ID NO: 2332328 - RNA, 19 nt, Artificial Sequence
  Description of Artificial Sequence: Synthetic oligonucleotide
gucauguugucuugucaaa

SEQ ID NO: 2332329 - RNA, 19 nt, Artificial Sequence
  Description of Artificial Sequence: Synthetic oligonucleotide
uaguagucaccugguccag

SEQ ID NO: 2332330 - RNA, 19 nt, Artificial Sequence
  Description of Artificial Sequence: Synthetic oligonucleotide
uguccaaggcuggaaggau

SEQ ID NO: 2332331 - RNA, 19 nt, Artificial Sequence
  Description of Artificial Sequence: Synthetic oligonucleotide
gcuaguuagcugagguagg

SEQ ID NO: 2332332 - RNA, 19 nt, Artificial Sequence
  Description of Artificial Sequence: Synthetic oligonucleotide
ccaggguuuuccuuaucag

SEQ ID NO: 2332333 - RNA, 19 nt, Artificial Sequence
  Description of Artificial Sequence: Synthetic oligonucleotide
ucgacuccaggguuuccau

SEQ ID NO: 2332334 - RNA, 19 nt, Artificial Sequence
  Description of Artificial Sequence: Synthetic oligonucleotide
gacgcagccaaucgcccaa

SEQ ID NO: 2332335 - RNA, 19 nt, Artificial Sequence
  Description of Artificial Sequence: Synthetic oligonucleotide
acccuuuaagaagcccaag

SEQ ID NO: 2332336 - RNA, 19 nt, Artificial Sequence
  Description of Artificial Sequence: Synthetic oligonucleotide
  modified_base (7)..(7): a, c, u, g, unknown or other
gguaccnccugguggccac

SEQ ID NO: 2332337 - RNA, 19 nt, Artificial Sequence
  Description of Artificial Sequence: Synthetic oligonucleotide
ucuccugaugugugcucaa

SEQ ID NO: 2332338 - RNA, 19 nt, Artificial Sequence
  Description of Artificial Sequence: Synthetic oligonucleotide
uuccggucuguguuuucuc

SEQ ID NO: 2332339 - RNA, 19 nt, Artificial Sequence
  Description of Artificial Sequence: Synthetic oligonucleotide
guugcagcuacggcgagua

SEQ ID NO: 2332340 - RNA, 19 nt, Artificial Sequence
  Description of Artificial Sequence: Synthetic oligonucleotide
ggaaaaugguaguuaaguu

SEQ ID NO: 2332341 - RNA, 19 nt, Artificial Sequence
  Description of Artificial Sequence: Synthetic oligonucleotide
guacugauucaugcuaaaa

SEQ ID NO: 2332342 - RNA, 19 nt, Artificial Sequence
  Description of Artificial Sequence: Synthetic oligonucleotide
uguugcagcuacggcgagu

SEQ ID NO: 2332343 - RNA, 19 nt, Artificial Sequence
  Description of Artificial Sequence: Synthetic oligonucleotide
aucuacuguugcagcuacg

SEQ ID NO: 2332344 - RNA, 19 nt, Artificial Sequence
  Description of Artificial Sequence: Synthetic oligonucleotide
cugguccagugagaagccg

SEQ ID NO: 2332345 - RNA, 19 nt, Artificial Sequence
  Description of Artificial Sequence: Synthetic oligonucleotide
cauauccucagggucugga

SEQ ID NO: 2332346 - RNA, 19 nt, Artificial Sequence
  Description of Artificial Sequence: Synthetic oligonucleotide
uugcagcuacggcgaguag

SEQ ID NO: 2332347 - RNA, 19 nt, Artificial Sequence
  Description of Artificial Sequence: Synthetic oligonucleotide
uaguuagcugagguaggua

SEQ ID NO: 2332348 - RNA, 19 nt, Artificial Sequence
  Description of Artificial Sequence: Synthetic oligonucleotide
gcaggguaggagauguuug

SEQ ID NO: 2332349 - RNA, 19 nt, Artificial Sequence
  Description of Artificial Sequence: Synthetic oligonucleotide
ggggccauacugugugucc

SEQ ID NO: 2332350 - RNA, 19 nt, Artificial Sequence
  Description of Artificial Sequence: Synthetic oligonucleotide
gcugcuaguuagcugaggu

SEQ ID NO: 2332351 - RNA, 19 nt, Artificial Sequence
  Description of Artificial Sequence: Synthetic oligonucleotide
ccuuaucagauagagcuga

SEQ ID NO: 2332352 - RNA, 19 nt, Artificial Sequence
  Description of Artificial Sequence: Synthetic oligonucleotide
cuggccacagaggcacucc

SEQ ID NO: 2332353 - RNA, 19 nt, Artificial Sequence
  Description of Artificial Sequence: Synthetic oligonucleotide
ggguaggagauguuuggaa

SEQ ID NO: 2332354 - RNA, 19 nt, Artificial Sequence
  Description of Artificial Sequence: Synthetic oligonucleotide
ccagucaggugcuuucgac

SEQ ID NO: 2332355 - RNA, 19 nt, Artificial Sequence
  Description of Artificial Sequence: Synthetic oligonucleotide
  modified_base (14)..(14): a, c, u, g, unknown or other
ggcgagcgguaccnccugg

SEQ ID NO: 2332356 - RNA, 19 nt, Artificial Sequence
  Description of Artificial Sequence: Synthetic oligonucleotide
ggaaucaaauauguaaauu

SEQ ID NO: 2332357 - RNA, 19 nt, Artificial Sequence
  Description of Artificial Sequence: Synthetic oligonucleotide
gcuuucgacucugucucag

SEQ ID NO: 2332358 - RNA, 19 nt, Artificial Sequence
  Description of Artificial Sequence: Synthetic oligonucleotide
uuucgacuccaggguuucc

SEQ ID NO: 2332359 - RNA, 19 nt, Artificial Sequence
  Description of Artificial Sequence: Synthetic oligonucleotide
accaagcauggaagucugg

SEQ ID NO: 2332360 - RNA, 19 nt, Artificial Sequence
  Description of Artificial Sequence: Synthetic oligonucleotide
ccaggguuuccauauccuc

SEQ ID NO: 2332361 - RNA, 19 nt, Artificial Sequence
  Description of Artificial Sequence: Synthetic oligonucleotide
gaaggaugcugcugcuagu

SEQ ID NO: 2332362 - RNA, 19 nt, Artificial Sequence
  Description of Artificial Sequence: Synthetic oligonucleotide
aggaugcugcugcuaguua

SEQ ID NO: 2332363 - RNA, 19 nt, Artificial Sequence
  Description of Artificial Sequence: Synthetic oligonucleotide
  modified_base (15)..(15): a, c, u, g, unknown or other
aggcgagcgguaccnccug

SEQ ID NO: 2332364 - RNA, 19 nt, Artificial Sequence
  Description of Artificial Sequence: Synthetic oligonucleotide
gcaacccuuuaagaagccc

SEQ ID NO: 2332365 - RNA, 19 nt, Artificial Sequence
  Description of Artificial Sequence: Synthetic oligonucleotide
cugcugcuuagauacucaa

SEQ ID NO: 2332366 - RNA, 19 nt, Artificial Sequence
  Description of Artificial Sequence: Synthetic oligonucleotide
cagucaggugcuuucgacu

SEQ ID NO: 2332367 - RNA, 19 nt, Artificial Sequence
  Description of Artificial Sequence: Synthetic oligonucleotide
cacuccggacagcagcuca

SEQ ID NO: 2332368 - RNA, 19 nt, Artificial Sequence
  Description of Artificial Sequence: Synthetic oligonucleotide
caagcauggaagucuggau

SEQ ID NO: 2332369 - RNA, 19 nt, Artificial Sequence
  Description of Artificial Sequence: Synthetic oligonucleotide
cagugguacuucuuauugu

SEQ ID NO: 2332370 - RNA, 19 nt, Artificial Sequence
  Description of Artificial Sequence: Synthetic oligonucleotide
cugcuaguuagcugaggua

SEQ ID NO: 2332371 - RNA, 19 nt, Artificial Sequence
  Description of Artificial Sequence: Synthetic oligonucleotide
ggugccugggaaugagauc

SEQ ID NO: 2332372 - RNA, 19 nt, Artificial Sequence
  Description of Artificial Sequence: Synthetic oligonucleotide
gcugauccacgucagauuu

SEQ ID NO: 2332373 - RNA, 19 nt, Artificial Sequence
  Description of Artificial Sequence: Synthetic oligonucleotide
gguagguacugcagcccag

SEQ ID NO: 2332374 - RNA, 19 nt, Artificial Sequence
  Description of Artificial Sequence: Synthetic oligonucleotide
cuaguuagcugagguaggu

SEQ ID NO: 2332375 - RNA, 19 nt, Artificial Sequence
  Description of Artificial Sequence: Synthetic oligonucleotide
auguggaggcaacccuuua

SEQ ID NO: 2332376 - RNA, 19 nt, Artificial Sequence
  Description of Artificial Sequence: Synthetic oligonucleotide
agaagccgggcaaacccaa

SEQ ID NO: 2332377 - RNA, 19 nt, Artificial Sequence
  Description of Artificial Sequence: Synthetic oligonucleotide
  modified_base (16)..(16): a, c, u, g, unknown or other
caggcgagcgguaccnccu

SEQ ID NO: 2332378 - RNA, 19 nt, Artificial Sequence
  Description of Artificial Sequence: Synthetic oligonucleotide
cuacggcgaguagauaaga

SEQ ID NO: 2332379 - RNA, 19 nt, Artificial Sequence
  Description of Artificial Sequence: Synthetic oligonucleotide
cuguugcagcuacggcgag

SEQ ID NO: 2332380 - RNA, 19 nt, Artificial Sequence
  Description of Artificial Sequence: Synthetic oligonucleotide
cccaaggcaggguaggaga

SEQ ID NO: 2332381 - RNA, 19 nt, Artificial Sequence
  Description of Artificial Sequence: Synthetic oligonucleotide
cugacuugucauguugucu

SEQ ID NO: 2332382 - RNA, 19 nt, Artificial Sequence
  Description of Artificial Sequence: Synthetic oligonucleotide
ggaagucuggaucucuaau

SEQ ID NO: 2332383 - RNA, 19 nt, Artificial Sequence
  Description of Artificial Sequence: Synthetic oligonucleotide
gguccauguggaggcaacc

SEQ ID NO: 2332384 - RNA, 19 nt, Artificial Sequence
  Description of Artificial Sequence: Synthetic oligonucleotide
guucgcaugucagccucuc

SEQ ID NO: 2332385 - RNA, 19 nt, Artificial Sequence
  Description of Artificial Sequence: Synthetic oligonucleotide
gcgaguagauaagaguuua

SEQ ID NO: 2332386 - RNA, 19 nt, Artificial Sequence
  Description of Artificial Sequence: Synthetic oligonucleotide
ccaagcauggaagucugga

SEQ ID NO: 2332387 - RNA, 19 nt, Artificial Sequence
  Description of Artificial Sequence: Synthetic oligonucleotide
cgcaugucagccucucagc

SEQ ID NO: 2332388 - RNA, 19 nt, Artificial Sequence
  Description of Artificial Sequence: Synthetic oligonucleotide
cagugaaccccaagcuuua

SEQ ID NO: 2332389 - RNA, 19 nt, Artificial Sequence
  Description of Artificial Sequence: Synthetic oligonucleotide
cuucucgaaugcugucaaa

SEQ ID NO: 2332390 - RNA, 19 nt, Artificial Sequence
  Description of Artificial Sequence: Synthetic oligonucleotide
ucuugccaaguggccucca

SEQ ID NO: 2332391 - RNA, 19 nt, Artificial Sequence
  Description of Artificial Sequence: Synthetic oligonucleotide
ggucuuccucacugacuug

SEQ ID NO: 2332392 - RNA, 19 nt, Artificial Sequence
  Description of Artificial Sequence: Synthetic oligonucleotide
ggcaacccuuuaagaagcc

SEQ ID NO: 2332393 - RNA, 19 nt, Artificial Sequence
  Description of Artificial Sequence: Synthetic oligonucleotide
cuuugccagcuccuuaaau

SEQ ID NO: 2332394 - RNA, 19 nt, Artificial Sequence
  Description of Artificial Sequence: Synthetic oligonucleotide
gugaaccccaagcuuuaau

SEQ ID NO: 2332395 - RNA, 19 nt, Artificial Sequence
  Description of Artificial Sequence: Synthetic oligonucleotide
ggccacagaggcacuccgg

SEQ ID NO: 2332396 - RNA, 19 nt, Artificial Sequence
  Description of Artificial Sequence: Synthetic oligonucleotide
  modified_base (5)..(5): a, c, u, g, unknown or other
uaccnccugguggccacau

SEQ ID NO: 2332397 - RNA, 19 nt, Artificial Sequence
  Description of Artificial Sequence: Synthetic oligonucleotide
ccacagaggcacuccggac

SEQ ID NO: 2332398 - RNA, 19 nt, Artificial Sequence
  Description of Artificial Sequence: Synthetic oligonucleotide
cuuccggucuguguuuucu

SEQ ID NO: 2332399 - RNA, 19 nt, Artificial Sequence
  Description of Artificial Sequence: Synthetic oligonucleotide
gucaggugcuuucgacucu

SEQ ID NO: 2332400 - RNA, 19 nt, Artificial Sequence
  Description of Artificial Sequence: Synthetic oligonucleotide
aggguccauguggaggcaa

SEQ ID NO: 2332401 - RNA, 19 nt, Artificial Sequence
  Description of Artificial Sequence: Synthetic oligonucleotide
  modified_base (18)..(18): a, c, u, g, unknown or other
cucaggcgagcgguaccnc

SEQ ID NO: 2332402 - RNA, 19 nt, Artificial Sequence
  Description of Artificial Sequence: Synthetic oligonucleotide
agcuuccggucuguguuuu

SEQ ID NO: 2332403 - RNA, 19 nt, Artificial Sequence
  Description of Artificial Sequence: Synthetic oligonucleotide
  modified_base (19)..(19): a, c, u, g, unknown or other
gcucaggcgagcgguaccn

SEQ ID NO: 2332404 - RNA, 19 nt, Artificial Sequence
  Description of Artificial Sequence: Synthetic oligonucleotide
gccacauagucuguguagu

SEQ ID NO: 2332405 - RNA, 19 nt, Artificial Sequence
  Description of Artificial Sequence: Synthetic oligonucleotide
  modified_base (4)..(4): a, c, u, g, unknown or other
accnccugguggccacaua

SEQ ID NO: 2332406 - RNA, 19 nt, Artificial Sequence
  Description of Artificial Sequence: Synthetic oligonucleotide
  modified_base (2)..(2): a, c, u, g, unknown or other
cnccugguggccacauagu

SEQ ID NO: 2332407 - RNA, 19 nt, Artificial Sequence
  Description of Artificial Sequence: Synthetic oligonucleotide
ggguccauguggaggcaac

SEQ ID NO: 2332408 - RNA, 19 nt, Artificial Sequence
  Description of Artificial Sequence: Synthetic oligonucleotide
ccugucuguaaguucugcu

SEQ ID NO: 2332409 - RNA, 19 nt, Artificial Sequence
  Description of Artificial Sequence: Synthetic oligonucleotide
cagaggcacuccggacagc

SEQ ID NO: 2332410 - RNA, 19 nt, Artificial Sequence
  Description of Artificial Sequence: Synthetic oligonucleotide
gcuguucgcaugucagccu

SEQ ID NO: 2332411 - RNA, 19 nt, Artificial Sequence
  Description of Artificial Sequence: Synthetic oligonucleotide
  modified_base (12)..(12): a, c, u, g, unknown or other
cgagcgguaccnccuggug

SEQ ID NO: 2332412 - RNA, 19 nt, Artificial Sequence
  Description of Artificial Sequence: Synthetic oligonucleotide
ccggacagcagcucagcaa

SEQ ID NO: 2332413 - RNA, 19 nt, Artificial Sequence
  Description of Artificial Sequence: Synthetic oligonucleotide
gcagcuacggcgaguagau

SEQ ID NO: 2332414 - RNA, 19 nt, Artificial Sequence
  Description of Artificial Sequence: Synthetic oligonucleotide
ggcaggguaggagauguuu

SEQ ID NO: 2332415 - RNA, 19 nt, Artificial Sequence
  Description of Artificial Sequence: Synthetic oligonucleotide
cggcgaguagauaagaguu

SEQ ID NO: 2332416 - RNA, 19 nt, Artificial Sequence
  Description of Artificial Sequence: Synthetic oligonucleotide
  modified_base (6)..(6): a, c, u, g, unknown or other
guaccnccugguggccaca

SEQ ID NO: 2332417 - RNA, 19 nt, Artificial Sequence
  Description of Artificial Sequence: Synthetic oligonucleotide
ggcacuccggacagcagcu

SEQ ID NO: 2332418 - RNA, 19 nt, Artificial Sequence
  Description of Artificial Sequence: Synthetic oligonucleotide
ggcgaguagauaagaguuu

SEQ ID NO: 2332419 - RNA, 19 nt, Artificial Sequence
  Description of Artificial Sequence: Synthetic oligonucleotide
acgcagccaaucgcccaaa

SEQ ID NO: 2332420 - RNA, 19 nt, Artificial Sequence
  Description of Artificial Sequence: Synthetic oligonucleotide
ccaaucgcccaaacaucua

SEQ ID NO: 2332421 - RNA, 19 nt, Artificial Sequence
  Description of Artificial Sequence: Synthetic oligonucleotide
cccagucaggugcuuucga

SEQ ID NO: 2332422 - RNA, 19 nt, Artificial Sequence
  Description of Artificial Sequence: Synthetic oligonucleotide
  modified_base (9)..(9): a, c, u, g, unknown or other
gcgguaccnccugguggcc

SEQ ID NO: 2332423 - RNA, 19 nt, Artificial Sequence
  Description of Artificial Sequence: Synthetic oligonucleotide
gcagcucagcaaagacgca

SEQ ID NO: 2332424 - RNA, 19 nt, Artificial Sequence
  Description of Artificial Sequence: Synthetic oligonucleotide
ccauguggaggcaacccuu

SEQ ID NO: 2332425 - RNA, 19 nt, Artificial Sequence
  Description of Artificial Sequence: Synthetic oligonucleotide
ccggucuguguuuucuccu

SEQ ID NO: 2332426 - RNA, 19 nt, Artificial Sequence
  Description of Artificial Sequence: Synthetic oligonucleotide
cagcuuccggucuguguuu

SEQ ID NO: 2332427 - RNA, 19 nt, Artificial Sequence
  Description of Artificial Sequence: Synthetic oligonucleotide
cuccugaugugugcucaau

SEQ ID NO: 2332428 - RNA, 19 nt, Artificial Sequence
  Description of Artificial Sequence: Synthetic oligonucleotide
cgcagccaaucgcccaaac

SEQ ID NO: 2332429 - RNA, 19 nt, Artificial Sequence
  Description of Artificial Sequence: Synthetic oligonucleotide
cgaguagauaagaguuuau

SEQ ID NO: 2332430 - RNA, 19 nt, Artificial Sequence
  Description of Artificial Sequence: Synthetic oligonucleotide
gcacuccggacagcagcuc

SEQ ID NO: 2332431 - RNA, 19 nt, Artificial Sequence
  Description of Artificial Sequence: Synthetic oligonucleotide
  modified_base (13)..(13): a, c, u, g, unknown or other
gcgagcgguaccnccuggu

SEQ ID NO: 2332432 - RNA, 19 nt, Artificial Sequence
  Description of Artificial Sequence: Synthetic oligonucleotide
cagcuacggcgaguagaua

SEQ ID NO: 2332433 - RNA, 19 nt, Artificial Sequence
  Description of Artificial Sequence: Synthetic oligonucleotide
ccccacugaaguacugauu

SEQ ID NO: 2332434 - RNA, 19 nt, Artificial Sequence
  Description of Artificial Sequence: Synthetic oligonucleotide
  modified_base (8)..(8): a, c, u, g, unknown or other
cgguaccnccugguggcca

SEQ ID NO: 2332435 - RNA, 19 nt, Artificial Sequence
  Description of Artificial Sequence: Synthetic oligonucleotide
aaauuauauauauauagug

SEQ ID NO: 2332436 - RNA, 19 nt, Artificial Sequence
  Description of Artificial Sequence: Synthetic oligonucleotide
aaaacuagccaaaauaccc

SEQ ID NO: 2332437 - RNA, 19 nt, Artificial Sequence
  Description of Artificial Sequence: Synthetic oligonucleotide
acuuucauuaucuucaggg

SEQ ID NO: 2332438 - RNA, 19 nt, Artificial Sequence
  Description of Artificial Sequence: Synthetic oligonucleotide
aauagggaguccaugaugc

SEQ ID NO: 2332439 - RNA, 19 nt, Artificial Sequence
  Description of Artificial Sequence: Synthetic oligonucleotide
aaauacccaaaccuugagc

SEQ ID NO: 2332440 - RNA, 19 nt, Artificial Sequence
  Description of Artificial Sequence: Synthetic oligonucleotide
auauagugaauagaaaccc

SEQ ID NO: 2332441 - RNA, 19 nt, Artificial Sequence
  Description of Artificial Sequence: Synthetic oligonucleotide
aauuauauauauauaguga

SEQ ID NO: 2332442 - RNA, 19 nt, Artificial Sequence
  Description of Artificial Sequence: Synthetic oligonucleotide
auuauauauauauagugaa

SEQ ID NO: 2332443 - RNA, 19 nt, Artificial Sequence
  Description of Artificial Sequence: Synthetic oligonucleotide
uugaaagacuggaauaggg

SEQ ID NO: 2332444 - RNA, 19 nt, Artificial Sequence
  Description of Artificial Sequence: Synthetic oligonucleotide
aaacccaaugguuagagaa

SEQ ID NO: 2332445 - RNA, 19 nt, Artificial Sequence
  Description of Artificial Sequence: Synthetic oligonucleotide
ugaauagaaacccaauggu

SEQ ID NO: 2332446 - RNA, 19 nt, Artificial Sequence
  Description of Artificial Sequence: Synthetic oligonucleotide
aaugguuagagaaagggcu

SEQ ID NO: 2332447 - RNA, 19 nt, Artificial Sequence
  Description of Artificial Sequence: Synthetic oligonucleotide
ccaaauuauauauauauag

SEQ ID NO: 2332448 - RNA, 19 nt, Artificial Sequence
  Description of Artificial Sequence: Synthetic oligonucleotide
uguuccucaauccagcuga

SEQ ID NO: 2332449 - RNA, 19 nt, Artificial Sequence
  Description of Artificial Sequence: Synthetic oligonucleotide
acuguaggcauacucgacc

SEQ ID NO: 2332450 - RNA, 19 nt, Artificial Sequence
  Description of Artificial Sequence: Synthetic oligonucleotide
agaacgauggcuuugcuga

SEQ ID NO: 2332451 - RNA, 19 nt, Artificial Sequence
  Description of Artificial Sequence: Synthetic oligonucleotide
uauauauauauagugaaua

SEQ ID NO: 2332452 - RNA, 19 nt, Artificial Sequence
  Description of Artificial Sequence: Synthetic oligonucleotide
acuacacuccccuuguggc

SEQ ID NO: 2332453 - RNA, 19 nt, Artificial Sequence
  Description of Artificial Sequence: Synthetic oligonucleotide
uucauuaucuucagggcug

SEQ ID NO: 2332454 - RNA, 19 nt, Artificial Sequence
  Description of Artificial Sequence: Synthetic oligonucleotide
agugaauagaaacccaaug

SEQ ID NO: 2332455 - RNA, 19 nt, Artificial Sequence
  Description of Artificial Sequence: Synthetic oligonucleotide
gaugcuauuagcucuggac

SEQ ID NO: 2332456 - RNA, 19 nt, Artificial Sequence
  Description of Artificial Sequence: Synthetic oligonucleotide
aacaauuuccaaauuauau

SEQ ID NO: 2332457 - RNA, 19 nt, Artificial Sequence
  Description of Artificial Sequence: Synthetic oligonucleotide
ucgaccuuggcacacgccg

SEQ ID NO: 2332458 - RNA, 19 nt, Artificial Sequence
  Description of Artificial Sequence: Synthetic oligonucleotide
agccaaaauacccaaaccu

SEQ ID NO: 2332459 - RNA, 19 nt, Artificial Sequence
  Description of Artificial Sequence: Synthetic oligonucleotide
aagacuggaauagggaguc

SEQ ID NO: 2332460 - RNA, 19 nt, Artificial Sequence
  Description of Artificial Sequence: Synthetic oligonucleotide
auauauauagugaauagaa

SEQ ID NO: 2332461 - RNA, 19 nt, Artificial Sequence
  Description of Artificial Sequence: Synthetic oligonucleotide
ugaaagacuggaauaggga

SEQ ID NO: 2332462 - RNA, 19 nt, Artificial Sequence
  Description of Artificial Sequence: Synthetic oligonucleotide
ugaaacacguugaacuuca

SEQ ID NO: 2332463 - RNA, 19 nt, Artificial Sequence
  Description of Artificial Sequence: Synthetic oligonucleotide
aaaagcccaggguccaggc

SEQ ID NO: 2332464 - RNA, 19 nt, Artificial Sequence
  Description of Artificial Sequence: Synthetic oligonucleotide
uuuguaggacuccuuguag

SEQ ID NO: 2332465 - RNA, 19 nt, Artificial Sequence
  Description of Artificial Sequence: Synthetic oligonucleotide
uuauauauauauagugaau

SEQ ID NO: 2332466 - RNA, 19 nt, Artificial Sequence
  Description of Artificial Sequence: Synthetic oligonucleotide
auagaaacccaaugguuag

SEQ ID NO: 2332467 - RNA, 19 nt, Artificial Sequence
  Description of Artificial Sequence: Synthetic oligonucleotide
uauagugaauagaaaccca

SEQ ID NO: 2332468 - RNA, 19 nt, Artificial Sequence
  Description of Artificial Sequence: Synthetic oligonucleotide
aauagaaacccaaugguua

SEQ ID NO: 2332469 - RNA, 19 nt, Artificial Sequence
  Description of Artificial Sequence: Synthetic oligonucleotide
uuguaggacuccuuguagg

SEQ ID NO: 2332470 - RNA, 19 nt, Artificial Sequence
  Description of Artificial Sequence: Synthetic oligonucleotide
aauguggauacuucuuccu

SEQ ID NO: 2332471 - RNA, 19 nt, Artificial Sequence
  Description of Artificial Sequence: Synthetic oligonucleotide
guuuucuguagaacgaugg

SEQ ID NO: 2332472 - RNA, 19 nt, Artificial Sequence
  Description of Artificial Sequence: Synthetic oligonucleotide
uuuucuguagaacgauggc

SEQ ID NO: 2332473 - RNA, 19 nt, Artificial Sequence
  Description of Artificial Sequence: Synthetic oligonucleotide
uugagugugagcacgccgc

SEQ ID NO: 2332474 - RNA, 19 nt, Artificial Sequence
  Description of Artificial Sequence: Synthetic oligonucleotide
uuaucuucagggcugugac

SEQ ID NO: 2332475 - RNA, 19 nt, Artificial Sequence
  Description of Artificial Sequence: Synthetic oligonucleotide
cauugaaagacuggaauag

SEQ ID NO: 2332476 - RNA, 19 nt, Artificial Sequence
  Description of Artificial Sequence: Synthetic oligonucleotide
acggaagaggcacuggugg

SEQ ID NO: 2332477 - RNA, 19 nt, Artificial Sequence
  Description of Artificial Sequence: Synthetic oligonucleotide
ucauagccucucuugauag

SEQ ID NO: 2332478 - RNA, 19 nt, Artificial Sequence
  Description of Artificial Sequence: Synthetic oligonucleotide
aaccgaugcuauuagcucu

SEQ ID NO: 2332479 - RNA, 19 nt, Artificial Sequence
  Description of Artificial Sequence: Synthetic oligonucleotide
uucaauugauggaggacgc

SEQ ID NO: 2332480 - RNA, 19 nt, Artificial Sequence
  Description of Artificial Sequence: Synthetic oligonucleotide
caugaugccuugaaacacg

SEQ ID NO: 2332481 - RNA, 19 nt, Artificial Sequence
  Description of Artificial Sequence: Synthetic oligonucleotide
caaugguuagagaaagggc

SEQ ID NO: 2332482 - RNA, 19 nt, Artificial Sequence
  Description of Artificial Sequence: Synthetic oligonucleotide
cuagccaaaauacccaaac

SEQ ID NO: 2332483 - RNA, 19 nt, Artificial Sequence
  Description of Artificial Sequence: Synthetic oligonucleotide
agcucuggacacuacacuc

SEQ ID NO: 2332484 - RNA, 19 nt, Artificial Sequence
  Description of Artificial Sequence: Synthetic oligonucleotide
uggaauagggaguccauga

SEQ ID NO: 2332485 - RNA, 19 nt, Artificial Sequence
  Description of Artificial Sequence: Synthetic oligonucleotide
ucaucauagccucucuuga

SEQ ID NO: 2332486 - RNA, 19 nt, Artificial Sequence
  Description of Artificial Sequence: Synthetic oligonucleotide
aagaggcacugguggaacc

SEQ ID NO: 2332487 - RNA, 19 nt, Artificial Sequence
  Description of Artificial Sequence: Synthetic oligonucleotide
gaauagggaguccaugaug

SEQ ID NO: 2332488 - RNA, 19 nt, Artificial Sequence
  Description of Artificial Sequence: Synthetic oligonucleotide
augcuauuagcucuggaca

SEQ ID NO: 2332489 - RNA, 19 nt, Artificial Sequence
  Description of Artificial Sequence: Synthetic oligonucleotide
uccaaauuauauauauaua

SEQ ID NO: 2332490 - RNA, 19 nt, Artificial Sequence
  Description of Artificial Sequence: Synthetic oligonucleotide
uuagcucuggacacuacac

SEQ ID NO: 2332491 - RNA, 19 nt, Artificial Sequence
  Description of Artificial Sequence: Synthetic oligonucleotide
aagacacaagcugacagcu

SEQ ID NO: 2332492 - RNA, 19 nt, Artificial Sequence
  Description of Artificial Sequence: Synthetic oligonucleotide
uucuguagaacgauggcuu

SEQ ID NO: 2332493 - RNA, 19 nt, Artificial Sequence
  Description of Artificial Sequence: Synthetic oligonucleotide
uagccaaaauacccaaacc

SEQ ID NO: 2332494 - RNA, 19 nt, Artificial Sequence
  Description of Artificial Sequence: Synthetic oligonucleotide
agcagaggcgaacaauuuc

SEQ ID NO: 2332495 - RNA, 19 nt, Artificial Sequence
  Description of Artificial Sequence: Synthetic oligonucleotide
uguaggacuccuuguagga

SEQ ID NO: 2332496 - RNA, 19 nt, Artificial Sequence
  Description of Artificial Sequence: Synthetic oligonucleotide
uuucuguagaacgauggcu

SEQ ID NO: 2332497 - RNA, 19 nt, Artificial Sequence
  Description of Artificial Sequence: Synthetic oligonucleotide
caauguggauacuucuucc

SEQ ID NO: 2332498 - RNA, 19 nt, Artificial Sequence
  Description of Artificial Sequence: Synthetic oligonucleotide
auugaaagacuggaauagg

SEQ ID NO: 2332499 - RNA, 19 nt, Artificial Sequence
  Description of Artificial Sequence: Synthetic oligonucleotide
ugcuauuagcucuggacac

SEQ ID NO: 2332500 - RNA, 19 nt, Artificial Sequence
  Description of Artificial Sequence: Synthetic oligonucleotide
uugauagcaucccuccucu

SEQ ID NO: 2332501 - RNA, 19 nt, Artificial Sequence
  Description of Artificial Sequence: Synthetic oligonucleotide
aaacuagccaaaauaccca

SEQ ID NO: 2332502 - RNA, 19 nt, Artificial Sequence
  Description of Artificial Sequence: Synthetic oligonucleotide
aaagacuggaauagggagu

SEQ ID NO: 2332503 - RNA, 19 nt, Artificial Sequence
  Description of Artificial Sequence: Synthetic oligonucleotide
aggacucuugcugauaauc

SEQ ID NO: 2332504 - RNA, 19 nt, Artificial Sequence
  Description of Artificial Sequence: Synthetic oligonucleotide
uguagaacgauggcuuugc

SEQ ID NO: 2332505 - RNA, 19 nt, Artificial Sequence
  Description of Artificial Sequence: Synthetic oligonucleotide
uagaacgauggcuuugcug

SEQ ID NO: 2332506 - RNA, 19 nt, Artificial Sequence
  Description of Artificial Sequence: Synthetic oligonucleotide
aacuagccaaaauacccaa

SEQ ID NO: 2332507 - RNA, 19 nt, Artificial Sequence
  Description of Artificial Sequence: Synthetic oligonucleotide
auuagcucuggacacuaca

SEQ ID NO: 2332508 - RNA, 19 nt, Artificial Sequence
  Description of Artificial Sequence: Synthetic oligonucleotide
cacguugaacuucaccugg

SEQ ID NO: 2332509 - RNA, 19 nt, Artificial Sequence
  Description of Artificial Sequence: Synthetic oligonucleotide
cugauaaucacuguccuca

SEQ ID NO: 2332510 - RNA, 19 nt, Artificial Sequence
  Description of Artificial Sequence: Synthetic oligonucleotide
uccuucaugaggguugucc

SEQ ID NO: 2332511 - RNA, 19 nt, Artificial Sequence
  Description of Artificial Sequence: Synthetic oligonucleotide
uuucucgcagagucugugg

SEQ ID NO: 2332512 - RNA, 19 nt, Artificial Sequence
  Description of Artificial Sequence: Synthetic oligonucleotide
gggaacgauggucugaagg

SEQ ID NO: 2332513 - RNA, 19 nt, Artificial Sequence
  Description of Artificial Sequence: Synthetic oligonucleotide
uuuucaauugauggaggac

SEQ ID NO: 2332514 - RNA, 19 nt, Artificial Sequence
  Description of Artificial Sequence: Synthetic oligonucleotide
caaauuauauauauauagu

SEQ ID NO: 2332515 - RNA, 19 nt, Artificial Sequence
  Description of Artificial Sequence: Synthetic oligonucleotide
uucucgcagagucuguggc

SEQ ID NO: 2332516 - RNA, 19 nt, Artificial Sequence
  Description of Artificial Sequence: Synthetic oligonucleotide
ucacuguaggcauacucga

SEQ ID NO: 2332517 - RNA, 19 nt, Artificial Sequence
  Description of Artificial Sequence: Synthetic oligonucleotide
gauagcaucccuccucuuc

SEQ ID NO: 2332518 - RNA, 19 nt, Artificial Sequence
  Description of Artificial Sequence: Synthetic oligonucleotide
auagcaucccuccucuucu

SEQ ID NO: 2332519 - RNA, 19 nt, Artificial Sequence
  Description of Artificial Sequence: Synthetic oligonucleotide
cucacaguguuccucaauc

SEQ ID NO: 2332520 - RNA, 19 nt, Artificial Sequence
  Description of Artificial Sequence: Synthetic oligonucleotide
agaaacccaaugguuagag

SEQ ID NO: 2332521 - RNA, 19 nt, Artificial Sequence
  Description of Artificial Sequence: Synthetic oligonucleotide
uuugggagccaauggagaa

SEQ ID NO: 2332522 - RNA, 19 nt, Artificial Sequence
  Description of Artificial Sequence: Synthetic oligonucleotide
uggaggacgccaaucacaa

SEQ ID NO: 2332523 - RNA, 19 nt, Artificial Sequence
  Description of Artificial Sequence: Synthetic oligonucleotide
ugguuagagaaagggcugg

SEQ ID NO: 2332524 - RNA, 19 nt, Artificial Sequence
  Description of Artificial Sequence: Synthetic oligonucleotide
cacuacacuccccuugugg

SEQ ID NO: 2332525 - RNA, 19 nt, Artificial Sequence
  Description of Artificial Sequence: Synthetic oligonucleotide
gacucuugcugauaaucac

SEQ ID NO: 2332526 - RNA, 19 nt, Artificial Sequence
  Description of Artificial Sequence: Synthetic oligonucleotide
gaaccgaugcuauuagcuc

SEQ ID NO: 2332527 - RNA, 19 nt, Artificial Sequence
  Description of Artificial Sequence: Synthetic oligonucleotide
gaggcgaacaauuuccaaa

SEQ ID NO: 2332528 - RNA, 19 nt, Artificial Sequence
  Description of Artificial Sequence: Synthetic oligonucleotide
aaguguugcccaagagacc

SEQ ID NO: 2332529 - RNA, 19 nt, Artificial Sequence
  Description of Artificial Sequence: Synthetic oligonucleotide
uagucgaugguuuucugua

SEQ ID NO: 2332530 - RNA, 19 nt, Artificial Sequence
  Description of Artificial Sequence: Synthetic oligonucleotide
aauccagcugaagacacaa

SEQ ID NO: 2332531 - RNA, 19 nt, Artificial Sequence
  Description of Artificial Sequence: Synthetic oligonucleotide
aaaccuugagccaaguguu

SEQ ID NO: 2332532 - RNA, 19 nt, Artificial Sequence
  Description of Artificial Sequence: Synthetic oligonucleotide
ucacaauuugcucguaguu

SEQ ID NO: 2332533 - RNA, 19 nt, Artificial Sequence
  Description of Artificial Sequence: Synthetic oligonucleotide
accuugagccaaguguugc

SEQ ID NO: 2332534 - RNA, 19 nt, Artificial Sequence
  Description of Artificial Sequence: Synthetic oligonucleotide
uugcucguaguucacuuuc

SEQ ID NO: 2332535 - RNA, 19 nt, Artificial Sequence
  Description of Artificial Sequence: Synthetic oligonucleotide
uccugaugugccuucacaa

SEQ ID NO: 2332536 - RNA, 19 nt, Artificial Sequence
  Description of Artificial Sequence: Synthetic oligonucleotide
gcauacucgaccuuggcac

SEQ ID NO: 2332537 - RNA, 19 nt, Artificial Sequence
  Description of Artificial Sequence: Synthetic oligonucleotide
ggucugaaggucaucauag

SEQ ID NO: 2332538 - RNA, 19 nt, Artificial Sequence
  Description of Artificial Sequence: Synthetic oligonucleotide
gagcccucaguagaguugg

SEQ ID NO: 2332539 - RNA, 19 nt, Artificial Sequence
  Description of Artificial Sequence: Synthetic oligonucleotide
uagugaauagaaacccaau

SEQ ID NO: 2332540 - RNA, 19 nt, Artificial Sequence
  Description of Artificial Sequence: Synthetic oligonucleotide
aggcgaacaauuuccaaau

SEQ ID NO: 2332541 - RNA, 19 nt, Artificial Sequence
  Description of Artificial Sequence: Synthetic oligonucleotide
ugaugugccuucacaauuu

SEQ ID NO: 2332542 - RNA, 19 nt, Artificial Sequence
  Description of Artificial Sequence: Synthetic oligonucleotide
uucaugaggguuguccuga

SEQ ID NO: 2332543 - RNA, 19 nt, Artificial Sequence
  Description of Artificial Sequence: Synthetic oligonucleotide
uguguuggggacggaagag

SEQ ID NO: 2332544 - RNA, 19 nt, Artificial Sequence
  Description of Artificial Sequence: Synthetic oligonucleotide
auuaucuucagggcuguga

SEQ ID NO: 2332545 - RNA, 19 nt, Artificial Sequence
  Description of Artificial Sequence: Synthetic oligonucleotide
aauuugcucguaguucacu

SEQ ID NO: 2332546 - RNA, 19 nt, Artificial Sequence
  Description of Artificial Sequence: Synthetic oligonucleotide
caauuucucgcagagucug

SEQ ID NO: 2332547 - RNA, 19 nt, Artificial Sequence
  Description of Artificial Sequence: Synthetic oligonucleotide
ugcgcaauguggauacuuc

SEQ ID NO: 2332548 - RNA, 19 nt, Artificial Sequence
  Description of Artificial Sequence: Synthetic oligonucleotide
acccaaugguuagagaaag

SEQ ID NO: 2332549 - RNA, 19 nt, Artificial Sequence
  Description of Artificial Sequence: Synthetic oligonucleotide
caguguuccucaauccagc

SEQ ID NO: 2332550 - RNA, 19 nt, Artificial Sequence
  Description of Artificial Sequence: Synthetic oligonucleotide
uggucagagaccugguccu

SEQ ID NO: 2332551 - RNA, 19 nt, Artificial Sequence
  Description of Artificial Sequence: Synthetic oligonucleotide
ccaaaauacccaaaccuug

SEQ ID NO: 2332552 - RNA, 19 nt, Artificial Sequence
  Description of Artificial Sequence: Synthetic oligonucleotide
cuucagggcugugacaucc

SEQ ID NO: 2332553 - RNA, 19 nt, Artificial Sequence
  Description of Artificial Sequence: Synthetic oligonucleotide
gaugugccuucacaauuug

SEQ ID NO: 2332554 - RNA, 19 nt, Artificial Sequence
  Description of Artificial Sequence: Synthetic oligonucleotide
ucuugauagcaucccuccu

SEQ ID NO: 2332555 - RNA, 19 nt, Artificial Sequence
  Description of Artificial Sequence: Synthetic oligonucleotide
acucgaccuuggcacacgc

SEQ ID NO: 2332556 - RNA, 19 nt, Artificial Sequence
  Description of Artificial Sequence: Synthetic oligonucleotide
aaacuggauguagucgaug

SEQ ID NO: 2332557 - RNA, 19 nt, Artificial Sequence
  Description of Artificial Sequence: Synthetic oligonucleotide
uagcucuggacacuacacu

SEQ ID NO: 2332558 - RNA, 19 nt, Artificial Sequence
  Description of Artificial Sequence: Synthetic oligonucleotide
agaccugguccucuccuuc

SEQ ID NO: 2332559 - RNA, 19 nt, Artificial Sequence
  Description of Artificial Sequence: Synthetic oligonucleotide
cucuggacacuacacuccc

SEQ ID NO: 2332560 - RNA, 19 nt, Artificial Sequence
  Description of Artificial Sequence: Synthetic oligonucleotide
uugaaacacguugaacuuc

SEQ ID NO: 2332561 - RNA, 19 nt, Artificial Sequence
  Description of Artificial Sequence: Synthetic oligonucleotide
agaggcauugaaagacugg

SEQ ID NO: 2332562 - RNA, 19 nt, Artificial Sequence
  Description of Artificial Sequence: Synthetic oligonucleotide
cauccuugcgcaaugugga

SEQ ID NO: 2332563 - RNA, 19 nt, Artificial Sequence
  Description of Artificial Sequence: Synthetic oligonucleotide
gaccuuggcacacgccggg

SEQ ID NO: 2332564 - RNA, 19 nt, Artificial Sequence
  Description of Artificial Sequence: Synthetic oligonucleotide
auacccaaaccuugagcca

SEQ ID NO: 2332565 - RNA, 19 nt, Artificial Sequence
  Description of Artificial Sequence: Synthetic oligonucleotide
guaguucacuuucauuauc

SEQ ID NO: 2332566 - RNA, 19 nt, Artificial Sequence
  Description of Artificial Sequence: Synthetic oligonucleotide
guggaaccgaugcuauuag

SEQ ID NO: 2332567 - RNA, 19 nt, Artificial Sequence
  Description of Artificial Sequence: Synthetic oligonucleotide
uggaaccgaugcuauuagc

SEQ ID NO: 2332568 - RNA, 19 nt, Artificial Sequence
  Description of Artificial Sequence: Synthetic oligonucleotide
cuucaugaggguuguccug

SEQ ID NO: 2332569 - RNA, 19 nt, Artificial Sequence
  Description of Artificial Sequence: Synthetic oligonucleotide
gauguagucgaugguuuuc

SEQ ID NO: 2332570 - RNA, 19 nt, Artificial Sequence
  Description of Artificial Sequence: Synthetic oligonucleotide
ucaauugauggaggacgcc

SEQ ID NO: 2332571 - RNA, 19 nt, Artificial Sequence
  Description of Artificial Sequence: Synthetic oligonucleotide
gagaaguccugcugcuggc

SEQ ID NO: 2332572 - RNA, 19 nt, Artificial Sequence
  Description of Artificial Sequence: Synthetic oligonucleotide
ugcucguaguucacuuuca

SEQ ID NO: 2332573 - RNA, 19 nt, Artificial Sequence
  Description of Artificial Sequence: Synthetic oligonucleotide
uugagccaaguguugccca

SEQ ID NO: 2332574 - RNA, 19 nt, Artificial Sequence
  Description of Artificial Sequence: Synthetic oligonucleotide
cauagccucucuugauagc

SEQ ID NO: 2332575 - RNA, 19 nt, Artificial Sequence
  Description of Artificial Sequence: Synthetic oligonucleotide
caccuggucagagaccugg

SEQ ID NO: 2332576 - RNA, 19 nt, Artificial Sequence
  Description of Artificial Sequence: Synthetic oligonucleotide
cuuguggcugcuuucuaca

SEQ ID NO: 2332577 - RNA, 19 nt, Artificial Sequence
  Description of Artificial Sequence: Synthetic oligonucleotide
gaacgauggcuuugcugag

SEQ ID NO: 2332578 - RNA, 19 nt, Artificial Sequence
  Description of Artificial Sequence: Synthetic oligonucleotide
cuguggcucacaguguucc

SEQ ID NO: 2332579 - RNA, 19 nt, Artificial Sequence
  Description of Artificial Sequence: Synthetic oligonucleotide
guaggacucuugcugauaa

SEQ ID NO: 2332580 - RNA, 19 nt, Artificial Sequence
  Description of Artificial Sequence: Synthetic oligonucleotide
uacacuccccuuguggcug

SEQ ID NO: 2332581 - RNA, 19 nt, Artificial Sequence
  Description of Artificial Sequence: Synthetic oligonucleotide
gcagaggcgaacaauuucc

SEQ ID NO: 2332582 - RNA, 19 nt, Artificial Sequence
  Description of Artificial Sequence: Synthetic oligonucleotide
ugaacuucaccuggucaga

SEQ ID NO: 2332583 - RNA, 19 nt, Artificial Sequence
  Description of Artificial Sequence: Synthetic oligonucleotide
augugccuucacaauuugc

SEQ ID NO: 2332584 - RNA, 19 nt, Artificial Sequence
  Description of Artificial Sequence: Synthetic oligonucleotide
ugugacauccuugcgcaau

SEQ ID NO: 2332585 - RNA, 19 nt, Artificial Sequence
  Description of Artificial Sequence: Synthetic oligonucleotide
uacccaaaccuugagccaa

SEQ ID NO: 2332586 - RNA, 19 nt, Artificial Sequence
  Description of Artificial Sequence: Synthetic oligonucleotide
gaggacgccaaucacaauu

SEQ ID NO: 2332587 - RNA, 19 nt, Artificial Sequence
  Description of Artificial Sequence: Synthetic oligonucleotide
augguuagagaaagggcug

SEQ ID NO: 2332588 - RNA, 19 nt, Artificial Sequence
  Description of Artificial Sequence: Synthetic oligonucleotide
caagcugacagcuccugga

SEQ ID NO: 2332589 - RNA, 19 nt, Artificial Sequence
  Description of Artificial Sequence: Synthetic oligonucleotide
aacccaaugguuagagaaa

SEQ ID NO: 2332590 - RNA, 19 nt, Artificial Sequence
  Description of Artificial Sequence: Synthetic oligonucleotide
augguuuucuguagaacga

SEQ ID NO: 2332591 - RNA, 19 nt, Artificial Sequence
  Description of Artificial Sequence: Synthetic oligonucleotide
ugccuugaaacacguugaa

SEQ ID NO: 2332592 - RNA, 19 nt, Artificial Sequence
  Description of Artificial Sequence: Synthetic oligonucleotide
gucugaaggucaucauagc

SEQ ID NO: 2332593 - RNA, 19 nt, Artificial Sequence
  Description of Artificial Sequence: Synthetic oligonucleotide
gacuggaauagggagucca

SEQ ID NO: 2332594 - RNA, 19 nt, Artificial Sequence
  Description of Artificial Sequence: Synthetic oligonucleotide
uauuagcucuggacacuac

SEQ ID NO: 2332595 - RNA, 19 nt, Artificial Sequence
  Description of Artificial Sequence: Synthetic oligonucleotide
ccuugaaacacguugaacu

SEQ ID NO: 2332596 - RNA, 19 nt, Artificial Sequence
  Description of Artificial Sequence: Synthetic oligonucleotide
agcuugagugugagcacgc

SEQ ID NO: 2332597 - RNA, 19 nt, Artificial Sequence
  Description of Artificial Sequence: Synthetic oligonucleotide
ucucgcagagucuguggcu

SEQ ID NO: 2332598 - RNA, 19 nt, Artificial Sequence
  Description of Artificial Sequence: Synthetic oligonucleotide
ugauaaucacuguccucau

SEQ ID NO: 2332599 - RNA, 19 nt, Artificial Sequence
  Description of Artificial Sequence: Synthetic oligonucleotide
gugacauccuugcgcaaug

SEQ ID NO: 2332600 - RNA, 19 nt, Artificial Sequence
  Description of Artificial Sequence: Synthetic oligonucleotide
uuugcucguaguucacuuu

SEQ ID NO: 2332601 - RNA, 19 nt, Artificial Sequence
  Description of Artificial Sequence: Synthetic oligonucleotide
caauugauggaggacgcca

SEQ ID NO: 2332602 - RNA, 19 nt, Artificial Sequence
  Description of Artificial Sequence: Synthetic oligonucleotide
aaaacuggauguagucgau

SEQ ID NO: 2332603 - RNA, 19 nt, Artificial Sequence
  Description of Artificial Sequence: Synthetic oligonucleotide
cuuuguaggacuccuugua

SEQ ID NO: 2332604 - RNA, 19 nt, Artificial Sequence
  Description of Artificial Sequence: Synthetic oligonucleotide
cugcagcucuccaggagcc

SEQ ID NO: 2332605 - RNA, 19 nt, Artificial Sequence
  Description of Artificial Sequence: Synthetic oligonucleotide
gaagaggcacugguggaac

SEQ ID NO: 2332606 - RNA, 19 nt, Artificial Sequence
  Description of Artificial Sequence: Synthetic oligonucleotide
gaauagaaacccaaugguu

SEQ ID NO: 2332607 - RNA, 19 nt, Artificial Sequence
  Description of Artificial Sequence: Synthetic oligonucleotide
uagaaacccaaugguuaga

SEQ ID NO: 2332608 - RNA, 19 nt, Artificial Sequence
  Description of Artificial Sequence: Synthetic oligonucleotide
aacgauggcuuugcugagu

SEQ ID NO: 2332609 - RNA, 19 nt, Artificial Sequence
  Description of Artificial Sequence: Synthetic oligonucleotide
gucgaugguuuucuguaga

SEQ ID NO: 2332610 - RNA, 19 nt, Artificial Sequence
  Description of Artificial Sequence: Synthetic oligonucleotide
caauuugcucguaguucac

SEQ ID NO: 2332611 - RNA, 19 nt, Artificial Sequence
  Description of Artificial Sequence: Synthetic oligonucleotide
ggacacuacacuccccuug

SEQ ID NO: 2332612 - RNA, 19 nt, Artificial Sequence
  Description of Artificial Sequence: Synthetic oligonucleotide
gaacgauggucugaagguc

SEQ ID NO: 2332613 - RNA, 19 nt, Artificial Sequence
  Description of Artificial Sequence: Synthetic oligonucleotide
gacggaagaggcacuggug

SEQ ID NO: 2332614 - RNA, 19 nt, Artificial Sequence
  Description of Artificial Sequence: Synthetic oligonucleotide
cacuguaggcauacucgac

SEQ ID NO: 2332615 - RNA, 19 nt, Artificial Sequence
  Description of Artificial Sequence: Synthetic oligonucleotide
guguuccucaauccagcug

SEQ ID NO: 2332616 - RNA, 19 nt, Artificial Sequence
  Description of Artificial Sequence: Synthetic oligonucleotide
ugagccaaguguugcccaa

SEQ ID NO: 2332617 - RNA, 19 nt, Artificial Sequence
  Description of Artificial Sequence: Synthetic oligonucleotide
augccuugaaacacguuga

SEQ ID NO: 2332618 - RNA, 19 nt, Artificial Sequence
  Description of Artificial Sequence: Synthetic oligonucleotide
auggaggacgccaaucaca

SEQ ID NO: 2332619 - RNA, 19 nt, Artificial Sequence
  Description of Artificial Sequence: Synthetic oligonucleotide
agaggcgaacaauuuccaa

SEQ ID NO: 2332620 - RNA, 19 nt, Artificial Sequence
  Description of Artificial Sequence: Synthetic oligonucleotide
uccggucuuuguaggacuc

SEQ ID NO: 2332621 - RNA, 19 nt, Artificial Sequence
  Description of Artificial Sequence: Synthetic oligonucleotide
aauuucucgcagagucugu

SEQ ID NO: 2332622 - RNA, 19 nt, Artificial Sequence
  Description of Artificial Sequence: Synthetic oligonucleotide
cagagauagaggcauugaa

SEQ ID NO: 2332623 - RNA, 19 nt, Artificial Sequence
  Description of Artificial Sequence: Synthetic oligonucleotide
ggaacgauggucugaaggu

SEQ ID NO: 2332624 - RNA, 19 nt, Artificial Sequence
  Description of Artificial Sequence: Synthetic oligonucleotide
acaauuucucgcagagucu

SEQ ID NO: 2332625 - RNA, 19 nt, Artificial Sequence
  Description of Artificial Sequence: Synthetic oligonucleotide
cucaauccagcugaagaca

SEQ ID NO: 2332626 - RNA, 19 nt, Artificial Sequence
  Description of Artificial Sequence: Synthetic oligonucleotide
ccuugcgcaauguggauac

SEQ ID NO: 2332627 - RNA, 19 nt, Artificial Sequence
  Description of Artificial Sequence: Synthetic oligonucleotide
cuggaauagggaguccaug

SEQ ID NO: 2332628 - RNA, 19 nt, Artificial Sequence
  Description of Artificial Sequence: Synthetic oligonucleotide
uacucgaccuuggcacacg

SEQ ID NO: 2332629 - RNA, 19 nt, Artificial Sequence
  Description of Artificial Sequence: Synthetic oligonucleotide
agagucuguggcucacagu

SEQ ID NO: 2332630 - RNA, 19 nt, Artificial Sequence
  Description of Artificial Sequence: Synthetic oligonucleotide
ccaaucacaauuucucgca

SEQ ID NO: 2332631 - RNA, 19 nt, Artificial Sequence
  Description of Artificial Sequence: Synthetic oligonucleotide
acgauggcuuugcugaguu

SEQ ID NO: 2332632 - RNA, 19 nt, Artificial Sequence
  Description of Artificial Sequence: Synthetic oligonucleotide
agccaaguguugcccaaga

SEQ ID NO: 2332633 - RNA, 19 nt, Artificial Sequence
  Description of Artificial Sequence: Synthetic oligonucleotide
gauggcuuugcugaguuuu

SEQ ID NO: 2332634 - RNA, 19 nt, Artificial Sequence
  Description of Artificial Sequence: Synthetic oligonucleotide
uuguggcugcuuucuacaa

SEQ ID NO: 2332635 - RNA, 19 nt, Artificial Sequence
  Description of Artificial Sequence: Synthetic oligonucleotide
gcgaacaauuuccaaauua

SEQ ID NO: 2332636 - RNA, 19 nt, Artificial Sequence
  Description of Artificial Sequence: Synthetic oligonucleotide
guagucgaugguuuucugu

SEQ ID NO: 2332637 - RNA, 19 nt, Artificial Sequence
  Description of Artificial Sequence: Synthetic oligonucleotide
cuguagaacgauggcuuug

SEQ ID NO: 2332638 - RNA, 19 nt, Artificial Sequence
  Description of Artificial Sequence: Synthetic oligonucleotide
aggacuccuuguaggacuc

SEQ ID NO: 2332639 - RNA, 19 nt, Artificial Sequence
  Description of Artificial Sequence: Synthetic oligonucleotide
ucuccuucaugaggguugu

SEQ ID NO: 2332640 - RNA, 19 nt, Artificial Sequence
  Description of Artificial Sequence: Synthetic oligonucleotide
uuguaggacucuugcugau

SEQ ID NO: 2332641 - RNA, 19 nt, Artificial Sequence
  Description of Artificial Sequence: Synthetic oligonucleotide
gguuagagaaagggcuggg

SEQ ID NO: 2332642 - RNA, 19 nt, Artificial Sequence
  Description of Artificial Sequence: Synthetic oligonucleotide
gguuuucuguagaacgaug

SEQ ID NO: 2332643 - RNA, 19 nt, Artificial Sequence
  Description of Artificial Sequence: Synthetic oligonucleotide
gauacuucuuccuccuguu

SEQ ID NO: 2332644 - RNA, 19 nt, Artificial Sequence
  Description of Artificial Sequence: Synthetic oligonucleotide
uggagaaguccugcugcug

SEQ ID NO: 2332645 - RNA, 19 nt, Artificial Sequence
  Description of Artificial Sequence: Synthetic oligonucleotide
cauacucgaccuuggcaca

SEQ ID NO: 2332646 - RNA, 19 nt, Artificial Sequence
  Description of Artificial Sequence: Synthetic oligonucleotide
cucgcagagucuguggcuc

SEQ ID NO: 2332647 - RNA, 19 nt, Artificial Sequence
  Description of Artificial Sequence: Synthetic oligonucleotide
ggcauugaaagacuggaau

SEQ ID NO: 2332648 - RNA, 19 nt, Artificial Sequence
  Description of Artificial Sequence: Synthetic oligonucleotide
cuguguuggggacggaaga

SEQ ID NO: 2332649 - RNA, 19 nt, Artificial Sequence
  Description of Artificial Sequence: Synthetic oligonucleotide
cuugaaacacguugaacuu

SEQ ID NO: 2332650 - RNA, 19 nt, Artificial Sequence
  Description of Artificial Sequence: Synthetic oligonucleotide
agacacaagcugacagcuc

SEQ ID NO: 2332651 - RNA, 19 nt, Artificial Sequence
  Description of Artificial Sequence: Synthetic oligonucleotide
uguggcucacaguguuccu

SEQ ID NO: 2332652 - RNA, 19 nt, Artificial Sequence
  Description of Artificial Sequence: Synthetic oligonucleotide
ggcauacucgaccuuggca

SEQ ID NO: 2332653 - RNA, 19 nt, Artificial Sequence
  Description of Artificial Sequence: Synthetic oligonucleotide
gaccaagcagaggcgaaca

SEQ ID NO: 2332654 - RNA, 19 nt, Artificial Sequence
  Description of Artificial Sequence: Synthetic oligonucleotide
guugcccaagagaccaagc

SEQ ID NO: 2332655 - RNA, 19 nt, Artificial Sequence
  Description of Artificial Sequence: Synthetic oligonucleotide
accgaugcuauuagcucug

SEQ ID NO: 2332656 - RNA, 19 nt, Artificial Sequence
  Description of Artificial Sequence: Synthetic oligonucleotide
caagcagaggcgaacaauu

SEQ ID NO: 2332657 - RNA, 19 nt, Artificial Sequence
  Description of Artificial Sequence: Synthetic oligonucleotide
cucgaccuuggcacacgcc

SEQ ID NO: 2332658 - RNA, 19 nt, Artificial Sequence
  Description of Artificial Sequence: Synthetic oligonucleotide
gugagcacgccgccuccgg

SEQ ID NO: 2332659 - RNA, 19 nt, Artificial Sequence
  Description of Artificial Sequence: Synthetic oligonucleotide
cuuggcacacgccggguga

SEQ ID NO: 2332660 - RNA, 19 nt, Artificial Sequence
  Description of Artificial Sequence: Synthetic oligonucleotide
ugagcacgccgccuccggu

SEQ ID NO: 2332661 - RNA, 19 nt, Artificial Sequence
  Description of Artificial Sequence: Synthetic oligonucleotide
uugcgcaauguggauacuu

SEQ ID NO: 2332662 - RNA, 19 nt, Artificial Sequence
  Description of Artificial Sequence: Synthetic oligonucleotide
caugaggguuguccugaug

SEQ ID NO: 2332663 - RNA, 19 nt, Artificial Sequence
  Description of Artificial Sequence: Synthetic oligonucleotide
uuggcacacgccgggugag

SEQ ID NO: 2332664 - RNA, 19 nt, Artificial Sequence
  Description of Artificial Sequence: Synthetic oligonucleotide
ccuugagccaaguguugcc

SEQ ID NO: 2332665 - RNA, 19 nt, Artificial Sequence
  Description of Artificial Sequence: Synthetic oligonucleotide
uccuugcgcaauguggaua

SEQ ID NO: 2332666 - RNA, 19 nt, Artificial Sequence
  Description of Artificial Sequence: Synthetic oligonucleotide
acacuacacuccccuugug

SEQ ID NO: 2332667 - RNA, 19 nt, Artificial Sequence
  Description of Artificial Sequence: Synthetic oligonucleotide
ugggaacgauggucugaag

SEQ ID NO: 2332668 - RNA, 19 nt, Artificial Sequence
  Description of Artificial Sequence: Synthetic oligonucleotide
ugacauccuugcgcaaugu

SEQ ID NO: 2332669 - RNA, 19 nt, Artificial Sequence
  Description of Artificial Sequence: Synthetic oligonucleotide
ggacucuugcugauaauca

SEQ ID NO: 2332670 - RNA, 19 nt, Artificial Sequence
  Description of Artificial Sequence: Synthetic oligonucleotide
cagagaccugguccucucc

SEQ ID NO: 2332671 - RNA, 19 nt, Artificial Sequence
  Description of Artificial Sequence: Synthetic oligonucleotide
ggaaccgaugcuauuagcu

SEQ ID NO: 2332672 - RNA, 19 nt, Artificial Sequence
  Description of Artificial Sequence: Synthetic oligonucleotide
cccaaugguuagagaaagg

SEQ ID NO: 2332673 - RNA, 19 nt, Artificial Sequence
  Description of Artificial Sequence: Synthetic oligonucleotide
gcugauaaucacuguccuc

SEQ ID NO: 2332674 - RNA, 19 nt, Artificial Sequence
  Description of Artificial Sequence: Synthetic oligonucleotide
aggugggaacgauggucug

SEQ ID NO: 2332675 - RNA, 19 nt, Artificial Sequence
  Description of Artificial Sequence: Synthetic oligonucleotide
guggauacuucuuccuccu

SEQ ID NO: 2332676 - RNA, 19 nt, Artificial Sequence
  Description of Artificial Sequence: Synthetic oligonucleotide
caggugggaacgauggucu

SEQ ID NO: 2332677 - RNA, 19 nt, Artificial Sequence
  Description of Artificial Sequence: Synthetic oligonucleotide
ucuucagggcugugacauc

SEQ ID NO: 2332678 - RNA, 19 nt, Artificial Sequence
  Description of Artificial Sequence: Synthetic oligonucleotide
cuguaggcauacucgaccu

SEQ ID NO: 2332679 - RNA, 19 nt, Artificial Sequence
  Description of Artificial Sequence: Synthetic oligonucleotide
uuguccugaugugccuuca

SEQ ID NO: 2332680 - RNA, 19 nt, Artificial Sequence
  Description of Artificial Sequence: Synthetic oligonucleotide
ucgcagagucuguggcuca

SEQ ID NO: 2332681 - RNA, 19 nt, Artificial Sequence
  Description of Artificial Sequence: Synthetic oligonucleotide
gccaaguguugcccaagag

SEQ ID NO: 2332682 - RNA, 19 nt, Artificial Sequence
  Description of Artificial Sequence: Synthetic oligonucleotide
uaggacucuugcugauaau

SEQ ID NO: 2332683 - RNA, 19 nt, Artificial Sequence
  Description of Artificial Sequence: Synthetic oligonucleotide
uggggacggaagaggcacu

SEQ ID NO: 2332684 - RNA, 19 nt, Artificial Sequence
  Description of Artificial Sequence: Synthetic oligonucleotide
gcucuggacacuacacucc

SEQ ID NO: 2332685 - RNA, 19 nt, Artificial Sequence
  Description of Artificial Sequence: Synthetic oligonucleotide
gagcacgccgccuccgguc

SEQ ID NO: 2332686 - RNA, 19 nt, Artificial Sequence
  Description of Artificial Sequence: Synthetic oligonucleotide
gaaacacguugaacuucac

SEQ ID NO: 2332687 - RNA, 19 nt, Artificial Sequence
  Description of Artificial Sequence: Synthetic oligonucleotide
acuagccaaaauacccaaa

SEQ ID NO: 2332688 - RNA, 19 nt, Artificial Sequence
  Description of Artificial Sequence: Synthetic oligonucleotide
gguggaaccgaugcuauua

SEQ ID NO: 2332689 - RNA, 19 nt, Artificial Sequence
  Description of Artificial Sequence: Synthetic oligonucleotide
gcccaagagaccaagcaga

SEQ ID NO: 2332690 - RNA, 19 nt, Artificial Sequence
  Description of Artificial Sequence: Synthetic oligonucleotide
acuggaauagggaguccau

SEQ ID NO: 2332691 - RNA, 19 nt, Artificial Sequence
  Description of Artificial Sequence: Synthetic oligonucleotide
uccccuuguggcugcuuuc

SEQ ID NO: 2332692 - RNA, 19 nt, Artificial Sequence
  Description of Artificial Sequence: Synthetic oligonucleotide
aggacgccaaucacaauuu

SEQ ID NO: 2332693 - RNA, 19 nt, Artificial Sequence
  Description of Artificial Sequence: Synthetic oligonucleotide
cugaagacacaagcugaca

SEQ ID NO: 2332694 - RNA, 19 nt, Artificial Sequence
  Description of Artificial Sequence: Synthetic oligonucleotide
cuauuagcucuggacacua

SEQ ID NO: 2332695 - RNA, 19 nt, Artificial Sequence
  Description of Artificial Sequence: Synthetic oligonucleotide
uggacacuacacuccccuu

SEQ ID NO: 2332696 - RNA, 19 nt, Artificial Sequence
  Description of Artificial Sequence: Synthetic oligonucleotide
gugggaacgauggucugaa

SEQ ID NO: 2332697 - RNA, 19 nt, Artificial Sequence
  Description of Artificial Sequence: Synthetic oligonucleotide
ggagcccucaguagaguug

SEQ ID NO: 2332698 - RNA, 19 nt, Artificial Sequence
  Description of Artificial Sequence: Synthetic oligonucleotide
cugaugugccuucacaauu

SEQ ID NO: 2332699 - RNA, 19 nt, Artificial Sequence
  Description of Artificial Sequence: Synthetic oligonucleotide
ggguccaggcuguugucac

SEQ ID NO: 2332700 - RNA, 19 nt, Artificial Sequence
  Description of Artificial Sequence: Synthetic oligonucleotide
cucugcagccccggggccc

SEQ ID NO: 2332701 - RNA, 19 nt, Artificial Sequence
  Description of Artificial Sequence: Synthetic oligonucleotide
ugauagcaucccuccucuu

SEQ ID NO: 2332702 - RNA, 19 nt, Artificial Sequence
  Description of Artificial Sequence: Synthetic oligonucleotide
ugguggaaccgaugcuauu

SEQ ID NO: 2332703 - RNA, 19 nt, Artificial Sequence
  Description of Artificial Sequence: Synthetic oligonucleotide
agucuguggcucacagugu

SEQ ID NO: 2332704 - RNA, 19 nt, Artificial Sequence
  Description of Artificial Sequence: Synthetic oligonucleotide
ccaaaccuugagccaagug

SEQ ID NO: 2332705 - RNA, 19 nt, Artificial Sequence
  Description of Artificial Sequence: Synthetic oligonucleotide
guuggggacggaagaggca

SEQ ID NO: 2332706 - RNA, 19 nt, Artificial Sequence
  Description of Artificial Sequence: Synthetic oligonucleotide
gaagcuggccacagagaua

SEQ ID NO: 2332707 - RNA, 19 nt, Artificial Sequence
  Description of Artificial Sequence: Synthetic oligonucleotide
cucucuugauagcaucccu

SEQ ID NO: 2332708 - RNA, 19 nt, Artificial Sequence
  Description of Artificial Sequence: Synthetic oligonucleotide
cgaacaauuuccaaauuau

SEQ ID NO: 2332709 - RNA, 19 nt, Artificial Sequence
  Description of Artificial Sequence: Synthetic oligonucleotide
gccuugaaacacguugaac

SEQ ID NO: 2332710 - RNA, 19 nt, Artificial Sequence
  Description of Artificial Sequence: Synthetic oligonucleotide
gggcugugacauccuugcg

SEQ ID NO: 2332711 - RNA, 19 nt, Artificial Sequence
  Description of Artificial Sequence: Synthetic oligonucleotide
cuacacuccccuuguggcu

SEQ ID NO: 2332712 - RNA, 19 nt, Artificial Sequence
  Description of Artificial Sequence: Synthetic oligonucleotide
ggaauagggaguccaugau

SEQ ID NO: 2332713 - RNA, 19 nt, Artificial Sequence
  Description of Artificial Sequence: Synthetic oligonucleotide
ggcacacgccgggugagag

SEQ ID NO: 2332714 - RNA, 19 nt, Artificial Sequence
  Description of Artificial Sequence: Synthetic oligonucleotide
ggacggaagaggcacuggu

SEQ ID NO: 2332715 - RNA, 19 nt, Artificial Sequence
  Description of Artificial Sequence: Synthetic oligonucleotide
gggacggaagaggcacugg

SEQ ID NO: 2332716 - RNA, 19 nt, Artificial Sequence
  Description of Artificial Sequence: Synthetic oligonucleotide
ggugggaacgauggucuga

SEQ ID NO: 2332717 - RNA, 19 nt, Artificial Sequence
  Description of Artificial Sequence: Synthetic oligonucleotide
ggacgccaaucacaauuuc

SEQ ID NO: 2332718 - RNA, 19 nt, Artificial Sequence
  Description of Artificial Sequence: Synthetic oligonucleotide
cucguaguucacuuucauu

SEQ ID NO: 2332719 - RNA, 19 nt, Artificial Sequence
  Description of Artificial Sequence: Synthetic oligonucleotide
cacacgccgggugagagcu

SEQ ID NO: 2332720 - RNA, 19 nt, Artificial Sequence
  Description of Artificial Sequence: Synthetic oligonucleotide
guagaacgauggcuuugcu

SEQ ID NO: 2332721 - RNA, 19 nt, Artificial Sequence
  Description of Artificial Sequence: Synthetic oligonucleotide
cuccggucuuuguaggacu

SEQ ID NO: 2332722 - RNA, 19 nt, Artificial Sequence
  Description of Artificial Sequence: Synthetic oligonucleotide
cgaccuuggcacacgccgg

SEQ ID NO: 2332723 - RNA, 19 nt, Artificial Sequence
  Description of Artificial Sequence: Synthetic oligonucleotide
ggggacggaagaggcacug

SEQ ID NO: 2332724 - RNA, 19 nt, Artificial Sequence
  Description of Artificial Sequence: Synthetic oligonucleotide
cugguggaaccgaugcuau

SEQ ID NO: 2332725 - RNA, 19 nt, Artificial Sequence
  Description of Artificial Sequence: Synthetic oligonucleotide
cucuccaggagcccucagu

SEQ ID NO: 2332726 - RNA, 19 nt, Artificial Sequence
  Description of Artificial Sequence: Synthetic oligonucleotide
uggcacacgccgggugaga

SEQ ID NO: 2332727 - RNA, 19 nt, Artificial Sequence
  Description of Artificial Sequence: Synthetic oligonucleotide
ccuuggcacacgccgggug

SEQ ID NO: 2332728 - RNA, 19 nt, Artificial Sequence
  Description of Artificial Sequence: Synthetic oligonucleotide
gcacacgccgggugagagc

SEQ ID NO: 2332729 - RNA, 19 nt, Artificial Sequence
  Description of Artificial Sequence: Synthetic oligonucleotide
gcgcaauguggauacuucu

SEQ ID NO: 2332730 - RNA, 19 nt, Artificial Sequence
  Description of Artificial Sequence: Synthetic oligonucleotide
gcuauuagcucuggacacu

SEQ ID NO: 2332731 - RNA, 19 nt, Artificial Sequence
  Description of Artificial Sequence: Synthetic oligonucleotide
ggccacagagauagaggca

SEQ ID NO: 2332732 - RNA, 19 nt, Artificial Sequence
  Description of Artificial Sequence: Synthetic oligonucleotide
guuccucaauccagcugaa

SEQ ID NO: 2332733 - RNA, 19 nt, Artificial Sequence
  Description of Artificial Sequence: Synthetic oligonucleotide
cacugguggaaccgaugcu

SEQ ID NO: 2332734 - RNA, 19 nt, Artificial Sequence
  Description of Artificial Sequence: Synthetic oligonucleotide
gagugugagcacgccgccu

SEQ ID NO: 2332735 - RNA, 19 nt, Artificial Sequence
  Description of Artificial Sequence: Synthetic oligonucleotide
cugugacauccuugcgcaa

SEQ ID NO: 2332736 - RNA, 19 nt, Artificial Sequence
  Description of Artificial Sequence: Synthetic oligonucleotide
ccggucuuuguaggacucc

SEQ ID NO: 2332737 - RNA, 19 nt, Artificial Sequence
  Description of Artificial Sequence: Synthetic oligonucleotide
ggucaucauagccucucuu

SEQ ID NO: 2332738 - RNA, 19 nt, Artificial Sequence
  Description of Artificial Sequence: Synthetic oligonucleotide
gccuccggucuuuguagga

SEQ ID NO: 2332739 - RNA, 19 nt, Artificial Sequence
  Description of Artificial Sequence: Synthetic oligonucleotide
ccgaugcuauuagcucugg

SEQ ID NO: 2332740 - RNA, 19 nt, Artificial Sequence
  Description of Artificial Sequence: Synthetic oligonucleotide
cccucaguagaguugguuu

SEQ ID NO: 2332741 - RNA, 19 nt, Artificial Sequence
  Description of Artificial Sequence: Synthetic oligonucleotide
cgccuccggucuuuguagg

SEQ ID NO: 2332742 - RNA, 19 nt, Artificial Sequence
  Description of Artificial Sequence: Synthetic oligonucleotide
gccgccuccggucuuugua

SEQ ID NO: 2332743 - RNA, 19 nt, Artificial Sequence
  Description of Artificial Sequence: Synthetic oligonucleotide
ccugaugugccuucacaau

SEQ ID NO: 2332744 - RNA, 19 nt, Artificial Sequence
  Description of Artificial Sequence: Synthetic oligonucleotide
ggucagagaccugguccuc

SEQ ID NO: 2332745 - RNA, 19 nt, Artificial Sequence
  Description of Artificial Sequence: Synthetic oligonucleotide
ccucaguagaguugguuuu

SEQ ID NO: 2332746 - RNA, 19 nt, Artificial Sequence
  Description of Artificial Sequence: Synthetic oligonucleotide
cuccccuuguggcugcuuu

SEQ ID NO: 2332747 - RNA, 19 nt, Artificial Sequence
  Description of Artificial Sequence: Synthetic oligonucleotide
ggcgaacaauuuccaaauu

SEQ ID NO: 2332748 - RNA, 19 nt, Artificial Sequence
  Description of Artificial Sequence: Synthetic oligonucleotide
ggguuguccugaugugccu

SEQ ID NO: 2332749 - RNA, 19 nt, Artificial Sequence
  Description of Artificial Sequence: Synthetic oligonucleotide
cuccuucaugaggguuguc

SEQ ID NO: 2332750 - RNA, 19 nt, Artificial Sequence
  Description of Artificial Sequence: Synthetic oligonucleotide
cacgccgggugagagcugu

SEQ ID NO: 2332751 - RNA, 19 nt, Artificial Sequence
  Description of Artificial Sequence: Synthetic oligonucleotide
acgccgggugagagcuguc

SEQ ID NO: 2332752 - RNA, 19 nt, Artificial Sequence
  Description of Artificial Sequence: Synthetic oligonucleotide
gcucacaguguuccucaau

SEQ ID NO: 2332753 - RNA, 19 nt, Artificial Sequence
  Description of Artificial Sequence: Synthetic oligonucleotide
gguuguccugaugugccuu

SEQ ID NO: 2332754 - RNA, 19 nt, Artificial Sequence
  Description of Artificial Sequence: Synthetic oligonucleotide
gcaucccuccucuucuguu

SEQ ID NO: 2332755 - RNA, 19 nt, Artificial Sequence
  Description of Artificial Sequence: Synthetic oligonucleotide
cgaugcuauuagcucugga

SEQ ID NO: 2332756 - RNA, 19 nt, Artificial Sequence
  Description of Artificial Sequence: Synthetic oligonucleotide
acacgccgggugagagcug

SEQ ID NO: 2332757 - RNA, 19 nt, Artificial Sequence
  Description of Artificial Sequence: Synthetic oligonucleotide
gggagccaauggagaaguc

SEQ ID NO: 2332758 - RNA, 19 nt, Artificial Sequence
  Description of Artificial Sequence: Synthetic oligonucleotide
cgcaauguggauacuucuu

SEQ ID NO: 2332759 - RNA, 19 nt, Artificial Sequence
  Description of Artificial Sequence: Synthetic oligonucleotide
cuugcgcaauguggauacu

SEQ ID NO: 2332760 - RNA, 19 nt, Artificial Sequence
  Description of Artificial Sequence: Synthetic oligonucleotide
ggaggacgccaaucacaau

SEQ ID NO: 2332761 - RNA, 19 nt, Artificial Sequence
  Description of Artificial Sequence: Synthetic oligonucleotide
gccgggugagagcugucuu

SEQ ID NO: 2332762 - RNA, 19 nt, Artificial Sequence
  Description of Artificial Sequence: Synthetic oligonucleotide
gcccucaguagaguugguu

SEQ ID NO: 2332763 - RNA, 19 nt, Artificial Sequence
  Description of Artificial Sequence: Synthetic oligonucleotide
cccuuguggcugcuuucua

SEQ ID NO: 2332764 - RNA, 19 nt, Artificial Sequence
  Description of Artificial Sequence: Synthetic oligonucleotide
cccaaaccuugagccaagu

SEQ ID NO: 2332765 - RNA, 19 nt, Artificial Sequence
  Description of Artificial Sequence: Synthetic oligonucleotide
cacgccgccuccggucuuu

SEQ ID NO: 2332766 - RNA, 19 nt, Artificial Sequence
  Description of Artificial Sequence: Synthetic oligonucleotide
cgccgggugagagcugucu

SEQ ID NO: 2332767 - RNA, 19 nt, Artificial Sequence
  Description of Artificial Sequence: Synthetic oligonucleotide
gcccaggguccaggcuguu

SEQ ID NO: 2332768 - RNA, 19 nt, Artificial Sequence
  Description of Artificial Sequence: Synthetic oligonucleotide
  modified_base (5)..(5): a, c, u, g, unknown or other
ucuanaacccauaagaagg

SEQ ID NO: 2332769 - RNA, 19 nt, Artificial Sequence
  Description of Artificial Sequence: Synthetic oligonucleotide
  modified_base (8)..(8): a, c, u, g, unknown or other
uuuucuanaacccauaaga

SEQ ID NO: 2332770 - RNA, 19 nt, Artificial Sequence
  Description of Artificial Sequence: Synthetic oligonucleotide
cuuaauuugaaguagguag

SEQ ID NO: 2332771 - RNA, 19 nt, Artificial Sequence
  Description of Artificial Sequence: Synthetic oligonucleotide
aaugauuacagcauuaagg

SEQ ID NO: 2332772 - RNA, 19 nt, Artificial Sequence
  Description of Artificial Sequence: Synthetic oligonucleotide
uuaacuaaaauccaaagau

SEQ ID NO: 2332773 - RNA, 19 nt, Artificial Sequence
  Description of Artificial Sequence: Synthetic oligonucleotide
ugguauacaguuuagaugc

SEQ ID NO: 2332774 - RNA, 19 nt, Artificial Sequence
  Description of Artificial Sequence: Synthetic oligonucleotide
gaauauaggacacaaacac

SEQ ID NO: 2332775 - RNA, 19 nt, Artificial Sequence
  Description of Artificial Sequence: Synthetic oligonucleotide
aauauggaaugauuacagc

SEQ ID NO: 2332776 - RNA, 19 nt, Artificial Sequence
  Description of Artificial Sequence: Synthetic oligonucleotide
auaagaaggauuguggugc

SEQ ID NO: 2332777 - RNA, 19 nt, Artificial Sequence
  Description of Artificial Sequence: Synthetic oligonucleotide
uuuggugacauacugguag

SEQ ID NO: 2332778 - RNA, 19 nt, Artificial Sequence
  Description of Artificial Sequence: Synthetic oligonucleotide
cauuucugaaauaugaugc

SEQ ID NO: 2332779 - RNA, 19 nt, Artificial Sequence
  Description of Artificial Sequence: Synthetic oligonucleotide
aaggacaggaaacacuggc

SEQ ID NO: 2332780 - RNA, 19 nt, Artificial Sequence
  Description of Artificial Sequence: Synthetic oligonucleotide
gauauuuucaggaaacagg

SEQ ID NO: 2332781 - RNA, 19 nt, Artificial Sequence
  Description of Artificial Sequence: Synthetic oligonucleotide
aacuaaaauccaaagauag

SEQ ID NO: 2332782 - RNA, 19 nt, Artificial Sequence
  Description of Artificial Sequence: Synthetic oligonucleotide
gagaauauaggacacaaac

SEQ ID NO: 2332783 - RNA, 19 nt, Artificial Sequence
  Description of Artificial Sequence: Synthetic oligonucleotide
ucaacugugacaaugguaa

SEQ ID NO: 2332784 - RNA, 19 nt, Artificial Sequence
  Description of Artificial Sequence: Synthetic oligonucleotide
ugauuaaaccuuuauaugu

SEQ ID NO: 2332785 - RNA, 19 nt, Artificial Sequence
  Description of Artificial Sequence: Synthetic oligonucleotide
cuauuaaagccaauuaagg

SEQ ID NO: 2332786 - RNA, 19 nt, Artificial Sequence
  Description of Artificial Sequence: Synthetic oligonucleotide
auuugaaguagguagaucu

SEQ ID NO: 2332787 - RNA, 19 nt, Artificial Sequence
  Description of Artificial Sequence: Synthetic oligonucleotide
uauuaaagccaauuaaggc

SEQ ID NO: 2332788 - RNA, 19 nt, Artificial Sequence
  Description of Artificial Sequence: Synthetic oligonucleotide
aaaccuuuauauguaaagg

SEQ ID NO: 2332789 - RNA, 19 nt, Artificial Sequence
  Description of Artificial Sequence: Synthetic oligonucleotide
auuaaggauauuuucagga

SEQ ID NO: 2332790 - RNA, 19 nt, Artificial Sequence
  Description of Artificial Sequence: Synthetic oligonucleotide
uauguaaaggagcaaauaa

SEQ ID NO: 2332791 - RNA, 19 nt, Artificial Sequence
  Description of Artificial Sequence: Synthetic oligonucleotide
uuaaaugaaggacaggaaa

SEQ ID NO: 2332792 - RNA, 19 nt, Artificial Sequence
  Description of Artificial Sequence: Synthetic oligonucleotide
acuagcacuagauucuagc

SEQ ID NO: 2332793 - RNA, 19 nt, Artificial Sequence
  Description of Artificial Sequence: Synthetic oligonucleotide
ucugcaaacacaucagcgg

SEQ ID NO: 2332794 - RNA, 19 nt, Artificial Sequence
  Description of Artificial Sequence: Synthetic oligonucleotide
  modified_base (6)..(6): a, c, u, g, unknown or other
uucuanaacccauaagaag

SEQ ID NO: 2332795 - RNA, 19 nt, Artificial Sequence
  Description of Artificial Sequence: Synthetic oligonucleotide
uguaaaggagcaaauaauc

SEQ ID NO: 2332796 - RNA, 19 nt, Artificial Sequence
  Description of Artificial Sequence: Synthetic oligonucleotide
augauuacagcauuaagga

SEQ ID NO: 2332797 - RNA, 19 nt, Artificial Sequence
  Description of Artificial Sequence: Synthetic oligonucleotide
aaccuuuauauguaaagga

SEQ ID NO: 2332798 - RNA, 19 nt, Artificial Sequence
  Description of Artificial Sequence: Synthetic oligonucleotide
ugaaauaugaugcuuggua

SEQ ID NO: 2332799 - RNA, 19 nt, Artificial Sequence
  Description of Artificial Sequence: Synthetic oligonucleotide
aauccaaagauagaggacu

SEQ ID NO: 2332800 - RNA, 19 nt, Artificial Sequence
  Description of Artificial Sequence: Synthetic oligonucleotide
uaaaggagcaaauaaucca

SEQ ID NO: 2332801 - RNA, 19 nt, Artificial Sequence
  Description of Artificial Sequence: Synthetic oligonucleotide
aguagguagaucuuccuuc

SEQ ID NO: 2332802 - RNA, 19 nt, Artificial Sequence
  Description of Artificial Sequence: Synthetic oligonucleotide
agcacuagauucuagcuuc

SEQ ID NO: 2332803 - RNA, 19 nt, Artificial Sequence
  Description of Artificial Sequence: Synthetic oligonucleotide
aaggauauuuucaggaaac

SEQ ID NO: 2332804 - RNA, 19 nt, Artificial Sequence
  Description of Artificial Sequence: Synthetic oligonucleotide
uuaauuugaaguagguaga

SEQ ID NO: 2332805 - RNA, 19 nt, Artificial Sequence
  Description of Artificial Sequence: Synthetic oligonucleotide
caacauugaugaaauaugg

SEQ ID NO: 2332806 - RNA, 19 nt, Artificial Sequence
  Description of Artificial Sequence: Synthetic oligonucleotide
uagaauacagaccccauac

SEQ ID NO: 2332807 - RNA, 19 nt, Artificial Sequence
  Description of Artificial Sequence: Synthetic oligonucleotide
  modified_base (7)..(7): a, c, u, g, unknown or other
uuucuanaacccauaagaa

SEQ ID NO: 2332808 - RNA, 19 nt, Artificial Sequence
  Description of Artificial Sequence: Synthetic oligonucleotide
ugaaauauggaaugauuac

SEQ ID NO: 2332809 - RNA, 19 nt, Artificial Sequence
  Description of Artificial Sequence: Synthetic oligonucleotide
uaugaugcuugguauacag

SEQ ID NO: 2332810 - RNA, 19 nt, Artificial Sequence
  Description of Artificial Sequence: Synthetic oligonucleotide
uuugcuuaauuugaaguag

SEQ ID NO: 2332811 - RNA, 19 nt, Artificial Sequence
  Description of Artificial Sequence: Synthetic oligonucleotide
ugugacaaugguaagacuu

SEQ ID NO: 2332812 - RNA, 19 nt, Artificial Sequence
  Description of Artificial Sequence: Synthetic oligonucleotide
uugguauacaguuuagaug

SEQ ID NO: 2332813 - RNA, 19 nt, Artificial Sequence
  Description of Artificial Sequence: Synthetic oligonucleotide
aaaggagcaaauaauccag

SEQ ID NO: 2332814 - RNA, 19 nt, Artificial Sequence
  Description of Artificial Sequence: Synthetic oligonucleotide
uuuuaaggaugguuugugg

SEQ ID NO: 2332815 - RNA, 19 nt, Artificial Sequence
  Description of Artificial Sequence: Synthetic oligonucleotide
acauuucugaaauaugaug

SEQ ID NO: 2332816 - RNA, 19 nt, Artificial Sequence
  Description of Artificial Sequence: Synthetic oligonucleotide
uuuaaggaugguuugugga

SEQ ID NO: 2332817 - RNA, 19 nt, Artificial Sequence
  Description of Artificial Sequence: Synthetic oligonucleotide
aaaacuauuaaagccaauu

SEQ ID NO: 2332818 - RNA, 19 nt, Artificial Sequence
  Description of Artificial Sequence: Synthetic oligonucleotide
uuuucaggaaacagguaag

SEQ ID NO: 2332819 - RNA, 19 nt, Artificial Sequence
  Description of Artificial Sequence: Synthetic oligonucleotide
gacauuaugaaacauuucu

SEQ ID NO: 2332820 - RNA, 19 nt, Artificial Sequence
  Description of Artificial Sequence: Synthetic oligonucleotide
uugcuuaauuugaaguagg

SEQ ID NO: 2332821 - RNA, 19 nt, Artificial Sequence
  Description of Artificial Sequence: Synthetic oligonucleotide
aguuuagaugcucaauguc

SEQ ID NO: 2332822 - RNA, 19 nt, Artificial Sequence
  Description of Artificial Sequence: Synthetic oligonucleotide
gcauguagaauacagaccc

SEQ ID NO: 2332823 - RNA, 19 nt, Artificial Sequence
  Description of Artificial Sequence: Synthetic oligonucleotide
gauauggaaguucagggga

SEQ ID NO: 2332824 - RNA, 19 nt, Artificial Sequence
  Description of Artificial Sequence: Synthetic oligonucleotide
aaacuauuaaagccaauua

SEQ ID NO: 2332825 - RNA, 19 nt, Artificial Sequence
  Description of Artificial Sequence: Synthetic oligonucleotide
cuuuauauguaaaggagca

SEQ ID NO: 2332826 - RNA, 19 nt, Artificial Sequence
  Description of Artificial Sequence: Synthetic oligonucleotide
ucaaucaacugugacaaug

SEQ ID NO: 2332827 - RNA, 19 nt, Artificial Sequence
  Description of Artificial Sequence: Synthetic oligonucleotide
ugagaagugcacuggauca

SEQ ID NO: 2332828 - RNA, 19 nt, Artificial Sequence
  Description of Artificial Sequence: Synthetic oligonucleotide
acugugacaaugguaagac

SEQ ID NO: 2332829 - RNA, 19 nt, Artificial Sequence
  Description of Artificial Sequence: Synthetic oligonucleotide
uggaauuaacuaaaaucca

SEQ ID NO: 2332830 - RNA, 19 nt, Artificial Sequence
  Description of Artificial Sequence: Synthetic oligonucleotide
auauaggacacaaacacug

SEQ ID NO: 2332831 - RNA, 19 nt, Artificial Sequence
  Description of Artificial Sequence: Synthetic oligonucleotide
aguuuggugacauacuggu

SEQ ID NO: 2332832 - RNA, 19 nt, Artificial Sequence
  Description of Artificial Sequence: Synthetic oligonucleotide
uuauauguaaaggagcaaa

SEQ ID NO: 2332833 - RNA, 19 nt, Artificial Sequence
  Description of Artificial Sequence: Synthetic oligonucleotide
gacacaaacacugagagcu

SEQ ID NO: 2332834 - RNA, 19 nt, Artificial Sequence
  Description of Artificial Sequence: Synthetic oligonucleotide
uuuugcuuaauuugaagua

SEQ ID NO: 2332835 - RNA, 19 nt, Artificial Sequence
  Description of Artificial Sequence: Synthetic oligonucleotide
ucauagcuuuuaaggaugg

SEQ ID NO: 2332836 - RNA, 19 nt, Artificial Sequence
  Description of Artificial Sequence: Synthetic oligonucleotide
gaaugauuacagcauuaag

SEQ ID NO: 2332837 - RNA, 19 nt, Artificial Sequence
  Description of Artificial Sequence: Synthetic oligonucleotide
cauacuauagacuccccug

SEQ ID NO: 2332838 - RNA, 19 nt, Artificial Sequence
  Description of Artificial Sequence: Synthetic oligonucleotide
cuacacuagcacuagauuc

SEQ ID NO: 2332839 - RNA, 19 nt, Artificial Sequence
  Description of Artificial Sequence: Synthetic oligonucleotide
ugcauguagaauacagacc

SEQ ID NO: 2332840 - RNA, 19 nt, Artificial Sequence
  Description of Artificial Sequence: Synthetic oligonucleotide
uucaacaacauugaugaaa

SEQ ID NO: 2332841 - RNA, 19 nt, Artificial Sequence
  Description of Artificial Sequence: Synthetic oligonucleotide
aggauuguggugcauguag

SEQ ID NO: 2332842 - RNA, 19 nt, Artificial Sequence
  Description of Artificial Sequence: Synthetic oligonucleotide
cauuaaggauauuuucagg

SEQ ID NO: 2332843 - RNA, 19 nt, Artificial Sequence
  Description of Artificial Sequence: Synthetic oligonucleotide
agcggaaaacuucucugcc

SEQ ID NO: 2332844 - RNA, 19 nt, Artificial Sequence
  Description of Artificial Sequence: Synthetic oligonucleotide
cauuaugaaacauuucuga

SEQ ID NO: 2332845 - RNA, 19 nt, Artificial Sequence
  Description of Artificial Sequence: Synthetic oligonucleotide
guucaagcaagcuucacac

SEQ ID NO: 2332846 - RNA, 19 nt, Artificial Sequence
  Description of Artificial Sequence: Synthetic oligonucleotide
uggaugaacuuuuccauug

SEQ ID NO: 2332847 - RNA, 19 nt, Artificial Sequence
  Description of Artificial Sequence: Synthetic oligonucleotide
ugauggucauucuugguug

SEQ ID NO: 2332848 - RNA, 19 nt, Artificial Sequence
  Description of Artificial Sequence: Synthetic oligonucleotide
agauuucuaccauucuuuc

SEQ ID NO: 2332849 - RNA, 19 nt, Artificial Sequence
  Description of Artificial Sequence: Synthetic oligonucleotide
acacaaagucauuuaaaug

SEQ ID NO: 2332850 - RNA, 19 nt, Artificial Sequence
  Description of Artificial Sequence: Synthetic oligonucleotide
uaacuaaaauccaaagaua

SEQ ID NO: 2332851 - RNA, 19 nt, Artificial Sequence
  Description of Artificial Sequence: Synthetic oligonucleotide
ggcuuuuccagccagaccc

SEQ ID NO: 2332852 - RNA, 19 nt, Artificial Sequence
  Description of Artificial Sequence: Synthetic oligonucleotide
gaaauauggaaugauuaca

SEQ ID NO: 2332853 - RNA, 19 nt, Artificial Sequence
  Description of Artificial Sequence: Synthetic oligonucleotide
cuagcagcagauuucuacc

SEQ ID NO: 2332854 - RNA, 19 nt, Artificial Sequence
  Description of Artificial Sequence: Synthetic oligonucleotide
uauauguaaaggagcaaau

SEQ ID NO: 2332855 - RNA, 19 nt, Artificial Sequence
  Description of Artificial Sequence: Synthetic oligonucleotide
gaaaacuucucugccaccc

SEQ ID NO: 2332856 - RNA, 19 nt, Artificial Sequence
  Description of Artificial Sequence: Synthetic oligonucleotide
guagguagaucuuccuucg

SEQ ID NO: 2332857 - RNA, 19 nt, Artificial Sequence
  Description of Artificial Sequence: Synthetic oligonucleotide
gaggacucaucugugaggg

SEQ ID NO: 2332858 - RNA, 19 nt, Artificial Sequence
  Description of Artificial Sequence: Synthetic oligonucleotide
guaaaggagcaaauaaucc

SEQ ID NO: 2332859 - RNA, 19 nt, Artificial Sequence
  Description of Artificial Sequence: Synthetic oligonucleotide
ugaugcuugguauacaguu

SEQ ID NO: 2332860 - RNA, 19 nt, Artificial Sequence
  Description of Artificial Sequence: Synthetic oligonucleotide
uuuccauuguacucugaag

SEQ ID NO: 2332861 - RNA, 19 nt, Artificial Sequence
  Description of Artificial Sequence: Synthetic oligonucleotide
uuucaggaaacagguaagg

SEQ ID NO: 2332862 - RNA, 19 nt, Artificial Sequence
  Description of Artificial Sequence: Synthetic oligonucleotide
gaccccauacuauagacuc

SEQ ID NO: 2332863 - RNA, 19 nt, Artificial Sequence
  Description of Artificial Sequence: Synthetic oligonucleotide
uuaaggauauuuucaggaa

SEQ ID NO: 2332864 - RNA, 19 nt, Artificial Sequence
  Description of Artificial Sequence: Synthetic oligonucleotide
uucacacaaagucauuuaa

SEQ ID NO: 2332865 - RNA, 19 nt, Artificial Sequence
  Description of Artificial Sequence: Synthetic oligonucleotide
uagaggacucaucugugag

SEQ ID NO: 2332866 - RNA, 19 nt, Artificial Sequence
  Description of Artificial Sequence: Synthetic oligonucleotide
cauaagaaggauuguggug

SEQ ID NO: 2332867 - RNA, 19 nt, Artificial Sequence
  Description of Artificial Sequence: Synthetic oligonucleotide
acaacauugaugaaauaug

SEQ ID NO: 2332868 - RNA, 19 nt, Artificial Sequence
  Description of Artificial Sequence: Synthetic oligonucleotide
uguacucugaagucaaauc

SEQ ID NO: 2332869 - RNA, 19 nt, Artificial Sequence
  Description of Artificial Sequence: Synthetic oligonucleotide
ucagcggaaaacuucucug

SEQ ID NO: 2332870 - RNA, 19 nt, Artificial Sequence
  Description of Artificial Sequence: Synthetic oligonucleotide
aauauaggacacaaacacu

SEQ ID NO: 2332871 - RNA, 19 nt, Artificial Sequence
  Description of Artificial Sequence: Synthetic oligonucleotide
ucauucuugguugucaacu

SEQ ID NO: 2332872 - RNA, 19 nt, Artificial Sequence
  Description of Artificial Sequence: Synthetic oligonucleotide
guacucugaagucaaauca

SEQ ID NO: 2332873 - RNA, 19 nt, Artificial Sequence
  Description of Artificial Sequence: Synthetic oligonucleotide
aaaaucuacacuagcacua

SEQ ID NO: 2332874 - RNA, 19 nt, Artificial Sequence
  Description of Artificial Sequence: Synthetic oligonucleotide
agagcuggucugcaaacac

SEQ ID NO: 2332875 - RNA, 19 nt, Artificial Sequence
  Description of Artificial Sequence: Synthetic oligonucleotide
uuaaaccuuuauauguaaa

SEQ ID NO: 2332876 - RNA, 19 nt, Artificial Sequence
  Description of Artificial Sequence: Synthetic oligonucleotide
accuuuauauguaaaggag

SEQ ID NO: 2332877 - RNA, 19 nt, Artificial Sequence
  Description of Artificial Sequence: Synthetic oligonucleotide
acacuggcaugcuaaacuc

SEQ ID NO: 2332878 - RNA, 19 nt, Artificial Sequence
  Description of Artificial Sequence: Synthetic oligonucleotide
acucaagucuacuuuaaaa

SEQ ID NO: 2332879 - RNA, 19 nt, Artificial Sequence
  Description of Artificial Sequence: Synthetic oligonucleotide
uuaaggaugguuuguggau

SEQ ID NO: 2332880 - RNA, 19 nt, Artificial Sequence
  Description of Artificial Sequence: Synthetic oligonucleotide
uauaggacacaaacacuga

SEQ ID NO: 2332881 - RNA, 19 nt, Artificial Sequence
  Description of Artificial Sequence: Synthetic oligonucleotide
uuguggugcauguagaaua

SEQ ID NO: 2332882 - RNA, 19 nt, Artificial Sequence
  Description of Artificial Sequence: Synthetic oligonucleotide
aagacucaagucuacuuua

SEQ ID NO: 2332883 - RNA, 19 nt, Artificial Sequence
  Description of Artificial Sequence: Synthetic oligonucleotide
aacucgggagagaauauag

SEQ ID NO: 2332884 - RNA, 19 nt, Artificial Sequence
  Description of Artificial Sequence: Synthetic oligonucleotide
aaucaacugugacaauggu

SEQ ID NO: 2332885 - RNA, 19 nt, Artificial Sequence
  Description of Artificial Sequence: Synthetic oligonucleotide
ucgggagagaauauaggac

SEQ ID NO: 2332886 - RNA, 19 nt, Artificial Sequence
  Description of Artificial Sequence: Synthetic oligonucleotide
uucguuuccauuguacucu

SEQ ID NO: 2332887 - RNA, 19 nt, Artificial Sequence
  Description of Artificial Sequence: Synthetic oligonucleotide
ucaaaucaaucaacuguga

SEQ ID NO: 2332888 - RNA, 19 nt, Artificial Sequence
  Description of Artificial Sequence: Synthetic oligonucleotide
agaggacucaucugugagg

SEQ ID NO: 2332889 - RNA, 19 nt, Artificial Sequence
  Description of Artificial Sequence: Synthetic oligonucleotide
uacucugaagucaaaucaa

SEQ ID NO: 2332890 - RNA, 19 nt, Artificial Sequence
  Description of Artificial Sequence: Synthetic oligonucleotide
ucugcuagcagcagauuuc

SEQ ID NO: 2332891 - RNA, 19 nt, Artificial Sequence
  Description of Artificial Sequence: Synthetic oligonucleotide
cacaaguuuggugacauac

SEQ ID NO: 2332892 - RNA, 19 nt, Artificial Sequence
  Description of Artificial Sequence: Synthetic oligonucleotide
agcauuaaggauauuuuca

SEQ ID NO: 2332893 - RNA, 19 nt, Artificial Sequence
  Description of Artificial Sequence: Synthetic oligonucleotide
uguggugcauguagaauac

SEQ ID NO: 2332894 - RNA, 19 nt, Artificial Sequence
  Description of Artificial Sequence: Synthetic oligonucleotide
ugcuuaauuugaaguaggu

SEQ ID NO: 2332895 - RNA, 19 nt, Artificial Sequence
  Description of Artificial Sequence: Synthetic oligonucleotide
uacagaccccauacuauag

SEQ ID NO: 2332896 - RNA, 19 nt, Artificial Sequence
  Description of Artificial Sequence: Synthetic oligonucleotide
gaauacagaccccauacua

SEQ ID NO: 2332897 - RNA, 19 nt, Artificial Sequence
  Description of Artificial Sequence: Synthetic oligonucleotide
auacuauagacuccccuga

SEQ ID NO: 2332898 - RNA, 19 nt, Artificial Sequence
  Description of Artificial Sequence: Synthetic oligonucleotide
gucugcaaacacaucagcg

SEQ ID NO: 2332899 - RNA, 19 nt, Artificial Sequence
  Description of Artificial Sequence: Synthetic oligonucleotide
aauacagaccccauacuau

SEQ ID NO: 2332900 - RNA, 19 nt, Artificial Sequence
  Description of Artificial Sequence: Synthetic oligonucleotide
ccuuuauauguaaaggagc

SEQ ID NO: 2332901 - RNA, 19 nt, Artificial Sequence
  Description of Artificial Sequence: Synthetic oligonucleotide
accacacgaaccugugacc

SEQ ID NO: 2332902 - RNA, 19 nt, Artificial Sequence
  Description of Artificial Sequence: Synthetic oligonucleotide
aaggaugguuuguggauga

SEQ ID NO: 2332903 - RNA, 19 nt, Artificial Sequence
  Description of Artificial Sequence: Synthetic oligonucleotide
aacugugacaaugguaaga

SEQ ID NO: 2332904 - RNA, 19 nt, Artificial Sequence
  Description of Artificial Sequence: Synthetic oligonucleotide
uggaugauuaaaccuuuau

SEQ ID NO: 2332905 - RNA, 19 nt, Artificial Sequence
  Description of Artificial Sequence: Synthetic oligonucleotide
aagccaauuaaggcacugg

SEQ ID NO: 2332906 - RNA, 19 nt, Artificial Sequence
  Description of Artificial Sequence: Synthetic oligonucleotide
ugacauacugguagagcug

SEQ ID NO: 2332907 - RNA, 19 nt, Artificial Sequence
  Description of Artificial Sequence: Synthetic oligonucleotide
gaggguucaagcaagcuuc

SEQ ID NO: 2332908 - RNA, 19 nt, Artificial Sequence
  Description of Artificial Sequence: Synthetic oligonucleotide
cuaccauucuuucaacaac

SEQ ID NO: 2332909 - RNA, 19 nt, Artificial Sequence
  Description of Artificial Sequence: Synthetic oligonucleotide
agcuuuuaaggaugguuug

SEQ ID NO: 2332910 - RNA, 19 nt, Artificial Sequence
  Description of Artificial Sequence: Synthetic oligonucleotide
auacugguagagcuggucu

SEQ ID NO: 2332911 - RNA, 19 nt, Artificial Sequence
  Description of Artificial Sequence: Synthetic oligonucleotide
aauguccccucugaugguc

SEQ ID NO: 2332912 - RNA, 19 nt, Artificial Sequence
  Description of Artificial Sequence: Synthetic oligonucleotide
caagcuucacacaaaguca

SEQ ID NO: 2332913 - RNA, 19 nt, Artificial Sequence
  Description of Artificial Sequence: Synthetic oligonucleotide
caugcuaaacucgggagag

SEQ ID NO: 2332914 - RNA, 19 nt, Artificial Sequence
  Description of Artificial Sequence: Synthetic oligonucleotide
acauuaugaaacauuucug

SEQ ID NO: 2332915 - RNA, 19 nt, Artificial Sequence
  Description of Artificial Sequence: Synthetic oligonucleotide
ugacuacacaaguuuggug

SEQ ID NO: 2332916 - RNA, 19 nt, Artificial Sequence
  Description of Artificial Sequence: Synthetic oligonucleotide
  modified_base (4)..(4): a, c, u, g, unknown or other
cuanaacccauaagaagga

SEQ ID NO: 2332917 - RNA, 19 nt, Artificial Sequence
  Description of Artificial Sequence: Synthetic oligonucleotide
uugaugaaauauggaauga

SEQ ID NO: 2332918 - RNA, 19 nt, Artificial Sequence
  Description of Artificial Sequence: Synthetic oligonucleotide
gaaauaugaugcuugguau

SEQ ID NO: 2332919 - RNA, 19 nt, Artificial Sequence
  Description of Artificial Sequence: Synthetic oligonucleotide
augaaauauggaaugauua

SEQ ID NO: 2332920 - RNA, 19 nt, Artificial Sequence
  Description of Artificial Sequence: Synthetic oligonucleotide
caauuaaggcacuggauga

SEQ ID NO: 2332921 - RNA, 19 nt, Artificial Sequence
  Description of Artificial Sequence: Synthetic oligonucleotide
ccaauuaaggcacuggaug

SEQ ID NO: 2332922 - RNA, 19 nt, Artificial Sequence
  Description of Artificial Sequence: Synthetic oligonucleotide
gauuucuaccauucuuuca

SEQ ID NO: 2332923 - RNA, 19 nt, Artificial Sequence
  Description of Artificial Sequence: Synthetic oligonucleotide
uuaaggcacuggaugauua

SEQ ID NO: 2332924 - RNA, 19 nt, Artificial Sequence
  Description of Artificial Sequence: Synthetic oligonucleotide
ugguaagacuuaaaacuau

SEQ ID NO: 2332925 - RNA, 19 nt, Artificial Sequence
  Description of Artificial Sequence: Synthetic oligonucleotide
cagcauuaaggauauuuuc

SEQ ID NO: 2332926 - RNA, 19 nt, Artificial Sequence
  Description of Artificial Sequence: Synthetic oligonucleotide
uucugagaagugcacugga

SEQ ID NO: 2332927 - RNA, 19 nt, Artificial Sequence
  Description of Artificial Sequence: Synthetic oligonucleotide
agccaauuaaggcacugga

SEQ ID NO: 2332928 - RNA, 19 nt, Artificial Sequence
  Description of Artificial Sequence: Synthetic oligonucleotide
aucagcggaaaacuucucu

SEQ ID NO: 2332929 - RNA, 19 nt, Artificial Sequence
  Description of Artificial Sequence: Synthetic oligonucleotide
cuucguuuccauuguacuc

SEQ ID NO: 2332930 - RNA, 19 nt, Artificial Sequence
  Description of Artificial Sequence: Synthetic oligonucleotide
ucaggcucaccacacgaac

SEQ ID NO: 2332931 - RNA, 19 nt, Artificial Sequence
  Description of Artificial Sequence: Synthetic oligonucleotide
aaguucaggggaaguagag

SEQ ID NO: 2332932 - RNA, 19 nt, Artificial Sequence
  Description of Artificial Sequence: Synthetic oligonucleotide
auugcuucugagaagugca

SEQ ID NO: 2332933 - RNA, 19 nt, Artificial Sequence
  Description of Artificial Sequence: Synthetic oligonucleotide
cccauaagaaggauugugg

SEQ ID NO: 2332934 - RNA, 19 nt, Artificial Sequence
  Description of Artificial Sequence: Synthetic oligonucleotide
acuauagacuccccugacu

SEQ ID NO: 2332935 - RNA, 19 nt, Artificial Sequence
  Description of Artificial Sequence: Synthetic oligonucleotide
  modified_base (2)..(2): a, c, u, g, unknown or other
anaacccauaagaaggauu

SEQ ID NO: 2332936 - RNA, 19 nt, Artificial Sequence
  Description of Artificial Sequence: Synthetic oligonucleotide
ugauuacagcauuaaggau

SEQ ID NO: 2332937 - RNA, 19 nt, Artificial Sequence
  Description of Artificial Sequence: Synthetic oligonucleotide
gacaggaaacacuggcaug

SEQ ID NO: 2332938 - RNA, 19 nt, Artificial Sequence
  Description of Artificial Sequence: Synthetic oligonucleotide
caccacacgaaccugugac

SEQ ID NO: 2332939 - RNA, 19 nt, Artificial Sequence
  Description of Artificial Sequence: Synthetic oligonucleotide
cugagaagugcacuggauc

SEQ ID NO: 2332940 - RNA, 19 nt, Artificial Sequence
  Description of Artificial Sequence: Synthetic oligonucleotide
uguagaauacagaccccau

SEQ ID NO: 2332941 - RNA, 19 nt, Artificial Sequence
  Description of Artificial Sequence: Synthetic oligonucleotide
aaucuacacuagcacuaga

SEQ ID NO: 2332942 - RNA, 19 nt, Artificial Sequence
  Description of Artificial Sequence: Synthetic oligonucleotide
ucaagacucaagucuacuu

SEQ ID NO: 2332943 - RNA, 19 nt, Artificial Sequence
  Description of Artificial Sequence: Synthetic oligonucleotide
ggauauuuucaggaaacag

SEQ ID NO: 2332944 - RNA, 19 nt, Artificial Sequence
  Description of Artificial Sequence: Synthetic oligonucleotide
cucgggagagaauauagga

SEQ ID NO: 2332945 - RNA, 19 nt, Artificial Sequence
  Description of Artificial Sequence: Synthetic oligonucleotide
gaagucaaaucaaucaacu

SEQ ID NO: 2332946 - RNA, 19 nt, Artificial Sequence
  Description of Artificial Sequence: Synthetic oligonucleotide
uuuauauguaaaggagcaa

SEQ ID NO: 2332947 - RNA, 19 nt, Artificial Sequence
  Description of Artificial Sequence: Synthetic oligonucleotide
ugcuugguauacaguuuag

SEQ ID NO: 2332948 - RNA, 19 nt, Artificial Sequence
  Description of Artificial Sequence: Synthetic oligonucleotide
agaggguucaagcaagcuu

SEQ ID NO: 2332949 - RNA, 19 nt, Artificial Sequence
  Description of Artificial Sequence: Synthetic oligonucleotide
auagcuuuuaaggaugguu

SEQ ID NO: 2332950 - RNA, 19 nt, Artificial Sequence
  Description of Artificial Sequence: Synthetic oligonucleotide
uacuauagacuccccugac

SEQ ID NO: 2332951 - RNA, 19 nt, Artificial Sequence
  Description of Artificial Sequence: Synthetic oligonucleotide
cagcggaaaacuucucugc

SEQ ID NO: 2332952 - RNA, 19 nt, Artificial Sequence
  Description of Artificial Sequence: Synthetic oligonucleotide
auagucugcuagcagcaga

SEQ ID NO: 2332953 - RNA, 19 nt, Artificial Sequence
  Description of Artificial Sequence: Synthetic oligonucleotide
gagagaauauaggacacaa

SEQ ID NO: 2332954 - RNA, 19 nt, Artificial Sequence
  Description of Artificial Sequence: Synthetic oligonucleotide
auguagaauacagacccca

SEQ ID NO: 2332955 - RNA, 19 nt, Artificial Sequence
  Description of Artificial Sequence: Synthetic oligonucleotide
cauuuaaaugaaggacagg

SEQ ID NO: 2332956 - RNA, 19 nt, Artificial Sequence
  Description of Artificial Sequence: Synthetic oligonucleotide
cauguagaauacagacccc

SEQ ID NO: 2332957 - RNA, 19 nt, Artificial Sequence
  Description of Artificial Sequence: Synthetic oligonucleotide
uggaucaggcucaccacac

SEQ ID NO: 2332958 - RNA, 19 nt, Artificial Sequence
  Description of Artificial Sequence: Synthetic oligonucleotide
uaauuugaaguagguagau

SEQ ID NO: 2332959 - RNA, 19 nt, Artificial Sequence
  Description of Artificial Sequence: Synthetic oligonucleotide
ggcacuggaugauuaaacc

SEQ ID NO: 2332960 - RNA, 19 nt, Artificial Sequence
  Description of Artificial Sequence: Synthetic oligonucleotide
uuccauugcuucugagaag

SEQ ID NO: 2332961 - RNA, 19 nt, Artificial Sequence
  Description of Artificial Sequence: Synthetic oligonucleotide
uucaggaaacagguaaggu

SEQ ID NO: 2332962 - RNA, 19 nt, Artificial Sequence
  Description of Artificial Sequence: Synthetic oligonucleotide
cagaccccauacuauagac

SEQ ID NO: 2332963 - RNA, 19 nt, Artificial Sequence
  Description of Artificial Sequence: Synthetic oligonucleotide
uagcacuagauucuagcuu

SEQ ID NO: 2332964 - RNA, 19 nt, Artificial Sequence
  Description of Artificial Sequence: Synthetic oligonucleotide
uauggaaguucaggggaag

SEQ ID NO: 2332965 - RNA, 19 nt, Artificial Sequence
  Description of Artificial Sequence: Synthetic oligonucleotide
auguaaaggagcaaauaau

SEQ ID NO: 2332966 - RNA, 19 nt, Artificial Sequence
  Description of Artificial Sequence: Synthetic oligonucleotide
uaaacucgggagagaauau

SEQ ID NO: 2332967 - RNA, 19 nt, Artificial Sequence
  Description of Artificial Sequence: Synthetic oligonucleotide
gguaaggugugguggacag

SEQ ID NO: 2332968 - RNA, 19 nt, Artificial Sequence
  Description of Artificial Sequence: Synthetic oligonucleotide
gcuagcagcagauuucuac

SEQ ID NO: 2332969 - RNA, 19 nt, Artificial Sequence
  Description of Artificial Sequence: Synthetic oligonucleotide
uaaaacuauuaaagccaau

SEQ ID NO: 2332970 - RNA, 19 nt, Artificial Sequence
  Description of Artificial Sequence: Synthetic oligonucleotide
cacaaacacugagagcugg

SEQ ID NO: 2332971 - RNA, 19 nt, Artificial Sequence
  Description of Artificial Sequence: Synthetic oligonucleotide
auacagaccccauacuaua

SEQ ID NO: 2332972 - RNA, 19 nt, Artificial Sequence
  Description of Artificial Sequence: Synthetic oligonucleotide
acccauaagaaggauugug

SEQ ID NO: 2332973 - RNA, 19 nt, Artificial Sequence
  Description of Artificial Sequence: Synthetic oligonucleotide
uuucuaccauucuuucaac

SEQ ID NO: 2332974 - RNA, 19 nt, Artificial Sequence
  Description of Artificial Sequence: Synthetic oligonucleotide
ugcaaacacaucagcggaa

SEQ ID NO: 2332975 - RNA, 19 nt, Artificial Sequence
  Description of Artificial Sequence: Synthetic oligonucleotide
uacacaaguuuggugacau

SEQ ID NO: 2332976 - RNA, 19 nt, Artificial Sequence
  Description of Artificial Sequence: Synthetic oligonucleotide
uucaagcaagcuucacaca

SEQ ID NO: 2332977 - RNA, 19 nt, Artificial Sequence
  Description of Artificial Sequence: Synthetic oligonucleotide
agugacauuaugaaacauu

SEQ ID NO: 2332978 - RNA, 19 nt, Artificial Sequence
  Description of Artificial Sequence: Synthetic oligonucleotide
augcuugguauacaguuua

SEQ ID NO: 2332979 - RNA, 19 nt, Artificial Sequence
  Description of Artificial Sequence: Synthetic oligonucleotide
cuaaacucgggagagaaua

SEQ ID NO: 2332980 - RNA, 19 nt, Artificial Sequence
  Description of Artificial Sequence: Synthetic oligonucleotide
acagggauauggaaguuca

SEQ ID NO: 2332981 - RNA, 19 nt, Artificial Sequence
  Description of Artificial Sequence: Synthetic oligonucleotide
cuugguauacaguuuagau

SEQ ID NO: 2332982 - RNA, 19 nt, Artificial Sequence
  Description of Artificial Sequence: Synthetic oligonucleotide
acaucagcggaaaacuucu

SEQ ID NO: 2332983 - RNA, 19 nt, Artificial Sequence
  Description of Artificial Sequence: Synthetic oligonucleotide
cuauagacuccccugacua

SEQ ID NO: 2332984 - RNA, 19 nt, Artificial Sequence
  Description of Artificial Sequence: Synthetic oligonucleotide
cacuggaucaggcucacca

SEQ ID NO: 2332985 - RNA, 19 nt, Artificial Sequence
  Description of Artificial Sequence: Synthetic oligonucleotide
ccugacuacacaaguuugg

SEQ ID NO: 2332986 - RNA, 19 nt, Artificial Sequence
  Description of Artificial Sequence: Synthetic oligonucleotide
acagaccccauacuauaga

SEQ ID NO: 2332987 - RNA, 19 nt, Artificial Sequence
  Description of Artificial Sequence: Synthetic oligonucleotide
acuagauucuagcuuccuu

SEQ ID NO: 2332988 - RNA, 19 nt, Artificial Sequence
  Description of Artificial Sequence: Synthetic oligonucleotide
guagaucuuccuucguuuc

SEQ ID NO: 2332989 - RNA, 19 nt, Artificial Sequence
  Description of Artificial Sequence: Synthetic oligonucleotide
auagacuccccugacuaca

SEQ ID NO: 2332990 - RNA, 19 nt, Artificial Sequence
  Description of Artificial Sequence: Synthetic oligonucleotide
uggucauucuugguuguca

SEQ ID NO: 2332991 - RNA, 19 nt, Artificial Sequence
  Description of Artificial Sequence: Synthetic oligonucleotide
ggcaugcuaaacucgggag

SEQ ID NO: 2332992 - RNA, 19 nt, Artificial Sequence
  Description of Artificial Sequence: Synthetic oligonucleotide
acucgggagagaauauagg

SEQ ID NO: 2332993 - RNA, 19 nt, Artificial Sequence
  Description of Artificial Sequence: Synthetic oligonucleotide
cauuguacucugaagucaa

SEQ ID NO: 2332994 - RNA, 19 nt, Artificial Sequence
  Description of Artificial Sequence: Synthetic oligonucleotide
cuuuuccauugcuucugag

SEQ ID NO: 2332995 - RNA, 19 nt, Artificial Sequence
  Description of Artificial Sequence: Synthetic oligonucleotide
uaaagccaauuaaggcacu

SEQ ID NO: 2332996 - RNA, 19 nt, Artificial Sequence
  Description of Artificial Sequence: Synthetic oligonucleotide
auacaguuuagaugcucaa

SEQ ID NO: 2332997 - RNA, 19 nt, Artificial Sequence
  Description of Artificial Sequence: Synthetic oligonucleotide
augguaagacuuaaaacua

SEQ ID NO: 2332998 - RNA, 19 nt, Artificial Sequence
  Description of Artificial Sequence: Synthetic oligonucleotide
aaggagcaaauaauccaga

SEQ ID NO: 2332999 - RNA, 19 nt, Artificial Sequence
  Description of Artificial Sequence: Synthetic oligonucleotide
agcagauuucuaccauucu

SEQ ID NO: 2333000 - RNA, 19 nt, Artificial Sequence
  Description of Artificial Sequence: Synthetic oligonucleotide
ugguuuguggaugaacuuu

SEQ ID NO: 2333001 - RNA, 19 nt, Artificial Sequence
  Description of Artificial Sequence: Synthetic oligonucleotide
gguucaagcaagcuucaca

SEQ ID NO: 2333002 - RNA, 19 nt, Artificial Sequence
  Description of Artificial Sequence: Synthetic oligonucleotide
uggcuuuuccagccagacc

SEQ ID NO: 2333003 - RNA, 19 nt, Artificial Sequence
  Description of Artificial Sequence: Synthetic oligonucleotide
uacaguuuagaugcucaau

SEQ ID NO: 2333004 - RNA, 19 nt, Artificial Sequence
  Description of Artificial Sequence: Synthetic oligonucleotide
  modified_base (3)..(3): a, c, u, g, unknown or other
uanaacccauaagaaggau

SEQ ID NO: 2333005 - RNA, 19 nt, Artificial Sequence
  Description of Artificial Sequence: Synthetic oligonucleotide
acagcauuaaggauauuuu

SEQ ID NO: 2333006 - RNA, 19 nt, Artificial Sequence
  Description of Artificial Sequence: Synthetic oligonucleotide
uugcuucugagaagugcac

SEQ ID NO: 2333007 - RNA, 19 nt, Artificial Sequence
  Description of Artificial Sequence: Synthetic oligonucleotide
gaugaacuuuuccauugcu

SEQ ID NO: 2333008 - RNA, 19 nt, Artificial Sequence
  Description of Artificial Sequence: Synthetic oligonucleotide
cuggcaugcuaaacucggg

SEQ ID NO: 2333009 - RNA, 19 nt, Artificial Sequence
  Description of Artificial Sequence: Synthetic oligonucleotide
agguagaucuuccuucguu

SEQ ID NO: 2333010 - RNA, 19 nt, Artificial Sequence
  Description of Artificial Sequence: Synthetic oligonucleotide
ugacaaugguaagacuuaa

SEQ ID NO: 2333011 - RNA, 19 nt, Artificial Sequence
  Description of Artificial Sequence: Synthetic oligonucleotide
gaugaaauauggaaugauu

SEQ ID NO: 2333012 - RNA, 19 nt, Artificial Sequence
  Description of Artificial Sequence: Synthetic oligonucleotide
gaaacacuggcaugcuaaa

SEQ ID NO: 2333013 - RNA, 19 nt, Artificial Sequence
  Description of Artificial Sequence: Synthetic oligonucleotide
acuuuuccauugcuucuga

SEQ ID NO: 2333014 - RNA, 19 nt, Artificial Sequence
  Description of Artificial Sequence: Synthetic oligonucleotide
uccagccagacccaucaua

SEQ ID NO: 2333015 - RNA, 19 nt, Artificial Sequence
  Description of Artificial Sequence: Synthetic oligonucleotide
acacgaaccugugaccuug

SEQ ID NO: 2333016 - RNA, 19 nt, Artificial Sequence
  Description of Artificial Sequence: Synthetic oligonucleotide
uagacuccccugacuacac

SEQ ID NO: 2333017 - RNA, 19 nt, Artificial Sequence
  Description of Artificial Sequence: Synthetic oligonucleotide
guaagacuuaaaacuauua

SEQ ID NO: 2333018 - RNA, 19 nt, Artificial Sequence
  Description of Artificial Sequence: Synthetic oligonucleotide
ucaccacacgaaccuguga

SEQ ID NO: 2333019 - RNA, 19 nt, Artificial Sequence
  Description of Artificial Sequence: Synthetic oligonucleotide
aaacucgggagagaauaua

SEQ ID NO: 2333020 - RNA, 19 nt, Artificial Sequence
  Description of Artificial Sequence: Synthetic oligonucleotide
caucauagcuuuuaaggau

SEQ ID NO: 2333021 - RNA, 19 nt, Artificial Sequence
  Description of Artificial Sequence: Synthetic oligonucleotide
caacugugacaaugguaag

SEQ ID NO: 2333022 - RNA, 19 nt, Artificial Sequence
  Description of Artificial Sequence: Synthetic oligonucleotide
accccauacuauagacucc

SEQ ID NO: 2333023 - RNA, 19 nt, Artificial Sequence
  Description of Artificial Sequence: Synthetic oligonucleotide
guauacaguuuagaugcuc

SEQ ID NO: 2333024 - RNA, 19 nt, Artificial Sequence
  Description of Artificial Sequence: Synthetic oligonucleotide
gucuacauuuggaauuaac

SEQ ID NO: 2333025 - RNA, 19 nt, Artificial Sequence
  Description of Artificial Sequence: Synthetic oligonucleotide
gacuccccugacuacacaa

SEQ ID NO: 2333026 - RNA, 19 nt, Artificial Sequence
  Description of Artificial Sequence: Synthetic oligonucleotide
aacccauaagaaggauugu

SEQ ID NO: 2333027 - RNA, 19 nt, Artificial Sequence
  Description of Artificial Sequence: Synthetic oligonucleotide
gacucaagucuacuuuaaa

SEQ ID NO: 2333028 - RNA, 19 nt, Artificial Sequence
  Description of Artificial Sequence: Synthetic oligonucleotide
cuagcacuagauucuagcu

SEQ ID NO: 2333029 - RNA, 19 nt, Artificial Sequence
  Description of Artificial Sequence: Synthetic oligonucleotide
uagguagaucuuccuucgu

SEQ ID NO: 2333030 - RNA, 19 nt, Artificial Sequence
  Description of Artificial Sequence: Synthetic oligonucleotide
cauacugguagagcugguc

SEQ ID NO: 2333031 - RNA, 19 nt, Artificial Sequence
  Description of Artificial Sequence: Synthetic oligonucleotide
gucauucuugguugucaac

SEQ ID NO: 2333032 - RNA, 19 nt, Artificial Sequence
  Description of Artificial Sequence: Synthetic oligonucleotide
cuucacacaaagucauuua

SEQ ID NO: 2333033 - RNA, 19 nt, Artificial Sequence
  Description of Artificial Sequence: Synthetic oligonucleotide
augaaacauuucugaaaua

SEQ ID NO: 2333034 - RNA, 19 nt, Artificial Sequence
  Description of Artificial Sequence: Synthetic oligonucleotide
cacuagcacuagauucuag

SEQ ID NO: 2333035 - RNA, 19 nt, Artificial Sequence
  Description of Artificial Sequence: Synthetic oligonucleotide
aucaacugugacaauggua

SEQ ID NO: 2333036 - RNA, 19 nt, Artificial Sequence
  Description of Artificial Sequence: Synthetic oligonucleotide
uagaggguucaagcaagcu

SEQ ID NO: 2333037 - RNA, 19 nt, Artificial Sequence
  Description of Artificial Sequence: Synthetic oligonucleotide
acucugaagucaaaucaau

SEQ ID NO: 2333038 - RNA, 19 nt, Artificial Sequence
  Description of Artificial Sequence: Synthetic oligonucleotide
cagggauauggaaguucag

SEQ ID NO: 2333039 - RNA, 19 nt, Artificial Sequence
  Description of Artificial Sequence: Synthetic oligonucleotide
auuaaggcacuggaugauu

SEQ ID NO: 2333040 - RNA, 19 nt, Artificial Sequence
  Description of Artificial Sequence: Synthetic oligonucleotide
caguuuagaugcucaaugu

SEQ ID NO: 2333041 - RNA, 19 nt, Artificial Sequence
  Description of Artificial Sequence: Synthetic oligonucleotide
cacugagagcuggagacuc

SEQ ID NO: 2333042 - RNA, 19 nt, Artificial Sequence
  Description of Artificial Sequence: Synthetic oligonucleotide
agcuggucugcaaacacau

SEQ ID NO: 2333043 - RNA, 19 nt, Artificial Sequence
  Description of Artificial Sequence: Synthetic oligonucleotide
guaaggugugguggacagg

SEQ ID NO: 2333044 - RNA, 19 nt, Artificial Sequence
  Description of Artificial Sequence: Synthetic oligonucleotide
cacuggaugauuaaaccuu

SEQ ID NO: 2333045 - RNA, 19 nt, Artificial Sequence
  Description of Artificial Sequence: Synthetic oligonucleotide
ggaaugauuacagcauuaa

SEQ ID NO: 2333046 - RNA, 19 nt, Artificial Sequence
  Description of Artificial Sequence: Synthetic oligonucleotide
gguagagcuggucugcaaa

SEQ ID NO: 2333047 - RNA, 19 nt, Artificial Sequence
  Description of Artificial Sequence: Synthetic oligonucleotide
agagaauauaggacacaaa

SEQ ID NO: 2333048 - RNA, 19 nt, Artificial Sequence
  Description of Artificial Sequence: Synthetic oligonucleotide
gcaugcuaaacucgggaga

SEQ ID NO: 2333049 - RNA, 19 nt, Artificial Sequence
  Description of Artificial Sequence: Synthetic oligonucleotide
agaccccauacuauagacu

SEQ ID NO: 2333050 - RNA, 19 nt, Artificial Sequence
  Description of Artificial Sequence: Synthetic oligonucleotide
gacccaucauagcuuuuaa

SEQ ID NO: 2333051 - RNA, 19 nt, Artificial Sequence
  Description of Artificial Sequence: Synthetic oligonucleotide
gggaaguagaggguucaag

SEQ ID NO: 2333052 - RNA, 19 nt, Artificial Sequence
  Description of Artificial Sequence: Synthetic oligonucleotide
caagcaagcuucacacaaa

SEQ ID NO: 2333053 - RNA, 19 nt, Artificial Sequence
  Description of Artificial Sequence: Synthetic oligonucleotide
acaaacacugagagcugga

SEQ ID NO: 2333054 - RNA, 19 nt, Artificial Sequence
  Description of Artificial Sequence: Synthetic oligonucleotide
gugacaaugguaagacuua

SEQ ID NO: 2333055 - RNA, 19 nt, Artificial Sequence
  Description of Artificial Sequence: Synthetic oligonucleotide
caggggaaguagaggguuc

SEQ ID NO: 2333056 - RNA, 19 nt, Artificial Sequence
  Description of Artificial Sequence: Synthetic oligonucleotide
ccccauacuauagacuccc

SEQ ID NO: 2333057 - RNA, 19 nt, Artificial Sequence
  Description of Artificial Sequence: Synthetic oligonucleotide
gggagagaauauaggacac

SEQ ID NO: 2333058 - RNA, 19 nt, Artificial Sequence
  Description of Artificial Sequence: Synthetic oligonucleotide
caagacucaagucuacuuu

SEQ ID NO: 2333059 - RNA, 19 nt, Artificial Sequence
  Description of Artificial Sequence: Synthetic oligonucleotide
aaggauuguggugcaugua

SEQ ID NO: 2333060 - RNA, 19 nt, Artificial Sequence
  Description of Artificial Sequence: Synthetic oligonucleotide
gccacccuggcuuuuccag

SEQ ID NO: 2333061 - RNA, 19 nt, Artificial Sequence
  Description of Artificial Sequence: Synthetic oligonucleotide
ugguagagcuggucugcaa

SEQ ID NO: 2333062 - RNA, 19 nt, Artificial Sequence
  Description of Artificial Sequence: Synthetic oligonucleotide
uuccuucguuuccauugua

SEQ ID NO: 2333063 - RNA, 19 nt, Artificial Sequence
  Description of Artificial Sequence: Synthetic oligonucleotide
caucagcggaaaacuucuc

SEQ ID NO: 2333064 - RNA, 19 nt, Artificial Sequence
  Description of Artificial Sequence: Synthetic oligonucleotide
acgaaccugugaccuugug

SEQ ID NO: 2333065 - RNA, 19 nt, Artificial Sequence
  Description of Artificial Sequence: Synthetic oligonucleotide
guuuguggaugaacuuuuc

SEQ ID NO: 2333066 - RNA, 19 nt, Artificial Sequence
  Description of Artificial Sequence: Synthetic oligonucleotide
acacaaacacugagagcug

SEQ ID NO: 2333067 - RNA, 19 nt, Artificial Sequence
  Description of Artificial Sequence: Synthetic oligonucleotide
cccugacuacacaaguuug

SEQ ID NO: 2333068 - RNA, 19 nt, Artificial Sequence
  Description of Artificial Sequence: Synthetic oligonucleotide
ugccacccuggcuuuucca

SEQ ID NO: 2333069 - RNA, 19 nt, Artificial Sequence
  Description of Artificial Sequence: Synthetic oligonucleotide
ggaugguuuguggaugaac

SEQ ID NO: 2333070 - RNA, 19 nt, Artificial Sequence
  Description of Artificial Sequence: Synthetic oligonucleotide
ggggaucacauucaagacu

SEQ ID NO: 2333071 - RNA, 19 nt, Artificial Sequence
  Description of Artificial Sequence: Synthetic oligonucleotide
gcacuggaugauuaaaccu

SEQ ID NO: 2333072 - RNA, 19 nt, Artificial Sequence
  Description of Artificial Sequence: Synthetic oligonucleotide
agcaagcuucacacaaagu

SEQ ID NO: 2333073 - RNA, 19 nt, Artificial Sequence
  Description of Artificial Sequence: Synthetic oligonucleotide
ggucauucuugguugucaa

SEQ ID NO: 2333074 - RNA, 19 nt, Artificial Sequence
  Description of Artificial Sequence: Synthetic oligonucleotide
agacuccccugacuacaca

SEQ ID NO: 2333075 - RNA, 19 nt, Artificial Sequence
  Description of Artificial Sequence: Synthetic oligonucleotide
gcuuaauuugaaguaggua

SEQ ID NO: 2333076 - RNA, 19 nt, Artificial Sequence
  Description of Artificial Sequence: Synthetic oligonucleotide
gaugcuugguauacaguuu

SEQ ID NO: 2333077 - RNA, 19 nt, Artificial Sequence
  Description of Artificial Sequence: Synthetic oligonucleotide
cuacacaaguuuggugaca

SEQ ID NO: 2333078 - RNA, 19 nt, Artificial Sequence
  Description of Artificial Sequence: Synthetic oligonucleotide
ggagagaauauaggacaca

SEQ ID NO: 2333079 - RNA, 19 nt, Artificial Sequence
  Description of Artificial Sequence: Synthetic oligonucleotide
ugcuagcagcagauuucua

SEQ ID NO: 2333080 - RNA, 19 nt, Artificial Sequence
  Description of Artificial Sequence: Synthetic oligonucleotide
ggauuguggugcauguaga

SEQ ID NO: 2333081 - RNA, 19 nt, Artificial Sequence
  Description of Artificial Sequence: Synthetic oligonucleotide
gcuugguauacaguuuaga

SEQ ID NO: 2333082 - RNA, 19 nt, Artificial Sequence
  Description of Artificial Sequence: Synthetic oligonucleotide
aucaggcucaccacacgaa

SEQ ID NO: 2333083 - RNA, 19 nt, Artificial Sequence
  Description of Artificial Sequence: Synthetic oligonucleotide
ccauaagaaggauuguggu

SEQ ID NO: 2333084 - RNA, 19 nt, Artificial Sequence
  Description of Artificial Sequence: Synthetic oligonucleotide
acacuagcacuagauucua

SEQ ID NO: 2333085 - RNA, 19 nt, Artificial Sequence
  Description of Artificial Sequence: Synthetic oligonucleotide
cuuccuucguuuccauugu

SEQ ID NO: 2333086 - RNA, 19 nt, Artificial Sequence
  Description of Artificial Sequence: Synthetic oligonucleotide
auuguacucugaagucaaa

SEQ ID NO: 2333087 - RNA, 19 nt, Artificial Sequence
  Description of Artificial Sequence: Synthetic oligonucleotide
augcuaaacucgggagaga

SEQ ID NO: 2333088 - RNA, 19 nt, Artificial Sequence
  Description of Artificial Sequence: Synthetic oligonucleotide
aggguucaagcaagcuuca

SEQ ID NO: 2333089 - RNA, 19 nt, Artificial Sequence
  Description of Artificial Sequence: Synthetic oligonucleotide
gcaaacacaucagcggaaa

SEQ ID NO: 2333090 - RNA, 19 nt, Artificial Sequence
  Description of Artificial Sequence: Synthetic oligonucleotide
gguaagacuuaaaacuauu

SEQ ID NO: 2333091 - RNA, 19 nt, Artificial Sequence
  Description of Artificial Sequence: Synthetic oligonucleotide
caacaacauugaugaaaua

SEQ ID NO: 2333092 - RNA, 19 nt, Artificial Sequence
  Description of Artificial Sequence: Synthetic oligonucleotide
cuccccugacuacacaagu

SEQ ID NO: 2333093 - RNA, 19 nt, Artificial Sequence
  Description of Artificial Sequence: Synthetic oligonucleotide
auguccccucugaugguca

SEQ ID NO: 2333094 - RNA, 19 nt, Artificial Sequence
  Description of Artificial Sequence: Synthetic oligonucleotide
gcacuagauucuagcuucc

SEQ ID NO: 2333095 - RNA, 19 nt, Artificial Sequence
  Description of Artificial Sequence: Synthetic oligonucleotide
cccauacuauagacucccc

SEQ ID NO: 2333096 - RNA, 19 nt, Artificial Sequence
  Description of Artificial Sequence: Synthetic oligonucleotide
ccuucguuuccauuguacu

SEQ ID NO: 2333097 - RNA, 19 nt, Artificial Sequence
  Description of Artificial Sequence: Synthetic oligonucleotide
ggacucaucugugagggau

SEQ ID NO: 2333098 - RNA, 19 nt, Artificial Sequence
  Description of Artificial Sequence: Synthetic oligonucleotide
gcuuuuaaggaugguuugu

SEQ ID NO: 2333099 - RNA, 19 nt, Artificial Sequence
  Description of Artificial Sequence: Synthetic oligonucleotide
guggugcauguagaauaca

SEQ ID NO: 2333100 - RNA, 19 nt, Artificial Sequence
  Description of Artificial Sequence: Synthetic oligonucleotide
cugugacaaugguaagacu

SEQ ID NO: 2333101 - RNA, 19 nt, Artificial Sequence
  Description of Artificial Sequence: Synthetic oligonucleotide
cugcuagcagcagauuucu

SEQ ID NO: 2333102 - RNA, 19 nt, Artificial Sequence
  Description of Artificial Sequence: Synthetic oligonucleotide
gguuuguggaugaacuuuu

SEQ ID NO: 2333103 - RNA, 19 nt, Artificial Sequence
  Description of Artificial Sequence: Synthetic oligonucleotide
aggaugguuuguggaugaa

SEQ ID NO: 2333104 - RNA, 19 nt, Artificial Sequence
  Description of Artificial Sequence: Synthetic oligonucleotide
gcuucacacaaagucauuu

SEQ ID NO: 2333105 - RNA, 19 nt, Artificial Sequence
  Description of Artificial Sequence: Synthetic oligonucleotide
ccauugcuucugagaagug

SEQ ID NO: 2333106 - RNA, 19 nt, Artificial Sequence
  Description of Artificial Sequence: Synthetic oligonucleotide
agucugcuagcagcagauu

SEQ ID NO: 2333107 - RNA, 19 nt, Artificial Sequence
  Description of Artificial Sequence: Synthetic oligonucleotide
cauagcuuuuaaggauggu

SEQ ID NO: 2333108 - RNA, 19 nt, Artificial Sequence
  Description of Artificial Sequence: Synthetic oligonucleotide
ggguucaagcaagcuucac

SEQ ID NO: 2333109 - RNA, 19 nt, Artificial Sequence
  Description of Artificial Sequence: Synthetic oligonucleotide
gcagcagauuucuaccauu

SEQ ID NO: 2333110 - RNA, 19 nt, Artificial Sequence
  Description of Artificial Sequence: Synthetic oligonucleotide
ggaucacauucaagacuca

SEQ ID NO: 2333111 - RNA, 19 nt, Artificial Sequence
  Description of Artificial Sequence: Synthetic oligonucleotide
gccaauuaaggcacuggau

SEQ ID NO: 2333112 - RNA, 19 nt, Artificial Sequence
  Description of Artificial Sequence: Synthetic oligonucleotide
gguauacaguuuagaugcu

SEQ ID NO: 2333113 - RNA, 19 nt, Artificial Sequence
  Description of Artificial Sequence: Synthetic oligonucleotide
cacuagauucuagcuuccu

SEQ ID NO: 2333114 - RNA, 19 nt, Artificial Sequence
  Description of Artificial Sequence: Synthetic oligonucleotide
cagugacauuaugaaacau

SEQ ID NO: 2333115 - RNA, 19 nt, Artificial Sequence
  Description of Artificial Sequence: Synthetic oligonucleotide
ccacacgaaccugugaccu

SEQ ID NO: 2333116 - RNA, 19 nt, Artificial Sequence
  Description of Artificial Sequence: Synthetic oligonucleotide
gcagugucacagggauaug

SEQ ID NO: 2333117 - RNA, 19 nt, Artificial Sequence
  Description of Artificial Sequence: Synthetic oligonucleotide
cacgaaccugugaccuugu

SEQ ID NO: 2333118 - RNA, 19 nt, Artificial Sequence
  Description of Artificial Sequence: Synthetic oligonucleotide
caggaaacacuggcaugcu

SEQ ID NO: 2333119 - RNA, 19 nt, Artificial Sequence
  Description of Artificial Sequence: Synthetic oligonucleotide
cacacgaaccugugaccuu

SEQ ID NO: 2333120 - RNA, 19 nt, Artificial Sequence
  Description of Artificial Sequence: Synthetic oligonucleotide
ccccugacuacacaaguuu

SEQ ID NO: 2333121 - RNA, 19 nt, Artificial Sequence
  Description of Artificial Sequence: Synthetic oligonucleotide
ccagacccaucauagcuuu

SEQ ID NO: 2333122 - RNA, 19 nt, Artificial Sequence
  Description of Artificial Sequence: Synthetic oligonucleotide
ggggaaguagaggguucaa

SEQ ID NO: 2333123 - RNA, 19 nt, Artificial Sequence
  Description of Artificial Sequence: Synthetic oligonucleotide
gcuaaacucgggagagaau

SEQ ID NO: 2333124 - RNA, 19 nt, Artificial Sequence
  Description of Artificial Sequence: Synthetic oligonucleotide
cuggagacucagugacauu

SEQ ID NO: 2333125 - RNA, 19 nt, Artificial Sequence
  Description of Artificial Sequence: Synthetic oligonucleotide
gccagacccaucauagcuu

SEQ ID NO: 2333126 - RNA, 19 nt, Artificial Sequence
  Description of Artificial Sequence: Synthetic oligonucleotide
guccccucugauggucauu

SEQ ID NO: 2333127 - RNA, 19 nt, Artificial Sequence
  Description of Artificial Sequence: Synthetic oligonucleotide
  modified_base (1)..(1): a, c, u, g, unknown or other
naacccauaagaaggauug

SEQ ID NO: 2333128 - RNA, 19 nt, Artificial Sequence
  Description of Artificial Sequence: Synthetic oligonucleotide
uuaaguaacaagcauaggc

SEQ ID NO: 2333129 - RNA, 19 nt, Artificial Sequence
  Description of Artificial Sequence: Synthetic oligonucleotide
aauaaucauaaaauaaugc

SEQ ID NO: 2333130 - RNA, 19 nt, Artificial Sequence
  Description of Artificial Sequence: Synthetic oligonucleotide
acuugugucacuuacugcc

SEQ ID NO: 2333131 - RNA, 19 nt, Artificial Sequence
  Description of Artificial Sequence: Synthetic oligonucleotide
uaaacauucaagauaguag

SEQ ID NO: 2333132 - RNA, 19 nt, Artificial Sequence
  Description of Artificial Sequence: Synthetic oligonucleotide
cuaucuacccuuaagaucc

SEQ ID NO: 2333133 - RNA, 19 nt, Artificial Sequence
  Description of Artificial Sequence: Synthetic oligonucleotide
uucuaaagaaaacagagcu

SEQ ID NO: 2333134 - RNA, 19 nt, Artificial Sequence
  Description of Artificial Sequence: Synthetic oligonucleotide
uuguguuuaaguaacaagc

SEQ ID NO: 2333135 - RNA, 19 nt, Artificial Sequence
  Description of Artificial Sequence: Synthetic oligonucleotide
uuuaaaacagagaaugucu

SEQ ID NO: 2333136 - RNA, 19 nt, Artificial Sequence
  Description of Artificial Sequence: Synthetic oligonucleotide
aaacauucaagauaguaga

SEQ ID NO: 2333137 - RNA, 19 nt, Artificial Sequence
  Description of Artificial Sequence: Synthetic oligonucleotide
cauucuaaagaaaacagag

SEQ ID NO: 2333138 - RNA, 19 nt, Artificial Sequence
  Description of Artificial Sequence: Synthetic oligonucleotide
agaaaacagagcuggaugc

SEQ ID NO: 2333139 - RNA, 19 nt, Artificial Sequence
  Description of Artificial Sequence: Synthetic oligonucleotide
acaagcauaggcuuagacc

SEQ ID NO: 2333140 - RNA, 19 nt, Artificial Sequence
  Description of Artificial Sequence: Synthetic oligonucleotide
uuugguuugcacaugagca

SEQ ID NO: 2333141 - RNA, 19 nt, Artificial Sequence
  Description of Artificial Sequence: Synthetic oligonucleotide
uugaauuuccguuaaaaca

SEQ ID NO: 2333142 - RNA, 19 nt, Artificial Sequence
  Description of Artificial Sequence: Synthetic oligonucleotide
cuaaagaaaacagagcugg

SEQ ID NO: 2333143 - RNA, 19 nt, Artificial Sequence
  Description of Artificial Sequence: Synthetic oligonucleotide
uuuacauuaaaagggaggc

SEQ ID NO: 2333144 - RNA, 19 nt, Artificial Sequence
  Description of Artificial Sequence: Synthetic oligonucleotide
aggaauauauauuaaauaa

SEQ ID NO: 2333145 - RNA, 19 nt, Artificial Sequence
  Description of Artificial Sequence: Synthetic oligonucleotide
aaucaaggaauauauauua

SEQ ID NO: 2333146 - RNA, 19 nt, Artificial Sequence
  Description of Artificial Sequence: Synthetic oligonucleotide
aaucauaaaauaaugcuga

SEQ ID NO: 2333147 - RNA, 19 nt, Artificial Sequence
  Description of Artificial Sequence: Synthetic oligonucleotide
caguaaacauucaagauag

SEQ ID NO: 2333148 - RNA, 19 nt, Artificial Sequence
  Description of Artificial Sequence: Synthetic oligonucleotide
aagaaaacagagcuggaug

SEQ ID NO: 2333149 - RNA, 19 nt, Artificial Sequence
  Description of Artificial Sequence: Synthetic oligonucleotide
caagauaguagagagaagg

SEQ ID NO: 2333150 - RNA, 19 nt, Artificial Sequence
  Description of Artificial Sequence: Synthetic oligonucleotide
ugagcaguuaacaaucaag

SEQ ID NO: 2333151 - RNA, 19 nt, Artificial Sequence
  Description of Artificial Sequence: Synthetic oligonucleotide
aauaaugcugacaguaaac

SEQ ID NO: 2333152 - RNA, 19 nt, Artificial Sequence
  Description of Artificial Sequence: Synthetic oligonucleotide
cauucaagauaguagagag

SEQ ID NO: 2333153 - RNA, 19 nt, Artificial Sequence
  Description of Artificial Sequence: Synthetic oligonucleotide
uaucuaucuacccuuaaga

SEQ ID NO: 2333154 - RNA, 19 nt, Artificial Sequence
  Description of Artificial Sequence: Synthetic oligonucleotide
acaaucaaggaauauauau

SEQ ID NO: 2333155 - RNA, 19 nt, Artificial Sequence
  Description of Artificial Sequence: Synthetic oligonucleotide
ugugauuguucucugaaga

SEQ ID NO: 2333156 - RNA, 19 nt, Artificial Sequence
  Description of Artificial Sequence: Synthetic oligonucleotide
ugcaucacagccuagugag

SEQ ID NO: 2333157 - RNA, 19 nt, Artificial Sequence
  Description of Artificial Sequence: Synthetic oligonucleotide
aacaagcauaggcuuagac

SEQ ID NO: 2333158 - RNA, 19 nt, Artificial Sequence
  Description of Artificial Sequence: Synthetic oligonucleotide
ucuguguuggccaucagca

SEQ ID NO: 2333159 - RNA, 19 nt, Artificial Sequence
  Description of Artificial Sequence: Synthetic oligonucleotide
aggaagucaacuucugagc

SEQ ID NO: 2333160 - RNA, 19 nt, Artificial Sequence
  Description of Artificial Sequence: Synthetic oligonucleotide
uguguuuaaguaacaagca

SEQ ID NO: 2333161 - RNA, 19 nt, Artificial Sequence
  Description of Artificial Sequence: Synthetic oligonucleotide
uucaagauaguagagagaa

SEQ ID NO: 2333162 - RNA, 19 nt, Artificial Sequence
  Description of Artificial Sequence: Synthetic oligonucleotide
uguuuaaguaacaagcaua

SEQ ID NO: 2333163 - RNA, 19 nt, Artificial Sequence
  Description of Artificial Sequence: Synthetic oligonucleotide
ucuuuuaagacugacugga

SEQ ID NO: 2333164 - RNA, 19 nt, Artificial Sequence
  Description of Artificial Sequence: Synthetic oligonucleotide
caguuuaaaacagagaaug

SEQ ID NO: 2333165 - RNA, 19 nt, Artificial Sequence
  Description of Artificial Sequence: Synthetic oligonucleotide
acccuuaagauccaacugg

SEQ ID NO: 2333166 - RNA, 19 nt, Artificial Sequence
  Description of Artificial Sequence: Synthetic oligonucleotide
cacauucuaaagaaaacag

SEQ ID NO: 2333167 - RNA, 19 nt, Artificial Sequence
  Description of Artificial Sequence: Synthetic oligonucleotide
gagcaguuaacaaucaagg

SEQ ID NO: 2333168 - RNA, 19 nt, Artificial Sequence
  Description of Artificial Sequence: Synthetic oligonucleotide
uguaacauugaauuuccgu

SEQ ID NO: 2333169 - RNA, 19 nt, Artificial Sequence
  Description of Artificial Sequence: Synthetic oligonucleotide
aaacagagaaugucucagg

SEQ ID NO: 2333170 - RNA, 19 nt, Artificial Sequence
  Description of Artificial Sequence: Synthetic oligonucleotide
aguuuuguguuuaaguaac

SEQ ID NO: 2333171 - RNA, 19 nt, Artificial Sequence
  Description of Artificial Sequence: Synthetic oligonucleotide
guuuaaguaacaagcauag

SEQ ID NO: 2333172 - RNA, 19 nt, Artificial Sequence
  Description of Artificial Sequence: Synthetic oligonucleotide
uuuuaagacugacuggaga

SEQ ID NO: 2333173 - RNA, 19 nt, Artificial Sequence
  Description of Artificial Sequence: Synthetic oligonucleotide
uuuaagacugacuggagau

SEQ ID NO: 2333174 - RNA, 19 nt, Artificial Sequence
  Description of Artificial Sequence: Synthetic oligonucleotide
uuaaaacagagaaugucuc

SEQ ID NO: 2333175 - RNA, 19 nt, Artificial Sequence
  Description of Artificial Sequence: Synthetic oligonucleotide
caagcauaggcuuagacca

SEQ ID NO: 2333176 - RNA, 19 nt, Artificial Sequence
  Description of Artificial Sequence: Synthetic oligonucleotide
ucaaggaauauauauuaaa

SEQ ID NO: 2333177 - RNA, 19 nt, Artificial Sequence
  Description of Artificial Sequence: Synthetic oligonucleotide
aaauaaugcugacaguaaa

SEQ ID NO: 2333178 - RNA, 19 nt, Artificial Sequence
  Description of Artificial Sequence: Synthetic oligonucleotide
uaggcuuagaccaccaucu

SEQ ID NO: 2333179 - RNA, 19 nt, Artificial Sequence
  Description of Artificial Sequence: Synthetic oligonucleotide
aacagagaaugucucagga

SEQ ID NO: 2333180 - RNA, 19 nt, Artificial Sequence
  Description of Artificial Sequence: Synthetic oligonucleotide
cugacaguaaacauucaag

SEQ ID NO: 2333181 - RNA, 19 nt, Artificial Sequence
  Description of Artificial Sequence: Synthetic oligonucleotide
uauacuugcuuuauuuuaa

SEQ ID NO: 2333182 - RNA, 19 nt, Artificial Sequence
  Description of Artificial Sequence: Synthetic oligonucleotide
aaaagggaggcucaguuua

SEQ ID NO: 2333183 - RNA, 19 nt, Artificial Sequence
  Description of Artificial Sequence: Synthetic oligonucleotide
ugacuugugucacuuacug

SEQ ID NO: 2333184 - RNA, 19 nt, Artificial Sequence
  Description of Artificial Sequence: Synthetic oligonucleotide
aaagguacguuugguuugc

SEQ ID NO: 2333185 - RNA, 19 nt, Artificial Sequence
  Description of Artificial Sequence: Synthetic oligonucleotide
ucucugaagagucaaugcu

SEQ ID NO: 2333186 - RNA, 19 nt, Artificial Sequence
  Description of Artificial Sequence: Synthetic oligonucleotide
acaguaaacauucaagaua

SEQ ID NO: 2333187 - RNA, 19 nt, Artificial Sequence
  Description of Artificial Sequence: Synthetic oligonucleotide
aaguauuugcuggugugac

SEQ ID NO: 2333188 - RNA, 19 nt, Artificial Sequence
  Description of Artificial Sequence: Synthetic oligonucleotide
aucauaaaauaaugcugac

SEQ ID NO: 2333189 - RNA, 19 nt, Artificial Sequence
  Description of Artificial Sequence: Synthetic oligonucleotide
aaugcuuccgaaguauuug

SEQ ID NO: 2333190 - RNA, 19 nt, Artificial Sequence
  Description of Artificial Sequence: Synthetic oligonucleotide
uagaccaccaucuaucuau

SEQ ID NO: 2333191 - RNA, 19 nt, Artificial Sequence
  Description of Artificial Sequence: Synthetic oligonucleotide
ucuguagucacuuuugcuu

SEQ ID NO: 2333192 - RNA, 19 nt, Artificial Sequence
  Description of Artificial Sequence: Synthetic oligonucleotide
ugaagagucaaugcuuccg

SEQ ID NO: 2333193 - RNA, 19 nt, Artificial Sequence
  Description of Artificial Sequence: Synthetic oligonucleotide
uccguuaaaacauggcuac

SEQ ID NO: 2333194 - RNA, 19 nt, Artificial Sequence
  Description of Artificial Sequence: Synthetic oligonucleotide
ugugacuugugucacuuac

SEQ ID NO: 2333195 - RNA, 19 nt, Artificial Sequence
  Description of Artificial Sequence: Synthetic oligonucleotide
uaaagguacguuugguuug

SEQ ID NO: 2333196 - RNA, 19 nt, Artificial Sequence
  Description of Artificial Sequence: Synthetic oligonucleotide
aaugucucaggacacccgu

SEQ ID NO: 2333197 - RNA, 19 nt, Artificial Sequence
  Description of Artificial Sequence: Synthetic oligonucleotide
caaguggucacacacacuc

SEQ ID NO: 2333198 - RNA, 19 nt, Artificial Sequence
  Description of Artificial Sequence: Synthetic oligonucleotide
accaucuaucuaucuaccc

SEQ ID NO: 2333199 - RNA, 19 nt, Artificial Sequence
  Description of Artificial Sequence: Synthetic oligonucleotide
uuugcacaugagcaaagug

SEQ ID NO: 2333200 - RNA, 19 nt, Artificial Sequence
  Description of Artificial Sequence: Synthetic oligonucleotide
cuuaagauccaacugguga

SEQ ID NO: 2333201 - RNA, 19 nt, Artificial Sequence
  Description of Artificial Sequence: Synthetic oligonucleotide
acagagaaugucucaggac

SEQ ID NO: 2333202 - RNA, 19 nt, Artificial Sequence
  Description of Artificial Sequence: Synthetic oligonucleotide
uaaaacagagaaugucuca

SEQ ID NO: 2333203 - RNA, 19 nt, Artificial Sequence
  Description of Artificial Sequence: Synthetic oligonucleotide
uguaaagcacacauucuaa

SEQ ID NO: 2333204 - RNA, 19 nt, Artificial Sequence
  Description of Artificial Sequence: Synthetic oligonucleotide
ugcuuuauuuuaacaauuc

SEQ ID NO: 2333205 - RNA, 19 nt, Artificial Sequence
  Description of Artificial Sequence: Synthetic oligonucleotide
augcuuccgaaguauuugc

SEQ ID NO: 2333206 - RNA, 19 nt, Artificial Sequence
  Description of Artificial Sequence: Synthetic oligonucleotide
uaagacugacuggagaucc

SEQ ID NO: 2333207 - RNA, 19 nt, Artificial Sequence
  Description of Artificial Sequence: Synthetic oligonucleotide
ucacaaaauuauccuagga

SEQ ID NO: 2333208 - RNA, 19 nt, Artificial Sequence
  Description of Artificial Sequence: Synthetic oligonucleotide
uacuuaaugaacugcucac

SEQ ID NO: 2333209 - RNA, 19 nt, Artificial Sequence
  Description of Artificial Sequence: Synthetic oligonucleotide
uccgcuucuagacagugcu

SEQ ID NO: 2333210 - RNA, 19 nt, Artificial Sequence
  Description of Artificial Sequence: Synthetic oligonucleotide
ucacacauauauugcacug

SEQ ID NO: 2333211 - RNA, 19 nt, Artificial Sequence
  Description of Artificial Sequence: Synthetic oligonucleotide
aaauuauccuaggaaguca

SEQ ID NO: 2333212 - RNA, 19 nt, Artificial Sequence
  Description of Artificial Sequence: Synthetic oligonucleotide
ucauaaaauaaugcugaca

SEQ ID NO: 2333213 - RNA, 19 nt, Artificial Sequence
  Description of Artificial Sequence: Synthetic oligonucleotide
uccggcaaggcucacaagu

SEQ ID NO: 2333214 - RNA, 19 nt, Artificial Sequence
  Description of Artificial Sequence: Synthetic oligonucleotide
aacauugaauuuccguuaa

SEQ ID NO: 2333215 - RNA, 19 nt, Artificial Sequence
  Description of Artificial Sequence: Synthetic oligonucleotide
cucacaaguggucacacac

SEQ ID NO: 2333216 - RNA, 19 nt, Artificial Sequence
  Description of Artificial Sequence: Synthetic oligonucleotide
aguagagagaagguuuugg

SEQ ID NO: 2333217 - RNA, 19 nt, Artificial Sequence
  Description of Artificial Sequence: Synthetic oligonucleotide
uggguaaagguacguuugg

SEQ ID NO: 2333218 - RNA, 19 nt, Artificial Sequence
  Description of Artificial Sequence: Synthetic oligonucleotide
guuugguuugcacaugagc

SEQ ID NO: 2333219 - RNA, 19 nt, Artificial Sequence
  Description of Artificial Sequence: Synthetic oligonucleotide
guagagagaagguuuuggc

SEQ ID NO: 2333220 - RNA, 19 nt, Artificial Sequence
  Description of Artificial Sequence: Synthetic oligonucleotide
uuccguuaaaacauggcua

SEQ ID NO: 2333221 - RNA, 19 nt, Artificial Sequence
  Description of Artificial Sequence: Synthetic oligonucleotide
uacccuuaagauccaacug

SEQ ID NO: 2333222 - RNA, 19 nt, Artificial Sequence
  Description of Artificial Sequence: Synthetic oligonucleotide
agagucaaugcuuccgaag

SEQ ID NO: 2333223 - RNA, 19 nt, Artificial Sequence
  Description of Artificial Sequence: Synthetic oligonucleotide
cuaucuaucuacccuuaag

SEQ ID NO: 2333224 - RNA, 19 nt, Artificial Sequence
  Description of Artificial Sequence: Synthetic oligonucleotide
aagguuuuggcaguuuugu

SEQ ID NO: 2333225 - RNA, 19 nt, Artificial Sequence
  Description of Artificial Sequence: Synthetic oligonucleotide
uuuaaguaacaagcauagg

SEQ ID NO: 2333226 - RNA, 19 nt, Artificial Sequence
  Description of Artificial Sequence: Synthetic oligonucleotide
auaaugcugacaguaaaca

SEQ ID NO: 2333227 - RNA, 19 nt, Artificial Sequence
  Description of Artificial Sequence: Synthetic oligonucleotide
uuauccuaggaagucaacu

SEQ ID NO: 2333228 - RNA, 19 nt, Artificial Sequence
  Description of Artificial Sequence: Synthetic oligonucleotide
uugcacuggguaaagguac

SEQ ID NO: 2333229 - RNA, 19 nt, Artificial Sequence
  Description of Artificial Sequence: Synthetic oligonucleotide
guuaaaacauggcuacaac

SEQ ID NO: 2333230 - RNA, 19 nt, Artificial Sequence
  Description of Artificial Sequence: Synthetic oligonucleotide
aguggucacacacacucug

SEQ ID NO: 2333231 - RNA, 19 nt, Artificial Sequence
  Description of Artificial Sequence: Synthetic oligonucleotide
uugucaucuguguuggcca

SEQ ID NO: 2333232 - RNA, 19 nt, Artificial Sequence
  Description of Artificial Sequence: Synthetic oligonucleotide
gugauuguucucugaagag

SEQ ID NO: 2333233 - RNA, 19 nt, Artificial Sequence
  Description of Artificial Sequence: Synthetic oligonucleotide
cagagaaugucucaggaca

SEQ ID NO: 2333234 - RNA, 19 nt, Artificial Sequence
  Description of Artificial Sequence: Synthetic oligonucleotide
cuugucaucuguguuggcc

SEQ ID NO: 2333235 - RNA, 19 nt, Artificial Sequence
  Description of Artificial Sequence: Synthetic oligonucleotide
ugcacuggguaaagguacg

SEQ ID NO: 2333236 - RNA, 19 nt, Artificial Sequence
  Description of Artificial Sequence: Synthetic oligonucleotide
cacaaaauuauccuaggaa

SEQ ID NO: 2333237 - RNA, 19 nt, Artificial Sequence
  Description of Artificial Sequence: Synthetic oligonucleotide
uugcuuuauuuuaacaauu

SEQ ID NO: 2333238 - RNA, 19 nt, Artificial Sequence
  Description of Artificial Sequence: Synthetic oligonucleotide
augcuugucaucuguguug

SEQ ID NO: 2333239 - RNA, 19 nt, Artificial Sequence
  Description of Artificial Sequence: Synthetic oligonucleotide
ccucuuuuaagacugacug

SEQ ID NO: 2333240 - RNA, 19 nt, Artificial Sequence
  Description of Artificial Sequence: Synthetic oligonucleotide
uccucuuuuaagacugacu

SEQ ID NO: 2333241 - RNA, 19 nt, Artificial Sequence
  Description of Artificial Sequence: Synthetic oligonucleotide
uacuugcuuuauuuuaaca

SEQ ID NO: 2333242 - RNA, 19 nt, Artificial Sequence
  Description of Artificial Sequence: Synthetic oligonucleotide
gucacuuacugccugcccc

SEQ ID NO: 2333243 - RNA, 19 nt, Artificial Sequence
  Description of Artificial Sequence: Synthetic oligonucleotide
aucuaucuacccuuaagau

SEQ ID NO: 2333244 - RNA, 19 nt, Artificial Sequence
  Description of Artificial Sequence: Synthetic oligonucleotide
uauccuaggaagucaacuu

SEQ ID NO: 2333245 - RNA, 19 nt, Artificial Sequence
  Description of Artificial Sequence: Synthetic oligonucleotide
aauuauccuaggaagucaa

SEQ ID NO: 2333246 - RNA, 19 nt, Artificial Sequence
  Description of Artificial Sequence: Synthetic oligonucleotide
ucuacccuuaagauccaac

SEQ ID NO: 2333247 - RNA, 19 nt, Artificial Sequence
  Description of Artificial Sequence: Synthetic oligonucleotide
guaacaagcauaggcuuag

SEQ ID NO: 2333248 - RNA, 19 nt, Artificial Sequence
  Description of Artificial Sequence: Synthetic oligonucleotide
aagauaguagagagaaggu

SEQ ID NO: 2333249 - RNA, 19 nt, Artificial Sequence
  Description of Artificial Sequence: Synthetic oligonucleotide
gucuguaacauugaauuuc

SEQ ID NO: 2333250 - RNA, 19 nt, Artificial Sequence
  Description of Artificial Sequence: Synthetic oligonucleotide
gacguacuuaaugaacugc

SEQ ID NO: 2333251 - RNA, 19 nt, Artificial Sequence
  Description of Artificial Sequence: Synthetic oligonucleotide
acauucaagauaguagaga

SEQ ID NO: 2333252 - RNA, 19 nt, Artificial Sequence
  Description of Artificial Sequence: Synthetic oligonucleotide
gaagagucaaugcuuccga

SEQ ID NO: 2333253 - RNA, 19 nt, Artificial Sequence
  Description of Artificial Sequence: Synthetic oligonucleotide
uacugccugccccacuucg

SEQ ID NO: 2333254 - RNA, 19 nt, Artificial Sequence
  Description of Artificial Sequence: Synthetic oligonucleotide
cuuuuaagacugacuggag

SEQ ID NO: 2333255 - RNA, 19 nt, Artificial Sequence
  Description of Artificial Sequence: Synthetic oligonucleotide
gcaucuuguaaacacauuc

SEQ ID NO: 2333256 - RNA, 19 nt, Artificial Sequence
  Description of Artificial Sequence: Synthetic oligonucleotide
ugcuuguccggcaaggcuc

SEQ ID NO: 2333257 - RNA, 19 nt, Artificial Sequence
  Description of Artificial Sequence: Synthetic oligonucleotide
ugucucaggacacccgugu

SEQ ID NO: 2333258 - RNA, 19 nt, Artificial Sequence
  Description of Artificial Sequence: Synthetic oligonucleotide
agagaaugucucaggacac

SEQ ID NO: 2333259 - RNA, 19 nt, Artificial Sequence
  Description of Artificial Sequence: Synthetic oligonucleotide
aagugcuuguccggcaagg

SEQ ID NO: 2333260 - RNA, 19 nt, Artificial Sequence
  Description of Artificial Sequence: Synthetic oligonucleotide
agcauaggcuuagaccacc

SEQ ID NO: 2333261 - RNA, 19 nt, Artificial Sequence
  Description of Artificial Sequence: Synthetic oligonucleotide
agacguacuuaaugaacug

SEQ ID NO: 2333262 - RNA, 19 nt, Artificial Sequence
  Description of Artificial Sequence: Synthetic oligonucleotide
caagcagucacacauauau

SEQ ID NO: 2333263 - RNA, 19 nt, Artificial Sequence
  Description of Artificial Sequence: Synthetic oligonucleotide
ugaugcuugucaucugugu

SEQ ID NO: 2333264 - RNA, 19 nt, Artificial Sequence
  Description of Artificial Sequence: Synthetic oligonucleotide
gaugcuuggcaucuuguaa

SEQ ID NO: 2333265 - RNA, 19 nt, Artificial Sequence
  Description of Artificial Sequence: Synthetic oligonucleotide
acauucuaaagaaaacaga

SEQ ID NO: 2333266 - RNA, 19 nt, Artificial Sequence
  Description of Artificial Sequence: Synthetic oligonucleotide
aggacacccguguaaagca

SEQ ID NO: 2333267 - RNA, 19 nt, Artificial Sequence
  Description of Artificial Sequence: Synthetic oligonucleotide
agagcuuauuuacauuaaa

SEQ ID NO: 2333268 - RNA, 19 nt, Artificial Sequence
  Description of Artificial Sequence: Synthetic oligonucleotide
ucacuuuccucugugucug

SEQ ID NO: 2333269 - RNA, 19 nt, Artificial Sequence
  Description of Artificial Sequence: Synthetic oligonucleotide
aagacugacuggagauccc

SEQ ID NO: 2333270 - RNA, 19 nt, Artificial Sequence
  Description of Artificial Sequence: Synthetic oligonucleotide
agguacguuugguuugcac

SEQ ID NO: 2333271 - RNA, 19 nt, Artificial Sequence
  Description of Artificial Sequence: Synthetic oligonucleotide
ggaggcucaguuuaaaaca

SEQ ID NO: 2333272 - RNA, 19 nt, Artificial Sequence
  Description of Artificial Sequence: Synthetic oligonucleotide
uguagucacuuuugcuuug

SEQ ID NO: 2333273 - RNA, 19 nt, Artificial Sequence
  Description of Artificial Sequence: Synthetic oligonucleotide
guaaacauucaagauagua

SEQ ID NO: 2333274 - RNA, 19 nt, Artificial Sequence
  Description of Artificial Sequence: Synthetic oligonucleotide
gacuugugucacuuacugc

SEQ ID NO: 2333275 - RNA, 19 nt, Artificial Sequence
  Description of Artificial Sequence: Synthetic oligonucleotide
uggcaucuuguaaacacau

SEQ ID NO: 2333276 - RNA, 19 nt, Artificial Sequence
  Description of Artificial Sequence: Synthetic oligonucleotide
acccguguaaagcacacau

SEQ ID NO: 2333277 - RNA, 19 nt, Artificial Sequence
  Description of Artificial Sequence: Synthetic oligonucleotide
gaaugucucaggacacccg

SEQ ID NO: 2333278 - RNA, 19 nt, Artificial Sequence
  Description of Artificial Sequence: Synthetic oligonucleotide
gaauuuccguuaaaacaug

SEQ ID NO: 2333279 - RNA, 19 nt, Artificial Sequence
  Description of Artificial Sequence: Synthetic oligonucleotide
gguacguuugguuugcaca

SEQ ID NO: 2333280 - RNA, 19 nt, Artificial Sequence
  Description of Artificial Sequence: Synthetic oligonucleotide
gacuggagaucccgggagg

SEQ ID NO: 2333281 - RNA, 19 nt, Artificial Sequence
  Description of Artificial Sequence: Synthetic oligonucleotide
caaggaauauauauuaaau

SEQ ID NO: 2333282 - RNA, 19 nt, Artificial Sequence
  Description of Artificial Sequence: Synthetic oligonucleotide
cugucuguaacauugaauu

SEQ ID NO: 2333283 - RNA, 19 nt, Artificial Sequence
  Description of Artificial Sequence: Synthetic oligonucleotide
gagcuuauuuacauuaaaa

SEQ ID NO: 2333284 - RNA, 19 nt, Artificial Sequence
  Description of Artificial Sequence: Synthetic oligonucleotide
gauaguagagagaagguuu

SEQ ID NO: 2333285 - RNA, 19 nt, Artificial Sequence
  Description of Artificial Sequence: Synthetic oligonucleotide
aaccuuggcccucugugaa

SEQ ID NO: 2333286 - RNA, 19 nt, Artificial Sequence
  Description of Artificial Sequence: Synthetic oligonucleotide
ucucaggacacccguguaa

SEQ ID NO: 2333287 - RNA, 19 nt, Artificial Sequence
  Description of Artificial Sequence: Synthetic oligonucleotide
aagagucaaugcuuccgaa

SEQ ID NO: 2333288 - RNA, 19 nt, Artificial Sequence
  Description of Artificial Sequence: Synthetic oligonucleotide
aguuuaaaacagagaaugu

SEQ ID NO: 2333289 - RNA, 19 nt, Artificial Sequence
  Description of Artificial Sequence: Synthetic oligonucleotide
gacaguaaacauucaagau

SEQ ID NO: 2333290 - RNA, 19 nt, Artificial Sequence
  Description of Artificial Sequence: Synthetic oligonucleotide
gcagcugucuguaacauug

SEQ ID NO: 2333291 - RNA, 19 nt, Artificial Sequence
  Description of Artificial Sequence: Synthetic oligonucleotide
ucacuuacugccugcccca

SEQ ID NO: 2333292 - RNA, 19 nt, Artificial Sequence
  Description of Artificial Sequence: Synthetic oligonucleotide
ucuaucuaucuacccuuaa

SEQ ID NO: 2333293 - RNA, 19 nt, Artificial Sequence
  Description of Artificial Sequence: Synthetic oligonucleotide
caccaucuaucuaucuacc

SEQ ID NO: 2333294 - RNA, 19 nt, Artificial Sequence
  Description of Artificial Sequence: Synthetic oligonucleotide
aguauuugcuggugugacu

SEQ ID NO: 2333295 - RNA, 19 nt, Artificial Sequence
  Description of Artificial Sequence: Synthetic oligonucleotide
agugcuuguccggcaaggc

SEQ ID NO: 2333296 - RNA, 19 nt, Artificial Sequence
  Description of Artificial Sequence: Synthetic oligonucleotide
agaaucugagguggcagag

SEQ ID NO: 2333297 - RNA, 19 nt, Artificial Sequence
  Description of Artificial Sequence: Synthetic oligonucleotide
ugucacuuacugccugccc

SEQ ID NO: 2333298 - RNA, 19 nt, Artificial Sequence
  Description of Artificial Sequence: Synthetic oligonucleotide
acuuaaugaacugcucacu

SEQ ID NO: 2333299 - RNA, 19 nt, Artificial Sequence
  Description of Artificial Sequence: Synthetic oligonucleotide
uggcccucugugaacuggg

SEQ ID NO: 2333300 - RNA, 19 nt, Artificial Sequence
  Description of Artificial Sequence: Synthetic oligonucleotide
acguuugguuugcacauga

SEQ ID NO: 2333301 - RNA, 19 nt, Artificial Sequence
  Description of Artificial Sequence: Synthetic oligonucleotide
aaaacagagcuggaugcuu

SEQ ID NO: 2333302 - RNA, 19 nt, Artificial Sequence
  Description of Artificial Sequence: Synthetic oligonucleotide
ggaagucaacuucugagca

SEQ ID NO: 2333303 - RNA, 19 nt, Artificial Sequence
  Description of Artificial Sequence: Synthetic oligonucleotide
agauaguagagagaagguu

SEQ ID NO: 2333304 - RNA, 19 nt, Artificial Sequence
  Description of Artificial Sequence: Synthetic oligonucleotide
acguacuuaaugaacugcu

SEQ ID NO: 2333305 - RNA, 19 nt, Artificial Sequence
  Description of Artificial Sequence: Synthetic oligonucleotide
ugucuguaacauugaauuu

SEQ ID NO: 2333306 - RNA, 19 nt, Artificial Sequence
  Description of Artificial Sequence: Synthetic oligonucleotide
cuugcuuuauuuuaacaau

SEQ ID NO: 2333307 - RNA, 19 nt, Artificial Sequence
  Description of Artificial Sequence: Synthetic oligonucleotide
cauucacaaaauuauccua

SEQ ID NO: 2333308 - RNA, 19 nt, Artificial Sequence
  Description of Artificial Sequence: Synthetic oligonucleotide
cauugaauuuccguuaaaa

SEQ ID NO: 2333309 - RNA, 19 nt, Artificial Sequence
  Description of Artificial Sequence: Synthetic oligonucleotide
auuauccuaggaagucaac

SEQ ID NO: 2333310 - RNA, 19 nt, Artificial Sequence
  Description of Artificial Sequence: Synthetic oligonucleotide
auauugcacuggguaaagg

SEQ ID NO: 2333311 - RNA, 19 nt, Artificial Sequence
  Description of Artificial Sequence: Synthetic oligonucleotide
ggcucaguuuaaaacagag

SEQ ID NO: 2333312 - RNA, 19 nt, Artificial Sequence
  Description of Artificial Sequence: Synthetic oligonucleotide
aggcuccgcuucuagacag

SEQ ID NO: 2333313 - RNA, 19 nt, Artificial Sequence
  Description of Artificial Sequence: Synthetic oligonucleotide
uugcuggugugacuugugu

SEQ ID NO: 2333314 - RNA, 19 nt, Artificial Sequence
  Description of Artificial Sequence: Synthetic oligonucleotide
gagaaugucucaggacacc

SEQ ID NO: 2333315 - RNA, 19 nt, Artificial Sequence
  Description of Artificial Sequence: Synthetic oligonucleotide
uuccgaaguauuugcuggu

SEQ ID NO: 2333316 - RNA, 19 nt, Artificial Sequence
  Description of Artificial Sequence: Synthetic oligonucleotide
guaaagguacguuugguuu

SEQ ID NO: 2333317 - RNA, 19 nt, Artificial Sequence
  Description of Artificial Sequence: Synthetic oligonucleotide
ucaggacacccguguaaag

SEQ ID NO: 2333318 - RNA, 19 nt, Artificial Sequence
  Description of Artificial Sequence: Synthetic oligonucleotide
ccguguaaagcacacauuc

SEQ ID NO: 2333319 - RNA, 19 nt, Artificial Sequence
  Description of Artificial Sequence: Synthetic oligonucleotide
cagccuagugagcuggagc

SEQ ID NO: 2333320 - RNA, 19 nt, Artificial Sequence
  Description of Artificial Sequence: Synthetic oligonucleotide
acuucgggaugcaucacag

SEQ ID NO: 2333321 - RNA, 19 nt, Artificial Sequence
  Description of Artificial Sequence: Synthetic oligonucleotide
gaggcagcugucuguaaca

SEQ ID NO: 2333322 - RNA, 19 nt, Artificial Sequence
  Description of Artificial Sequence: Synthetic oligonucleotide
ccaccaucuaucuaucuac

SEQ ID NO: 2333323 - RNA, 19 nt, Artificial Sequence
  Description of Artificial Sequence: Synthetic oligonucleotide
ugguuugcacaugagcaaa

SEQ ID NO: 2333324 - RNA, 19 nt, Artificial Sequence
  Description of Artificial Sequence: Synthetic oligonucleotide
ugcuggugugacuuguguc

SEQ ID NO: 2333325 - RNA, 19 nt, Artificial Sequence
  Description of Artificial Sequence: Synthetic oligonucleotide
uuagaccaccaucuaucua

SEQ ID NO: 2333326 - RNA, 19 nt, Artificial Sequence
  Description of Artificial Sequence: Synthetic oligonucleotide
agcugguaugucaucauga

SEQ ID NO: 2333327 - RNA, 19 nt, Artificial Sequence
  Description of Artificial Sequence: Synthetic oligonucleotide
uggagcccagagaaucuga

SEQ ID NO: 2333328 - RNA, 19 nt, Artificial Sequence
  Description of Artificial Sequence: Synthetic oligonucleotide
uccaacuggugagggaggc

SEQ ID NO: 2333329 - RNA, 19 nt, Artificial Sequence
  Description of Artificial Sequence: Synthetic oligonucleotide
acacucugagagcuuauuu

SEQ ID NO: 2333330 - RNA, 19 nt, Artificial Sequence
  Description of Artificial Sequence: Synthetic oligonucleotide
uccgaaguauuugcuggug

SEQ ID NO: 2333331 - RNA, 19 nt, Artificial Sequence
  Description of Artificial Sequence: Synthetic oligonucleotide
cuacccuuaagauccaacu

SEQ ID NO: 2333332 - RNA, 19 nt, Artificial Sequence
  Description of Artificial Sequence: Synthetic oligonucleotide
auucaagauaguagagaga

SEQ ID NO: 2333333 - RNA, 19 nt, Artificial Sequence
  Description of Artificial Sequence: Synthetic oligonucleotide
cucccgguccucuuuuaag

SEQ ID NO: 2333334 - RNA, 19 nt, Artificial Sequence
  Description of Artificial Sequence: Synthetic oligonucleotide
uaguagagagaagguuuug

SEQ ID NO: 2333335 - RNA, 19 nt, Artificial Sequence
  Description of Artificial Sequence: Synthetic oligonucleotide
agauccaacuggugaggga

SEQ ID NO: 2333336 - RNA, 19 nt, Artificial Sequence
  Description of Artificial Sequence: Synthetic oligonucleotide
aucaaggaauauauauuaa

SEQ ID NO: 2333337 - RNA, 19 nt, Artificial Sequence
  Description of Artificial Sequence: Synthetic oligonucleotide
cuguguuggccaucagcag

SEQ ID NO: 2333338 - RNA, 19 nt, Artificial Sequence
  Description of Artificial Sequence: Synthetic oligonucleotide
caaucaaggaauauauauu

SEQ ID NO: 2333339 - RNA, 19 nt, Artificial Sequence
  Description of Artificial Sequence: Synthetic oligonucleotide
aguaacaagcauaggcuua

SEQ ID NO: 2333340 - RNA, 19 nt, Artificial Sequence
  Description of Artificial Sequence: Synthetic oligonucleotide
auuugcuggugugacuugu

SEQ ID NO: 2333341 - RNA, 19 nt, Artificial Sequence
  Description of Artificial Sequence: Synthetic oligonucleotide
gucacacauauauugcacu

SEQ ID NO: 2333342 - RNA, 19 nt, Artificial Sequence
  Description of Artificial Sequence: Synthetic oligonucleotide
auaguagagagaagguuuu

SEQ ID NO: 2333343 - RNA, 19 nt, Artificial Sequence
  Description of Artificial Sequence: Synthetic oligonucleotide
cuaggaagucaacuucuga

SEQ ID NO: 2333344 - RNA, 19 nt, Artificial Sequence
  Description of Artificial Sequence: Synthetic oligonucleotide
gcuuagaccaccaucuauc

SEQ ID NO: 2333345 - RNA, 19 nt, Artificial Sequence
  Description of Artificial Sequence: Synthetic oligonucleotide
cuucgggaugcaucacagc

SEQ ID NO: 2333346 - RNA, 19 nt, Artificial Sequence
  Description of Artificial Sequence: Synthetic oligonucleotide
cuggaugcuuggcaucuug

SEQ ID NO: 2333347 - RNA, 19 nt, Artificial Sequence
  Description of Artificial Sequence: Synthetic oligonucleotide
uggcaguuuuguguuuaag

SEQ ID NO: 2333348 - RNA, 19 nt, Artificial Sequence
  Description of Artificial Sequence: Synthetic oligonucleotide
uaucuacccuuaagaucca

SEQ ID NO: 2333349 - RNA, 19 nt, Artificial Sequence
  Description of Artificial Sequence: Synthetic oligonucleotide
agaugggguccugcaagac

SEQ ID NO: 2333350 - RNA, 19 nt, Artificial Sequence
  Description of Artificial Sequence: Synthetic oligonucleotide
guguuuaaguaacaagcau

SEQ ID NO: 2333351 - RNA, 19 nt, Artificial Sequence
  Description of Artificial Sequence: Synthetic oligonucleotide
gcagucacacauauauugc

SEQ ID NO: 2333352 - RNA, 19 nt, Artificial Sequence
  Description of Artificial Sequence: Synthetic oligonucleotide
ugcugacaguaaacauuca

SEQ ID NO: 2333353 - RNA, 19 nt, Artificial Sequence
  Description of Artificial Sequence: Synthetic oligonucleotide
acauugaauuuccguuaaa

SEQ ID NO: 2333354 - RNA, 19 nt, Artificial Sequence
  Description of Artificial Sequence: Synthetic oligonucleotide
gcugacaguaaacauucaa

SEQ ID NO: 2333355 - RNA, 19 nt, Artificial Sequence
  Description of Artificial Sequence: Synthetic oligonucleotide
agggaggcucaguuuaaaa

SEQ ID NO: 2333356 - RNA, 19 nt, Artificial Sequence
  Description of Artificial Sequence: Synthetic oligonucleotide
guacguuugguuugcacau

SEQ ID NO: 2333357 - RNA, 19 nt, Artificial Sequence
  Description of Artificial Sequence: Synthetic oligonucleotide
guuggccaucagcagccag

SEQ ID NO: 2333358 - RNA, 19 nt, Artificial Sequence
  Description of Artificial Sequence: Synthetic oligonucleotide
cuuaaugaacugcucacuu

SEQ ID NO: 2333359 - RNA, 19 nt, Artificial Sequence
  Description of Artificial Sequence: Synthetic oligonucleotide
augaugcuugucaucugug

SEQ ID NO: 2333360 - RNA, 19 nt, Artificial Sequence
  Description of Artificial Sequence: Synthetic oligonucleotide
guggcagaggcuccgcuuc

SEQ ID NO: 2333361 - RNA, 19 nt, Artificial Sequence
  Description of Artificial Sequence: Synthetic oligonucleotide
cuagugagcuggagcccag

SEQ ID NO: 2333362 - RNA, 19 nt, Artificial Sequence
  Description of Artificial Sequence: Synthetic oligonucleotide
gagagcuuauuuacauuaa

SEQ ID NO: 2333363 - RNA, 19 nt, Artificial Sequence
  Description of Artificial Sequence: Synthetic oligonucleotide
aguuaacaaucaaggaaua

SEQ ID NO: 2333364 - RNA, 19 nt, Artificial Sequence
  Description of Artificial Sequence: Synthetic oligonucleotide
guuuuguguuuaaguaaca

SEQ ID NO: 2333365 - RNA, 19 nt, Artificial Sequence
  Description of Artificial Sequence: Synthetic oligonucleotide
gaggcuccgcuucuagaca

SEQ ID NO: 2333366 - RNA, 19 nt, Artificial Sequence
  Description of Artificial Sequence: Synthetic oligonucleotide
aaagggaggcucaguuuaa

SEQ ID NO: 2333367 - RNA, 19 nt, Artificial Sequence
  Description of Artificial Sequence: Synthetic oligonucleotide
caugaugcuugucaucugu

SEQ ID NO: 2333368 - RNA, 19 nt, Artificial Sequence
  Description of Artificial Sequence: Synthetic oligonucleotide
gacacccguguaaagcaca

SEQ ID NO: 2333369 - RNA, 19 nt, Artificial Sequence
  Description of Artificial Sequence: Synthetic oligonucleotide
caucuaucuaucuacccuu

SEQ ID NO: 2333370 - RNA, 19 nt, Artificial Sequence
  Description of Artificial Sequence: Synthetic oligonucleotide
aagggaggcucaguuuaaa

SEQ ID NO: 2333371 - RNA, 19 nt, Artificial Sequence
  Description of Artificial Sequence: Synthetic oligonucleotide
gucuguagucacuuuugcu

SEQ ID NO: 2333372 - RNA, 19 nt, Artificial Sequence
  Description of Artificial Sequence: Synthetic oligonucleotide
acagccuagugagcuggag

SEQ ID NO: 2333373 - RNA, 19 nt, Artificial Sequence
  Description of Artificial Sequence: Synthetic oligonucleotide
uaacaagcauaggcuuaga

SEQ ID NO: 2333374 - RNA, 19 nt, Artificial Sequence
  Description of Artificial Sequence: Synthetic oligonucleotide
gugucacuuacugccugcc

SEQ ID NO: 2333375 - RNA, 19 nt, Artificial Sequence
  Description of Artificial Sequence: Synthetic oligonucleotide
acuuacugccugccccacu

SEQ ID NO: 2333376 - RNA, 19 nt, Artificial Sequence
  Description of Artificial Sequence: Synthetic oligonucleotide
aagcagucacacauauauu

SEQ ID NO: 2333377 - RNA, 19 nt, Artificial Sequence
  Description of Artificial Sequence: Synthetic oligonucleotide
aguaaacauucaagauagu

SEQ ID NO: 2333378 - RNA, 19 nt, Artificial Sequence
  Description of Artificial Sequence: Synthetic oligonucleotide
cuggagcccagagaaucug

SEQ ID NO: 2333379 - RNA, 19 nt, Artificial Sequence
  Description of Artificial Sequence: Synthetic oligonucleotide
cugagcaguuaacaaucaa

SEQ ID NO: 2333380 - RNA, 19 nt, Artificial Sequence
  Description of Artificial Sequence: Synthetic oligonucleotide
gguaaagguacguuugguu

SEQ ID NO: 2333381 - RNA, 19 nt, Artificial Sequence
  Description of Artificial Sequence: Synthetic oligonucleotide
cuugugucacuuacugccu

SEQ ID NO: 2333382 - RNA, 19 nt, Artificial Sequence
  Description of Artificial Sequence: Synthetic oligonucleotide
ugccugccccacuucggga

SEQ ID NO: 2333383 - RNA, 19 nt, Artificial Sequence
  Description of Artificial Sequence: Synthetic oligonucleotide
cucaggacacccguguaaa

SEQ ID NO: 2333384 - RNA, 19 nt, Artificial Sequence
  Description of Artificial Sequence: Synthetic oligonucleotide
acaaguggucacacacacu

SEQ ID NO: 2333385 - RNA, 19 nt, Artificial Sequence
  Description of Artificial Sequence: Synthetic oligonucleotide
cguacuuaaugaacugcuc

SEQ ID NO: 2333386 - RNA, 19 nt, Artificial Sequence
  Description of Artificial Sequence: Synthetic oligonucleotide
cuuggcccucugugaacug

SEQ ID NO: 2333387 - RNA, 19 nt, Artificial Sequence
  Description of Artificial Sequence: Synthetic oligonucleotide
aagguacguuugguuugca

SEQ ID NO: 2333388 - RNA, 19 nt, Artificial Sequence
  Description of Artificial Sequence: Synthetic oligonucleotide
gcagaggcuccgcuucuag

SEQ ID NO: 2333389 - RNA, 19 nt, Artificial Sequence
  Description of Artificial Sequence: Synthetic oligonucleotide
aggcucaguuuaaaacaga

SEQ ID NO: 2333390 - RNA, 19 nt, Artificial Sequence
  Description of Artificial Sequence: Synthetic oligonucleotide
gcucaguuuaaaacagaga

SEQ ID NO: 2333391 - RNA, 19 nt, Artificial Sequence
  Description of Artificial Sequence: Synthetic oligonucleotide
cacauauauugcacugggu

SEQ ID NO: 2333392 - RNA, 19 nt, Artificial Sequence
  Description of Artificial Sequence: Synthetic oligonucleotide
aucuaucuaucuacccuua

SEQ ID NO: 2333393 - RNA, 19 nt, Artificial Sequence
  Description of Artificial Sequence: Synthetic oligonucleotide
augucucaggacacccgug

SEQ ID NO: 2333394 - RNA, 19 nt, Artificial Sequence
  Description of Artificial Sequence: Synthetic oligonucleotide
ccggcaaggcucacaagug

SEQ ID NO: 2333395 - RNA, 19 nt, Artificial Sequence
  Description of Artificial Sequence: Synthetic oligonucleotide
aggcuuagaccaccaucua

SEQ ID NO: 2333396 - RNA, 19 nt, Artificial Sequence
  Description of Artificial Sequence: Synthetic oligonucleotide
ggaugcuuggcaucuugua

SEQ ID NO: 2333397 - RNA, 19 nt, Artificial Sequence
  Description of Artificial Sequence: Synthetic oligonucleotide
ccaucuaucuaucuacccu

SEQ ID NO: 2333398 - RNA, 19 nt, Artificial Sequence
  Description of Artificial Sequence: Synthetic oligonucleotide
cuuacugccugccccacuu

SEQ ID NO: 2333399 - RNA, 19 nt, Artificial Sequence
  Description of Artificial Sequence: Synthetic oligonucleotide
gguaugucaucaugaugcu

SEQ ID NO: 2333400 - RNA, 19 nt, Artificial Sequence
  Description of Artificial Sequence: Synthetic oligonucleotide
caaugcuuccgaaguauuu

SEQ ID NO: 2333401 - RNA, 19 nt, Artificial Sequence
  Description of Artificial Sequence: Synthetic oligonucleotide
gagaucccgggagggcagc

SEQ ID NO: 2333402 - RNA, 19 nt, Artificial Sequence
  Description of Artificial Sequence: Synthetic oligonucleotide
cccgguccucuuuuaagac

SEQ ID NO: 2333403 - RNA, 19 nt, Artificial Sequence
  Description of Artificial Sequence: Synthetic oligonucleotide
gaccaccaucuaucuaucu

SEQ ID NO: 2333404 - RNA, 19 nt, Artificial Sequence
  Description of Artificial Sequence: Synthetic oligonucleotide
gugcuuguccggcaaggcu

SEQ ID NO: 2333405 - RNA, 19 nt, Artificial Sequence
  Description of Artificial Sequence: Synthetic oligonucleotide
cacacacucugagagcuua

SEQ ID NO: 2333406 - RNA, 19 nt, Artificial Sequence
  Description of Artificial Sequence: Synthetic oligonucleotide
uucucccgguccucuuuua

SEQ ID NO: 2333407 - RNA, 19 nt, Artificial Sequence
  Description of Artificial Sequence: Synthetic oligonucleotide
cagccagaugggguccugc

SEQ ID NO: 2333408 - RNA, 19 nt, Artificial Sequence
  Description of Artificial Sequence: Synthetic oligonucleotide
gugacuugugucacuuacu

SEQ ID NO: 2333409 - RNA, 19 nt, Artificial Sequence
  Description of Artificial Sequence: Synthetic oligonucleotide
guagucacuuuugcuuugu

SEQ ID NO: 2333410 - RNA, 19 nt, Artificial Sequence
  Description of Artificial Sequence: Synthetic oligonucleotide
ccccacuucgggaugcauc

SEQ ID NO: 2333411 - RNA, 19 nt, Artificial Sequence
  Description of Artificial Sequence: Synthetic oligonucleotide
cugagagcuuauuuacauu

SEQ ID NO: 2333412 - RNA, 19 nt, Artificial Sequence
  Description of Artificial Sequence: Synthetic oligonucleotide
aucuacccuuaagauccaa

SEQ ID NO: 2333413 - RNA, 19 nt, Artificial Sequence
  Description of Artificial Sequence: Synthetic oligonucleotide
ggaugcaucacagccuagu

SEQ ID NO: 2333414 - RNA, 19 nt, Artificial Sequence
  Description of Artificial Sequence: Synthetic oligonucleotide
cguuugguuugcacaugag

SEQ ID NO: 2333415 - RNA, 19 nt, Artificial Sequence
  Description of Artificial Sequence: Synthetic oligonucleotide
gcaaggcucacaagugguc

SEQ ID NO: 2333416 - RNA, 19 nt, Artificial Sequence
  Description of Artificial Sequence: Synthetic oligonucleotide
cacuuacugccugccccac

SEQ ID NO: 2333417 - RNA, 19 nt, Artificial Sequence
  Description of Artificial Sequence: Synthetic oligonucleotide
ggcuuagaccaccaucuau

SEQ ID NO: 2333418 - RNA, 19 nt, Artificial Sequence
  Description of Artificial Sequence: Synthetic oligonucleotide
ggacacccguguaaagcac

SEQ ID NO: 2333419 - RNA, 19 nt, Artificial Sequence
  Description of Artificial Sequence: Synthetic oligonucleotide
cuacaaccuuggcccucug

SEQ ID NO: 2333420 - RNA, 19 nt, Artificial Sequence
  Description of Artificial Sequence: Synthetic oligonucleotide
cacagccuagugagcugga

SEQ ID NO: 2333421 - RNA, 19 nt, Artificial Sequence
  Description of Artificial Sequence: Synthetic oligonucleotide
gguccugcaagacguacuu

SEQ ID NO: 2333422 - RNA, 19 nt, Artificial Sequence
  Description of Artificial Sequence: Synthetic oligonucleotide
gcaucacagccuagugagc

SEQ ID NO: 2333423 - RNA, 19 nt, Artificial Sequence
  Description of Artificial Sequence: Synthetic oligonucleotide
cccuuaagauccaacuggu

SEQ ID NO: 2333424 - RNA, 19 nt, Artificial Sequence
  Description of Artificial Sequence: Synthetic oligonucleotide
ccuagugagcuggagccca

SEQ ID NO: 2333425 - RNA, 19 nt, Artificial Sequence
  Description of Artificial Sequence: Synthetic oligonucleotide
agucaacuucugagcaguu

SEQ ID NO: 2333426 - RNA, 19 nt, Artificial Sequence
  Description of Artificial Sequence: Synthetic oligonucleotide
ggcccucugugaacugggg

SEQ ID NO: 2333427 - RNA, 19 nt, Artificial Sequence
  Description of Artificial Sequence: Synthetic oligonucleotide
ggcaaggcucacaaguggu

SEQ ID NO: 2333428 - RNA, 19 nt, Artificial Sequence
  Description of Artificial Sequence: Synthetic oligonucleotide
gggguccugcaagacguac

SEQ ID NO: 2333429 - RNA, 19 nt, Artificial Sequence
  Description of Artificial Sequence: Synthetic oligonucleotide
ugccccacuucgggaugca

SEQ ID NO: 2333430 - RNA, 19 nt, Artificial Sequence
  Description of Artificial Sequence: Synthetic oligonucleotide
cauaggcuuagaccaccau

SEQ ID NO: 2333431 - RNA, 19 nt, Artificial Sequence
  Description of Artificial Sequence: Synthetic oligonucleotide
gcuuguccggcaaggcuca

SEQ ID NO: 2333432 - RNA, 19 nt, Artificial Sequence
  Description of Artificial Sequence: Synthetic oligonucleotide
gcauaggcuuagaccacca

SEQ ID NO: 2333433 - RNA, 19 nt, Artificial Sequence
  Description of Artificial Sequence: Synthetic oligonucleotide
ggugugacuugugucacuu

SEQ ID NO: 2333434 - RNA, 19 nt, Artificial Sequence
  Description of Artificial Sequence: Synthetic oligonucleotide
gccagaugggguccugcaa

SEQ ID NO: 2333435 - RNA, 19 nt, Artificial Sequence
  Description of Artificial Sequence: Synthetic oligonucleotide
cuuguccggcaaggcucac

SEQ ID NO: 2333436 - RNA, 19 nt, Artificial Sequence
  Description of Artificial Sequence: Synthetic oligonucleotide
cguguaaagcacacauucu

SEQ ID NO: 2333437 - RNA, 19 nt, Artificial Sequence
  Description of Artificial Sequence: Synthetic oligonucleotide
cgggagggcagcugguaug

SEQ ID NO: 2333438 - RNA, 19 nt, Artificial Sequence
  Description of Artificial Sequence: Synthetic oligonucleotide
gagaagguuuuggcaguuu

SEQ ID NO: 2333439 - RNA, 19 nt, Artificial Sequence
  Description of Artificial Sequence: Synthetic oligonucleotide
cacccguguaaagcacaca

SEQ ID NO: 2333440 - RNA, 19 nt, Artificial Sequence
  Description of Artificial Sequence: Synthetic oligonucleotide
gguccucuuuuaagacuga

SEQ ID NO: 2333441 - RNA, 19 nt, Artificial Sequence
  Description of Artificial Sequence: Synthetic oligonucleotide
ggcuacaaccuuggcccuc

SEQ ID NO: 2333442 - RNA, 19 nt, Artificial Sequence
  Description of Artificial Sequence: Synthetic oligonucleotide
gcuacaaccuuggcccucu

SEQ ID NO: 2333443 - RNA, 19 nt, Artificial Sequence
  Description of Artificial Sequence: Synthetic oligonucleotide
ccugccccacuucgggaug

SEQ ID NO: 2333444 - RNA, 19 nt, Artificial Sequence
  Description of Artificial Sequence: Synthetic oligonucleotide
guccugcaagacguacuua

SEQ ID NO: 2333445 - RNA, 19 nt, Artificial Sequence
  Description of Artificial Sequence: Synthetic oligonucleotide
ccgguccucuuuuaagacu

SEQ ID NO: 2333446 - RNA, 19 nt, Artificial Sequence
  Description of Artificial Sequence: Synthetic oligonucleotide
cgggaugcaucacagccua

SEQ ID NO: 2333447 - RNA, 19 nt, Artificial Sequence
  Description of Artificial Sequence: Synthetic oligonucleotide
ccguuaaaacauggcuaca

SEQ ID NO: 2333448 - RNA, 19 nt, Artificial Sequence
  Description of Artificial Sequence: Synthetic oligonucleotide
ccugcaagacguacuuaau

SEQ ID NO: 2333449 - RNA, 19 nt, Artificial Sequence
  Description of Artificial Sequence: Synthetic oligonucleotide
cacuuuccucugugucugu

SEQ ID NO: 2333450 - RNA, 19 nt, Artificial Sequence
  Description of Artificial Sequence: Synthetic oligonucleotide
ggcaucuuguaaacacauu

SEQ ID NO: 2333451 - RNA, 19 nt, Artificial Sequence
  Description of Artificial Sequence: Synthetic oligonucleotide
gggaggcagcugucuguaa

SEQ ID NO: 2333452 - RNA, 19 nt, Artificial Sequence
  Description of Artificial Sequence: Synthetic oligonucleotide
ggcagcugucuguaacauu

SEQ ID NO: 2333453 - RNA, 19 nt, Artificial Sequence
  Description of Artificial Sequence: Synthetic oligonucleotide
gccugccccacuucgggau

SEQ ID NO: 2333454 - RNA, 19 nt, Artificial Sequence
  Description of Artificial Sequence: Synthetic oligonucleotide
cccguguaaagcacacauu

SEQ ID NO: 2333455 - RNA, 19 nt, Artificial Sequence
  Description of Artificial Sequence: Synthetic oligonucleotide
ggcagaggcuccgcuucua

SEQ ID NO: 2333456 - RNA, 19 nt, Artificial Sequence
  Description of Artificial Sequence: Synthetic oligonucleotide
gcacaugagcaaagugcuu

SEQ ID NO: 2333457 - RNA, 19 nt, Artificial Sequence
  Description of Artificial Sequence: Synthetic oligonucleotide
ccgggagggcagcugguau

SEQ ID NO: 2333458 - RNA, 19 nt, Artificial Sequence
  Description of Artificial Sequence: Synthetic oligonucleotide
gccccacuucgggaugcau

SEQ ID NO: 2333459 - RNA, 19 nt, Artificial Sequence
  Description of Artificial Sequence: Synthetic oligonucleotide
aucuuuguuacguagaugc

SEQ ID NO: 2333460 - RNA, 19 nt, Artificial Sequence
  Description of Artificial Sequence: Synthetic oligonucleotide
auagcugucacucagguag

SEQ ID NO: 2333461 - RNA, 19 nt, Artificial Sequence
  Description of Artificial Sequence: Synthetic oligonucleotide
ucauauguguucuucaggg

SEQ ID NO: 2333462 - RNA, 19 nt, Artificial Sequence
  Description of Artificial Sequence: Synthetic oligonucleotide
gaugcuauuuaucuccagg

SEQ ID NO: 2333463 - RNA, 19 nt, Artificial Sequence
  Description of Artificial Sequence: Synthetic oligonucleotide
agcugaaugggucaccucc

SEQ ID NO: 2333464 - RNA, 19 nt, Artificial Sequence
  Description of Artificial Sequence: Synthetic oligonucleotide
ugagaggucuucaaugacg

SEQ ID NO: 2333465 - RNA, 19 nt, Artificial Sequence
  Description of Artificial Sequence: Synthetic oligonucleotide
guagaugcuauuuaucucc

SEQ ID NO: 2333466 - RNA, 19 nt, Artificial Sequence
  Description of Artificial Sequence: Synthetic oligonucleotide
cuuauugaucucuagguug

SEQ ID NO: 2333467 - RNA, 19 nt, Artificial Sequence
  Description of Artificial Sequence: Synthetic oligonucleotide
agauguaggggccugagag

SEQ ID NO: 2333468 - RNA, 19 nt, Artificial Sequence
  Description of Artificial Sequence: Synthetic oligonucleotide
aagccaaguccuuuaggcc

SEQ ID NO: 2333469 - RNA, 19 nt, Artificial Sequence
  Description of Artificial Sequence: Synthetic oligonucleotide
aucacagucucucucgggc

SEQ ID NO: 2333470 - RNA, 19 nt, Artificial Sequence
  Description of Artificial Sequence: Synthetic oligonucleotide
agccaaguccuuuaggccc

SEQ ID NO: 2333471 - RNA, 19 nt, Artificial Sequence
  Description of Artificial Sequence: Synthetic oligonucleotide
ucuuugagggccucuaccg

SEQ ID NO: 2333472 - RNA, 19 nt, Artificial Sequence
  Description of Artificial Sequence: Synthetic oligonucleotide
aggaugcugucauugaccc

SEQ ID NO: 2333473 - RNA, 19 nt, Artificial Sequence
  Description of Artificial Sequence: Synthetic oligonucleotide
ucugucaaaggcuuuccgg

SEQ ID NO: 2333474 - RNA, 19 nt, Artificial Sequence
  Description of Artificial Sequence: Synthetic oligonucleotide
gaugaucuuuguuacguag

SEQ ID NO: 2333475 - RNA, 19 nt, Artificial Sequence
  Description of Artificial Sequence: Synthetic oligonucleotide
aaaauggauggguacguca

SEQ ID NO: 2333476 - RNA, 19 nt, Artificial Sequence
  Description of Artificial Sequence: Synthetic oligonucleotide
augcuauuuaucuccaggg

SEQ ID NO: 2333477 - RNA, 19 nt, Artificial Sequence
  Description of Artificial Sequence: Synthetic oligonucleotide
uagacaacaucauaugugu

SEQ ID NO: 2333478 - RNA, 19 nt, Artificial Sequence
  Description of Artificial Sequence: Synthetic oligonucleotide
ucuccaaucugcaaccugc

SEQ ID NO: 2333479 - RNA, 19 nt, Artificial Sequence
  Description of Artificial Sequence: Synthetic oligonucleotide
aacaucauauguguucuuc

SEQ ID NO: 2333480 - RNA, 19 nt, Artificial Sequence
  Description of Artificial Sequence: Synthetic oligonucleotide
agagacgaacgauggaacc

SEQ ID NO: 2333481 - RNA, 19 nt, Artificial Sequence
  Description of Artificial Sequence: Synthetic oligonucleotide
ucaguccagaccaagggcc

SEQ ID NO: 2333482 - RNA, 19 nt, Artificial Sequence
  Description of Artificial Sequence: Synthetic oligonucleotide
aaugacgcgcuucacuuug

SEQ ID NO: 2333483 - RNA, 19 nt, Artificial Sequence
  Description of Artificial Sequence: Synthetic oligonucleotide
gaugaaaauggauggguac

SEQ ID NO: 2333484 - RNA, 19 nt, Artificial Sequence
  Description of Artificial Sequence: Synthetic oligonucleotide
uuuaucuccagggaugugc

SEQ ID NO: 2333485 - RNA, 19 nt, Artificial Sequence
  Description of Artificial Sequence: Synthetic oligonucleotide
aucuuggugaugaaaaugg

SEQ ID NO: 2333486 - RNA, 19 nt, Artificial Sequence
  Description of Artificial Sequence: Synthetic oligonucleotide
uuauugaucucuagguugu

SEQ ID NO: 2333487 - RNA, 19 nt, Artificial Sequence
  Description of Artificial Sequence: Synthetic oligonucleotide
uuuguuacguagaugcuau

SEQ ID NO: 2333488 - RNA, 19 nt, Artificial Sequence
  Description of Artificial Sequence: Synthetic oligonucleotide
uacgucaccaaugugcggg

SEQ ID NO: 2333489 - RNA, 19 nt, Artificial Sequence
  Description of Artificial Sequence: Synthetic oligonucleotide
gacaacaucauauguguuc

SEQ ID NO: 2333490 - RNA, 19 nt, Artificial Sequence
  Description of Artificial Sequence: Synthetic oligonucleotide
auauguguucuucagggcu

SEQ ID NO: 2333491 - RNA, 19 nt, Artificial Sequence
  Description of Artificial Sequence: Synthetic oligonucleotide
ucuucaaugacgcgcuuca

SEQ ID NO: 2333492 - RNA, 19 nt, Artificial Sequence
  Description of Artificial Sequence: Synthetic oligonucleotide
gaugcugucauugacccug

SEQ ID NO: 2333493 - RNA, 19 nt, Artificial Sequence
  Description of Artificial Sequence: Synthetic oligonucleotide
acguagaugcuauuuaucu

SEQ ID NO: 2333494 - RNA, 19 nt, Artificial Sequence
  Description of Artificial Sequence: Synthetic oligonucleotide
aaugggucaccucccgaac

SEQ ID NO: 2333495 - RNA, 19 nt, Artificial Sequence
  Description of Artificial Sequence: Synthetic oligonucleotide
caugacguccucuagcccc

SEQ ID NO: 2333496 - RNA, 19 nt, Artificial Sequence
  Description of Artificial Sequence: Synthetic oligonucleotide
uuugaugagcuugaucucc

SEQ ID NO: 2333497 - RNA, 19 nt, Artificial Sequence
  Description of Artificial Sequence: Synthetic oligonucleotide
ugguagaucuccucaaagc

SEQ ID NO: 2333498 - RNA, 19 nt, Artificial Sequence
  Description of Artificial Sequence: Synthetic oligonucleotide
aaugugaucuccucguauu

SEQ ID NO: 2333499 - RNA, 19 nt, Artificial Sequence
  Description of Artificial Sequence: Synthetic oligonucleotide
accugaguuaccccuuucc

SEQ ID NO: 2333500 - RNA, 19 nt, Artificial Sequence
  Description of Artificial Sequence: Synthetic oligonucleotide
ucuaccgcagcugaauggg

SEQ ID NO: 2333501 - RNA, 19 nt, Artificial Sequence
  Description of Artificial Sequence: Synthetic oligonucleotide
ucuagccccacacuguuga

SEQ ID NO: 2333502 - RNA, 19 nt, Artificial Sequence
  Description of Artificial Sequence: Synthetic oligonucleotide
guagacaacaucauaugug

SEQ ID NO: 2333503 - RNA, 19 nt, Artificial Sequence
  Description of Artificial Sequence: Synthetic oligonucleotide
aggugauggaggcagggcg

SEQ ID NO: 2333504 - RNA, 19 nt, Artificial Sequence
  Description of Artificial Sequence: Synthetic oligonucleotide
ugcaugacguccucuagcc

SEQ ID NO: 2333505 - RNA, 19 nt, Artificial Sequence
  Description of Artificial Sequence: Synthetic oligonucleotide
accgccaggaucuugucuc

SEQ ID NO: 2333506 - RNA, 19 nt, Artificial Sequence
  Description of Artificial Sequence: Synthetic oligonucleotide
ucuagguugugaugucugg

SEQ ID NO: 2333507 - RNA, 19 nt, Artificial Sequence
  Description of Artificial Sequence: Synthetic oligonucleotide
ugaagccaaguccuuuagg

SEQ ID NO: 2333508 - RNA, 19 nt, Artificial Sequence
  Description of Artificial Sequence: Synthetic oligonucleotide
gacauagagacgaacgaug

SEQ ID NO: 2333509 - RNA, 19 nt, Artificial Sequence
  Description of Artificial Sequence: Synthetic oligonucleotide
uucaguccagaccaagggc

SEQ ID NO: 2333510 - RNA, 19 nt, Artificial Sequence
  Description of Artificial Sequence: Synthetic oligonucleotide
agaccaagggcccagguga

SEQ ID NO: 2333511 - RNA, 19 nt, Artificial Sequence
  Description of Artificial Sequence: Synthetic oligonucleotide
uccaaugugaucuccucgu

SEQ ID NO: 2333512 - RNA, 19 nt, Artificial Sequence
  Description of Artificial Sequence: Synthetic oligonucleotide
uuuagguagacaacaucau

SEQ ID NO: 2333513 - RNA, 19 nt, Artificial Sequence
  Description of Artificial Sequence: Synthetic oligonucleotide
ugcuauuuaucuccaggga

SEQ ID NO: 2333514 - RNA, 19 nt, Artificial Sequence
  Description of Artificial Sequence: Synthetic oligonucleotide
gaggucuucaaugacgcgc

SEQ ID NO: 2333515 - RNA, 19 nt, Artificial Sequence
  Description of Artificial Sequence: Synthetic oligonucleotide
uccuuuaggcccuuugaug

SEQ ID NO: 2333516 - RNA, 19 nt, Artificial Sequence
  Description of Artificial Sequence: Synthetic oligonucleotide
ugucauugacccugaggcg

SEQ ID NO: 2333517 - RNA, 19 nt, Artificial Sequence
  Description of Artificial Sequence: Synthetic oligonucleotide
aguuuuaguggcucuguca

SEQ ID NO: 2333518 - RNA, 19 nt, Artificial Sequence
  Description of Artificial Sequence: Synthetic oligonucleotide
ugaguuaccccuuuccaau

SEQ ID NO: 2333519 - RNA, 19 nt, Artificial Sequence
  Description of Artificial Sequence: Synthetic oligonucleotide
augacauagagacgaacga

SEQ ID NO: 2333520 - RNA, 19 nt, Artificial Sequence
  Description of Artificial Sequence: Synthetic oligonucleotide
gaucuuggugaugaaaaug

SEQ ID NO: 2333521 - RNA, 19 nt, Artificial Sequence
  Description of Artificial Sequence: Synthetic oligonucleotide
cuucgaugaucuuuguuac

SEQ ID NO: 2333522 - RNA, 19 nt, Artificial Sequence
  Description of Artificial Sequence: Synthetic oligonucleotide
aaucugcaaccugccaucc

SEQ ID NO: 2333523 - RNA, 19 nt, Artificial Sequence
  Description of Artificial Sequence: Synthetic oligonucleotide
gaaucacagucucucucgg

SEQ ID NO: 2333524 - RNA, 19 nt, Artificial Sequence
  Description of Artificial Sequence: Synthetic oligonucleotide
gucaguaccaccugcgaug

SEQ ID NO: 2333525 - RNA, 19 nt, Artificial Sequence
  Description of Artificial Sequence: Synthetic oligonucleotide
gaacgauggaaccugcuuc

SEQ ID NO: 2333526 - RNA, 19 nt, Artificial Sequence
  Description of Artificial Sequence: Synthetic oligonucleotide
acauagagacgaacgaugg

SEQ ID NO: 2333527 - RNA, 19 nt, Artificial Sequence
  Description of Artificial Sequence: Synthetic oligonucleotide
ugaugaaaauggaugggua

SEQ ID NO: 2333528 - RNA, 19 nt, Artificial Sequence
  Description of Artificial Sequence: Synthetic oligonucleotide
ucgaugaucuuuguuacgu

SEQ ID NO: 2333529 - RNA, 19 nt, Artificial Sequence
  Description of Artificial Sequence: Synthetic oligonucleotide
ucaaugacgcgcuucacuu

SEQ ID NO: 2333530 - RNA, 19 nt, Artificial Sequence
  Description of Artificial Sequence: Synthetic oligonucleotide
uuacguagaugcuauuuau

SEQ ID NO: 2333531 - RNA, 19 nt, Artificial Sequence
  Description of Artificial Sequence: Synthetic oligonucleotide
uucgaugaucuuuguuacg

SEQ ID NO: 2333532 - RNA, 19 nt, Artificial Sequence
  Description of Artificial Sequence: Synthetic oligonucleotide
aaccugccauccuuguggg

SEQ ID NO: 2333533 - RNA, 19 nt, Artificial Sequence
  Description of Artificial Sequence: Synthetic oligonucleotide
uuuccggcgcaugacauag

SEQ ID NO: 2333534 - RNA, 19 nt, Artificial Sequence
  Description of Artificial Sequence: Synthetic oligonucleotide
gagcauagcugucacucag

SEQ ID NO: 2333535 - RNA, 19 nt, Artificial Sequence
  Description of Artificial Sequence: Synthetic oligonucleotide
auagagacgaacgauggaa

SEQ ID NO: 2333536 - RNA, 19 nt, Artificial Sequence
  Description of Artificial Sequence: Synthetic oligonucleotide
gagaggucuucaaugacgc

SEQ ID NO: 2333537 - RNA, 19 nt, Artificial Sequence
  Description of Artificial Sequence: Synthetic oligonucleotide
ugaugucuggggagcauag

SEQ ID NO: 2333538 - RNA, 19 nt, Artificial Sequence
  Description of Artificial Sequence: Synthetic oligonucleotide
acaucauauguguucuuca

SEQ ID NO: 2333539 - RNA, 19 nt, Artificial Sequence
  Description of Artificial Sequence: Synthetic oligonucleotide
acaacaucauauguguucu

SEQ ID NO: 2333540 - RNA, 19 nt, Artificial Sequence
  Description of Artificial Sequence: Synthetic oligonucleotide
ugugcggguugucaguacc

SEQ ID NO: 2333541 - RNA, 19 nt, Artificial Sequence
  Description of Artificial Sequence: Synthetic oligonucleotide
guuuuaguggcucugucaa

SEQ ID NO: 2333542 - RNA, 19 nt, Artificial Sequence
  Description of Artificial Sequence: Synthetic oligonucleotide
uccggcgcaugacauagag

SEQ ID NO: 2333543 - RNA, 19 nt, Artificial Sequence
  Description of Artificial Sequence: Synthetic oligonucleotide
ggcuauucaguccagacca

SEQ ID NO: 2333544 - RNA, 19 nt, Artificial Sequence
  Description of Artificial Sequence: Synthetic oligonucleotide
uugaucucuagguugugau

SEQ ID NO: 2333545 - RNA, 19 nt, Artificial Sequence
  Description of Artificial Sequence: Synthetic oligonucleotide
uauuuaucuccagggaugu

SEQ ID NO: 2333546 - RNA, 19 nt, Artificial Sequence
  Description of Artificial Sequence: Synthetic oligonucleotide
cauauguguucuucagggc

SEQ ID NO: 2333547 - RNA, 19 nt, Artificial Sequence
  Description of Artificial Sequence: Synthetic oligonucleotide
uacguagaugcuauuuauc

SEQ ID NO: 2333548 - RNA, 19 nt, Artificial Sequence
  Description of Artificial Sequence: Synthetic oligonucleotide
guugucaguaccaccugcg

SEQ ID NO: 2333549 - RNA, 19 nt, Artificial Sequence
  Description of Artificial Sequence: Synthetic oligonucleotide
uugaccgccaggaucuugu

SEQ ID NO: 2333550 - RNA, 19 nt, Artificial Sequence
  Description of Artificial Sequence: Synthetic oligonucleotide
acgcgcuucacuuuguggu

SEQ ID NO: 2333551 - RNA, 19 nt, Artificial Sequence
  Description of Artificial Sequence: Synthetic oligonucleotide
acguccucuagccccacac

SEQ ID NO: 2333552 - RNA, 19 nt, Artificial Sequence
  Description of Artificial Sequence: Synthetic oligonucleotide
gauggguacgucaccaaug

SEQ ID NO: 2333553 - RNA, 19 nt, Artificial Sequence
  Description of Artificial Sequence: Synthetic oligonucleotide
uuaccccuuuccaauguga

SEQ ID NO: 2333554 - RNA, 19 nt, Artificial Sequence
  Description of Artificial Sequence: Synthetic oligonucleotide
auggguacgucaccaaugu

SEQ ID NO: 2333555 - RNA, 19 nt, Artificial Sequence
  Description of Artificial Sequence: Synthetic oligonucleotide
ugaagcccagaccugaguu

SEQ ID NO: 2333556 - RNA, 19 nt, Artificial Sequence
  Description of Artificial Sequence: Synthetic oligonucleotide
uagaugcuauuuaucucca

SEQ ID NO: 2333557 - RNA, 19 nt, Artificial Sequence
  Description of Artificial Sequence: Synthetic oligonucleotide
uggaaccugcuucuuugag

SEQ ID NO: 2333558 - RNA, 19 nt, Artificial Sequence
  Description of Artificial Sequence: Synthetic oligonucleotide
ucuuuguuacguagaugcu

SEQ ID NO: 2333559 - RNA, 19 nt, Artificial Sequence
  Description of Artificial Sequence: Synthetic oligonucleotide
ugugauccgcuuauugauc

SEQ ID NO: 2333560 - RNA, 19 nt, Artificial Sequence
  Description of Artificial Sequence: Synthetic oligonucleotide
ccaggaaugaucuugguga

SEQ ID NO: 2333561 - RNA, 19 nt, Artificial Sequence
  Description of Artificial Sequence: Synthetic oligonucleotide
ucugcaaccugccauccuu

SEQ ID NO: 2333562 - RNA, 19 nt, Artificial Sequence
  Description of Artificial Sequence: Synthetic oligonucleotide
gacgcgcuucacuuugugg

SEQ ID NO: 2333563 - RNA, 19 nt, Artificial Sequence
  Description of Artificial Sequence: Synthetic oligonucleotide
cucuaccgcagcugaaugg

SEQ ID NO: 2333564 - RNA, 19 nt, Artificial Sequence
  Description of Artificial Sequence: Synthetic oligonucleotide
ugggcuauucaguccagac

SEQ ID NO: 2333565 - RNA, 19 nt, Artificial Sequence
  Description of Artificial Sequence: Synthetic oligonucleotide
aguaccaccugcgaugcug

SEQ ID NO: 2333566 - RNA, 19 nt, Artificial Sequence
  Description of Artificial Sequence: Synthetic oligonucleotide
gguacgucaccaaugugcg

SEQ ID NO: 2333567 - RNA, 19 nt, Artificial Sequence
  Description of Artificial Sequence: Synthetic oligonucleotide
uuaggcccuuugaugagcu

SEQ ID NO: 2333568 - RNA, 19 nt, Artificial Sequence
  Description of Artificial Sequence: Synthetic oligonucleotide
ugucaguaccaccugcgau

SEQ ID NO: 2333569 - RNA, 19 nt, Artificial Sequence
  Description of Artificial Sequence: Synthetic oligonucleotide
uguuacguagaugcuauuu

SEQ ID NO: 2333570 - RNA, 19 nt, Artificial Sequence
  Description of Artificial Sequence: Synthetic oligonucleotide
augugcugguucccuacac

SEQ ID NO: 2333571 - RNA, 19 nt, Artificial Sequence
  Description of Artificial Sequence: Synthetic oligonucleotide
cauccuugugggcagcacc

SEQ ID NO: 2333572 - RNA, 19 nt, Artificial Sequence
  Description of Artificial Sequence: Synthetic oligonucleotide
uuuaggcccuuugaugagc

SEQ ID NO: 2333573 - RNA, 19 nt, Artificial Sequence
  Description of Artificial Sequence: Synthetic oligonucleotide
uccgcuuauugaucucuag

SEQ ID NO: 2333574 - RNA, 19 nt, Artificial Sequence
  Description of Artificial Sequence: Synthetic oligonucleotide
ugacauagagacgaacgau

SEQ ID NO: 2333575 - RNA, 19 nt, Artificial Sequence
  Description of Artificial Sequence: Synthetic oligonucleotide
ugaccuucucagcuggggu

SEQ ID NO: 2333576 - RNA, 19 nt, Artificial Sequence
  Description of Artificial Sequence: Synthetic oligonucleotide
ggguacgucaccaaugugc

SEQ ID NO: 2333577 - RNA, 19 nt, Artificial Sequence
  Description of Artificial Sequence: Synthetic oligonucleotide
ucaguaccaccugcgaugc

SEQ ID NO: 2333578 - RNA, 19 nt, Artificial Sequence
  Description of Artificial Sequence: Synthetic oligonucleotide
cucuagguugugaugucug

SEQ ID NO: 2333579 - RNA, 19 nt, Artificial Sequence
  Description of Artificial Sequence: Synthetic oligonucleotide
uugucaguaccaccugcga

SEQ ID NO: 2333580 - RNA, 19 nt, Artificial Sequence
  Description of Artificial Sequence: Synthetic oligonucleotide
uccucugugauccgcuuau

SEQ ID NO: 2333581 - RNA, 19 nt, Artificial Sequence
  Description of Artificial Sequence: Synthetic oligonucleotide
guuacguagaugcuauuua

SEQ ID NO: 2333582 - RNA, 19 nt, Artificial Sequence
  Description of Artificial Sequence: Synthetic oligonucleotide
cuccucguauuccaucucc

SEQ ID NO: 2333583 - RNA, 19 nt, Artificial Sequence
  Description of Artificial Sequence: Synthetic oligonucleotide
gaucucuagguugugaugu

SEQ ID NO: 2333584 - RNA, 19 nt, Artificial Sequence
  Description of Artificial Sequence: Synthetic oligonucleotide
cuuuaggcccuuugaugag

SEQ ID NO: 2333585 - RNA, 19 nt, Artificial Sequence
  Description of Artificial Sequence: Synthetic oligonucleotide
cucugucaaaggcuuuccg

SEQ ID NO: 2333586 - RNA, 19 nt, Artificial Sequence
  Description of Artificial Sequence: Synthetic oligonucleotide
aagcugucgcccuccacga

SEQ ID NO: 2333587 - RNA, 19 nt, Artificial Sequence
  Description of Artificial Sequence: Synthetic oligonucleotide
cuuugaugagcuugaucuc

SEQ ID NO: 2333588 - RNA, 19 nt, Artificial Sequence
  Description of Artificial Sequence: Synthetic oligonucleotide
gaaugggucaccucccgaa

SEQ ID NO: 2333589 - RNA, 19 nt, Artificial Sequence
  Description of Artificial Sequence: Synthetic oligonucleotide
gaguuaccccuuuccaaug

SEQ ID NO: 2333590 - RNA, 19 nt, Artificial Sequence
  Description of Artificial Sequence: Synthetic oligonucleotide
ugaaugggucaccucccga

SEQ ID NO: 2333591 - RNA, 19 nt, Artificial Sequence
  Description of Artificial Sequence: Synthetic oligonucleotide
aguuaccccuuuccaaugu

SEQ ID NO: 2333592 - RNA, 19 nt, Artificial Sequence
  Description of Artificial Sequence: Synthetic oligonucleotide
agaugcuauuuaucuccag

SEQ ID NO: 2333593 - RNA, 19 nt, Artificial Sequence
  Description of Artificial Sequence: Synthetic oligonucleotide
uccaguuuuaguggcucug

SEQ ID NO: 2333594 - RNA, 19 nt, Artificial Sequence
  Description of Artificial Sequence: Synthetic oligonucleotide
auguguucuucagggcugc

SEQ ID NO: 2333595 - RNA, 19 nt, Artificial Sequence
  Description of Artificial Sequence: Synthetic oligonucleotide
cugucgcccuccacgaugg

SEQ ID NO: 2333596 - RNA, 19 nt, Artificial Sequence
  Description of Artificial Sequence: Synthetic oligonucleotide
gcugucauugacccugagg

SEQ ID NO: 2333597 - RNA, 19 nt, Artificial Sequence
  Description of Artificial Sequence: Synthetic oligonucleotide
agaggucuucaaugacgcg

SEQ ID NO: 2333598 - RNA, 19 nt, Artificial Sequence
  Description of Artificial Sequence: Synthetic oligonucleotide
agacgaacgauggaaccug

SEQ ID NO: 2333599 - RNA, 19 nt, Artificial Sequence
  Description of Artificial Sequence: Synthetic oligonucleotide
ugcugguucccuacacccc

SEQ ID NO: 2333600 - RNA, 19 nt, Artificial Sequence
  Description of Artificial Sequence: Synthetic oligonucleotide
augaccuucucagcugggg

SEQ ID NO: 2333601 - RNA, 19 nt, Artificial Sequence
  Description of Artificial Sequence: Synthetic oligonucleotide
cugaaugggucaccucccg

SEQ ID NO: 2333602 - RNA, 19 nt, Artificial Sequence
  Description of Artificial Sequence: Synthetic oligonucleotide
uugugguagaucuccucaa

SEQ ID NO: 2333603 - RNA, 19 nt, Artificial Sequence
  Description of Artificial Sequence: Synthetic oligonucleotide
cuuugugguagaucuccuc

SEQ ID NO: 2333604 - RNA, 19 nt, Artificial Sequence
  Description of Artificial Sequence: Synthetic oligonucleotide
ccugcuccaguuuuagugg

SEQ ID NO: 2333605 - RNA, 19 nt, Artificial Sequence
  Description of Artificial Sequence: Synthetic oligonucleotide
ugggguuuccggcgcauga

SEQ ID NO: 2333606 - RNA, 19 nt, Artificial Sequence
  Description of Artificial Sequence: Synthetic oligonucleotide
agguugugaugucugggga

SEQ ID NO: 2333607 - RNA, 19 nt, Artificial Sequence
  Description of Artificial Sequence: Synthetic oligonucleotide
cuauucaguccagaccaag

SEQ ID NO: 2333608 - RNA, 19 nt, Artificial Sequence
  Description of Artificial Sequence: Synthetic oligonucleotide
ugccacggcguccucgugc

SEQ ID NO: 2333609 - RNA, 19 nt, Artificial Sequence
  Description of Artificial Sequence: Synthetic oligonucleotide
uaccccuuuccaaugugau

SEQ ID NO: 2333610 - RNA, 19 nt, Artificial Sequence
  Description of Artificial Sequence: Synthetic oligonucleotide
auguaggggccugagaggu

SEQ ID NO: 2333611 - RNA, 19 nt, Artificial Sequence
  Description of Artificial Sequence: Synthetic oligonucleotide
gccaccuuuagguagacaa

SEQ ID NO: 2333612 - RNA, 19 nt, Artificial Sequence
  Description of Artificial Sequence: Synthetic oligonucleotide
guuaccccuuuccaaugug

SEQ ID NO: 2333613 - RNA, 19 nt, Artificial Sequence
  Description of Artificial Sequence: Synthetic oligonucleotide
uuuuaguggcucugucaaa

SEQ ID NO: 2333614 - RNA, 19 nt, Artificial Sequence
  Description of Artificial Sequence: Synthetic oligonucleotide
augaucuuuguuacguaga

SEQ ID NO: 2333615 - RNA, 19 nt, Artificial Sequence
  Description of Artificial Sequence: Synthetic oligonucleotide
cggcgcaugacauagagac

SEQ ID NO: 2333616 - RNA, 19 nt, Artificial Sequence
  Description of Artificial Sequence: Synthetic oligonucleotide
uaccgcagcugaauggguc

SEQ ID NO: 2333617 - RNA, 19 nt, Artificial Sequence
  Description of Artificial Sequence: Synthetic oligonucleotide
guaggcauugcugggcuug

SEQ ID NO: 2333618 - RNA, 19 nt, Artificial Sequence
  Description of Artificial Sequence: Synthetic oligonucleotide
ugcugaagcccagaccuga

SEQ ID NO: 2333619 - RNA, 19 nt, Artificial Sequence
  Description of Artificial Sequence: Synthetic oligonucleotide
gguagaucuccucaaagcu

SEQ ID NO: 2333620 - RNA, 19 nt, Artificial Sequence
  Description of Artificial Sequence: Synthetic oligonucleotide
ucucuagguugugaugucu

SEQ ID NO: 2333621 - RNA, 19 nt, Artificial Sequence
  Description of Artificial Sequence: Synthetic oligonucleotide
cauccugggcugcagcccc

SEQ ID NO: 2333622 - RNA, 19 nt, Artificial Sequence
  Description of Artificial Sequence: Synthetic oligonucleotide
gauggaggcagggcgaguc

SEQ ID NO: 2333623 - RNA, 19 nt, Artificial Sequence
  Description of Artificial Sequence: Synthetic oligonucleotide
aaugugcggguugucagua

SEQ ID NO: 2333624 - RNA, 19 nt, Artificial Sequence
  Description of Artificial Sequence: Synthetic oligonucleotide
cugagaggucuucaaugac

SEQ ID NO: 2333625 - RNA, 19 nt, Artificial Sequence
  Description of Artificial Sequence: Synthetic oligonucleotide
gccugagaggucuucaaug

SEQ ID NO: 2333626 - RNA, 19 nt, Artificial Sequence
  Description of Artificial Sequence: Synthetic oligonucleotide
ccuuuaggcccuuugauga

SEQ ID NO: 2333627 - RNA, 19 nt, Artificial Sequence
  Description of Artificial Sequence: Synthetic oligonucleotide
ugacgcgcuucacuuugug

SEQ ID NO: 2333628 - RNA, 19 nt, Artificial Sequence
  Description of Artificial Sequence: Synthetic oligonucleotide
aggcccuuugaugagcuug

SEQ ID NO: 2333629 - RNA, 19 nt, Artificial Sequence
  Description of Artificial Sequence: Synthetic oligonucleotide
gaaaauggauggguacguc

SEQ ID NO: 2333630 - RNA, 19 nt, Artificial Sequence
  Description of Artificial Sequence: Synthetic oligonucleotide
ugggucaccucccgaacau

SEQ ID NO: 2333631 - RNA, 19 nt, Artificial Sequence
  Description of Artificial Sequence: Synthetic oligonucleotide
caccuuuagguagacaaca

SEQ ID NO: 2333632 - RNA, 19 nt, Artificial Sequence
  Description of Artificial Sequence: Synthetic oligonucleotide
gggcuauucaguccagacc

SEQ ID NO: 2333633 - RNA, 19 nt, Artificial Sequence
  Description of Artificial Sequence: Synthetic oligonucleotide
augggucaccucccgaaca

SEQ ID NO: 2333634 - RNA, 19 nt, Artificial Sequence
  Description of Artificial Sequence: Synthetic oligonucleotide
ucaaagcugucgcccucca

SEQ ID NO: 2333635 - RNA, 19 nt, Artificial Sequence
  Description of Artificial Sequence: Synthetic oligonucleotide
uuuccgggcuugcuccucu

SEQ ID NO: 2333636 - RNA, 19 nt, Artificial Sequence
  Description of Artificial Sequence: Synthetic oligonucleotide
gguugucaguaccaccugc

SEQ ID NO: 2333637 - RNA, 19 nt, Artificial Sequence
  Description of Artificial Sequence: Synthetic oligonucleotide
cugaguuaccccuuuccaa

SEQ ID NO: 2333638 - RNA, 19 nt, Artificial Sequence
  Description of Artificial Sequence: Synthetic oligonucleotide
uccuucgaugaucuuuguu

SEQ ID NO: 2333639 - RNA, 19 nt, Artificial Sequence
  Description of Artificial Sequence: Synthetic oligonucleotide
cagaccaagggcccaggug

SEQ ID NO: 2333640 - RNA, 19 nt, Artificial Sequence
  Description of Artificial Sequence: Synthetic oligonucleotide
gaugugcugguucccuaca

SEQ ID NO: 2333641 - RNA, 19 nt, Artificial Sequence
  Description of Artificial Sequence: Synthetic oligonucleotide
ugcgaugcugaagccaagu

SEQ ID NO: 2333642 - RNA, 19 nt, Artificial Sequence
  Description of Artificial Sequence: Synthetic oligonucleotide
ugaucuccucguauuccau

SEQ ID NO: 2333643 - RNA, 19 nt, Artificial Sequence
  Description of Artificial Sequence: Synthetic oligonucleotide
ccgcuuauugaucucuagg

SEQ ID NO: 2333644 - RNA, 19 nt, Artificial Sequence
  Description of Artificial Sequence: Synthetic oligonucleotide
ccuucgaugaucuuuguua

SEQ ID NO: 2333645 - RNA, 19 nt, Artificial Sequence
  Description of Artificial Sequence: Synthetic oligonucleotide
cuguugaccgccaggaucu

SEQ ID NO: 2333646 - RNA, 19 nt, Artificial Sequence
  Description of Artificial Sequence: Synthetic oligonucleotide
ucgugcaugacguccucua

SEQ ID NO: 2333647 - RNA, 19 nt, Artificial Sequence
  Description of Artificial Sequence: Synthetic oligonucleotide
auggaaccugcuucuuuga

SEQ ID NO: 2333648 - RNA, 19 nt, Artificial Sequence
  Description of Artificial Sequence: Synthetic oligonucleotide
cuuuguuacguagaugcua

SEQ ID NO: 2333649 - RNA, 19 nt, Artificial Sequence
  Description of Artificial Sequence: Synthetic oligonucleotide
uggguacgucaccaaugug

SEQ ID NO: 2333650 - RNA, 19 nt, Artificial Sequence
  Description of Artificial Sequence: Synthetic oligonucleotide
uauugaucucuagguugug

SEQ ID NO: 2333651 - RNA, 19 nt, Artificial Sequence
  Description of Artificial Sequence: Synthetic oligonucleotide
gggagcauagcugucacuc

SEQ ID NO: 2333652 - RNA, 19 nt, Artificial Sequence
  Description of Artificial Sequence: Synthetic oligonucleotide
guacgucaccaaugugcgg

SEQ ID NO: 2333653 - RNA, 19 nt, Artificial Sequence
  Description of Artificial Sequence: Synthetic oligonucleotide
cuuggugaugaaaauggau

SEQ ID NO: 2333654 - RNA, 19 nt, Artificial Sequence
  Description of Artificial Sequence: Synthetic oligonucleotide
ccaccaggaaugaucuugg

SEQ ID NO: 2333655 - RNA, 19 nt, Artificial Sequence
  Description of Artificial Sequence: Synthetic oligonucleotide
ugcaaccugccauccuugu

SEQ ID NO: 2333656 - RNA, 19 nt, Artificial Sequence
  Description of Artificial Sequence: Synthetic oligonucleotide
ccuccuucgaugaucuuug

SEQ ID NO: 2333657 - RNA, 19 nt, Artificial Sequence
  Description of Artificial Sequence: Synthetic oligonucleotide
gaugucuggggagcauagc

SEQ ID NO: 2333658 - RNA, 19 nt, Artificial Sequence
  Description of Artificial Sequence: Synthetic oligonucleotide
gguagacaacaucauaugu

SEQ ID NO: 2333659 - RNA, 19 nt, Artificial Sequence
  Description of Artificial Sequence: Synthetic oligonucleotide
cauagagacgaacgaugga

SEQ ID NO: 2333660 - RNA, 19 nt, Artificial Sequence
  Description of Artificial Sequence: Synthetic oligonucleotide
gacccugaggcggccaucc

SEQ ID NO: 2333661 - RNA, 19 nt, Artificial Sequence
  Description of Artificial Sequence: Synthetic oligonucleotide
cgaugcugaagccaagucc

SEQ ID NO: 2333662 - RNA, 19 nt, Artificial Sequence
  Description of Artificial Sequence: Synthetic oligonucleotide
gugauccgcuuauugaucu

SEQ ID NO: 2333663 - RNA, 19 nt, Artificial Sequence
  Description of Artificial Sequence: Synthetic oligonucleotide
acagucucucucgggcugg

SEQ ID NO: 2333664 - RNA, 19 nt, Artificial Sequence
  Description of Artificial Sequence: Synthetic oligonucleotide
gcaggaaucacagucucuc

SEQ ID NO: 2333665 - RNA, 19 nt, Artificial Sequence
  Description of Artificial Sequence: Synthetic oligonucleotide
guccucgugcaugacgucc

SEQ ID NO: 2333666 - RNA, 19 nt, Artificial Sequence
  Description of Artificial Sequence: Synthetic oligonucleotide
gaagcccagaccugaguua

SEQ ID NO: 2333667 - RNA, 19 nt, Artificial Sequence
  Description of Artificial Sequence: Synthetic oligonucleotide
caguuuuaguggcucuguc

SEQ ID NO: 2333668 - RNA, 19 nt, Artificial Sequence
  Description of Artificial Sequence: Synthetic oligonucleotide
ggcgaguccaggccaagcc

SEQ ID NO: 2333669 - RNA, 19 nt, Artificial Sequence
  Description of Artificial Sequence: Synthetic oligonucleotide
cuugcuccucugugauccg

SEQ ID NO: 2333670 - RNA, 19 nt, Artificial Sequence
  Description of Artificial Sequence: Synthetic oligonucleotide
gcgcaugacauagagacga

SEQ ID NO: 2333671 - RNA, 19 nt, Artificial Sequence
  Description of Artificial Sequence: Synthetic oligonucleotide
ccagggaugugcugguucc

SEQ ID NO: 2333672 - RNA, 19 nt, Artificial Sequence
  Description of Artificial Sequence: Synthetic oligonucleotide
accuccuucgaugaucuuu

SEQ ID NO: 2333673 - RNA, 19 nt, Artificial Sequence
  Description of Artificial Sequence: Synthetic oligonucleotide
gacgaacgauggaaccugc

SEQ ID NO: 2333674 - RNA, 19 nt, Artificial Sequence
  Description of Artificial Sequence: Synthetic oligonucleotide
ggcguccucgugcaugacg

SEQ ID NO: 2333675 - RNA, 19 nt, Artificial Sequence
  Description of Artificial Sequence: Synthetic oligonucleotide
ccaugaccuucucagcugg

SEQ ID NO: 2333676 - RNA, 19 nt, Artificial Sequence
  Description of Artificial Sequence: Synthetic oligonucleotide
gagacgaacgauggaaccu

SEQ ID NO: 2333677 - RNA, 19 nt, Artificial Sequence
  Description of Artificial Sequence: Synthetic oligonucleotide
cacgauggcugagaagcac

SEQ ID NO: 2333678 - RNA, 19 nt, Artificial Sequence
  Description of Artificial Sequence: Synthetic oligonucleotide
gcuauuuaucuccagggau

SEQ ID NO: 2333679 - RNA, 19 nt, Artificial Sequence
  Description of Artificial Sequence: Synthetic oligonucleotide
agggcaggaaucacagucu

SEQ ID NO: 2333680 - RNA, 19 nt, Artificial Sequence
  Description of Artificial Sequence: Synthetic oligonucleotide
ggucaccucccgaacaucc

SEQ ID NO: 2333681 - RNA, 19 nt, Artificial Sequence
  Description of Artificial Sequence: Synthetic oligonucleotide
accaccugcgaugcugaag

SEQ ID NO: 2333682 - RNA, 19 nt, Artificial Sequence
  Description of Artificial Sequence: Synthetic oligonucleotide
aggaaugaucuuggugaug

SEQ ID NO: 2333683 - RNA, 19 nt, Artificial Sequence
  Description of Artificial Sequence: Synthetic oligonucleotide
uggauggguacgucaccaa

SEQ ID NO: 2333684 - RNA, 19 nt, Artificial Sequence
  Description of Artificial Sequence: Synthetic oligonucleotide
acgauggcugagaagcacu

SEQ ID NO: 2333685 - RNA, 19 nt, Artificial Sequence
  Description of Artificial Sequence: Synthetic oligonucleotide
acggcguccucgugcauga

SEQ ID NO: 2333686 - RNA, 19 nt, Artificial Sequence
  Description of Artificial Sequence: Synthetic oligonucleotide
ugcggguugucaguaccac

SEQ ID NO: 2333687 - RNA, 19 nt, Artificial Sequence
  Description of Artificial Sequence: Synthetic oligonucleotide
cugugauccgcuuauugau

SEQ ID NO: 2333688 - RNA, 19 nt, Artificial Sequence
  Description of Artificial Sequence: Synthetic oligonucleotide
ggaugugcugguucccuac

SEQ ID NO: 2333689 - RNA, 19 nt, Artificial Sequence
  Description of Artificial Sequence: Synthetic oligonucleotide
ccucguauuccaucucccc

SEQ ID NO: 2333690 - RNA, 19 nt, Artificial Sequence
  Description of Artificial Sequence: Synthetic oligonucleotide
auuuaucuccagggaugug

SEQ ID NO: 2333691 - RNA, 19 nt, Artificial Sequence
  Description of Artificial Sequence: Synthetic oligonucleotide
gcugucgcccuccacgaug

SEQ ID NO: 2333692 - RNA, 19 nt, Artificial Sequence
  Description of Artificial Sequence: Synthetic oligonucleotide
ugugaugucuggggagcau

SEQ ID NO: 2333693 - RNA, 19 nt, Artificial Sequence
  Description of Artificial Sequence: Synthetic oligonucleotide
cucuagccccacacuguug

SEQ ID NO: 2333694 - RNA, 19 nt, Artificial Sequence
  Description of Artificial Sequence: Synthetic oligonucleotide
ggcagggcgaguccaggcc

SEQ ID NO: 2333695 - RNA, 19 nt, Artificial Sequence
  Description of Artificial Sequence: Synthetic oligonucleotide
accuuuagguagacaacau

SEQ ID NO: 2333696 - RNA, 19 nt, Artificial Sequence
  Description of Artificial Sequence: Synthetic oligonucleotide
gaccugaguuaccccuuuc

SEQ ID NO: 2333697 - RNA, 19 nt, Artificial Sequence
  Description of Artificial Sequence: Synthetic oligonucleotide
cuagccccacacuguugac

SEQ ID NO: 2333698 - RNA, 19 nt, Artificial Sequence
  Description of Artificial Sequence: Synthetic oligonucleotide
uuguuacguagaugcuauu

SEQ ID NO: 2333699 - RNA, 19 nt, Artificial Sequence
  Description of Artificial Sequence: Synthetic oligonucleotide
ggagcauagcugucacuca

SEQ ID NO: 2333700 - RNA, 19 nt, Artificial Sequence
  Description of Artificial Sequence: Synthetic oligonucleotide
guccuuuaggcccuuugau

SEQ ID NO: 2333701 - RNA, 19 nt, Artificial Sequence
  Description of Artificial Sequence: Synthetic oligonucleotide
caccugcgaugcugaagcc

SEQ ID NO: 2333702 - RNA, 19 nt, Artificial Sequence
  Description of Artificial Sequence: Synthetic oligonucleotide
guugaccgccaggaucuug

SEQ ID NO: 2333703 - RNA, 19 nt, Artificial Sequence
  Description of Artificial Sequence: Synthetic oligonucleotide
gcaaccugccauccuugug

SEQ ID NO: 2333704 - RNA, 19 nt, Artificial Sequence
  Description of Artificial Sequence: Synthetic oligonucleotide
cugcgaugcugaagccaag

SEQ ID NO: 2333705 - RNA, 19 nt, Artificial Sequence
  Description of Artificial Sequence: Synthetic oligonucleotide
cuggggagcauagcuguca

SEQ ID NO: 2333706 - RNA, 19 nt, Artificial Sequence
  Description of Artificial Sequence: Synthetic oligonucleotide
ccugaguuaccccuuucca

SEQ ID NO: 2333707 - RNA, 19 nt, Artificial Sequence
  Description of Artificial Sequence: Synthetic oligonucleotide
agcacucugugaacuccug

SEQ ID NO: 2333708 - RNA, 19 nt, Artificial Sequence
  Description of Artificial Sequence: Synthetic oligonucleotide
accuucucagcugggguuu

SEQ ID NO: 2333709 - RNA, 19 nt, Artificial Sequence
  Description of Artificial Sequence: Synthetic oligonucleotide
gaccuucucagcugggguu

SEQ ID NO: 2333710 - RNA, 19 nt, Artificial Sequence
  Description of Artificial Sequence: Synthetic oligonucleotide
caaugugaucuccucguau

SEQ ID NO: 2333711 - RNA, 19 nt, Artificial Sequence
  Description of Artificial Sequence: Synthetic oligonucleotide
gcaugacauagagacgaac

SEQ ID NO: 2333712 - RNA, 19 nt, Artificial Sequence
  Description of Artificial Sequence: Synthetic oligonucleotide
gggcaggaaucacagucuc

SEQ ID NO: 2333713 - RNA, 19 nt, Artificial Sequence
  Description of Artificial Sequence: Synthetic oligonucleotide
guaggggccugagaggucu

SEQ ID NO: 2333714 - RNA, 19 nt, Artificial Sequence
  Description of Artificial Sequence: Synthetic oligonucleotide
gcccagaccugaguuaccc

SEQ ID NO: 2333715 - RNA, 19 nt, Artificial Sequence
  Description of Artificial Sequence: Synthetic oligonucleotide
ugaccgccaggaucuuguc

SEQ ID NO: 2333716 - RNA, 19 nt, Artificial Sequence
  Description of Artificial Sequence: Synthetic oligonucleotide
ggugauggaggcagggcga

SEQ ID NO: 2333717 - RNA, 19 nt, Artificial Sequence
  Description of Artificial Sequence: Synthetic oligonucleotide
acgaacgauggaaccugcu

SEQ ID NO: 2333718 - RNA, 19 nt, Artificial Sequence
  Description of Artificial Sequence: Synthetic oligonucleotide
guuuccggcgcaugacaua

SEQ ID NO: 2333719 - RNA, 19 nt, Artificial Sequence
  Description of Artificial Sequence: Synthetic oligonucleotide
gcggguugucaguaccacc

SEQ ID NO: 2333720 - RNA, 19 nt, Artificial Sequence
  Description of Artificial Sequence: Synthetic oligonucleotide
auugacccugaggcggcca

SEQ ID NO: 2333721 - RNA, 19 nt, Artificial Sequence
  Description of Artificial Sequence: Synthetic oligonucleotide
aggggccugagaggucuuc

SEQ ID NO: 2333722 - RNA, 19 nt, Artificial Sequence
  Description of Artificial Sequence: Synthetic oligonucleotide
gcaugacguccucuagccc

SEQ ID NO: 2333723 - RNA, 19 nt, Artificial Sequence
  Description of Artificial Sequence: Synthetic oligonucleotide
gcuuauugaucucuagguu

SEQ ID NO: 2333724 - RNA, 19 nt, Artificial Sequence
  Description of Artificial Sequence: Synthetic oligonucleotide
caaugugcggguugucagu

SEQ ID NO: 2333725 - RNA, 19 nt, Artificial Sequence
  Description of Artificial Sequence: Synthetic oligonucleotide
cauugacccugaggcggcc

SEQ ID NO: 2333726 - RNA, 19 nt, Artificial Sequence
  Description of Artificial Sequence: Synthetic oligonucleotide
cagcugaaugggucaccuc

SEQ ID NO: 2333727 - RNA, 19 nt, Artificial Sequence
  Description of Artificial Sequence: Synthetic oligonucleotide
gcgaugcugaagccaaguc

SEQ ID NO: 2333728 - RNA, 19 nt, Artificial Sequence
  Description of Artificial Sequence: Synthetic oligonucleotide
gcucugucaaaggcuuucc

SEQ ID NO: 2333729 - RNA, 19 nt, Artificial Sequence
  Description of Artificial Sequence: Synthetic oligonucleotide
ggguuuccggcgcaugaca

SEQ ID NO: 2333730 - RNA, 19 nt, Artificial Sequence
  Description of Artificial Sequence: Synthetic oligonucleotide
ccucuaccgcagcugaaug

SEQ ID NO: 2333731 - RNA, 19 nt, Artificial Sequence
  Description of Artificial Sequence: Synthetic oligonucleotide
gaccgccaggaucuugucu

SEQ ID NO: 2333732 - RNA, 19 nt, Artificial Sequence
  Description of Artificial Sequence: Synthetic oligonucleotide
cacucagguaggcauugcu

SEQ ID NO: 2333733 - RNA, 19 nt, Artificial Sequence
  Description of Artificial Sequence: Synthetic oligonucleotide
gcgaguccaggccaagcca

SEQ ID NO: 2333734 - RNA, 19 nt, Artificial Sequence
  Description of Artificial Sequence: Synthetic oligonucleotide
caggaaugaucuuggugau

SEQ ID NO: 2333735 - RNA, 19 nt, Artificial Sequence
  Description of Artificial Sequence: Synthetic oligonucleotide
gugcggguugucaguacca

SEQ ID NO: 2333736 - RNA, 19 nt, Artificial Sequence
  Description of Artificial Sequence: Synthetic oligonucleotide
gcagggcgaguccaggcca

SEQ ID NO: 2333737 - RNA, 19 nt, Artificial Sequence
  Description of Artificial Sequence: Synthetic oligonucleotide
cuuuccgggcuugcuccuc

SEQ ID NO: 2333738 - RNA, 19 nt, Artificial Sequence
  Description of Artificial Sequence: Synthetic oligonucleotide
ggcccuuugaugagcuuga

SEQ ID NO: 2333739 - RNA, 19 nt, Artificial Sequence
  Description of Artificial Sequence: Synthetic oligonucleotide
cgugcaugacguccucuag

SEQ ID NO: 2333740 - RNA, 19 nt, Artificial Sequence
  Description of Artificial Sequence: Synthetic oligonucleotide
cagggcugccacggcgucc

SEQ ID NO: 2333741 - RNA, 19 nt, Artificial Sequence
  Description of Artificial Sequence: Synthetic oligonucleotide
cugggguuuccggcgcaug

SEQ ID NO: 2333742 - RNA, 19 nt, Artificial Sequence
  Description of Artificial Sequence: Synthetic oligonucleotide
gccacggcguccucgugca

SEQ ID NO: 2333743 - RNA, 19 nt, Artificial Sequence
  Description of Artificial Sequence: Synthetic oligonucleotide
auccgcuuauugaucucua

SEQ ID NO: 2333744 - RNA, 19 nt, Artificial Sequence
  Description of Artificial Sequence: Synthetic oligonucleotide
agggcgaguccaggccaag

SEQ ID NO: 2333745 - RNA, 19 nt, Artificial Sequence
  Description of Artificial Sequence: Synthetic oligonucleotide
ggauggguacgucaccaau

SEQ ID NO: 2333746 - RNA, 19 nt, Artificial Sequence
  Description of Artificial Sequence: Synthetic oligonucleotide
cugggcuauucaguccaga

SEQ ID NO: 2333747 - RNA, 19 nt, Artificial Sequence
  Description of Artificial Sequence: Synthetic oligonucleotide
cgauggcugagaagcacuc

SEQ ID NO: 2333748 - RNA, 19 nt, Artificial Sequence
  Description of Artificial Sequence: Synthetic oligonucleotide
gggguuuccggcgcaugac

SEQ ID NO: 2333749 - RNA, 19 nt, Artificial Sequence
  Description of Artificial Sequence: Synthetic oligonucleotide
acgauggaaccugcuucuu

SEQ ID NO: 2333750 - RNA, 19 nt, Artificial Sequence
  Description of Artificial Sequence: Synthetic oligonucleotide
caccucccgaacauccacu

SEQ ID NO: 2333751 - RNA, 19 nt, Artificial Sequence
  Description of Artificial Sequence: Synthetic oligonucleotide
ccgggcuugcuccucugug

SEQ ID NO: 2333752 - RNA, 19 nt, Artificial Sequence
  Description of Artificial Sequence: Synthetic oligonucleotide
cggguugucaguaccaccu

SEQ ID NO: 2333753 - RNA, 19 nt, Artificial Sequence
  Description of Artificial Sequence: Synthetic oligonucleotide
cuaccgcagcugaaugggu

SEQ ID NO: 2333754 - RNA, 19 nt, Artificial Sequence
  Description of Artificial Sequence: Synthetic oligonucleotide
cagggcgaguccaggccaa

SEQ ID NO: 2333755 - RNA, 19 nt, Artificial Sequence
  Description of Artificial Sequence: Synthetic oligonucleotide
ggcuugcuccucugugauc

SEQ ID NO: 2333756 - RNA, 19 nt, Artificial Sequence
  Description of Artificial Sequence: Synthetic oligonucleotide
ugacguccucuagccccac

SEQ ID NO: 2333757 - RNA, 19 nt, Artificial Sequence
  Description of Artificial Sequence: Synthetic oligonucleotide
uguugaccgccaggaucuu

SEQ ID NO: 2333758 - RNA, 19 nt, Artificial Sequence
  Description of Artificial Sequence: Synthetic oligonucleotide
caaugacgcgcuucacuuu

SEQ ID NO: 2333759 - RNA, 19 nt, Artificial Sequence
  Description of Artificial Sequence: Synthetic oligonucleotide
augcugaagccaaguccuu

SEQ ID NO: 2333760 - RNA, 19 nt, Artificial Sequence
  Description of Artificial Sequence: Synthetic oligonucleotide
gcguccucgugcaugacgu

SEQ ID NO: 2333761 - RNA, 19 nt, Artificial Sequence
  Description of Artificial Sequence: Synthetic oligonucleotide
gggcgaguccaggccaagc

SEQ ID NO: 2333762 - RNA, 19 nt, Artificial Sequence
  Description of Artificial Sequence: Synthetic oligonucleotide
gcuauucaguccagaccaa

SEQ ID NO: 2333763 - RNA, 19 nt, Artificial Sequence
  Description of Artificial Sequence: Synthetic oligonucleotide
gccccaccaggaaugaucu

SEQ ID NO: 2333764 - RNA, 19 nt, Artificial Sequence
  Description of Artificial Sequence: Synthetic oligonucleotide
cugccacggcguccucgug

SEQ ID NO: 2333765 - RNA, 19 nt, Artificial Sequence
  Description of Artificial Sequence: Synthetic oligonucleotide
gguuuccggcgcaugacau

SEQ ID NO: 2333766 - RNA, 19 nt, Artificial Sequence
  Description of Artificial Sequence: Synthetic oligonucleotide
gaccaagggcccaggugau

SEQ ID NO: 2333767 - RNA, 19 nt, Artificial Sequence
  Description of Artificial Sequence: Synthetic oligonucleotide
ccaaugugaucuccucgua

SEQ ID NO: 2333768 - RNA, 19 nt, Artificial Sequence
  Description of Artificial Sequence: Synthetic oligonucleotide
cuccuucgaugaucuuugu

SEQ ID NO: 2333769 - RNA, 19 nt, Artificial Sequence
  Description of Artificial Sequence: Synthetic oligonucleotide
cugcagccccaccaggaau

SEQ ID NO: 2333770 - RNA, 19 nt, Artificial Sequence
  Description of Artificial Sequence: Synthetic oligonucleotide
ccugcuucuuugagggccu

SEQ ID NO: 2333771 - RNA, 19 nt, Artificial Sequence
  Description of Artificial Sequence: Synthetic oligonucleotide
ggcaggaaucacagucucu

SEQ ID NO: 2333772 - RNA, 19 nt, Artificial Sequence
  Description of Artificial Sequence: Synthetic oligonucleotide
cucgugcaugacguccucu

SEQ ID NO: 2333773 - RNA, 19 nt, Artificial Sequence
  Description of Artificial Sequence: Synthetic oligonucleotide
ccggcgcaugacauagaga

SEQ ID NO: 2333774 - RNA, 19 nt, Artificial Sequence
  Description of Artificial Sequence: Synthetic oligonucleotide
cucgggcugggacccagau

SEQ ID NO: 2333775 - RNA, 19 nt, Artificial Sequence
  Description of Artificial Sequence: Synthetic oligonucleotide
ccucgugcaugacguccuc

SEQ ID NO: 2333776 - RNA, 19 nt, Artificial Sequence
  Description of Artificial Sequence: Synthetic oligonucleotide
cgaugaucuuuguuacgua

SEQ ID NO: 2333777 - RNA, 19 nt, Artificial Sequence
  Description of Artificial Sequence: Synthetic oligonucleotide
ccaguuuuaguggcucugu

SEQ ID NO: 2333778 - RNA, 19 nt, Artificial Sequence
  Description of Artificial Sequence: Synthetic oligonucleotide
ccgcagcugaaugggucac

SEQ ID NO: 2333779 - RNA, 19 nt, Artificial Sequence
  Description of Artificial Sequence: Synthetic oligonucleotide
cgcagcugaaugggucacc

SEQ ID NO: 2333780 - RNA, 19 nt, Artificial Sequence
  Description of Artificial Sequence: Synthetic oligonucleotide
gccucuaccgcagcugaau

SEQ ID NO: 2333781 - RNA, 19 nt, Artificial Sequence
  Description of Artificial Sequence: Synthetic oligonucleotide
ggccaagccagggcaggaa

SEQ ID NO: 2333782 - RNA, 19 nt, Artificial Sequence
  Description of Artificial Sequence: Synthetic oligonucleotide
cccuccacgauggcugaga

SEQ ID NO: 2333783 - RNA, 19 nt, Artificial Sequence
  Description of Artificial Sequence: Synthetic oligonucleotide
gcuuuccgggcuugcuccu

SEQ ID NO: 2333784 - RNA, 19 nt, Artificial Sequence
  Description of Artificial Sequence: Synthetic oligonucleotide
cgaacgauggaaccugcuu

SEQ ID NO: 2333785 - RNA, 19 nt, Artificial Sequence
  Description of Artificial Sequence: Synthetic oligonucleotide
gguaggcauugcugggcuu

SEQ ID NO: 2333786 - RNA, 19 nt, Artificial Sequence
  Description of Artificial Sequence: Synthetic oligonucleotide
ggcggccauccugggcugc

SEQ ID NO: 2333787 - RNA, 19 nt, Artificial Sequence
  Description of Artificial Sequence: Synthetic oligonucleotide
cgcaugacauagagacgaa

SEQ ID NO: 2333788 - RNA, 19 nt, Artificial Sequence
  Description of Artificial Sequence: Synthetic oligonucleotide
cguccucgugcaugacguc

SEQ ID NO: 2333789 - RNA, 19 nt, Artificial Sequence
  Description of Artificial Sequence: Synthetic oligonucleotide
gcccuccacgauggcugag

SEQ ID NO: 2333790 - RNA, 19 nt, Artificial Sequence
  Description of Artificial Sequence: Synthetic oligonucleotide
ccucuagccccacacuguu

SEQ ID NO: 2333791 - RNA, 19 nt, Artificial Sequence
  Description of Artificial Sequence: Synthetic oligonucleotide
caguaccaccugcgaugcu

SEQ ID NO: 2333792 - RNA, 19 nt, Artificial Sequence
  Description of Artificial Sequence: Synthetic oligonucleotide
gcugggguuuccggcgcau

SEQ ID NO: 2333793 - RNA, 19 nt, Artificial Sequence
  Description of Artificial Sequence: Synthetic oligonucleotide
gggcugggacccagaugua

SEQ ID NO: 2333794 - RNA, 19 nt, Artificial Sequence
  Description of Artificial Sequence: Synthetic oligonucleotide
gcccuuugaugagcuugau

SEQ ID NO: 2333795 - RNA, 19 nt, Artificial Sequence
  Description of Artificial Sequence: Synthetic oligonucleotide
cccgaacauccacuucauu

SEQ ID NO: 2333796 - RNA, 19 nt, Artificial Sequence
  Description of Artificial Sequence: Synthetic oligonucleotide
ccucugugauccgcuuauu

SEQ ID NO: 2333797 - RNA, 19 nt, Artificial Sequence
  Description of Artificial Sequence: Synthetic oligonucleotide
cggcguccucgugcaugac

SEQ ID NO: 2333798 - RNA, 19 nt, Artificial Sequence
  Description of Artificial Sequence: Synthetic oligonucleotide
ucaaucuccgcgaagauag

SEQ ID NO: 2333799 - RNA, 19 nt, Artificial Sequence
  Description of Artificial Sequence: Synthetic oligonucleotide
aauccuaggauggaggugg

SEQ ID NO: 2333800 - RNA, 19 nt, Artificial Sequence
  Description of Artificial Sequence: Synthetic oligonucleotide
ugugcaaacgccaaggccu

SEQ ID NO: 2333801 - RNA, 19 nt, Artificial Sequence
  Description of Artificial Sequence: Synthetic oligonucleotide
ucgaucuuggcugagaggg

SEQ ID NO: 2333802 - RNA, 19 nt, Artificial Sequence
  Description of Artificial Sequence: Synthetic oligonucleotide
agaaacgugcaccugguac

SEQ ID NO: 2333803 - RNA, 19 nt, Artificial Sequence
  Description of Artificial Sequence: Synthetic oligonucleotide
ugucgauucccacacauca

SEQ ID NO: 2333804 - RNA, 19 nt, Artificial Sequence
  Description of Artificial Sequence: Synthetic oligonucleotide
uggaguguagcccuugcgg

SEQ ID NO: 2333805 - RNA, 19 nt, Artificial Sequence
  Description of Artificial Sequence: Synthetic oligonucleotide
ugcaguaccaggaucgugc

SEQ ID NO: 2333806 - RNA, 19 nt, Artificial Sequence
  Description of Artificial Sequence: Synthetic oligonucleotide
guaaguuugugucuguacc

SEQ ID NO: 2333807 - RNA, 19 nt, Artificial Sequence
  Description of Artificial Sequence: Synthetic oligonucleotide
uguguuuauguccacgggu

SEQ ID NO: 2333808 - RNA, 19 nt, Artificial Sequence
  Description of Artificial Sequence: Synthetic oligonucleotide
uugugucuguaccagggcg

SEQ ID NO: 2333809 - RNA, 19 nt, Artificial Sequence
  Description of Artificial Sequence: Synthetic oligonucleotide
cugaaauucccucuggaag

SEQ ID NO: 2333810 - RNA, 19 nt, Artificial Sequence
  Description of Artificial Sequence: Synthetic oligonucleotide
gaguaguccacacugagca

SEQ ID NO: 2333811 - RNA, 19 nt, Artificial Sequence
  Description of Artificial Sequence: Synthetic oligonucleotide
uuugcaggcaccucgggcc

SEQ ID NO: 2333812 - RNA, 19 nt, Artificial Sequence
  Description of Artificial Sequence: Synthetic oligonucleotide
gaaacgugcaccugguacc

SEQ ID NO: 2333813 - RNA, 19 nt, Artificial Sequence
  Description of Artificial Sequence: Synthetic oligonucleotide
ucgaugacagugaacaccu

SEQ ID NO: 2333814 - RNA, 19 nt, Artificial Sequence
  Description of Artificial Sequence: Synthetic oligonucleotide
uggagacaggcaaaguagg

SEQ ID NO: 2333815 - RNA, 19 nt, Artificial Sequence
  Description of Artificial Sequence: Synthetic oligonucleotide
gauucccacacaucaacag

SEQ ID NO: 2333816 - RNA, 19 nt, Artificial Sequence
  Description of Artificial Sequence: Synthetic oligonucleotide
gacagugaacaccuucugg

SEQ ID NO: 2333817 - RNA, 19 nt, Artificial Sequence
  Description of Artificial Sequence: Synthetic oligonucleotide
auucccacacaucaacagg

SEQ ID NO: 2333818 - RNA, 19 nt, Artificial Sequence
  Description of Artificial Sequence: Synthetic oligonucleotide
uucgaugacagugaacacc

SEQ ID NO: 2333819 - RNA, 19 nt, Artificial Sequence
  Description of Artificial Sequence: Synthetic oligonucleotide
ugugcagggcacaaccagg

SEQ ID NO: 2333820 - RNA, 19 nt, Artificial Sequence
  Description of Artificial Sequence: Synthetic oligonucleotide
gauacgaggccaugggugc

SEQ ID NO: 2333821 - RNA, 19 nt, Artificial Sequence
  Description of Artificial Sequence: Synthetic oligonucleotide
acccacaucgugcaggagg

SEQ ID NO: 2333822 - RNA, 19 nt, Artificial Sequence
  Description of Artificial Sequence: Synthetic oligonucleotide
cauacuggccaccacagug

SEQ ID NO: 2333823 - RNA, 19 nt, Artificial Sequence
  Description of Artificial Sequence: Synthetic oligonucleotide
guguuccuaaagcagacag

SEQ ID NO: 2333824 - RNA, 19 nt, Artificial Sequence
  Description of Artificial Sequence: Synthetic oligonucleotide
uccccucugagacacuugg

SEQ ID NO: 2333825 - RNA, 19 nt, Artificial Sequence
  Description of Artificial Sequence: Synthetic oligonucleotide
uaaagcagacagcuggacu

SEQ ID NO: 2333826 - RNA, 19 nt, Artificial Sequence
  Description of Artificial Sequence: Synthetic oligonucleotide
uguuccuaaagcagacagc

SEQ ID NO: 2333827 - RNA, 19 nt, Artificial Sequence
  Description of Artificial Sequence: Synthetic oligonucleotide
gagaguaguccacacugag

SEQ ID NO: 2333828 - RNA, 19 nt, Artificial Sequence
  Description of Artificial Sequence: Synthetic oligonucleotide
aaucuccgcgaagauaggg

SEQ ID NO: 2333829 - RNA, 19 nt, Artificial Sequence
  Description of Artificial Sequence: Synthetic oligonucleotide
cuccgaagacccuugagag

SEQ ID NO: 2333830 - RNA, 19 nt, Artificial Sequence
  Description of Artificial Sequence: Synthetic oligonucleotide
ucgguagcggaacuccugg

SEQ ID NO: 2333831 - RNA, 19 nt, Artificial Sequence
  Description of Artificial Sequence: Synthetic oligonucleotide
aacgccaaggccucagcug

SEQ ID NO: 2333832 - RNA, 19 nt, Artificial Sequence
  Description of Artificial Sequence: Synthetic oligonucleotide
aaguuugugucuguaccag

SEQ ID NO: 2333833 - RNA, 19 nt, Artificial Sequence
  Description of Artificial Sequence: Synthetic oligonucleotide
gccauugucaaucuccgcg

SEQ ID NO: 2333834 - RNA, 19 nt, Artificial Sequence
  Description of Artificial Sequence: Synthetic oligonucleotide
ucgauucccacacaucaac

SEQ ID NO: 2333835 - RNA, 19 nt, Artificial Sequence
  Description of Artificial Sequence: Synthetic oligonucleotide
gauggauggggcccgacug

SEQ ID NO: 2333836 - RNA, 19 nt, Artificial Sequence
  Description of Artificial Sequence: Synthetic oligonucleotide
ucagaguacaguggaggcg

SEQ ID NO: 2333837 - RNA, 19 nt, Artificial Sequence
  Description of Artificial Sequence: Synthetic oligonucleotide
aguacaguggaggcggucg

SEQ ID NO: 2333838 - RNA, 19 nt, Artificial Sequence
  Description of Artificial Sequence: Synthetic oligonucleotide
ucugaguacuccgaagacc

SEQ ID NO: 2333839 - RNA, 19 nt, Artificial Sequence
  Description of Artificial Sequence: Synthetic oligonucleotide
gguguguuuauguccacgg

SEQ ID NO: 2333840 - RNA, 19 nt, Artificial Sequence
  Description of Artificial Sequence: Synthetic oligonucleotide
ucugugcuuguccugcuug

SEQ ID NO: 2333841 - RNA, 19 nt, Artificial Sequence
  Description of Artificial Sequence: Synthetic oligonucleotide
uuugugucuguaccagggc

SEQ ID NO: 2333842 - RNA, 19 nt, Artificial Sequence
  Description of Artificial Sequence: Synthetic oligonucleotide
uugcggucgaucuuggcug

SEQ ID NO: 2333843 - RNA, 19 nt, Artificial Sequence
  Description of Artificial Sequence: Synthetic oligonucleotide
acccuugagagaguagucc

SEQ ID NO: 2333844 - RNA, 19 nt, Artificial Sequence
  Description of Artificial Sequence: Synthetic oligonucleotide
guuuauguccacggguucg

SEQ ID NO: 2333845 - RNA, 19 nt, Artificial Sequence
  Description of Artificial Sequence: Synthetic oligonucleotide
cucagaguacaguggaggc

SEQ ID NO: 2333846 - RNA, 19 nt, Artificial Sequence
  Description of Artificial Sequence: Synthetic oligonucleotide
gaucgugccaccuucucuc

SEQ ID NO: 2333847 - RNA, 19 nt, Artificial Sequence
  Description of Artificial Sequence: Synthetic oligonucleotide
aaacgugcaccugguaccg

SEQ ID NO: 2333848 - RNA, 19 nt, Artificial Sequence
  Description of Artificial Sequence: Synthetic oligonucleotide
gguucgaugacagugaaca

SEQ ID NO: 2333849 - RNA, 19 nt, Artificial Sequence
  Description of Artificial Sequence: Synthetic oligonucleotide
agacuguguuccuaaagca

SEQ ID NO: 2333850 - RNA, 19 nt, Artificial Sequence
  Description of Artificial Sequence: Synthetic oligonucleotide
agggauacgaggccauggg

SEQ ID NO: 2333851 - RNA, 19 nt, Artificial Sequence
  Description of Artificial Sequence: Synthetic oligonucleotide
aguuugugucuguaccagg

SEQ ID NO: 2333852 - RNA, 19 nt, Artificial Sequence
  Description of Artificial Sequence: Synthetic oligonucleotide
ugcgcuucuguuugcaggc

SEQ ID NO: 2333853 - RNA, 19 nt, Artificial Sequence
  Description of Artificial Sequence: Synthetic oligonucleotide
acaccuucugggcacgacg

SEQ ID NO: 2333854 - RNA, 19 nt, Artificial Sequence
  Description of Artificial Sequence: Synthetic oligonucleotide
uucaagacuguguuccuaa

SEQ ID NO: 2333855 - RNA, 19 nt, Artificial Sequence
  Description of Artificial Sequence: Synthetic oligonucleotide
caggccacagcacacggcg

SEQ ID NO: 2333856 - RNA, 19 nt, Artificial Sequence
  Description of Artificial Sequence: Synthetic oligonucleotide
auacuggccaccacagugc

SEQ ID NO: 2333857 - RNA, 19 nt, Artificial Sequence
  Description of Artificial Sequence: Synthetic oligonucleotide
caacaggucaugcagcgug

SEQ ID NO: 2333858 - RNA, 19 nt, Artificial Sequence
  Description of Artificial Sequence: Synthetic oligonucleotide
ugagagaguaguccacacu

SEQ ID NO: 2333859 - RNA, 19 nt, Artificial Sequence
  Description of Artificial Sequence: Synthetic oligonucleotide
agaguaguccacacugagc

SEQ ID NO: 2333860 - RNA, 19 nt, Artificial Sequence
  Description of Artificial Sequence: Synthetic oligonucleotide
aaacgccaaggccucagcu

SEQ ID NO: 2333861 - RNA, 19 nt, Artificial Sequence
  Description of Artificial Sequence: Synthetic oligonucleotide
ggcagugcaggauggaugg

SEQ ID NO: 2333862 - RNA, 19 nt, Artificial Sequence
  Description of Artificial Sequence: Synthetic oligonucleotide
gaggugucgauucccacac

SEQ ID NO: 2333863 - RNA, 19 nt, Artificial Sequence
  Description of Artificial Sequence: Synthetic oligonucleotide
caagacuguguuccuaaag

SEQ ID NO: 2333864 - RNA, 19 nt, Artificial Sequence
  Description of Artificial Sequence: Synthetic oligonucleotide
cugggcacgacgugcaggg

SEQ ID NO: 2333865 - RNA, 19 nt, Artificial Sequence
  Description of Artificial Sequence: Synthetic oligonucleotide
agacacuuggcuuccuuca

SEQ ID NO: 2333866 - RNA, 19 nt, Artificial Sequence
  Description of Artificial Sequence: Synthetic oligonucleotide
aauucccucuggaagcuug

SEQ ID NO: 2333867 - RNA, 19 nt, Artificial Sequence
  Description of Artificial Sequence: Synthetic oligonucleotide
auugucaaucuccgcgaag

SEQ ID NO: 2333868 - RNA, 19 nt, Artificial Sequence
  Description of Artificial Sequence: Synthetic oligonucleotide
acacaucaacaggucaugc

SEQ ID NO: 2333869 - RNA, 19 nt, Artificial Sequence
  Description of Artificial Sequence: Synthetic oligonucleotide
agugcaggauggauggggc

SEQ ID NO: 2333870 - RNA, 19 nt, Artificial Sequence
  Description of Artificial Sequence: Synthetic oligonucleotide
ggcgcuaugagcucugacc

SEQ ID NO: 2333871 - RNA, 19 nt, Artificial Sequence
  Description of Artificial Sequence: Synthetic oligonucleotide
cugugcaaacgccaaggcc

SEQ ID NO: 2333872 - RNA, 19 nt, Artificial Sequence
  Description of Artificial Sequence: Synthetic oligonucleotide
uguuugcaggcaccucggg

SEQ ID NO: 2333873 - RNA, 19 nt, Artificial Sequence
  Description of Artificial Sequence: Synthetic oligonucleotide
uguuuauguccacggguuc

SEQ ID NO: 2333874 - RNA, 19 nt, Artificial Sequence
  Description of Artificial Sequence: Synthetic oligonucleotide
guguguuuauguccacggg

SEQ ID NO: 2333875 - RNA, 19 nt, Artificial Sequence
  Description of Artificial Sequence: Synthetic oligonucleotide
uccacacugagcacccggc

SEQ ID NO: 2333876 - RNA, 19 nt, Artificial Sequence
  Description of Artificial Sequence: Synthetic oligonucleotide
cagugaacaccuucugggc

SEQ ID NO: 2333877 - RNA, 19 nt, Artificial Sequence
  Description of Artificial Sequence: Synthetic oligonucleotide
cacacggcgaccagggccc

SEQ ID NO: 2333878 - RNA, 19 nt, Artificial Sequence
  Description of Artificial Sequence: Synthetic oligonucleotide
gagggauacgaggccaugg

SEQ ID NO: 2333879 - RNA, 19 nt, Artificial Sequence
  Description of Artificial Sequence: Synthetic oligonucleotide
ggagccauugucaaucucc

SEQ ID NO: 2333880 - RNA, 19 nt, Artificial Sequence
  Description of Artificial Sequence: Synthetic oligonucleotide
acuguguuccuaaagcaga

SEQ ID NO: 2333881 - RNA, 19 nt, Artificial Sequence
  Description of Artificial Sequence: Synthetic oligonucleotide
guuugcaggcaccucgggc

SEQ ID NO: 2333882 - RNA, 19 nt, Artificial Sequence
  Description of Artificial Sequence: Synthetic oligonucleotide
cacggguucgaugacagug

SEQ ID NO: 2333883 - RNA, 19 nt, Artificial Sequence
  Description of Artificial Sequence: Synthetic oligonucleotide
uagcggaacuccuggagac

SEQ ID NO: 2333884 - RNA, 19 nt, Artificial Sequence
  Description of Artificial Sequence: Synthetic oligonucleotide
acgugcagggacccagggc

SEQ ID NO: 2333885 - RNA, 19 nt, Artificial Sequence
  Description of Artificial Sequence: Synthetic oligonucleotide
uuuauguccacggguucga

SEQ ID NO: 2333886 - RNA, 19 nt, Artificial Sequence
  Description of Artificial Sequence: Synthetic oligonucleotide
agccauugucaaucuccgc

SEQ ID NO: 2333887 - RNA, 19 nt, Artificial Sequence
  Description of Artificial Sequence: Synthetic oligonucleotide
cuugcugaacuccugugca

SEQ ID NO: 2333888 - RNA, 19 nt, Artificial Sequence
  Description of Artificial Sequence: Synthetic oligonucleotide
cuguguuccuaaagcagac

SEQ ID NO: 2333889 - RNA, 19 nt, Artificial Sequence
  Description of Artificial Sequence: Synthetic oligonucleotide
ggccauguaaguuuguguc

SEQ ID NO: 2333890 - RNA, 19 nt, Artificial Sequence
  Description of Artificial Sequence: Synthetic oligonucleotide
guuccuaaagcagacagcu

SEQ ID NO: 2333891 - RNA, 19 nt, Artificial Sequence
  Description of Artificial Sequence: Synthetic oligonucleotide
agggcagguguguuuaugu

SEQ ID NO: 2333892 - RNA, 19 nt, Artificial Sequence
  Description of Artificial Sequence: Synthetic oligonucleotide
gagacacuuggcuuccuuc

SEQ ID NO: 2333893 - RNA, 19 nt, Artificial Sequence
  Description of Artificial Sequence: Synthetic oligonucleotide
uuccuaaagcagacagcug

SEQ ID NO: 2333894 - RNA, 19 nt, Artificial Sequence
  Description of Artificial Sequence: Synthetic oligonucleotide
cagcacacggcgaccaggg

SEQ ID NO: 2333895 - RNA, 19 nt, Artificial Sequence
  Description of Artificial Sequence: Synthetic oligonucleotide
gucgaucuuggcugagagg

SEQ ID NO: 2333896 - RNA, 19 nt, Artificial Sequence
  Description of Artificial Sequence: Synthetic oligonucleotide
acgccaaggccucagcuga

SEQ ID NO: 2333897 - RNA, 19 nt, Artificial Sequence
  Description of Artificial Sequence: Synthetic oligonucleotide
gggugcaguaccaggaucg

SEQ ID NO: 2333898 - RNA, 19 nt, Artificial Sequence
  Description of Artificial Sequence: Synthetic oligonucleotide
cagugcaggauggaugggg

SEQ ID NO: 2333899 - RNA, 19 nt, Artificial Sequence
  Description of Artificial Sequence: Synthetic oligonucleotide
aaaguagggcccggccagg

SEQ ID NO: 2333900 - RNA, 19 nt, Artificial Sequence
  Description of Artificial Sequence: Synthetic oligonucleotide
guccacacugagcacccgg

SEQ ID NO: 2333901 - RNA, 19 nt, Artificial Sequence
  Description of Artificial Sequence: Synthetic oligonucleotide
ugcagcguggccucccagc

SEQ ID NO: 2333902 - RNA, 19 nt, Artificial Sequence
  Description of Artificial Sequence: Synthetic oligonucleotide
gacgugcagggacccaggg

SEQ ID NO: 2333903 - RNA, 19 nt, Artificial Sequence
  Description of Artificial Sequence: Synthetic oligonucleotide
ccuaggauggagguggugg

SEQ ID NO: 2333904 - RNA, 19 nt, Artificial Sequence
  Description of Artificial Sequence: Synthetic oligonucleotide
uagcccuugcggucgaucu

SEQ ID NO: 2333905 - RNA, 19 nt, Artificial Sequence
  Description of Artificial Sequence: Synthetic oligonucleotide
cucguguggagccauuguc

SEQ ID NO: 2333906 - RNA, 19 nt, Artificial Sequence
  Description of Artificial Sequence: Synthetic oligonucleotide
ugaacaccuucugggcacg

SEQ ID NO: 2333907 - RNA, 19 nt, Artificial Sequence
  Description of Artificial Sequence: Synthetic oligonucleotide
guuccaacagggcaggugu

SEQ ID NO: 2333908 - RNA, 19 nt, Artificial Sequence
  Description of Artificial Sequence: Synthetic oligonucleotide
aggaucgugccaccuucuc

SEQ ID NO: 2333909 - RNA, 19 nt, Artificial Sequence
  Description of Artificial Sequence: Synthetic oligonucleotide
cuggaguguagcccuugcg

SEQ ID NO: 2333910 - RNA, 19 nt, Artificial Sequence
  Description of Artificial Sequence: Synthetic oligonucleotide
gguaccgaggugucgauuc

SEQ ID NO: 2333911 - RNA, 19 nt, Artificial Sequence
  Description of Artificial Sequence: Synthetic oligonucleotide
guacaguggaggcggucgg

SEQ ID NO: 2333912 - RNA, 19 nt, Artificial Sequence
  Description of Artificial Sequence: Synthetic oligonucleotide
acgugcaccugguaccgag

SEQ ID NO: 2333913 - RNA, 19 nt, Artificial Sequence
  Description of Artificial Sequence: Synthetic oligonucleotide
agggauccuccucagagua

SEQ ID NO: 2333914 - RNA, 19 nt, Artificial Sequence
  Description of Artificial Sequence: Synthetic oligonucleotide
cucugaguacuccgaagac

SEQ ID NO: 2333915 - RNA, 19 nt, Artificial Sequence
  Description of Artificial Sequence: Synthetic oligonucleotide
aggucaugcagcguggccu

SEQ ID NO: 2333916 - RNA, 19 nt, Artificial Sequence
  Description of Artificial Sequence: Synthetic oligonucleotide
ucccaauccuaggauggag

SEQ ID NO: 2333917 - RNA, 19 nt, Artificial Sequence
  Description of Artificial Sequence: Synthetic oligonucleotide
agugcgcuucuguuugcag

SEQ ID NO: 2333918 - RNA, 19 nt, Artificial Sequence
  Description of Artificial Sequence: Synthetic oligonucleotide
uguguuccuaaagcagaca

SEQ ID NO: 2333919 - RNA, 19 nt, Artificial Sequence
  Description of Artificial Sequence: Synthetic oligonucleotide
guccauacuggccaccaca

SEQ ID NO: 2333920 - RNA, 19 nt, Artificial Sequence
  Description of Artificial Sequence: Synthetic oligonucleotide
ggucgaucuuggcugagag

SEQ ID NO: 2333921 - RNA, 19 nt, Artificial Sequence
  Description of Artificial Sequence: Synthetic oligonucleotide
cacaucaacaggucaugca

SEQ ID NO: 2333922 - RNA, 19 nt, Artificial Sequence
  Description of Artificial Sequence: Synthetic oligonucleotide
ggauacgaggccaugggug

SEQ ID NO: 2333923 - RNA, 19 nt, Artificial Sequence
  Description of Artificial Sequence: Synthetic oligonucleotide
gacaggcaaaguagggccc

SEQ ID NO: 2333924 - RNA, 19 nt, Artificial Sequence
  Description of Artificial Sequence: Synthetic oligonucleotide
ucgccuggaguguagcccu

SEQ ID NO: 2333925 - RNA, 19 nt, Artificial Sequence
  Description of Artificial Sequence: Synthetic oligonucleotide
aucgugccaccuucucucg

SEQ ID NO: 2333926 - RNA, 19 nt, Artificial Sequence
  Description of Artificial Sequence: Synthetic oligonucleotide
auucccucuggaagcuugc

SEQ ID NO: 2333927 - RNA, 19 nt, Artificial Sequence
  Description of Artificial Sequence: Synthetic oligonucleotide
ucaagacuguguuccuaaa

SEQ ID NO: 2333928 - RNA, 19 nt, Artificial Sequence
  Description of Artificial Sequence: Synthetic oligonucleotide
ucgucccucaccaccucug

SEQ ID NO: 2333929 - RNA, 19 nt, Artificial Sequence
  Description of Artificial Sequence: Synthetic oligonucleotide
aaguagggcccggccaggg

SEQ ID NO: 2333930 - RNA, 19 nt, Artificial Sequence
  Description of Artificial Sequence: Synthetic oligonucleotide
cuaaagcagacagcuggac

SEQ ID NO: 2333931 - RNA, 19 nt, Artificial Sequence
  Description of Artificial Sequence: Synthetic oligonucleotide
ucgugccaccuucucucgg

SEQ ID NO: 2333932 - RNA, 19 nt, Artificial Sequence
  Description of Artificial Sequence: Synthetic oligonucleotide
gaguguagcccuugcgguc

SEQ ID NO: 2333933 - RNA, 19 nt, Artificial Sequence
  Description of Artificial Sequence: Synthetic oligonucleotide
gcgaccagggcccacgggg

SEQ ID NO: 2333934 - RNA, 19 nt, Artificial Sequence
  Description of Artificial Sequence: Synthetic oligonucleotide
cccaauccuaggauggagg

SEQ ID NO: 2333935 - RNA, 19 nt, Artificial Sequence
  Description of Artificial Sequence: Synthetic oligonucleotide
uggccagagaaacgugcac

SEQ ID NO: 2333936 - RNA, 19 nt, Artificial Sequence
  Description of Artificial Sequence: Synthetic oligonucleotide
uuccaacagggcaggugug

SEQ ID NO: 2333937 - RNA, 19 nt, Artificial Sequence
  Description of Artificial Sequence: Synthetic oligonucleotide
ugggugcaguaccaggauc

SEQ ID NO: 2333938 - RNA, 19 nt, Artificial Sequence
  Description of Artificial Sequence: Synthetic oligonucleotide
ggaagggccccugugaggc

SEQ ID NO: 2333939 - RNA, 19 nt, Artificial Sequence
  Description of Artificial Sequence: Synthetic oligonucleotide
acacccacaucgugcagga

SEQ ID NO: 2333940 - RNA, 19 nt, Artificial Sequence
  Description of Artificial Sequence: Synthetic oligonucleotide
cugggguuccaacagggca

SEQ ID NO: 2333941 - RNA, 19 nt, Artificial Sequence
  Description of Artificial Sequence: Synthetic oligonucleotide
cucgggccauguaaguuug

SEQ ID NO: 2333942 - RNA, 19 nt, Artificial Sequence
  Description of Artificial Sequence: Synthetic oligonucleotide
ugcugaacuccugugcaaa

SEQ ID NO: 2333943 - RNA, 19 nt, Artificial Sequence
  Description of Artificial Sequence: Synthetic oligonucleotide
aguacuccgaagacccuug

SEQ ID NO: 2333944 - RNA, 19 nt, Artificial Sequence
  Description of Artificial Sequence: Synthetic oligonucleotide
caaucuccgcgaagauagg

SEQ ID NO: 2333945 - RNA, 19 nt, Artificial Sequence
  Description of Artificial Sequence: Synthetic oligonucleotide
ccucagaguacaguggagg

SEQ ID NO: 2333946 - RNA, 19 nt, Artificial Sequence
  Description of Artificial Sequence: Synthetic oligonucleotide
aagacccuugagagaguag

SEQ ID NO: 2333947 - RNA, 19 nt, Artificial Sequence
  Description of Artificial Sequence: Synthetic oligonucleotide
uuccuucaagacuguguuc

SEQ ID NO: 2333948 - RNA, 19 nt, Artificial Sequence
  Description of Artificial Sequence: Synthetic oligonucleotide
ggucacacccacaucgugc

SEQ ID NO: 2333949 - RNA, 19 nt, Artificial Sequence
  Description of Artificial Sequence: Synthetic oligonucleotide
uugcaggcaccucgggcca

SEQ ID NO: 2333950 - RNA, 19 nt, Artificial Sequence
  Description of Artificial Sequence: Synthetic oligonucleotide
agcuucugaggguggguga

SEQ ID NO: 2333951 - RNA, 19 nt, Artificial Sequence
  Description of Artificial Sequence: Synthetic oligonucleotide
ggcacaaccaggccacagc

SEQ ID NO: 2333952 - RNA, 19 nt, Artificial Sequence
  Description of Artificial Sequence: Synthetic oligonucleotide
agagaaacgugcaccuggu

SEQ ID NO: 2333953 - RNA, 19 nt, Artificial Sequence
  Description of Artificial Sequence: Synthetic oligonucleotide
ugagggugggugagggauc

SEQ ID NO: 2333954 - RNA, 19 nt, Artificial Sequence
  Description of Artificial Sequence: Synthetic oligonucleotide
agcuggacugcaguggcca

SEQ ID NO: 2333955 - RNA, 19 nt, Artificial Sequence
  Description of Artificial Sequence: Synthetic oligonucleotide
uucugggcacgacgugcag

SEQ ID NO: 2333956 - RNA, 19 nt, Artificial Sequence
  Description of Artificial Sequence: Synthetic oligonucleotide
aggcaaaguagggcccggc

SEQ ID NO: 2333957 - RNA, 19 nt, Artificial Sequence
  Description of Artificial Sequence: Synthetic oligonucleotide
guggaggcggucgguagcg

SEQ ID NO: 2333958 - RNA, 19 nt, Artificial Sequence
  Description of Artificial Sequence: Synthetic oligonucleotide
cuugcggucgaucuuggcu

SEQ ID NO: 2333959 - RNA, 19 nt, Artificial Sequence
  Description of Artificial Sequence: Synthetic oligonucleotide
guaccgaggugucgauucc

SEQ ID NO: 2333960 - RNA, 19 nt, Artificial Sequence
  Description of Artificial Sequence: Synthetic oligonucleotide
gcacacggcgaccagggcc

SEQ ID NO: 2333961 - RNA, 19 nt, Artificial Sequence
  Description of Artificial Sequence: Synthetic oligonucleotide
uacgaggccaugggugcag

SEQ ID NO: 2333962 - RNA, 19 nt, Artificial Sequence
  Description of Artificial Sequence: Synthetic oligonucleotide
caauccuaggauggaggug

SEQ ID NO: 2333963 - RNA, 19 nt, Artificial Sequence
  Description of Artificial Sequence: Synthetic oligonucleotide
uaccgaggugucgauuccc

SEQ ID NO: 2333964 - RNA, 19 nt, Artificial Sequence
  Description of Artificial Sequence: Synthetic oligonucleotide
cuccgcgaagauagggaug

SEQ ID NO: 2333965 - RNA, 19 nt, Artificial Sequence
  Description of Artificial Sequence: Synthetic oligonucleotide
ggccagagaaacgugcacc

SEQ ID NO: 2333966 - RNA, 19 nt, Artificial Sequence
  Description of Artificial Sequence: Synthetic oligonucleotide
ggcaaaguagggcccggcc

SEQ ID NO: 2333967 - RNA, 19 nt, Artificial Sequence
  Description of Artificial Sequence: Synthetic oligonucleotide
caguggaggcggucgguag

SEQ ID NO: 2333968 - RNA, 19 nt, Artificial Sequence
  Description of Artificial Sequence: Synthetic oligonucleotide
ggcucccaauccuaggaug

SEQ ID NO: 2333969 - RNA, 19 nt, Artificial Sequence
  Description of Artificial Sequence: Synthetic oligonucleotide
guagggcccggccaggguc

SEQ ID NO: 2333970 - RNA, 19 nt, Artificial Sequence
  Description of Artificial Sequence: Synthetic oligonucleotide
ugcggucgaucuuggcuga

SEQ ID NO: 2333971 - RNA, 19 nt, Artificial Sequence
  Description of Artificial Sequence: Synthetic oligonucleotide
ucaacaggucaugcagcgu

SEQ ID NO: 2333972 - RNA, 19 nt, Artificial Sequence
  Description of Artificial Sequence: Synthetic oligonucleotide
gugcaggauggauggggcc

SEQ ID NO: 2333973 - RNA, 19 nt, Artificial Sequence
  Description of Artificial Sequence: Synthetic oligonucleotide
cuuccuucaagacuguguu

SEQ ID NO: 2333974 - RNA, 19 nt, Artificial Sequence
  Description of Artificial Sequence: Synthetic oligonucleotide
gaagacccuugagagagua

SEQ ID NO: 2333975 - RNA, 19 nt, Artificial Sequence
  Description of Artificial Sequence: Synthetic oligonucleotide
accucgccuggaguguagc

SEQ ID NO: 2333976 - RNA, 19 nt, Artificial Sequence
  Description of Artificial Sequence: Synthetic oligonucleotide
cuucugggcacgacgugca

SEQ ID NO: 2333977 - RNA, 19 nt, Artificial Sequence
  Description of Artificial Sequence: Synthetic oligonucleotide
gaaauucccucuggaagcu

SEQ ID NO: 2333978 - RNA, 19 nt, Artificial Sequence
  Description of Artificial Sequence: Synthetic oligonucleotide
ccaugggugcaguaccagg

SEQ ID NO: 2333979 - RNA, 19 nt, Artificial Sequence
  Description of Artificial Sequence: Synthetic oligonucleotide
uugcugccuccccucugag

SEQ ID NO: 2333980 - RNA, 19 nt, Artificial Sequence
  Description of Artificial Sequence: Synthetic oligonucleotide
ucaugcagcguggccuccc

SEQ ID NO: 2333981 - RNA, 19 nt, Artificial Sequence
  Description of Artificial Sequence: Synthetic oligonucleotide
gauccuccucagaguacag

SEQ ID NO: 2333982 - RNA, 19 nt, Artificial Sequence
  Description of Artificial Sequence: Synthetic oligonucleotide
cuuggcugagagggauacg

SEQ ID NO: 2333983 - RNA, 19 nt, Artificial Sequence
  Description of Artificial Sequence: Synthetic oligonucleotide
ggugagggauccuccucag

SEQ ID NO: 2333984 - RNA, 19 nt, Artificial Sequence
  Description of Artificial Sequence: Synthetic oligonucleotide
uguccacggguucgaugac

SEQ ID NO: 2333985 - RNA, 19 nt, Artificial Sequence
  Description of Artificial Sequence: Synthetic oligonucleotide
acggguucgaugacaguga

SEQ ID NO: 2333986 - RNA, 19 nt, Artificial Sequence
  Description of Artificial Sequence: Synthetic oligonucleotide
gugucuguaccagggcggc

SEQ ID NO: 2333987 - RNA, 19 nt, Artificial Sequence
  Description of Artificial Sequence: Synthetic oligonucleotide
gucgguagcggaacuccug

SEQ ID NO: 2333988 - RNA, 19 nt, Artificial Sequence
  Description of Artificial Sequence: Synthetic oligonucleotide
ggauccuccucagaguaca

SEQ ID NO: 2333989 - RNA, 19 nt, Artificial Sequence
  Description of Artificial Sequence: Synthetic oligonucleotide
auguaaguuugugucugua

SEQ ID NO: 2333990 - RNA, 19 nt, Artificial Sequence
  Description of Artificial Sequence: Synthetic oligonucleotide
guaccaggaucgugccacc

SEQ ID NO: 2333991 - RNA, 19 nt, Artificial Sequence
  Description of Artificial Sequence: Synthetic oligonucleotide
gcgaagauagggaugaccu

SEQ ID NO: 2333992 - RNA, 19 nt, Artificial Sequence
  Description of Artificial Sequence: Synthetic oligonucleotide
ggcaccucgggccauguaa

SEQ ID NO: 2333993 - RNA, 19 nt, Artificial Sequence
  Description of Artificial Sequence: Synthetic oligonucleotide
agcucguguggagccauug

SEQ ID NO: 2333994 - RNA, 19 nt, Artificial Sequence
  Description of Artificial Sequence: Synthetic oligonucleotide
cccugggcugcacagcucg

SEQ ID NO: 2333995 - RNA, 19 nt, Artificial Sequence
  Description of Artificial Sequence: Synthetic oligonucleotide
acggcgaccagggcccacg

SEQ ID NO: 2333996 - RNA, 19 nt, Artificial Sequence
  Description of Artificial Sequence: Synthetic oligonucleotide
caguggccagagaaacgug

SEQ ID NO: 2333997 - RNA, 19 nt, Artificial Sequence
  Description of Artificial Sequence: Synthetic oligonucleotide
aggcggucgguagcggaac

SEQ ID NO: 2333998 - RNA, 19 nt, Artificial Sequence
  Description of Artificial Sequence: Synthetic oligonucleotide
agagggauacgaggccaug

SEQ ID NO: 2333999 - RNA, 19 nt, Artificial Sequence
  Description of Artificial Sequence: Synthetic oligonucleotide
ccucugaguacuccgaaga

SEQ ID NO: 2334000 - RNA, 19 nt, Artificial Sequence
  Description of Artificial Sequence: Synthetic oligonucleotide
aguagggcccggccagggu

SEQ ID NO: 2334001 - RNA, 19 nt, Artificial Sequence
  Description of Artificial Sequence: Synthetic oligonucleotide
gggugagggauccuccuca

SEQ ID NO: 2334002 - RNA, 19 nt, Artificial Sequence
  Description of Artificial Sequence: Synthetic oligonucleotide
accugguaccgaggugucg

SEQ ID NO: 2334003 - RNA, 19 nt, Artificial Sequence
  Description of Artificial Sequence: Synthetic oligonucleotide
aaauucccucuggaagcuu

SEQ ID NO: 2334004 - RNA, 19 nt, Artificial Sequence
  Description of Artificial Sequence: Synthetic oligonucleotide
augaccucgccuggagugu

SEQ ID NO: 2334005 - RNA, 19 nt, Artificial Sequence
  Description of Artificial Sequence: Synthetic oligonucleotide
gcuucuguuugcaggcacc

SEQ ID NO: 2334006 - RNA, 19 nt, Artificial Sequence
  Description of Artificial Sequence: Synthetic oligonucleotide
ugucuguaccagggcggcc

SEQ ID NO: 2334007 - RNA, 19 nt, Artificial Sequence
  Description of Artificial Sequence: Synthetic oligonucleotide
gcggaacuccuggagacag

SEQ ID NO: 2334008 - RNA, 19 nt, Artificial Sequence
  Description of Artificial Sequence: Synthetic oligonucleotide
gcugaacuccugugcaaac

SEQ ID NO: 2334009 - RNA, 19 nt, Artificial Sequence
  Description of Artificial Sequence: Synthetic oligonucleotide
uucuguuugcaggcaccuc

SEQ ID NO: 2334010 - RNA, 19 nt, Artificial Sequence
  Description of Artificial Sequence: Synthetic oligonucleotide
ggaguguagcccuugcggu

SEQ ID NO: 2334011 - RNA, 19 nt, Artificial Sequence
  Description of Artificial Sequence: Synthetic oligonucleotide
acuccugugcaaacgccaa

SEQ ID NO: 2334012 - RNA, 19 nt, Artificial Sequence
  Description of Artificial Sequence: Synthetic oligonucleotide
gggcacgacgugcagggac

SEQ ID NO: 2334013 - RNA, 19 nt, Artificial Sequence
  Description of Artificial Sequence: Synthetic oligonucleotide
guguuuauguccacggguu

SEQ ID NO: 2334014 - RNA, 19 nt, Artificial Sequence
  Description of Artificial Sequence: Synthetic oligonucleotide
cagguguguuuauguccac

SEQ ID NO: 2334015 - RNA, 19 nt, Artificial Sequence
  Description of Artificial Sequence: Synthetic oligonucleotide
ggcacgacgugcagggacc

SEQ ID NO: 2334016 - RNA, 19 nt, Artificial Sequence
  Description of Artificial Sequence: Synthetic oligonucleotide
augcagcguggccucccag

SEQ ID NO: 2334017 - RNA, 19 nt, Artificial Sequence
  Description of Artificial Sequence: Synthetic oligonucleotide
gagaaacgugcaccuggua

SEQ ID NO: 2334018 - RNA, 19 nt, Artificial Sequence
  Description of Artificial Sequence: Synthetic oligonucleotide
uuauguccacggguucgau

SEQ ID NO: 2334019 - RNA, 19 nt, Artificial Sequence
  Description of Artificial Sequence: Synthetic oligonucleotide
accgaggugucgauuccca

SEQ ID NO: 2334020 - RNA, 19 nt, Artificial Sequence
  Description of Artificial Sequence: Synthetic oligonucleotide
ccuaaagcagacagcugga

SEQ ID NO: 2334021 - RNA, 19 nt, Artificial Sequence
  Description of Artificial Sequence: Synthetic oligonucleotide
ccaggaucgugccaccuuc

SEQ ID NO: 2334022 - RNA, 19 nt, Artificial Sequence
  Description of Artificial Sequence: Synthetic oligonucleotide
ucgggccauguaaguuugu

SEQ ID NO: 2334023 - RNA, 19 nt, Artificial Sequence
  Description of Artificial Sequence: Synthetic oligonucleotide
gugcaguaccaggaucgug

SEQ ID NO: 2334024 - RNA, 19 nt, Artificial Sequence
  Description of Artificial Sequence: Synthetic oligonucleotide
ggugucgauucccacacau

SEQ ID NO: 2334025 - RNA, 19 nt, Artificial Sequence
  Description of Artificial Sequence: Synthetic oligonucleotide
gcgcuaugagcucugaccu

SEQ ID NO: 2334026 - RNA, 19 nt, Artificial Sequence
  Description of Artificial Sequence: Synthetic oligonucleotide
agcggaacuccuggagaca

SEQ ID NO: 2334027 - RNA, 19 nt, Artificial Sequence
  Description of Artificial Sequence: Synthetic oligonucleotide
guacuccgaagacccuuga

SEQ ID NO: 2334028 - RNA, 19 nt, Artificial Sequence
  Description of Artificial Sequence: Synthetic oligonucleotide
auacgaggccaugggugca

SEQ ID NO: 2334029 - RNA, 19 nt, Artificial Sequence
  Description of Artificial Sequence: Synthetic oligonucleotide
aacgugcaccugguaccga

SEQ ID NO: 2334030 - RNA, 19 nt, Artificial Sequence
  Description of Artificial Sequence: Synthetic oligonucleotide
gaguacaguggaggcgguc

SEQ ID NO: 2334031 - RNA, 19 nt, Artificial Sequence
  Description of Artificial Sequence: Synthetic oligonucleotide
cauguaaguuugugucugu

SEQ ID NO: 2334032 - RNA, 19 nt, Artificial Sequence
  Description of Artificial Sequence: Synthetic oligonucleotide
ugcaaacgccaaggccuca

SEQ ID NO: 2334033 - RNA, 19 nt, Artificial Sequence
  Description of Artificial Sequence: Synthetic oligonucleotide
gucgauucccacacaucaa

SEQ ID NO: 2334034 - RNA, 19 nt, Artificial Sequence
  Description of Artificial Sequence: Synthetic oligonucleotide
gcaccucgggccauguaag

SEQ ID NO: 2334035 - RNA, 19 nt, Artificial Sequence
  Description of Artificial Sequence: Synthetic oligonucleotide
gaccucgccuggaguguag

SEQ ID NO: 2334036 - RNA, 19 nt, Artificial Sequence
  Description of Artificial Sequence: Synthetic oligonucleotide
acagcucguguggagccau

SEQ ID NO: 2334037 - RNA, 19 nt, Artificial Sequence
  Description of Artificial Sequence: Synthetic oligonucleotide
ccuggaguguagcccuugc

SEQ ID NO: 2334038 - RNA, 19 nt, Artificial Sequence
  Description of Artificial Sequence: Synthetic oligonucleotide
gccauguaaguuugugucu

SEQ ID NO: 2334039 - RNA, 19 nt, Artificial Sequence
  Description of Artificial Sequence: Synthetic oligonucleotide
accucgggccauguaaguu

SEQ ID NO: 2334040 - RNA, 19 nt, Artificial Sequence
  Description of Artificial Sequence: Synthetic oligonucleotide
gccagagaaacgugcaccu

SEQ ID NO: 2334041 - RNA, 19 nt, Artificial Sequence
  Description of Artificial Sequence: Synthetic oligonucleotide
cuucaagacuguguuccua

SEQ ID NO: 2334042 - RNA, 19 nt, Artificial Sequence
  Description of Artificial Sequence: Synthetic oligonucleotide
gaggcggucgguagcggaa

SEQ ID NO: 2334043 - RNA, 19 nt, Artificial Sequence
  Description of Artificial Sequence: Synthetic oligonucleotide
gaagggccccugugaggca

SEQ ID NO: 2334044 - RNA, 19 nt, Artificial Sequence
  Description of Artificial Sequence: Synthetic oligonucleotide
guagcccuugcggucgauc

SEQ ID NO: 2334045 - RNA, 19 nt, Artificial Sequence
  Description of Artificial Sequence: Synthetic oligonucleotide
ugaccucgccuggagugua

SEQ ID NO: 2334046 - RNA, 19 nt, Artificial Sequence
  Description of Artificial Sequence: Synthetic oligonucleotide
gcccuugcggucgaucuug

SEQ ID NO: 2334047 - RNA, 19 nt, Artificial Sequence
  Description of Artificial Sequence: Synthetic oligonucleotide
gaguacuccgaagacccuu

SEQ ID NO: 2334048 - RNA, 19 nt, Artificial Sequence
  Description of Artificial Sequence: Synthetic oligonucleotide
cgcgaagauagggaugacc

SEQ ID NO: 2334049 - RNA, 19 nt, Artificial Sequence
  Description of Artificial Sequence: Synthetic oligonucleotide
guccacggguucgaugaca

SEQ ID NO: 2334050 - RNA, 19 nt, Artificial Sequence
  Description of Artificial Sequence: Synthetic oligonucleotide
cuucuguuugcaggcaccu

SEQ ID NO: 2334051 - RNA, 19 nt, Artificial Sequence
  Description of Artificial Sequence: Synthetic oligonucleotide
agcccuugcggucgaucuu

SEQ ID NO: 2334052 - RNA, 19 nt, Artificial Sequence
  Description of Artificial Sequence: Synthetic oligonucleotide
gggccauguaaguuugugu

SEQ ID NO: 2334053 - RNA, 19 nt, Artificial Sequence
  Description of Artificial Sequence: Synthetic oligonucleotide
cgaagauagggaugaccuc

SEQ ID NO: 2334054 - RNA, 19 nt, Artificial Sequence
  Description of Artificial Sequence: Synthetic oligonucleotide
caccucugaguacuccgaa

SEQ ID NO: 2334055 - RNA, 19 nt, Artificial Sequence
  Description of Artificial Sequence: Synthetic oligonucleotide
ggaucgugccaccuucucu

SEQ ID NO: 2334056 - RNA, 19 nt, Artificial Sequence
  Description of Artificial Sequence: Synthetic oligonucleotide
cccacacaucaacagguca

SEQ ID NO: 2334057 - RNA, 19 nt, Artificial Sequence
  Description of Artificial Sequence: Synthetic oligonucleotide
caugcagcguggccuccca

SEQ ID NO: 2334058 - RNA, 19 nt, Artificial Sequence
  Description of Artificial Sequence: Synthetic oligonucleotide
ccucgccuggaguguagcc

SEQ ID NO: 2334059 - RNA, 19 nt, Artificial Sequence
  Description of Artificial Sequence: Synthetic oligonucleotide
agaguacaguggaggcggu

SEQ ID NO: 2334060 - RNA, 19 nt, Artificial Sequence
  Description of Artificial Sequence: Synthetic oligonucleotide
ccugguaccgaggugucga

SEQ ID NO: 2334061 - RNA, 19 nt, Artificial Sequence
  Description of Artificial Sequence: Synthetic oligonucleotide
ugguaccgaggugucgauu

SEQ ID NO: 2334062 - RNA, 19 nt, Artificial Sequence
  Description of Artificial Sequence: Synthetic oligonucleotide
gauggagguggugggcgcu

SEQ ID NO: 2334063 - RNA, 19 nt, Artificial Sequence
  Description of Artificial Sequence: Synthetic oligonucleotide
caguaccaggaucgugcca

SEQ ID NO: 2334064 - RNA, 19 nt, Artificial Sequence
  Description of Artificial Sequence: Synthetic oligonucleotide
cucccaauccuaggaugga

SEQ ID NO: 2334065 - RNA, 19 nt, Artificial Sequence
  Description of Artificial Sequence: Synthetic oligonucleotide
ggaggcggucgguagcgga

SEQ ID NO: 2334066 - RNA, 19 nt, Artificial Sequence
  Description of Artificial Sequence: Synthetic oligonucleotide
ugggcgcuaugagcucuga

SEQ ID NO: 2334067 - RNA, 19 nt, Artificial Sequence
  Description of Artificial Sequence: Synthetic oligonucleotide
ggcgaccagggcccacggg

SEQ ID NO: 2334068 - RNA, 19 nt, Artificial Sequence
  Description of Artificial Sequence: Synthetic oligonucleotide
gggcacaaccaggccacag

SEQ ID NO: 2334069 - RNA, 19 nt, Artificial Sequence
  Description of Artificial Sequence: Synthetic oligonucleotide
cuggacugcaguggccaga

SEQ ID NO: 2334070 - RNA, 19 nt, Artificial Sequence
  Description of Artificial Sequence: Synthetic oligonucleotide
cgugcaccugguaccgagg

SEQ ID NO: 2334071 - RNA, 19 nt, Artificial Sequence
  Description of Artificial Sequence: Synthetic oligonucleotide
cgaggugucgauucccaca

SEQ ID NO: 2334072 - RNA, 19 nt, Artificial Sequence
  Description of Artificial Sequence: Synthetic oligonucleotide
ccaauccuaggauggaggu

SEQ ID NO: 2334073 - RNA, 19 nt, Artificial Sequence
  Description of Artificial Sequence: Synthetic oligonucleotide
gugggcgcuaugagcucug

SEQ ID NO: 2334074 - RNA, 19 nt, Artificial Sequence
  Description of Artificial Sequence: Synthetic oligonucleotide
gcagcuggcucgucccuca

SEQ ID NO: 2334075 - RNA, 19 nt, Artificial Sequence
  Description of Artificial Sequence: Synthetic oligonucleotide
ccacacaucaacaggucau

SEQ ID NO: 2334076 - RNA, 19 nt, Artificial Sequence
  Description of Artificial Sequence: Synthetic oligonucleotide
cgauucccacacaucaaca

SEQ ID NO: 2334077 - RNA, 19 nt, Artificial Sequence
  Description of Artificial Sequence: Synthetic oligonucleotide
auccuaggauggagguggu

SEQ ID NO: 2334078 - RNA, 19 nt, Artificial Sequence
  Description of Artificial Sequence: Synthetic oligonucleotide
ccagagaaacgugcaccug

SEQ ID NO: 2334079 - RNA, 19 nt, Artificial Sequence
  Description of Artificial Sequence: Synthetic oligonucleotide
ggguucgaugacagugaac

SEQ ID NO: 2334080 - RNA, 19 nt, Artificial Sequence
  Description of Artificial Sequence: Synthetic oligonucleotide
gcuaugagcucugaccuuu

SEQ ID NO: 2334081 - RNA, 19 nt, Artificial Sequence
  Description of Artificial Sequence: Synthetic oligonucleotide
ccuugcggucgaucuuggc

SEQ ID NO: 2334082 - RNA, 19 nt, Artificial Sequence
  Description of Artificial Sequence: Synthetic oligonucleotide
gggcgcuaugagcucugac

SEQ ID NO: 2334083 - RNA, 19 nt, Artificial Sequence
  Description of Artificial Sequence: Synthetic oligonucleotide
cugccuccccucugagaca

SEQ ID NO: 2334084 - RNA, 19 nt, Artificial Sequence
  Description of Artificial Sequence: Synthetic oligonucleotide
ccgaggugucgauucccac

SEQ ID NO: 2334085 - RNA, 19 nt, Artificial Sequence
  Description of Artificial Sequence: Synthetic oligonucleotide
gggauccuccucagaguac

SEQ ID NO: 2334086 - RNA, 19 nt, Artificial Sequence
  Description of Artificial Sequence: Synthetic oligonucleotide
acgaggccaugggugcagu

SEQ ID NO: 2334087 - RNA, 19 nt, Artificial Sequence
  Description of Artificial Sequence: Synthetic oligonucleotide
cacagcucguguggagcca

SEQ ID NO: 2334088 - RNA, 19 nt, Artificial Sequence
  Description of Artificial Sequence: Synthetic oligonucleotide
cggucgguagcggaacucc

SEQ ID NO: 2334089 - RNA, 19 nt, Artificial Sequence
  Description of Artificial Sequence: Synthetic oligonucleotide
ccucaccaccucugaguac

SEQ ID NO: 2334090 - RNA, 19 nt, Artificial Sequence
  Description of Artificial Sequence: Synthetic oligonucleotide
cguguggagccauugucaa

SEQ ID NO: 2334091 - RNA, 19 nt, Artificial Sequence
  Description of Artificial Sequence: Synthetic oligonucleotide
cagcuggcucgucccucac

SEQ ID NO: 2334092 - RNA, 19 nt, Artificial Sequence
  Description of Artificial Sequence: Synthetic oligonucleotide
caggaucgugccaccuucu

SEQ ID NO: 2334093 - RNA, 19 nt, Artificial Sequence
  Description of Artificial Sequence: Synthetic oligonucleotide
uguagcccuugcggucgau

SEQ ID NO: 2334094 - RNA, 19 nt, Artificial Sequence
  Description of Artificial Sequence: Synthetic oligonucleotide
cgacgugcagggacccagg

SEQ ID NO: 2334095 - RNA, 19 nt, Artificial Sequence
  Description of Artificial Sequence: Synthetic oligonucleotide
gcagcguggccucccagcu

SEQ ID NO: 2334096 - RNA, 19 nt, Artificial Sequence
  Description of Artificial Sequence: Synthetic oligonucleotide
caacagggcagguguguuu

SEQ ID NO: 2334097 - RNA, 19 nt, Artificial Sequence
  Description of Artificial Sequence: Synthetic oligonucleotide
gcacgacgugcagggaccc

SEQ ID NO: 2334098 - RNA, 19 nt, Artificial Sequence
  Description of Artificial Sequence: Synthetic oligonucleotide
cuaugagcucugaccuuuu

SEQ ID NO: 2334099 - RNA, 19 nt, Artificial Sequence
  Description of Artificial Sequence: Synthetic oligonucleotide
caccucgggccauguaagu

SEQ ID NO: 2334100 - RNA, 19 nt, Artificial Sequence
  Description of Artificial Sequence: Synthetic oligonucleotide
gcucguguggagccauugu

SEQ ID NO: 2334101 - RNA, 19 nt, Artificial Sequence
  Description of Artificial Sequence: Synthetic oligonucleotide
gggagugugcagggcacaa

SEQ ID NO: 2334102 - RNA, 19 nt, Artificial Sequence
  Description of Artificial Sequence: Synthetic oligonucleotide
ccacaucgugcaggagggg

SEQ ID NO: 2334103 - RNA, 19 nt, Artificial Sequence
  Description of Artificial Sequence: Synthetic oligonucleotide
ggcagcuggcucgucccuc

SEQ ID NO: 2334104 - RNA, 19 nt, Artificial Sequence
  Description of Artificial Sequence: Synthetic oligonucleotide
ggugggcgcuaugagcucu

SEQ ID NO: 2334105 - RNA, 19 nt, Artificial Sequence
  Description of Artificial Sequence: Synthetic oligonucleotide
ggugcaguaccaggaucgu

SEQ ID NO: 2334106 - RNA, 19 nt, Artificial Sequence
  Description of Artificial Sequence: Synthetic oligonucleotide
ggcucgucccucaccaccu

SEQ ID NO: 2334107 - RNA, 19 nt, Artificial Sequence
  Description of Artificial Sequence: Synthetic oligonucleotide
cacgacgugcagggaccca

SEQ ID NO: 2334108 - RNA, 19 nt, Artificial Sequence
  Description of Artificial Sequence: Synthetic oligonucleotide
cugguaccgaggugucgau

SEQ ID NO: 2334109 - RNA, 19 nt, Artificial Sequence
  Description of Artificial Sequence: Synthetic oligonucleotide
gcggucgguagcggaacuc

SEQ ID NO: 2334110 - RNA, 19 nt, Artificial Sequence
  Description of Artificial Sequence: Synthetic oligonucleotide
cguccauacuggccaccac

SEQ ID NO: 2334111 - RNA, 19 nt, Artificial Sequence
  Description of Artificial Sequence: Synthetic oligonucleotide
ccguccauacuggccacca

SEQ ID NO: 2334112 - RNA, 19 nt, Artificial Sequence
  Description of Artificial Sequence: Synthetic oligonucleotide
cccguccauacuggccacc

SEQ ID NO: 2334113 - RNA, 19 nt, Artificial Sequence
  Description of Artificial Sequence: Synthetic oligonucleotide
ccccguccauacuggccac

SEQ ID NO: 2334114 - RNA, 19 nt, Artificial Sequence
  Description of Artificial Sequence: Synthetic oligonucleotide
ggucgguagcggaacuccu

SEQ ID NO: 2334115 - RNA, 19 nt, Artificial Sequence
  Description of Artificial Sequence: Synthetic oligonucleotide
gccaaggccucagcugaaa

SEQ ID NO: 2334116 - RNA, 19 nt, Artificial Sequence
  Description of Artificial Sequence: Synthetic oligonucleotide
acacggcgaccagggccca

SEQ ID NO: 2334117 - RNA, 19 nt, Artificial Sequence
  Description of Artificial Sequence: Synthetic oligonucleotide
cacggcgaccagggcccac

SEQ ID NO: 2334118 - RNA, 19 nt, Artificial Sequence
  Description of Artificial Sequence: Synthetic oligonucleotide
ggacugcaguggccagaga

SEQ ID NO: 2334119 - RNA, 19 nt, Artificial Sequence
  Description of Artificial Sequence: Synthetic oligonucleotide
ggcggucgguagcggaacu

SEQ ID NO: 2334120 - RNA, 19 nt, Artificial Sequence
  Description of Artificial Sequence: Synthetic oligonucleotide
gcgcuucuguuugcaggca

SEQ ID NO: 2334121 - RNA, 19 nt, Artificial Sequence
  Description of Artificial Sequence: Synthetic oligonucleotide
cggguucgaugacagugaa

SEQ ID NO: 2334122 - RNA, 19 nt, Artificial Sequence
  Description of Artificial Sequence: Synthetic oligonucleotide
cugagacacuuggcuuccu

SEQ ID NO: 2334123 - RNA, 19 nt, Artificial Sequence
  Description of Artificial Sequence: Synthetic oligonucleotide
cggcgaccagggcccacgg

SEQ ID NO: 2334124 - RNA, 19 nt, Artificial Sequence
  Description of Artificial Sequence: Synthetic oligonucleotide
ccaccacagugcgcuucug

SEQ ID NO: 2334125 - RNA, 19 nt, Artificial Sequence
  Description of Artificial Sequence: Synthetic oligonucleotide
ccgcgaagauagggaugac

SEQ ID NO: 2334126 - RNA, 19 nt, Artificial Sequence
  Description of Artificial Sequence: Synthetic oligonucleotide
cggucgaucuuggcugaga

SEQ ID NO: 2334127 - RNA, 19 nt, Artificial Sequence
  Description of Artificial Sequence: Synthetic oligonucleotide
cagcguggccucccagcuu

SEQ ID NO: 2334128 - RNA, 19 nt, Artificial Sequence
  Description of Artificial Sequence: Synthetic oligonucleotide
ccaacagggcagguguguu

SEQ ID NO: 2334129 - RNA, 19 nt, Artificial Sequence
  Description of Artificial Sequence: Synthetic oligonucleotide
cagcucguguggagccauu

SEQ ID NO: 2334130 - RNA, 19 nt, Artificial Sequence
  Description of Artificial Sequence: Synthetic oligonucleotide
ccggcagugcaggauggau

SEQ ID NO: 2334131 - RNA, 19 nt, Artificial Sequence
  Description of Artificial Sequence: Synthetic oligonucleotide
cgaagacccuugagagagu

SEQ ID NO: 2334132 - RNA, 19 nt, Artificial Sequence
  Description of Artificial Sequence: Synthetic oligonucleotide
gccuccccucugagacacu

SEQ ID NO: 2334133 - RNA, 19 nt, Artificial Sequence
  Description of Artificial Sequence: Synthetic oligonucleotide
aaugagaaaagauaaucuc

SEQ ID NO: 2334134 - RNA, 19 nt, Artificial Sequence
  Description of Artificial Sequence: Synthetic oligonucleotide
aguggugagagguacaugc

SEQ ID NO: 2334135 - RNA, 19 nt, Artificial Sequence
  Description of Artificial Sequence: Synthetic oligonucleotide
aaaagagucugccacgccg

SEQ ID NO: 2334136 - RNA, 19 nt, Artificial Sequence
  Description of Artificial Sequence: Synthetic oligonucleotide
uaucauauuggcccuaagg

SEQ ID NO: 2334137 - RNA, 19 nt, Artificial Sequence
  Description of Artificial Sequence: Synthetic oligonucleotide
ugauauaugggucucugag

SEQ ID NO: 2334138 - RNA, 19 nt, Artificial Sequence
  Description of Artificial Sequence: Synthetic oligonucleotide
agucgaaacccguagaugg

SEQ ID NO: 2334139 - RNA, 19 nt, Artificial Sequence
  Description of Artificial Sequence: Synthetic oligonucleotide
auauaugggucucugaguc

SEQ ID NO: 2334140 - RNA, 19 nt, Artificial Sequence
  Description of Artificial Sequence: Synthetic oligonucleotide
cauauuggcccuaaggugg

SEQ ID NO: 2334141 - RNA, 19 nt, Artificial Sequence
  Description of Artificial Sequence: Synthetic oligonucleotide
gacuccauaacucagccag

SEQ ID NO: 2334142 - RNA, 19 nt, Artificial Sequence
  Description of Artificial Sequence: Synthetic oligonucleotide
aaaagauaaucucucuuca

SEQ ID NO: 2334143 - RNA, 19 nt, Artificial Sequence
  Description of Artificial Sequence: Synthetic oligonucleotide
gauauugacgaugaugagg

SEQ ID NO: 2334144 - RNA, 19 nt, Artificial Sequence
  Description of Artificial Sequence: Synthetic oligonucleotide
auauugacgaugaugaggg

SEQ ID NO: 2334145 - RNA, 19 nt, Artificial Sequence
  Description of Artificial Sequence: Synthetic oligonucleotide
uuagucugaaugaucuugg

SEQ ID NO: 2334146 - RNA, 19 nt, Artificial Sequence
  Description of Artificial Sequence: Synthetic oligonucleotide
gauacuugcagaaaagccc

SEQ ID NO: 2334147 - RNA, 19 nt, Artificial Sequence
  Description of Artificial Sequence: Synthetic oligonucleotide
aagaaaagagucugccacg

SEQ ID NO: 2334148 - RNA, 19 nt, Artificial Sequence
  Description of Artificial Sequence: Synthetic oligonucleotide
ucagccuccaaaaugagaa

SEQ ID NO: 2334149 - RNA, 19 nt, Artificial Sequence
  Description of Artificial Sequence: Synthetic oligonucleotide
ugaucuacguaaaaguccu

SEQ ID NO: 2334150 - RNA, 19 nt, Artificial Sequence
  Description of Artificial Sequence: Synthetic oligonucleotide
agucugaaugaucuuggcc

SEQ ID NO: 2334151 - RNA, 19 nt, Artificial Sequence
  Description of Artificial Sequence: Synthetic oligonucleotide
aacuggaugcuguccacgc

SEQ ID NO: 2334152 - RNA, 19 nt, Artificial Sequence
  Description of Artificial Sequence: Synthetic oligonucleotide
aucauauuggcccuaaggu

SEQ ID NO: 2334153 - RNA, 19 nt, Artificial Sequence
  Description of Artificial Sequence: Synthetic oligonucleotide
agguuauugacauccgugg

SEQ ID NO: 2334154 - RNA, 19 nt, Artificial Sequence
  Description of Artificial Sequence: Synthetic oligonucleotide
uugacgaugaugagggucc

SEQ ID NO: 2334155 - RNA, 19 nt, Artificial Sequence
  Description of Artificial Sequence: Synthetic oligonucleotide
ucgauuucaucccauaggu

SEQ ID NO: 2334156 - RNA, 19 nt, Artificial Sequence
  Description of Artificial Sequence: Synthetic oligonucleotide
cugaucuacguaaaagucc

SEQ ID NO: 2334157 - RNA, 19 nt, Artificial Sequence
  Description of Artificial Sequence: Synthetic oligonucleotide
aaaagcccaagucggauca

SEQ ID NO: 2334158 - RNA, 19 nt, Artificial Sequence
  Description of Artificial Sequence: Synthetic oligonucleotide
ucauauuggcccuaaggug

SEQ ID NO: 2334159 - RNA, 19 nt, Artificial Sequence
  Description of Artificial Sequence: Synthetic oligonucleotide
augcugaugguaaagacac

SEQ ID NO: 2334160 - RNA, 19 nt, Artificial Sequence
  Description of Artificial Sequence: Synthetic oligonucleotide
ucuuugguaucauauuggc

SEQ ID NO: 2334161 - RNA, 19 nt, Artificial Sequence
  Description of Artificial Sequence: Synthetic oligonucleotide
cauggaaguggucaggagg

SEQ ID NO: 2334162 - RNA, 19 nt, Artificial Sequence
  Description of Artificial Sequence: Synthetic oligonucleotide
ucugagucgaaacccguag

SEQ ID NO: 2334163 - RNA, 19 nt, Artificial Sequence
  Description of Artificial Sequence: Synthetic oligonucleotide
caaccuauugcacccaugg

SEQ ID NO: 2334164 - RNA, 19 nt, Artificial Sequence
  Description of Artificial Sequence: Synthetic oligonucleotide
aaaauucgauuucauccca

SEQ ID NO: 2334165 - RNA, 19 nt, Artificial Sequence
  Description of Artificial Sequence: Synthetic oligonucleotide
aucugaucuacguaaaagu

SEQ ID NO: 2334166 - RNA, 19 nt, Artificial Sequence
  Description of Artificial Sequence: Synthetic oligonucleotide
uaacccaggagaaggaccc

SEQ ID NO: 2334167 - RNA, 19 nt, Artificial Sequence
  Description of Artificial Sequence: Synthetic oligonucleotide
uucaagacuccauaacuca

SEQ ID NO: 2334168 - RNA, 19 nt, Artificial Sequence
  Description of Artificial Sequence: Synthetic oligonucleotide
acgauauugacgaugauga

SEQ ID NO: 2334169 - RNA, 19 nt, Artificial Sequence
  Description of Artificial Sequence: Synthetic oligonucleotide
ugguaaugaucccuggaag

SEQ ID NO: 2334170 - RNA, 19 nt, Artificial Sequence
  Description of Artificial Sequence: Synthetic oligonucleotide
agaaaagagucugccacgc

SEQ ID NO: 2334171 - RNA, 19 nt, Artificial Sequence
  Description of Artificial Sequence: Synthetic oligonucleotide
uuugaucccucuauuuuca

SEQ ID NO: 2334172 - RNA, 19 nt, Artificial Sequence
  Description of Artificial Sequence: Synthetic oligonucleotide
ucucacaaccuauugcacc

SEQ ID NO: 2334173 - RNA, 19 nt, Artificial Sequence
  Description of Artificial Sequence: Synthetic oligonucleotide
ccaaaaguagccauaaccc

SEQ ID NO: 2334174 - RNA, 19 nt, Artificial Sequence
  Description of Artificial Sequence: Synthetic oligonucleotide
aaagagucugccacgccgc

SEQ ID NO: 2334175 - RNA, 19 nt, Artificial Sequence
  Description of Artificial Sequence: Synthetic oligonucleotide
uggucagguuugcagaagg

SEQ ID NO: 2334176 - RNA, 19 nt, Artificial Sequence
  Description of Artificial Sequence: Synthetic oligonucleotide
cucacaaccuauugcaccc

SEQ ID NO: 2334177 - RNA, 19 nt, Artificial Sequence
  Description of Artificial Sequence: Synthetic oligonucleotide
gguaaugaucccuggaagg

SEQ ID NO: 2334178 - RNA, 19 nt, Artificial Sequence
  Description of Artificial Sequence: Synthetic oligonucleotide
uuauugacauccgugguga

SEQ ID NO: 2334179 - RNA, 19 nt, Artificial Sequence
  Description of Artificial Sequence: Synthetic oligonucleotide
guuauugacauccguggug

SEQ ID NO: 2334180 - RNA, 19 nt, Artificial Sequence
  Description of Artificial Sequence: Synthetic oligonucleotide
auucgauuucaucccauag

SEQ ID NO: 2334181 - RNA, 19 nt, Artificial Sequence
  Description of Artificial Sequence: Synthetic oligonucleotide
gguagacuuagucugaaug

SEQ ID NO: 2334182 - RNA, 19 nt, Artificial Sequence
  Description of Artificial Sequence: Synthetic oligonucleotide
aaggagagacgcuggguag

SEQ ID NO: 2334183 - RNA, 19 nt, Artificial Sequence
  Description of Artificial Sequence: Synthetic oligonucleotide
auaacccaggagaaggacc

SEQ ID NO: 2334184 - RNA, 19 nt, Artificial Sequence
  Description of Artificial Sequence: Synthetic oligonucleotide
ucuacguaaaaguccuucu

SEQ ID NO: 2334185 - RNA, 19 nt, Artificial Sequence
  Description of Artificial Sequence: Synthetic oligonucleotide
ugggcaccgugauauaugg

SEQ ID NO: 2334186 - RNA, 19 nt, Artificial Sequence
  Description of Artificial Sequence: Synthetic oligonucleotide
gaucccucuauuuucaaaa

SEQ ID NO: 2334187 - RNA, 19 nt, Artificial Sequence
  Description of Artificial Sequence: Synthetic oligonucleotide
cuuugguaucauauuggcc

SEQ ID NO: 2334188 - RNA, 19 nt, Artificial Sequence
  Description of Artificial Sequence: Synthetic oligonucleotide
uauaugggucucugagucg

SEQ ID NO: 2334189 - RNA, 19 nt, Artificial Sequence
  Description of Artificial Sequence: Synthetic oligonucleotide
ugaugagggucccaucucc

SEQ ID NO: 2334190 - RNA, 19 nt, Artificial Sequence
  Description of Artificial Sequence: Synthetic oligonucleotide
ugcagaagaggccuagcug

SEQ ID NO: 2334191 - RNA, 19 nt, Artificial Sequence
  Description of Artificial Sequence: Synthetic oligonucleotide
ucuuugaucccucuauuuu

SEQ ID NO: 2334192 - RNA, 19 nt, Artificial Sequence
  Description of Artificial Sequence: Synthetic oligonucleotide
ggagguagaagaaaggaag

SEQ ID NO: 2334193 - RNA, 19 nt, Artificial Sequence
  Description of Artificial Sequence: Synthetic oligonucleotide
uagagcgucugaaggacag

SEQ ID NO: 2334194 - RNA, 19 nt, Artificial Sequence
  Description of Artificial Sequence: Synthetic oligonucleotide
agaaaagauaaucucucuu

SEQ ID NO: 2334195 - RNA, 19 nt, Artificial Sequence
  Description of Artificial Sequence: Synthetic oligonucleotide
guagacuuagucugaauga

SEQ ID NO: 2334196 - RNA, 19 nt, Artificial Sequence
  Description of Artificial Sequence: Synthetic oligonucleotide
auuucaucccauagguccc

SEQ ID NO: 2334197 - RNA, 19 nt, Artificial Sequence
  Description of Artificial Sequence: Synthetic oligonucleotide
ugcagauaugccaggauau

SEQ ID NO: 2334198 - RNA, 19 nt, Artificial Sequence
  Description of Artificial Sequence: Synthetic oligonucleotide
aucuacguaaaaguccuuc

SEQ ID NO: 2334199 - RNA, 19 nt, Artificial Sequence
  Description of Artificial Sequence: Synthetic oligonucleotide
caccggaaagaaaagaguc

SEQ ID NO: 2334200 - RNA, 19 nt, Artificial Sequence
  Description of Artificial Sequence: Synthetic oligonucleotide
caagacuccauaacucagc

SEQ ID NO: 2334201 - RNA, 19 nt, Artificial Sequence
  Description of Artificial Sequence: Synthetic oligonucleotide
gagugagaaggagagacgc

SEQ ID NO: 2334202 - RNA, 19 nt, Artificial Sequence
  Description of Artificial Sequence: Synthetic oligonucleotide
cagguuauugacauccgug

SEQ ID NO: 2334203 - RNA, 19 nt, Artificial Sequence
  Description of Artificial Sequence: Synthetic oligonucleotide
aagagucugccacgccgcc

SEQ ID NO: 2334204 - RNA, 19 nt, Artificial Sequence
  Description of Artificial Sequence: Synthetic oligonucleotide
uacguaaaaguccuucuuu

SEQ ID NO: 2334205 - RNA, 19 nt, Artificial Sequence
  Description of Artificial Sequence: Synthetic oligonucleotide
ggugagaaaaggcaggaac

SEQ ID NO: 2334206 - RNA, 19 nt, Artificial Sequence
  Description of Artificial Sequence: Synthetic oligonucleotide
gaagaaaggaagguggcga

SEQ ID NO: 2334207 - RNA, 19 nt, Artificial Sequence
  Description of Artificial Sequence: Synthetic oligonucleotide
caucugaucuacguaaaag

SEQ ID NO: 2334208 - RNA, 19 nt, Artificial Sequence
  Description of Artificial Sequence: Synthetic oligonucleotide
uauagagcgucugaaggac

SEQ ID NO: 2334209 - RNA, 19 nt, Artificial Sequence
  Description of Artificial Sequence: Synthetic oligonucleotide
ugagucgaaacccguagau

SEQ ID NO: 2334210 - RNA, 19 nt, Artificial Sequence
  Description of Artificial Sequence: Synthetic oligonucleotide
ucccaucugaucuacguaa

SEQ ID NO: 2334211 - RNA, 19 nt, Artificial Sequence
  Description of Artificial Sequence: Synthetic oligonucleotide
aaggcgguauuuucuguca

SEQ ID NO: 2334212 - RNA, 19 nt, Artificial Sequence
  Description of Artificial Sequence: Synthetic oligonucleotide
ucccauaggucccaucuga

SEQ ID NO: 2334213 - RNA, 19 nt, Artificial Sequence
  Description of Artificial Sequence: Synthetic oligonucleotide
agucggaucaggcugguaa

SEQ ID NO: 2334214 - RNA, 19 nt, Artificial Sequence
  Description of Artificial Sequence: Synthetic oligonucleotide
aauucgauuucaucccaua

SEQ ID NO: 2334215 - RNA, 19 nt, Artificial Sequence
  Description of Artificial Sequence: Synthetic oligonucleotide
cugaugguaaagacacugc

SEQ ID NO: 2334216 - RNA, 19 nt, Artificial Sequence
  Description of Artificial Sequence: Synthetic oligonucleotide
gcgauggugagugagaagg

SEQ ID NO: 2334217 - RNA, 19 nt, Artificial Sequence
  Description of Artificial Sequence: Synthetic oligonucleotide
cacgauauugacgaugaug

SEQ ID NO: 2334218 - RNA, 19 nt, Artificial Sequence
  Description of Artificial Sequence: Synthetic oligonucleotide
gucagguuugcagaaggcg

SEQ ID NO: 2334219 - RNA, 19 nt, Artificial Sequence
  Description of Artificial Sequence: Synthetic oligonucleotide
aacccguagauggaccagg

SEQ ID NO: 2334220 - RNA, 19 nt, Artificial Sequence
  Description of Artificial Sequence: Synthetic oligonucleotide
cauaacucagccagcccag

SEQ ID NO: 2334221 - RNA, 19 nt, Artificial Sequence
  Description of Artificial Sequence: Synthetic oligonucleotide
gaggccuagcugcugaagc

SEQ ID NO: 2334222 - RNA, 19 nt, Artificial Sequence
  Description of Artificial Sequence: Synthetic oligonucleotide
agcacagcaugcuucugag

SEQ ID NO: 2334223 - RNA, 19 nt, Artificial Sequence
  Description of Artificial Sequence: Synthetic oligonucleotide
gcagaaaagcccaagucgg

SEQ ID NO: 2334224 - RNA, 19 nt, Artificial Sequence
  Description of Artificial Sequence: Synthetic oligonucleotide
caaaaguagccauaaccca

SEQ ID NO: 2334225 - RNA, 19 nt, Artificial Sequence
  Description of Artificial Sequence: Synthetic oligonucleotide
ccaaaaugagaaaagauaa

SEQ ID NO: 2334226 - RNA, 19 nt, Artificial Sequence
  Description of Artificial Sequence: Synthetic oligonucleotide
aacaugcccagggugaaga

SEQ ID NO: 2334227 - RNA, 19 nt, Artificial Sequence
  Description of Artificial Sequence: Synthetic oligonucleotide
uagauggaccaggagguag

SEQ ID NO: 2334228 - RNA, 19 nt, Artificial Sequence
  Description of Artificial Sequence: Synthetic oligonucleotide
aaacaggagcucuuuggua

SEQ ID NO: 2334229 - RNA, 19 nt, Artificial Sequence
  Description of Artificial Sequence: Synthetic oligonucleotide
uacaugcugaugguaaaga

SEQ ID NO: 2334230 - RNA, 19 nt, Artificial Sequence
  Description of Artificial Sequence: Synthetic oligonucleotide
gaaggcgguauuuucuguc

SEQ ID NO: 2334231 - RNA, 19 nt, Artificial Sequence
  Description of Artificial Sequence: Synthetic oligonucleotide
ucccucuauuuucaaaauc

SEQ ID NO: 2334232 - RNA, 19 nt, Artificial Sequence
  Description of Artificial Sequence: Synthetic oligonucleotide
cagauaugccaggauauag

SEQ ID NO: 2334233 - RNA, 19 nt, Artificial Sequence
  Description of Artificial Sequence: Synthetic oligonucleotide
auccguggugagaaaaggc

SEQ ID NO: 2334234 - RNA, 19 nt, Artificial Sequence
  Description of Artificial Sequence: Synthetic oligonucleotide
ggauacuugcagaaaagcc

SEQ ID NO: 2334235 - RNA, 19 nt, Artificial Sequence
  Description of Artificial Sequence: Synthetic oligonucleotide
ggauauagagcgucugaag

SEQ ID NO: 2334236 - RNA, 19 nt, Artificial Sequence
  Description of Artificial Sequence: Synthetic oligonucleotide
uauugcacccauggaagug

SEQ ID NO: 2334237 - RNA, 19 nt, Artificial Sequence
  Description of Artificial Sequence: Synthetic oligonucleotide
gaaacccguagauggacca

SEQ ID NO: 2334238 - RNA, 19 nt, Artificial Sequence
  Description of Artificial Sequence: Synthetic oligonucleotide
gguaaagacacugcagaag

SEQ ID NO: 2334239 - RNA, 19 nt, Artificial Sequence
  Description of Artificial Sequence: Synthetic oligonucleotide
gaaggagagacgcugggua

SEQ ID NO: 2334240 - RNA, 19 nt, Artificial Sequence
  Description of Artificial Sequence: Synthetic oligonucleotide
uugguaucauauuggcccu

SEQ ID NO: 2334241 - RNA, 19 nt, Artificial Sequence
  Description of Artificial Sequence: Synthetic oligonucleotide
gacuuagucugaaugaucu

SEQ ID NO: 2334242 - RNA, 19 nt, Artificial Sequence
  Description of Artificial Sequence: Synthetic oligonucleotide
ugguaaagacacugcagaa

SEQ ID NO: 2334243 - RNA, 19 nt, Artificial Sequence
  Description of Artificial Sequence: Synthetic oligonucleotide
cugaagccgggccucaagg

SEQ ID NO: 2334244 - RNA, 19 nt, Artificial Sequence
  Description of Artificial Sequence: Synthetic oligonucleotide
uucucacaaccuauugcac

SEQ ID NO: 2334245 - RNA, 19 nt, Artificial Sequence
  Description of Artificial Sequence: Synthetic oligonucleotide
aguagccauaacccaggag

SEQ ID NO: 2334246 - RNA, 19 nt, Artificial Sequence
  Description of Artificial Sequence: Synthetic oligonucleotide
gccauaacccaggagaagg

SEQ ID NO: 2334247 - RNA, 19 nt, Artificial Sequence
  Description of Artificial Sequence: Synthetic oligonucleotide
uagacuuagucugaaugau

SEQ ID NO: 2334248 - RNA, 19 nt, Artificial Sequence
  Description of Artificial Sequence: Synthetic oligonucleotide
aaccuauugcacccaugga

SEQ ID NO: 2334249 - RNA, 19 nt, Artificial Sequence
  Description of Artificial Sequence: Synthetic oligonucleotide
gauauaugggucucugagu

SEQ ID NO: 2334250 - RNA, 19 nt, Artificial Sequence
  Description of Artificial Sequence: Synthetic oligonucleotide
acgcuggguagacuuaguc

SEQ ID NO: 2334251 - RNA, 19 nt, Artificial Sequence
  Description of Artificial Sequence: Synthetic oligonucleotide
uagccauaacccaggagaa

SEQ ID NO: 2334252 - RNA, 19 nt, Artificial Sequence
  Description of Artificial Sequence: Synthetic oligonucleotide
aagccaaaaguagccauaa

SEQ ID NO: 2334253 - RNA, 19 nt, Artificial Sequence
  Description of Artificial Sequence: Synthetic oligonucleotide
uagucugaaugaucuuggc

SEQ ID NO: 2334254 - RNA, 19 nt, Artificial Sequence
  Description of Artificial Sequence: Synthetic oligonucleotide
aagcccaagucggaucagg

SEQ ID NO: 2334255 - RNA, 19 nt, Artificial Sequence
  Description of Artificial Sequence: Synthetic oligonucleotide
gcacccacgauauugacga

SEQ ID NO: 2334256 - RNA, 19 nt, Artificial Sequence
  Description of Artificial Sequence: Synthetic oligonucleotide
cagaaggcgguauuuucug

SEQ ID NO: 2334257 - RNA, 19 nt, Artificial Sequence
  Description of Artificial Sequence: Synthetic oligonucleotide
ucuggcaccagaagccaaa

SEQ ID NO: 2334258 - RNA, 19 nt, Artificial Sequence
  Description of Artificial Sequence: Synthetic oligonucleotide
ugcaugugccugagguccg

SEQ ID NO: 2334259 - RNA, 19 nt, Artificial Sequence
  Description of Artificial Sequence: Synthetic oligonucleotide
auaugggucucugagucga

SEQ ID NO: 2334260 - RNA, 19 nt, Artificial Sequence
  Description of Artificial Sequence: Synthetic oligonucleotide
agacuuagucugaaugauc

SEQ ID NO: 2334261 - RNA, 19 nt, Artificial Sequence
  Description of Artificial Sequence: Synthetic oligonucleotide
agccaaaaguagccauaac

SEQ ID NO: 2334262 - RNA, 19 nt, Artificial Sequence
  Description of Artificial Sequence: Synthetic oligonucleotide
gaagaggccuagcugcuga

SEQ ID NO: 2334263 - RNA, 19 nt, Artificial Sequence
  Description of Artificial Sequence: Synthetic oligonucleotide
aguggucaggaggaccagc

SEQ ID NO: 2334264 - RNA, 19 nt, Artificial Sequence
  Description of Artificial Sequence: Synthetic oligonucleotide
gcugaugguaaagacacug

SEQ ID NO: 2334265 - RNA, 19 nt, Artificial Sequence
  Description of Artificial Sequence: Synthetic oligonucleotide
gaagagcacgcaggcaccg

SEQ ID NO: 2334266 - RNA, 19 nt, Artificial Sequence
  Description of Artificial Sequence: Synthetic oligonucleotide
accaccucagccuccaaaa

SEQ ID NO: 2334267 - RNA, 19 nt, Artificial Sequence
  Description of Artificial Sequence: Synthetic oligonucleotide
ugaucccucuauuuucaaa

SEQ ID NO: 2334268 - RNA, 19 nt, Artificial Sequence
  Description of Artificial Sequence: Synthetic oligonucleotide
aaaggaagguggcgauggu

SEQ ID NO: 2334269 - RNA, 19 nt, Artificial Sequence
  Description of Artificial Sequence: Synthetic oligonucleotide
gucucugagucgaaacccg

SEQ ID NO: 2334270 - RNA, 19 nt, Artificial Sequence
  Description of Artificial Sequence: Synthetic oligonucleotide
ucucugagucgaaacccgu

SEQ ID NO: 2334271 - RNA, 19 nt, Artificial Sequence
  Description of Artificial Sequence: Synthetic oligonucleotide
ucccaccggagucggaucc

SEQ ID NO: 2334272 - RNA, 19 nt, Artificial Sequence
  Description of Artificial Sequence: Synthetic oligonucleotide
aaacccguagauggaccag

SEQ ID NO: 2334273 - RNA, 19 nt, Artificial Sequence
  Description of Artificial Sequence: Synthetic oligonucleotide
ggcaccggaaagaaaagag

SEQ ID NO: 2334274 - RNA, 19 nt, Artificial Sequence
  Description of Artificial Sequence: Synthetic oligonucleotide
guacaugcugaugguaaag

SEQ ID NO: 2334275 - RNA, 19 nt, Artificial Sequence
  Description of Artificial Sequence: Synthetic oligonucleotide
uaacucagccagcccaggu

SEQ ID NO: 2334276 - RNA, 19 nt, Artificial Sequence
  Description of Artificial Sequence: Synthetic oligonucleotide
agguccgagaggccagugg

SEQ ID NO: 2334277 - RNA, 19 nt, Artificial Sequence
  Description of Artificial Sequence: Synthetic oligonucleotide
agcacccacgauauugacg

SEQ ID NO: 2334278 - RNA, 19 nt, Artificial Sequence
  Description of Artificial Sequence: Synthetic oligonucleotide
agguugggcaccgugauau

SEQ ID NO: 2334279 - RNA, 19 nt, Artificial Sequence
  Description of Artificial Sequence: Synthetic oligonucleotide
gagucgaaacccguagaug

SEQ ID NO: 2334280 - RNA, 19 nt, Artificial Sequence
  Description of Artificial Sequence: Synthetic oligonucleotide
gaagccgggccucaagguc

SEQ ID NO: 2334281 - RNA, 19 nt, Artificial Sequence
  Description of Artificial Sequence: Synthetic oligonucleotide
acugcagaagaggccuagc

SEQ ID NO: 2334282 - RNA, 19 nt, Artificial Sequence
  Description of Artificial Sequence: Synthetic oligonucleotide
gaucaggcugguaaugauc

SEQ ID NO: 2334283 - RNA, 19 nt, Artificial Sequence
  Description of Artificial Sequence: Synthetic oligonucleotide
uuugcagaaggcgguauuu

SEQ ID NO: 2334284 - RNA, 19 nt, Artificial Sequence
  Description of Artificial Sequence: Synthetic oligonucleotide
aacccaggagaaggacccc

SEQ ID NO: 2334285 - RNA, 19 nt, Artificial Sequence
  Description of Artificial Sequence: Synthetic oligonucleotide
aggauauagagcgucugaa

SEQ ID NO: 2334286 - RNA, 19 nt, Artificial Sequence
  Description of Artificial Sequence: Synthetic oligonucleotide
caagucagccaguggugag

SEQ ID NO: 2334287 - RNA, 19 nt, Artificial Sequence
  Description of Artificial Sequence: Synthetic oligonucleotide
guaaaaguccuucuuugau

SEQ ID NO: 2334288 - RNA, 19 nt, Artificial Sequence
  Description of Artificial Sequence: Synthetic oligonucleotide
aggaggaccagcagaaaca

SEQ ID NO: 2334289 - RNA, 19 nt, Artificial Sequence
  Description of Artificial Sequence: Synthetic oligonucleotide
caguggagaacaugcccag

SEQ ID NO: 2334290 - RNA, 19 nt, Artificial Sequence
  Description of Artificial Sequence: Synthetic oligonucleotide
agcccaagucggaucaggc

SEQ ID NO: 2334291 - RNA, 19 nt, Artificial Sequence
  Description of Artificial Sequence: Synthetic oligonucleotide
ucgaaacccguagauggac

SEQ ID NO: 2334292 - RNA, 19 nt, Artificial Sequence
  Description of Artificial Sequence: Synthetic oligonucleotide
agaaggcgguauuuucugu

SEQ ID NO: 2334293 - RNA, 19 nt, Artificial Sequence
  Description of Artificial Sequence: Synthetic oligonucleotide
augcuguccacgcuccgug

SEQ ID NO: 2334294 - RNA, 19 nt, Artificial Sequence
  Description of Artificial Sequence: Synthetic oligonucleotide
cauaacccaggagaaggac

SEQ ID NO: 2334295 - RNA, 19 nt, Artificial Sequence
  Description of Artificial Sequence: Synthetic oligonucleotide
ucccuucaagacuccauaa

SEQ ID NO: 2334296 - RNA, 19 nt, Artificial Sequence
  Description of Artificial Sequence: Synthetic oligonucleotide
acuccauaacucagccagc

SEQ ID NO: 2334297 - RNA, 19 nt, Artificial Sequence
  Description of Artificial Sequence: Synthetic oligonucleotide
auugacauccguggugaga

SEQ ID NO: 2334298 - RNA, 19 nt, Artificial Sequence
  Description of Artificial Sequence: Synthetic oligonucleotide
agucagccaguggugagag

SEQ ID NO: 2334299 - RNA, 19 nt, Artificial Sequence
  Description of Artificial Sequence: Synthetic oligonucleotide
accgugauauaugggucuc

SEQ ID NO: 2334300 - RNA, 19 nt, Artificial Sequence
  Description of Artificial Sequence: Synthetic oligonucleotide
acauccguggugagaaaag

SEQ ID NO: 2334301 - RNA, 19 nt, Artificial Sequence
  Description of Artificial Sequence: Synthetic oligonucleotide
cuaagguggcuguggucag

SEQ ID NO: 2334302 - RNA, 19 nt, Artificial Sequence
  Description of Artificial Sequence: Synthetic oligonucleotide
gucccaucucccuucaaga

SEQ ID NO: 2334303 - RNA, 19 nt, Artificial Sequence
  Description of Artificial Sequence: Synthetic oligonucleotide
gggauacuugcagaaaagc

SEQ ID NO: 2334304 - RNA, 19 nt, Artificial Sequence
  Description of Artificial Sequence: Synthetic oligonucleotide
uccgagaggccaguggaga

SEQ ID NO: 2334305 - RNA, 19 nt, Artificial Sequence
  Description of Artificial Sequence: Synthetic oligonucleotide
agagcgucugaaggacagc

SEQ ID NO: 2334306 - RNA, 19 nt, Artificial Sequence
  Description of Artificial Sequence: Synthetic oligonucleotide
uaagguggcuguggucagg

SEQ ID NO: 2334307 - RNA, 19 nt, Artificial Sequence
  Description of Artificial Sequence: Synthetic oligonucleotide
acucagccagcccagguua

SEQ ID NO: 2334308 - RNA, 19 nt, Artificial Sequence
  Description of Artificial Sequence: Synthetic oligonucleotide
aucccucuauuuucaaaau

SEQ ID NO: 2334309 - RNA, 19 nt, Artificial Sequence
  Description of Artificial Sequence: Synthetic oligonucleotide
auaacucagccagcccagg

SEQ ID NO: 2334310 - RNA, 19 nt, Artificial Sequence
  Description of Artificial Sequence: Synthetic oligonucleotide
gcgucugaaggacagcacc

SEQ ID NO: 2334311 - RNA, 19 nt, Artificial Sequence
  Description of Artificial Sequence: Synthetic oligonucleotide
ggcaccagaagccaaaagu

SEQ ID NO: 2334312 - RNA, 19 nt, Artificial Sequence
  Description of Artificial Sequence: Synthetic oligonucleotide
auggugagugagaaggaga

SEQ ID NO: 2334313 - RNA, 19 nt, Artificial Sequence
  Description of Artificial Sequence: Synthetic oligonucleotide
gggucucugagucgaaacc

SEQ ID NO: 2334314 - RNA, 19 nt, Artificial Sequence
  Description of Artificial Sequence: Synthetic oligonucleotide
aggagguagaagaaaggaa

SEQ ID NO: 2334315 - RNA, 19 nt, Artificial Sequence
  Description of Artificial Sequence: Synthetic oligonucleotide
agguacaugcugaugguaa

SEQ ID NO: 2334316 - RNA, 19 nt, Artificial Sequence
  Description of Artificial Sequence: Synthetic oligonucleotide
gugcagauaugccaggaua

SEQ ID NO: 2334317 - RNA, 19 nt, Artificial Sequence
  Description of Artificial Sequence: Synthetic oligonucleotide
cacccauggaaguggucag

SEQ ID NO: 2334318 - RNA, 19 nt, Artificial Sequence
  Description of Artificial Sequence: Synthetic oligonucleotide
agacgcuggguagacuuag

SEQ ID NO: 2334319 - RNA, 19 nt, Artificial Sequence
  Description of Artificial Sequence: Synthetic oligonucleotide
acccacgauauugacgaug

SEQ ID NO: 2334320 - RNA, 19 nt, Artificial Sequence
  Description of Artificial Sequence: Synthetic oligonucleotide
gccaguggagaacaugccc

SEQ ID NO: 2334321 - RNA, 19 nt, Artificial Sequence
  Description of Artificial Sequence: Synthetic oligonucleotide
caggcaccggaaagaaaag

SEQ ID NO: 2334322 - RNA, 19 nt, Artificial Sequence
  Description of Artificial Sequence: Synthetic oligonucleotide
cuguccacgcuccgugucc

SEQ ID NO: 2334323 - RNA, 19 nt, Artificial Sequence
  Description of Artificial Sequence: Synthetic oligonucleotide
ucggaucaggcugguaaug

SEQ ID NO: 2334324 - RNA, 19 nt, Artificial Sequence
  Description of Artificial Sequence: Synthetic oligonucleotide
cccaagucggaucaggcug

SEQ ID NO: 2334325 - RNA, 19 nt, Artificial Sequence
  Description of Artificial Sequence: Synthetic oligonucleotide
caugcccagggugaagagc

SEQ ID NO: 2334326 - RNA, 19 nt, Artificial Sequence
  Description of Artificial Sequence: Synthetic oligonucleotide
uaaugaucccuggaagguu

SEQ ID NO: 2334327 - RNA, 19 nt, Artificial Sequence
  Description of Artificial Sequence: Synthetic oligonucleotide
agacuccauaacucagcca

SEQ ID NO: 2334328 - RNA, 19 nt, Artificial Sequence
  Description of Artificial Sequence: Synthetic oligonucleotide
uccuucuuugaucccucua

SEQ ID NO: 2334329 - RNA, 19 nt, Artificial Sequence
  Description of Artificial Sequence: Synthetic oligonucleotide
uuggcccuaagguggcugu

SEQ ID NO: 2334330 - RNA, 19 nt, Artificial Sequence
  Description of Artificial Sequence: Synthetic oligonucleotide
acaugcccagggugaagag

SEQ ID NO: 2334331 - RNA, 19 nt, Artificial Sequence
  Description of Artificial Sequence: Synthetic oligonucleotide
gugauauaugggucucuga

SEQ ID NO: 2334332 - RNA, 19 nt, Artificial Sequence
  Description of Artificial Sequence: Synthetic oligonucleotide
aguccuucuuugaucccuc

SEQ ID NO: 2334333 - RNA, 19 nt, Artificial Sequence
  Description of Artificial Sequence: Synthetic oligonucleotide
aggacagcacccacgauau

SEQ ID NO: 2334334 - RNA, 19 nt, Artificial Sequence
  Description of Artificial Sequence: Synthetic oligonucleotide
ccaagucggaucaggcugg

SEQ ID NO: 2334335 - RNA, 19 nt, Artificial Sequence
  Description of Artificial Sequence: Synthetic oligonucleotide
cucugcaugugccugaggu

SEQ ID NO: 2334336 - RNA, 19 nt, Artificial Sequence
  Description of Artificial Sequence: Synthetic oligonucleotide
guaaugaucccuggaaggu

SEQ ID NO: 2334337 - RNA, 19 nt, Artificial Sequence
  Description of Artificial Sequence: Synthetic oligonucleotide
caggauauagagcgucuga

SEQ ID NO: 2334338 - RNA, 19 nt, Artificial Sequence
  Description of Artificial Sequence: Synthetic oligonucleotide
ugcugaugguaaagacacu

SEQ ID NO: 2334339 - RNA, 19 nt, Artificial Sequence
  Description of Artificial Sequence: Synthetic oligonucleotide
ggcaccgugauauaugggu

SEQ ID NO: 2334340 - RNA, 19 nt, Artificial Sequence
  Description of Artificial Sequence: Synthetic oligonucleotide
uauugacgaugaugagggu

SEQ ID NO: 2334341 - RNA, 19 nt, Artificial Sequence
  Description of Artificial Sequence: Synthetic oligonucleotide
cguggugagaaaaggcagg

SEQ ID NO: 2334342 - RNA, 19 nt, Artificial Sequence
  Description of Artificial Sequence: Synthetic oligonucleotide
caucccauaggucccaucu

SEQ ID NO: 2334343 - RNA, 19 nt, Artificial Sequence
  Description of Artificial Sequence: Synthetic oligonucleotide
acuuagucugaaugaucuu

SEQ ID NO: 2334344 - RNA, 19 nt, Artificial Sequence
  Description of Artificial Sequence: Synthetic oligonucleotide
aucccaccggagucggauc

SEQ ID NO: 2334345 - RNA, 19 nt, Artificial Sequence
  Description of Artificial Sequence: Synthetic oligonucleotide
acagcacccacgauauuga

SEQ ID NO: 2334346 - RNA, 19 nt, Artificial Sequence
  Description of Artificial Sequence: Synthetic oligonucleotide
gacauccguggugagaaaa

SEQ ID NO: 2334347 - RNA, 19 nt, Artificial Sequence
  Description of Artificial Sequence: Synthetic oligonucleotide
auuggcccuaagguggcug

SEQ ID NO: 2334348 - RNA, 19 nt, Artificial Sequence
  Description of Artificial Sequence: Synthetic oligonucleotide
ccggaaagaaaagagucug

SEQ ID NO: 2334349 - RNA, 19 nt, Artificial Sequence
  Description of Artificial Sequence: Synthetic oligonucleotide
caggaacuggaugcugucc

SEQ ID NO: 2334350 - RNA, 19 nt, Artificial Sequence
  Description of Artificial Sequence: Synthetic oligonucleotide
agcgucugaaggacagcac

SEQ ID NO: 2334351 - RNA, 19 nt, Artificial Sequence
  Description of Artificial Sequence: Synthetic oligonucleotide
uugaucccucuauuuucaa

SEQ ID NO: 2334352 - RNA, 19 nt, Artificial Sequence
  Description of Artificial Sequence: Synthetic oligonucleotide
acgaugaugagggucccau

SEQ ID NO: 2334353 - RNA, 19 nt, Artificial Sequence
  Description of Artificial Sequence: Synthetic oligonucleotide
ucccuggaagguugggcac

SEQ ID NO: 2334354 - RNA, 19 nt, Artificial Sequence
  Description of Artificial Sequence: Synthetic oligonucleotide
agauggaccaggagguaga

SEQ ID NO: 2334355 - RNA, 19 nt, Artificial Sequence
  Description of Artificial Sequence: Synthetic oligonucleotide
uacuugcagaaaagcccaa

SEQ ID NO: 2334356 - RNA, 19 nt, Artificial Sequence
  Description of Artificial Sequence: Synthetic oligonucleotide
ggugagagguacaugcuga

SEQ ID NO: 2334357 - RNA, 19 nt, Artificial Sequence
  Description of Artificial Sequence: Synthetic oligonucleotide
uugcacccauggaaguggu

SEQ ID NO: 2334358 - RNA, 19 nt, Artificial Sequence
  Description of Artificial Sequence: Synthetic oligonucleotide
agccauaacccaggagaag

SEQ ID NO: 2334359 - RNA, 19 nt, Artificial Sequence
  Description of Artificial Sequence: Synthetic oligonucleotide
ggggauacuugcagaaaag

SEQ ID NO: 2334360 - RNA, 19 nt, Artificial Sequence
  Description of Artificial Sequence: Synthetic oligonucleotide
gcaggcaccggaaagaaaa

SEQ ID NO: 2334361 - RNA, 19 nt, Artificial Sequence
  Description of Artificial Sequence: Synthetic oligonucleotide
aagguugggcaccgugaua

SEQ ID NO: 2334362 - RNA, 19 nt, Artificial Sequence
  Description of Artificial Sequence: Synthetic oligonucleotide
gccuccaaaaugagaaaag

SEQ ID NO: 2334363 - RNA, 19 nt, Artificial Sequence
  Description of Artificial Sequence: Synthetic oligonucleotide
gguggcgauggugagugag

SEQ ID NO: 2334364 - RNA, 19 nt, Artificial Sequence
  Description of Artificial Sequence: Synthetic oligonucleotide
agugagaaggagagacgcu

SEQ ID NO: 2334365 - RNA, 19 nt, Artificial Sequence
  Description of Artificial Sequence: Synthetic oligonucleotide
acccauggaaguggucagg

SEQ ID NO: 2334366 - RNA, 19 nt, Artificial Sequence
  Description of Artificial Sequence: Synthetic oligonucleotide
uggcgauggugagugagaa

SEQ ID NO: 2334367 - RNA, 19 nt, Artificial Sequence
  Description of Artificial Sequence: Synthetic oligonucleotide
guggugagaaaaggcagga

SEQ ID NO: 2334368 - RNA, 19 nt, Artificial Sequence
  Description of Artificial Sequence: Synthetic oligonucleotide
ccguggugagaaaaggcag

SEQ ID NO: 2334369 - RNA, 19 nt, Artificial Sequence
  Description of Artificial Sequence: Synthetic oligonucleotide
gguccgagaggccagugga

SEQ ID NO: 2334370 - RNA, 19 nt, Artificial Sequence
  Description of Artificial Sequence: Synthetic oligonucleotide
ucacaaccuauugcaccca

SEQ ID NO: 2334371 - RNA, 19 nt, Artificial Sequence
  Description of Artificial Sequence: Synthetic oligonucleotide
uaggucccaucugaucuac

SEQ ID NO: 2334372 - RNA, 19 nt, Artificial Sequence
  Description of Artificial Sequence: Synthetic oligonucleotide
ggcgguauuuucugucaug

SEQ ID NO: 2334373 - RNA, 19 nt, Artificial Sequence
  Description of Artificial Sequence: Synthetic oligonucleotide
gaagguugggcaccgugau

SEQ ID NO: 2334374 - RNA, 19 nt, Artificial Sequence
  Description of Artificial Sequence: Synthetic oligonucleotide
ccuaagguggcugugguca

SEQ ID NO: 2334375 - RNA, 19 nt, Artificial Sequence
  Description of Artificial Sequence: Synthetic oligonucleotide
ugccacgccgcccgccucc

SEQ ID NO: 2334376 - RNA, 19 nt, Artificial Sequence
  Description of Artificial Sequence: Synthetic oligonucleotide
uggguagacuuagucugaa

SEQ ID NO: 2334377 - RNA, 19 nt, Artificial Sequence
  Description of Artificial Sequence: Synthetic oligonucleotide
agaggccuagcugcugaag

SEQ ID NO: 2334378 - RNA, 19 nt, Artificial Sequence
  Description of Artificial Sequence: Synthetic oligonucleotide
aggcaccggaaagaaaaga

SEQ ID NO: 2334379 - RNA, 19 nt, Artificial Sequence
  Description of Artificial Sequence: Synthetic oligonucleotide
ugacgaugaugaggguccc

SEQ ID NO: 2334380 - RNA, 19 nt, Artificial Sequence
  Description of Artificial Sequence: Synthetic oligonucleotide
cugagucgaaacccguaga

SEQ ID NO: 2334381 - RNA, 19 nt, Artificial Sequence
  Description of Artificial Sequence: Synthetic oligonucleotide
cuggguagacuuagucuga

SEQ ID NO: 2334382 - RNA, 19 nt, Artificial Sequence
  Description of Artificial Sequence: Synthetic oligonucleotide
aggagagacgcuggguaga

SEQ ID NO: 2334383 - RNA, 19 nt, Artificial Sequence
  Description of Artificial Sequence: Synthetic oligonucleotide
uaugggucucugagucgaa

SEQ ID NO: 2334384 - RNA, 19 nt, Artificial Sequence
  Description of Artificial Sequence: Synthetic oligonucleotide
aggcugguaaugaucccug

SEQ ID NO: 2334385 - RNA, 19 nt, Artificial Sequence
  Description of Artificial Sequence: Synthetic oligonucleotide
guggucaggaggaccagca

SEQ ID NO: 2334386 - RNA, 19 nt, Artificial Sequence
  Description of Artificial Sequence: Synthetic oligonucleotide
acaaccuauugcacccaug

SEQ ID NO: 2334387 - RNA, 19 nt, Artificial Sequence
  Description of Artificial Sequence: Synthetic oligonucleotide
cccacgauauugacgauga

SEQ ID NO: 2334388 - RNA, 19 nt, Artificial Sequence
  Description of Artificial Sequence: Synthetic oligonucleotide
ggccucaaggucuggcacc

SEQ ID NO: 2334389 - RNA, 19 nt, Artificial Sequence
  Description of Artificial Sequence: Synthetic oligonucleotide
agaacaugcccagggugaa

SEQ ID NO: 2334390 - RNA, 19 nt, Artificial Sequence
  Description of Artificial Sequence: Synthetic oligonucleotide
gcacccauggaagugguca

SEQ ID NO: 2334391 - RNA, 19 nt, Artificial Sequence
  Description of Artificial Sequence: Synthetic oligonucleotide
ggccaagucagccaguggu

SEQ ID NO: 2334392 - RNA, 19 nt, Artificial Sequence
  Description of Artificial Sequence: Synthetic oligonucleotide
auagagcgucugaaggaca

SEQ ID NO: 2334393 - RNA, 19 nt, Artificial Sequence
  Description of Artificial Sequence: Synthetic oligonucleotide
aggcgguauuuucugucau

SEQ ID NO: 2334394 - RNA, 19 nt, Artificial Sequence
  Description of Artificial Sequence: Synthetic oligonucleotide
gcugguaaugaucccugga

SEQ ID NO: 2334395 - RNA, 19 nt, Artificial Sequence
  Description of Artificial Sequence: Synthetic oligonucleotide
gguacaugcugaugguaaa

SEQ ID NO: 2334396 - RNA, 19 nt, Artificial Sequence
  Description of Artificial Sequence: Synthetic oligonucleotide
ucaucccauaggucccauc

SEQ ID NO: 2334397 - RNA, 19 nt, Artificial Sequence
  Description of Artificial Sequence: Synthetic oligonucleotide
uccguguccucugcaugug

SEQ ID NO: 2334398 - RNA, 19 nt, Artificial Sequence
  Description of Artificial Sequence: Synthetic oligonucleotide
cccuucaagacuccauaac

SEQ ID NO: 2334399 - RNA, 19 nt, Artificial Sequence
  Description of Artificial Sequence: Synthetic oligonucleotide
uguccacgcuccguguccu

SEQ ID NO: 2334400 - RNA, 19 nt, Artificial Sequence
  Description of Artificial Sequence: Synthetic oligonucleotide
ggaacuggaugcuguccac

SEQ ID NO: 2334401 - RNA, 19 nt, Artificial Sequence
  Description of Artificial Sequence: Synthetic oligonucleotide
agucugccacgccgcccgc

SEQ ID NO: 2334402 - RNA, 19 nt, Artificial Sequence
  Description of Artificial Sequence: Synthetic oligonucleotide
agcacgcaggcaccggaaa

SEQ ID NO: 2334403 - RNA, 19 nt, Artificial Sequence
  Description of Artificial Sequence: Synthetic oligonucleotide
cggaaagaaaagagucugc

SEQ ID NO: 2334404 - RNA, 19 nt, Artificial Sequence
  Description of Artificial Sequence: Synthetic oligonucleotide
uccacgcuccguguccucu

SEQ ID NO: 2334405 - RNA, 19 nt, Artificial Sequence
  Description of Artificial Sequence: Synthetic oligonucleotide
cagcacccacgauauugac

SEQ ID NO: 2334406 - RNA, 19 nt, Artificial Sequence
  Description of Artificial Sequence: Synthetic oligonucleotide
ugcacccauggaagugguc

SEQ ID NO: 2334407 - RNA, 19 nt, Artificial Sequence
  Description of Artificial Sequence: Synthetic oligonucleotide
gguuauugacauccguggu

SEQ ID NO: 2334408 - RNA, 19 nt, Artificial Sequence
  Description of Artificial Sequence: Synthetic oligonucleotide
gucgaaacccguagaugga

SEQ ID NO: 2334409 - RNA, 19 nt, Artificial Sequence
  Description of Artificial Sequence: Synthetic oligonucleotide
cuauugcacccauggaagu

SEQ ID NO: 2334410 - RNA, 19 nt, Artificial Sequence
  Description of Artificial Sequence: Synthetic oligonucleotide
ggucagguuugcagaaggc

SEQ ID NO: 2334411 - RNA, 19 nt, Artificial Sequence
  Description of Artificial Sequence: Synthetic oligonucleotide
cacgcuccguguccucugc

SEQ ID NO: 2334412 - RNA, 19 nt, Artificial Sequence
  Description of Artificial Sequence: Synthetic oligonucleotide
caccgugauauaugggucu

SEQ ID NO: 2334413 - RNA, 19 nt, Artificial Sequence
  Description of Artificial Sequence: Synthetic oligonucleotide
gagguacaugcugauggua

SEQ ID NO: 2334414 - RNA, 19 nt, Artificial Sequence
  Description of Artificial Sequence: Synthetic oligonucleotide
ggcgauggugagugagaag

SEQ ID NO: 2334415 - RNA, 19 nt, Artificial Sequence
  Description of Artificial Sequence: Synthetic oligonucleotide
ccuccaaaaugagaaaaga

SEQ ID NO: 2334416 - RNA, 19 nt, Artificial Sequence
  Description of Artificial Sequence: Synthetic oligonucleotide
gauggaccaggagguagaa

SEQ ID NO: 2334417 - RNA, 19 nt, Artificial Sequence
  Description of Artificial Sequence: Synthetic oligonucleotide
cccagguuauugacauccg

SEQ ID NO: 2334418 - RNA, 19 nt, Artificial Sequence
  Description of Artificial Sequence: Synthetic oligonucleotide
cagguuugcagaaggcggu

SEQ ID NO: 2334419 - RNA, 19 nt, Artificial Sequence
  Description of Artificial Sequence: Synthetic oligonucleotide
cgaaacccguagauggacc

SEQ ID NO: 2334420 - RNA, 19 nt, Artificial Sequence
  Description of Artificial Sequence: Synthetic oligonucleotide
ggcccuaagguggcugugg

SEQ ID NO: 2334421 - RNA, 19 nt, Artificial Sequence
  Description of Artificial Sequence: Synthetic oligonucleotide
agcaugcuucugaggacug

SEQ ID NO: 2334422 - RNA, 19 nt, Artificial Sequence
  Description of Artificial Sequence: Synthetic oligonucleotide
ugacauccguggugagaaa

SEQ ID NO: 2334423 - RNA, 19 nt, Artificial Sequence
  Description of Artificial Sequence: Synthetic oligonucleotide
ggucccaucugaucuacgu

SEQ ID NO: 2334424 - RNA, 19 nt, Artificial Sequence
  Description of Artificial Sequence: Synthetic oligonucleotide
cuacguaaaaguccuucuu

SEQ ID NO: 2334425 - RNA, 19 nt, Artificial Sequence
  Description of Artificial Sequence: Synthetic oligonucleotide
cucugagucgaaacccgua

SEQ ID NO: 2334426 - RNA, 19 nt, Artificial Sequence
  Description of Artificial Sequence: Synthetic oligonucleotide
caugcuucugaggacugua

SEQ ID NO: 2334427 - RNA, 19 nt, Artificial Sequence
  Description of Artificial Sequence: Synthetic oligonucleotide
cguaaaaguccuucuuuga

SEQ ID NO: 2334428 - RNA, 19 nt, Artificial Sequence
  Description of Artificial Sequence: Synthetic oligonucleotide
gcuccguguccucugcaug

SEQ ID NO: 2334429 - RNA, 19 nt, Artificial Sequence
  Description of Artificial Sequence: Synthetic oligonucleotide
aucucccuucaagacucca

SEQ ID NO: 2334430 - RNA, 19 nt, Artificial Sequence
  Description of Artificial Sequence: Synthetic oligonucleotide
cagcccagguuauugacau

SEQ ID NO: 2334431 - RNA, 19 nt, Artificial Sequence
  Description of Artificial Sequence: Synthetic oligonucleotide
agggucccaucucccuuca

SEQ ID NO: 2334432 - RNA, 19 nt, Artificial Sequence
  Description of Artificial Sequence: Synthetic oligonucleotide
gaugcuguccacgcuccgu

SEQ ID NO: 2334433 - RNA, 19 nt, Artificial Sequence
  Description of Artificial Sequence: Synthetic oligonucleotide
uauuggcccuaagguggcu

SEQ ID NO: 2334434 - RNA, 19 nt, Artificial Sequence
  Description of Artificial Sequence: Synthetic oligonucleotide
cgauauugacgaugaugag

SEQ ID NO: 2334435 - RNA, 19 nt, Artificial Sequence
  Description of Artificial Sequence: Synthetic oligonucleotide
ccuagcugcugaagccggg

SEQ ID NO: 2334436 - RNA, 19 nt, Artificial Sequence
  Description of Artificial Sequence: Synthetic oligonucleotide
guggcgauggugagugaga

SEQ ID NO: 2334437 - RNA, 19 nt, Artificial Sequence
  Description of Artificial Sequence: Synthetic oligonucleotide
ugguaucauauuggcccua

SEQ ID NO: 2334438 - RNA, 19 nt, Artificial Sequence
  Description of Artificial Sequence: Synthetic oligonucleotide
cgugauauaugggucucug

SEQ ID NO: 2334439 - RNA, 19 nt, Artificial Sequence
  Description of Artificial Sequence: Synthetic oligonucleotide
gacgaugaugaggguccca

SEQ ID NO: 2334440 - RNA, 19 nt, Artificial Sequence
  Description of Artificial Sequence: Synthetic oligonucleotide
caguggugagagguacaug

SEQ ID NO: 2334441 - RNA, 19 nt, Artificial Sequence
  Description of Artificial Sequence: Synthetic oligonucleotide
augggucucugagucgaaa

SEQ ID NO: 2334442 - RNA, 19 nt, Artificial Sequence
  Description of Artificial Sequence: Synthetic oligonucleotide
cguagauggaccaggaggu

SEQ ID NO: 2334443 - RNA, 19 nt, Artificial Sequence
  Description of Artificial Sequence: Synthetic oligonucleotide
gguaucauauuggcccuaa

SEQ ID NO: 2334444 - RNA, 19 nt, Artificial Sequence
  Description of Artificial Sequence: Synthetic oligonucleotide
gaagguggcgauggugagu

SEQ ID NO: 2334445 - RNA, 19 nt, Artificial Sequence
  Description of Artificial Sequence: Synthetic oligonucleotide
uggcccuaagguggcugug

SEQ ID NO: 2334446 - RNA, 19 nt, Artificial Sequence
  Description of Artificial Sequence: Synthetic oligonucleotide
aggucccaucugaucuacg

SEQ ID NO: 2334447 - RNA, 19 nt, Artificial Sequence
  Description of Artificial Sequence: Synthetic oligonucleotide
ccaggauauagagcgucug

SEQ ID NO: 2334448 - RNA, 19 nt, Artificial Sequence
  Description of Artificial Sequence: Synthetic oligonucleotide
ggagagacgcuggguagac

SEQ ID NO: 2334449 - RNA, 19 nt, Artificial Sequence
  Description of Artificial Sequence: Synthetic oligonucleotide
acccguagauggaccagga

SEQ ID NO: 2334450 - RNA, 19 nt, Artificial Sequence
  Description of Artificial Sequence: Synthetic oligonucleotide
gcaccgugauauauggguc

SEQ ID NO: 2334451 - RNA, 19 nt, Artificial Sequence
  Description of Artificial Sequence: Synthetic oligonucleotide
gucggaucaggcugguaau

SEQ ID NO: 2334452 - RNA, 19 nt, Artificial Sequence
  Description of Artificial Sequence: Synthetic oligonucleotide
ccauaacccaggagaagga

SEQ ID NO: 2334453 - RNA, 19 nt, Artificial Sequence
  Description of Artificial Sequence: Synthetic oligonucleotide
ccucagccuccaaaaugag

SEQ ID NO: 2334454 - RNA, 19 nt, Artificial Sequence
  Description of Artificial Sequence: Synthetic oligonucleotide
gcgguauuuucugucaugu

SEQ ID NO: 2334455 - RNA, 19 nt, Artificial Sequence
  Description of Artificial Sequence: Synthetic oligonucleotide
cacgccgcccgccuccauc

SEQ ID NO: 2334456 - RNA, 19 nt, Artificial Sequence
  Description of Artificial Sequence: Synthetic oligonucleotide
caggcugguaaugaucccu

SEQ ID NO: 2334457 - RNA, 19 nt, Artificial Sequence
  Description of Artificial Sequence: Synthetic oligonucleotide
ggugaagagcacgcaggca

SEQ ID NO: 2334458 - RNA, 19 nt, Artificial Sequence
  Description of Artificial Sequence: Synthetic oligonucleotide
agguuugcagaaggcggua

SEQ ID NO: 2334459 - RNA, 19 nt, Artificial Sequence
  Description of Artificial Sequence: Synthetic oligonucleotide
gcuguccacgcuccguguc

SEQ ID NO: 2334460 - RNA, 19 nt, Artificial Sequence
  Description of Artificial Sequence: Synthetic oligonucleotide
acgcuccguguccucugca

SEQ ID NO: 2334461 - RNA, 19 nt, Artificial Sequence
  Description of Artificial Sequence: Synthetic oligonucleotide
augccaggauauagagcgu

SEQ ID NO: 2334462 - RNA, 19 nt, Artificial Sequence
  Description of Artificial Sequence: Synthetic oligonucleotide
ccagcagaaacaggagcuc

SEQ ID NO: 2334463 - RNA, 19 nt, Artificial Sequence
  Description of Artificial Sequence: Synthetic oligonucleotide
gagacgcuggguagacuua

SEQ ID NO: 2334464 - RNA, 19 nt, Artificial Sequence
  Description of Artificial Sequence: Synthetic oligonucleotide
cccguagauggaccaggag

SEQ ID NO: 2334465 - RNA, 19 nt, Artificial Sequence
  Description of Artificial Sequence: Synthetic oligonucleotide
gggcaccgugauauauggg

SEQ ID NO: 2334466 - RNA, 19 nt, Artificial Sequence
  Description of Artificial Sequence: Synthetic oligonucleotide
gcaccggaaagaaaagagu

SEQ ID NO: 2334467 - RNA, 19 nt, Artificial Sequence
  Description of Artificial Sequence: Synthetic oligonucleotide
aagucggaucaggcuggua

SEQ ID NO: 2334468 - RNA, 19 nt, Artificial Sequence
  Description of Artificial Sequence: Synthetic oligonucleotide
gagcacgcaggcaccggaa

SEQ ID NO: 2334469 - RNA, 19 nt, Artificial Sequence
  Description of Artificial Sequence: Synthetic oligonucleotide
gcccgccuccaucccaccg

SEQ ID NO: 2334470 - RNA, 19 nt, Artificial Sequence
  Description of Artificial Sequence: Synthetic oligonucleotide
cccuggaagguugggcacc

SEQ ID NO: 2334471 - RNA, 19 nt, Artificial Sequence
  Description of Artificial Sequence: Synthetic oligonucleotide
ccaagucagccagugguga

SEQ ID NO: 2334472 - RNA, 19 nt, Artificial Sequence
  Description of Artificial Sequence: Synthetic oligonucleotide
gaaggacagcacccacgau

SEQ ID NO: 2334473 - RNA, 19 nt, Artificial Sequence
  Description of Artificial Sequence: Synthetic oligonucleotide
gccucaaggucuggcacca

SEQ ID NO: 2334474 - RNA, 19 nt, Artificial Sequence
  Description of Artificial Sequence: Synthetic oligonucleotide
ccaucugaucuacguaaaa

SEQ ID NO: 2334475 - RNA, 19 nt, Artificial Sequence
  Description of Artificial Sequence: Synthetic oligonucleotide
agguggcgauggugaguga

SEQ ID NO: 2334476 - RNA, 19 nt, Artificial Sequence
  Description of Artificial Sequence: Synthetic oligonucleotide
cccaucugaucuacguaaa

SEQ ID NO: 2334477 - RNA, 19 nt, Artificial Sequence
  Description of Artificial Sequence: Synthetic oligonucleotide
cagccaguggugagaggua

SEQ ID NO: 2334478 - RNA, 19 nt, Artificial Sequence
  Description of Artificial Sequence: Synthetic oligonucleotide
cccauggaaguggucagga

SEQ ID NO: 2334479 - RNA, 19 nt, Artificial Sequence
  Description of Artificial Sequence: Synthetic oligonucleotide
cacaaccuauugcacccau

SEQ ID NO: 2334480 - RNA, 19 nt, Artificial Sequence
  Description of Artificial Sequence: Synthetic oligonucleotide
caucccaccggagucggau

SEQ ID NO: 2334481 - RNA, 19 nt, Artificial Sequence
  Description of Artificial Sequence: Synthetic oligonucleotide
gucugccacgccgcccgcc

SEQ ID NO: 2334482 - RNA, 19 nt, Artificial Sequence
  Description of Artificial Sequence: Synthetic oligonucleotide
agccgggccucaaggucug

SEQ ID NO: 2334483 - RNA, 19 nt, Artificial Sequence
  Description of Artificial Sequence: Synthetic oligonucleotide
gcccaagucggaucaggcu

SEQ ID NO: 2334484 - RNA, 19 nt, Artificial Sequence
  Description of Artificial Sequence: Synthetic oligonucleotide
gagagacgcuggguagacu

SEQ ID NO: 2334485 - RNA, 19 nt, Artificial Sequence
  Description of Artificial Sequence: Synthetic oligonucleotide
gaucuacguaaaaguccuu

SEQ ID NO: 2334486 - RNA, 19 nt, Artificial Sequence
  Description of Artificial Sequence: Synthetic oligonucleotide
guccacgcuccguguccuc

SEQ ID NO: 2334487 - RNA, 19 nt, Artificial Sequence
  Description of Artificial Sequence: Synthetic oligonucleotide
cucagccagcccagguuau

SEQ ID NO: 2334488 - RNA, 19 nt, Artificial Sequence
  Description of Artificial Sequence: Synthetic oligonucleotide
ccgagaggccaguggagaa

SEQ ID NO: 2334489 - RNA, 19 nt, Artificial Sequence
  Description of Artificial Sequence: Synthetic oligonucleotide
ggguagacuuagucugaau

SEQ ID NO: 2334490 - RNA, 19 nt, Artificial Sequence
  Description of Artificial Sequence: Synthetic oligonucleotide
ccgggccucaaggucuggc

SEQ ID NO: 2334491 - RNA, 19 nt, Artificial Sequence
  Description of Artificial Sequence: Synthetic oligonucleotide
ccgcccgccuccaucccac

SEQ ID NO: 2334492 - RNA, 19 nt, Artificial Sequence
  Description of Artificial Sequence: Synthetic oligonucleotide
cugccacgccgcccgccuc

SEQ ID NO: 2334493 - RNA, 19 nt, Artificial Sequence
  Description of Artificial Sequence: Synthetic oligonucleotide
gccaggauauagagcgucu

SEQ ID NO: 2334494 - RNA, 19 nt, Artificial Sequence
  Description of Artificial Sequence: Synthetic oligonucleotide
gcccuaagguggcuguggu

SEQ ID NO: 2334495 - RNA, 19 nt, Artificial Sequence
  Description of Artificial Sequence: Synthetic oligonucleotide
gguuugcagaaggcgguau

SEQ ID NO: 2334496 - RNA, 19 nt, Artificial Sequence
  Description of Artificial Sequence: Synthetic oligonucleotide
cccaccggagucggauccc

SEQ ID NO: 2334497 - RNA, 19 nt, Artificial Sequence
  Description of Artificial Sequence: Synthetic oligonucleotide
gcaugugccugagguccga

SEQ ID NO: 2334498 - RNA, 19 nt, Artificial Sequence
  Description of Artificial Sequence: Synthetic oligonucleotide
ccagggugaagagcacgca

SEQ ID NO: 2334499 - RNA, 19 nt, Artificial Sequence
  Description of Artificial Sequence: Synthetic oligonucleotide
caagucggaucaggcuggu

SEQ ID NO: 2334500 - RNA, 19 nt, Artificial Sequence
  Description of Artificial Sequence: Synthetic oligonucleotide
gccugagguccgagaggcc

SEQ ID NO: 2334501 - RNA, 19 nt, Artificial Sequence
  Description of Artificial Sequence: Synthetic oligonucleotide
gccgcccgccuccauccca

SEQ ID NO: 2334502 - RNA, 19 nt, Artificial Sequence
  Description of Artificial Sequence: Synthetic oligonucleotide
ccaguggugagagguacau

SEQ ID NO: 2334503 - RNA, 19 nt, Artificial Sequence
  Description of Artificial Sequence: Synthetic oligonucleotide
gcaugcuucugaggacugu

SEQ ID NO: 2334504 - RNA, 19 nt, Artificial Sequence
  Description of Artificial Sequence: Synthetic oligonucleotide
ccucaaggucuggcaccag

SEQ ID NO: 2334505 - RNA, 19 nt, Artificial Sequence
  Description of Artificial Sequence: Synthetic oligonucleotide
cacccacgauauugacgau

SEQ ID NO: 2334506 - RNA, 19 nt, Artificial Sequence
  Description of Artificial Sequence: Synthetic oligonucleotide
gggucccaucucccuucaa

SEQ ID NO: 2334507 - RNA, 19 nt, Artificial Sequence
  Description of Artificial Sequence: Synthetic oligonucleotide
cgcaggcaccggaaagaaa

SEQ ID NO: 2334508 - RNA, 19 nt, Artificial Sequence
  Description of Artificial Sequence: Synthetic oligonucleotide
ccaucccaccggagucgga

SEQ ID NO: 2334509 - RNA, 19 nt, Artificial Sequence
  Description of Artificial Sequence: Synthetic oligonucleotide
ccgugauauaugggucucu

SEQ ID NO: 2334510 - RNA, 19 nt, Artificial Sequence
  Description of Artificial Sequence: Synthetic oligonucleotide
cgguauuuucugucauguu

SEQ ID NO: 2334511 - RNA, 19 nt, Artificial Sequence
  Description of Artificial Sequence: Synthetic oligonucleotide
cgcccgccuccaucccacc

SEQ ID NO: 2334512 - RNA, 19 nt, Artificial Sequence
  Description of Artificial Sequence: Synthetic oligonucleotide
ccacgauauugacgaugau

SEQ ID NO: 2334513 - RNA, 19 nt, Artificial Sequence
  Description of Artificial Sequence: Synthetic oligonucleotide
cgcuccguguccucugcau

SEQ ID NO: 2334514 - RNA, 19 nt, Artificial Sequence
  Description of Artificial Sequence: Synthetic oligonucleotide
cgccgcccgccuccauccc

SEQ ID NO: 2334515 - RNA, 19 nt, Artificial Sequence
  Description of Artificial Sequence: Synthetic oligonucleotide
uucaauuuacccaugagag

SEQ ID NO: 2334516 - RNA, 19 nt, Artificial Sequence
  Description of Artificial Sequence: Synthetic oligonucleotide
auaacgauuuuauuguagc

SEQ ID NO: 2334517 - RNA, 19 nt, Artificial Sequence
  Description of Artificial Sequence: Synthetic oligonucleotide
uucuucaaguuucugaacg

SEQ ID NO: 2334518 - RNA, 19 nt, Artificial Sequence
  Description of Artificial Sequence: Synthetic oligonucleotide
agacaaucuguucugaagc

SEQ ID NO: 2334519 - RNA, 19 nt, Artificial Sequence
  Description of Artificial Sequence: Synthetic oligonucleotide
aacgguaguuucuaacugc

SEQ ID NO: 2334520 - RNA, 19 nt, Artificial Sequence
  Description of Artificial Sequence: Synthetic oligonucleotide
uuuaagaucuccuuguaac

SEQ ID NO: 2334521 - RNA, 19 nt, Artificial Sequence
  Description of Artificial Sequence: Synthetic oligonucleotide
aaugcucuaacucucccuc

SEQ ID NO: 2334522 - RNA, 19 nt, Artificial Sequence
  Description of Artificial Sequence: Synthetic oligonucleotide
uuucaauuuacccaugaga

SEQ ID NO: 2334523 - RNA, 19 nt, Artificial Sequence
  Description of Artificial Sequence: Synthetic oligonucleotide
acauaagauagccagaaug

SEQ ID NO: 2334524 - RNA, 19 nt, Artificial Sequence
  Description of Artificial Sequence: Synthetic oligonucleotide
ucuuuguuuagccuaagug

SEQ ID NO: 2334525 - RNA, 19 nt, Artificial Sequence
  Description of Artificial Sequence: Synthetic oligonucleotide
aauaguaacuguauucuuc

SEQ ID NO: 2334526 - RNA, 19 nt, Artificial Sequence
  Description of Artificial Sequence: Synthetic oligonucleotide
uguuagcugguuaauaugc

SEQ ID NO: 2334527 - RNA, 19 nt, Artificial Sequence
  Description of Artificial Sequence: Synthetic oligonucleotide
aacucagacaaucuguucu

SEQ ID NO: 2334528 - RNA, 19 nt, Artificial Sequence
  Description of Artificial Sequence: Synthetic oligonucleotide
uuuaguucuuuguuuagcc

SEQ ID NO: 2334529 - RNA, 19 nt, Artificial Sequence
  Description of Artificial Sequence: Synthetic oligonucleotide
gucuacauaagauagccag

SEQ ID NO: 2334530 - RNA, 19 nt, Artificial Sequence
  Description of Artificial Sequence: Synthetic oligonucleotide
ucuguucugaagcugcugg

SEQ ID NO: 2334531 - RNA, 19 nt, Artificial Sequence
  Description of Artificial Sequence: Synthetic oligonucleotide
ucuucucagagaaaggacc

SEQ ID NO: 2334532 - RNA, 19 nt, Artificial Sequence
  Description of Artificial Sequence: Synthetic oligonucleotide
uuguucuuggauuguaucg

SEQ ID NO: 2334533 - RNA, 19 nt, Artificial Sequence
  Description of Artificial Sequence: Synthetic oligonucleotide
agaaguucugcugauaacg

SEQ ID NO: 2334534 - RNA, 19 nt, Artificial Sequence
  Description of Artificial Sequence: Synthetic oligonucleotide
acgauuuuauuguagcuuc

SEQ ID NO: 2334535 - RNA, 19 nt, Artificial Sequence
  Description of Artificial Sequence: Synthetic oligonucleotide
uuucuuaccagucugguuu

SEQ ID NO: 2334536 - RNA, 19 nt, Artificial Sequence
  Description of Artificial Sequence: Synthetic oligonucleotide
uuuauacuucuucucagug

SEQ ID NO: 2334537 - RNA, 19 nt, Artificial Sequence
  Description of Artificial Sequence: Synthetic oligonucleotide
guuaauaugcuuuucuuuc

SEQ ID NO: 2334538 - RNA, 19 nt, Artificial Sequence
  Description of Artificial Sequence: Synthetic oligonucleotide
uuaguugccucuaacucag

SEQ ID NO: 2334539 - RNA, 19 nt, Artificial Sequence
  Description of Artificial Sequence: Synthetic oligonucleotide
cuggacauuucguugaugg

SEQ ID NO: 2334540 - RNA, 19 nt, Artificial Sequence
  Description of Artificial Sequence: Synthetic oligonucleotide
aagauagccagaauguguc

SEQ ID NO: 2334541 - RNA, 19 nt, Artificial Sequence
  Description of Artificial Sequence: Synthetic oligonucleotide
uuaucuuuguauuuccugu

SEQ ID NO: 2334542 - RNA, 19 nt, Artificial Sequence
  Description of Artificial Sequence: Synthetic oligonucleotide
uauuaguugccucuaacuc

SEQ ID NO: 2334543 - RNA, 19 nt, Artificial Sequence
  Description of Artificial Sequence: Synthetic oligonucleotide
auuugcauaccucuugcuc

SEQ ID NO: 2334544 - RNA, 19 nt, Artificial Sequence
  Description of Artificial Sequence: Synthetic oligonucleotide
ugaauaguaacuguauucu

SEQ ID NO: 2334545 - RNA, 19 nt, Artificial Sequence
  Description of Artificial Sequence: Synthetic oligonucleotide
uuuguuuagccuaagugua

SEQ ID NO: 2334546 - RNA, 19 nt, Artificial Sequence
  Description of Artificial Sequence: Synthetic oligonucleotide
ucuuguaauuugcauaccu

SEQ ID NO: 2334547 - RNA, 19 nt, Artificial Sequence
  Description of Artificial Sequence: Synthetic oligonucleotide
aguuuuaagaucuccuugu

SEQ ID NO: 2334548 - RNA, 19 nt, Artificial Sequence
  Description of Artificial Sequence: Synthetic oligonucleotide
uucaaguuuucccaguugu

SEQ ID NO: 2334549 - RNA, 19 nt, Artificial Sequence
  Description of Artificial Sequence: Synthetic oligonucleotide
uuguaauuugcauaccucu

SEQ ID NO: 2334550 - RNA, 19 nt, Artificial Sequence
  Description of Artificial Sequence: Synthetic oligonucleotide
uuauuaguugccucuaacu

SEQ ID NO: 2334551 - RNA, 19 nt, Artificial Sequence
  Description of Artificial Sequence: Synthetic oligonucleotide
uuugcauaccucuugcucu

SEQ ID NO: 2334552 - RNA, 19 nt, Artificial Sequence
  Description of Artificial Sequence: Synthetic oligonucleotide
uaauuugcauaccucuugc

SEQ ID NO: 2334553 - RNA, 19 nt, Artificial Sequence
  Description of Artificial Sequence: Synthetic oligonucleotide
aauuucauuugccuucaga

SEQ ID NO: 2334554 - RNA, 19 nt, Artificial Sequence
  Description of Artificial Sequence: Synthetic oligonucleotide
uccuuuauacuucuucuca

SEQ ID NO: 2334555 - RNA, 19 nt, Artificial Sequence
  Description of Artificial Sequence: Synthetic oligonucleotide
ucuucaaguuucugaacgg

SEQ ID NO: 2334556 - RNA, 19 nt, Artificial Sequence
  Description of Artificial Sequence: Synthetic oligonucleotide
ucguuaauuccugagaaug

SEQ ID NO: 2334557 - RNA, 19 nt, Artificial Sequence
  Description of Artificial Sequence: Synthetic oligonucleotide
uuuauuaguugccucuaac

SEQ ID NO: 2334558 - RNA, 19 nt, Artificial Sequence
  Description of Artificial Sequence: Synthetic oligonucleotide
uugccucuaacucagacaa

SEQ ID NO: 2334559 - RNA, 19 nt, Artificial Sequence
  Description of Artificial Sequence: Synthetic oligonucleotide
uuggcuuucagcucucuag

SEQ ID NO: 2334560 - RNA, 19 nt, Artificial Sequence
  Description of Artificial Sequence: Synthetic oligonucleotide
auuaguugccucuaacuca

SEQ ID NO: 2334561 - RNA, 19 nt, Artificial Sequence
  Description of Artificial Sequence: Synthetic oligonucleotide
ugcucuuuggcucgaagag

SEQ ID NO: 2334562 - RNA, 19 nt, Artificial Sequence
  Description of Artificial Sequence: Synthetic oligonucleotide
uuuguuagcugguuaauau

SEQ ID NO: 2334563 - RNA, 19 nt, Artificial Sequence
  Description of Artificial Sequence: Synthetic oligonucleotide
uaaaaguuguuuacuuucu

SEQ ID NO: 2334564 - RNA, 19 nt, Artificial Sequence
  Description of Artificial Sequence: Synthetic oligonucleotide
ugaacgguaguuucuaacu

SEQ ID NO: 2334565 - RNA, 19 nt, Artificial Sequence
  Description of Artificial Sequence: Synthetic oligonucleotide
gaaaggaccucuugcuugg

SEQ ID NO: 2334566 - RNA, 19 nt, Artificial Sequence
  Description of Artificial Sequence: Synthetic oligonucleotide
ugaggucuuuauuaguugc

SEQ ID NO: 2334567 - RNA, 19 nt, Artificial Sequence
  Description of Artificial Sequence: Synthetic oligonucleotide
gauaacgauuuuauuguag

SEQ ID NO: 2334568 - RNA, 19 nt, Artificial Sequence
  Description of Artificial Sequence: Synthetic oligonucleotide
ucagaaguucugcugauaa

SEQ ID NO: 2334569 - RNA, 19 nt, Artificial Sequence
  Description of Artificial Sequence: Synthetic oligonucleotide
uuuguucucaggacaagcu

SEQ ID NO: 2334570 - RNA, 19 nt, Artificial Sequence
  Description of Artificial Sequence: Synthetic oligonucleotide
uacaauucucucuucucag

SEQ ID NO: 2334571 - RNA, 19 nt, Artificial Sequence
  Description of Artificial Sequence: Synthetic oligonucleotide
uaucgaaugcuucuuuugu

SEQ ID NO: 2334572 - RNA, 19 nt, Artificial Sequence
  Description of Artificial Sequence: Synthetic oligonucleotide
auaccucuugcucuuuggc

SEQ ID NO: 2334573 - RNA, 19 nt, Artificial Sequence
  Description of Artificial Sequence: Synthetic oligonucleotide
ucauucguuaauuccugag

SEQ ID NO: 2334574 - RNA, 19 nt, Artificial Sequence
  Description of Artificial Sequence: Synthetic oligonucleotide
gacauuucguugauggagg

SEQ ID NO: 2334575 - RNA, 19 nt, Artificial Sequence
  Description of Artificial Sequence: Synthetic oligonucleotide
uggucuacauaagauagcc

SEQ ID NO: 2334576 - RNA, 19 nt, Artificial Sequence
  Description of Artificial Sequence: Synthetic oligonucleotide
agaaugcucuaacucuccc

SEQ ID NO: 2334577 - RNA, 19 nt, Artificial Sequence
  Description of Artificial Sequence: Synthetic oligonucleotide
uuuucuugcugaauaguaa

SEQ ID NO: 2334578 - RNA, 19 nt, Artificial Sequence
  Description of Artificial Sequence: Synthetic oligonucleotide
caaucuguucugaagcugc

SEQ ID NO: 2334579 - RNA, 19 nt, Artificial Sequence
  Description of Artificial Sequence: Synthetic oligonucleotide
cuuggauuguaucgaaugc

SEQ ID NO: 2334580 - RNA, 19 nt, Artificial Sequence
  Description of Artificial Sequence: Synthetic oligonucleotide
uccuguucuaaacugucca

SEQ ID NO: 2334581 - RNA, 19 nt, Artificial Sequence
  Description of Artificial Sequence: Synthetic oligonucleotide
ucuccuuuauacuucuucu

SEQ ID NO: 2334582 - RNA, 19 nt, Artificial Sequence
  Description of Artificial Sequence: Synthetic oligonucleotide
uuaauaugcuuuucuuucu

SEQ ID NO: 2334583 - RNA, 19 nt, Artificial Sequence
  Description of Artificial Sequence: Synthetic oligonucleotide
uuaagaucuccuuguaacu

SEQ ID NO: 2334584 - RNA, 19 nt, Artificial Sequence
  Description of Artificial Sequence: Synthetic oligonucleotide
uuugccuucagaaguucug

SEQ ID NO: 2334585 - RNA, 19 nt, Artificial Sequence
  Description of Artificial Sequence: Synthetic oligonucleotide
guaauuugcauaccucuug

SEQ ID NO: 2334586 - RNA, 19 nt, Artificial Sequence
  Description of Artificial Sequence: Synthetic oligonucleotide
uuuuaagaucuccuuguaa

SEQ ID NO: 2334587 - RNA, 19 nt, Artificial Sequence
  Description of Artificial Sequence: Synthetic oligonucleotide
auucguuaauuccugagaa

SEQ ID NO: 2334588 - RNA, 19 nt, Artificial Sequence
  Description of Artificial Sequence: Synthetic oligonucleotide
cauccugugauuccuuucg

SEQ ID NO: 2334589 - RNA, 19 nt, Artificial Sequence
  Description of Artificial Sequence: Synthetic oligonucleotide
acccaugagaguuuuaaga

SEQ ID NO: 2334590 - RNA, 19 nt, Artificial Sequence
  Description of Artificial Sequence: Synthetic oligonucleotide
agagaaaggaccucuugcu

SEQ ID NO: 2334591 - RNA, 19 nt, Artificial Sequence
  Description of Artificial Sequence: Synthetic oligonucleotide
guagcuucaaguuuuccca

SEQ ID NO: 2334592 - RNA, 19 nt, Artificial Sequence
  Description of Artificial Sequence: Synthetic oligonucleotide
ucuugcugaauaguaacug

SEQ ID NO: 2334593 - RNA, 19 nt, Artificial Sequence
  Description of Artificial Sequence: Synthetic oligonucleotide
ucucauucguuaauuccug

SEQ ID NO: 2334594 - RNA, 19 nt, Artificial Sequence
  Description of Artificial Sequence: Synthetic oligonucleotide
auuucguugauggagggcu

SEQ ID NO: 2334595 - RNA, 19 nt, Artificial Sequence
  Description of Artificial Sequence: Synthetic oligonucleotide
ucuaaacuguccacuuuug

SEQ ID NO: 2334596 - RNA, 19 nt, Artificial Sequence
  Description of Artificial Sequence: Synthetic oligonucleotide
ugagaaugcucuaacucuc

SEQ ID NO: 2334597 - RNA, 19 nt, Artificial Sequence
  Description of Artificial Sequence: Synthetic oligonucleotide
uuagccuaaguguauuuaa

SEQ ID NO: 2334598 - RNA, 19 nt, Artificial Sequence
  Description of Artificial Sequence: Synthetic oligonucleotide
uuuuguucucaggacaagc

SEQ ID NO: 2334599 - RNA, 19 nt, Artificial Sequence
  Description of Artificial Sequence: Synthetic oligonucleotide
uagcauuuccucuuucuca

SEQ ID NO: 2334600 - RNA, 19 nt, Artificial Sequence
  Description of Artificial Sequence: Synthetic oligonucleotide
uuauuguagcuucaaguuu

SEQ ID NO: 2334601 - RNA, 19 nt, Artificial Sequence
  Description of Artificial Sequence: Synthetic oligonucleotide
uucuaaacuguccacuuuu

SEQ ID NO: 2334602 - RNA, 19 nt, Artificial Sequence
  Description of Artificial Sequence: Synthetic oligonucleotide
uaaacuguccacuuuuguu

SEQ ID NO: 2334603 - RNA, 19 nt, Artificial Sequence
  Description of Artificial Sequence: Synthetic oligonucleotide
uguagcauuuccucuuucu

SEQ ID NO: 2334604 - RNA, 19 nt, Artificial Sequence
  Description of Artificial Sequence: Synthetic oligonucleotide
aauuugcauaccucuugcu

SEQ ID NO: 2334605 - RNA, 19 nt, Artificial Sequence
  Description of Artificial Sequence: Synthetic oligonucleotide
cucuuuggcucgaagagac

SEQ ID NO: 2334606 - RNA, 19 nt, Artificial Sequence
  Description of Artificial Sequence: Synthetic oligonucleotide
cuuguaauuugcauaccuc

SEQ ID NO: 2334607 - RNA, 19 nt, Artificial Sequence
  Description of Artificial Sequence: Synthetic oligonucleotide
cagacaaucuguucugaag

SEQ ID NO: 2334608 - RNA, 19 nt, Artificial Sequence
  Description of Artificial Sequence: Synthetic oligonucleotide
uguucuuggauuguaucga

SEQ ID NO: 2334609 - RNA, 19 nt, Artificial Sequence
  Description of Artificial Sequence: Synthetic oligonucleotide
ucaauuuacccaugagagu

SEQ ID NO: 2334610 - RNA, 19 nt, Artificial Sequence
  Description of Artificial Sequence: Synthetic oligonucleotide
ucuccuuguaacuucuuaa

SEQ ID NO: 2334611 - RNA, 19 nt, Artificial Sequence
  Description of Artificial Sequence: Synthetic oligonucleotide
gaacgguaguuucuaacug

SEQ ID NO: 2334612 - RNA, 19 nt, Artificial Sequence
  Description of Artificial Sequence: Synthetic oligonucleotide
aguuuucccaguuguaccu

SEQ ID NO: 2334613 - RNA, 19 nt, Artificial Sequence
  Description of Artificial Sequence: Synthetic oligonucleotide
ugagaguuuuaagaucucc

SEQ ID NO: 2334614 - RNA, 19 nt, Artificial Sequence
  Description of Artificial Sequence: Synthetic oligonucleotide
uuucuuucucaugucagca

SEQ ID NO: 2334615 - RNA, 19 nt, Artificial Sequence
  Description of Artificial Sequence: Synthetic oligonucleotide
cuuucucaugucagcaucc

SEQ ID NO: 2334616 - RNA, 19 nt, Artificial Sequence
  Description of Artificial Sequence: Synthetic oligonucleotide
uaacgauuuuauuguagcu

SEQ ID NO: 2334617 - RNA, 19 nt, Artificial Sequence
  Description of Artificial Sequence: Synthetic oligonucleotide
cuuuguuuagccuaagugu

SEQ ID NO: 2334618 - RNA, 19 nt, Artificial Sequence
  Description of Artificial Sequence: Synthetic oligonucleotide
uguaauuugcauaccucuu

SEQ ID NO: 2334619 - RNA, 19 nt, Artificial Sequence
  Description of Artificial Sequence: Synthetic oligonucleotide
aguuucaauuuacccauga

SEQ ID NO: 2334620 - RNA, 19 nt, Artificial Sequence
  Description of Artificial Sequence: Synthetic oligonucleotide
cugguacugaaccugugcc

SEQ ID NO: 2334621 - RNA, 19 nt, Artificial Sequence
  Description of Artificial Sequence: Synthetic oligonucleotide
cuuucgcuccuuuuguagc

SEQ ID NO: 2334622 - RNA, 19 nt, Artificial Sequence
  Description of Artificial Sequence: Synthetic oligonucleotide
ugcucuuguaauuugcaua

SEQ ID NO: 2334623 - RNA, 19 nt, Artificial Sequence
  Description of Artificial Sequence: Synthetic oligonucleotide
cugugauuccuuucgcucc

SEQ ID NO: 2334624 - RNA, 19 nt, Artificial Sequence
  Description of Artificial Sequence: Synthetic oligonucleotide
uuuggcucgaagagacugc

SEQ ID NO: 2334625 - RNA, 19 nt, Artificial Sequence
  Description of Artificial Sequence: Synthetic oligonucleotide
ucuagcaguggcaucuccu

SEQ ID NO: 2334626 - RNA, 19 nt, Artificial Sequence
  Description of Artificial Sequence: Synthetic oligonucleotide
guaucgaaugcuucuuuug

SEQ ID NO: 2334627 - RNA, 19 nt, Artificial Sequence
  Description of Artificial Sequence: Synthetic oligonucleotide
caugagaguuuuaagaucu

SEQ ID NO: 2334628 - RNA, 19 nt, Artificial Sequence
  Description of Artificial Sequence: Synthetic oligonucleotide
cauaagauagccagaaugu

SEQ ID NO: 2334629 - RNA, 19 nt, Artificial Sequence
  Description of Artificial Sequence: Synthetic oligonucleotide
uuggauuguaucgaaugcu

SEQ ID NO: 2334630 - RNA, 19 nt, Artificial Sequence
  Description of Artificial Sequence: Synthetic oligonucleotide
auaagauagccagaaugug

SEQ ID NO: 2334631 - RNA, 19 nt, Artificial Sequence
  Description of Artificial Sequence: Synthetic oligonucleotide
guacaauucucucuucuca

SEQ ID NO: 2334632 - RNA, 19 nt, Artificial Sequence
  Description of Artificial Sequence: Synthetic oligonucleotide
cauaccucuugcucuuugg

SEQ ID NO: 2334633 - RNA, 19 nt, Artificial Sequence
  Description of Artificial Sequence: Synthetic oligonucleotide
uuacccaugagaguuuuaa

SEQ ID NO: 2334634 - RNA, 19 nt, Artificial Sequence
  Description of Artificial Sequence: Synthetic oligonucleotide
acauuucguugauggaggg

SEQ ID NO: 2334635 - RNA, 19 nt, Artificial Sequence
  Description of Artificial Sequence: Synthetic oligonucleotide
gauuguaucgaaugcuucu

SEQ ID NO: 2334636 - RNA, 19 nt, Artificial Sequence
  Description of Artificial Sequence: Synthetic oligonucleotide
cugauaacgauuuuauugu

SEQ ID NO: 2334637 - RNA, 19 nt, Artificial Sequence
  Description of Artificial Sequence: Synthetic oligonucleotide
uucuuuguuuagccuaagu

SEQ ID NO: 2334638 - RNA, 19 nt, Artificial Sequence
  Description of Artificial Sequence: Synthetic oligonucleotide
ucugcugauaacgauuuua

SEQ ID NO: 2334639 - RNA, 19 nt, Artificial Sequence
  Description of Artificial Sequence: Synthetic oligonucleotide
uggauuguaucgaaugcuu

SEQ ID NO: 2334640 - RNA, 19 nt, Artificial Sequence
  Description of Artificial Sequence: Synthetic oligonucleotide
cucuaacucagacaaucug

SEQ ID NO: 2334641 - RNA, 19 nt, Artificial Sequence
  Description of Artificial Sequence: Synthetic oligonucleotide
uucaaguuucugaacggua

SEQ ID NO: 2334642 - RNA, 19 nt, Artificial Sequence
  Description of Artificial Sequence: Synthetic oligonucleotide
agccagaaugugucuuugc

SEQ ID NO: 2334643 - RNA, 19 nt, Artificial Sequence
  Description of Artificial Sequence: Synthetic oligonucleotide
ugugauuccuuucgcuccu

SEQ ID NO: 2334644 - RNA, 19 nt, Artificial Sequence
  Description of Artificial Sequence: Synthetic oligonucleotide
uguucuaaacuguccacuu

SEQ ID NO: 2334645 - RNA, 19 nt, Artificial Sequence
  Description of Artificial Sequence: Synthetic oligonucleotide
uccuuguaacuucuuaaua

SEQ ID NO: 2334646 - RNA, 19 nt, Artificial Sequence
  Description of Artificial Sequence: Synthetic oligonucleotide
cugaacgguaguuucuaac

SEQ ID NO: 2334647 - RNA, 19 nt, Artificial Sequence
  Description of Artificial Sequence: Synthetic oligonucleotide
gcucuuguaauuugcauac

SEQ ID NO: 2334648 - RNA, 19 nt, Artificial Sequence
  Description of Artificial Sequence: Synthetic oligonucleotide
auccugugauuccuuucgc

SEQ ID NO: 2334649 - RNA, 19 nt, Artificial Sequence
  Description of Artificial Sequence: Synthetic oligonucleotide
cuaaagccaccuuuuguuc

SEQ ID NO: 2334650 - RNA, 19 nt, Artificial Sequence
  Description of Artificial Sequence: Synthetic oligonucleotide
aaguucugcugauaacgau

SEQ ID NO: 2334651 - RNA, 19 nt, Artificial Sequence
  Description of Artificial Sequence: Synthetic oligonucleotide
auaugcuuuucuuucucau

SEQ ID NO: 2334652 - RNA, 19 nt, Artificial Sequence
  Description of Artificial Sequence: Synthetic oligonucleotide
uguaucgaaugcuucuuuu

SEQ ID NO: 2334653 - RNA, 19 nt, Artificial Sequence
  Description of Artificial Sequence: Synthetic oligonucleotide
ugguuaauaugcuuuucuu

SEQ ID NO: 2334654 - RNA, 19 nt, Artificial Sequence
  Description of Artificial Sequence: Synthetic oligonucleotide
uuccuuucgcuccuuuugu

SEQ ID NO: 2334655 - RNA, 19 nt, Artificial Sequence
  Description of Artificial Sequence: Synthetic oligonucleotide
agaguacaauucucucuuc

SEQ ID NO: 2334656 - RNA, 19 nt, Artificial Sequence
  Description of Artificial Sequence: Synthetic oligonucleotide
uccacaccagcaagcuugg

SEQ ID NO: 2334657 - RNA, 19 nt, Artificial Sequence
  Description of Artificial Sequence: Synthetic oligonucleotide
aguuguuuacuuucuucaa

SEQ ID NO: 2334658 - RNA, 19 nt, Artificial Sequence
  Description of Artificial Sequence: Synthetic oligonucleotide
uuccugagaaugcucuaac

SEQ ID NO: 2334659 - RNA, 19 nt, Artificial Sequence
  Description of Artificial Sequence: Synthetic oligonucleotide
uaguaacuguauucuucag

SEQ ID NO: 2334660 - RNA, 19 nt, Artificial Sequence
  Description of Artificial Sequence: Synthetic oligonucleotide
guaacuguauucuucaguu

SEQ ID NO: 2334661 - RNA, 19 nt, Artificial Sequence
  Description of Artificial Sequence: Synthetic oligonucleotide
uucaugcugcugcugguac

SEQ ID NO: 2334662 - RNA, 19 nt, Artificial Sequence
  Description of Artificial Sequence: Synthetic oligonucleotide
gaagagacugccccgcauc

SEQ ID NO: 2334663 - RNA, 19 nt, Artificial Sequence
  Description of Artificial Sequence: Synthetic oligonucleotide
cauucguuaauuccugaga

SEQ ID NO: 2334664 - RNA, 19 nt, Artificial Sequence
  Description of Artificial Sequence: Synthetic oligonucleotide
uagccuaaguguauuuaau

SEQ ID NO: 2334665 - RNA, 19 nt, Artificial Sequence
  Description of Artificial Sequence: Synthetic oligonucleotide
aguuucuaacugcucuugu

SEQ ID NO: 2334666 - RNA, 19 nt, Artificial Sequence
  Description of Artificial Sequence: Synthetic oligonucleotide
gugaggucuuuauuaguug

SEQ ID NO: 2334667 - RNA, 19 nt, Artificial Sequence
  Description of Artificial Sequence: Synthetic oligonucleotide
ucaaguuuucccaguugua

SEQ ID NO: 2334668 - RNA, 19 nt, Artificial Sequence
  Description of Artificial Sequence: Synthetic oligonucleotide
uuguuuagccuaaguguau

SEQ ID NO: 2334669 - RNA, 19 nt, Artificial Sequence
  Description of Artificial Sequence: Synthetic oligonucleotide
ugauaacgauuuuauugua

SEQ ID NO: 2334670 - RNA, 19 nt, Artificial Sequence
  Description of Artificial Sequence: Synthetic oligonucleotide
uucguuaauuccugagaau

SEQ ID NO: 2334671 - RNA, 19 nt, Artificial Sequence
  Description of Artificial Sequence: Synthetic oligonucleotide
uccugagaaugcucuaacu

SEQ ID NO: 2334672 - RNA, 19 nt, Artificial Sequence
  Description of Artificial Sequence: Synthetic oligonucleotide
ugguacugaaccugugccu

SEQ ID NO: 2334673 - RNA, 19 nt, Artificial Sequence
  Description of Artificial Sequence: Synthetic oligonucleotide
uugccuucagaaguucugc

SEQ ID NO: 2334674 - RNA, 19 nt, Artificial Sequence
  Description of Artificial Sequence: Synthetic oligonucleotide
uguuguucaugcugcugcu

SEQ ID NO: 2334675 - RNA, 19 nt, Artificial Sequence
  Description of Artificial Sequence: Synthetic oligonucleotide
guugccucuaacucagaca

SEQ ID NO: 2334676 - RNA, 19 nt, Artificial Sequence
  Description of Artificial Sequence: Synthetic oligonucleotide
uaagaucuccuuguaacuu

SEQ ID NO: 2334677 - RNA, 19 nt, Artificial Sequence
  Description of Artificial Sequence: Synthetic oligonucleotide
cauccagaguacaauucuc

SEQ ID NO: 2334678 - RNA, 19 nt, Artificial Sequence
  Description of Artificial Sequence: Synthetic oligonucleotide
uccugugauuccuuucgcu

SEQ ID NO: 2334679 - RNA, 19 nt, Artificial Sequence
  Description of Artificial Sequence: Synthetic oligonucleotide
ugcucuaacucucccucuc

SEQ ID NO: 2334680 - RNA, 19 nt, Artificial Sequence
  Description of Artificial Sequence: Synthetic oligonucleotide
uggacauuucguugaugga

SEQ ID NO: 2334681 - RNA, 19 nt, Artificial Sequence
  Description of Artificial Sequence: Synthetic oligonucleotide
gaaguucugcugauaacga

SEQ ID NO: 2334682 - RNA, 19 nt, Artificial Sequence
  Description of Artificial Sequence: Synthetic oligonucleotide
uucuuucucaugucagcau

SEQ ID NO: 2334683 - RNA, 19 nt, Artificial Sequence
  Description of Artificial Sequence: Synthetic oligonucleotide
aaccugugccugcaaggcu

SEQ ID NO: 2334684 - RNA, 19 nt, Artificial Sequence
  Description of Artificial Sequence: Synthetic oligonucleotide
auuuccuguucuaaacugu

SEQ ID NO: 2334685 - RNA, 19 nt, Artificial Sequence
  Description of Artificial Sequence: Synthetic oligonucleotide
uuaccagucugguuuucau

SEQ ID NO: 2334686 - RNA, 19 nt, Artificial Sequence
  Description of Artificial Sequence: Synthetic oligonucleotide
ucuuuauuaguugccucua

SEQ ID NO: 2334687 - RNA, 19 nt, Artificial Sequence
  Description of Artificial Sequence: Synthetic oligonucleotide
guugauggagggcuuccac

SEQ ID NO: 2334688 - RNA, 19 nt, Artificial Sequence
  Description of Artificial Sequence: Synthetic oligonucleotide
uuggcucgaagagacugcc

SEQ ID NO: 2334689 - RNA, 19 nt, Artificial Sequence
  Description of Artificial Sequence: Synthetic oligonucleotide
aucgaaugcuucuuuuguu

SEQ ID NO: 2334690 - RNA, 19 nt, Artificial Sequence
  Description of Artificial Sequence: Synthetic oligonucleotide
cagaaguucugcugauaac

SEQ ID NO: 2334691 - RNA, 19 nt, Artificial Sequence
  Description of Artificial Sequence: Synthetic oligonucleotide
ccugagaaugcucuaacuc

SEQ ID NO: 2334692 - RNA, 19 nt, Artificial Sequence
  Description of Artificial Sequence: Synthetic oligonucleotide
ccuuguaacuucuuaauaa

SEQ ID NO: 2334693 - RNA, 19 nt, Artificial Sequence
  Description of Artificial Sequence: Synthetic oligonucleotide
gacaaucuguucugaagcu

SEQ ID NO: 2334694 - RNA, 19 nt, Artificial Sequence
  Description of Artificial Sequence: Synthetic oligonucleotide
auagccagaaugugucuuu

SEQ ID NO: 2334695 - RNA, 19 nt, Artificial Sequence
  Description of Artificial Sequence: Synthetic oligonucleotide
agauagccagaaugugucu

SEQ ID NO: 2334696 - RNA, 19 nt, Artificial Sequence
  Description of Artificial Sequence: Synthetic oligonucleotide
agggcuuccaccuccuuuu

SEQ ID NO: 2334697 - RNA, 19 nt, Artificial Sequence
  Description of Artificial Sequence: Synthetic oligonucleotide
gaguacaauucucucuucu

SEQ ID NO: 2334698 - RNA, 19 nt, Artificial Sequence
  Description of Artificial Sequence: Synthetic oligonucleotide
agcuucaaguuuucccagu

SEQ ID NO: 2334699 - RNA, 19 nt, Artificial Sequence
  Description of Artificial Sequence: Synthetic oligonucleotide
acuguauucuucaguuuca

SEQ ID NO: 2334700 - RNA, 19 nt, Artificial Sequence
  Description of Artificial Sequence: Synthetic oligonucleotide
uguuuagccuaaguguauu

SEQ ID NO: 2334701 - RNA, 19 nt, Artificial Sequence
  Description of Artificial Sequence: Synthetic oligonucleotide
gguacugaaccugugccug

SEQ ID NO: 2334702 - RNA, 19 nt, Artificial Sequence
  Description of Artificial Sequence: Synthetic oligonucleotide
aguucugcugauaacgauu

SEQ ID NO: 2334703 - RNA, 19 nt, Artificial Sequence
  Description of Artificial Sequence: Synthetic oligonucleotide
guuucuaacugcucuugua

SEQ ID NO: 2334704 - RNA, 19 nt, Artificial Sequence
  Description of Artificial Sequence: Synthetic oligonucleotide
ucugaacgguaguuucuaa

SEQ ID NO: 2334705 - RNA, 19 nt, Artificial Sequence
  Description of Artificial Sequence: Synthetic oligonucleotide
cauuucguugauggagggc

SEQ ID NO: 2334706 - RNA, 19 nt, Artificial Sequence
  Description of Artificial Sequence: Synthetic oligonucleotide
cuuuuguucucaggacaag

SEQ ID NO: 2334707 - RNA, 19 nt, Artificial Sequence
  Description of Artificial Sequence: Synthetic oligonucleotide
caauuuacccaugagaguu

SEQ ID NO: 2334708 - RNA, 19 nt, Artificial Sequence
  Description of Artificial Sequence: Synthetic oligonucleotide
uucugaacgguaguuucua

SEQ ID NO: 2334709 - RNA, 19 nt, Artificial Sequence
  Description of Artificial Sequence: Synthetic oligonucleotide
gcugguacugaaccugugc

SEQ ID NO: 2334710 - RNA, 19 nt, Artificial Sequence
  Description of Artificial Sequence: Synthetic oligonucleotide
cucgaagagacugccccgc

SEQ ID NO: 2334711 - RNA, 19 nt, Artificial Sequence
  Description of Artificial Sequence: Synthetic oligonucleotide
aauuuacccaugagaguuu

SEQ ID NO: 2334712 - RNA, 19 nt, Artificial Sequence
  Description of Artificial Sequence: Synthetic oligonucleotide
aguuucugaacgguaguuu

SEQ ID NO: 2334713 - RNA, 19 nt, Artificial Sequence
  Description of Artificial Sequence: Synthetic oligonucleotide
cuugcugaauaguaacugu

SEQ ID NO: 2334714 - RNA, 19 nt, Artificial Sequence
  Description of Artificial Sequence: Synthetic oligonucleotide
gaaugcucuaacucucccu

SEQ ID NO: 2334715 - RNA, 19 nt, Artificial Sequence
  Description of Artificial Sequence: Synthetic oligonucleotide
cguuaauuccugagaaugc

SEQ ID NO: 2334716 - RNA, 19 nt, Artificial Sequence
  Description of Artificial Sequence: Synthetic oligonucleotide
agccaccuuuuguucuugg

SEQ ID NO: 2334717 - RNA, 19 nt, Artificial Sequence
  Description of Artificial Sequence: Synthetic oligonucleotide
guuuuaagaucuccuugua

SEQ ID NO: 2334718 - RNA, 19 nt, Artificial Sequence
  Description of Artificial Sequence: Synthetic oligonucleotide
aacuccucuuccacaccag

SEQ ID NO: 2334719 - RNA, 19 nt, Artificial Sequence
  Description of Artificial Sequence: Synthetic oligonucleotide
acgguaguuucuaacugcu

SEQ ID NO: 2334720 - RNA, 19 nt, Artificial Sequence
  Description of Artificial Sequence: Synthetic oligonucleotide
uuguagcauuuccucuuuc

SEQ ID NO: 2334721 - RNA, 19 nt, Artificial Sequence
  Description of Artificial Sequence: Synthetic oligonucleotide
ucgaagagacugccccgca

SEQ ID NO: 2334722 - RNA, 19 nt, Artificial Sequence
  Description of Artificial Sequence: Synthetic oligonucleotide
cuggucuuuaucuuuguau

SEQ ID NO: 2334723 - RNA, 19 nt, Artificial Sequence
  Description of Artificial Sequence: Synthetic oligonucleotide
uagccagaaugugucuuug

SEQ ID NO: 2334724 - RNA, 19 nt, Artificial Sequence
  Description of Artificial Sequence: Synthetic oligonucleotide
uguccacuuuuguuuguua

SEQ ID NO: 2334725 - RNA, 19 nt, Artificial Sequence
  Description of Artificial Sequence: Synthetic oligonucleotide
ccuuucgcuccuuuuguag

SEQ ID NO: 2334726 - RNA, 19 nt, Artificial Sequence
  Description of Artificial Sequence: Synthetic oligonucleotide
uucuuaccagucugguuuu

SEQ ID NO: 2334727 - RNA, 19 nt, Artificial Sequence
  Description of Artificial Sequence: Synthetic oligonucleotide
ggaccucuugcuuggcccg

SEQ ID NO: 2334728 - RNA, 19 nt, Artificial Sequence
  Description of Artificial Sequence: Synthetic oligonucleotide
augagaguuuuaagaucuc

SEQ ID NO: 2334729 - RNA, 19 nt, Artificial Sequence
  Description of Artificial Sequence: Synthetic oligonucleotide
uaccagucugguuuucauu

SEQ ID NO: 2334730 - RNA, 19 nt, Artificial Sequence
  Description of Artificial Sequence: Synthetic oligonucleotide
cucuagcaguggcaucucc

SEQ ID NO: 2334731 - RNA, 19 nt, Artificial Sequence
  Description of Artificial Sequence: Synthetic oligonucleotide
cuuuauuaguugccucuaa

SEQ ID NO: 2334732 - RNA, 19 nt, Artificial Sequence
  Description of Artificial Sequence: Synthetic oligonucleotide
uuuacccaugagaguuuua

SEQ ID NO: 2334733 - RNA, 19 nt, Artificial Sequence
  Description of Artificial Sequence: Synthetic oligonucleotide
ugucagcauccagaguaca

SEQ ID NO: 2334734 - RNA, 19 nt, Artificial Sequence
  Description of Artificial Sequence: Synthetic oligonucleotide
uggcucgaagagacugccc

SEQ ID NO: 2334735 - RNA, 19 nt, Artificial Sequence
  Description of Artificial Sequence: Synthetic oligonucleotide
augcucuaacucucccucu

SEQ ID NO: 2334736 - RNA, 19 nt, Artificial Sequence
  Description of Artificial Sequence: Synthetic oligonucleotide
guuuguuagcugguuaaua

SEQ ID NO: 2334737 - RNA, 19 nt, Artificial Sequence
  Description of Artificial Sequence: Synthetic oligonucleotide
uuucguugauggagggcuu

SEQ ID NO: 2334738 - RNA, 19 nt, Artificial Sequence
  Description of Artificial Sequence: Synthetic oligonucleotide
cuaacucagacaaucuguu

SEQ ID NO: 2334739 - RNA, 19 nt, Artificial Sequence
  Description of Artificial Sequence: Synthetic oligonucleotide
uucucagagaaaggaccuc

SEQ ID NO: 2334740 - RNA, 19 nt, Artificial Sequence
  Description of Artificial Sequence: Synthetic oligonucleotide
guuuucccaguuguaccug

SEQ ID NO: 2334741 - RNA, 19 nt, Artificial Sequence
  Description of Artificial Sequence: Synthetic oligonucleotide
cucauucguuaauuccuga

SEQ ID NO: 2334742 - RNA, 19 nt, Artificial Sequence
  Description of Artificial Sequence: Synthetic oligonucleotide
accagcaagcuuggcuuuc

SEQ ID NO: 2334743 - RNA, 19 nt, Artificial Sequence
  Description of Artificial Sequence: Synthetic oligonucleotide
ugcuggacauuucguugau

SEQ ID NO: 2334744 - RNA, 19 nt, Artificial Sequence
  Description of Artificial Sequence: Synthetic oligonucleotide
gguuaauaugcuuuucuuu

SEQ ID NO: 2334745 - RNA, 19 nt, Artificial Sequence
  Description of Artificial Sequence: Synthetic oligonucleotide
uccuuucgcuccuuuugua

SEQ ID NO: 2334746 - RNA, 19 nt, Artificial Sequence
  Description of Artificial Sequence: Synthetic oligonucleotide
agcucucuagcaguggcau

SEQ ID NO: 2334747 - RNA, 19 nt, Artificial Sequence
  Description of Artificial Sequence: Synthetic oligonucleotide
auuuacccaugagaguuuu

SEQ ID NO: 2334748 - RNA, 19 nt, Artificial Sequence
  Description of Artificial Sequence: Synthetic oligonucleotide
cagaguacaauucucucuu

SEQ ID NO: 2334749 - RNA, 19 nt, Artificial Sequence
  Description of Artificial Sequence: Synthetic oligonucleotide
aagcugcuggacauuucgu

SEQ ID NO: 2334750 - RNA, 19 nt, Artificial Sequence
  Description of Artificial Sequence: Synthetic oligonucleotide
uucguugauggagggcuuc

SEQ ID NO: 2334751 - RNA, 19 nt, Artificial Sequence
  Description of Artificial Sequence: Synthetic oligonucleotide
gaaugugucuuugcuuucu

SEQ ID NO: 2334752 - RNA, 19 nt, Artificial Sequence
  Description of Artificial Sequence: Synthetic oligonucleotide
aagccaccuuuuguucuug

SEQ ID NO: 2334753 - RNA, 19 nt, Artificial Sequence
  Description of Artificial Sequence: Synthetic oligonucleotide
ccuucucauucguuaauuc

SEQ ID NO: 2334754 - RNA, 19 nt, Artificial Sequence
  Description of Artificial Sequence: Synthetic oligonucleotide
ggauuguaucgaaugcuuc

SEQ ID NO: 2334755 - RNA, 19 nt, Artificial Sequence
  Description of Artificial Sequence: Synthetic oligonucleotide
gacugccccgcauccugug

SEQ ID NO: 2334756 - RNA, 19 nt, Artificial Sequence
  Description of Artificial Sequence: Synthetic oligonucleotide
guggcaucuccuuuauacu

SEQ ID NO: 2334757 - RNA, 19 nt, Artificial Sequence
  Description of Artificial Sequence: Synthetic oligonucleotide
gcucuaacucucccucucc

SEQ ID NO: 2334758 - RNA, 19 nt, Artificial Sequence
  Description of Artificial Sequence: Synthetic oligonucleotide
uucugcugauaacgauuuu

SEQ ID NO: 2334759 - RNA, 19 nt, Artificial Sequence
  Description of Artificial Sequence: Synthetic oligonucleotide
gauagccagaaugugucuu

SEQ ID NO: 2334760 - RNA, 19 nt, Artificial Sequence
  Description of Artificial Sequence: Synthetic oligonucleotide
gccuaaguguauuuaauuu

SEQ ID NO: 2334761 - RNA, 19 nt, Artificial Sequence
  Description of Artificial Sequence: Synthetic oligonucleotide
accugugccugcaaggcuu

SEQ ID NO: 2334762 - RNA, 19 nt, Artificial Sequence
  Description of Artificial Sequence: Synthetic oligonucleotide
ugccucuaacucagacaau

SEQ ID NO: 2334763 - RNA, 19 nt, Artificial Sequence
  Description of Artificial Sequence: Synthetic oligonucleotide
uucgcuccuuuuguagcau

SEQ ID NO: 2334764 - RNA, 19 nt, Artificial Sequence
  Description of Artificial Sequence: Synthetic oligonucleotide
cucagacaaucuguucuga

SEQ ID NO: 2334765 - RNA, 19 nt, Artificial Sequence
  Description of Artificial Sequence: Synthetic oligonucleotide
guuuagccuaaguguauuu

SEQ ID NO: 2334766 - RNA, 19 nt, Artificial Sequence
  Description of Artificial Sequence: Synthetic oligonucleotide
agagacugccccgcauccu

SEQ ID NO: 2334767 - RNA, 19 nt, Artificial Sequence
  Description of Artificial Sequence: Synthetic oligonucleotide
cucaggacaagcuggucuu

SEQ ID NO: 2334768 - RNA, 19 nt, Artificial Sequence
  Description of Artificial Sequence: Synthetic oligonucleotide
gaccucuugcuuggcccgc

SEQ ID NO: 2334769 - RNA, 19 nt, Artificial Sequence
  Description of Artificial Sequence: Synthetic oligonucleotide
gcauccugugauuccuuuc

SEQ ID NO: 2334770 - RNA, 19 nt, Artificial Sequence
  Description of Artificial Sequence: Synthetic oligonucleotide
gcugaauaguaacuguauu

SEQ ID NO: 2334771 - RNA, 19 nt, Artificial Sequence
  Description of Artificial Sequence: Synthetic oligonucleotide
ggucuacauaagauagcca

SEQ ID NO: 2334772 - RNA, 19 nt, Artificial Sequence
  Description of Artificial Sequence: Synthetic oligonucleotide
cuuucuuaccagucugguu

SEQ ID NO: 2334773 - RNA, 19 nt, Artificial Sequence
  Description of Artificial Sequence: Synthetic oligonucleotide
cccaugagaguuuuaagau

SEQ ID NO: 2334774 - RNA, 19 nt, Artificial Sequence
  Description of Artificial Sequence: Synthetic oligonucleotide
cuuggcuuucagcucucua

SEQ ID NO: 2334775 - RNA, 19 nt, Artificial Sequence
  Description of Artificial Sequence: Synthetic oligonucleotide
ccagaguacaauucucucu

SEQ ID NO: 2334776 - RNA, 19 nt, Artificial Sequence
  Description of Artificial Sequence: Synthetic oligonucleotide
gagggcuuccaccuccuuu

SEQ ID NO: 2334777 - RNA, 19 nt, Artificial Sequence
  Description of Artificial Sequence: Synthetic oligonucleotide
agcuuggcuuucagcucuc

SEQ ID NO: 2334778 - RNA, 19 nt, Artificial Sequence
  Description of Artificial Sequence: Synthetic oligonucleotide
cugcucuuguaauuugcau

SEQ ID NO: 2334779 - RNA, 19 nt, Artificial Sequence
  Description of Artificial Sequence: Synthetic oligonucleotide
cagugaggucuuuauuagu

SEQ ID NO: 2334780 - RNA, 19 nt, Artificial Sequence
  Description of Artificial Sequence: Synthetic oligonucleotide
uggcccgcugcaacuccuc

SEQ ID NO: 2334781 - RNA, 19 nt, Artificial Sequence
  Description of Artificial Sequence: Synthetic oligonucleotide
ucuugcucuuuggcucgaa

SEQ ID NO: 2334782 - RNA, 19 nt, Artificial Sequence
  Description of Artificial Sequence: Synthetic oligonucleotide
gcucuuuggcucgaagaga

SEQ ID NO: 2334783 - RNA, 19 nt, Artificial Sequence
  Description of Artificial Sequence: Synthetic oligonucleotide
cuugcuuggcccgcugcaa

SEQ ID NO: 2334784 - RNA, 19 nt, Artificial Sequence
  Description of Artificial Sequence: Synthetic oligonucleotide
gcuccuuuuguagcauuuc

SEQ ID NO: 2334785 - RNA, 19 nt, Artificial Sequence
  Description of Artificial Sequence: Synthetic oligonucleotide
ugccccgcauccugugauu

SEQ ID NO: 2334786 - RNA, 19 nt, Artificial Sequence
  Description of Artificial Sequence: Synthetic oligonucleotide
ccacuuuuguuuguuagcu

SEQ ID NO: 2334787 - RNA, 19 nt, Artificial Sequence
  Description of Artificial Sequence: Synthetic oligonucleotide
gcuggacauuucguugaug

SEQ ID NO: 2334788 - RNA, 19 nt, Artificial Sequence
  Description of Artificial Sequence: Synthetic oligonucleotide
ugcauaccucuugcucuuu

SEQ ID NO: 2334789 - RNA, 19 nt, Artificial Sequence
  Description of Artificial Sequence: Synthetic oligonucleotide
gcuuucuuaccagucuggu

SEQ ID NO: 2334790 - RNA, 19 nt, Artificial Sequence
  Description of Artificial Sequence: Synthetic oligonucleotide
gcucucuagcaguggcauc

SEQ ID NO: 2334791 - RNA, 19 nt, Artificial Sequence
  Description of Artificial Sequence: Synthetic oligonucleotide
ccucuaacucagacaaucu

SEQ ID NO: 2334792 - RNA, 19 nt, Artificial Sequence
  Description of Artificial Sequence: Synthetic oligonucleotide
cgguaguuucuaacugcuc

SEQ ID NO: 2334793 - RNA, 19 nt, Artificial Sequence
  Description of Artificial Sequence: Synthetic oligonucleotide
cugccccgcauccugugau

SEQ ID NO: 2334794 - RNA, 19 nt, Artificial Sequence
  Description of Artificial Sequence: Synthetic oligonucleotide
gccccgcauccugugauuc

SEQ ID NO: 2334795 - RNA, 19 nt, Artificial Sequence
  Description of Artificial Sequence: Synthetic oligonucleotide
caguggcaucuccuuuaua

SEQ ID NO: 2334796 - RNA, 19 nt, Artificial Sequence
  Description of Artificial Sequence: Synthetic oligonucleotide
caccagcaagcuuggcuuu

SEQ ID NO: 2334797 - RNA, 19 nt, Artificial Sequence
  Description of Artificial Sequence: Synthetic oligonucleotide
ccacaccagcaagcuuggc

SEQ ID NO: 2334798 - RNA, 19 nt, Artificial Sequence
  Description of Artificial Sequence: Synthetic oligonucleotide
cgaagagacugccccgcau

SEQ ID NO: 2334799 - RNA, 19 nt, Artificial Sequence
  Description of Artificial Sequence: Synthetic oligonucleotide
ccugugccugcaaggcuuu

SEQ ID NO: 2334800 - RNA, 19 nt, Artificial Sequence
  Description of Artificial Sequence: Synthetic oligonucleotide
cugugccugcaaggcuuuu

SEQ ID NO: 2334801 - RNA, 19 nt, Artificial Sequence
  Description of Artificial Sequence: Synthetic oligonucleotide
ccgcauccugugauuccuu

SEQ ID NO: 2334802 - RNA, 19 nt, Artificial Sequence
  Description of Artificial Sequence: Synthetic oligonucleotide
aauccaugugaucugcucc

SEQ ID NO: 2334803 - RNA, 19 nt, Artificial Sequence
  Description of Artificial Sequence: Synthetic oligonucleotide
uaugguggguacaugaggg

SEQ ID NO: 2334804 - RNA, 19 nt, Artificial Sequence
  Description of Artificial Sequence: Synthetic oligonucleotide
ucaaauuugccacucagcu

SEQ ID NO: 2334805 - RNA, 19 nt, Artificial Sequence
  Description of Artificial Sequence: Synthetic oligonucleotide
auugcuuuguaguaggguc

SEQ ID NO: 2334806 - RNA, 19 nt, Artificial Sequence
  Description of Artificial Sequence: Synthetic oligonucleotide
ugaaccaugagucucacuc

SEQ ID NO: 2334807 - RNA, 19 nt, Artificial Sequence
  Description of Artificial Sequence: Synthetic oligonucleotide
uuuucuauauuccucgaac

SEQ ID NO: 2334808 - RNA, 19 nt, Artificial Sequence
  Description of Artificial Sequence: Synthetic oligonucleotide
gaaaugacccaccaucacg

SEQ ID NO: 2334809 - RNA, 19 nt, Artificial Sequence
  Description of Artificial Sequence: Synthetic oligonucleotide
agucucucaaauuugccac

SEQ ID NO: 2334810 - RNA, 19 nt, Artificial Sequence
  Description of Artificial Sequence: Synthetic oligonucleotide
ucauaugccuucauuaucu

SEQ ID NO: 2334811 - RNA, 19 nt, Artificial Sequence
  Description of Artificial Sequence: Synthetic oligonucleotide
ugagucucacucuugaugc

SEQ ID NO: 2334812 - RNA, 19 nt, Artificial Sequence
  Description of Artificial Sequence: Synthetic oligonucleotide
augaauuucaucucaucag

SEQ ID NO: 2334813 - RNA, 19 nt, Artificial Sequence
  Description of Artificial Sequence: Synthetic oligonucleotide
gaugaauuucaucucauca

SEQ ID NO: 2334814 - RNA, 19 nt, Artificial Sequence
  Description of Artificial Sequence: Synthetic oligonucleotide
aaauccaugugaucugcuc

SEQ ID NO: 2334815 - RNA, 19 nt, Artificial Sequence
  Description of Artificial Sequence: Synthetic oligonucleotide
ugacuuuaaggucucagug

SEQ ID NO: 2334816 - RNA, 19 nt, Artificial Sequence
  Description of Artificial Sequence: Synthetic oligonucleotide
acuuuaaggucucagugag

SEQ ID NO: 2334817 - RNA, 19 nt, Artificial Sequence
  Description of Artificial Sequence: Synthetic oligonucleotide
ugcaaaguagcuguggagg

SEQ ID NO: 2334818 - RNA, 19 nt, Artificial Sequence
  Description of Artificial Sequence: Synthetic oligonucleotide
aaauugagccuugaaggac

SEQ ID NO: 2334819 - RNA, 19 nt, Artificial Sequence
  Description of Artificial Sequence: Synthetic oligonucleotide
guuccaauccccuucauug

SEQ ID NO: 2334820 - RNA, 19 nt, Artificial Sequence
  Description of Artificial Sequence: Synthetic oligonucleotide
cauuaucucucucagcugg

SEQ ID NO: 2334821 - RNA, 19 nt, Artificial Sequence
  Description of Artificial Sequence: Synthetic oligonucleotide
auccugagcaucuuggagg

SEQ ID NO: 2334822 - RNA, 19 nt, Artificial Sequence
  Description of Artificial Sequence: Synthetic oligonucleotide
agugcauuucaccacagug

SEQ ID NO: 2334823 - RNA, 19 nt, Artificial Sequence
  Description of Artificial Sequence: Synthetic oligonucleotide
uuuaaggucucagugaggu

SEQ ID NO: 2334824 - RNA, 19 nt, Artificial Sequence
  Description of Artificial Sequence: Synthetic oligonucleotide
cauagucuuccucauaugc

SEQ ID NO: 2334825 - RNA, 19 nt, Artificial Sequence
  Description of Artificial Sequence: Synthetic oligonucleotide
ucugcuagaaauccaugug

SEQ ID NO: 2334826 - RNA, 19 nt, Artificial Sequence
  Description of Artificial Sequence: Synthetic oligonucleotide
uccuaagcccuucauggcg

SEQ ID NO: 2334827 - RNA, 19 nt, Artificial Sequence
  Description of Artificial Sequence: Synthetic oligonucleotide
uuucuauauuccucgaaca

SEQ ID NO: 2334828 - RNA, 19 nt, Artificial Sequence
  Description of Artificial Sequence: Synthetic oligonucleotide
auccgcuccagauagccgc

SEQ ID NO: 2334829 - RNA, 19 nt, Artificial Sequence
  Description of Artificial Sequence: Synthetic oligonucleotide
ugcacguugcuucucuugg

SEQ ID NO: 2334830 - RNA, 19 nt, Artificial Sequence
  Description of Artificial Sequence: Synthetic oligonucleotide
agagccaaggcauuggugu

SEQ ID NO: 2334831 - RNA, 19 nt, Artificial Sequence
  Description of Artificial Sequence: Synthetic oligonucleotide
uucuauauuccucgaacac

SEQ ID NO: 2334832 - RNA, 19 nt, Artificial Sequence
  Description of Artificial Sequence: Synthetic oligonucleotide
uacaugagggccacaauga

SEQ ID NO: 2334833 - RNA, 19 nt, Artificial Sequence
  Description of Artificial Sequence: Synthetic oligonucleotide
uauuccucgaacacucuca

SEQ ID NO: 2334834 - RNA, 19 nt, Artificial Sequence
  Description of Artificial Sequence: Synthetic oligonucleotide
uguaugguggguacaugag

SEQ ID NO: 2334835 - RNA, 19 nt, Artificial Sequence
  Description of Artificial Sequence: Synthetic oligonucleotide
guaaucugugcccaggagc

SEQ ID NO: 2334836 - RNA, 19 nt, Artificial Sequence
  Description of Artificial Sequence: Synthetic oligonucleotide
ucuugguccgagaagccag

SEQ ID NO: 2334837 - RNA, 19 nt, Artificial Sequence
  Description of Artificial Sequence: Synthetic oligonucleotide
aagacaucugcuagaaauc

SEQ ID NO: 2334838 - RNA, 19 nt, Artificial Sequence
  Description of Artificial Sequence: Synthetic oligonucleotide
acugcguguacacaggaug

SEQ ID NO: 2334839 - RNA, 19 nt, Artificial Sequence
  Description of Artificial Sequence: Synthetic oligonucleotide
cauugguguaaucugugcc

SEQ ID NO: 2334840 - RNA, 19 nt, Artificial Sequence
  Description of Artificial Sequence: Synthetic oligonucleotide
aaaugacccaccaucacgu

SEQ ID NO: 2334841 - RNA, 19 nt, Artificial Sequence
  Description of Artificial Sequence: Synthetic oligonucleotide
ucgaacacucucaucaggu

SEQ ID NO: 2334842 - RNA, 19 nt, Artificial Sequence
  Description of Artificial Sequence: Synthetic oligonucleotide
gaagcuuaucagcuaagac

SEQ ID NO: 2334843 - RNA, 19 nt, Artificial Sequence
  Description of Artificial Sequence: Synthetic oligonucleotide
ucuauauuccucgaacacu

SEQ ID NO: 2334844 - RNA, 19 nt, Artificial Sequence
  Description of Artificial Sequence: Synthetic oligonucleotide
cagaauccgcuccagauag

SEQ ID NO: 2334845 - RNA, 19 nt, Artificial Sequence
  Description of Artificial Sequence: Synthetic oligonucleotide
uuuguaguagggucucugc

SEQ ID NO: 2334846 - RNA, 19 nt, Artificial Sequence
  Description of Artificial Sequence: Synthetic oligonucleotide
uccuggguccacaaagccg

SEQ ID NO: 2334847 - RNA, 19 nt, Artificial Sequence
  Description of Artificial Sequence: Synthetic oligonucleotide
uguaaucugugcccaggag

SEQ ID NO: 2334848 - RNA, 19 nt, Artificial Sequence
  Description of Artificial Sequence: Synthetic oligonucleotide
cucaaauuugccacucagc

SEQ ID NO: 2334849 - RNA, 19 nt, Artificial Sequence
  Description of Artificial Sequence: Synthetic oligonucleotide
agucucucugcaaaguagc

SEQ ID NO: 2334850 - RNA, 19 nt, Artificial Sequence
  Description of Artificial Sequence: Synthetic oligonucleotide
gauccugagcaucuuggag

SEQ ID NO: 2334851 - RNA, 19 nt, Artificial Sequence
  Description of Artificial Sequence: Synthetic oligonucleotide
guaugguggguacaugagg

SEQ ID NO: 2334852 - RNA, 19 nt, Artificial Sequence
  Description of Artificial Sequence: Synthetic oligonucleotide
cuccagugaaccaugaguc

SEQ ID NO: 2334853 - RNA, 19 nt, Artificial Sequence
  Description of Artificial Sequence: Synthetic oligonucleotide
augagucucucaaauuugc

SEQ ID NO: 2334854 - RNA, 19 nt, Artificial Sequence
  Description of Artificial Sequence: Synthetic oligonucleotide
aucugcuagaaauccaugu

SEQ ID NO: 2334855 - RNA, 19 nt, Artificial Sequence
  Description of Artificial Sequence: Synthetic oligonucleotide
cauggauuuucucacccgc

SEQ ID NO: 2334856 - RNA, 19 nt, Artificial Sequence
  Description of Artificial Sequence: Synthetic oligonucleotide
cacaaagccgcucacauca

SEQ ID NO: 2334857 - RNA, 19 nt, Artificial Sequence
  Description of Artificial Sequence: Synthetic oligonucleotide
ugagguccuugccaaauug

SEQ ID NO: 2334858 - RNA, 19 nt, Artificial Sequence
  Description of Artificial Sequence: Synthetic oligonucleotide
cucguauuuguaugguggg

SEQ ID NO: 2334859 - RNA, 19 nt, Artificial Sequence
  Description of Artificial Sequence: Synthetic oligonucleotide
gacuuuaaggucucaguga

SEQ ID NO: 2334860 - RNA, 19 nt, Artificial Sequence
  Description of Artificial Sequence: Synthetic oligonucleotide
uccucauaugccuucauua

SEQ ID NO: 2334861 - RNA, 19 nt, Artificial Sequence
  Description of Artificial Sequence: Synthetic oligonucleotide
aauugagccuugaaggacu

SEQ ID NO: 2334862 - RNA, 19 nt, Artificial Sequence
  Description of Artificial Sequence: Synthetic oligonucleotide
cucagcugguucuuggucc

SEQ ID NO: 2334863 - RNA, 19 nt, Artificial Sequence
  Description of Artificial Sequence: Synthetic oligonucleotide
uggauuuucucacccgcug

SEQ ID NO: 2334864 - RNA, 19 nt, Artificial Sequence
  Description of Artificial Sequence: Synthetic oligonucleotide
ugagucucucaaauuugcc

SEQ ID NO: 2334865 - RNA, 19 nt, Artificial Sequence
  Description of Artificial Sequence: Synthetic oligonucleotide
aucuaugauggccugcuca

SEQ ID NO: 2334866 - RNA, 19 nt, Artificial Sequence
  Description of Artificial Sequence: Synthetic oligonucleotide
uuccgagugcauuucacca

SEQ ID NO: 2334867 - RNA, 19 nt, Artificial Sequence
  Description of Artificial Sequence: Synthetic oligonucleotide
ugcuagaaauccaugugau

SEQ ID NO: 2334868 - RNA, 19 nt, Artificial Sequence
  Description of Artificial Sequence: Synthetic oligonucleotide
uuaucagcuaagacaucug

SEQ ID NO: 2334869 - RNA, 19 nt, Artificial Sequence
  Description of Artificial Sequence: Synthetic oligonucleotide
agugagcauggccuccucc

SEQ ID NO: 2334870 - RNA, 19 nt, Artificial Sequence
  Description of Artificial Sequence: Synthetic oligonucleotide
uuguaguagggucucugca

SEQ ID NO: 2334871 - RNA, 19 nt, Artificial Sequence
  Description of Artificial Sequence: Synthetic oligonucleotide
gccaaauugagccuugaag

SEQ ID NO: 2334872 - RNA, 19 nt, Artificial Sequence
  Description of Artificial Sequence: Synthetic oligonucleotide
uuggccucguauuuguaug

SEQ ID NO: 2334873 - RNA, 19 nt, Artificial Sequence
  Description of Artificial Sequence: Synthetic oligonucleotide
cugcguguacacaggaugg

SEQ ID NO: 2334874 - RNA, 19 nt, Artificial Sequence
  Description of Artificial Sequence: Synthetic oligonucleotide
uguaguagggucucugcau

SEQ ID NO: 2334875 - RNA, 19 nt, Artificial Sequence
  Description of Artificial Sequence: Synthetic oligonucleotide
gaacacucucaucagguga

SEQ ID NO: 2334876 - RNA, 19 nt, Artificial Sequence
  Description of Artificial Sequence: Synthetic oligonucleotide
ucacccgcugcauagagau

SEQ ID NO: 2334877 - RNA, 19 nt, Artificial Sequence
  Description of Artificial Sequence: Synthetic oligonucleotide
augguggguacaugagggc

SEQ ID NO: 2334878 - RNA, 19 nt, Artificial Sequence
  Description of Artificial Sequence: Synthetic oligonucleotide
aaagccgcucacaucaucu

SEQ ID NO: 2334879 - RNA, 19 nt, Artificial Sequence
  Description of Artificial Sequence: Synthetic oligonucleotide
gaugggucagagccaaggc

SEQ ID NO: 2334880 - RNA, 19 nt, Artificial Sequence
  Description of Artificial Sequence: Synthetic oligonucleotide
ccucguauuuguauggugg

SEQ ID NO: 2334881 - RNA, 19 nt, Artificial Sequence
  Description of Artificial Sequence: Synthetic oligonucleotide
gaauccgcuccagauagcc

SEQ ID NO: 2334882 - RNA, 19 nt, Artificial Sequence
  Description of Artificial Sequence: Synthetic oligonucleotide
ugaagcuuaucagcuaaga

SEQ ID NO: 2334883 - RNA, 19 nt, Artificial Sequence
  Description of Artificial Sequence: Synthetic oligonucleotide
ugacccaccaucacguguc

SEQ ID NO: 2334884 - RNA, 19 nt, Artificial Sequence
  Description of Artificial Sequence: Synthetic oligonucleotide
uggccucguauuuguaugg

SEQ ID NO: 2334885 - RNA, 19 nt, Artificial Sequence
  Description of Artificial Sequence: Synthetic oligonucleotide
caaauugagccuugaagga

SEQ ID NO: 2334886 - RNA, 19 nt, Artificial Sequence
  Description of Artificial Sequence: Synthetic oligonucleotide
ugaugaauuucaucucauc

SEQ ID NO: 2334887 - RNA, 19 nt, Artificial Sequence
  Description of Artificial Sequence: Synthetic oligonucleotide
guauuuguaugguggguac

SEQ ID NO: 2334888 - RNA, 19 nt, Artificial Sequence
  Description of Artificial Sequence: Synthetic oligonucleotide
uuuguuccuaagcccuuca

SEQ ID NO: 2334889 - RNA, 19 nt, Artificial Sequence
  Description of Artificial Sequence: Synthetic oligonucleotide
cuuggugagcacaucuaug

SEQ ID NO: 2334890 - RNA, 19 nt, Artificial Sequence
  Description of Artificial Sequence: Synthetic oligonucleotide
uccaauccccuucauugcu

SEQ ID NO: 2334891 - RNA, 19 nt, Artificial Sequence
  Description of Artificial Sequence: Synthetic oligonucleotide
aagccgcucacaucaucuc

SEQ ID NO: 2334892 - RNA, 19 nt, Artificial Sequence
  Description of Artificial Sequence: Synthetic oligonucleotide
cuucauugcuuuguaguag

SEQ ID NO: 2334893 - RNA, 19 nt, Artificial Sequence
  Description of Artificial Sequence: Synthetic oligonucleotide
ugguucuugguccgagaag

SEQ ID NO: 2334894 - RNA, 19 nt, Artificial Sequence
  Description of Artificial Sequence: Synthetic oligonucleotide
ucauugguuccaauccccu

SEQ ID NO: 2334895 - RNA, 19 nt, Artificial Sequence
  Description of Artificial Sequence: Synthetic oligonucleotide
uuccaauccccuucauugc

SEQ ID NO: 2334896 - RNA, 19 nt, Artificial Sequence
  Description of Artificial Sequence: Synthetic oligonucleotide
acaugagggccacaaugag

SEQ ID NO: 2334897 - RNA, 19 nt, Artificial Sequence
  Description of Artificial Sequence: Synthetic oligonucleotide
guuagacccauagucuucc

SEQ ID NO: 2334898 - RNA, 19 nt, Artificial Sequence
  Description of Artificial Sequence: Synthetic oligonucleotide
ccagguuagacccauaguc

SEQ ID NO: 2334899 - RNA, 19 nt, Artificial Sequence
  Description of Artificial Sequence: Synthetic oligonucleotide
aaccaugagucucacucuu

SEQ ID NO: 2334900 - RNA, 19 nt, Artificial Sequence
  Description of Artificial Sequence: Synthetic oligonucleotide
ugaccccuucuuuuguucc

SEQ ID NO: 2334901 - RNA, 19 nt, Artificial Sequence
  Description of Artificial Sequence: Synthetic oligonucleotide
ggugagcacaucuaugaug

SEQ ID NO: 2334902 - RNA, 19 nt, Artificial Sequence
  Description of Artificial Sequence: Synthetic oligonucleotide
guacacaggauggugauga

SEQ ID NO: 2334903 - RNA, 19 nt, Artificial Sequence
  Description of Artificial Sequence: Synthetic oligonucleotide
cucgaacacucucaucagg

SEQ ID NO: 2334904 - RNA, 19 nt, Artificial Sequence
  Description of Artificial Sequence: Synthetic oligonucleotide
ucucacccgcugcauagag

SEQ ID NO: 2334905 - RNA, 19 nt, Artificial Sequence
  Description of Artificial Sequence: Synthetic oligonucleotide
uugguuccaauccccuuca

SEQ ID NO: 2334906 - RNA, 19 nt, Artificial Sequence
  Description of Artificial Sequence: Synthetic oligonucleotide
aaugacccaccaucacgug

SEQ ID NO: 2334907 - RNA, 19 nt, Artificial Sequence
  Description of Artificial Sequence: Synthetic oligonucleotide
cucauaugccuucauuauc

SEQ ID NO: 2334908 - RNA, 19 nt, Artificial Sequence
  Description of Artificial Sequence: Synthetic oligonucleotide
uucauggcgucaugcagcu

SEQ ID NO: 2334909 - RNA, 19 nt, Artificial Sequence
  Description of Artificial Sequence: Synthetic oligonucleotide
agcuaagacaucugcuaga

SEQ ID NO: 2334910 - RNA, 19 nt, Artificial Sequence
  Description of Artificial Sequence: Synthetic oligonucleotide
ugaguagaugggucagagc

SEQ ID NO: 2334911 - RNA, 19 nt, Artificial Sequence
  Description of Artificial Sequence: Synthetic oligonucleotide
aucacgugucccugcuccc

SEQ ID NO: 2334912 - RNA, 19 nt, Artificial Sequence
  Description of Artificial Sequence: Synthetic oligonucleotide
gaauuucaucucaucaguc

SEQ ID NO: 2334913 - RNA, 19 nt, Artificial Sequence
  Description of Artificial Sequence: Synthetic oligonucleotide
agcacaucuaugauggccu

SEQ ID NO: 2334914 - RNA, 19 nt, Artificial Sequence
  Description of Artificial Sequence: Synthetic oligonucleotide
gcuugugucugcuuggaug

SEQ ID NO: 2334915 - RNA, 19 nt, Artificial Sequence
  Description of Artificial Sequence: Synthetic oligonucleotide
cugcaaaguagcuguggag

SEQ ID NO: 2334916 - RNA, 19 nt, Artificial Sequence
  Description of Artificial Sequence: Synthetic oligonucleotide
ucucaucagucccauggau

SEQ ID NO: 2334917 - RNA, 19 nt, Artificial Sequence
  Description of Artificial Sequence: Synthetic oligonucleotide
uccagguuagacccauagu

SEQ ID NO: 2334918 - RNA, 19 nt, Artificial Sequence
  Description of Artificial Sequence: Synthetic oligonucleotide
ugguggguacaugagggcc

SEQ ID NO: 2334919 - RNA, 19 nt, Artificial Sequence
  Description of Artificial Sequence: Synthetic oligonucleotide
cugcuagaaauccauguga

SEQ ID NO: 2334920 - RNA, 19 nt, Artificial Sequence
  Description of Artificial Sequence: Synthetic oligonucleotide
auagagauccugagcaucu

SEQ ID NO: 2334921 - RNA, 19 nt, Artificial Sequence
  Description of Artificial Sequence: Synthetic oligonucleotide
uccagugaaccaugagucu

SEQ ID NO: 2334922 - RNA, 19 nt, Artificial Sequence
  Description of Artificial Sequence: Synthetic oligonucleotide
gucccauggauuuucucac

SEQ ID NO: 2334923 - RNA, 19 nt, Artificial Sequence
  Description of Artificial Sequence: Synthetic oligonucleotide
uugguguaaucugugccca

SEQ ID NO: 2334924 - RNA, 19 nt, Artificial Sequence
  Description of Artificial Sequence: Synthetic oligonucleotide
uggcugaguagauggguca

SEQ ID NO: 2334925 - RNA, 19 nt, Artificial Sequence
  Description of Artificial Sequence: Synthetic oligonucleotide
aaguagcuguggagguucc

SEQ ID NO: 2334926 - RNA, 19 nt, Artificial Sequence
  Description of Artificial Sequence: Synthetic oligonucleotide
uccgagugcauuucaccac

SEQ ID NO: 2334927 - RNA, 19 nt, Artificial Sequence
  Description of Artificial Sequence: Synthetic oligonucleotide
uauuuguaugguggguaca

SEQ ID NO: 2334928 - RNA, 19 nt, Artificial Sequence
  Description of Artificial Sequence: Synthetic oligonucleotide
aauccgcuccagauagccg

SEQ ID NO: 2334929 - RNA, 19 nt, Artificial Sequence
  Description of Artificial Sequence: Synthetic oligonucleotide
guagggucucugcaucagg

SEQ ID NO: 2334930 - RNA, 19 nt, Artificial Sequence
  Description of Artificial Sequence: Synthetic oligonucleotide
uucauggcguaguggaguc

SEQ ID NO: 2334931 - RNA, 19 nt, Artificial Sequence
  Description of Artificial Sequence: Synthetic oligonucleotide
uuuucucacccgcugcaua

SEQ ID NO: 2334932 - RNA, 19 nt, Artificial Sequence
  Description of Artificial Sequence: Synthetic oligonucleotide
uccuccagugaaccaugag

SEQ ID NO: 2334933 - RNA, 19 nt, Artificial Sequence
  Description of Artificial Sequence: Synthetic oligonucleotide
gaggaagaaaugacccacc

SEQ ID NO: 2334934 - RNA, 19 nt, Artificial Sequence
  Description of Artificial Sequence: Synthetic oligonucleotide
agguuagacccauagucuu

SEQ ID NO: 2334935 - RNA, 19 nt, Artificial Sequence
  Description of Artificial Sequence: Synthetic oligonucleotide
ugccucugcacguugcuuc

SEQ ID NO: 2334936 - RNA, 19 nt, Artificial Sequence
  Description of Artificial Sequence: Synthetic oligonucleotide
uuuguaugguggguacaug

SEQ ID NO: 2334937 - RNA, 19 nt, Artificial Sequence
  Description of Artificial Sequence: Synthetic oligonucleotide
aucucaucagucccaugga

SEQ ID NO: 2334938 - RNA, 19 nt, Artificial Sequence
  Description of Artificial Sequence: Synthetic oligonucleotide
cuugccaaauugagccuug

SEQ ID NO: 2334939 - RNA, 19 nt, Artificial Sequence
  Description of Artificial Sequence: Synthetic oligonucleotide
ugugucugcuuggaugucu

SEQ ID NO: 2334940 - RNA, 19 nt, Artificial Sequence
  Description of Artificial Sequence: Synthetic oligonucleotide
uaguagggucucugcauca

SEQ ID NO: 2334941 - RNA, 19 nt, Artificial Sequence
  Description of Artificial Sequence: Synthetic oligonucleotide
caucugcuagaaauccaug

SEQ ID NO: 2334942 - RNA, 19 nt, Artificial Sequence
  Description of Artificial Sequence: Synthetic oligonucleotide
ucucugcaaaguagcugug

SEQ ID NO: 2334943 - RNA, 19 nt, Artificial Sequence
  Description of Artificial Sequence: Synthetic oligonucleotide
agguccuugccaaauugag

SEQ ID NO: 2334944 - RNA, 19 nt, Artificial Sequence
  Description of Artificial Sequence: Synthetic oligonucleotide
cacguugcuucucuuggug

SEQ ID NO: 2334945 - RNA, 19 nt, Artificial Sequence
  Description of Artificial Sequence: Synthetic oligonucleotide
uggagggccaguccugggu

SEQ ID NO: 2334946 - RNA, 19 nt, Artificial Sequence
  Description of Artificial Sequence: Synthetic oligonucleotide
auuccucgaacacucucau

SEQ ID NO: 2334947 - RNA, 19 nt, Artificial Sequence
  Description of Artificial Sequence: Synthetic oligonucleotide
agugaaccaugagucucac

SEQ ID NO: 2334948 - RNA, 19 nt, Artificial Sequence
  Description of Artificial Sequence: Synthetic oligonucleotide
uugccacucagcucugacu

SEQ ID NO: 2334949 - RNA, 19 nt, Artificial Sequence
  Description of Artificial Sequence: Synthetic oligonucleotide
caccacagugagcauggcc

SEQ ID NO: 2334950 - RNA, 19 nt, Artificial Sequence
  Description of Artificial Sequence: Synthetic oligonucleotide
ucccauggauuuucucacc

SEQ ID NO: 2334951 - RNA, 19 nt, Artificial Sequence
  Description of Artificial Sequence: Synthetic oligonucleotide
ucucucaaauuugccacuc

SEQ ID NO: 2334952 - RNA, 19 nt, Artificial Sequence
  Description of Artificial Sequence: Synthetic oligonucleotide
uguacacaggauggugaug

SEQ ID NO: 2334953 - RNA, 19 nt, Artificial Sequence
  Description of Artificial Sequence: Synthetic oligonucleotide
uuuuguuccuaagcccuuc

SEQ ID NO: 2334954 - RNA, 19 nt, Artificial Sequence
  Description of Artificial Sequence: Synthetic oligonucleotide
ugccaaauugagccuugaa

SEQ ID NO: 2334955 - RNA, 19 nt, Artificial Sequence
  Description of Artificial Sequence: Synthetic oligonucleotide
gguguaaucugugcccagg

SEQ ID NO: 2334956 - RNA, 19 nt, Artificial Sequence
  Description of Artificial Sequence: Synthetic oligonucleotide
acguugcuucucuugguga

SEQ ID NO: 2334957 - RNA, 19 nt, Artificial Sequence
  Description of Artificial Sequence: Synthetic oligonucleotide
ucucaaugaugaccccuuc

SEQ ID NO: 2334958 - RNA, 19 nt, Artificial Sequence
  Description of Artificial Sequence: Synthetic oligonucleotide
cucaucaggugaguggcac

SEQ ID NO: 2334959 - RNA, 19 nt, Artificial Sequence
  Description of Artificial Sequence: Synthetic oligonucleotide
ucguauuuguauggugggu

SEQ ID NO: 2334960 - RNA, 19 nt, Artificial Sequence
  Description of Artificial Sequence: Synthetic oligonucleotide
caaugagucucucaaauuu

SEQ ID NO: 2334961 - RNA, 19 nt, Artificial Sequence
  Description of Artificial Sequence: Synthetic oligonucleotide
cuuggagggccaguccugg

SEQ ID NO: 2334962 - RNA, 19 nt, Artificial Sequence
  Description of Artificial Sequence: Synthetic oligonucleotide
aguagggucucugcaucag

SEQ ID NO: 2334963 - RNA, 19 nt, Artificial Sequence
  Description of Artificial Sequence: Synthetic oligonucleotide
ucucaucaggugaguggca

SEQ ID NO: 2334964 - RNA, 19 nt, Artificial Sequence
  Description of Artificial Sequence: Synthetic oligonucleotide
ugguguaaucugugcccag

SEQ ID NO: 2334965 - RNA, 19 nt, Artificial Sequence
  Description of Artificial Sequence: Synthetic oligonucleotide
caucuuggagggccagucc

SEQ ID NO: 2334966 - RNA, 19 nt, Artificial Sequence
  Description of Artificial Sequence: Synthetic oligonucleotide
gcucauugguuccaauccc

SEQ ID NO: 2334967 - RNA, 19 nt, Artificial Sequence
  Description of Artificial Sequence: Synthetic oligonucleotide
gucuucuuccagguuagac

SEQ ID NO: 2334968 - RNA, 19 nt, Artificial Sequence
  Description of Artificial Sequence: Synthetic oligonucleotide
ggaggcacaccagaauccg

SEQ ID NO: 2334969 - RNA, 19 nt, Artificial Sequence
  Description of Artificial Sequence: Synthetic oligonucleotide
ccagauagccgcuuguguc

SEQ ID NO: 2334970 - RNA, 19 nt, Artificial Sequence
  Description of Artificial Sequence: Synthetic oligonucleotide
uuguuccuaagcccuucau

SEQ ID NO: 2334971 - RNA, 19 nt, Artificial Sequence
  Description of Artificial Sequence: Synthetic oligonucleotide
cauggcguaguggagucuc

SEQ ID NO: 2334972 - RNA, 19 nt, Artificial Sequence
  Description of Artificial Sequence: Synthetic oligonucleotide
ugagcacaucuaugauggc

SEQ ID NO: 2334973 - RNA, 19 nt, Artificial Sequence
  Description of Artificial Sequence: Synthetic oligonucleotide
guguaaucugugcccagga

SEQ ID NO: 2334974 - RNA, 19 nt, Artificial Sequence
  Description of Artificial Sequence: Synthetic oligonucleotide
uucaucucaucagucccau

SEQ ID NO: 2334975 - RNA, 19 nt, Artificial Sequence
  Description of Artificial Sequence: Synthetic oligonucleotide
cacaggauggugaugaauu

SEQ ID NO: 2334976 - RNA, 19 nt, Artificial Sequence
  Description of Artificial Sequence: Synthetic oligonucleotide
cuccaaacacccuggcuga

SEQ ID NO: 2334977 - RNA, 19 nt, Artificial Sequence
  Description of Artificial Sequence: Synthetic oligonucleotide
agugagguccuugccaaau

SEQ ID NO: 2334978 - RNA, 19 nt, Artificial Sequence
  Description of Artificial Sequence: Synthetic oligonucleotide
agaauccgcuccagauagc

SEQ ID NO: 2334979 - RNA, 19 nt, Artificial Sequence
  Description of Artificial Sequence: Synthetic oligonucleotide
cagguuagacccauagucu

SEQ ID NO: 2334980 - RNA, 19 nt, Artificial Sequence
  Description of Artificial Sequence: Synthetic oligonucleotide
gagguccuugccaaauuga

SEQ ID NO: 2334981 - RNA, 19 nt, Artificial Sequence
  Description of Artificial Sequence: Synthetic oligonucleotide
gauagccgcuugugucugc

SEQ ID NO: 2334982 - RNA, 19 nt, Artificial Sequence
  Description of Artificial Sequence: Synthetic oligonucleotide
cacaucuaugauggccugc

SEQ ID NO: 2334983 - RNA, 19 nt, Artificial Sequence
  Description of Artificial Sequence: Synthetic oligonucleotide
gagggccacaaugagucuc

SEQ ID NO: 2334984 - RNA, 19 nt, Artificial Sequence
  Description of Artificial Sequence: Synthetic oligonucleotide
cugacuuuaaggucucagu

SEQ ID NO: 2334985 - RNA, 19 nt, Artificial Sequence
  Description of Artificial Sequence: Synthetic oligonucleotide
uuagacccauagucuuccu

SEQ ID NO: 2334986 - RNA, 19 nt, Artificial Sequence
  Description of Artificial Sequence: Synthetic oligonucleotide
guagaugggucagagccaa

SEQ ID NO: 2334987 - RNA, 19 nt, Artificial Sequence
  Description of Artificial Sequence: Synthetic oligonucleotide
aggagcuuuugugggagga

SEQ ID NO: 2334988 - RNA, 19 nt, Artificial Sequence
  Description of Artificial Sequence: Synthetic oligonucleotide
ugcguguacacaggauggu

SEQ ID NO: 2334989 - RNA, 19 nt, Artificial Sequence
  Description of Artificial Sequence: Synthetic oligonucleotide
aagcccuucauggcgucau

SEQ ID NO: 2334990 - RNA, 19 nt, Artificial Sequence
  Description of Artificial Sequence: Synthetic oligonucleotide
uccccuucauugcuuugua

SEQ ID NO: 2334991 - RNA, 19 nt, Artificial Sequence
  Description of Artificial Sequence: Synthetic oligonucleotide
gcuagaaauccaugugauc

SEQ ID NO: 2334992 - RNA, 19 nt, Artificial Sequence
  Description of Artificial Sequence: Synthetic oligonucleotide
agauagccgcuugugucug

SEQ ID NO: 2334993 - RNA, 19 nt, Artificial Sequence
  Description of Artificial Sequence: Synthetic oligonucleotide
aauuugccacucagcucug

SEQ ID NO: 2334994 - RNA, 19 nt, Artificial Sequence
  Description of Artificial Sequence: Synthetic oligonucleotide
auuaucucucucagcuggu

SEQ ID NO: 2334995 - RNA, 19 nt, Artificial Sequence
  Description of Artificial Sequence: Synthetic oligonucleotide
agcuuuugugggaggaaga

SEQ ID NO: 2334996 - RNA, 19 nt, Artificial Sequence
  Description of Artificial Sequence: Synthetic oligonucleotide
cuccagauagccgcuugug

SEQ ID NO: 2334997 - RNA, 19 nt, Artificial Sequence
  Description of Artificial Sequence: Synthetic oligonucleotide
agguuccgagugcauuuca

SEQ ID NO: 2334998 - RNA, 19 nt, Artificial Sequence
  Description of Artificial Sequence: Synthetic oligonucleotide
caaacacccuggcugagua

SEQ ID NO: 2334999 - RNA, 19 nt, Artificial Sequence
  Description of Artificial Sequence: Synthetic oligonucleotide
uccaaacacccuggcugag

SEQ ID NO: 2335000 - RNA, 19 nt, Artificial Sequence
  Description of Artificial Sequence: Synthetic oligonucleotide
gggaggaagaaaugaccca

SEQ ID NO: 2335001 - RNA, 19 nt, Artificial Sequence
  Description of Artificial Sequence: Synthetic oligonucleotide
acgugucccugcucccuuc

SEQ ID NO: 2335002 - RNA, 19 nt, Artificial Sequence
  Description of Artificial Sequence: Synthetic oligonucleotide
cugguucuugguccgagaa

SEQ ID NO: 2335003 - RNA, 19 nt, Artificial Sequence
  Description of Artificial Sequence: Synthetic oligonucleotide
uuaucucucucagcugguu

SEQ ID NO: 2335004 - RNA, 19 nt, Artificial Sequence
  Description of Artificial Sequence: Synthetic oligonucleotide
gaggcacaccagaauccgc

SEQ ID NO: 2335005 - RNA, 19 nt, Artificial Sequence
  Description of Artificial Sequence: Synthetic oligonucleotide
agcugguucuugguccgag

SEQ ID NO: 2335006 - RNA, 19 nt, Artificial Sequence
  Description of Artificial Sequence: Synthetic oligonucleotide
gcguaguggagucucucug

SEQ ID NO: 2335007 - RNA, 19 nt, Artificial Sequence
  Description of Artificial Sequence: Synthetic oligonucleotide
caugagggccacaaugagu

SEQ ID NO: 2335008 - RNA, 19 nt, Artificial Sequence
  Description of Artificial Sequence: Synthetic oligonucleotide
uggagguuccgagugcauu

SEQ ID NO: 2335009 - RNA, 19 nt, Artificial Sequence
  Description of Artificial Sequence: Synthetic oligonucleotide
auagccgcuugugucugcu

SEQ ID NO: 2335010 - RNA, 19 nt, Artificial Sequence
  Description of Artificial Sequence: Synthetic oligonucleotide
cguaguggagucucucugc

SEQ ID NO: 2335011 - RNA, 19 nt, Artificial Sequence
  Description of Artificial Sequence: Synthetic oligonucleotide
acccaccaucacguguccc

SEQ ID NO: 2335012 - RNA, 19 nt, Artificial Sequence
  Description of Artificial Sequence: Synthetic oligonucleotide
cagauagccgcuugugucu

SEQ ID NO: 2335013 - RNA, 19 nt, Artificial Sequence
  Description of Artificial Sequence: Synthetic oligonucleotide
cuaagcccuucauggcguc

SEQ ID NO: 2335014 - RNA, 19 nt, Artificial Sequence
  Description of Artificial Sequence: Synthetic oligonucleotide
gcuauccucaaugcucuug

SEQ ID NO: 2335015 - RNA, 19 nt, Artificial Sequence
  Description of Artificial Sequence: Synthetic oligonucleotide
ucccugcucccuucauggc

SEQ ID NO: 2335016 - RNA, 19 nt, Artificial Sequence
  Description of Artificial Sequence: Synthetic oligonucleotide
gcuaagacaucugcuagaa

SEQ ID NO: 2335017 - RNA, 19 nt, Artificial Sequence
  Description of Artificial Sequence: Synthetic oligonucleotide
uaagcccuucauggcguca

SEQ ID NO: 2335018 - RNA, 19 nt, Artificial Sequence
  Description of Artificial Sequence: Synthetic oligonucleotide
gagguuccgagugcauuuc

SEQ ID NO: 2335019 - RNA, 19 nt, Artificial Sequence
  Description of Artificial Sequence: Synthetic oligonucleotide
uucucacccgcugcauaga

SEQ ID NO: 2335020 - RNA, 19 nt, Artificial Sequence
  Description of Artificial Sequence: Synthetic oligonucleotide
accaugagucucacucuug

SEQ ID NO: 2335021 - RNA, 19 nt, Artificial Sequence
  Description of Artificial Sequence: Synthetic oligonucleotide
gccucguauuuguauggug

SEQ ID NO: 2335022 - RNA, 19 nt, Artificial Sequence
  Description of Artificial Sequence: Synthetic oligonucleotide
acaccagaauccgcuccag

SEQ ID NO: 2335023 - RNA, 19 nt, Artificial Sequence
  Description of Artificial Sequence: Synthetic oligonucleotide
ggcacugcguguacacagg

SEQ ID NO: 2335024 - RNA, 19 nt, Artificial Sequence
  Description of Artificial Sequence: Synthetic oligonucleotide
ucugcacguugcuucucuu

SEQ ID NO: 2335025 - RNA, 19 nt, Artificial Sequence
  Description of Artificial Sequence: Synthetic oligonucleotide
cuuggccucguauuuguau

SEQ ID NO: 2335026 - RNA, 19 nt, Artificial Sequence
  Description of Artificial Sequence: Synthetic oligonucleotide
caucuaugauggccugcuc

SEQ ID NO: 2335027 - RNA, 19 nt, Artificial Sequence
  Description of Artificial Sequence: Synthetic oligonucleotide
ccucgaacacucucaucag

SEQ ID NO: 2335028 - RNA, 19 nt, Artificial Sequence
  Description of Artificial Sequence: Synthetic oligonucleotide
gguuagacccauagucuuc

SEQ ID NO: 2335029 - RNA, 19 nt, Artificial Sequence
  Description of Artificial Sequence: Synthetic oligonucleotide
ggagucucucugcaaagua

SEQ ID NO: 2335030 - RNA, 19 nt, Artificial Sequence
  Description of Artificial Sequence: Synthetic oligonucleotide
gaugaccccuucuuuuguu

SEQ ID NO: 2335031 - RNA, 19 nt, Artificial Sequence
  Description of Artificial Sequence: Synthetic oligonucleotide
gagugcauuucaccacagu

SEQ ID NO: 2335032 - RNA, 19 nt, Artificial Sequence
  Description of Artificial Sequence: Synthetic oligonucleotide
ucauggcguaguggagucu

SEQ ID NO: 2335033 - RNA, 19 nt, Artificial Sequence
  Description of Artificial Sequence: Synthetic oligonucleotide
ggucagagccaaggcauug

SEQ ID NO: 2335034 - RNA, 19 nt, Artificial Sequence
  Description of Artificial Sequence: Synthetic oligonucleotide
guguacacaggauggugau

SEQ ID NO: 2335035 - RNA, 19 nt, Artificial Sequence
  Description of Artificial Sequence: Synthetic oligonucleotide
gugaguggcacugcgugua

SEQ ID NO: 2335036 - RNA, 19 nt, Artificial Sequence
  Description of Artificial Sequence: Synthetic oligonucleotide
cauugcuuuguaguagggu

SEQ ID NO: 2335037 - RNA, 19 nt, Artificial Sequence
  Description of Artificial Sequence: Synthetic oligonucleotide
agccaaggcauugguguaa

SEQ ID NO: 2335038 - RNA, 19 nt, Artificial Sequence
  Description of Artificial Sequence: Synthetic oligonucleotide
gguuccgagugcauuucac

SEQ ID NO: 2335039 - RNA, 19 nt, Artificial Sequence
  Description of Artificial Sequence: Synthetic oligonucleotide
uggcguaguggagucucuc

SEQ ID NO: 2335040 - RNA, 19 nt, Artificial Sequence
  Description of Artificial Sequence: Synthetic oligonucleotide
ugcucccuucauggcguag

SEQ ID NO: 2335041 - RNA, 19 nt, Artificial Sequence
  Description of Artificial Sequence: Synthetic oligonucleotide
gcacaucuaugauggccug

SEQ ID NO: 2335042 - RNA, 19 nt, Artificial Sequence
  Description of Artificial Sequence: Synthetic oligonucleotide
gguggguacaugagggcca

SEQ ID NO: 2335043 - RNA, 19 nt, Artificial Sequence
  Description of Artificial Sequence: Synthetic oligonucleotide
cucacccgcugcauagaga

SEQ ID NO: 2335044 - RNA, 19 nt, Artificial Sequence
  Description of Artificial Sequence: Synthetic oligonucleotide
gaccccuucuuuuguuccu

SEQ ID NO: 2335045 - RNA, 19 nt, Artificial Sequence
  Description of Artificial Sequence: Synthetic oligonucleotide
ccaugagucucacucuuga

SEQ ID NO: 2335046 - RNA, 19 nt, Artificial Sequence
  Description of Artificial Sequence: Synthetic oligonucleotide
gagucucacucuugaugcu

SEQ ID NO: 2335047 - RNA, 19 nt, Artificial Sequence
  Description of Artificial Sequence: Synthetic oligonucleotide
ugguuccaauccccuucau

SEQ ID NO: 2335048 - RNA, 19 nt, Artificial Sequence
  Description of Artificial Sequence: Synthetic oligonucleotide
gcguguacacaggauggug

SEQ ID NO: 2335049 - RNA, 19 nt, Artificial Sequence
  Description of Artificial Sequence: Synthetic oligonucleotide
auuugccacucagcucuga

SEQ ID NO: 2335050 - RNA, 19 nt, Artificial Sequence
  Description of Artificial Sequence: Synthetic oligonucleotide
gccgcucacaucaucucug

SEQ ID NO: 2335051 - RNA, 19 nt, Artificial Sequence
  Description of Artificial Sequence: Synthetic oligonucleotide
cccuucauugcuuuguagu

SEQ ID NO: 2335052 - RNA, 19 nt, Artificial Sequence
  Description of Artificial Sequence: Synthetic oligonucleotide
cacccuggcugaguagaug

SEQ ID NO: 2335053 - RNA, 19 nt, Artificial Sequence
  Description of Artificial Sequence: Synthetic oligonucleotide
gcaucuuggagggccaguc

SEQ ID NO: 2335054 - RNA, 19 nt, Artificial Sequence
  Description of Artificial Sequence: Synthetic oligonucleotide
cgaacacucucaucaggug

SEQ ID NO: 2335055 - RNA, 19 nt, Artificial Sequence
  Description of Artificial Sequence: Synthetic oligonucleotide
gacccauagucuuccucau

SEQ ID NO: 2335056 - RNA, 19 nt, Artificial Sequence
  Description of Artificial Sequence: Synthetic oligonucleotide
ggaagaaaugacccaccau

SEQ ID NO: 2335057 - RNA, 19 nt, Artificial Sequence
  Description of Artificial Sequence: Synthetic oligonucleotide
uugugucugcuuggauguc

SEQ ID NO: 2335058 - RNA, 19 nt, Artificial Sequence
  Description of Artificial Sequence: Synthetic oligonucleotide
gaguggcacugcguguaca

SEQ ID NO: 2335059 - RNA, 19 nt, Artificial Sequence
  Description of Artificial Sequence: Synthetic oligonucleotide
ccgcucacaucaucucugc

SEQ ID NO: 2335060 - RNA, 19 nt, Artificial Sequence
  Description of Artificial Sequence: Synthetic oligonucleotide
caaugaugaccccuucuuu

SEQ ID NO: 2335061 - RNA, 19 nt, Artificial Sequence
  Description of Artificial Sequence: Synthetic oligonucleotide
caccagaauccgcuccaga

SEQ ID NO: 2335062 - RNA, 19 nt, Artificial Sequence
  Description of Artificial Sequence: Synthetic oligonucleotide
ugcuauccucaaugcucuu

SEQ ID NO: 2335063 - RNA, 19 nt, Artificial Sequence
  Description of Artificial Sequence: Synthetic oligonucleotide
cuccuccagugaaccauga

SEQ ID NO: 2335064 - RNA, 19 nt, Artificial Sequence
  Description of Artificial Sequence: Synthetic oligonucleotide
ccgagugcauuucaccaca

SEQ ID NO: 2335065 - RNA, 19 nt, Artificial Sequence
  Description of Artificial Sequence: Synthetic oligonucleotide
ggagguuccgagugcauuu

SEQ ID NO: 2335066 - RNA, 19 nt, Artificial Sequence
  Description of Artificial Sequence: Synthetic oligonucleotide
gcacugcguguacacagga

SEQ ID NO: 2335067 - RNA, 19 nt, Artificial Sequence
  Description of Artificial Sequence: Synthetic oligonucleotide
cccauagucuuccucauau

SEQ ID NO: 2335068 - RNA, 19 nt, Artificial Sequence
  Description of Artificial Sequence: Synthetic oligonucleotide
caugagucucacucuugau

SEQ ID NO: 2335069 - RNA, 19 nt, Artificial Sequence
  Description of Artificial Sequence: Synthetic oligonucleotide
auggcgucaugcagcuccu

SEQ ID NO: 2335070 - RNA, 19 nt, Artificial Sequence
  Description of Artificial Sequence: Synthetic oligonucleotide
accccuucuuuuguuccua

SEQ ID NO: 2335071 - RNA, 19 nt, Artificial Sequence
  Description of Artificial Sequence: Synthetic oligonucleotide
auggcguaguggagucucu

SEQ ID NO: 2335072 - RNA, 19 nt, Artificial Sequence
  Description of Artificial Sequence: Synthetic oligonucleotide
acaaagccgcucacaucau

SEQ ID NO: 2335073 - RNA, 19 nt, Artificial Sequence
  Description of Artificial Sequence: Synthetic oligonucleotide
cacccgcugcauagagauc

SEQ ID NO: 2335074 - RNA, 19 nt, Artificial Sequence
  Description of Artificial Sequence: Synthetic oligonucleotide
ccucauaugccuucauuau

SEQ ID NO: 2335075 - RNA, 19 nt, Artificial Sequence
  Description of Artificial Sequence: Synthetic oligonucleotide
cacucagcucugacuuuaa

SEQ ID NO: 2335076 - RNA, 19 nt, Artificial Sequence
  Description of Artificial Sequence: Synthetic oligonucleotide
ggcguaguggagucucucu

SEQ ID NO: 2335077 - RNA, 19 nt, Artificial Sequence
  Description of Artificial Sequence: Synthetic oligonucleotide
cauugguuccaauccccuu

SEQ ID NO: 2335078 - RNA, 19 nt, Artificial Sequence
  Description of Artificial Sequence: Synthetic oligonucleotide
gguuccaauccccuucauu

SEQ ID NO: 2335079 - RNA, 19 nt, Artificial Sequence
  Description of Artificial Sequence: Synthetic oligonucleotide
ccagaauccgcuccagaua

SEQ ID NO: 2335080 - RNA, 19 nt, Artificial Sequence
  Description of Artificial Sequence: Synthetic oligonucleotide
ggugaguggcacugcgugu

SEQ ID NO: 2335081 - RNA, 19 nt, Artificial Sequence
  Description of Artificial Sequence: Synthetic oligonucleotide
gucucacucuugaugcuau

SEQ ID NO: 2335082 - RNA, 19 nt, Artificial Sequence
  Description of Artificial Sequence: Synthetic oligonucleotide
uggguacaugagggccaca

SEQ ID NO: 2335083 - RNA, 19 nt, Artificial Sequence
  Description of Artificial Sequence: Synthetic oligonucleotide
uagccgcuugugucugcuu

SEQ ID NO: 2335084 - RNA, 19 nt, Artificial Sequence
  Description of Artificial Sequence: Synthetic oligonucleotide
gugaaccaugagucucacu

SEQ ID NO: 2335085 - RNA, 19 nt, Artificial Sequence
  Description of Artificial Sequence: Synthetic oligonucleotide
caggugaguggcacugcgu

SEQ ID NO: 2335086 - RNA, 19 nt, Artificial Sequence
  Description of Artificial Sequence: Synthetic oligonucleotide
gugagguccuugccaaauu

SEQ ID NO: 2335087 - RNA, 19 nt, Artificial Sequence
  Description of Artificial Sequence: Synthetic oligonucleotide
acacccuggcugaguagau

SEQ ID NO: 2335088 - RNA, 19 nt, Artificial Sequence
  Description of Artificial Sequence: Synthetic oligonucleotide
ccuaagcccuucauggcgu

SEQ ID NO: 2335089 - RNA, 19 nt, Artificial Sequence
  Description of Artificial Sequence: Synthetic oligonucleotide
gcugcccugcaggaggcac

SEQ ID NO: 2335090 - RNA, 19 nt, Artificial Sequence
  Description of Artificial Sequence: Synthetic oligonucleotide
gcucugacuuuaaggucuc

SEQ ID NO: 2335091 - RNA, 19 nt, Artificial Sequence
  Description of Artificial Sequence: Synthetic oligonucleotide
ucauggcgucaugcagcuc

SEQ ID NO: 2335092 - RNA, 19 nt, Artificial Sequence
  Description of Artificial Sequence: Synthetic oligonucleotide
cagugagguccuugccaaa

SEQ ID NO: 2335093 - RNA, 19 nt, Artificial Sequence
  Description of Artificial Sequence: Synthetic oligonucleotide
cacugcguguacacaggau

SEQ ID NO: 2335094 - RNA, 19 nt, Artificial Sequence
  Description of Artificial Sequence: Synthetic oligonucleotide
cuuccagguuagacccaua

SEQ ID NO: 2335095 - RNA, 19 nt, Artificial Sequence
  Description of Artificial Sequence: Synthetic oligonucleotide
gcuccagauagccgcuugu

SEQ ID NO: 2335096 - RNA, 19 nt, Artificial Sequence
  Description of Artificial Sequence: Synthetic oligonucleotide
gcacguugcuucucuuggu

SEQ ID NO: 2335097 - RNA, 19 nt, Artificial Sequence
  Description of Artificial Sequence: Synthetic oligonucleotide
ccaucacgugucccugcuc

SEQ ID NO: 2335098 - RNA, 19 nt, Artificial Sequence
  Description of Artificial Sequence: Synthetic oligonucleotide
gcucccuucauggcguagu

SEQ ID NO: 2335099 - RNA, 19 nt, Artificial Sequence
  Description of Artificial Sequence: Synthetic oligonucleotide
ggauggugaugaauuucau

SEQ ID NO: 2335100 - RNA, 19 nt, Artificial Sequence
  Description of Artificial Sequence: Synthetic oligonucleotide
ccucaaugcucuuguuggu

SEQ ID NO: 2335101 - RNA, 19 nt, Artificial Sequence
  Description of Artificial Sequence: Synthetic oligonucleotide
cuaugauggccugcucauu

SEQ ID NO: 2335102 - RNA, 19 nt, Artificial Sequence
  Description of Artificial Sequence: Synthetic oligonucleotide
cagcuccuuggccucguau

SEQ ID NO: 2335103 - RNA, 19 nt, Artificial Sequence
  Description of Artificial Sequence: Synthetic oligonucleotide
ggccucguauuuguauggu

SEQ ID NO: 2335104 - RNA, 19 nt, Artificial Sequence
  Description of Artificial Sequence: Synthetic oligonucleotide
ccgcugcauagagauccug

SEQ ID NO: 2335105 - RNA, 19 nt, Artificial Sequence
  Description of Artificial Sequence: Synthetic oligonucleotide
cagcugguucuugguccga

SEQ ID NO: 2335106 - RNA, 19 nt, Artificial Sequence
  Description of Artificial Sequence: Synthetic oligonucleotide
caucagucccauggauuuu

SEQ ID NO: 2335107 - RNA, 19 nt, Artificial Sequence
  Description of Artificial Sequence: Synthetic oligonucleotide
ccccuucuuuuguuccuaa

SEQ ID NO: 2335108 - RNA, 19 nt, Artificial Sequence
  Description of Artificial Sequence: Synthetic oligonucleotide
cacgugucccugcucccuu

SEQ ID NO: 2335109 - RNA, 19 nt, Artificial Sequence
  Description of Artificial Sequence: Synthetic oligonucleotide
gcuuuguaguagggucucu

SEQ ID NO: 2335110 - RNA, 19 nt, Artificial Sequence
  Description of Artificial Sequence: Synthetic oligonucleotide
gccaaggcauugguguaau

SEQ ID NO: 2335111 - RNA, 19 nt, Artificial Sequence
  Description of Artificial Sequence: Synthetic oligonucleotide
gggccacaaugagucucuc

SEQ ID NO: 2335112 - RNA, 19 nt, Artificial Sequence
  Description of Artificial Sequence: Synthetic oligonucleotide
gccugcucauugguuccaa

SEQ ID NO: 2335113 - RNA, 19 nt, Artificial Sequence
  Description of Artificial Sequence: Synthetic oligonucleotide
ccgcuugugucugcuugga

SEQ ID NO: 2335114 - RNA, 19 nt, Artificial Sequence
  Description of Artificial Sequence: Synthetic oligonucleotide
gggucagagccaaggcauu

SEQ ID NO: 2335115 - RNA, 19 nt, Artificial Sequence
  Description of Artificial Sequence: Synthetic oligonucleotide
cccgcugcauagagauccu

SEQ ID NO: 2335116 - RNA, 19 nt, Artificial Sequence
  Description of Artificial Sequence: Synthetic oligonucleotide
cgcucacaucaucucugcu

SEQ ID NO: 2335117 - RNA, 19 nt, Artificial Sequence
  Description of Artificial Sequence: Synthetic oligonucleotide
guaaauaauacuucuaacg

SEQ ID NO: 2335118 - RNA, 19 nt, Artificial Sequence
  Description of Artificial Sequence: Synthetic oligonucleotide
uuaaguacagcuaugaaaa

SEQ ID NO: 2335119 - RNA, 19 nt, Artificial Sequence
  Description of Artificial Sequence: Synthetic oligonucleotide
acaauggagagccacaccc

SEQ ID NO: 2335120 - RNA, 19 nt, Artificial Sequence
  Description of Artificial Sequence: Synthetic oligonucleotide
aaauguaugacacugucaa

SEQ ID NO: 2335121 - RNA, 19 nt, Artificial Sequence
  Description of Artificial Sequence: Synthetic oligonucleotide
gacacugucaaacaggagc

SEQ ID NO: 2335122 - RNA, 19 nt, Artificial Sequence
  Description of Artificial Sequence: Synthetic oligonucleotide
aguaaauaauacuucuaac

SEQ ID NO: 2335123 - RNA, 19 nt, Artificial Sequence
  Description of Artificial Sequence: Synthetic oligonucleotide
aauguugaaaagcccuuac

SEQ ID NO: 2335124 - RNA, 19 nt, Artificial Sequence
  Description of Artificial Sequence: Synthetic oligonucleotide
uugaaaagcccuuacaaug

SEQ ID NO: 2335125 - RNA, 19 nt, Artificial Sequence
  Description of Artificial Sequence: Synthetic oligonucleotide
aaaggcuucgauccgucgc

SEQ ID NO: 2335126 - RNA, 19 nt, Artificial Sequence
  Description of Artificial Sequence: Synthetic oligonucleotide
aaauaauacuucuaacgga

SEQ ID NO: 2335127 - RNA, 19 nt, Artificial Sequence
  Description of Artificial Sequence: Synthetic oligonucleotide
aaauaauguugaaaagccc

SEQ ID NO: 2335128 - RNA, 19 nt, Artificial Sequence
  Description of Artificial Sequence: Synthetic oligonucleotide
gaugccaauguucagauga

SEQ ID NO: 2335129 - RNA, 19 nt, Artificial Sequence
  Description of Artificial Sequence: Synthetic oligonucleotide
ugaaauuucaaaguaaaua

SEQ ID NO: 2335130 - RNA, 19 nt, Artificial Sequence
  Description of Artificial Sequence: Synthetic oligonucleotide
ugaacaccgaacaauggag

SEQ ID NO: 2335131 - RNA, 19 nt, Artificial Sequence
  Description of Artificial Sequence: Synthetic oligonucleotide
ucaaaguaaauaauacuuc

SEQ ID NO: 2335132 - RNA, 19 nt, Artificial Sequence
  Description of Artificial Sequence: Synthetic oligonucleotide
uucagaugaacaccgaaca

SEQ ID NO: 2335133 - RNA, 19 nt, Artificial Sequence
  Description of Artificial Sequence: Synthetic oligonucleotide
auguaugacacugucaaac

SEQ ID NO: 2335134 - RNA, 19 nt, Artificial Sequence
  Description of Artificial Sequence: Synthetic oligonucleotide
uauuguuaaguacagcuau

SEQ ID NO: 2335135 - RNA, 19 nt, Artificial Sequence
  Description of Artificial Sequence: Synthetic oligonucleotide
aauaauacuucuaacggaa

SEQ ID NO: 2335136 - RNA, 19 nt, Artificial Sequence
  Description of Artificial Sequence: Synthetic oligonucleotide
auacgugucgaucuugugg

SEQ ID NO: 2335137 - RNA, 19 nt, Artificial Sequence
  Description of Artificial Sequence: Synthetic oligonucleotide
uuuguccuaaauuucaaaa

SEQ ID NO: 2335138 - RNA, 19 nt, Artificial Sequence
  Description of Artificial Sequence: Synthetic oligonucleotide
aacggcaccagcaugcggc

SEQ ID NO: 2335139 - RNA, 19 nt, Artificial Sequence
  Description of Artificial Sequence: Synthetic oligonucleotide
aacaauggagagccacacc

SEQ ID NO: 2335140 - RNA, 19 nt, Artificial Sequence
  Description of Artificial Sequence: Synthetic oligonucleotide
ucuaacggaaguuuguccu

SEQ ID NO: 2335141 - RNA, 19 nt, Artificial Sequence
  Description of Artificial Sequence: Synthetic oligonucleotide
agucauucuugcuuuuacc

SEQ ID NO: 2335142 - RNA, 19 nt, Artificial Sequence
  Description of Artificial Sequence: Synthetic oligonucleotide
ugaaaagcccuuacaauga

SEQ ID NO: 2335143 - RNA, 19 nt, Artificial Sequence
  Description of Artificial Sequence: Synthetic oligonucleotide
uucugagaaaguccuagag

SEQ ID NO: 2335144 - RNA, 19 nt, Artificial Sequence
  Description of Artificial Sequence: Synthetic oligonucleotide
aacaccgaacaauggagag

SEQ ID NO: 2335145 - RNA, 19 nt, Artificial Sequence
  Description of Artificial Sequence: Synthetic oligonucleotide
uguccuaaauuucaaaaua

SEQ ID NO: 2335146 - RNA, 19 nt, Artificial Sequence
  Description of Artificial Sequence: Synthetic oligonucleotide
uuucuucccaauuugggga

SEQ ID NO: 2335147 - RNA, 19 nt, Artificial Sequence
  Description of Artificial Sequence: Synthetic oligonucleotide
uaauacuucuaacggaagu

SEQ ID NO: 2335148 - RNA, 19 nt, Artificial Sequence
  Description of Artificial Sequence: Synthetic oligonucleotide
cauaacggcaccagcaugc

SEQ ID NO: 2335149 - RNA, 19 nt, Artificial Sequence
  Description of Artificial Sequence: Synthetic oligonucleotide
ucugagaaaguccuagagu

SEQ ID NO: 2335150 - RNA, 19 nt, Artificial Sequence
  Description of Artificial Sequence: Synthetic oligonucleotide
ucuugcuuuuaccacaggu

SEQ ID NO: 2335151 - RNA, 19 nt, Artificial Sequence
  Description of Artificial Sequence: Synthetic oligonucleotide
aguacuggaauuccucauc

SEQ ID NO: 2335152 - RNA, 19 nt, Artificial Sequence
  Description of Artificial Sequence: Synthetic oligonucleotide
guuaaguacagcuaugaaa

SEQ ID NO: 2335153 - RNA, 19 nt, Artificial Sequence
  Description of Artificial Sequence: Synthetic oligonucleotide
acgguuuauauccguagcg

SEQ ID NO: 2335154 - RNA, 19 nt, Artificial Sequence
  Description of Artificial Sequence: Synthetic oligonucleotide
uugagauacgugucgaucu

SEQ ID NO: 2335155 - RNA, 19 nt, Artificial Sequence
  Description of Artificial Sequence: Synthetic oligonucleotide
guuuauauccguagcgugg

SEQ ID NO: 2335156 - RNA, 19 nt, Artificial Sequence
  Description of Artificial Sequence: Synthetic oligonucleotide
agccacacccauuuggugg

SEQ ID NO: 2335157 - RNA, 19 nt, Artificial Sequence
  Description of Artificial Sequence: Synthetic oligonucleotide
uacgugucgaucuugugga

SEQ ID NO: 2335158 - RNA, 19 nt, Artificial Sequence
  Description of Artificial Sequence: Synthetic oligonucleotide
gagagccacacccauuugg

SEQ ID NO: 2335159 - RNA, 19 nt, Artificial Sequence
  Description of Artificial Sequence: Synthetic oligonucleotide
uguaugacacugucaaaca

SEQ ID NO: 2335160 - RNA, 19 nt, Artificial Sequence
  Description of Artificial Sequence: Synthetic oligonucleotide
uuauuguuaaguacagcua

SEQ ID NO: 2335161 - RNA, 19 nt, Artificial Sequence
  Description of Artificial Sequence: Synthetic oligonucleotide
aauuuuacaucugcucuca

SEQ ID NO: 2335162 - RNA, 19 nt, Artificial Sequence
  Description of Artificial Sequence: Synthetic oligonucleotide
gaauuuuacaucugcucuc

SEQ ID NO: 2335163 - RNA, 19 nt, Artificial Sequence
  Description of Artificial Sequence: Synthetic oligonucleotide
aauacuucuaacggaaguu

SEQ ID NO: 2335164 - RNA, 19 nt, Artificial Sequence
  Description of Artificial Sequence: Synthetic oligonucleotide
uccuaaauuucaaaauaau

SEQ ID NO: 2335165 - RNA, 19 nt, Artificial Sequence
  Description of Artificial Sequence: Synthetic oligonucleotide
ugccugaacguucugagaa

SEQ ID NO: 2335166 - RNA, 19 nt, Artificial Sequence
  Description of Artificial Sequence: Synthetic oligonucleotide
aguacagcuaugaaaacca

SEQ ID NO: 2335167 - RNA, 19 nt, Artificial Sequence
  Description of Artificial Sequence: Synthetic oligonucleotide
aacguucugagaaaguccu

SEQ ID NO: 2335168 - RNA, 19 nt, Artificial Sequence
  Description of Artificial Sequence: Synthetic oligonucleotide
uacuucuaacggaaguuug

SEQ ID NO: 2335169 - RNA, 19 nt, Artificial Sequence
  Description of Artificial Sequence: Synthetic oligonucleotide
ugacgguuuauauccguag

SEQ ID NO: 2335170 - RNA, 19 nt, Artificial Sequence
  Description of Artificial Sequence: Synthetic oligonucleotide
uucaggggcuuccuuacag

SEQ ID NO: 2335171 - RNA, 19 nt, Artificial Sequence
  Description of Artificial Sequence: Synthetic oligonucleotide
uucuaacggaaguuugucc

SEQ ID NO: 2335172 - RNA, 19 nt, Artificial Sequence
  Description of Artificial Sequence: Synthetic oligonucleotide
uuccuuacagaucuguuuu

SEQ ID NO: 2335173 - RNA, 19 nt, Artificial Sequence
  Description of Artificial Sequence: Synthetic oligonucleotide
ugcacgucccggcagaucu

SEQ ID NO: 2335174 - RNA, 19 nt, Artificial Sequence
  Description of Artificial Sequence: Synthetic oligonucleotide
ucauucuugcuuuuaccac

SEQ ID NO: 2335175 - RNA, 19 nt, Artificial Sequence
  Description of Artificial Sequence: Synthetic oligonucleotide
uguugguugcagcacuuug

SEQ ID NO: 2335176 - RNA, 19 nt, Artificial Sequence
  Description of Artificial Sequence: Synthetic oligonucleotide
uuuauauccguagcgugga

SEQ ID NO: 2335177 - RNA, 19 nt, Artificial Sequence
  Description of Artificial Sequence: Synthetic oligonucleotide
ugaacguucugagaaaguc

SEQ ID NO: 2335178 - RNA, 19 nt, Artificial Sequence
  Description of Artificial Sequence: Synthetic oligonucleotide
guaugacacugucaaacag

SEQ ID NO: 2335179 - RNA, 19 nt, Artificial Sequence
  Description of Artificial Sequence: Synthetic oligonucleotide
caccgaacaauggagagcc

SEQ ID NO: 2335180 - RNA, 19 nt, Artificial Sequence
  Description of Artificial Sequence: Synthetic oligonucleotide
aguccuagagucuucugca

SEQ ID NO: 2335181 - RNA, 19 nt, Artificial Sequence
  Description of Artificial Sequence: Synthetic oligonucleotide
uuuuccucauaacggcacc

SEQ ID NO: 2335182 - RNA, 19 nt, Artificial Sequence
  Description of Artificial Sequence: Synthetic oligonucleotide
cugcucgccagcuucaggg

SEQ ID NO: 2335183 - RNA, 19 nt, Artificial Sequence
  Description of Artificial Sequence: Synthetic oligonucleotide
aaacaggagcuccacaguu

SEQ ID NO: 2335184 - RNA, 19 nt, Artificial Sequence
  Description of Artificial Sequence: Synthetic oligonucleotide
uguucagaugaacaccgaa

SEQ ID NO: 2335185 - RNA, 19 nt, Artificial Sequence
  Description of Artificial Sequence: Synthetic oligonucleotide
gaugaacaccgaacaaugg

SEQ ID NO: 2335186 - RNA, 19 nt, Artificial Sequence
  Description of Artificial Sequence: Synthetic oligonucleotide
gacgguuuauauccguagc

SEQ ID NO: 2335187 - RNA, 19 nt, Artificial Sequence
  Description of Artificial Sequence: Synthetic oligonucleotide
uccguagcguggaaaaggc

SEQ ID NO: 2335188 - RNA, 19 nt, Artificial Sequence
  Description of Artificial Sequence: Synthetic oligonucleotide
cacuuguacuggcagagcc

SEQ ID NO: 2335189 - RNA, 19 nt, Artificial Sequence
  Description of Artificial Sequence: Synthetic oligonucleotide
caugccugaacguucugag

SEQ ID NO: 2335190 - RNA, 19 nt, Artificial Sequence
  Description of Artificial Sequence: Synthetic oligonucleotide
ugcacuuguacuggcagag

SEQ ID NO: 2335191 - RNA, 19 nt, Artificial Sequence
  Description of Artificial Sequence: Synthetic oligonucleotide
ugagaaaguccuagagucu

SEQ ID NO: 2335192 - RNA, 19 nt, Artificial Sequence
  Description of Artificial Sequence: Synthetic oligonucleotide
uguuaaguacagcuaugaa

SEQ ID NO: 2335193 - RNA, 19 nt, Artificial Sequence
  Description of Artificial Sequence: Synthetic oligonucleotide
aaggcuucgauccgucgcu

SEQ ID NO: 2335194 - RNA, 19 nt, Artificial Sequence
  Description of Artificial Sequence: Synthetic oligonucleotide
gaacguucugagaaagucc

SEQ ID NO: 2335195 - RNA, 19 nt, Artificial Sequence
  Description of Artificial Sequence: Synthetic oligonucleotide
agaugaacaccgaacaaug

SEQ ID NO: 2335196 - RNA, 19 nt, Artificial Sequence
  Description of Artificial Sequence: Synthetic oligonucleotide
ucauaacggcaccagcaug

SEQ ID NO: 2335197 - RNA, 19 nt, Artificial Sequence
  Description of Artificial Sequence: Synthetic oligonucleotide
uucacaugccugaacguuc

SEQ ID NO: 2335198 - RNA, 19 nt, Artificial Sequence
  Description of Artificial Sequence: Synthetic oligonucleotide
caaaguaaauaauacuucu

SEQ ID NO: 2335199 - RNA, 19 nt, Artificial Sequence
  Description of Artificial Sequence: Synthetic oligonucleotide
ugucguguugguugcagca

SEQ ID NO: 2335200 - RNA, 19 nt, Artificial Sequence
  Description of Artificial Sequence: Synthetic oligonucleotide
agaggcaguacuggaauuc

SEQ ID NO: 2335201 - RNA, 19 nt, Artificial Sequence
  Description of Artificial Sequence: Synthetic oligonucleotide
auauccguagcguggaaaa

SEQ ID NO: 2335202 - RNA, 19 nt, Artificial Sequence
  Description of Artificial Sequence: Synthetic oligonucleotide
aauguaugacacugucaaa

SEQ ID NO: 2335203 - RNA, 19 nt, Artificial Sequence
  Description of Artificial Sequence: Synthetic oligonucleotide
auccguagcguggaaaagg

SEQ ID NO: 2335204 - RNA, 19 nt, Artificial Sequence
  Description of Artificial Sequence: Synthetic oligonucleotide
uuguggaugccguugcgga

SEQ ID NO: 2335205 - RNA, 19 nt, Artificial Sequence
  Description of Artificial Sequence: Synthetic oligonucleotide
acagcgaguucucgucugc

SEQ ID NO: 2335206 - RNA, 19 nt, Artificial Sequence
  Description of Artificial Sequence: Synthetic oligonucleotide
aaaguccuagagucuucug

SEQ ID NO: 2335207 - RNA, 19 nt, Artificial Sequence
  Description of Artificial Sequence: Synthetic oligonucleotide
cucagguugaggucgcggc

SEQ ID NO: 2335208 - RNA, 19 nt, Artificial Sequence
  Description of Artificial Sequence: Synthetic oligonucleotide
ugagacagcgaguucucgu

SEQ ID NO: 2335209 - RNA, 19 nt, Artificial Sequence
  Description of Artificial Sequence: Synthetic oligonucleotide
ggucucauagcaccugucg

SEQ ID NO: 2335210 - RNA, 19 nt, Artificial Sequence
  Description of Artificial Sequence: Synthetic oligonucleotide
auguugaaaagcccuuaca

SEQ ID NO: 2335211 - RNA, 19 nt, Artificial Sequence
  Description of Artificial Sequence: Synthetic oligonucleotide
guugcagcacuuugucagg

SEQ ID NO: 2335212 - RNA, 19 nt, Artificial Sequence
  Description of Artificial Sequence: Synthetic oligonucleotide
ucgaucuuguggaugccgu

SEQ ID NO: 2335213 - RNA, 19 nt, Artificial Sequence
  Description of Artificial Sequence: Synthetic oligonucleotide
gagucuucugcacgucccg

SEQ ID NO: 2335214 - RNA, 19 nt, Artificial Sequence
  Description of Artificial Sequence: Synthetic oligonucleotide
gguuuauauccguagcgug

SEQ ID NO: 2335215 - RNA, 19 nt, Artificial Sequence
  Description of Artificial Sequence: Synthetic oligonucleotide
guucagaugaacaccgaac

SEQ ID NO: 2335216 - RNA, 19 nt, Artificial Sequence
  Description of Artificial Sequence: Synthetic oligonucleotide
auagcaccugucguguugg

SEQ ID NO: 2335217 - RNA, 19 nt, Artificial Sequence
  Description of Artificial Sequence: Synthetic oligonucleotide
uaaguacagcuaugaaaac

SEQ ID NO: 2335218 - RNA, 19 nt, Artificial Sequence
  Description of Artificial Sequence: Synthetic oligonucleotide
uccucauaacggcaccagc

SEQ ID NO: 2335219 - RNA, 19 nt, Artificial Sequence
  Description of Artificial Sequence: Synthetic oligonucleotide
aacaggaguagcggcagca

SEQ ID NO: 2335220 - RNA, 19 nt, Artificial Sequence
  Description of Artificial Sequence: Synthetic oligonucleotide
ucuucugcacgucccggca

SEQ ID NO: 2335221 - RNA, 19 nt, Artificial Sequence
  Description of Artificial Sequence: Synthetic oligonucleotide
gagacagcgaguucucguc

SEQ ID NO: 2335222 - RNA, 19 nt, Artificial Sequence
  Description of Artificial Sequence: Synthetic oligonucleotide
caaauguaugacacuguca

SEQ ID NO: 2335223 - RNA, 19 nt, Artificial Sequence
  Description of Artificial Sequence: Synthetic oligonucleotide
ccagguaaggcuugcagcc

SEQ ID NO: 2335224 - RNA, 19 nt, Artificial Sequence
  Description of Artificial Sequence: Synthetic oligonucleotide
uggaugccguugcggaugg

SEQ ID NO: 2335225 - RNA, 19 nt, Artificial Sequence
  Description of Artificial Sequence: Synthetic oligonucleotide
uggugacgguuuauauccg

SEQ ID NO: 2335226 - RNA, 19 nt, Artificial Sequence
  Description of Artificial Sequence: Synthetic oligonucleotide
acacccauuugguggugac

SEQ ID NO: 2335227 - RNA, 19 nt, Artificial Sequence
  Description of Artificial Sequence: Synthetic oligonucleotide
auaauacuucuaacggaag

SEQ ID NO: 2335228 - RNA, 19 nt, Artificial Sequence
  Description of Artificial Sequence: Synthetic oligonucleotide
ucgagcgcggcguugagau

SEQ ID NO: 2335229 - RNA, 19 nt, Artificial Sequence
  Description of Artificial Sequence: Synthetic oligonucleotide
ucugcucgccagcuucagg

SEQ ID NO: 2335230 - RNA, 19 nt, Artificial Sequence
  Description of Artificial Sequence: Synthetic oligonucleotide
gauacgugucgaucuugug

SEQ ID NO: 2335231 - RNA, 19 nt, Artificial Sequence
  Description of Artificial Sequence: Synthetic oligonucleotide
ugaggucgcggccuccucc

SEQ ID NO: 2335232 - RNA, 19 nt, Artificial Sequence
  Description of Artificial Sequence: Synthetic oligonucleotide
gaggguggcccuccagucg

SEQ ID NO: 2335233 - RNA, 19 nt, Artificial Sequence
  Description of Artificial Sequence: Synthetic oligonucleotide
guccucgccgcccagcagg

SEQ ID NO: 2335234 - RNA, 19 nt, Artificial Sequence
  Description of Artificial Sequence: Synthetic oligonucleotide
cauagcaccugucguguug

SEQ ID NO: 2335235 - RNA, 19 nt, Artificial Sequence
  Description of Artificial Sequence: Synthetic oligonucleotide
agcgaguucucgucugcuc

SEQ ID NO: 2335236 - RNA, 19 nt, Artificial Sequence
  Description of Artificial Sequence: Synthetic oligonucleotide
gaauuccucaucacaguca

SEQ ID NO: 2335237 - RNA, 19 nt, Artificial Sequence
  Description of Artificial Sequence: Synthetic oligonucleotide
uuucacaugccugaacguu

SEQ ID NO: 2335238 - RNA, 19 nt, Artificial Sequence
  Description of Artificial Sequence: Synthetic oligonucleotide
uccgucgcugcacuuguac

SEQ ID NO: 2335239 - RNA, 19 nt, Artificial Sequence
  Description of Artificial Sequence: Synthetic oligonucleotide
ugacacugucaaacaggag

SEQ ID NO: 2335240 - RNA, 19 nt, Artificial Sequence
  Description of Artificial Sequence: Synthetic oligonucleotide
uauauccguagcguggaaa

SEQ ID NO: 2335241 - RNA, 19 nt, Artificial Sequence
  Description of Artificial Sequence: Synthetic oligonucleotide
uaacggcaccagcaugcgg

SEQ ID NO: 2335242 - RNA, 19 nt, Artificial Sequence
  Description of Artificial Sequence: Synthetic oligonucleotide
guugagauacgugucgauc

SEQ ID NO: 2335243 - RNA, 19 nt, Artificial Sequence
  Description of Artificial Sequence: Synthetic oligonucleotide
gaggcaguacuggaauucc

SEQ ID NO: 2335244 - RNA, 19 nt, Artificial Sequence
  Description of Artificial Sequence: Synthetic oligonucleotide
ugagauacgugucgaucuu

SEQ ID NO: 2335245 - RNA, 19 nt, Artificial Sequence
  Description of Artificial Sequence: Synthetic oligonucleotide
cuucuaacggaaguuuguc

SEQ ID NO: 2335246 - RNA, 19 nt, Artificial Sequence
  Description of Artificial Sequence: Synthetic oligonucleotide
guccuaaauuucaaaauaa

SEQ ID NO: 2335247 - RNA, 19 nt, Artificial Sequence
  Description of Artificial Sequence: Synthetic oligonucleotide
uaauguugaaaagcccuua

SEQ ID NO: 2335248 - RNA, 19 nt, Artificial Sequence
  Description of Artificial Sequence: Synthetic oligonucleotide
guucucgucugcucgccag

SEQ ID NO: 2335249 - RNA, 19 nt, Artificial Sequence
  Description of Artificial Sequence: Synthetic oligonucleotide
acuucuaacggaaguuugu

SEQ ID NO: 2335250 - RNA, 19 nt, Artificial Sequence
  Description of Artificial Sequence: Synthetic oligonucleotide
uucgauccgucgcugcacu

SEQ ID NO: 2335251 - RNA, 19 nt, Artificial Sequence
  Description of Artificial Sequence: Synthetic oligonucleotide
agggaugccaauguucaga

SEQ ID NO: 2335252 - RNA, 19 nt, Artificial Sequence
  Description of Artificial Sequence: Synthetic oligonucleotide
uauccguagcguggaaaag

SEQ ID NO: 2335253 - RNA, 19 nt, Artificial Sequence
  Description of Artificial Sequence: Synthetic oligonucleotide
gaacaccgaacaauggaga

SEQ ID NO: 2335254 - RNA, 19 nt, Artificial Sequence
  Description of Artificial Sequence: Synthetic oligonucleotide
gcgaguucucgucugcucg

SEQ ID NO: 2335255 - RNA, 19 nt, Artificial Sequence
  Description of Artificial Sequence: Synthetic oligonucleotide
cuucccaauuuggggaucc

SEQ ID NO: 2335256 - RNA, 19 nt, Artificial Sequence
  Description of Artificial Sequence: Synthetic oligonucleotide
gucgcugcacuuguacugg

SEQ ID NO: 2335257 - RNA, 19 nt, Artificial Sequence
  Description of Artificial Sequence: Synthetic oligonucleotide
auaacggcaccagcaugcg

SEQ ID NO: 2335258 - RNA, 19 nt, Artificial Sequence
  Description of Artificial Sequence: Synthetic oligonucleotide
gucgaucuuguggaugccg

SEQ ID NO: 2335259 - RNA, 19 nt, Artificial Sequence
  Description of Artificial Sequence: Synthetic oligonucleotide
uucucgucugcucgccagc

SEQ ID NO: 2335260 - RNA, 19 nt, Artificial Sequence
  Description of Artificial Sequence: Synthetic oligonucleotide
cuaugaaaaccaagucaca

SEQ ID NO: 2335261 - RNA, 19 nt, Artificial Sequence
  Description of Artificial Sequence: Synthetic oligonucleotide
ucccggcagaucuuggaga

SEQ ID NO: 2335262 - RNA, 19 nt, Artificial Sequence
  Description of Artificial Sequence: Synthetic oligonucleotide
agguaaggcuugcagccca

SEQ ID NO: 2335263 - RNA, 19 nt, Artificial Sequence
  Description of Artificial Sequence: Synthetic oligonucleotide
gagcgcggcguugagauac

SEQ ID NO: 2335264 - RNA, 19 nt, Artificial Sequence
  Description of Artificial Sequence: Synthetic oligonucleotide
ccacaggucucauagcacc

SEQ ID NO: 2335265 - RNA, 19 nt, Artificial Sequence
  Description of Artificial Sequence: Synthetic oligonucleotide
accagcaugcggcucgcug

SEQ ID NO: 2335266 - RNA, 19 nt, Artificial Sequence
  Description of Artificial Sequence: Synthetic oligonucleotide
ccaauuuggggauccacug

SEQ ID NO: 2335267 - RNA, 19 nt, Artificial Sequence
  Description of Artificial Sequence: Synthetic oligonucleotide
auacuucuaacggaaguuu

SEQ ID NO: 2335268 - RNA, 19 nt, Artificial Sequence
  Description of Artificial Sequence: Synthetic oligonucleotide
ugggcgagggccguggggc

SEQ ID NO: 2335269 - RNA, 19 nt, Artificial Sequence
  Description of Artificial Sequence: Synthetic oligonucleotide
auaauguugaaaagcccuu

SEQ ID NO: 2335270 - RNA, 19 nt, Artificial Sequence
  Description of Artificial Sequence: Synthetic oligonucleotide
gguggugacgguuuauauc

SEQ ID NO: 2335271 - RNA, 19 nt, Artificial Sequence
  Description of Artificial Sequence: Synthetic oligonucleotide
accacaggucucauagcac

SEQ ID NO: 2335272 - RNA, 19 nt, Artificial Sequence
  Description of Artificial Sequence: Synthetic oligonucleotide
ccaaauguaugacacuguc

SEQ ID NO: 2335273 - RNA, 19 nt, Artificial Sequence
  Description of Artificial Sequence: Synthetic oligonucleotide
agcccuuacaaugaauuuu

SEQ ID NO: 2335274 - RNA, 19 nt, Artificial Sequence
  Description of Artificial Sequence: Synthetic oligonucleotide
ucgcgcgcuggccaacagg

SEQ ID NO: 2335275 - RNA, 19 nt, Artificial Sequence
  Description of Artificial Sequence: Synthetic oligonucleotide
gaugccguugcggaugguc

SEQ ID NO: 2335276 - RNA, 19 nt, Artificial Sequence
  Description of Artificial Sequence: Synthetic oligonucleotide
gagauacgugucgaucuug

SEQ ID NO: 2335277 - RNA, 19 nt, Artificial Sequence
  Description of Artificial Sequence: Synthetic oligonucleotide
uaacggaaguuuguccuaa

SEQ ID NO: 2335278 - RNA, 19 nt, Artificial Sequence
  Description of Artificial Sequence: Synthetic oligonucleotide
cucgccccggcucagguug

SEQ ID NO: 2335279 - RNA, 19 nt, Artificial Sequence
  Description of Artificial Sequence: Synthetic oligonucleotide
gucccggcagaucuuggag

SEQ ID NO: 2335280 - RNA, 19 nt, Artificial Sequence
  Description of Artificial Sequence: Synthetic oligonucleotide
ugaggguggcccuccaguc

SEQ ID NO: 2335281 - RNA, 19 nt, Artificial Sequence
  Description of Artificial Sequence: Synthetic oligonucleotide
agacagcgaguucucgucu

SEQ ID NO: 2335282 - RNA, 19 nt, Artificial Sequence
  Description of Artificial Sequence: Synthetic oligonucleotide
aucggcacggccgggcggc

SEQ ID NO: 2335283 - RNA, 19 nt, Artificial Sequence
  Description of Artificial Sequence: Synthetic oligonucleotide
aacggaaguuuguccuaaa

SEQ ID NO: 2335284 - RNA, 19 nt, Artificial Sequence
  Description of Artificial Sequence: Synthetic oligonucleotide
ugguggugacgguuuauau

SEQ ID NO: 2335285 - RNA, 19 nt, Artificial Sequence
  Description of Artificial Sequence: Synthetic oligonucleotide
agagccacacccauuuggu

SEQ ID NO: 2335286 - RNA, 19 nt, Artificial Sequence
  Description of Artificial Sequence: Synthetic oligonucleotide
agauacgugucgaucuugu

SEQ ID NO: 2335287 - RNA, 19 nt, Artificial Sequence
  Description of Artificial Sequence: Synthetic oligonucleotide
ugcagcacuuugucaggga

SEQ ID NO: 2335288 - RNA, 19 nt, Artificial Sequence
  Description of Artificial Sequence: Synthetic oligonucleotide
aguagcggcagcagcagga

SEQ ID NO: 2335289 - RNA, 19 nt, Artificial Sequence
  Description of Artificial Sequence: Synthetic oligonucleotide
cugucguguugguugcagc

SEQ ID NO: 2335290 - RNA, 19 nt, Artificial Sequence
  Description of Artificial Sequence: Synthetic oligonucleotide
uuauauccguagcguggaa

SEQ ID NO: 2335291 - RNA, 19 nt, Artificial Sequence
  Description of Artificial Sequence: Synthetic oligonucleotide
cacuuugucagggaaggga

SEQ ID NO: 2335292 - RNA, 19 nt, Artificial Sequence
  Description of Artificial Sequence: Synthetic oligonucleotide
gaaaaggcuucgauccguc

SEQ ID NO: 2335293 - RNA, 19 nt, Artificial Sequence
  Description of Artificial Sequence: Synthetic oligonucleotide
agucuucugcacgucccgg

SEQ ID NO: 2335294 - RNA, 19 nt, Artificial Sequence
  Description of Artificial Sequence: Synthetic oligonucleotide
agcccaaauguaugacacu

SEQ ID NO: 2335295 - RNA, 19 nt, Artificial Sequence
  Description of Artificial Sequence: Synthetic oligonucleotide
acaugccugaacguucuga

SEQ ID NO: 2335296 - RNA, 19 nt, Artificial Sequence
  Description of Artificial Sequence: Synthetic oligonucleotide
caccugucguguugguugc

SEQ ID NO: 2335297 - RNA, 19 nt, Artificial Sequence
  Description of Artificial Sequence: Synthetic oligonucleotide
uggucuugaggguggcccu

SEQ ID NO: 2335298 - RNA, 19 nt, Artificial Sequence
  Description of Artificial Sequence: Synthetic oligonucleotide
ccagcaugcggcucgcugg

SEQ ID NO: 2335299 - RNA, 19 nt, Artificial Sequence
  Description of Artificial Sequence: Synthetic oligonucleotide
aggagcuccacaguuguuu

SEQ ID NO: 2335300 - RNA, 19 nt, Artificial Sequence
  Description of Artificial Sequence: Synthetic oligonucleotide
uguggaugccguugcggau

SEQ ID NO: 2335301 - RNA, 19 nt, Artificial Sequence
  Description of Artificial Sequence: Synthetic oligonucleotide
augccugaacguucugaga

SEQ ID NO: 2335302 - RNA, 19 nt, Artificial Sequence
  Description of Artificial Sequence: Synthetic oligonucleotide
augggcgagggccgugggg

SEQ ID NO: 2335303 - RNA, 19 nt, Artificial Sequence
  Description of Artificial Sequence: Synthetic oligonucleotide
ucccaauuuggggauccac

SEQ ID NO: 2335304 - RNA, 19 nt, Artificial Sequence
  Description of Artificial Sequence: Synthetic oligonucleotide
ggaagggaugccaauguuc

SEQ ID NO: 2335305 - RNA, 19 nt, Artificial Sequence
  Description of Artificial Sequence: Synthetic oligonucleotide
caauggagagccacaccca

SEQ ID NO: 2335306 - RNA, 19 nt, Artificial Sequence
  Description of Artificial Sequence: Synthetic oligonucleotide
guacuggcagagcccgucc

SEQ ID NO: 2335307 - RNA, 19 nt, Artificial Sequence
  Description of Artificial Sequence: Synthetic oligonucleotide
gaucuuggagaggcaguac

SEQ ID NO: 2335308 - RNA, 19 nt, Artificial Sequence
  Description of Artificial Sequence: Synthetic oligonucleotide
agguugaggucgcggccuc

SEQ ID NO: 2335309 - RNA, 19 nt, Artificial Sequence
  Description of Artificial Sequence: Synthetic oligonucleotide
guggcccuccagucggugg

SEQ ID NO: 2335310 - RNA, 19 nt, Artificial Sequence
  Description of Artificial Sequence: Synthetic oligonucleotide
cugagacagcgaguucucg

SEQ ID NO: 2335311 - RNA, 19 nt, Artificial Sequence
  Description of Artificial Sequence: Synthetic oligonucleotide
ccucauaacggcaccagca

SEQ ID NO: 2335312 - RNA, 19 nt, Artificial Sequence
  Description of Artificial Sequence: Synthetic oligonucleotide
cuugaggguggcccuccag

SEQ ID NO: 2335313 - RNA, 19 nt, Artificial Sequence
  Description of Artificial Sequence: Synthetic oligonucleotide
gggauccacugagacagcg

SEQ ID NO: 2335314 - RNA, 19 nt, Artificial Sequence
  Description of Artificial Sequence: Synthetic oligonucleotide
cacccauuugguggugacg

SEQ ID NO: 2335315 - RNA, 19 nt, Artificial Sequence
  Description of Artificial Sequence: Synthetic oligonucleotide
cguggaaaaggcuucgauc

SEQ ID NO: 2335316 - RNA, 19 nt, Artificial Sequence
  Description of Artificial Sequence: Synthetic oligonucleotide
gcuuuuaccacaggucuca

SEQ ID NO: 2335317 - RNA, 19 nt, Artificial Sequence
  Description of Artificial Sequence: Synthetic oligonucleotide
gaguucucgucugcucgcc

SEQ ID NO: 2335318 - RNA, 19 nt, Artificial Sequence
  Description of Artificial Sequence: Synthetic oligonucleotide
ccagucgguggucuggucc

SEQ ID NO: 2335319 - RNA, 19 nt, Artificial Sequence
  Description of Artificial Sequence: Synthetic oligonucleotide
aguucucgucugcucgcca

SEQ ID NO: 2335320 - RNA, 19 nt, Artificial Sequence
  Description of Artificial Sequence: Synthetic oligonucleotide
ugcuccuggccucgcgcgc

SEQ ID NO: 2335321 - RNA, 19 nt, Artificial Sequence
  Description of Artificial Sequence: Synthetic oligonucleotide
ccugaacguucugagaaag

SEQ ID NO: 2335322 - RNA, 19 nt, Artificial Sequence
  Description of Artificial Sequence: Synthetic oligonucleotide
gagaaaguccuagagucuu

SEQ ID NO: 2335323 - RNA, 19 nt, Artificial Sequence
  Description of Artificial Sequence: Synthetic oligonucleotide
uggccucgcgcgcuggcca

SEQ ID NO: 2335324 - RNA, 19 nt, Artificial Sequence
  Description of Artificial Sequence: Synthetic oligonucleotide
cagcaugcggcucgcuggc

SEQ ID NO: 2335325 - RNA, 19 nt, Artificial Sequence
  Description of Artificial Sequence: Synthetic oligonucleotide
cuucgauccgucgcugcac

SEQ ID NO: 2335326 - RNA, 19 nt, Artificial Sequence
  Description of Artificial Sequence: Synthetic oligonucleotide
cuaacggaaguuuguccua

SEQ ID NO: 2335327 - RNA, 19 nt, Artificial Sequence
  Description of Artificial Sequence: Synthetic oligonucleotide
guuucacaugccugaacgu

SEQ ID NO: 2335328 - RNA, 19 nt, Artificial Sequence
  Description of Artificial Sequence: Synthetic oligonucleotide
agcaggucgagcgcggcgu

SEQ ID NO: 2335329 - RNA, 19 nt, Artificial Sequence
  Description of Artificial Sequence: Synthetic oligonucleotide
ugucgaucuuguggaugcc

SEQ ID NO: 2335330 - RNA, 19 nt, Artificial Sequence
  Description of Artificial Sequence: Synthetic oligonucleotide
aggucucauagcaccuguc

SEQ ID NO: 2335331 - RNA, 19 nt, Artificial Sequence
  Description of Artificial Sequence: Synthetic oligonucleotide
ucgcugcacuuguacuggc

SEQ ID NO: 2335332 - RNA, 19 nt, Artificial Sequence
  Description of Artificial Sequence: Synthetic oligonucleotide
ucucgucugcucgccagcu

SEQ ID NO: 2335333 - RNA, 19 nt, Artificial Sequence
  Description of Artificial Sequence: Synthetic oligonucleotide
guugguugcagcacuuugu

SEQ ID NO: 2335334 - RNA, 19 nt, Artificial Sequence
  Description of Artificial Sequence: Synthetic oligonucleotide
ggccaacaggaguagcggc

SEQ ID NO: 2335335 - RNA, 19 nt, Artificial Sequence
  Description of Artificial Sequence: Synthetic oligonucleotide
ccgcccagcaggucgagcg

SEQ ID NO: 2335336 - RNA, 19 nt, Artificial Sequence
  Description of Artificial Sequence: Synthetic oligonucleotide
gucguguugguugcagcac

SEQ ID NO: 2335337 - RNA, 19 nt, Artificial Sequence
  Description of Artificial Sequence: Synthetic oligonucleotide
cagaugaacaccgaacaau

SEQ ID NO: 2335338 - RNA, 19 nt, Artificial Sequence
  Description of Artificial Sequence: Synthetic oligonucleotide
cagcaggucgagcgcggcg

SEQ ID NO: 2335339 - RNA, 19 nt, Artificial Sequence
  Description of Artificial Sequence: Synthetic oligonucleotide
gauccgucgcugcacuugu

SEQ ID NO: 2335340 - RNA, 19 nt, Artificial Sequence
  Description of Artificial Sequence: Synthetic oligonucleotide
uuguacuggcagagcccgu

SEQ ID NO: 2335341 - RNA, 19 nt, Artificial Sequence
  Description of Artificial Sequence: Synthetic oligonucleotide
guuguuucacaugccugaa

SEQ ID NO: 2335342 - RNA, 19 nt, Artificial Sequence
  Description of Artificial Sequence: Synthetic oligonucleotide
acagucauucuugcuuuua

SEQ ID NO: 2335343 - RNA, 19 nt, Artificial Sequence
  Description of Artificial Sequence: Synthetic oligonucleotide
ggcaguacuggaauuccuc

SEQ ID NO: 2335344 - RNA, 19 nt, Artificial Sequence
  Description of Artificial Sequence: Synthetic oligonucleotide
cuagagucuucugcacguc

SEQ ID NO: 2335345 - RNA, 19 nt, Artificial Sequence
  Description of Artificial Sequence: Synthetic oligonucleotide
cagagcccguccucgccgc

SEQ ID NO: 2335346 - RNA, 19 nt, Artificial Sequence
  Description of Artificial Sequence: Synthetic oligonucleotide
gcggcguugagauacgugu

SEQ ID NO: 2335347 - RNA, 19 nt, Artificial Sequence
  Description of Artificial Sequence: Synthetic oligonucleotide
caucggcacggccgggcgg

SEQ ID NO: 2335348 - RNA, 19 nt, Artificial Sequence
  Description of Artificial Sequence: Synthetic oligonucleotide
ucuucccaauuuggggauc

SEQ ID NO: 2335349 - RNA, 19 nt, Artificial Sequence
  Description of Artificial Sequence: Synthetic oligonucleotide
ccgaacaauggagagccac

SEQ ID NO: 2335350 - RNA, 19 nt, Artificial Sequence
  Description of Artificial Sequence: Synthetic oligonucleotide
uccucgccgcccagcaggu

SEQ ID NO: 2335351 - RNA, 19 nt, Artificial Sequence
  Description of Artificial Sequence: Synthetic oligonucleotide
ggaguagcggcagcagcag

SEQ ID NO: 2335352 - RNA, 19 nt, Artificial Sequence
  Description of Artificial Sequence: Synthetic oligonucleotide
acggcaccagcaugcggcu

SEQ ID NO: 2335353 - RNA, 19 nt, Artificial Sequence
  Description of Artificial Sequence: Synthetic oligonucleotide
uugaggucgcggccuccuc

SEQ ID NO: 2335354 - RNA, 19 nt, Artificial Sequence
  Description of Artificial Sequence: Synthetic oligonucleotide
cacgucccggcagaucuug

SEQ ID NO: 2335355 - RNA, 19 nt, Artificial Sequence
  Description of Artificial Sequence: Synthetic oligonucleotide
gcucagguugaggucgcgg

SEQ ID NO: 2335356 - RNA, 19 nt, Artificial Sequence
  Description of Artificial Sequence: Synthetic oligonucleotide
auguucagaugaacaccga

SEQ ID NO: 2335357 - RNA, 19 nt, Artificial Sequence
  Description of Artificial Sequence: Synthetic oligonucleotide
augccaauguucagaugaa

SEQ ID NO: 2335358 - RNA, 19 nt, Artificial Sequence
  Description of Artificial Sequence: Synthetic oligonucleotide
ggaugccaauguucagaug

SEQ ID NO: 2335359 - RNA, 19 nt, Artificial Sequence
  Description of Artificial Sequence: Synthetic oligonucleotide
aggcaguacuggaauuccu

SEQ ID NO: 2335360 - RNA, 19 nt, Artificial Sequence
  Description of Artificial Sequence: Synthetic oligonucleotide
cgucgcugcacuuguacug

SEQ ID NO: 2335361 - RNA, 19 nt, Artificial Sequence
  Description of Artificial Sequence: Synthetic oligonucleotide
gugacgguuuauauccgua

SEQ ID NO: 2335362 - RNA, 19 nt, Artificial Sequence
  Description of Artificial Sequence: Synthetic oligonucleotide
aggucgagcgcggcguuga

SEQ ID NO: 2335363 - RNA, 19 nt, Artificial Sequence
  Description of Artificial Sequence: Synthetic oligonucleotide
gcccuuacaaugaauuuua

SEQ ID NO: 2335364 - RNA, 19 nt, Artificial Sequence
  Description of Artificial Sequence: Synthetic oligonucleotide
agcguggaaaaggcuucga

SEQ ID NO: 2335365 - RNA, 19 nt, Artificial Sequence
  Description of Artificial Sequence: Synthetic oligonucleotide
cugaacguucugagaaagu

SEQ ID NO: 2335366 - RNA, 19 nt, Artificial Sequence
  Description of Artificial Sequence: Synthetic oligonucleotide
ggcuucgauccgucgcugc

SEQ ID NO: 2335367 - RNA, 19 nt, Artificial Sequence
  Description of Artificial Sequence: Synthetic oligonucleotide
gcuucgauccgucgcugca

SEQ ID NO: 2335368 - RNA, 19 nt, Artificial Sequence
  Description of Artificial Sequence: Synthetic oligonucleotide
gcaugcggcucgcuggcug

SEQ ID NO: 2335369 - RNA, 19 nt, Artificial Sequence
  Description of Artificial Sequence: Synthetic oligonucleotide
ugcggcucgcuggcugucc

SEQ ID NO: 2335370 - RNA, 19 nt, Artificial Sequence
  Description of Artificial Sequence: Synthetic oligonucleotide
auccacugagacagcgagu

SEQ ID NO: 2335371 - RNA, 19 nt, Artificial Sequence
  Description of Artificial Sequence: Synthetic oligonucleotide
acgugucgaucuuguggau

SEQ ID NO: 2335372 - RNA, 19 nt, Artificial Sequence
  Description of Artificial Sequence: Synthetic oligonucleotide
uccagucgguggucugguc

SEQ ID NO: 2335373 - RNA, 19 nt, Artificial Sequence
  Description of Artificial Sequence: Synthetic oligonucleotide
cuucaggggcuuccuuaca

SEQ ID NO: 2335374 - RNA, 19 nt, Artificial Sequence
  Description of Artificial Sequence: Synthetic oligonucleotide
ccccggaugggcgagggcc

SEQ ID NO: 2335375 - RNA, 19 nt, Artificial Sequence
  Description of Artificial Sequence: Synthetic oligonucleotide
gagaggcaguacuggaauu

SEQ ID NO: 2335376 - RNA, 19 nt, Artificial Sequence
  Description of Artificial Sequence: Synthetic oligonucleotide
ggugacgguuuauauccgu

SEQ ID NO: 2335377 - RNA, 19 nt, Artificial Sequence
  Description of Artificial Sequence: Synthetic oligonucleotide
gucugcucgccagcuucag

SEQ ID NO: 2335378 - RNA, 19 nt, Artificial Sequence
  Description of Artificial Sequence: Synthetic oligonucleotide
gcacuuugucagggaaggg

SEQ ID NO: 2335379 - RNA, 19 nt, Artificial Sequence
  Description of Artificial Sequence: Synthetic oligonucleotide
uccuccgcgcucgcggggu

SEQ ID NO: 2335380 - RNA, 19 nt, Artificial Sequence
  Description of Artificial Sequence: Synthetic oligonucleotide
gggaugccaauguucagau

SEQ ID NO: 2335381 - RNA, 19 nt, Artificial Sequence
  Description of Artificial Sequence: Synthetic oligonucleotide
cgaguucucgucugcucgc

SEQ ID NO: 2335382 - RNA, 19 nt, Artificial Sequence
  Description of Artificial Sequence: Synthetic oligonucleotide
gagcccguccucgccgccc

SEQ ID NO: 2335383 - RNA, 19 nt, Artificial Sequence
  Description of Artificial Sequence: Synthetic oligonucleotide
cccggaugggcgagggccg

SEQ ID NO: 2335384 - RNA, 19 nt, Artificial Sequence
  Description of Artificial Sequence: Synthetic oligonucleotide
agcccguccucgccgccca

SEQ ID NO: 2335385 - RNA, 19 nt, Artificial Sequence
  Description of Artificial Sequence: Synthetic oligonucleotide
agcaccugucguguugguu

SEQ ID NO: 2335386 - RNA, 19 nt, Artificial Sequence
  Description of Artificial Sequence: Synthetic oligonucleotide
agcgcggcguugagauacg

SEQ ID NO: 2335387 - RNA, 19 nt, Artificial Sequence
  Description of Artificial Sequence: Synthetic oligonucleotide
aggcuucgauccgucgcug

SEQ ID NO: 2335388 - RNA, 19 nt, Artificial Sequence
  Description of Artificial Sequence: Synthetic oligonucleotide
ccuccagucgguggucugg

SEQ ID NO: 2335389 - RNA, 19 nt, Artificial Sequence
  Description of Artificial Sequence: Synthetic oligonucleotide
cucgccagcuucaggggcu

SEQ ID NO: 2335390 - RNA, 19 nt, Artificial Sequence
  Description of Artificial Sequence: Synthetic oligonucleotide
ggcacggccgggcggccgg

SEQ ID NO: 2335391 - RNA, 19 nt, Artificial Sequence
  Description of Artificial Sequence: Synthetic oligonucleotide
cagucgguggucugguccu

SEQ ID NO: 2335392 - RNA, 19 nt, Artificial Sequence
  Description of Artificial Sequence: Synthetic oligonucleotide
acgucccggcagaucuugg

SEQ ID NO: 2335393 - RNA, 19 nt, Artificial Sequence
  Description of Artificial Sequence: Synthetic oligonucleotide
caggggcuuccuuacagau

SEQ ID NO: 2335394 - RNA, 19 nt, Artificial Sequence
  Description of Artificial Sequence: Synthetic oligonucleotide
ucgauccgucgcugcacuu

SEQ ID NO: 2335395 - RNA, 19 nt, Artificial Sequence
  Description of Artificial Sequence: Synthetic oligonucleotide
caggucucauagcaccugu

SEQ ID NO: 2335396 - RNA, 19 nt, Artificial Sequence
  Description of Artificial Sequence: Synthetic oligonucleotide
ggauccacugagacagcga

SEQ ID NO: 2335397 - RNA, 19 nt, Artificial Sequence
  Description of Artificial Sequence: Synthetic oligonucleotide
cucgcgcgcuggccaacag

SEQ ID NO: 2335398 - RNA, 19 nt, Artificial Sequence
  Description of Artificial Sequence: Synthetic oligonucleotide
ucgccccggcucagguuga

SEQ ID NO: 2335399 - RNA, 19 nt, Artificial Sequence
  Description of Artificial Sequence: Synthetic oligonucleotide
agucgguggucugguccug

SEQ ID NO: 2335400 - RNA, 19 nt, Artificial Sequence
  Description of Artificial Sequence: Synthetic oligonucleotide
gcuguccagguaaggcuug

SEQ ID NO: 2335401 - RNA, 19 nt, Artificial Sequence
  Description of Artificial Sequence: Synthetic oligonucleotide
ccaucggcacggccgggcg

SEQ ID NO: 2335402 - RNA, 19 nt, Artificial Sequence
  Description of Artificial Sequence: Synthetic oligonucleotide
cacacccauuuggugguga

SEQ ID NO: 2335403 - RNA, 19 nt, Artificial Sequence
  Description of Artificial Sequence: Synthetic oligonucleotide
cucgcggggucgcgccccg

SEQ ID NO: 2335404 - RNA, 19 nt, Artificial Sequence
  Description of Artificial Sequence: Synthetic oligonucleotide
gcacuuguacuggcagagc

SEQ ID NO: 2335405 - RNA, 19 nt, Artificial Sequence
  Description of Artificial Sequence: Synthetic oligonucleotide
ucgcucgccccggcucagg

SEQ ID NO: 2335406 - RNA, 19 nt, Artificial Sequence
  Description of Artificial Sequence: Synthetic oligonucleotide
gcguugagauacgugucga

SEQ ID NO: 2335407 - RNA, 19 nt, Artificial Sequence
  Description of Artificial Sequence: Synthetic oligonucleotide
cuccgcgcucgcggggucg

SEQ ID NO: 2335408 - RNA, 19 nt, Artificial Sequence
  Description of Artificial Sequence: Synthetic oligonucleotide
gccacacccauuugguggu

SEQ ID NO: 2335409 - RNA, 19 nt, Artificial Sequence
  Description of Artificial Sequence: Synthetic oligonucleotide
gcuggccaacaggaguagc

SEQ ID NO: 2335410 - RNA, 19 nt, Artificial Sequence
  Description of Artificial Sequence: Synthetic oligonucleotide
caugcggcucgcuggcugu

SEQ ID NO: 2335411 - RNA, 19 nt, Artificial Sequence
  Description of Artificial Sequence: Synthetic oligonucleotide
gccguugcggauggucuug

SEQ ID NO: 2335412 - RNA, 19 nt, Artificial Sequence
  Description of Artificial Sequence: Synthetic oligonucleotide
caggucgagcgcggcguug

SEQ ID NO: 2335413 - RNA, 19 nt, Artificial Sequence
  Description of Artificial Sequence: Synthetic oligonucleotide
cagguugaggucgcggccu

SEQ ID NO: 2335414 - RNA, 19 nt, Artificial Sequence
  Description of Artificial Sequence: Synthetic oligonucleotide
cguagcguggaaaaggcuu

SEQ ID NO: 2335415 - RNA, 19 nt, Artificial Sequence
  Description of Artificial Sequence: Synthetic oligonucleotide
accgaacaauggagagcca

SEQ ID NO: 2335416 - RNA, 19 nt, Artificial Sequence
  Description of Artificial Sequence: Synthetic oligonucleotide
acguucugagaaaguccua

SEQ ID NO: 2335417 - RNA, 19 nt, Artificial Sequence
  Description of Artificial Sequence: Synthetic oligonucleotide
accugucguguugguugca

SEQ ID NO: 2335418 - RNA, 19 nt, Artificial Sequence
  Description of Artificial Sequence: Synthetic oligonucleotide
agcaugcggcucgcuggcu

SEQ ID NO: 2335419 - RNA, 19 nt, Artificial Sequence
  Description of Artificial Sequence: Synthetic oligonucleotide
cugcacgucccggcagauc

SEQ ID NO: 2335420 - RNA, 19 nt, Artificial Sequence
  Description of Artificial Sequence: Synthetic oligonucleotide
cccggcucagguugagguc

SEQ ID NO: 2335421 - RNA, 19 nt, Artificial Sequence
  Description of Artificial Sequence: Synthetic oligonucleotide
cccaaauguaugacacugu

SEQ ID NO: 2335422 - RNA, 19 nt, Artificial Sequence
  Description of Artificial Sequence: Synthetic oligonucleotide
gcguggaaaaggcuucgau

SEQ ID NO: 2335423 - RNA, 19 nt, Artificial Sequence
  Description of Artificial Sequence: Synthetic oligonucleotide
gcucgcucgccccggcuca

SEQ ID NO: 2335424 - RNA, 19 nt, Artificial Sequence
  Description of Artificial Sequence: Synthetic oligonucleotide
ucgccagcuucaggggcuu

SEQ ID NO: 2335425 - RNA, 19 nt, Artificial Sequence
  Description of Artificial Sequence: Synthetic oligonucleotide
cggcguugagauacguguc

SEQ ID NO: 2335426 - RNA, 19 nt, Artificial Sequence
  Description of Artificial Sequence: Synthetic oligonucleotide
cucgcucgccccggcucag

SEQ ID NO: 2335427 - RNA, 19 nt, Artificial Sequence
  Description of Artificial Sequence: Synthetic oligonucleotide
cgcggcguugagauacgug

SEQ ID NO: 2335428 - RNA, 19 nt, Artificial Sequence
  Description of Artificial Sequence: Synthetic oligonucleotide
cccaucggcacggccgggc

SEQ ID NO: 2335429 - RNA, 19 nt, Artificial Sequence
  Description of Artificial Sequence: Synthetic oligonucleotide
gguaaggcuugcagcccaa

SEQ ID NO: 2335430 - RNA, 19 nt, Artificial Sequence
  Description of Artificial Sequence: Synthetic oligonucleotide
ccggcagaucuuggagagg

SEQ ID NO: 2335431 - RNA, 19 nt, Artificial Sequence
  Description of Artificial Sequence: Synthetic oligonucleotide
cacagucauucuugcuuuu

SEQ ID NO: 2335432 - RNA, 19 nt, Artificial Sequence
  Description of Artificial Sequence: Synthetic oligonucleotide
ucggcacggccgggcggcc

SEQ ID NO: 2335433 - RNA, 19 nt, Artificial Sequence
  Description of Artificial Sequence: Synthetic oligonucleotide
cuuuuaccacaggucucau

SEQ ID NO: 2335434 - RNA, 19 nt, Artificial Sequence
  Description of Artificial Sequence: Synthetic oligonucleotide
cccuccagucgguggucug

SEQ ID NO: 2335435 - RNA, 19 nt, Artificial Sequence
  Description of Artificial Sequence: Synthetic oligonucleotide
cgguuuauauccguagcgu

SEQ ID NO: 2335436 - RNA, 19 nt, Artificial Sequence
  Description of Artificial Sequence: Synthetic oligonucleotide
cuccagucgguggucuggu

SEQ ID NO: 2335437 - RNA, 19 nt, Artificial Sequence
  Description of Artificial Sequence: Synthetic oligonucleotide
gccccggcucagguugagg

SEQ ID NO: 2335438 - RNA, 19 nt, Artificial Sequence
  Description of Artificial Sequence: Synthetic oligonucleotide
gcucgcggggucgcgcccc

SEQ ID NO: 2335439 - RNA, 19 nt, Artificial Sequence
  Description of Artificial Sequence: Synthetic oligonucleotide
gcggcucgcuggcugucca

SEQ ID NO: 2335440 - RNA, 19 nt, Artificial Sequence
  Description of Artificial Sequence: Synthetic oligonucleotide
cagcgaguucucgucugcu

SEQ ID NO: 2335441 - RNA, 19 nt, Artificial Sequence
  Description of Artificial Sequence: Synthetic oligonucleotide
cugggcagcggcgcgcgcu

SEQ ID NO: 2335442 - RNA, 19 nt, Artificial Sequence
  Description of Artificial Sequence: Synthetic oligonucleotide
cgcugcacuuguacuggca

SEQ ID NO: 2335443 - RNA, 19 nt, Artificial Sequence
  Description of Artificial Sequence: Synthetic oligonucleotide
gcgcgcgcucgcucgcccc

SEQ ID NO: 2335444 - RNA, 19 nt, Artificial Sequence
  Description of Artificial Sequence: Synthetic oligonucleotide
gcgcgcuggccaacaggag

SEQ ID NO: 2335445 - RNA, 19 nt, Artificial Sequence
  Description of Artificial Sequence: Synthetic oligonucleotide
gcgagggccguggggcccc

SEQ ID NO: 2335446 - RNA, 19 nt, Artificial Sequence
  Description of Artificial Sequence: Synthetic oligonucleotide
cgucugcucgccagcuuca

SEQ ID NO: 2335447 - RNA, 19 nt, Artificial Sequence
  Description of Artificial Sequence: Synthetic oligonucleotide
ccgucgcugcacuuguacu

SEQ ID NO: 2335448 - RNA, 19 nt, Artificial Sequence
  Description of Artificial Sequence: Synthetic oligonucleotide
cgcgcgcucgcucgccccg

SEQ ID NO: 2335449 - RNA, 19 nt, Artificial Sequence
  Description of Artificial Sequence: Synthetic oligonucleotide
auccgucgcugcacuugua

SEQ ID NO: 2335450 - RNA, 19 nt, Artificial Sequence
  Description of Artificial Sequence: Synthetic oligonucleotide
cgcucgcucgccccggcuc

SEQ ID NO: 2335451 - RNA, 19 nt, Artificial Sequence
  Description of Artificial Sequence: Synthetic oligonucleotide
caggagcuccacaguuguu

SEQ ID NO: 2335452 - RNA, 19 nt, Artificial Sequence
  Description of Artificial Sequence: Synthetic oligonucleotide
ggccucgcgcgcuggccaa

SEQ ID NO: 2335453 - RNA, 19 nt, Artificial Sequence
  Description of Artificial Sequence: Synthetic oligonucleotide
cgcgcuggccaacaggagu

SEQ ID NO: 2335454 - RNA, 19 nt, Artificial Sequence
  Description of Artificial Sequence: Synthetic oligonucleotide
cucgucugcucgccagcuu

SEQ ID NO: 2335455 - RNA, 19 nt, Artificial Sequence
  Description of Artificial Sequence: Synthetic oligonucleotide
ccguagcguggaaaaggcu

SEQ ID NO: 2335456 - RNA, 19 nt, Artificial Sequence
  Description of Artificial Sequence: Synthetic oligonucleotide
cguugagauacgugucgau

SEQ ID NO: 2335457 - RNA, 19 nt, Artificial Sequence
  Description of Artificial Sequence: Synthetic oligonucleotide
ucgcggggucgcgccccgu

SEQ ID NO: 2335458 - RNA, 19 nt, Artificial Sequence
  Description of Artificial Sequence: Synthetic oligonucleotide
gcccguccucgccgcccag

SEQ ID NO: 2335459 - RNA, 19 nt, Artificial Sequence
  Description of Artificial Sequence: Synthetic oligonucleotide
cgcgcucgcggggucgcgc

SEQ ID NO: 2335460 - RNA, 19 nt, Artificial Sequence
  Description of Artificial Sequence: Synthetic oligonucleotide
cgcucgcggggucgcgccc

SEQ ID NO: 2335461 - RNA, 19 nt, Artificial Sequence
  Description of Artificial Sequence: Synthetic oligonucleotide
ccccaucggcacggccggg

SEQ ID NO: 2335462 - RNA, 19 nt, Artificial Sequence
  Description of Artificial Sequence: Synthetic oligonucleotide
ccuccgcgcucgcgggguc

SEQ ID NO: 2335463 - RNA, 19 nt, Artificial Sequence
  Description of Artificial Sequence: Synthetic oligonucleotide
cgcggggucgcgccccguc

SEQ ID NO: 2335464 - RNA, 19 nt, Artificial Sequence
  Description of Artificial Sequence: Synthetic oligonucleotide
ccucgcgcgcuggccaaca

SEQ ID NO: 2335465 - RNA, 19 nt, Artificial Sequence
  Description of Artificial Sequence: Synthetic oligonucleotide
gccucgcgcgcuggccaac

SEQ ID NO: 2335466 - RNA, 19 nt, Artificial Sequence
  Description of Artificial Sequence: Synthetic oligonucleotide
cggcacggccgggcggccg

SEQ ID NO: 2335467 - RNA, 19 nt, Artificial Sequence
  Description of Artificial Sequence: Synthetic oligonucleotide
gcgcggcguugagauacgu

SEQ ID NO: 2335468 - RNA, 19 nt, Artificial Sequence
  Description of Artificial Sequence: Synthetic oligonucleotide
cgccccggcucagguugag

SEQ ID NO: 2335469 - RNA, 19 nt, Artificial Sequence
  Description of Artificial Sequence: Synthetic oligonucleotide
cgagcgcggcguugagaua

SEQ ID NO: 2335470 - RNA, 19 nt, Artificial Sequence
  Description of Artificial Sequence: Synthetic oligonucleotide
ggaugccguugcggauggu

SEQ ID NO: 2335471 - RNA, 19 nt, Artificial Sequence
  Description of Artificial Sequence: Synthetic oligonucleotide
gcacgucccggcagaucuu

SEQ ID NO: 2335472 - RNA, 19 nt, Artificial Sequence
  Description of Artificial Sequence: Synthetic oligonucleotide
cgccgcccagcaggucgag

SEQ ID NO: 2335473 - RNA, 19 nt, Artificial Sequence
  Description of Artificial Sequence: Synthetic oligonucleotide
cgcucgccccggcucaggu

SEQ ID NO: 2335474 - RNA, 19 nt, Artificial Sequence
  Description of Artificial Sequence: Synthetic oligonucleotide
aagaacugaagccucaagc

SEQ ID NO: 2335475 - RNA, 19 nt, Artificial Sequence
  Description of Artificial Sequence: Synthetic oligonucleotide
uggcugaagacuuaaagcg

SEQ ID NO: 2335476 - RNA, 19 nt, Artificial Sequence
  Description of Artificial Sequence: Synthetic oligonucleotide
aagagaacagcucucugac

SEQ ID NO: 2335477 - RNA, 19 nt, Artificial Sequence
  Description of Artificial Sequence: Synthetic oligonucleotide
aacaguaacguuuucccag

SEQ ID NO: 2335478 - RNA, 19 nt, Artificial Sequence
  Description of Artificial Sequence: Synthetic oligonucleotide
uuagcaaccugacaaacag

SEQ ID NO: 2335479 - RNA, 19 nt, Artificial Sequence
  Description of Artificial Sequence: Synthetic oligonucleotide
uuuauugcaggcuauuaag

SEQ ID NO: 2335480 - RNA, 19 nt, Artificial Sequence
  Description of Artificial Sequence: Synthetic oligonucleotide
uugcaggcuauuaagaagg

SEQ ID NO: 2335481 - RNA, 19 nt, Artificial Sequence
  Description of Artificial Sequence: Synthetic oligonucleotide
gauacagaaacucagccac

SEQ ID NO: 2335482 - RNA, 19 nt, Artificial Sequence
  Description of Artificial Sequence: Synthetic oligonucleotide
agggaggucaaucagaguc

SEQ ID NO: 2335483 - RNA, 19 nt, Artificial Sequence
  Description of Artificial Sequence: Synthetic oligonucleotide
cuuaaagcgaucuaagaac

SEQ ID NO: 2335484 - RNA, 19 nt, Artificial Sequence
  Description of Artificial Sequence: Synthetic oligonucleotide
uuaacuuugcugauuuugc

SEQ ID NO: 2335485 - RNA, 19 nt, Artificial Sequence
  Description of Artificial Sequence: Synthetic oligonucleotide
ugcgauaucuuguuuauug

SEQ ID NO: 2335486 - RNA, 19 nt, Artificial Sequence
  Description of Artificial Sequence: Synthetic oligonucleotide
aauucaaacucuuugccuu

SEQ ID NO: 2335487 - RNA, 19 nt, Artificial Sequence
  Description of Artificial Sequence: Synthetic oligonucleotide
caaacaguaacguuuuccc

SEQ ID NO: 2335488 - RNA, 19 nt, Artificial Sequence
  Description of Artificial Sequence: Synthetic oligonucleotide
uuaaagcgaucuaagaacu

SEQ ID NO: 2335489 - RNA, 19 nt, Artificial Sequence
  Description of Artificial Sequence: Synthetic oligonucleotide
aacguuuucccagagucac

SEQ ID NO: 2335490 - RNA, 19 nt, Artificial Sequence
  Description of Artificial Sequence: Synthetic oligonucleotide
acaaacaguaacguuuucc

SEQ ID NO: 2335491 - RNA, 19 nt, Artificial Sequence
  Description of Artificial Sequence: Synthetic oligonucleotide
uuuguaugcagcagaacug

SEQ ID NO: 2335492 - RNA, 19 nt, Artificial Sequence
  Description of Artificial Sequence: Synthetic oligonucleotide
auaucuuguuuauugcagg

SEQ ID NO: 2335493 - RNA, 19 nt, Artificial Sequence
  Description of Artificial Sequence: Synthetic oligonucleotide
ugacuuuagaccuuccacc

SEQ ID NO: 2335494 - RNA, 19 nt, Artificial Sequence
  Description of Artificial Sequence: Synthetic oligonucleotide
ugcugaauuaacuuugcug

SEQ ID NO: 2335495 - RNA, 19 nt, Artificial Sequence
  Description of Artificial Sequence: Synthetic oligonucleotide
augaccaggguuugcagcc

SEQ ID NO: 2335496 - RNA, 19 nt, Artificial Sequence
  Description of Artificial Sequence: Synthetic oligonucleotide
gagaacagcucucugacug

SEQ ID NO: 2335497 - RNA, 19 nt, Artificial Sequence
  Description of Artificial Sequence: Synthetic oligonucleotide
ucagucauagaugaccagg

SEQ ID NO: 2335498 - RNA, 19 nt, Artificial Sequence
  Description of Artificial Sequence: Synthetic oligonucleotide
cuggaugucagccaugccg

SEQ ID NO: 2335499 - RNA, 19 nt, Artificial Sequence
  Description of Artificial Sequence: Synthetic oligonucleotide
aagccucaagcucucgugc

SEQ ID NO: 2335500 - RNA, 19 nt, Artificial Sequence
  Description of Artificial Sequence: Synthetic oligonucleotide
gauaucuuguuuauugcag

SEQ ID NO: 2335501 - RNA, 19 nt, Artificial Sequence
  Description of Artificial Sequence: Synthetic oligonucleotide
caggcuauuaagaaggaug

SEQ ID NO: 2335502 - RNA, 19 nt, Artificial Sequence
  Description of Artificial Sequence: Synthetic oligonucleotide
acuuaaagcgaucuaagaa

SEQ ID NO: 2335503 - RNA, 19 nt, Artificial Sequence
  Description of Artificial Sequence: Synthetic oligonucleotide
uugacuuuagaccuuccac

SEQ ID NO: 2335504 - RNA, 19 nt, Artificial Sequence
  Description of Artificial Sequence: Synthetic oligonucleotide
auugcaggcuauuaagaag

SEQ ID NO: 2335505 - RNA, 19 nt, Artificial Sequence
  Description of Artificial Sequence: Synthetic oligonucleotide
uuauugcaggcuauuaaga

SEQ ID NO: 2335506 - RNA, 19 nt, Artificial Sequence
  Description of Artificial Sequence: Synthetic oligonucleotide
cuggcugaagacuuaaagc

SEQ ID NO: 2335507 - RNA, 19 nt, Artificial Sequence
  Description of Artificial Sequence: Synthetic oligonucleotide
gaggaccugauacagaaac

SEQ ID NO: 2335508 - RNA, 19 nt, Artificial Sequence
  Description of Artificial Sequence: Synthetic oligonucleotide
caugcugucgaugaggacc

SEQ ID NO: 2335509 - RNA, 19 nt, Artificial Sequence
  Description of Artificial Sequence: Synthetic oligonucleotide
ugauacagaaacucagcca

SEQ ID NO: 2335510 - RNA, 19 nt, Artificial Sequence
  Description of Artificial Sequence: Synthetic oligonucleotide
aagacuuaaagcgaucuaa

SEQ ID NO: 2335511 - RNA, 19 nt, Artificial Sequence
  Description of Artificial Sequence: Synthetic oligonucleotide
aacucagccacaucuuuca

SEQ ID NO: 2335512 - RNA, 19 nt, Artificial Sequence
  Description of Artificial Sequence: Synthetic oligonucleotide
ucgagguaaggcuggaagg

SEQ ID NO: 2335513 - RNA, 19 nt, Artificial Sequence
  Description of Artificial Sequence: Synthetic oligonucleotide
gucgaugaggaccugauac

SEQ ID NO: 2335514 - RNA, 19 nt, Artificial Sequence
  Description of Artificial Sequence: Synthetic oligonucleotide
guugaguuccuuuucgagc

SEQ ID NO: 2335515 - RNA, 19 nt, Artificial Sequence
  Description of Artificial Sequence: Synthetic oligonucleotide
ugcugcugaauuaacuuug

SEQ ID NO: 2335516 - RNA, 19 nt, Artificial Sequence
  Description of Artificial Sequence: Synthetic oligonucleotide
uaucuuguuuauugcaggc

SEQ ID NO: 2335517 - RNA, 19 nt, Artificial Sequence
  Description of Artificial Sequence: Synthetic oligonucleotide
uuugaggggcaacugggag

SEQ ID NO: 2335518 - RNA, 19 nt, Artificial Sequence
  Description of Artificial Sequence: Synthetic oligonucleotide
aaagcgaucuaagaacuga

SEQ ID NO: 2335519 - RNA, 19 nt, Artificial Sequence
  Description of Artificial Sequence: Synthetic oligonucleotide
gucaaucagagucaggcug

SEQ ID NO: 2335520 - RNA, 19 nt, Artificial Sequence
  Description of Artificial Sequence: Synthetic oligonucleotide
gcugaauuaacuuugcuga

SEQ ID NO: 2335521 - RNA, 19 nt, Artificial Sequence
  Description of Artificial Sequence: Synthetic oligonucleotide
aacuguugguaauggaagu

SEQ ID NO: 2335522 - RNA, 19 nt, Artificial Sequence
  Description of Artificial Sequence: Synthetic oligonucleotide
aucgagguaaggcuggaag

SEQ ID NO: 2335523 - RNA, 19 nt, Artificial Sequence
  Description of Artificial Sequence: Synthetic oligonucleotide
aaacaguaacguuuuccca

SEQ ID NO: 2335524 - RNA, 19 nt, Artificial Sequence
  Description of Artificial Sequence: Synthetic oligonucleotide
ucuuguuuauugcaggcua

SEQ ID NO: 2335525 - RNA, 19 nt, Artificial Sequence
  Description of Artificial Sequence: Synthetic oligonucleotide
aagcccaacgaagagaaca

SEQ ID NO: 2335526 - RNA, 19 nt, Artificial Sequence
  Description of Artificial Sequence: Synthetic oligonucleotide
guaguggccaguuagcaac

SEQ ID NO: 2335527 - RNA, 19 nt, Artificial Sequence
  Description of Artificial Sequence: Synthetic oligonucleotide
gguaauggaagucugugug

SEQ ID NO: 2335528 - RNA, 19 nt, Artificial Sequence
  Description of Artificial Sequence: Synthetic oligonucleotide
uauugcaggcuauuaagaa

SEQ ID NO: 2335529 - RNA, 19 nt, Artificial Sequence
  Description of Artificial Sequence: Synthetic oligonucleotide
gaagagaacagcucucuga

SEQ ID NO: 2335530 - RNA, 19 nt, Artificial Sequence
  Description of Artificial Sequence: Synthetic oligonucleotide
caaggaaucgagguaaggc

SEQ ID NO: 2335531 - RNA, 19 nt, Artificial Sequence
  Description of Artificial Sequence: Synthetic oligonucleotide
ugcaguacuggaacugucc

SEQ ID NO: 2335532 - RNA, 19 nt, Artificial Sequence
  Description of Artificial Sequence: Synthetic oligonucleotide
uccagaugaacuuccagaa

SEQ ID NO: 2335533 - RNA, 19 nt, Artificial Sequence
  Description of Artificial Sequence: Synthetic oligonucleotide
ucaaucagagucaggcugu

SEQ ID NO: 2335534 - RNA, 19 nt, Artificial Sequence
  Description of Artificial Sequence: Synthetic oligonucleotide
aggguuugcagccagggcu

SEQ ID NO: 2335535 - RNA, 19 nt, Artificial Sequence
  Description of Artificial Sequence: Synthetic oligonucleotide
aacguugcacuauccacca

SEQ ID NO: 2335536 - RNA, 19 nt, Artificial Sequence
  Description of Artificial Sequence: Synthetic oligonucleotide
uaacuuugcugauuuugcc

SEQ ID NO: 2335537 - RNA, 19 nt, Artificial Sequence
  Description of Artificial Sequence: Synthetic oligonucleotide
ucuaagaacugaagccuca

SEQ ID NO: 2335538 - RNA, 19 nt, Artificial Sequence
  Description of Artificial Sequence: Synthetic oligonucleotide
agaccuuccacccaccaca

SEQ ID NO: 2335539 - RNA, 19 nt, Artificial Sequence
  Description of Artificial Sequence: Synthetic oligonucleotide
ugaagacuuaaagcgaucu

SEQ ID NO: 2335540 - RNA, 19 nt, Artificial Sequence
  Description of Artificial Sequence: Synthetic oligonucleotide
uaagaacugaagccucaag

SEQ ID NO: 2335541 - RNA, 19 nt, Artificial Sequence
  Description of Artificial Sequence: Synthetic oligonucleotide
gaacguugcacuauccacc

SEQ ID NO: 2335542 - RNA, 19 nt, Artificial Sequence
  Description of Artificial Sequence: Synthetic oligonucleotide
uguugacuuuguaugcagc

SEQ ID NO: 2335543 - RNA, 19 nt, Artificial Sequence
  Description of Artificial Sequence: Synthetic oligonucleotide
cagaugaacuuccagaaca

SEQ ID NO: 2335544 - RNA, 19 nt, Artificial Sequence
  Description of Artificial Sequence: Synthetic oligonucleotide
cucuguaguggccaguuag

SEQ ID NO: 2335545 - RNA, 19 nt, Artificial Sequence
  Description of Artificial Sequence: Synthetic oligonucleotide
aguuagcaaccugacaaac

SEQ ID NO: 2335546 - RNA, 19 nt, Artificial Sequence
  Description of Artificial Sequence: Synthetic oligonucleotide
uauuaagaaggaugguguc

SEQ ID NO: 2335547 - RNA, 19 nt, Artificial Sequence
  Description of Artificial Sequence: Synthetic oligonucleotide
augaggaccugauacagaa

SEQ ID NO: 2335548 - RNA, 19 nt, Artificial Sequence
  Description of Artificial Sequence: Synthetic oligonucleotide
cuuuagaccuuccacccac

SEQ ID NO: 2335549 - RNA, 19 nt, Artificial Sequence
  Description of Artificial Sequence: Synthetic oligonucleotide
gaccgggugacucguaagg

SEQ ID NO: 2335550 - RNA, 19 nt, Artificial Sequence
  Description of Artificial Sequence: Synthetic oligonucleotide
uugccauugcgauaucuug

SEQ ID NO: 2335551 - RNA, 19 nt, Artificial Sequence
  Description of Artificial Sequence: Synthetic oligonucleotide
uggccaguuagcaaccuga

SEQ ID NO: 2335552 - RNA, 19 nt, Artificial Sequence
  Description of Artificial Sequence: Synthetic oligonucleotide
gaagccucaagcucucgug

SEQ ID NO: 2335553 - RNA, 19 nt, Artificial Sequence
  Description of Artificial Sequence: Synthetic oligonucleotide
uggaacguugcacuaucca

SEQ ID NO: 2335554 - RNA, 19 nt, Artificial Sequence
  Description of Artificial Sequence: Synthetic oligonucleotide
aagguguugaguuccuuuu

SEQ ID NO: 2335555 - RNA, 19 nt, Artificial Sequence
  Description of Artificial Sequence: Synthetic oligonucleotide
aacgaagagaacagcucuc

SEQ ID NO: 2335556 - RNA, 19 nt, Artificial Sequence
  Description of Artificial Sequence: Synthetic oligonucleotide
gacuuaaagcgaucuaaga

SEQ ID NO: 2335557 - RNA, 19 nt, Artificial Sequence
  Description of Artificial Sequence: Synthetic oligonucleotide
ugacaaacaguaacguuuu

SEQ ID NO: 2335558 - RNA, 19 nt, Artificial Sequence
  Description of Artificial Sequence: Synthetic oligonucleotide
uugacuuuguaugcagcag

SEQ ID NO: 2335559 - RNA, 19 nt, Artificial Sequence
  Description of Artificial Sequence: Synthetic oligonucleotide
auuaagaaggauggugucu

SEQ ID NO: 2335560 - RNA, 19 nt, Artificial Sequence
  Description of Artificial Sequence: Synthetic oligonucleotide
agccucaagcucucgugcc

SEQ ID NO: 2335561 - RNA, 19 nt, Artificial Sequence
  Description of Artificial Sequence: Synthetic oligonucleotide
uaacguuuucccagaguca

SEQ ID NO: 2335562 - RNA, 19 nt, Artificial Sequence
  Description of Artificial Sequence: Synthetic oligonucleotide
acuuugaggggcaacuggg

SEQ ID NO: 2335563 - RNA, 19 nt, Artificial Sequence
  Description of Artificial Sequence: Synthetic oligonucleotide
guugacuuuguaugcagca

SEQ ID NO: 2335564 - RNA, 19 nt, Artificial Sequence
  Description of Artificial Sequence: Synthetic oligonucleotide
uucagacccaugcugucga

SEQ ID NO: 2335565 - RNA, 19 nt, Artificial Sequence
  Description of Artificial Sequence: Synthetic oligonucleotide
ugccucaaggaaucgaggu

SEQ ID NO: 2335566 - RNA, 19 nt, Artificial Sequence
  Description of Artificial Sequence: Synthetic oligonucleotide
auugcgauaucuuguuuau

SEQ ID NO: 2335567 - RNA, 19 nt, Artificial Sequence
  Description of Artificial Sequence: Synthetic oligonucleotide
cuauuaagaaggauggugu

SEQ ID NO: 2335568 - RNA, 19 nt, Artificial Sequence
  Description of Artificial Sequence: Synthetic oligonucleotide
ucaaggaaucgagguaagg

SEQ ID NO: 2335569 - RNA, 19 nt, Artificial Sequence
  Description of Artificial Sequence: Synthetic oligonucleotide
ucguaagguguugaguucc

SEQ ID NO: 2335570 - RNA, 19 nt, Artificial Sequence
  Description of Artificial Sequence: Synthetic oligonucleotide
ucgaugaggaccugauaca

SEQ ID NO: 2335571 - RNA, 19 nt, Artificial Sequence
  Description of Artificial Sequence: Synthetic oligonucleotide
aguacuggaacuguccagu

SEQ ID NO: 2335572 - RNA, 19 nt, Artificial Sequence
  Description of Artificial Sequence: Synthetic oligonucleotide
ugccagucagucauagaug

SEQ ID NO: 2335573 - RNA, 19 nt, Artificial Sequence
  Description of Artificial Sequence: Synthetic oligonucleotide
uuguaugcagcagaacugu

SEQ ID NO: 2335574 - RNA, 19 nt, Artificial Sequence
  Description of Artificial Sequence: Synthetic oligonucleotide
gcgaucuaagaacugaagc

SEQ ID NO: 2335575 - RNA, 19 nt, Artificial Sequence
  Description of Artificial Sequence: Synthetic oligonucleotide
guuuauugcaggcuauuaa

SEQ ID NO: 2335576 - RNA, 19 nt, Artificial Sequence
  Description of Artificial Sequence: Synthetic oligonucleotide
cgaucuaagaacugaagcc

SEQ ID NO: 2335577 - RNA, 19 nt, Artificial Sequence
  Description of Artificial Sequence: Synthetic oligonucleotide
agacuuaaagcgaucuaag

SEQ ID NO: 2335578 - RNA, 19 nt, Artificial Sequence
  Description of Artificial Sequence: Synthetic oligonucleotide
acuauccaccacgaacacc

SEQ ID NO: 2335579 - RNA, 19 nt, Artificial Sequence
  Description of Artificial Sequence: Synthetic oligonucleotide
augaacuuccagaacacca

SEQ ID NO: 2335580 - RNA, 19 nt, Artificial Sequence
  Description of Artificial Sequence: Synthetic oligonucleotide
ugguaauggaagucugugu

SEQ ID NO: 2335581 - RNA, 19 nt, Artificial Sequence
  Description of Artificial Sequence: Synthetic oligonucleotide
ucagagucaggcuguugcc

SEQ ID NO: 2335582 - RNA, 19 nt, Artificial Sequence
  Description of Artificial Sequence: Synthetic oligonucleotide
uguuauuguugacuuugua

SEQ ID NO: 2335583 - RNA, 19 nt, Artificial Sequence
  Description of Artificial Sequence: Synthetic oligonucleotide
ugaagccucaagcucucgu

SEQ ID NO: 2335584 - RNA, 19 nt, Artificial Sequence
  Description of Artificial Sequence: Synthetic oligonucleotide
ugugucucuguaguggcca

SEQ ID NO: 2335585 - RNA, 19 nt, Artificial Sequence
  Description of Artificial Sequence: Synthetic oligonucleotide
acgaacaccacagcccugg

SEQ ID NO: 2335586 - RNA, 19 nt, Artificial Sequence
  Description of Artificial Sequence: Synthetic oligonucleotide
gaucuaagaacugaagccu

SEQ ID NO: 2335587 - RNA, 19 nt, Artificial Sequence
  Description of Artificial Sequence: Synthetic oligonucleotide
agguguugaguuccuuuuc

SEQ ID NO: 2335588 - RNA, 19 nt, Artificial Sequence
  Description of Artificial Sequence: Synthetic oligonucleotide
uagaugaccaggguuugca

SEQ ID NO: 2335589 - RNA, 19 nt, Artificial Sequence
  Description of Artificial Sequence: Synthetic oligonucleotide
gauuuugccauugcgauau

SEQ ID NO: 2335590 - RNA, 19 nt, Artificial Sequence
  Description of Artificial Sequence: Synthetic oligonucleotide
acaguaacguuuucccaga

SEQ ID NO: 2335591 - RNA, 19 nt, Artificial Sequence
  Description of Artificial Sequence: Synthetic oligonucleotide
uuagaccuuccacccacca

SEQ ID NO: 2335592 - RNA, 19 nt, Artificial Sequence
  Description of Artificial Sequence: Synthetic oligonucleotide
gagguaaggcuggaaggcg

SEQ ID NO: 2335593 - RNA, 19 nt, Artificial Sequence
  Description of Artificial Sequence: Synthetic oligonucleotide
ugacucguaagguguugag

SEQ ID NO: 2335594 - RNA, 19 nt, Artificial Sequence
  Description of Artificial Sequence: Synthetic oligonucleotide
aucuaagaacugaagccuc

SEQ ID NO: 2335595 - RNA, 19 nt, Artificial Sequence
  Description of Artificial Sequence: Synthetic oligonucleotide
uuuagaccuuccacccacc

SEQ ID NO: 2335596 - RNA, 19 nt, Artificial Sequence
  Description of Artificial Sequence: Synthetic oligonucleotide
aguaacguuuucccagagu

SEQ ID NO: 2335597 - RNA, 19 nt, Artificial Sequence
  Description of Artificial Sequence: Synthetic oligonucleotide
auagaugaccaggguuugc

SEQ ID NO: 2335598 - RNA, 19 nt, Artificial Sequence
  Description of Artificial Sequence: Synthetic oligonucleotide
cacaaagcccaacgaagag

SEQ ID NO: 2335599 - RNA, 19 nt, Artificial Sequence
  Description of Artificial Sequence: Synthetic oligonucleotide
cugacaaacaguaacguuu

SEQ ID NO: 2335600 - RNA, 19 nt, Artificial Sequence
  Description of Artificial Sequence: Synthetic oligonucleotide
uuucaccucccgcuggaac

SEQ ID NO: 2335601 - RNA, 19 nt, Artificial Sequence
  Description of Artificial Sequence: Synthetic oligonucleotide
acuuuguaugcagcagaac

SEQ ID NO: 2335602 - RNA, 19 nt, Artificial Sequence
  Description of Artificial Sequence: Synthetic oligonucleotide
cacaucuuucaccucccgc

SEQ ID NO: 2335603 - RNA, 19 nt, Artificial Sequence
  Description of Artificial Sequence: Synthetic oligonucleotide
uacuggaacuguccagugu

SEQ ID NO: 2335604 - RNA, 19 nt, Artificial Sequence
  Description of Artificial Sequence: Synthetic oligonucleotide
guaugcagcagaacuguug

SEQ ID NO: 2335605 - RNA, 19 nt, Artificial Sequence
  Description of Artificial Sequence: Synthetic oligonucleotide
uuuugccauugcgauaucu

SEQ ID NO: 2335606 - RNA, 19 nt, Artificial Sequence
  Description of Artificial Sequence: Synthetic oligonucleotide
agcccuuuccugcugccag

SEQ ID NO: 2335607 - RNA, 19 nt, Artificial Sequence
  Description of Artificial Sequence: Synthetic oligonucleotide
cauugcgauaucuuguuua

SEQ ID NO: 2335608 - RNA, 19 nt, Artificial Sequence
  Description of Artificial Sequence: Synthetic oligonucleotide
agucagucauagaugacca

SEQ ID NO: 2335609 - RNA, 19 nt, Artificial Sequence
  Description of Artificial Sequence: Synthetic oligonucleotide
ugcagcagaacuguuggua

SEQ ID NO: 2335610 - RNA, 19 nt, Artificial Sequence
  Description of Artificial Sequence: Synthetic oligonucleotide
aggaaucgagguaaggcug

SEQ ID NO: 2335611 - RNA, 19 nt, Artificial Sequence
  Description of Artificial Sequence: Synthetic oligonucleotide
agcaaccugacaaacagua

SEQ ID NO: 2335612 - RNA, 19 nt, Artificial Sequence
  Description of Artificial Sequence: Synthetic oligonucleotide
ccugauacagaaacucagc

SEQ ID NO: 2335613 - RNA, 19 nt, Artificial Sequence
  Description of Artificial Sequence: Synthetic oligonucleotide
uagaccuuccacccaccac

SEQ ID NO: 2335614 - RNA, 19 nt, Artificial Sequence
  Description of Artificial Sequence: Synthetic oligonucleotide
acagcccuuuccugcugcc

SEQ ID NO: 2335615 - RNA, 19 nt, Artificial Sequence
  Description of Artificial Sequence: Synthetic oligonucleotide
ugauuuugccauugcgaua

SEQ ID NO: 2335616 - RNA, 19 nt, Artificial Sequence
  Description of Artificial Sequence: Synthetic oligonucleotide
cugccucaaggaaucgagg

SEQ ID NO: 2335617 - RNA, 19 nt, Artificial Sequence
  Description of Artificial Sequence: Synthetic oligonucleotide
acccaccacagcccuuucc

SEQ ID NO: 2335618 - RNA, 19 nt, Artificial Sequence
  Description of Artificial Sequence: Synthetic oligonucleotide
caguacuggaacuguccag

SEQ ID NO: 2335619 - RNA, 19 nt, Artificial Sequence
  Description of Artificial Sequence: Synthetic oligonucleotide
gagucacaaagcccaacga

SEQ ID NO: 2335620 - RNA, 19 nt, Artificial Sequence
  Description of Artificial Sequence: Synthetic oligonucleotide
cucaaggaaucgagguaag

SEQ ID NO: 2335621 - RNA, 19 nt, Artificial Sequence
  Description of Artificial Sequence: Synthetic oligonucleotide
acccaugcugucgaugagg

SEQ ID NO: 2335622 - RNA, 19 nt, Artificial Sequence
  Description of Artificial Sequence: Synthetic oligonucleotide
gaacuccacuuugaggggc

SEQ ID NO: 2335623 - RNA, 19 nt, Artificial Sequence
  Description of Artificial Sequence: Synthetic oligonucleotide
aucuuguuuauugcaggcu

SEQ ID NO: 2335624 - RNA, 19 nt, Artificial Sequence
  Description of Artificial Sequence: Synthetic oligonucleotide
cugcauuccaggaacucca

SEQ ID NO: 2335625 - RNA, 19 nt, Artificial Sequence
  Description of Artificial Sequence: Synthetic oligonucleotide
uuuucgagcugcugcugaa

SEQ ID NO: 2335626 - RNA, 19 nt, Artificial Sequence
  Description of Artificial Sequence: Synthetic oligonucleotide
uugccccuguuauuguuga

SEQ ID NO: 2335627 - RNA, 19 nt, Artificial Sequence
  Description of Artificial Sequence: Synthetic oligonucleotide
uagcaaccugacaaacagu

SEQ ID NO: 2335628 - RNA, 19 nt, Artificial Sequence
  Description of Artificial Sequence: Synthetic oligonucleotide
gaagacuuaaagcgaucua

SEQ ID NO: 2335629 - RNA, 19 nt, Artificial Sequence
  Description of Artificial Sequence: Synthetic oligonucleotide
agcgaucuaagaacugaag

SEQ ID NO: 2335630 - RNA, 19 nt, Artificial Sequence
  Description of Artificial Sequence: Synthetic oligonucleotide
ggaaucgagguaaggcugg

SEQ ID NO: 2335631 - RNA, 19 nt, Artificial Sequence
  Description of Artificial Sequence: Synthetic oligonucleotide
gcgauaucuuguuuauugc

SEQ ID NO: 2335632 - RNA, 19 nt, Artificial Sequence
  Description of Artificial Sequence: Synthetic oligonucleotide
cucguaagguguugaguuc

SEQ ID NO: 2335633 - RNA, 19 nt, Artificial Sequence
  Description of Artificial Sequence: Synthetic oligonucleotide
agcaggaccgcgagcaccg

SEQ ID NO: 2335634 - RNA, 19 nt, Artificial Sequence
  Description of Artificial Sequence: Synthetic oligonucleotide
caucuuucaccucccgcug

SEQ ID NO: 2335635 - RNA, 19 nt, Artificial Sequence
  Description of Artificial Sequence: Synthetic oligonucleotide
cugagcaggugcaguacug

SEQ ID NO: 2335636 - RNA, 19 nt, Artificial Sequence
  Description of Artificial Sequence: Synthetic oligonucleotide
cuggaacguugcacuaucc

SEQ ID NO: 2335637 - RNA, 19 nt, Artificial Sequence
  Description of Artificial Sequence: Synthetic oligonucleotide
gccagucagucauagauga

SEQ ID NO: 2335638 - RNA, 19 nt, Artificial Sequence
  Description of Artificial Sequence: Synthetic oligonucleotide
agcccaacgaagagaacag

SEQ ID NO: 2335639 - RNA, 19 nt, Artificial Sequence
  Description of Artificial Sequence: Synthetic oligonucleotide
gucagucauagaugaccag

SEQ ID NO: 2335640 - RNA, 19 nt, Artificial Sequence
  Description of Artificial Sequence: Synthetic oligonucleotide
gaccugauacagaaacuca

SEQ ID NO: 2335641 - RNA, 19 nt, Artificial Sequence
  Description of Artificial Sequence: Synthetic oligonucleotide
ggaacuccacuuugagggg

SEQ ID NO: 2335642 - RNA, 19 nt, Artificial Sequence
  Description of Artificial Sequence: Synthetic oligonucleotide
acgaagagaacagcucucu

SEQ ID NO: 2335643 - RNA, 19 nt, Artificial Sequence
  Description of Artificial Sequence: Synthetic oligonucleotide
accugacaaacaguaacgu

SEQ ID NO: 2335644 - RNA, 19 nt, Artificial Sequence
  Description of Artificial Sequence: Synthetic oligonucleotide
aagcgaucuaagaacugaa

SEQ ID NO: 2335645 - RNA, 19 nt, Artificial Sequence
  Description of Artificial Sequence: Synthetic oligonucleotide
cugaagacuuaaagcgauc

SEQ ID NO: 2335646 - RNA, 19 nt, Artificial Sequence
  Description of Artificial Sequence: Synthetic oligonucleotide
agaccgggugacucguaag

SEQ ID NO: 2335647 - RNA, 19 nt, Artificial Sequence
  Description of Artificial Sequence: Synthetic oligonucleotide
cguugcacuauccaccacg

SEQ ID NO: 2335648 - RNA, 19 nt, Artificial Sequence
  Description of Artificial Sequence: Synthetic oligonucleotide
cugauuuugccauugcgau

SEQ ID NO: 2335649 - RNA, 19 nt, Artificial Sequence
  Description of Artificial Sequence: Synthetic oligonucleotide
ugcuccagaugaacuucca

SEQ ID NO: 2335650 - RNA, 19 nt, Artificial Sequence
  Description of Artificial Sequence: Synthetic oligonucleotide
cugccuugacuuuagaccu

SEQ ID NO: 2335651 - RNA, 19 nt, Artificial Sequence
  Description of Artificial Sequence: Synthetic oligonucleotide
ggaccugauacagaaacuc

SEQ ID NO: 2335652 - RNA, 19 nt, Artificial Sequence
  Description of Artificial Sequence: Synthetic oligonucleotide
cauagaugaccaggguuug

SEQ ID NO: 2335653 - RNA, 19 nt, Artificial Sequence
  Description of Artificial Sequence: Synthetic oligonucleotide
ccugccucaaggaaucgag

SEQ ID NO: 2335654 - RNA, 19 nt, Artificial Sequence
  Description of Artificial Sequence: Synthetic oligonucleotide
agcguugggucccucugcu

SEQ ID NO: 2335655 - RNA, 19 nt, Artificial Sequence
  Description of Artificial Sequence: Synthetic oligonucleotide
gcugauuuugccauugcga

SEQ ID NO: 2335656 - RNA, 19 nt, Artificial Sequence
  Description of Artificial Sequence: Synthetic oligonucleotide
aggcuguugccccuguuau

SEQ ID NO: 2335657 - RNA, 19 nt, Artificial Sequence
  Description of Artificial Sequence: Synthetic oligonucleotide
ugaggaccugauacagaaa

SEQ ID NO: 2335658 - RNA, 19 nt, Artificial Sequence
  Description of Artificial Sequence: Synthetic oligonucleotide
guugccccuguuauuguug

SEQ ID NO: 2335659 - RNA, 19 nt, Artificial Sequence
  Description of Artificial Sequence: Synthetic oligonucleotide
acggacagcagcguugggu

SEQ ID NO: 2335660 - RNA, 19 nt, Artificial Sequence
  Description of Artificial Sequence: Synthetic oligonucleotide
aggugcaguacuggaacug

SEQ ID NO: 2335661 - RNA, 19 nt, Artificial Sequence
  Description of Artificial Sequence: Synthetic oligonucleotide
cagcagaccgggugacucg

SEQ ID NO: 2335662 - RNA, 19 nt, Artificial Sequence
  Description of Artificial Sequence: Synthetic oligonucleotide
cuuugaggggcaacuggga

SEQ ID NO: 2335663 - RNA, 19 nt, Artificial Sequence
  Description of Artificial Sequence: Synthetic oligonucleotide
ugucgaugaggaccugaua

SEQ ID NO: 2335664 - RNA, 19 nt, Artificial Sequence
  Description of Artificial Sequence: Synthetic oligonucleotide
gagcaggugcaguacugga

SEQ ID NO: 2335665 - RNA, 19 nt, Artificial Sequence
  Description of Artificial Sequence: Synthetic oligonucleotide
accuuccacccaccacagc

SEQ ID NO: 2335666 - RNA, 19 nt, Artificial Sequence
  Description of Artificial Sequence: Synthetic oligonucleotide
guugcacuauccaccacga

SEQ ID NO: 2335667 - RNA, 19 nt, Artificial Sequence
  Description of Artificial Sequence: Synthetic oligonucleotide
cacccuuggcacugcauuc

SEQ ID NO: 2335668 - RNA, 19 nt, Artificial Sequence
  Description of Artificial Sequence: Synthetic oligonucleotide
caguaacguuuucccagag

SEQ ID NO: 2335669 - RNA, 19 nt, Artificial Sequence
  Description of Artificial Sequence: Synthetic oligonucleotide
gacccaugcugucgaugag

SEQ ID NO: 2335670 - RNA, 19 nt, Artificial Sequence
  Description of Artificial Sequence: Synthetic oligonucleotide
gaccuuccacccaccacag

SEQ ID NO: 2335671 - RNA, 19 nt, Artificial Sequence
  Description of Artificial Sequence: Synthetic oligonucleotide
acguugcacuauccaccac

SEQ ID NO: 2335672 - RNA, 19 nt, Artificial Sequence
  Description of Artificial Sequence: Synthetic oligonucleotide
aaucgagguaaggcuggaa

SEQ ID NO: 2335673 - RNA, 19 nt, Artificial Sequence
  Description of Artificial Sequence: Synthetic oligonucleotide
gcuccagaugaacuuccag

SEQ ID NO: 2335674 - RNA, 19 nt, Artificial Sequence
  Description of Artificial Sequence: Synthetic oligonucleotide
guggccaguuagcaaccug

SEQ ID NO: 2335675 - RNA, 19 nt, Artificial Sequence
  Description of Artificial Sequence: Synthetic oligonucleotide
gccagguguccgcagaagc

SEQ ID NO: 2335676 - RNA, 19 nt, Artificial Sequence
  Description of Artificial Sequence: Synthetic oligonucleotide
gcaguacuggaacugucca

SEQ ID NO: 2335677 - RNA, 19 nt, Artificial Sequence
  Description of Artificial Sequence: Synthetic oligonucleotide
gaucuuggccagccacuuc

SEQ ID NO: 2335678 - RNA, 19 nt, Artificial Sequence
  Description of Artificial Sequence: Synthetic oligonucleotide
ucucuguaguggccaguua

SEQ ID NO: 2335679 - RNA, 19 nt, Artificial Sequence
  Description of Artificial Sequence: Synthetic oligonucleotide
augcagcagaacuguuggu

SEQ ID NO: 2335680 - RNA, 19 nt, Artificial Sequence
  Description of Artificial Sequence: Synthetic oligonucleotide
cagcguugggucccucugc

SEQ ID NO: 2335681 - RNA, 19 nt, Artificial Sequence
  Description of Artificial Sequence: Synthetic oligonucleotide
ucccgcuggaacguugcac

SEQ ID NO: 2335682 - RNA, 19 nt, Artificial Sequence
  Description of Artificial Sequence: Synthetic oligonucleotide
aggggcaacugggagaauu

SEQ ID NO: 2335683 - RNA, 19 nt, Artificial Sequence
  Description of Artificial Sequence: Synthetic oligonucleotide
uuucgagcugcugcugaau

SEQ ID NO: 2335684 - RNA, 19 nt, Artificial Sequence
  Description of Artificial Sequence: Synthetic oligonucleotide
gcagcagaacuguugguaa

SEQ ID NO: 2335685 - RNA, 19 nt, Artificial Sequence
  Description of Artificial Sequence: Synthetic oligonucleotide
gcuggaacguugcacuauc

SEQ ID NO: 2335686 - RNA, 19 nt, Artificial Sequence
  Description of Artificial Sequence: Synthetic oligonucleotide
augccggcauccccacguc

SEQ ID NO: 2335687 - RNA, 19 nt, Artificial Sequence
  Description of Artificial Sequence: Synthetic oligonucleotide
gugacucguaagguguuga

SEQ ID NO: 2335688 - RNA, 19 nt, Artificial Sequence
  Description of Artificial Sequence: Synthetic oligonucleotide
uccacccuuggcacugcau

SEQ ID NO: 2335689 - RNA, 19 nt, Artificial Sequence
  Description of Artificial Sequence: Synthetic oligonucleotide
uguccgcagaagccaugaa

SEQ ID NO: 2335690 - RNA, 19 nt, Artificial Sequence
  Description of Artificial Sequence: Synthetic oligonucleotide
cagcaggaccgcgagcacc

SEQ ID NO: 2335691 - RNA, 19 nt, Artificial Sequence
  Description of Artificial Sequence: Synthetic oligonucleotide
cguugggucccucugcugc

SEQ ID NO: 2335692 - RNA, 19 nt, Artificial Sequence
  Description of Artificial Sequence: Synthetic oligonucleotide
acguccacccuuggcacug

SEQ ID NO: 2335693 - RNA, 19 nt, Artificial Sequence
  Description of Artificial Sequence: Synthetic oligonucleotide
gacucguaagguguugagu

SEQ ID NO: 2335694 - RNA, 19 nt, Artificial Sequence
  Description of Artificial Sequence: Synthetic oligonucleotide
accgggugacucguaaggu

SEQ ID NO: 2335695 - RNA, 19 nt, Artificial Sequence
  Description of Artificial Sequence: Synthetic oligonucleotide
ccagaugaacuuccagaac

SEQ ID NO: 2335696 - RNA, 19 nt, Artificial Sequence
  Description of Artificial Sequence: Synthetic oligonucleotide
ggcugaagacuuaaagcga

SEQ ID NO: 2335697 - RNA, 19 nt, Artificial Sequence
  Description of Artificial Sequence: Synthetic oligonucleotide
guaaggcuggaaggcgccc

SEQ ID NO: 2335698 - RNA, 19 nt, Artificial Sequence
  Description of Artificial Sequence: Synthetic oligonucleotide
ugccuugacuuuagaccuu

SEQ ID NO: 2335699 - RNA, 19 nt, Artificial Sequence
  Description of Artificial Sequence: Synthetic oligonucleotide
gaaucgagguaaggcugga

SEQ ID NO: 2335700 - RNA, 19 nt, Artificial Sequence
  Description of Artificial Sequence: Synthetic oligonucleotide
cgagguaaggcuggaaggc

SEQ ID NO: 2335701 - RNA, 19 nt, Artificial Sequence
  Description of Artificial Sequence: Synthetic oligonucleotide
guugguaauggaagucugu

SEQ ID NO: 2335702 - RNA, 19 nt, Artificial Sequence
  Description of Artificial Sequence: Synthetic oligonucleotide
agccaugccggcaucccca

SEQ ID NO: 2335703 - RNA, 19 nt, Artificial Sequence
  Description of Artificial Sequence: Synthetic oligonucleotide
caggaccgcgagcaccgcc

SEQ ID NO: 2335704 - RNA, 19 nt, Artificial Sequence
  Description of Artificial Sequence: Synthetic oligonucleotide
cugaauuaacuuugcugau

SEQ ID NO: 2335705 - RNA, 19 nt, Artificial Sequence
  Description of Artificial Sequence: Synthetic oligonucleotide
gugugucucuguaguggcc

SEQ ID NO: 2335706 - RNA, 19 nt, Artificial Sequence
  Description of Artificial Sequence: Synthetic oligonucleotide
agcagaccgggugacucgu

SEQ ID NO: 2335707 - RNA, 19 nt, Artificial Sequence
  Description of Artificial Sequence: Synthetic oligonucleotide
cagacccaugcugucgaug

SEQ ID NO: 2335708 - RNA, 19 nt, Artificial Sequence
  Description of Artificial Sequence: Synthetic oligonucleotide
aggaccgcgagcaccgcca

SEQ ID NO: 2335709 - RNA, 19 nt, Artificial Sequence
  Description of Artificial Sequence: Synthetic oligonucleotide
gcagcguugggucccucug

SEQ ID NO: 2335710 - RNA, 19 nt, Artificial Sequence
  Description of Artificial Sequence: Synthetic oligonucleotide
ggguuugcagccagggcug

SEQ ID NO: 2335711 - RNA, 19 nt, Artificial Sequence
  Description of Artificial Sequence: Synthetic oligonucleotide
guguccgcagaagccauga

SEQ ID NO: 2335712 - RNA, 19 nt, Artificial Sequence
  Description of Artificial Sequence: Synthetic oligonucleotide
caugccggcauccccacgu

SEQ ID NO: 2335713 - RNA, 19 nt, Artificial Sequence
  Description of Artificial Sequence: Synthetic oligonucleotide
gccucaagcucucgugccc

SEQ ID NO: 2335714 - RNA, 19 nt, Artificial Sequence
  Description of Artificial Sequence: Synthetic oligonucleotide
acacgccagguguccgcag

SEQ ID NO: 2335715 - RNA, 19 nt, Artificial Sequence
  Description of Artificial Sequence: Synthetic oligonucleotide
cagugugcugggagcagca

SEQ ID NO: 2335716 - RNA, 19 nt, Artificial Sequence
  Description of Artificial Sequence: Synthetic oligonucleotide
cugaagccucaagcucucg

SEQ ID NO: 2335717 - RNA, 19 nt, Artificial Sequence
  Description of Artificial Sequence: Synthetic oligonucleotide
uugcgauaucuuguuuauu

SEQ ID NO: 2335718 - RNA, 19 nt, Artificial Sequence
  Description of Artificial Sequence: Synthetic oligonucleotide
cacgaacaccacagcccug

SEQ ID NO: 2335719 - RNA, 19 nt, Artificial Sequence
  Description of Artificial Sequence: Synthetic oligonucleotide
ggugacucguaagguguug

SEQ ID NO: 2335720 - RNA, 19 nt, Artificial Sequence
  Description of Artificial Sequence: Synthetic oligonucleotide
aguggccaguuagcaaccu

SEQ ID NO: 2335721 - RNA, 19 nt, Artificial Sequence
  Description of Artificial Sequence: Synthetic oligonucleotide
gcucucgugcccagggagg

SEQ ID NO: 2335722 - RNA, 19 nt, Artificial Sequence
  Description of Artificial Sequence: Synthetic oligonucleotide
ccgggugacucguaaggug

SEQ ID NO: 2335723 - RNA, 19 nt, Artificial Sequence
  Description of Artificial Sequence: Synthetic oligonucleotide
agcgucagcaggaccgcga

SEQ ID NO: 2335724 - RNA, 19 nt, Artificial Sequence
  Description of Artificial Sequence: Synthetic oligonucleotide
ccucaaggaaucgagguaa

SEQ ID NO: 2335725 - RNA, 19 nt, Artificial Sequence
  Description of Artificial Sequence: Synthetic oligonucleotide
caggcuguugccccuguua

SEQ ID NO: 2335726 - RNA, 19 nt, Artificial Sequence
  Description of Artificial Sequence: Synthetic oligonucleotide
gccaguuagcaaccugaca

SEQ ID NO: 2335727 - RNA, 19 nt, Artificial Sequence
  Description of Artificial Sequence: Synthetic oligonucleotide
acgccagguguccgcagaa

SEQ ID NO: 2335728 - RNA, 19 nt, Artificial Sequence
  Description of Artificial Sequence: Synthetic oligonucleotide
gaccgcgagcaccgccacc

SEQ ID NO: 2335729 - RNA, 19 nt, Artificial Sequence
  Description of Artificial Sequence: Synthetic oligonucleotide
ccacguccacccuuggcac

SEQ ID NO: 2335730 - RNA, 19 nt, Artificial Sequence
  Description of Artificial Sequence: Synthetic oligonucleotide
cccaacgaagagaacagcu

SEQ ID NO: 2335731 - RNA, 19 nt, Artificial Sequence
  Description of Artificial Sequence: Synthetic oligonucleotide
ugggagcagcagaccgggu

SEQ ID NO: 2335732 - RNA, 19 nt, Artificial Sequence
  Description of Artificial Sequence: Synthetic oligonucleotide
cagaccgggugacucguaa

SEQ ID NO: 2335733 - RNA, 19 nt, Artificial Sequence
  Description of Artificial Sequence: Synthetic oligonucleotide
gccacggacagcagcguug

SEQ ID NO: 2335734 - RNA, 19 nt, Artificial Sequence
  Description of Artificial Sequence: Synthetic oligonucleotide
ccucccgcuggaacguugc

SEQ ID NO: 2335735 - RNA, 19 nt, Artificial Sequence
  Description of Artificial Sequence: Synthetic oligonucleotide
gcagcagaccgggugacuc

SEQ ID NO: 2335736 - RNA, 19 nt, Artificial Sequence
  Description of Artificial Sequence: Synthetic oligonucleotide
ccagucagucauagaugac

SEQ ID NO: 2335737 - RNA, 19 nt, Artificial Sequence
  Description of Artificial Sequence: Synthetic oligonucleotide
cacgccagguguccgcaga

SEQ ID NO: 2335738 - RNA, 19 nt, Artificial Sequence
  Description of Artificial Sequence: Synthetic oligonucleotide
acguuuucccagagucaca

SEQ ID NO: 2335739 - RNA, 19 nt, Artificial Sequence
  Description of Artificial Sequence: Synthetic oligonucleotide
cugcugaauuaacuuugcu

SEQ ID NO: 2335740 - RNA, 19 nt, Artificial Sequence
  Description of Artificial Sequence: Synthetic oligonucleotide
gccucaaggaaucgaggua

SEQ ID NO: 2335741 - RNA, 19 nt, Artificial Sequence
  Description of Artificial Sequence: Synthetic oligonucleotide
ggccaguuagcaaccugac

SEQ ID NO: 2335742 - RNA, 19 nt, Artificial Sequence
  Description of Artificial Sequence: Synthetic oligonucleotide
cagcgucagcaggaccgcg

SEQ ID NO: 2335743 - RNA, 19 nt, Artificial Sequence
  Description of Artificial Sequence: Synthetic oligonucleotide
gccuugacuuuagaccuuc

SEQ ID NO: 2335744 - RNA, 19 nt, Artificial Sequence
  Description of Artificial Sequence: Synthetic oligonucleotide
ucgugcccagggaggucaa

SEQ ID NO: 2335745 - RNA, 19 nt, Artificial Sequence
  Description of Artificial Sequence: Synthetic oligonucleotide
ccacacgccagguguccgc

SEQ ID NO: 2335746 - RNA, 19 nt, Artificial Sequence
  Description of Artificial Sequence: Synthetic oligonucleotide
ggugcaguacuggaacugu

SEQ ID NO: 2335747 - RNA, 19 nt, Artificial Sequence
  Description of Artificial Sequence: Synthetic oligonucleotide
gccccucaggcgaucuugg

SEQ ID NO: 2335748 - RNA, 19 nt, Artificial Sequence
  Description of Artificial Sequence: Synthetic oligonucleotide
gcccaacgaagagaacagc

SEQ ID NO: 2335749 - RNA, 19 nt, Artificial Sequence
  Description of Artificial Sequence: Synthetic oligonucleotide
ccaccacgaacaccacagc

SEQ ID NO: 2335750 - RNA, 19 nt, Artificial Sequence
  Description of Artificial Sequence: Synthetic oligonucleotide
gggcaacugggagaauuca

SEQ ID NO: 2335751 - RNA, 19 nt, Artificial Sequence
  Description of Artificial Sequence: Synthetic oligonucleotide
gguuugcagccagggcugc

SEQ ID NO: 2335752 - RNA, 19 nt, Artificial Sequence
  Description of Artificial Sequence: Synthetic oligonucleotide
gccauugcgauaucuuguu

SEQ ID NO: 2335753 - RNA, 19 nt, Artificial Sequence
  Description of Artificial Sequence: Synthetic oligonucleotide
cagcagaacuguugguaau

SEQ ID NO: 2335754 - RNA, 19 nt, Artificial Sequence
  Description of Artificial Sequence: Synthetic oligonucleotide
cacacgccagguguccgca

SEQ ID NO: 2335755 - RNA, 19 nt, Artificial Sequence
  Description of Artificial Sequence: Synthetic oligonucleotide
gguguccgcagaagccaug

SEQ ID NO: 2335756 - RNA, 19 nt, Artificial Sequence
  Description of Artificial Sequence: Synthetic oligonucleotide
ugcugucgaugaggaccug

SEQ ID NO: 2335757 - RNA, 19 nt, Artificial Sequence
  Description of Artificial Sequence: Synthetic oligonucleotide
gucucuguaguggccaguu

SEQ ID NO: 2335758 - RNA, 19 nt, Artificial Sequence
  Description of Artificial Sequence: Synthetic oligonucleotide
gccccuguuauuguugacu

SEQ ID NO: 2335759 - RNA, 19 nt, Artificial Sequence
  Description of Artificial Sequence: Synthetic oligonucleotide
ccacgaacaccacagcccu

SEQ ID NO: 2335760 - RNA, 19 nt, Artificial Sequence
  Description of Artificial Sequence: Synthetic oligonucleotide
ccaugcugucgaugaggac

SEQ ID NO: 2335761 - RNA, 19 nt, Artificial Sequence
  Description of Artificial Sequence: Synthetic oligonucleotide
cccgcuggaacguugcacu

SEQ ID NO: 2335762 - RNA, 19 nt, Artificial Sequence
  Description of Artificial Sequence: Synthetic oligonucleotide
gccggcauccccacgucca

SEQ ID NO: 2335763 - RNA, 19 nt, Artificial Sequence
  Description of Artificial Sequence: Synthetic oligonucleotide
ggcuauuaagaaggauggu

SEQ ID NO: 2335764 - RNA, 19 nt, Artificial Sequence
  Description of Artificial Sequence: Synthetic oligonucleotide
gccaugccggcauccccac

SEQ ID NO: 2335765 - RNA, 19 nt, Artificial Sequence
  Description of Artificial Sequence: Synthetic oligonucleotide
ccagaacaccagcgucagc

SEQ ID NO: 2335766 - RNA, 19 nt, Artificial Sequence
  Description of Artificial Sequence: Synthetic oligonucleotide
cucccgcuggaacguugca

SEQ ID NO: 2335767 - RNA, 19 nt, Artificial Sequence
  Description of Artificial Sequence: Synthetic oligonucleotide
ccccacguccacccuuggc

SEQ ID NO: 2335768 - RNA, 19 nt, Artificial Sequence
  Description of Artificial Sequence: Synthetic oligonucleotide
cucucgugcccagggaggu

SEQ ID NO: 2335769 - RNA, 19 nt, Artificial Sequence
  Description of Artificial Sequence: Synthetic oligonucleotide
ggaccgcgagcaccgccac

SEQ ID NO: 2335770 - RNA, 19 nt, Artificial Sequence
  Description of Artificial Sequence: Synthetic oligonucleotide
guaagguguugaguuccuu

SEQ ID NO: 2335771 - RNA, 19 nt, Artificial Sequence
  Description of Artificial Sequence: Synthetic oligonucleotide
cagggaggucaaucagagu

SEQ ID NO: 2335772 - RNA, 19 nt, Artificial Sequence
  Description of Artificial Sequence: Synthetic oligonucleotide
cacguccacccuuggcacu

SEQ ID NO: 2335773 - RNA, 19 nt, Artificial Sequence
  Description of Artificial Sequence: Synthetic oligonucleotide
ccaugccggcauccccacg

SEQ ID NO: 2335774 - RNA, 19 nt, Artificial Sequence
  Description of Artificial Sequence: Synthetic oligonucleotide
ccucaagcucucgugccca

SEQ ID NO: 2335775 - RNA, 19 nt, Artificial Sequence
  Description of Artificial Sequence: Synthetic oligonucleotide
gggagaauucaaacucuuu

SEQ ID NO: 2335776 - RNA, 19 nt, Artificial Sequence
  Description of Artificial Sequence: Synthetic oligonucleotide
ccccacacgccaggugucc

SEQ ID NO: 2335777 - RNA, 19 nt, Artificial Sequence
  Description of Artificial Sequence: Synthetic oligonucleotide
ccagagucacaaagcccaa

SEQ ID NO: 2335778 - RNA, 19 nt, Artificial Sequence
  Description of Artificial Sequence: Synthetic oligonucleotide
gucaggcuguugccccugu

SEQ ID NO: 2335779 - RNA, 19 nt, Artificial Sequence
  Description of Artificial Sequence: Synthetic oligonucleotide
ccggcauccccacguccac

SEQ ID NO: 2335780 - RNA, 19 nt, Artificial Sequence
  Description of Artificial Sequence: Synthetic oligonucleotide
ccccuguuauuguugacuu

SEQ ID NO: 2335781 - RNA, 19 nt, Artificial Sequence
  Description of Artificial Sequence: Synthetic oligonucleotide
gccagccacuucuccaagu

SEQ ID NO: 2335782 - RNA, 19 nt, Artificial Sequence
  Description of Artificial Sequence: Synthetic oligonucleotide
gcaggcuauuaagaaggau

SEQ ID NO: 2335783 - RNA, 19 nt, Artificial Sequence
  Description of Artificial Sequence: Synthetic oligonucleotide
cguaagguguugaguuccu

SEQ ID NO: 2335784 - RNA, 19 nt, Artificial Sequence
  Description of Artificial Sequence: Synthetic oligonucleotide
cccuggcugaagacuuaaa

SEQ ID NO: 2335785 - RNA, 19 nt, Artificial Sequence
  Description of Artificial Sequence: Synthetic oligonucleotide
gcaggaccgcgagcaccgc

SEQ ID NO: 2335786 - RNA, 19 nt, Artificial Sequence
  Description of Artificial Sequence: Synthetic oligonucleotide
cgccagguguccgcagaag

SEQ ID NO: 2335787 - RNA, 19 nt, Artificial Sequence
  Description of Artificial Sequence: Synthetic oligonucleotide
ccgcgagcaccgccaccgc

SEQ ID NO: 2335788 - RNA, 19 nt, Artificial Sequence
  Description of Artificial Sequence: Synthetic oligonucleotide
ccauugcgauaucuuguuu

SEQ ID NO: 2335789 - RNA, 19 nt, Artificial Sequence
  Description of Artificial Sequence: Synthetic oligonucleotide
ccgcuggaacguugcacua

SEQ ID NO: 2335790 - RNA, 19 nt, Artificial Sequence
  Description of Artificial Sequence: Synthetic oligonucleotide
gggugacucguaagguguu

SEQ ID NO: 2335791 - RNA, 19 nt, Artificial Sequence
  Description of Artificial Sequence: Synthetic oligonucleotide
gcugccccucaggcgaucu

SEQ ID NO: 2335792 - RNA, 19 nt, Artificial Sequence
  Description of Artificial Sequence: Synthetic oligonucleotide
cccuguuauuguugacuuu

SEQ ID NO: 2335793 - RNA, 19 nt, Artificial Sequence
  Description of Artificial Sequence: Synthetic oligonucleotide
ggcugccccucaggcgauc

SEQ ID NO: 2335794 - RNA, 19 nt, Artificial Sequence
  Description of Artificial Sequence: Synthetic oligonucleotide
ccacccaccacagcccuuu

SEQ ID NO: 2335795 - RNA, 19 nt, Artificial Sequence
  Description of Artificial Sequence: Synthetic oligonucleotide
gcagaccgggugacucgua

SEQ ID NO: 2335796 - RNA, 19 nt, Artificial Sequence
  Description of Artificial Sequence: Synthetic oligonucleotide
gaggggcaacugggagaau

SEQ ID NO: 2335797 - RNA, 19 nt, Artificial Sequence
  Description of Artificial Sequence: Synthetic oligonucleotide
cgaucuuggccagccacuu

SEQ ID NO: 2335798 - RNA, 19 nt, Artificial Sequence
  Description of Artificial Sequence: Synthetic oligonucleotide
cgcuggaacguugcacuau

SEQ ID NO: 2335799 - RNA, 19 nt, Artificial Sequence
  Description of Artificial Sequence: Synthetic oligonucleotide
caccucccgcuggaacguu

SEQ ID NO: 2335800 - RNA, 19 nt, Artificial Sequence
  Description of Artificial Sequence: Synthetic oligonucleotide
cgccaccgccacggacagc

SEQ ID NO: 2335801 - RNA, 19 nt, Artificial Sequence
  Description of Artificial Sequence: Synthetic oligonucleotide
gggcugccccucaggcgau

SEQ ID NO: 2335802 - RNA, 19 nt, Artificial Sequence
  Description of Artificial Sequence: Synthetic oligonucleotide
cgccacggacagcagcguu

SEQ ID NO: 2335803 - RNA, 19 nt, Artificial Sequence
  Description of Artificial Sequence: Synthetic oligonucleotide
ccgccacggacagcagcgu

SEQ ID NO: 2335804 - RNA, 19 nt, Artificial Sequence
  Description of Artificial Sequence: Synthetic oligonucleotide
cgugcccagggaggucaau

SEQ ID NO: 2335805 - RNA, 19 nt, Artificial Sequence
  Description of Artificial Sequence: Synthetic oligonucleotide
auaguugacaaccaguucc

SEQ ID NO: 2335806 - RNA, 19 nt, Artificial Sequence
  Description of Artificial Sequence: Synthetic oligonucleotide
ucuagcaucagauucaagc

SEQ ID NO: 2335807 - RNA, 19 nt, Artificial Sequence
  Description of Artificial Sequence: Synthetic oligonucleotide
auaaguaugucuugggagc

SEQ ID NO: 2335808 - RNA, 19 nt, Artificial Sequence
  Description of Artificial Sequence: Synthetic oligonucleotide
gauaaguaugucuugggag

SEQ ID NO: 2335809 - RNA, 19 nt, Artificial Sequence
  Description of Artificial Sequence: Synthetic oligonucleotide
gaucaguugacuuuucagg

SEQ ID NO: 2335810 - RNA, 19 nt, Artificial Sequence
  Description of Artificial Sequence: Synthetic oligonucleotide
gaagcuuucauccagcaac

SEQ ID NO: 2335811 - RNA, 19 nt, Artificial Sequence
  Description of Artificial Sequence: Synthetic oligonucleotide
accaguuccacauggauac

SEQ ID NO: 2335812 - RNA, 19 nt, Artificial Sequence
  Description of Artificial Sequence: Synthetic oligonucleotide
gauguaauccacaaguucc

SEQ ID NO: 2335813 - RNA, 19 nt, Artificial Sequence
  Description of Artificial Sequence: Synthetic oligonucleotide
aauauaucccaaccaguuc

SEQ ID NO: 2335814 - RNA, 19 nt, Artificial Sequence
  Description of Artificial Sequence: Synthetic oligonucleotide
aaagauuaggcuuguuaag

SEQ ID NO: 2335815 - RNA, 19 nt, Artificial Sequence
  Description of Artificial Sequence: Synthetic oligonucleotide
aggguuuugucuuauuggc

SEQ ID NO: 2335816 - RNA, 19 nt, Artificial Sequence
  Description of Artificial Sequence: Synthetic oligonucleotide
aagauuaggcuuguuaagg

SEQ ID NO: 2335817 - RNA, 19 nt, Artificial Sequence
  Description of Artificial Sequence: Synthetic oligonucleotide
auuaaaggggucuucuaac

SEQ ID NO: 2335818 - RNA, 19 nt, Artificial Sequence
  Description of Artificial Sequence: Synthetic oligonucleotide
aacacuaugaaggaaagaa

SEQ ID NO: 2335819 - RNA, 19 nt, Artificial Sequence
  Description of Artificial Sequence: Synthetic oligonucleotide
cuuguuaaggcaaaggguc

SEQ ID NO: 2335820 - RNA, 19 nt, Artificial Sequence
  Description of Artificial Sequence: Synthetic oligonucleotide
gagcuuugggauuaaaggg

SEQ ID NO: 2335821 - RNA, 19 nt, Artificial Sequence
  Description of Artificial Sequence: Synthetic oligonucleotide
agaacaccaggacaguucc

SEQ ID NO: 2335822 - RNA, 19 nt, Artificial Sequence
  Description of Artificial Sequence: Synthetic oligonucleotide
auaaaugucugucugacau

SEQ ID NO: 2335823 - RNA, 19 nt, Artificial Sequence
  Description of Artificial Sequence: Synthetic oligonucleotide
uugguuuacgccuuucugg

SEQ ID NO: 2335824 - RNA, 19 nt, Artificial Sequence
  Description of Artificial Sequence: Synthetic oligonucleotide
uauaaucuugcagaguagg

SEQ ID NO: 2335825 - RNA, 19 nt, Artificial Sequence
  Description of Artificial Sequence: Synthetic oligonucleotide
gauauaaucuugcagagua

SEQ ID NO: 2335826 - RNA, 19 nt, Artificial Sequence
  Description of Artificial Sequence: Synthetic oligonucleotide
agauuaggcuuguuaaggc

SEQ ID NO: 2335827 - RNA, 19 nt, Artificial Sequence
  Description of Artificial Sequence: Synthetic oligonucleotide
ugggucacaaaacugauaa

SEQ ID NO: 2335828 - RNA, 19 nt, Artificial Sequence
  Description of Artificial Sequence: Synthetic oligonucleotide
ucagauucaagccagccaa

SEQ ID NO: 2335829 - RNA, 19 nt, Artificial Sequence
  Description of Artificial Sequence: Synthetic oligonucleotide
agauguaauccacaaguuc

SEQ ID NO: 2335830 - RNA, 19 nt, Artificial Sequence
  Description of Artificial Sequence: Synthetic oligonucleotide
uaauccacaaguuccagga

SEQ ID NO: 2335831 - RNA, 19 nt, Artificial Sequence
  Description of Artificial Sequence: Synthetic oligonucleotide
ugucuuauuggcuuuguca

SEQ ID NO: 2335832 - RNA, 19 nt, Artificial Sequence
  Description of Artificial Sequence: Synthetic oligonucleotide
auauaucccaaccaguuca

SEQ ID NO: 2335833 - RNA, 19 nt, Artificial Sequence
  Description of Artificial Sequence: Synthetic oligonucleotide
aaccaguucacagugcugg

SEQ ID NO: 2335834 - RNA, 19 nt, Artificial Sequence
  Description of Artificial Sequence: Synthetic oligonucleotide
ucagcaauugguuuacgcc

SEQ ID NO: 2335835 - RNA, 19 nt, Artificial Sequence
  Description of Artificial Sequence: Synthetic oligonucleotide
acuaucuagaccucgugag

SEQ ID NO: 2335836 - RNA, 19 nt, Artificial Sequence
  Description of Artificial Sequence: Synthetic oligonucleotide
gaggguuuugucuuauugg

SEQ ID NO: 2335837 - RNA, 19 nt, Artificial Sequence
  Description of Artificial Sequence: Synthetic oligonucleotide
uuagauguuggauuuugug

SEQ ID NO: 2335838 - RNA, 19 nt, Artificial Sequence
  Description of Artificial Sequence: Synthetic oligonucleotide
gaaagaaagcuguaagcug

SEQ ID NO: 2335839 - RNA, 19 nt, Artificial Sequence
  Description of Artificial Sequence: Synthetic oligonucleotide
ugcuauagggcucuuuucc

SEQ ID NO: 2335840 - RNA, 19 nt, Artificial Sequence
  Description of Artificial Sequence: Synthetic oligonucleotide
cuguuugaggaucugaacc

SEQ ID NO: 2335841 - RNA, 19 nt, Artificial Sequence
  Description of Artificial Sequence: Synthetic oligonucleotide
aagauaccuguucucauug

SEQ ID NO: 2335842 - RNA, 19 nt, Artificial Sequence
  Description of Artificial Sequence: Synthetic oligonucleotide
cuagcaucagauucaagcc

SEQ ID NO: 2335843 - RNA, 19 nt, Artificial Sequence
  Description of Artificial Sequence: Synthetic oligonucleotide
uaaucuugcagaguagggg

SEQ ID NO: 2335844 - RNA, 19 nt, Artificial Sequence
  Description of Artificial Sequence: Synthetic oligonucleotide
guggauauaaucuugcaga

SEQ ID NO: 2335845 - RNA, 19 nt, Artificial Sequence
  Description of Artificial Sequence: Synthetic oligonucleotide
aagaugcuaguccuggaag

SEQ ID NO: 2335846 - RNA, 19 nt, Artificial Sequence
  Description of Artificial Sequence: Synthetic oligonucleotide
agauguuggauuuuguggu

SEQ ID NO: 2335847 - RNA, 19 nt, Artificial Sequence
  Description of Artificial Sequence: Synthetic oligonucleotide
uguucuagcaucagauuca

SEQ ID NO: 2335848 - RNA, 19 nt, Artificial Sequence
  Description of Artificial Sequence: Synthetic oligonucleotide
acuaugaaggaaagaaagc

SEQ ID NO: 2335849 - RNA, 19 nt, Artificial Sequence
  Description of Artificial Sequence: Synthetic oligonucleotide
gaaagcuguaagcugauca

SEQ ID NO: 2335850 - RNA, 19 nt, Artificial Sequence
  Description of Artificial Sequence: Synthetic oligonucleotide
cagaauauaucccaaccag

SEQ ID NO: 2335851 - RNA, 19 nt, Artificial Sequence
  Description of Artificial Sequence: Synthetic oligonucleotide
ugugcagauaaguaugucu

SEQ ID NO: 2335852 - RNA, 19 nt, Artificial Sequence
  Description of Artificial Sequence: Synthetic oligonucleotide
ugaucaguugacuuuucag

SEQ ID NO: 2335853 - RNA, 19 nt, Artificial Sequence
  Description of Artificial Sequence: Synthetic oligonucleotide
uccaacacuaugaaggaaa

SEQ ID NO: 2335854 - RNA, 19 nt, Artificial Sequence
  Description of Artificial Sequence: Synthetic oligonucleotide
gacaaccaguuccacaugg

SEQ ID NO: 2335855 - RNA, 19 nt, Artificial Sequence
  Description of Artificial Sequence: Synthetic oligonucleotide
uuagucucauaaaugucug

SEQ ID NO: 2335856 - RNA, 19 nt, Artificial Sequence
  Description of Artificial Sequence: Synthetic oligonucleotide
uugacaaccaguuccacau

SEQ ID NO: 2335857 - RNA, 19 nt, Artificial Sequence
  Description of Artificial Sequence: Synthetic oligonucleotide
uucacugcccacacgaccc

SEQ ID NO: 2335858 - RNA, 19 nt, Artificial Sequence
  Description of Artificial Sequence: Synthetic oligonucleotide
cucaauuuucugaaccagg

SEQ ID NO: 2335859 - RNA, 19 nt, Artificial Sequence
  Description of Artificial Sequence: Synthetic oligonucleotide
aaggcuucuucuucgacga

SEQ ID NO: 2335860 - RNA, 19 nt, Artificial Sequence
  Description of Artificial Sequence: Synthetic oligonucleotide
aaaugucugucugacauga

SEQ ID NO: 2335861 - RNA, 19 nt, Artificial Sequence
  Description of Artificial Sequence: Synthetic oligonucleotide
gauaccuguucucauugag

SEQ ID NO: 2335862 - RNA, 19 nt, Artificial Sequence
  Description of Artificial Sequence: Synthetic oligonucleotide
cuuauuggcuuugucaugc

SEQ ID NO: 2335863 - RNA, 19 nt, Artificial Sequence
  Description of Artificial Sequence: Synthetic oligonucleotide
agaugcuaguccuggaagg

SEQ ID NO: 2335864 - RNA, 19 nt, Artificial Sequence
  Description of Artificial Sequence: Synthetic oligonucleotide
uaucccaaccaguucacag

SEQ ID NO: 2335865 - RNA, 19 nt, Artificial Sequence
  Description of Artificial Sequence: Synthetic oligonucleotide
ggucuucuaacucagcugg

SEQ ID NO: 2335866 - RNA, 19 nt, Artificial Sequence
  Description of Artificial Sequence: Synthetic oligonucleotide
aauugguuuacgccuuucu

SEQ ID NO: 2335867 - RNA, 19 nt, Artificial Sequence
  Description of Artificial Sequence: Synthetic oligonucleotide
ugacaugaggcauaaugca

SEQ ID NO: 2335868 - RNA, 19 nt, Artificial Sequence
  Description of Artificial Sequence: Synthetic oligonucleotide
acuaacugagcuuugggau

SEQ ID NO: 2335869 - RNA, 19 nt, Artificial Sequence
  Description of Artificial Sequence: Synthetic oligonucleotide
ugauaauggucccuggcac

SEQ ID NO: 2335870 - RNA, 19 nt, Artificial Sequence
  Description of Artificial Sequence: Synthetic oligonucleotide
augguggugagauagucug

SEQ ID NO: 2335871 - RNA, 19 nt, Artificial Sequence
  Description of Artificial Sequence: Synthetic oligonucleotide
caacguguccgcuucaucc

SEQ ID NO: 2335872 - RNA, 19 nt, Artificial Sequence
  Description of Artificial Sequence: Synthetic oligonucleotide
agucucauaaaugucuguc

SEQ ID NO: 2335873 - RNA, 19 nt, Artificial Sequence
  Description of Artificial Sequence: Synthetic oligonucleotide
uuaaaggggucuucuaacu

SEQ ID NO: 2335874 - RNA, 19 nt, Artificial Sequence
  Description of Artificial Sequence: Synthetic oligonucleotide
uacuaucuagaccucguga

SEQ ID NO: 2335875 - RNA, 19 nt, Artificial Sequence
  Description of Artificial Sequence: Synthetic oligonucleotide
aagggucuuucacugaaga

SEQ ID NO: 2335876 - RNA, 19 nt, Artificial Sequence
  Description of Artificial Sequence: Synthetic oligonucleotide
cugaaccaggcucacaucc

SEQ ID NO: 2335877 - RNA, 19 nt, Artificial Sequence
  Description of Artificial Sequence: Synthetic oligonucleotide
aggcauaaugcaguggagc

SEQ ID NO: 2335878 - RNA, 19 nt, Artificial Sequence
  Description of Artificial Sequence: Synthetic oligonucleotide
ggcuuguuaaggcaaaggg

SEQ ID NO: 2335879 - RNA, 19 nt, Artificial Sequence
  Description of Artificial Sequence: Synthetic oligonucleotide
agauaaguaugucuuggga

SEQ ID NO: 2335880 - RNA, 19 nt, Artificial Sequence
  Description of Artificial Sequence: Synthetic oligonucleotide
aaacugauaauggucccug

SEQ ID NO: 2335881 - RNA, 19 nt, Artificial Sequence
  Description of Artificial Sequence: Synthetic oligonucleotide
auugguuuacgccuuucug

SEQ ID NO: 2335882 - RNA, 19 nt, Artificial Sequence
  Description of Artificial Sequence: Synthetic oligonucleotide
guaauccacaaguuccagg

SEQ ID NO: 2335883 - RNA, 19 nt, Artificial Sequence
  Description of Artificial Sequence: Synthetic oligonucleotide
uaucuagaccucgugaggc

SEQ ID NO: 2335884 - RNA, 19 nt, Artificial Sequence
  Description of Artificial Sequence: Synthetic oligonucleotide
caaagauuaggcuuguuaa

SEQ ID NO: 2335885 - RNA, 19 nt, Artificial Sequence
  Description of Artificial Sequence: Synthetic oligonucleotide
caagauguaauccacaagu

SEQ ID NO: 2335886 - RNA, 19 nt, Artificial Sequence
  Description of Artificial Sequence: Synthetic oligonucleotide
auccagaauauaucccaac

SEQ ID NO: 2335887 - RNA, 19 nt, Artificial Sequence
  Description of Artificial Sequence: Synthetic oligonucleotide
uggcauuugcccuugcagc

SEQ ID NO: 2335888 - RNA, 19 nt, Artificial Sequence
  Description of Artificial Sequence: Synthetic oligonucleotide
uauagggcucuuuuccaag

SEQ ID NO: 2335889 - RNA, 19 nt, Artificial Sequence
  Description of Artificial Sequence: Synthetic oligonucleotide
uucagggccuuccacaaac

SEQ ID NO: 2335890 - RNA, 19 nt, Artificial Sequence
  Description of Artificial Sequence: Synthetic oligonucleotide
uggugagauagucugggcu

SEQ ID NO: 2335891 - RNA, 19 nt, Artificial Sequence
  Description of Artificial Sequence: Synthetic oligonucleotide
ucaguugacuuuucagggc

SEQ ID NO: 2335892 - RNA, 19 nt, Artificial Sequence
  Description of Artificial Sequence: Synthetic oligonucleotide
uuuacucagcaauugguuu

SEQ ID NO: 2335893 - RNA, 19 nt, Artificial Sequence
  Description of Artificial Sequence: Synthetic oligonucleotide
aacaccaggacaguuccug

SEQ ID NO: 2335894 - RNA, 19 nt, Artificial Sequence
  Description of Artificial Sequence: Synthetic oligonucleotide
ucccuuuagucucauaaau

SEQ ID NO: 2335895 - RNA, 19 nt, Artificial Sequence
  Description of Artificial Sequence: Synthetic oligonucleotide
aaaacugauaauggucccu

SEQ ID NO: 2335896 - RNA, 19 nt, Artificial Sequence
  Description of Artificial Sequence: Synthetic oligonucleotide
cugagcuuugggauuaaag

SEQ ID NO: 2335897 - RNA, 19 nt, Artificial Sequence
  Description of Artificial Sequence: Synthetic oligonucleotide
ucugcuauagggcucuuuu

SEQ ID NO: 2335898 - RNA, 19 nt, Artificial Sequence
  Description of Artificial Sequence: Synthetic oligonucleotide
cauaaugcaguggagcuug

SEQ ID NO: 2335899 - RNA, 19 nt, Artificial Sequence
  Description of Artificial Sequence: Synthetic oligonucleotide
cagauaaguaugucuuggg

SEQ ID NO: 2335900 - RNA, 19 nt, Artificial Sequence
  Description of Artificial Sequence: Synthetic oligonucleotide
ugguuuacgccuuucugga

SEQ ID NO: 2335901 - RNA, 19 nt, Artificial Sequence
  Description of Artificial Sequence: Synthetic oligonucleotide
gacaugaggcauaaugcag

SEQ ID NO: 2335902 - RNA, 19 nt, Artificial Sequence
  Description of Artificial Sequence: Synthetic oligonucleotide
cuuuuccaagauguaaucc

SEQ ID NO: 2335903 - RNA, 19 nt, Artificial Sequence
  Description of Artificial Sequence: Synthetic oligonucleotide
acuuuucagggccuuccac

SEQ ID NO: 2335904 - RNA, 19 nt, Artificial Sequence
  Description of Artificial Sequence: Synthetic oligonucleotide
uccgcuucauccaacacua

SEQ ID NO: 2335905 - RNA, 19 nt, Artificial Sequence
  Description of Artificial Sequence: Synthetic oligonucleotide
ucgacgagcugccagcuca

SEQ ID NO: 2335906 - RNA, 19 nt, Artificial Sequence
  Description of Artificial Sequence: Synthetic oligonucleotide
cagcucaauuuucugaacc

SEQ ID NO: 2335907 - RNA, 19 nt, Artificial Sequence
  Description of Artificial Sequence: Synthetic oligonucleotide
gauuaggcuuguuaaggca

SEQ ID NO: 2335908 - RNA, 19 nt, Artificial Sequence
  Description of Artificial Sequence: Synthetic oligonucleotide
uaguugacaaccaguucca

SEQ ID NO: 2335909 - RNA, 19 nt, Artificial Sequence
  Description of Artificial Sequence: Synthetic oligonucleotide
aagcuuucauccagcaacg

SEQ ID NO: 2335910 - RNA, 19 nt, Artificial Sequence
  Description of Artificial Sequence: Synthetic oligonucleotide
aaguaugucuugggagccc

SEQ ID NO: 2335911 - RNA, 19 nt, Artificial Sequence
  Description of Artificial Sequence: Synthetic oligonucleotide
auugaggcuggcauuugcc

SEQ ID NO: 2335912 - RNA, 19 nt, Artificial Sequence
  Description of Artificial Sequence: Synthetic oligonucleotide
cuaucuagaccucgugagg

SEQ ID NO: 2335913 - RNA, 19 nt, Artificial Sequence
  Description of Artificial Sequence: Synthetic oligonucleotide
uguaagcugaucaguugac

SEQ ID NO: 2335914 - RNA, 19 nt, Artificial Sequence
  Description of Artificial Sequence: Synthetic oligonucleotide
ucugugcagauaaguaugu

SEQ ID NO: 2335915 - RNA, 19 nt, Artificial Sequence
  Description of Artificial Sequence: Synthetic oligonucleotide
auaaucuugcagaguaggg

SEQ ID NO: 2335916 - RNA, 19 nt, Artificial Sequence
  Description of Artificial Sequence: Synthetic oligonucleotide
uggaguggccacaagcaca

SEQ ID NO: 2335917 - RNA, 19 nt, Artificial Sequence
  Description of Artificial Sequence: Synthetic oligonucleotide
uucuucgacgagcugccag

SEQ ID NO: 2335918 - RNA, 19 nt, Artificial Sequence
  Description of Artificial Sequence: Synthetic oligonucleotide
uggucauccagaauauauc

SEQ ID NO: 2335919 - RNA, 19 nt, Artificial Sequence
  Description of Artificial Sequence: Synthetic oligonucleotide
ucuucgacgagcugccagc

SEQ ID NO: 2335920 - RNA, 19 nt, Artificial Sequence
  Description of Artificial Sequence: Synthetic oligonucleotide
ucccaaccaguucacagug

SEQ ID NO: 2335921 - RNA, 19 nt, Artificial Sequence
  Description of Artificial Sequence: Synthetic oligonucleotide
gauuuuguggucauccaga

SEQ ID NO: 2335922 - RNA, 19 nt, Artificial Sequence
  Description of Artificial Sequence: Synthetic oligonucleotide
uggaagauaccuguucuca

SEQ ID NO: 2335923 - RNA, 19 nt, Artificial Sequence
  Description of Artificial Sequence: Synthetic oligonucleotide
cuuuagucucauaaauguc

SEQ ID NO: 2335924 - RNA, 19 nt, Artificial Sequence
  Description of Artificial Sequence: Synthetic oligonucleotide
uuguuaaggcaaagggucu

SEQ ID NO: 2335925 - RNA, 19 nt, Artificial Sequence
  Description of Artificial Sequence: Synthetic oligonucleotide
uuacucagcaauugguuua

SEQ ID NO: 2335926 - RNA, 19 nt, Artificial Sequence
  Description of Artificial Sequence: Synthetic oligonucleotide
ugcuguuugaggaucugaa

SEQ ID NO: 2335927 - RNA, 19 nt, Artificial Sequence
  Description of Artificial Sequence: Synthetic oligonucleotide
uaagcugaucaguugacuu

SEQ ID NO: 2335928 - RNA, 19 nt, Artificial Sequence
  Description of Artificial Sequence: Synthetic oligonucleotide
agcuuggagcuugugaugg

SEQ ID NO: 2335929 - RNA, 19 nt, Artificial Sequence
  Description of Artificial Sequence: Synthetic oligonucleotide
agcucaauuuucugaacca

SEQ ID NO: 2335930 - RNA, 19 nt, Artificial Sequence
  Description of Artificial Sequence: Synthetic oligonucleotide
ugcagauaaguaugucuug

SEQ ID NO: 2335931 - RNA, 19 nt, Artificial Sequence
  Description of Artificial Sequence: Synthetic oligonucleotide
guugcagaacaccaggaca

SEQ ID NO: 2335932 - RNA, 19 nt, Artificial Sequence
  Description of Artificial Sequence: Synthetic oligonucleotide
uaaaggggucuucuaacuc

SEQ ID NO: 2335933 - RNA, 19 nt, Artificial Sequence
  Description of Artificial Sequence: Synthetic oligonucleotide
ugcccuugcagccuuagau

SEQ ID NO: 2335934 - RNA, 19 nt, Artificial Sequence
  Description of Artificial Sequence: Synthetic oligonucleotide
uaaguaugucuugggagcc

SEQ ID NO: 2335935 - RNA, 19 nt, Artificial Sequence
  Description of Artificial Sequence: Synthetic oligonucleotide
gauagucugggcuggugac

SEQ ID NO: 2335936 - RNA, 19 nt, Artificial Sequence
  Description of Artificial Sequence: Synthetic oligonucleotide
ugucuugggagcccuuuug

SEQ ID NO: 2335937 - RNA, 19 nt, Artificial Sequence
  Description of Artificial Sequence: Synthetic oligonucleotide
uauaucccaaccaguucac

SEQ ID NO: 2335938 - RNA, 19 nt, Artificial Sequence
  Description of Artificial Sequence: Synthetic oligonucleotide
cuuucauccagcaacgugu

SEQ ID NO: 2335939 - RNA, 19 nt, Artificial Sequence
  Description of Artificial Sequence: Synthetic oligonucleotide
ugacuuuacucagcaauug

SEQ ID NO: 2335940 - RNA, 19 nt, Artificial Sequence
  Description of Artificial Sequence: Synthetic oligonucleotide
uccacauggauacuaucua

SEQ ID NO: 2335941 - RNA, 19 nt, Artificial Sequence
  Description of Artificial Sequence: Synthetic oligonucleotide
aagcugaucaguugacuuu

SEQ ID NO: 2335942 - RNA, 19 nt, Artificial Sequence
  Description of Artificial Sequence: Synthetic oligonucleotide
agauagucugggcugguga

SEQ ID NO: 2335943 - RNA, 19 nt, Artificial Sequence
  Description of Artificial Sequence: Synthetic oligonucleotide
ggaaaaucauaguugacaa

SEQ ID NO: 2335944 - RNA, 19 nt, Artificial Sequence
  Description of Artificial Sequence: Synthetic oligonucleotide
cagccaaagauuaggcuug

SEQ ID NO: 2335945 - RNA, 19 nt, Artificial Sequence
  Description of Artificial Sequence: Synthetic oligonucleotide
uuuacgccuuucuggaaac

SEQ ID NO: 2335946 - RNA, 19 nt, Artificial Sequence
  Description of Artificial Sequence: Synthetic oligonucleotide
cucuguggauauaaucuug

SEQ ID NO: 2335947 - RNA, 19 nt, Artificial Sequence
  Description of Artificial Sequence: Synthetic oligonucleotide
ggugagauagucugggcug

SEQ ID NO: 2335948 - RNA, 19 nt, Artificial Sequence
  Description of Artificial Sequence: Synthetic oligonucleotide
gaugcuaguccuggaaggc

SEQ ID NO: 2335949 - RNA, 19 nt, Artificial Sequence
  Description of Artificial Sequence: Synthetic oligonucleotide
agcaucagauucaagccag

SEQ ID NO: 2335950 - RNA, 19 nt, Artificial Sequence
  Description of Artificial Sequence: Synthetic oligonucleotide
ggucuuucacugaagaugc

SEQ ID NO: 2335951 - RNA, 19 nt, Artificial Sequence
  Description of Artificial Sequence: Synthetic oligonucleotide
uguaauccacaaguuccag

SEQ ID NO: 2335952 - RNA, 19 nt, Artificial Sequence
  Description of Artificial Sequence: Synthetic oligonucleotide
auacuaucuagaccucgug

SEQ ID NO: 2335953 - RNA, 19 nt, Artificial Sequence
  Description of Artificial Sequence: Synthetic oligonucleotide
caagcacaucugcugacgg

SEQ ID NO: 2335954 - RNA, 19 nt, Artificial Sequence
  Description of Artificial Sequence: Synthetic oligonucleotide
auuuuguggucauccagaa

SEQ ID NO: 2335955 - RNA, 19 nt, Artificial Sequence
  Description of Artificial Sequence: Synthetic oligonucleotide
cuuuucagggccuuccaca

SEQ ID NO: 2335956 - RNA, 19 nt, Artificial Sequence
  Description of Artificial Sequence: Synthetic oligonucleotide
acaagcacaucugcugacg

SEQ ID NO: 2335957 - RNA, 19 nt, Artificial Sequence
  Description of Artificial Sequence: Synthetic oligonucleotide
gaaacucuggaagauaccu

SEQ ID NO: 2335958 - RNA, 19 nt, Artificial Sequence
  Description of Artificial Sequence: Synthetic oligonucleotide
agaauauaucccaaccagu

SEQ ID NO: 2335959 - RNA, 19 nt, Artificial Sequence
  Description of Artificial Sequence: Synthetic oligonucleotide
ugguggugagauagucugg

SEQ ID NO: 2335960 - RNA, 19 nt, Artificial Sequence
  Description of Artificial Sequence: Synthetic oligonucleotide
gcagauaaguaugucuugg

SEQ ID NO: 2335961 - RNA, 19 nt, Artificial Sequence
  Description of Artificial Sequence: Synthetic oligonucleotide
accucgugaggcuaugucu

SEQ ID NO: 2335962 - RNA, 19 nt, Artificial Sequence
  Description of Artificial Sequence: Synthetic oligonucleotide
uuucacugaagaugcuagu

SEQ ID NO: 2335963 - RNA, 19 nt, Artificial Sequence
  Description of Artificial Sequence: Synthetic oligonucleotide
agauucaagccagccaaag

SEQ ID NO: 2335964 - RNA, 19 nt, Artificial Sequence
  Description of Artificial Sequence: Synthetic oligonucleotide
auuuucugaaccaggcuca

SEQ ID NO: 2335965 - RNA, 19 nt, Artificial Sequence
  Description of Artificial Sequence: Synthetic oligonucleotide
gauguuggauuuugugguc

SEQ ID NO: 2335966 - RNA, 19 nt, Artificial Sequence
  Description of Artificial Sequence: Synthetic oligonucleotide
gaggcuaugucugugcaga

SEQ ID NO: 2335967 - RNA, 19 nt, Artificial Sequence
  Description of Artificial Sequence: Synthetic oligonucleotide
aucccaaccaguucacagu

SEQ ID NO: 2335968 - RNA, 19 nt, Artificial Sequence
  Description of Artificial Sequence: Synthetic oligonucleotide
uucaagccagccaaagauu

SEQ ID NO: 2335969 - RNA, 19 nt, Artificial Sequence
  Description of Artificial Sequence: Synthetic oligonucleotide
aggcaaagggucuuucacu

SEQ ID NO: 2335970 - RNA, 19 nt, Artificial Sequence
  Description of Artificial Sequence: Synthetic oligonucleotide
cuguaagcugaucaguuga

SEQ ID NO: 2335971 - RNA, 19 nt, Artificial Sequence
  Description of Artificial Sequence: Synthetic oligonucleotide
cuaugaaggaaagaaagcu

SEQ ID NO: 2335972 - RNA, 19 nt, Artificial Sequence
  Description of Artificial Sequence: Synthetic oligonucleotide
guugacaaccaguuccaca

SEQ ID NO: 2335973 - RNA, 19 nt, Artificial Sequence
  Description of Artificial Sequence: Synthetic oligonucleotide
gaucugaaccaguucuguc

SEQ ID NO: 2335974 - RNA, 19 nt, Artificial Sequence
  Description of Artificial Sequence: Synthetic oligonucleotide
cugauaauggucccuggca

SEQ ID NO: 2335975 - RNA, 19 nt, Artificial Sequence
  Description of Artificial Sequence: Synthetic oligonucleotide
ucuuucacugaagaugcua

SEQ ID NO: 2335976 - RNA, 19 nt, Artificial Sequence
  Description of Artificial Sequence: Synthetic oligonucleotide
auauaaucuugcagaguag

SEQ ID NO: 2335977 - RNA, 19 nt, Artificial Sequence
  Description of Artificial Sequence: Synthetic oligonucleotide
caucagauucaagccagcc

SEQ ID NO: 2335978 - RNA, 19 nt, Artificial Sequence
  Description of Artificial Sequence: Synthetic oligonucleotide
uggccacaagcacaucugc

SEQ ID NO: 2335979 - RNA, 19 nt, Artificial Sequence
  Description of Artificial Sequence: Synthetic oligonucleotide
auagggcucuuuuccaaga

SEQ ID NO: 2335980 - RNA, 19 nt, Artificial Sequence
  Description of Artificial Sequence: Synthetic oligonucleotide
guuuacgccuuucuggaaa

SEQ ID NO: 2335981 - RNA, 19 nt, Artificial Sequence
  Description of Artificial Sequence: Synthetic oligonucleotide
aggcuuguuaaggcaaagg

SEQ ID NO: 2335982 - RNA, 19 nt, Artificial Sequence
  Description of Artificial Sequence: Synthetic oligonucleotide
cacuaacugagcuuuggga

SEQ ID NO: 2335983 - RNA, 19 nt, Artificial Sequence
  Description of Artificial Sequence: Synthetic oligonucleotide
gucauccagaauauauccc

SEQ ID NO: 2335984 - RNA, 19 nt, Artificial Sequence
  Description of Artificial Sequence: Synthetic oligonucleotide
aagauguaauccacaaguu

SEQ ID NO: 2335985 - RNA, 19 nt, Artificial Sequence
  Description of Artificial Sequence: Synthetic oligonucleotide
uuguggucauccagaauau

SEQ ID NO: 2335986 - RNA, 19 nt, Artificial Sequence
  Description of Artificial Sequence: Synthetic oligonucleotide
cucuggaagauaccuguuc

SEQ ID NO: 2335987 - RNA, 19 nt, Artificial Sequence
  Description of Artificial Sequence: Synthetic oligonucleotide
uugcagccuuagauguugg

SEQ ID NO: 2335988 - RNA, 19 nt, Artificial Sequence
  Description of Artificial Sequence: Synthetic oligonucleotide
auuaggcuuguuaaggcaa

SEQ ID NO: 2335989 - RNA, 19 nt, Artificial Sequence
  Description of Artificial Sequence: Synthetic oligonucleotide
agccuuagauguuggauuu

SEQ ID NO: 2335990 - RNA, 19 nt, Artificial Sequence
  Description of Artificial Sequence: Synthetic oligonucleotide
gaauauaucccaaccaguu

SEQ ID NO: 2335991 - RNA, 19 nt, Artificial Sequence
  Description of Artificial Sequence: Synthetic oligonucleotide
uuccugaggguuuugucuu

SEQ ID NO: 2335992 - RNA, 19 nt, Artificial Sequence
  Description of Artificial Sequence: Synthetic oligonucleotide
uugucuuauuggcuuuguc

SEQ ID NO: 2335993 - RNA, 19 nt, Artificial Sequence
  Description of Artificial Sequence: Synthetic oligonucleotide
cagggaugggucacaaaac

SEQ ID NO: 2335994 - RNA, 19 nt, Artificial Sequence
  Description of Artificial Sequence: Synthetic oligonucleotide
cucggcucccuuuagucuc

SEQ ID NO: 2335995 - RNA, 19 nt, Artificial Sequence
  Description of Artificial Sequence: Synthetic oligonucleotide
gugagauagucugggcugg

SEQ ID NO: 2335996 - RNA, 19 nt, Artificial Sequence
  Description of Artificial Sequence: Synthetic oligonucleotide
ucucggcucccuuuagucu

SEQ ID NO: 2335997 - RNA, 19 nt, Artificial Sequence
  Description of Artificial Sequence: Synthetic oligonucleotide
agggcucuuuuccaagaug

SEQ ID NO: 2335998 - RNA, 19 nt, Artificial Sequence
  Description of Artificial Sequence: Synthetic oligonucleotide
cauccaacacuaugaagga

SEQ ID NO: 2335999 - RNA, 19 nt, Artificial Sequence
  Description of Artificial Sequence: Synthetic oligonucleotide
uagucucauaaaugucugu

SEQ ID NO: 2336000 - RNA, 19 nt, Artificial Sequence
  Description of Artificial Sequence: Synthetic oligonucleotide
uuuuguggucauccagaau

SEQ ID NO: 2336001 - RNA, 19 nt, Artificial Sequence
  Description of Artificial Sequence: Synthetic oligonucleotide
ggaaacguggcucccacca

SEQ ID NO: 2336002 - RNA, 19 nt, Artificial Sequence
  Description of Artificial Sequence: Synthetic oligonucleotide
ugucaugcuguuugaggau

SEQ ID NO: 2336003 - RNA, 19 nt, Artificial Sequence
  Description of Artificial Sequence: Synthetic oligonucleotide
ugaugguggugagauaguc

SEQ ID NO: 2336004 - RNA, 19 nt, Artificial Sequence
  Description of Artificial Sequence: Synthetic oligonucleotide
ggauacuaucuagaccucg

SEQ ID NO: 2336005 - RNA, 19 nt, Artificial Sequence
  Description of Artificial Sequence: Synthetic oligonucleotide
acaaacgccccuggagugg

SEQ ID NO: 2336006 - RNA, 19 nt, Artificial Sequence
  Description of Artificial Sequence: Synthetic oligonucleotide
gagcuuggagcuugugaug

SEQ ID NO: 2336007 - RNA, 19 nt, Artificial Sequence
  Description of Artificial Sequence: Synthetic oligonucleotide
aggcucacaucccagggau

SEQ ID NO: 2336008 - RNA, 19 nt, Artificial Sequence
  Description of Artificial Sequence: Synthetic oligonucleotide
cacaaacgccccuggagug

SEQ ID NO: 2336009 - RNA, 19 nt, Artificial Sequence
  Description of Artificial Sequence: Synthetic oligonucleotide
aaccaguuccacauggaua

SEQ ID NO: 2336010 - RNA, 19 nt, Artificial Sequence
  Description of Artificial Sequence: Synthetic oligonucleotide
ugcuaguccuggaaggcuu

SEQ ID NO: 2336011 - RNA, 19 nt, Artificial Sequence
  Description of Artificial Sequence: Synthetic oligonucleotide
acuuucugcuauagggcuc

SEQ ID NO: 2336012 - RNA, 19 nt, Artificial Sequence
  Description of Artificial Sequence: Synthetic oligonucleotide
uguuggauuuuguggucau

SEQ ID NO: 2336013 - RNA, 19 nt, Artificial Sequence
  Description of Artificial Sequence: Synthetic oligonucleotide
ggaaagaaagcuguaagcu

SEQ ID NO: 2336014 - RNA, 19 nt, Artificial Sequence
  Description of Artificial Sequence: Synthetic oligonucleotide
uacgccuuucuggaaacgu

SEQ ID NO: 2336015 - RNA, 19 nt, Artificial Sequence
  Description of Artificial Sequence: Synthetic oligonucleotide
guucugucaccuucucggc

SEQ ID NO: 2336016 - RNA, 19 nt, Artificial Sequence
  Description of Artificial Sequence: Synthetic oligonucleotide
uuugucuuauuggcuuugu

SEQ ID NO: 2336017 - RNA, 19 nt, Artificial Sequence
  Description of Artificial Sequence: Synthetic oligonucleotide
gauaauggucccuggcacu

SEQ ID NO: 2336018 - RNA, 19 nt, Artificial Sequence
  Description of Artificial Sequence: Synthetic oligonucleotide
aguugacaaccaguuccac

SEQ ID NO: 2336019 - RNA, 19 nt, Artificial Sequence
  Description of Artificial Sequence: Synthetic oligonucleotide
gcucacaucccagggaugg

SEQ ID NO: 2336020 - RNA, 19 nt, Artificial Sequence
  Description of Artificial Sequence: Synthetic oligonucleotide
cuaugucugugcagauaag

SEQ ID NO: 2336021 - RNA, 19 nt, Artificial Sequence
  Description of Artificial Sequence: Synthetic oligonucleotide
ggugacuuuacucagcaau

SEQ ID NO: 2336022 - RNA, 19 nt, Artificial Sequence
  Description of Artificial Sequence: Synthetic oligonucleotide
aucuagaccucgugaggcu

SEQ ID NO: 2336023 - RNA, 19 nt, Artificial Sequence
  Description of Artificial Sequence: Synthetic oligonucleotide
uaacugagcuuugggauua

SEQ ID NO: 2336024 - RNA, 19 nt, Artificial Sequence
  Description of Artificial Sequence: Synthetic oligonucleotide
gcuuucauccagcaacgug

SEQ ID NO: 2336025 - RNA, 19 nt, Artificial Sequence
  Description of Artificial Sequence: Synthetic oligonucleotide
cuggugacuuuacucagca

SEQ ID NO: 2336026 - RNA, 19 nt, Artificial Sequence
  Description of Artificial Sequence: Synthetic oligonucleotide
ggagcuguugcagaacacc

SEQ ID NO: 2336027 - RNA, 19 nt, Artificial Sequence
  Description of Artificial Sequence: Synthetic oligonucleotide
gaggcauaaugcaguggag

SEQ ID NO: 2336028 - RNA, 19 nt, Artificial Sequence
  Description of Artificial Sequence: Synthetic oligonucleotide
ggaugggucacaaaacuga

SEQ ID NO: 2336029 - RNA, 19 nt, Artificial Sequence
  Description of Artificial Sequence: Synthetic oligonucleotide
uuauuggcuuugucaugcu

SEQ ID NO: 2336030 - RNA, 19 nt, Artificial Sequence
  Description of Artificial Sequence: Synthetic oligonucleotide
gauacuaucuagaccucgu

SEQ ID NO: 2336031 - RNA, 19 nt, Artificial Sequence
  Description of Artificial Sequence: Synthetic oligonucleotide
aguaugucuugggagcccu

SEQ ID NO: 2336032 - RNA, 19 nt, Artificial Sequence
  Description of Artificial Sequence: Synthetic oligonucleotide
uuaaggcaaagggucuuuc

SEQ ID NO: 2336033 - RNA, 19 nt, Artificial Sequence
  Description of Artificial Sequence: Synthetic oligonucleotide
ugggagcccuuuuggaaac

SEQ ID NO: 2336034 - RNA, 19 nt, Artificial Sequence
  Description of Artificial Sequence: Synthetic oligonucleotide
ucacaucccagggaugggu

SEQ ID NO: 2336035 - RNA, 19 nt, Artificial Sequence
  Description of Artificial Sequence: Synthetic oligonucleotide
cuggaguggccacaagcac

SEQ ID NO: 2336036 - RNA, 19 nt, Artificial Sequence
  Description of Artificial Sequence: Synthetic oligonucleotide
uccugcucuguggauauaa

SEQ ID NO: 2336037 - RNA, 19 nt, Artificial Sequence
  Description of Artificial Sequence: Synthetic oligonucleotide
cccuuuagucucauaaaug

SEQ ID NO: 2336038 - RNA, 19 nt, Artificial Sequence
  Description of Artificial Sequence: Synthetic oligonucleotide
ccacauggauacuaucuag

SEQ ID NO: 2336039 - RNA, 19 nt, Artificial Sequence
  Description of Artificial Sequence: Synthetic oligonucleotide
uguuaaggcaaagggucuu

SEQ ID NO: 2336040 - RNA, 19 nt, Artificial Sequence
  Description of Artificial Sequence: Synthetic oligonucleotide
uggucccuggcacuucacu

SEQ ID NO: 2336041 - RNA, 19 nt, Artificial Sequence
  Description of Artificial Sequence: Synthetic oligonucleotide
uuuucugaaccaggcucac

SEQ ID NO: 2336042 - RNA, 19 nt, Artificial Sequence
  Description of Artificial Sequence: Synthetic oligonucleotide
gcuguaagcugaucaguug

SEQ ID NO: 2336043 - RNA, 19 nt, Artificial Sequence
  Description of Artificial Sequence: Synthetic oligonucleotide
agcccuuuuggaaacucug

SEQ ID NO: 2336044 - RNA, 19 nt, Artificial Sequence
  Description of Artificial Sequence: Synthetic oligonucleotide
uggauacuaucuagaccuc

SEQ ID NO: 2336045 - RNA, 19 nt, Artificial Sequence
  Description of Artificial Sequence: Synthetic oligonucleotide
ucuaacucagcuggacuuu

SEQ ID NO: 2336046 - RNA, 19 nt, Artificial Sequence
  Description of Artificial Sequence: Synthetic oligonucleotide
cagcaauugguuuacgccu

SEQ ID NO: 2336047 - RNA, 19 nt, Artificial Sequence
  Description of Artificial Sequence: Synthetic oligonucleotide
ucagcuggacuuucugcua

SEQ ID NO: 2336048 - RNA, 19 nt, Artificial Sequence
  Description of Artificial Sequence: Synthetic oligonucleotide
gaccucgugaggcuauguc

SEQ ID NO: 2336049 - RNA, 19 nt, Artificial Sequence
  Description of Artificial Sequence: Synthetic oligonucleotide
cuggaaacguggcucccac

SEQ ID NO: 2336050 - RNA, 19 nt, Artificial Sequence
  Description of Artificial Sequence: Synthetic oligonucleotide
uggcacuucacugcccaca

SEQ ID NO: 2336051 - RNA, 19 nt, Artificial Sequence
  Description of Artificial Sequence: Synthetic oligonucleotide
gaagauaccuguucucauu

SEQ ID NO: 2336052 - RNA, 19 nt, Artificial Sequence
  Description of Artificial Sequence: Synthetic oligonucleotide
ccuuuagucucauaaaugu

SEQ ID NO: 2336053 - RNA, 19 nt, Artificial Sequence
  Description of Artificial Sequence: Synthetic oligonucleotide
cugcuauagggcucuuuuc

SEQ ID NO: 2336054 - RNA, 19 nt, Artificial Sequence
  Description of Artificial Sequence: Synthetic oligonucleotide
ugcagccuuagauguugga

SEQ ID NO: 2336055 - RNA, 19 nt, Artificial Sequence
  Description of Artificial Sequence: Synthetic oligonucleotide
guuccacauggauacuauc

SEQ ID NO: 2336056 - RNA, 19 nt, Artificial Sequence
  Description of Artificial Sequence: Synthetic oligonucleotide
gcucaauuuucugaaccag

SEQ ID NO: 2336057 - RNA, 19 nt, Artificial Sequence
  Description of Artificial Sequence: Synthetic oligonucleotide
cuguggauauaaucuugca

SEQ ID NO: 2336058 - RNA, 19 nt, Artificial Sequence
  Description of Artificial Sequence: Synthetic oligonucleotide
uggaaacguggcucccacc

SEQ ID NO: 2336059 - RNA, 19 nt, Artificial Sequence
  Description of Artificial Sequence: Synthetic oligonucleotide
cugaucaguugacuuuuca

SEQ ID NO: 2336060 - RNA, 19 nt, Artificial Sequence
  Description of Artificial Sequence: Synthetic oligonucleotide
caaccaguucacagugcug

SEQ ID NO: 2336061 - RNA, 19 nt, Artificial Sequence
  Description of Artificial Sequence: Synthetic oligonucleotide
guggugagauagucugggc

SEQ ID NO: 2336062 - RNA, 19 nt, Artificial Sequence
  Description of Artificial Sequence: Synthetic oligonucleotide
cuugugaugguggugagau

SEQ ID NO: 2336063 - RNA, 19 nt, Artificial Sequence
  Description of Artificial Sequence: Synthetic oligonucleotide
acaccaggacaguuccuga

SEQ ID NO: 2336064 - RNA, 19 nt, Artificial Sequence
  Description of Artificial Sequence: Synthetic oligonucleotide
cuguugcagaacaccagga

SEQ ID NO: 2336065 - RNA, 19 nt, Artificial Sequence
  Description of Artificial Sequence: Synthetic oligonucleotide
cuuuacucagcaauugguu

SEQ ID NO: 2336066 - RNA, 19 nt, Artificial Sequence
  Description of Artificial Sequence: Synthetic oligonucleotide
caucacuaacugagcuuug

SEQ ID NO: 2336067 - RNA, 19 nt, Artificial Sequence
  Description of Artificial Sequence: Synthetic oligonucleotide
ccaagauguaauccacaag

SEQ ID NO: 2336068 - RNA, 19 nt, Artificial Sequence
  Description of Artificial Sequence: Synthetic oligonucleotide
uuucagggccuuccacaaa

SEQ ID NO: 2336069 - RNA, 19 nt, Artificial Sequence
  Description of Artificial Sequence: Synthetic oligonucleotide
ccagaauauaucccaacca

SEQ ID NO: 2336070 - RNA, 19 nt, Artificial Sequence
  Description of Artificial Sequence: Synthetic oligonucleotide
gucaugcuguuugaggauc

SEQ ID NO: 2336071 - RNA, 19 nt, Artificial Sequence
  Description of Artificial Sequence: Synthetic oligonucleotide
ccucgugaggcuaugucug

SEQ ID NO: 2336072 - RNA, 19 nt, Artificial Sequence
  Description of Artificial Sequence: Synthetic oligonucleotide
ucuagaccucgugaggcua

SEQ ID NO: 2336073 - RNA, 19 nt, Artificial Sequence
  Description of Artificial Sequence: Synthetic oligonucleotide
cauccagaauauaucccaa

SEQ ID NO: 2336074 - RNA, 19 nt, Artificial Sequence
  Description of Artificial Sequence: Synthetic oligonucleotide
cuaacucagcuggacuuuc

SEQ ID NO: 2336075 - RNA, 19 nt, Artificial Sequence
  Description of Artificial Sequence: Synthetic oligonucleotide
agcugaucaguugacuuuu

SEQ ID NO: 2336076 - RNA, 19 nt, Artificial Sequence
  Description of Artificial Sequence: Synthetic oligonucleotide
ggcauaaugcaguggagcu

SEQ ID NO: 2336077 - RNA, 19 nt, Artificial Sequence
  Description of Artificial Sequence: Synthetic oligonucleotide
agcuguaagcugaucaguu

SEQ ID NO: 2336078 - RNA, 19 nt, Artificial Sequence
  Description of Artificial Sequence: Synthetic oligonucleotide
aguuccacauggauacuau

SEQ ID NO: 2336079 - RNA, 19 nt, Artificial Sequence
  Description of Artificial Sequence: Synthetic oligonucleotide
auagucugggcuggugacu

SEQ ID NO: 2336080 - RNA, 19 nt, Artificial Sequence
  Description of Artificial Sequence: Synthetic oligonucleotide
ggagcuuggagcuugugau

SEQ ID NO: 2336081 - RNA, 19 nt, Artificial Sequence
  Description of Artificial Sequence: Synthetic oligonucleotide
ucgugaggcuaugucugug

SEQ ID NO: 2336082 - RNA, 19 nt, Artificial Sequence
  Description of Artificial Sequence: Synthetic oligonucleotide
caaacgccccuggaguggc

SEQ ID NO: 2336083 - RNA, 19 nt, Artificial Sequence
  Description of Artificial Sequence: Synthetic oligonucleotide
gcccuugcagccuuagaug

SEQ ID NO: 2336084 - RNA, 19 nt, Artificial Sequence
  Description of Artificial Sequence: Synthetic oligonucleotide
ugcagaacaccaggacagu

SEQ ID NO: 2336085 - RNA, 19 nt, Artificial Sequence
  Description of Artificial Sequence: Synthetic oligonucleotide
guggucauccagaauauau

SEQ ID NO: 2336086 - RNA, 19 nt, Artificial Sequence
  Description of Artificial Sequence: Synthetic oligonucleotide
auaaugcaguggagcuugg

SEQ ID NO: 2336087 - RNA, 19 nt, Artificial Sequence
  Description of Artificial Sequence: Synthetic oligonucleotide
gccagcucaauuuucugaa

SEQ ID NO: 2336088 - RNA, 19 nt, Artificial Sequence
  Description of Artificial Sequence: Synthetic oligonucleotide
aacgccccuggaguggcca

SEQ ID NO: 2336089 - RNA, 19 nt, Artificial Sequence
  Description of Artificial Sequence: Synthetic oligonucleotide
uugcccuugcagccuuaga

SEQ ID NO: 2336090 - RNA, 19 nt, Artificial Sequence
  Description of Artificial Sequence: Synthetic oligonucleotide
acucagcaauugguuuacg

SEQ ID NO: 2336091 - RNA, 19 nt, Artificial Sequence
  Description of Artificial Sequence: Synthetic oligonucleotide
acaaccaguuccacaugga

SEQ ID NO: 2336092 - RNA, 19 nt, Artificial Sequence
  Description of Artificial Sequence: Synthetic oligonucleotide
aaacgccccuggaguggcc

SEQ ID NO: 2336093 - RNA, 19 nt, Artificial Sequence
  Description of Artificial Sequence: Synthetic oligonucleotide
gggaugggucacaaaacug

SEQ ID NO: 2336094 - RNA, 19 nt, Artificial Sequence
  Description of Artificial Sequence: Synthetic oligonucleotide
acgccuuucuggaaacgug

SEQ ID NO: 2336095 - RNA, 19 nt, Artificial Sequence
  Description of Artificial Sequence: Synthetic oligonucleotide
ccaaagauuaggcuuguua

SEQ ID NO: 2336096 - RNA, 19 nt, Artificial Sequence
  Description of Artificial Sequence: Synthetic oligonucleotide
caauuuucugaaccaggcu

SEQ ID NO: 2336097 - RNA, 19 nt, Artificial Sequence
  Description of Artificial Sequence: Synthetic oligonucleotide
cucacaucccagggauggg

SEQ ID NO: 2336098 - RNA, 19 nt, Artificial Sequence
  Description of Artificial Sequence: Synthetic oligonucleotide
acgagcugccagcucaauu

SEQ ID NO: 2336099 - RNA, 19 nt, Artificial Sequence
  Description of Artificial Sequence: Synthetic oligonucleotide
ugagauagucugggcuggu

SEQ ID NO: 2336100 - RNA, 19 nt, Artificial Sequence
  Description of Artificial Sequence: Synthetic oligonucleotide
auaucccaaccaguucaca

SEQ ID NO: 2336101 - RNA, 19 nt, Artificial Sequence
  Description of Artificial Sequence: Synthetic oligonucleotide
uguggucauccagaauaua

SEQ ID NO: 2336102 - RNA, 19 nt, Artificial Sequence
  Description of Artificial Sequence: Synthetic oligonucleotide
aggggucuucuaacucagc

SEQ ID NO: 2336103 - RNA, 19 nt, Artificial Sequence
  Description of Artificial Sequence: Synthetic oligonucleotide
uggugacuuuacucagcaa

SEQ ID NO: 2336104 - RNA, 19 nt, Artificial Sequence
  Description of Artificial Sequence: Synthetic oligonucleotide
uucgacgagcugccagcuc

SEQ ID NO: 2336105 - RNA, 19 nt, Artificial Sequence
  Description of Artificial Sequence: Synthetic oligonucleotide
agcaauugguuuacgccuu

SEQ ID NO: 2336106 - RNA, 19 nt, Artificial Sequence
  Description of Artificial Sequence: Synthetic oligonucleotide
accuucucggcucccuuua

SEQ ID NO: 2336107 - RNA, 19 nt, Artificial Sequence
  Description of Artificial Sequence: Synthetic oligonucleotide
cuaacugagcuuugggauu

SEQ ID NO: 2336108 - RNA, 19 nt, Artificial Sequence
  Description of Artificial Sequence: Synthetic oligonucleotide
aguugacuuuucagggccu

SEQ ID NO: 2336109 - RNA, 19 nt, Artificial Sequence
  Description of Artificial Sequence: Synthetic oligonucleotide
gaugggucacaaaacugau

SEQ ID NO: 2336110 - RNA, 19 nt, Artificial Sequence
  Description of Artificial Sequence: Synthetic oligonucleotide
caauugguuuacgccuuuc

SEQ ID NO: 2336111 - RNA, 19 nt, Artificial Sequence
  Description of Artificial Sequence: Synthetic oligonucleotide
cugucugacaugaggcaua

SEQ ID NO: 2336112 - RNA, 19 nt, Artificial Sequence
  Description of Artificial Sequence: Synthetic oligonucleotide
uguucucauugaggcuggc

SEQ ID NO: 2336113 - RNA, 19 nt, Artificial Sequence
  Description of Artificial Sequence: Synthetic oligonucleotide
cugugcagauaaguauguc

SEQ ID NO: 2336114 - RNA, 19 nt, Artificial Sequence
  Description of Artificial Sequence: Synthetic oligonucleotide
uagaccucgugaggcuaug

SEQ ID NO: 2336115 - RNA, 19 nt, Artificial Sequence
  Description of Artificial Sequence: Synthetic oligonucleotide
guucucauugaggcuggca

SEQ ID NO: 2336116 - RNA, 19 nt, Artificial Sequence
  Description of Artificial Sequence: Synthetic oligonucleotide
gcucuuuuccaagauguaa

SEQ ID NO: 2336117 - RNA, 19 nt, Artificial Sequence
  Description of Artificial Sequence: Synthetic oligonucleotide
ggaaggcuucuucuucgac

SEQ ID NO: 2336118 - RNA, 19 nt, Artificial Sequence
  Description of Artificial Sequence: Synthetic oligonucleotide
ggggucuucuaacucagcu

SEQ ID NO: 2336119 - RNA, 19 nt, Artificial Sequence
  Description of Artificial Sequence: Synthetic oligonucleotide
cuuucugcuauagggcucu

SEQ ID NO: 2336120 - RNA, 19 nt, Artificial Sequence
  Description of Artificial Sequence: Synthetic oligonucleotide
acguguccgcuucauccaa

SEQ ID NO: 2336121 - RNA, 19 nt, Artificial Sequence
  Description of Artificial Sequence: Synthetic oligonucleotide
cagccuuagauguuggauu

SEQ ID NO: 2336122 - RNA, 19 nt, Artificial Sequence
  Description of Artificial Sequence: Synthetic oligonucleotide
guaagcugaucaguugacu

SEQ ID NO: 2336123 - RNA, 19 nt, Artificial Sequence
  Description of Artificial Sequence: Synthetic oligonucleotide
acgccccuggaguggccac

SEQ ID NO: 2336124 - RNA, 19 nt, Artificial Sequence
  Description of Artificial Sequence: Synthetic oligonucleotide
acgacccacccuuccugcu

SEQ ID NO: 2336125 - RNA, 19 nt, Artificial Sequence
  Description of Artificial Sequence: Synthetic oligonucleotide
ccagcaacguguccgcuuc

SEQ ID NO: 2336126 - RNA, 19 nt, Artificial Sequence
  Description of Artificial Sequence: Synthetic oligonucleotide
gggcucuuuuccaagaugu

SEQ ID NO: 2336127 - RNA, 19 nt, Artificial Sequence
  Description of Artificial Sequence: Synthetic oligonucleotide
gcuggugacuuuacucagc

SEQ ID NO: 2336128 - RNA, 19 nt, Artificial Sequence
  Description of Artificial Sequence: Synthetic oligonucleotide
agcuuucauccagcaacgu

SEQ ID NO: 2336129 - RNA, 19 nt, Artificial Sequence
  Description of Artificial Sequence: Synthetic oligonucleotide
ccagcucaauuuucugaac

SEQ ID NO: 2336130 - RNA, 19 nt, Artificial Sequence
  Description of Artificial Sequence: Synthetic oligonucleotide
aggcuaugucugugcagau

SEQ ID NO: 2336131 - RNA, 19 nt, Artificial Sequence
  Description of Artificial Sequence: Synthetic oligonucleotide
agccaaagauuaggcuugu

SEQ ID NO: 2336132 - RNA, 19 nt, Artificial Sequence
  Description of Artificial Sequence: Synthetic oligonucleotide
cagauucaagccagccaaa

SEQ ID NO: 2336133 - RNA, 19 nt, Artificial Sequence
  Description of Artificial Sequence: Synthetic oligonucleotide
gcuuugucaugcuguuuga

SEQ ID NO: 2336134 - RNA, 19 nt, Artificial Sequence
  Description of Artificial Sequence: Synthetic oligonucleotide
cuggcacuucacugcccac

SEQ ID NO: 2336135 - RNA, 19 nt, Artificial Sequence
  Description of Artificial Sequence: Synthetic oligonucleotide
agcuggacuuucugcuaua

SEQ ID NO: 2336136 - RNA, 19 nt, Artificial Sequence
  Description of Artificial Sequence: Synthetic oligonucleotide
agcaacguguccgcuucau

SEQ ID NO: 2336137 - RNA, 19 nt, Artificial Sequence
  Description of Artificial Sequence: Synthetic oligonucleotide
gacccacccuuccugcucu

SEQ ID NO: 2336138 - RNA, 19 nt, Artificial Sequence
  Description of Artificial Sequence: Synthetic oligonucleotide
caaccaguuccacauggau

SEQ ID NO: 2336139 - RNA, 19 nt, Artificial Sequence
  Description of Artificial Sequence: Synthetic oligonucleotide
uucugcuauagggcucuuu

SEQ ID NO: 2336140 - RNA, 19 nt, Artificial Sequence
  Description of Artificial Sequence: Synthetic oligonucleotide
augggucacaaaacugaua

SEQ ID NO: 2336141 - RNA, 19 nt, Artificial Sequence
  Description of Artificial Sequence: Synthetic oligonucleotide
aacugagcuuugggauuaa

SEQ ID NO: 2336142 - RNA, 19 nt, Artificial Sequence
  Description of Artificial Sequence: Synthetic oligonucleotide
gaaacguggcucccaccau

SEQ ID NO: 2336143 - RNA, 19 nt, Artificial Sequence
  Description of Artificial Sequence: Synthetic oligonucleotide
auggucccuggcacuucac

SEQ ID NO: 2336144 - RNA, 19 nt, Artificial Sequence
  Description of Artificial Sequence: Synthetic oligonucleotide
ggaagauaccuguucucau

SEQ ID NO: 2336145 - RNA, 19 nt, Artificial Sequence
  Description of Artificial Sequence: Synthetic oligonucleotide
gaggcuggcauuugcccuu

SEQ ID NO: 2336146 - RNA, 19 nt, Artificial Sequence
  Description of Artificial Sequence: Synthetic oligonucleotide
agaccucgugaggcuaugu

SEQ ID NO: 2336147 - RNA, 19 nt, Artificial Sequence
  Description of Artificial Sequence: Synthetic oligonucleotide
acugagcuuugggauuaaa

SEQ ID NO: 2336148 - RNA, 19 nt, Artificial Sequence
  Description of Artificial Sequence: Synthetic oligonucleotide
ugucaccuucucggcuccc

SEQ ID NO: 2336149 - RNA, 19 nt, Artificial Sequence
  Description of Artificial Sequence: Synthetic oligonucleotide
cccaaccaguucacagugc

SEQ ID NO: 2336150 - RNA, 19 nt, Artificial Sequence
  Description of Artificial Sequence: Synthetic oligonucleotide
gucuucuaacucagcugga

SEQ ID NO: 2336151 - RNA, 19 nt, Artificial Sequence
  Description of Artificial Sequence: Synthetic oligonucleotide
ggauauaaucuugcagagu

SEQ ID NO: 2336152 - RNA, 19 nt, Artificial Sequence
  Description of Artificial Sequence: Synthetic oligonucleotide
gcaucagauucaagccagc

SEQ ID NO: 2336153 - RNA, 19 nt, Artificial Sequence
  Description of Artificial Sequence: Synthetic oligonucleotide
gguuuacgccuuucuggaa

SEQ ID NO: 2336154 - RNA, 19 nt, Artificial Sequence
  Description of Artificial Sequence: Synthetic oligonucleotide
gcuuugggauuaaaggggu

SEQ ID NO: 2336155 - RNA, 19 nt, Artificial Sequence
  Description of Artificial Sequence: Synthetic oligonucleotide
gcaacguguccgcuucauc

SEQ ID NO: 2336156 - RNA, 19 nt, Artificial Sequence
  Description of Artificial Sequence: Synthetic oligonucleotide
ggagcccuuuuggaaacuc

SEQ ID NO: 2336157 - RNA, 19 nt, Artificial Sequence
  Description of Artificial Sequence: Synthetic oligonucleotide
uggcucccaccaucacuaa

SEQ ID NO: 2336158 - RNA, 19 nt, Artificial Sequence
  Description of Artificial Sequence: Synthetic oligonucleotide
ccacacgacccacccuucc

SEQ ID NO: 2336159 - RNA, 19 nt, Artificial Sequence
  Description of Artificial Sequence: Synthetic oligonucleotide
gccagccaaagauuaggcu

SEQ ID NO: 2336160 - RNA, 19 nt, Artificial Sequence
  Description of Artificial Sequence: Synthetic oligonucleotide
gacaguuccugaggguuuu

SEQ ID NO: 2336161 - RNA, 19 nt, Artificial Sequence
  Description of Artificial Sequence: Synthetic oligonucleotide
cuagaccucgugaggcuau

SEQ ID NO: 2336162 - RNA, 19 nt, Artificial Sequence
  Description of Artificial Sequence: Synthetic oligonucleotide
auccagcaacguguccgcu

SEQ ID NO: 2336163 - RNA, 19 nt, Artificial Sequence
  Description of Artificial Sequence: Synthetic oligonucleotide
agucugggcuggugacuuu

SEQ ID NO: 2336164 - RNA, 19 nt, Artificial Sequence
  Description of Artificial Sequence: Synthetic oligonucleotide
cacacgacccacccuuccu

SEQ ID NO: 2336165 - RNA, 19 nt, Artificial Sequence
  Description of Artificial Sequence: Synthetic oligonucleotide
cucgugaggcuaugucugu

SEQ ID NO: 2336166 - RNA, 19 nt, Artificial Sequence
  Description of Artificial Sequence: Synthetic oligonucleotide
gcagccuuagauguuggau

SEQ ID NO: 2336167 - RNA, 19 nt, Artificial Sequence
  Description of Artificial Sequence: Synthetic oligonucleotide
gcuaguccuggaaggcuuc

SEQ ID NO: 2336168 - RNA, 19 nt, Artificial Sequence
  Description of Artificial Sequence: Synthetic oligonucleotide
cagcuggacuuucugcuau

SEQ ID NO: 2336169 - RNA, 19 nt, Artificial Sequence
  Description of Artificial Sequence: Synthetic oligonucleotide
ggcuaugucugugcagaua

SEQ ID NO: 2336170 - RNA, 19 nt, Artificial Sequence
  Description of Artificial Sequence: Synthetic oligonucleotide
cauuugcccuugcagccuu

SEQ ID NO: 2336171 - RNA, 19 nt, Artificial Sequence
  Description of Artificial Sequence: Synthetic oligonucleotide
cgagcugccagcucaauuu

SEQ ID NO: 2336172 - RNA, 19 nt, Artificial Sequence
  Description of Artificial Sequence: Synthetic oligonucleotide
cuucgacgagcugccagcu

SEQ ID NO: 2336173 - RNA, 19 nt, Artificial Sequence
  Description of Artificial Sequence: Synthetic oligonucleotide
uuccugcucuguggauaua

SEQ ID NO: 2336174 - RNA, 19 nt, Artificial Sequence
  Description of Artificial Sequence: Synthetic oligonucleotide
cccuggcacuucacugccc

SEQ ID NO: 2336175 - RNA, 19 nt, Artificial Sequence
  Description of Artificial Sequence: Synthetic oligonucleotide
ggccacaagcacaucugcu

SEQ ID NO: 2336176 - RNA, 19 nt, Artificial Sequence
  Description of Artificial Sequence: Synthetic oligonucleotide
cagcaacguguccgcuuca

SEQ ID NO: 2336177 - RNA, 19 nt, Artificial Sequence
  Description of Artificial Sequence: Synthetic oligonucleotide
cuaguccuggaaggcuucu

SEQ ID NO: 2336178 - RNA, 19 nt, Artificial Sequence
  Description of Artificial Sequence: Synthetic oligonucleotide
auuugcccuugcagccuua

SEQ ID NO: 2336179 - RNA, 19 nt, Artificial Sequence
  Description of Artificial Sequence: Synthetic oligonucleotide
cccacacgacccacccuuc

SEQ ID NO: 2336180 - RNA, 19 nt, Artificial Sequence
  Description of Artificial Sequence: Synthetic oligonucleotide
gcauuugcccuugcagccu

SEQ ID NO: 2336181 - RNA, 19 nt, Artificial Sequence
  Description of Artificial Sequence: Synthetic oligonucleotide
ccugcucuguggauauaau

SEQ ID NO: 2336182 - RNA, 19 nt, Artificial Sequence
  Description of Artificial Sequence: Synthetic oligonucleotide
gccuuccacaaacgccccu

SEQ ID NO: 2336183 - RNA, 19 nt, Artificial Sequence
  Description of Artificial Sequence: Synthetic oligonucleotide
ccccuggaguggccacaag

SEQ ID NO: 2336184 - RNA, 19 nt, Artificial Sequence
  Description of Artificial Sequence: Synthetic oligonucleotide
cccagggaugggucacaaa

SEQ ID NO: 2336185 - RNA, 19 nt, Artificial Sequence
  Description of Artificial Sequence: Synthetic oligonucleotide
gccccuggaguggccacaa

SEQ ID NO: 2336186 - RNA, 19 nt, Artificial Sequence
  Description of Artificial Sequence: Synthetic oligonucleotide
gggagcccuuuuggaaacu

SEQ ID NO: 2336187 - RNA, 19 nt, Artificial Sequence
  Description of Artificial Sequence: Synthetic oligonucleotide
gccuuagauguuggauuuu

SEQ ID NO: 2336188 - RNA, 19 nt, Artificial Sequence
  Description of Artificial Sequence: Synthetic oligonucleotide
cgacgagcugccagcucaa

SEQ ID NO: 2336189 - RNA, 19 nt, Artificial Sequence
  Description of Artificial Sequence: Synthetic oligonucleotide
ccaguuccacauggauacu

SEQ ID NO: 2336190 - RNA, 19 nt, Artificial Sequence
  Description of Artificial Sequence: Synthetic oligonucleotide
ccgcuucauccaacacuau

SEQ ID NO: 2336191 - RNA, 19 nt, Artificial Sequence
  Description of Artificial Sequence: Synthetic oligonucleotide
cggcucccuuuagucucau

SEQ ID NO: 2336192 - RNA, 19 nt, Artificial Sequence
  Description of Artificial Sequence: Synthetic oligonucleotide
aacuauuucauuuugugcc

SEQ ID NO: 2336193 - RNA, 19 nt, Artificial Sequence
  Description of Artificial Sequence: Synthetic oligonucleotide
uauacauucauuuuaaugc

SEQ ID NO: 2336194 - RNA, 19 nt, Artificial Sequence
  Description of Artificial Sequence: Synthetic oligonucleotide
aauuauaccaaacaugaag

SEQ ID NO: 2336195 - RNA, 19 nt, Artificial Sequence
  Description of Artificial Sequence: Synthetic oligonucleotide
aacaauaacaacugaagag

SEQ ID NO: 2336196 - RNA, 19 nt, Artificial Sequence
  Description of Artificial Sequence: Synthetic oligonucleotide
aaaagauucaccaaagguc

SEQ ID NO: 2336197 - RNA, 19 nt, Artificial Sequence
  Description of Artificial Sequence: Synthetic oligonucleotide
aaguuaguaucuuacaauc

SEQ ID NO: 2336198 - RNA, 19 nt, Artificial Sequence
  Description of Artificial Sequence: Synthetic oligonucleotide
aaaauuauaccaaacauga

SEQ ID NO: 2336199 - RNA, 19 nt, Artificial Sequence
  Description of Artificial Sequence: Synthetic oligonucleotide
gaagacagcacuuuuaaag

SEQ ID NO: 2336200 - RNA, 19 nt, Artificial Sequence
  Description of Artificial Sequence: Synthetic oligonucleotide
uaugaauuaacugaguucc

SEQ ID NO: 2336201 - RNA, 19 nt, Artificial Sequence
  Description of Artificial Sequence: Synthetic oligonucleotide
aaauacaucaauugguaug

SEQ ID NO: 2336202 - RNA, 19 nt, Artificial Sequence
  Description of Artificial Sequence: Synthetic oligonucleotide
uuaacugaguuccaaaucc

SEQ ID NO: 2336203 - RNA, 19 nt, Artificial Sequence
  Description of Artificial Sequence: Synthetic oligonucleotide
aauacaucaauugguaugg

SEQ ID NO: 2336204 - RNA, 19 nt, Artificial Sequence
  Description of Artificial Sequence: Synthetic oligonucleotide
aaggcauucagacuggcuc

SEQ ID NO: 2336205 - RNA, 19 nt, Artificial Sequence
  Description of Artificial Sequence: Synthetic oligonucleotide
auacauucauuuuaaugcc

SEQ ID NO: 2336206 - RNA, 19 nt, Artificial Sequence
  Description of Artificial Sequence: Synthetic oligonucleotide
uaaaagauucaccaaaggu

SEQ ID NO: 2336207 - RNA, 19 nt, Artificial Sequence
  Description of Artificial Sequence: Synthetic oligonucleotide
ugguuuaugaauuaacuga

SEQ ID NO: 2336208 - RNA, 19 nt, Artificial Sequence
  Description of Artificial Sequence: Synthetic oligonucleotide
uucaccaaaggucauuugg

SEQ ID NO: 2336209 - RNA, 19 nt, Artificial Sequence
  Description of Artificial Sequence: Synthetic oligonucleotide
agcaacuuuacauacagug

SEQ ID NO: 2336210 - RNA, 19 nt, Artificial Sequence
  Description of Artificial Sequence: Synthetic oligonucleotide
aacaacugaagagacaggg

SEQ ID NO: 2336211 - RNA, 19 nt, Artificial Sequence
  Description of Artificial Sequence: Synthetic oligonucleotide
aaacaauaacaacugaaga

SEQ ID NO: 2336212 - RNA, 19 nt, Artificial Sequence
  Description of Artificial Sequence: Synthetic oligonucleotide
uguaaaagauucaccaaag

SEQ ID NO: 2336213 - RNA, 19 nt, Artificial Sequence
  Description of Artificial Sequence: Synthetic oligonucleotide
gaaggagaaaauuauacca

SEQ ID NO: 2336214 - RNA, 19 nt, Artificial Sequence
  Description of Artificial Sequence: Synthetic oligonucleotide
gaaacaauaacaacugaag

SEQ ID NO: 2336215 - RNA, 19 nt, Artificial Sequence
  Description of Artificial Sequence: Synthetic oligonucleotide
uaucuuacaaucuuggaaa

SEQ ID NO: 2336216 - RNA, 19 nt, Artificial Sequence
  Description of Artificial Sequence: Synthetic oligonucleotide
cuaagaacacuuaauuagg

SEQ ID NO: 2336217 - RNA, 19 nt, Artificial Sequence
  Description of Artificial Sequence: Synthetic oligonucleotide
uguaacaggaaacaauaac

SEQ ID NO: 2336218 - RNA, 19 nt, Artificial Sequence
  Description of Artificial Sequence: Synthetic oligonucleotide
aaaguuaguaucuuacaau

SEQ ID NO: 2336219 - RNA, 19 nt, Artificial Sequence
  Description of Artificial Sequence: Synthetic oligonucleotide
uuaaggauggcuuccaugu

SEQ ID NO: 2336220 - RNA, 19 nt, Artificial Sequence
  Description of Artificial Sequence: Synthetic oligonucleotide
ugaacuauuucauuuugug

SEQ ID NO: 2336221 - RNA, 19 nt, Artificial Sequence
  Description of Artificial Sequence: Synthetic oligonucleotide
acuauuucauuuugugccc

SEQ ID NO: 2336222 - RNA, 19 nt, Artificial Sequence
  Description of Artificial Sequence: Synthetic oligonucleotide
uaguaucuuacaaucuugg

SEQ ID NO: 2336223 - RNA, 19 nt, Artificial Sequence
  Description of Artificial Sequence: Synthetic oligonucleotide
aaagauucaccaaagguca

SEQ ID NO: 2336224 - RNA, 19 nt, Artificial Sequence
  Description of Artificial Sequence: Synthetic oligonucleotide
uuuacauacaguggcaucc

SEQ ID NO: 2336225 - RNA, 19 nt, Artificial Sequence
  Description of Artificial Sequence: Synthetic oligonucleotide
gcuaagaacacuuaauuag

SEQ ID NO: 2336226 - RNA, 19 nt, Artificial Sequence
  Description of Artificial Sequence: Synthetic oligonucleotide
auuaacugaguuccaaauc

SEQ ID NO: 2336227 - RNA, 19 nt, Artificial Sequence
  Description of Artificial Sequence: Synthetic oligonucleotide
aauuaacugaguuccaaau

SEQ ID NO: 2336228 - RNA, 19 nt, Artificial Sequence
  Description of Artificial Sequence: Synthetic oligonucleotide
aaauccaugugguuuuaag

SEQ ID NO: 2336229 - RNA, 19 nt, Artificial Sequence
  Description of Artificial Sequence: Synthetic oligonucleotide
ucuccaaagacugaaacug

SEQ ID NO: 2336230 - RNA, 19 nt, Artificial Sequence
  Description of Artificial Sequence: Synthetic oligonucleotide
ucaccaaaggucauuuggg

SEQ ID NO: 2336231 - RNA, 19 nt, Artificial Sequence
  Description of Artificial Sequence: Synthetic oligonucleotide
ucuaauguaacaggaaaca

SEQ ID NO: 2336232 - RNA, 19 nt, Artificial Sequence
  Description of Artificial Sequence: Synthetic oligonucleotide
uuaguaucuuacaaucuug

SEQ ID NO: 2336233 - RNA, 19 nt, Artificial Sequence
  Description of Artificial Sequence: Synthetic oligonucleotide
gaacuauuucauuuugugc

SEQ ID NO: 2336234 - RNA, 19 nt, Artificial Sequence
  Description of Artificial Sequence: Synthetic oligonucleotide
ucagacaaguagcugacca

SEQ ID NO: 2336235 - RNA, 19 nt, Artificial Sequence
  Description of Artificial Sequence: Synthetic oligonucleotide
uggaaaaggaguuuccgug

SEQ ID NO: 2336236 - RNA, 19 nt, Artificial Sequence
  Description of Artificial Sequence: Synthetic oligonucleotide
acaggaaacaauaacaacu

SEQ ID NO: 2336237 - RNA, 19 nt, Artificial Sequence
  Description of Artificial Sequence: Synthetic oligonucleotide
uaauguaacaggaaacaau

SEQ ID NO: 2336238 - RNA, 19 nt, Artificial Sequence
  Description of Artificial Sequence: Synthetic oligonucleotide
acaucaauugguauggcac

SEQ ID NO: 2336239 - RNA, 19 nt, Artificial Sequence
  Description of Artificial Sequence: Synthetic oligonucleotide
uucucagacaaguagcuga

SEQ ID NO: 2336240 - RNA, 19 nt, Artificial Sequence
  Description of Artificial Sequence: Synthetic oligonucleotide
aagaguacacagcaugugu

SEQ ID NO: 2336241 - RNA, 19 nt, Artificial Sequence
  Description of Artificial Sequence: Synthetic oligonucleotide
uugguauggcaccacaaag

SEQ ID NO: 2336242 - RNA, 19 nt, Artificial Sequence
  Description of Artificial Sequence: Synthetic oligonucleotide
aagaagacagcacuuuuaa

SEQ ID NO: 2336243 - RNA, 19 nt, Artificial Sequence
  Description of Artificial Sequence: Synthetic oligonucleotide
accaaccaaaguuaguauc

SEQ ID NO: 2336244 - RNA, 19 nt, Artificial Sequence
  Description of Artificial Sequence: Synthetic oligonucleotide
auuauaccaaacaugaaga

SEQ ID NO: 2336245 - RNA, 19 nt, Artificial Sequence
  Description of Artificial Sequence: Synthetic oligonucleotide
aagagacaucuauuccacc

SEQ ID NO: 2336246 - RNA, 19 nt, Artificial Sequence
  Description of Artificial Sequence: Synthetic oligonucleotide
accgauggaaagccgauac

SEQ ID NO: 2336247 - RNA, 19 nt, Artificial Sequence
  Description of Artificial Sequence: Synthetic oligonucleotide
uaagaacacuuaauuagga

SEQ ID NO: 2336248 - RNA, 19 nt, Artificial Sequence
  Description of Artificial Sequence: Synthetic oligonucleotide
gacaggguagcuuuguggc

SEQ ID NO: 2336249 - RNA, 19 nt, Artificial Sequence
  Description of Artificial Sequence: Synthetic oligonucleotide
auggaaagccgauaccugg

SEQ ID NO: 2336250 - RNA, 19 nt, Artificial Sequence
  Description of Artificial Sequence: Synthetic oligonucleotide
uuacaaucuuggaaaagga

SEQ ID NO: 2336251 - RNA, 19 nt, Artificial Sequence
  Description of Artificial Sequence: Synthetic oligonucleotide
aguguuucuccagagaaag

SEQ ID NO: 2336252 - RNA, 19 nt, Artificial Sequence
  Description of Artificial Sequence: Synthetic oligonucleotide
agacaaguagcugaccacc

SEQ ID NO: 2336253 - RNA, 19 nt, Artificial Sequence
  Description of Artificial Sequence: Synthetic oligonucleotide
uuccccuccaucaaggaca

SEQ ID NO: 2336254 - RNA, 19 nt, Artificial Sequence
  Description of Artificial Sequence: Synthetic oligonucleotide
accaaaguuaguaucuuac

SEQ ID NO: 2336255 - RNA, 19 nt, Artificial Sequence
  Description of Artificial Sequence: Synthetic oligonucleotide
ucuguguccugcagaaacg

SEQ ID NO: 2336256 - RNA, 19 nt, Artificial Sequence
  Description of Artificial Sequence: Synthetic oligonucleotide
agcacuaccgauggaaagc

SEQ ID NO: 2336257 - RNA, 19 nt, Artificial Sequence
  Description of Artificial Sequence: Synthetic oligonucleotide
ucuauuccaccaaccaaag

SEQ ID NO: 2336258 - RNA, 19 nt, Artificial Sequence
  Description of Artificial Sequence: Synthetic oligonucleotide
uggggaaaggcauucagac

SEQ ID NO: 2336259 - RNA, 19 nt, Artificial Sequence
  Description of Artificial Sequence: Synthetic oligonucleotide
aaagccgauaccugggcca

SEQ ID NO: 2336260 - RNA, 19 nt, Artificial Sequence
  Description of Artificial Sequence: Synthetic oligonucleotide
auuaggaaaggaaauauaa

SEQ ID NO: 2336261 - RNA, 19 nt, Artificial Sequence
  Description of Artificial Sequence: Synthetic oligonucleotide
acaaagcuuuuaaauauac

SEQ ID NO: 2336262 - RNA, 19 nt, Artificial Sequence
  Description of Artificial Sequence: Synthetic oligonucleotide
ugguauggcaccacaaaga

SEQ ID NO: 2336263 - RNA, 19 nt, Artificial Sequence
  Description of Artificial Sequence: Synthetic oligonucleotide
aucagaggcaagaagacag

SEQ ID NO: 2336264 - RNA, 19 nt, Artificial Sequence
  Description of Artificial Sequence: Synthetic oligonucleotide
uggcuucucagacaaguag

SEQ ID NO: 2336265 - RNA, 19 nt, Artificial Sequence
  Description of Artificial Sequence: Synthetic oligonucleotide
agacaggguagcuuugugg

SEQ ID NO: 2336266 - RNA, 19 nt, Artificial Sequence
  Description of Artificial Sequence: Synthetic oligonucleotide
caauaacaacugaagagac

SEQ ID NO: 2336267 - RNA, 19 nt, Artificial Sequence
  Description of Artificial Sequence: Synthetic oligonucleotide
aaaagaguacacagcaugu

SEQ ID NO: 2336268 - RNA, 19 nt, Artificial Sequence
  Description of Artificial Sequence: Synthetic oligonucleotide
aaacaugaagaaagucugg

SEQ ID NO: 2336269 - RNA, 19 nt, Artificial Sequence
  Description of Artificial Sequence: Synthetic oligonucleotide
acugaagagacaggguagc

SEQ ID NO: 2336270 - RNA, 19 nt, Artificial Sequence
  Description of Artificial Sequence: Synthetic oligonucleotide
caucaauugguauggcacc

SEQ ID NO: 2336271 - RNA, 19 nt, Artificial Sequence
  Description of Artificial Sequence: Synthetic oligonucleotide
gaucagcaacuuuacauac

SEQ ID NO: 2336272 - RNA, 19 nt, Artificial Sequence
  Description of Artificial Sequence: Synthetic oligonucleotide
guaucuuacaaucuuggaa

SEQ ID NO: 2336273 - RNA, 19 nt, Artificial Sequence
  Description of Artificial Sequence: Synthetic oligonucleotide
aacaggcuauacucacuac

SEQ ID NO: 2336274 - RNA, 19 nt, Artificial Sequence
  Description of Artificial Sequence: Synthetic oligonucleotide
acaaucuuggaaaaggagu

SEQ ID NO: 2336275 - RNA, 19 nt, Artificial Sequence
  Description of Artificial Sequence: Synthetic oligonucleotide
agacaucuauuccaccaac

SEQ ID NO: 2336276 - RNA, 19 nt, Artificial Sequence
  Description of Artificial Sequence: Synthetic oligonucleotide
agaggcggggccuagcgac

SEQ ID NO: 2336277 - RNA, 19 nt, Artificial Sequence
  Description of Artificial Sequence: Synthetic oligonucleotide
uccaaagacugaaacugga

SEQ ID NO: 2336278 - RNA, 19 nt, Artificial Sequence
  Description of Artificial Sequence: Synthetic oligonucleotide
ggaaggagaaaauuauacc

SEQ ID NO: 2336279 - RNA, 19 nt, Artificial Sequence
  Description of Artificial Sequence: Synthetic oligonucleotide
aaagaguacacagcaugug

SEQ ID NO: 2336280 - RNA, 19 nt, Artificial Sequence
  Description of Artificial Sequence: Synthetic oligonucleotide
uacaucaauugguauggca

SEQ ID NO: 2336281 - RNA, 19 nt, Artificial Sequence
  Description of Artificial Sequence: Synthetic oligonucleotide
acuuaauuaggaaaggaaa

SEQ ID NO: 2336282 - RNA, 19 nt, Artificial Sequence
  Description of Artificial Sequence: Synthetic oligonucleotide
cauacaguggcaucccaag

SEQ ID NO: 2336283 - RNA, 19 nt, Artificial Sequence
  Description of Artificial Sequence: Synthetic oligonucleotide
cuuggaaaaggaguuuccg

SEQ ID NO: 2336284 - RNA, 19 nt, Artificial Sequence
  Description of Artificial Sequence: Synthetic oligonucleotide
ugcuaagaacacuuaauua

SEQ ID NO: 2336285 - RNA, 19 nt, Artificial Sequence
  Description of Artificial Sequence: Synthetic oligonucleotide
gguaauuccugccguaagg

SEQ ID NO: 2336286 - RNA, 19 nt, Artificial Sequence
  Description of Artificial Sequence: Synthetic oligonucleotide
uaacaacugaagagacagg

SEQ ID NO: 2336287 - RNA, 19 nt, Artificial Sequence
  Description of Artificial Sequence: Synthetic oligonucleotide
acaggcuauacucacuacu

SEQ ID NO: 2336288 - RNA, 19 nt, Artificial Sequence
  Description of Artificial Sequence: Synthetic oligonucleotide
aauaacaacugaagagaca

SEQ ID NO: 2336289 - RNA, 19 nt, Artificial Sequence
  Description of Artificial Sequence: Synthetic oligonucleotide
uuaaaggaaggagaaaauu

SEQ ID NO: 2336290 - RNA, 19 nt, Artificial Sequence
  Description of Artificial Sequence: Synthetic oligonucleotide
cucuugguaauuccugccg

SEQ ID NO: 2336291 - RNA, 19 nt, Artificial Sequence
  Description of Artificial Sequence: Synthetic oligonucleotide
uaacugaguuccaaaucca

SEQ ID NO: 2336292 - RNA, 19 nt, Artificial Sequence
  Description of Artificial Sequence: Synthetic oligonucleotide
ucagacuggcucuccaaag

SEQ ID NO: 2336293 - RNA, 19 nt, Artificial Sequence
  Description of Artificial Sequence: Synthetic oligonucleotide
ugaguuccaaauccaugug

SEQ ID NO: 2336294 - RNA, 19 nt, Artificial Sequence
  Description of Artificial Sequence: Synthetic oligonucleotide
caccaaaggucauuugggg

SEQ ID NO: 2336295 - RNA, 19 nt, Artificial Sequence
  Description of Artificial Sequence: Synthetic oligonucleotide
acaaugaccaucaccaggu

SEQ ID NO: 2336296 - RNA, 19 nt, Artificial Sequence
  Description of Artificial Sequence: Synthetic oligonucleotide
ucuugguaauuccugccgu

SEQ ID NO: 2336297 - RNA, 19 nt, Artificial Sequence
  Description of Artificial Sequence: Synthetic oligonucleotide
aaacgaaagcucuggggaa

SEQ ID NO: 2336298 - RNA, 19 nt, Artificial Sequence
  Description of Artificial Sequence: Synthetic oligonucleotide
acagugaacaggcuauacu

SEQ ID NO: 2336299 - RNA, 19 nt, Artificial Sequence
  Description of Artificial Sequence: Synthetic oligonucleotide
ugcaaguguuucuccagag

SEQ ID NO: 2336300 - RNA, 19 nt, Artificial Sequence
  Description of Artificial Sequence: Synthetic oligonucleotide
ucccaagagacaucuauuc

SEQ ID NO: 2336301 - RNA, 19 nt, Artificial Sequence
  Description of Artificial Sequence: Synthetic oligonucleotide
aguaucuuacaaucuugga

SEQ ID NO: 2336302 - RNA, 19 nt, Artificial Sequence
  Description of Artificial Sequence: Synthetic oligonucleotide
ugcagaaacgaaagcucug

SEQ ID NO: 2336303 - RNA, 19 nt, Artificial Sequence
  Description of Artificial Sequence: Synthetic oligonucleotide
uuccaccaaccaaaguuag

SEQ ID NO: 2336304 - RNA, 19 nt, Artificial Sequence
  Description of Artificial Sequence: Synthetic oligonucleotide
ugguaauuccugccguaag

SEQ ID NO: 2336305 - RNA, 19 nt, Artificial Sequence
  Description of Artificial Sequence: Synthetic oligonucleotide
uucgugaggcguuuccucc

SEQ ID NO: 2336306 - RNA, 19 nt, Artificial Sequence
  Description of Artificial Sequence: Synthetic oligonucleotide
auugguauggcaccacaaa

SEQ ID NO: 2336307 - RNA, 19 nt, Artificial Sequence
  Description of Artificial Sequence: Synthetic oligonucleotide
uuuuaaugcccugaacuau

SEQ ID NO: 2336308 - RNA, 19 nt, Artificial Sequence
  Description of Artificial Sequence: Synthetic oligonucleotide
aaagaaucagaggcaagaa

SEQ ID NO: 2336309 - RNA, 19 nt, Artificial Sequence
  Description of Artificial Sequence: Synthetic oligonucleotide
aauuaggaaaggaaauaua

SEQ ID NO: 2336310 - RNA, 19 nt, Artificial Sequence
  Description of Artificial Sequence: Synthetic oligonucleotide
caaguagcugaccaccaag

SEQ ID NO: 2336311 - RNA, 19 nt, Artificial Sequence
  Description of Artificial Sequence: Synthetic oligonucleotide
ugauccugcugcuucguga

SEQ ID NO: 2336312 - RNA, 19 nt, Artificial Sequence
  Description of Artificial Sequence: Synthetic oligonucleotide
cagcacuuuuaaaggaagg

SEQ ID NO: 2336313 - RNA, 19 nt, Artificial Sequence
  Description of Artificial Sequence: Synthetic oligonucleotide
agacagcacuuuuaaagga

SEQ ID NO: 2336314 - RNA, 19 nt, Artificial Sequence
  Description of Artificial Sequence: Synthetic oligonucleotide
accaaaggucauuugggga

SEQ ID NO: 2336315 - RNA, 19 nt, Artificial Sequence
  Description of Artificial Sequence: Synthetic oligonucleotide
uguguucccugcucuaaug

SEQ ID NO: 2336316 - RNA, 19 nt, Artificial Sequence
  Description of Artificial Sequence: Synthetic oligonucleotide
gaaaaggaguuuccgugca

SEQ ID NO: 2336317 - RNA, 19 nt, Artificial Sequence
  Description of Artificial Sequence: Synthetic oligonucleotide
auucauuuuaaugcccuga

SEQ ID NO: 2336318 - RNA, 19 nt, Artificial Sequence
  Description of Artificial Sequence: Synthetic oligonucleotide
gacaucuauuccaccaacc

SEQ ID NO: 2336319 - RNA, 19 nt, Artificial Sequence
  Description of Artificial Sequence: Synthetic oligonucleotide
aucuauuccaccaaccaaa

SEQ ID NO: 2336320 - RNA, 19 nt, Artificial Sequence
  Description of Artificial Sequence: Synthetic oligonucleotide
cacuuaauuaggaaaggaa

SEQ ID NO: 2336321 - RNA, 19 nt, Artificial Sequence
  Description of Artificial Sequence: Synthetic oligonucleotide
gagcacuaccgauggaaag

SEQ ID NO: 2336322 - RNA, 19 nt, Artificial Sequence
  Description of Artificial Sequence: Synthetic oligonucleotide
ugcucuaauguaacaggaa

SEQ ID NO: 2336323 - RNA, 19 nt, Artificial Sequence
  Description of Artificial Sequence: Synthetic oligonucleotide
ggaugagcacuaccgaugg

SEQ ID NO: 2336324 - RNA, 19 nt, Artificial Sequence
  Description of Artificial Sequence: Synthetic oligonucleotide
ugaacaggcuauacucacu

SEQ ID NO: 2336325 - RNA, 19 nt, Artificial Sequence
  Description of Artificial Sequence: Synthetic oligonucleotide
aacuuuacauacaguggca

SEQ ID NO: 2336326 - RNA, 19 nt, Artificial Sequence
  Description of Artificial Sequence: Synthetic oligonucleotide
uccaaauccaugugguuuu

SEQ ID NO: 2336327 - RNA, 19 nt, Artificial Sequence
  Description of Artificial Sequence: Synthetic oligonucleotide
aggucauuuggggaucagc

SEQ ID NO: 2336328 - RNA, 19 nt, Artificial Sequence
  Description of Artificial Sequence: Synthetic oligonucleotide
uaauuccugccguaaggac

SEQ ID NO: 2336329 - RNA, 19 nt, Artificial Sequence
  Description of Artificial Sequence: Synthetic oligonucleotide
gauggaaagccgauaccug

SEQ ID NO: 2336330 - RNA, 19 nt, Artificial Sequence
  Description of Artificial Sequence: Synthetic oligonucleotide
uucagacuggcucuccaaa

SEQ ID NO: 2336331 - RNA, 19 nt, Artificial Sequence
  Description of Artificial Sequence: Synthetic oligonucleotide
aaguagcugaccaccaagu

SEQ ID NO: 2336332 - RNA, 19 nt, Artificial Sequence
  Description of Artificial Sequence: Synthetic oligonucleotide
uuccaaauccaugugguuu

SEQ ID NO: 2336333 - RNA, 19 nt, Artificial Sequence
  Description of Artificial Sequence: Synthetic oligonucleotide
gugaacaggcuauacucac

SEQ ID NO: 2336334 - RNA, 19 nt, Artificial Sequence
  Description of Artificial Sequence: Synthetic oligonucleotide
ugccguaaggacugcaagu

SEQ ID NO: 2336335 - RNA, 19 nt, Artificial Sequence
  Description of Artificial Sequence: Synthetic oligonucleotide
aggaaacaauaacaacuga

SEQ ID NO: 2336336 - RNA, 19 nt, Artificial Sequence
  Description of Artificial Sequence: Synthetic oligonucleotide
ugagcacuaccgauggaaa

SEQ ID NO: 2336337 - RNA, 19 nt, Artificial Sequence
  Description of Artificial Sequence: Synthetic oligonucleotide
acuggcucuccaaagacug

SEQ ID NO: 2336338 - RNA, 19 nt, Artificial Sequence
  Description of Artificial Sequence: Synthetic oligonucleotide
augaccaucaccaggugga

SEQ ID NO: 2336339 - RNA, 19 nt, Artificial Sequence
  Description of Artificial Sequence: Synthetic oligonucleotide
ugcagggaugagcacuacc

SEQ ID NO: 2336340 - RNA, 19 nt, Artificial Sequence
  Description of Artificial Sequence: Synthetic oligonucleotide
cagaaacgaaagcucuggg

SEQ ID NO: 2336341 - RNA, 19 nt, Artificial Sequence
  Description of Artificial Sequence: Synthetic oligonucleotide
agcuuuguggcuucucaga

SEQ ID NO: 2336342 - RNA, 19 nt, Artificial Sequence
  Description of Artificial Sequence: Synthetic oligonucleotide
uuacauacaguggcauccc

SEQ ID NO: 2336343 - RNA, 19 nt, Artificial Sequence
  Description of Artificial Sequence: Synthetic oligonucleotide
uuuccgugcagggaugagc

SEQ ID NO: 2336344 - RNA, 19 nt, Artificial Sequence
  Description of Artificial Sequence: Synthetic oligonucleotide
ggagacucuccucagugag

SEQ ID NO: 2336345 - RNA, 19 nt, Artificial Sequence
  Description of Artificial Sequence: Synthetic oligonucleotide
aguuaguaucuuacaaucu

SEQ ID NO: 2336346 - RNA, 19 nt, Artificial Sequence
  Description of Artificial Sequence: Synthetic oligonucleotide
uucccugcucuaauguaac

SEQ ID NO: 2336347 - RNA, 19 nt, Artificial Sequence
  Description of Artificial Sequence: Synthetic oligonucleotide
uuuuaaggauggcuuccau

SEQ ID NO: 2336348 - RNA, 19 nt, Artificial Sequence
  Description of Artificial Sequence: Synthetic oligonucleotide
aacugaggcaacacaguga

SEQ ID NO: 2336349 - RNA, 19 nt, Artificial Sequence
  Description of Artificial Sequence: Synthetic oligonucleotide
agugcuaagaacacuuaau

SEQ ID NO: 2336350 - RNA, 19 nt, Artificial Sequence
  Description of Artificial Sequence: Synthetic oligonucleotide
ugcuucgugaggcguuucc

SEQ ID NO: 2336351 - RNA, 19 nt, Artificial Sequence
  Description of Artificial Sequence: Synthetic oligonucleotide
guagcuuuguggcuucuca

SEQ ID NO: 2336352 - RNA, 19 nt, Artificial Sequence
  Description of Artificial Sequence: Synthetic oligonucleotide
cugaguuccaaauccaugu

SEQ ID NO: 2336353 - RNA, 19 nt, Artificial Sequence
  Description of Artificial Sequence: Synthetic oligonucleotide
uggggaucagcaacuuuac

SEQ ID NO: 2336354 - RNA, 19 nt, Artificial Sequence
  Description of Artificial Sequence: Synthetic oligonucleotide
auacaucaauugguauggc

SEQ ID NO: 2336355 - RNA, 19 nt, Artificial Sequence
  Description of Artificial Sequence: Synthetic oligonucleotide
aauugguauggcaccacaa

SEQ ID NO: 2336356 - RNA, 19 nt, Artificial Sequence
  Description of Artificial Sequence: Synthetic oligonucleotide
cuauuucauuuugugcccc

SEQ ID NO: 2336357 - RNA, 19 nt, Artificial Sequence
  Description of Artificial Sequence: Synthetic oligonucleotide
guuaguaucuuacaaucuu

SEQ ID NO: 2336358 - RNA, 19 nt, Artificial Sequence
  Description of Artificial Sequence: Synthetic oligonucleotide
uuaaugcccugaacuauuu

SEQ ID NO: 2336359 - RNA, 19 nt, Artificial Sequence
  Description of Artificial Sequence: Synthetic oligonucleotide
gaagagacaggguagcuuu

SEQ ID NO: 2336360 - RNA, 19 nt, Artificial Sequence
  Description of Artificial Sequence: Synthetic oligonucleotide
aagugugguuuaugaauua

SEQ ID NO: 2336361 - RNA, 19 nt, Artificial Sequence
  Description of Artificial Sequence: Synthetic oligonucleotide
agacucuccucagugagca

SEQ ID NO: 2336362 - RNA, 19 nt, Artificial Sequence
  Description of Artificial Sequence: Synthetic oligonucleotide
gcagaaacgaaagcucugg

SEQ ID NO: 2336363 - RNA, 19 nt, Artificial Sequence
  Description of Artificial Sequence: Synthetic oligonucleotide
auacaguggcaucccaaga

SEQ ID NO: 2336364 - RNA, 19 nt, Artificial Sequence
  Description of Artificial Sequence: Synthetic oligonucleotide
agugaacaggcuauacuca

SEQ ID NO: 2336365 - RNA, 19 nt, Artificial Sequence
  Description of Artificial Sequence: Synthetic oligonucleotide
guaauuccugccguaagga

SEQ ID NO: 2336366 - RNA, 19 nt, Artificial Sequence
  Description of Artificial Sequence: Synthetic oligonucleotide
aacuggacccuuggugauc

SEQ ID NO: 2336367 - RNA, 19 nt, Artificial Sequence
  Description of Artificial Sequence: Synthetic oligonucleotide
uccccuccaucaaggacag

SEQ ID NO: 2336368 - RNA, 19 nt, Artificial Sequence
  Description of Artificial Sequence: Synthetic oligonucleotide
aacgaaagcucuggggaaa

SEQ ID NO: 2336369 - RNA, 19 nt, Artificial Sequence
  Description of Artificial Sequence: Synthetic oligonucleotide
agggaugagcacuaccgau

SEQ ID NO: 2336370 - RNA, 19 nt, Artificial Sequence
  Description of Artificial Sequence: Synthetic oligonucleotide
gucacaggaaacugaggca

SEQ ID NO: 2336371 - RNA, 19 nt, Artificial Sequence
  Description of Artificial Sequence: Synthetic oligonucleotide
cugcucuaauguaacagga

SEQ ID NO: 2336372 - RNA, 19 nt, Artificial Sequence
  Description of Artificial Sequence: Synthetic oligonucleotide
gagacaucuauuccaccaa

SEQ ID NO: 2336373 - RNA, 19 nt, Artificial Sequence
  Description of Artificial Sequence: Synthetic oligonucleotide
auucaccaaaggucauuug

SEQ ID NO: 2336374 - RNA, 19 nt, Artificial Sequence
  Description of Artificial Sequence: Synthetic oligonucleotide
acuaccgauggaaagccga

SEQ ID NO: 2336375 - RNA, 19 nt, Artificial Sequence
  Description of Artificial Sequence: Synthetic oligonucleotide
aaaggcauucagacuggcu

SEQ ID NO: 2336376 - RNA, 19 nt, Artificial Sequence
  Description of Artificial Sequence: Synthetic oligonucleotide
agaagacagcacuuuuaaa

SEQ ID NO: 2336377 - RNA, 19 nt, Artificial Sequence
  Description of Artificial Sequence: Synthetic oligonucleotide
caguggcaucccaagagac

SEQ ID NO: 2336378 - RNA, 19 nt, Artificial Sequence
  Description of Artificial Sequence: Synthetic oligonucleotide
uaaugcccugaacuauuuc

SEQ ID NO: 2336379 - RNA, 19 nt, Artificial Sequence
  Description of Artificial Sequence: Synthetic oligonucleotide
ggggacaaugaccaucacc

SEQ ID NO: 2336380 - RNA, 19 nt, Artificial Sequence
  Description of Artificial Sequence: Synthetic oligonucleotide
gguuuuaaggauggcuucc

SEQ ID NO: 2336381 - RNA, 19 nt, Artificial Sequence
  Description of Artificial Sequence: Synthetic oligonucleotide
ugggccaucucuugguaau

SEQ ID NO: 2336382 - RNA, 19 nt, Artificial Sequence
  Description of Artificial Sequence: Synthetic oligonucleotide
uguucccugcucuaaugua

SEQ ID NO: 2336383 - RNA, 19 nt, Artificial Sequence
  Description of Artificial Sequence: Synthetic oligonucleotide
agaaagcacuugccccacg

SEQ ID NO: 2336384 - RNA, 19 nt, Artificial Sequence
  Description of Artificial Sequence: Synthetic oligonucleotide
cuucgugaggcguuuccuc

SEQ ID NO: 2336385 - RNA, 19 nt, Artificial Sequence
  Description of Artificial Sequence: Synthetic oligonucleotide
cuacuuccccuccaucaag

SEQ ID NO: 2336386 - RNA, 19 nt, Artificial Sequence
  Description of Artificial Sequence: Synthetic oligonucleotide
gguauggcaccacaaagaa

SEQ ID NO: 2336387 - RNA, 19 nt, Artificial Sequence
  Description of Artificial Sequence: Synthetic oligonucleotide
uguguccugcagaaacgaa

SEQ ID NO: 2336388 - RNA, 19 nt, Artificial Sequence
  Description of Artificial Sequence: Synthetic oligonucleotide
uugguaauuccugccguaa

SEQ ID NO: 2336389 - RNA, 19 nt, Artificial Sequence
  Description of Artificial Sequence: Synthetic oligonucleotide
gcucuaauguaacaggaaa

SEQ ID NO: 2336390 - RNA, 19 nt, Artificial Sequence
  Description of Artificial Sequence: Synthetic oligonucleotide
cuuccauguaaaagauuca

SEQ ID NO: 2336391 - RNA, 19 nt, Artificial Sequence
  Description of Artificial Sequence: Synthetic oligonucleotide
aaguguuucuccagagaaa

SEQ ID NO: 2336392 - RNA, 19 nt, Artificial Sequence
  Description of Artificial Sequence: Synthetic oligonucleotide
caagaagacagcacuuuua

SEQ ID NO: 2336393 - RNA, 19 nt, Artificial Sequence
  Description of Artificial Sequence: Synthetic oligonucleotide
gaaaggcauucagacuggc

SEQ ID NO: 2336394 - RNA, 19 nt, Artificial Sequence
  Description of Artificial Sequence: Synthetic oligonucleotide
ggucauuuggggaucagca

SEQ ID NO: 2336395 - RNA, 19 nt, Artificial Sequence
  Description of Artificial Sequence: Synthetic oligonucleotide
auuccaccaaccaaaguua

SEQ ID NO: 2336396 - RNA, 19 nt, Artificial Sequence
  Description of Artificial Sequence: Synthetic oligonucleotide
ucaauugguauggcaccac

SEQ ID NO: 2336397 - RNA, 19 nt, Artificial Sequence
  Description of Artificial Sequence: Synthetic oligonucleotide
aggguagcuuuguggcuuc

SEQ ID NO: 2336398 - RNA, 19 nt, Artificial Sequence
  Description of Artificial Sequence: Synthetic oligonucleotide
acucuccucagugagcagu

SEQ ID NO: 2336399 - RNA, 19 nt, Artificial Sequence
  Description of Artificial Sequence: Synthetic oligonucleotide
uggcaccacaaagaaucag

SEQ ID NO: 2336400 - RNA, 19 nt, Artificial Sequence
  Description of Artificial Sequence: Synthetic oligonucleotide
acaggguagcuuuguggcu

SEQ ID NO: 2336401 - RNA, 19 nt, Artificial Sequence
  Description of Artificial Sequence: Synthetic oligonucleotide
aggcuauacucacuacuaa

SEQ ID NO: 2336402 - RNA, 19 nt, Artificial Sequence
  Description of Artificial Sequence: Synthetic oligonucleotide
gcucuccaaagacugaaac

SEQ ID NO: 2336403 - RNA, 19 nt, Artificial Sequence
  Description of Artificial Sequence: Synthetic oligonucleotide
gcgacuguccccgucacgg

SEQ ID NO: 2336404 - RNA, 19 nt, Artificial Sequence
  Description of Artificial Sequence: Synthetic oligonucleotide
caggcuauacucacuacua

SEQ ID NO: 2336405 - RNA, 19 nt, Artificial Sequence
  Description of Artificial Sequence: Synthetic oligonucleotide
augugguuuuaaggauggc

SEQ ID NO: 2336406 - RNA, 19 nt, Artificial Sequence
  Description of Artificial Sequence: Synthetic oligonucleotide
acaacugaagagacagggu

SEQ ID NO: 2336407 - RNA, 19 nt, Artificial Sequence
  Description of Artificial Sequence: Synthetic oligonucleotide
cacuaccgauggaaagccg

SEQ ID NO: 2336408 - RNA, 19 nt, Artificial Sequence
  Description of Artificial Sequence: Synthetic oligonucleotide
gaaagcacuugccccacgu

SEQ ID NO: 2336409 - RNA, 19 nt, Artificial Sequence
  Description of Artificial Sequence: Synthetic oligonucleotide
guccccgucacggagacuc

SEQ ID NO: 2336410 - RNA, 19 nt, Artificial Sequence
  Description of Artificial Sequence: Synthetic oligonucleotide
ugaccaccaagugugguuu

SEQ ID NO: 2336411 - RNA, 19 nt, Artificial Sequence
  Description of Artificial Sequence: Synthetic oligonucleotide
gacaaguagcugaccacca

SEQ ID NO: 2336412 - RNA, 19 nt, Artificial Sequence
  Description of Artificial Sequence: Synthetic oligonucleotide
gugcuaagaacacuuaauu

SEQ ID NO: 2336413 - RNA, 19 nt, Artificial Sequence
  Description of Artificial Sequence: Synthetic oligonucleotide
ucgugaggcguuuccucca

SEQ ID NO: 2336414 - RNA, 19 nt, Artificial Sequence
  Description of Artificial Sequence: Synthetic oligonucleotide
ccugaacuauuucauuuug

SEQ ID NO: 2336415 - RNA, 19 nt, Artificial Sequence
  Description of Artificial Sequence: Synthetic oligonucleotide
cuggggaaaggcauucaga

SEQ ID NO: 2336416 - RNA, 19 nt, Artificial Sequence
  Description of Artificial Sequence: Synthetic oligonucleotide
gagacucuccucagugagc

SEQ ID NO: 2336417 - RNA, 19 nt, Artificial Sequence
  Description of Artificial Sequence: Synthetic oligonucleotide
uggcucuccaaagacugaa

SEQ ID NO: 2336418 - RNA, 19 nt, Artificial Sequence
  Description of Artificial Sequence: Synthetic oligonucleotide
ugaccaucaccagguggag

SEQ ID NO: 2336419 - RNA, 19 nt, Artificial Sequence
  Description of Artificial Sequence: Synthetic oligonucleotide
aucagcaacuuuacauaca

SEQ ID NO: 2336420 - RNA, 19 nt, Artificial Sequence
  Description of Artificial Sequence: Synthetic oligonucleotide
gcuauacucacuacuaaaa

SEQ ID NO: 2336421 - RNA, 19 nt, Artificial Sequence
  Description of Artificial Sequence: Synthetic oligonucleotide
ggcuauacucacuacuaaa

SEQ ID NO: 2336422 - RNA, 19 nt, Artificial Sequence
  Description of Artificial Sequence: Synthetic oligonucleotide
cuagcgacuguccccguca

SEQ ID NO: 2336423 - RNA, 19 nt, Artificial Sequence
  Description of Artificial Sequence: Synthetic oligonucleotide
caccagguggagaggcggg

SEQ ID NO: 2336424 - RNA, 19 nt, Artificial Sequence
  Description of Artificial Sequence: Synthetic oligonucleotide
cucuccaaagacugaaacu

SEQ ID NO: 2336425 - RNA, 19 nt, Artificial Sequence
  Description of Artificial Sequence: Synthetic oligonucleotide
acgaaagcucuggggaaag

SEQ ID NO: 2336426 - RNA, 19 nt, Artificial Sequence
  Description of Artificial Sequence: Synthetic oligonucleotide
cacagugaacaggcuauac

SEQ ID NO: 2336427 - RNA, 19 nt, Artificial Sequence
  Description of Artificial Sequence: Synthetic oligonucleotide
ucccugcucuaauguaaca

SEQ ID NO: 2336428 - RNA, 19 nt, Artificial Sequence
  Description of Artificial Sequence: Synthetic oligonucleotide
aguggcaucccaagagaca

SEQ ID NO: 2336429 - RNA, 19 nt, Artificial Sequence
  Description of Artificial Sequence: Synthetic oligonucleotide
cccuccaucaaggacagug

SEQ ID NO: 2336430 - RNA, 19 nt, Artificial Sequence
  Description of Artificial Sequence: Synthetic oligonucleotide
gggaugagcacuaccgaug

SEQ ID NO: 2336431 - RNA, 19 nt, Artificial Sequence
  Description of Artificial Sequence: Synthetic oligonucleotide
cauuuggggaucagcaacu

SEQ ID NO: 2336432 - RNA, 19 nt, Artificial Sequence
  Description of Artificial Sequence: Synthetic oligonucleotide
ccacgugaaucccugcucc

SEQ ID NO: 2336433 - RNA, 19 nt, Artificial Sequence
  Description of Artificial Sequence: Synthetic oligonucleotide
auguaacaggaaacaauaa

SEQ ID NO: 2336434 - RNA, 19 nt, Artificial Sequence
  Description of Artificial Sequence: Synthetic oligonucleotide
gccguaaggacugcaagug

SEQ ID NO: 2336435 - RNA, 19 nt, Artificial Sequence
  Description of Artificial Sequence: Synthetic oligonucleotide
cugaacuauuucauuuugu

SEQ ID NO: 2336436 - RNA, 19 nt, Artificial Sequence
  Description of Artificial Sequence: Synthetic oligonucleotide
guucccugcucuaauguaa

SEQ ID NO: 2336437 - RNA, 19 nt, Artificial Sequence
  Description of Artificial Sequence: Synthetic oligonucleotide
aagauucaccaaaggucau

SEQ ID NO: 2336438 - RNA, 19 nt, Artificial Sequence
  Description of Artificial Sequence: Synthetic oligonucleotide
ggacaaugaccaucaccag

SEQ ID NO: 2336439 - RNA, 19 nt, Artificial Sequence
  Description of Artificial Sequence: Synthetic oligonucleotide
caucccaagagacaucuau

SEQ ID NO: 2336440 - RNA, 19 nt, Artificial Sequence
  Description of Artificial Sequence: Synthetic oligonucleotide
augaauuaacugaguucca

SEQ ID NO: 2336441 - RNA, 19 nt, Artificial Sequence
  Description of Artificial Sequence: Synthetic oligonucleotide
cagugcuaagaacacuuaa

SEQ ID NO: 2336442 - RNA, 19 nt, Artificial Sequence
  Description of Artificial Sequence: Synthetic oligonucleotide
aucaccagguggagaggcg

SEQ ID NO: 2336443 - RNA, 19 nt, Artificial Sequence
  Description of Artificial Sequence: Synthetic oligonucleotide
agauucaccaaaggucauu

SEQ ID NO: 2336444 - RNA, 19 nt, Artificial Sequence
  Description of Artificial Sequence: Synthetic oligonucleotide
cucagacaaguagcugacc

SEQ ID NO: 2336445 - RNA, 19 nt, Artificial Sequence
  Description of Artificial Sequence: Synthetic oligonucleotide
guguccugcagaaacgaaa

SEQ ID NO: 2336446 - RNA, 19 nt, Artificial Sequence
  Description of Artificial Sequence: Synthetic oligonucleotide
cauucagacuggcucucca

SEQ ID NO: 2336447 - RNA, 19 nt, Artificial Sequence
  Description of Artificial Sequence: Synthetic oligonucleotide
cuugccccacgugaauccc

SEQ ID NO: 2336448 - RNA, 19 nt, Artificial Sequence
  Description of Artificial Sequence: Synthetic oligonucleotide
uugccccacgugaaucccu

SEQ ID NO: 2336449 - RNA, 19 nt, Artificial Sequence
  Description of Artificial Sequence: Synthetic oligonucleotide
acccuuggugauccugcug

SEQ ID NO: 2336450 - RNA, 19 nt, Artificial Sequence
  Description of Artificial Sequence: Synthetic oligonucleotide
ggccuagcgacuguccccg

SEQ ID NO: 2336451 - RNA, 19 nt, Artificial Sequence
  Description of Artificial Sequence: Synthetic oligonucleotide
gugaaucccugcuccaucu

SEQ ID NO: 2336452 - RNA, 19 nt, Artificial Sequence
  Description of Artificial Sequence: Synthetic oligonucleotide
ugcugcuucgugaggcguu

SEQ ID NO: 2336453 - RNA, 19 nt, Artificial Sequence
  Description of Artificial Sequence: Synthetic oligonucleotide
aguuuccgugcagggauga

SEQ ID NO: 2336454 - RNA, 19 nt, Artificial Sequence
  Description of Artificial Sequence: Synthetic oligonucleotide
gaugagcacuaccgaugga

SEQ ID NO: 2336455 - RNA, 19 nt, Artificial Sequence
  Description of Artificial Sequence: Synthetic oligonucleotide
gcacuaccgauggaaagcc

SEQ ID NO: 2336456 - RNA, 19 nt, Artificial Sequence
  Description of Artificial Sequence: Synthetic oligonucleotide
gugauccugcugcuucgug

SEQ ID NO: 2336457 - RNA, 19 nt, Artificial Sequence
  Description of Artificial Sequence: Synthetic oligonucleotide
uagcgacuguccccgucac

SEQ ID NO: 2336458 - RNA, 19 nt, Artificial Sequence
  Description of Artificial Sequence: Synthetic oligonucleotide
augcccugaacuauuucau

SEQ ID NO: 2336459 - RNA, 19 nt, Artificial Sequence
  Description of Artificial Sequence: Synthetic oligonucleotide
ggaguuuccgugcagggau

SEQ ID NO: 2336460 - RNA, 19 nt, Artificial Sequence
  Description of Artificial Sequence: Synthetic oligonucleotide
cagcauguguucccugcuc

SEQ ID NO: 2336461 - RNA, 19 nt, Artificial Sequence
  Description of Artificial Sequence: Synthetic oligonucleotide
ccaaccaaaguuaguaucu

SEQ ID NO: 2336462 - RNA, 19 nt, Artificial Sequence
  Description of Artificial Sequence: Synthetic oligonucleotide
ucuccucagugagcagugc

SEQ ID NO: 2336463 - RNA, 19 nt, Artificial Sequence
  Description of Artificial Sequence: Synthetic oligonucleotide
cagggaugagcacuaccga

SEQ ID NO: 2336464 - RNA, 19 nt, Artificial Sequence
  Description of Artificial Sequence: Synthetic oligonucleotide
ggcguuuccuccaucccug

SEQ ID NO: 2336465 - RNA, 19 nt, Artificial Sequence
  Description of Artificial Sequence: Synthetic oligonucleotide
ggggccuagcgacuguccc

SEQ ID NO: 2336466 - RNA, 19 nt, Artificial Sequence
  Description of Artificial Sequence: Synthetic oligonucleotide
cacuugccccacgugaauc

SEQ ID NO: 2336467 - RNA, 19 nt, Artificial Sequence
  Description of Artificial Sequence: Synthetic oligonucleotide
cuguguccugcagaaacga

SEQ ID NO: 2336468 - RNA, 19 nt, Artificial Sequence
  Description of Artificial Sequence: Synthetic oligonucleotide
gagaggcggggccuagcga

SEQ ID NO: 2336469 - RNA, 19 nt, Artificial Sequence
  Description of Artificial Sequence: Synthetic oligonucleotide
uaccgauggaaagccgaua

SEQ ID NO: 2336470 - RNA, 19 nt, Artificial Sequence
  Description of Artificial Sequence: Synthetic oligonucleotide
auuuggggaucagcaacuu

SEQ ID NO: 2336471 - RNA, 19 nt, Artificial Sequence
  Description of Artificial Sequence: Synthetic oligonucleotide
ccgauggaaagccgauacc

SEQ ID NO: 2336472 - RNA, 19 nt, Artificial Sequence
  Description of Artificial Sequence: Synthetic oligonucleotide
cacgugaaucccugcucca

SEQ ID NO: 2336473 - RNA, 19 nt, Artificial Sequence
  Description of Artificial Sequence: Synthetic oligonucleotide
cugcuccaucucugugucc

SEQ ID NO: 2336474 - RNA, 19 nt, Artificial Sequence
  Description of Artificial Sequence: Synthetic oligonucleotide
acagugcuaagaacacuua

SEQ ID NO: 2336475 - RNA, 19 nt, Artificial Sequence
  Description of Artificial Sequence: Synthetic oligonucleotide
acgugaaucccugcuccau

SEQ ID NO: 2336476 - RNA, 19 nt, Artificial Sequence
  Description of Artificial Sequence: Synthetic oligonucleotide
uccugccguaaggacugca

SEQ ID NO: 2336477 - RNA, 19 nt, Artificial Sequence
  Description of Artificial Sequence: Synthetic oligonucleotide
accaccaagugugguuuau

SEQ ID NO: 2336478 - RNA, 19 nt, Artificial Sequence
  Description of Artificial Sequence: Synthetic oligonucleotide
ccaaaggucauuuggggau

SEQ ID NO: 2336479 - RNA, 19 nt, Artificial Sequence
  Description of Artificial Sequence: Synthetic oligonucleotide
cuggcucuccaaagacuga

SEQ ID NO: 2336480 - RNA, 19 nt, Artificial Sequence
  Description of Artificial Sequence: Synthetic oligonucleotide
cccgucacggagacucucc

SEQ ID NO: 2336481 - RNA, 19 nt, Artificial Sequence
  Description of Artificial Sequence: Synthetic oligonucleotide
ggcaucccaagagacaucu

SEQ ID NO: 2336482 - RNA, 19 nt, Artificial Sequence
  Description of Artificial Sequence: Synthetic oligonucleotide
uccccgucacggagacucu

SEQ ID NO: 2336483 - RNA, 19 nt, Artificial Sequence
  Description of Artificial Sequence: Synthetic oligonucleotide
ggggaucagcaacuuuaca

SEQ ID NO: 2336484 - RNA, 19 nt, Artificial Sequence
  Description of Artificial Sequence: Synthetic oligonucleotide
caccaaccaaaguuaguau

SEQ ID NO: 2336485 - RNA, 19 nt, Artificial Sequence
  Description of Artificial Sequence: Synthetic oligonucleotide
cugaccaccaagugugguu

SEQ ID NO: 2336486 - RNA, 19 nt, Artificial Sequence
  Description of Artificial Sequence: Synthetic oligonucleotide
cuaccgauggaaagccgau

SEQ ID NO: 2336487 - RNA, 19 nt, Artificial Sequence
  Description of Artificial Sequence: Synthetic oligonucleotide
ggggaaaggcauucagacu

SEQ ID NO: 2336488 - RNA, 19 nt, Artificial Sequence
  Description of Artificial Sequence: Synthetic oligonucleotide
cccacgugaaucccugcuc

SEQ ID NO: 2336489 - RNA, 19 nt, Artificial Sequence
  Description of Artificial Sequence: Synthetic oligonucleotide
gaccaccaagugugguuua

SEQ ID NO: 2336490 - RNA, 19 nt, Artificial Sequence
  Description of Artificial Sequence: Synthetic oligonucleotide
ggccaucucuugguaauuc

SEQ ID NO: 2336491 - RNA, 19 nt, Artificial Sequence
  Description of Artificial Sequence: Synthetic oligonucleotide
gguagcuuuguggcuucuc

SEQ ID NO: 2336492 - RNA, 19 nt, Artificial Sequence
  Description of Artificial Sequence: Synthetic oligonucleotide
gugaggcguuuccuccauc

SEQ ID NO: 2336493 - RNA, 19 nt, Artificial Sequence
  Description of Artificial Sequence: Synthetic oligonucleotide
gcggggucacaggaaacug

SEQ ID NO: 2336494 - RNA, 19 nt, Artificial Sequence
  Description of Artificial Sequence: Synthetic oligonucleotide
ccuacuuccccuccaucaa

SEQ ID NO: 2336495 - RNA, 19 nt, Artificial Sequence
  Description of Artificial Sequence: Synthetic oligonucleotide
ggcauucagacuggcucuc

SEQ ID NO: 2336496 - RNA, 19 nt, Artificial Sequence
  Description of Artificial Sequence: Synthetic oligonucleotide
agccgauaccugggccauc

SEQ ID NO: 2336497 - RNA, 19 nt, Artificial Sequence
  Description of Artificial Sequence: Synthetic oligonucleotide
uuccugccguaaggacugc

SEQ ID NO: 2336498 - RNA, 19 nt, Artificial Sequence
  Description of Artificial Sequence: Synthetic oligonucleotide
aggcggggccuagcgacug

SEQ ID NO: 2336499 - RNA, 19 nt, Artificial Sequence
  Description of Artificial Sequence: Synthetic oligonucleotide
guauggcaccacaaagaau

SEQ ID NO: 2336500 - RNA, 19 nt, Artificial Sequence
  Description of Artificial Sequence: Synthetic oligonucleotide
cagcaacuuuacauacagu

SEQ ID NO: 2336501 - RNA, 19 nt, Artificial Sequence
  Description of Artificial Sequence: Synthetic oligonucleotide
ccugccguaaggacugcaa

SEQ ID NO: 2336502 - RNA, 19 nt, Artificial Sequence
  Description of Artificial Sequence: Synthetic oligonucleotide
ccaccaagugugguuuaug

SEQ ID NO: 2336503 - RNA, 19 nt, Artificial Sequence
  Description of Artificial Sequence: Synthetic oligonucleotide
ccagguggagaggcggggc

SEQ ID NO: 2336504 - RNA, 19 nt, Artificial Sequence
  Description of Artificial Sequence: Synthetic oligonucleotide
caaccaaaguuaguaucuu

SEQ ID NO: 2336505 - RNA, 19 nt, Artificial Sequence
  Description of Artificial Sequence: Synthetic oligonucleotide
cgauggaaagccgauaccu

SEQ ID NO: 2336506 - RNA, 19 nt, Artificial Sequence
  Description of Artificial Sequence: Synthetic oligonucleotide
caggguagcuuuguggcuu

SEQ ID NO: 2336507 - RNA, 19 nt, Artificial Sequence
  Description of Artificial Sequence: Synthetic oligonucleotide
ccuagcgacuguccccguc

SEQ ID NO: 2336508 - RNA, 19 nt, Artificial Sequence
  Description of Artificial Sequence: Synthetic oligonucleotide
gcauguguucccugcucua

SEQ ID NO: 2336509 - RNA, 19 nt, Artificial Sequence
  Description of Artificial Sequence: Synthetic oligonucleotide
cacggagacucuccucagu

SEQ ID NO: 2336510 - RNA, 19 nt, Artificial Sequence
  Description of Artificial Sequence: Synthetic oligonucleotide
ggcggggucacaggaaacu

SEQ ID NO: 2336511 - RNA, 19 nt, Artificial Sequence
  Description of Artificial Sequence: Synthetic oligonucleotide
ggacagugcuaagaacacu

SEQ ID NO: 2336512 - RNA, 19 nt, Artificial Sequence
  Description of Artificial Sequence: Synthetic oligonucleotide
gugcagggaugagcacuac

SEQ ID NO: 2336513 - RNA, 19 nt, Artificial Sequence
  Description of Artificial Sequence: Synthetic oligonucleotide
cugcuucgugaggcguuuc

SEQ ID NO: 2336514 - RNA, 19 nt, Artificial Sequence
  Description of Artificial Sequence: Synthetic oligonucleotide
cccugaacuauuucauuuu

SEQ ID NO: 2336515 - RNA, 19 nt, Artificial Sequence
  Description of Artificial Sequence: Synthetic oligonucleotide
cggggucacaggaaacuga

SEQ ID NO: 2336516 - RNA, 19 nt, Artificial Sequence
  Description of Artificial Sequence: Synthetic oligonucleotide
gccgauaccugggccaucu

SEQ ID NO: 2336517 - RNA, 19 nt, Artificial Sequence
  Description of Artificial Sequence: Synthetic oligonucleotide
gcuucgugaggcguuuccu

SEQ ID NO: 2336518 - RNA, 19 nt, Artificial Sequence
  Description of Artificial Sequence: Synthetic oligonucleotide
cgugcagggaugagcacua

SEQ ID NO: 2336519 - RNA, 19 nt, Artificial Sequence
  Description of Artificial Sequence: Synthetic oligonucleotide
gaggcggggccuagcgacu

SEQ ID NO: 2336520 - RNA, 19 nt, Artificial Sequence
  Description of Artificial Sequence: Synthetic oligonucleotide
cggggccuagcgacugucc

SEQ ID NO: 2336521 - RNA, 19 nt, Artificial Sequence
  Description of Artificial Sequence: Synthetic oligonucleotide
gugagcagugccagccuuu

SEQ ID NO: 2336522 - RNA, 19 nt, Artificial Sequence
  Description of Artificial Sequence: Synthetic oligonucleotide
gggcggggucacaggaaac

SEQ ID NO: 2336523 - RNA, 19 nt, Artificial Sequence
  Description of Artificial Sequence: Synthetic oligonucleotide
ccccuacuuccccuccauc

SEQ ID NO: 2336524 - RNA, 19 nt, Artificial Sequence
  Description of Artificial Sequence: Synthetic oligonucleotide
gcugaccaccaaguguggu

SEQ ID NO: 2336525 - RNA, 19 nt, Artificial Sequence
  Description of Artificial Sequence: Synthetic oligonucleotide
ccguaaggacugcaagugu

SEQ ID NO: 2336526 - RNA, 19 nt, Artificial Sequence
  Description of Artificial Sequence: Synthetic oligonucleotide
ccgugcagggaugagcacu

SEQ ID NO: 2336527 - RNA, 19 nt, Artificial Sequence
  Description of Artificial Sequence: Synthetic oligonucleotide
ccccacgugaaucccugcu

SEQ ID NO: 2336528 - RNA, 19 nt, Artificial Sequence
  Description of Artificial Sequence: Synthetic oligonucleotide
gcggggccuagcgacuguc

SEQ ID NO: 2336529 - RNA, 19 nt, Artificial Sequence
  Description of Artificial Sequence: Synthetic oligonucleotide
ccgauaccugggccaucuc

SEQ ID NO: 2336530 - RNA, 19 nt, Artificial Sequence
  Description of Artificial Sequence: Synthetic oligonucleotide
gcugcuucgugaggcguuu

SEQ ID NO: 2336531 - RNA, 19 nt, Artificial Sequence
  Description of Artificial Sequence: Synthetic oligonucleotide
ccgucacggagacucuccu

SEQ ID NO: 2336532 - RNA, 19 nt, Artificial Sequence
  Description of Artificial Sequence: Synthetic oligonucleotide
gcaucccaagagacaucua

SEQ ID NO: 2336533 - RNA, 19 nt, Artificial Sequence
  Description of Artificial Sequence: Synthetic oligonucleotide
gggccaucucuugguaauu

SEQ ID NO: 2336534 - RNA, 19 nt, Artificial Sequence
  Description of Artificial Sequence: Synthetic oligonucleotide
ggcggggccuagcgacugu

SEQ ID NO: 2336535 - RNA, 19 nt, Artificial Sequence
  Description of Artificial Sequence: Synthetic oligonucleotide
cgugaggcguuuccuccau

SEQ ID NO: 2336536 - RNA, 19 nt, Artificial Sequence
  Description of Artificial Sequence: Synthetic oligonucleotide
gccuagcgacuguccccgu

SEQ ID NO: 2336537 - RNA, 19 nt, Artificial Sequence
  Description of Artificial Sequence: Synthetic oligonucleotide
cguuuccuccaucccuguu

SEQ ID NO: 2336538 - RNA, 19 nt, Artificial Sequence
  Description of Artificial Sequence: Synthetic oligonucleotide
ccccuccaucaaggacagu

SEQ ID NO: 2336539 - RNA, 19 nt, Artificial Sequence
  Description of Artificial Sequence: Synthetic oligonucleotide
uuuuaaauuagcuaagugg

SEQ ID NO: 2336540 - RNA, 19 nt, Artificial Sequence
  Description of Artificial Sequence: Synthetic oligonucleotide
aaaggaagcgguuggaacc

SEQ ID NO: 2336541 - RNA, 19 nt, Artificial Sequence
  Description of Artificial Sequence: Synthetic oligonucleotide
uucuuuauaacuuuguccc

SEQ ID NO: 2336542 - RNA, 19 nt, Artificial Sequence
  Description of Artificial Sequence: Synthetic oligonucleotide
aaauuagcuaaguggaaac

SEQ ID NO: 2336543 - RNA, 19 nt, Artificial Sequence
  Description of Artificial Sequence: Synthetic oligonucleotide
uguuccuagagcauaaggg

SEQ ID NO: 2336544 - RNA, 19 nt, Artificial Sequence
  Description of Artificial Sequence: Synthetic oligonucleotide
ucaaggauguuccagaagc

SEQ ID NO: 2336545 - RNA, 19 nt, Artificial Sequence
  Description of Artificial Sequence: Synthetic oligonucleotide
uuaaugaggaacgagauca

SEQ ID NO: 2336546 - RNA, 19 nt, Artificial Sequence
  Description of Artificial Sequence: Synthetic oligonucleotide
auagcaaguagugugagcc

SEQ ID NO: 2336547 - RNA, 19 nt, Artificial Sequence
  Description of Artificial Sequence: Synthetic oligonucleotide
cuugaaaugaauucggcag

SEQ ID NO: 2336548 - RNA, 19 nt, Artificial Sequence
  Description of Artificial Sequence: Synthetic oligonucleotide
auaauguuaagucauccag

SEQ ID NO: 2336549 - RNA, 19 nt, Artificial Sequence
  Description of Artificial Sequence: Synthetic oligonucleotide
ucaucaauuguccucauca

SEQ ID NO: 2336550 - RNA, 19 nt, Artificial Sequence
  Description of Artificial Sequence: Synthetic oligonucleotide
ugagguuugggcuauacag

SEQ ID NO: 2336551 - RNA, 19 nt, Artificial Sequence
  Description of Artificial Sequence: Synthetic oligonucleotide
aggucuauaaaauauucuc

SEQ ID NO: 2336552 - RNA, 19 nt, Artificial Sequence
  Description of Artificial Sequence: Synthetic oligonucleotide
auaacuuugucccuacugg

SEQ ID NO: 2336553 - RNA, 19 nt, Artificial Sequence
  Description of Artificial Sequence: Synthetic oligonucleotide
aacauuuaguucugacugc

SEQ ID NO: 2336554 - RNA, 19 nt, Artificial Sequence
  Description of Artificial Sequence: Synthetic oligonucleotide
uauacaguucuuuauaacu

SEQ ID NO: 2336555 - RNA, 19 nt, Artificial Sequence
  Description of Artificial Sequence: Synthetic oligonucleotide
uaauguuaagucauccagg

SEQ ID NO: 2336556 - RNA, 19 nt, Artificial Sequence
  Description of Artificial Sequence: Synthetic oligonucleotide
aguagugugagccgggagc

SEQ ID NO: 2336557 - RNA, 19 nt, Artificial Sequence
  Description of Artificial Sequence: Synthetic oligonucleotide
aauaauguuaagucaucca

SEQ ID NO: 2336558 - RNA, 19 nt, Artificial Sequence
  Description of Artificial Sequence: Synthetic oligonucleotide
uuuaauucauguacuauuc

SEQ ID NO: 2336559 - RNA, 19 nt, Artificial Sequence
  Description of Artificial Sequence: Synthetic oligonucleotide
uauaacuuugucccuacug

SEQ ID NO: 2336560 - RNA, 19 nt, Artificial Sequence
  Description of Artificial Sequence: Synthetic oligonucleotide
aucaauuguccucaucacc

SEQ ID NO: 2336561 - RNA, 19 nt, Artificial Sequence
  Description of Artificial Sequence: Synthetic oligonucleotide
uuguuaaugaggaacgaga

SEQ ID NO: 2336562 - RNA, 19 nt, Artificial Sequence
  Description of Artificial Sequence: Synthetic oligonucleotide
uuguuuacagguuuggcug

SEQ ID NO: 2336563 - RNA, 19 nt, Artificial Sequence
  Description of Artificial Sequence: Synthetic oligonucleotide
caacauuuaguucugacug

SEQ ID NO: 2336564 - RNA, 19 nt, Artificial Sequence
  Description of Artificial Sequence: Synthetic oligonucleotide
guucuuuauaacuuugucc

SEQ ID NO: 2336565 - RNA, 19 nt, Artificial Sequence
  Description of Artificial Sequence: Synthetic oligonucleotide
uucauuaaacaccuuccag

SEQ ID NO: 2336566 - RNA, 19 nt, Artificial Sequence
  Description of Artificial Sequence: Synthetic oligonucleotide
uaauucauguacuauucug

SEQ ID NO: 2336567 - RNA, 19 nt, Artificial Sequence
  Description of Artificial Sequence: Synthetic oligonucleotide
ugaaacgcuacucagcacu

SEQ ID NO: 2336568 - RNA, 19 nt, Artificial Sequence
  Description of Artificial Sequence: Synthetic oligonucleotide
ugugugauucgcuugcacg

SEQ ID NO: 2336569 - RNA, 19 nt, Artificial Sequence
  Description of Artificial Sequence: Synthetic oligonucleotide
aacuuguuaaugaggaacg

SEQ ID NO: 2336570 - RNA, 19 nt, Artificial Sequence
  Description of Artificial Sequence: Synthetic oligonucleotide
uucuaaguugcuuuaauaa

SEQ ID NO: 2336571 - RNA, 19 nt, Artificial Sequence
  Description of Artificial Sequence: Synthetic oligonucleotide
ucuacucauucuuugguag

SEQ ID NO: 2336572 - RNA, 19 nt, Artificial Sequence
  Description of Artificial Sequence: Synthetic oligonucleotide
aguucuuuauaacuuuguc

SEQ ID NO: 2336573 - RNA, 19 nt, Artificial Sequence
  Description of Artificial Sequence: Synthetic oligonucleotide
aaggauguuccagaagccc

SEQ ID NO: 2336574 - RNA, 19 nt, Artificial Sequence
  Description of Artificial Sequence: Synthetic oligonucleotide
uaaguugcuuuaauaaugu

SEQ ID NO: 2336575 - RNA, 19 nt, Artificial Sequence
  Description of Artificial Sequence: Synthetic oligonucleotide
aagggaacuuguuaaugag

SEQ ID NO: 2336576 - RNA, 19 nt, Artificial Sequence
  Description of Artificial Sequence: Synthetic oligonucleotide
aauuccuggaacucggcga

SEQ ID NO: 2336577 - RNA, 19 nt, Artificial Sequence
  Description of Artificial Sequence: Synthetic oligonucleotide
uugaaaugaauucggcagc

SEQ ID NO: 2336578 - RNA, 19 nt, Artificial Sequence
  Description of Artificial Sequence: Synthetic oligonucleotide
ucuuugguaggcuugaaau

SEQ ID NO: 2336579 - RNA, 19 nt, Artificial Sequence
  Description of Artificial Sequence: Synthetic oligonucleotide
uuugguaggcuugaaauga

SEQ ID NO: 2336580 - RNA, 19 nt, Artificial Sequence
  Description of Artificial Sequence: Synthetic oligonucleotide
uaauuccuggaacucggcg

SEQ ID NO: 2336581 - RNA, 19 nt, Artificial Sequence
  Description of Artificial Sequence: Synthetic oligonucleotide
aauucauguacuauucugu

SEQ ID NO: 2336582 - RNA, 19 nt, Artificial Sequence
  Description of Artificial Sequence: Synthetic oligonucleotide
aaccguaguguuuaauuca

SEQ ID NO: 2336583 - RNA, 19 nt, Artificial Sequence
  Description of Artificial Sequence: Synthetic oligonucleotide
ugcuuaguugaugagauga

SEQ ID NO: 2336584 - RNA, 19 nt, Artificial Sequence
  Description of Artificial Sequence: Synthetic oligonucleotide
uaauaauguuaagucaucc

SEQ ID NO: 2336585 - RNA, 19 nt, Artificial Sequence
  Description of Artificial Sequence: Synthetic oligonucleotide
gaacuuguuaaugaggaac

SEQ ID NO: 2336586 - RNA, 19 nt, Artificial Sequence
  Description of Artificial Sequence: Synthetic oligonucleotide
ucauuuaccacuucuucaa

SEQ ID NO: 2336587 - RNA, 19 nt, Artificial Sequence
  Description of Artificial Sequence: Synthetic oligonucleotide
uugaguaauuccuggaacu

SEQ ID NO: 2336588 - RNA, 19 nt, Artificial Sequence
  Description of Artificial Sequence: Synthetic oligonucleotide
ugaaaugaauucggcagcg

SEQ ID NO: 2336589 - RNA, 19 nt, Artificial Sequence
  Description of Artificial Sequence: Synthetic oligonucleotide
uuugggacggugagggugg

SEQ ID NO: 2336590 - RNA, 19 nt, Artificial Sequence
  Description of Artificial Sequence: Synthetic oligonucleotide
aacucggcgaacucaucac

SEQ ID NO: 2336591 - RNA, 19 nt, Artificial Sequence
  Description of Artificial Sequence: Synthetic oligonucleotide
acuauucugucaucaauug

SEQ ID NO: 2336592 - RNA, 19 nt, Artificial Sequence
  Description of Artificial Sequence: Synthetic oligonucleotide
uguuaaugaggaacgagau

SEQ ID NO: 2336593 - RNA, 19 nt, Artificial Sequence
  Description of Artificial Sequence: Synthetic oligonucleotide
gauaagaaggacuuaauuu

SEQ ID NO: 2336594 - RNA, 19 nt, Artificial Sequence
  Description of Artificial Sequence: Synthetic oligonucleotide
uuaauaauguuaagucauc

SEQ ID NO: 2336595 - RNA, 19 nt, Artificial Sequence
  Description of Artificial Sequence: Synthetic oligonucleotide
aauucggcagcguucauua

SEQ ID NO: 2336596 - RNA, 19 nt, Artificial Sequence
  Description of Artificial Sequence: Synthetic oligonucleotide
gaucaaaggcguuugggac

SEQ ID NO: 2336597 - RNA, 19 nt, Artificial Sequence
  Description of Artificial Sequence: Synthetic oligonucleotide
uucacaccgucacugggcg

SEQ ID NO: 2336598 - RNA, 19 nt, Artificial Sequence
  Description of Artificial Sequence: Synthetic oligonucleotide
auuagcuaaguggaaacag

SEQ ID NO: 2336599 - RNA, 19 nt, Artificial Sequence
  Description of Artificial Sequence: Synthetic oligonucleotide
aggaacgagaucaaaggcg

SEQ ID NO: 2336600 - RNA, 19 nt, Artificial Sequence
  Description of Artificial Sequence: Synthetic oligonucleotide
agaucaaaggcguuuggga

SEQ ID NO: 2336601 - RNA, 19 nt, Artificial Sequence
  Description of Artificial Sequence: Synthetic oligonucleotide
uuuaccacuucuucaacau

SEQ ID NO: 2336602 - RNA, 19 nt, Artificial Sequence
  Description of Artificial Sequence: Synthetic oligonucleotide
ugucauuuaccacuucuuc

SEQ ID NO: 2336603 - RNA, 19 nt, Artificial Sequence
  Description of Artificial Sequence: Synthetic oligonucleotide
auucugucaucaauugucc

SEQ ID NO: 2336604 - RNA, 19 nt, Artificial Sequence
  Description of Artificial Sequence: Synthetic oligonucleotide
gcucuuaccacucuguucc

SEQ ID NO: 2336605 - RNA, 19 nt, Artificial Sequence
  Description of Artificial Sequence: Synthetic oligonucleotide
aacuuugucccuacuggcg

SEQ ID NO: 2336606 - RNA, 19 nt, Artificial Sequence
  Description of Artificial Sequence: Synthetic oligonucleotide
uaguugaugagaugaccag

SEQ ID NO: 2336607 - RNA, 19 nt, Artificial Sequence
  Description of Artificial Sequence: Synthetic oligonucleotide
gaggaacgagaucaaaggc

SEQ ID NO: 2336608 - RNA, 19 nt, Artificial Sequence
  Description of Artificial Sequence: Synthetic oligonucleotide
aacgcuacucagcacuuca

SEQ ID NO: 2336609 - RNA, 19 nt, Artificial Sequence
  Description of Artificial Sequence: Synthetic oligonucleotide
uggccaaucaccguggagc

SEQ ID NO: 2336610 - RNA, 19 nt, Artificial Sequence
  Description of Artificial Sequence: Synthetic oligonucleotide
uuuauaacuuugucccuac

SEQ ID NO: 2336611 - RNA, 19 nt, Artificial Sequence
  Description of Artificial Sequence: Synthetic oligonucleotide
caggcuuuccucaaggaug

SEQ ID NO: 2336612 - RNA, 19 nt, Artificial Sequence
  Description of Artificial Sequence: Synthetic oligonucleotide
aguaauuccuggaacucgg

SEQ ID NO: 2336613 - RNA, 19 nt, Artificial Sequence
  Description of Artificial Sequence: Synthetic oligonucleotide
aguuguuuacagguuuggc

SEQ ID NO: 2336614 - RNA, 19 nt, Artificial Sequence
  Description of Artificial Sequence: Synthetic oligonucleotide
uugacaucugucaugcuua

SEQ ID NO: 2336615 - RNA, 19 nt, Artificial Sequence
  Description of Artificial Sequence: Synthetic oligonucleotide
uaacuuugucccuacuggc

SEQ ID NO: 2336616 - RNA, 19 nt, Artificial Sequence
  Description of Artificial Sequence: Synthetic oligonucleotide
uagagcauaagggaacuug

SEQ ID NO: 2336617 - RNA, 19 nt, Artificial Sequence
  Description of Artificial Sequence: Synthetic oligonucleotide
guaggcuugaaaugaauuc

SEQ ID NO: 2336618 - RNA, 19 nt, Artificial Sequence
  Description of Artificial Sequence: Synthetic oligonucleotide
aauuagcuaaguggaaaca

SEQ ID NO: 2336619 - RNA, 19 nt, Artificial Sequence
  Description of Artificial Sequence: Synthetic oligonucleotide
aguggaaacaggcuuuccu

SEQ ID NO: 2336620 - RNA, 19 nt, Artificial Sequence
  Description of Artificial Sequence: Synthetic oligonucleotide
gaguaauuccuggaacucg

SEQ ID NO: 2336621 - RNA, 19 nt, Artificial Sequence
  Description of Artificial Sequence: Synthetic oligonucleotide
gacucauaaaguuguuuac

SEQ ID NO: 2336622 - RNA, 19 nt, Artificial Sequence
  Description of Artificial Sequence: Synthetic oligonucleotide
gaaccguaguguuuaauuc

SEQ ID NO: 2336623 - RNA, 19 nt, Artificial Sequence
  Description of Artificial Sequence: Synthetic oligonucleotide
gagaucaaaggcguuuggg

SEQ ID NO: 2336624 - RNA, 19 nt, Artificial Sequence
  Description of Artificial Sequence: Synthetic oligonucleotide
aaggaagcgguuggaaccg

SEQ ID NO: 2336625 - RNA, 19 nt, Artificial Sequence
  Description of Artificial Sequence: Synthetic oligonucleotide
uuucuaaguugcuuuaaua

SEQ ID NO: 2336626 - RNA, 19 nt, Artificial Sequence
  Description of Artificial Sequence: Synthetic oligonucleotide
cuauacaguucuuuauaac

SEQ ID NO: 2336627 - RNA, 19 nt, Artificial Sequence
  Description of Artificial Sequence: Synthetic oligonucleotide
ucaaaggcguuugggacgg

SEQ ID NO: 2336628 - RNA, 19 nt, Artificial Sequence
  Description of Artificial Sequence: Synthetic oligonucleotide
guuccuagagcauaaggga

SEQ ID NO: 2336629 - RNA, 19 nt, Artificial Sequence
  Description of Artificial Sequence: Synthetic oligonucleotide
cuuugguaggcuugaaaug

SEQ ID NO: 2336630 - RNA, 19 nt, Artificial Sequence
  Description of Artificial Sequence: Synthetic oligonucleotide
auuaaacaccuuccagcuc

SEQ ID NO: 2336631 - RNA, 19 nt, Artificial Sequence
  Description of Artificial Sequence: Synthetic oligonucleotide
cuuaguugaugagaugacc

SEQ ID NO: 2336632 - RNA, 19 nt, Artificial Sequence
  Description of Artificial Sequence: Synthetic oligonucleotide
uauuggacgacggcgagga

SEQ ID NO: 2336633 - RNA, 19 nt, Artificial Sequence
  Description of Artificial Sequence: Synthetic oligonucleotide
ucaugcuuaguugaugaga

SEQ ID NO: 2336634 - RNA, 19 nt, Artificial Sequence
  Description of Artificial Sequence: Synthetic oligonucleotide
uccuagagcauaagggaac

SEQ ID NO: 2336635 - RNA, 19 nt, Artificial Sequence
  Description of Artificial Sequence: Synthetic oligonucleotide
gaugaccaggucuauaaaa

SEQ ID NO: 2336636 - RNA, 19 nt, Artificial Sequence
  Description of Artificial Sequence: Synthetic oligonucleotide
uggacgacggcgaggaccc

SEQ ID NO: 2336637 - RNA, 19 nt, Artificial Sequence
  Description of Artificial Sequence: Synthetic oligonucleotide
gauagcaaguagugugagc

SEQ ID NO: 2336638 - RNA, 19 nt, Artificial Sequence
  Description of Artificial Sequence: Synthetic oligonucleotide
cuuguuaaugaggaacgag

SEQ ID NO: 2336639 - RNA, 19 nt, Artificial Sequence
  Description of Artificial Sequence: Synthetic oligonucleotide
ccugauagcaaguagugug

SEQ ID NO: 2336640 - RNA, 19 nt, Artificial Sequence
  Description of Artificial Sequence: Synthetic oligonucleotide
caaaggaagcgguuggaac

SEQ ID NO: 2336641 - RNA, 19 nt, Artificial Sequence
  Description of Artificial Sequence: Synthetic oligonucleotide
uuccuagagcauaagggaa

SEQ ID NO: 2336642 - RNA, 19 nt, Artificial Sequence
  Description of Artificial Sequence: Synthetic oligonucleotide
gagaugaccaggucuauaa

SEQ ID NO: 2336643 - RNA, 19 nt, Artificial Sequence
  Description of Artificial Sequence: Synthetic oligonucleotide
cuggcaucaaucuucccug

SEQ ID NO: 2336644 - RNA, 19 nt, Artificial Sequence
  Description of Artificial Sequence: Synthetic oligonucleotide
gagaccauccuugggagcc

SEQ ID NO: 2336645 - RNA, 19 nt, Artificial Sequence
  Description of Artificial Sequence: Synthetic oligonucleotide
gucauuuaccacuucuuca

SEQ ID NO: 2336646 - RNA, 19 nt, Artificial Sequence
  Description of Artificial Sequence: Synthetic oligonucleotide
cuguuccuagagcauaagg

SEQ ID NO: 2336647 - RNA, 19 nt, Artificial Sequence
  Description of Artificial Sequence: Synthetic oligonucleotide
uucccugcaaaggaagcgg

SEQ ID NO: 2336648 - RNA, 19 nt, Artificial Sequence
  Description of Artificial Sequence: Synthetic oligonucleotide
ucggcagcguucauuaaac

SEQ ID NO: 2336649 - RNA, 19 nt, Artificial Sequence
  Description of Artificial Sequence: Synthetic oligonucleotide
uguacuauucugucaucaa

SEQ ID NO: 2336650 - RNA, 19 nt, Artificial Sequence
  Description of Artificial Sequence: Synthetic oligonucleotide
uuuucucucucuucucgga

SEQ ID NO: 2336651 - RNA, 19 nt, Artificial Sequence
  Description of Artificial Sequence: Synthetic oligonucleotide
aaguagugugagccgggag

SEQ ID NO: 2336652 - RNA, 19 nt, Artificial Sequence
  Description of Artificial Sequence: Synthetic oligonucleotide
agcaaguagugugagccgg

SEQ ID NO: 2336653 - RNA, 19 nt, Artificial Sequence
  Description of Artificial Sequence: Synthetic oligonucleotide
ucuuuauaacuuugucccu

SEQ ID NO: 2336654 - RNA, 19 nt, Artificial Sequence
  Description of Artificial Sequence: Synthetic oligonucleotide
acucauaaaguuguuuaca

SEQ ID NO: 2336655 - RNA, 19 nt, Artificial Sequence
  Description of Artificial Sequence: Synthetic oligonucleotide
acggcgaggaccccgccgc

SEQ ID NO: 2336656 - RNA, 19 nt, Artificial Sequence
  Description of Artificial Sequence: Synthetic oligonucleotide
agcauaagggaacuuguua

SEQ ID NO: 2336657 - RNA, 19 nt, Artificial Sequence
  Description of Artificial Sequence: Synthetic oligonucleotide
aguugcuuuaauaauguua

SEQ ID NO: 2336658 - RNA, 19 nt, Artificial Sequence
  Description of Artificial Sequence: Synthetic oligonucleotide
guuguuuacagguuuggcu

SEQ ID NO: 2336659 - RNA, 19 nt, Artificial Sequence
  Description of Artificial Sequence: Synthetic oligonucleotide
gaacucggcgaacucauca

SEQ ID NO: 2336660 - RNA, 19 nt, Artificial Sequence
  Description of Artificial Sequence: Synthetic oligonucleotide
uucggcagcguucauuaaa

SEQ ID NO: 2336661 - RNA, 19 nt, Artificial Sequence
  Description of Artificial Sequence: Synthetic oligonucleotide
acuuugucccuacuggcgu

SEQ ID NO: 2336662 - RNA, 19 nt, Artificial Sequence
  Description of Artificial Sequence: Synthetic oligonucleotide
caaggauguuccagaagcc

SEQ ID NO: 2336663 - RNA, 19 nt, Artificial Sequence
  Description of Artificial Sequence: Synthetic oligonucleotide
agcgguuggaaccguagug

SEQ ID NO: 2336664 - RNA, 19 nt, Artificial Sequence
  Description of Artificial Sequence: Synthetic oligonucleotide
ggcgccgccauauuggacg

SEQ ID NO: 2336665 - RNA, 19 nt, Artificial Sequence
  Description of Artificial Sequence: Synthetic oligonucleotide
uuggacgacggcgaggacc

SEQ ID NO: 2336666 - RNA, 19 nt, Artificial Sequence
  Description of Artificial Sequence: Synthetic oligonucleotide
guuaaugaggaacgagauc

SEQ ID NO: 2336667 - RNA, 19 nt, Artificial Sequence
  Description of Artificial Sequence: Synthetic oligonucleotide
uuaguucugacugcaucca

SEQ ID NO: 2336668 - RNA, 19 nt, Artificial Sequence
  Description of Artificial Sequence: Synthetic oligonucleotide
uugcuuuaauaauguuaag

SEQ ID NO: 2336669 - RNA, 19 nt, Artificial Sequence
  Description of Artificial Sequence: Synthetic oligonucleotide
ugauagcaaguagugugag

SEQ ID NO: 2336670 - RNA, 19 nt, Artificial Sequence
  Description of Artificial Sequence: Synthetic oligonucleotide
caucaauuguccucaucac

SEQ ID NO: 2336671 - RNA, 19 nt, Artificial Sequence
  Description of Artificial Sequence: Synthetic oligonucleotide
acuacugcugagguuuggg

SEQ ID NO: 2336672 - RNA, 19 nt, Artificial Sequence
  Description of Artificial Sequence: Synthetic oligonucleotide
cugcaaaggaagcgguugg

SEQ ID NO: 2336673 - RNA, 19 nt, Artificial Sequence
  Description of Artificial Sequence: Synthetic oligonucleotide
agggaacuuguuaaugagg

SEQ ID NO: 2336674 - RNA, 19 nt, Artificial Sequence
  Description of Artificial Sequence: Synthetic oligonucleotide
gaugagaugaccaggucua

SEQ ID NO: 2336675 - RNA, 19 nt, Artificial Sequence
  Description of Artificial Sequence: Synthetic oligonucleotide
cuacugcugagguuugggc

SEQ ID NO: 2336676 - RNA, 19 nt, Artificial Sequence
  Description of Artificial Sequence: Synthetic oligonucleotide
ugaguaauuccuggaacuc

SEQ ID NO: 2336677 - RNA, 19 nt, Artificial Sequence
  Description of Artificial Sequence: Synthetic oligonucleotide
aggcuugaaaugaauucgg

SEQ ID NO: 2336678 - RNA, 19 nt, Artificial Sequence
  Description of Artificial Sequence: Synthetic oligonucleotide
ucugucaugcuuaguugau

SEQ ID NO: 2336679 - RNA, 19 nt, Artificial Sequence
  Description of Artificial Sequence: Synthetic oligonucleotide
ugggcuauacaguucuuua

SEQ ID NO: 2336680 - RNA, 19 nt, Artificial Sequence
  Description of Artificial Sequence: Synthetic oligonucleotide
auguacuauucugucauca

SEQ ID NO: 2336681 - RNA, 19 nt, Artificial Sequence
  Description of Artificial Sequence: Synthetic oligonucleotide
gcuugcacggcccugaaac

SEQ ID NO: 2336682 - RNA, 19 nt, Artificial Sequence
  Description of Artificial Sequence: Synthetic oligonucleotide
gcagcguucauuaaacacc

SEQ ID NO: 2336683 - RNA, 19 nt, Artificial Sequence
  Description of Artificial Sequence: Synthetic oligonucleotide
gcuacucagcacuucacag

SEQ ID NO: 2336684 - RNA, 19 nt, Artificial Sequence
  Description of Artificial Sequence: Synthetic oligonucleotide
uuauaacuuugucccuacu

SEQ ID NO: 2336685 - RNA, 19 nt, Artificial Sequence
  Description of Artificial Sequence: Synthetic oligonucleotide
cuugcacggcccugaaacg

SEQ ID NO: 2336686 - RNA, 19 nt, Artificial Sequence
  Description of Artificial Sequence: Synthetic oligonucleotide
gccauauuggacgacggcg

SEQ ID NO: 2336687 - RNA, 19 nt, Artificial Sequence
  Description of Artificial Sequence: Synthetic oligonucleotide
ugaccaggucuauaaaaua

SEQ ID NO: 2336688 - RNA, 19 nt, Artificial Sequence
  Description of Artificial Sequence: Synthetic oligonucleotide
aagacucauaaaguuguuu

SEQ ID NO: 2336689 - RNA, 19 nt, Artificial Sequence
  Description of Artificial Sequence: Synthetic oligonucleotide
uggaacucggcgaacucau

SEQ ID NO: 2336690 - RNA, 19 nt, Artificial Sequence
  Description of Artificial Sequence: Synthetic oligonucleotide
aucaccguggagcggaggu

SEQ ID NO: 2336691 - RNA, 19 nt, Artificial Sequence
  Description of Artificial Sequence: Synthetic oligonucleotide
uccagaagcccgcccuagg

SEQ ID NO: 2336692 - RNA, 19 nt, Artificial Sequence
  Description of Artificial Sequence: Synthetic oligonucleotide
guuugggacggugagggug

SEQ ID NO: 2336693 - RNA, 19 nt, Artificial Sequence
  Description of Artificial Sequence: Synthetic oligonucleotide
acaggcuuuccucaaggau

SEQ ID NO: 2336694 - RNA, 19 nt, Artificial Sequence
  Description of Artificial Sequence: Synthetic oligonucleotide
cugauagcaaguaguguga

SEQ ID NO: 2336695 - RNA, 19 nt, Artificial Sequence
  Description of Artificial Sequence: Synthetic oligonucleotide
cauauuggacgacggcgag

SEQ ID NO: 2336696 - RNA, 19 nt, Artificial Sequence
  Description of Artificial Sequence: Synthetic oligonucleotide
gaagcgguuggaaccguag

SEQ ID NO: 2336697 - RNA, 19 nt, Artificial Sequence
  Description of Artificial Sequence: Synthetic oligonucleotide
uaaugaggaacgagaucaa

SEQ ID NO: 2336698 - RNA, 19 nt, Artificial Sequence
  Description of Artificial Sequence: Synthetic oligonucleotide
aaacgcuacucagcacuuc

SEQ ID NO: 2336699 - RNA, 19 nt, Artificial Sequence
  Description of Artificial Sequence: Synthetic oligonucleotide
ugugauucgcuugcacggc

SEQ ID NO: 2336700 - RNA, 19 nt, Artificial Sequence
  Description of Artificial Sequence: Synthetic oligonucleotide
agagcauaagggaacuugu

SEQ ID NO: 2336701 - RNA, 19 nt, Artificial Sequence
  Description of Artificial Sequence: Synthetic oligonucleotide
uuuggcuggcaucaaucuu

SEQ ID NO: 2336702 - RNA, 19 nt, Artificial Sequence
  Description of Artificial Sequence: Synthetic oligonucleotide
aaaggcguuugggacggug

SEQ ID NO: 2336703 - RNA, 19 nt, Artificial Sequence
  Description of Artificial Sequence: Synthetic oligonucleotide
aaguugcuuuaauaauguu

SEQ ID NO: 2336704 - RNA, 19 nt, Artificial Sequence
  Description of Artificial Sequence: Synthetic oligonucleotide
uuuuacuacugcugagguu

SEQ ID NO: 2336705 - RNA, 19 nt, Artificial Sequence
  Description of Artificial Sequence: Synthetic oligonucleotide
aauauucucucuacucauu

SEQ ID NO: 2336706 - RNA, 19 nt, Artificial Sequence
  Description of Artificial Sequence: Synthetic oligonucleotide
ggcagcguucauuaaacac

SEQ ID NO: 2336707 - RNA, 19 nt, Artificial Sequence
  Description of Artificial Sequence: Synthetic oligonucleotide
ucucucuucucggagacuu

SEQ ID NO: 2336708 - RNA, 19 nt, Artificial Sequence
  Description of Artificial Sequence: Synthetic oligonucleotide
gucaugcuuaguugaugag

SEQ ID NO: 2336709 - RNA, 19 nt, Artificial Sequence
  Description of Artificial Sequence: Synthetic oligonucleotide
uugguaggcuugaaaugaa

SEQ ID NO: 2336710 - RNA, 19 nt, Artificial Sequence
  Description of Artificial Sequence: Synthetic oligonucleotide
augaccaggucuauaaaau

SEQ ID NO: 2336711 - RNA, 19 nt, Artificial Sequence
  Description of Artificial Sequence: Synthetic oligonucleotide
uugaugagaugaccagguc

SEQ ID NO: 2336712 - RNA, 19 nt, Artificial Sequence
  Description of Artificial Sequence: Synthetic oligonucleotide
gcauaagggaacuuguuaa

SEQ ID NO: 2336713 - RNA, 19 nt, Artificial Sequence
  Description of Artificial Sequence: Synthetic oligonucleotide
auauuggacgacggcgagg

SEQ ID NO: 2336714 - RNA, 19 nt, Artificial Sequence
  Description of Artificial Sequence: Synthetic oligonucleotide
cauuuaccacuucuucaac

SEQ ID NO: 2336715 - RNA, 19 nt, Artificial Sequence
  Description of Artificial Sequence: Synthetic oligonucleotide
guucacaccgucacugggc

SEQ ID NO: 2336716 - RNA, 19 nt, Artificial Sequence
  Description of Artificial Sequence: Synthetic oligonucleotide
caugcuuaguugaugagau

SEQ ID NO: 2336717 - RNA, 19 nt, Artificial Sequence
  Description of Artificial Sequence: Synthetic oligonucleotide
uugcacggcccugaaacgc

SEQ ID NO: 2336718 - RNA, 19 nt, Artificial Sequence
  Description of Artificial Sequence: Synthetic oligonucleotide
ugcacggcccugaaacgcu

SEQ ID NO: 2336719 - RNA, 19 nt, Artificial Sequence
  Description of Artificial Sequence: Synthetic oligonucleotide
ucuguuccuagagcauaag

SEQ ID NO: 2336720 - RNA, 19 nt, Artificial Sequence
  Description of Artificial Sequence: Synthetic oligonucleotide
ccaggucuauaaaauauuc

SEQ ID NO: 2336721 - RNA, 19 nt, Artificial Sequence
  Description of Artificial Sequence: Synthetic oligonucleotide
ucagcacuucacaguuggc

SEQ ID NO: 2336722 - RNA, 19 nt, Artificial Sequence
  Description of Artificial Sequence: Synthetic oligonucleotide
aggcguuugggacggugag

SEQ ID NO: 2336723 - RNA, 19 nt, Artificial Sequence
  Description of Artificial Sequence: Synthetic oligonucleotide
ugguaggcuugaaaugaau

SEQ ID NO: 2336724 - RNA, 19 nt, Artificial Sequence
  Description of Artificial Sequence: Synthetic oligonucleotide
acgagaucaaaggcguuug

SEQ ID NO: 2336725 - RNA, 19 nt, Artificial Sequence
  Description of Artificial Sequence: Synthetic oligonucleotide
gcguucauuaaacaccuuc

SEQ ID NO: 2336726 - RNA, 19 nt, Artificial Sequence
  Description of Artificial Sequence: Synthetic oligonucleotide
gacggcgaggaccccgccg

SEQ ID NO: 2336727 - RNA, 19 nt, Artificial Sequence
  Description of Artificial Sequence: Synthetic oligonucleotide
gcguuugggacggugaggg

SEQ ID NO: 2336728 - RNA, 19 nt, Artificial Sequence
  Description of Artificial Sequence: Synthetic oligonucleotide
uuaccacuucuucaacauu

SEQ ID NO: 2336729 - RNA, 19 nt, Artificial Sequence
  Description of Artificial Sequence: Synthetic oligonucleotide
acucggcgaacucaucaca

SEQ ID NO: 2336730 - RNA, 19 nt, Artificial Sequence
  Description of Artificial Sequence: Synthetic oligonucleotide
uggagcggagguguccgcg

SEQ ID NO: 2336731 - RNA, 19 nt, Artificial Sequence
  Description of Artificial Sequence: Synthetic oligonucleotide
aaucaccguggagcggagg

SEQ ID NO: 2336732 - RNA, 19 nt, Artificial Sequence
  Description of Artificial Sequence: Synthetic oligonucleotide
acuuguuaaugaggaacga

SEQ ID NO: 2336733 - RNA, 19 nt, Artificial Sequence
  Description of Artificial Sequence: Synthetic oligonucleotide
augcuuaguugaugagaug

SEQ ID NO: 2336734 - RNA, 19 nt, Artificial Sequence
  Description of Artificial Sequence: Synthetic oligonucleotide
cuuuauaacuuugucccua

SEQ ID NO: 2336735 - RNA, 19 nt, Artificial Sequence
  Description of Artificial Sequence: Synthetic oligonucleotide
aaggcguuugggacgguga

SEQ ID NO: 2336736 - RNA, 19 nt, Artificial Sequence
  Description of Artificial Sequence: Synthetic oligonucleotide
ugcaaaggaagcgguugga

SEQ ID NO: 2336737 - RNA, 19 nt, Artificial Sequence
  Description of Artificial Sequence: Synthetic oligonucleotide
uacuacugcugagguuugg

SEQ ID NO: 2336738 - RNA, 19 nt, Artificial Sequence
  Description of Artificial Sequence: Synthetic oligonucleotide
ucggcgaacucaucacagu

SEQ ID NO: 2336739 - RNA, 19 nt, Artificial Sequence
  Description of Artificial Sequence: Synthetic oligonucleotide
uuugucccuacuggcguga

SEQ ID NO: 2336740 - RNA, 19 nt, Artificial Sequence
  Description of Artificial Sequence: Synthetic oligonucleotide
cauguacuauucugucauc

SEQ ID NO: 2336741 - RNA, 19 nt, Artificial Sequence
  Description of Artificial Sequence: Synthetic oligonucleotide
gacgacggcgaggaccccg

SEQ ID NO: 2336742 - RNA, 19 nt, Artificial Sequence
  Description of Artificial Sequence: Synthetic oligonucleotide
uuuacagguuuggcuggca

SEQ ID NO: 2336743 - RNA, 19 nt, Artificial Sequence
  Description of Artificial Sequence: Synthetic oligonucleotide
accgucacugggcgccgcc

SEQ ID NO: 2336744 - RNA, 19 nt, Artificial Sequence
  Description of Artificial Sequence: Synthetic oligonucleotide
agugugagccgggagcuga

SEQ ID NO: 2336745 - RNA, 19 nt, Artificial Sequence
  Description of Artificial Sequence: Synthetic oligonucleotide
cugggagaccauccuuggg

SEQ ID NO: 2336746 - RNA, 19 nt, Artificial Sequence
  Description of Artificial Sequence: Synthetic oligonucleotide
gcgaacucaucacaguuca

SEQ ID NO: 2336747 - RNA, 19 nt, Artificial Sequence
  Description of Artificial Sequence: Synthetic oligonucleotide
uucgcuugcacggcccuga

SEQ ID NO: 2336748 - RNA, 19 nt, Artificial Sequence
  Description of Artificial Sequence: Synthetic oligonucleotide
uaguucugacugcauccau

SEQ ID NO: 2336749 - RNA, 19 nt, Artificial Sequence
  Description of Artificial Sequence: Synthetic oligonucleotide
gaccaggucuauaaaauau

SEQ ID NO: 2336750 - RNA, 19 nt, Artificial Sequence
  Description of Artificial Sequence: Synthetic oligonucleotide
aggcuuuccucaaggaugu

SEQ ID NO: 2336751 - RNA, 19 nt, Artificial Sequence
  Description of Artificial Sequence: Synthetic oligonucleotide
ccugaaacgcuacucagca

SEQ ID NO: 2336752 - RNA, 19 nt, Artificial Sequence
  Description of Artificial Sequence: Synthetic oligonucleotide
uccgcgugugugauucgcu

SEQ ID NO: 2336753 - RNA, 19 nt, Artificial Sequence
  Description of Artificial Sequence: Synthetic oligonucleotide
cugaaacgcuacucagcac

SEQ ID NO: 2336754 - RNA, 19 nt, Artificial Sequence
  Description of Artificial Sequence: Synthetic oligonucleotide
ugucccuacuggcgugagc

SEQ ID NO: 2336755 - RNA, 19 nt, Artificial Sequence
  Description of Artificial Sequence: Synthetic oligonucleotide
uugggcuauacaguucuuu

SEQ ID NO: 2336756 - RNA, 19 nt, Artificial Sequence
  Description of Artificial Sequence: Synthetic oligonucleotide
guuuacagguuuggcuggc

SEQ ID NO: 2336757 - RNA, 19 nt, Artificial Sequence
  Description of Artificial Sequence: Synthetic oligonucleotide
guaauuccuggaacucggc

SEQ ID NO: 2336758 - RNA, 19 nt, Artificial Sequence
  Description of Artificial Sequence: Synthetic oligonucleotide
guuuggcuggcaucaaucu

SEQ ID NO: 2336759 - RNA, 19 nt, Artificial Sequence
  Description of Artificial Sequence: Synthetic oligonucleotide
agucccuccgcguguguga

SEQ ID NO: 2336760 - RNA, 19 nt, Artificial Sequence
  Description of Artificial Sequence: Synthetic oligonucleotide
ggcuauacaguucuuuaua

SEQ ID NO: 2336761 - RNA, 19 nt, Artificial Sequence
  Description of Artificial Sequence: Synthetic oligonucleotide
guacuauucugucaucaau

SEQ ID NO: 2336762 - RNA, 19 nt, Artificial Sequence
  Description of Artificial Sequence: Synthetic oligonucleotide
ggucuauaaaauauucucu

SEQ ID NO: 2336763 - RNA, 19 nt, Artificial Sequence
  Description of Artificial Sequence: Synthetic oligonucleotide
acucauucuuugguaggcu

SEQ ID NO: 2336764 - RNA, 19 nt, Artificial Sequence
  Description of Artificial Sequence: Synthetic oligonucleotide
cugucaugcuuaguugaug

SEQ ID NO: 2336765 - RNA, 19 nt, Artificial Sequence
  Description of Artificial Sequence: Synthetic oligonucleotide
gcugggagaccauccuugg

SEQ ID NO: 2336766 - RNA, 19 nt, Artificial Sequence
  Description of Artificial Sequence: Synthetic oligonucleotide
cauucuuugguaggcuuga

SEQ ID NO: 2336767 - RNA, 19 nt, Artificial Sequence
  Description of Artificial Sequence: Synthetic oligonucleotide
gucaucaauuguccucauc

SEQ ID NO: 2336768 - RNA, 19 nt, Artificial Sequence
  Description of Artificial Sequence: Synthetic oligonucleotide
accguaguguuuaauucau

SEQ ID NO: 2336769 - RNA, 19 nt, Artificial Sequence
  Description of Artificial Sequence: Synthetic oligonucleotide
cugccugauagcaaguagu

SEQ ID NO: 2336770 - RNA, 19 nt, Artificial Sequence
  Description of Artificial Sequence: Synthetic oligonucleotide
guuaagucauccagguucu

SEQ ID NO: 2336771 - RNA, 19 nt, Artificial Sequence
  Description of Artificial Sequence: Synthetic oligonucleotide
auuggacgacggcgaggac

SEQ ID NO: 2336772 - RNA, 19 nt, Artificial Sequence
  Description of Artificial Sequence: Synthetic oligonucleotide
accaggucuauaaaauauu

SEQ ID NO: 2336773 - RNA, 19 nt, Artificial Sequence
  Description of Artificial Sequence: Synthetic oligonucleotide
gcuggcaucaaucuucccu

SEQ ID NO: 2336774 - RNA, 19 nt, Artificial Sequence
  Description of Artificial Sequence: Synthetic oligonucleotide
agagcggggcucgccuucc

SEQ ID NO: 2336775 - RNA, 19 nt, Artificial Sequence
  Description of Artificial Sequence: Synthetic oligonucleotide
ggcgauaagaaggacuuaa

SEQ ID NO: 2336776 - RNA, 19 nt, Artificial Sequence
  Description of Artificial Sequence: Synthetic oligonucleotide
gcgugugugauucgcuugc

SEQ ID NO: 2336777 - RNA, 19 nt, Artificial Sequence
  Description of Artificial Sequence: Synthetic oligonucleotide
cuaaguggaaacaggcuuu

SEQ ID NO: 2336778 - RNA, 19 nt, Artificial Sequence
  Description of Artificial Sequence: Synthetic oligonucleotide
cagcguucauuaaacaccu

SEQ ID NO: 2336779 - RNA, 19 nt, Artificial Sequence
  Description of Artificial Sequence: Synthetic oligonucleotide
gagguuugggcuauacagu

SEQ ID NO: 2336780 - RNA, 19 nt, Artificial Sequence
  Description of Artificial Sequence: Synthetic oligonucleotide
cccugaaacgcuacucagc

SEQ ID NO: 2336781 - RNA, 19 nt, Artificial Sequence
  Description of Artificial Sequence: Synthetic oligonucleotide
ggauguuccagaagcccgc

SEQ ID NO: 2336782 - RNA, 19 nt, Artificial Sequence
  Description of Artificial Sequence: Synthetic oligonucleotide
guguccgcggugcugccug

SEQ ID NO: 2336783 - RNA, 19 nt, Artificial Sequence
  Description of Artificial Sequence: Synthetic oligonucleotide
ggcuugaaaugaauucggc

SEQ ID NO: 2336784 - RNA, 19 nt, Artificial Sequence
  Description of Artificial Sequence: Synthetic oligonucleotide
gcuaaguggaaacaggcuu

SEQ ID NO: 2336785 - RNA, 19 nt, Artificial Sequence
  Description of Artificial Sequence: Synthetic oligonucleotide
acgcuacucagcacuucac

SEQ ID NO: 2336786 - RNA, 19 nt, Artificial Sequence
  Description of Artificial Sequence: Synthetic oligonucleotide
cuacucagcacuucacagu

SEQ ID NO: 2336787 - RNA, 19 nt, Artificial Sequence
  Description of Artificial Sequence: Synthetic oligonucleotide
agguuuggcuggcaucaau

SEQ ID NO: 2336788 - RNA, 19 nt, Artificial Sequence
  Description of Artificial Sequence: Synthetic oligonucleotide
cauaagggaacuuguuaau

SEQ ID NO: 2336789 - RNA, 19 nt, Artificial Sequence
  Description of Artificial Sequence: Synthetic oligonucleotide
acgacggcgaggaccccgc

SEQ ID NO: 2336790 - RNA, 19 nt, Artificial Sequence
  Description of Artificial Sequence: Synthetic oligonucleotide
caggcgauaagaaggacuu

SEQ ID NO: 2336791 - RNA, 19 nt, Artificial Sequence
  Description of Artificial Sequence: Synthetic oligonucleotide
gcccugaaacgcuacucag

SEQ ID NO: 2336792 - RNA, 19 nt, Artificial Sequence
  Description of Artificial Sequence: Synthetic oligonucleotide
gccgccauauuggacgacg

SEQ ID NO: 2336793 - RNA, 19 nt, Artificial Sequence
  Description of Artificial Sequence: Synthetic oligonucleotide
ggcucuuaccacucuguuc

SEQ ID NO: 2336794 - RNA, 19 nt, Artificial Sequence
  Description of Artificial Sequence: Synthetic oligonucleotide
uuugggcuauacaguucuu

SEQ ID NO: 2336795 - RNA, 19 nt, Artificial Sequence
  Description of Artificial Sequence: Synthetic oligonucleotide
caguucuuuauaacuuugu

SEQ ID NO: 2336796 - RNA, 19 nt, Artificial Sequence
  Description of Artificial Sequence: Synthetic oligonucleotide
ggaaccguaguguuuaauu

SEQ ID NO: 2336797 - RNA, 19 nt, Artificial Sequence
  Description of Artificial Sequence: Synthetic oligonucleotide
ggaacgagaucaaaggcgu

SEQ ID NO: 2336798 - RNA, 19 nt, Artificial Sequence
  Description of Artificial Sequence: Synthetic oligonucleotide
ccauauuggacgacggcga

SEQ ID NO: 2336799 - RNA, 19 nt, Artificial Sequence
  Description of Artificial Sequence: Synthetic oligonucleotide
gucccuacuggcgugagcu

SEQ ID NO: 2336800 - RNA, 19 nt, Artificial Sequence
  Description of Artificial Sequence: Synthetic oligonucleotide
ucuuaccacucuguuccua

SEQ ID NO: 2336801 - RNA, 19 nt, Artificial Sequence
  Description of Artificial Sequence: Synthetic oligonucleotide
aggcucuuaccacucuguu

SEQ ID NO: 2336802 - RNA, 19 nt, Artificial Sequence
  Description of Artificial Sequence: Synthetic oligonucleotide
ucacaccgucacugggcgc

SEQ ID NO: 2336803 - RNA, 19 nt, Artificial Sequence
  Description of Artificial Sequence: Synthetic oligonucleotide
cuggaacucggcgaacuca

SEQ ID NO: 2336804 - RNA, 19 nt, Artificial Sequence
  Description of Artificial Sequence: Synthetic oligonucleotide
gcuuaguugaugagaugac

SEQ ID NO: 2336805 - RNA, 19 nt, Artificial Sequence
  Description of Artificial Sequence: Synthetic oligonucleotide
gagucccuccgcgugugug

SEQ ID NO: 2336806 - RNA, 19 nt, Artificial Sequence
  Description of Artificial Sequence: Synthetic oligonucleotide
gcaaguagugugagccggg

SEQ ID NO: 2336807 - RNA, 19 nt, Artificial Sequence
  Description of Artificial Sequence: Synthetic oligonucleotide
caaucaccguggagcggag

SEQ ID NO: 2336808 - RNA, 19 nt, Artificial Sequence
  Description of Artificial Sequence: Synthetic oligonucleotide
cuccgcgugugugauucgc

SEQ ID NO: 2336809 - RNA, 19 nt, Artificial Sequence
  Description of Artificial Sequence: Synthetic oligonucleotide
uggaaccguaguguuuaau

SEQ ID NO: 2336810 - RNA, 19 nt, Artificial Sequence
  Description of Artificial Sequence: Synthetic oligonucleotide
gaagcccgcccuagggccc

SEQ ID NO: 2336811 - RNA, 19 nt, Artificial Sequence
  Description of Artificial Sequence: Synthetic oligonucleotide
uuggaaccguaguguuuaa

SEQ ID NO: 2336812 - RNA, 19 nt, Artificial Sequence
  Description of Artificial Sequence: Synthetic oligonucleotide
gagagcggggcucgccuuc

SEQ ID NO: 2336813 - RNA, 19 nt, Artificial Sequence
  Description of Artificial Sequence: Synthetic oligonucleotide
ucgagucccuccgcgugug

SEQ ID NO: 2336814 - RNA, 19 nt, Artificial Sequence
  Description of Artificial Sequence: Synthetic oligonucleotide
ccuacuggcgugagcugcc

SEQ ID NO: 2336815 - RNA, 19 nt, Artificial Sequence
  Description of Artificial Sequence: Synthetic oligonucleotide
gcuuuccucaaggauguuc

SEQ ID NO: 2336816 - RNA, 19 nt, Artificial Sequence
  Description of Artificial Sequence: Synthetic oligonucleotide
cucgccuuccuccaaggcu

SEQ ID NO: 2336817 - RNA, 19 nt, Artificial Sequence
  Description of Artificial Sequence: Synthetic oligonucleotide
guagugugagccgggagcu

SEQ ID NO: 2336818 - RNA, 19 nt, Artificial Sequence
  Description of Artificial Sequence: Synthetic oligonucleotide
aggaccccgccgcuggcca

SEQ ID NO: 2336819 - RNA, 19 nt, Artificial Sequence
  Description of Artificial Sequence: Synthetic oligonucleotide
uugucccuacuggcgugag

SEQ ID NO: 2336820 - RNA, 19 nt, Artificial Sequence
  Description of Artificial Sequence: Synthetic oligonucleotide
gauucgcuugcacggcccu

SEQ ID NO: 2336821 - RNA, 19 nt, Artificial Sequence
  Description of Artificial Sequence: Synthetic oligonucleotide
cuggcgugagcugccauca

SEQ ID NO: 2336822 - RNA, 19 nt, Artificial Sequence
  Description of Artificial Sequence: Synthetic oligonucleotide
ggcgaacucaucacaguuc

SEQ ID NO: 2336823 - RNA, 19 nt, Artificial Sequence
  Description of Artificial Sequence: Synthetic oligonucleotide
ggcguuugggacggugagg

SEQ ID NO: 2336824 - RNA, 19 nt, Artificial Sequence
  Description of Artificial Sequence: Synthetic oligonucleotide
ugagagcggggcucgccuu

SEQ ID NO: 2336825 - RNA, 19 nt, Artificial Sequence
  Description of Artificial Sequence: Synthetic oligonucleotide
caaguagugugagccggga

SEQ ID NO: 2336826 - RNA, 19 nt, Artificial Sequence
  Description of Artificial Sequence: Synthetic oligonucleotide
uugggacggugaggguggg

SEQ ID NO: 2336827 - RNA, 19 nt, Artificial Sequence
  Description of Artificial Sequence: Synthetic oligonucleotide
gcacuucacaguuggcaga

SEQ ID NO: 2336828 - RNA, 19 nt, Artificial Sequence
  Description of Artificial Sequence: Synthetic oligonucleotide
ccgccauauuggacgacgg

SEQ ID NO: 2336829 - RNA, 19 nt, Artificial Sequence
  Description of Artificial Sequence: Synthetic oligonucleotide
auucgcuugcacggcccug

SEQ ID NO: 2336830 - RNA, 19 nt, Artificial Sequence
  Description of Artificial Sequence: Synthetic oligonucleotide
gaauucggcagcguucauu

SEQ ID NO: 2336831 - RNA, 19 nt, Artificial Sequence
  Description of Artificial Sequence: Synthetic oligonucleotide
agggccccgggccucgagu

SEQ ID NO: 2336832 - RNA, 19 nt, Artificial Sequence
  Description of Artificial Sequence: Synthetic oligonucleotide
agccugcccuguugacauc

SEQ ID NO: 2336833 - RNA, 19 nt, Artificial Sequence
  Description of Artificial Sequence: Synthetic oligonucleotide
augagaugaccaggucuau

SEQ ID NO: 2336834 - RNA, 19 nt, Artificial Sequence
  Description of Artificial Sequence: Synthetic oligonucleotide
ccaaucaccguggagcgga

SEQ ID NO: 2336835 - RNA, 19 nt, Artificial Sequence
  Description of Artificial Sequence: Synthetic oligonucleotide
cgagaucaaaggcguuugg

SEQ ID NO: 2336836 - RNA, 19 nt, Artificial Sequence
  Description of Artificial Sequence: Synthetic oligonucleotide
uccgcggugcugccugaua

SEQ ID NO: 2336837 - RNA, 19 nt, Artificial Sequence
  Description of Artificial Sequence: Synthetic oligonucleotide
ccgcggugcugccugauag

SEQ ID NO: 2336838 - RNA, 19 nt, Artificial Sequence
  Description of Artificial Sequence: Synthetic oligonucleotide
ccguaguguuuaauucaug

SEQ ID NO: 2336839 - RNA, 19 nt, Artificial Sequence
  Description of Artificial Sequence: Synthetic oligonucleotide
ucgcuugcacggcccugaa

SEQ ID NO: 2336840 - RNA, 19 nt, Artificial Sequence
  Description of Artificial Sequence: Synthetic oligonucleotide
cauuuaguucugacugcau

SEQ ID NO: 2336841 - RNA, 19 nt, Artificial Sequence
  Description of Artificial Sequence: Synthetic oligonucleotide
guggagcggagguguccgc

SEQ ID NO: 2336842 - RNA, 19 nt, Artificial Sequence
  Description of Artificial Sequence: Synthetic oligonucleotide
gguaggcuugaaaugaauu

SEQ ID NO: 2336843 - RNA, 19 nt, Artificial Sequence
  Description of Artificial Sequence: Synthetic oligonucleotide
uggcgugagcugccaucaa

SEQ ID NO: 2336844 - RNA, 19 nt, Artificial Sequence
  Description of Artificial Sequence: Synthetic oligonucleotide
ggcgugagcugccaucaaa

SEQ ID NO: 2336845 - RNA, 19 nt, Artificial Sequence
  Description of Artificial Sequence: Synthetic oligonucleotide
uguccgcggugcugccuga

SEQ ID NO: 2336846 - RNA, 19 nt, Artificial Sequence
  Description of Artificial Sequence: Synthetic oligonucleotide
gaaacgcuacucagcacuu

SEQ ID NO: 2336847 - RNA, 19 nt, Artificial Sequence
  Description of Artificial Sequence: Synthetic oligonucleotide
gcaaaggaagcgguuggaa

SEQ ID NO: 2336848 - RNA, 19 nt, Artificial Sequence
  Description of Artificial Sequence: Synthetic oligonucleotide
gcaggcgauaagaaggacu

SEQ ID NO: 2336849 - RNA, 19 nt, Artificial Sequence
  Description of Artificial Sequence: Synthetic oligonucleotide
gagcauaagggaacuuguu

SEQ ID NO: 2336850 - RNA, 19 nt, Artificial Sequence
  Description of Artificial Sequence: Synthetic oligonucleotide
gggcuauacaguucuuuau

SEQ ID NO: 2336851 - RNA, 19 nt, Artificial Sequence
  Description of Artificial Sequence: Synthetic oligonucleotide
ccucgagucccuccgcgug

SEQ ID NO: 2336852 - RNA, 19 nt, Artificial Sequence
  Description of Artificial Sequence: Synthetic oligonucleotide
accguggagcggagguguc

SEQ ID NO: 2336853 - RNA, 19 nt, Artificial Sequence
  Description of Artificial Sequence: Synthetic oligonucleotide
ugggacggugagggugggc

SEQ ID NO: 2336854 - RNA, 19 nt, Artificial Sequence
  Description of Artificial Sequence: Synthetic oligonucleotide
cguggagcggagguguccg

SEQ ID NO: 2336855 - RNA, 19 nt, Artificial Sequence
  Description of Artificial Sequence: Synthetic oligonucleotide
ccgccgcuggccaaucacc

SEQ ID NO: 2336856 - RNA, 19 nt, Artificial Sequence
  Description of Artificial Sequence: Synthetic oligonucleotide
cgccgcuggccaaucaccg

SEQ ID NO: 2336857 - RNA, 19 nt, Artificial Sequence
  Description of Artificial Sequence: Synthetic oligonucleotide
cugagagcggggcucgccu

SEQ ID NO: 2336858 - RNA, 19 nt, Artificial Sequence
  Description of Artificial Sequence: Synthetic oligonucleotide
cccuccgcgugugugauuc

SEQ ID NO: 2336859 - RNA, 19 nt, Artificial Sequence
  Description of Artificial Sequence: Synthetic oligonucleotide
gcggagguguccgcggugc

SEQ ID NO: 2336860 - RNA, 19 nt, Artificial Sequence
  Description of Artificial Sequence: Synthetic oligonucleotide
aggaagcgguuggaaccgu

SEQ ID NO: 2336861 - RNA, 19 nt, Artificial Sequence
  Description of Artificial Sequence: Synthetic oligonucleotide
gccaaucaccguggagcgg

SEQ ID NO: 2336862 - RNA, 19 nt, Artificial Sequence
  Description of Artificial Sequence: Synthetic oligonucleotide
ggugggcaggcgauaagaa

SEQ ID NO: 2336863 - RNA, 19 nt, Artificial Sequence
  Description of Artificial Sequence: Synthetic oligonucleotide
ccuggaacucggcgaacuc

SEQ ID NO: 2336864 - RNA, 19 nt, Artificial Sequence
  Description of Artificial Sequence: Synthetic oligonucleotide
gacaucugucaugcuuagu

SEQ ID NO: 2336865 - RNA, 19 nt, Artificial Sequence
  Description of Artificial Sequence: Synthetic oligonucleotide
cgcgugugugauucgcuug

SEQ ID NO: 2336866 - RNA, 19 nt, Artificial Sequence
  Description of Artificial Sequence: Synthetic oligonucleotide
gcggugcugccugauagca

SEQ ID NO: 2336867 - RNA, 19 nt, Artificial Sequence
  Description of Artificial Sequence: Synthetic oligonucleotide
aggcgauaagaaggacuua

SEQ ID NO: 2336868 - RNA, 19 nt, Artificial Sequence
  Description of Artificial Sequence: Synthetic oligonucleotide
cgcccuagggccccgggcc

SEQ ID NO: 2336869 - RNA, 19 nt, Artificial Sequence
  Description of Artificial Sequence: Synthetic oligonucleotide
gcgguuggaaccguagugu

SEQ ID NO: 2336870 - RNA, 19 nt, Artificial Sequence
  Description of Artificial Sequence: Synthetic oligonucleotide
cgggccucgagucccuccg

SEQ ID NO: 2336871 - RNA, 19 nt, Artificial Sequence
  Description of Artificial Sequence: Synthetic oligonucleotide
ggcaggcgauaagaaggac

SEQ ID NO: 2336872 - RNA, 19 nt, Artificial Sequence
  Description of Artificial Sequence: Synthetic oligonucleotide
gggagccugcccuguugac

SEQ ID NO: 2336873 - RNA, 19 nt, Artificial Sequence
  Description of Artificial Sequence: Synthetic oligonucleotide
gucacugggcgccgccaua

SEQ ID NO: 2336874 - RNA, 19 nt, Artificial Sequence
  Description of Artificial Sequence: Synthetic oligonucleotide
cccgccgcuggccaaucac

SEQ ID NO: 2336875 - RNA, 19 nt, Artificial Sequence
  Description of Artificial Sequence: Synthetic oligonucleotide
cucgagucccuccgcgugu

SEQ ID NO: 2336876 - RNA, 19 nt, Artificial Sequence
  Description of Artificial Sequence: Synthetic oligonucleotide
caccguggagcggaggugu

SEQ ID NO: 2336877 - RNA, 19 nt, Artificial Sequence
  Description of Artificial Sequence: Synthetic oligonucleotide
cgcuacucagcacuucaca

SEQ ID NO: 2336878 - RNA, 19 nt, Artificial Sequence
  Description of Artificial Sequence: Synthetic oligonucleotide
cuacuggcgugagcugcca

SEQ ID NO: 2336879 - RNA, 19 nt, Artificial Sequence
  Description of Artificial Sequence: Synthetic oligonucleotide
cgauaagaaggacuuaauu

SEQ ID NO: 2336880 - RNA, 19 nt, Artificial Sequence
  Description of Artificial Sequence: Synthetic oligonucleotide
cgcggugcugccugauagc

SEQ ID NO: 2336881 - RNA, 19 nt, Artificial Sequence
  Description of Artificial Sequence: Synthetic oligonucleotide
gcuggccaaucaccgugga

SEQ ID NO: 2336882 - RNA, 19 nt, Artificial Sequence
  Description of Artificial Sequence: Synthetic oligonucleotide
gaacgagaucaaaggcguu

SEQ ID NO: 2336883 - RNA, 19 nt, Artificial Sequence
  Description of Artificial Sequence: Synthetic oligonucleotide
ggaacucggcgaacucauc

SEQ ID NO: 2336884 - RNA, 19 nt, Artificial Sequence
  Description of Artificial Sequence: Synthetic oligonucleotide
ccuagagcauaagggaacu

SEQ ID NO: 2336885 - RNA, 19 nt, Artificial Sequence
  Description of Artificial Sequence: Synthetic oligonucleotide
agcguucauuaaacaccuu

SEQ ID NO: 2336886 - RNA, 19 nt, Artificial Sequence
  Description of Artificial Sequence: Synthetic oligonucleotide
ccuccgcgugugugauucg

SEQ ID NO: 2336887 - RNA, 19 nt, Artificial Sequence
  Description of Artificial Sequence: Synthetic oligonucleotide
accccgccgcuggccaauc

SEQ ID NO: 2336888 - RNA, 19 nt, Artificial Sequence
  Description of Artificial Sequence: Synthetic oligonucleotide
ccguggagcggaggugucc

SEQ ID NO: 2336889 - RNA, 19 nt, Artificial Sequence
  Description of Artificial Sequence: Synthetic oligonucleotide
gcgauaagaaggacuuaau

SEQ ID NO: 2336890 - RNA, 19 nt, Artificial Sequence
  Description of Artificial Sequence: Synthetic oligonucleotide
ggcgaggaccccgccgcug

SEQ ID NO: 2336891 - RNA, 19 nt, Artificial Sequence
  Description of Artificial Sequence: Synthetic oligonucleotide
caccgucacugggcgccgc

SEQ ID NO: 2336892 - RNA, 19 nt, Artificial Sequence
  Description of Artificial Sequence: Synthetic oligonucleotide
gcgccgccauauuggacga

SEQ ID NO: 2336893 - RNA, 19 nt, Artificial Sequence
  Description of Artificial Sequence: Synthetic oligonucleotide
ucccuccgcgugugugauu

SEQ ID NO: 2336894 - RNA, 19 nt, Artificial Sequence
  Description of Artificial Sequence: Synthetic oligonucleotide
ccuagggccccgggccucg

SEQ ID NO: 2336895 - RNA, 19 nt, Artificial Sequence
  Description of Artificial Sequence: Synthetic oligonucleotide
gguuggaaccguaguguuu

SEQ ID NO: 2336896 - RNA, 19 nt, Artificial Sequence
  Description of Artificial Sequence: Synthetic oligonucleotide
ugcugagguuugggcuaua

SEQ ID NO: 2336897 - RNA, 19 nt, Artificial Sequence
  Description of Artificial Sequence: Synthetic oligonucleotide
ggaagcgguuggaaccgua

SEQ ID NO: 2336898 - RNA, 19 nt, Artificial Sequence
  Description of Artificial Sequence: Synthetic oligonucleotide
ccgcccuagggccccgggc

SEQ ID NO: 2336899 - RNA, 19 nt, Artificial Sequence
  Description of Artificial Sequence: Synthetic oligonucleotide
cuagagcauaagggaacuu

SEQ ID NO: 2336900 - RNA, 19 nt, Artificial Sequence
  Description of Artificial Sequence: Synthetic oligonucleotide
cuugggagccugcccuguu

SEQ ID NO: 2336901 - RNA, 19 nt, Artificial Sequence
  Description of Artificial Sequence: Synthetic oligonucleotide
cccgcccuagggccccggg

SEQ ID NO: 2336902 - RNA, 19 nt, Artificial Sequence
  Description of Artificial Sequence: Synthetic oligonucleotide
cggcccugaaacgcuacuc

SEQ ID NO: 2336903 - RNA, 19 nt, Artificial Sequence
  Description of Artificial Sequence: Synthetic oligonucleotide
gggcgccgccauauuggac

SEQ ID NO: 2336904 - RNA, 19 nt, Artificial Sequence
  Description of Artificial Sequence: Synthetic oligonucleotide
gagcggggcucgccuuccu

SEQ ID NO: 2336905 - RNA, 19 nt, Artificial Sequence
  Description of Artificial Sequence: Synthetic oligonucleotide
gucccuccgcgugugugau

SEQ ID NO: 2336906 - RNA, 19 nt, Artificial Sequence
  Description of Artificial Sequence: Synthetic oligonucleotide
gaccccgccgcuggccaau

SEQ ID NO: 2336907 - RNA, 19 nt, Artificial Sequence
  Description of Artificial Sequence: Synthetic oligonucleotide
ggaccccgccgcuggccaa

SEQ ID NO: 2336908 - RNA, 19 nt, Artificial Sequence
  Description of Artificial Sequence: Synthetic oligonucleotide
cggcgaacucaucacaguu

SEQ ID NO: 2336909 - RNA, 19 nt, Artificial Sequence
  Description of Artificial Sequence: Synthetic oligonucleotide
ggacgacggcgaggacccc

SEQ ID NO: 2336910 - RNA, 19 nt, Artificial Sequence
  Description of Artificial Sequence: Synthetic oligonucleotide
gguguccgcggugcugccu

SEQ ID NO: 2336911 - RNA, 19 nt, Artificial Sequence
  Description of Artificial Sequence: Synthetic oligonucleotide
cggggcucgccuuccucca

SEQ ID NO: 2336912 - RNA, 19 nt, Artificial Sequence
  Description of Artificial Sequence: Synthetic oligonucleotide
gcccuagggccccgggccu

SEQ ID NO: 2336913 - RNA, 19 nt, Artificial Sequence
  Description of Artificial Sequence: Synthetic oligonucleotide
ccgcgugugugauucgcuu

SEQ ID NO: 2336914 - RNA, 19 nt, Artificial Sequence
  Description of Artificial Sequence: Synthetic oligonucleotide
cgacggcgaggaccccgcc

SEQ ID NO: 2336915 - RNA, 19 nt, Artificial Sequence
  Description of Artificial Sequence: Synthetic oligonucleotide
guccgcggugcugccugau

SEQ ID NO: 2336916 - RNA, 19 nt, Artificial Sequence
  Description of Artificial Sequence: Synthetic oligonucleotide
caaaggcguuugggacggu

SEQ ID NO: 2336917 - RNA, 19 nt, Artificial Sequence
  Description of Artificial Sequence: Synthetic oligonucleotide
cgcuugcacggcccugaaa

SEQ ID NO: 2336918 - RNA, 19 nt, Artificial Sequence
  Description of Artificial Sequence: Synthetic oligonucleotide
cguuugggacggugagggu

SEQ ID NO: 2336919 - RNA, 19 nt, Artificial Sequence
  Description of Artificial Sequence: Synthetic oligonucleotide
cgccgccauauuggacgac

SEQ ID NO: 2336920 - RNA, 19 nt, Artificial Sequence
  Description of Artificial Sequence: Synthetic oligonucleotide
ccccgccgcuggccaauca

SEQ ID NO: 2336921 - RNA, 19 nt, Artificial Sequence
  Description of Artificial Sequence: Synthetic oligonucleotide
ggcuuuccucaaggauguu

SEQ ID NO: 2336922 - RNA, 19 nt, Artificial Sequence
  Description of Artificial Sequence: Synthetic oligonucleotide
cggagguguccgcggugcu

SEQ ID NO: 2336923 - RNA, 19 nt, Artificial Sequence
  Description of Artificial Sequence: Synthetic oligonucleotide
ccccgggccucgagucccu

SEQ ID NO: 2336924 - RNA, 19 nt, Artificial Sequence
  Description of Artificial Sequence: Synthetic oligonucleotide
cggcgaggaccccgccgcu

SEQ ID NO: 2336925 - RNA, 19 nt, Artificial Sequence
  Description of Artificial Sequence: Synthetic oligonucleotide
aaucuauugguccugggug

SEQ ID NO: 2336926 - RNA, 19 nt, Artificial Sequence
  Description of Artificial Sequence: Synthetic oligonucleotide
aaaugccuagcuuaaaucu

SEQ ID NO: 2336927 - RNA, 19 nt, Artificial Sequence
  Description of Artificial Sequence: Synthetic oligonucleotide
uuccggaaaauccagcaag

SEQ ID NO: 2336928 - RNA, 19 nt, Artificial Sequence
  Description of Artificial Sequence: Synthetic oligonucleotide
uacccagccacccacagag

SEQ ID NO: 2336929 - RNA, 19 nt, Artificial Sequence
  Description of Artificial Sequence: Synthetic oligonucleotide
ugaaaugccuagcuuaaau

SEQ ID NO: 2336930 - RNA, 19 nt, Artificial Sequence
  Description of Artificial Sequence: Synthetic oligonucleotide
aucuauugguccugggugg

SEQ ID NO: 2336931 - RNA, 19 nt, Artificial Sequence
  Description of Artificial Sequence: Synthetic oligonucleotide
gaaaugccuagcuuaaauc

SEQ ID NO: 2336932 - RNA, 19 nt, Artificial Sequence
  Description of Artificial Sequence: Synthetic oligonucleotide
ccuagcuuaaaucuauugg

SEQ ID NO: 2336933 - RNA, 19 nt, Artificial Sequence
  Description of Artificial Sequence: Synthetic oligonucleotide
uccggaaaauccagcaagc

SEQ ID NO: 2336934 - RNA, 19 nt, Artificial Sequence
  Description of Artificial Sequence: Synthetic oligonucleotide
gacugaaaugccuagcuua

SEQ ID NO: 2336935 - RNA, 19 nt, Artificial Sequence
  Description of Artificial Sequence: Synthetic oligonucleotide
cuagcuuaaaucuauuggu

SEQ ID NO: 2336936 - RNA, 19 nt, Artificial Sequence
  Description of Artificial Sequence: Synthetic oligonucleotide
ucuggacguacccagccac

SEQ ID NO: 2336937 - RNA, 19 nt, Artificial Sequence
  Description of Artificial Sequence: Synthetic oligonucleotide
uuucccuuccugcuaggac

SEQ ID NO: 2336938 - RNA, 19 nt, Artificial Sequence
  Description of Artificial Sequence: Synthetic oligonucleotide
caagccccgguuaaugagc

SEQ ID NO: 2336939 - RNA, 19 nt, Artificial Sequence
  Description of Artificial Sequence: Synthetic oligonucleotide
ugccuuccggaaaauccag

SEQ ID NO: 2336940 - RNA, 19 nt, Artificial Sequence
  Description of Artificial Sequence: Synthetic oligonucleotide
ugcugguuuucccuuccug

SEQ ID NO: 2336941 - RNA, 19 nt, Artificial Sequence
  Description of Artificial Sequence: Synthetic oligonucleotide
aaugccuagcuuaaaucua

SEQ ID NO: 2336942 - RNA, 19 nt, Artificial Sequence
  Description of Artificial Sequence: Synthetic oligonucleotide
cuugcugguuuucccuucc

SEQ ID NO: 2336943 - RNA, 19 nt, Artificial Sequence
  Description of Artificial Sequence: Synthetic oligonucleotide
gacguacccagccacccac

SEQ ID NO: 2336944 - RNA, 19 nt, Artificial Sequence
  Description of Artificial Sequence: Synthetic oligonucleotide
gguuuucccuuccugcuag

SEQ ID NO: 2336945 - RNA, 19 nt, Artificial Sequence
  Description of Artificial Sequence: Synthetic oligonucleotide
caccucuggacguacccag

SEQ ID NO: 2336946 - RNA, 19 nt, Artificial Sequence
  Description of Artificial Sequence: Synthetic oligonucleotide
acugaaaugccuagcuuaa

SEQ ID NO: 2336947 - RNA, 19 nt, Artificial Sequence
  Description of Artificial Sequence: Synthetic oligonucleotide
uggacguacccagccaccc

SEQ ID NO: 2336948 - RNA, 19 nt, Artificial Sequence
  Description of Artificial Sequence: Synthetic oligonucleotide
ugguuuucccuuccugcua

SEQ ID NO: 2336949 - RNA, 19 nt, Artificial Sequence
  Description of Artificial Sequence: Synthetic oligonucleotide
gccuagcuuaaaucuauug

SEQ ID NO: 2336950 - RNA, 19 nt, Artificial Sequence
  Description of Artificial Sequence: Synthetic oligonucleotide
guuuucccuuccugcuagg

SEQ ID NO: 2336951 - RNA, 19 nt, Artificial Sequence
  Description of Artificial Sequence: Synthetic oligonucleotide
cuggacguacccagccacc

SEQ ID NO: 2336952 - RNA, 19 nt, Artificial Sequence
  Description of Artificial Sequence: Synthetic oligonucleotide
cagccacccacagaggccc

SEQ ID NO: 2336953 - RNA, 19 nt, Artificial Sequence
  Description of Artificial Sequence: Synthetic oligonucleotide
aagccccgguuaaugagcu

SEQ ID NO: 2336954 - RNA, 19 nt, Artificial Sequence
  Description of Artificial Sequence: Synthetic oligonucleotide
augccuagcuuaaaucuau

SEQ ID NO: 2336955 - RNA, 19 nt, Artificial Sequence
  Description of Artificial Sequence: Synthetic oligonucleotide
gguccuggguggcucagcc

SEQ ID NO: 2336956 - RNA, 19 nt, Artificial Sequence
  Description of Artificial Sequence: Synthetic oligonucleotide
ugccuagcuuaaaucuauu

SEQ ID NO: 2336957 - RNA, 19 nt, Artificial Sequence
  Description of Artificial Sequence: Synthetic oligonucleotide
cgguuaaugagcuguuuug

SEQ ID NO: 2336958 - RNA, 19 nt, Artificial Sequence
  Description of Artificial Sequence: Synthetic oligonucleotide
cuuccggaaaauccagcaa

SEQ ID NO: 2336959 - RNA, 19 nt, Artificial Sequence
  Description of Artificial Sequence: Synthetic oligonucleotide
ggcaccucuggacguaccc

SEQ ID NO: 2336960 - RNA, 19 nt, Artificial Sequence
  Description of Artificial Sequence: Synthetic oligonucleotide
ccuuccggaaaauccagca

SEQ ID NO: 2336961 - RNA, 19 nt, Artificial Sequence
  Description of Artificial Sequence: Synthetic oligonucleotide
cccagccacccacagaggc

SEQ ID NO: 2336962 - RNA, 19 nt, Artificial Sequence
  Description of Artificial Sequence: Synthetic oligonucleotide
ccucuggacguacccagcc

SEQ ID NO: 2336963 - RNA, 19 nt, Artificial Sequence
  Description of Artificial Sequence: Synthetic oligonucleotide
ccagccacccacagaggcc

SEQ ID NO: 2336964 - RNA, 19 nt, Artificial Sequence
  Description of Artificial Sequence: Synthetic oligonucleotide
cucuggacguacccagcca

SEQ ID NO: 2336965 - RNA, 19 nt, Artificial Sequence
  Description of Artificial Sequence: Synthetic oligonucleotide
agccccgguuaaugagcug

SEQ ID NO: 2336966 - RNA, 19 nt, Artificial Sequence
  Description of Artificial Sequence: Synthetic oligonucleotide
cuggguggcucagcccaag

SEQ ID NO: 2336967 - RNA, 19 nt, Artificial Sequence
  Description of Artificial Sequence: Synthetic oligonucleotide
cugaaaugccuagcuuaaa

SEQ ID NO: 2336968 - RNA, 19 nt, Artificial Sequence
  Description of Artificial Sequence: Synthetic oligonucleotide
agccacccacagaggcccc

SEQ ID NO: 2336969 - RNA, 19 nt, Artificial Sequence
  Description of Artificial Sequence: Synthetic oligonucleotide
ggacguacccagccaccca

SEQ ID NO: 2336970 - RNA, 19 nt, Artificial Sequence
  Description of Artificial Sequence: Synthetic oligonucleotide
acguacccagccacccaca

SEQ ID NO: 2336971 - RNA, 19 nt, Artificial Sequence
  Description of Artificial Sequence: Synthetic oligonucleotide
ggacugaaaugccuagcuu

SEQ ID NO: 2336972 - RNA, 19 nt, Artificial Sequence
  Description of Artificial Sequence: Synthetic oligonucleotide
gaauggccuugcugguuuu

SEQ ID NO: 2336973 - RNA, 19 nt, Artificial Sequence
  Description of Artificial Sequence: Synthetic oligonucleotide
ccggaaaauccagcaagca

SEQ ID NO: 2336974 - RNA, 19 nt, Artificial Sequence
  Description of Artificial Sequence: Synthetic oligonucleotide
gccccgguuaaugagcugu

SEQ ID NO: 2336975 - RNA, 19 nt, Artificial Sequence
  Description of Artificial Sequence: Synthetic oligonucleotide
aggggcaccucuggacgua

SEQ ID NO: 2336976 - RNA, 19 nt, Artificial Sequence
  Description of Artificial Sequence: Synthetic oligonucleotide
caggggcaccucuggacgu

SEQ ID NO: 2336977 - RNA, 19 nt, Artificial Sequence
  Description of Artificial Sequence: Synthetic oligonucleotide
cggaaaauccagcaagcau

SEQ ID NO: 2336978 - RNA, 19 nt, Artificial Sequence
  Description of Artificial Sequence: Synthetic oligonucleotide
ccgguuaaugagcuguuuu

SEQ ID NO: 2336979 - RNA, 19 nt, Artificial Sequence
  Description of Artificial Sequence: Synthetic oligonucleotide
ggggcaccucuggacguac

SEQ ID NO: 2336980 - RNA, 19 nt, Artificial Sequence
  Description of Artificial Sequence: Synthetic oligonucleotide
gggcaccucuggacguacc

SEQ ID NO: 2336981 - RNA, 19 nt, Artificial Sequence
  Description of Artificial Sequence: Synthetic oligonucleotide
ccuggguggcucagcccaa

SEQ ID NO: 2336982 - RNA, 19 nt, Artificial Sequence
  Description of Artificial Sequence: Synthetic oligonucleotide
gccacccacagaggccccu

SEQ ID NO: 2336983 - RNA, 19 nt, Artificial Sequence
  Description of Artificial Sequence: Synthetic oligonucleotide
ccccgguuaaugagcuguu

SEQ ID NO: 2336984 - RNA, 19 nt, Artificial Sequence
  Description of Artificial Sequence: Synthetic oligonucleotide
cccgguuaaugagcuguuu

SEQ ID NO: 2336985 - RNA, 19 nt, Artificial Sequence
  Description of Artificial Sequence: Synthetic oligonucleotide
uaaauaguuauguacaucg

SEQ ID NO: 2336986 - RNA, 19 nt, Artificial Sequence
  Description of Artificial Sequence: Synthetic oligonucleotide
ucuaguaagucucaggagg

SEQ ID NO: 2336987 - RNA, 19 nt, Artificial Sequence
  Description of Artificial Sequence: Synthetic oligonucleotide
gaagugacuagcuaaaagg

SEQ ID NO: 2336988 - RNA, 19 nt, Artificial Sequence
  Description of Artificial Sequence: Synthetic oligonucleotide
aguuuuaucaucaucaccg

SEQ ID NO: 2336989 - RNA, 19 nt, Artificial Sequence
  Description of Artificial Sequence: Synthetic oligonucleotide
uuauguacaucgcagagag

SEQ ID NO: 2336990 - RNA, 19 nt, Artificial Sequence
  Description of Artificial Sequence: Synthetic oligonucleotide
aaaggagagagacagcaag

SEQ ID NO: 2336991 - RNA, 19 nt, Artificial Sequence
  Description of Artificial Sequence: Synthetic oligonucleotide
aauaguuauguacaucgca

SEQ ID NO: 2336992 - RNA, 19 nt, Artificial Sequence
  Description of Artificial Sequence: Synthetic oligonucleotide
aacaaguucacaccaccgg

SEQ ID NO: 2336993 - RNA, 19 nt, Artificial Sequence
  Description of Artificial Sequence: Synthetic oligonucleotide
uuuaucaucaucaccgcac

SEQ ID NO: 2336994 - RNA, 19 nt, Artificial Sequence
  Description of Artificial Sequence: Synthetic oligonucleotide
aucaucaccgcacuggugg

SEQ ID NO: 2336995 - RNA, 19 nt, Artificial Sequence
  Description of Artificial Sequence: Synthetic oligonucleotide
acuaaaucagguucuuuac

SEQ ID NO: 2336996 - RNA, 19 nt, Artificial Sequence
  Description of Artificial Sequence: Synthetic oligonucleotide
agaaaggggacaguaaacc

SEQ ID NO: 2336997 - RNA, 19 nt, Artificial Sequence
  Description of Artificial Sequence: Synthetic oligonucleotide
aaaccacuggucuaguaag

SEQ ID NO: 2336998 - RNA, 19 nt, Artificial Sequence
  Description of Artificial Sequence: Synthetic oligonucleotide
accuuuacuuguuaauacc

SEQ ID NO: 2336999 - RNA, 19 nt, Artificial Sequence
  Description of Artificial Sequence: Synthetic oligonucleotide
aaaagaguccuggagaaug

SEQ ID NO: 2337000 - RNA, 19 nt, Artificial Sequence
  Description of Artificial Sequence: Synthetic oligonucleotide
auguacaucgcagagaguc

SEQ ID NO: 2337001 - RNA, 19 nt, Artificial Sequence
  Description of Artificial Sequence: Synthetic oligonucleotide
uguguaucaguccuccagg

SEQ ID NO: 2337002 - RNA, 19 nt, Artificial Sequence
  Description of Artificial Sequence: Synthetic oligonucleotide
aaagcgaggugguaggaag

SEQ ID NO: 2337003 - RNA, 19 nt, Artificial Sequence
  Description of Artificial Sequence: Synthetic oligonucleotide
uguuaauaccucauccucc

SEQ ID NO: 2337004 - RNA, 19 nt, Artificial Sequence
  Description of Artificial Sequence: Synthetic oligonucleotide
uuuacuuguuaauaccuca

SEQ ID NO: 2337005 - RNA, 19 nt, Artificial Sequence
  Description of Artificial Sequence: Synthetic oligonucleotide
guuaauaccucauccuccg

SEQ ID NO: 2337006 - RNA, 19 nt, Artificial Sequence
  Description of Artificial Sequence: Synthetic oligonucleotide
ucagcacuaaaucagguuc

SEQ ID NO: 2337007 - RNA, 19 nt, Artificial Sequence
  Description of Artificial Sequence: Synthetic oligonucleotide
agucucaggaggcaagugc

SEQ ID NO: 2337008 - RNA, 19 nt, Artificial Sequence
  Description of Artificial Sequence: Synthetic oligonucleotide
acuagcuaaaaggagagag

SEQ ID NO: 2337009 - RNA, 19 nt, Artificial Sequence
  Description of Artificial Sequence: Synthetic oligonucleotide
uacuauucccgucuugagg

SEQ ID NO: 2337010 - RNA, 19 nt, Artificial Sequence
  Description of Artificial Sequence: Synthetic oligonucleotide
aaaggggacaguaaaccac

SEQ ID NO: 2337011 - RNA, 19 nt, Artificial Sequence
  Description of Artificial Sequence: Synthetic oligonucleotide
uaucaguccuccaggaagg

SEQ ID NO: 2337012 - RNA, 19 nt, Artificial Sequence
  Description of Artificial Sequence: Synthetic oligonucleotide
aaggaucucagaccgcgcg

SEQ ID NO: 2337013 - RNA, 19 nt, Artificial Sequence
  Description of Artificial Sequence: Synthetic oligonucleotide
aaauaguuauguacaucgc

SEQ ID NO: 2337014 - RNA, 19 nt, Artificial Sequence
  Description of Artificial Sequence: Synthetic oligonucleotide
ugacuagcuaaaaggagag

SEQ ID NO: 2337015 - RNA, 19 nt, Artificial Sequence
  Description of Artificial Sequence: Synthetic oligonucleotide
uaccacauuaaauaguuau

SEQ ID NO: 2337016 - RNA, 19 nt, Artificial Sequence
  Description of Artificial Sequence: Synthetic oligonucleotide
aguuauguacaucgcagag

SEQ ID NO: 2337017 - RNA, 19 nt, Artificial Sequence
  Description of Artificial Sequence: Synthetic oligonucleotide
agaagugacuagcuaaaag

SEQ ID NO: 2337018 - RNA, 19 nt, Artificial Sequence
  Description of Artificial Sequence: Synthetic oligonucleotide
uuggcgaacaaguucacac

SEQ ID NO: 2337019 - RNA, 19 nt, Artificial Sequence
  Description of Artificial Sequence: Synthetic oligonucleotide
ucguuggcgaacaaguuca

SEQ ID NO: 2337020 - RNA, 19 nt, Artificial Sequence
  Description of Artificial Sequence: Synthetic oligonucleotide
gagagagacagcaagaaga

SEQ ID NO: 2337021 - RNA, 19 nt, Artificial Sequence
  Description of Artificial Sequence: Synthetic oligonucleotide
uuguuaauaccucauccuc

SEQ ID NO: 2337022 - RNA, 19 nt, Artificial Sequence
  Description of Artificial Sequence: Synthetic oligonucleotide
auaguuauguacaucgcag

SEQ ID NO: 2337023 - RNA, 19 nt, Artificial Sequence
  Description of Artificial Sequence: Synthetic oligonucleotide
guaaugagcacccgggaag

SEQ ID NO: 2337024 - RNA, 19 nt, Artificial Sequence
  Description of Artificial Sequence: Synthetic oligonucleotide
ucgggaaaggaucucagac

SEQ ID NO: 2337025 - RNA, 19 nt, Artificial Sequence
  Description of Artificial Sequence: Synthetic oligonucleotide
aaggggucauuucaccagg

SEQ ID NO: 2337026 - RNA, 19 nt, Artificial Sequence
  Description of Artificial Sequence: Synthetic oligonucleotide
ucuucggauucccagggcc

SEQ ID NO: 2337027 - RNA, 19 nt, Artificial Sequence
  Description of Artificial Sequence: Synthetic oligonucleotide
cuaguaagucucaggaggc

SEQ ID NO: 2337028 - RNA, 19 nt, Artificial Sequence
  Description of Artificial Sequence: Synthetic oligonucleotide
gagaaagcgaggugguagg

SEQ ID NO: 2337029 - RNA, 19 nt, Artificial Sequence
  Description of Artificial Sequence: Synthetic oligonucleotide
uuggcuacuauucccgucu

SEQ ID NO: 2337030 - RNA, 19 nt, Artificial Sequence
  Description of Artificial Sequence: Synthetic oligonucleotide
uguacuuggcccaugcguc

SEQ ID NO: 2337031 - RNA, 19 nt, Artificial Sequence
  Description of Artificial Sequence: Synthetic oligonucleotide
gaaggggucauuucaccag

SEQ ID NO: 2337032 - RNA, 19 nt, Artificial Sequence
  Description of Artificial Sequence: Synthetic oligonucleotide
cagguaaugagcacccggg

SEQ ID NO: 2337033 - RNA, 19 nt, Artificial Sequence
  Description of Artificial Sequence: Synthetic oligonucleotide
aagugacuagcuaaaagga

SEQ ID NO: 2337034 - RNA, 19 nt, Artificial Sequence
  Description of Artificial Sequence: Synthetic oligonucleotide
gaagcugccgucguuggcg

SEQ ID NO: 2337035 - RNA, 19 nt, Artificial Sequence
  Description of Artificial Sequence: Synthetic oligonucleotide
uggagaauggucugcggcc

SEQ ID NO: 2337036 - RNA, 19 nt, Artificial Sequence
  Description of Artificial Sequence: Synthetic oligonucleotide
ucgggcagccauuuugucg

SEQ ID NO: 2337037 - RNA, 19 nt, Artificial Sequence
  Description of Artificial Sequence: Synthetic oligonucleotide
acuugagcccgacaccucg

SEQ ID NO: 2337038 - RNA, 19 nt, Artificial Sequence
  Description of Artificial Sequence: Synthetic oligonucleotide
guuuguucccgccucugcg

SEQ ID NO: 2337039 - RNA, 19 nt, Artificial Sequence
  Description of Artificial Sequence: Synthetic oligonucleotide
uggucuaguaagucucagg

SEQ ID NO: 2337040 - RNA, 19 nt, Artificial Sequence
  Description of Artificial Sequence: Synthetic oligonucleotide
auguacuuggcccaugcgu

SEQ ID NO: 2337041 - RNA, 19 nt, Artificial Sequence
  Description of Artificial Sequence: Synthetic oligonucleotide
uguacaucgcagagagucc

SEQ ID NO: 2337042 - RNA, 19 nt, Artificial Sequence
  Description of Artificial Sequence: Synthetic oligonucleotide
ucucgggugacguucccgg

SEQ ID NO: 2337043 - RNA, 19 nt, Artificial Sequence
  Description of Artificial Sequence: Synthetic oligonucleotide
uccucuucggauucccagg

SEQ ID NO: 2337044 - RNA, 19 nt, Artificial Sequence
  Description of Artificial Sequence: Synthetic oligonucleotide
uaaugagcacccgggaagg

SEQ ID NO: 2337045 - RNA, 19 nt, Artificial Sequence
  Description of Artificial Sequence: Synthetic oligonucleotide
cuugaacagcuccaggaag

SEQ ID NO: 2337046 - RNA, 19 nt, Artificial Sequence
  Description of Artificial Sequence: Synthetic oligonucleotide
cuuuacuuguuaauaccuc

SEQ ID NO: 2337047 - RNA, 19 nt, Artificial Sequence
  Description of Artificial Sequence: Synthetic oligonucleotide
uaguuauguacaucgcaga

SEQ ID NO: 2337048 - RNA, 19 nt, Artificial Sequence
  Description of Artificial Sequence: Synthetic oligonucleotide
aguucacaccaccggacac

SEQ ID NO: 2337049 - RNA, 19 nt, Artificial Sequence
  Description of Artificial Sequence: Synthetic oligonucleotide
uuacuuguuaauaccucau

SEQ ID NO: 2337050 - RNA, 19 nt, Artificial Sequence
  Description of Artificial Sequence: Synthetic oligonucleotide
ucugcgcuugcccacgaag

SEQ ID NO: 2337051 - RNA, 19 nt, Artificial Sequence
  Description of Artificial Sequence: Synthetic oligonucleotide
acaaguucacaccaccgga

SEQ ID NO: 2337052 - RNA, 19 nt, Artificial Sequence
  Description of Artificial Sequence: Synthetic oligonucleotide
ugccauuaccacauuaaau

SEQ ID NO: 2337053 - RNA, 19 nt, Artificial Sequence
  Description of Artificial Sequence: Synthetic oligonucleotide
cuguguaucaguccuccag

SEQ ID NO: 2337054 - RNA, 19 nt, Artificial Sequence
  Description of Artificial Sequence: Synthetic oligonucleotide
uuugucgccaggugccgcg

SEQ ID NO: 2337055 - RNA, 19 nt, Artificial Sequence
  Description of Artificial Sequence: Synthetic oligonucleotide
caccuuuacuuguuaauac

SEQ ID NO: 2337056 - RNA, 19 nt, Artificial Sequence
  Description of Artificial Sequence: Synthetic oligonucleotide
ucuuuacuucucagaagug

SEQ ID NO: 2337057 - RNA, 19 nt, Artificial Sequence
  Description of Artificial Sequence: Synthetic oligonucleotide
uuccucuucggauucccag

SEQ ID NO: 2337058 - RNA, 19 nt, Artificial Sequence
  Description of Artificial Sequence: Synthetic oligonucleotide
agggcuaguuuguucccgc

SEQ ID NO: 2337059 - RNA, 19 nt, Artificial Sequence
  Description of Artificial Sequence: Synthetic oligonucleotide
guuuuaucaucaucaccgc

SEQ ID NO: 2337060 - RNA, 19 nt, Artificial Sequence
  Description of Artificial Sequence: Synthetic oligonucleotide
cuucucagaagugacuagc

SEQ ID NO: 2337061 - RNA, 19 nt, Artificial Sequence
  Description of Artificial Sequence: Synthetic oligonucleotide
uuuguucccgccucugcgc

SEQ ID NO: 2337062 - RNA, 19 nt, Artificial Sequence
  Description of Artificial Sequence: Synthetic oligonucleotide
aggaucucagaccgcgcgc

SEQ ID NO: 2337063 - RNA, 19 nt, Artificial Sequence
  Description of Artificial Sequence: Synthetic oligonucleotide
uacuuguuaauaccucauc

SEQ ID NO: 2337064 - RNA, 19 nt, Artificial Sequence
  Description of Artificial Sequence: Synthetic oligonucleotide
cuggagaauggucugcggc

SEQ ID NO: 2337065 - RNA, 19 nt, Artificial Sequence
  Description of Artificial Sequence: Synthetic oligonucleotide
caugcgucaccuuuacuug

SEQ ID NO: 2337066 - RNA, 19 nt, Artificial Sequence
  Description of Artificial Sequence: Synthetic oligonucleotide
agugacuagcuaaaaggag

SEQ ID NO: 2337067 - RNA, 19 nt, Artificial Sequence
  Description of Artificial Sequence: Synthetic oligonucleotide
uggucugcggccaugggaa

SEQ ID NO: 2337068 - RNA, 19 nt, Artificial Sequence
  Description of Artificial Sequence: Synthetic oligonucleotide
ucucagaccgcgcgcuugg

SEQ ID NO: 2337069 - RNA, 19 nt, Artificial Sequence
  Description of Artificial Sequence: Synthetic oligonucleotide
aucgcagagagucccaggu

SEQ ID NO: 2337070 - RNA, 19 nt, Artificial Sequence
  Description of Artificial Sequence: Synthetic oligonucleotide
ggucuaguaagucucagga

SEQ ID NO: 2337071 - RNA, 19 nt, Artificial Sequence
  Description of Artificial Sequence: Synthetic oligonucleotide
ucccagguaaugagcaccc

SEQ ID NO: 2337072 - RNA, 19 nt, Artificial Sequence
  Description of Artificial Sequence: Synthetic oligonucleotide
uggcgaacaaguucacacc

SEQ ID NO: 2337073 - RNA, 19 nt, Artificial Sequence
  Description of Artificial Sequence: Synthetic oligonucleotide
aauggucugcggccauggg

SEQ ID NO: 2337074 - RNA, 19 nt, Artificial Sequence
  Description of Artificial Sequence: Synthetic oligonucleotide
gucuaguaagucucaggag

SEQ ID NO: 2337075 - RNA, 19 nt, Artificial Sequence
  Description of Artificial Sequence: Synthetic oligonucleotide
cucagaagugacuagcuaa

SEQ ID NO: 2337076 - RNA, 19 nt, Artificial Sequence
  Description of Artificial Sequence: Synthetic oligonucleotide
gccauuaccacauuaaaua

SEQ ID NO: 2337077 - RNA, 19 nt, Artificial Sequence
  Description of Artificial Sequence: Synthetic oligonucleotide
cagagccagagaaagcgag

SEQ ID NO: 2337078 - RNA, 19 nt, Artificial Sequence
  Description of Artificial Sequence: Synthetic oligonucleotide
cacuggucuaguaagucuc

SEQ ID NO: 2337079 - RNA, 19 nt, Artificial Sequence
  Description of Artificial Sequence: Synthetic oligonucleotide
agacagcaagaagagacag

SEQ ID NO: 2337080 - RNA, 19 nt, Artificial Sequence
  Description of Artificial Sequence: Synthetic oligonucleotide
aggccgaugggucgggucg

SEQ ID NO: 2337081 - RNA, 19 nt, Artificial Sequence
  Description of Artificial Sequence: Synthetic oligonucleotide
gugacuagcuaaaaggaga

SEQ ID NO: 2337082 - RNA, 19 nt, Artificial Sequence
  Description of Artificial Sequence: Synthetic oligonucleotide
caaguucacaccaccggac

SEQ ID NO: 2337083 - RNA, 19 nt, Artificial Sequence
  Description of Artificial Sequence: Synthetic oligonucleotide
ugagcccgacaccucgucg

SEQ ID NO: 2337084 - RNA, 19 nt, Artificial Sequence
  Description of Artificial Sequence: Synthetic oligonucleotide
ucugcggccaugggaagcg

SEQ ID NO: 2337085 - RNA, 19 nt, Artificial Sequence
  Description of Artificial Sequence: Synthetic oligonucleotide
ggucauuucaccaggggcc

SEQ ID NO: 2337086 - RNA, 19 nt, Artificial Sequence
  Description of Artificial Sequence: Synthetic oligonucleotide
uguaucaguccuccaggaa

SEQ ID NO: 2337087 - RNA, 19 nt, Artificial Sequence
  Description of Artificial Sequence: Synthetic oligonucleotide
gacaccggacuugagcccg

SEQ ID NO: 2337088 - RNA, 19 nt, Artificial Sequence
  Description of Artificial Sequence: Synthetic oligonucleotide
gaugggucgggucgcugcg

SEQ ID NO: 2337089 - RNA, 19 nt, Artificial Sequence
  Description of Artificial Sequence: Synthetic oligonucleotide
accacauuaaauaguuaug

SEQ ID NO: 2337090 - RNA, 19 nt, Artificial Sequence
  Description of Artificial Sequence: Synthetic oligonucleotide
gacucggaggcuccgcccg

SEQ ID NO: 2337091 - RNA, 19 nt, Artificial Sequence
  Description of Artificial Sequence: Synthetic oligonucleotide
cuagcuaaaaggagagaga

SEQ ID NO: 2337092 - RNA, 19 nt, Artificial Sequence
  Description of Artificial Sequence: Synthetic oligonucleotide
ugagcacccgggaaggggu

SEQ ID NO: 2337093 - RNA, 19 nt, Artificial Sequence
  Description of Artificial Sequence: Synthetic oligonucleotide
gaauggucugcggccaugg

SEQ ID NO: 2337094 - RNA, 19 nt, Artificial Sequence
  Description of Artificial Sequence: Synthetic oligonucleotide
caguaaaccacuggucuag

SEQ ID NO: 2337095 - RNA, 19 nt, Artificial Sequence
  Description of Artificial Sequence: Synthetic oligonucleotide
cuucggauucccagggccc

SEQ ID NO: 2337096 - RNA, 19 nt, Artificial Sequence
  Description of Artificial Sequence: Synthetic oligonucleotide
ccauuaccacauuaaauag

SEQ ID NO: 2337097 - RNA, 19 nt, Artificial Sequence
  Description of Artificial Sequence: Synthetic oligonucleotide
ucaucaccgcacugguggg

SEQ ID NO: 2337098 - RNA, 19 nt, Artificial Sequence
  Description of Artificial Sequence: Synthetic oligonucleotide
ccgaguuuuaucaucauca

SEQ ID NO: 2337099 - RNA, 19 nt, Artificial Sequence
  Description of Artificial Sequence: Synthetic oligonucleotide
cuuguuaauaccucauccu

SEQ ID NO: 2337100 - RNA, 19 nt, Artificial Sequence
  Description of Artificial Sequence: Synthetic oligonucleotide
cuacuauucccgucuugag

SEQ ID NO: 2337101 - RNA, 19 nt, Artificial Sequence
  Description of Artificial Sequence: Synthetic oligonucleotide
uccuucuguguaucagucc

SEQ ID NO: 2337102 - RNA, 19 nt, Artificial Sequence
  Description of Artificial Sequence: Synthetic oligonucleotide
ugguaggaagaaaggggac

SEQ ID NO: 2337103 - RNA, 19 nt, Artificial Sequence
  Description of Artificial Sequence: Synthetic oligonucleotide
cuucgggaaaggaucucag

SEQ ID NO: 2337104 - RNA, 19 nt, Artificial Sequence
  Description of Artificial Sequence: Synthetic oligonucleotide
aaggccgcugccauuacca

SEQ ID NO: 2337105 - RNA, 19 nt, Artificial Sequence
  Description of Artificial Sequence: Synthetic oligonucleotide
gucguuggcgaacaaguuc

SEQ ID NO: 2337106 - RNA, 19 nt, Artificial Sequence
  Description of Artificial Sequence: Synthetic oligonucleotide
ucgggugacguucccggcc

SEQ ID NO: 2337107 - RNA, 19 nt, Artificial Sequence
  Description of Artificial Sequence: Synthetic oligonucleotide
uucgggaaaggaucucaga

SEQ ID NO: 2337108 - RNA, 19 nt, Artificial Sequence
  Description of Artificial Sequence: Synthetic oligonucleotide
gggucauuucaccaggggc

SEQ ID NO: 2337109 - RNA, 19 nt, Artificial Sequence
  Description of Artificial Sequence: Synthetic oligonucleotide
uucggauucccagggcccg

SEQ ID NO: 2337110 - RNA, 19 nt, Artificial Sequence
  Description of Artificial Sequence: Synthetic oligonucleotide
aguccuggagaauggucug

SEQ ID NO: 2337111 - RNA, 19 nt, Artificial Sequence
  Description of Artificial Sequence: Synthetic oligonucleotide
guuauguacaucgcagaga

SEQ ID NO: 2337112 - RNA, 19 nt, Artificial Sequence
  Description of Artificial Sequence: Synthetic oligonucleotide
guaagucucaggaggcaag

SEQ ID NO: 2337113 - RNA, 19 nt, Artificial Sequence
  Description of Artificial Sequence: Synthetic oligonucleotide
agcccaucggcuccugccg

SEQ ID NO: 2337114 - RNA, 19 nt, Artificial Sequence
  Description of Artificial Sequence: Synthetic oligonucleotide
ccaucuuccgcuugaacag

SEQ ID NO: 2337115 - RNA, 19 nt, Artificial Sequence
  Description of Artificial Sequence: Synthetic oligonucleotide
guacaucgcagagaguccc

SEQ ID NO: 2337116 - RNA, 19 nt, Artificial Sequence
  Description of Artificial Sequence: Synthetic oligonucleotide
cauguacuuggcccaugcg

SEQ ID NO: 2337117 - RNA, 19 nt, Artificial Sequence
  Description of Artificial Sequence: Synthetic oligonucleotide
gaggcaagugcucaaggua

SEQ ID NO: 2337118 - RNA, 19 nt, Artificial Sequence
  Description of Artificial Sequence: Synthetic oligonucleotide
ugcgcuugcccacgaagcu

SEQ ID NO: 2337119 - RNA, 19 nt, Artificial Sequence
  Description of Artificial Sequence: Synthetic oligonucleotide
cagaccgcgcgcuuggcgc

SEQ ID NO: 2337120 - RNA, 19 nt, Artificial Sequence
  Description of Artificial Sequence: Synthetic oligonucleotide
uuaauaccucauccuccgu

SEQ ID NO: 2337121 - RNA, 19 nt, Artificial Sequence
  Description of Artificial Sequence: Synthetic oligonucleotide
agagagucccagguaauga

SEQ ID NO: 2337122 - RNA, 19 nt, Artificial Sequence
  Description of Artificial Sequence: Synthetic oligonucleotide
uaagucucaggaggcaagu

SEQ ID NO: 2337123 - RNA, 19 nt, Artificial Sequence
  Description of Artificial Sequence: Synthetic oligonucleotide
cagguucuuuacuucucag

SEQ ID NO: 2337124 - RNA, 19 nt, Artificial Sequence
  Description of Artificial Sequence: Synthetic oligonucleotide
agaguccuggagaaugguc

SEQ ID NO: 2337125 - RNA, 19 nt, Artificial Sequence
  Description of Artificial Sequence: Synthetic oligonucleotide
ugggucgggucgcugcggg

SEQ ID NO: 2337126 - RNA, 19 nt, Artificial Sequence
  Description of Artificial Sequence: Synthetic oligonucleotide
gagggcuaguuuguucccg

SEQ ID NO: 2337127 - RNA, 19 nt, Artificial Sequence
  Description of Artificial Sequence: Synthetic oligonucleotide
augagcacccgggaagggg

SEQ ID NO: 2337128 - RNA, 19 nt, Artificial Sequence
  Description of Artificial Sequence: Synthetic oligonucleotide
auuuugucgccaggugccg

SEQ ID NO: 2337129 - RNA, 19 nt, Artificial Sequence
  Description of Artificial Sequence: Synthetic oligonucleotide
aucagguucuuuacuucuc

SEQ ID NO: 2337130 - RNA, 19 nt, Artificial Sequence
  Description of Artificial Sequence: Synthetic oligonucleotide
ccauuuugucgccaggugc

SEQ ID NO: 2337131 - RNA, 19 nt, Artificial Sequence
  Description of Artificial Sequence: Synthetic oligonucleotide
ucuuggcuacuauucccgu

SEQ ID NO: 2337132 - RNA, 19 nt, Artificial Sequence
  Description of Artificial Sequence: Synthetic oligonucleotide
agguaaugagcacccggga

SEQ ID NO: 2337133 - RNA, 19 nt, Artificial Sequence
  Description of Artificial Sequence: Synthetic oligonucleotide
acuucgggaaaggaucuca

SEQ ID NO: 2337134 - RNA, 19 nt, Artificial Sequence
  Description of Artificial Sequence: Synthetic oligonucleotide
gagacagcaagaagagaca

SEQ ID NO: 2337135 - RNA, 19 nt, Artificial Sequence
  Description of Artificial Sequence: Synthetic oligonucleotide
guucacaccaccggacacc

SEQ ID NO: 2337136 - RNA, 19 nt, Artificial Sequence
  Description of Artificial Sequence: Synthetic oligonucleotide
aagaguccuggagaauggu

SEQ ID NO: 2337137 - RNA, 19 nt, Artificial Sequence
  Description of Artificial Sequence: Synthetic oligonucleotide
cauuaccacauuaaauagu

SEQ ID NO: 2337138 - RNA, 19 nt, Artificial Sequence
  Description of Artificial Sequence: Synthetic oligonucleotide
uacaucgcagagaguccca

SEQ ID NO: 2337139 - RNA, 19 nt, Artificial Sequence
  Description of Artificial Sequence: Synthetic oligonucleotide
aucaguccuccaggaaggc

SEQ ID NO: 2337140 - RNA, 19 nt, Artificial Sequence
  Description of Artificial Sequence: Synthetic oligonucleotide
caucgcagagagucccagg

SEQ ID NO: 2337141 - RNA, 19 nt, Artificial Sequence
  Description of Artificial Sequence: Synthetic oligonucleotide
acguucccggccccgacuc

SEQ ID NO: 2337142 - RNA, 19 nt, Artificial Sequence
  Description of Artificial Sequence: Synthetic oligonucleotide
aagucucaggaggcaagug

SEQ ID NO: 2337143 - RNA, 19 nt, Artificial Sequence
  Description of Artificial Sequence: Synthetic oligonucleotide
aguaagucucaggaggcaa

SEQ ID NO: 2337144 - RNA, 19 nt, Artificial Sequence
  Description of Artificial Sequence: Synthetic oligonucleotide
gaaggccgcugccauuacc

SEQ ID NO: 2337145 - RNA, 19 nt, Artificial Sequence
  Description of Artificial Sequence: Synthetic oligonucleotide
gacuccagcccaucggcuc

SEQ ID NO: 2337146 - RNA, 19 nt, Artificial Sequence
  Description of Artificial Sequence: Synthetic oligonucleotide
cuauucccgucuugagggc

SEQ ID NO: 2337147 - RNA, 19 nt, Artificial Sequence
  Description of Artificial Sequence: Synthetic oligonucleotide
ugggaagcgccuugguuuc

SEQ ID NO: 2337148 - RNA, 19 nt, Artificial Sequence
  Description of Artificial Sequence: Synthetic oligonucleotide
ucuguguaucaguccucca

SEQ ID NO: 2337149 - RNA, 19 nt, Artificial Sequence
  Description of Artificial Sequence: Synthetic oligonucleotide
uauguacaucgcagagagu

SEQ ID NO: 2337150 - RNA, 19 nt, Artificial Sequence
  Description of Artificial Sequence: Synthetic oligonucleotide
caggggccgaguuuuauca

SEQ ID NO: 2337151 - RNA, 19 nt, Artificial Sequence
  Description of Artificial Sequence: Synthetic oligonucleotide
augcgucaccuuuacuugu

SEQ ID NO: 2337152 - RNA, 19 nt, Artificial Sequence
  Description of Artificial Sequence: Synthetic oligonucleotide
cagcccaucggcuccugcc

SEQ ID NO: 2337153 - RNA, 19 nt, Artificial Sequence
  Description of Artificial Sequence: Synthetic oligonucleotide
ccagguaaugagcacccgg

SEQ ID NO: 2337154 - RNA, 19 nt, Artificial Sequence
  Description of Artificial Sequence: Synthetic oligonucleotide
aucggcuccugccgccgcc

SEQ ID NO: 2337155 - RNA, 19 nt, Artificial Sequence
  Description of Artificial Sequence: Synthetic oligonucleotide
gauucccagggcccgccgc

SEQ ID NO: 2337156 - RNA, 19 nt, Artificial Sequence
  Description of Artificial Sequence: Synthetic oligonucleotide
uauucccgucuugagggcu

SEQ ID NO: 2337157 - RNA, 19 nt, Artificial Sequence
  Description of Artificial Sequence: Synthetic oligonucleotide
ggcgaacaaguucacacca

SEQ ID NO: 2337158 - RNA, 19 nt, Artificial Sequence
  Description of Artificial Sequence: Synthetic oligonucleotide
uggcccaugcgucaccuuu

SEQ ID NO: 2337159 - RNA, 19 nt, Artificial Sequence
  Description of Artificial Sequence: Synthetic oligonucleotide
agccauuuugucgccaggu

SEQ ID NO: 2337160 - RNA, 19 nt, Artificial Sequence
  Description of Artificial Sequence: Synthetic oligonucleotide
aggcaagugcucaagguaa

SEQ ID NO: 2337161 - RNA, 19 nt, Artificial Sequence
  Description of Artificial Sequence: Synthetic oligonucleotide
gggacuucgggaaaggauc

SEQ ID NO: 2337162 - RNA, 19 nt, Artificial Sequence
  Description of Artificial Sequence: Synthetic oligonucleotide
agccagagaaagcgaggug

SEQ ID NO: 2337163 - RNA, 19 nt, Artificial Sequence
  Description of Artificial Sequence: Synthetic oligonucleotide
aagcugccgucguuggcga

SEQ ID NO: 2337164 - RNA, 19 nt, Artificial Sequence
  Description of Artificial Sequence: Synthetic oligonucleotide
guguaucaguccuccagga

SEQ ID NO: 2337165 - RNA, 19 nt, Artificial Sequence
  Description of Artificial Sequence: Synthetic oligonucleotide
caccucccgacucggaggc

SEQ ID NO: 2337166 - RNA, 19 nt, Artificial Sequence
  Description of Artificial Sequence: Synthetic oligonucleotide
cuucuguguaucaguccuc

SEQ ID NO: 2337167 - RNA, 19 nt, Artificial Sequence
  Description of Artificial Sequence: Synthetic oligonucleotide
ugcggccaugggaagcgcc

SEQ ID NO: 2337168 - RNA, 19 nt, Artificial Sequence
  Description of Artificial Sequence: Synthetic oligonucleotide
ggggucauuucaccagggg

SEQ ID NO: 2337169 - RNA, 19 nt, Artificial Sequence
  Description of Artificial Sequence: Synthetic oligonucleotide
uuuugucgccaggugccgc

SEQ ID NO: 2337170 - RNA, 19 nt, Artificial Sequence
  Description of Artificial Sequence: Synthetic oligonucleotide
agaccgcgcgcuuggcgcg

SEQ ID NO: 2337171 - RNA, 19 nt, Artificial Sequence
  Description of Artificial Sequence: Synthetic oligonucleotide
ugcgucaccuuuacuuguu

SEQ ID NO: 2337172 - RNA, 19 nt, Artificial Sequence
  Description of Artificial Sequence: Synthetic oligonucleotide
aagcgaggugguaggaaga

SEQ ID NO: 2337173 - RNA, 19 nt, Artificial Sequence
  Description of Artificial Sequence: Synthetic oligonucleotide
uuucaccaggggccgaguu

SEQ ID NO: 2337174 - RNA, 19 nt, Artificial Sequence
  Description of Artificial Sequence: Synthetic oligonucleotide
agcuaaaaggagagagaca

SEQ ID NO: 2337175 - RNA, 19 nt, Artificial Sequence
  Description of Artificial Sequence: Synthetic oligonucleotide
caggaagcugccgucguug

SEQ ID NO: 2337176 - RNA, 19 nt, Artificial Sequence
  Description of Artificial Sequence: Synthetic oligonucleotide
cgaacaaguucacaccacc

SEQ ID NO: 2337177 - RNA, 19 nt, Artificial Sequence
  Description of Artificial Sequence: Synthetic oligonucleotide
acaucgcagagagucccag

SEQ ID NO: 2337178 - RNA, 19 nt, Artificial Sequence
  Description of Artificial Sequence: Synthetic oligonucleotide
cagagagucccagguaaug

SEQ ID NO: 2337179 - RNA, 19 nt, Artificial Sequence
  Description of Artificial Sequence: Synthetic oligonucleotide
gcuaguuuguucccgccuc

SEQ ID NO: 2337180 - RNA, 19 nt, Artificial Sequence
  Description of Artificial Sequence: Synthetic oligonucleotide
cacgaagcugagcgugggg

SEQ ID NO: 2337181 - RNA, 19 nt, Artificial Sequence
  Description of Artificial Sequence: Synthetic oligonucleotide
uugagcccgacaccucguc

SEQ ID NO: 2337182 - RNA, 19 nt, Artificial Sequence
  Description of Artificial Sequence: Synthetic oligonucleotide
ccggacuugagcccgacac

SEQ ID NO: 2337183 - RNA, 19 nt, Artificial Sequence
  Description of Artificial Sequence: Synthetic oligonucleotide
cggacaccggacuugagcc

SEQ ID NO: 2337184 - RNA, 19 nt, Artificial Sequence
  Description of Artificial Sequence: Synthetic oligonucleotide
cuggucuaguaagucucag

SEQ ID NO: 2337185 - RNA, 19 nt, Artificial Sequence
  Description of Artificial Sequence: Synthetic oligonucleotide
gaaagcgaggugguaggaa

SEQ ID NO: 2337186 - RNA, 19 nt, Artificial Sequence
  Description of Artificial Sequence: Synthetic oligonucleotide
gcagccauuuugucgccag

SEQ ID NO: 2337187 - RNA, 19 nt, Artificial Sequence
  Description of Artificial Sequence: Synthetic oligonucleotide
agcccgacaccucgucguc

SEQ ID NO: 2337188 - RNA, 19 nt, Artificial Sequence
  Description of Artificial Sequence: Synthetic oligonucleotide
guacuuggcccaugcguca

SEQ ID NO: 2337189 - RNA, 19 nt, Artificial Sequence
  Description of Artificial Sequence: Synthetic oligonucleotide
cucuucggauucccagggc

SEQ ID NO: 2337190 - RNA, 19 nt, Artificial Sequence
  Description of Artificial Sequence: Synthetic oligonucleotide
uuuucacuucugccaugua

SEQ ID NO: 2337191 - RNA, 19 nt, Artificial Sequence
  Description of Artificial Sequence: Synthetic oligonucleotide
cagccauuuugucgccagg

SEQ ID NO: 2337192 - RNA, 19 nt, Artificial Sequence
  Description of Artificial Sequence: Synthetic oligonucleotide
caggugccgcgcaagggac

SEQ ID NO: 2337193 - RNA, 19 nt, Artificial Sequence
  Description of Artificial Sequence: Synthetic oligonucleotide
aguaaaccacuggucuagu

SEQ ID NO: 2337194 - RNA, 19 nt, Artificial Sequence
  Description of Artificial Sequence: Synthetic oligonucleotide
ccauguacuuggcccaugc

SEQ ID NO: 2337195 - RNA, 19 nt, Artificial Sequence
  Description of Artificial Sequence: Synthetic oligonucleotide
ggcaccucccgacucggag

SEQ ID NO: 2337196 - RNA, 19 nt, Artificial Sequence
  Description of Artificial Sequence: Synthetic oligonucleotide
agaaagcgaggugguagga

SEQ ID NO: 2337197 - RNA, 19 nt, Artificial Sequence
  Description of Artificial Sequence: Synthetic oligonucleotide
ucacaccaccggacaccgg

SEQ ID NO: 2337198 - RNA, 19 nt, Artificial Sequence
  Description of Artificial Sequence: Synthetic oligonucleotide
agaauggucugcggccaug

SEQ ID NO: 2337199 - RNA, 19 nt, Artificial Sequence
  Description of Artificial Sequence: Synthetic oligonucleotide
aggggucauuucaccaggg

SEQ ID NO: 2337200 - RNA, 19 nt, Artificial Sequence
  Description of Artificial Sequence: Synthetic oligonucleotide
acuggucuaguaagucuca

SEQ ID NO: 2337201 - RNA, 19 nt, Artificial Sequence
  Description of Artificial Sequence: Synthetic oligonucleotide
gccauuuugucgccaggug

SEQ ID NO: 2337202 - RNA, 19 nt, Artificial Sequence
  Description of Artificial Sequence: Synthetic oligonucleotide
gacuagcuaaaaggagaga

SEQ ID NO: 2337203 - RNA, 19 nt, Artificial Sequence
  Description of Artificial Sequence: Synthetic oligonucleotide
aucucagaccgcgcgcuug

SEQ ID NO: 2337204 - RNA, 19 nt, Artificial Sequence
  Description of Artificial Sequence: Synthetic oligonucleotide
aggaaggccgcugccauua

SEQ ID NO: 2337205 - RNA, 19 nt, Artificial Sequence
  Description of Artificial Sequence: Synthetic oligonucleotide
cgaguuuuaucaucaucac

SEQ ID NO: 2337206 - RNA, 19 nt, Artificial Sequence
  Description of Artificial Sequence: Synthetic oligonucleotide
guaaaccacuggucuagua

SEQ ID NO: 2337207 - RNA, 19 nt, Artificial Sequence
  Description of Artificial Sequence: Synthetic oligonucleotide
cucgggugacguucccggc

SEQ ID NO: 2337208 - RNA, 19 nt, Artificial Sequence
  Description of Artificial Sequence: Synthetic oligonucleotide
gcaagggacuucgggaaag

SEQ ID NO: 2337209 - RNA, 19 nt, Artificial Sequence
  Description of Artificial Sequence: Synthetic oligonucleotide
ugacguucccggccccgac

SEQ ID NO: 2337210 - RNA, 19 nt, Artificial Sequence
  Description of Artificial Sequence: Synthetic oligonucleotide
ggacaguaaaccacugguc

SEQ ID NO: 2337211 - RNA, 19 nt, Artificial Sequence
  Description of Artificial Sequence: Synthetic oligonucleotide
ccuuuacuuguuaauaccu

SEQ ID NO: 2337212 - RNA, 19 nt, Artificial Sequence
  Description of Artificial Sequence: Synthetic oligonucleotide
ccggacaccggacuugagc

SEQ ID NO: 2337213 - RNA, 19 nt, Artificial Sequence
  Description of Artificial Sequence: Synthetic oligonucleotide
gaggccgaugggucggguc

SEQ ID NO: 2337214 - RNA, 19 nt, Artificial Sequence
  Description of Artificial Sequence: Synthetic oligonucleotide
acaccaccggacaccggac

SEQ ID NO: 2337215 - RNA, 19 nt, Artificial Sequence
  Description of Artificial Sequence: Synthetic oligonucleotide
cagcacuaaaucagguucu

SEQ ID NO: 2337216 - RNA, 19 nt, Artificial Sequence
  Description of Artificial Sequence: Synthetic oligonucleotide
gccgaguuuuaucaucauc

SEQ ID NO: 2337217 - RNA, 19 nt, Artificial Sequence
  Description of Artificial Sequence: Synthetic oligonucleotide
ucguccccgcucucgggug

SEQ ID NO: 2337218 - RNA, 19 nt, Artificial Sequence
  Description of Artificial Sequence: Synthetic oligonucleotide
cacuggugggcuuuguacu

SEQ ID NO: 2337219 - RNA, 19 nt, Artificial Sequence
  Description of Artificial Sequence: Synthetic oligonucleotide
ucuugagggcuaguuuguu

SEQ ID NO: 2337220 - RNA, 19 nt, Artificial Sequence
  Description of Artificial Sequence: Synthetic oligonucleotide
cucccgacucggaggcucc

SEQ ID NO: 2337221 - RNA, 19 nt, Artificial Sequence
  Description of Artificial Sequence: Synthetic oligonucleotide
agcgaggugguaggaagaa

SEQ ID NO: 2337222 - RNA, 19 nt, Artificial Sequence
  Description of Artificial Sequence: Synthetic oligonucleotide
accaccggacaccggacuu

SEQ ID NO: 2337223 - RNA, 19 nt, Artificial Sequence
  Description of Artificial Sequence: Synthetic oligonucleotide
guccuggagaauggucugc

SEQ ID NO: 2337224 - RNA, 19 nt, Artificial Sequence
  Description of Artificial Sequence: Synthetic oligonucleotide
agcacuaaaucagguucuu

SEQ ID NO: 2337225 - RNA, 19 nt, Artificial Sequence
  Description of Artificial Sequence: Synthetic oligonucleotide
gagcccgacaccucgucgu

SEQ ID NO: 2337226 - RNA, 19 nt, Artificial Sequence
  Description of Artificial Sequence: Synthetic oligonucleotide
gucucaggaggcaagugcu

SEQ ID NO: 2337227 - RNA, 19 nt, Artificial Sequence
  Description of Artificial Sequence: Synthetic oligonucleotide
uucccggccccgacuccag

SEQ ID NO: 2337228 - RNA, 19 nt, Artificial Sequence
  Description of Artificial Sequence: Synthetic oligonucleotide
ugucgccaggugccgcgca

SEQ ID NO: 2337229 - RNA, 19 nt, Artificial Sequence
  Description of Artificial Sequence: Synthetic oligonucleotide
uucccgucuugagggcuag

SEQ ID NO: 2337230 - RNA, 19 nt, Artificial Sequence
  Description of Artificial Sequence: Synthetic oligonucleotide
caucaccgcacuggugggc

SEQ ID NO: 2337231 - RNA, 19 nt, Artificial Sequence
  Description of Artificial Sequence: Synthetic oligonucleotide
ugcccacgaagcugagcgu

SEQ ID NO: 2337232 - RNA, 19 nt, Artificial Sequence
  Description of Artificial Sequence: Synthetic oligonucleotide
guucccgccucugcgcuug

SEQ ID NO: 2337233 - RNA, 19 nt, Artificial Sequence
  Description of Artificial Sequence: Synthetic oligonucleotide
ggacaccggacuugagccc

SEQ ID NO: 2337234 - RNA, 19 nt, Artificial Sequence
  Description of Artificial Sequence: Synthetic oligonucleotide
ucauuucaccaggggccga

SEQ ID NO: 2337235 - RNA, 19 nt, Artificial Sequence
  Description of Artificial Sequence: Synthetic oligonucleotide
gucugcggccaugggaagc

SEQ ID NO: 2337236 - RNA, 19 nt, Artificial Sequence
  Description of Artificial Sequence: Synthetic oligonucleotide
ccgacuccagcccaucggc

SEQ ID NO: 2337237 - RNA, 19 nt, Artificial Sequence
  Description of Artificial Sequence: Synthetic oligonucleotide
ggggccgaguuuuaucauc

SEQ ID NO: 2337238 - RNA, 19 nt, Artificial Sequence
  Description of Artificial Sequence: Synthetic oligonucleotide
ccuggagaauggucugcgg

SEQ ID NO: 2337239 - RNA, 19 nt, Artificial Sequence
  Description of Artificial Sequence: Synthetic oligonucleotide
cucgggcagccauuuuguc

SEQ ID NO: 2337240 - RNA, 19 nt, Artificial Sequence
  Description of Artificial Sequence: Synthetic oligonucleotide
uucccagggcccgccgcgg

SEQ ID NO: 2337241 - RNA, 19 nt, Artificial Sequence
  Description of Artificial Sequence: Synthetic oligonucleotide
uggcuacuauucccgucuu

SEQ ID NO: 2337242 - RNA, 19 nt, Artificial Sequence
  Description of Artificial Sequence: Synthetic oligonucleotide
aggggccgaguuuuaucau

SEQ ID NO: 2337243 - RNA, 19 nt, Artificial Sequence
  Description of Artificial Sequence: Synthetic oligonucleotide
gacuucgggaaaggaucuc

SEQ ID NO: 2337244 - RNA, 19 nt, Artificial Sequence
  Description of Artificial Sequence: Synthetic oligonucleotide
cccgacuccagcccaucgg

SEQ ID NO: 2337245 - RNA, 19 nt, Artificial Sequence
  Description of Artificial Sequence: Synthetic oligonucleotide
augggucgggucgcugcgg

SEQ ID NO: 2337246 - RNA, 19 nt, Artificial Sequence
  Description of Artificial Sequence: Synthetic oligonucleotide
ucggauucccagggcccgc

SEQ ID NO: 2337247 - RNA, 19 nt, Artificial Sequence
  Description of Artificial Sequence: Synthetic oligonucleotide
gggcuaguuuguucccgcc

SEQ ID NO: 2337248 - RNA, 19 nt, Artificial Sequence
  Description of Artificial Sequence: Synthetic oligonucleotide
ggaaaggaucucagaccgc

SEQ ID NO: 2337249 - RNA, 19 nt, Artificial Sequence
  Description of Artificial Sequence: Synthetic oligonucleotide
uccgcccgucucccucggg

SEQ ID NO: 2337250 - RNA, 19 nt, Artificial Sequence
  Description of Artificial Sequence: Synthetic oligonucleotide
caccucgucguccccgcuc

SEQ ID NO: 2337251 - RNA, 19 nt, Artificial Sequence
  Description of Artificial Sequence: Synthetic oligonucleotide
ggucgggucgcugcgggcc

SEQ ID NO: 2337252 - RNA, 19 nt, Artificial Sequence
  Description of Artificial Sequence: Synthetic oligonucleotide
gggccgaguuuuaucauca

SEQ ID NO: 2337253 - RNA, 19 nt, Artificial Sequence
  Description of Artificial Sequence: Synthetic oligonucleotide
gucgggucgcugcgggccc

SEQ ID NO: 2337254 - RNA, 19 nt, Artificial Sequence
  Description of Artificial Sequence: Synthetic oligonucleotide
accggacuugagcccgaca

SEQ ID NO: 2337255 - RNA, 19 nt, Artificial Sequence
  Description of Artificial Sequence: Synthetic oligonucleotide
ggauucccagggcccgccg

SEQ ID NO: 2337256 - RNA, 19 nt, Artificial Sequence
  Description of Artificial Sequence: Synthetic oligonucleotide
ccaugcgucaccuuuacuu

SEQ ID NO: 2337257 - RNA, 19 nt, Artificial Sequence
  Description of Artificial Sequence: Synthetic oligonucleotide
ucccgacucggaggcuccg

SEQ ID NO: 2337258 - RNA, 19 nt, Artificial Sequence
  Description of Artificial Sequence: Synthetic oligonucleotide
gacuugagcccgacaccuc

SEQ ID NO: 2337259 - RNA, 19 nt, Artificial Sequence
  Description of Artificial Sequence: Synthetic oligonucleotide
ggugacguucccggccccg

SEQ ID NO: 2337260 - RNA, 19 nt, Artificial Sequence
  Description of Artificial Sequence: Synthetic oligonucleotide
acucggaggcuccgcccgu

SEQ ID NO: 2337261 - RNA, 19 nt, Artificial Sequence
  Description of Artificial Sequence: Synthetic oligonucleotide
gccgucguuggcgaacaag

SEQ ID NO: 2337262 - RNA, 19 nt, Artificial Sequence
  Description of Artificial Sequence: Synthetic oligonucleotide
gcuccgcccgucucccucg

SEQ ID NO: 2337263 - RNA, 19 nt, Artificial Sequence
  Description of Artificial Sequence: Synthetic oligonucleotide
ggacuugagcccgacaccu

SEQ ID NO: 2337264 - RNA, 19 nt, Artificial Sequence
  Description of Artificial Sequence: Synthetic oligonucleotide
ucggcuccugccgccgccc

SEQ ID NO: 2337265 - RNA, 19 nt, Artificial Sequence
  Description of Artificial Sequence: Synthetic oligonucleotide
gcgcaagggacuucgggaa

SEQ ID NO: 2337266 - RNA, 19 nt, Artificial Sequence
  Description of Artificial Sequence: Synthetic oligonucleotide
cgaugggucgggucgcugc

SEQ ID NO: 2337267 - RNA, 19 nt, Artificial Sequence
  Description of Artificial Sequence: Synthetic oligonucleotide
ggccaugggaagcgccuug

SEQ ID NO: 2337268 - RNA, 19 nt, Artificial Sequence
  Description of Artificial Sequence: Synthetic oligonucleotide
ccgcgcaagggacuucggg

SEQ ID NO: 2337269 - RNA, 19 nt, Artificial Sequence
  Description of Artificial Sequence: Synthetic oligonucleotide
ucgggucgcugcgggcccg

SEQ ID NO: 2337270 - RNA, 19 nt, Artificial Sequence
  Description of Artificial Sequence: Synthetic oligonucleotide
agcugagcguggggccugg

SEQ ID NO: 2337271 - RNA, 19 nt, Artificial Sequence
  Description of Artificial Sequence: Synthetic oligonucleotide
ccaggggccgaguuuuauc

SEQ ID NO: 2337272 - RNA, 19 nt, Artificial Sequence
  Description of Artificial Sequence: Synthetic oligonucleotide
agcacccgggaagggguca

SEQ ID NO: 2337273 - RNA, 19 nt, Artificial Sequence
  Description of Artificial Sequence: Synthetic oligonucleotide
gggccgcccuuccucuucg

SEQ ID NO: 2337274 - RNA, 19 nt, Artificial Sequence
  Description of Artificial Sequence: Synthetic oligonucleotide
uguucccgccucugcgcuu

SEQ ID NO: 2337275 - RNA, 19 nt, Artificial Sequence
  Description of Artificial Sequence: Synthetic oligonucleotide
caugggaagcgccuugguu

SEQ ID NO: 2337276 - RNA, 19 nt, Artificial Sequence
  Description of Artificial Sequence: Synthetic oligonucleotide
gaccgcgcgcuuggcgcgg

SEQ ID NO: 2337277 - RNA, 19 nt, Artificial Sequence
  Description of Artificial Sequence: Synthetic oligonucleotide
ccgacucggaggcuccgcc

SEQ ID NO: 2337278 - RNA, 19 nt, Artificial Sequence
  Description of Artificial Sequence: Synthetic oligonucleotide
cucagaccgcgcgcuuggc

SEQ ID NO: 2337279 - RNA, 19 nt, Artificial Sequence
  Description of Artificial Sequence: Synthetic oligonucleotide
accaggggccgaguuuuau

SEQ ID NO: 2337280 - RNA, 19 nt, Artificial Sequence
  Description of Artificial Sequence: Synthetic oligonucleotide
ggcuaguuuguucccgccu

SEQ ID NO: 2337281 - RNA, 19 nt, Artificial Sequence
  Description of Artificial Sequence: Synthetic oligonucleotide
gucguccccgcucucgggu

SEQ ID NO: 2337282 - RNA, 19 nt, Artificial Sequence
  Description of Artificial Sequence: Synthetic oligonucleotide
ccgucguuggcgaacaagu

SEQ ID NO: 2337283 - RNA, 19 nt, Artificial Sequence
  Description of Artificial Sequence: Synthetic oligonucleotide
cuugagcccgacaccucgu

SEQ ID NO: 2337284 - RNA, 19 nt, Artificial Sequence
  Description of Artificial Sequence: Synthetic oligonucleotide
ccacgaagcugagcguggg

SEQ ID NO: 2337285 - RNA, 19 nt, Artificial Sequence
  Description of Artificial Sequence: Synthetic oligonucleotide
gcccaugcgucaccuuuac

SEQ ID NO: 2337286 - RNA, 19 nt, Artificial Sequence
  Description of Artificial Sequence: Synthetic oligonucleotide
cgcagagagucccagguaa

SEQ ID NO: 2337287 - RNA, 19 nt, Artificial Sequence
  Description of Artificial Sequence: Synthetic oligonucleotide
ccgggcaccucccgacucg

SEQ ID NO: 2337288 - RNA, 19 nt, Artificial Sequence
  Description of Artificial Sequence: Synthetic oligonucleotide
acccgggaaggggucauuu

SEQ ID NO: 2337289 - RNA, 19 nt, Artificial Sequence
  Description of Artificial Sequence: Synthetic oligonucleotide
gcugccgucguuggcgaac

SEQ ID NO: 2337290 - RNA, 19 nt, Artificial Sequence
  Description of Artificial Sequence: Synthetic oligonucleotide
cuccgcccgucucccucgg

SEQ ID NO: 2337291 - RNA, 19 nt, Artificial Sequence
  Description of Artificial Sequence: Synthetic oligonucleotide
cgcgcaagggacuucggga

SEQ ID NO: 2337292 - RNA, 19 nt, Artificial Sequence
  Description of Artificial Sequence: Synthetic oligonucleotide
uucccgccucugcgcuugc

SEQ ID NO: 2337293 - RNA, 19 nt, Artificial Sequence
  Description of Artificial Sequence: Synthetic oligonucleotide
gccucugcgcuugcccacg

SEQ ID NO: 2337294 - RNA, 19 nt, Artificial Sequence
  Description of Artificial Sequence: Synthetic oligonucleotide
caccggacaccggacuuga

SEQ ID NO: 2337295 - RNA, 19 nt, Artificial Sequence
  Description of Artificial Sequence: Synthetic oligonucleotide
gagcacccgggaagggguc

SEQ ID NO: 2337296 - RNA, 19 nt, Artificial Sequence
  Description of Artificial Sequence: Synthetic oligonucleotide
cugccgucguuggcgaaca

SEQ ID NO: 2337297 - RNA, 19 nt, Artificial Sequence
  Description of Artificial Sequence: Synthetic oligonucleotide
ccgcccgucucccucgggc

SEQ ID NO: 2337298 - RNA, 19 nt, Artificial Sequence
  Description of Artificial Sequence: Synthetic oligonucleotide
cgggugacguucccggccc

SEQ ID NO: 2337299 - RNA, 19 nt, Artificial Sequence
  Description of Artificial Sequence: Synthetic oligonucleotide
gcaagugcucaagguaaaa

SEQ ID NO: 2337300 - RNA, 19 nt, Artificial Sequence
  Description of Artificial Sequence: Synthetic oligonucleotide
gcccaucggcuccugccgc

SEQ ID NO: 2337301 - RNA, 19 nt, Artificial Sequence
  Description of Artificial Sequence: Synthetic oligonucleotide
gucgccaggugccgcgcaa

SEQ ID NO: 2337302 - RNA, 19 nt, Artificial Sequence
  Description of Artificial Sequence: Synthetic oligonucleotide
gucucccucgggcagccau

SEQ ID NO: 2337303 - RNA, 19 nt, Artificial Sequence
  Description of Artificial Sequence: Synthetic oligonucleotide
ggacuucgggaaaggaucu

SEQ ID NO: 2337304 - RNA, 19 nt, Artificial Sequence
  Description of Artificial Sequence: Synthetic oligonucleotide
gugacguucccggccccga

SEQ ID NO: 2337305 - RNA, 19 nt, Artificial Sequence
  Description of Artificial Sequence: Synthetic oligonucleotide
gcgccuugguuuccuucug

SEQ ID NO: 2337306 - RNA, 19 nt, Artificial Sequence
  Description of Artificial Sequence: Synthetic oligonucleotide
ccacuggucuaguaagucu

SEQ ID NO: 2337307 - RNA, 19 nt, Artificial Sequence
  Description of Artificial Sequence: Synthetic oligonucleotide
gcccgucucccucgggcag

SEQ ID NO: 2337308 - RNA, 19 nt, Artificial Sequence
  Description of Artificial Sequence: Synthetic oligonucleotide
gggccgggcaccucccgac

SEQ ID NO: 2337309 - RNA, 19 nt, Artificial Sequence
  Description of Artificial Sequence: Synthetic oligonucleotide
ccccgacuccagcccaucg

SEQ ID NO: 2337310 - RNA, 19 nt, Artificial Sequence
  Description of Artificial Sequence: Synthetic oligonucleotide
aggugccgcgcaagggacu

SEQ ID NO: 2337311 - RNA, 19 nt, Artificial Sequence
  Description of Artificial Sequence: Synthetic oligonucleotide
cccagguaaugagcacccg

SEQ ID NO: 2337312 - RNA, 19 nt, Artificial Sequence
  Description of Artificial Sequence: Synthetic oligonucleotide
ggaaggccgcugccauuac

SEQ ID NO: 2337313 - RNA, 19 nt, Artificial Sequence
  Description of Artificial Sequence: Synthetic oligonucleotide
cccgggaaggggucauuuc

SEQ ID NO: 2337314 - RNA, 19 nt, Artificial Sequence
  Description of Artificial Sequence: Synthetic oligonucleotide
ucccgccucugcgcuugcc

SEQ ID NO: 2337315 - RNA, 19 nt, Artificial Sequence
  Description of Artificial Sequence: Synthetic oligonucleotide
ucccucgggcagccauuuu

SEQ ID NO: 2337316 - RNA, 19 nt, Artificial Sequence
  Description of Artificial Sequence: Synthetic oligonucleotide
cucggaggcuccgcccguc

SEQ ID NO: 2337317 - RNA, 19 nt, Artificial Sequence
  Description of Artificial Sequence: Synthetic oligonucleotide
cugcggccaugggaagcgc

SEQ ID NO: 2337318 - RNA, 19 nt, Artificial Sequence
  Description of Artificial Sequence: Synthetic oligonucleotide
agcugccgucguuggcgaa

SEQ ID NO: 2337319 - RNA, 19 nt, Artificial Sequence
  Description of Artificial Sequence: Synthetic oligonucleotide
caccggacuugagcccgac

SEQ ID NO: 2337320 - RNA, 19 nt, Artificial Sequence
  Description of Artificial Sequence: Synthetic oligonucleotide
ccaccggacaccggacuug

SEQ ID NO: 2337321 - RNA, 19 nt, Artificial Sequence
  Description of Artificial Sequence: Synthetic oligonucleotide
cgucaccuuuacuuguuaa

SEQ ID NO: 2337322 - RNA, 19 nt, Artificial Sequence
  Description of Artificial Sequence: Synthetic oligonucleotide
ccucccgacucggaggcuc

SEQ ID NO: 2337323 - RNA, 19 nt, Artificial Sequence
  Description of Artificial Sequence: Synthetic oligonucleotide
gggucgggucgcugcgggc

SEQ ID NO: 2337324 - RNA, 19 nt, Artificial Sequence
  Description of Artificial Sequence: Synthetic oligonucleotide
acaccggacuugagcccga

SEQ ID NO: 2337325 - RNA, 19 nt, Artificial Sequence
  Description of Artificial Sequence: Synthetic oligonucleotide
ggccgaugggucgggucgc

SEQ ID NO: 2337326 - RNA, 19 nt, Artificial Sequence
  Description of Artificial Sequence: Synthetic oligonucleotide
gggugacguucccggcccc

SEQ ID NO: 2337327 - RNA, 19 nt, Artificial Sequence
  Description of Artificial Sequence: Synthetic oligonucleotide
caccaccggacaccggacu

SEQ ID NO: 2337328 - RNA, 19 nt, Artificial Sequence
  Description of Artificial Sequence: Synthetic oligonucleotide
gggaagcgccuugguuucc

SEQ ID NO: 2337329 - RNA, 19 nt, Artificial Sequence
  Description of Artificial Sequence: Synthetic oligonucleotide
gccgcccuuccucuucgga

SEQ ID NO: 2337330 - RNA, 19 nt, Artificial Sequence
  Description of Artificial Sequence: Synthetic oligonucleotide
cucugcgcuugcccacgaa

SEQ ID NO: 2337331 - RNA, 19 nt, Artificial Sequence
  Description of Artificial Sequence: Synthetic oligonucleotide
gcccgacaccucgucgucc

SEQ ID NO: 2337332 - RNA, 19 nt, Artificial Sequence
  Description of Artificial Sequence: Synthetic oligonucleotide
gccgggcaccucccgacuc

SEQ ID NO: 2337333 - RNA, 19 nt, Artificial Sequence
  Description of Artificial Sequence: Synthetic oligonucleotide
cgucguccccgcucucggg

SEQ ID NO: 2337334 - RNA, 19 nt, Artificial Sequence
  Description of Artificial Sequence: Synthetic oligonucleotide
ccgccucugcgcuugccca

SEQ ID NO: 2337335 - RNA, 19 nt, Artificial Sequence
  Description of Artificial Sequence: Synthetic oligonucleotide
gcgaggugguaggaagaaa

SEQ ID NO: 2337336 - RNA, 19 nt, Artificial Sequence
  Description of Artificial Sequence: Synthetic oligonucleotide
cccgucucccucgggcagc

SEQ ID NO: 2337337 - RNA, 19 nt, Artificial Sequence
  Description of Artificial Sequence: Synthetic oligonucleotide
accucccgacucggaggcu

SEQ ID NO: 2337338 - RNA, 19 nt, Artificial Sequence
  Description of Artificial Sequence: Synthetic oligonucleotide
ccgacaccucgucgucccc

SEQ ID NO: 2337339 - RNA, 19 nt, Artificial Sequence
  Description of Artificial Sequence: Synthetic oligonucleotide
gccgcgcaagggacuucgg

SEQ ID NO: 2337340 - RNA, 19 nt, Artificial Sequence
  Description of Artificial Sequence: Synthetic oligonucleotide
cccgacucggaggcuccgc

SEQ ID NO: 2337341 - RNA, 19 nt, Artificial Sequence
  Description of Artificial Sequence: Synthetic oligonucleotide
cugccgccgcccgccgggc

SEQ ID NO: 2337342 - RNA, 19 nt, Artificial Sequence
  Description of Artificial Sequence: Synthetic oligonucleotide
ccgucucccucgggcagcc

SEQ ID NO: 2337343 - RNA, 19 nt, Artificial Sequence
  Description of Artificial Sequence: Synthetic oligonucleotide
cggcggaggccgauggguc

SEQ ID NO: 2337344 - RNA, 19 nt, Artificial Sequence
  Description of Artificial Sequence: Synthetic oligonucleotide
agggcccgccgcggcggag

SEQ ID NO: 2337345 - RNA, 19 nt, Artificial Sequence
  Description of Artificial Sequence: Synthetic oligonucleotide
ggccgaguuuuaucaucau

SEQ ID NO: 2337346 - RNA, 19 nt, Artificial Sequence
  Description of Artificial Sequence: Synthetic oligonucleotide
gcggcggaggccgaugggu

SEQ ID NO: 2337347 - RNA, 19 nt, Artificial Sequence
  Description of Artificial Sequence: Synthetic oligonucleotide
gcacuaaaucagguucuuu

SEQ ID NO: 2337348 - RNA, 19 nt, Artificial Sequence
  Description of Artificial Sequence: Synthetic oligonucleotide
gugccgcgcaagggacuuc

SEQ ID NO: 2337349 - RNA, 19 nt, Artificial Sequence
  Description of Artificial Sequence: Synthetic oligonucleotide
cgggcaccucccgacucgg

SEQ ID NO: 2337350 - RNA, 19 nt, Artificial Sequence
  Description of Artificial Sequence: Synthetic oligonucleotide
ggugccgcgcaagggacuu

SEQ ID NO: 2337351 - RNA, 19 nt, Artificial Sequence
  Description of Artificial Sequence: Synthetic oligonucleotide
cgcugccauuaccacauua

SEQ ID NO: 2337352 - RNA, 19 nt, Artificial Sequence
  Description of Artificial Sequence: Synthetic oligonucleotide
gccgcggcggaggccgaug

SEQ ID NO: 2337353 - RNA, 19 nt, Artificial Sequence
  Description of Artificial Sequence: Synthetic oligonucleotide
gggucgcugcgggcccggg

SEQ ID NO: 2337354 - RNA, 19 nt, Artificial Sequence
  Description of Artificial Sequence: Synthetic oligonucleotide
ccgucuugagggcuaguuu

SEQ ID NO: 2337355 - RNA, 19 nt, Artificial Sequence
  Description of Artificial Sequence: Synthetic oligonucleotide
ccgcccuuccucuucggau

SEQ ID NO: 2337356 - RNA, 19 nt, Artificial Sequence
  Description of Artificial Sequence: Synthetic oligonucleotide
ccgaugggucgggucgcug

SEQ ID NO: 2337357 - RNA, 19 nt, Artificial Sequence
  Description of Artificial Sequence: Synthetic oligonucleotide
ccaugggaagcgccuuggu

SEQ ID NO: 2337358 - RNA, 19 nt, Artificial Sequence
  Description of Artificial Sequence: Synthetic oligonucleotide
ggccgggcaccucccgacu

SEQ ID NO: 2337359 - RNA, 19 nt, Artificial Sequence
  Description of Artificial Sequence: Synthetic oligonucleotide
caccgcacuggugggcuuu

SEQ ID NO: 2337360 - RNA, 19 nt, Artificial Sequence
  Description of Artificial Sequence: Synthetic oligonucleotide
ccucugcgcuugcccacga

SEQ ID NO: 2337361 - RNA, 19 nt, Artificial Sequence
  Description of Artificial Sequence: Synthetic oligonucleotide
cgucguuggcgaacaaguu

SEQ ID NO: 2337362 - RNA, 19 nt, Artificial Sequence
  Description of Artificial Sequence: Synthetic oligonucleotide
cgcccuuccucuucggauu

SEQ ID NO: 2337363 - RNA, 19 nt, Artificial Sequence
  Description of Artificial Sequence: Synthetic oligonucleotide
cccaugcgucaccuuuacu

SEQ ID NO: 2337364 - RNA, 19 nt, Artificial Sequence
  Description of Artificial Sequence: Synthetic oligonucleotide
cugggccgcccuuccucuu

SEQ ID NO: 2337365 - RNA, 19 nt, Artificial Sequence
  Description of Artificial Sequence: Synthetic oligonucleotide
gcccgccgggccgggcacc

SEQ ID NO: 2337366 - RNA, 19 nt, Artificial Sequence
  Description of Artificial Sequence: Synthetic oligonucleotide
cgggccgggcaccucccga

SEQ ID NO: 2337367 - RNA, 19 nt, Artificial Sequence
  Description of Artificial Sequence: Synthetic oligonucleotide
gccgaugggucgggucgcu

SEQ ID NO: 2337368 - RNA, 19 nt, Artificial Sequence
  Description of Artificial Sequence: Synthetic oligonucleotide
ccccgcucucgggugacgu

SEQ ID NO: 2337369 - RNA, 19 nt, Artificial Sequence
  Description of Artificial Sequence: Synthetic oligonucleotide
cacccgggaaggggucauu

SEQ ID NO: 2337370 - RNA, 19 nt, Artificial Sequence
  Description of Artificial Sequence: Synthetic oligonucleotide
cccgcucucgggugacguu

SEQ ID NO: 2337371 - RNA, 19 nt, Artificial Sequence
  Description of Artificial Sequence: Synthetic oligonucleotide
ccuccgucuucugcuucuu

SEQ ID NO: 2337372 - RNA, 19 nt, Artificial Sequence
  Description of Artificial Sequence: Synthetic oligonucleotide
ccgcgcgcuuggcgcggga

SEQ ID NO: 2337373 - RNA, 19 nt, Artificial Sequence
  Description of Artificial Sequence: Synthetic oligonucleotide
ccgccgggccgggcaccuc

SEQ ID NO: 2337374 - RNA, 19 nt, Artificial Sequence
  Description of Artificial Sequence: Synthetic oligonucleotide
cgucucccucgggcagcca

SEQ ID NO: 2337375 - RNA, 19 nt, Artificial Sequence
  Description of Artificial Sequence: Synthetic oligonucleotide
cggccaugggaagcgccuu

SEQ ID NO: 2337376 - RNA, 19 nt, Artificial Sequence
  Description of Artificial Sequence: Synthetic oligonucleotide
ccgcugccauuaccacauu

SEQ ID NO: 2337377 - RNA, 19 nt, Artificial Sequence
  Description of Artificial Sequence: Synthetic oligonucleotide
cgccgcggcggaggccgau

SEQ ID NO: 2337378 - RNA, 19 nt, Artificial Sequence
  Description of Artificial Sequence: Synthetic oligonucleotide
aguguauuuucuuagucgc

SEQ ID NO: 2337379 - RNA, 19 nt, Artificial Sequence
  Description of Artificial Sequence: Synthetic oligonucleotide
aguagguccauccuguccc

SEQ ID NO: 2337380 - RNA, 19 nt, Artificial Sequence
  Description of Artificial Sequence: Synthetic oligonucleotide
aauucggucaccaaguguc

SEQ ID NO: 2337381 - RNA, 19 nt, Artificial Sequence
  Description of Artificial Sequence: Synthetic oligonucleotide
uccgaaaguccucagaaag

SEQ ID NO: 2337382 - RNA, 19 nt, Artificial Sequence
  Description of Artificial Sequence: Synthetic oligonucleotide
uguauuuucuuagucgccg

SEQ ID NO: 2337383 - RNA, 19 nt, Artificial Sequence
  Description of Artificial Sequence: Synthetic oligonucleotide
caucaugccacccauaggc

SEQ ID NO: 2337384 - RNA, 19 nt, Artificial Sequence
  Description of Artificial Sequence: Synthetic oligonucleotide
gggagcauuauccagaggg

SEQ ID NO: 2337385 - RNA, 19 nt, Artificial Sequence
  Description of Artificial Sequence: Synthetic oligonucleotide
uuucacuuuguccacaggu

SEQ ID NO: 2337386 - RNA, 19 nt, Artificial Sequence
  Description of Artificial Sequence: Synthetic oligonucleotide
aggcauaaggccgacaucc

SEQ ID NO: 2337387 - RNA, 19 nt, Artificial Sequence
  Description of Artificial Sequence: Synthetic oligonucleotide
uuuugcuucuguuaggcga

SEQ ID NO: 2337388 - RNA, 19 nt, Artificial Sequence
  Description of Artificial Sequence: Synthetic oligonucleotide
uucuguuaggcgaacagug

SEQ ID NO: 2337389 - RNA, 19 nt, Artificial Sequence
  Description of Artificial Sequence: Synthetic oligonucleotide
uucacuuuauagcaucuca

SEQ ID NO: 2337390 - RNA, 19 nt, Artificial Sequence
  Description of Artificial Sequence: Synthetic oligonucleotide
caguguauuuucuuagucg

SEQ ID NO: 2337391 - RNA, 19 nt, Artificial Sequence
  Description of Artificial Sequence: Synthetic oligonucleotide
aacagugaaguguguccgc

SEQ ID NO: 2337392 - RNA, 19 nt, Artificial Sequence
  Description of Artificial Sequence: Synthetic oligonucleotide
acaguguauuuucuuaguc

SEQ ID NO: 2337393 - RNA, 19 nt, Artificial Sequence
  Description of Artificial Sequence: Synthetic oligonucleotide
agagugucacuccagaacu

SEQ ID NO: 2337394 - RNA, 19 nt, Artificial Sequence
  Description of Artificial Sequence: Synthetic oligonucleotide
ucucaaggcaaucucuuga

SEQ ID NO: 2337395 - RNA, 19 nt, Artificial Sequence
  Description of Artificial Sequence: Synthetic oligonucleotide
uuuagggaugucuucuccc

SEQ ID NO: 2337396 - RNA, 19 nt, Artificial Sequence
  Description of Artificial Sequence: Synthetic oligonucleotide
uguuaggcgaacagugaag

SEQ ID NO: 2337397 - RNA, 19 nt, Artificial Sequence
  Description of Artificial Sequence: Synthetic oligonucleotide
uccacuagcuucuuggccu

SEQ ID NO: 2337398 - RNA, 19 nt, Artificial Sequence
  Description of Artificial Sequence: Synthetic oligonucleotide
aacaguguauuuucuuagu

SEQ ID NO: 2337399 - RNA, 19 nt, Artificial Sequence
  Description of Artificial Sequence: Synthetic oligonucleotide
ucaacugccgcgcugcaca

SEQ ID NO: 2337400 - RNA, 19 nt, Artificial Sequence
  Description of Artificial Sequence: Synthetic oligonucleotide
uuuucuuagucgccgccag

SEQ ID NO: 2337401 - RNA, 19 nt, Artificial Sequence
  Description of Artificial Sequence: Synthetic oligonucleotide
gagagugucacuccagaac

SEQ ID NO: 2337402 - RNA, 19 nt, Artificial Sequence
  Description of Artificial Sequence: Synthetic oligonucleotide
uucuuagucgccgccaggg

SEQ ID NO: 2337403 - RNA, 19 nt, Artificial Sequence
  Description of Artificial Sequence: Synthetic oligonucleotide
aagagagugucacuccaga

SEQ ID NO: 2337404 - RNA, 19 nt, Artificial Sequence
  Description of Artificial Sequence: Synthetic oligonucleotide
auaggcauaaggccgacau

SEQ ID NO: 2337405 - RNA, 19 nt, Artificial Sequence
  Description of Artificial Sequence: Synthetic oligonucleotide
auuccuugggagcauuauc

SEQ ID NO: 2337406 - RNA, 19 nt, Artificial Sequence
  Description of Artificial Sequence: Synthetic oligonucleotide
agagcugcgccccgcagcc

SEQ ID NO: 2337407 - RNA, 19 nt, Artificial Sequence
  Description of Artificial Sequence: Synthetic oligonucleotide
ucacuuuauagcaucucaa

SEQ ID NO: 2337408 - RNA, 19 nt, Artificial Sequence
  Description of Artificial Sequence: Synthetic oligonucleotide
aaucucuugagagucugca

SEQ ID NO: 2337409 - RNA, 19 nt, Artificial Sequence
  Description of Artificial Sequence: Synthetic oligonucleotide
acugcaccaggcaucaugc

SEQ ID NO: 2337410 - RNA, 19 nt, Artificial Sequence
  Description of Artificial Sequence: Synthetic oligonucleotide
guuuaugcccuggacauag

SEQ ID NO: 2337411 - RNA, 19 nt, Artificial Sequence
  Description of Artificial Sequence: Synthetic oligonucleotide
accggcgagagcuucacuc

SEQ ID NO: 2337412 - RNA, 19 nt, Artificial Sequence
  Description of Artificial Sequence: Synthetic oligonucleotide
aggucugaaaucuccagga

SEQ ID NO: 2337413 - RNA, 19 nt, Artificial Sequence
  Description of Artificial Sequence: Synthetic oligonucleotide
acuacagugccacccacug

SEQ ID NO: 2337414 - RNA, 19 nt, Artificial Sequence
  Description of Artificial Sequence: Synthetic oligonucleotide
aguccucagaaagagagug

SEQ ID NO: 2337415 - RNA, 19 nt, Artificial Sequence
  Description of Artificial Sequence: Synthetic oligonucleotide
uguugcucccaacaagcca

SEQ ID NO: 2337416 - RNA, 19 nt, Artificial Sequence
  Description of Artificial Sequence: Synthetic oligonucleotide
cacccauaggcauaaggcc

SEQ ID NO: 2337417 - RNA, 19 nt, Artificial Sequence
  Description of Artificial Sequence: Synthetic oligonucleotide
ucuguuaggcgaacaguga

SEQ ID NO: 2337418 - RNA, 19 nt, Artificial Sequence
  Description of Artificial Sequence: Synthetic oligonucleotide
ugaggucugaaaucuccag

SEQ ID NO: 2337419 - RNA, 19 nt, Artificial Sequence
  Description of Artificial Sequence: Synthetic oligonucleotide
agcauagcuccgcaggcgg

SEQ ID NO: 2337420 - RNA, 19 nt, Artificial Sequence
  Description of Artificial Sequence: Synthetic oligonucleotide
uaggcgaacagugaagugu

SEQ ID NO: 2337421 - RNA, 19 nt, Artificial Sequence
  Description of Artificial Sequence: Synthetic oligonucleotide
ugcaccaggcaucaugcca

SEQ ID NO: 2337422 - RNA, 19 nt, Artificial Sequence
  Description of Artificial Sequence: Synthetic oligonucleotide
acugccgcgcugcacagac

SEQ ID NO: 2337423 - RNA, 19 nt, Artificial Sequence
  Description of Artificial Sequence: Synthetic oligonucleotide
agguuuaugcccuggacau

SEQ ID NO: 2337424 - RNA, 19 nt, Artificial Sequence
  Description of Artificial Sequence: Synthetic oligonucleotide
uguucacuuuauagcaucu

SEQ ID NO: 2337425 - RNA, 19 nt, Artificial Sequence
  Description of Artificial Sequence: Synthetic oligonucleotide
gaaagagagugucacucca

SEQ ID NO: 2337426 - RNA, 19 nt, Artificial Sequence
  Description of Artificial Sequence: Synthetic oligonucleotide
agugucacuccagaacuac

SEQ ID NO: 2337427 - RNA, 19 nt, Artificial Sequence
  Description of Artificial Sequence: Synthetic oligonucleotide
aguccgaaaguccucagaa

SEQ ID NO: 2337428 - RNA, 19 nt, Artificial Sequence
  Description of Artificial Sequence: Synthetic oligonucleotide
ugcuuugaucuuuuccgcc

SEQ ID NO: 2337429 - RNA, 19 nt, Artificial Sequence
  Description of Artificial Sequence: Synthetic oligonucleotide
ucggcuuuggcgacguuug

SEQ ID NO: 2337430 - RNA, 19 nt, Artificial Sequence
  Description of Artificial Sequence: Synthetic oligonucleotide
uugggagcauuauccagag

SEQ ID NO: 2337431 - RNA, 19 nt, Artificial Sequence
  Description of Artificial Sequence: Synthetic oligonucleotide
ugaucaguuucacuuuguc

SEQ ID NO: 2337432 - RNA, 19 nt, Artificial Sequence
  Description of Artificial Sequence: Synthetic oligonucleotide
gacugcaccaggcaucaug

SEQ ID NO: 2337433 - RNA, 19 nt, Artificial Sequence
  Description of Artificial Sequence: Synthetic oligonucleotide
acccauaggcauaaggccg

SEQ ID NO: 2337434 - RNA, 19 nt, Artificial Sequence
  Description of Artificial Sequence: Synthetic oligonucleotide
ucccaggagaauucgguca

SEQ ID NO: 2337435 - RNA, 19 nt, Artificial Sequence
  Description of Artificial Sequence: Synthetic oligonucleotide
uuucuuagucgccgccagg

SEQ ID NO: 2337436 - RNA, 19 nt, Artificial Sequence
  Description of Artificial Sequence: Synthetic oligonucleotide
ggcguguucacuuuauagc

SEQ ID NO: 2337437 - RNA, 19 nt, Artificial Sequence
  Description of Artificial Sequence: Synthetic oligonucleotide
ucguugaggucugaaaucu

SEQ ID NO: 2337438 - RNA, 19 nt, Artificial Sequence
  Description of Artificial Sequence: Synthetic oligonucleotide
uauccagaggggcaccggc

SEQ ID NO: 2337439 - RNA, 19 nt, Artificial Sequence
  Description of Artificial Sequence: Synthetic oligonucleotide
uuuggcgacguuugcuuug

SEQ ID NO: 2337440 - RNA, 19 nt, Artificial Sequence
  Description of Artificial Sequence: Synthetic oligonucleotide
cuggcaaugucuuggacca

SEQ ID NO: 2337441 - RNA, 19 nt, Artificial Sequence
  Description of Artificial Sequence: Synthetic oligonucleotide
guuuagggaugucuucucc

SEQ ID NO: 2337442 - RNA, 19 nt, Artificial Sequence
  Description of Artificial Sequence: Synthetic oligonucleotide
cuugggagcauuauccaga

SEQ ID NO: 2337443 - RNA, 19 nt, Artificial Sequence
  Description of Artificial Sequence: Synthetic oligonucleotide
agugaagcaggggugagca

SEQ ID NO: 2337444 - RNA, 19 nt, Artificial Sequence
  Description of Artificial Sequence: Synthetic oligonucleotide
ugaucuuuuccgccucggc

SEQ ID NO: 2337445 - RNA, 19 nt, Artificial Sequence
  Description of Artificial Sequence: Synthetic oligonucleotide
guugcucccaacaagccac

SEQ ID NO: 2337446 - RNA, 19 nt, Artificial Sequence
  Description of Artificial Sequence: Synthetic oligonucleotide
uugagagucugcacaggcu

SEQ ID NO: 2337447 - RNA, 19 nt, Artificial Sequence
  Description of Artificial Sequence: Synthetic oligonucleotide
acaccggggaccuguugcc

SEQ ID NO: 2337448 - RNA, 19 nt, Artificial Sequence
  Description of Artificial Sequence: Synthetic oligonucleotide
agaauucggucaccaagug

SEQ ID NO: 2337449 - RNA, 19 nt, Artificial Sequence
  Description of Artificial Sequence: Synthetic oligonucleotide
guauuuucuuagucgccgc

SEQ ID NO: 2337450 - RNA, 19 nt, Artificial Sequence
  Description of Artificial Sequence: Synthetic oligonucleotide
gagcauuauccagaggggc

SEQ ID NO: 2337451 - RNA, 19 nt, Artificial Sequence
  Description of Artificial Sequence: Synthetic oligonucleotide
agguuuugcuucuguuagg

SEQ ID NO: 2337452 - RNA, 19 nt, Artificial Sequence
  Description of Artificial Sequence: Synthetic oligonucleotide
agggaccccaguccgaaag

SEQ ID NO: 2337453 - RNA, 19 nt, Artificial Sequence
  Description of Artificial Sequence: Synthetic oligonucleotide
aucacaguagguccauccu

SEQ ID NO: 2337454 - RNA, 19 nt, Artificial Sequence
  Description of Artificial Sequence: Synthetic oligonucleotide
uugaucaguuucacuuugu

SEQ ID NO: 2337455 - RNA, 19 nt, Artificial Sequence
  Description of Artificial Sequence: Synthetic oligonucleotide
uuaggcgaacagugaagug

SEQ ID NO: 2337456 - RNA, 19 nt, Artificial Sequence
  Description of Artificial Sequence: Synthetic oligonucleotide
ggcagcauagcuccgcagg

SEQ ID NO: 2337457 - RNA, 19 nt, Artificial Sequence
  Description of Artificial Sequence: Synthetic oligonucleotide
ccacccauaggcauaaggc

SEQ ID NO: 2337458 - RNA, 19 nt, Artificial Sequence
  Description of Artificial Sequence: Synthetic oligonucleotide
gccugcacaagguuuaugc

SEQ ID NO: 2337459 - RNA, 19 nt, Artificial Sequence
  Description of Artificial Sequence: Synthetic oligonucleotide
auuauccagaggggcaccg

SEQ ID NO: 2337460 - RNA, 19 nt, Artificial Sequence
  Description of Artificial Sequence: Synthetic oligonucleotide
caagguuuaugcccuggac

SEQ ID NO: 2337461 - RNA, 19 nt, Artificial Sequence
  Description of Artificial Sequence: Synthetic oligonucleotide
uugaucuuuuccgccucgg

SEQ ID NO: 2337462 - RNA, 19 nt, Artificial Sequence
  Description of Artificial Sequence: Synthetic oligonucleotide
acaagguuuaugcccugga

SEQ ID NO: 2337463 - RNA, 19 nt, Artificial Sequence
  Description of Artificial Sequence: Synthetic oligonucleotide
auagcaucucaaggcaauc

SEQ ID NO: 2337464 - RNA, 19 nt, Artificial Sequence
  Description of Artificial Sequence: Synthetic oligonucleotide
uuaugcccuggacauaguu

SEQ ID NO: 2337465 - RNA, 19 nt, Artificial Sequence
  Description of Artificial Sequence: Synthetic oligonucleotide
aggccgacauccuggaucu

SEQ ID NO: 2337466 - RNA, 19 nt, Artificial Sequence
  Description of Artificial Sequence: Synthetic oligonucleotide
ggggauauuccuugggagc

SEQ ID NO: 2337467 - RNA, 19 nt, Artificial Sequence
  Description of Artificial Sequence: Synthetic oligonucleotide
aacaagccaccugggagug

SEQ ID NO: 2337468 - RNA, 19 nt, Artificial Sequence
  Description of Artificial Sequence: Synthetic oligonucleotide
cuccacuagcuucuuggcc

SEQ ID NO: 2337469 - RNA, 19 nt, Artificial Sequence
  Description of Artificial Sequence: Synthetic oligonucleotide
uuggccugcacaagguuua

SEQ ID NO: 2337470 - RNA, 19 nt, Artificial Sequence
  Description of Artificial Sequence: Synthetic oligonucleotide
auuuucuuagucgccgcca

SEQ ID NO: 2337471 - RNA, 19 nt, Artificial Sequence
  Description of Artificial Sequence: Synthetic oligonucleotide
auaaggccgacauccugga

SEQ ID NO: 2337472 - RNA, 19 nt, Artificial Sequence
  Description of Artificial Sequence: Synthetic oligonucleotide
gucugcacaggcuguaaac

SEQ ID NO: 2337473 - RNA, 19 nt, Artificial Sequence
  Description of Artificial Sequence: Synthetic oligonucleotide
gggcguguucacuuuauag

SEQ ID NO: 2337474 - RNA, 19 nt, Artificial Sequence
  Description of Artificial Sequence: Synthetic oligonucleotide
ucccaacaagccaccuggg

SEQ ID NO: 2337475 - RNA, 19 nt, Artificial Sequence
  Description of Artificial Sequence: Synthetic oligonucleotide
ccaacaagccaccugggag

SEQ ID NO: 2337476 - RNA, 19 nt, Artificial Sequence
  Description of Artificial Sequence: Synthetic oligonucleotide
ugcucaacugccgcgcugc

SEQ ID NO: 2337477 - RNA, 19 nt, Artificial Sequence
  Description of Artificial Sequence: Synthetic oligonucleotide
cuguugcucccaacaagcc

SEQ ID NO: 2337478 - RNA, 19 nt, Artificial Sequence
  Description of Artificial Sequence: Synthetic oligonucleotide
uccagaggggcaccggcga

SEQ ID NO: 2337479 - RNA, 19 nt, Artificial Sequence
  Description of Artificial Sequence: Synthetic oligonucleotide
caguagguccauccugucc

SEQ ID NO: 2337480 - RNA, 19 nt, Artificial Sequence
  Description of Artificial Sequence: Synthetic oligonucleotide
uuauccagaggggcaccgg

SEQ ID NO: 2337481 - RNA, 19 nt, Artificial Sequence
  Description of Artificial Sequence: Synthetic oligonucleotide
gugagcaggccuuugccca

SEQ ID NO: 2337482 - RNA, 19 nt, Artificial Sequence
  Description of Artificial Sequence: Synthetic oligonucleotide
gaggcggagagcugcgccc

SEQ ID NO: 2337483 - RNA, 19 nt, Artificial Sequence
  Description of Artificial Sequence: Synthetic oligonucleotide
cuuugaucuuuuccgccuc

SEQ ID NO: 2337484 - RNA, 19 nt, Artificial Sequence
  Description of Artificial Sequence: Synthetic oligonucleotide
agagagugucacuccagaa

SEQ ID NO: 2337485 - RNA, 19 nt, Artificial Sequence
  Description of Artificial Sequence: Synthetic oligonucleotide
uguccgcucuuucuguuua

SEQ ID NO: 2337486 - RNA, 19 nt, Artificial Sequence
  Description of Artificial Sequence: Synthetic oligonucleotide
gcguguucacuuuauagca

SEQ ID NO: 2337487 - RNA, 19 nt, Artificial Sequence
  Description of Artificial Sequence: Synthetic oligonucleotide
uuccaaggcugcuuugauc

SEQ ID NO: 2337488 - RNA, 19 nt, Artificial Sequence
  Description of Artificial Sequence: Synthetic oligonucleotide
guucguugaggucugaaau

SEQ ID NO: 2337489 - RNA, 19 nt, Artificial Sequence
  Description of Artificial Sequence: Synthetic oligonucleotide
ggagcauuauccagagggg

SEQ ID NO: 2337490 - RNA, 19 nt, Artificial Sequence
  Description of Artificial Sequence: Synthetic oligonucleotide
aggccuuugcccagguccc

SEQ ID NO: 2337491 - RNA, 19 nt, Artificial Sequence
  Description of Artificial Sequence: Synthetic oligonucleotide
ugggagcauuauccagagg

SEQ ID NO: 2337492 - RNA, 19 nt, Artificial Sequence
  Description of Artificial Sequence: Synthetic oligonucleotide
aacuacagugccacccacu

SEQ ID NO: 2337493 - RNA, 19 nt, Artificial Sequence
  Description of Artificial Sequence: Synthetic oligonucleotide
uauuccuugggagcauuau

SEQ ID NO: 2337494 - RNA, 19 nt, Artificial Sequence
  Description of Artificial Sequence: Synthetic oligonucleotide
uccugucccucucccagga

SEQ ID NO: 2337495 - RNA, 19 nt, Artificial Sequence
  Description of Artificial Sequence: Synthetic oligonucleotide
uucggucaccaagugucag

SEQ ID NO: 2337496 - RNA, 19 nt, Artificial Sequence
  Description of Artificial Sequence: Synthetic oligonucleotide
ggugagcaggccuuugccc

SEQ ID NO: 2337497 - RNA, 19 nt, Artificial Sequence
  Description of Artificial Sequence: Synthetic oligonucleotide
aggcgaacagugaagugug

SEQ ID NO: 2337498 - RNA, 19 nt, Artificial Sequence
  Description of Artificial Sequence: Synthetic oligonucleotide
agcaggggugagcaggccu

SEQ ID NO: 2337499 - RNA, 19 nt, Artificial Sequence
  Description of Artificial Sequence: Synthetic oligonucleotide
cacaagguuuaugcccugg

SEQ ID NO: 2337500 - RNA, 19 nt, Artificial Sequence
  Description of Artificial Sequence: Synthetic oligonucleotide
aagcaggggugagcaggcc

SEQ ID NO: 2337501 - RNA, 19 nt, Artificial Sequence
  Description of Artificial Sequence: Synthetic oligonucleotide
gaauucggucaccaagugu

SEQ ID NO: 2337502 - RNA, 19 nt, Artificial Sequence
  Description of Artificial Sequence: Synthetic oligonucleotide
uuuaugcccuggacauagu

SEQ ID NO: 2337503 - RNA, 19 nt, Artificial Sequence
  Description of Artificial Sequence: Synthetic oligonucleotide
caagugucagcagcuguug

SEQ ID NO: 2337504 - RNA, 19 nt, Artificial Sequence
  Description of Artificial Sequence: Synthetic oligonucleotide
cugcugcucaacugccgcg

SEQ ID NO: 2337505 - RNA, 19 nt, Artificial Sequence
  Description of Artificial Sequence: Synthetic oligonucleotide
agcuccgcaggcgggaagg

SEQ ID NO: 2337506 - RNA, 19 nt, Artificial Sequence
  Description of Artificial Sequence: Synthetic oligonucleotide
gaccccaguccgaaagucc

SEQ ID NO: 2337507 - RNA, 19 nt, Artificial Sequence
  Description of Artificial Sequence: Synthetic oligonucleotide
gccucaacaguguauuuuc

SEQ ID NO: 2337508 - RNA, 19 nt, Artificial Sequence
  Description of Artificial Sequence: Synthetic oligonucleotide
uguugccuggcgaggcgga

SEQ ID NO: 2337509 - RNA, 19 nt, Artificial Sequence
  Description of Artificial Sequence: Synthetic oligonucleotide
cuguuaggcgaacagugaa

SEQ ID NO: 2337510 - RNA, 19 nt, Artificial Sequence
  Description of Artificial Sequence: Synthetic oligonucleotide
ucuuuuccgccucggcuuu

SEQ ID NO: 2337511 - RNA, 19 nt, Artificial Sequence
  Description of Artificial Sequence: Synthetic oligonucleotide
gcuuugauuuccuggggca

SEQ ID NO: 2337512 - RNA, 19 nt, Artificial Sequence
  Description of Artificial Sequence: Synthetic oligonucleotide
gagugaagcaggggugagc

SEQ ID NO: 2337513 - RNA, 19 nt, Artificial Sequence
  Description of Artificial Sequence: Synthetic oligonucleotide
guuaggcgaacagugaagu

SEQ ID NO: 2337514 - RNA, 19 nt, Artificial Sequence
  Description of Artificial Sequence: Synthetic oligonucleotide
agucugcacaggcuguaaa

SEQ ID NO: 2337515 - RNA, 19 nt, Artificial Sequence
  Description of Artificial Sequence: Synthetic oligonucleotide
cagcauagcuccgcaggcg

SEQ ID NO: 2337516 - RNA, 19 nt, Artificial Sequence
  Description of Artificial Sequence: Synthetic oligonucleotide
uuggcgacguuugcuuuga

SEQ ID NO: 2337517 - RNA, 19 nt, Artificial Sequence
  Description of Artificial Sequence: Synthetic oligonucleotide
gcuguaaacugccccuccc

SEQ ID NO: 2337518 - RNA, 19 nt, Artificial Sequence
  Description of Artificial Sequence: Synthetic oligonucleotide
cauuauccagaggggcacc

SEQ ID NO: 2337519 - RNA, 19 nt, Artificial Sequence
  Description of Artificial Sequence: Synthetic oligonucleotide
cugggagugaagcaggggu

SEQ ID NO: 2337520 - RNA, 19 nt, Artificial Sequence
  Description of Artificial Sequence: Synthetic oligonucleotide
guucacuuuauagcaucuc

SEQ ID NO: 2337521 - RNA, 19 nt, Artificial Sequence
  Description of Artificial Sequence: Synthetic oligonucleotide
gagcgugaggcuggcaaug

SEQ ID NO: 2337522 - RNA, 19 nt, Artificial Sequence
  Description of Artificial Sequence: Synthetic oligonucleotide
ggcaaugucuuggaccagc

SEQ ID NO: 2337523 - RNA, 19 nt, Artificial Sequence
  Description of Artificial Sequence: Synthetic oligonucleotide
gcagcauagcuccgcaggc

SEQ ID NO: 2337524 - RNA, 19 nt, Artificial Sequence
  Description of Artificial Sequence: Synthetic oligonucleotide
ugcccaggucccagggacc

SEQ ID NO: 2337525 - RNA, 19 nt, Artificial Sequence
  Description of Artificial Sequence: Synthetic oligonucleotide
agccucaacaguguauuuu

SEQ ID NO: 2337526 - RNA, 19 nt, Artificial Sequence
  Description of Artificial Sequence: Synthetic oligonucleotide
cuguugccuggcgaggcgg

SEQ ID NO: 2337527 - RNA, 19 nt, Artificial Sequence
  Description of Artificial Sequence: Synthetic oligonucleotide
gcauaaggccgacauccug

SEQ ID NO: 2337528 - RNA, 19 nt, Artificial Sequence
  Description of Artificial Sequence: Synthetic oligonucleotide
gugucagcagcuguugcuc

SEQ ID NO: 2337529 - RNA, 19 nt, Artificial Sequence
  Description of Artificial Sequence: Synthetic oligonucleotide
gcgacguuugcuuugauuu

SEQ ID NO: 2337530 - RNA, 19 nt, Artificial Sequence
  Description of Artificial Sequence: Synthetic oligonucleotide
gcaaucucuugagagucug

SEQ ID NO: 2337531 - RNA, 19 nt, Artificial Sequence
  Description of Artificial Sequence: Synthetic oligonucleotide
accccaguccgaaaguccu

SEQ ID NO: 2337532 - RNA, 19 nt, Artificial Sequence
  Description of Artificial Sequence: Synthetic oligonucleotide
ccgcucuuucuguuuaggg

SEQ ID NO: 2337533 - RNA, 19 nt, Artificial Sequence
  Description of Artificial Sequence: Synthetic oligonucleotide
agcugcgccccgcagccca

SEQ ID NO: 2337534 - RNA, 19 nt, Artificial Sequence
  Description of Artificial Sequence: Synthetic oligonucleotide
cugcaccaggcaucaugcc

SEQ ID NO: 2337535 - RNA, 19 nt, Artificial Sequence
  Description of Artificial Sequence: Synthetic oligonucleotide
gcauuauccagaggggcac

SEQ ID NO: 2337536 - RNA, 19 nt, Artificial Sequence
  Description of Artificial Sequence: Synthetic oligonucleotide
caugccacccauaggcaua

SEQ ID NO: 2337537 - RNA, 19 nt, Artificial Sequence
  Description of Artificial Sequence: Synthetic oligonucleotide
guccgaaaguccucagaaa

SEQ ID NO: 2337538 - RNA, 19 nt, Artificial Sequence
  Description of Artificial Sequence: Synthetic oligonucleotide
guccgcucuuucuguuuag

SEQ ID NO: 2337539 - RNA, 19 nt, Artificial Sequence
  Description of Artificial Sequence: Synthetic oligonucleotide
ggacauaguucuugaucuc

SEQ ID NO: 2337540 - RNA, 19 nt, Artificial Sequence
  Description of Artificial Sequence: Synthetic oligonucleotide
cuguuuagggaugucuucu

SEQ ID NO: 2337541 - RNA, 19 nt, Artificial Sequence
  Description of Artificial Sequence: Synthetic oligonucleotide
agacaccggggaccuguug

SEQ ID NO: 2337542 - RNA, 19 nt, Artificial Sequence
  Description of Artificial Sequence: Synthetic oligonucleotide
caacugccgcgcugcacag

SEQ ID NO: 2337543 - RNA, 19 nt, Artificial Sequence
  Description of Artificial Sequence: Synthetic oligonucleotide
aggaguucguugaggucug

SEQ ID NO: 2337544 - RNA, 19 nt, Artificial Sequence
  Description of Artificial Sequence: Synthetic oligonucleotide
auucggucaccaaguguca

SEQ ID NO: 2337545 - RNA, 19 nt, Artificial Sequence
  Description of Artificial Sequence: Synthetic oligonucleotide
uaaggccgacauccuggau

SEQ ID NO: 2337546 - RNA, 19 nt, Artificial Sequence
  Description of Artificial Sequence: Synthetic oligonucleotide
agcccaagccgcggcgccc

SEQ ID NO: 2337547 - RNA, 19 nt, Artificial Sequence
  Description of Artificial Sequence: Synthetic oligonucleotide
gcuuugaucuuuuccgccu

SEQ ID NO: 2337548 - RNA, 19 nt, Artificial Sequence
  Description of Artificial Sequence: Synthetic oligonucleotide
ggucccagggaccccaguc

SEQ ID NO: 2337549 - RNA, 19 nt, Artificial Sequence
  Description of Artificial Sequence: Synthetic oligonucleotide
caguccgaaaguccucaga

SEQ ID NO: 2337550 - RNA, 19 nt, Artificial Sequence
  Description of Artificial Sequence: Synthetic oligonucleotide
gcucccaacaagccaccug

SEQ ID NO: 2337551 - RNA, 19 nt, Artificial Sequence
  Description of Artificial Sequence: Synthetic oligonucleotide
ugccggcagcauagcuccg

SEQ ID NO: 2337552 - RNA, 19 nt, Artificial Sequence
  Description of Artificial Sequence: Synthetic oligonucleotide
ccggcgagagcuucacucc

SEQ ID NO: 2337553 - RNA, 19 nt, Artificial Sequence
  Description of Artificial Sequence: Synthetic oligonucleotide
caagccaccugggagugaa

SEQ ID NO: 2337554 - RNA, 19 nt, Artificial Sequence
  Description of Artificial Sequence: Synthetic oligonucleotide
agcgugaggcuggcaaugu

SEQ ID NO: 2337555 - RNA, 19 nt, Artificial Sequence
  Description of Artificial Sequence: Synthetic oligonucleotide
cugcucaacugccgcgcug

SEQ ID NO: 2337556 - RNA, 19 nt, Artificial Sequence
  Description of Artificial Sequence: Synthetic oligonucleotide
cuucuguuaggcgaacagu

SEQ ID NO: 2337557 - RNA, 19 nt, Artificial Sequence
  Description of Artificial Sequence: Synthetic oligonucleotide
uggcaaugucuuggaccag

SEQ ID NO: 2337558 - RNA, 19 nt, Artificial Sequence
  Description of Artificial Sequence: Synthetic oligonucleotide
gaguucguugaggucugaa

SEQ ID NO: 2337559 - RNA, 19 nt, Artificial Sequence
  Description of Artificial Sequence: Synthetic oligonucleotide
cucaacugccgcgcugcac

SEQ ID NO: 2337560 - RNA, 19 nt, Artificial Sequence
  Description of Artificial Sequence: Synthetic oligonucleotide
cauagcuccgcaggcggga

SEQ ID NO: 2337561 - RNA, 19 nt, Artificial Sequence
  Description of Artificial Sequence: Synthetic oligonucleotide
gccgcugccggcagcauag

SEQ ID NO: 2337562 - RNA, 19 nt, Artificial Sequence
  Description of Artificial Sequence: Synthetic oligonucleotide
ggagugaagcaggggugag

SEQ ID NO: 2337563 - RNA, 19 nt, Artificial Sequence
  Description of Artificial Sequence: Synthetic oligonucleotide
auauuccuugggagcauua

SEQ ID NO: 2337564 - RNA, 19 nt, Artificial Sequence
  Description of Artificial Sequence: Synthetic oligonucleotide
gcgaacagugaaguguguc

SEQ ID NO: 2337565 - RNA, 19 nt, Artificial Sequence
  Description of Artificial Sequence: Synthetic oligonucleotide
ugcucccaacaagccaccu

SEQ ID NO: 2337566 - RNA, 19 nt, Artificial Sequence
  Description of Artificial Sequence: Synthetic oligonucleotide
gggaccuguugccuggcga

SEQ ID NO: 2337567 - RNA, 19 nt, Artificial Sequence
  Description of Artificial Sequence: Synthetic oligonucleotide
gccacccacugcuuccaag

SEQ ID NO: 2337568 - RNA, 19 nt, Artificial Sequence
  Description of Artificial Sequence: Synthetic oligonucleotide
ccuguugccuggcgaggcg

SEQ ID NO: 2337569 - RNA, 19 nt, Artificial Sequence
  Description of Artificial Sequence: Synthetic oligonucleotide
gggagugaagcagggguga

SEQ ID NO: 2337570 - RNA, 19 nt, Artificial Sequence
  Description of Artificial Sequence: Synthetic oligonucleotide
aacugccgcgcugcacaga

SEQ ID NO: 2337571 - RNA, 19 nt, Artificial Sequence
  Description of Artificial Sequence: Synthetic oligonucleotide
cuggcgaggcggagagcug

SEQ ID NO: 2337572 - RNA, 19 nt, Artificial Sequence
  Description of Artificial Sequence: Synthetic oligonucleotide
gagugucacuccagaacua

SEQ ID NO: 2337573 - RNA, 19 nt, Artificial Sequence
  Description of Artificial Sequence: Synthetic oligonucleotide
ggagagcugcgccccgcag

SEQ ID NO: 2337574 - RNA, 19 nt, Artificial Sequence
  Description of Artificial Sequence: Synthetic oligonucleotide
cccauaggcauaaggccga

SEQ ID NO: 2337575 - RNA, 19 nt, Artificial Sequence
  Description of Artificial Sequence: Synthetic oligonucleotide
gcccuggacauaguucuug

SEQ ID NO: 2337576 - RNA, 19 nt, Artificial Sequence
  Description of Artificial Sequence: Synthetic oligonucleotide
gcgagagcuucacuccuuc

SEQ ID NO: 2337577 - RNA, 19 nt, Artificial Sequence
  Description of Artificial Sequence: Synthetic oligonucleotide
gggacugcaccaggcauca

SEQ ID NO: 2337578 - RNA, 19 nt, Artificial Sequence
  Description of Artificial Sequence: Synthetic oligonucleotide
guguguccgcucuuucugu

SEQ ID NO: 2337579 - RNA, 19 nt, Artificial Sequence
  Description of Artificial Sequence: Synthetic oligonucleotide
gcauagcuccgcaggcggg

SEQ ID NO: 2337580 - RNA, 19 nt, Artificial Sequence
  Description of Artificial Sequence: Synthetic oligonucleotide
gagucugcacaggcuguaa

SEQ ID NO: 2337581 - RNA, 19 nt, Artificial Sequence
  Description of Artificial Sequence: Synthetic oligonucleotide
ggggaccuguugccuggcg

SEQ ID NO: 2337582 - RNA, 19 nt, Artificial Sequence
  Description of Artificial Sequence: Synthetic oligonucleotide
ugccacccacugcuuccaa

SEQ ID NO: 2337583 - RNA, 19 nt, Artificial Sequence
  Description of Artificial Sequence: Synthetic oligonucleotide
cauaggcauaaggccgaca

SEQ ID NO: 2337584 - RNA, 19 nt, Artificial Sequence
  Description of Artificial Sequence: Synthetic oligonucleotide
gccgacauccuggaucuuc

SEQ ID NO: 2337585 - RNA, 19 nt, Artificial Sequence
  Description of Artificial Sequence: Synthetic oligonucleotide
ccggggaccuguugccugg

SEQ ID NO: 2337586 - RNA, 19 nt, Artificial Sequence
  Description of Artificial Sequence: Synthetic oligonucleotide
auagcuccgcaggcgggaa

SEQ ID NO: 2337587 - RNA, 19 nt, Artificial Sequence
  Description of Artificial Sequence: Synthetic oligonucleotide
ccgacauccuggaucuuca

SEQ ID NO: 2337588 - RNA, 19 nt, Artificial Sequence
  Description of Artificial Sequence: Synthetic oligonucleotide
ccugggagugaagcagggg

SEQ ID NO: 2337589 - RNA, 19 nt, Artificial Sequence
  Description of Artificial Sequence: Synthetic oligonucleotide
uagguccauccugucccuc

SEQ ID NO: 2337590 - RNA, 19 nt, Artificial Sequence
  Description of Artificial Sequence: Synthetic oligonucleotide
cuuuuccgccucggcuuug

SEQ ID NO: 2337591 - RNA, 19 nt, Artificial Sequence
  Description of Artificial Sequence: Synthetic oligonucleotide
gcacaagguuuaugcccug

SEQ ID NO: 2337592 - RNA, 19 nt, Artificial Sequence
  Description of Artificial Sequence: Synthetic oligonucleotide
aggggcguguucacuuuau

SEQ ID NO: 2337593 - RNA, 19 nt, Artificial Sequence
  Description of Artificial Sequence: Synthetic oligonucleotide
uggccugcacaagguuuau

SEQ ID NO: 2337594 - RNA, 19 nt, Artificial Sequence
  Description of Artificial Sequence: Synthetic oligonucleotide
cuuuggcgacguuugcuuu

SEQ ID NO: 2337595 - RNA, 19 nt, Artificial Sequence
  Description of Artificial Sequence: Synthetic oligonucleotide
ggcgaggcggagagcugcg

SEQ ID NO: 2337596 - RNA, 19 nt, Artificial Sequence
  Description of Artificial Sequence: Synthetic oligonucleotide
aggcggcucgccgccgccg

SEQ ID NO: 2337597 - RNA, 19 nt, Artificial Sequence
  Description of Artificial Sequence: Synthetic oligonucleotide
cgaggcggagagcugcgcc

SEQ ID NO: 2337598 - RNA, 19 nt, Artificial Sequence
  Description of Artificial Sequence: Synthetic oligonucleotide
acaagccaccugggaguga

SEQ ID NO: 2337599 - RNA, 19 nt, Artificial Sequence
  Description of Artificial Sequence: Synthetic oligonucleotide
cccaacaagccaccuggga

SEQ ID NO: 2337600 - RNA, 19 nt, Artificial Sequence
  Description of Artificial Sequence: Synthetic oligonucleotide
uggcgacguuugcuuugau

SEQ ID NO: 2337601 - RNA, 19 nt, Artificial Sequence
  Description of Artificial Sequence: Synthetic oligonucleotide
ggcggagagcugcgccccg

SEQ ID NO: 2337602 - RNA, 19 nt, Artificial Sequence
  Description of Artificial Sequence: Synthetic oligonucleotide
uagucgccgccaggggcgu

SEQ ID NO: 2337603 - RNA, 19 nt, Artificial Sequence
  Description of Artificial Sequence: Synthetic oligonucleotide
caggcggcucgccgccgcc

SEQ ID NO: 2337604 - RNA, 19 nt, Artificial Sequence
  Description of Artificial Sequence: Synthetic oligonucleotide
gugccacccacugcuucca

SEQ ID NO: 2337605 - RNA, 19 nt, Artificial Sequence
  Description of Artificial Sequence: Synthetic oligonucleotide
gccggcagcauagcuccgc

SEQ ID NO: 2337606 - RNA, 19 nt, Artificial Sequence
  Description of Artificial Sequence: Synthetic oligonucleotide
ccacaggcggcucgccgcc

SEQ ID NO: 2337607 - RNA, 19 nt, Artificial Sequence
  Description of Artificial Sequence: Synthetic oligonucleotide
ccccaucacaguaggucca

SEQ ID NO: 2337608 - RNA, 19 nt, Artificial Sequence
  Description of Artificial Sequence: Synthetic oligonucleotide
cugaaaucuccaggagcgu

SEQ ID NO: 2337609 - RNA, 19 nt, Artificial Sequence
  Description of Artificial Sequence: Synthetic oligonucleotide
cucggcuuuggcgacguuu

SEQ ID NO: 2337610 - RNA, 19 nt, Artificial Sequence
  Description of Artificial Sequence: Synthetic oligonucleotide
gcgugaggcuggcaauguc

SEQ ID NO: 2337611 - RNA, 19 nt, Artificial Sequence
  Description of Artificial Sequence: Synthetic oligonucleotide
ggcgacguuugcuuugauu

SEQ ID NO: 2337612 - RNA, 19 nt, Artificial Sequence
  Description of Artificial Sequence: Synthetic oligonucleotide
cccaguccgaaaguccuca

SEQ ID NO: 2337613 - RNA, 19 nt, Artificial Sequence
  Description of Artificial Sequence: Synthetic oligonucleotide
ccaagugucagcagcuguu

SEQ ID NO: 2337614 - RNA, 19 nt, Artificial Sequence
  Description of Artificial Sequence: Synthetic oligonucleotide
caggggcguguucacuuua

SEQ ID NO: 2337615 - RNA, 19 nt, Artificial Sequence
  Description of Artificial Sequence: Synthetic oligonucleotide
ggagcgugaggcuggcaau

SEQ ID NO: 2337616 - RNA, 19 nt, Artificial Sequence
  Description of Artificial Sequence: Synthetic oligonucleotide
guguccgcucuuucuguuu

SEQ ID NO: 2337617 - RNA, 19 nt, Artificial Sequence
  Description of Artificial Sequence: Synthetic oligonucleotide
gguuuaugcccuggacaua

SEQ ID NO: 2337618 - RNA, 19 nt, Artificial Sequence
  Description of Artificial Sequence: Synthetic oligonucleotide
ccucaacaguguauuuucu

SEQ ID NO: 2337619 - RNA, 19 nt, Artificial Sequence
  Description of Artificial Sequence: Synthetic oligonucleotide
gagcugcgccccgcagccc

SEQ ID NO: 2337620 - RNA, 19 nt, Artificial Sequence
  Description of Artificial Sequence: Synthetic oligonucleotide
ggggcguguucacuuuaua

SEQ ID NO: 2337621 - RNA, 19 nt, Artificial Sequence
  Description of Artificial Sequence: Synthetic oligonucleotide
ccuggcgaggcggagagcu

SEQ ID NO: 2337622 - RNA, 19 nt, Artificial Sequence
  Description of Artificial Sequence: Synthetic oligonucleotide
ccccaguccgaaaguccuc

SEQ ID NO: 2337623 - RNA, 19 nt, Artificial Sequence
  Description of Artificial Sequence: Synthetic oligonucleotide
ccauaggcauaaggccgac

SEQ ID NO: 2337624 - RNA, 19 nt, Artificial Sequence
  Description of Artificial Sequence: Synthetic oligonucleotide
gcaccggcgagagcuucac

SEQ ID NO: 2337625 - RNA, 19 nt, Artificial Sequence
  Description of Artificial Sequence: Synthetic oligonucleotide
ccgcaggcgggaaggucac

SEQ ID NO: 2337626 - RNA, 19 nt, Artificial Sequence
  Description of Artificial Sequence: Synthetic oligonucleotide
ggcauaaggccgacauccu

SEQ ID NO: 2337627 - RNA, 19 nt, Artificial Sequence
  Description of Artificial Sequence: Synthetic oligonucleotide
cagggaccccaguccgaaa

SEQ ID NO: 2337628 - RNA, 19 nt, Artificial Sequence
  Description of Artificial Sequence: Synthetic oligonucleotide
ggcaccggcgagagcuuca

SEQ ID NO: 2337629 - RNA, 19 nt, Artificial Sequence
  Description of Artificial Sequence: Synthetic oligonucleotide
cugccgcgcugcacagaca

SEQ ID NO: 2337630 - RNA, 19 nt, Artificial Sequence
  Description of Artificial Sequence: Synthetic oligonucleotide
gcucaacugccgcgcugca

SEQ ID NO: 2337631 - RNA, 19 nt, Artificial Sequence
  Description of Artificial Sequence: Synthetic oligonucleotide
cugcgccccgcagcccaag

SEQ ID NO: 2337632 - RNA, 19 nt, Artificial Sequence
  Description of Artificial Sequence: Synthetic oligonucleotide
ccaucacaguagguccauc

SEQ ID NO: 2337633 - RNA, 19 nt, Artificial Sequence
  Description of Artificial Sequence: Synthetic oligonucleotide
cggcagcauagcuccgcag

SEQ ID NO: 2337634 - RNA, 19 nt, Artificial Sequence
  Description of Artificial Sequence: Synthetic oligonucleotide
gcugcucaacugccgcgcu

SEQ ID NO: 2337635 - RNA, 19 nt, Artificial Sequence
  Description of Artificial Sequence: Synthetic oligonucleotide
ggaguucguugaggucuga

SEQ ID NO: 2337636 - RNA, 19 nt, Artificial Sequence
  Description of Artificial Sequence: Synthetic oligonucleotide
gucgccgccaggggcgugu

SEQ ID NO: 2337637 - RNA, 19 nt, Artificial Sequence
  Description of Artificial Sequence: Synthetic oligonucleotide
agucgccgccaggggcgug

SEQ ID NO: 2337638 - RNA, 19 nt, Artificial Sequence
  Description of Artificial Sequence: Synthetic oligonucleotide
ccuggacauaguucuugau

SEQ ID NO: 2337639 - RNA, 19 nt, Artificial Sequence
  Description of Artificial Sequence: Synthetic oligonucleotide
ccagggaccccaguccgaa

SEQ ID NO: 2337640 - RNA, 19 nt, Artificial Sequence
  Description of Artificial Sequence: Synthetic oligonucleotide
ccgccaggggcguguucac

SEQ ID NO: 2337641 - RNA, 19 nt, Artificial Sequence
  Description of Artificial Sequence: Synthetic oligonucleotide
cccagggaccccaguccga

SEQ ID NO: 2337642 - RNA, 19 nt, Artificial Sequence
  Description of Artificial Sequence: Synthetic oligonucleotide
gggcaccggcgagagcuuc

SEQ ID NO: 2337643 - RNA, 19 nt, Artificial Sequence
  Description of Artificial Sequence: Synthetic oligonucleotide
gcaggggugagcaggccuu

SEQ ID NO: 2337644 - RNA, 19 nt, Artificial Sequence
  Description of Artificial Sequence: Synthetic oligonucleotide
ggcgaacagugaagugugu

SEQ ID NO: 2337645 - RNA, 19 nt, Artificial Sequence
  Description of Artificial Sequence: Synthetic oligonucleotide
cagacaccggggaccuguu

SEQ ID NO: 2337646 - RNA, 19 nt, Artificial Sequence
  Description of Artificial Sequence: Synthetic oligonucleotide
caccggggaccuguugccu

SEQ ID NO: 2337647 - RNA, 19 nt, Artificial Sequence
  Description of Artificial Sequence: Synthetic oligonucleotide
gcccaagccgcggcgccca

SEQ ID NO: 2337648 - RNA, 19 nt, Artificial Sequence
  Description of Artificial Sequence: Synthetic oligonucleotide
ucgccgccaggggcguguu

SEQ ID NO: 2337649 - RNA, 19 nt, Artificial Sequence
  Description of Artificial Sequence: Synthetic oligonucleotide
caccggcgagagcuucacu

SEQ ID NO: 2337650 - RNA, 19 nt, Artificial Sequence
  Description of Artificial Sequence: Synthetic oligonucleotide
ggcgagagcuucacuccuu

SEQ ID NO: 2337651 - RNA, 19 nt, Artificial Sequence
  Description of Artificial Sequence: Synthetic oligonucleotide
gccucggcuuuggcgacgu

SEQ ID NO: 2337652 - RNA, 19 nt, Artificial Sequence
  Description of Artificial Sequence: Synthetic oligonucleotide
cggagagcugcgccccgca

SEQ ID NO: 2337653 - RNA, 19 nt, Artificial Sequence
  Description of Artificial Sequence: Synthetic oligonucleotide
ccgcugccggcagcauagc

SEQ ID NO: 2337654 - RNA, 19 nt, Artificial Sequence
  Description of Artificial Sequence: Synthetic oligonucleotide
caggggugagcaggccuuu

SEQ ID NO: 2337655 - RNA, 19 nt, Artificial Sequence
  Description of Artificial Sequence: Synthetic oligonucleotide
cccaucacaguagguccau

SEQ ID NO: 2337656 - RNA, 19 nt, Artificial Sequence
  Description of Artificial Sequence: Synthetic oligonucleotide
cccaagccgcggcgcccac

SEQ ID NO: 2337657 - RNA, 19 nt, Artificial Sequence
  Description of Artificial Sequence: Synthetic oligonucleotide
cggcgagagcuucacuccu

SEQ ID NO: 2337658 - RNA, 19 nt, Artificial Sequence
  Description of Artificial Sequence: Synthetic oligonucleotide
ccaagccgcggcgcccaca

SEQ ID NO: 2337659 - RNA, 19 nt, Artificial Sequence
  Description of Artificial Sequence: Synthetic oligonucleotide
gcuccgcaggcgggaaggu

SEQ ID NO: 2337660 - RNA, 19 nt, Artificial Sequence
  Description of Artificial Sequence: Synthetic oligonucleotide
cgcugccggcagcauagcu

SEQ ID NO: 2337661 - RNA, 19 nt, Artificial Sequence
  Description of Artificial Sequence: Synthetic oligonucleotide
ggggcaccggcgagagcuu

SEQ ID NO: 2337662 - RNA, 19 nt, Artificial Sequence
  Description of Artificial Sequence: Synthetic oligonucleotide
cggcgcccacaggcggcuc

SEQ ID NO: 2337663 - RNA, 19 nt, Artificial Sequence
  Description of Artificial Sequence: Synthetic oligonucleotide
ccucggcuuuggcgacguu

SEQ ID NO: 2337664 - RNA, 19 nt, Artificial Sequence
  Description of Artificial Sequence: Synthetic oligonucleotide
ccgccgcugccggcagcau

SEQ ID NO: 2337665 - RNA, 19 nt, Artificial Sequence
  Description of Artificial Sequence: Synthetic oligonucleotide
aauaaauaacaucccaugg

SEQ ID NO: 2337666 - RNA, 19 nt, Artificial Sequence
  Description of Artificial Sequence: Synthetic oligonucleotide
aaaauagugauugucagcu

SEQ ID NO: 2337667 - RNA, 19 nt, Artificial Sequence
  Description of Artificial Sequence: Synthetic oligonucleotide
aucaucagcguuuauuucc

SEQ ID NO: 2337668 - RNA, 19 nt, Artificial Sequence
  Description of Artificial Sequence: Synthetic oligonucleotide
ucuggauuaaucagugugg

SEQ ID NO: 2337669 - RNA, 19 nt, Artificial Sequence
  Description of Artificial Sequence: Synthetic oligonucleotide
ucuugguacacucucuugg

SEQ ID NO: 2337670 - RNA, 19 nt, Artificial Sequence
  Description of Artificial Sequence: Synthetic oligonucleotide
agaucuuucugauguaggc

SEQ ID NO: 2337671 - RNA, 19 nt, Artificial Sequence
  Description of Artificial Sequence: Synthetic oligonucleotide
gauuaaucaguguggaaag

SEQ ID NO: 2337672 - RNA, 19 nt, Artificial Sequence
  Description of Artificial Sequence: Synthetic oligonucleotide
aguguggaaagucucugcc

SEQ ID NO: 2337673 - RNA, 19 nt, Artificial Sequence
  Description of Artificial Sequence: Synthetic oligonucleotide
agaaaauagugauugucag

SEQ ID NO: 2337674 - RNA, 19 nt, Artificial Sequence
  Description of Artificial Sequence: Synthetic oligonucleotide
ugcauagaacaucagaacu

SEQ ID NO: 2337675 - RNA, 19 nt, Artificial Sequence
  Description of Artificial Sequence: Synthetic oligonucleotide
aaaucaucagcguuuauuu

SEQ ID NO: 2337676 - RNA, 19 nt, Artificial Sequence
  Description of Artificial Sequence: Synthetic oligonucleotide
auaaauaacaucccauggu

SEQ ID NO: 2337677 - RNA, 19 nt, Artificial Sequence
  Description of Artificial Sequence: Synthetic oligonucleotide
ucagaacuaagcuuaaaac

SEQ ID NO: 2337678 - RNA, 19 nt, Artificial Sequence
  Description of Artificial Sequence: Synthetic oligonucleotide
agaacaucagaacuaagcu

SEQ ID NO: 2337679 - RNA, 19 nt, Artificial Sequence
  Description of Artificial Sequence: Synthetic oligonucleotide
augaaguccgaguaggagg

SEQ ID NO: 2337680 - RNA, 19 nt, Artificial Sequence
  Description of Artificial Sequence: Synthetic oligonucleotide
aggcacacaaaucaucagc

SEQ ID NO: 2337681 - RNA, 19 nt, Artificial Sequence
  Description of Artificial Sequence: Synthetic oligonucleotide
aauaacaucccauggugau

SEQ ID NO: 2337682 - RNA, 19 nt, Artificial Sequence
  Description of Artificial Sequence: Synthetic oligonucleotide
aaaagggcuaggaagaucu

SEQ ID NO: 2337683 - RNA, 19 nt, Artificial Sequence
  Description of Artificial Sequence: Synthetic oligonucleotide
caugucaccagcuagcuuc

SEQ ID NO: 2337684 - RNA, 19 nt, Artificial Sequence
  Description of Artificial Sequence: Synthetic oligonucleotide
uuucccuacaucuggaucu

SEQ ID NO: 2337685 - RNA, 19 nt, Artificial Sequence
  Description of Artificial Sequence: Synthetic oligonucleotide
aaucaucagcguuuauuuc

SEQ ID NO: 2337686 - RNA, 19 nt, Artificial Sequence
  Description of Artificial Sequence: Synthetic oligonucleotide
gaaaauagugauugucagc

SEQ ID NO: 2337687 - RNA, 19 nt, Artificial Sequence
  Description of Artificial Sequence: Synthetic oligonucleotide
cuuagcugaauaaauaaca

SEQ ID NO: 2337688 - RNA, 19 nt, Artificial Sequence
  Description of Artificial Sequence: Synthetic oligonucleotide
uuucacucuggauuaauca

SEQ ID NO: 2337689 - RNA, 19 nt, Artificial Sequence
  Description of Artificial Sequence: Synthetic oligonucleotide
uaacaucccauggugaugg

SEQ ID NO: 2337690 - RNA, 19 nt, Artificial Sequence
  Description of Artificial Sequence: Synthetic oligonucleotide
uucacauuacuguucucgg

SEQ ID NO: 2337691 - RNA, 19 nt, Artificial Sequence
  Description of Artificial Sequence: Synthetic oligonucleotide
acagaaaauagugauuguc

SEQ ID NO: 2337692 - RNA, 19 nt, Artificial Sequence
  Description of Artificial Sequence: Synthetic oligonucleotide
ucagcguuuauuuccuggg

SEQ ID NO: 2337693 - RNA, 19 nt, Artificial Sequence
  Description of Artificial Sequence: Synthetic oligonucleotide
ucuucuagccucuaggauc

SEQ ID NO: 2337694 - RNA, 19 nt, Artificial Sequence
  Description of Artificial Sequence: Synthetic oligonucleotide
accaaaacagaaaauagug

SEQ ID NO: 2337695 - RNA, 19 nt, Artificial Sequence
  Description of Artificial Sequence: Synthetic oligonucleotide
uuagcugaauaaauaacau

SEQ ID NO: 2337696 - RNA, 19 nt, Artificial Sequence
  Description of Artificial Sequence: Synthetic oligonucleotide
cuagccucuaggaucaagg

SEQ ID NO: 2337697 - RNA, 19 nt, Artificial Sequence
  Description of Artificial Sequence: Synthetic oligonucleotide
aacaucagaacuaagcuua

SEQ ID NO: 2337698 - RNA, 19 nt, Artificial Sequence
  Description of Artificial Sequence: Synthetic oligonucleotide
agcguuuauuuccugggac

SEQ ID NO: 2337699 - RNA, 19 nt, Artificial Sequence
  Description of Artificial Sequence: Synthetic oligonucleotide
cugguuagagagaugagug

SEQ ID NO: 2337700 - RNA, 19 nt, Artificial Sequence
  Description of Artificial Sequence: Synthetic oligonucleotide
uaaucaguguggaaagucu

SEQ ID NO: 2337701 - RNA, 19 nt, Artificial Sequence
  Description of Artificial Sequence: Synthetic oligonucleotide
ugaaguccgaguaggagga

SEQ ID NO: 2337702 - RNA, 19 nt, Artificial Sequence
  Description of Artificial Sequence: Synthetic oligonucleotide
augccugucgcaucgcucc

SEQ ID NO: 2337703 - RNA, 19 nt, Artificial Sequence
  Description of Artificial Sequence: Synthetic oligonucleotide
ucgaccuccaucaugccug

SEQ ID NO: 2337704 - RNA, 19 nt, Artificial Sequence
  Description of Artificial Sequence: Synthetic oligonucleotide
gauggugucugguugugcc

SEQ ID NO: 2337705 - RNA, 19 nt, Artificial Sequence
  Description of Artificial Sequence: Synthetic oligonucleotide
cacauuacuguucucgggc

SEQ ID NO: 2337706 - RNA, 19 nt, Artificial Sequence
  Description of Artificial Sequence: Synthetic oligonucleotide
aucagaacuaagcuuaaaa

SEQ ID NO: 2337707 - RNA, 19 nt, Artificial Sequence
  Description of Artificial Sequence: Synthetic oligonucleotide
ugguuagagagaugagugg

SEQ ID NO: 2337708 - RNA, 19 nt, Artificial Sequence
  Description of Artificial Sequence: Synthetic oligonucleotide
gaucugugcgacuccacgg

SEQ ID NO: 2337709 - RNA, 19 nt, Artificial Sequence
  Description of Artificial Sequence: Synthetic oligonucleotide
ucaggccuaguuuaauucc

SEQ ID NO: 2337710 - RNA, 19 nt, Artificial Sequence
  Description of Artificial Sequence: Synthetic oligonucleotide
aaucaguguggaaagucuc

SEQ ID NO: 2337711 - RNA, 19 nt, Artificial Sequence
  Description of Artificial Sequence: Synthetic oligonucleotide
ucacauuacuguucucggg

SEQ ID NO: 2337712 - RNA, 19 nt, Artificial Sequence
  Description of Artificial Sequence: Synthetic oligonucleotide
uaggaucaaggccagacuc

SEQ ID NO: 2337713 - RNA, 19 nt, Artificial Sequence
  Description of Artificial Sequence: Synthetic oligonucleotide
ugucgcaucgcuccucagg

SEQ ID NO: 2337714 - RNA, 19 nt, Artificial Sequence
  Description of Artificial Sequence: Synthetic oligonucleotide
cauuccgacggccuguucg

SEQ ID NO: 2337715 - RNA, 19 nt, Artificial Sequence
  Description of Artificial Sequence: Synthetic oligonucleotide
ugguacaaagggcaaagaa

SEQ ID NO: 2337716 - RNA, 19 nt, Artificial Sequence
  Description of Artificial Sequence: Synthetic oligonucleotide
cagaaaauagugauuguca

SEQ ID NO: 2337717 - RNA, 19 nt, Artificial Sequence
  Description of Artificial Sequence: Synthetic oligonucleotide
gaagaucuuucugauguag

SEQ ID NO: 2337718 - RNA, 19 nt, Artificial Sequence
  Description of Artificial Sequence: Synthetic oligonucleotide
accuccaucaugccugucg

SEQ ID NO: 2337719 - RNA, 19 nt, Artificial Sequence
  Description of Artificial Sequence: Synthetic oligonucleotide
cuucugaccccucaagugc

SEQ ID NO: 2337720 - RNA, 19 nt, Artificial Sequence
  Description of Artificial Sequence: Synthetic oligonucleotide
aacagaaaauagugauugu

SEQ ID NO: 2337721 - RNA, 19 nt, Artificial Sequence
  Description of Artificial Sequence: Synthetic oligonucleotide
ugaguccaaauccuuuccc

SEQ ID NO: 2337722 - RNA, 19 nt, Artificial Sequence
  Description of Artificial Sequence: Synthetic oligonucleotide
aguaggaggacucgaccuc

SEQ ID NO: 2337723 - RNA, 19 nt, Artificial Sequence
  Description of Artificial Sequence: Synthetic oligonucleotide
uugaguccaaauccuuucc

SEQ ID NO: 2337724 - RNA, 19 nt, Artificial Sequence
  Description of Artificial Sequence: Synthetic oligonucleotide
ucaagccccgcuuagcuga

SEQ ID NO: 2337725 - RNA, 19 nt, Artificial Sequence
  Description of Artificial Sequence: Synthetic oligonucleotide
gacucgaccuccaucaugc

SEQ ID NO: 2337726 - RNA, 19 nt, Artificial Sequence
  Description of Artificial Sequence: Synthetic oligonucleotide
gaugucagggacugcauuc

SEQ ID NO: 2337727 - RNA, 19 nt, Artificial Sequence
  Description of Artificial Sequence: Synthetic oligonucleotide
aacucagagcugcauagaa

SEQ ID NO: 2337728 - RNA, 19 nt, Artificial Sequence
  Description of Artificial Sequence: Synthetic oligonucleotide
gaggacucgaccuccauca

SEQ ID NO: 2337729 - RNA, 19 nt, Artificial Sequence
  Description of Artificial Sequence: Synthetic oligonucleotide
uaguuuaauuccguuuucc

SEQ ID NO: 2337730 - RNA, 19 nt, Artificial Sequence
  Description of Artificial Sequence: Synthetic oligonucleotide
uuuauuuccugggaccucu

SEQ ID NO: 2337731 - RNA, 19 nt, Artificial Sequence
  Description of Artificial Sequence: Synthetic oligonucleotide
ugguacacucucuugguac

SEQ ID NO: 2337732 - RNA, 19 nt, Artificial Sequence
  Description of Artificial Sequence: Synthetic oligonucleotide
gaugaaguccgaguaggag

SEQ ID NO: 2337733 - RNA, 19 nt, Artificial Sequence
  Description of Artificial Sequence: Synthetic oligonucleotide
aggucucucuucuagccuc

SEQ ID NO: 2337734 - RNA, 19 nt, Artificial Sequence
  Description of Artificial Sequence: Synthetic oligonucleotide
auagugauugucagcuccc

SEQ ID NO: 2337735 - RNA, 19 nt, Artificial Sequence
  Description of Artificial Sequence: Synthetic oligonucleotide
aaauaacaucccaugguga

SEQ ID NO: 2337736 - RNA, 19 nt, Artificial Sequence
  Description of Artificial Sequence: Synthetic oligonucleotide
ucaucagcguuuauuuccu

SEQ ID NO: 2337737 - RNA, 19 nt, Artificial Sequence
  Description of Artificial Sequence: Synthetic oligonucleotide
cuugucuggaguacuuccc

SEQ ID NO: 2337738 - RNA, 19 nt, Artificial Sequence
  Description of Artificial Sequence: Synthetic oligonucleotide
auuacuguucucgggcugg

SEQ ID NO: 2337739 - RNA, 19 nt, Artificial Sequence
  Description of Artificial Sequence: Synthetic oligonucleotide
uggugauggugucugguug

SEQ ID NO: 2337740 - RNA, 19 nt, Artificial Sequence
  Description of Artificial Sequence: Synthetic oligonucleotide
caucaugccugucgcaucg

SEQ ID NO: 2337741 - RNA, 19 nt, Artificial Sequence
  Description of Artificial Sequence: Synthetic oligonucleotide
auguaaaagaggcuuuaaa

SEQ ID NO: 2337742 - RNA, 19 nt, Artificial Sequence
  Description of Artificial Sequence: Synthetic oligonucleotide
caggccuaguuuaauuccg

SEQ ID NO: 2337743 - RNA, 19 nt, Artificial Sequence
  Description of Artificial Sequence: Synthetic oligonucleotide
agcugcauagaacaucaga

SEQ ID NO: 2337744 - RNA, 19 nt, Artificial Sequence
  Description of Artificial Sequence: Synthetic oligonucleotide
gaaagucucugccgccucg

SEQ ID NO: 2337745 - RNA, 19 nt, Artificial Sequence
  Description of Artificial Sequence: Synthetic oligonucleotide
acacucucuugguacaaag

SEQ ID NO: 2337746 - RNA, 19 nt, Artificial Sequence
  Description of Artificial Sequence: Synthetic oligonucleotide
uucugaccccucaagugcc

SEQ ID NO: 2337747 - RNA, 19 nt, Artificial Sequence
  Description of Artificial Sequence: Synthetic oligonucleotide
auuccgacggccuguucgg

SEQ ID NO: 2337748 - RNA, 19 nt, Artificial Sequence
  Description of Artificial Sequence: Synthetic oligonucleotide
uacaucuggaucugugcga

SEQ ID NO: 2337749 - RNA, 19 nt, Artificial Sequence
  Description of Artificial Sequence: Synthetic oligonucleotide
cacucucuugguacaaagg

SEQ ID NO: 2337750 - RNA, 19 nt, Artificial Sequence
  Description of Artificial Sequence: Synthetic oligonucleotide
cacucuggauuaaucagug

SEQ ID NO: 2337751 - RNA, 19 nt, Artificial Sequence
  Description of Artificial Sequence: Synthetic oligonucleotide
augucagggacugcauucc

SEQ ID NO: 2337752 - RNA, 19 nt, Artificial Sequence
  Description of Artificial Sequence: Synthetic oligonucleotide
ucugugcgacuccacgggg

SEQ ID NO: 2337753 - RNA, 19 nt, Artificial Sequence
  Description of Artificial Sequence: Synthetic oligonucleotide
gagagaugagugguguggg

SEQ ID NO: 2337754 - RNA, 19 nt, Artificial Sequence
  Description of Artificial Sequence: Synthetic oligonucleotide
aauguaaaagaggcuuuaa

SEQ ID NO: 2337755 - RNA, 19 nt, Artificial Sequence
  Description of Artificial Sequence: Synthetic oligonucleotide
ucaccagcuagcuuccgca

SEQ ID NO: 2337756 - RNA, 19 nt, Artificial Sequence
  Description of Artificial Sequence: Synthetic oligonucleotide
ugucagggacugcauuccg

SEQ ID NO: 2337757 - RNA, 19 nt, Artificial Sequence
  Description of Artificial Sequence: Synthetic oligonucleotide
cucaggccuaguuuaauuc

SEQ ID NO: 2337758 - RNA, 19 nt, Artificial Sequence
  Description of Artificial Sequence: Synthetic oligonucleotide
uuaauuccguuuuccugcu

SEQ ID NO: 2337759 - RNA, 19 nt, Artificial Sequence
  Description of Artificial Sequence: Synthetic oligonucleotide
aggagaugaaguccgagua

SEQ ID NO: 2337760 - RNA, 19 nt, Artificial Sequence
  Description of Artificial Sequence: Synthetic oligonucleotide
uccgagucacccuggaugu

SEQ ID NO: 2337761 - RNA, 19 nt, Artificial Sequence
  Description of Artificial Sequence: Synthetic oligonucleotide
agggcuaggaagaucuuuc

SEQ ID NO: 2337762 - RNA, 19 nt, Artificial Sequence
  Description of Artificial Sequence: Synthetic oligonucleotide
gcuaggaagaucuuucuga

SEQ ID NO: 2337763 - RNA, 19 nt, Artificial Sequence
  Description of Artificial Sequence: Synthetic oligonucleotide
ucggucacaggagaugaag

SEQ ID NO: 2337764 - RNA, 19 nt, Artificial Sequence
  Description of Artificial Sequence: Synthetic oligonucleotide
aguuuugaguccaaauccu

SEQ ID NO: 2337765 - RNA, 19 nt, Artificial Sequence
  Description of Artificial Sequence: Synthetic oligonucleotide
agcuuccgcacgcucacgg

SEQ ID NO: 2337766 - RNA, 19 nt, Artificial Sequence
  Description of Artificial Sequence: Synthetic oligonucleotide
uauuuccugggaccucuug

SEQ ID NO: 2337767 - RNA, 19 nt, Artificial Sequence
  Description of Artificial Sequence: Synthetic oligonucleotide
ucucucuucuagccucuag

SEQ ID NO: 2337768 - RNA, 19 nt, Artificial Sequence
  Description of Artificial Sequence: Synthetic oligonucleotide
cuucuagccucuaggauca

SEQ ID NO: 2337769 - RNA, 19 nt, Artificial Sequence
  Description of Artificial Sequence: Synthetic oligonucleotide
aauuggucauuuaguuuug

SEQ ID NO: 2337770 - RNA, 19 nt, Artificial Sequence
  Description of Artificial Sequence: Synthetic oligonucleotide
ggauuaaucaguguggaaa

SEQ ID NO: 2337771 - RNA, 19 nt, Artificial Sequence
  Description of Artificial Sequence: Synthetic oligonucleotide
acauuacuguucucgggcu

SEQ ID NO: 2337772 - RNA, 19 nt, Artificial Sequence
  Description of Artificial Sequence: Synthetic oligonucleotide
accagcuagcuuccgcacg

SEQ ID NO: 2337773 - RNA, 19 nt, Artificial Sequence
  Description of Artificial Sequence: Synthetic oligonucleotide
uguucggucacaggagaug

SEQ ID NO: 2337774 - RNA, 19 nt, Artificial Sequence
  Description of Artificial Sequence: Synthetic oligonucleotide
ggaucugugcgacuccacg

SEQ ID NO: 2337775 - RNA, 19 nt, Artificial Sequence
  Description of Artificial Sequence: Synthetic oligonucleotide
cucaagacgagguguucac

SEQ ID NO: 2337776 - RNA, 19 nt, Artificial Sequence
  Description of Artificial Sequence: Synthetic oligonucleotide
cuaguuuaauuccguuuuc

SEQ ID NO: 2337777 - RNA, 19 nt, Artificial Sequence
  Description of Artificial Sequence: Synthetic oligonucleotide
agacgagguguucacauua

SEQ ID NO: 2337778 - RNA, 19 nt, Artificial Sequence
  Description of Artificial Sequence: Synthetic oligonucleotide
cuuucccuacaucuggauc

SEQ ID NO: 2337779 - RNA, 19 nt, Artificial Sequence
  Description of Artificial Sequence: Synthetic oligonucleotide
ggagaugaaguccgaguag

SEQ ID NO: 2337780 - RNA, 19 nt, Artificial Sequence
  Description of Artificial Sequence: Synthetic oligonucleotide
acugcauuccgacggccug

SEQ ID NO: 2337781 - RNA, 19 nt, Artificial Sequence
  Description of Artificial Sequence: Synthetic oligonucleotide
guuagagagaugaguggug

SEQ ID NO: 2337782 - RNA, 19 nt, Artificial Sequence
  Description of Artificial Sequence: Synthetic oligonucleotide
gugguguggggacaguccc

SEQ ID NO: 2337783 - RNA, 19 nt, Artificial Sequence
  Description of Artificial Sequence: Synthetic oligonucleotide
gaccucuugguacacucuc

SEQ ID NO: 2337784 - RNA, 19 nt, Artificial Sequence
  Description of Artificial Sequence: Synthetic oligonucleotide
uccguuuuccugcucgcau

SEQ ID NO: 2337785 - RNA, 19 nt, Artificial Sequence
  Description of Artificial Sequence: Synthetic oligonucleotide
cuuccgcacgcucacggcc

SEQ ID NO: 2337786 - RNA, 19 nt, Artificial Sequence
  Description of Artificial Sequence: Synthetic oligonucleotide
uccuuucccuacaucugga

SEQ ID NO: 2337787 - RNA, 19 nt, Artificial Sequence
  Description of Artificial Sequence: Synthetic oligonucleotide
auaacaucccauggugaug

SEQ ID NO: 2337788 - RNA, 19 nt, Artificial Sequence
  Description of Artificial Sequence: Synthetic oligonucleotide
auuaaucaguguggaaagu

SEQ ID NO: 2337789 - RNA, 19 nt, Artificial Sequence
  Description of Artificial Sequence: Synthetic oligonucleotide
uggauuaaucaguguggaa

SEQ ID NO: 2337790 - RNA, 19 nt, Artificial Sequence
  Description of Artificial Sequence: Synthetic oligonucleotide
uguggggacagucccuguc

SEQ ID NO: 2337791 - RNA, 19 nt, Artificial Sequence
  Description of Artificial Sequence: Synthetic oligonucleotide
gcugaauaaauaacauccc

SEQ ID NO: 2337792 - RNA, 19 nt, Artificial Sequence
  Description of Artificial Sequence: Synthetic oligonucleotide
aguccgaguaggaggacuc

SEQ ID NO: 2337793 - RNA, 19 nt, Artificial Sequence
  Description of Artificial Sequence: Synthetic oligonucleotide
aagacgagguguucacauu

SEQ ID NO: 2337794 - RNA, 19 nt, Artificial Sequence
  Description of Artificial Sequence: Synthetic oligonucleotide
acacaaaucaucagcguuu

SEQ ID NO: 2337795 - RNA, 19 nt, Artificial Sequence
  Description of Artificial Sequence: Synthetic oligonucleotide
gcguuuauuuccugggacc

SEQ ID NO: 2337796 - RNA, 19 nt, Artificial Sequence
  Description of Artificial Sequence: Synthetic oligonucleotide
ucagagcugcauagaacau

SEQ ID NO: 2337797 - RNA, 19 nt, Artificial Sequence
  Description of Artificial Sequence: Synthetic oligonucleotide
ucuugguacaaagggcaaa

SEQ ID NO: 2337798 - RNA, 19 nt, Artificial Sequence
  Description of Artificial Sequence: Synthetic oligonucleotide
cauuacuguucucgggcug

SEQ ID NO: 2337799 - RNA, 19 nt, Artificial Sequence
  Description of Artificial Sequence: Synthetic oligonucleotide
uugguacacucucuuggua

SEQ ID NO: 2337800 - RNA, 19 nt, Artificial Sequence
  Description of Artificial Sequence: Synthetic oligonucleotide
ccuacaucuggaucugugc

SEQ ID NO: 2337801 - RNA, 19 nt, Artificial Sequence
  Description of Artificial Sequence: Synthetic oligonucleotide
cucuugguacacucucuug

SEQ ID NO: 2337802 - RNA, 19 nt, Artificial Sequence
  Description of Artificial Sequence: Synthetic oligonucleotide
ucacccuggaugucaggga

SEQ ID NO: 2337803 - RNA, 19 nt, Artificial Sequence
  Description of Artificial Sequence: Synthetic oligonucleotide
ucaugccugucgcaucgcu

SEQ ID NO: 2337804 - RNA, 19 nt, Artificial Sequence
  Description of Artificial Sequence: Synthetic oligonucleotide
acucgaccuccaucaugcc

SEQ ID NO: 2337805 - RNA, 19 nt, Artificial Sequence
  Description of Artificial Sequence: Synthetic oligonucleotide
uggaaagucucugccgccu

SEQ ID NO: 2337806 - RNA, 19 nt, Artificial Sequence
  Description of Artificial Sequence: Synthetic oligonucleotide
cagcugguuagagagauga

SEQ ID NO: 2337807 - RNA, 19 nt, Artificial Sequence
  Description of Artificial Sequence: Synthetic oligonucleotide
gaguccaaauccuuucccu

SEQ ID NO: 2337808 - RNA, 19 nt, Artificial Sequence
  Description of Artificial Sequence: Synthetic oligonucleotide
auagaacaucagaacuaag

SEQ ID NO: 2337809 - RNA, 19 nt, Artificial Sequence
  Description of Artificial Sequence: Synthetic oligonucleotide
aagggcuaggaagaucuuu

SEQ ID NO: 2337810 - RNA, 19 nt, Artificial Sequence
  Description of Artificial Sequence: Synthetic oligonucleotide
ucaagacgagguguucaca

SEQ ID NO: 2337811 - RNA, 19 nt, Artificial Sequence
  Description of Artificial Sequence: Synthetic oligonucleotide
uggcucaagccccgcuuag

SEQ ID NO: 2337812 - RNA, 19 nt, Artificial Sequence
  Description of Artificial Sequence: Synthetic oligonucleotide
acgagguguucacauuacu

SEQ ID NO: 2337813 - RNA, 19 nt, Artificial Sequence
  Description of Artificial Sequence: Synthetic oligonucleotide
guaggaggacucgaccucc

SEQ ID NO: 2337814 - RNA, 19 nt, Artificial Sequence
  Description of Artificial Sequence: Synthetic oligonucleotide
uagugauugucagcucccc

SEQ ID NO: 2337815 - RNA, 19 nt, Artificial Sequence
  Description of Artificial Sequence: Synthetic oligonucleotide
gcaggucucucuucuagcc

SEQ ID NO: 2337816 - RNA, 19 nt, Artificial Sequence
  Description of Artificial Sequence: Synthetic oligonucleotide
aucaguguggaaagucucu

SEQ ID NO: 2337817 - RNA, 19 nt, Artificial Sequence
  Description of Artificial Sequence: Synthetic oligonucleotide
caucccauggugauggugu

SEQ ID NO: 2337818 - RNA, 19 nt, Artificial Sequence
  Description of Artificial Sequence: Synthetic oligonucleotide
agcuagcuuccgcacgcuc

SEQ ID NO: 2337819 - RNA, 19 nt, Artificial Sequence
  Description of Artificial Sequence: Synthetic oligonucleotide
uuccgcacgcucacggccu

SEQ ID NO: 2337820 - RNA, 19 nt, Artificial Sequence
  Description of Artificial Sequence: Synthetic oligonucleotide
gcuuagcugaauaaauaac

SEQ ID NO: 2337821 - RNA, 19 nt, Artificial Sequence
  Description of Artificial Sequence: Synthetic oligonucleotide
cagggacugcauuccgacg

SEQ ID NO: 2337822 - RNA, 19 nt, Artificial Sequence
  Description of Artificial Sequence: Synthetic oligonucleotide
cuggauuaaucagugugga

SEQ ID NO: 2337823 - RNA, 19 nt, Artificial Sequence
  Description of Artificial Sequence: Synthetic oligonucleotide
acucuggauuaaucagugu

SEQ ID NO: 2337824 - RNA, 19 nt, Artificial Sequence
  Description of Artificial Sequence: Synthetic oligonucleotide
guucggucacaggagauga

SEQ ID NO: 2337825 - RNA, 19 nt, Artificial Sequence
  Description of Artificial Sequence: Synthetic oligonucleotide
guggaaagucucugccgcc

SEQ ID NO: 2337826 - RNA, 19 nt, Artificial Sequence
  Description of Artificial Sequence: Synthetic oligonucleotide
cagagcugcauagaacauc

SEQ ID NO: 2337827 - RNA, 19 nt, Artificial Sequence
  Description of Artificial Sequence: Synthetic oligonucleotide
augagugguguggggacag

SEQ ID NO: 2337828 - RNA, 19 nt, Artificial Sequence
  Description of Artificial Sequence: Synthetic oligonucleotide
ggcuaggaagaucuuucug

SEQ ID NO: 2337829 - RNA, 19 nt, Artificial Sequence
  Description of Artificial Sequence: Synthetic oligonucleotide
uccgaguaggaggacucga

SEQ ID NO: 2337830 - RNA, 19 nt, Artificial Sequence
  Description of Artificial Sequence: Synthetic oligonucleotide
cucacggccuccgagucac

SEQ ID NO: 2337831 - RNA, 19 nt, Artificial Sequence
  Description of Artificial Sequence: Synthetic oligonucleotide
gacgagguguucacauuac

SEQ ID NO: 2337832 - RNA, 19 nt, Artificial Sequence
  Description of Artificial Sequence: Synthetic oligonucleotide
cucgucgccucgcggagcc

SEQ ID NO: 2337833 - RNA, 19 nt, Artificial Sequence
  Description of Artificial Sequence: Synthetic oligonucleotide
ggccuguucggucacagga

SEQ ID NO: 2337834 - RNA, 19 nt, Artificial Sequence
  Description of Artificial Sequence: Synthetic oligonucleotide
uucccuacaucuggaucug

SEQ ID NO: 2337835 - RNA, 19 nt, Artificial Sequence
  Description of Artificial Sequence: Synthetic oligonucleotide
ugaccccucaagugccagc

SEQ ID NO: 2337836 - RNA, 19 nt, Artificial Sequence
  Description of Artificial Sequence: Synthetic oligonucleotide
aggaucaaggccagacuca

SEQ ID NO: 2337837 - RNA, 19 nt, Artificial Sequence
  Description of Artificial Sequence: Synthetic oligonucleotide
gguacacucucuugguaca

SEQ ID NO: 2337838 - RNA, 19 nt, Artificial Sequence
  Description of Artificial Sequence: Synthetic oligonucleotide
uaggaggacucgaccucca

SEQ ID NO: 2337839 - RNA, 19 nt, Artificial Sequence
  Description of Artificial Sequence: Synthetic oligonucleotide
ugcucgcaucucuucagau

SEQ ID NO: 2337840 - RNA, 19 nt, Artificial Sequence
  Description of Artificial Sequence: Synthetic oligonucleotide
agucacccuggaugucagg

SEQ ID NO: 2337841 - RNA, 19 nt, Artificial Sequence
  Description of Artificial Sequence: Synthetic oligonucleotide
gaucaaggccagacucaag

SEQ ID NO: 2337842 - RNA, 19 nt, Artificial Sequence
  Description of Artificial Sequence: Synthetic oligonucleotide
gaugagugguguggggaca

SEQ ID NO: 2337843 - RNA, 19 nt, Artificial Sequence
  Description of Artificial Sequence: Synthetic oligonucleotide
acaucccauggugauggug

SEQ ID NO: 2337844 - RNA, 19 nt, Artificial Sequence
  Description of Artificial Sequence: Synthetic oligonucleotide
cgagguguucacauuacug

SEQ ID NO: 2337845 - RNA, 19 nt, Artificial Sequence
  Description of Artificial Sequence: Synthetic oligonucleotide
gagucacccuggaugucag

SEQ ID NO: 2337846 - RNA, 19 nt, Artificial Sequence
  Description of Artificial Sequence: Synthetic oligonucleotide
cacgcucacggccuccgag

SEQ ID NO: 2337847 - RNA, 19 nt, Artificial Sequence
  Description of Artificial Sequence: Synthetic oligonucleotide
aucaugccugucgcaucgc

SEQ ID NO: 2337848 - RNA, 19 nt, Artificial Sequence
  Description of Artificial Sequence: Synthetic oligonucleotide
gucugguugugccagggcu

SEQ ID NO: 2337849 - RNA, 19 nt, Artificial Sequence
  Description of Artificial Sequence: Synthetic oligonucleotide
gguguucacauuacuguuc

SEQ ID NO: 2337850 - RNA, 19 nt, Artificial Sequence
  Description of Artificial Sequence: Synthetic oligonucleotide
ccccucaagugccagcucg

SEQ ID NO: 2337851 - RNA, 19 nt, Artificial Sequence
  Description of Artificial Sequence: Synthetic oligonucleotide
gaacucagagcugcauaga

SEQ ID NO: 2337852 - RNA, 19 nt, Artificial Sequence
  Description of Artificial Sequence: Synthetic oligonucleotide
acgcucacggccuccgagu

SEQ ID NO: 2337853 - RNA, 19 nt, Artificial Sequence
  Description of Artificial Sequence: Synthetic oligonucleotide
cucgcaucucuucagauuu

SEQ ID NO: 2337854 - RNA, 19 nt, Artificial Sequence
  Description of Artificial Sequence: Synthetic oligonucleotide
cuugguacacucucuuggu

SEQ ID NO: 2337855 - RNA, 19 nt, Artificial Sequence
  Description of Artificial Sequence: Synthetic oligonucleotide
uacacucucuugguacaaa

SEQ ID NO: 2337856 - RNA, 19 nt, Artificial Sequence
  Description of Artificial Sequence: Synthetic oligonucleotide
ccagcuagcuuccgcacgc

SEQ ID NO: 2337857 - RNA, 19 nt, Artificial Sequence
  Description of Artificial Sequence: Synthetic oligonucleotide
uaauuccguuuuccugcuc

SEQ ID NO: 2337858 - RNA, 19 nt, Artificial Sequence
  Description of Artificial Sequence: Synthetic oligonucleotide
uuccguuuuccugcucgca

SEQ ID NO: 2337859 - RNA, 19 nt, Artificial Sequence
  Description of Artificial Sequence: Synthetic oligonucleotide
ucgcaucgcuccucaggcc

SEQ ID NO: 2337860 - RNA, 19 nt, Artificial Sequence
  Description of Artificial Sequence: Synthetic oligonucleotide
caagacgagguguucacau

SEQ ID NO: 2337861 - RNA, 19 nt, Artificial Sequence
  Description of Artificial Sequence: Synthetic oligonucleotide
gguuagagagaugaguggu

SEQ ID NO: 2337862 - RNA, 19 nt, Artificial Sequence
  Description of Artificial Sequence: Synthetic oligonucleotide
guuuauuuccugggaccuc

SEQ ID NO: 2337863 - RNA, 19 nt, Artificial Sequence
  Description of Artificial Sequence: Synthetic oligonucleotide
ggacucgaccuccaucaug

SEQ ID NO: 2337864 - RNA, 19 nt, Artificial Sequence
  Description of Artificial Sequence: Synthetic oligonucleotide
cacacaaaucaucagcguu

SEQ ID NO: 2337865 - RNA, 19 nt, Artificial Sequence
  Description of Artificial Sequence: Synthetic oligonucleotide
caccagcuagcuuccgcac

SEQ ID NO: 2337866 - RNA, 19 nt, Artificial Sequence
  Description of Artificial Sequence: Synthetic oligonucleotide
gcauagaacaucagaacua

SEQ ID NO: 2337867 - RNA, 19 nt, Artificial Sequence
  Description of Artificial Sequence: Synthetic oligonucleotide
ucgcccaugucaccagcua

SEQ ID NO: 2337868 - RNA, 19 nt, Artificial Sequence
  Description of Artificial Sequence: Synthetic oligonucleotide
guccgaguaggaggacucg

SEQ ID NO: 2337869 - RNA, 19 nt, Artificial Sequence
  Description of Artificial Sequence: Synthetic oligonucleotide
ugucaccagcuagcuuccg

SEQ ID NO: 2337870 - RNA, 19 nt, Artificial Sequence
  Description of Artificial Sequence: Synthetic oligonucleotide
uccgacggccuguucgguc

SEQ ID NO: 2337871 - RNA, 19 nt, Artificial Sequence
  Description of Artificial Sequence: Synthetic oligonucleotide
agacucaagacgagguguu

SEQ ID NO: 2337872 - RNA, 19 nt, Artificial Sequence
  Description of Artificial Sequence: Synthetic oligonucleotide
ggcgcgagcgccuccccgg

SEQ ID NO: 2337873 - RNA, 19 nt, Artificial Sequence
  Description of Artificial Sequence: Synthetic oligonucleotide
cagcguuuauuuccuggga

SEQ ID NO: 2337874 - RNA, 19 nt, Artificial Sequence
  Description of Artificial Sequence: Synthetic oligonucleotide
accccucaagugccagcuc

SEQ ID NO: 2337875 - RNA, 19 nt, Artificial Sequence
  Description of Artificial Sequence: Synthetic oligonucleotide
acggccuguucggucacag

SEQ ID NO: 2337876 - RNA, 19 nt, Artificial Sequence
  Description of Artificial Sequence: Synthetic oligonucleotide
cccuacaucuggaucugug

SEQ ID NO: 2337877 - RNA, 19 nt, Artificial Sequence
  Description of Artificial Sequence: Synthetic oligonucleotide
cuaggaucaaggccagacu

SEQ ID NO: 2337878 - RNA, 19 nt, Artificial Sequence
  Description of Artificial Sequence: Synthetic oligonucleotide
uguucucgggcuggcugcu

SEQ ID NO: 2337879 - RNA, 19 nt, Artificial Sequence
  Description of Artificial Sequence: Synthetic oligonucleotide
ggaggacucgaccuccauc

SEQ ID NO: 2337880 - RNA, 19 nt, Artificial Sequence
  Description of Artificial Sequence: Synthetic oligonucleotide
accucuugguacacucucu

SEQ ID NO: 2337881 - RNA, 19 nt, Artificial Sequence
  Description of Artificial Sequence: Synthetic oligonucleotide
cagacucaagacgaggugu

SEQ ID NO: 2337882 - RNA, 19 nt, Artificial Sequence
  Description of Artificial Sequence: Synthetic oligonucleotide
ucgcaucucuucagauuuu

SEQ ID NO: 2337883 - RNA, 19 nt, Artificial Sequence
  Description of Artificial Sequence: Synthetic oligonucleotide
agccccgcuuagcugaaua

SEQ ID NO: 2337884 - RNA, 19 nt, Artificial Sequence
  Description of Artificial Sequence: Synthetic oligonucleotide
aggccuaguuuaauuccgu

SEQ ID NO: 2337885 - RNA, 19 nt, Artificial Sequence
  Description of Artificial Sequence: Synthetic oligonucleotide
gagcugcauagaacaucag

SEQ ID NO: 2337886 - RNA, 19 nt, Artificial Sequence
  Description of Artificial Sequence: Synthetic oligonucleotide
ucgcuccucaggccuaguu

SEQ ID NO: 2337887 - RNA, 19 nt, Artificial Sequence
  Description of Artificial Sequence: Synthetic oligonucleotide
acaucagaacuaagcuuaa

SEQ ID NO: 2337888 - RNA, 19 nt, Artificial Sequence
  Description of Artificial Sequence: Synthetic oligonucleotide
uagcuuccgcacgcucacg

SEQ ID NO: 2337889 - RNA, 19 nt, Artificial Sequence
  Description of Artificial Sequence: Synthetic oligonucleotide
gcuccucaggccuaguuua

SEQ ID NO: 2337890 - RNA, 19 nt, Artificial Sequence
  Description of Artificial Sequence: Synthetic oligonucleotide
cacaaaucaucagcguuua

SEQ ID NO: 2337891 - RNA, 19 nt, Artificial Sequence
  Description of Artificial Sequence: Synthetic oligonucleotide
ccuaguuuaauuccguuuu

SEQ ID NO: 2337892 - RNA, 19 nt, Artificial Sequence
  Description of Artificial Sequence: Synthetic oligonucleotide
uccucaggccuaguuuaau

SEQ ID NO: 2337893 - RNA, 19 nt, Artificial Sequence
  Description of Artificial Sequence: Synthetic oligonucleotide
agucccuguccaggugggg

SEQ ID NO: 2337894 - RNA, 19 nt, Artificial Sequence
  Description of Artificial Sequence: Synthetic oligonucleotide
ccgaguaggaggacucgac

SEQ ID NO: 2337895 - RNA, 19 nt, Artificial Sequence
  Description of Artificial Sequence: Synthetic oligonucleotide
gucagggacugcauuccga

SEQ ID NO: 2337896 - RNA, 19 nt, Artificial Sequence
  Description of Artificial Sequence: Synthetic oligonucleotide
gcccaugucaccagcuagc

SEQ ID NO: 2337897 - RNA, 19 nt, Artificial Sequence
  Description of Artificial Sequence: Synthetic oligonucleotide
gaccccucaagugccagcu

SEQ ID NO: 2337898 - RNA, 19 nt, Artificial Sequence
  Description of Artificial Sequence: Synthetic oligonucleotide
uccccggggccgccuggcg

SEQ ID NO: 2337899 - RNA, 19 nt, Artificial Sequence
  Description of Artificial Sequence: Synthetic oligonucleotide
aaagggcuaggaagaucuu

SEQ ID NO: 2337900 - RNA, 19 nt, Artificial Sequence
  Description of Artificial Sequence: Synthetic oligonucleotide
cgcuuagcugaauaaauaa

SEQ ID NO: 2337901 - RNA, 19 nt, Artificial Sequence
  Description of Artificial Sequence: Synthetic oligonucleotide
cugaccccucaagugccag

SEQ ID NO: 2337902 - RNA, 19 nt, Artificial Sequence
  Description of Artificial Sequence: Synthetic oligonucleotide
gaaguccgaguaggaggac

SEQ ID NO: 2337903 - RNA, 19 nt, Artificial Sequence
  Description of Artificial Sequence: Synthetic oligonucleotide
aggaggacucgaccuccau

SEQ ID NO: 2337904 - RNA, 19 nt, Artificial Sequence
  Description of Artificial Sequence: Synthetic oligonucleotide
aggacucgaccuccaucau

SEQ ID NO: 2337905 - RNA, 19 nt, Artificial Sequence
  Description of Artificial Sequence: Synthetic oligonucleotide
cugcucgcaucucuucaga

SEQ ID NO: 2337906 - RNA, 19 nt, Artificial Sequence
  Description of Artificial Sequence: Synthetic oligonucleotide
caucgcuccucaggccuag

SEQ ID NO: 2337907 - RNA, 19 nt, Artificial Sequence
  Description of Artificial Sequence: Synthetic oligonucleotide
ugagugguguggggacagu

SEQ ID NO: 2337908 - RNA, 19 nt, Artificial Sequence
  Description of Artificial Sequence: Synthetic oligonucleotide
ccucuaggaucaaggccag

SEQ ID NO: 2337909 - RNA, 19 nt, Artificial Sequence
  Description of Artificial Sequence: Synthetic oligonucleotide
cucuucuagccucuaggau

SEQ ID NO: 2337910 - RNA, 19 nt, Artificial Sequence
  Description of Artificial Sequence: Synthetic oligonucleotide
gcuuccgcacgcucacggc

SEQ ID NO: 2337911 - RNA, 19 nt, Artificial Sequence
  Description of Artificial Sequence: Synthetic oligonucleotide
gacugcauuccgacggccu

SEQ ID NO: 2337912 - RNA, 19 nt, Artificial Sequence
  Description of Artificial Sequence: Synthetic oligonucleotide
ugcauuccgacggccuguu

SEQ ID NO: 2337913 - RNA, 19 nt, Artificial Sequence
  Description of Artificial Sequence: Synthetic oligonucleotide
cuccaucaugccugucgca

SEQ ID NO: 2337914 - RNA, 19 nt, Artificial Sequence
  Description of Artificial Sequence: Synthetic oligonucleotide
caucagaacuaagcuuaaa

SEQ ID NO: 2337915 - RNA, 19 nt, Artificial Sequence
  Description of Artificial Sequence: Synthetic oligonucleotide
ccugggaccucuugguaca

SEQ ID NO: 2337916 - RNA, 19 nt, Artificial Sequence
  Description of Artificial Sequence: Synthetic oligonucleotide
aagugccagcucgcccaug

SEQ ID NO: 2337917 - RNA, 19 nt, Artificial Sequence
  Description of Artificial Sequence: Synthetic oligonucleotide
ucccuacaucuggaucugu

SEQ ID NO: 2337918 - RNA, 19 nt, Artificial Sequence
  Description of Artificial Sequence: Synthetic oligonucleotide
cauggugauggugucuggu

SEQ ID NO: 2337919 - RNA, 19 nt, Artificial Sequence
  Description of Artificial Sequence: Synthetic oligonucleotide
agccuggcucaagccccgc

SEQ ID NO: 2337920 - RNA, 19 nt, Artificial Sequence
  Description of Artificial Sequence: Synthetic oligonucleotide
ccaucaugccugucgcauc

SEQ ID NO: 2337921 - RNA, 19 nt, Artificial Sequence
  Description of Artificial Sequence: Synthetic oligonucleotide
cagcucgcccaugucacca

SEQ ID NO: 2337922 - RNA, 19 nt, Artificial Sequence
  Description of Artificial Sequence: Synthetic oligonucleotide
gcucaagccccgcuuagcu

SEQ ID NO: 2337923 - RNA, 19 nt, Artificial Sequence
  Description of Artificial Sequence: Synthetic oligonucleotide
ggcucaagccccgcuuagc

SEQ ID NO: 2337924 - RNA, 19 nt, Artificial Sequence
  Description of Artificial Sequence: Synthetic oligonucleotide
gcgagcgccuccccggggc

SEQ ID NO: 2337925 - RNA, 19 nt, Artificial Sequence
  Description of Artificial Sequence: Synthetic oligonucleotide
uuccgacggccuguucggu

SEQ ID NO: 2337926 - RNA, 19 nt, Artificial Sequence
  Description of Artificial Sequence: Synthetic oligonucleotide
gcacacaaaucaucagcgu

SEQ ID NO: 2337927 - RNA, 19 nt, Artificial Sequence
  Description of Artificial Sequence: Synthetic oligonucleotide
ccgcuuagcugaauaaaua

SEQ ID NO: 2337928 - RNA, 19 nt, Artificial Sequence
  Description of Artificial Sequence: Synthetic oligonucleotide
gcucgcccaugucaccagc

SEQ ID NO: 2337929 - RNA, 19 nt, Artificial Sequence
  Description of Artificial Sequence: Synthetic oligonucleotide
gucgccucgcggagccccg

SEQ ID NO: 2337930 - RNA, 19 nt, Artificial Sequence
  Description of Artificial Sequence: Synthetic oligonucleotide
ccucaagugccagcucgcc

SEQ ID NO: 2337931 - RNA, 19 nt, Artificial Sequence
  Description of Artificial Sequence: Synthetic oligonucleotide
guacuucccucugccuguc

SEQ ID NO: 2337932 - RNA, 19 nt, Artificial Sequence
  Description of Artificial Sequence: Synthetic oligonucleotide
gccucgucgccucgcggag

SEQ ID NO: 2337933 - RNA, 19 nt, Artificial Sequence
  Description of Artificial Sequence: Synthetic oligonucleotide
gccagacucaagacgaggu

SEQ ID NO: 2337934 - RNA, 19 nt, Artificial Sequence
  Description of Artificial Sequence: Synthetic oligonucleotide
ugguugugccagggcucca

SEQ ID NO: 2337935 - RNA, 19 nt, Artificial Sequence
  Description of Artificial Sequence: Synthetic oligonucleotide
cucgcccaugucaccagcu

SEQ ID NO: 2337936 - RNA, 19 nt, Artificial Sequence
  Description of Artificial Sequence: Synthetic oligonucleotide
gggcuaggaagaucuuucu

SEQ ID NO: 2337937 - RNA, 19 nt, Artificial Sequence
  Description of Artificial Sequence: Synthetic oligonucleotide
ggaguacuucccucugccu

SEQ ID NO: 2337938 - RNA, 19 nt, Artificial Sequence
  Description of Artificial Sequence: Synthetic oligonucleotide
cuguucggucacaggagau

SEQ ID NO: 2337939 - RNA, 19 nt, Artificial Sequence
  Description of Artificial Sequence: Synthetic oligonucleotide
gccgccucgucgccucgcg

SEQ ID NO: 2337940 - RNA, 19 nt, Artificial Sequence
  Description of Artificial Sequence: Synthetic oligonucleotide
ccgacggccuguucgguca

SEQ ID NO: 2337941 - RNA, 19 nt, Artificial Sequence
  Description of Artificial Sequence: Synthetic oligonucleotide
cccgcuuagcugaauaaau

SEQ ID NO: 2337942 - RNA, 19 nt, Artificial Sequence
  Description of Artificial Sequence: Synthetic oligonucleotide
ccugucgcaucgcuccuca

SEQ ID NO: 2337943 - RNA, 19 nt, Artificial Sequence
  Description of Artificial Sequence: Synthetic oligonucleotide
cugccgccucgucgccucg

SEQ ID NO: 2337944 - RNA, 19 nt, Artificial Sequence
  Description of Artificial Sequence: Synthetic oligonucleotide
gccccgcuuagcugaauaa

SEQ ID NO: 2337945 - RNA, 19 nt, Artificial Sequence
  Description of Artificial Sequence: Synthetic oligonucleotide
caagccccgcuuagcugaa

SEQ ID NO: 2337946 - RNA, 19 nt, Artificial Sequence
  Description of Artificial Sequence: Synthetic oligonucleotide
cuccuugucuggaguacuu

SEQ ID NO: 2337947 - RNA, 19 nt, Artificial Sequence
  Description of Artificial Sequence: Synthetic oligonucleotide
gcucgcaucucuucagauu

SEQ ID NO: 2337948 - RNA, 19 nt, Artificial Sequence
  Description of Artificial Sequence: Synthetic oligonucleotide
gacggccuguucggucaca

SEQ ID NO: 2337949 - RNA, 19 nt, Artificial Sequence
  Description of Artificial Sequence: Synthetic oligonucleotide
gcucacggccuccgaguca

SEQ ID NO: 2337950 - RNA, 19 nt, Artificial Sequence
  Description of Artificial Sequence: Synthetic oligonucleotide
cgagucacccuggauguca

SEQ ID NO: 2337951 - RNA, 19 nt, Artificial Sequence
  Description of Artificial Sequence: Synthetic oligonucleotide
ggccuaguuuaauuccguu

SEQ ID NO: 2337952 - RNA, 19 nt, Artificial Sequence
  Description of Artificial Sequence: Synthetic oligonucleotide
ucgucgccucgcggagccc

SEQ ID NO: 2337953 - RNA, 19 nt, Artificial Sequence
  Description of Artificial Sequence: Synthetic oligonucleotide
cugauguaggcagcugguu

SEQ ID NO: 2337954 - RNA, 19 nt, Artificial Sequence
  Description of Artificial Sequence: Synthetic oligonucleotide
cugcauuccgacggccugu

SEQ ID NO: 2337955 - RNA, 19 nt, Artificial Sequence
  Description of Artificial Sequence: Synthetic oligonucleotide
aucgcuccucaggccuagu

SEQ ID NO: 2337956 - RNA, 19 nt, Artificial Sequence
  Description of Artificial Sequence: Synthetic oligonucleotide
cggccuccgagucacccug

SEQ ID NO: 2337957 - RNA, 19 nt, Artificial Sequence
  Description of Artificial Sequence: Synthetic oligonucleotide
cggccuguucggucacagg

SEQ ID NO: 2337958 - RNA, 19 nt, Artificial Sequence
  Description of Artificial Sequence: Synthetic oligonucleotide
ccccgcuuagcugaauaaa

SEQ ID NO: 2337959 - RNA, 19 nt, Artificial Sequence
  Description of Artificial Sequence: Synthetic oligonucleotide
cgucgccucgcggagcccc

SEQ ID NO: 2337960 - RNA, 19 nt, Artificial Sequence
  Description of Artificial Sequence: Synthetic oligonucleotide
ccucaggccuaguuuaauu

SEQ ID NO: 2337961 - RNA, 19 nt, Artificial Sequence
  Description of Artificial Sequence: Synthetic oligonucleotide
cgcucacggccuccgaguc

SEQ ID NO: 2337962 - RNA, 19 nt, Artificial Sequence
  Description of Artificial Sequence: Synthetic oligonucleotide
cgcacgcucacggccuccg

SEQ ID NO: 2337963 - RNA, 19 nt, Artificial Sequence
  Description of Artificial Sequence: Synthetic oligonucleotide
gcauuccgacggccuguuc

SEQ ID NO: 2337964 - RNA, 19 nt, Artificial Sequence
  Description of Artificial Sequence: Synthetic oligonucleotide
ccgccucgucgccucgcgg

SEQ ID NO: 2337965 - RNA, 19 nt, Artificial Sequence
  Description of Artificial Sequence: Synthetic oligonucleotide
ccuuucccuacaucuggau

SEQ ID NO: 2337966 - RNA, 19 nt, Artificial Sequence
  Description of Artificial Sequence: Synthetic oligonucleotide
ccucgucgccucgcggagc

SEQ ID NO: 2337967 - RNA, 19 nt, Artificial Sequence
  Description of Artificial Sequence: Synthetic oligonucleotide
cgccucgucgccucgcgga

SEQ ID NO: 2337968 - RNA, 19 nt, Artificial Sequence
  Description of Artificial Sequence: Synthetic oligonucleotide
ggggaacucagagcugcau

SEQ ID NO: 2337969 - RNA, 19 nt, Artificial Sequence
  Description of Artificial Sequence: Synthetic oligonucleotide
gccugucgcaucgcuccuc

SEQ ID NO: 2337970 - RNA, 19 nt, Artificial Sequence
  Description of Artificial Sequence: Synthetic oligonucleotide
gcacgcucacggccuccga

SEQ ID NO: 2337971 - RNA, 19 nt, Artificial Sequence
  Description of Artificial Sequence: Synthetic oligonucleotide
cggcgcgagcgccuccccg

SEQ ID NO: 2337972 - RNA, 19 nt, Artificial Sequence
  Description of Artificial Sequence: Synthetic oligonucleotide
ccgagucacccuggauguc

SEQ ID NO: 2337973 - RNA, 19 nt, Artificial Sequence
  Description of Artificial Sequence: Synthetic oligonucleotide
cagcuagcuuccgcacgcu

SEQ ID NO: 2337974 - RNA, 19 nt, Artificial Sequence
  Description of Artificial Sequence: Synthetic oligonucleotide
gccuggcucaagccccgcu

SEQ ID NO: 2337975 - RNA, 19 nt, Artificial Sequence
  Description of Artificial Sequence: Synthetic oligonucleotide
cgcgagcgccuccccgggg

SEQ ID NO: 2337976 - RNA, 19 nt, Artificial Sequence
  Description of Artificial Sequence: Synthetic oligonucleotide
ccgcacgcucacggccucc

SEQ ID NO: 2337977 - RNA, 19 nt, Artificial Sequence
  Description of Artificial Sequence: Synthetic oligonucleotide
ccggcgcgagcgccucccc

SEQ ID NO: 2337978 - RNA, 19 nt, Artificial Sequence
  Description of Artificial Sequence: Synthetic oligonucleotide
cgcuccucaggccuaguuu

SEQ ID NO: 2337979 - RNA, 19 nt, Artificial Sequence
  Description of Artificial Sequence: Synthetic oligonucleotide
cgccucgcggagccccggc

SEQ ID NO: 2337980 - RNA, 19 nt, Artificial Sequence
  Description of Artificial Sequence: Synthetic oligonucleotide
ccaugucaccagcuagcuu

SEQ ID NO: 2337981 - RNA, 19 nt, Artificial Sequence
  Description of Artificial Sequence: Synthetic oligonucleotide
cgaccuccaucaugccugu

SEQ ID NO: 2337982 - RNA, 19 nt, Artificial Sequence
  Description of Artificial Sequence: Synthetic oligonucleotide
ccggggccgccuggcgccc

SEQ ID NO: 2337983 - RNA, 19 nt, Artificial Sequence
  Description of Artificial Sequence: Synthetic oligonucleotide
ccgccggcgcgagcgccuc

SEQ ID NO: 2337984 - RNA, 19 nt, Artificial Sequence
  Description of Artificial Sequence: Synthetic oligonucleotide
gccgccggcgcgagcgccu

SEQ ID NO: 2337985 - RNA, 19 nt, Artificial Sequence
  Description of Artificial Sequence: Synthetic oligonucleotide
cgccggcgcgagcgccucc

SEQ ID NO: 2337986 - RNA, 19 nt, Artificial Sequence
  Description of Artificial Sequence: Synthetic oligonucleotide
cggggccgccuggcgcccg

SEQ ID NO: 2337987 - RNA, 19 nt, Artificial Sequence
  Description of Artificial Sequence: Synthetic oligonucleotide
aaugguauaauguucaccu

SEQ ID NO: 2337988 - RNA, 19 nt, Artificial Sequence
  Description of Artificial Sequence: Synthetic oligonucleotide
acaaauaagcauuucccgc

SEQ ID NO: 2337989 - RNA, 19 nt, Artificial Sequence
  Description of Artificial Sequence: Synthetic oligonucleotide
aauuuaaugguauaauguu

SEQ ID NO: 2337990 - RNA, 19 nt, Artificial Sequence
  Description of Artificial Sequence: Synthetic oligonucleotide
uacaaauaagcauuucccg

SEQ ID NO: 2337991 - RNA, 19 nt, Artificial Sequence
  Description of Artificial Sequence: Synthetic oligonucleotide
agauauugauucuuccucc

SEQ ID NO: 2337992 - RNA, 19 nt, Artificial Sequence
  Description of Artificial Sequence: Synthetic oligonucleotide
aucuguuggaaacugauag

SEQ ID NO: 2337993 - RNA, 19 nt, Artificial Sequence
  Description of Artificial Sequence: Synthetic oligonucleotide
aaagauauugauucuuccu

SEQ ID NO: 2337994 - RNA, 19 nt, Artificial Sequence
  Description of Artificial Sequence: Synthetic oligonucleotide
aacugauagaugugaacac

SEQ ID NO: 2337995 - RNA, 19 nt, Artificial Sequence
  Description of Artificial Sequence: Synthetic oligonucleotide
uuaaggugcucaaauuugg

SEQ ID NO: 2337996 - RNA, 19 nt, Artificial Sequence
  Description of Artificial Sequence: Synthetic oligonucleotide
uuuaaggugcucaaauuug

SEQ ID NO: 2337997 - RNA, 19 nt, Artificial Sequence
  Description of Artificial Sequence: Synthetic oligonucleotide
uccaacuuguaucucaucc

SEQ ID NO: 2337998 - RNA, 19 nt, Artificial Sequence
  Description of Artificial Sequence: Synthetic oligonucleotide
aauguccauucauugcacc

SEQ ID NO: 2337999 - RNA, 19 nt, Artificial Sequence
  Description of Artificial Sequence: Synthetic oligonucleotide
ucuucaauucuucuuggag

SEQ ID NO: 2338000 - RNA, 19 nt, Artificial Sequence
  Description of Artificial Sequence: Synthetic oligonucleotide
uggaacagaucacagguag

SEQ ID NO: 2338001 - RNA, 19 nt, Artificial Sequence
  Description of Artificial Sequence: Synthetic oligonucleotide
uacaauaccccaaggauac

SEQ ID NO: 2338002 - RNA, 19 nt, Artificial Sequence
  Description of Artificial Sequence: Synthetic oligonucleotide
uaaugcugcuacuugaugc

SEQ ID NO: 2338003 - RNA, 19 nt, Artificial Sequence
  Description of Artificial Sequence: Synthetic oligonucleotide
gauacgagagucaugguag

SEQ ID NO: 2338004 - RNA, 19 nt, Artificial Sequence
  Description of Artificial Sequence: Synthetic oligonucleotide
auggauacgagagucaugg

SEQ ID NO: 2338005 - RNA, 19 nt, Artificial Sequence
  Description of Artificial Sequence: Synthetic oligonucleotide
uguacaauaccccaaggau

SEQ ID NO: 2338006 - RNA, 19 nt, Artificial Sequence
  Description of Artificial Sequence: Synthetic oligonucleotide
uucuuagagaaagauauug

SEQ ID NO: 2338007 - RNA, 19 nt, Artificial Sequence
  Description of Artificial Sequence: Synthetic oligonucleotide
auacuggcgagcuuugacc

SEQ ID NO: 2338008 - RNA, 19 nt, Artificial Sequence
  Description of Artificial Sequence: Synthetic oligonucleotide
ugguauaauguucaccuug

SEQ ID NO: 2338009 - RNA, 19 nt, Artificial Sequence
  Description of Artificial Sequence: Synthetic oligonucleotide
uucaaaauggcuuccuucu

SEQ ID NO: 2338010 - RNA, 19 nt, Artificial Sequence
  Description of Artificial Sequence: Synthetic oligonucleotide
auugaggaccaauucacuc

SEQ ID NO: 2338011 - RNA, 19 nt, Artificial Sequence
  Description of Artificial Sequence: Synthetic oligonucleotide
ucuuagagaaagauauuga

SEQ ID NO: 2338012 - RNA, 19 nt, Artificial Sequence
  Description of Artificial Sequence: Synthetic oligonucleotide
uuccacuuguacaauaccc

SEQ ID NO: 2338013 - RNA, 19 nt, Artificial Sequence
  Description of Artificial Sequence: Synthetic oligonucleotide
uguccuuagagaauggccu

SEQ ID NO: 2338014 - RNA, 19 nt, Artificial Sequence
  Description of Artificial Sequence: Synthetic oligonucleotide
uuuuaaggugcucaaauuu

SEQ ID NO: 2338015 - RNA, 19 nt, Artificial Sequence
  Description of Artificial Sequence: Synthetic oligonucleotide
aauaagcauuucccgcagc

SEQ ID NO: 2338016 - RNA, 19 nt, Artificial Sequence
  Description of Artificial Sequence: Synthetic oligonucleotide
cucguagugccucauaugg

SEQ ID NO: 2338017 - RNA, 19 nt, Artificial Sequence
  Description of Artificial Sequence: Synthetic oligonucleotide
cagcaaauggcaaaugucc

SEQ ID NO: 2338018 - RNA, 19 nt, Artificial Sequence
  Description of Artificial Sequence: Synthetic oligonucleotide
ucuuuuaaggugcucaaau

SEQ ID NO: 2338019 - RNA, 19 nt, Artificial Sequence
  Description of Artificial Sequence: Synthetic oligonucleotide
uagucuucuucuuagagaa

SEQ ID NO: 2338020 - RNA, 19 nt, Artificial Sequence
  Description of Artificial Sequence: Synthetic oligonucleotide
ucuuauuuccaacuuguau

SEQ ID NO: 2338021 - RNA, 19 nt, Artificial Sequence
  Description of Artificial Sequence: Synthetic oligonucleotide
aaauaagcauuucccgcag

SEQ ID NO: 2338022 - RNA, 19 nt, Artificial Sequence
  Description of Artificial Sequence: Synthetic oligonucleotide
uuguacaauaccccaagga

SEQ ID NO: 2338023 - RNA, 19 nt, Artificial Sequence
  Description of Artificial Sequence: Synthetic oligonucleotide
auuuaaugguauaauguuc

SEQ ID NO: 2338024 - RNA, 19 nt, Artificial Sequence
  Description of Artificial Sequence: Synthetic oligonucleotide
uagaacucgugucucuugg

SEQ ID NO: 2338025 - RNA, 19 nt, Artificial Sequence
  Description of Artificial Sequence: Synthetic oligonucleotide
guacaaauaagcauuuccc

SEQ ID NO: 2338026 - RNA, 19 nt, Artificial Sequence
  Description of Artificial Sequence: Synthetic oligonucleotide
ugcaccauugaucuuggca

SEQ ID NO: 2338027 - RNA, 19 nt, Artificial Sequence
  Description of Artificial Sequence: Synthetic oligonucleotide
augguuaagaggucaagug

SEQ ID NO: 2338028 - RNA, 19 nt, Artificial Sequence
  Description of Artificial Sequence: Synthetic oligonucleotide
ucuuaaugcugcuacuuga

SEQ ID NO: 2338029 - RNA, 19 nt, Artificial Sequence
  Description of Artificial Sequence: Synthetic oligonucleotide
aaauuguaucugccuuggc

SEQ ID NO: 2338030 - RNA, 19 nt, Artificial Sequence
  Description of Artificial Sequence: Synthetic oligonucleotide
auucauugcaccauugauc

SEQ ID NO: 2338031 - RNA, 19 nt, Artificial Sequence
  Description of Artificial Sequence: Synthetic oligonucleotide
ucuguaauucgcuuuuaga

SEQ ID NO: 2338032 - RNA, 19 nt, Artificial Sequence
  Description of Artificial Sequence: Synthetic oligonucleotide
ucucuugaagacugagugg

SEQ ID NO: 2338033 - RNA, 19 nt, Artificial Sequence
  Description of Artificial Sequence: Synthetic oligonucleotide
acuuguacaauaccccaag

SEQ ID NO: 2338034 - RNA, 19 nt, Artificial Sequence
  Description of Artificial Sequence: Synthetic oligonucleotide
ugguuaagaggucaagugu

SEQ ID NO: 2338035 - RNA, 19 nt, Artificial Sequence
  Description of Artificial Sequence: Synthetic oligonucleotide
uccuucuuaaugcugcuac

SEQ ID NO: 2338036 - RNA, 19 nt, Artificial Sequence
  Description of Artificial Sequence: Synthetic oligonucleotide
aucacagguagucuucuuc

SEQ ID NO: 2338037 - RNA, 19 nt, Artificial Sequence
  Description of Artificial Sequence: Synthetic oligonucleotide
uucgcuuuuagaaauugua

SEQ ID NO: 2338038 - RNA, 19 nt, Artificial Sequence
  Description of Artificial Sequence: Synthetic oligonucleotide
cuacuugaugccauaaaug

SEQ ID NO: 2338039 - RNA, 19 nt, Artificial Sequence
  Description of Artificial Sequence: Synthetic oligonucleotide
uucuguaauucgcuuuuag

SEQ ID NO: 2338040 - RNA, 19 nt, Artificial Sequence
  Description of Artificial Sequence: Synthetic oligonucleotide
cuguaaagcucguagugcc

SEQ ID NO: 2338041 - RNA, 19 nt, Artificial Sequence
  Description of Artificial Sequence: Synthetic oligonucleotide
gaaacugauagaugugaac

SEQ ID NO: 2338042 - RNA, 19 nt, Artificial Sequence
  Description of Artificial Sequence: Synthetic oligonucleotide
uugaggaccaauucacuca

SEQ ID NO: 2338043 - RNA, 19 nt, Artificial Sequence
  Description of Artificial Sequence: Synthetic oligonucleotide
uucaauucuucuuggagau

SEQ ID NO: 2338044 - RNA, 19 nt, Artificial Sequence
  Description of Artificial Sequence: Synthetic oligonucleotide
uguaucucauccauacuuc

SEQ ID NO: 2338045 - RNA, 19 nt, Artificial Sequence
  Description of Artificial Sequence: Synthetic oligonucleotide
uugaugccauaaaugacug

SEQ ID NO: 2338046 - RNA, 19 nt, Artificial Sequence
  Description of Artificial Sequence: Synthetic oligonucleotide
agaaagauauugauucuuc

SEQ ID NO: 2338047 - RNA, 19 nt, Artificial Sequence
  Description of Artificial Sequence: Synthetic oligonucleotide
ugaaguagaggcacacaug

SEQ ID NO: 2338048 - RNA, 19 nt, Artificial Sequence
  Description of Artificial Sequence: Synthetic oligonucleotide
aauucgcuuuuagaaauug

SEQ ID NO: 2338049 - RNA, 19 nt, Artificial Sequence
  Description of Artificial Sequence: Synthetic oligonucleotide
cuuugaccaucuuauuucc

SEQ ID NO: 2338050 - RNA, 19 nt, Artificial Sequence
  Description of Artificial Sequence: Synthetic oligonucleotide
ugaaaagcccauucccucc

SEQ ID NO: 2338051 - RNA, 19 nt, Artificial Sequence
  Description of Artificial Sequence: Synthetic oligonucleotide
aauggcaaauguccauuca

SEQ ID NO: 2338052 - RNA, 19 nt, Artificial Sequence
  Description of Artificial Sequence: Synthetic oligonucleotide
aagagcacgcuugaucuuc

SEQ ID NO: 2338053 - RNA, 19 nt, Artificial Sequence
  Description of Artificial Sequence: Synthetic oligonucleotide
aguagaggcacacauggau

SEQ ID NO: 2338054 - RNA, 19 nt, Artificial Sequence
  Description of Artificial Sequence: Synthetic oligonucleotide
guuucauucucucuuccug

SEQ ID NO: 2338055 - RNA, 19 nt, Artificial Sequence
  Description of Artificial Sequence: Synthetic oligonucleotide
augaaguagaggcacacau

SEQ ID NO: 2338056 - RNA, 19 nt, Artificial Sequence
  Description of Artificial Sequence: Synthetic oligonucleotide
cuguaauucgcuuuuagaa

SEQ ID NO: 2338057 - RNA, 19 nt, Artificial Sequence
  Description of Artificial Sequence: Synthetic oligonucleotide
uuaaugcugcuacuugaug

SEQ ID NO: 2338058 - RNA, 19 nt, Artificial Sequence
  Description of Artificial Sequence: Synthetic oligonucleotide
accauugaggaccaauuca

SEQ ID NO: 2338059 - RNA, 19 nt, Artificial Sequence
  Description of Artificial Sequence: Synthetic oligonucleotide
uuugcagcgccuguaaagc

SEQ ID NO: 2338060 - RNA, 19 nt, Artificial Sequence
  Description of Artificial Sequence: Synthetic oligonucleotide
uaaugguauaauguucacc

SEQ ID NO: 2338061 - RNA, 19 nt, Artificial Sequence
  Description of Artificial Sequence: Synthetic oligonucleotide
auaagcauuucccgcagcu

SEQ ID NO: 2338062 - RNA, 19 nt, Artificial Sequence
  Description of Artificial Sequence: Synthetic oligonucleotide
uuccuaccacagcaaaugg

SEQ ID NO: 2338063 - RNA, 19 nt, Artificial Sequence
  Description of Artificial Sequence: Synthetic oligonucleotide
ucaucuguuggaaacugau

SEQ ID NO: 2338064 - RNA, 19 nt, Artificial Sequence
  Description of Artificial Sequence: Synthetic oligonucleotide
uaccccaaggauacuggcg

SEQ ID NO: 2338065 - RNA, 19 nt, Artificial Sequence
  Description of Artificial Sequence: Synthetic oligonucleotide
guuugcagcgccuguaaag

SEQ ID NO: 2338066 - RNA, 19 nt, Artificial Sequence
  Description of Artificial Sequence: Synthetic oligonucleotide
uaaggugcucaaauuuggc

SEQ ID NO: 2338067 - RNA, 19 nt, Artificial Sequence
  Description of Artificial Sequence: Synthetic oligonucleotide
auaccccaaggauacuggc

SEQ ID NO: 2338068 - RNA, 19 nt, Artificial Sequence
  Description of Artificial Sequence: Synthetic oligonucleotide
uuuacucgcugcacaaaca

SEQ ID NO: 2338069 - RNA, 19 nt, Artificial Sequence
  Description of Artificial Sequence: Synthetic oligonucleotide
uagagaauggccuguugga

SEQ ID NO: 2338070 - RNA, 19 nt, Artificial Sequence
  Description of Artificial Sequence: Synthetic oligonucleotide
caauuuaaugguauaaugu

SEQ ID NO: 2338071 - RNA, 19 nt, Artificial Sequence
  Description of Artificial Sequence: Synthetic oligonucleotide
aggaccaauucacucauga

SEQ ID NO: 2338072 - RNA, 19 nt, Artificial Sequence
  Description of Artificial Sequence: Synthetic oligonucleotide
caaauaagcauuucccgca

SEQ ID NO: 2338073 - RNA, 19 nt, Artificial Sequence
  Description of Artificial Sequence: Synthetic oligonucleotide
cauugcaccauugaucuug

SEQ ID NO: 2338074 - RNA, 19 nt, Artificial Sequence
  Description of Artificial Sequence: Synthetic oligonucleotide
ucgcuuuuagaaauuguau

SEQ ID NO: 2338075 - RNA, 19 nt, Artificial Sequence
  Description of Artificial Sequence: Synthetic oligonucleotide
cuuuacucgcugcacaaac

SEQ ID NO: 2338076 - RNA, 19 nt, Artificial Sequence
  Description of Artificial Sequence: Synthetic oligonucleotide
agaacucgugucucuuggc

SEQ ID NO: 2338077 - RNA, 19 nt, Artificial Sequence
  Description of Artificial Sequence: Synthetic oligonucleotide
aguguccuuagagaauggc

SEQ ID NO: 2338078 - RNA, 19 nt, Artificial Sequence
  Description of Artificial Sequence: Synthetic oligonucleotide
gauacuggcgagcuuugac

SEQ ID NO: 2338079 - RNA, 19 nt, Artificial Sequence
  Description of Artificial Sequence: Synthetic oligonucleotide
aagcauuucccgcagcuuu

SEQ ID NO: 2338080 - RNA, 19 nt, Artificial Sequence
  Description of Artificial Sequence: Synthetic oligonucleotide
uagaggcacacauggauac

SEQ ID NO: 2338081 - RNA, 19 nt, Artificial Sequence
  Description of Artificial Sequence: Synthetic oligonucleotide
agaauggccuguuggagca

SEQ ID NO: 2338082 - RNA, 19 nt, Artificial Sequence
  Description of Artificial Sequence: Synthetic oligonucleotide
uccuaccacagcaaauggc

SEQ ID NO: 2338083 - RNA, 19 nt, Artificial Sequence
  Description of Artificial Sequence: Synthetic oligonucleotide
uccauacuuccuaccacag

SEQ ID NO: 2338084 - RNA, 19 nt, Artificial Sequence
  Description of Artificial Sequence: Synthetic oligonucleotide
acucgugucucuuggcuuc

SEQ ID NO: 2338085 - RNA, 19 nt, Artificial Sequence
  Description of Artificial Sequence: Synthetic oligonucleotide
ucguagugccucauauggg

SEQ ID NO: 2338086 - RNA, 19 nt, Artificial Sequence
  Description of Artificial Sequence: Synthetic oligonucleotide
uuacucgcugcacaaacau

SEQ ID NO: 2338087 - RNA, 19 nt, Artificial Sequence
  Description of Artificial Sequence: Synthetic oligonucleotide
auaaaugacuggcucugga

SEQ ID NO: 2338088 - RNA, 19 nt, Artificial Sequence
  Description of Artificial Sequence: Synthetic oligonucleotide
aacuucuguaauucgcuuu

SEQ ID NO: 2338089 - RNA, 19 nt, Artificial Sequence
  Description of Artificial Sequence: Synthetic oligonucleotide
uaaaugacuggcucuggaa

SEQ ID NO: 2338090 - RNA, 19 nt, Artificial Sequence
  Description of Artificial Sequence: Synthetic oligonucleotide
uggagcaaugaaguagagg

SEQ ID NO: 2338091 - RNA, 19 nt, Artificial Sequence
  Description of Artificial Sequence: Synthetic oligonucleotide
cuuccuaccacagcaaaug

SEQ ID NO: 2338092 - RNA, 19 nt, Artificial Sequence
  Description of Artificial Sequence: Synthetic oligonucleotide
uuaaugguauaauguucac

SEQ ID NO: 2338093 - RNA, 19 nt, Artificial Sequence
  Description of Artificial Sequence: Synthetic oligonucleotide
ugccauaaaugacuggcuc

SEQ ID NO: 2338094 - RNA, 19 nt, Artificial Sequence
  Description of Artificial Sequence: Synthetic oligonucleotide
acuugaugccauaaaugac

SEQ ID NO: 2338095 - RNA, 19 nt, Artificial Sequence
  Description of Artificial Sequence: Synthetic oligonucleotide
ucaccauagaacucguguc

SEQ ID NO: 2338096 - RNA, 19 nt, Artificial Sequence
  Description of Artificial Sequence: Synthetic oligonucleotide
cuugaugccauaaaugacu

SEQ ID NO: 2338097 - RNA, 19 nt, Artificial Sequence
  Description of Artificial Sequence: Synthetic oligonucleotide
cagguagucuucuucuuag

SEQ ID NO: 2338098 - RNA, 19 nt, Artificial Sequence
  Description of Artificial Sequence: Synthetic oligonucleotide
caaguguccuuagagaaug

SEQ ID NO: 2338099 - RNA, 19 nt, Artificial Sequence
  Description of Artificial Sequence: Synthetic oligonucleotide
guaucucauccauacuucc

SEQ ID NO: 2338100 - RNA, 19 nt, Artificial Sequence
  Description of Artificial Sequence: Synthetic oligonucleotide
gaacagaucacagguaguc

SEQ ID NO: 2338101 - RNA, 19 nt, Artificial Sequence
  Description of Artificial Sequence: Synthetic oligonucleotide
cuuguacaauaccccaagg

SEQ ID NO: 2338102 - RNA, 19 nt, Artificial Sequence
  Description of Artificial Sequence: Synthetic oligonucleotide
uagugucgucaucuguugg

SEQ ID NO: 2338103 - RNA, 19 nt, Artificial Sequence
  Description of Artificial Sequence: Synthetic oligonucleotide
gucgucaucuguuggaaac

SEQ ID NO: 2338104 - RNA, 19 nt, Artificial Sequence
  Description of Artificial Sequence: Synthetic oligonucleotide
aaggauacuggcgagcuuu

SEQ ID NO: 2338105 - RNA, 19 nt, Artificial Sequence
  Description of Artificial Sequence: Synthetic oligonucleotide
agagucaugguaguuaaaa

SEQ ID NO: 2338106 - RNA, 19 nt, Artificial Sequence
  Description of Artificial Sequence: Synthetic oligonucleotide
gguagucuucuucuuagag

SEQ ID NO: 2338107 - RNA, 19 nt, Artificial Sequence
  Description of Artificial Sequence: Synthetic oligonucleotide
auuucccgcagcuuuacaa

SEQ ID NO: 2338108 - RNA, 19 nt, Artificial Sequence
  Description of Artificial Sequence: Synthetic oligonucleotide
uuuccaacuuguaucucau

SEQ ID NO: 2338109 - RNA, 19 nt, Artificial Sequence
  Description of Artificial Sequence: Synthetic oligonucleotide
aaacuucuguaauucgcuu

SEQ ID NO: 2338110 - RNA, 19 nt, Artificial Sequence
  Description of Artificial Sequence: Synthetic oligonucleotide
acgcucaccauagaacucg

SEQ ID NO: 2338111 - RNA, 19 nt, Artificial Sequence
  Description of Artificial Sequence: Synthetic oligonucleotide
ggcaaauguccauucauug

SEQ ID NO: 2338112 - RNA, 19 nt, Artificial Sequence
  Description of Artificial Sequence: Synthetic oligonucleotide
uccauucauugcaccauug

SEQ ID NO: 2338113 - RNA, 19 nt, Artificial Sequence
  Description of Artificial Sequence: Synthetic oligonucleotide
ucaaguguccuuagagaau

SEQ ID NO: 2338114 - RNA, 19 nt, Artificial Sequence
  Description of Artificial Sequence: Synthetic oligonucleotide
acucgcugcacaaacaucu

SEQ ID NO: 2338115 - RNA, 19 nt, Artificial Sequence
  Description of Artificial Sequence: Synthetic oligonucleotide
uguaaagcucguagugccu

SEQ ID NO: 2338116 - RNA, 19 nt, Artificial Sequence
  Description of Artificial Sequence: Synthetic oligonucleotide
agcuuugaccaucuuauuu

SEQ ID NO: 2338117 - RNA, 19 nt, Artificial Sequence
  Description of Artificial Sequence: Synthetic oligonucleotide
aguuucauucucucuuccu

SEQ ID NO: 2338118 - RNA, 19 nt, Artificial Sequence
  Description of Artificial Sequence: Synthetic oligonucleotide
acuucuguaauucgcuuuu

SEQ ID NO: 2338119 - RNA, 19 nt, Artificial Sequence
  Description of Artificial Sequence: Synthetic oligonucleotide
aacagaucacagguagucu

SEQ ID NO: 2338120 - RNA, 19 nt, Artificial Sequence
  Description of Artificial Sequence: Synthetic oligonucleotide
guuaagaggucaagugucc

SEQ ID NO: 2338121 - RNA, 19 nt, Artificial Sequence
  Description of Artificial Sequence: Synthetic oligonucleotide
gcuuugaccaucuuauuuc

SEQ ID NO: 2338122 - RNA, 19 nt, Artificial Sequence
  Description of Artificial Sequence: Synthetic oligonucleotide
guggcuuguuuucugggcc

SEQ ID NO: 2338123 - RNA, 19 nt, Artificial Sequence
  Description of Artificial Sequence: Synthetic oligonucleotide
gcaaauguccauucauugc

SEQ ID NO: 2338124 - RNA, 19 nt, Artificial Sequence
  Description of Artificial Sequence: Synthetic oligonucleotide
cacgcuugaucuucaauuc

SEQ ID NO: 2338125 - RNA, 19 nt, Artificial Sequence
  Description of Artificial Sequence: Synthetic oligonucleotide
ugauagaugugaacaccau

SEQ ID NO: 2338126 - RNA, 19 nt, Artificial Sequence
  Description of Artificial Sequence: Synthetic oligonucleotide
uucuuucggucuuuguccu

SEQ ID NO: 2338127 - RNA, 19 nt, Artificial Sequence
  Description of Artificial Sequence: Synthetic oligonucleotide
uccucugacgcucaccaua

SEQ ID NO: 2338128 - RNA, 19 nt, Artificial Sequence
  Description of Artificial Sequence: Synthetic oligonucleotide
guaauucgcuuuuagaaau

SEQ ID NO: 2338129 - RNA, 19 nt, Artificial Sequence
  Description of Artificial Sequence: Synthetic oligonucleotide
cucauaugggucugcuccc

SEQ ID NO: 2338130 - RNA, 19 nt, Artificial Sequence
  Description of Artificial Sequence: Synthetic oligonucleotide
gguauaauguucaccuugc

SEQ ID NO: 2338131 - RNA, 19 nt, Artificial Sequence
  Description of Artificial Sequence: Synthetic oligonucleotide
aacaccauugaggaccaau

SEQ ID NO: 2338132 - RNA, 19 nt, Artificial Sequence
  Description of Artificial Sequence: Synthetic oligonucleotide
ucucauccauacuuccuac

SEQ ID NO: 2338133 - RNA, 19 nt, Artificial Sequence
  Description of Artificial Sequence: Synthetic oligonucleotide
guuuguacaaauaagcauu

SEQ ID NO: 2338134 - RNA, 19 nt, Artificial Sequence
  Description of Artificial Sequence: Synthetic oligonucleotide
ucgcugcacaaacaucugc

SEQ ID NO: 2338135 - RNA, 19 nt, Artificial Sequence
  Description of Artificial Sequence: Synthetic oligonucleotide
ucaugguuaagaggucaag

SEQ ID NO: 2338136 - RNA, 19 nt, Artificial Sequence
  Description of Artificial Sequence: Synthetic oligonucleotide
aucucauccauacuuccua

SEQ ID NO: 2338137 - RNA, 19 nt, Artificial Sequence
  Description of Artificial Sequence: Synthetic oligonucleotide
guagugucgucaucuguug

SEQ ID NO: 2338138 - RNA, 19 nt, Artificial Sequence
  Description of Artificial Sequence: Synthetic oligonucleotide
ucauaugggucugcucccg

SEQ ID NO: 2338139 - RNA, 19 nt, Artificial Sequence
  Description of Artificial Sequence: Synthetic oligonucleotide
cucauccauacuuccuacc

SEQ ID NO: 2338140 - RNA, 19 nt, Artificial Sequence
  Description of Artificial Sequence: Synthetic oligonucleotide
gauccuccauguuuguaca

SEQ ID NO: 2338141 - RNA, 19 nt, Artificial Sequence
  Description of Artificial Sequence: Synthetic oligonucleotide
caauucacucaugagcuuc

SEQ ID NO: 2338142 - RNA, 19 nt, Artificial Sequence
  Description of Artificial Sequence: Synthetic oligonucleotide
guguccuuagagaauggcc

SEQ ID NO: 2338143 - RNA, 19 nt, Artificial Sequence
  Description of Artificial Sequence: Synthetic oligonucleotide
ucuuucaaaauggcuuccu

SEQ ID NO: 2338144 - RNA, 19 nt, Artificial Sequence
  Description of Artificial Sequence: Synthetic oligonucleotide
uucuuucaaaauggcuucc

SEQ ID NO: 2338145 - RNA, 19 nt, Artificial Sequence
  Description of Artificial Sequence: Synthetic oligonucleotide
aacucgugucucuuggcuu

SEQ ID NO: 2338146 - RNA, 19 nt, Artificial Sequence
  Description of Artificial Sequence: Synthetic oligonucleotide
cauucucucuuccugguga

SEQ ID NO: 2338147 - RNA, 19 nt, Artificial Sequence
  Description of Artificial Sequence: Synthetic oligonucleotide
uuaagaggucaaguguccu

SEQ ID NO: 2338148 - RNA, 19 nt, Artificial Sequence
  Description of Artificial Sequence: Synthetic oligonucleotide
ugcuacuugaugccauaaa

SEQ ID NO: 2338149 - RNA, 19 nt, Artificial Sequence
  Description of Artificial Sequence: Synthetic oligonucleotide
gaaaagcccauucccucca

SEQ ID NO: 2338150 - RNA, 19 nt, Artificial Sequence
  Description of Artificial Sequence: Synthetic oligonucleotide
caucuuauuuccaacuugu

SEQ ID NO: 2338151 - RNA, 19 nt, Artificial Sequence
  Description of Artificial Sequence: Synthetic oligonucleotide
uaaagcucguagugccuca

SEQ ID NO: 2338152 - RNA, 19 nt, Artificial Sequence
  Description of Artificial Sequence: Synthetic oligonucleotide
uccuuuacucgcugcacaa

SEQ ID NO: 2338153 - RNA, 19 nt, Artificial Sequence
  Description of Artificial Sequence: Synthetic oligonucleotide
uaauucgcuuuuagaaauu

SEQ ID NO: 2338154 - RNA, 19 nt, Artificial Sequence
  Description of Artificial Sequence: Synthetic oligonucleotide
ugcagcgccuguaaagcuc

SEQ ID NO: 2338155 - RNA, 19 nt, Artificial Sequence
  Description of Artificial Sequence: Synthetic oligonucleotide
agcucguagugccucauau

SEQ ID NO: 2338156 - RNA, 19 nt, Artificial Sequence
  Description of Artificial Sequence: Synthetic oligonucleotide
cauaaaugacuggcucugg

SEQ ID NO: 2338157 - RNA, 19 nt, Artificial Sequence
  Description of Artificial Sequence: Synthetic oligonucleotide
uuccuggugaauucuuuua

SEQ ID NO: 2338158 - RNA, 19 nt, Artificial Sequence
  Description of Artificial Sequence: Synthetic oligonucleotide
ugugaacaccauugaggac

SEQ ID NO: 2338159 - RNA, 19 nt, Artificial Sequence
  Description of Artificial Sequence: Synthetic oligonucleotide
gguuaagaggucaaguguc

SEQ ID NO: 2338160 - RNA, 19 nt, Artificial Sequence
  Description of Artificial Sequence: Synthetic oligonucleotide
agacugaguggcuuguuuu

SEQ ID NO: 2338161 - RNA, 19 nt, Artificial Sequence
  Description of Artificial Sequence: Synthetic oligonucleotide
gcucuucaugguuaagagg

SEQ ID NO: 2338162 - RNA, 19 nt, Artificial Sequence
  Description of Artificial Sequence: Synthetic oligonucleotide
agaggucaaguguccuuag

SEQ ID NO: 2338163 - RNA, 19 nt, Artificial Sequence
  Description of Artificial Sequence: Synthetic oligonucleotide
aguagugucgucaucuguu

SEQ ID NO: 2338164 - RNA, 19 nt, Artificial Sequence
  Description of Artificial Sequence: Synthetic oligonucleotide
guccuuagagaauggccug

SEQ ID NO: 2338165 - RNA, 19 nt, Artificial Sequence
  Description of Artificial Sequence: Synthetic oligonucleotide
agcaaauggcaaaugucca

SEQ ID NO: 2338166 - RNA, 19 nt, Artificial Sequence
  Description of Artificial Sequence: Synthetic oligonucleotide
auugcaccauugaucuugg

SEQ ID NO: 2338167 - RNA, 19 nt, Artificial Sequence
  Description of Artificial Sequence: Synthetic oligonucleotide
acgcuugaucuucaauucu

SEQ ID NO: 2338168 - RNA, 19 nt, Artificial Sequence
  Description of Artificial Sequence: Synthetic oligonucleotide
uuggcaguagugucgucau

SEQ ID NO: 2338169 - RNA, 19 nt, Artificial Sequence
  Description of Artificial Sequence: Synthetic oligonucleotide
auacgagagucaugguagu

SEQ ID NO: 2338170 - RNA, 19 nt, Artificial Sequence
  Description of Artificial Sequence: Synthetic oligonucleotide
acauggauacgagagucau

SEQ ID NO: 2338171 - RNA, 19 nt, Artificial Sequence
  Description of Artificial Sequence: Synthetic oligonucleotide
caccauugaggaccaauuc

SEQ ID NO: 2338172 - RNA, 19 nt, Artificial Sequence
  Description of Artificial Sequence: Synthetic oligonucleotide
cucaccauagaacucgugu

SEQ ID NO: 2338173 - RNA, 19 nt, Artificial Sequence
  Description of Artificial Sequence: Synthetic oligonucleotide
cugaguggcuuguuuucug

SEQ ID NO: 2338174 - RNA, 19 nt, Artificial Sequence
  Description of Artificial Sequence: Synthetic oligonucleotide
gccuguaaagcucguagug

SEQ ID NO: 2338175 - RNA, 19 nt, Artificial Sequence
  Description of Artificial Sequence: Synthetic oligonucleotide
uccaguuugcagcgccugu

SEQ ID NO: 2338176 - RNA, 19 nt, Artificial Sequence
  Description of Artificial Sequence: Synthetic oligonucleotide
agcuucuuucaaaauggcu

SEQ ID NO: 2338177 - RNA, 19 nt, Artificial Sequence
  Description of Artificial Sequence: Synthetic oligonucleotide
uacucgcugcacaaacauc

SEQ ID NO: 2338178 - RNA, 19 nt, Artificial Sequence
  Description of Artificial Sequence: Synthetic oligonucleotide
cucaugagcuucaucuuaa

SEQ ID NO: 2338179 - RNA, 19 nt, Artificial Sequence
  Description of Artificial Sequence: Synthetic oligonucleotide
uccuccauguuuguacaaa

SEQ ID NO: 2338180 - RNA, 19 nt, Artificial Sequence
  Description of Artificial Sequence: Synthetic oligonucleotide
agaggcacacauggauacg

SEQ ID NO: 2338181 - RNA, 19 nt, Artificial Sequence
  Description of Artificial Sequence: Synthetic oligonucleotide
ucaugagcuucaucuuaaa

SEQ ID NO: 2338182 - RNA, 19 nt, Artificial Sequence
  Description of Artificial Sequence: Synthetic oligonucleotide
ucgucaucuguuggaaacu

SEQ ID NO: 2338183 - RNA, 19 nt, Artificial Sequence
  Description of Artificial Sequence: Synthetic oligonucleotide
guaaagcucguagugccuc

SEQ ID NO: 2338184 - RNA, 19 nt, Artificial Sequence
  Description of Artificial Sequence: Synthetic oligonucleotide
gaacucgugucucuuggcu

SEQ ID NO: 2338185 - RNA, 19 nt, Artificial Sequence
  Description of Artificial Sequence: Synthetic oligonucleotide
cgcuuuuagaaauuguauc

SEQ ID NO: 2338186 - RNA, 19 nt, Artificial Sequence
  Description of Artificial Sequence: Synthetic oligonucleotide
ggauacgagagucauggua

SEQ ID NO: 2338187 - RNA, 19 nt, Artificial Sequence
  Description of Artificial Sequence: Synthetic oligonucleotide
acugaguggcuuguuuucu

SEQ ID NO: 2338188 - RNA, 19 nt, Artificial Sequence
  Description of Artificial Sequence: Synthetic oligonucleotide
gccuguuggagcaaugaag

SEQ ID NO: 2338189 - RNA, 19 nt, Artificial Sequence
  Description of Artificial Sequence: Synthetic oligonucleotide
cauaugggucugcucccgc

SEQ ID NO: 2338190 - RNA, 19 nt, Artificial Sequence
  Description of Artificial Sequence: Synthetic oligonucleotide
gcgccuguaaagcucguag

SEQ ID NO: 2338191 - RNA, 19 nt, Artificial Sequence
  Description of Artificial Sequence: Synthetic oligonucleotide
aauggccuguuggagcaau

SEQ ID NO: 2338192 - RNA, 19 nt, Artificial Sequence
  Description of Artificial Sequence: Synthetic oligonucleotide
agguagucuucuucuuaga

SEQ ID NO: 2338193 - RNA, 19 nt, Artificial Sequence
  Description of Artificial Sequence: Synthetic oligonucleotide
ccuguaaagcucguagugc

SEQ ID NO: 2338194 - RNA, 19 nt, Artificial Sequence
  Description of Artificial Sequence: Synthetic oligonucleotide
ugucgucaucuguuggaaa

SEQ ID NO: 2338195 - RNA, 19 nt, Artificial Sequence
  Description of Artificial Sequence: Synthetic oligonucleotide
uugcagcgccuguaaagcu

SEQ ID NO: 2338196 - RNA, 19 nt, Artificial Sequence
  Description of Artificial Sequence: Synthetic oligonucleotide
aucuuggcaguagugucgu

SEQ ID NO: 2338197 - RNA, 19 nt, Artificial Sequence
  Description of Artificial Sequence: Synthetic oligonucleotide
acgagagucaugguaguua

SEQ ID NO: 2338198 - RNA, 19 nt, Artificial Sequence
  Description of Artificial Sequence: Synthetic oligonucleotide
caucuuaaacuucuguaau

SEQ ID NO: 2338199 - RNA, 19 nt, Artificial Sequence
  Description of Artificial Sequence: Synthetic oligonucleotide
uuucggucuuuguccuucu

SEQ ID NO: 2338200 - RNA, 19 nt, Artificial Sequence
  Description of Artificial Sequence: Synthetic oligonucleotide
aguuugcagcgccuguaaa

SEQ ID NO: 2338201 - RNA, 19 nt, Artificial Sequence
  Description of Artificial Sequence: Synthetic oligonucleotide
augguauaauguucaccuu

SEQ ID NO: 2338202 - RNA, 19 nt, Artificial Sequence
  Description of Artificial Sequence: Synthetic oligonucleotide
cucgcugcacaaacaucug

SEQ ID NO: 2338203 - RNA, 19 nt, Artificial Sequence
  Description of Artificial Sequence: Synthetic oligonucleotide
uguaucugccuuggcaauu

SEQ ID NO: 2338204 - RNA, 19 nt, Artificial Sequence
  Description of Artificial Sequence: Synthetic oligonucleotide
agcacgcuugaucuucaau

SEQ ID NO: 2338205 - RNA, 19 nt, Artificial Sequence
  Description of Artificial Sequence: Synthetic oligonucleotide
uauuuccaacuuguaucuc

SEQ ID NO: 2338206 - RNA, 19 nt, Artificial Sequence
  Description of Artificial Sequence: Synthetic oligonucleotide
cuuaaugcugcuacuugau

SEQ ID NO: 2338207 - RNA, 19 nt, Artificial Sequence
  Description of Artificial Sequence: Synthetic oligonucleotide
ccauaaaugacuggcucug

SEQ ID NO: 2338208 - RNA, 19 nt, Artificial Sequence
  Description of Artificial Sequence: Synthetic oligonucleotide
gccugaagcucucuuucag

SEQ ID NO: 2338209 - RNA, 19 nt, Artificial Sequence
  Description of Artificial Sequence: Synthetic oligonucleotide
cacuuguacaauaccccaa

SEQ ID NO: 2338210 - RNA, 19 nt, Artificial Sequence
  Description of Artificial Sequence: Synthetic oligonucleotide
uuccaacuuguaucucauc

SEQ ID NO: 2338211 - RNA, 19 nt, Artificial Sequence
  Description of Artificial Sequence: Synthetic oligonucleotide
ccucugacgcucaccauag

SEQ ID NO: 2338212 - RNA, 19 nt, Artificial Sequence
  Description of Artificial Sequence: Synthetic oligonucleotide
acaccauugaggaccaauu

SEQ ID NO: 2338213 - RNA, 19 nt, Artificial Sequence
  Description of Artificial Sequence: Synthetic oligonucleotide
uggcgagcuuugaccaucu

SEQ ID NO: 2338214 - RNA, 19 nt, Artificial Sequence
  Description of Artificial Sequence: Synthetic oligonucleotide
gcuacuugaugccauaaau

SEQ ID NO: 2338215 - RNA, 19 nt, Artificial Sequence
  Description of Artificial Sequence: Synthetic oligonucleotide
aaagcucguagugccucau

SEQ ID NO: 2338216 - RNA, 19 nt, Artificial Sequence
  Description of Artificial Sequence: Synthetic oligonucleotide
gggcccacaucugaaaagc

SEQ ID NO: 2338217 - RNA, 19 nt, Artificial Sequence
  Description of Artificial Sequence: Synthetic oligonucleotide
cuuuguccuucuuaaugcu

SEQ ID NO: 2338218 - RNA, 19 nt, Artificial Sequence
  Description of Artificial Sequence: Synthetic oligonucleotide
uggauacgagagucauggu

SEQ ID NO: 2338219 - RNA, 19 nt, Artificial Sequence
  Description of Artificial Sequence: Synthetic oligonucleotide
caugguuaagaggucaagu

SEQ ID NO: 2338220 - RNA, 19 nt, Artificial Sequence
  Description of Artificial Sequence: Synthetic oligonucleotide
gcagcgccuguaaagcucg

SEQ ID NO: 2338221 - RNA, 19 nt, Artificial Sequence
  Description of Artificial Sequence: Synthetic oligonucleotide
guagaggcacacauggaua

SEQ ID NO: 2338222 - RNA, 19 nt, Artificial Sequence
  Description of Artificial Sequence: Synthetic oligonucleotide
acuuccuaccacagcaaau

SEQ ID NO: 2338223 - RNA, 19 nt, Artificial Sequence
  Description of Artificial Sequence: Synthetic oligonucleotide
agcccauucccuccaguuu

SEQ ID NO: 2338224 - RNA, 19 nt, Artificial Sequence
  Description of Artificial Sequence: Synthetic oligonucleotide
caccauagaacucgugucu

SEQ ID NO: 2338225 - RNA, 19 nt, Artificial Sequence
  Description of Artificial Sequence: Synthetic oligonucleotide
ccuguuggagcaaugaagu

SEQ ID NO: 2338226 - RNA, 19 nt, Artificial Sequence
  Description of Artificial Sequence: Synthetic oligonucleotide
ucaauucuucuuggagaua

SEQ ID NO: 2338227 - RNA, 19 nt, Artificial Sequence
  Description of Artificial Sequence: Synthetic oligonucleotide
ugccucauaugggucugcu

SEQ ID NO: 2338228 - RNA, 19 nt, Artificial Sequence
  Description of Artificial Sequence: Synthetic oligonucleotide
gcucguagugccucauaug

SEQ ID NO: 2338229 - RNA, 19 nt, Artificial Sequence
  Description of Artificial Sequence: Synthetic oligonucleotide
gacgcucaccauagaacuc

SEQ ID NO: 2338230 - RNA, 19 nt, Artificial Sequence
  Description of Artificial Sequence: Synthetic oligonucleotide
caacuuguaucucauccau

SEQ ID NO: 2338231 - RNA, 19 nt, Artificial Sequence
  Description of Artificial Sequence: Synthetic oligonucleotide
guagugccucauauggguc

SEQ ID NO: 2338232 - RNA, 19 nt, Artificial Sequence
  Description of Artificial Sequence: Synthetic oligonucleotide
ggcacacauggauacgaga

SEQ ID NO: 2338233 - RNA, 19 nt, Artificial Sequence
  Description of Artificial Sequence: Synthetic oligonucleotide
cuggcgagcuuugaccauc

SEQ ID NO: 2338234 - RNA, 19 nt, Artificial Sequence
  Description of Artificial Sequence: Synthetic oligonucleotide
cauugaggaccaauucacu

SEQ ID NO: 2338235 - RNA, 19 nt, Artificial Sequence
  Description of Artificial Sequence: Synthetic oligonucleotide
ccauacuuccuaccacagc

SEQ ID NO: 2338236 - RNA, 19 nt, Artificial Sequence
  Description of Artificial Sequence: Synthetic oligonucleotide
cauugaucuuggcaguagu

SEQ ID NO: 2338237 - RNA, 19 nt, Artificial Sequence
  Description of Artificial Sequence: Synthetic oligonucleotide
ggcucuggaacagaucaca

SEQ ID NO: 2338238 - RNA, 19 nt, Artificial Sequence
  Description of Artificial Sequence: Synthetic oligonucleotide
uacgagagucaugguaguu

SEQ ID NO: 2338239 - RNA, 19 nt, Artificial Sequence
  Description of Artificial Sequence: Synthetic oligonucleotide
uugcaccauugaucuuggc

SEQ ID NO: 2338240 - RNA, 19 nt, Artificial Sequence
  Description of Artificial Sequence: Synthetic oligonucleotide
gccauaaaugacuggcucu

SEQ ID NO: 2338241 - RNA, 19 nt, Artificial Sequence
  Description of Artificial Sequence: Synthetic oligonucleotide
acuggcgagcuuugaccau

SEQ ID NO: 2338242 - RNA, 19 nt, Artificial Sequence
  Description of Artificial Sequence: Synthetic oligonucleotide
cuggaacagaucacaggua

SEQ ID NO: 2338243 - RNA, 19 nt, Artificial Sequence
  Description of Artificial Sequence: Synthetic oligonucleotide
aucuuauuuccaacuugua

SEQ ID NO: 2338244 - RNA, 19 nt, Artificial Sequence
  Description of Artificial Sequence: Synthetic oligonucleotide
uggcaguagugucgucauc

SEQ ID NO: 2338245 - RNA, 19 nt, Artificial Sequence
  Description of Artificial Sequence: Synthetic oligonucleotide
accauugaucuuggcagua

SEQ ID NO: 2338246 - RNA, 19 nt, Artificial Sequence
  Description of Artificial Sequence: Synthetic oligonucleotide
aggauacuggcgagcuuug

SEQ ID NO: 2338247 - RNA, 19 nt, Artificial Sequence
  Description of Artificial Sequence: Synthetic oligonucleotide
gcacgcuugaucuucaauu

SEQ ID NO: 2338248 - RNA, 19 nt, Artificial Sequence
  Description of Artificial Sequence: Synthetic oligonucleotide
ucauugcaccauugaucuu

SEQ ID NO: 2338249 - RNA, 19 nt, Artificial Sequence
  Description of Artificial Sequence: Synthetic oligonucleotide
cuuguaucucauccauacu

SEQ ID NO: 2338250 - RNA, 19 nt, Artificial Sequence
  Description of Artificial Sequence: Synthetic oligonucleotide
uucggucuuuguccuucuu

SEQ ID NO: 2338251 - RNA, 19 nt, Artificial Sequence
  Description of Artificial Sequence: Synthetic oligonucleotide
ucuuggagauaggcuucaa

SEQ ID NO: 2338252 - RNA, 19 nt, Artificial Sequence
  Description of Artificial Sequence: Synthetic oligonucleotide
ggcaauuuaaugguauaau

SEQ ID NO: 2338253 - RNA, 19 nt, Artificial Sequence
  Description of Artificial Sequence: Synthetic oligonucleotide
agagcacgcuugaucuuca

SEQ ID NO: 2338254 - RNA, 19 nt, Artificial Sequence
  Description of Artificial Sequence: Synthetic oligonucleotide
cuguuggagcaaugaagua

SEQ ID NO: 2338255 - RNA, 19 nt, Artificial Sequence
  Description of Artificial Sequence: Synthetic oligonucleotide
caguuugcagcgccuguaa

SEQ ID NO: 2338256 - RNA, 19 nt, Artificial Sequence
  Description of Artificial Sequence: Synthetic oligonucleotide
gugucgucaucuguuggaa

SEQ ID NO: 2338257 - RNA, 19 nt, Artificial Sequence
  Description of Artificial Sequence: Synthetic oligonucleotide
ccauugaucuuggcaguag

SEQ ID NO: 2338258 - RNA, 19 nt, Artificial Sequence
  Description of Artificial Sequence: Synthetic oligonucleotide
cccuccaguuugcagcgcc

SEQ ID NO: 2338259 - RNA, 19 nt, Artificial Sequence
  Description of Artificial Sequence: Synthetic oligonucleotide
cuuccuggugaauucuuuu

SEQ ID NO: 2338260 - RNA, 19 nt, Artificial Sequence
  Description of Artificial Sequence: Synthetic oligonucleotide
agcauuucccgcagcuuua

SEQ ID NO: 2338261 - RNA, 19 nt, Artificial Sequence
  Description of Artificial Sequence: Synthetic oligonucleotide
cauuucccgcagcuuuaca

SEQ ID NO: 2338262 - RNA, 19 nt, Artificial Sequence
  Description of Artificial Sequence: Synthetic oligonucleotide
cccauucccuccaguuugc

SEQ ID NO: 2338263 - RNA, 19 nt, Artificial Sequence
  Description of Artificial Sequence: Synthetic oligonucleotide
caccauugaucuuggcagu

SEQ ID NO: 2338264 - RNA, 19 nt, Artificial Sequence
  Description of Artificial Sequence: Synthetic oligonucleotide
ggccuguuggagcaaugaa

SEQ ID NO: 2338265 - RNA, 19 nt, Artificial Sequence
  Description of Artificial Sequence: Synthetic oligonucleotide
auggccuguuggagcaaug

SEQ ID NO: 2338266 - RNA, 19 nt, Artificial Sequence
  Description of Artificial Sequence: Synthetic oligonucleotide
gaucacagguagucuucuu

SEQ ID NO: 2338267 - RNA, 19 nt, Artificial Sequence
  Description of Artificial Sequence: Synthetic oligonucleotide
cuccucuuuucuucaaguu

SEQ ID NO: 2338268 - RNA, 19 nt, Artificial Sequence
  Description of Artificial Sequence: Synthetic oligonucleotide
gagcacgcuugaucuucaa

SEQ ID NO: 2338269 - RNA, 19 nt, Artificial Sequence
  Description of Artificial Sequence: Synthetic oligonucleotide
guccauucauugcaccauu

SEQ ID NO: 2338270 - RNA, 19 nt, Artificial Sequence
  Description of Artificial Sequence: Synthetic oligonucleotide
cguagugccucauaugggu

SEQ ID NO: 2338271 - RNA, 19 nt, Artificial Sequence
  Description of Artificial Sequence: Synthetic oligonucleotide
gagcuuugaccaucuuauu

SEQ ID NO: 2338272 - RNA, 19 nt, Artificial Sequence
  Description of Artificial Sequence: Synthetic oligonucleotide
guaucugccuuggcaauuu

SEQ ID NO: 2338273 - RNA, 19 nt, Artificial Sequence
  Description of Artificial Sequence: Synthetic oligonucleotide
cgucaucuguuggaaacug

SEQ ID NO: 2338274 - RNA, 19 nt, Artificial Sequence
  Description of Artificial Sequence: Synthetic oligonucleotide
ucccuccaguuugcagcgc

SEQ ID NO: 2338275 - RNA, 19 nt, Artificial Sequence
  Description of Artificial Sequence: Synthetic oligonucleotide
gcauuucccgcagcuuuac

SEQ ID NO: 2338276 - RNA, 19 nt, Artificial Sequence
  Description of Artificial Sequence: Synthetic oligonucleotide
agcgccuguaaagcucgua

SEQ ID NO: 2338277 - RNA, 19 nt, Artificial Sequence
  Description of Artificial Sequence: Synthetic oligonucleotide
ggaacagaucacagguagu

SEQ ID NO: 2338278 - RNA, 19 nt, Artificial Sequence
  Description of Artificial Sequence: Synthetic oligonucleotide
ggcuuguuuucugggccca

SEQ ID NO: 2338279 - RNA, 19 nt, Artificial Sequence
  Description of Artificial Sequence: Synthetic oligonucleotide
cucgugucucuuggcuuca

SEQ ID NO: 2338280 - RNA, 19 nt, Artificial Sequence
  Description of Artificial Sequence: Synthetic oligonucleotide
gcucaccauagaacucgug

SEQ ID NO: 2338281 - RNA, 19 nt, Artificial Sequence
  Description of Artificial Sequence: Synthetic oligonucleotide
ccuuggcaauuuaauggua

SEQ ID NO: 2338282 - RNA, 19 nt, Artificial Sequence
  Description of Artificial Sequence: Synthetic oligonucleotide
cucugacgcucaccauaga

SEQ ID NO: 2338283 - RNA, 19 nt, Artificial Sequence
  Description of Artificial Sequence: Synthetic oligonucleotide
ggauacuggcgagcuuuga

SEQ ID NO: 2338284 - RNA, 19 nt, Artificial Sequence
  Description of Artificial Sequence: Synthetic oligonucleotide
ccacagcaaauggcaaaug

SEQ ID NO: 2338285 - RNA, 19 nt, Artificial Sequence
  Description of Artificial Sequence: Synthetic oligonucleotide
ucgugucucuuggcuucau

SEQ ID NO: 2338286 - RNA, 19 nt, Artificial Sequence
  Description of Artificial Sequence: Synthetic oligonucleotide
gaagacugaguggcuuguu

SEQ ID NO: 2338287 - RNA, 19 nt, Artificial Sequence
  Description of Artificial Sequence: Synthetic oligonucleotide
gaacaccauugaggaccaa

SEQ ID NO: 2338288 - RNA, 19 nt, Artificial Sequence
  Description of Artificial Sequence: Synthetic oligonucleotide
ccaguuugcagcgccugua

SEQ ID NO: 2338289 - RNA, 19 nt, Artificial Sequence
  Description of Artificial Sequence: Synthetic oligonucleotide
ccuuuacucgcugcacaaa

SEQ ID NO: 2338290 - RNA, 19 nt, Artificial Sequence
  Description of Artificial Sequence: Synthetic oligonucleotide
ccuccaguuugcagcgccu

SEQ ID NO: 2338291 - RNA, 19 nt, Artificial Sequence
  Description of Artificial Sequence: Synthetic oligonucleotide
cagcgccuguaaagcucgu

SEQ ID NO: 2338292 - RNA, 19 nt, Artificial Sequence
  Description of Artificial Sequence: Synthetic oligonucleotide
ccuuagagaauggccuguu

SEQ ID NO: 2338293 - RNA, 19 nt, Artificial Sequence
  Description of Artificial Sequence: Synthetic oligonucleotide
cgcucaccauagaacucgu

SEQ ID NO: 2338294 - RNA, 19 nt, Artificial Sequence
  Description of Artificial Sequence: Synthetic oligonucleotide
aaugacaccaaaucucccc

SEQ ID NO: 2338295 - RNA, 19 nt, Artificial Sequence
  Description of Artificial Sequence: Synthetic oligonucleotide
uguaguauuaaauacccag

SEQ ID NO: 2338296 - RNA, 19 nt, Artificial Sequence
  Description of Artificial Sequence: Synthetic oligonucleotide
uuuaccaauaaacugacuc

SEQ ID NO: 2338297 - RNA, 19 nt, Artificial Sequence
  Description of Artificial Sequence: Synthetic oligonucleotide
uauguaguauuaaauaccc

SEQ ID NO: 2338298 - RNA, 19 nt, Artificial Sequence
  Description of Artificial Sequence: Synthetic oligonucleotide
uuaaauacccagaaagaag

SEQ ID NO: 2338299 - RNA, 19 nt, Artificial Sequence
  Description of Artificial Sequence: Synthetic oligonucleotide
aaagcagaaaauaaucuuc

SEQ ID NO: 2338300 - RNA, 19 nt, Artificial Sequence
  Description of Artificial Sequence: Synthetic oligonucleotide
cuuauuguuaaucuuugcc

SEQ ID NO: 2338301 - RNA, 19 nt, Artificial Sequence
  Description of Artificial Sequence: Synthetic oligonucleotide
uuaucagguacuuccaacg

SEQ ID NO: 2338302 - RNA, 19 nt, Artificial Sequence
  Description of Artificial Sequence: Synthetic oligonucleotide
ugaacaauuucuucaggcg

SEQ ID NO: 2338303 - RNA, 19 nt, Artificial Sequence
  Description of Artificial Sequence: Synthetic oligonucleotide
cuauguaguauuaaauacc

SEQ ID NO: 2338304 - RNA, 19 nt, Artificial Sequence
  Description of Artificial Sequence: Synthetic oligonucleotide
uauuaaauacccagaaaga

SEQ ID NO: 2338305 - RNA, 19 nt, Artificial Sequence
  Description of Artificial Sequence: Synthetic oligonucleotide
uuauuguuaaucuuugccu

SEQ ID NO: 2338306 - RNA, 19 nt, Artificial Sequence
  Description of Artificial Sequence: Synthetic oligonucleotide
accaaaucuccccaggugc

SEQ ID NO: 2338307 - RNA, 19 nt, Artificial Sequence
  Description of Artificial Sequence: Synthetic oligonucleotide
aaucacguacaaaugauuc

SEQ ID NO: 2338308 - RNA, 19 nt, Artificial Sequence
  Description of Artificial Sequence: Synthetic oligonucleotide
aauaaacugacuccuucug

SEQ ID NO: 2338309 - RNA, 19 nt, Artificial Sequence
  Description of Artificial Sequence: Synthetic oligonucleotide
uacuugauaauuuuaaaua

SEQ ID NO: 2338310 - RNA, 19 nt, Artificial Sequence
  Description of Artificial Sequence: Synthetic oligonucleotide
aucacguacaaaugauucc

SEQ ID NO: 2338311 - RNA, 19 nt, Artificial Sequence
  Description of Artificial Sequence: Synthetic oligonucleotide
guguuuaucagguacuucc

SEQ ID NO: 2338312 - RNA, 19 nt, Artificial Sequence
  Description of Artificial Sequence: Synthetic oligonucleotide
caaaugacaccaaaucucc

SEQ ID NO: 2338313 - RNA, 19 nt, Artificial Sequence
  Description of Artificial Sequence: Synthetic oligonucleotide
uauucuugguggcaugacg

SEQ ID NO: 2338314 - RNA, 19 nt, Artificial Sequence
  Description of Artificial Sequence: Synthetic oligonucleotide
gauugaugcguacaccccg

SEQ ID NO: 2338315 - RNA, 19 nt, Artificial Sequence
  Description of Artificial Sequence: Synthetic oligonucleotide
gaugcguacaccccgguag

SEQ ID NO: 2338316 - RNA, 19 nt, Artificial Sequence
  Description of Artificial Sequence: Synthetic oligonucleotide
cugaacaauuucuucaggc

SEQ ID NO: 2338317 - RNA, 19 nt, Artificial Sequence
  Description of Artificial Sequence: Synthetic oligonucleotide
auccccaugucacauaagg

SEQ ID NO: 2338318 - RNA, 19 nt, Artificial Sequence
  Description of Artificial Sequence: Synthetic oligonucleotide
auaacaaaggccaaggggu

SEQ ID NO: 2338319 - RNA, 19 nt, Artificial Sequence
  Description of Artificial Sequence: Synthetic oligonucleotide
auacuugauaauuuuaaau

SEQ ID NO: 2338320 - RNA, 19 nt, Artificial Sequence
  Description of Artificial Sequence: Synthetic oligonucleotide
auuguuaaucuuugccugg

SEQ ID NO: 2338321 - RNA, 19 nt, Artificial Sequence
  Description of Artificial Sequence: Synthetic oligonucleotide
agggguguuuaucagguac

SEQ ID NO: 2338322 - RNA, 19 nt, Artificial Sequence
  Description of Artificial Sequence: Synthetic oligonucleotide
aaagacaccacugaacaau

SEQ ID NO: 2338323 - RNA, 19 nt, Artificial Sequence
  Description of Artificial Sequence: Synthetic oligonucleotide
aaguuuugcuauugucuuc

SEQ ID NO: 2338324 - RNA, 19 nt, Artificial Sequence
  Description of Artificial Sequence: Synthetic oligonucleotide
uuugauuuccucucccucu

SEQ ID NO: 2338325 - RNA, 19 nt, Artificial Sequence
  Description of Artificial Sequence: Synthetic oligonucleotide
acagucuuauuguuaaucu

SEQ ID NO: 2338326 - RNA, 19 nt, Artificial Sequence
  Description of Artificial Sequence: Synthetic oligonucleotide
uuccaggcguauaacaaag

SEQ ID NO: 2338327 - RNA, 19 nt, Artificial Sequence
  Description of Artificial Sequence: Synthetic oligonucleotide
auuaaauacccagaaagaa

SEQ ID NO: 2338328 - RNA, 19 nt, Artificial Sequence
  Description of Artificial Sequence: Synthetic oligonucleotide
ugugcuuuuggaguccugg

SEQ ID NO: 2338329 - RNA, 19 nt, Artificial Sequence
  Description of Artificial Sequence: Synthetic oligonucleotide
aaagcacucuuccaaugca

SEQ ID NO: 2338330 - RNA, 19 nt, Artificial Sequence
  Description of Artificial Sequence: Synthetic oligonucleotide
aggaaucacguacaaauga

SEQ ID NO: 2338331 - RNA, 19 nt, Artificial Sequence
  Description of Artificial Sequence: Synthetic oligonucleotide
ugaagauacuugauaauuu

SEQ ID NO: 2338332 - RNA, 19 nt, Artificial Sequence
  Description of Artificial Sequence: Synthetic oligonucleotide
agcugauugaugcguacac

SEQ ID NO: 2338333 - RNA, 19 nt, Artificial Sequence
  Description of Artificial Sequence: Synthetic oligonucleotide
gaacaauuucuucaggcga

SEQ ID NO: 2338334 - RNA, 19 nt, Artificial Sequence
  Description of Artificial Sequence: Synthetic oligonucleotide
acagacuucagauuuggaa

SEQ ID NO: 2338335 - RNA, 19 nt, Artificial Sequence
  Description of Artificial Sequence: Synthetic oligonucleotide
aaaugcuccccugggaagg

SEQ ID NO: 2338336 - RNA, 19 nt, Artificial Sequence
  Description of Artificial Sequence: Synthetic oligonucleotide
aaaucuccccaggugcucc

SEQ ID NO: 2338337 - RNA, 19 nt, Artificial Sequence
  Description of Artificial Sequence: Synthetic oligonucleotide
aagcccacucuauucuugg

SEQ ID NO: 2338338 - RNA, 19 nt, Artificial Sequence
  Description of Artificial Sequence: Synthetic oligonucleotide
ugucacauaaggcuccacu

SEQ ID NO: 2338339 - RNA, 19 nt, Artificial Sequence
  Description of Artificial Sequence: Synthetic oligonucleotide
accacugaacaauuucuuc

SEQ ID NO: 2338340 - RNA, 19 nt, Artificial Sequence
  Description of Artificial Sequence: Synthetic oligonucleotide
ucacguacaaaugauucca

SEQ ID NO: 2338341 - RNA, 19 nt, Artificial Sequence
  Description of Artificial Sequence: Synthetic oligonucleotide
uugucugucagagggacag

SEQ ID NO: 2338342 - RNA, 19 nt, Artificial Sequence
  Description of Artificial Sequence: Synthetic oligonucleotide
guauaacaaaggccaaggg

SEQ ID NO: 2338343 - RNA, 19 nt, Artificial Sequence
  Description of Artificial Sequence: Synthetic oligonucleotide
uaucagguacuuccaacgc

SEQ ID NO: 2338344 - RNA, 19 nt, Artificial Sequence
  Description of Artificial Sequence: Synthetic oligonucleotide
caggcguauaacaaaggcc

SEQ ID NO: 2338345 - RNA, 19 nt, Artificial Sequence
  Description of Artificial Sequence: Synthetic oligonucleotide
uguuuaucagguacuucca

SEQ ID NO: 2338346 - RNA, 19 nt, Artificial Sequence
  Description of Artificial Sequence: Synthetic oligonucleotide
ugaggggugacaaggacaa

SEQ ID NO: 2338347 - RNA, 19 nt, Artificial Sequence
  Description of Artificial Sequence: Synthetic oligonucleotide
auucuugguggcaugacgg

SEQ ID NO: 2338348 - RNA, 19 nt, Artificial Sequence
  Description of Artificial Sequence: Synthetic oligonucleotide
caugacgggccacagagag

SEQ ID NO: 2338349 - RNA, 19 nt, Artificial Sequence
  Description of Artificial Sequence: Synthetic oligonucleotide
ucacauaaggcuccacugu

SEQ ID NO: 2338350 - RNA, 19 nt, Artificial Sequence
  Description of Artificial Sequence: Synthetic oligonucleotide
gacaaggacaaagacacca

SEQ ID NO: 2338351 - RNA, 19 nt, Artificial Sequence
  Description of Artificial Sequence: Synthetic oligonucleotide
aacgcaugaggcuucacuu

SEQ ID NO: 2338352 - RNA, 19 nt, Artificial Sequence
  Description of Artificial Sequence: Synthetic oligonucleotide
agccugauaagccuuccuc

SEQ ID NO: 2338353 - RNA, 19 nt, Artificial Sequence
  Description of Artificial Sequence: Synthetic oligonucleotide
gauacuugauaauuuuaaa

SEQ ID NO: 2338354 - RNA, 19 nt, Artificial Sequence
  Description of Artificial Sequence: Synthetic oligonucleotide
ggcaauuucauggaugagg

SEQ ID NO: 2338355 - RNA, 19 nt, Artificial Sequence
  Description of Artificial Sequence: Synthetic oligonucleotide
aaaccugacuucuuuugau

SEQ ID NO: 2338356 - RNA, 19 nt, Artificial Sequence
  Description of Artificial Sequence: Synthetic oligonucleotide
uaaucuuugccuggccucg

SEQ ID NO: 2338357 - RNA, 19 nt, Artificial Sequence
  Description of Artificial Sequence: Synthetic oligonucleotide
ccuauguaguauuaaauac

SEQ ID NO: 2338358 - RNA, 19 nt, Artificial Sequence
  Description of Artificial Sequence: Synthetic oligonucleotide
uuaaucuuugccuggccuc

SEQ ID NO: 2338359 - RNA, 19 nt, Artificial Sequence
  Description of Artificial Sequence: Synthetic oligonucleotide
ugauugaugcguacacccc

SEQ ID NO: 2338360 - RNA, 19 nt, Artificial Sequence
  Description of Artificial Sequence: Synthetic oligonucleotide
uugaggggugacaaggaca

SEQ ID NO: 2338361 - RNA, 19 nt, Artificial Sequence
  Description of Artificial Sequence: Synthetic oligonucleotide
gcuuggguggcuuugagag

SEQ ID NO: 2338362 - RNA, 19 nt, Artificial Sequence
  Description of Artificial Sequence: Synthetic oligonucleotide
gacaccaaaucuccccagg

SEQ ID NO: 2338363 - RNA, 19 nt, Artificial Sequence
  Description of Artificial Sequence: Synthetic oligonucleotide
aggcuucacuucuagucgc

SEQ ID NO: 2338364 - RNA, 19 nt, Artificial Sequence
  Description of Artificial Sequence: Synthetic oligonucleotide
aggcguauaacaaaggcca

SEQ ID NO: 2338365 - RNA, 19 nt, Artificial Sequence
  Description of Artificial Sequence: Synthetic oligonucleotide
uacuuccaacgcaugaggc

SEQ ID NO: 2338366 - RNA, 19 nt, Artificial Sequence
  Description of Artificial Sequence: Synthetic oligonucleotide
ugcuauugucuucuuuacc

SEQ ID NO: 2338367 - RNA, 19 nt, Artificial Sequence
  Description of Artificial Sequence: Synthetic oligonucleotide
gucacauaaggcuccacug

SEQ ID NO: 2338368 - RNA, 19 nt, Artificial Sequence
  Description of Artificial Sequence: Synthetic oligonucleotide
cuugguggcaugacgggcc

SEQ ID NO: 2338369 - RNA, 19 nt, Artificial Sequence
  Description of Artificial Sequence: Synthetic oligonucleotide
aucgucacgccgcugccgc

SEQ ID NO: 2338370 - RNA, 19 nt, Artificial Sequence
  Description of Artificial Sequence: Synthetic oligonucleotide
agauuuggaaauccccaug

SEQ ID NO: 2338371 - RNA, 19 nt, Artificial Sequence
  Description of Artificial Sequence: Synthetic oligonucleotide
aaagggcacaagaaugaag

SEQ ID NO: 2338372 - RNA, 19 nt, Artificial Sequence
  Description of Artificial Sequence: Synthetic oligonucleotide
gcuauugucuucuuuacca

SEQ ID NO: 2338373 - RNA, 19 nt, Artificial Sequence
  Description of Artificial Sequence: Synthetic oligonucleotide
uuugaggggugacaaggac

SEQ ID NO: 2338374 - RNA, 19 nt, Artificial Sequence
  Description of Artificial Sequence: Synthetic oligonucleotide
auaaggcuccacugugcgc

SEQ ID NO: 2338375 - RNA, 19 nt, Artificial Sequence
  Description of Artificial Sequence: Synthetic oligonucleotide
uugagagccugauaagccu

SEQ ID NO: 2338376 - RNA, 19 nt, Artificial Sequence
  Description of Artificial Sequence: Synthetic oligonucleotide
aacugacuccuucuguccu

SEQ ID NO: 2338377 - RNA, 19 nt, Artificial Sequence
  Description of Artificial Sequence: Synthetic oligonucleotide
uguuaaucuuugccuggcc

SEQ ID NO: 2338378 - RNA, 19 nt, Artificial Sequence
  Description of Artificial Sequence: Synthetic oligonucleotide
uucuugguggcaugacggg

SEQ ID NO: 2338379 - RNA, 19 nt, Artificial Sequence
  Description of Artificial Sequence: Synthetic oligonucleotide
ugacgggccacagagagcu

SEQ ID NO: 2338380 - RNA, 19 nt, Artificial Sequence
  Description of Artificial Sequence: Synthetic oligonucleotide
ucguuuaaaccugacuucu

SEQ ID NO: 2338381 - RNA, 19 nt, Artificial Sequence
  Description of Artificial Sequence: Synthetic oligonucleotide
ucaggcgaaguuuugcuau

SEQ ID NO: 2338382 - RNA, 19 nt, Artificial Sequence
  Description of Artificial Sequence: Synthetic oligonucleotide
cucugaagauacuugauaa

SEQ ID NO: 2338383 - RNA, 19 nt, Artificial Sequence
  Description of Artificial Sequence: Synthetic oligonucleotide
caaugcacugugcuuuugg

SEQ ID NO: 2338384 - RNA, 19 nt, Artificial Sequence
  Description of Artificial Sequence: Synthetic oligonucleotide
agauacuugauaauuuuaa

SEQ ID NO: 2338385 - RNA, 19 nt, Artificial Sequence
  Description of Artificial Sequence: Synthetic oligonucleotide
uucccuauguaguauuaaa

SEQ ID NO: 2338386 - RNA, 19 nt, Artificial Sequence
  Description of Artificial Sequence: Synthetic oligonucleotide
gacagucuuauuguuaauc

SEQ ID NO: 2338387 - RNA, 19 nt, Artificial Sequence
  Description of Artificial Sequence: Synthetic oligonucleotide
ggcaugacgggccacagag

SEQ ID NO: 2338388 - RNA, 19 nt, Artificial Sequence
  Description of Artificial Sequence: Synthetic oligonucleotide
ucccgaacagacuucagau

SEQ ID NO: 2338389 - RNA, 19 nt, Artificial Sequence
  Description of Artificial Sequence: Synthetic oligonucleotide
cugacuucuuuugauuucc

SEQ ID NO: 2338390 - RNA, 19 nt, Artificial Sequence
  Description of Artificial Sequence: Synthetic oligonucleotide
uuuccaggcguauaacaaa

SEQ ID NO: 2338391 - RNA, 19 nt, Artificial Sequence
  Description of Artificial Sequence: Synthetic oligonucleotide
ucguuucaagaugagcucc

SEQ ID NO: 2338392 - RNA, 19 nt, Artificial Sequence
  Description of Artificial Sequence: Synthetic oligonucleotide
ugcuccucaaucacugugu

SEQ ID NO: 2338393 - RNA, 19 nt, Artificial Sequence
  Description of Artificial Sequence: Synthetic oligonucleotide
augcguacaccccgguagc

SEQ ID NO: 2338394 - RNA, 19 nt, Artificial Sequence
  Description of Artificial Sequence: Synthetic oligonucleotide
aacaauuucuucaggcgaa

SEQ ID NO: 2338395 - RNA, 19 nt, Artificial Sequence
  Description of Artificial Sequence: Synthetic oligonucleotide
uuucaagaugagcucccga

SEQ ID NO: 2338396 - RNA, 19 nt, Artificial Sequence
  Description of Artificial Sequence: Synthetic oligonucleotide
ucgccggacccgcacaucg

SEQ ID NO: 2338397 - RNA, 19 nt, Artificial Sequence
  Description of Artificial Sequence: Synthetic oligonucleotide
uccccaugucacauaaggc

SEQ ID NO: 2338398 - RNA, 19 nt, Artificial Sequence
  Description of Artificial Sequence: Synthetic oligonucleotide
gaagagaucuucuggaaau

SEQ ID NO: 2338399 - RNA, 19 nt, Artificial Sequence
  Description of Artificial Sequence: Synthetic oligonucleotide
acauaaggcuccacugugc

SEQ ID NO: 2338400 - RNA, 19 nt, Artificial Sequence
  Description of Artificial Sequence: Synthetic oligonucleotide
agcuggaaagggcacaaga

SEQ ID NO: 2338401 - RNA, 19 nt, Artificial Sequence
  Description of Artificial Sequence: Synthetic oligonucleotide
ucuucaggcgaaguuuugc

SEQ ID NO: 2338402 - RNA, 19 nt, Artificial Sequence
  Description of Artificial Sequence: Synthetic oligonucleotide
gcuuuuggaguccuggucc

SEQ ID NO: 2338403 - RNA, 19 nt, Artificial Sequence
  Description of Artificial Sequence: Synthetic oligonucleotide
cuucucugaagauacuuga

SEQ ID NO: 2338404 - RNA, 19 nt, Artificial Sequence
  Description of Artificial Sequence: Synthetic oligonucleotide
cuuuuggaguccugguccc

SEQ ID NO: 2338405 - RNA, 19 nt, Artificial Sequence
  Description of Artificial Sequence: Synthetic oligonucleotide
ucuauucuugguggcauga

SEQ ID NO: 2338406 - RNA, 19 nt, Artificial Sequence
  Description of Artificial Sequence: Synthetic oligonucleotide
augacaccaaaucucccca

SEQ ID NO: 2338407 - RNA, 19 nt, Artificial Sequence
  Description of Artificial Sequence: Synthetic oligonucleotide
ugauaagccuuccucuuuu

SEQ ID NO: 2338408 - RNA, 19 nt, Artificial Sequence
  Description of Artificial Sequence: Synthetic oligonucleotide
cacaucgucacgccgcugc

SEQ ID NO: 2338409 - RNA, 19 nt, Artificial Sequence
  Description of Artificial Sequence: Synthetic oligonucleotide
guaguauuaaauacccaga

SEQ ID NO: 2338410 - RNA, 19 nt, Artificial Sequence
  Description of Artificial Sequence: Synthetic oligonucleotide
uugcuauugucuucuuuac

SEQ ID NO: 2338411 - RNA, 19 nt, Artificial Sequence
  Description of Artificial Sequence: Synthetic oligonucleotide
cacauaaggcuccacugug

SEQ ID NO: 2338412 - RNA, 19 nt, Artificial Sequence
  Description of Artificial Sequence: Synthetic oligonucleotide
uuguuaaucuuugccuggc

SEQ ID NO: 2338413 - RNA, 19 nt, Artificial Sequence
  Description of Artificial Sequence: Synthetic oligonucleotide
gucguuuaaaccugacuuc

SEQ ID NO: 2338414 - RNA, 19 nt, Artificial Sequence
  Description of Artificial Sequence: Synthetic oligonucleotide
ucugucagagggacagucu

SEQ ID NO: 2338415 - RNA, 19 nt, Artificial Sequence
  Description of Artificial Sequence: Synthetic oligonucleotide
agucuuauuguuaaucuuu

SEQ ID NO: 2338416 - RNA, 19 nt, Artificial Sequence
  Description of Artificial Sequence: Synthetic oligonucleotide
ugcuuuuggaguccugguc

SEQ ID NO: 2338417 - RNA, 19 nt, Artificial Sequence
  Description of Artificial Sequence: Synthetic oligonucleotide
uggccucguuucaagauga

SEQ ID NO: 2338418 - RNA, 19 nt, Artificial Sequence
  Description of Artificial Sequence: Synthetic oligonucleotide
caggaaucacguacaaaug

SEQ ID NO: 2338419 - RNA, 19 nt, Artificial Sequence
  Description of Artificial Sequence: Synthetic oligonucleotide
acgcaugaggcuucacuuc

SEQ ID NO: 2338420 - RNA, 19 nt, Artificial Sequence
  Description of Artificial Sequence: Synthetic oligonucleotide
cacagagagcuggaaaggg

SEQ ID NO: 2338421 - RNA, 19 nt, Artificial Sequence
  Description of Artificial Sequence: Synthetic oligonucleotide
gaaguuuugcuauugucuu

SEQ ID NO: 2338422 - RNA, 19 nt, Artificial Sequence
  Description of Artificial Sequence: Synthetic oligonucleotide
acaucgucacgccgcugcc

SEQ ID NO: 2338423 - RNA, 19 nt, Artificial Sequence
  Description of Artificial Sequence: Synthetic oligonucleotide
augaagagaucuucuggaa

SEQ ID NO: 2338424 - RNA, 19 nt, Artificial Sequence
  Description of Artificial Sequence: Synthetic oligonucleotide
ugacaccaaaucuccccag

SEQ ID NO: 2338425 - RNA, 19 nt, Artificial Sequence
  Description of Artificial Sequence: Synthetic oligonucleotide
agguacuuccaacgcauga

SEQ ID NO: 2338426 - RNA, 19 nt, Artificial Sequence
  Description of Artificial Sequence: Synthetic oligonucleotide
uucaggagauuuucuggaa

SEQ ID NO: 2338427 - RNA, 19 nt, Artificial Sequence
  Description of Artificial Sequence: Synthetic oligonucleotide
agggcacaagaaugaagag

SEQ ID NO: 2338428 - RNA, 19 nt, Artificial Sequence
  Description of Artificial Sequence: Synthetic oligonucleotide
auugaugcguacaccccgg

SEQ ID NO: 2338429 - RNA, 19 nt, Artificial Sequence
  Description of Artificial Sequence: Synthetic oligonucleotide
cacguacaaaugauuccag

SEQ ID NO: 2338430 - RNA, 19 nt, Artificial Sequence
  Description of Artificial Sequence: Synthetic oligonucleotide
aggagagcccaucuccuug

SEQ ID NO: 2338431 - RNA, 19 nt, Artificial Sequence
  Description of Artificial Sequence: Synthetic oligonucleotide
uuccaaugcacugugcuuu

SEQ ID NO: 2338432 - RNA, 19 nt, Artificial Sequence
  Description of Artificial Sequence: Synthetic oligonucleotide
cccacucuauucuuggugg

SEQ ID NO: 2338433 - RNA, 19 nt, Artificial Sequence
  Description of Artificial Sequence: Synthetic oligonucleotide
cccucuuugccaaaagugc

SEQ ID NO: 2338434 - RNA, 19 nt, Artificial Sequence
  Description of Artificial Sequence: Synthetic oligonucleotide
ugagcugauugaugcguac

SEQ ID NO: 2338435 - RNA, 19 nt, Artificial Sequence
  Description of Artificial Sequence: Synthetic oligonucleotide
gguacuuccaacgcaugag

SEQ ID NO: 2338436 - RNA, 19 nt, Artificial Sequence
  Description of Artificial Sequence: Synthetic oligonucleotide
aacaaaggccaaggggugu

SEQ ID NO: 2338437 - RNA, 19 nt, Artificial Sequence
  Description of Artificial Sequence: Synthetic oligonucleotide
ucuugguggcaugacgggc

SEQ ID NO: 2338438 - RNA, 19 nt, Artificial Sequence
  Description of Artificial Sequence: Synthetic oligonucleotide
accugacuucuuuugauuu

SEQ ID NO: 2338439 - RNA, 19 nt, Artificial Sequence
  Description of Artificial Sequence: Synthetic oligonucleotide
ugagagccugauaagccuu

SEQ ID NO: 2338440 - RNA, 19 nt, Artificial Sequence
  Description of Artificial Sequence: Synthetic oligonucleotide
cugggaaggcaauuucaug

SEQ ID NO: 2338441 - RNA, 19 nt, Artificial Sequence
  Description of Artificial Sequence: Synthetic oligonucleotide
uugaggaagcccacucuau

SEQ ID NO: 2338442 - RNA, 19 nt, Artificial Sequence
  Description of Artificial Sequence: Synthetic oligonucleotide
guuucaagaugagcucccg

SEQ ID NO: 2338443 - RNA, 19 nt, Artificial Sequence
  Description of Artificial Sequence: Synthetic oligonucleotide
ugacaaggacaaagacacc

SEQ ID NO: 2338444 - RNA, 19 nt, Artificial Sequence
  Description of Artificial Sequence: Synthetic oligonucleotide
agagccugauaagccuucc

SEQ ID NO: 2338445 - RNA, 19 nt, Artificial Sequence
  Description of Artificial Sequence: Synthetic oligonucleotide
acaauuucuucaggcgaag

SEQ ID NO: 2338446 - RNA, 19 nt, Artificial Sequence
  Description of Artificial Sequence: Synthetic oligonucleotide
guuaaucuuugccuggccu

SEQ ID NO: 2338447 - RNA, 19 nt, Artificial Sequence
  Description of Artificial Sequence: Synthetic oligonucleotide
cuggccucguuucaagaug

SEQ ID NO: 2338448 - RNA, 19 nt, Artificial Sequence
  Description of Artificial Sequence: Synthetic oligonucleotide
ucccugucuaguucagcug

SEQ ID NO: 2338449 - RNA, 19 nt, Artificial Sequence
  Description of Artificial Sequence: Synthetic oligonucleotide
ucuaguucagcuggcggau

SEQ ID NO: 2338450 - RNA, 19 nt, Artificial Sequence
  Description of Artificial Sequence: Synthetic oligonucleotide
ccagaaagaagguccuucc

SEQ ID NO: 2338451 - RNA, 19 nt, Artificial Sequence
  Description of Artificial Sequence: Synthetic oligonucleotide
ccaggcguauaacaaaggc

SEQ ID NO: 2338452 - RNA, 19 nt, Artificial Sequence
  Description of Artificial Sequence: Synthetic oligonucleotide
acaggguucccuauguagu

SEQ ID NO: 2338453 - RNA, 19 nt, Artificial Sequence
  Description of Artificial Sequence: Synthetic oligonucleotide
uucaggcgaaguuuugcua

SEQ ID NO: 2338454 - RNA, 19 nt, Artificial Sequence
  Description of Artificial Sequence: Synthetic oligonucleotide
uugcuuggguggcuuugag

SEQ ID NO: 2338455 - RNA, 19 nt, Artificial Sequence
  Description of Artificial Sequence: Synthetic oligonucleotide
cguauaacaaaggccaagg

SEQ ID NO: 2338456 - RNA, 19 nt, Artificial Sequence
  Description of Artificial Sequence: Synthetic oligonucleotide
uuugcuuggguggcuuuga

SEQ ID NO: 2338457 - RNA, 19 nt, Artificial Sequence
  Description of Artificial Sequence: Synthetic oligonucleotide
cuucacacuuugaggggug

SEQ ID NO: 2338458 - RNA, 19 nt, Artificial Sequence
  Description of Artificial Sequence: Synthetic oligonucleotide
guuuaucagguacuuccaa

SEQ ID NO: 2338459 - RNA, 19 nt, Artificial Sequence
  Description of Artificial Sequence: Synthetic oligonucleotide
ccaagggguguuuaucagg

SEQ ID NO: 2338460 - RNA, 19 nt, Artificial Sequence
  Description of Artificial Sequence: Synthetic oligonucleotide
cccugucuaguucagcugg

SEQ ID NO: 2338461 - RNA, 19 nt, Artificial Sequence
  Description of Artificial Sequence: Synthetic oligonucleotide
cuauugucuucuuuaccaa

SEQ ID NO: 2338462 - RNA, 19 nt, Artificial Sequence
  Description of Artificial Sequence: Synthetic oligonucleotide
ccaauaaacugacuccuuc

SEQ ID NO: 2338463 - RNA, 19 nt, Artificial Sequence
  Description of Artificial Sequence: Synthetic oligonucleotide
cuccacugugcgcagcagc

SEQ ID NO: 2338464 - RNA, 19 nt, Artificial Sequence
  Description of Artificial Sequence: Synthetic oligonucleotide
acgggccacagagagcugg

SEQ ID NO: 2338465 - RNA, 19 nt, Artificial Sequence
  Description of Artificial Sequence: Synthetic oligonucleotide
aagacaccacugaacaauu

SEQ ID NO: 2338466 - RNA, 19 nt, Artificial Sequence
  Description of Artificial Sequence: Synthetic oligonucleotide
gccgccaggaaucacguac

SEQ ID NO: 2338467 - RNA, 19 nt, Artificial Sequence
  Description of Artificial Sequence: Synthetic oligonucleotide
cucuauucuugguggcaug

SEQ ID NO: 2338468 - RNA, 19 nt, Artificial Sequence
  Description of Artificial Sequence: Synthetic oligonucleotide
cacuucuagucgccggacc

SEQ ID NO: 2338469 - RNA, 19 nt, Artificial Sequence
  Description of Artificial Sequence: Synthetic oligonucleotide
ggaaagggcacaagaauga

SEQ ID NO: 2338470 - RNA, 19 nt, Artificial Sequence
  Description of Artificial Sequence: Synthetic oligonucleotide
uugguggcaugacgggcca

SEQ ID NO: 2338471 - RNA, 19 nt, Artificial Sequence
  Description of Artificial Sequence: Synthetic oligonucleotide
gacccgcacaucgucacgc

SEQ ID NO: 2338472 - RNA, 19 nt, Artificial Sequence
  Description of Artificial Sequence: Synthetic oligonucleotide
aggugcuccucaaucacug

SEQ ID NO: 2338473 - RNA, 19 nt, Artificial Sequence
  Description of Artificial Sequence: Synthetic oligonucleotide
aggccaagggguguuuauc

SEQ ID NO: 2338474 - RNA, 19 nt, Artificial Sequence
  Description of Artificial Sequence: Synthetic oligonucleotide
caagggguguuuaucaggu

SEQ ID NO: 2338475 - RNA, 19 nt, Artificial Sequence
  Description of Artificial Sequence: Synthetic oligonucleotide
aaucuucucugaagauacu

SEQ ID NO: 2338476 - RNA, 19 nt, Artificial Sequence
  Description of Artificial Sequence: Synthetic oligonucleotide
acucuauucuugguggcau

SEQ ID NO: 2338477 - RNA, 19 nt, Artificial Sequence
  Description of Artificial Sequence: Synthetic oligonucleotide
ugccuggccucguuucaag

SEQ ID NO: 2338478 - RNA, 19 nt, Artificial Sequence
  Description of Artificial Sequence: Synthetic oligonucleotide
aacagacuucagauuugga

SEQ ID NO: 2338479 - RNA, 19 nt, Artificial Sequence
  Description of Artificial Sequence: Synthetic oligonucleotide
ugaugcguacaccccggua

SEQ ID NO: 2338480 - RNA, 19 nt, Artificial Sequence
  Description of Artificial Sequence: Synthetic oligonucleotide
gaggucuuccaggcaaaug

SEQ ID NO: 2338481 - RNA, 19 nt, Artificial Sequence
  Description of Artificial Sequence: Synthetic oligonucleotide
ucuuugccuggccucguuu

SEQ ID NO: 2338482 - RNA, 19 nt, Artificial Sequence
  Description of Artificial Sequence: Synthetic oligonucleotide
cuuugcuuggguggcuuug

SEQ ID NO: 2338483 - RNA, 19 nt, Artificial Sequence
  Description of Artificial Sequence: Synthetic oligonucleotide
uugaugcguacaccccggu

SEQ ID NO: 2338484 - RNA, 19 nt, Artificial Sequence
  Description of Artificial Sequence: Synthetic oligonucleotide
cucccgaacagacuucaga

SEQ ID NO: 2338485 - RNA, 19 nt, Artificial Sequence
  Description of Artificial Sequence: Synthetic oligonucleotide
aauccccaugucacauaag

SEQ ID NO: 2338486 - RNA, 19 nt, Artificial Sequence
  Description of Artificial Sequence: Synthetic oligonucleotide
auguaguauuaaauaccca

SEQ ID NO: 2338487 - RNA, 19 nt, Artificial Sequence
  Description of Artificial Sequence: Synthetic oligonucleotide
cuauucuugguggcaugac

SEQ ID NO: 2338488 - RNA, 19 nt, Artificial Sequence
  Description of Artificial Sequence: Synthetic oligonucleotide
ccaggaaucacguacaaau

SEQ ID NO: 2338489 - RNA, 19 nt, Artificial Sequence
  Description of Artificial Sequence: Synthetic oligonucleotide
gcugccgccaggaaucacg

SEQ ID NO: 2338490 - RNA, 19 nt, Artificial Sequence
  Description of Artificial Sequence: Synthetic oligonucleotide
augacgggccacagagagc

SEQ ID NO: 2338491 - RNA, 19 nt, Artificial Sequence
  Description of Artificial Sequence: Synthetic oligonucleotide
cccaugucacauaaggcuc

SEQ ID NO: 2338492 - RNA, 19 nt, Artificial Sequence
  Description of Artificial Sequence: Synthetic oligonucleotide
ccucguuucaagaugagcu

SEQ ID NO: 2338493 - RNA, 19 nt, Artificial Sequence
  Description of Artificial Sequence: Synthetic oligonucleotide
accccgguagccaggagag

SEQ ID NO: 2338494 - RNA, 19 nt, Artificial Sequence
  Description of Artificial Sequence: Synthetic oligonucleotide
uuccaacgcaugaggcuuc

SEQ ID NO: 2338495 - RNA, 19 nt, Artificial Sequence
  Description of Artificial Sequence: Synthetic oligonucleotide
gagagcccaucuccuugag

SEQ ID NO: 2338496 - RNA, 19 nt, Artificial Sequence
  Description of Artificial Sequence: Synthetic oligonucleotide
gcgaaguuuugcuauuguc

SEQ ID NO: 2338497 - RNA, 19 nt, Artificial Sequence
  Description of Artificial Sequence: Synthetic oligonucleotide
cuagucgccggacccgcac

SEQ ID NO: 2338498 - RNA, 19 nt, Artificial Sequence
  Description of Artificial Sequence: Synthetic oligonucleotide
gggaaggcaauuucaugga

SEQ ID NO: 2338499 - RNA, 19 nt, Artificial Sequence
  Description of Artificial Sequence: Synthetic oligonucleotide
ccuuccaggugcugaaagc

SEQ ID NO: 2338500 - RNA, 19 nt, Artificial Sequence
  Description of Artificial Sequence: Synthetic oligonucleotide
gucugucagagggacaguc

SEQ ID NO: 2338501 - RNA, 19 nt, Artificial Sequence
  Description of Artificial Sequence: Synthetic oligonucleotide
aaucuuugccuggccucgu

SEQ ID NO: 2338502 - RNA, 19 nt, Artificial Sequence
  Description of Artificial Sequence: Synthetic oligonucleotide
aagggguguuuaucaggua

SEQ ID NO: 2338503 - RNA, 19 nt, Artificial Sequence
  Description of Artificial Sequence: Synthetic oligonucleotide
uagucgccggacccgcaca

SEQ ID NO: 2338504 - RNA, 19 nt, Artificial Sequence
  Description of Artificial Sequence: Synthetic oligonucleotide
gcguauaacaaaggccaag

SEQ ID NO: 2338505 - RNA, 19 nt, Artificial Sequence
  Description of Artificial Sequence: Synthetic oligonucleotide
ucuguccuuuccaggcgua

SEQ ID NO: 2338506 - RNA, 19 nt, Artificial Sequence
  Description of Artificial Sequence: Synthetic oligonucleotide
cccuauguaguauuaaaua

SEQ ID NO: 2338507 - RNA, 19 nt, Artificial Sequence
  Description of Artificial Sequence: Synthetic oligonucleotide
caaagacaccacugaacaa

SEQ ID NO: 2338508 - RNA, 19 nt, Artificial Sequence
  Description of Artificial Sequence: Synthetic oligonucleotide
ugcuccccugggaaggcaa

SEQ ID NO: 2338509 - RNA, 19 nt, Artificial Sequence
  Description of Artificial Sequence: Synthetic oligonucleotide
uggcaugacgggccacaga

SEQ ID NO: 2338510 - RNA, 19 nt, Artificial Sequence
  Description of Artificial Sequence: Synthetic oligonucleotide
ggccaagggguguuuauca

SEQ ID NO: 2338511 - RNA, 19 nt, Artificial Sequence
  Description of Artificial Sequence: Synthetic oligonucleotide
ucacacuuugaggggugac

SEQ ID NO: 2338512 - RNA, 19 nt, Artificial Sequence
  Description of Artificial Sequence: Synthetic oligonucleotide
aaaggccaagggguguuua

SEQ ID NO: 2338513 - RNA, 19 nt, Artificial Sequence
  Description of Artificial Sequence: Synthetic oligonucleotide
cuucaggcgaaguuuugcu

SEQ ID NO: 2338514 - RNA, 19 nt, Artificial Sequence
  Description of Artificial Sequence: Synthetic oligonucleotide
ucuagucgccggacccgca

SEQ ID NO: 2338515 - RNA, 19 nt, Artificial Sequence
  Description of Artificial Sequence: Synthetic oligonucleotide
aggcgaaguuuugcuauug

SEQ ID NO: 2338516 - RNA, 19 nt, Artificial Sequence
  Description of Artificial Sequence: Synthetic oligonucleotide
cagguacuuccaacgcaug

SEQ ID NO: 2338517 - RNA, 19 nt, Artificial Sequence
  Description of Artificial Sequence: Synthetic oligonucleotide
ggacaaagacaccacugaa

SEQ ID NO: 2338518 - RNA, 19 nt, Artificial Sequence
  Description of Artificial Sequence: Synthetic oligonucleotide
augucacauaaggcuccac

SEQ ID NO: 2338519 - RNA, 19 nt, Artificial Sequence
  Description of Artificial Sequence: Synthetic oligonucleotide
gccaagggguguuuaucag

SEQ ID NO: 2338520 - RNA, 19 nt, Artificial Sequence
  Description of Artificial Sequence: Synthetic oligonucleotide
uacaccccgguagccagga

SEQ ID NO: 2338521 - RNA, 19 nt, Artificial Sequence
  Description of Artificial Sequence: Synthetic oligonucleotide
ugcguacaccccgguagcc

SEQ ID NO: 2338522 - RNA, 19 nt, Artificial Sequence
  Description of Artificial Sequence: Synthetic oligonucleotide
uguccuuuccaggcguaua

SEQ ID NO: 2338523 - RNA, 19 nt, Artificial Sequence
  Description of Artificial Sequence: Synthetic oligonucleotide
gagagccugauaagccuuc

SEQ ID NO: 2338524 - RNA, 19 nt, Artificial Sequence
  Description of Artificial Sequence: Synthetic oligonucleotide
cguuucaagaugagcuccc

SEQ ID NO: 2338525 - RNA, 19 nt, Artificial Sequence
  Description of Artificial Sequence: Synthetic oligonucleotide
gaaucacguacaaaugauu

SEQ ID NO: 2338526 - RNA, 19 nt, Artificial Sequence
  Description of Artificial Sequence: Synthetic oligonucleotide
caucgucacgccgcugccg

SEQ ID NO: 2338527 - RNA, 19 nt, Artificial Sequence
  Description of Artificial Sequence: Synthetic oligonucleotide
aggcaauuucauggaugag

SEQ ID NO: 2338528 - RNA, 19 nt, Artificial Sequence
  Description of Artificial Sequence: Synthetic oligonucleotide
uccaacgcaugaggcuuca

SEQ ID NO: 2338529 - RNA, 19 nt, Artificial Sequence
  Description of Artificial Sequence: Synthetic oligonucleotide
agcccacucuauucuuggu

SEQ ID NO: 2338530 - RNA, 19 nt, Artificial Sequence
  Description of Artificial Sequence: Synthetic oligonucleotide
acaaaggccaagggguguu

SEQ ID NO: 2338531 - RNA, 19 nt, Artificial Sequence
  Description of Artificial Sequence: Synthetic oligonucleotide
uggaguccuggucccuguc

SEQ ID NO: 2338532 - RNA, 19 nt, Artificial Sequence
  Description of Artificial Sequence: Synthetic oligonucleotide
gcuucacuucuagucgccg

SEQ ID NO: 2338533 - RNA, 19 nt, Artificial Sequence
  Description of Artificial Sequence: Synthetic oligonucleotide
caccccgguagccaggaga

SEQ ID NO: 2338534 - RNA, 19 nt, Artificial Sequence
  Description of Artificial Sequence: Synthetic oligonucleotide
caacgcaugaggcuucacu

SEQ ID NO: 2338535 - RNA, 19 nt, Artificial Sequence
  Description of Artificial Sequence: Synthetic oligonucleotide
cgaaguuuugcuauugucu

SEQ ID NO: 2338536 - RNA, 19 nt, Artificial Sequence
  Description of Artificial Sequence: Synthetic oligonucleotide
ccuuuccaggcguauaaca

SEQ ID NO: 2338537 - RNA, 19 nt, Artificial Sequence
  Description of Artificial Sequence: Synthetic oligonucleotide
guagccaggagagcccauc

SEQ ID NO: 2338538 - RNA, 19 nt, Artificial Sequence
  Description of Artificial Sequence: Synthetic oligonucleotide
ugaggucuuccaggcaaau

SEQ ID NO: 2338539 - RNA, 19 nt, Artificial Sequence
  Description of Artificial Sequence: Synthetic oligonucleotide
guucccuauguaguauuaa

SEQ ID NO: 2338540 - RNA, 19 nt, Artificial Sequence
  Description of Artificial Sequence: Synthetic oligonucleotide
gagcuggaaagggcacaag

SEQ ID NO: 2338541 - RNA, 19 nt, Artificial Sequence
  Description of Artificial Sequence: Synthetic oligonucleotide
gcacugugcuuuuggaguc

SEQ ID NO: 2338542 - RNA, 19 nt, Artificial Sequence
  Description of Artificial Sequence: Synthetic oligonucleotide
cacucuauucuugguggca

SEQ ID NO: 2338543 - RNA, 19 nt, Artificial Sequence
  Description of Artificial Sequence: Synthetic oligonucleotide
ggagagcccaucuccuuga

SEQ ID NO: 2338544 - RNA, 19 nt, Artificial Sequence
  Description of Artificial Sequence: Synthetic oligonucleotide
gcuggaaagggcacaagaa

SEQ ID NO: 2338545 - RNA, 19 nt, Artificial Sequence
  Description of Artificial Sequence: Synthetic oligonucleotide
cuaguucagcuggcggaug

SEQ ID NO: 2338546 - RNA, 19 nt, Artificial Sequence
  Description of Artificial Sequence: Synthetic oligonucleotide
ccacucuauucuugguggc

SEQ ID NO: 2338547 - RNA, 19 nt, Artificial Sequence
  Description of Artificial Sequence: Synthetic oligonucleotide
ucagagggacagucuuauu

SEQ ID NO: 2338548 - RNA, 19 nt, Artificial Sequence
  Description of Artificial Sequence: Synthetic oligonucleotide
caggguucccuauguagua

SEQ ID NO: 2338549 - RNA, 19 nt, Artificial Sequence
  Description of Artificial Sequence: Synthetic oligonucleotide
ccugucuaguucagcuggc

SEQ ID NO: 2338550 - RNA, 19 nt, Artificial Sequence
  Description of Artificial Sequence: Synthetic oligonucleotide
accaauaaacugacuccuu

SEQ ID NO: 2338551 - RNA, 19 nt, Artificial Sequence
  Description of Artificial Sequence: Synthetic oligonucleotide
gguguuuaucagguacuuc

SEQ ID NO: 2338552 - RNA, 19 nt, Artificial Sequence
  Description of Artificial Sequence: Synthetic oligonucleotide
aggguucccuauguaguau

SEQ ID NO: 2338553 - RNA, 19 nt, Artificial Sequence
  Description of Artificial Sequence: Synthetic oligonucleotide
uccccugggaaggcaauuu

SEQ ID NO: 2338554 - RNA, 19 nt, Artificial Sequence
  Description of Artificial Sequence: Synthetic oligonucleotide
agucgccggacccgcacau

SEQ ID NO: 2338555 - RNA, 19 nt, Artificial Sequence
  Description of Artificial Sequence: Synthetic oligonucleotide
guacaccccgguagccagg

SEQ ID NO: 2338556 - RNA, 19 nt, Artificial Sequence
  Description of Artificial Sequence: Synthetic oligonucleotide
ggaaucacguacaaaugau

SEQ ID NO: 2338557 - RNA, 19 nt, Artificial Sequence
  Description of Artificial Sequence: Synthetic oligonucleotide
guggcaugacgggccacag

SEQ ID NO: 2338558 - RNA, 19 nt, Artificial Sequence
  Description of Artificial Sequence: Synthetic oligonucleotide
gccucguuucaagaugagc

SEQ ID NO: 2338559 - RNA, 19 nt, Artificial Sequence
  Description of Artificial Sequence: Synthetic oligonucleotide
ggagauuuucuggaaccaa

SEQ ID NO: 2338560 - RNA, 19 nt, Artificial Sequence
  Description of Artificial Sequence: Synthetic oligonucleotide
ggacccgcacaucgucacg

SEQ ID NO: 2338561 - RNA, 19 nt, Artificial Sequence
  Description of Artificial Sequence: Synthetic oligonucleotide
cagucuuauuguuaaucuu

SEQ ID NO: 2338562 - RNA, 19 nt, Artificial Sequence
  Description of Artificial Sequence: Synthetic oligonucleotide
cagcuggcggaugagcuga

SEQ ID NO: 2338563 - RNA, 19 nt, Artificial Sequence
  Description of Artificial Sequence: Synthetic oligonucleotide
cuuccaacgcaugaggcuu

SEQ ID NO: 2338564 - RNA, 19 nt, Artificial Sequence
  Description of Artificial Sequence: Synthetic oligonucleotide
cucaaucacuguguugucu

SEQ ID NO: 2338565 - RNA, 19 nt, Artificial Sequence
  Description of Artificial Sequence: Synthetic oligonucleotide
cguacaccccgguagccag

SEQ ID NO: 2338566 - RNA, 19 nt, Artificial Sequence
  Description of Artificial Sequence: Synthetic oligonucleotide
gucagagggacagucuuau

SEQ ID NO: 2338567 - RNA, 19 nt, Artificial Sequence
  Description of Artificial Sequence: Synthetic oligonucleotide
gagccugauaagccuuccu

SEQ ID NO: 2338568 - RNA, 19 nt, Artificial Sequence
  Description of Artificial Sequence: Synthetic oligonucleotide
ccagucguuuaaaccugac

SEQ ID NO: 2338569 - RNA, 19 nt, Artificial Sequence
  Description of Artificial Sequence: Synthetic oligonucleotide
ucgucacgccgcugccgcc

SEQ ID NO: 2338570 - RNA, 19 nt, Artificial Sequence
  Description of Artificial Sequence: Synthetic oligonucleotide
gguccuuccaggugcugaa

SEQ ID NO: 2338571 - RNA, 19 nt, Artificial Sequence
  Description of Artificial Sequence: Synthetic oligonucleotide
ggcuucacuucuagucgcc

SEQ ID NO: 2338572 - RNA, 19 nt, Artificial Sequence
  Description of Artificial Sequence: Synthetic oligonucleotide
augaggucuuccaggcaaa

SEQ ID NO: 2338573 - RNA, 19 nt, Artificial Sequence
  Description of Artificial Sequence: Synthetic oligonucleotide
gcggaugagcugauugaug

SEQ ID NO: 2338574 - RNA, 19 nt, Artificial Sequence
  Description of Artificial Sequence: Synthetic oligonucleotide
caaucacuguguugucugu

SEQ ID NO: 2338575 - RNA, 19 nt, Artificial Sequence
  Description of Artificial Sequence: Synthetic oligonucleotide
ccgguagccaggagagccc

SEQ ID NO: 2338576 - RNA, 19 nt, Artificial Sequence
  Description of Artificial Sequence: Synthetic oligonucleotide
gucacgccgcugccgccag

SEQ ID NO: 2338577 - RNA, 19 nt, Artificial Sequence
  Description of Artificial Sequence: Synthetic oligonucleotide
ccuggucccugucuaguuc

SEQ ID NO: 2338578 - RNA, 19 nt, Artificial Sequence
  Description of Artificial Sequence: Synthetic oligonucleotide
cccaggugcuccucaauca

SEQ ID NO: 2338579 - RNA, 19 nt, Artificial Sequence
  Description of Artificial Sequence: Synthetic oligonucleotide
gccgcugccgccaggaauc

SEQ ID NO: 2338580 - RNA, 19 nt, Artificial Sequence
  Description of Artificial Sequence: Synthetic oligonucleotide
cugugcgcagcagcuucac

SEQ ID NO: 2338581 - RNA, 19 nt, Artificial Sequence
  Description of Artificial Sequence: Synthetic oligonucleotide
ggaaauccccaugucacau

SEQ ID NO: 2338582 - RNA, 19 nt, Artificial Sequence
  Description of Artificial Sequence: Synthetic oligonucleotide
cccgcacaucgucacgccg

SEQ ID NO: 2338583 - RNA, 19 nt, Artificial Sequence
  Description of Artificial Sequence: Synthetic oligonucleotide
cugauaagccuuccucuuu

SEQ ID NO: 2338584 - RNA, 19 nt, Artificial Sequence
  Description of Artificial Sequence: Synthetic oligonucleotide
gaagguccuuccaggugcu

SEQ ID NO: 2338585 - RNA, 19 nt, Artificial Sequence
  Description of Artificial Sequence: Synthetic oligonucleotide
guggcuuugagagccugau

SEQ ID NO: 2338586 - RNA, 19 nt, Artificial Sequence
  Description of Artificial Sequence: Synthetic oligonucleotide
ggaaccaaagggaucuuuu

SEQ ID NO: 2338587 - RNA, 19 nt, Artificial Sequence
  Description of Artificial Sequence: Synthetic oligonucleotide
ccaggcaaaugacaccaaa

SEQ ID NO: 2338588 - RNA, 19 nt, Artificial Sequence
  Description of Artificial Sequence: Synthetic oligonucleotide
gggguguuuaucagguacu

SEQ ID NO: 2338589 - RNA, 19 nt, Artificial Sequence
  Description of Artificial Sequence: Synthetic oligonucleotide
gguucccuauguaguauua

SEQ ID NO: 2338590 - RNA, 19 nt, Artificial Sequence
  Description of Artificial Sequence: Synthetic oligonucleotide
ugccgccaggaaucacgua

SEQ ID NO: 2338591 - RNA, 19 nt, Artificial Sequence
  Description of Artificial Sequence: Synthetic oligonucleotide
cugccgccaggaaucacgu

SEQ ID NO: 2338592 - RNA, 19 nt, Artificial Sequence
  Description of Artificial Sequence: Synthetic oligonucleotide
cacgccgcugccgccagga

SEQ ID NO: 2338593 - RNA, 19 nt, Artificial Sequence
  Description of Artificial Sequence: Synthetic oligonucleotide
ugguggcaugacgggccac

SEQ ID NO: 2338594 - RNA, 19 nt, Artificial Sequence
  Description of Artificial Sequence: Synthetic oligonucleotide
cugagacaggguucccuau

SEQ ID NO: 2338595 - RNA, 19 nt, Artificial Sequence
  Description of Artificial Sequence: Synthetic oligonucleotide
ccccugggaaggcaauuuc

SEQ ID NO: 2338596 - RNA, 19 nt, Artificial Sequence
  Description of Artificial Sequence: Synthetic oligonucleotide
ggccucguuucaagaugag

SEQ ID NO: 2338597 - RNA, 19 nt, Artificial Sequence
  Description of Artificial Sequence: Synthetic oligonucleotide
ccugauaagccuuccucuu

SEQ ID NO: 2338598 - RNA, 19 nt, Artificial Sequence
  Description of Artificial Sequence: Synthetic oligonucleotide
cggacccgcacaucgucac

SEQ ID NO: 2338599 - RNA, 19 nt, Artificial Sequence
  Description of Artificial Sequence: Synthetic oligonucleotide
gcguacaccccgguagcca

SEQ ID NO: 2338600 - RNA, 19 nt, Artificial Sequence
  Description of Artificial Sequence: Synthetic oligonucleotide
ggguucccuauguaguauu

SEQ ID NO: 2338601 - RNA, 19 nt, Artificial Sequence
  Description of Artificial Sequence: Synthetic oligonucleotide
gccaggaaucacguacaaa

SEQ ID NO: 2338602 - RNA, 19 nt, Artificial Sequence
  Description of Artificial Sequence: Synthetic oligonucleotide
ggcggaugagcugauugau

SEQ ID NO: 2338603 - RNA, 19 nt, Artificial Sequence
  Description of Artificial Sequence: Synthetic oligonucleotide
ccaggagagcccaucuccu

SEQ ID NO: 2338604 - RNA, 19 nt, Artificial Sequence
  Description of Artificial Sequence: Synthetic oligonucleotide
ccuugaggaagcccacucu

SEQ ID NO: 2338605 - RNA, 19 nt, Artificial Sequence
  Description of Artificial Sequence: Synthetic oligonucleotide
gcaugacgggccacagaga

SEQ ID NO: 2338606 - RNA, 19 nt, Artificial Sequence
  Description of Artificial Sequence: Synthetic oligonucleotide
gucgccggacccgcacauc

SEQ ID NO: 2338607 - RNA, 19 nt, Artificial Sequence
  Description of Artificial Sequence: Synthetic oligonucleotide
ggguguuuaucagguacuu

SEQ ID NO: 2338608 - RNA, 19 nt, Artificial Sequence
  Description of Artificial Sequence: Synthetic oligonucleotide
acgccgcugccgccaggaa

SEQ ID NO: 2338609 - RNA, 19 nt, Artificial Sequence
  Description of Artificial Sequence: Synthetic oligonucleotide
cuguccuuuccaggcguau

SEQ ID NO: 2338610 - RNA, 19 nt, Artificial Sequence
  Description of Artificial Sequence: Synthetic oligonucleotide
gcacaucgucacgccgcug

SEQ ID NO: 2338611 - RNA, 19 nt, Artificial Sequence
  Description of Artificial Sequence: Synthetic oligonucleotide
ccaacgcaugaggcuucac

SEQ ID NO: 2338612 - RNA, 19 nt, Artificial Sequence
  Description of Artificial Sequence: Synthetic oligonucleotide
cccgaacagacuucagauu

SEQ ID NO: 2338613 - RNA, 19 nt, Artificial Sequence
  Description of Artificial Sequence: Synthetic oligonucleotide
gcgcagcagcuucacacuu

SEQ ID NO: 2338614 - RNA, 19 nt, Artificial Sequence
  Description of Artificial Sequence: Synthetic oligonucleotide
ccccgguagccaggagagc

SEQ ID NO: 2338615 - RNA, 19 nt, Artificial Sequence
  Description of Artificial Sequence: Synthetic oligonucleotide
cgucacgccgcugccgcca

SEQ ID NO: 2338616 - RNA, 19 nt, Artificial Sequence
  Description of Artificial Sequence: Synthetic oligonucleotide
gguagccaggagagcccau

SEQ ID NO: 2338617 - RNA, 19 nt, Artificial Sequence
  Description of Artificial Sequence: Synthetic oligonucleotide
cgcacaucgucacgccgcu

SEQ ID NO: 2338618 - RNA, 19 nt, Artificial Sequence
  Description of Artificial Sequence: Synthetic oligonucleotide
cgccggacccgcacaucgu

SEQ ID NO: 2338619 - RNA, 19 nt, Artificial Sequence
  Description of Artificial Sequence: Synthetic oligonucleotide
uguaguaagaaccuugcag

SEQ ID NO: 2338620 - RNA, 19 nt, Artificial Sequence
  Description of Artificial Sequence: Synthetic oligonucleotide
guaguaagaaccuugcagg

SEQ ID NO: 2338621 - RNA, 19 nt, Artificial Sequence
  Description of Artificial Sequence: Synthetic oligonucleotide
aagaccacuagccagguca

SEQ ID NO: 2338622 - RNA, 19 nt, Artificial Sequence
  Description of Artificial Sequence: Synthetic oligonucleotide
ugacauuaggccuauagug

SEQ ID NO: 2338623 - RNA, 19 nt, Artificial Sequence
  Description of Artificial Sequence: Synthetic oligonucleotide
agcaaguucaaagauggcc

SEQ ID NO: 2338624 - RNA, 19 nt, Artificial Sequence
  Description of Artificial Sequence: Synthetic oligonucleotide
uuauaaaccuguccgagcu

SEQ ID NO: 2338625 - RNA, 19 nt, Artificial Sequence
  Description of Artificial Sequence: Synthetic oligonucleotide
ugugauuucccgcagguga

SEQ ID NO: 2338626 - RNA, 19 nt, Artificial Sequence
  Description of Artificial Sequence: Synthetic oligonucleotide
acauuaggccuauagugcc

SEQ ID NO: 2338627 - RNA, 19 nt, Artificial Sequence
  Description of Artificial Sequence: Synthetic oligonucleotide
ucucagaagaccacuagcc

SEQ ID NO: 2338628 - RNA, 19 nt, Artificial Sequence
  Description of Artificial Sequence: Synthetic oligonucleotide
aagaaugaguagcaggucu

SEQ ID NO: 2338629 - RNA, 19 nt, Artificial Sequence
  Description of Artificial Sequence: Synthetic oligonucleotide
ucuguugaugagcagucgg

SEQ ID NO: 2338630 - RNA, 19 nt, Artificial Sequence
  Description of Artificial Sequence: Synthetic oligonucleotide
agugacauuaggccuauag

SEQ ID NO: 2338631 - RNA, 19 nt, Artificial Sequence
  Description of Artificial Sequence: Synthetic oligonucleotide
aauguucuguguguagagc

SEQ ID NO: 2338632 - RNA, 19 nt, Artificial Sequence
  Description of Artificial Sequence: Synthetic oligonucleotide
uagugagugacauuaggcc

SEQ ID NO: 2338633 - RNA, 19 nt, Artificial Sequence
  Description of Artificial Sequence: Synthetic oligonucleotide
ucugccaucacaucagccc

SEQ ID NO: 2338634 - RNA, 19 nt, Artificial Sequence
  Description of Artificial Sequence: Synthetic oligonucleotide
uaagcaaaggaccccacca

SEQ ID NO: 2338635 - RNA, 19 nt, Artificial Sequence
  Description of Artificial Sequence: Synthetic oligonucleotide
aaggaccuucgacagacgg

SEQ ID NO: 2338636 - RNA, 19 nt, Artificial Sequence
  Description of Artificial Sequence: Synthetic oligonucleotide
aguagugagugacauuagg

SEQ ID NO: 2338637 - RNA, 19 nt, Artificial Sequence
  Description of Artificial Sequence: Synthetic oligonucleotide
ucucucaaguccaucaaug

SEQ ID NO: 2338638 - RNA, 19 nt, Artificial Sequence
  Description of Artificial Sequence: Synthetic oligonucleotide
agacagggaugccagacgc

SEQ ID NO: 2338639 - RNA, 19 nt, Artificial Sequence
  Description of Artificial Sequence: Synthetic oligonucleotide
agugguuuggcccagacuu

SEQ ID NO: 2338640 - RNA, 19 nt, Artificial Sequence
  Description of Artificial Sequence: Synthetic oligonucleotide
uuaucuguccuguccaucc

SEQ ID NO: 2338641 - RNA, 19 nt, Artificial Sequence
  Description of Artificial Sequence: Synthetic oligonucleotide
aaaucagccacauguagua

SEQ ID NO: 2338642 - RNA, 19 nt, Artificial Sequence
  Description of Artificial Sequence: Synthetic oligonucleotide
uguagagaccacuucccgg

SEQ ID NO: 2338643 - RNA, 19 nt, Artificial Sequence
  Description of Artificial Sequence: Synthetic oligonucleotide
ugcaaaggacccaugagcu

SEQ ID NO: 2338644 - RNA, 19 nt, Artificial Sequence
  Description of Artificial Sequence: Synthetic oligonucleotide
guaagaaccuugcaggcag

SEQ ID NO: 2338645 - RNA, 19 nt, Artificial Sequence
  Description of Artificial Sequence: Synthetic oligonucleotide
ucugccagggcaaaaucag

SEQ ID NO: 2338646 - RNA, 19 nt, Artificial Sequence
  Description of Artificial Sequence: Synthetic oligonucleotide
guagagaccacuucccggg

SEQ ID NO: 2338647 - RNA, 19 nt, Artificial Sequence
  Description of Artificial Sequence: Synthetic oligonucleotide
ugaacuacaucgccuagcu

SEQ ID NO: 2338648 - RNA, 19 nt, Artificial Sequence
  Description of Artificial Sequence: Synthetic oligonucleotide
cauguaguaagaaccuugc

SEQ ID NO: 2338649 - RNA, 19 nt, Artificial Sequence
  Description of Artificial Sequence: Synthetic oligonucleotide
ucuguacugcuucagacaa

SEQ ID NO: 2338650 - RNA, 19 nt, Artificial Sequence
  Description of Artificial Sequence: Synthetic oligonucleotide
ugucgugaagcaaucgaag

SEQ ID NO: 2338651 - RNA, 19 nt, Artificial Sequence
  Description of Artificial Sequence: Synthetic oligonucleotide
uguacugcuucagacaagc

SEQ ID NO: 2338652 - RNA, 19 nt, Artificial Sequence
  Description of Artificial Sequence: Synthetic oligonucleotide
agacaagcuggcaaaaggc

SEQ ID NO: 2338653 - RNA, 19 nt, Artificial Sequence
  Description of Artificial Sequence: Synthetic oligonucleotide
ucaaccagcuuggagacag

SEQ ID NO: 2338654 - RNA, 19 nt, Artificial Sequence
  Description of Artificial Sequence: Synthetic oligonucleotide
gaugcaaaggacccaugag

SEQ ID NO: 2338655 - RNA, 19 nt, Artificial Sequence
  Description of Artificial Sequence: Synthetic oligonucleotide
uccccaaagaacacaaugu

SEQ ID NO: 2338656 - RNA, 19 nt, Artificial Sequence
  Description of Artificial Sequence: Synthetic oligonucleotide
gacauuaggccuauagugc

SEQ ID NO: 2338657 - RNA, 19 nt, Artificial Sequence
  Description of Artificial Sequence: Synthetic oligonucleotide
ucuccugugugauuucccg

SEQ ID NO: 2338658 - RNA, 19 nt, Artificial Sequence
  Description of Artificial Sequence: Synthetic oligonucleotide
aagcaaucgaaggaaguag

SEQ ID NO: 2338659 - RNA, 19 nt, Artificial Sequence
  Description of Artificial Sequence: Synthetic oligonucleotide
ugaugcaaaggacccauga

SEQ ID NO: 2338660 - RNA, 19 nt, Artificial Sequence
  Description of Artificial Sequence: Synthetic oligonucleotide
cuuauaaaccuguccgagc

SEQ ID NO: 2338661 - RNA, 19 nt, Artificial Sequence
  Description of Artificial Sequence: Synthetic oligonucleotide
aaaaucagccacauguagu

SEQ ID NO: 2338662 - RNA, 19 nt, Artificial Sequence
  Description of Artificial Sequence: Synthetic oligonucleotide
agugagugacauuaggccu

SEQ ID NO: 2338663 - RNA, 19 nt, Artificial Sequence
  Description of Artificial Sequence: Synthetic oligonucleotide
uuggcccagacuuauaaac

SEQ ID NO: 2338664 - RNA, 19 nt, Artificial Sequence
  Description of Artificial Sequence: Synthetic oligonucleotide
uugaugagcagucggggca

SEQ ID NO: 2338665 - RNA, 19 nt, Artificial Sequence
  Description of Artificial Sequence: Synthetic oligonucleotide
gucgugaagcaaucgaagg

SEQ ID NO: 2338666 - RNA, 19 nt, Artificial Sequence
  Description of Artificial Sequence: Synthetic oligonucleotide
gaaccuugcaggcagcggc

SEQ ID NO: 2338667 - RNA, 19 nt, Artificial Sequence
  Description of Artificial Sequence: Synthetic oligonucleotide
gaaguagugagugacauua

SEQ ID NO: 2338668 - RNA, 19 nt, Artificial Sequence
  Description of Artificial Sequence: Synthetic oligonucleotide
cagacaagcuggcaaaagg

SEQ ID NO: 2338669 - RNA, 19 nt, Artificial Sequence
  Description of Artificial Sequence: Synthetic oligonucleotide
gaaggaaguagugagugac

SEQ ID NO: 2338670 - RNA, 19 nt, Artificial Sequence
  Description of Artificial Sequence: Synthetic oligonucleotide
ucaaguccaucaauguucu

SEQ ID NO: 2338671 - RNA, 19 nt, Artificial Sequence
  Description of Artificial Sequence: Synthetic oligonucleotide
ucgugaagcaaucgaagga

SEQ ID NO: 2338672 - RNA, 19 nt, Artificial Sequence
  Description of Artificial Sequence: Synthetic oligonucleotide
guagcugaugcaaaggacc

SEQ ID NO: 2338673 - RNA, 19 nt, Artificial Sequence
  Description of Artificial Sequence: Synthetic oligonucleotide
acuuauaaaccuguccgag

SEQ ID NO: 2338674 - RNA, 19 nt, Artificial Sequence
  Description of Artificial Sequence: Synthetic oligonucleotide
caaagaacacaaugucagg

SEQ ID NO: 2338675 - RNA, 19 nt, Artificial Sequence
  Description of Artificial Sequence: Synthetic oligonucleotide
ugaggccauagucuuaucu

SEQ ID NO: 2338676 - RNA, 19 nt, Artificial Sequence
  Description of Artificial Sequence: Synthetic oligonucleotide
ucgaaggaaguagugagug

SEQ ID NO: 2338677 - RNA, 19 nt, Artificial Sequence
  Description of Artificial Sequence: Synthetic oligonucleotide
uaguaagaaccuugcaggc

SEQ ID NO: 2338678 - RNA, 19 nt, Artificial Sequence
  Description of Artificial Sequence: Synthetic oligonucleotide
acuucccgggaucugaguc

SEQ ID NO: 2338679 - RNA, 19 nt, Artificial Sequence
  Description of Artificial Sequence: Synthetic oligonucleotide
acuguaagcaaaggacccc

SEQ ID NO: 2338680 - RNA, 19 nt, Artificial Sequence
  Description of Artificial Sequence: Synthetic oligonucleotide
acggguacagcuccuuggc

SEQ ID NO: 2338681 - RNA, 19 nt, Artificial Sequence
  Description of Artificial Sequence: Synthetic oligonucleotide
aagggcuugggugugaaga

SEQ ID NO: 2338682 - RNA, 19 nt, Artificial Sequence
  Description of Artificial Sequence: Synthetic oligonucleotide
aaggaccccaccaagucuc

SEQ ID NO: 2338683 - RNA, 19 nt, Artificial Sequence
  Description of Artificial Sequence: Synthetic oligonucleotide
ugugugauuucccgcaggu

SEQ ID NO: 2338684 - RNA, 19 nt, Artificial Sequence
  Description of Artificial Sequence: Synthetic oligonucleotide
uguacugcgaggacuguaa

SEQ ID NO: 2338685 - RNA, 19 nt, Artificial Sequence
  Description of Artificial Sequence: Synthetic oligonucleotide
ggcaaaaucagccacaugu

SEQ ID NO: 2338686 - RNA, 19 nt, Artificial Sequence
  Description of Artificial Sequence: Synthetic oligonucleotide
ucaauguucuguguguaga

SEQ ID NO: 2338687 - RNA, 19 nt, Artificial Sequence
  Description of Artificial Sequence: Synthetic oligonucleotide
caucacaucagcccugaag

SEQ ID NO: 2338688 - RNA, 19 nt, Artificial Sequence
  Description of Artificial Sequence: Synthetic oligonucleotide
guagugagugacauuaggc

SEQ ID NO: 2338689 - RNA, 19 nt, Artificial Sequence
  Description of Artificial Sequence: Synthetic oligonucleotide
ucagccacauguaguaaga

SEQ ID NO: 2338690 - RNA, 19 nt, Artificial Sequence
  Description of Artificial Sequence: Synthetic oligonucleotide
uacgggaugucauacugcu

SEQ ID NO: 2338691 - RNA, 19 nt, Artificial Sequence
  Description of Artificial Sequence: Synthetic oligonucleotide
acugcgaggacuguaagca

SEQ ID NO: 2338692 - RNA, 19 nt, Artificial Sequence
  Description of Artificial Sequence: Synthetic oligonucleotide
uacaucgccuagcuggacc

SEQ ID NO: 2338693 - RNA, 19 nt, Artificial Sequence
  Description of Artificial Sequence: Synthetic oligonucleotide
uggcccagacuuauaaacc

SEQ ID NO: 2338694 - RNA, 19 nt, Artificial Sequence
  Description of Artificial Sequence: Synthetic oligonucleotide
gacuguaagcaaaggaccc

SEQ ID NO: 2338695 - RNA, 19 nt, Artificial Sequence
  Description of Artificial Sequence: Synthetic oligonucleotide
aggccuauagugcccacgg

SEQ ID NO: 2338696 - RNA, 19 nt, Artificial Sequence
  Description of Artificial Sequence: Synthetic oligonucleotide
uugucgugaagcaaucgaa

SEQ ID NO: 2338697 - RNA, 19 nt, Artificial Sequence
  Description of Artificial Sequence: Synthetic oligonucleotide
caauguucuguguguagag

SEQ ID NO: 2338698 - RNA, 19 nt, Artificial Sequence
  Description of Artificial Sequence: Synthetic oligonucleotide
uuccuugucgugaagcaau

SEQ ID NO: 2338699 - RNA, 19 nt, Artificial Sequence
  Description of Artificial Sequence: Synthetic oligonucleotide
gccacauguaguaagaacc

SEQ ID NO: 2338700 - RNA, 19 nt, Artificial Sequence
  Description of Artificial Sequence: Synthetic oligonucleotide
aagaaccuugcaggcagcg

SEQ ID NO: 2338701 - RNA, 19 nt, Artificial Sequence
  Description of Artificial Sequence: Synthetic oligonucleotide
aaccagcuuggagacaggg

SEQ ID NO: 2338702 - RNA, 19 nt, Artificial Sequence
  Description of Artificial Sequence: Synthetic oligonucleotide
cuucaaccagcuuggagac

SEQ ID NO: 2338703 - RNA, 19 nt, Artificial Sequence
  Description of Artificial Sequence: Synthetic oligonucleotide
acauguaguaagaaccuug

SEQ ID NO: 2338704 - RNA, 19 nt, Artificial Sequence
  Description of Artificial Sequence: Synthetic oligonucleotide
ucugaacuacaucgccuag

SEQ ID NO: 2338705 - RNA, 19 nt, Artificial Sequence
  Description of Artificial Sequence: Synthetic oligonucleotide
uauaaaccuguccgagcug

SEQ ID NO: 2338706 - RNA, 19 nt, Artificial Sequence
  Description of Artificial Sequence: Synthetic oligonucleotide
gacuuauaaaccuguccga

SEQ ID NO: 2338707 - RNA, 19 nt, Artificial Sequence
  Description of Artificial Sequence: Synthetic oligonucleotide
cuugggugugaagaaaagc

SEQ ID NO: 2338708 - RNA, 19 nt, Artificial Sequence
  Description of Artificial Sequence: Synthetic oligonucleotide
agguagcugaugcaaagga

SEQ ID NO: 2338709 - RNA, 19 nt, Artificial Sequence
  Description of Artificial Sequence: Synthetic oligonucleotide
ucucaaguccaucaauguu

SEQ ID NO: 2338710 - RNA, 19 nt, Artificial Sequence
  Description of Artificial Sequence: Synthetic oligonucleotide
acaagcuggcaaaaggcuc

SEQ ID NO: 2338711 - RNA, 19 nt, Artificial Sequence
  Description of Artificial Sequence: Synthetic oligonucleotide
gguuucacaacuccaguac

SEQ ID NO: 2338712 - RNA, 19 nt, Artificial Sequence
  Description of Artificial Sequence: Synthetic oligonucleotide
guaagcaaaggaccccacc

SEQ ID NO: 2338713 - RNA, 19 nt, Artificial Sequence
  Description of Artificial Sequence: Synthetic oligonucleotide
uacugcgaggacuguaagc

SEQ ID NO: 2338714 - RNA, 19 nt, Artificial Sequence
  Description of Artificial Sequence: Synthetic oligonucleotide
aagcaaaggaccccaccaa

SEQ ID NO: 2338715 - RNA, 19 nt, Artificial Sequence
  Description of Artificial Sequence: Synthetic oligonucleotide
gaagcaguuccuugucgug

SEQ ID NO: 2338716 - RNA, 19 nt, Artificial Sequence
  Description of Artificial Sequence: Synthetic oligonucleotide
caagucucuguugaugagc

SEQ ID NO: 2338717 - RNA, 19 nt, Artificial Sequence
  Description of Artificial Sequence: Synthetic oligonucleotide
agacggugcagguagcuga

SEQ ID NO: 2338718 - RNA, 19 nt, Artificial Sequence
  Description of Artificial Sequence: Synthetic oligonucleotide
agcuucaaccagcuuggag

SEQ ID NO: 2338719 - RNA, 19 nt, Artificial Sequence
  Description of Artificial Sequence: Synthetic oligonucleotide
ugcgaggacuguaagcaaa

SEQ ID NO: 2338720 - RNA, 19 nt, Artificial Sequence
  Description of Artificial Sequence: Synthetic oligonucleotide
cagacgcucucucaagucc

SEQ ID NO: 2338721 - RNA, 19 nt, Artificial Sequence
  Description of Artificial Sequence: Synthetic oligonucleotide
auaaaccuguccgagcugu

SEQ ID NO: 2338722 - RNA, 19 nt, Artificial Sequence
  Description of Artificial Sequence: Synthetic oligonucleotide
caaaggacccaugagcuuc

SEQ ID NO: 2338723 - RNA, 19 nt, Artificial Sequence
  Description of Artificial Sequence: Synthetic oligonucleotide
cacggguacagcuccuugg

SEQ ID NO: 2338724 - RNA, 19 nt, Artificial Sequence
  Description of Artificial Sequence: Synthetic oligonucleotide
aagcaaguucaaagauggc

SEQ ID NO: 2338725 - RNA, 19 nt, Artificial Sequence
  Description of Artificial Sequence: Synthetic oligonucleotide
ugcugaagguugcuguaga

SEQ ID NO: 2338726 - RNA, 19 nt, Artificial Sequence
  Description of Artificial Sequence: Synthetic oligonucleotide
cauuaggccuauagugccc

SEQ ID NO: 2338727 - RNA, 19 nt, Artificial Sequence
  Description of Artificial Sequence: Synthetic oligonucleotide
aagauggccucaggguacg

SEQ ID NO: 2338728 - RNA, 19 nt, Artificial Sequence
  Description of Artificial Sequence: Synthetic oligonucleotide
auagucuuaucuguccugu

SEQ ID NO: 2338729 - RNA, 19 nt, Artificial Sequence
  Description of Artificial Sequence: Synthetic oligonucleotide
ggucccaagaaugaguagc

SEQ ID NO: 2338730 - RNA, 19 nt, Artificial Sequence
  Description of Artificial Sequence: Synthetic oligonucleotide
uucccgcaggugaugaggc

SEQ ID NO: 2338731 - RNA, 19 nt, Artificial Sequence
  Description of Artificial Sequence: Synthetic oligonucleotide
gguacgggaugucauacug

SEQ ID NO: 2338732 - RNA, 19 nt, Artificial Sequence
  Description of Artificial Sequence: Synthetic oligonucleotide
cccaagaaugaguagcagg

SEQ ID NO: 2338733 - RNA, 19 nt, Artificial Sequence
  Description of Artificial Sequence: Synthetic oligonucleotide
uucacaacuccaguacaga

SEQ ID NO: 2338734 - RNA, 19 nt, Artificial Sequence
  Description of Artificial Sequence: Synthetic oligonucleotide
cuucccgggaucugagucc

SEQ ID NO: 2338735 - RNA, 19 nt, Artificial Sequence
  Description of Artificial Sequence: Synthetic oligonucleotide
cuugucgugaagcaaucga

SEQ ID NO: 2338736 - RNA, 19 nt, Artificial Sequence
  Description of Artificial Sequence: Synthetic oligonucleotide
acccaugagcuucaaccag

SEQ ID NO: 2338737 - RNA, 19 nt, Artificial Sequence
  Description of Artificial Sequence: Synthetic oligonucleotide
gaaugaguagcaggucugc

SEQ ID NO: 2338738 - RNA, 19 nt, Artificial Sequence
  Description of Artificial Sequence: Synthetic oligonucleotide
caaaggcagucucagaaga

SEQ ID NO: 2338739 - RNA, 19 nt, Artificial Sequence
  Description of Artificial Sequence: Synthetic oligonucleotide
guuucacaacuccaguaca

SEQ ID NO: 2338740 - RNA, 19 nt, Artificial Sequence
  Description of Artificial Sequence: Synthetic oligonucleotide
aggguacgggaugucauac

SEQ ID NO: 2338741 - RNA, 19 nt, Artificial Sequence
  Description of Artificial Sequence: Synthetic oligonucleotide
agggaugccagacgcucuc

SEQ ID NO: 2338742 - RNA, 19 nt, Artificial Sequence
  Description of Artificial Sequence: Synthetic oligonucleotide
agaaugaguagcaggucug

SEQ ID NO: 2338743 - RNA, 19 nt, Artificial Sequence
  Description of Artificial Sequence: Synthetic oligonucleotide
ucaggguacgggaugucau

SEQ ID NO: 2338744 - RNA, 19 nt, Artificial Sequence
  Description of Artificial Sequence: Synthetic oligonucleotide
gaagcaaucgaaggaagua

SEQ ID NO: 2338745 - RNA, 19 nt, Artificial Sequence
  Description of Artificial Sequence: Synthetic oligonucleotide
ggacuguaagcaaaggacc

SEQ ID NO: 2338746 - RNA, 19 nt, Artificial Sequence
  Description of Artificial Sequence: Synthetic oligonucleotide
aguaagaaccuugcaggca

SEQ ID NO: 2338747 - RNA, 19 nt, Artificial Sequence
  Description of Artificial Sequence: Synthetic oligonucleotide
gagccgcagaagcaguucc

SEQ ID NO: 2338748 - RNA, 19 nt, Artificial Sequence
  Description of Artificial Sequence: Synthetic oligonucleotide
uguguccagcccaggaggu

SEQ ID NO: 2338749 - RNA, 19 nt, Artificial Sequence
  Description of Artificial Sequence: Synthetic oligonucleotide
cugaacuacaucgccuagc

SEQ ID NO: 2338750 - RNA, 19 nt, Artificial Sequence
  Description of Artificial Sequence: Synthetic oligonucleotide
uauagugcccacggguaca

SEQ ID NO: 2338751 - RNA, 19 nt, Artificial Sequence
  Description of Artificial Sequence: Synthetic oligonucleotide
acaucgccuagcuggacca

SEQ ID NO: 2338752 - RNA, 19 nt, Artificial Sequence
  Description of Artificial Sequence: Synthetic oligonucleotide
gaugccacugggugugcug

SEQ ID NO: 2338753 - RNA, 19 nt, Artificial Sequence
  Description of Artificial Sequence: Synthetic oligonucleotide
uuuggcccagacuuauaaa

SEQ ID NO: 2338754 - RNA, 19 nt, Artificial Sequence
  Description of Artificial Sequence: Synthetic oligonucleotide
cuauagugcccacggguac

SEQ ID NO: 2338755 - RNA, 19 nt, Artificial Sequence
  Description of Artificial Sequence: Synthetic oligonucleotide
gaagguugcuguagagacc

SEQ ID NO: 2338756 - RNA, 19 nt, Artificial Sequence
  Description of Artificial Sequence: Synthetic oligonucleotide
ugcccacggguacagcucc

SEQ ID NO: 2338757 - RNA, 19 nt, Artificial Sequence
  Description of Artificial Sequence: Synthetic oligonucleotide
aaguagugagugacauuag

SEQ ID NO: 2338758 - RNA, 19 nt, Artificial Sequence
  Description of Artificial Sequence: Synthetic oligonucleotide
uaggccuauagugcccacg

SEQ ID NO: 2338759 - RNA, 19 nt, Artificial Sequence
  Description of Artificial Sequence: Synthetic oligonucleotide
cuggaaagaggaucuccug

SEQ ID NO: 2338760 - RNA, 19 nt, Artificial Sequence
  Description of Artificial Sequence: Synthetic oligonucleotide
ucugaguccggaugccacu

SEQ ID NO: 2338761 - RNA, 19 nt, Artificial Sequence
  Description of Artificial Sequence: Synthetic oligonucleotide
accuguccgagcuguguuc

SEQ ID NO: 2338762 - RNA, 19 nt, Artificial Sequence
  Description of Artificial Sequence: Synthetic oligonucleotide
ugcagguagcugaugcaaa

SEQ ID NO: 2338763 - RNA, 19 nt, Artificial Sequence
  Description of Artificial Sequence: Synthetic oligonucleotide
aaaccuguccgagcugugu

SEQ ID NO: 2338764 - RNA, 19 nt, Artificial Sequence
  Description of Artificial Sequence: Synthetic oligonucleotide
aucugaguccggaugccac

SEQ ID NO: 2338765 - RNA, 19 nt, Artificial Sequence
  Description of Artificial Sequence: Synthetic oligonucleotide
ggaaggaccuucgacagac

SEQ ID NO: 2338766 - RNA, 19 nt, Artificial Sequence
  Description of Artificial Sequence: Synthetic oligonucleotide
aggaaguagugagugacau

SEQ ID NO: 2338767 - RNA, 19 nt, Artificial Sequence
  Description of Artificial Sequence: Synthetic oligonucleotide
gggaucugaguccggaugc

SEQ ID NO: 2338768 - RNA, 19 nt, Artificial Sequence
  Description of Artificial Sequence: Synthetic oligonucleotide
agcggcuccccaaagaaca

SEQ ID NO: 2338769 - RNA, 19 nt, Artificial Sequence
  Description of Artificial Sequence: Synthetic oligonucleotide
ugacuucuguacugcuuca

SEQ ID NO: 2338770 - RNA, 19 nt, Artificial Sequence
  Description of Artificial Sequence: Synthetic oligonucleotide
aaccuguccgagcuguguu

SEQ ID NO: 2338771 - RNA, 19 nt, Artificial Sequence
  Description of Artificial Sequence: Synthetic oligonucleotide
cuucagacaagcuggcaaa

SEQ ID NO: 2338772 - RNA, 19 nt, Artificial Sequence
  Description of Artificial Sequence: Synthetic oligonucleotide
uguucgggcaugaggucuc

SEQ ID NO: 2338773 - RNA, 19 nt, Artificial Sequence
  Description of Artificial Sequence: Synthetic oligonucleotide
agcaaucgaaggaaguagu

SEQ ID NO: 2338774 - RNA, 19 nt, Artificial Sequence
  Description of Artificial Sequence: Synthetic oligonucleotide
uaaaccuguccgagcugug

SEQ ID NO: 2338775 - RNA, 19 nt, Artificial Sequence
  Description of Artificial Sequence: Synthetic oligonucleotide
cuguguucgggcaugaggu

SEQ ID NO: 2338776 - RNA, 19 nt, Artificial Sequence
  Description of Artificial Sequence: Synthetic oligonucleotide
uucuguguguagagccgca

SEQ ID NO: 2338777 - RNA, 19 nt, Artificial Sequence
  Description of Artificial Sequence: Synthetic oligonucleotide
uucgacagacggugcaggu

SEQ ID NO: 2338778 - RNA, 19 nt, Artificial Sequence
  Description of Artificial Sequence: Synthetic oligonucleotide
agaaccuugcaggcagcgg

SEQ ID NO: 2338779 - RNA, 19 nt, Artificial Sequence
  Description of Artificial Sequence: Synthetic oligonucleotide
gccauagucuuaucugucc

SEQ ID NO: 2338780 - RNA, 19 nt, Artificial Sequence
  Description of Artificial Sequence: Synthetic oligonucleotide
gaguagcaggucugccagg

SEQ ID NO: 2338781 - RNA, 19 nt, Artificial Sequence
  Description of Artificial Sequence: Synthetic oligonucleotide
ugccagacgcucucucaag

SEQ ID NO: 2338782 - RNA, 19 nt, Artificial Sequence
  Description of Artificial Sequence: Synthetic oligonucleotide
ucgggcaugaggucucccu

SEQ ID NO: 2338783 - RNA, 19 nt, Artificial Sequence
  Description of Artificial Sequence: Synthetic oligonucleotide
aggacccaugagcuucaac

SEQ ID NO: 2338784 - RNA, 19 nt, Artificial Sequence
  Description of Artificial Sequence: Synthetic oligonucleotide
ggaccuucgacagacggug

SEQ ID NO: 2338785 - RNA, 19 nt, Artificial Sequence
  Description of Artificial Sequence: Synthetic oligonucleotide
gaacuacaucgccuagcug

SEQ ID NO: 2338786 - RNA, 19 nt, Artificial Sequence
  Description of Artificial Sequence: Synthetic oligonucleotide
gagaccacuucccgggauc

SEQ ID NO: 2338787 - RNA, 19 nt, Artificial Sequence
  Description of Artificial Sequence: Synthetic oligonucleotide
gucacacacagugguuugg

SEQ ID NO: 2338788 - RNA, 19 nt, Artificial Sequence
  Description of Artificial Sequence: Synthetic oligonucleotide
ucccaagaaugaguagcag

SEQ ID NO: 2338789 - RNA, 19 nt, Artificial Sequence
  Description of Artificial Sequence: Synthetic oligonucleotide
ugccaucacaucagcccug

SEQ ID NO: 2338790 - RNA, 19 nt, Artificial Sequence
  Description of Artificial Sequence: Synthetic oligonucleotide
gugacauuaggccuauagu

SEQ ID NO: 2338791 - RNA, 19 nt, Artificial Sequence
  Description of Artificial Sequence: Synthetic oligonucleotide
uccuugucgugaagcaauc

SEQ ID NO: 2338792 - RNA, 19 nt, Artificial Sequence
  Description of Artificial Sequence: Synthetic oligonucleotide
cuuggccaaggugaagaag

SEQ ID NO: 2338793 - RNA, 19 nt, Artificial Sequence
  Description of Artificial Sequence: Synthetic oligonucleotide
auuucccgcaggugaugag

SEQ ID NO: 2338794 - RNA, 19 nt, Artificial Sequence
  Description of Artificial Sequence: Synthetic oligonucleotide
uccggaugccacugggugu

SEQ ID NO: 2338795 - RNA, 19 nt, Artificial Sequence
  Description of Artificial Sequence: Synthetic oligonucleotide
uguccuguccauccagcuu

SEQ ID NO: 2338796 - RNA, 19 nt, Artificial Sequence
  Description of Artificial Sequence: Synthetic oligonucleotide
agagccgcagaagcaguuc

SEQ ID NO: 2338797 - RNA, 19 nt, Artificial Sequence
  Description of Artificial Sequence: Synthetic oligonucleotide
agucggggcacugacuucu

SEQ ID NO: 2338798 - RNA, 19 nt, Artificial Sequence
  Description of Artificial Sequence: Synthetic oligonucleotide
gauuucccgcaggugauga

SEQ ID NO: 2338799 - RNA, 19 nt, Artificial Sequence
  Description of Artificial Sequence: Synthetic oligonucleotide
aaaggacccaugagcuuca

SEQ ID NO: 2338800 - RNA, 19 nt, Artificial Sequence
  Description of Artificial Sequence: Synthetic oligonucleotide
gaagaagggcuugggugug

SEQ ID NO: 2338801 - RNA, 19 nt, Artificial Sequence
  Description of Artificial Sequence: Synthetic oligonucleotide
cacaucuguacugcgagga

SEQ ID NO: 2338802 - RNA, 19 nt, Artificial Sequence
  Description of Artificial Sequence: Synthetic oligonucleotide
agaccacuagccaggucac

SEQ ID NO: 2338803 - RNA, 19 nt, Artificial Sequence
  Description of Artificial Sequence: Synthetic oligonucleotide
ugaugagcagucggggcac

SEQ ID NO: 2338804 - RNA, 19 nt, Artificial Sequence
  Description of Artificial Sequence: Synthetic oligonucleotide
guacugcgaggacuguaag

SEQ ID NO: 2338805 - RNA, 19 nt, Artificial Sequence
  Description of Artificial Sequence: Synthetic oligonucleotide
acaucagcccugaaguccu

SEQ ID NO: 2338806 - RNA, 19 nt, Artificial Sequence
  Description of Artificial Sequence: Synthetic oligonucleotide
cuuuccacacucugaacua

SEQ ID NO: 2338807 - RNA, 19 nt, Artificial Sequence
  Description of Artificial Sequence: Synthetic oligonucleotide
aaucagccacauguaguaa

SEQ ID NO: 2338808 - RNA, 19 nt, Artificial Sequence
  Description of Artificial Sequence: Synthetic oligonucleotide
aggucccaagaaugaguag

SEQ ID NO: 2338809 - RNA, 19 nt, Artificial Sequence
  Description of Artificial Sequence: Synthetic oligonucleotide
cucuguugaugagcagucg

SEQ ID NO: 2338810 - RNA, 19 nt, Artificial Sequence
  Description of Artificial Sequence: Synthetic oligonucleotide
augucagguuucacaacuc

SEQ ID NO: 2338811 - RNA, 19 nt, Artificial Sequence
  Description of Artificial Sequence: Synthetic oligonucleotide
uccauccagcuuuccaguc

SEQ ID NO: 2338812 - RNA, 19 nt, Artificial Sequence
  Description of Artificial Sequence: Synthetic oligonucleotide
uguguucgggcaugagguc

SEQ ID NO: 2338813 - RNA, 19 nt, Artificial Sequence
  Description of Artificial Sequence: Synthetic oligonucleotide
uagagaccacuucccggga

SEQ ID NO: 2338814 - RNA, 19 nt, Artificial Sequence
  Description of Artificial Sequence: Synthetic oligonucleotide
auagugcccacggguacag

SEQ ID NO: 2338815 - RNA, 19 nt, Artificial Sequence
  Description of Artificial Sequence: Synthetic oligonucleotide
cuuaucuguccuguccauc

SEQ ID NO: 2338816 - RNA, 19 nt, Artificial Sequence
  Description of Artificial Sequence: Synthetic oligonucleotide
uucagacaagcuggcaaaa

SEQ ID NO: 2338817 - RNA, 19 nt, Artificial Sequence
  Description of Artificial Sequence: Synthetic oligonucleotide
gaagggcuugggugugaag

SEQ ID NO: 2338818 - RNA, 19 nt, Artificial Sequence
  Description of Artificial Sequence: Synthetic oligonucleotide
guacgggaugucauacugc

SEQ ID NO: 2338819 - RNA, 19 nt, Artificial Sequence
  Description of Artificial Sequence: Synthetic oligonucleotide
ugauuucccgcaggugaug

SEQ ID NO: 2338820 - RNA, 19 nt, Artificial Sequence
  Description of Artificial Sequence: Synthetic oligonucleotide
gacaagcuggcaaaaggcu

SEQ ID NO: 2338821 - RNA, 19 nt, Artificial Sequence
  Description of Artificial Sequence: Synthetic oligonucleotide
gagcagucggggcacugac

SEQ ID NO: 2338822 - RNA, 19 nt, Artificial Sequence
  Description of Artificial Sequence: Synthetic oligonucleotide
aucgaaggaaguagugagu

SEQ ID NO: 2338823 - RNA, 19 nt, Artificial Sequence
  Description of Artificial Sequence: Synthetic oligonucleotide
cuugcaggcagcggcuccc

SEQ ID NO: 2338824 - RNA, 19 nt, Artificial Sequence
  Description of Artificial Sequence: Synthetic oligonucleotide
gggcaugaggucucccugg

SEQ ID NO: 2338825 - RNA, 19 nt, Artificial Sequence
  Description of Artificial Sequence: Synthetic oligonucleotide
ugagcagucggggcacuga

SEQ ID NO: 2338826 - RNA, 19 nt, Artificial Sequence
  Description of Artificial Sequence: Synthetic oligonucleotide
gaaggaccuucgacagacg

SEQ ID NO: 2338827 - RNA, 19 nt, Artificial Sequence
  Description of Artificial Sequence: Synthetic oligonucleotide
gaugaggccauagucuuau

SEQ ID NO: 2338828 - RNA, 19 nt, Artificial Sequence
  Description of Artificial Sequence: Synthetic oligonucleotide
acuacaucgccuagcugga

SEQ ID NO: 2338829 - RNA, 19 nt, Artificial Sequence
  Description of Artificial Sequence: Synthetic oligonucleotide
gguagcugaugcaaaggac

SEQ ID NO: 2338830 - RNA, 19 nt, Artificial Sequence
  Description of Artificial Sequence: Synthetic oligonucleotide
ccaagaaugaguagcaggu

SEQ ID NO: 2338831 - RNA, 19 nt, Artificial Sequence
  Description of Artificial Sequence: Synthetic oligonucleotide
cagggcaaaaucagccaca

SEQ ID NO: 2338832 - RNA, 19 nt, Artificial Sequence
  Description of Artificial Sequence: Synthetic oligonucleotide
gucccaagaaugaguagca

SEQ ID NO: 2338833 - RNA, 19 nt, Artificial Sequence
  Description of Artificial Sequence: Synthetic oligonucleotide
aaccuugcaggcagcggcu

SEQ ID NO: 2338834 - RNA, 19 nt, Artificial Sequence
  Description of Artificial Sequence: Synthetic oligonucleotide
cuguaagcaaaggacccca

SEQ ID NO: 2338835 - RNA, 19 nt, Artificial Sequence
  Description of Artificial Sequence: Synthetic oligonucleotide
gucugccagggcaaaauca

SEQ ID NO: 2338836 - RNA, 19 nt, Artificial Sequence
  Description of Artificial Sequence: Synthetic oligonucleotide
guccgagcuguguucgggc

SEQ ID NO: 2338837 - RNA, 19 nt, Artificial Sequence
  Description of Artificial Sequence: Synthetic oligonucleotide
ugguuuggcccagacuuau

SEQ ID NO: 2338838 - RNA, 19 nt, Artificial Sequence
  Description of Artificial Sequence: Synthetic oligonucleotide
uagagccgcagaagcaguu

SEQ ID NO: 2338839 - RNA, 19 nt, Artificial Sequence
  Description of Artificial Sequence: Synthetic oligonucleotide
agggcaaaaucagccacau

SEQ ID NO: 2338840 - RNA, 19 nt, Artificial Sequence
  Description of Artificial Sequence: Synthetic oligonucleotide
augaggccauagucuuauc

SEQ ID NO: 2338841 - RNA, 19 nt, Artificial Sequence
  Description of Artificial Sequence: Synthetic oligonucleotide
cugaugcaaaggacccaug

SEQ ID NO: 2338842 - RNA, 19 nt, Artificial Sequence
  Description of Artificial Sequence: Synthetic oligonucleotide
gcaaucgaaggaaguagug

SEQ ID NO: 2338843 - RNA, 19 nt, Artificial Sequence
  Description of Artificial Sequence: Synthetic oligonucleotide
ucgccuagcuggaccacau

SEQ ID NO: 2338844 - RNA, 19 nt, Artificial Sequence
  Description of Artificial Sequence: Synthetic oligonucleotide
uagcuggaccacaucugua

SEQ ID NO: 2338845 - RNA, 19 nt, Artificial Sequence
  Description of Artificial Sequence: Synthetic oligonucleotide
gaucugaguccggaugcca

SEQ ID NO: 2338846 - RNA, 19 nt, Artificial Sequence
  Description of Artificial Sequence: Synthetic oligonucleotide
agacgcucucucaagucca

SEQ ID NO: 2338847 - RNA, 19 nt, Artificial Sequence
  Description of Artificial Sequence: Synthetic oligonucleotide
agagaccacuucccgggau

SEQ ID NO: 2338848 - RNA, 19 nt, Artificial Sequence
  Description of Artificial Sequence: Synthetic oligonucleotide
cucucaaguccaucaaugu

SEQ ID NO: 2338849 - RNA, 19 nt, Artificial Sequence
  Description of Artificial Sequence: Synthetic oligonucleotide
ggagacagggaugccagac

SEQ ID NO: 2338850 - RNA, 19 nt, Artificial Sequence
  Description of Artificial Sequence: Synthetic oligonucleotide
agggaggucccaagaauga

SEQ ID NO: 2338851 - RNA, 19 nt, Artificial Sequence
  Description of Artificial Sequence: Synthetic oligonucleotide
ccugucugccaucacauca

SEQ ID NO: 2338852 - RNA, 19 nt, Artificial Sequence
  Description of Artificial Sequence: Synthetic oligonucleotide
gucugccaucacaucagcc

SEQ ID NO: 2338853 - RNA, 19 nt, Artificial Sequence
  Description of Artificial Sequence: Synthetic oligonucleotide
uggagacagggaugccaga

SEQ ID NO: 2338854 - RNA, 19 nt, Artificial Sequence
  Description of Artificial Sequence: Synthetic oligonucleotide
caaccagcuuggagacagg

SEQ ID NO: 2338855 - RNA, 19 nt, Artificial Sequence
  Description of Artificial Sequence: Synthetic oligonucleotide
cuagcuggaccacaucugu

SEQ ID NO: 2338856 - RNA, 19 nt, Artificial Sequence
  Description of Artificial Sequence: Synthetic oligonucleotide
cugaguccggaugccacug

SEQ ID NO: 2338857 - RNA, 19 nt, Artificial Sequence
  Description of Artificial Sequence: Synthetic oligonucleotide
uuaggccuauagugcccac

SEQ ID NO: 2338858 - RNA, 19 nt, Artificial Sequence
  Description of Artificial Sequence: Synthetic oligonucleotide
agaccacuucccgggaucu

SEQ ID NO: 2338859 - RNA, 19 nt, Artificial Sequence
  Description of Artificial Sequence: Synthetic oligonucleotide
cuguccgagcuguguucgg

SEQ ID NO: 2338860 - RNA, 19 nt, Artificial Sequence
  Description of Artificial Sequence: Synthetic oligonucleotide
cuguguguagagccgcaga

SEQ ID NO: 2338861 - RNA, 19 nt, Artificial Sequence
  Description of Artificial Sequence: Synthetic oligonucleotide
aggaccuucgacagacggu

SEQ ID NO: 2338862 - RNA, 19 nt, Artificial Sequence
  Description of Artificial Sequence: Synthetic oligonucleotide
cagccuuuccacacucuga

SEQ ID NO: 2338863 - RNA, 19 nt, Artificial Sequence
  Description of Artificial Sequence: Synthetic oligonucleotide
gaagaccacuagccagguc

SEQ ID NO: 2338864 - RNA, 19 nt, Artificial Sequence
  Description of Artificial Sequence: Synthetic oligonucleotide
gaccccaccaagucucugu

SEQ ID NO: 2338865 - RNA, 19 nt, Artificial Sequence
  Description of Artificial Sequence: Synthetic oligonucleotide
uucaaccagcuuggagaca

SEQ ID NO: 2338866 - RNA, 19 nt, Artificial Sequence
  Description of Artificial Sequence: Synthetic oligonucleotide
ucucccgcuggaugagauc

SEQ ID NO: 2338867 - RNA, 19 nt, Artificial Sequence
  Description of Artificial Sequence: Synthetic oligonucleotide
gugugauuucccgcaggug

SEQ ID NO: 2338868 - RNA, 19 nt, Artificial Sequence
  Description of Artificial Sequence: Synthetic oligonucleotide
gcuugggugugaagaaaag

SEQ ID NO: 2338869 - RNA, 19 nt, Artificial Sequence
  Description of Artificial Sequence: Synthetic oligonucleotide
ccgggaaggaccuucgaca

SEQ ID NO: 2338870 - RNA, 19 nt, Artificial Sequence
  Description of Artificial Sequence: Synthetic oligonucleotide
caccagccuuuccacacuc

SEQ ID NO: 2338871 - RNA, 19 nt, Artificial Sequence
  Description of Artificial Sequence: Synthetic oligonucleotide
gcgaggacuguaagcaaag

SEQ ID NO: 2338872 - RNA, 19 nt, Artificial Sequence
  Description of Artificial Sequence: Synthetic oligonucleotide
gacagacggugcagguagc

SEQ ID NO: 2338873 - RNA, 19 nt, Artificial Sequence
  Description of Artificial Sequence: Synthetic oligonucleotide
gggaggucccaagaaugag

SEQ ID NO: 2338874 - RNA, 19 nt, Artificial Sequence
  Description of Artificial Sequence: Synthetic oligonucleotide
aucgccuagcuggaccaca

SEQ ID NO: 2338875 - RNA, 19 nt, Artificial Sequence
  Description of Artificial Sequence: Synthetic oligonucleotide
ggcccagacuuauaaaccu

SEQ ID NO: 2338876 - RNA, 19 nt, Artificial Sequence
  Description of Artificial Sequence: Synthetic oligonucleotide
ggccuauagugcccacggg

SEQ ID NO: 2338877 - RNA, 19 nt, Artificial Sequence
  Description of Artificial Sequence: Synthetic oligonucleotide
guuccuugucgugaagcaa

SEQ ID NO: 2338878 - RNA, 19 nt, Artificial Sequence
  Description of Artificial Sequence: Synthetic oligonucleotide
ccuguccgagcuguguucg

SEQ ID NO: 2338879 - RNA, 19 nt, Artificial Sequence
  Description of Artificial Sequence: Synthetic oligonucleotide
gaccuucgacagacggugc

SEQ ID NO: 2338880 - RNA, 19 nt, Artificial Sequence
  Description of Artificial Sequence: Synthetic oligonucleotide
accuugcaggcagcggcuc

SEQ ID NO: 2338881 - RNA, 19 nt, Artificial Sequence
  Description of Artificial Sequence: Synthetic oligonucleotide
ggugaagaagggcuugggu

SEQ ID NO: 2338882 - RNA, 19 nt, Artificial Sequence
  Description of Artificial Sequence: Synthetic oligonucleotide
cagucucagaagaccacua

SEQ ID NO: 2338883 - RNA, 19 nt, Artificial Sequence
  Description of Artificial Sequence: Synthetic oligonucleotide
cgggaaggaccuucgacag

SEQ ID NO: 2338884 - RNA, 19 nt, Artificial Sequence
  Description of Artificial Sequence: Synthetic oligonucleotide
gccuauagugcccacgggu

SEQ ID NO: 2338885 - RNA, 19 nt, Artificial Sequence
  Description of Artificial Sequence: Synthetic oligonucleotide
ggucugccagggcaaaauc

SEQ ID NO: 2338886 - RNA, 19 nt, Artificial Sequence
  Description of Artificial Sequence: Synthetic oligonucleotide
agcuggcaaaaggcuccac

SEQ ID NO: 2338887 - RNA, 19 nt, Artificial Sequence
  Description of Artificial Sequence: Synthetic oligonucleotide
acuagccaggucacacaca

SEQ ID NO: 2338888 - RNA, 19 nt, Artificial Sequence
  Description of Artificial Sequence: Synthetic oligonucleotide
acgcucucucaaguccauc

SEQ ID NO: 2338889 - RNA, 19 nt, Artificial Sequence
  Description of Artificial Sequence: Synthetic oligonucleotide
cccuggaaagaggaucucc

SEQ ID NO: 2338890 - RNA, 19 nt, Artificial Sequence
  Description of Artificial Sequence: Synthetic oligonucleotide
aggcagcggcuccccaaag

SEQ ID NO: 2338891 - RNA, 19 nt, Artificial Sequence
  Description of Artificial Sequence: Synthetic oligonucleotide
ccuugucgugaagcaaucg

SEQ ID NO: 2338892 - RNA, 19 nt, Artificial Sequence
  Description of Artificial Sequence: Synthetic oligonucleotide
cucuuguguccagcccagg

SEQ ID NO: 2338893 - RNA, 19 nt, Artificial Sequence
  Description of Artificial Sequence: Synthetic oligonucleotide
gcagcggcuccccaaagaa

SEQ ID NO: 2338894 - RNA, 19 nt, Artificial Sequence
  Description of Artificial Sequence: Synthetic oligonucleotide
aguccggaugccacugggu

SEQ ID NO: 2338895 - RNA, 19 nt, Artificial Sequence
  Description of Artificial Sequence: Synthetic oligonucleotide
ccagucucccgcuggauga

SEQ ID NO: 2338896 - RNA, 19 nt, Artificial Sequence
  Description of Artificial Sequence: Synthetic oligonucleotide
ggccaaggugaagaagggc

SEQ ID NO: 2338897 - RNA, 19 nt, Artificial Sequence
  Description of Artificial Sequence: Synthetic oligonucleotide
uucgggcaugaggucuccc

SEQ ID NO: 2338898 - RNA, 19 nt, Artificial Sequence
  Description of Artificial Sequence: Synthetic oligonucleotide
ccuauagugcccacgggua

SEQ ID NO: 2338899 - RNA, 19 nt, Artificial Sequence
  Description of Artificial Sequence: Synthetic oligonucleotide
ccagacgcucucucaaguc

SEQ ID NO: 2338900 - RNA, 19 nt, Artificial Sequence
  Description of Artificial Sequence: Synthetic oligonucleotide
gcaaaaucagccacaugua

SEQ ID NO: 2338901 - RNA, 19 nt, Artificial Sequence
  Description of Artificial Sequence: Synthetic oligonucleotide
augagcagucggggcacug

SEQ ID NO: 2338902 - RNA, 19 nt, Artificial Sequence
  Description of Artificial Sequence: Synthetic oligonucleotide
gcccagacuuauaaaccug

SEQ ID NO: 2338903 - RNA, 19 nt, Artificial Sequence
  Description of Artificial Sequence: Synthetic oligonucleotide
caggguacgggaugucaua

SEQ ID NO: 2338904 - RNA, 19 nt, Artificial Sequence
  Description of Artificial Sequence: Synthetic oligonucleotide
guguucgggcaugaggucu

SEQ ID NO: 2338905 - RNA, 19 nt, Artificial Sequence
  Description of Artificial Sequence: Synthetic oligonucleotide
cccgggaaggaccuucgac

SEQ ID NO: 2338906 - RNA, 19 nt, Artificial Sequence
  Description of Artificial Sequence: Synthetic oligonucleotide
gaccacuucccgggaucug

SEQ ID NO: 2338907 - RNA, 19 nt, Artificial Sequence
  Description of Artificial Sequence: Synthetic oligonucleotide
ggccauagucuuaucuguc

SEQ ID NO: 2338908 - RNA, 19 nt, Artificial Sequence
  Description of Artificial Sequence: Synthetic oligonucleotide
cuacaucgccuagcuggac

SEQ ID NO: 2338909 - RNA, 19 nt, Artificial Sequence
  Description of Artificial Sequence: Synthetic oligonucleotide
cagucggggcacugacuuc

SEQ ID NO: 2338910 - RNA, 19 nt, Artificial Sequence
  Description of Artificial Sequence: Synthetic oligonucleotide
cuccuuggccaaggugaag

SEQ ID NO: 2338911 - RNA, 19 nt, Artificial Sequence
  Description of Artificial Sequence: Synthetic oligonucleotide
agccgcagaagcaguuccu

SEQ ID NO: 2338912 - RNA, 19 nt, Artificial Sequence
  Description of Artificial Sequence: Synthetic oligonucleotide
ccacacucugaacuacauc

SEQ ID NO: 2338913 - RNA, 19 nt, Artificial Sequence
  Description of Artificial Sequence: Synthetic oligonucleotide
ggcagucucagaagaccac

SEQ ID NO: 2338914 - RNA, 19 nt, Artificial Sequence
  Description of Artificial Sequence: Synthetic oligonucleotide
ccacauguaguaagaaccu

SEQ ID NO: 2338915 - RNA, 19 nt, Artificial Sequence
  Description of Artificial Sequence: Synthetic oligonucleotide
guccaucaauguucugugu

SEQ ID NO: 2338916 - RNA, 19 nt, Artificial Sequence
  Description of Artificial Sequence: Synthetic oligonucleotide
cugcgaggacuguaagcaa

SEQ ID NO: 2338917 - RNA, 19 nt, Artificial Sequence
  Description of Artificial Sequence: Synthetic oligonucleotide
agcagucggggcacugacu

SEQ ID NO: 2338918 - RNA, 19 nt, Artificial Sequence
  Description of Artificial Sequence: Synthetic oligonucleotide
ccgcagaagcaguuccuug

SEQ ID NO: 2338919 - RNA, 19 nt, Artificial Sequence
  Description of Artificial Sequence: Synthetic oligonucleotide
cgugaagcaaucgaaggaa

SEQ ID NO: 2338920 - RNA, 19 nt, Artificial Sequence
  Description of Artificial Sequence: Synthetic oligonucleotide
ggcagcggcuccccaaaga

SEQ ID NO: 2338921 - RNA, 19 nt, Artificial Sequence
  Description of Artificial Sequence: Synthetic oligonucleotide
agucucccgcuggaugaga

SEQ ID NO: 2338922 - RNA, 19 nt, Artificial Sequence
  Description of Artificial Sequence: Synthetic oligonucleotide
ccggaugccacugggugug

SEQ ID NO: 2338923 - RNA, 19 nt, Artificial Sequence
  Description of Artificial Sequence: Synthetic oligonucleotide
caucagcccugaaguccuc

SEQ ID NO: 2338924 - RNA, 19 nt, Artificial Sequence
  Description of Artificial Sequence: Synthetic oligonucleotide
ggaggucccaagaaugagu

SEQ ID NO: 2338925 - RNA, 19 nt, Artificial Sequence
  Description of Artificial Sequence: Synthetic oligonucleotide
caguacagacagggcagca

SEQ ID NO: 2338926 - RNA, 19 nt, Artificial Sequence
  Description of Artificial Sequence: Synthetic oligonucleotide
gaccacuagccaggucaca

SEQ ID NO: 2338927 - RNA, 19 nt, Artificial Sequence
  Description of Artificial Sequence: Synthetic oligonucleotide
aaggacccaugagcuucaa

SEQ ID NO: 2338928 - RNA, 19 nt, Artificial Sequence
  Description of Artificial Sequence: Synthetic oligonucleotide
gugauuucccgcaggugau

SEQ ID NO: 2338929 - RNA, 19 nt, Artificial Sequence
  Description of Artificial Sequence: Synthetic oligonucleotide
caucgccuagcuggaccac

SEQ ID NO: 2338930 - RNA, 19 nt, Artificial Sequence
  Description of Artificial Sequence: Synthetic oligonucleotide
gggaaggaccuucgacaga

SEQ ID NO: 2338931 - RNA, 19 nt, Artificial Sequence
  Description of Artificial Sequence: Synthetic oligonucleotide
gcagucggggcacugacuu

SEQ ID NO: 2338932 - RNA, 19 nt, Artificial Sequence
  Description of Artificial Sequence: Synthetic oligonucleotide
gguugcuguagagaccacu

SEQ ID NO: 2338933 - RNA, 19 nt, Artificial Sequence
  Description of Artificial Sequence: Synthetic oligonucleotide
gacagggaugccagacgcu

SEQ ID NO: 2338934 - RNA, 19 nt, Artificial Sequence
  Description of Artificial Sequence: Synthetic oligonucleotide
acggugcagguagcugaug

SEQ ID NO: 2338935 - RNA, 19 nt, Artificial Sequence
  Description of Artificial Sequence: Synthetic oligonucleotide
cuguacugcgaggacugua

SEQ ID NO: 2338936 - RNA, 19 nt, Artificial Sequence
  Description of Artificial Sequence: Synthetic oligonucleotide
gagcuguguucgggcauga

SEQ ID NO: 2338937 - RNA, 19 nt, Artificial Sequence
  Description of Artificial Sequence: Synthetic oligonucleotide
gcugaugcaaaggacccau

SEQ ID NO: 2338938 - RNA, 19 nt, Artificial Sequence
  Description of Artificial Sequence: Synthetic oligonucleotide
cagccacauguaguaagaa

SEQ ID NO: 2338939 - RNA, 19 nt, Artificial Sequence
  Description of Artificial Sequence: Synthetic oligonucleotide
gagcuucaaccagcuugga

SEQ ID NO: 2338940 - RNA, 19 nt, Artificial Sequence
  Description of Artificial Sequence: Synthetic oligonucleotide
gaggaucuccugugugauu

SEQ ID NO: 2338941 - RNA, 19 nt, Artificial Sequence
  Description of Artificial Sequence: Synthetic oligonucleotide
ccacuagccaggucacaca

SEQ ID NO: 2338942 - RNA, 19 nt, Artificial Sequence
  Description of Artificial Sequence: Synthetic oligonucleotide
gggcacugacuucuguacu

SEQ ID NO: 2338943 - RNA, 19 nt, Artificial Sequence
  Description of Artificial Sequence: Synthetic oligonucleotide
gacggugcagguagcugau

SEQ ID NO: 2338944 - RNA, 19 nt, Artificial Sequence
  Description of Artificial Sequence: Synthetic oligonucleotide
cagggaugccagacgcucu

SEQ ID NO: 2338945 - RNA, 19 nt, Artificial Sequence
  Description of Artificial Sequence: Synthetic oligonucleotide
gccaucacaucagcccuga

SEQ ID NO: 2338946 - RNA, 19 nt, Artificial Sequence
  Description of Artificial Sequence: Synthetic oligonucleotide
uccagcccaggagguccac

SEQ ID NO: 2338947 - RNA, 19 nt, Artificial Sequence
  Description of Artificial Sequence: Synthetic oligonucleotide
gucggggcacugacuucug

SEQ ID NO: 2338948 - RNA, 19 nt, Artificial Sequence
  Description of Artificial Sequence: Synthetic oligonucleotide
gccagacgcucucucaagu

SEQ ID NO: 2338949 - RNA, 19 nt, Artificial Sequence
  Description of Artificial Sequence: Synthetic oligonucleotide
cacauguaguaagaaccuu

SEQ ID NO: 2338950 - RNA, 19 nt, Artificial Sequence
  Description of Artificial Sequence: Synthetic oligonucleotide
cgggcaugaggucucccug

SEQ ID NO: 2338951 - RNA, 19 nt, Artificial Sequence
  Description of Artificial Sequence: Synthetic oligonucleotide
gcagggcacccugucugcc

SEQ ID NO: 2338952 - RNA, 19 nt, Artificial Sequence
  Description of Artificial Sequence: Synthetic oligonucleotide
ggguacgggaugucauacu

SEQ ID NO: 2338953 - RNA, 19 nt, Artificial Sequence
  Description of Artificial Sequence: Synthetic oligonucleotide
gaugagcagucggggcacu

SEQ ID NO: 2338954 - RNA, 19 nt, Artificial Sequence
  Description of Artificial Sequence: Synthetic oligonucleotide
cgcagaagcaguuccuugu

SEQ ID NO: 2338955 - RNA, 19 nt, Artificial Sequence
  Description of Artificial Sequence: Synthetic oligonucleotide
cgagcuguguucgggcaug

SEQ ID NO: 2338956 - RNA, 19 nt, Artificial Sequence
  Description of Artificial Sequence: Synthetic oligonucleotide
gacgcucucucaaguccau

SEQ ID NO: 2338957 - RNA, 19 nt, Artificial Sequence
  Description of Artificial Sequence: Synthetic oligonucleotide
gggcuugggugugaagaaa

SEQ ID NO: 2338958 - RNA, 19 nt, Artificial Sequence
  Description of Artificial Sequence: Synthetic oligonucleotide
cacuucccgggaucugagu

SEQ ID NO: 2338959 - RNA, 19 nt, Artificial Sequence
  Description of Artificial Sequence: Synthetic oligonucleotide
ggaccccaccaagucucug

SEQ ID NO: 2338960 - RNA, 19 nt, Artificial Sequence
  Description of Artificial Sequence: Synthetic oligonucleotide
gcaaaggacccaugagcuu

SEQ ID NO: 2338961 - RNA, 19 nt, Artificial Sequence
  Description of Artificial Sequence: Synthetic oligonucleotide
gucucccgcuggaugagau

SEQ ID NO: 2338962 - RNA, 19 nt, Artificial Sequence
  Description of Artificial Sequence: Synthetic oligonucleotide
gcggcuccccaaagaacac

SEQ ID NO: 2338963 - RNA, 19 nt, Artificial Sequence
  Description of Artificial Sequence: Synthetic oligonucleotide
cacagugguuuggcccaga

SEQ ID NO: 2338964 - RNA, 19 nt, Artificial Sequence
  Description of Artificial Sequence: Synthetic oligonucleotide
gguuuggcccagacuuaua

SEQ ID NO: 2338965 - RNA, 19 nt, Artificial Sequence
  Description of Artificial Sequence: Synthetic oligonucleotide
cuccaccuccagggagguc

SEQ ID NO: 2338966 - RNA, 19 nt, Artificial Sequence
  Description of Artificial Sequence: Synthetic oligonucleotide
cccgggaucugaguccgga

SEQ ID NO: 2338967 - RNA, 19 nt, Artificial Sequence
  Description of Artificial Sequence: Synthetic oligonucleotide
gagugacauuaggccuaua

SEQ ID NO: 2338968 - RNA, 19 nt, Artificial Sequence
  Description of Artificial Sequence: Synthetic oligonucleotide
gggaugccagacgcucucu

SEQ ID NO: 2338969 - RNA, 19 nt, Artificial Sequence
  Description of Artificial Sequence: Synthetic oligonucleotide
caccuccagggagguccca

SEQ ID NO: 2338970 - RNA, 19 nt, Artificial Sequence
  Description of Artificial Sequence: Synthetic oligonucleotide
ccaucacaucagcccugaa

SEQ ID NO: 2338971 - RNA, 19 nt, Artificial Sequence
  Description of Artificial Sequence: Synthetic oligonucleotide
ccgcaggugaugaggccau

SEQ ID NO: 2338972 - RNA, 19 nt, Artificial Sequence
  Description of Artificial Sequence: Synthetic oligonucleotide
ccccgggaaggaccuucga

SEQ ID NO: 2338973 - RNA, 19 nt, Artificial Sequence
  Description of Artificial Sequence: Synthetic oligonucleotide
ccgagcuguguucgggcau

SEQ ID NO: 2338974 - RNA, 19 nt, Artificial Sequence
  Description of Artificial Sequence: Synthetic oligonucleotide
ccgggaucugaguccggau

SEQ ID NO: 2338975 - RNA, 19 nt, Artificial Sequence
  Description of Artificial Sequence: Synthetic oligonucleotide
cccacggguacagcuccuu

SEQ ID NO: 2338976 - RNA, 19 nt, Artificial Sequence
  Description of Artificial Sequence: Synthetic oligonucleotide
acugaaucuacuuccaacc

SEQ ID NO: 2338977 - RNA, 19 nt, Artificial Sequence
  Description of Artificial Sequence: Synthetic oligonucleotide
aagucgugccuucucaucc

SEQ ID NO: 2338978 - RNA, 19 nt, Artificial Sequence
  Description of Artificial Sequence: Synthetic oligonucleotide
agcagaacauugcaguugc

SEQ ID NO: 2338979 - RNA, 19 nt, Artificial Sequence
  Description of Artificial Sequence: Synthetic oligonucleotide
aguagaacaucuguguggc

SEQ ID NO: 2338980 - RNA, 19 nt, Artificial Sequence
  Description of Artificial Sequence: Synthetic oligonucleotide
uggagugcaagcuucacag

SEQ ID NO: 2338981 - RNA, 19 nt, Artificial Sequence
  Description of Artificial Sequence: Synthetic oligonucleotide
aauggggcaggguuagccc

SEQ ID NO: 2338982 - RNA, 19 nt, Artificial Sequence
  Description of Artificial Sequence: Synthetic oligonucleotide
gaugccuucucgcacacgg

SEQ ID NO: 2338983 - RNA, 19 nt, Artificial Sequence
  Description of Artificial Sequence: Synthetic oligonucleotide
aguccucauagauaagucg

SEQ ID NO: 2338984 - RNA, 19 nt, Artificial Sequence
  Description of Artificial Sequence: Synthetic oligonucleotide
guaguagagaacgauaggc

SEQ ID NO: 2338985 - RNA, 19 nt, Artificial Sequence
  Description of Artificial Sequence: Synthetic oligonucleotide
ugggacugaaucuacuucc

SEQ ID NO: 2338986 - RNA, 19 nt, Artificial Sequence
  Description of Artificial Sequence: Synthetic oligonucleotide
uccuauugaugccuucucg

SEQ ID NO: 2338987 - RNA, 19 nt, Artificial Sequence
  Description of Artificial Sequence: Synthetic oligonucleotide
gaguaguagagaacgauag

SEQ ID NO: 2338988 - RNA, 19 nt, Artificial Sequence
  Description of Artificial Sequence: Synthetic oligonucleotide
ugcaucaacuugucaaagg

SEQ ID NO: 2338989 - RNA, 19 nt, Artificial Sequence
  Description of Artificial Sequence: Synthetic oligonucleotide
agcaggauagggcagagca

SEQ ID NO: 2338990 - RNA, 19 nt, Artificial Sequence
  Description of Artificial Sequence: Synthetic oligonucleotide
cuacuuccaaccaaauggg

SEQ ID NO: 2338991 - RNA, 19 nt, Artificial Sequence
  Description of Artificial Sequence: Synthetic oligonucleotide
aguaguagagaacgauagg

SEQ ID NO: 2338992 - RNA, 19 nt, Artificial Sequence
  Description of Artificial Sequence: Synthetic oligonucleotide
acuuccaaccaaauggggc

SEQ ID NO: 2338993 - RNA, 19 nt, Artificial Sequence
  Description of Artificial Sequence: Synthetic oligonucleotide
gauagggcagagcagaaca

SEQ ID NO: 2338994 - RNA, 19 nt, Artificial Sequence
  Description of Artificial Sequence: Synthetic oligonucleotide
ucaacuugucaaaggacug

SEQ ID NO: 2338995 - RNA, 19 nt, Artificial Sequence
  Description of Artificial Sequence: Synthetic oligonucleotide
uaguagagaacgauaggca

SEQ ID NO: 2338996 - RNA, 19 nt, Artificial Sequence
  Description of Artificial Sequence: Synthetic oligonucleotide
agucugggagcuuggaucg

SEQ ID NO: 2338997 - RNA, 19 nt, Artificial Sequence
  Description of Artificial Sequence: Synthetic oligonucleotide
auagauaagucgugccuuc

SEQ ID NO: 2338998 - RNA, 19 nt, Artificial Sequence
  Description of Artificial Sequence: Synthetic oligonucleotide
acaucuguguggcaagcac

SEQ ID NO: 2338999 - RNA, 19 nt, Artificial Sequence
  Description of Artificial Sequence: Synthetic oligonucleotide
agaacgauaggcaggagag

SEQ ID NO: 2339000 - RNA, 19 nt, Artificial Sequence
  Description of Artificial Sequence: Synthetic oligonucleotide
gaguccccgagucacagcg

SEQ ID NO: 2339001 - RNA, 19 nt, Artificial Sequence
  Description of Artificial Sequence: Synthetic oligonucleotide
aacgauaggcaggagaggu

SEQ ID NO: 2339002 - RNA, 19 nt, Artificial Sequence
  Description of Artificial Sequence: Synthetic oligonucleotide
ugucaaaggacugugccca

SEQ ID NO: 2339003 - RNA, 19 nt, Artificial Sequence
  Description of Artificial Sequence: Synthetic oligonucleotide
aaccaaauggggcaggguu

SEQ ID NO: 2339004 - RNA, 19 nt, Artificial Sequence
  Description of Artificial Sequence: Synthetic oligonucleotide
uguggcaagcaccuaggcc

SEQ ID NO: 2339005 - RNA, 19 nt, Artificial Sequence
  Description of Artificial Sequence: Synthetic oligonucleotide
gacugaaucuacuuccaac

SEQ ID NO: 2339006 - RNA, 19 nt, Artificial Sequence
  Description of Artificial Sequence: Synthetic oligonucleotide
acguaguccucauagauaa

SEQ ID NO: 2339007 - RNA, 19 nt, Artificial Sequence
  Description of Artificial Sequence: Synthetic oligonucleotide
ugaaucuacuuccaaccaa

SEQ ID NO: 2339008 - RNA, 19 nt, Artificial Sequence
  Description of Artificial Sequence: Synthetic oligonucleotide
uaugcaucaacuugucaaa

SEQ ID NO: 2339009 - RNA, 19 nt, Artificial Sequence
  Description of Artificial Sequence: Synthetic oligonucleotide
ugccuguaggaguagaaca

SEQ ID NO: 2339010 - RNA, 19 nt, Artificial Sequence
  Description of Artificial Sequence: Synthetic oligonucleotide
aagcaccuaggccucagag

SEQ ID NO: 2339011 - RNA, 19 nt, Artificial Sequence
  Description of Artificial Sequence: Synthetic oligonucleotide
aguuggagcaggauagggc

SEQ ID NO: 2339012 - RNA, 19 nt, Artificial Sequence
  Description of Artificial Sequence: Synthetic oligonucleotide
ucaucaaauguguggggug

SEQ ID NO: 2339013 - RNA, 19 nt, Artificial Sequence
  Description of Artificial Sequence: Synthetic oligonucleotide
aggguuagccccuagucug

SEQ ID NO: 2339014 - RNA, 19 nt, Artificial Sequence
  Description of Artificial Sequence: Synthetic oligonucleotide
uacuuccaaccaaaugggg

SEQ ID NO: 2339015 - RNA, 19 nt, Artificial Sequence
  Description of Artificial Sequence: Synthetic oligonucleotide
uuggccucugcuuucaacu

SEQ ID NO: 2339016 - RNA, 19 nt, Artificial Sequence
  Description of Artificial Sequence: Synthetic oligonucleotide
uucacuguauucugugcgc

SEQ ID NO: 2339017 - RNA, 19 nt, Artificial Sequence
  Description of Artificial Sequence: Synthetic oligonucleotide
uauugaugccuucucgcac

SEQ ID NO: 2339018 - RNA, 19 nt, Artificial Sequence
  Description of Artificial Sequence: Synthetic oligonucleotide
ugcuuucaacuccucacag

SEQ ID NO: 2339019 - RNA, 19 nt, Artificial Sequence
  Description of Artificial Sequence: Synthetic oligonucleotide
gauaagucgugccuucuca

SEQ ID NO: 2339020 - RNA, 19 nt, Artificial Sequence
  Description of Artificial Sequence: Synthetic oligonucleotide
aggguaggagucccggugc

SEQ ID NO: 2339021 - RNA, 19 nt, Artificial Sequence
  Description of Artificial Sequence: Synthetic oligonucleotide
aucaacuugucaaaggacu

SEQ ID NO: 2339022 - RNA, 19 nt, Artificial Sequence
  Description of Artificial Sequence: Synthetic oligonucleotide
cauguguggguggagaggg

SEQ ID NO: 2339023 - RNA, 19 nt, Artificial Sequence
  Description of Artificial Sequence: Synthetic oligonucleotide
guagagaacgauaggcagg

SEQ ID NO: 2339024 - RNA, 19 nt, Artificial Sequence
  Description of Artificial Sequence: Synthetic oligonucleotide
aucgcagaguccccgaguc

SEQ ID NO: 2339025 - RNA, 19 nt, Artificial Sequence
  Description of Artificial Sequence: Synthetic oligonucleotide
agaacauugcaguugccau

SEQ ID NO: 2339026 - RNA, 19 nt, Artificial Sequence
  Description of Artificial Sequence: Synthetic oligonucleotide
ucucauccaccacauguug

SEQ ID NO: 2339027 - RNA, 19 nt, Artificial Sequence
  Description of Artificial Sequence: Synthetic oligonucleotide
ugcaguuugcuuucccgag

SEQ ID NO: 2339028 - RNA, 19 nt, Artificial Sequence
  Description of Artificial Sequence: Synthetic oligonucleotide
guuggagcaggauagggca

SEQ ID NO: 2339029 - RNA, 19 nt, Artificial Sequence
  Description of Artificial Sequence: Synthetic oligonucleotide
gagaagccugccaagcucg

SEQ ID NO: 2339030 - RNA, 19 nt, Artificial Sequence
  Description of Artificial Sequence: Synthetic oligonucleotide
agcaccuaggccucagagg

SEQ ID NO: 2339031 - RNA, 19 nt, Artificial Sequence
  Description of Artificial Sequence: Synthetic oligonucleotide
aaugcccggaacacacugc

SEQ ID NO: 2339032 - RNA, 19 nt, Artificial Sequence
  Description of Artificial Sequence: Synthetic oligonucleotide
agaacaucuguguggcaag

SEQ ID NO: 2339033 - RNA, 19 nt, Artificial Sequence
  Description of Artificial Sequence: Synthetic oligonucleotide
agauaagucgugccuucuc

SEQ ID NO: 2339034 - RNA, 19 nt, Artificial Sequence
  Description of Artificial Sequence: Synthetic oligonucleotide
uagagaacgauaggcagga

SEQ ID NO: 2339035 - RNA, 19 nt, Artificial Sequence
  Description of Artificial Sequence: Synthetic oligonucleotide
uuagccccuagucugccug

SEQ ID NO: 2339036 - RNA, 19 nt, Artificial Sequence
  Description of Artificial Sequence: Synthetic oligonucleotide
gagaacgauaggcaggaga

SEQ ID NO: 2339037 - RNA, 19 nt, Artificial Sequence
  Description of Artificial Sequence: Synthetic oligonucleotide
auuggccucugcuuucaac

SEQ ID NO: 2339038 - RNA, 19 nt, Artificial Sequence
  Description of Artificial Sequence: Synthetic oligonucleotide
uguuucuccgccucaugug

SEQ ID NO: 2339039 - RNA, 19 nt, Artificial Sequence
  Description of Artificial Sequence: Synthetic oligonucleotide
gaaugcccggaacacacug

SEQ ID NO: 2339040 - RNA, 19 nt, Artificial Sequence
  Description of Artificial Sequence: Synthetic oligonucleotide
uagaacaucuguguggcaa

SEQ ID NO: 2339041 - RNA, 19 nt, Artificial Sequence
  Description of Artificial Sequence: Synthetic oligonucleotide
uguggugccagcucuggac

SEQ ID NO: 2339042 - RNA, 19 nt, Artificial Sequence
  Description of Artificial Sequence: Synthetic oligonucleotide
auucugugcgcaggaaugc

SEQ ID NO: 2339043 - RNA, 19 nt, Artificial Sequence
  Description of Artificial Sequence: Synthetic oligonucleotide
caucuguguggcaagcacc

SEQ ID NO: 2339044 - RNA, 19 nt, Artificial Sequence
  Description of Artificial Sequence: Synthetic oligonucleotide
gcuuuguacuuccucaggg

SEQ ID NO: 2339045 - RNA, 19 nt, Artificial Sequence
  Description of Artificial Sequence: Synthetic oligonucleotide
ggacacguaguccucauag

SEQ ID NO: 2339046 - RNA, 19 nt, Artificial Sequence
  Description of Artificial Sequence: Synthetic oligonucleotide
cuuccaaccaaauggggca

SEQ ID NO: 2339047 - RNA, 19 nt, Artificial Sequence
  Description of Artificial Sequence: Synthetic oligonucleotide
uuucuccgccucauguggg

SEQ ID NO: 2339048 - RNA, 19 nt, Artificial Sequence
  Description of Artificial Sequence: Synthetic oligonucleotide
augcccggaacacacugcg

SEQ ID NO: 2339049 - RNA, 19 nt, Artificial Sequence
  Description of Artificial Sequence: Synthetic oligonucleotide
uuucaacuccucacaggcc

SEQ ID NO: 2339050 - RNA, 19 nt, Artificial Sequence
  Description of Artificial Sequence: Synthetic oligonucleotide
cauugcaguugccauuggg

SEQ ID NO: 2339051 - RNA, 19 nt, Artificial Sequence
  Description of Artificial Sequence: Synthetic oligonucleotide
ucugugcgcaggaaugccc

SEQ ID NO: 2339052 - RNA, 19 nt, Artificial Sequence
  Description of Artificial Sequence: Synthetic oligonucleotide
ccuggaguaguagagaacg

SEQ ID NO: 2339053 - RNA, 19 nt, Artificial Sequence
  Description of Artificial Sequence: Synthetic oligonucleotide
ugugugcuguuucuccgcc

SEQ ID NO: 2339054 - RNA, 19 nt, Artificial Sequence
  Description of Artificial Sequence: Synthetic oligonucleotide
auguugauuggccucugcu

SEQ ID NO: 2339055 - RNA, 19 nt, Artificial Sequence
  Description of Artificial Sequence: Synthetic oligonucleotide
ucauccaccacauguugau

SEQ ID NO: 2339056 - RNA, 19 nt, Artificial Sequence
  Description of Artificial Sequence: Synthetic oligonucleotide
ugccauugggacugaaucu

SEQ ID NO: 2339057 - RNA, 19 nt, Artificial Sequence
  Description of Artificial Sequence: Synthetic oligonucleotide
ugacguucuugguuccagg

SEQ ID NO: 2339058 - RNA, 19 nt, Artificial Sequence
  Description of Artificial Sequence: Synthetic oligonucleotide
uugguggagugcaagcuuc

SEQ ID NO: 2339059 - RNA, 19 nt, Artificial Sequence
  Description of Artificial Sequence: Synthetic oligonucleotide
gaggguaggagucccggug

SEQ ID NO: 2339060 - RNA, 19 nt, Artificial Sequence
  Description of Artificial Sequence: Synthetic oligonucleotide
guggcaagcaccuaggccu

SEQ ID NO: 2339061 - RNA, 19 nt, Artificial Sequence
  Description of Artificial Sequence: Synthetic oligonucleotide
agcugugcaucaucaaaug

SEQ ID NO: 2339062 - RNA, 19 nt, Artificial Sequence
  Description of Artificial Sequence: Synthetic oligonucleotide
uggaccuucacugcagucu

SEQ ID NO: 2339063 - RNA, 19 nt, Artificial Sequence
  Description of Artificial Sequence: Synthetic oligonucleotide
gaggguugcacagauucug

SEQ ID NO: 2339064 - RNA, 19 nt, Artificial Sequence
  Description of Artificial Sequence: Synthetic oligonucleotide
accacauguugauuggccu

SEQ ID NO: 2339065 - RNA, 19 nt, Artificial Sequence
  Description of Artificial Sequence: Synthetic oligonucleotide
caccacauguugauuggcc

SEQ ID NO: 2339066 - RNA, 19 nt, Artificial Sequence
  Description of Artificial Sequence: Synthetic oligonucleotide
agggguugcaguuugcuuu

SEQ ID NO: 2339067 - RNA, 19 nt, Artificial Sequence
  Description of Artificial Sequence: Synthetic oligonucleotide
uucccgagaagccugccaa

SEQ ID NO: 2339068 - RNA, 19 nt, Artificial Sequence
  Description of Artificial Sequence: Synthetic oligonucleotide
aagcgaggguaggaguccc

SEQ ID NO: 2339069 - RNA, 19 nt, Artificial Sequence
  Description of Artificial Sequence: Synthetic oligonucleotide
cugugcgcaggaaugcccg

SEQ ID NO: 2339070 - RNA, 19 nt, Artificial Sequence
  Description of Artificial Sequence: Synthetic oligonucleotide
auugggacugaaucuacuu

SEQ ID NO: 2339071 - RNA, 19 nt, Artificial Sequence
  Description of Artificial Sequence: Synthetic oligonucleotide
acguucuugguuccaggag

SEQ ID NO: 2339072 - RNA, 19 nt, Artificial Sequence
  Description of Artificial Sequence: Synthetic oligonucleotide
agagcauguucucuucacu

SEQ ID NO: 2339073 - RNA, 19 nt, Artificial Sequence
  Description of Artificial Sequence: Synthetic oligonucleotide
acagauucuguggugccag

SEQ ID NO: 2339074 - RNA, 19 nt, Artificial Sequence
  Description of Artificial Sequence: Synthetic oligonucleotide
gagcuuggaucgcagaguc

SEQ ID NO: 2339075 - RNA, 19 nt, Artificial Sequence
  Description of Artificial Sequence: Synthetic oligonucleotide
ggggcuaugcaucaacuug

SEQ ID NO: 2339076 - RNA, 19 nt, Artificial Sequence
  Description of Artificial Sequence: Synthetic oligonucleotide
ccuauugaugccuucucgc

SEQ ID NO: 2339077 - RNA, 19 nt, Artificial Sequence
  Description of Artificial Sequence: Synthetic oligonucleotide
uuggaucgcagaguccccg

SEQ ID NO: 2339078 - RNA, 19 nt, Artificial Sequence
  Description of Artificial Sequence: Synthetic oligonucleotide
uucuccgccucaugugggg

SEQ ID NO: 2339079 - RNA, 19 nt, Artificial Sequence
  Description of Artificial Sequence: Synthetic oligonucleotide
ucgcugacguucuugguuc

SEQ ID NO: 2339080 - RNA, 19 nt, Artificial Sequence
  Description of Artificial Sequence: Synthetic oligonucleotide
ggaguagaacaucugugug

SEQ ID NO: 2339081 - RNA, 19 nt, Artificial Sequence
  Description of Artificial Sequence: Synthetic oligonucleotide
auaagcagcagggguugcg

SEQ ID NO: 2339082 - RNA, 19 nt, Artificial Sequence
  Description of Artificial Sequence: Synthetic oligonucleotide
cuauugaugccuucucgca

SEQ ID NO: 2339083 - RNA, 19 nt, Artificial Sequence
  Description of Artificial Sequence: Synthetic oligonucleotide
uggaguaguagagaacgau

SEQ ID NO: 2339084 - RNA, 19 nt, Artificial Sequence
  Description of Artificial Sequence: Synthetic oligonucleotide
gaacgauaggcaggagagg

SEQ ID NO: 2339085 - RNA, 19 nt, Artificial Sequence
  Description of Artificial Sequence: Synthetic oligonucleotide
uaagucgugccuucucauc

SEQ ID NO: 2339086 - RNA, 19 nt, Artificial Sequence
  Description of Artificial Sequence: Synthetic oligonucleotide
guaggaguagaacaucugu

SEQ ID NO: 2339087 - RNA, 19 nt, Artificial Sequence
  Description of Artificial Sequence: Synthetic oligonucleotide
agaguccccgagucacagc

SEQ ID NO: 2339088 - RNA, 19 nt, Artificial Sequence
  Description of Artificial Sequence: Synthetic oligonucleotide
auaagucgugccuucucau

SEQ ID NO: 2339089 - RNA, 19 nt, Artificial Sequence
  Description of Artificial Sequence: Synthetic oligonucleotide
ugcaagcuucacagcuggg

SEQ ID NO: 2339090 - RNA, 19 nt, Artificial Sequence
  Description of Artificial Sequence: Synthetic oligonucleotide
cacacugcggcccgugggg

SEQ ID NO: 2339091 - RNA, 19 nt, Artificial Sequence
  Description of Artificial Sequence: Synthetic oligonucleotide
aacaucuguguggcaagca

SEQ ID NO: 2339092 - RNA, 19 nt, Artificial Sequence
  Description of Artificial Sequence: Synthetic oligonucleotide
gagucccggugcaugaggg

SEQ ID NO: 2339093 - RNA, 19 nt, Artificial Sequence
  Description of Artificial Sequence: Synthetic oligonucleotide
gcuuggaucgcagaguccc

SEQ ID NO: 2339094 - RNA, 19 nt, Artificial Sequence
  Description of Artificial Sequence: Synthetic oligonucleotide
ucacuguauucugugcgca

SEQ ID NO: 2339095 - RNA, 19 nt, Artificial Sequence
  Description of Artificial Sequence: Synthetic oligonucleotide
gaagcgaggguaggagucc

SEQ ID NO: 2339096 - RNA, 19 nt, Artificial Sequence
  Description of Artificial Sequence: Synthetic oligonucleotide
ugcccagcuuuguacuucc

SEQ ID NO: 2339097 - RNA, 19 nt, Artificial Sequence
  Description of Artificial Sequence: Synthetic oligonucleotide
uguggguggagaggguugc

SEQ ID NO: 2339098 - RNA, 19 nt, Artificial Sequence
  Description of Artificial Sequence: Synthetic oligonucleotide
cucuggaccuucacugcag

SEQ ID NO: 2339099 - RNA, 19 nt, Artificial Sequence
  Description of Artificial Sequence: Synthetic oligonucleotide
gacacguaguccucauaga

SEQ ID NO: 2339100 - RNA, 19 nt, Artificial Sequence
  Description of Artificial Sequence: Synthetic oligonucleotide
guugcacagauucuguggu

SEQ ID NO: 2339101 - RNA, 19 nt, Artificial Sequence
  Description of Artificial Sequence: Synthetic oligonucleotide
augcaucaacuugucaaag

SEQ ID NO: 2339102 - RNA, 19 nt, Artificial Sequence
  Description of Artificial Sequence: Synthetic oligonucleotide
caagcuucacagcugggga

SEQ ID NO: 2339103 - RNA, 19 nt, Artificial Sequence
  Description of Artificial Sequence: Synthetic oligonucleotide
guggugccagcucuggacc

SEQ ID NO: 2339104 - RNA, 19 nt, Artificial Sequence
  Description of Artificial Sequence: Synthetic oligonucleotide
uugauuggccucugcuuuc

SEQ ID NO: 2339105 - RNA, 19 nt, Artificial Sequence
  Description of Artificial Sequence: Synthetic oligonucleotide
uaggagucccggugcauga

SEQ ID NO: 2339106 - RNA, 19 nt, Artificial Sequence
  Description of Artificial Sequence: Synthetic oligonucleotide
cugaaucuacuuccaacca

SEQ ID NO: 2339107 - RNA, 19 nt, Artificial Sequence
  Description of Artificial Sequence: Synthetic oligonucleotide
ucgcacacgggaguccagg

SEQ ID NO: 2339108 - RNA, 19 nt, Artificial Sequence
  Description of Artificial Sequence: Synthetic oligonucleotide
caggauggacacguagucc

SEQ ID NO: 2339109 - RNA, 19 nt, Artificial Sequence
  Description of Artificial Sequence: Synthetic oligonucleotide
cauguugauuggccucugc

SEQ ID NO: 2339110 - RNA, 19 nt, Artificial Sequence
  Description of Artificial Sequence: Synthetic oligonucleotide
uccaaccaaauggggcagg

SEQ ID NO: 2339111 - RNA, 19 nt, Artificial Sequence
  Description of Artificial Sequence: Synthetic oligonucleotide
aguuugcuuucccgagaag

SEQ ID NO: 2339112 - RNA, 19 nt, Artificial Sequence
  Description of Artificial Sequence: Synthetic oligonucleotide
ucaaaggacugugcccagc

SEQ ID NO: 2339113 - RNA, 19 nt, Artificial Sequence
  Description of Artificial Sequence: Synthetic oligonucleotide
uucugugcgcaggaaugcc

SEQ ID NO: 2339114 - RNA, 19 nt, Artificial Sequence
  Description of Artificial Sequence: Synthetic oligonucleotide
cuuggaucgcagagucccc

SEQ ID NO: 2339115 - RNA, 19 nt, Artificial Sequence
  Description of Artificial Sequence: Synthetic oligonucleotide
uguguggggugauggcucu

SEQ ID NO: 2339116 - RNA, 19 nt, Artificial Sequence
  Description of Artificial Sequence: Synthetic oligonucleotide
cagaacauugcaguugcca

SEQ ID NO: 2339117 - RNA, 19 nt, Artificial Sequence
  Description of Artificial Sequence: Synthetic oligonucleotide
uguggggugauggcucuug

SEQ ID NO: 2339118 - RNA, 19 nt, Artificial Sequence
  Description of Artificial Sequence: Synthetic oligonucleotide
ugcccggaacacacugcgg

SEQ ID NO: 2339119 - RNA, 19 nt, Artificial Sequence
  Description of Artificial Sequence: Synthetic oligonucleotide
agugcaagcuucacagcug

SEQ ID NO: 2339120 - RNA, 19 nt, Artificial Sequence
  Description of Artificial Sequence: Synthetic oligonucleotide
ugguggagugcaagcuuca

SEQ ID NO: 2339121 - RNA, 19 nt, Artificial Sequence
  Description of Artificial Sequence: Synthetic oligonucleotide
guaguccucauagauaagu

SEQ ID NO: 2339122 - RNA, 19 nt, Artificial Sequence
  Description of Artificial Sequence: Synthetic oligonucleotide
ugcaucauggcuggacauc

SEQ ID NO: 2339123 - RNA, 19 nt, Artificial Sequence
  Description of Artificial Sequence: Synthetic oligonucleotide
uggggugauggcucuugca

SEQ ID NO: 2339124 - RNA, 19 nt, Artificial Sequence
  Description of Artificial Sequence: Synthetic oligonucleotide
aagcucgcugacguucuug

SEQ ID NO: 2339125 - RNA, 19 nt, Artificial Sequence
  Description of Artificial Sequence: Synthetic oligonucleotide
gagucacagcgcccgcgcg

SEQ ID NO: 2339126 - RNA, 19 nt, Artificial Sequence
  Description of Artificial Sequence: Synthetic oligonucleotide
uagauaagucgugccuucu

SEQ ID NO: 2339127 - RNA, 19 nt, Artificial Sequence
  Description of Artificial Sequence: Synthetic oligonucleotide
aaaggacugugcccagcuu

SEQ ID NO: 2339128 - RNA, 19 nt, Artificial Sequence
  Description of Artificial Sequence: Synthetic oligonucleotide
ugauuggccucugcuuuca

SEQ ID NO: 2339129 - RNA, 19 nt, Artificial Sequence
  Description of Artificial Sequence: Synthetic oligonucleotide
agucgugccuucucaucca

SEQ ID NO: 2339130 - RNA, 19 nt, Artificial Sequence
  Description of Artificial Sequence: Synthetic oligonucleotide
ucccgagaagccugccaag

SEQ ID NO: 2339131 - RNA, 19 nt, Artificial Sequence
  Description of Artificial Sequence: Synthetic oligonucleotide
agcauaagcagcagggguu

SEQ ID NO: 2339132 - RNA, 19 nt, Artificial Sequence
  Description of Artificial Sequence: Synthetic oligonucleotide
ggaccuucacugcagucug

SEQ ID NO: 2339133 - RNA, 19 nt, Artificial Sequence
  Description of Artificial Sequence: Synthetic oligonucleotide
cucagaggaggacugugga

SEQ ID NO: 2339134 - RNA, 19 nt, Artificial Sequence
  Description of Artificial Sequence: Synthetic oligonucleotide
guccucauagauaagucgu

SEQ ID NO: 2339135 - RNA, 19 nt, Artificial Sequence
  Description of Artificial Sequence: Synthetic oligonucleotide
cugacguucuugguuccag

SEQ ID NO: 2339136 - RNA, 19 nt, Artificial Sequence
  Description of Artificial Sequence: Synthetic oligonucleotide
uggggcuaugcaucaacuu

SEQ ID NO: 2339137 - RNA, 19 nt, Artificial Sequence
  Description of Artificial Sequence: Synthetic oligonucleotide
cugccuguaggaguagaac

SEQ ID NO: 2339138 - RNA, 19 nt, Artificial Sequence
  Description of Artificial Sequence: Synthetic oligonucleotide
cuguaggaguagaacaucu

SEQ ID NO: 2339139 - RNA, 19 nt, Artificial Sequence
  Description of Artificial Sequence: Synthetic oligonucleotide
gacaggauggacacguagu

SEQ ID NO: 2339140 - RNA, 19 nt, Artificial Sequence
  Description of Artificial Sequence: Synthetic oligonucleotide
gucaaaggacugugcccag

SEQ ID NO: 2339141 - RNA, 19 nt, Artificial Sequence
  Description of Artificial Sequence: Synthetic oligonucleotide
uggaucgcagaguccccga

SEQ ID NO: 2339142 - RNA, 19 nt, Artificial Sequence
  Description of Artificial Sequence: Synthetic oligonucleotide
agcuuggaucgcagagucc

SEQ ID NO: 2339143 - RNA, 19 nt, Artificial Sequence
  Description of Artificial Sequence: Synthetic oligonucleotide
agaagccugccaagcucgc

SEQ ID NO: 2339144 - RNA, 19 nt, Artificial Sequence
  Description of Artificial Sequence: Synthetic oligonucleotide
gcccggaacacacugcggc

SEQ ID NO: 2339145 - RNA, 19 nt, Artificial Sequence
  Description of Artificial Sequence: Synthetic oligonucleotide
guguggcaagcaccuaggc

SEQ ID NO: 2339146 - RNA, 19 nt, Artificial Sequence
  Description of Artificial Sequence: Synthetic oligonucleotide
cugggagcuuggaucgcag

SEQ ID NO: 2339147 - RNA, 19 nt, Artificial Sequence
  Description of Artificial Sequence: Synthetic oligonucleotide
cuagucugccuguaggagu

SEQ ID NO: 2339148 - RNA, 19 nt, Artificial Sequence
  Description of Artificial Sequence: Synthetic oligonucleotide
cacguaguccucauagaua

SEQ ID NO: 2339149 - RNA, 19 nt, Artificial Sequence
  Description of Artificial Sequence: Synthetic oligonucleotide
ucgcagaguccccgaguca

SEQ ID NO: 2339150 - RNA, 19 nt, Artificial Sequence
  Description of Artificial Sequence: Synthetic oligonucleotide
uggguggagaggguugcac

SEQ ID NO: 2339151 - RNA, 19 nt, Artificial Sequence
  Description of Artificial Sequence: Synthetic oligonucleotide
acacugcggcccguggggc

SEQ ID NO: 2339152 - RNA, 19 nt, Artificial Sequence
  Description of Artificial Sequence: Synthetic oligonucleotide
uccucacaggccagccaga

SEQ ID NO: 2339153 - RNA, 19 nt, Artificial Sequence
  Description of Artificial Sequence: Synthetic oligonucleotide
gguugcaguuugcuuuccc

SEQ ID NO: 2339154 - RNA, 19 nt, Artificial Sequence
  Description of Artificial Sequence: Synthetic oligonucleotide
ugugcccagcuuuguacuu

SEQ ID NO: 2339155 - RNA, 19 nt, Artificial Sequence
  Description of Artificial Sequence: Synthetic oligonucleotide
ggugauggcucuugcaucu

SEQ ID NO: 2339156 - RNA, 19 nt, Artificial Sequence
  Description of Artificial Sequence: Synthetic oligonucleotide
agcagggguugcgacuggg

SEQ ID NO: 2339157 - RNA, 19 nt, Artificial Sequence
  Description of Artificial Sequence: Synthetic oligonucleotide
ggguugcacagauucugug

SEQ ID NO: 2339158 - RNA, 19 nt, Artificial Sequence
  Description of Artificial Sequence: Synthetic oligonucleotide
caguuugcuuucccgagaa

SEQ ID NO: 2339159 - RNA, 19 nt, Artificial Sequence
  Description of Artificial Sequence: Synthetic oligonucleotide
uucucgcacacgggagucc

SEQ ID NO: 2339160 - RNA, 19 nt, Artificial Sequence
  Description of Artificial Sequence: Synthetic oligonucleotide
agccugccaagcucgcuga

SEQ ID NO: 2339161 - RNA, 19 nt, Artificial Sequence
  Description of Artificial Sequence: Synthetic oligonucleotide
gcagcugugcaucaucaaa

SEQ ID NO: 2339162 - RNA, 19 nt, Artificial Sequence
  Description of Artificial Sequence: Synthetic oligonucleotide
agaggguugcacagauucu

SEQ ID NO: 2339163 - RNA, 19 nt, Artificial Sequence
  Description of Artificial Sequence: Synthetic oligonucleotide
ggaagcgaggguaggaguc

SEQ ID NO: 2339164 - RNA, 19 nt, Artificial Sequence
  Description of Artificial Sequence: Synthetic oligonucleotide
uggacacguaguccucaua

SEQ ID NO: 2339165 - RNA, 19 nt, Artificial Sequence
  Description of Artificial Sequence: Synthetic oligonucleotide
gaacacacugcggcccgug

SEQ ID NO: 2339166 - RNA, 19 nt, Artificial Sequence
  Description of Artificial Sequence: Synthetic oligonucleotide
cuggaccuucacugcaguc

SEQ ID NO: 2339167 - RNA, 19 nt, Artificial Sequence
  Description of Artificial Sequence: Synthetic oligonucleotide
acgggaguccaggcucacc

SEQ ID NO: 2339168 - RNA, 19 nt, Artificial Sequence
  Description of Artificial Sequence: Synthetic oligonucleotide
cauaagcagcagggguugc

SEQ ID NO: 2339169 - RNA, 19 nt, Artificial Sequence
  Description of Artificial Sequence: Synthetic oligonucleotide
uccccgagucacagcgccc

SEQ ID NO: 2339170 - RNA, 19 nt, Artificial Sequence
  Description of Artificial Sequence: Synthetic oligonucleotide
cuucucgcacacgggaguc

SEQ ID NO: 2339171 - RNA, 19 nt, Artificial Sequence
  Description of Artificial Sequence: Synthetic oligonucleotide
acgauaggcaggagaggug

SEQ ID NO: 2339172 - RNA, 19 nt, Artificial Sequence
  Description of Artificial Sequence: Synthetic oligonucleotide
accaaauggggcaggguua

SEQ ID NO: 2339173 - RNA, 19 nt, Artificial Sequence
  Description of Artificial Sequence: Synthetic oligonucleotide
ccccuagucugccuguagg

SEQ ID NO: 2339174 - RNA, 19 nt, Artificial Sequence
  Description of Artificial Sequence: Synthetic oligonucleotide
cuguccgccuccucugguc

SEQ ID NO: 2339175 - RNA, 19 nt, Artificial Sequence
  Description of Artificial Sequence: Synthetic oligonucleotide
ggaguaguagagaacgaua

SEQ ID NO: 2339176 - RNA, 19 nt, Artificial Sequence
  Description of Artificial Sequence: Synthetic oligonucleotide
caccuaggccucagaggag

SEQ ID NO: 2339177 - RNA, 19 nt, Artificial Sequence
  Description of Artificial Sequence: Synthetic oligonucleotide
cuccgccucauguggggug

SEQ ID NO: 2339178 - RNA, 19 nt, Artificial Sequence
  Description of Artificial Sequence: Synthetic oligonucleotide
acagcgcccgcgcgauccg

SEQ ID NO: 2339179 - RNA, 19 nt, Artificial Sequence
  Description of Artificial Sequence: Synthetic oligonucleotide
ccaaauggggcaggguuag

SEQ ID NO: 2339180 - RNA, 19 nt, Artificial Sequence
  Description of Artificial Sequence: Synthetic oligonucleotide
auagggcagagcagaacau

SEQ ID NO: 2339181 - RNA, 19 nt, Artificial Sequence
  Description of Artificial Sequence: Synthetic oligonucleotide
ggaucgcagaguccccgag

SEQ ID NO: 2339182 - RNA, 19 nt, Artificial Sequence
  Description of Artificial Sequence: Synthetic oligonucleotide
ccacauguugauuggccuc

SEQ ID NO: 2339183 - RNA, 19 nt, Artificial Sequence
  Description of Artificial Sequence: Synthetic oligonucleotide
gggugauggcucuugcauc

SEQ ID NO: 2339184 - RNA, 19 nt, Artificial Sequence
  Description of Artificial Sequence: Synthetic oligonucleotide
gaucgcagaguccccgagu

SEQ ID NO: 2339185 - RNA, 19 nt, Artificial Sequence
  Description of Artificial Sequence: Synthetic oligonucleotide
gucgugccuucucauccac

SEQ ID NO: 2339186 - RNA, 19 nt, Artificial Sequence
  Description of Artificial Sequence: Synthetic oligonucleotide
cuaggccucagaggaggac

SEQ ID NO: 2339187 - RNA, 19 nt, Artificial Sequence
  Description of Artificial Sequence: Synthetic oligonucleotide
aucaaauguguggggugau

SEQ ID NO: 2339188 - RNA, 19 nt, Artificial Sequence
  Description of Artificial Sequence: Synthetic oligonucleotide
augccuucucgcacacggg

SEQ ID NO: 2339189 - RNA, 19 nt, Artificial Sequence
  Description of Artificial Sequence: Synthetic oligonucleotide
cauagauaagucgugccuu

SEQ ID NO: 2339190 - RNA, 19 nt, Artificial Sequence
  Description of Artificial Sequence: Synthetic oligonucleotide
uagccccuagucugccugu

SEQ ID NO: 2339191 - RNA, 19 nt, Artificial Sequence
  Description of Artificial Sequence: Synthetic oligonucleotide
guagaacaucuguguggca

SEQ ID NO: 2339192 - RNA, 19 nt, Artificial Sequence
  Description of Artificial Sequence: Synthetic oligonucleotide
ccuagucugccuguaggag

SEQ ID NO: 2339193 - RNA, 19 nt, Artificial Sequence
  Description of Artificial Sequence: Synthetic oligonucleotide
gcagcagggguugcgacug

SEQ ID NO: 2339194 - RNA, 19 nt, Artificial Sequence
  Description of Artificial Sequence: Synthetic oligonucleotide
cagaagagcauguucucuu

SEQ ID NO: 2339195 - RNA, 19 nt, Artificial Sequence
  Description of Artificial Sequence: Synthetic oligonucleotide
gcaggaaugcccggaacac

SEQ ID NO: 2339196 - RNA, 19 nt, Artificial Sequence
  Description of Artificial Sequence: Synthetic oligonucleotide
ccaaccaaauggggcaggg

SEQ ID NO: 2339197 - RNA, 19 nt, Artificial Sequence
  Description of Artificial Sequence: Synthetic oligonucleotide
acauguugauuggccucug

SEQ ID NO: 2339198 - RNA, 19 nt, Artificial Sequence
  Description of Artificial Sequence: Synthetic oligonucleotide
ccuccucugguccugugug

SEQ ID NO: 2339199 - RNA, 19 nt, Artificial Sequence
  Description of Artificial Sequence: Synthetic oligonucleotide
gcuaugcaucaacuuguca

SEQ ID NO: 2339200 - RNA, 19 nt, Artificial Sequence
  Description of Artificial Sequence: Synthetic oligonucleotide
gagcaggauagggcagagc

SEQ ID NO: 2339201 - RNA, 19 nt, Artificial Sequence
  Description of Artificial Sequence: Synthetic oligonucleotide
cagggcuugguggagugca

SEQ ID NO: 2339202 - RNA, 19 nt, Artificial Sequence
  Description of Artificial Sequence: Synthetic oligonucleotide
ccauugggacugaaucuac

SEQ ID NO: 2339203 - RNA, 19 nt, Artificial Sequence
  Description of Artificial Sequence: Synthetic oligonucleotide
agagaacgauaggcaggag

SEQ ID NO: 2339204 - RNA, 19 nt, Artificial Sequence
  Description of Artificial Sequence: Synthetic oligonucleotide
caggguuagccccuagucu

SEQ ID NO: 2339205 - RNA, 19 nt, Artificial Sequence
  Description of Artificial Sequence: Synthetic oligonucleotide
ucuccgccucauguggggu

SEQ ID NO: 2339206 - RNA, 19 nt, Artificial Sequence
  Description of Artificial Sequence: Synthetic oligonucleotide
aggagucccggugcaugag

SEQ ID NO: 2339207 - RNA, 19 nt, Artificial Sequence
  Description of Artificial Sequence: Synthetic oligonucleotide
uacuuccucagggcuuggu

SEQ ID NO: 2339208 - RNA, 19 nt, Artificial Sequence
  Description of Artificial Sequence: Synthetic oligonucleotide
ggguggagaggguugcaca

SEQ ID NO: 2339209 - RNA, 19 nt, Artificial Sequence
  Description of Artificial Sequence: Synthetic oligonucleotide
cugccaagcucgcugacgu

SEQ ID NO: 2339210 - RNA, 19 nt, Artificial Sequence
  Description of Artificial Sequence: Synthetic oligonucleotide
gcaguuugcuuucccgaga

SEQ ID NO: 2339211 - RNA, 19 nt, Artificial Sequence
  Description of Artificial Sequence: Synthetic oligonucleotide
agcgaggguaggagucccg

SEQ ID NO: 2339212 - RNA, 19 nt, Artificial Sequence
  Description of Artificial Sequence: Synthetic oligonucleotide
cacauguugauuggccucu

SEQ ID NO: 2339213 - RNA, 19 nt, Artificial Sequence
  Description of Artificial Sequence: Synthetic oligonucleotide
caaauggggcaggguuagc

SEQ ID NO: 2339214 - RNA, 19 nt, Artificial Sequence
  Description of Artificial Sequence: Synthetic oligonucleotide
gcucuggaccuucacugca

SEQ ID NO: 2339215 - RNA, 19 nt, Artificial Sequence
  Description of Artificial Sequence: Synthetic oligonucleotide
ggauagggcagagcagaac

SEQ ID NO: 2339216 - RNA, 19 nt, Artificial Sequence
  Description of Artificial Sequence: Synthetic oligonucleotide
gcgaggguaggagucccgg

SEQ ID NO: 2339217 - RNA, 19 nt, Artificial Sequence
  Description of Artificial Sequence: Synthetic oligonucleotide
caucauggcuggacaucga

SEQ ID NO: 2339218 - RNA, 19 nt, Artificial Sequence
  Description of Artificial Sequence: Synthetic oligonucleotide
agucugccuguaggaguag

SEQ ID NO: 2339219 - RNA, 19 nt, Artificial Sequence
  Description of Artificial Sequence: Synthetic oligonucleotide
gccaagcucgcugacguuc

SEQ ID NO: 2339220 - RNA, 19 nt, Artificial Sequence
  Description of Artificial Sequence: Synthetic oligonucleotide
cucgcugacguucuugguu

SEQ ID NO: 2339221 - RNA, 19 nt, Artificial Sequence
  Description of Artificial Sequence: Synthetic oligonucleotide
cccagcuuuguacuuccuc

SEQ ID NO: 2339222 - RNA, 19 nt, Artificial Sequence
  Description of Artificial Sequence: Synthetic oligonucleotide
gugcccagcuuuguacuuc

SEQ ID NO: 2339223 - RNA, 19 nt, Artificial Sequence
  Description of Artificial Sequence: Synthetic oligonucleotide
ucugguccugugugcuguu

SEQ ID NO: 2339224 - RNA, 19 nt, Artificial Sequence
  Description of Artificial Sequence: Synthetic oligonucleotide
caggaaugcccggaacaca

SEQ ID NO: 2339225 - RNA, 19 nt, Artificial Sequence
  Description of Artificial Sequence: Synthetic oligonucleotide
cccuggaguaguagagaac

SEQ ID NO: 2339226 - RNA, 19 nt, Artificial Sequence
  Description of Artificial Sequence: Synthetic oligonucleotide
cccgagaagccugccaagc

SEQ ID NO: 2339227 - RNA, 19 nt, Artificial Sequence
  Description of Artificial Sequence: Synthetic oligonucleotide
gcagggguugcgacugggg

SEQ ID NO: 2339228 - RNA, 19 nt, Artificial Sequence
  Description of Artificial Sequence: Synthetic oligonucleotide
gggcuaugcaucaacuugu

SEQ ID NO: 2339229 - RNA, 19 nt, Artificial Sequence
  Description of Artificial Sequence: Synthetic oligonucleotide
gccuucucgcacacgggag

SEQ ID NO: 2339230 - RNA, 19 nt, Artificial Sequence
  Description of Artificial Sequence: Synthetic oligonucleotide
ggguuagccccuagucugc

SEQ ID NO: 2339231 - RNA, 19 nt, Artificial Sequence
  Description of Artificial Sequence: Synthetic oligonucleotide
aucuuccuauugaugccuu

SEQ ID NO: 2339232 - RNA, 19 nt, Artificial Sequence
  Description of Artificial Sequence: Synthetic oligonucleotide
guacuuccucagggcuugg

SEQ ID NO: 2339233 - RNA, 19 nt, Artificial Sequence
  Description of Artificial Sequence: Synthetic oligonucleotide
ccggaacacacugcggccc

SEQ ID NO: 2339234 - RNA, 19 nt, Artificial Sequence
  Description of Artificial Sequence: Synthetic oligonucleotide
ggcuaugcaucaacuuguc

SEQ ID NO: 2339235 - RNA, 19 nt, Artificial Sequence
  Description of Artificial Sequence: Synthetic oligonucleotide
ccccgagucacagcgcccg

SEQ ID NO: 2339236 - RNA, 19 nt, Artificial Sequence
  Description of Artificial Sequence: Synthetic oligonucleotide
gccucagaggaggacugug

SEQ ID NO: 2339237 - RNA, 19 nt, Artificial Sequence
  Description of Artificial Sequence: Synthetic oligonucleotide
ggugcaugaggguguagau

SEQ ID NO: 2339238 - RNA, 19 nt, Artificial Sequence
  Description of Artificial Sequence: Synthetic oligonucleotide
cccuagucugccuguagga

SEQ ID NO: 2339239 - RNA, 19 nt, Artificial Sequence
  Description of Artificial Sequence: Synthetic oligonucleotide
cguggggcuaugcaucaac

SEQ ID NO: 2339240 - RNA, 19 nt, Artificial Sequence
  Description of Artificial Sequence: Synthetic oligonucleotide
gccuguccgccuccucugg

SEQ ID NO: 2339241 - RNA, 19 nt, Artificial Sequence
  Description of Artificial Sequence: Synthetic oligonucleotide
ugccaagcucgcugacguu

SEQ ID NO: 2339242 - RNA, 19 nt, Artificial Sequence
  Description of Artificial Sequence: Synthetic oligonucleotide
cuguggugccagcucugga

SEQ ID NO: 2339243 - RNA, 19 nt, Artificial Sequence
  Description of Artificial Sequence: Synthetic oligonucleotide
guggggcuaugcaucaacu

SEQ ID NO: 2339244 - RNA, 19 nt, Artificial Sequence
  Description of Artificial Sequence: Synthetic oligonucleotide
ggguaggagucccggugca

SEQ ID NO: 2339245 - RNA, 19 nt, Artificial Sequence
  Description of Artificial Sequence: Synthetic oligonucleotide
gccccuagucugccuguag

SEQ ID NO: 2339246 - RNA, 19 nt, Artificial Sequence
  Description of Artificial Sequence: Synthetic oligonucleotide
guuagccccuagucugccu

SEQ ID NO: 2339247 - RNA, 19 nt, Artificial Sequence
  Description of Artificial Sequence: Synthetic oligonucleotide
ggagcuuggaucgcagagu

SEQ ID NO: 2339248 - RNA, 19 nt, Artificial Sequence
  Description of Artificial Sequence: Synthetic oligonucleotide
cgagucacagcgcccgcgc

SEQ ID NO: 2339249 - RNA, 19 nt, Artificial Sequence
  Description of Artificial Sequence: Synthetic oligonucleotide
gucugggagcuuggaucgc

SEQ ID NO: 2339250 - RNA, 19 nt, Artificial Sequence
  Description of Artificial Sequence: Synthetic oligonucleotide
gcgcgauccgaaguccugc

SEQ ID NO: 2339251 - RNA, 19 nt, Artificial Sequence
  Description of Artificial Sequence: Synthetic oligonucleotide
cggaacacacugcggcccg

SEQ ID NO: 2339252 - RNA, 19 nt, Artificial Sequence
  Description of Artificial Sequence: Synthetic oligonucleotide
cauguggggugggcaugug

SEQ ID NO: 2339253 - RNA, 19 nt, Artificial Sequence
  Description of Artificial Sequence: Synthetic oligonucleotide
cguaguccucauagauaag

SEQ ID NO: 2339254 - RNA, 19 nt, Artificial Sequence
  Description of Artificial Sequence: Synthetic oligonucleotide
cugcaucauggcuggacau

SEQ ID NO: 2339255 - RNA, 19 nt, Artificial Sequence
  Description of Artificial Sequence: Synthetic oligonucleotide
gaagccugccaagcucgcu

SEQ ID NO: 2339256 - RNA, 19 nt, Artificial Sequence
  Description of Artificial Sequence: Synthetic oligonucleotide
gcagaacauugcaguugcc

SEQ ID NO: 2339257 - RNA, 19 nt, Artificial Sequence
  Description of Artificial Sequence: Synthetic oligonucleotide
ccgagucacagcgcccgcg

SEQ ID NO: 2339258 - RNA, 19 nt, Artificial Sequence
  Description of Artificial Sequence: Synthetic oligonucleotide
gugugcuguuucuccgccu

SEQ ID NO: 2339259 - RNA, 19 nt, Artificial Sequence
  Description of Artificial Sequence: Synthetic oligonucleotide
gcaugaggguguagaucug

SEQ ID NO: 2339260 - RNA, 19 nt, Artificial Sequence
  Description of Artificial Sequence: Synthetic oligonucleotide
gcccguggggcuaugcauc

SEQ ID NO: 2339261 - RNA, 19 nt, Artificial Sequence
  Description of Artificial Sequence: Synthetic oligonucleotide
gcccgcgcgauccgaaguc

SEQ ID NO: 2339262 - RNA, 19 nt, Artificial Sequence
  Description of Artificial Sequence: Synthetic oligonucleotide
gccucauguggggugggca

SEQ ID NO: 2339263 - RNA, 19 nt, Artificial Sequence
  Description of Artificial Sequence: Synthetic oligonucleotide
ggguugcaguuugcuuucc

SEQ ID NO: 2339264 - RNA, 19 nt, Artificial Sequence
  Description of Artificial Sequence: Synthetic oligonucleotide
cacgggaguccaggcucac

SEQ ID NO: 2339265 - RNA, 19 nt, Artificial Sequence
  Description of Artificial Sequence: Synthetic oligonucleotide
ccuucacugcagucuggga

SEQ ID NO: 2339266 - RNA, 19 nt, Artificial Sequence
  Description of Artificial Sequence: Synthetic oligonucleotide
gcugacguucuugguucca

SEQ ID NO: 2339267 - RNA, 19 nt, Artificial Sequence
  Description of Artificial Sequence: Synthetic oligonucleotide
cgcugacguucuugguucc

SEQ ID NO: 2339268 - RNA, 19 nt, Artificial Sequence
  Description of Artificial Sequence: Synthetic oligonucleotide
agccccuagucugccugua

SEQ ID NO: 2339269 - RNA, 19 nt, Artificial Sequence
  Description of Artificial Sequence: Synthetic oligonucleotide
cccgcgcgauccgaagucc

SEQ ID NO: 2339270 - RNA, 19 nt, Artificial Sequence
  Description of Artificial Sequence: Synthetic oligonucleotide
cccguggggcuaugcauca

SEQ ID NO: 2339271 - RNA, 19 nt, Artificial Sequence
  Description of Artificial Sequence: Synthetic oligonucleotide
gucacagcgcccgcgcgau

SEQ ID NO: 2339272 - RNA, 19 nt, Artificial Sequence
  Description of Artificial Sequence: Synthetic oligonucleotide
cggugcaugaggguguaga

SEQ ID NO: 2339273 - RNA, 19 nt, Artificial Sequence
  Description of Artificial Sequence: Synthetic oligonucleotide
cgcgcgauccgaaguccug

SEQ ID NO: 2339274 - RNA, 19 nt, Artificial Sequence
  Description of Artificial Sequence: Synthetic oligonucleotide
ggcccguggggcuaugcau

SEQ ID NO: 2339275 - RNA, 19 nt, Artificial Sequence
  Description of Artificial Sequence: Synthetic oligonucleotide
gcgcccgcgcgauccgaag

SEQ ID NO: 2339276 - RNA, 19 nt, Artificial Sequence
  Description of Artificial Sequence: Synthetic oligonucleotide
ccaagcucgcugacguucu

SEQ ID NO: 2339277 - RNA, 19 nt, Artificial Sequence
  Description of Artificial Sequence: Synthetic oligonucleotide
agcgcccgcgcgauccgaa

SEQ ID NO: 2339278 - RNA, 19 nt, Artificial Sequence
  Description of Artificial Sequence: Synthetic oligonucleotide
cccgagucacagcgcccgc

SEQ ID NO: 2339279 - RNA, 19 nt, Artificial Sequence
  Description of Artificial Sequence: Synthetic oligonucleotide
ccucauguggggugggcau

SEQ ID NO: 2339280 - RNA, 19 nt, Artificial Sequence
  Description of Artificial Sequence: Synthetic oligonucleotide
cacugcggcccguggggcu

SEQ ID NO: 2339281 - RNA, 19 nt, Artificial Sequence
  Description of Artificial Sequence: Synthetic oligonucleotide
ccgagaagccugccaagcu

SEQ ID NO: 2339282 - RNA, 19 nt, Artificial Sequence
  Description of Artificial Sequence: Synthetic oligonucleotide
cauccaccacauguugauu

SEQ ID NO: 2339283 - RNA, 19 nt, Artificial Sequence
  Description of Artificial Sequence: Synthetic oligonucleotide
gcucgcugacguucuuggu

SEQ ID NO: 2339284 - RNA, 19 nt, Artificial Sequence
  Description of Artificial Sequence: Synthetic oligonucleotide
ugcggcccguggggcuaug

SEQ ID NO: 2339285 - RNA, 19 nt, Artificial Sequence
  Description of Artificial Sequence: Synthetic oligonucleotide
gggacaggauggacacgua

SEQ ID NO: 2339286 - RNA, 19 nt, Artificial Sequence
  Description of Artificial Sequence: Synthetic oligonucleotide
caagcucgcugacguucuu

SEQ ID NO: 2339287 - RNA, 19 nt, Artificial Sequence
  Description of Artificial Sequence: Synthetic oligonucleotide
ccgccucaugugggguggg

SEQ ID NO: 2339288 - RNA, 19 nt, Artificial Sequence
  Description of Artificial Sequence: Synthetic oligonucleotide
gcggcccguggggcuaugc

SEQ ID NO: 2339289 - RNA, 19 nt, Artificial Sequence
  Description of Artificial Sequence: Synthetic oligonucleotide
ggaacacacugcggcccgu

SEQ ID NO: 2339290 - RNA, 19 nt, Artificial Sequence
  Description of Artificial Sequence: Synthetic oligonucleotide
cgccucauguggggugggc

SEQ ID NO: 2339291 - RNA, 19 nt, Artificial Sequence
  Description of Artificial Sequence: Synthetic oligonucleotide
cagcgcccgcgcgauccga

SEQ ID NO: 2339292 - RNA, 19 nt, Artificial Sequence
  Description of Artificial Sequence: Synthetic oligonucleotide
ccggugcaugaggguguag

SEQ ID NO: 2339293 - RNA, 19 nt, Artificial Sequence
  Description of Artificial Sequence: Synthetic oligonucleotide
cgcgauccgaaguccugcu

SEQ ID NO: 2339294 - RNA, 19 nt, Artificial Sequence
  Description of Artificial Sequence: Synthetic oligonucleotide
cggcccguggggcuaugca

SEQ ID NO: 2339295 - RNA, 19 nt, Artificial Sequence
  Description of Artificial Sequence: Synthetic oligonucleotide
cgaggguaggagucccggu

SEQ ID NO: 2339296 - RNA, 19 nt, Artificial Sequence
  Description of Artificial Sequence: Synthetic oligonucleotide
ccgcgcgauccgaaguccu

SEQ ID NO: 2339297 - RNA, 19 nt, Artificial Sequence
  Description of Artificial Sequence: Synthetic oligonucleotide
cacugcagucugggagcuu

SEQ ID NO: 2339298 - RNA, 19 nt, Artificial Sequence
  Description of Artificial Sequence: Synthetic oligonucleotide
ccguggggcuaugcaucaa

SEQ ID NO: 2339299 - RNA, 19 nt, Artificial Sequence
  Description of Artificial Sequence: Synthetic oligonucleotide
cgcccgcgcgauccgaagu

SEQ ID NO: 2339300 - RNA, 19 nt, Artificial Sequence
  Description of Artificial Sequence: Synthetic oligonucleotide
acuaugaaaguauugcucc

SEQ ID NO: 2339301 - RNA, 19 nt, Artificial Sequence
  Description of Artificial Sequence: Synthetic oligonucleotide
ucaaauguuguauacaggc

SEQ ID NO: 2339302 - RNA, 19 nt, Artificial Sequence
  Description of Artificial Sequence: Synthetic oligonucleotide
agaaagagcagauggaagg

SEQ ID NO: 2339303 - RNA, 19 nt, Artificial Sequence
  Description of Artificial Sequence: Synthetic oligonucleotide
gaaauagagagcugguucg

SEQ ID NO: 2339304 - RNA, 19 nt, Artificial Sequence
  Description of Artificial Sequence: Synthetic oligonucleotide
agaaauagagagcugguuc

SEQ ID NO: 2339305 - RNA, 19 nt, Artificial Sequence
  Description of Artificial Sequence: Synthetic oligonucleotide
aaagccauggaaugcuugg

SEQ ID NO: 2339306 - RNA, 19 nt, Artificial Sequence
  Description of Artificial Sequence: Synthetic oligonucleotide
aaaccaacugcugaggacg

SEQ ID NO: 2339307 - RNA, 19 nt, Artificial Sequence
  Description of Artificial Sequence: Synthetic oligonucleotide
accacuaugaaaguauugc

SEQ ID NO: 2339308 - RNA, 19 nt, Artificial Sequence
  Description of Artificial Sequence: Synthetic oligonucleotide
uugaaggagaucuucaucu

SEQ ID NO: 2339309 - RNA, 19 nt, Artificial Sequence
  Description of Artificial Sequence: Synthetic oligonucleotide
acucaaauguuguauacag

SEQ ID NO: 2339310 - RNA, 19 nt, Artificial Sequence
  Description of Artificial Sequence: Synthetic oligonucleotide
cacagaauaauagucaggg

SEQ ID NO: 2339311 - RNA, 19 nt, Artificial Sequence
  Description of Artificial Sequence: Synthetic oligonucleotide
ugagagacuaucagcaucc

SEQ ID NO: 2339312 - RNA, 19 nt, Artificial Sequence
  Description of Artificial Sequence: Synthetic oligonucleotide
aaggguguucuccagagca

SEQ ID NO: 2339313 - RNA, 19 nt, Artificial Sequence
  Description of Artificial Sequence: Synthetic oligonucleotide
aggggucagaaauagagag

SEQ ID NO: 2339314 - RNA, 19 nt, Artificial Sequence
  Description of Artificial Sequence: Synthetic oligonucleotide
gucagaaauagagagcugg

SEQ ID NO: 2339315 - RNA, 19 nt, Artificial Sequence
  Description of Artificial Sequence: Synthetic oligonucleotide
aaguguggcgccugaaggg

SEQ ID NO: 2339316 - RNA, 19 nt, Artificial Sequence
  Description of Artificial Sequence: Synthetic oligonucleotide
aaguccugaccucccaggc

SEQ ID NO: 2339317 - RNA, 19 nt, Artificial Sequence
  Description of Artificial Sequence: Synthetic oligonucleotide
agaauaauagucagggcuc

SEQ ID NO: 2339318 - RNA, 19 nt, Artificial Sequence
  Description of Artificial Sequence: Synthetic oligonucleotide
acagaauaauagucagggc

SEQ ID NO: 2339319 - RNA, 19 nt, Artificial Sequence
  Description of Artificial Sequence: Synthetic oligonucleotide
gaucauucugacuggcagg

SEQ ID NO: 2339320 - RNA, 19 nt, Artificial Sequence
  Description of Artificial Sequence: Synthetic oligonucleotide
aagggcacagaauaauagu

SEQ ID NO: 2339321 - RNA, 19 nt, Artificial Sequence
  Description of Artificial Sequence: Synthetic oligonucleotide
aguauagcuggacaggccu

SEQ ID NO: 2339322 - RNA, 19 nt, Artificial Sequence
  Description of Artificial Sequence: Synthetic oligonucleotide
ugaaaguauugcucccucg

SEQ ID NO: 2339323 - RNA, 19 nt, Artificial Sequence
  Description of Artificial Sequence: Synthetic oligonucleotide
ugggaguauagcuggacag

SEQ ID NO: 2339324 - RNA, 19 nt, Artificial Sequence
  Description of Artificial Sequence: Synthetic oligonucleotide
aguuugguuucuugggagg

SEQ ID NO: 2339325 - RNA, 19 nt, Artificial Sequence
  Description of Artificial Sequence: Synthetic oligonucleotide
aguuccaccucacuuggag

SEQ ID NO: 2339326 - RNA, 19 nt, Artificial Sequence
  Description of Artificial Sequence: Synthetic oligonucleotide
agguaaaccaacugcugag

SEQ ID NO: 2339327 - RNA, 19 nt, Artificial Sequence
  Description of Artificial Sequence: Synthetic oligonucleotide
cucaaauguuguauacagg

SEQ ID NO: 2339328 - RNA, 19 nt, Artificial Sequence
  Description of Artificial Sequence: Synthetic oligonucleotide
cacuaugaaaguauugcuc

SEQ ID NO: 2339329 - RNA, 19 nt, Artificial Sequence
  Description of Artificial Sequence: Synthetic oligonucleotide
gaaaguauugcucccucga

SEQ ID NO: 2339330 - RNA, 19 nt, Artificial Sequence
  Description of Artificial Sequence: Synthetic oligonucleotide
uauugcucccucgauuugg

SEQ ID NO: 2339331 - RNA, 19 nt, Artificial Sequence
  Description of Artificial Sequence: Synthetic oligonucleotide
auacugggaagguaaacca

SEQ ID NO: 2339332 - RNA, 19 nt, Artificial Sequence
  Description of Artificial Sequence: Synthetic oligonucleotide
augaaaguauugcucccuc

SEQ ID NO: 2339333 - RNA, 19 nt, Artificial Sequence
  Description of Artificial Sequence: Synthetic oligonucleotide
acuggaaguccugaccucc

SEQ ID NO: 2339334 - RNA, 19 nt, Artificial Sequence
  Description of Artificial Sequence: Synthetic oligonucleotide
aauguuguauacaggcugu

SEQ ID NO: 2339335 - RNA, 19 nt, Artificial Sequence
  Description of Artificial Sequence: Synthetic oligonucleotide
ucagaaauagagagcuggu

SEQ ID NO: 2339336 - RNA, 19 nt, Artificial Sequence
  Description of Artificial Sequence: Synthetic oligonucleotide
ucgauuugggagcucugag

SEQ ID NO: 2339337 - RNA, 19 nt, Artificial Sequence
  Description of Artificial Sequence: Synthetic oligonucleotide
aaucucaugcacagugggg

SEQ ID NO: 2339338 - RNA, 19 nt, Artificial Sequence
  Description of Artificial Sequence: Synthetic oligonucleotide
aguauugcucccucgauuu

SEQ ID NO: 2339339 - RNA, 19 nt, Artificial Sequence
  Description of Artificial Sequence: Synthetic oligonucleotide
cuaugaaaguauugcuccc

SEQ ID NO: 2339340 - RNA, 19 nt, Artificial Sequence
  Description of Artificial Sequence: Synthetic oligonucleotide
gaaggguacucaaauguug

SEQ ID NO: 2339341 - RNA, 19 nt, Artificial Sequence
  Description of Artificial Sequence: Synthetic oligonucleotide
ugcucccucgauuugggag

SEQ ID NO: 2339342 - RNA, 19 nt, Artificial Sequence
  Description of Artificial Sequence: Synthetic oligonucleotide
aaguccgagagaucauucu

SEQ ID NO: 2339343 - RNA, 19 nt, Artificial Sequence
  Description of Artificial Sequence: Synthetic oligonucleotide
aaaguauugcucccucgau

SEQ ID NO: 2339344 - RNA, 19 nt, Artificial Sequence
  Description of Artificial Sequence: Synthetic oligonucleotide
acugggaagguaaaccaac

SEQ ID NO: 2339345 - RNA, 19 nt, Artificial Sequence
  Description of Artificial Sequence: Synthetic oligonucleotide
agggcacagaauaauaguc

SEQ ID NO: 2339346 - RNA, 19 nt, Artificial Sequence
  Description of Artificial Sequence: Synthetic oligonucleotide
uguauacaggcuguuguca

SEQ ID NO: 2339347 - RNA, 19 nt, Artificial Sequence
  Description of Artificial Sequence: Synthetic oligonucleotide
ucagcaugacuuccuucgg

SEQ ID NO: 2339348 - RNA, 19 nt, Artificial Sequence
  Description of Artificial Sequence: Synthetic oligonucleotide
ugggaagguaaaccaacug

SEQ ID NO: 2339349 - RNA, 19 nt, Artificial Sequence
  Description of Artificial Sequence: Synthetic oligonucleotide
cagaauaauagucagggcu

SEQ ID NO: 2339350 - RNA, 19 nt, Artificial Sequence
  Description of Artificial Sequence: Synthetic oligonucleotide
uaaaccaacugcugaggac

SEQ ID NO: 2339351 - RNA, 19 nt, Artificial Sequence
  Description of Artificial Sequence: Synthetic oligonucleotide
uugggaguauagcuggaca

SEQ ID NO: 2339352 - RNA, 19 nt, Artificial Sequence
  Description of Artificial Sequence: Synthetic oligonucleotide
uucuugaggagccagccuu

SEQ ID NO: 2339353 - RNA, 19 nt, Artificial Sequence
  Description of Artificial Sequence: Synthetic oligonucleotide
agagaucauucugacuggc

SEQ ID NO: 2339354 - RNA, 19 nt, Artificial Sequence
  Description of Artificial Sequence: Synthetic oligonucleotide
gaauaauagucagggcucc

SEQ ID NO: 2339355 - RNA, 19 nt, Artificial Sequence
  Description of Artificial Sequence: Synthetic oligonucleotide
cgagagaucauucugacug

SEQ ID NO: 2339356 - RNA, 19 nt, Artificial Sequence
  Description of Artificial Sequence: Synthetic oligonucleotide
caucaaugaaggugacugg

SEQ ID NO: 2339357 - RNA, 19 nt, Artificial Sequence
  Description of Artificial Sequence: Synthetic oligonucleotide
gauuugggagcucugaggu

SEQ ID NO: 2339358 - RNA, 19 nt, Artificial Sequence
  Description of Artificial Sequence: Synthetic oligonucleotide
aaguauugcucccucgauu

SEQ ID NO: 2339359 - RNA, 19 nt, Artificial Sequence
  Description of Artificial Sequence: Synthetic oligonucleotide
guagcguuucuuaagggug

SEQ ID NO: 2339360 - RNA, 19 nt, Artificial Sequence
  Description of Artificial Sequence: Synthetic oligonucleotide
uaugaaaguauugcucccu

SEQ ID NO: 2339361 - RNA, 19 nt, Artificial Sequence
  Description of Artificial Sequence: Synthetic oligonucleotide
uucggugggaguuccaccu

SEQ ID NO: 2339362 - RNA, 19 nt, Artificial Sequence
  Description of Artificial Sequence: Synthetic oligonucleotide
aaggguacucaaauguugu

SEQ ID NO: 2339363 - RNA, 19 nt, Artificial Sequence
  Description of Artificial Sequence: Synthetic oligonucleotide
ugaccucccaggcuccugg

SEQ ID NO: 2339364 - RNA, 19 nt, Artificial Sequence
  Description of Artificial Sequence: Synthetic oligonucleotide
guacucaaauguuguauac

SEQ ID NO: 2339365 - RNA, 19 nt, Artificial Sequence
  Description of Artificial Sequence: Synthetic oligonucleotide
ugggguagcguuucuuaag

SEQ ID NO: 2339366 - RNA, 19 nt, Artificial Sequence
  Description of Artificial Sequence: Synthetic oligonucleotide
ggcacagaauaauagucag

SEQ ID NO: 2339367 - RNA, 19 nt, Artificial Sequence
  Description of Artificial Sequence: Synthetic oligonucleotide
uacucaaauguuguauaca

SEQ ID NO: 2339368 - RNA, 19 nt, Artificial Sequence
  Description of Artificial Sequence: Synthetic oligonucleotide
aggacggcaguuugguuuc

SEQ ID NO: 2339369 - RNA, 19 nt, Artificial Sequence
  Description of Artificial Sequence: Synthetic oligonucleotide
ucuuaaggguguucuccag

SEQ ID NO: 2339370 - RNA, 19 nt, Artificial Sequence
  Description of Artificial Sequence: Synthetic oligonucleotide
ccaggggucagaaauagag

SEQ ID NO: 2339371 - RNA, 19 nt, Artificial Sequence
  Description of Artificial Sequence: Synthetic oligonucleotide
ucacuuggagccugcacca

SEQ ID NO: 2339372 - RNA, 19 nt, Artificial Sequence
  Description of Artificial Sequence: Synthetic oligonucleotide
uguuguauacaggcuguug

SEQ ID NO: 2339373 - RNA, 19 nt, Artificial Sequence
  Description of Artificial Sequence: Synthetic oligonucleotide
aucaaugaaggugacugga

SEQ ID NO: 2339374 - RNA, 19 nt, Artificial Sequence
  Description of Artificial Sequence: Synthetic oligonucleotide
aggccugagcugcacuucc

SEQ ID NO: 2339375 - RNA, 19 nt, Artificial Sequence
  Description of Artificial Sequence: Synthetic oligonucleotide
aagccauggaaugcuuggg

SEQ ID NO: 2339376 - RNA, 19 nt, Artificial Sequence
  Description of Artificial Sequence: Synthetic oligonucleotide
cugcccauuggccugacug

SEQ ID NO: 2339377 - RNA, 19 nt, Artificial Sequence
  Description of Artificial Sequence: Synthetic oligonucleotide
gugacuggaaguccugacc

SEQ ID NO: 2339378 - RNA, 19 nt, Artificial Sequence
  Description of Artificial Sequence: Synthetic oligonucleotide
uuggccugacugaagugug

SEQ ID NO: 2339379 - RNA, 19 nt, Artificial Sequence
  Description of Artificial Sequence: Synthetic oligonucleotide
uagcguuucuuaagggugu

SEQ ID NO: 2339380 - RNA, 19 nt, Artificial Sequence
  Description of Artificial Sequence: Synthetic oligonucleotide
aauagagagcugguucgcu

SEQ ID NO: 2339381 - RNA, 19 nt, Artificial Sequence
  Description of Artificial Sequence: Synthetic oligonucleotide
cugacugaaguguggcgcc

SEQ ID NO: 2339382 - RNA, 19 nt, Artificial Sequence
  Description of Artificial Sequence: Synthetic oligonucleotide
auuggccugacugaagugu

SEQ ID NO: 2339383 - RNA, 19 nt, Artificial Sequence
  Description of Artificial Sequence: Synthetic oligonucleotide
ccagggagcucucagaagg

SEQ ID NO: 2339384 - RNA, 19 nt, Artificial Sequence
  Description of Artificial Sequence: Synthetic oligonucleotide
guccugagagacuaucagc

SEQ ID NO: 2339385 - RNA, 19 nt, Artificial Sequence
  Description of Artificial Sequence: Synthetic oligonucleotide
uccgagagaucauucugac

SEQ ID NO: 2339386 - RNA, 19 nt, Artificial Sequence
  Description of Artificial Sequence: Synthetic oligonucleotide
ugaaggugacuggaagucc

SEQ ID NO: 2339387 - RNA, 19 nt, Artificial Sequence
  Description of Artificial Sequence: Synthetic oligonucleotide
gggguagcguuucuuaagg

SEQ ID NO: 2339388 - RNA, 19 nt, Artificial Sequence
  Description of Artificial Sequence: Synthetic oligonucleotide
uacugggaagguaaaccaa

SEQ ID NO: 2339389 - RNA, 19 nt, Artificial Sequence
  Description of Artificial Sequence: Synthetic oligonucleotide
ugggaguuccaccucacuu

SEQ ID NO: 2339390 - RNA, 19 nt, Artificial Sequence
  Description of Artificial Sequence: Synthetic oligonucleotide
uggccaagccagaaagccc

SEQ ID NO: 2339391 - RNA, 19 nt, Artificial Sequence
  Description of Artificial Sequence: Synthetic oligonucleotide
agagacuaucagcauccug

SEQ ID NO: 2339392 - RNA, 19 nt, Artificial Sequence
  Description of Artificial Sequence: Synthetic oligonucleotide
guaaaccaacugcugagga

SEQ ID NO: 2339393 - RNA, 19 nt, Artificial Sequence
  Description of Artificial Sequence: Synthetic oligonucleotide
aucauucugacuggcaggu

SEQ ID NO: 2339394 - RNA, 19 nt, Artificial Sequence
  Description of Artificial Sequence: Synthetic oligonucleotide
uaaggguguucuccagagc

SEQ ID NO: 2339395 - RNA, 19 nt, Artificial Sequence
  Description of Artificial Sequence: Synthetic oligonucleotide
ugggacugcccauuggccu

SEQ ID NO: 2339396 - RNA, 19 nt, Artificial Sequence
  Description of Artificial Sequence: Synthetic oligonucleotide
ggaguuccaccucacuugg

SEQ ID NO: 2339397 - RNA, 19 nt, Artificial Sequence
  Description of Artificial Sequence: Synthetic oligonucleotide
agagagcugguucgcugcg

SEQ ID NO: 2339398 - RNA, 19 nt, Artificial Sequence
  Description of Artificial Sequence: Synthetic oligonucleotide
gguccugagagacuaucag

SEQ ID NO: 2339399 - RNA, 19 nt, Artificial Sequence
  Description of Artificial Sequence: Synthetic oligonucleotide
uucgcugcggaaguccgag

SEQ ID NO: 2339400 - RNA, 19 nt, Artificial Sequence
  Description of Artificial Sequence: Synthetic oligonucleotide
gguaaaccaacugcugagg

SEQ ID NO: 2339401 - RNA, 19 nt, Artificial Sequence
  Description of Artificial Sequence: Synthetic oligonucleotide
uguugucauugaaggagau

SEQ ID NO: 2339402 - RNA, 19 nt, Artificial Sequence
  Description of Artificial Sequence: Synthetic oligonucleotide
gggaguuccaccucacuug

SEQ ID NO: 2339403 - RNA, 19 nt, Artificial Sequence
  Description of Artificial Sequence: Synthetic oligonucleotide
acaccuggggcugucuugg

SEQ ID NO: 2339404 - RNA, 19 nt, Artificial Sequence
  Description of Artificial Sequence: Synthetic oligonucleotide
caccacuaugaaaguauug

SEQ ID NO: 2339405 - RNA, 19 nt, Artificial Sequence
  Description of Artificial Sequence: Synthetic oligonucleotide
agugugagguccugagaga

SEQ ID NO: 2339406 - RNA, 19 nt, Artificial Sequence
  Description of Artificial Sequence: Synthetic oligonucleotide
agccauggaaugcuuggga

SEQ ID NO: 2339407 - RNA, 19 nt, Artificial Sequence
  Description of Artificial Sequence: Synthetic oligonucleotide
cucuugggcaccacuauga

SEQ ID NO: 2339408 - RNA, 19 nt, Artificial Sequence
  Description of Artificial Sequence: Synthetic oligonucleotide
ucuugggcaccacuaugaa

SEQ ID NO: 2339409 - RNA, 19 nt, Artificial Sequence
  Description of Artificial Sequence: Synthetic oligonucleotide
ugcccauuggccugacuga

SEQ ID NO: 2339410 - RNA, 19 nt, Artificial Sequence
  Description of Artificial Sequence: Synthetic oligonucleotide
cagaaggguacucaaaugu

SEQ ID NO: 2339411 - RNA, 19 nt, Artificial Sequence
  Description of Artificial Sequence: Synthetic oligonucleotide
auuugggagcucugaggug

SEQ ID NO: 2339412 - RNA, 19 nt, Artificial Sequence
  Description of Artificial Sequence: Synthetic oligonucleotide
cugacuggcaggugucagc

SEQ ID NO: 2339413 - RNA, 19 nt, Artificial Sequence
  Description of Artificial Sequence: Synthetic oligonucleotide
uguggcgccugaagggucu

SEQ ID NO: 2339414 - RNA, 19 nt, Artificial Sequence
  Description of Artificial Sequence: Synthetic oligonucleotide
uccagggagcucucagaag

SEQ ID NO: 2339415 - RNA, 19 nt, Artificial Sequence
  Description of Artificial Sequence: Synthetic oligonucleotide
gaaagccccaagcccucag

SEQ ID NO: 2339416 - RNA, 19 nt, Artificial Sequence
  Description of Artificial Sequence: Synthetic oligonucleotide
cuucggugggaguuccacc

SEQ ID NO: 2339417 - RNA, 19 nt, Artificial Sequence
  Description of Artificial Sequence: Synthetic oligonucleotide
uaaccaccaaucacuucaa

SEQ ID NO: 2339418 - RNA, 19 nt, Artificial Sequence
  Description of Artificial Sequence: Synthetic oligonucleotide
agugggguagcguuucuua

SEQ ID NO: 2339419 - RNA, 19 nt, Artificial Sequence
  Description of Artificial Sequence: Synthetic oligonucleotide
uggaagggcacagaauaau

SEQ ID NO: 2339420 - RNA, 19 nt, Artificial Sequence
  Description of Artificial Sequence: Synthetic oligonucleotide
cugggcauugacuggcuuc

SEQ ID NO: 2339421 - RNA, 19 nt, Artificial Sequence
  Description of Artificial Sequence: Synthetic oligonucleotide
agggucucuggcuuccucu

SEQ ID NO: 2339422 - RNA, 19 nt, Artificial Sequence
  Description of Artificial Sequence: Synthetic oligonucleotide
cuuaaggguguucuccaga

SEQ ID NO: 2339423 - RNA, 19 nt, Artificial Sequence
  Description of Artificial Sequence: Synthetic oligonucleotide
ggaguauagcuggacaggc

SEQ ID NO: 2339424 - RNA, 19 nt, Artificial Sequence
  Description of Artificial Sequence: Synthetic oligonucleotide
acggcaguuugguuucuug

SEQ ID NO: 2339425 - RNA, 19 nt, Artificial Sequence
  Description of Artificial Sequence: Synthetic oligonucleotide
cagggagcucucagaaggg

SEQ ID NO: 2339426 - RNA, 19 nt, Artificial Sequence
  Description of Artificial Sequence: Synthetic oligonucleotide
agagcugguucgcugcgga

SEQ ID NO: 2339427 - RNA, 19 nt, Artificial Sequence
  Description of Artificial Sequence: Synthetic oligonucleotide
ggugauacugggaagguaa

SEQ ID NO: 2339428 - RNA, 19 nt, Artificial Sequence
  Description of Artificial Sequence: Synthetic oligonucleotide
uuucuugggaggccuccuc

SEQ ID NO: 2339429 - RNA, 19 nt, Artificial Sequence
  Description of Artificial Sequence: Synthetic oligonucleotide
ugaaagccauggaaugcuu

SEQ ID NO: 2339430 - RNA, 19 nt, Artificial Sequence
  Description of Artificial Sequence: Synthetic oligonucleotide
gaaguccgagagaucauuc

SEQ ID NO: 2339431 - RNA, 19 nt, Artificial Sequence
  Description of Artificial Sequence: Synthetic oligonucleotide
guccugaccucccaggcuc

SEQ ID NO: 2339432 - RNA, 19 nt, Artificial Sequence
  Description of Artificial Sequence: Synthetic oligonucleotide
gggaguauagcuggacagg

SEQ ID NO: 2339433 - RNA, 19 nt, Artificial Sequence
  Description of Artificial Sequence: Synthetic oligonucleotide
gccccaagcccucagcugg

SEQ ID NO: 2339434 - RNA, 19 nt, Artificial Sequence
  Description of Artificial Sequence: Synthetic oligonucleotide
cuccaggggucagaaauag

SEQ ID NO: 2339435 - RNA, 19 nt, Artificial Sequence
  Description of Artificial Sequence: Synthetic oligonucleotide
cuggaaguccugaccuccc

SEQ ID NO: 2339436 - RNA, 19 nt, Artificial Sequence
  Description of Artificial Sequence: Synthetic oligonucleotide
gguacucaaauguuguaua

SEQ ID NO: 2339437 - RNA, 19 nt, Artificial Sequence
  Description of Artificial Sequence: Synthetic oligonucleotide
ucaugcacagugggguagc

SEQ ID NO: 2339438 - RNA, 19 nt, Artificial Sequence
  Description of Artificial Sequence: Synthetic oligonucleotide
ccaggugauacugggaagg

SEQ ID NO: 2339439 - RNA, 19 nt, Artificial Sequence
  Description of Artificial Sequence: Synthetic oligonucleotide
ugguucgcugcggaagucc

SEQ ID NO: 2339440 - RNA, 19 nt, Artificial Sequence
  Description of Artificial Sequence: Synthetic oligonucleotide
cuugggaguauagcuggac

SEQ ID NO: 2339441 - RNA, 19 nt, Artificial Sequence
  Description of Artificial Sequence: Synthetic oligonucleotide
gaggacggcaguuugguuu

SEQ ID NO: 2339442 - RNA, 19 nt, Artificial Sequence
  Description of Artificial Sequence: Synthetic oligonucleotide
aguccugaccucccaggcu

SEQ ID NO: 2339443 - RNA, 19 nt, Artificial Sequence
  Description of Artificial Sequence: Synthetic oligonucleotide
gacuaucagcauccuguuc

SEQ ID NO: 2339444 - RNA, 19 nt, Artificial Sequence
  Description of Artificial Sequence: Synthetic oligonucleotide
caaauguuguauacaggcu

SEQ ID NO: 2339445 - RNA, 19 nt, Artificial Sequence
  Description of Artificial Sequence: Synthetic oligonucleotide
cucaugcacagugggguag

SEQ ID NO: 2339446 - RNA, 19 nt, Artificial Sequence
  Description of Artificial Sequence: Synthetic oligonucleotide
uccaggggucagaaauaga

SEQ ID NO: 2339447 - RNA, 19 nt, Artificial Sequence
  Description of Artificial Sequence: Synthetic oligonucleotide
acuuccuucggugggaguu

SEQ ID NO: 2339448 - RNA, 19 nt, Artificial Sequence
  Description of Artificial Sequence: Synthetic oligonucleotide
cuugaugaggcaggacuuc

SEQ ID NO: 2339449 - RNA, 19 nt, Artificial Sequence
  Description of Artificial Sequence: Synthetic oligonucleotide
gcucccucgauuugggagc

SEQ ID NO: 2339450 - RNA, 19 nt, Artificial Sequence
  Description of Artificial Sequence: Synthetic oligonucleotide
ccugacugaaguguggcgc

SEQ ID NO: 2339451 - RNA, 19 nt, Artificial Sequence
  Description of Artificial Sequence: Synthetic oligonucleotide
aguguggcgccugaagggu

SEQ ID NO: 2339452 - RNA, 19 nt, Artificial Sequence
  Description of Artificial Sequence: Synthetic oligonucleotide
acugaaguguggcgccuga

SEQ ID NO: 2339453 - RNA, 19 nt, Artificial Sequence
  Description of Artificial Sequence: Synthetic oligonucleotide
ccagguaaccaccaaucac

SEQ ID NO: 2339454 - RNA, 19 nt, Artificial Sequence
  Description of Artificial Sequence: Synthetic oligonucleotide
cuucugagucuacuucauc

SEQ ID NO: 2339455 - RNA, 19 nt, Artificial Sequence
  Description of Artificial Sequence: Synthetic oligonucleotide
gcacagaauaauagucagg

SEQ ID NO: 2339456 - RNA, 19 nt, Artificial Sequence
  Description of Artificial Sequence: Synthetic oligonucleotide
ucucaugcacaguggggua

SEQ ID NO: 2339457 - RNA, 19 nt, Artificial Sequence
  Description of Artificial Sequence: Synthetic oligonucleotide
guauugcucccucgauuug

SEQ ID NO: 2339458 - RNA, 19 nt, Artificial Sequence
  Description of Artificial Sequence: Synthetic oligonucleotide
cauucugacuggcaggugu

SEQ ID NO: 2339459 - RNA, 19 nt, Artificial Sequence
  Description of Artificial Sequence: Synthetic oligonucleotide
agaaggguacucaaauguu

SEQ ID NO: 2339460 - RNA, 19 nt, Artificial Sequence
  Description of Artificial Sequence: Synthetic oligonucleotide
gagaucauucugacuggca

SEQ ID NO: 2339461 - RNA, 19 nt, Artificial Sequence
  Description of Artificial Sequence: Synthetic oligonucleotide
uccuguugcugggacugcc

SEQ ID NO: 2339462 - RNA, 19 nt, Artificial Sequence
  Description of Artificial Sequence: Synthetic oligonucleotide
uccagagcagugugagguc

SEQ ID NO: 2339463 - RNA, 19 nt, Artificial Sequence
  Description of Artificial Sequence: Synthetic oligonucleotide
caggggucagaaauagaga

SEQ ID NO: 2339464 - RNA, 19 nt, Artificial Sequence
  Description of Artificial Sequence: Synthetic oligonucleotide
cgauuugggagcucugagg

SEQ ID NO: 2339465 - RNA, 19 nt, Artificial Sequence
  Description of Artificial Sequence: Synthetic oligonucleotide
gaaggugacuggaaguccu

SEQ ID NO: 2339466 - RNA, 19 nt, Artificial Sequence
  Description of Artificial Sequence: Synthetic oligonucleotide
ggcauugacuggcuuccag

SEQ ID NO: 2339467 - RNA, 19 nt, Artificial Sequence
  Description of Artificial Sequence: Synthetic oligonucleotide
uggaaugcuugggaguaua

SEQ ID NO: 2339468 - RNA, 19 nt, Artificial Sequence
  Description of Artificial Sequence: Synthetic oligonucleotide
gggucagaaauagagagcu

SEQ ID NO: 2339469 - RNA, 19 nt, Artificial Sequence
  Description of Artificial Sequence: Synthetic oligonucleotide
gguagcguuucuuaagggu

SEQ ID NO: 2339470 - RNA, 19 nt, Artificial Sequence
  Description of Artificial Sequence: Synthetic oligonucleotide
accaacugcugaggacggc

SEQ ID NO: 2339471 - RNA, 19 nt, Artificial Sequence
  Description of Artificial Sequence: Synthetic oligonucleotide
ccuggcaagguccagguga

SEQ ID NO: 2339472 - RNA, 19 nt, Artificial Sequence
  Description of Artificial Sequence: Synthetic oligonucleotide
ggagcucucagaaggguac

SEQ ID NO: 2339473 - RNA, 19 nt, Artificial Sequence
  Description of Artificial Sequence: Synthetic oligonucleotide
gagguccugagagacuauc

SEQ ID NO: 2339474 - RNA, 19 nt, Artificial Sequence
  Description of Artificial Sequence: Synthetic oligonucleotide
aggguacucaaauguugua

SEQ ID NO: 2339475 - RNA, 19 nt, Artificial Sequence
  Description of Artificial Sequence: Synthetic oligonucleotide
augacuuccuucgguggga

SEQ ID NO: 2339476 - RNA, 19 nt, Artificial Sequence
  Description of Artificial Sequence: Synthetic oligonucleotide
gcggaaguccgagagauca

SEQ ID NO: 2339477 - RNA, 19 nt, Artificial Sequence
  Description of Artificial Sequence: Synthetic oligonucleotide
uuccuucggugggaguucc

SEQ ID NO: 2339478 - RNA, 19 nt, Artificial Sequence
  Description of Artificial Sequence: Synthetic oligonucleotide
cauucuuggccaagccaga

SEQ ID NO: 2339479 - RNA, 19 nt, Artificial Sequence
  Description of Artificial Sequence: Synthetic oligonucleotide
cagaaagccccaagcccuc

SEQ ID NO: 2339480 - RNA, 19 nt, Artificial Sequence
  Description of Artificial Sequence: Synthetic oligonucleotide
cuggcaggugucagcauga

SEQ ID NO: 2339481 - RNA, 19 nt, Artificial Sequence
  Description of Artificial Sequence: Synthetic oligonucleotide
uggacaggccugagcugca

SEQ ID NO: 2339482 - RNA, 19 nt, Artificial Sequence
  Description of Artificial Sequence: Synthetic oligonucleotide
gggcacagaauaauaguca

SEQ ID NO: 2339483 - RNA, 19 nt, Artificial Sequence
  Description of Artificial Sequence: Synthetic oligonucleotide
cuccagagcagugugaggu

SEQ ID NO: 2339484 - RNA, 19 nt, Artificial Sequence
  Description of Artificial Sequence: Synthetic oligonucleotide
cuugggcaccacuaugaaa

SEQ ID NO: 2339485 - RNA, 19 nt, Artificial Sequence
  Description of Artificial Sequence: Synthetic oligonucleotide
caugcacagugggguagcg

SEQ ID NO: 2339486 - RNA, 19 nt, Artificial Sequence
  Description of Artificial Sequence: Synthetic oligonucleotide
gguucgcugcggaaguccg

SEQ ID NO: 2339487 - RNA, 19 nt, Artificial Sequence
  Description of Artificial Sequence: Synthetic oligonucleotide
ggggucagaaauagagagc

SEQ ID NO: 2339488 - RNA, 19 nt, Artificial Sequence
  Description of Artificial Sequence: Synthetic oligonucleotide
agucagggcuccugggcau

SEQ ID NO: 2339489 - RNA, 19 nt, Artificial Sequence
  Description of Artificial Sequence: Synthetic oligonucleotide
gugagguccugagagacua

SEQ ID NO: 2339490 - RNA, 19 nt, Artificial Sequence
  Description of Artificial Sequence: Synthetic oligonucleotide
ugacugaaguguggcgccu

SEQ ID NO: 2339491 - RNA, 19 nt, Artificial Sequence
  Description of Artificial Sequence: Synthetic oligonucleotide
cucgauuugggagcucuga

SEQ ID NO: 2339492 - RNA, 19 nt, Artificial Sequence
  Description of Artificial Sequence: Synthetic oligonucleotide
gccugacugaaguguggcg

SEQ ID NO: 2339493 - RNA, 19 nt, Artificial Sequence
  Description of Artificial Sequence: Synthetic oligonucleotide
agccugcaccaccgucugc

SEQ ID NO: 2339494 - RNA, 19 nt, Artificial Sequence
  Description of Artificial Sequence: Synthetic oligonucleotide
gugggguagcguuucuuaa

SEQ ID NO: 2339495 - RNA, 19 nt, Artificial Sequence
  Description of Artificial Sequence: Synthetic oligonucleotide
uugcucccucgauuuggga

SEQ ID NO: 2339496 - RNA, 19 nt, Artificial Sequence
  Description of Artificial Sequence: Synthetic oligonucleotide
ugcggaaguccgagagauc

SEQ ID NO: 2339497 - RNA, 19 nt, Artificial Sequence
  Description of Artificial Sequence: Synthetic oligonucleotide
auggaagggcacagaauaa

SEQ ID NO: 2339498 - RNA, 19 nt, Artificial Sequence
  Description of Artificial Sequence: Synthetic oligonucleotide
ucggugggaguuccaccuc

SEQ ID NO: 2339499 - RNA, 19 nt, Artificial Sequence
  Description of Artificial Sequence: Synthetic oligonucleotide
caccgucugcuccugccac

SEQ ID NO: 2339500 - RNA, 19 nt, Artificial Sequence
  Description of Artificial Sequence: Synthetic oligonucleotide
agggagcucucagaagggu

SEQ ID NO: 2339501 - RNA, 19 nt, Artificial Sequence
  Description of Artificial Sequence: Synthetic oligonucleotide
cggcaguuugguuucuugg

SEQ ID NO: 2339502 - RNA, 19 nt, Artificial Sequence
  Description of Artificial Sequence: Synthetic oligonucleotide
gcaggugucagcaugacuu

SEQ ID NO: 2339503 - RNA, 19 nt, Artificial Sequence
  Description of Artificial Sequence: Synthetic oligonucleotide
cuuccuucggugggaguuc

SEQ ID NO: 2339504 - RNA, 19 nt, Artificial Sequence
  Description of Artificial Sequence: Synthetic oligonucleotide
uuggagccugcaccaccgu

SEQ ID NO: 2339505 - RNA, 19 nt, Artificial Sequence
  Description of Artificial Sequence: Synthetic oligonucleotide
ggccagguaaccaccaauc

SEQ ID NO: 2339506 - RNA, 19 nt, Artificial Sequence
  Description of Artificial Sequence: Synthetic oligonucleotide
gccagguaaccaccaauca

SEQ ID NO: 2339507 - RNA, 19 nt, Artificial Sequence
  Description of Artificial Sequence: Synthetic oligonucleotide
gaccucccaggcuccuggc

SEQ ID NO: 2339508 - RNA, 19 nt, Artificial Sequence
  Description of Artificial Sequence: Synthetic oligonucleotide
uccuucggugggaguucca

SEQ ID NO: 2339509 - RNA, 19 nt, Artificial Sequence
  Description of Artificial Sequence: Synthetic oligonucleotide
cuaucagcauccuguuccu

SEQ ID NO: 2339510 - RNA, 19 nt, Artificial Sequence
  Description of Artificial Sequence: Synthetic oligonucleotide
gcuccuggccauucuuggc

SEQ ID NO: 2339511 - RNA, 19 nt, Artificial Sequence
  Description of Artificial Sequence: Synthetic oligonucleotide
ccagaaagccccaagcccu

SEQ ID NO: 2339512 - RNA, 19 nt, Artificial Sequence
  Description of Artificial Sequence: Synthetic oligonucleotide
agaaagccccaagcccuca

SEQ ID NO: 2339513 - RNA, 19 nt, Artificial Sequence
  Description of Artificial Sequence: Synthetic oligonucleotide
auguuguauacaggcuguu

SEQ ID NO: 2339514 - RNA, 19 nt, Artificial Sequence
  Description of Artificial Sequence: Synthetic oligonucleotide
aggugauacugggaaggua

SEQ ID NO: 2339515 - RNA, 19 nt, Artificial Sequence
  Description of Artificial Sequence: Synthetic oligonucleotide
ggucagaaauagagagcug

SEQ ID NO: 2339516 - RNA, 19 nt, Artificial Sequence
  Description of Artificial Sequence: Synthetic oligonucleotide
gugugccuuggccuggcaa

SEQ ID NO: 2339517 - RNA, 19 nt, Artificial Sequence
  Description of Artificial Sequence: Synthetic oligonucleotide
ccucuugggcaccacuaug

SEQ ID NO: 2339518 - RNA, 19 nt, Artificial Sequence
  Description of Artificial Sequence: Synthetic oligonucleotide
ggcaccacuaugaaaguau

SEQ ID NO: 2339519 - RNA, 19 nt, Artificial Sequence
  Description of Artificial Sequence: Synthetic oligonucleotide
ucgcugcggaaguccgaga

SEQ ID NO: 2339520 - RNA, 19 nt, Artificial Sequence
  Description of Artificial Sequence: Synthetic oligonucleotide
cugagucuacuucaucaau

SEQ ID NO: 2339521 - RNA, 19 nt, Artificial Sequence
  Description of Artificial Sequence: Synthetic oligonucleotide
cuacuucaucaaugaaggu

SEQ ID NO: 2339522 - RNA, 19 nt, Artificial Sequence
  Description of Artificial Sequence: Synthetic oligonucleotide
ccacuaugaaaguauugcu

SEQ ID NO: 2339523 - RNA, 19 nt, Artificial Sequence
  Description of Artificial Sequence: Synthetic oligonucleotide
cgcugcggaaguccgagag

SEQ ID NO: 2339524 - RNA, 19 nt, Artificial Sequence
  Description of Artificial Sequence: Synthetic oligonucleotide
gcucugaggugugccuugg

SEQ ID NO: 2339525 - RNA, 19 nt, Artificial Sequence
  Description of Artificial Sequence: Synthetic oligonucleotide
ggguacucaaauguuguau

SEQ ID NO: 2339526 - RNA, 19 nt, Artificial Sequence
  Description of Artificial Sequence: Synthetic oligonucleotide
agcguuucuuaaggguguu

SEQ ID NO: 2339527 - RNA, 19 nt, Artificial Sequence
  Description of Artificial Sequence: Synthetic oligonucleotide
cugcggaaguccgagagau

SEQ ID NO: 2339528 - RNA, 19 nt, Artificial Sequence
  Description of Artificial Sequence: Synthetic oligonucleotide
cugaggacggcaguuuggu

SEQ ID NO: 2339529 - RNA, 19 nt, Artificial Sequence
  Description of Artificial Sequence: Synthetic oligonucleotide
ccucacuuggagccugcac

SEQ ID NO: 2339530 - RNA, 19 nt, Artificial Sequence
  Description of Artificial Sequence: Synthetic oligonucleotide
cacuuggagccugcaccac

SEQ ID NO: 2339531 - RNA, 19 nt, Artificial Sequence
  Description of Artificial Sequence: Synthetic oligonucleotide
ccuucggugggaguuccac

SEQ ID NO: 2339532 - RNA, 19 nt, Artificial Sequence
  Description of Artificial Sequence: Synthetic oligonucleotide
gcugcggaaguccgagaga

SEQ ID NO: 2339533 - RNA, 19 nt, Artificial Sequence
  Description of Artificial Sequence: Synthetic oligonucleotide
gccaccacaccuggggcug

SEQ ID NO: 2339534 - RNA, 19 nt, Artificial Sequence
  Description of Artificial Sequence: Synthetic oligonucleotide
gccugagcugcacuuccuc

SEQ ID NO: 2339535 - RNA, 19 nt, Artificial Sequence
  Description of Artificial Sequence: Synthetic oligonucleotide
ccaacugcugaggacggca

SEQ ID NO: 2339536 - RNA, 19 nt, Artificial Sequence
  Description of Artificial Sequence: Synthetic oligonucleotide
cugguucgcugcggaaguc

SEQ ID NO: 2339537 - RNA, 19 nt, Artificial Sequence
  Description of Artificial Sequence: Synthetic oligonucleotide
ggcgccugaagggucucug

SEQ ID NO: 2339538 - RNA, 19 nt, Artificial Sequence
  Description of Artificial Sequence: Synthetic oligonucleotide
gagagacuaucagcauccu

SEQ ID NO: 2339539 - RNA, 19 nt, Artificial Sequence
  Description of Artificial Sequence: Synthetic oligonucleotide
gcugguucgcugcggaagu

SEQ ID NO: 2339540 - RNA, 19 nt, Artificial Sequence
  Description of Artificial Sequence: Synthetic oligonucleotide
ggugucagcaugacuuccu

SEQ ID NO: 2339541 - RNA, 19 nt, Artificial Sequence
  Description of Artificial Sequence: Synthetic oligonucleotide
ccucgauuugggagcucug

SEQ ID NO: 2339542 - RNA, 19 nt, Artificial Sequence
  Description of Artificial Sequence: Synthetic oligonucleotide
ccauggaaugcuugggagu

SEQ ID NO: 2339543 - RNA, 19 nt, Artificial Sequence
  Description of Artificial Sequence: Synthetic oligonucleotide
gacuuccuucggugggagu

SEQ ID NO: 2339544 - RNA, 19 nt, Artificial Sequence
  Description of Artificial Sequence: Synthetic oligonucleotide
guucgcugcggaaguccga

SEQ ID NO: 2339545 - RNA, 19 nt, Artificial Sequence
  Description of Artificial Sequence: Synthetic oligonucleotide
guguggcgccugaaggguc

SEQ ID NO: 2339546 - RNA, 19 nt, Artificial Sequence
  Description of Artificial Sequence: Synthetic oligonucleotide
cuucaaucucaugcacagu

SEQ ID NO: 2339547 - RNA, 19 nt, Artificial Sequence
  Description of Artificial Sequence: Synthetic oligonucleotide
gggagcucucagaagggua

SEQ ID NO: 2339548 - RNA, 19 nt, Artificial Sequence
  Description of Artificial Sequence: Synthetic oligonucleotide
cguuucuuaaggguguucu

SEQ ID NO: 2339549 - RNA, 19 nt, Artificial Sequence
  Description of Artificial Sequence: Synthetic oligonucleotide
caggugauacugggaaggu

SEQ ID NO: 2339550 - RNA, 19 nt, Artificial Sequence
  Description of Artificial Sequence: Synthetic oligonucleotide
cugaaguguggcgccugaa

SEQ ID NO: 2339551 - RNA, 19 nt, Artificial Sequence
  Description of Artificial Sequence: Synthetic oligonucleotide
gcguuucuuaaggguguuc

SEQ ID NO: 2339552 - RNA, 19 nt, Artificial Sequence
  Description of Artificial Sequence: Synthetic oligonucleotide
gcuugggaguauagcugga

SEQ ID NO: 2339553 - RNA, 19 nt, Artificial Sequence
  Description of Artificial Sequence: Synthetic oligonucleotide
gaagggucucuggcuuccu

SEQ ID NO: 2339554 - RNA, 19 nt, Artificial Sequence
  Description of Artificial Sequence: Synthetic oligonucleotide
gacugcccauuggccugac

SEQ ID NO: 2339555 - RNA, 19 nt, Artificial Sequence
  Description of Artificial Sequence: Synthetic oligonucleotide
gcuccaggggucagaaaua

SEQ ID NO: 2339556 - RNA, 19 nt, Artificial Sequence
  Description of Artificial Sequence: Synthetic oligonucleotide
ucccucgauuugggagcuc

SEQ ID NO: 2339557 - RNA, 19 nt, Artificial Sequence
  Description of Artificial Sequence: Synthetic oligonucleotide
ccugagagacuaucagcau

SEQ ID NO: 2339558 - RNA, 19 nt, Artificial Sequence
  Description of Artificial Sequence: Synthetic oligonucleotide
cucccucgauuugggagcu

SEQ ID NO: 2339559 - RNA, 19 nt, Artificial Sequence
  Description of Artificial Sequence: Synthetic oligonucleotide
gacggcaguuugguuucuu

SEQ ID NO: 2339560 - RNA, 19 nt, Artificial Sequence
  Description of Artificial Sequence: Synthetic oligonucleotide
ccgagagaucauucugacu

SEQ ID NO: 2339561 - RNA, 19 nt, Artificial Sequence
  Description of Artificial Sequence: Synthetic oligonucleotide
gcaccacuaugaaaguauu

SEQ ID NO: 2339562 - RNA, 19 nt, Artificial Sequence
  Description of Artificial Sequence: Synthetic oligonucleotide
cccucgauuugggagcucu

SEQ ID NO: 2339563 - RNA, 19 nt, Artificial Sequence
  Description of Artificial Sequence: Synthetic oligonucleotide
cugcugaggacggcaguuu

SEQ ID NO: 2339564 - RNA, 19 nt, Artificial Sequence
  Description of Artificial Sequence: Synthetic oligonucleotide
cagugggguagcguuucuu

SEQ ID NO: 2339565 - RNA, 19 nt, Artificial Sequence
  Description of Artificial Sequence: Synthetic oligonucleotide
cuccugccacuugcugaaa

SEQ ID NO: 2339566 - RNA, 19 nt, Artificial Sequence
  Description of Artificial Sequence: Synthetic oligonucleotide
ggacggcaguuugguuucu

SEQ ID NO: 2339567 - RNA, 19 nt, Artificial Sequence
  Description of Artificial Sequence: Synthetic oligonucleotide
cggaaguccgagagaucau

SEQ ID NO: 2339568 - RNA, 19 nt, Artificial Sequence
  Description of Artificial Sequence: Synthetic oligonucleotide
ccugaccucccaggcuccu

SEQ ID NO: 2339569 - RNA, 19 nt, Artificial Sequence
  Description of Artificial Sequence: Synthetic oligonucleotide
ccgucugcuccugccacuu

SEQ ID NO: 2339570 - RNA, 19 nt, Artificial Sequence
  Description of Artificial Sequence: Synthetic oligonucleotide
ccaccacaccuggggcugu

SEQ ID NO: 2339571 - RNA, 19 nt, Artificial Sequence
  Description of Artificial Sequence: Synthetic oligonucleotide
augucaaccaucuucagac

SEQ ID NO: 2339572 - RNA, 19 nt, Artificial Sequence
  Description of Artificial Sequence: Synthetic oligonucleotide
ugaggucugaccuugaagc

SEQ ID NO: 2339573 - RNA, 19 nt, Artificial Sequence
  Description of Artificial Sequence: Synthetic oligonucleotide
uguacccagauccucacgg

SEQ ID NO: 2339574 - RNA, 19 nt, Artificial Sequence
  Description of Artificial Sequence: Synthetic oligonucleotide
aaaggugcuagccagcuga

SEQ ID NO: 2339575 - RNA, 19 nt, Artificial Sequence
  Description of Artificial Sequence: Synthetic oligonucleotide
gaaggcuaaguuuucaagc

SEQ ID NO: 2339576 - RNA, 19 nt, Artificial Sequence
  Description of Artificial Sequence: Synthetic oligonucleotide
gauaggcuccaucagagcc

SEQ ID NO: 2339577 - RNA, 19 nt, Artificial Sequence
  Description of Artificial Sequence: Synthetic oligonucleotide
uuccauauggcacaguggu

SEQ ID NO: 2339578 - RNA, 19 nt, Artificial Sequence
  Description of Artificial Sequence: Synthetic oligonucleotide
agccugaugaaugucaacc

SEQ ID NO: 2339579 - RNA, 19 nt, Artificial Sequence
  Description of Artificial Sequence: Synthetic oligonucleotide
gaaggcaagcgucucaggg

SEQ ID NO: 2339580 - RNA, 19 nt, Artificial Sequence
  Description of Artificial Sequence: Synthetic oligonucleotide
accaucuucagacccgugc

SEQ ID NO: 2339581 - RNA, 19 nt, Artificial Sequence
  Description of Artificial Sequence: Synthetic oligonucleotide
ucugcaacgggcacuagcc

SEQ ID NO: 2339582 - RNA, 19 nt, Artificial Sequence
  Description of Artificial Sequence: Synthetic oligonucleotide
ucaaccaucuucagacccg

SEQ ID NO: 2339583 - RNA, 19 nt, Artificial Sequence
  Description of Artificial Sequence: Synthetic oligonucleotide
uuguagaccagcugcagcc

SEQ ID NO: 2339584 - RNA, 19 nt, Artificial Sequence
  Description of Artificial Sequence: Synthetic oligonucleotide
agugaagucuacccagcgc

SEQ ID NO: 2339585 - RNA, 19 nt, Artificial Sequence
  Description of Artificial Sequence: Synthetic oligonucleotide
ugaaggcuaaguuuucaag

SEQ ID NO: 2339586 - RNA, 19 nt, Artificial Sequence
  Description of Artificial Sequence: Synthetic oligonucleotide
ugagguagcaagguuuugg

SEQ ID NO: 2339587 - RNA, 19 nt, Artificial Sequence
  Description of Artificial Sequence: Synthetic oligonucleotide
cucagaagcccauucgugg

SEQ ID NO: 2339588 - RNA, 19 nt, Artificial Sequence
  Description of Artificial Sequence: Synthetic oligonucleotide
gugaagucuacccagcgcc

SEQ ID NO: 2339589 - RNA, 19 nt, Artificial Sequence
  Description of Artificial Sequence: Synthetic oligonucleotide
agcacgucuguccacacuc

SEQ ID NO: 2339590 - RNA, 19 nt, Artificial Sequence
  Description of Artificial Sequence: Synthetic oligonucleotide
ggaagguccaagcagcucg

SEQ ID NO: 2339591 - RNA, 19 nt, Artificial Sequence
  Description of Artificial Sequence: Synthetic oligonucleotide
agagaggacagguguuugc

SEQ ID NO: 2339592 - RNA, 19 nt, Artificial Sequence
  Description of Artificial Sequence: Synthetic oligonucleotide
cauggucugacucuucugc

SEQ ID NO: 2339593 - RNA, 19 nt, Artificial Sequence
  Description of Artificial Sequence: Synthetic oligonucleotide
uuucaagcacgucugucca

SEQ ID NO: 2339594 - RNA, 19 nt, Artificial Sequence
  Description of Artificial Sequence: Synthetic oligonucleotide
uuuuccaccugcaguaccu

SEQ ID NO: 2339595 - RNA, 19 nt, Artificial Sequence
  Description of Artificial Sequence: Synthetic oligonucleotide
agaacggcugcagauggcc

SEQ ID NO: 2339596 - RNA, 19 nt, Artificial Sequence
  Description of Artificial Sequence: Synthetic oligonucleotide
uuuccggggaggaugggag

SEQ ID NO: 2339597 - RNA, 19 nt, Artificial Sequence
  Description of Artificial Sequence: Synthetic oligonucleotide
agguuuuggcuacaagggg

SEQ ID NO: 2339598 - RNA, 19 nt, Artificial Sequence
  Description of Artificial Sequence: Synthetic oligonucleotide
ugaagccuuuuccaccagg

SEQ ID NO: 2339599 - RNA, 19 nt, Artificial Sequence
  Description of Artificial Sequence: Synthetic oligonucleotide
agaaggaucacggaaggca

SEQ ID NO: 2339600 - RNA, 19 nt, Artificial Sequence
  Description of Artificial Sequence: Synthetic oligonucleotide
uaucagucuuccauauggc

SEQ ID NO: 2339601 - RNA, 19 nt, Artificial Sequence
  Description of Artificial Sequence: Synthetic oligonucleotide
acgggcacuagccugauga

SEQ ID NO: 2339602 - RNA, 19 nt, Artificial Sequence
  Description of Artificial Sequence: Synthetic oligonucleotide
ucuacccagcgccagggag

SEQ ID NO: 2339603 - RNA, 19 nt, Artificial Sequence
  Description of Artificial Sequence: Synthetic oligonucleotide
ggggaguguacccagaucc

SEQ ID NO: 2339604 - RNA, 19 nt, Artificial Sequence
  Description of Artificial Sequence: Synthetic oligonucleotide
aggcuaaguuuucaagcac

SEQ ID NO: 2339605 - RNA, 19 nt, Artificial Sequence
  Description of Artificial Sequence: Synthetic oligonucleotide
aaggcaagcgucucagggu

SEQ ID NO: 2339606 - RNA, 19 nt, Artificial Sequence
  Description of Artificial Sequence: Synthetic oligonucleotide
caucuugugggguccauag

SEQ ID NO: 2339607 - RNA, 19 nt, Artificial Sequence
  Description of Artificial Sequence: Synthetic oligonucleotide
aggcaagcgucucaggguc

SEQ ID NO: 2339608 - RNA, 19 nt, Artificial Sequence
  Description of Artificial Sequence: Synthetic oligonucleotide
aagucuacccagcgccagg

SEQ ID NO: 2339609 - RNA, 19 nt, Artificial Sequence
  Description of Artificial Sequence: Synthetic oligonucleotide
cugaugaaugucaaccauc

SEQ ID NO: 2339610 - RNA, 19 nt, Artificial Sequence
  Description of Artificial Sequence: Synthetic oligonucleotide
cauucguggcuuuuccggg

SEQ ID NO: 2339611 - RNA, 19 nt, Artificial Sequence
  Description of Artificial Sequence: Synthetic oligonucleotide
aggaucacggaaggcaagc

SEQ ID NO: 2339612 - RNA, 19 nt, Artificial Sequence
  Description of Artificial Sequence: Synthetic oligonucleotide
ugaucggagcuucugugac

SEQ ID NO: 2339613 - RNA, 19 nt, Artificial Sequence
  Description of Artificial Sequence: Synthetic oligonucleotide
uugaucugugccugggacc

SEQ ID NO: 2339614 - RNA, 19 nt, Artificial Sequence
  Description of Artificial Sequence: Synthetic oligonucleotide
cucacggccgcccaggagc

SEQ ID NO: 2339615 - RNA, 19 nt, Artificial Sequence
  Description of Artificial Sequence: Synthetic oligonucleotide
uuggccauagcugaucgga

SEQ ID NO: 2339616 - RNA, 19 nt, Artificial Sequence
  Description of Artificial Sequence: Synthetic oligonucleotide
aggcuaacaccaguggccc

SEQ ID NO: 2339617 - RNA, 19 nt, Artificial Sequence
  Description of Artificial Sequence: Synthetic oligonucleotide
acagguguuugccgccucc

SEQ ID NO: 2339618 - RNA, 19 nt, Artificial Sequence
  Description of Artificial Sequence: Synthetic oligonucleotide
gaagccuuuuccaccaggc

SEQ ID NO: 2339619 - RNA, 19 nt, Artificial Sequence
  Description of Artificial Sequence: Synthetic oligonucleotide
ugcaacgggcacuagccug

SEQ ID NO: 2339620 - RNA, 19 nt, Artificial Sequence
  Description of Artificial Sequence: Synthetic oligonucleotide
aucacggaaggcaagcguc

SEQ ID NO: 2339621 - RNA, 19 nt, Artificial Sequence
  Description of Artificial Sequence: Synthetic oligonucleotide
auucguggcuuuuccgggg

SEQ ID NO: 2339622 - RNA, 19 nt, Artificial Sequence
  Description of Artificial Sequence: Synthetic oligonucleotide
aaaaggugcuagccagcug

SEQ ID NO: 2339623 - RNA, 19 nt, Artificial Sequence
  Description of Artificial Sequence: Synthetic oligonucleotide
uacccagauccucacggcc

SEQ ID NO: 2339624 - RNA, 19 nt, Artificial Sequence
  Description of Artificial Sequence: Synthetic oligonucleotide
cacguggcccagaaaacgg

SEQ ID NO: 2339625 - RNA, 19 nt, Artificial Sequence
  Description of Artificial Sequence: Synthetic oligonucleotide
guagcaagguuuuggcuac

SEQ ID NO: 2339626 - RNA, 19 nt, Artificial Sequence
  Description of Artificial Sequence: Synthetic oligonucleotide
guguuugccgccucccugg

SEQ ID NO: 2339627 - RNA, 19 nt, Artificial Sequence
  Description of Artificial Sequence: Synthetic oligonucleotide
ucugagguagcaagguuuu

SEQ ID NO: 2339628 - RNA, 19 nt, Artificial Sequence
  Description of Artificial Sequence: Synthetic oligonucleotide
aaggccggggauaggcucc

SEQ ID NO: 2339629 - RNA, 19 nt, Artificial Sequence
  Description of Artificial Sequence: Synthetic oligonucleotide
gacaaggccggggauaggc

SEQ ID NO: 2339630 - RNA, 19 nt, Artificial Sequence
  Description of Artificial Sequence: Synthetic oligonucleotide
ugcggucacccacagucag

SEQ ID NO: 2339631 - RNA, 19 nt, Artificial Sequence
  Description of Artificial Sequence: Synthetic oligonucleotide
cugcagcccaucuuguggg

SEQ ID NO: 2339632 - RNA, 19 nt, Artificial Sequence
  Description of Artificial Sequence: Synthetic oligonucleotide
ugcuagccagcugaguccg

SEQ ID NO: 2339633 - RNA, 19 nt, Artificial Sequence
  Description of Artificial Sequence: Synthetic oligonucleotide
auagacacacagcuccaga

SEQ ID NO: 2339634 - RNA, 19 nt, Artificial Sequence
  Description of Artificial Sequence: Synthetic oligonucleotide
gaguccggcgcuugggccg

SEQ ID NO: 2339635 - RNA, 19 nt, Artificial Sequence
  Description of Artificial Sequence: Synthetic oligonucleotide
aguaccugcagggaugcug

SEQ ID NO: 2339636 - RNA, 19 nt, Artificial Sequence
  Description of Artificial Sequence: Synthetic oligonucleotide
agggcugaggcuaacacca

SEQ ID NO: 2339637 - RNA, 19 nt, Artificial Sequence
  Description of Artificial Sequence: Synthetic oligonucleotide
aggaugaaggcuaaguuuu

SEQ ID NO: 2339638 - RNA, 19 nt, Artificial Sequence
  Description of Artificial Sequence: Synthetic oligonucleotide
ugucaaccaucuucagacc

SEQ ID NO: 2339639 - RNA, 19 nt, Artificial Sequence
  Description of Artificial Sequence: Synthetic oligonucleotide
cugaggucugaccuugaag

SEQ ID NO: 2339640 - RNA, 19 nt, Artificial Sequence
  Description of Artificial Sequence: Synthetic oligonucleotide
acuagccugaugaauguca

SEQ ID NO: 2339641 - RNA, 19 nt, Artificial Sequence
  Description of Artificial Sequence: Synthetic oligonucleotide
cagugaagucuacccagcg

SEQ ID NO: 2339642 - RNA, 19 nt, Artificial Sequence
  Description of Artificial Sequence: Synthetic oligonucleotide
cuuaucagucuuccauaug

SEQ ID NO: 2339643 - RNA, 19 nt, Artificial Sequence
  Description of Artificial Sequence: Synthetic oligonucleotide
cugcagauggccaucucuc

SEQ ID NO: 2339644 - RNA, 19 nt, Artificial Sequence
  Description of Artificial Sequence: Synthetic oligonucleotide
aaacggcggugggagaagg

SEQ ID NO: 2339645 - RNA, 19 nt, Artificial Sequence
  Description of Artificial Sequence: Synthetic oligonucleotide
gcugcagcccaucuugugg

SEQ ID NO: 2339646 - RNA, 19 nt, Artificial Sequence
  Description of Artificial Sequence: Synthetic oligonucleotide
gguagcaagguuuuggcua

SEQ ID NO: 2339647 - RNA, 19 nt, Artificial Sequence
  Description of Artificial Sequence: Synthetic oligonucleotide
gaugaaggcuaaguuuuca

SEQ ID NO: 2339648 - RNA, 19 nt, Artificial Sequence
  Description of Artificial Sequence: Synthetic oligonucleotide
aaaacggcggugggagaag

SEQ ID NO: 2339649 - RNA, 19 nt, Artificial Sequence
  Description of Artificial Sequence: Synthetic oligonucleotide
aacggcugcagauggccau

SEQ ID NO: 2339650 - RNA, 19 nt, Artificial Sequence
  Description of Artificial Sequence: Synthetic oligonucleotide
auauggcacagugguaguc

SEQ ID NO: 2339651 - RNA, 19 nt, Artificial Sequence
  Description of Artificial Sequence: Synthetic oligonucleotide
ggugcuagccagcugaguc

SEQ ID NO: 2339652 - RNA, 19 nt, Artificial Sequence
  Description of Artificial Sequence: Synthetic oligonucleotide
uucugugacauggucugac

SEQ ID NO: 2339653 - RNA, 19 nt, Artificial Sequence
  Description of Artificial Sequence: Synthetic oligonucleotide
agcgccagggagaaggauc

SEQ ID NO: 2339654 - RNA, 19 nt, Artificial Sequence
  Description of Artificial Sequence: Synthetic oligonucleotide
uccacguggcccagaaaac

SEQ ID NO: 2339655 - RNA, 19 nt, Artificial Sequence
  Description of Artificial Sequence: Synthetic oligonucleotide
ugaguccggcgcuugggcc

SEQ ID NO: 2339656 - RNA, 19 nt, Artificial Sequence
  Description of Artificial Sequence: Synthetic oligonucleotide
uguuugccgccucccuggg

SEQ ID NO: 2339657 - RNA, 19 nt, Artificial Sequence
  Description of Artificial Sequence: Synthetic oligonucleotide
ggcacuagccugaugaaug

SEQ ID NO: 2339658 - RNA, 19 nt, Artificial Sequence
  Description of Artificial Sequence: Synthetic oligonucleotide
cugaccuugaagccuuuuc

SEQ ID NO: 2339659 - RNA, 19 nt, Artificial Sequence
  Description of Artificial Sequence: Synthetic oligonucleotide
gugcuagccagcugagucc

SEQ ID NO: 2339660 - RNA, 19 nt, Artificial Sequence
  Description of Artificial Sequence: Synthetic oligonucleotide
uaccggacaaggccgggga

SEQ ID NO: 2339661 - RNA, 19 nt, Artificial Sequence
  Description of Artificial Sequence: Synthetic oligonucleotide
uuuuccggggaggauggga

SEQ ID NO: 2339662 - RNA, 19 nt, Artificial Sequence
  Description of Artificial Sequence: Synthetic oligonucleotide
acacacagcuccagaacgg

SEQ ID NO: 2339663 - RNA, 19 nt, Artificial Sequence
  Description of Artificial Sequence: Synthetic oligonucleotide
agucuacccagcgccaggg

SEQ ID NO: 2339664 - RNA, 19 nt, Artificial Sequence
  Description of Artificial Sequence: Synthetic oligonucleotide
caagcagcucgugagugag

SEQ ID NO: 2339665 - RNA, 19 nt, Artificial Sequence
  Description of Artificial Sequence: Synthetic oligonucleotide
agguagcaagguuuuggcu

SEQ ID NO: 2339666 - RNA, 19 nt, Artificial Sequence
  Description of Artificial Sequence: Synthetic oligonucleotide
ccacccaucgucugcaacg

SEQ ID NO: 2339667 - RNA, 19 nt, Artificial Sequence
  Description of Artificial Sequence: Synthetic oligonucleotide
uucguggcuuuuccgggga

SEQ ID NO: 2339668 - RNA, 19 nt, Artificial Sequence
  Description of Artificial Sequence: Synthetic oligonucleotide
agcugaucggagcuucugu

SEQ ID NO: 2339669 - RNA, 19 nt, Artificial Sequence
  Description of Artificial Sequence: Synthetic oligonucleotide
uguagaccagcugcagccc

SEQ ID NO: 2339670 - RNA, 19 nt, Artificial Sequence
  Description of Artificial Sequence: Synthetic oligonucleotide
cuuggccauagcugaucgg

SEQ ID NO: 2339671 - RNA, 19 nt, Artificial Sequence
  Description of Artificial Sequence: Synthetic oligonucleotide
aagcacgucuguccacacu

SEQ ID NO: 2339672 - RNA, 19 nt, Artificial Sequence
  Description of Artificial Sequence: Synthetic oligonucleotide
cccauaccggacaaggccg

SEQ ID NO: 2339673 - RNA, 19 nt, Artificial Sequence
  Description of Artificial Sequence: Synthetic oligonucleotide
ugacucuucugcugcucca

SEQ ID NO: 2339674 - RNA, 19 nt, Artificial Sequence
  Description of Artificial Sequence: Synthetic oligonucleotide
ugcagcccaucuugugggg

SEQ ID NO: 2339675 - RNA, 19 nt, Artificial Sequence
  Description of Artificial Sequence: Synthetic oligonucleotide
gaaggaucacggaaggcaa

SEQ ID NO: 2339676 - RNA, 19 nt, Artificial Sequence
  Description of Artificial Sequence: Synthetic oligonucleotide
gaaaacggcggugggagaa

SEQ ID NO: 2339677 - RNA, 19 nt, Artificial Sequence
  Description of Artificial Sequence: Synthetic oligonucleotide
gggauaggcuccaucagag

SEQ ID NO: 2339678 - RNA, 19 nt, Artificial Sequence
  Description of Artificial Sequence: Synthetic oligonucleotide
agcagcucgugagugagga

SEQ ID NO: 2339679 - RNA, 19 nt, Artificial Sequence
  Description of Artificial Sequence: Synthetic oligonucleotide
acucagaagcccauucgug

SEQ ID NO: 2339680 - RNA, 19 nt, Artificial Sequence
  Description of Artificial Sequence: Synthetic oligonucleotide
agguccaagcagcucguga

SEQ ID NO: 2339681 - RNA, 19 nt, Artificial Sequence
  Description of Artificial Sequence: Synthetic oligonucleotide
cauagacacacagcuccag

SEQ ID NO: 2339682 - RNA, 19 nt, Artificial Sequence
  Description of Artificial Sequence: Synthetic oligonucleotide
cuugugggguccauagaca

SEQ ID NO: 2339683 - RNA, 19 nt, Artificial Sequence
  Description of Artificial Sequence: Synthetic oligonucleotide
uggcccagaaaacggcggu

SEQ ID NO: 2339684 - RNA, 19 nt, Artificial Sequence
  Description of Artificial Sequence: Synthetic oligonucleotide
acguggcccagaaaacggc

SEQ ID NO: 2339685 - RNA, 19 nt, Artificial Sequence
  Description of Artificial Sequence: Synthetic oligonucleotide
guacccagauccucacggc

SEQ ID NO: 2339686 - RNA, 19 nt, Artificial Sequence
  Description of Artificial Sequence: Synthetic oligonucleotide
gagaaggaucacggaaggc

SEQ ID NO: 2339687 - RNA, 19 nt, Artificial Sequence
  Description of Artificial Sequence: Synthetic oligonucleotide
guuuucaagcacgucuguc

SEQ ID NO: 2339688 - RNA, 19 nt, Artificial Sequence
  Description of Artificial Sequence: Synthetic oligonucleotide
gacauggucugacucuucu

SEQ ID NO: 2339689 - RNA, 19 nt, Artificial Sequence
  Description of Artificial Sequence: Synthetic oligonucleotide
gggguccauagacacacag

SEQ ID NO: 2339690 - RNA, 19 nt, Artificial Sequence
  Description of Artificial Sequence: Synthetic oligonucleotide
cugaguccggcgcuugggc

SEQ ID NO: 2339691 - RNA, 19 nt, Artificial Sequence
  Description of Artificial Sequence: Synthetic oligonucleotide
uccauauggcacaguggua

SEQ ID NO: 2339692 - RNA, 19 nt, Artificial Sequence
  Description of Artificial Sequence: Synthetic oligonucleotide
gaucggagcuucugugaca

SEQ ID NO: 2339693 - RNA, 19 nt, Artificial Sequence
  Description of Artificial Sequence: Synthetic oligonucleotide
gcugaucggagcuucugug

SEQ ID NO: 2339694 - RNA, 19 nt, Artificial Sequence
  Description of Artificial Sequence: Synthetic oligonucleotide
aggucugaccuugaagccu

SEQ ID NO: 2339695 - RNA, 19 nt, Artificial Sequence
  Description of Artificial Sequence: Synthetic oligonucleotide
auaccggacaaggccgggg

SEQ ID NO: 2339696 - RNA, 19 nt, Artificial Sequence
  Description of Artificial Sequence: Synthetic oligonucleotide
cuagccagcugaguccggc

SEQ ID NO: 2339697 - RNA, 19 nt, Artificial Sequence
  Description of Artificial Sequence: Synthetic oligonucleotide
ugguggccccugcuuauca

SEQ ID NO: 2339698 - RNA, 19 nt, Artificial Sequence
  Description of Artificial Sequence: Synthetic oligonucleotide
cugaucggagcuucuguga

SEQ ID NO: 2339699 - RNA, 19 nt, Artificial Sequence
  Description of Artificial Sequence: Synthetic oligonucleotide
gaucacggaaggcaagcgu

SEQ ID NO: 2339700 - RNA, 19 nt, Artificial Sequence
  Description of Artificial Sequence: Synthetic oligonucleotide
caaggccggggauaggcuc

SEQ ID NO: 2339701 - RNA, 19 nt, Artificial Sequence
  Description of Artificial Sequence: Synthetic oligonucleotide
cgugcggucacccacaguc

SEQ ID NO: 2339702 - RNA, 19 nt, Artificial Sequence
  Description of Artificial Sequence: Synthetic oligonucleotide
cacgucuguccacacucag

SEQ ID NO: 2339703 - RNA, 19 nt, Artificial Sequence
  Description of Artificial Sequence: Synthetic oligonucleotide
uggggaguguacccagauc

SEQ ID NO: 2339704 - RNA, 19 nt, Artificial Sequence
  Description of Artificial Sequence: Synthetic oligonucleotide
cuagccugaugaaugucaa

SEQ ID NO: 2339705 - RNA, 19 nt, Artificial Sequence
  Description of Artificial Sequence: Synthetic oligonucleotide
ugccaagcgcucugugagc

SEQ ID NO: 2339706 - RNA, 19 nt, Artificial Sequence
  Description of Artificial Sequence: Synthetic oligonucleotide
uggccccugcuuaucaguc

SEQ ID NO: 2339707 - RNA, 19 nt, Artificial Sequence
  Description of Artificial Sequence: Synthetic oligonucleotide
cacccaucgucugcaacgg

SEQ ID NO: 2339708 - RNA, 19 nt, Artificial Sequence
  Description of Artificial Sequence: Synthetic oligonucleotide
uagccugaugaaugucaac

SEQ ID NO: 2339709 - RNA, 19 nt, Artificial Sequence
  Description of Artificial Sequence: Synthetic oligonucleotide
caccuucccaggcuucugc

SEQ ID NO: 2339710 - RNA, 19 nt, Artificial Sequence
  Description of Artificial Sequence: Synthetic oligonucleotide
aaggugcuagccagcugag

SEQ ID NO: 2339711 - RNA, 19 nt, Artificial Sequence
  Description of Artificial Sequence: Synthetic oligonucleotide
aucuugugggguccauaga

SEQ ID NO: 2339712 - RNA, 19 nt, Artificial Sequence
  Description of Artificial Sequence: Synthetic oligonucleotide
agcugcagcccaucuugug

SEQ ID NO: 2339713 - RNA, 19 nt, Artificial Sequence
  Description of Artificial Sequence: Synthetic oligonucleotide
gacccgugcggucacccac

SEQ ID NO: 2339714 - RNA, 19 nt, Artificial Sequence
  Description of Artificial Sequence: Synthetic oligonucleotide
gauccucacggccgcccag

SEQ ID NO: 2339715 - RNA, 19 nt, Artificial Sequence
  Description of Artificial Sequence: Synthetic oligonucleotide
uagcugaucggagcuucug

SEQ ID NO: 2339716 - RNA, 19 nt, Artificial Sequence
  Description of Artificial Sequence: Synthetic oligonucleotide
cuacccagcgccagggaga

SEQ ID NO: 2339717 - RNA, 19 nt, Artificial Sequence
  Description of Artificial Sequence: Synthetic oligonucleotide
uuccggggaggaugggagc

SEQ ID NO: 2339718 - RNA, 19 nt, Artificial Sequence
  Description of Artificial Sequence: Synthetic oligonucleotide
ucguggcuuuuccggggag

SEQ ID NO: 2339719 - RNA, 19 nt, Artificial Sequence
  Description of Artificial Sequence: Synthetic oligonucleotide
gcuuuuccggggaggaugg

SEQ ID NO: 2339720 - RNA, 19 nt, Artificial Sequence
  Description of Artificial Sequence: Synthetic oligonucleotide
uagaccagcugcagcccau

SEQ ID NO: 2339721 - RNA, 19 nt, Artificial Sequence
  Description of Artificial Sequence: Synthetic oligonucleotide
ugacauggucugacucuuc

SEQ ID NO: 2339722 - RNA, 19 nt, Artificial Sequence
  Description of Artificial Sequence: Synthetic oligonucleotide
ucugacucuucugcugcuc

SEQ ID NO: 2339723 - RNA, 19 nt, Artificial Sequence
  Description of Artificial Sequence: Synthetic oligonucleotide
agcccauucguggcuuuuc

SEQ ID NO: 2339724 - RNA, 19 nt, Artificial Sequence
  Description of Artificial Sequence: Synthetic oligonucleotide
acggcggugggagaaggug

SEQ ID NO: 2339725 - RNA, 19 nt, Artificial Sequence
  Description of Artificial Sequence: Synthetic oligonucleotide
aucgucugcaacgggcacu

SEQ ID NO: 2339726 - RNA, 19 nt, Artificial Sequence
  Description of Artificial Sequence: Synthetic oligonucleotide
ggaucacggaaggcaagcg

SEQ ID NO: 2339727 - RNA, 19 nt, Artificial Sequence
  Description of Artificial Sequence: Synthetic oligonucleotide
ucacggccgcccaggagcu

SEQ ID NO: 2339728 - RNA, 19 nt, Artificial Sequence
  Description of Artificial Sequence: Synthetic oligonucleotide
ggauaggcuccaucagagc

SEQ ID NO: 2339729 - RNA, 19 nt, Artificial Sequence
  Description of Artificial Sequence: Synthetic oligonucleotide
guagaccagcugcagccca

SEQ ID NO: 2339730 - RNA, 19 nt, Artificial Sequence
  Description of Artificial Sequence: Synthetic oligonucleotide
aacgggcacuagccugaug

SEQ ID NO: 2339731 - RNA, 19 nt, Artificial Sequence
  Description of Artificial Sequence: Synthetic oligonucleotide
ggggauaggcuccaucaga

SEQ ID NO: 2339732 - RNA, 19 nt, Artificial Sequence
  Description of Artificial Sequence: Synthetic oligonucleotide
gccagggagaaggaucacg

SEQ ID NO: 2339733 - RNA, 19 nt, Artificial Sequence
  Description of Artificial Sequence: Synthetic oligonucleotide
cagagaggacagguguuug

SEQ ID NO: 2339734 - RNA, 19 nt, Artificial Sequence
  Description of Artificial Sequence: Synthetic oligonucleotide
gcccagaaaacggcggugg

SEQ ID NO: 2339735 - RNA, 19 nt, Artificial Sequence
  Description of Artificial Sequence: Synthetic oligonucleotide
ucgucugcaacgggcacua

SEQ ID NO: 2339736 - RNA, 19 nt, Artificial Sequence
  Description of Artificial Sequence: Synthetic oligonucleotide
cagcccaucuugugggguc

SEQ ID NO: 2339737 - RNA, 19 nt, Artificial Sequence
  Description of Artificial Sequence: Synthetic oligonucleotide
gccugaugaaugucaacca

SEQ ID NO: 2339738 - RNA, 19 nt, Artificial Sequence
  Description of Artificial Sequence: Synthetic oligonucleotide
aagguccaagcagcucgug

SEQ ID NO: 2339739 - RNA, 19 nt, Artificial Sequence
  Description of Artificial Sequence: Synthetic oligonucleotide
cauaccggacaaggccggg

SEQ ID NO: 2339740 - RNA, 19 nt, Artificial Sequence
  Description of Artificial Sequence: Synthetic oligonucleotide
cagcucgugagugaggaaa

SEQ ID NO: 2339741 - RNA, 19 nt, Artificial Sequence
  Description of Artificial Sequence: Synthetic oligonucleotide
caagcgcucugugagcuca

SEQ ID NO: 2339742 - RNA, 19 nt, Artificial Sequence
  Description of Artificial Sequence: Synthetic oligonucleotide
ccacguggcccagaaaacg

SEQ ID NO: 2339743 - RNA, 19 nt, Artificial Sequence
  Description of Artificial Sequence: Synthetic oligonucleotide
agaccagcugcagcccauc

SEQ ID NO: 2339744 - RNA, 19 nt, Artificial Sequence
  Description of Artificial Sequence: Synthetic oligonucleotide
cagguguuugccgccuccc

SEQ ID NO: 2339745 - RNA, 19 nt, Artificial Sequence
  Description of Artificial Sequence: Synthetic oligonucleotide
agcacccggggaugagcag

SEQ ID NO: 2339746 - RNA, 19 nt, Artificial Sequence
  Description of Artificial Sequence: Synthetic oligonucleotide
cacccggggaugagcagug

SEQ ID NO: 2339747 - RNA, 19 nt, Artificial Sequence
  Description of Artificial Sequence: Synthetic oligonucleotide
cacucagaagcccauucgu

SEQ ID NO: 2339748 - RNA, 19 nt, Artificial Sequence
  Description of Artificial Sequence: Synthetic oligonucleotide
ccauaccggacaaggccgg

SEQ ID NO: 2339749 - RNA, 19 nt, Artificial Sequence
  Description of Artificial Sequence: Synthetic oligonucleotide
uacccagcgccagggagaa

SEQ ID NO: 2339750 - RNA, 19 nt, Artificial Sequence
  Description of Artificial Sequence: Synthetic oligonucleotide
cuuccccuuggccauagcu

SEQ ID NO: 2339751 - RNA, 19 nt, Artificial Sequence
  Description of Artificial Sequence: Synthetic oligonucleotide
aucucuccuggcaggugag

SEQ ID NO: 2339752 - RNA, 19 nt, Artificial Sequence
  Description of Artificial Sequence: Synthetic oligonucleotide
ugggguccauagacacaca

SEQ ID NO: 2339753 - RNA, 19 nt, Artificial Sequence
  Description of Artificial Sequence: Synthetic oligonucleotide
guccauagacacacagcuc

SEQ ID NO: 2339754 - RNA, 19 nt, Artificial Sequence
  Description of Artificial Sequence: Synthetic oligonucleotide
gguggccccugcuuaucag

SEQ ID NO: 2339755 - RNA, 19 nt, Artificial Sequence
  Description of Artificial Sequence: Synthetic oligonucleotide
gaacggcugcagauggcca

SEQ ID NO: 2339756 - RNA, 19 nt, Artificial Sequence
  Description of Artificial Sequence: Synthetic oligonucleotide
aaccaucuucagacccgug

SEQ ID NO: 2339757 - RNA, 19 nt, Artificial Sequence
  Description of Artificial Sequence: Synthetic oligonucleotide
cagggagaaggaucacgga

SEQ ID NO: 2339758 - RNA, 19 nt, Artificial Sequence
  Description of Artificial Sequence: Synthetic oligonucleotide
gcgcucugugagcucaucc

SEQ ID NO: 2339759 - RNA, 19 nt, Artificial Sequence
  Description of Artificial Sequence: Synthetic oligonucleotide
auagcugaucggagcuucu

SEQ ID NO: 2339760 - RNA, 19 nt, Artificial Sequence
  Description of Artificial Sequence: Synthetic oligonucleotide
cagacccgugcggucaccc

SEQ ID NO: 2339761 - RNA, 19 nt, Artificial Sequence
  Description of Artificial Sequence: Synthetic oligonucleotide
acgucuguccacacucaga

SEQ ID NO: 2339762 - RNA, 19 nt, Artificial Sequence
  Description of Artificial Sequence: Synthetic oligonucleotide
cugagguagcaagguuuug

SEQ ID NO: 2339763 - RNA, 19 nt, Artificial Sequence
  Description of Artificial Sequence: Synthetic oligonucleotide
aacggcggugggagaaggu

SEQ ID NO: 2339764 - RNA, 19 nt, Artificial Sequence
  Description of Artificial Sequence: Synthetic oligonucleotide
agcucgugagugaggaaaa

SEQ ID NO: 2339765 - RNA, 19 nt, Artificial Sequence
  Description of Artificial Sequence: Synthetic oligonucleotide
gcaguaccugcagggaugc

SEQ ID NO: 2339766 - RNA, 19 nt, Artificial Sequence
  Description of Artificial Sequence: Synthetic oligonucleotide
cacuagccugaugaauguc

SEQ ID NO: 2339767 - RNA, 19 nt, Artificial Sequence
  Description of Artificial Sequence: Synthetic oligonucleotide
agacccgugcggucaccca

SEQ ID NO: 2339768 - RNA, 19 nt, Artificial Sequence
  Description of Artificial Sequence: Synthetic oligonucleotide
cuuuuccggggaggauggg

SEQ ID NO: 2339769 - RNA, 19 nt, Artificial Sequence
  Description of Artificial Sequence: Synthetic oligonucleotide
cugccccaccuucccaggc

SEQ ID NO: 2339770 - RNA, 19 nt, Artificial Sequence
  Description of Artificial Sequence: Synthetic oligonucleotide
augcugguggccccugcuu

SEQ ID NO: 2339771 - RNA, 19 nt, Artificial Sequence
  Description of Artificial Sequence: Synthetic oligonucleotide
cccagaaaacggcgguggg

SEQ ID NO: 2339772 - RNA, 19 nt, Artificial Sequence
  Description of Artificial Sequence: Synthetic oligonucleotide
acaaggccggggauaggcu

SEQ ID NO: 2339773 - RNA, 19 nt, Artificial Sequence
  Description of Artificial Sequence: Synthetic oligonucleotide
ggaguguacccagauccuc

SEQ ID NO: 2339774 - RNA, 19 nt, Artificial Sequence
  Description of Artificial Sequence: Synthetic oligonucleotide
ucugaccuugaagccuuuu

SEQ ID NO: 2339775 - RNA, 19 nt, Artificial Sequence
  Description of Artificial Sequence: Synthetic oligonucleotide
agcgcucugugagcucauc

SEQ ID NO: 2339776 - RNA, 19 nt, Artificial Sequence
  Description of Artificial Sequence: Synthetic oligonucleotide
gggccgcuugaucugugcc

SEQ ID NO: 2339777 - RNA, 19 nt, Artificial Sequence
  Description of Artificial Sequence: Synthetic oligonucleotide
accaggcggcugccccacc

SEQ ID NO: 2339778 - RNA, 19 nt, Artificial Sequence
  Description of Artificial Sequence: Synthetic oligonucleotide
cauauggcacagugguagu

SEQ ID NO: 2339779 - RNA, 19 nt, Artificial Sequence
  Description of Artificial Sequence: Synthetic oligonucleotide
cacagucagcacccgggga

SEQ ID NO: 2339780 - RNA, 19 nt, Artificial Sequence
  Description of Artificial Sequence: Synthetic oligonucleotide
agcuuccccuuggccauag

SEQ ID NO: 2339781 - RNA, 19 nt, Artificial Sequence
  Description of Artificial Sequence: Synthetic oligonucleotide
gccgcuugaucugugccug

SEQ ID NO: 2339782 - RNA, 19 nt, Artificial Sequence
  Description of Artificial Sequence: Synthetic oligonucleotide
agucagcacccggggauga

SEQ ID NO: 2339783 - RNA, 19 nt, Artificial Sequence
  Description of Artificial Sequence: Synthetic oligonucleotide
aagcccauucguggcuuuu

SEQ ID NO: 2339784 - RNA, 19 nt, Artificial Sequence
  Description of Artificial Sequence: Synthetic oligonucleotide
uagcaagguuuuggcuaca

SEQ ID NO: 2339785 - RNA, 19 nt, Artificial Sequence
  Description of Artificial Sequence: Synthetic oligonucleotide
accggacaaggccggggau

SEQ ID NO: 2339786 - RNA, 19 nt, Artificial Sequence
  Description of Artificial Sequence: Synthetic oligonucleotide
ggaugaaggcuaaguuuuc

SEQ ID NO: 2339787 - RNA, 19 nt, Artificial Sequence
  Description of Artificial Sequence: Synthetic oligonucleotide
cacggaaggcaagcgucuc

SEQ ID NO: 2339788 - RNA, 19 nt, Artificial Sequence
  Description of Artificial Sequence: Synthetic oligonucleotide
ucagacccgugcggucacc

SEQ ID NO: 2339789 - RNA, 19 nt, Artificial Sequence
  Description of Artificial Sequence: Synthetic oligonucleotide
uacuggugucugggaaggu

SEQ ID NO: 2339790 - RNA, 19 nt, Artificial Sequence
  Description of Artificial Sequence: Synthetic oligonucleotide
gaagguccaagcagcucgu

SEQ ID NO: 2339791 - RNA, 19 nt, Artificial Sequence
  Description of Artificial Sequence: Synthetic oligonucleotide
gcuaaguuuucaagcacgu

SEQ ID NO: 2339792 - RNA, 19 nt, Artificial Sequence
  Description of Artificial Sequence: Synthetic oligonucleotide
cccagauccucacggccgc

SEQ ID NO: 2339793 - RNA, 19 nt, Artificial Sequence
  Description of Artificial Sequence: Synthetic oligonucleotide
gcuugaucugugccuggga

SEQ ID NO: 2339794 - RNA, 19 nt, Artificial Sequence
  Description of Artificial Sequence: Synthetic oligonucleotide
gcaacgggcacuagccuga

SEQ ID NO: 2339795 - RNA, 19 nt, Artificial Sequence
  Description of Artificial Sequence: Synthetic oligonucleotide
gugagggcugaggcuaaca

SEQ ID NO: 2339796 - RNA, 19 nt, Artificial Sequence
  Description of Artificial Sequence: Synthetic oligonucleotide
gcugaggccaggccucuga

SEQ ID NO: 2339797 - RNA, 19 nt, Artificial Sequence
  Description of Artificial Sequence: Synthetic oligonucleotide
cggcggugggagaaggugg

SEQ ID NO: 2339798 - RNA, 19 nt, Artificial Sequence
  Description of Artificial Sequence: Synthetic oligonucleotide
aggugcuagccagcugagu

SEQ ID NO: 2339799 - RNA, 19 nt, Artificial Sequence
  Description of Artificial Sequence: Synthetic oligonucleotide
ccauagacacacagcucca

SEQ ID NO: 2339800 - RNA, 19 nt, Artificial Sequence
  Description of Artificial Sequence: Synthetic oligonucleotide
cggcccauaccggacaagg

SEQ ID NO: 2339801 - RNA, 19 nt, Artificial Sequence
  Description of Artificial Sequence: Synthetic oligonucleotide
gucuacccagcgccaggga

SEQ ID NO: 2339802 - RNA, 19 nt, Artificial Sequence
  Description of Artificial Sequence: Synthetic oligonucleotide
uggcuuuuccggggaggau

SEQ ID NO: 2339803 - RNA, 19 nt, Artificial Sequence
  Description of Artificial Sequence: Synthetic oligonucleotide
ggagcuuccccuuggccau

SEQ ID NO: 2339804 - RNA, 19 nt, Artificial Sequence
  Description of Artificial Sequence: Synthetic oligonucleotide
gagccuccacccaucgucu

SEQ ID NO: 2339805 - RNA, 19 nt, Artificial Sequence
  Description of Artificial Sequence: Synthetic oligonucleotide
gcacuagccugaugaaugu

SEQ ID NO: 2339806 - RNA, 19 nt, Artificial Sequence
  Description of Artificial Sequence: Synthetic oligonucleotide
gugacauggucugacucuu

SEQ ID NO: 2339807 - RNA, 19 nt, Artificial Sequence
  Description of Artificial Sequence: Synthetic oligonucleotide
gugcggucacccacaguca

SEQ ID NO: 2339808 - RNA, 19 nt, Artificial Sequence
  Description of Artificial Sequence: Synthetic oligonucleotide
gcggcugccccaccuuccc

SEQ ID NO: 2339809 - RNA, 19 nt, Artificial Sequence
  Description of Artificial Sequence: Synthetic oligonucleotide
acccgugcggucacccaca

SEQ ID NO: 2339810 - RNA, 19 nt, Artificial Sequence
  Description of Artificial Sequence: Synthetic oligonucleotide
ccugcuuaucagucuucca

SEQ ID NO: 2339811 - RNA, 19 nt, Artificial Sequence
  Description of Artificial Sequence: Synthetic oligonucleotide
gggagccagagaggacagg

SEQ ID NO: 2339812 - RNA, 19 nt, Artificial Sequence
  Description of Artificial Sequence: Synthetic oligonucleotide
ccagaaaacggcgguggga

SEQ ID NO: 2339813 - RNA, 19 nt, Artificial Sequence
  Description of Artificial Sequence: Synthetic oligonucleotide
aggcuccaucagagccucc

SEQ ID NO: 2339814 - RNA, 19 nt, Artificial Sequence
  Description of Artificial Sequence: Synthetic oligonucleotide
ggccgcuugaucugugccu

SEQ ID NO: 2339815 - RNA, 19 nt, Artificial Sequence
  Description of Artificial Sequence: Synthetic oligonucleotide
ccugaugaaugucaaccau

SEQ ID NO: 2339816 - RNA, 19 nt, Artificial Sequence
  Description of Artificial Sequence: Synthetic oligonucleotide
aagcgcucugugagcucau

SEQ ID NO: 2339817 - RNA, 19 nt, Artificial Sequence
  Description of Artificial Sequence: Synthetic oligonucleotide
cuggggaguguacccagau

SEQ ID NO: 2339818 - RNA, 19 nt, Artificial Sequence
  Description of Artificial Sequence: Synthetic oligonucleotide
cggggauaggcuccaucag

SEQ ID NO: 2339819 - RNA, 19 nt, Artificial Sequence
  Description of Artificial Sequence: Synthetic oligonucleotide
ggucacccacagucagcac

SEQ ID NO: 2339820 - RNA, 19 nt, Artificial Sequence
  Description of Artificial Sequence: Synthetic oligonucleotide
ccgcuugaucugugccugg

SEQ ID NO: 2339821 - RNA, 19 nt, Artificial Sequence
  Description of Artificial Sequence: Synthetic oligonucleotide
gaagcccauucguggcuuu

SEQ ID NO: 2339822 - RNA, 19 nt, Artificial Sequence
  Description of Artificial Sequence: Synthetic oligonucleotide
cugcaacgggcacuagccu

SEQ ID NO: 2339823 - RNA, 19 nt, Artificial Sequence
  Description of Artificial Sequence: Synthetic oligonucleotide
ggacaaggccggggauagg

SEQ ID NO: 2339824 - RNA, 19 nt, Artificial Sequence
  Description of Artificial Sequence: Synthetic oligonucleotide
ccaucagagccuccaccca

SEQ ID NO: 2339825 - RNA, 19 nt, Artificial Sequence
  Description of Artificial Sequence: Synthetic oligonucleotide
gggcugaggcuaacaccag

SEQ ID NO: 2339826 - RNA, 19 nt, Artificial Sequence
  Description of Artificial Sequence: Synthetic oligonucleotide
gccggggauaggcuccauc

SEQ ID NO: 2339827 - RNA, 19 nt, Artificial Sequence
  Description of Artificial Sequence: Synthetic oligonucleotide
gcggugggagaaggugggg

SEQ ID NO: 2339828 - RNA, 19 nt, Artificial Sequence
  Description of Artificial Sequence: Synthetic oligonucleotide
aggccggggauaggcucca

SEQ ID NO: 2339829 - RNA, 19 nt, Artificial Sequence
  Description of Artificial Sequence: Synthetic oligonucleotide
gccgcccaggagcuucccc

SEQ ID NO: 2339830 - RNA, 19 nt, Artificial Sequence
  Description of Artificial Sequence: Synthetic oligonucleotide
cuugggccgcuugaucugu

SEQ ID NO: 2339831 - RNA, 19 nt, Artificial Sequence
  Description of Artificial Sequence: Synthetic oligonucleotide
aggugagggcugaggcuaa

SEQ ID NO: 2339832 - RNA, 19 nt, Artificial Sequence
  Description of Artificial Sequence: Synthetic oligonucleotide
gcuagccagcugaguccgg

SEQ ID NO: 2339833 - RNA, 19 nt, Artificial Sequence
  Description of Artificial Sequence: Synthetic oligonucleotide
ccucacggccgcccaggag

SEQ ID NO: 2339834 - RNA, 19 nt, Artificial Sequence
  Description of Artificial Sequence: Synthetic oligonucleotide
gggcggcccauaccggaca

SEQ ID NO: 2339835 - RNA, 19 nt, Artificial Sequence
  Description of Artificial Sequence: Synthetic oligonucleotide
ggugagggcugaggcuaac

SEQ ID NO: 2339836 - RNA, 19 nt, Artificial Sequence
  Description of Artificial Sequence: Synthetic oligonucleotide
gcgcuugggccgcuugauc

SEQ ID NO: 2339837 - RNA, 19 nt, Artificial Sequence
  Description of Artificial Sequence: Synthetic oligonucleotide
cagcugcagcccaucuugu

SEQ ID NO: 2339838 - RNA, 19 nt, Artificial Sequence
  Description of Artificial Sequence: Synthetic oligonucleotide
ggugucugggaagguccaa

SEQ ID NO: 2339839 - RNA, 19 nt, Artificial Sequence
  Description of Artificial Sequence: Synthetic oligonucleotide
ggggcggcccauaccggac

SEQ ID NO: 2339840 - RNA, 19 nt, Artificial Sequence
  Description of Artificial Sequence: Synthetic oligonucleotide
ccuggggaguguacccaga

SEQ ID NO: 2339841 - RNA, 19 nt, Artificial Sequence
  Description of Artificial Sequence: Synthetic oligonucleotide
ggcggcccauaccggacaa

SEQ ID NO: 2339842 - RNA, 19 nt, Artificial Sequence
  Description of Artificial Sequence: Synthetic oligonucleotide
cccgugcggucacccacag

SEQ ID NO: 2339843 - RNA, 19 nt, Artificial Sequence
  Description of Artificial Sequence: Synthetic oligonucleotide
ggccccugcuuaucagucu

SEQ ID NO: 2339844 - RNA, 19 nt, Artificial Sequence
  Description of Artificial Sequence: Synthetic oligonucleotide
gcagcucgugagugaggaa

SEQ ID NO: 2339845 - RNA, 19 nt, Artificial Sequence
  Description of Artificial Sequence: Synthetic oligonucleotide
ccagauccucacggccgcc

SEQ ID NO: 2339846 - RNA, 19 nt, Artificial Sequence
  Description of Artificial Sequence: Synthetic oligonucleotide
gccccugcuuaucagucuu

SEQ ID NO: 2339847 - RNA, 19 nt, Artificial Sequence
  Description of Artificial Sequence: Synthetic oligonucleotide
gcugguggccccugcuuau

SEQ ID NO: 2339848 - RNA, 19 nt, Artificial Sequence
  Description of Artificial Sequence: Synthetic oligonucleotide
gcacccggggaugagcagu

SEQ ID NO: 2339849 - RNA, 19 nt, Artificial Sequence
  Description of Artificial Sequence: Synthetic oligonucleotide
gggcacuagccugaugaau

SEQ ID NO: 2339850 - RNA, 19 nt, Artificial Sequence
  Description of Artificial Sequence: Synthetic oligonucleotide
gcggcccauaccggacaag

SEQ ID NO: 2339851 - RNA, 19 nt, Artificial Sequence
  Description of Artificial Sequence: Synthetic oligonucleotide
ccgcccaggagcuuccccu

SEQ ID NO: 2339852 - RNA, 19 nt, Artificial Sequence
  Description of Artificial Sequence: Synthetic oligonucleotide
gcgucucaggguccuugua

SEQ ID NO: 2339853 - RNA, 19 nt, Artificial Sequence
  Description of Artificial Sequence: Synthetic oligonucleotide
gagcuuccccuuggccaua

SEQ ID NO: 2339854 - RNA, 19 nt, Artificial Sequence
  Description of Artificial Sequence: Synthetic oligonucleotide
acccagcgccagggagaag

SEQ ID NO: 2339855 - RNA, 19 nt, Artificial Sequence
  Description of Artificial Sequence: Synthetic oligonucleotide
gcagcccaucuuguggggu

SEQ ID NO: 2339856 - RNA, 19 nt, Artificial Sequence
  Description of Artificial Sequence: Synthetic oligonucleotide
ccggacaaggccggggaua

SEQ ID NO: 2339857 - RNA, 19 nt, Artificial Sequence
  Description of Artificial Sequence: Synthetic oligonucleotide
cccugaggucugaccuuga

SEQ ID NO: 2339858 - RNA, 19 nt, Artificial Sequence
  Description of Artificial Sequence: Synthetic oligonucleotide
ggcgcuugggccgcuugau

SEQ ID NO: 2339859 - RNA, 19 nt, Artificial Sequence
  Description of Artificial Sequence: Synthetic oligonucleotide
gcccaucuuguggggucca

SEQ ID NO: 2339860 - RNA, 19 nt, Artificial Sequence
  Description of Artificial Sequence: Synthetic oligonucleotide
cgggcacuagccugaugaa

SEQ ID NO: 2339861 - RNA, 19 nt, Artificial Sequence
  Description of Artificial Sequence: Synthetic oligonucleotide
cagcgccagggagaaggau

SEQ ID NO: 2339862 - RNA, 19 nt, Artificial Sequence
  Description of Artificial Sequence: Synthetic oligonucleotide
caacgggcacuagccugau

SEQ ID NO: 2339863 - RNA, 19 nt, Artificial Sequence
  Description of Artificial Sequence: Synthetic oligonucleotide
caguaccugcagggaugcu

SEQ ID NO: 2339864 - RNA, 19 nt, Artificial Sequence
  Description of Artificial Sequence: Synthetic oligonucleotide
gucugaccuugaagccuuu

SEQ ID NO: 2339865 - RNA, 19 nt, Artificial Sequence
  Description of Artificial Sequence: Synthetic oligonucleotide
caagcgucucaggguccuu

SEQ ID NO: 2339866 - RNA, 19 nt, Artificial Sequence
  Description of Artificial Sequence: Synthetic oligonucleotide
cggcugccccaccuuccca

SEQ ID NO: 2339867 - RNA, 19 nt, Artificial Sequence
  Description of Artificial Sequence: Synthetic oligonucleotide
ccgugcggucacccacagu

SEQ ID NO: 2339868 - RNA, 19 nt, Artificial Sequence
  Description of Artificial Sequence: Synthetic oligonucleotide
guccggcgcuugggccgcu

SEQ ID NO: 2339869 - RNA, 19 nt, Artificial Sequence
  Description of Artificial Sequence: Synthetic oligonucleotide
cacggccgcccaggagcuu

SEQ ID NO: 2339870 - RNA, 19 nt, Artificial Sequence
  Description of Artificial Sequence: Synthetic oligonucleotide
ggccggggauaggcuccau

SEQ ID NO: 2339871 - RNA, 19 nt, Artificial Sequence
  Description of Artificial Sequence: Synthetic oligonucleotide
aauaccacaagucaugugg

SEQ ID NO: 2339872 - RNA, 19 nt, Artificial Sequence
  Description of Artificial Sequence: Synthetic oligonucleotide
aaaaguuuggcuuucagca

SEQ ID NO: 2339873 - RNA, 19 nt, Artificial Sequence
  Description of Artificial Sequence: Synthetic oligonucleotide
uuaaauaauguuauuugag

SEQ ID NO: 2339874 - RNA, 19 nt, Artificial Sequence
  Description of Artificial Sequence: Synthetic oligonucleotide
cuuauuaacacaaugcgac

SEQ ID NO: 2339875 - RNA, 19 nt, Artificial Sequence
  Description of Artificial Sequence: Synthetic oligonucleotide
aaauaauguuauuugagca

SEQ ID NO: 2339876 - RNA, 19 nt, Artificial Sequence
  Description of Artificial Sequence: Synthetic oligonucleotide
aaugcgaccaaucccaguc

SEQ ID NO: 2339877 - RNA, 19 nt, Artificial Sequence
  Description of Artificial Sequence: Synthetic oligonucleotide
aaccuugaaggucuaagcc

SEQ ID NO: 2339878 - RNA, 19 nt, Artificial Sequence
  Description of Artificial Sequence: Synthetic oligonucleotide
uccuuauuaacacaaugcg

SEQ ID NO: 2339879 - RNA, 19 nt, Artificial Sequence
  Description of Artificial Sequence: Synthetic oligonucleotide
uauuugagcauaaaauucc

SEQ ID NO: 2339880 - RNA, 19 nt, Artificial Sequence
  Description of Artificial Sequence: Synthetic oligonucleotide
ugaaauaggauuuauuuaa

SEQ ID NO: 2339881 - RNA, 19 nt, Artificial Sequence
  Description of Artificial Sequence: Synthetic oligonucleotide
auaaaauucccuuuaaccu

SEQ ID NO: 2339882 - RNA, 19 nt, Artificial Sequence
  Description of Artificial Sequence: Synthetic oligonucleotide
aaaaucguaaacaucaaug

SEQ ID NO: 2339883 - RNA, 19 nt, Artificial Sequence
  Description of Artificial Sequence: Synthetic oligonucleotide
aaaucguaaacaucaauga

SEQ ID NO: 2339884 - RNA, 19 nt, Artificial Sequence
  Description of Artificial Sequence: Synthetic oligonucleotide
uuuguaguguuacugagug

SEQ ID NO: 2339885 - RNA, 19 nt, Artificial Sequence
  Description of Artificial Sequence: Synthetic oligonucleotide
uaugagacaguuuucaaca

SEQ ID NO: 2339886 - RNA, 19 nt, Artificial Sequence
  Description of Artificial Sequence: Synthetic oligonucleotide
gaaucgacaacacucaagc

SEQ ID NO: 2339887 - RNA, 19 nt, Artificial Sequence
  Description of Artificial Sequence: Synthetic oligonucleotide
acagaugugauaugugugc

SEQ ID NO: 2339888 - RNA, 19 nt, Artificial Sequence
  Description of Artificial Sequence: Synthetic oligonucleotide
aggguaacaagacacuucc

SEQ ID NO: 2339889 - RNA, 19 nt, Artificial Sequence
  Description of Artificial Sequence: Synthetic oligonucleotide
cauagaaucgacaacacuc

SEQ ID NO: 2339890 - RNA, 19 nt, Artificial Sequence
  Description of Artificial Sequence: Synthetic oligonucleotide
uuccuuauuaacacaaugc

SEQ ID NO: 2339891 - RNA, 19 nt, Artificial Sequence
  Description of Artificial Sequence: Synthetic oligonucleotide
uuauuugagcauaaaauuc

SEQ ID NO: 2339892 - RNA, 19 nt, Artificial Sequence
  Description of Artificial Sequence: Synthetic oligonucleotide
uguaguguuacugagugag

SEQ ID NO: 2339893 - RNA, 19 nt, Artificial Sequence
  Description of Artificial Sequence: Synthetic oligonucleotide
aggucuaagccccucaugc

SEQ ID NO: 2339894 - RNA, 19 nt, Artificial Sequence
  Description of Artificial Sequence: Synthetic oligonucleotide
uucagcauuuuaaauaaug

SEQ ID NO: 2339895 - RNA, 19 nt, Artificial Sequence
  Description of Artificial Sequence: Synthetic oligonucleotide
uauuuugugaccgaaggcc

SEQ ID NO: 2339896 - RNA, 19 nt, Artificial Sequence
  Description of Artificial Sequence: Synthetic oligonucleotide
aacagaggucuaucaaucc

SEQ ID NO: 2339897 - RNA, 19 nt, Artificial Sequence
  Description of Artificial Sequence: Synthetic oligonucleotide
ucguaaacaucaaugaaca

SEQ ID NO: 2339898 - RNA, 19 nt, Artificial Sequence
  Description of Artificial Sequence: Synthetic oligonucleotide
aucaccaucaccucagaac

SEQ ID NO: 2339899 - RNA, 19 nt, Artificial Sequence
  Description of Artificial Sequence: Synthetic oligonucleotide
accaaucccagucuggugc

SEQ ID NO: 2339900 - RNA, 19 nt, Artificial Sequence
  Description of Artificial Sequence: Synthetic oligonucleotide
acgggaauuaacuaucaac

SEQ ID NO: 2339901 - RNA, 19 nt, Artificial Sequence
  Description of Artificial Sequence: Synthetic oligonucleotide
uuccaggcaauuuuaacgg

SEQ ID NO: 2339902 - RNA, 19 nt, Artificial Sequence
  Description of Artificial Sequence: Synthetic oligonucleotide
aauguucauacccugcuga

SEQ ID NO: 2339903 - RNA, 19 nt, Artificial Sequence
  Description of Artificial Sequence: Synthetic oligonucleotide
ucagaaauauuaaaaucgu

SEQ ID NO: 2339904 - RNA, 19 nt, Artificial Sequence
  Description of Artificial Sequence: Synthetic oligonucleotide
ugugauaugugugccaugg

SEQ ID NO: 2339905 - RNA, 19 nt, Artificial Sequence
  Description of Artificial Sequence: Synthetic oligonucleotide
cagguuaucagcugaaagg

SEQ ID NO: 2339906 - RNA, 19 nt, Artificial Sequence
  Description of Artificial Sequence: Synthetic oligonucleotide
aucguaaacaucaaugaac

SEQ ID NO: 2339907 - RNA, 19 nt, Artificial Sequence
  Description of Artificial Sequence: Synthetic oligonucleotide
aaucgacaacacucaagcc

SEQ ID NO: 2339908 - RNA, 19 nt, Artificial Sequence
  Description of Artificial Sequence: Synthetic oligonucleotide
aagccuugcaucauagugc

SEQ ID NO: 2339909 - RNA, 19 nt, Artificial Sequence
  Description of Artificial Sequence: Synthetic oligonucleotide
uuuaacgggaauuaacuau

SEQ ID NO: 2339910 - RNA, 19 nt, Artificial Sequence
  Description of Artificial Sequence: Synthetic oligonucleotide
ucaccaucaccucagaaca

SEQ ID NO: 2339911 - RNA, 19 nt, Artificial Sequence
  Description of Artificial Sequence: Synthetic oligonucleotide
gaagccuugcaucauagug

SEQ ID NO: 2339912 - RNA, 19 nt, Artificial Sequence
  Description of Artificial Sequence: Synthetic oligonucleotide
uguauuugacauuuguagu

SEQ ID NO: 2339913 - RNA, 19 nt, Artificial Sequence
  Description of Artificial Sequence: Synthetic oligonucleotide
ugugccauggacagaacag

SEQ ID NO: 2339914 - RNA, 19 nt, Artificial Sequence
  Description of Artificial Sequence: Synthetic oligonucleotide
guauuugacauuuguagug

SEQ ID NO: 2339915 - RNA, 19 nt, Artificial Sequence
  Description of Artificial Sequence: Synthetic oligonucleotide
aguuauaggguauuuugug

SEQ ID NO: 2339916 - RNA, 19 nt, Artificial Sequence
  Description of Artificial Sequence: Synthetic oligonucleotide
ucuguguugaaauaggauu

SEQ ID NO: 2339917 - RNA, 19 nt, Artificial Sequence
  Description of Artificial Sequence: Synthetic oligonucleotide
auugcauagaaucgacaac

SEQ ID NO: 2339918 - RNA, 19 nt, Artificial Sequence
  Description of Artificial Sequence: Synthetic oligonucleotide
ucagguuaucagcugaaag

SEQ ID NO: 2339919 - RNA, 19 nt, Artificial Sequence
  Description of Artificial Sequence: Synthetic oligonucleotide
uuuaaggcaaaguuguguc

SEQ ID NO: 2339920 - RNA, 19 nt, Artificial Sequence
  Description of Artificial Sequence: Synthetic oligonucleotide
uucuuuugcuaugagacag

SEQ ID NO: 2339921 - RNA, 19 nt, Artificial Sequence
  Description of Artificial Sequence: Synthetic oligonucleotide
uuauaggguauuuugugac

SEQ ID NO: 2339922 - RNA, 19 nt, Artificial Sequence
  Description of Artificial Sequence: Synthetic oligonucleotide
ucagcugaauaccacaagu

SEQ ID NO: 2339923 - RNA, 19 nt, Artificial Sequence
  Description of Artificial Sequence: Synthetic oligonucleotide
aucgacaacacucaagccu

SEQ ID NO: 2339924 - RNA, 19 nt, Artificial Sequence
  Description of Artificial Sequence: Synthetic oligonucleotide
uaacaagacacuuccauuc

SEQ ID NO: 2339925 - RNA, 19 nt, Artificial Sequence
  Description of Artificial Sequence: Synthetic oligonucleotide
uuaaaaguuuggcuuucag

SEQ ID NO: 2339926 - RNA, 19 nt, Artificial Sequence
  Description of Artificial Sequence: Synthetic oligonucleotide
uuaacgggaauuaacuauc

SEQ ID NO: 2339927 - RNA, 19 nt, Artificial Sequence
  Description of Artificial Sequence: Synthetic oligonucleotide
agccuugcaucauagugcc

SEQ ID NO: 2339928 - RNA, 19 nt, Artificial Sequence
  Description of Artificial Sequence: Synthetic oligonucleotide
ccaucuuagaacaugaagc

SEQ ID NO: 2339929 - RNA, 19 nt, Artificial Sequence
  Description of Artificial Sequence: Synthetic oligonucleotide
auaugugugccauggacag

SEQ ID NO: 2339930 - RNA, 19 nt, Artificial Sequence
  Description of Artificial Sequence: Synthetic oligonucleotide
aaucguaaacaucaaugaa

SEQ ID NO: 2339931 - RNA, 19 nt, Artificial Sequence
  Description of Artificial Sequence: Synthetic oligonucleotide
uguaacggccuucagaaau

SEQ ID NO: 2339932 - RNA, 19 nt, Artificial Sequence
  Description of Artificial Sequence: Synthetic oligonucleotide
uugcauagaaucgacaaca

SEQ ID NO: 2339933 - RNA, 19 nt, Artificial Sequence
  Description of Artificial Sequence: Synthetic oligonucleotide
acuguaacggccuucagaa

SEQ ID NO: 2339934 - RNA, 19 nt, Artificial Sequence
  Description of Artificial Sequence: Synthetic oligonucleotide
ugaaauguucauacccugc

SEQ ID NO: 2339935 - RNA, 19 nt, Artificial Sequence
  Description of Artificial Sequence: Synthetic oligonucleotide
uggacuguuaacuggugag

SEQ ID NO: 2339936 - RNA, 19 nt, Artificial Sequence
  Description of Artificial Sequence: Synthetic oligonucleotide
uuaaccuugaaggucuaag

SEQ ID NO: 2339937 - RNA, 19 nt, Artificial Sequence
  Description of Artificial Sequence: Synthetic oligonucleotide
agguuaucagcugaaaggg

SEQ ID NO: 2339938 - RNA, 19 nt, Artificial Sequence
  Description of Artificial Sequence: Synthetic oligonucleotide
ugcucuuuaaggcaaaguu

SEQ ID NO: 2339939 - RNA, 19 nt, Artificial Sequence
  Description of Artificial Sequence: Synthetic oligonucleotide
uuauuaacacaaugcgacc

SEQ ID NO: 2339940 - RNA, 19 nt, Artificial Sequence
  Description of Artificial Sequence: Synthetic oligonucleotide
ugaccgaaggccuucagca

SEQ ID NO: 2339941 - RNA, 19 nt, Artificial Sequence
  Description of Artificial Sequence: Synthetic oligonucleotide
uaaaauucccuuuaaccuu

SEQ ID NO: 2339942 - RNA, 19 nt, Artificial Sequence
  Description of Artificial Sequence: Synthetic oligonucleotide
acaagacacuuccauuccc

SEQ ID NO: 2339943 - RNA, 19 nt, Artificial Sequence
  Description of Artificial Sequence: Synthetic oligonucleotide
auuuuaacgggaauuaacu

SEQ ID NO: 2339944 - RNA, 19 nt, Artificial Sequence
  Description of Artificial Sequence: Synthetic oligonucleotide
aaauguucauacccugcug

SEQ ID NO: 2339945 - RNA, 19 nt, Artificial Sequence
  Description of Artificial Sequence: Synthetic oligonucleotide
auuugagcauaaaauuccc

SEQ ID NO: 2339946 - RNA, 19 nt, Artificial Sequence
  Description of Artificial Sequence: Synthetic oligonucleotide
cuaugagacaguuuucaac

SEQ ID NO: 2339947 - RNA, 19 nt, Artificial Sequence
  Description of Artificial Sequence: Synthetic oligonucleotide
uagaaagcccaucuuagaa

SEQ ID NO: 2339948 - RNA, 19 nt, Artificial Sequence
  Description of Artificial Sequence: Synthetic oligonucleotide
uaaccuugaaggucuaagc

SEQ ID NO: 2339949 - RNA, 19 nt, Artificial Sequence
  Description of Artificial Sequence: Synthetic oligonucleotide
aaaauucccuuuaaccuug

SEQ ID NO: 2339950 - RNA, 19 nt, Artificial Sequence
  Description of Artificial Sequence: Synthetic oligonucleotide
auaggguauuuugugaccg

SEQ ID NO: 2339951 - RNA, 19 nt, Artificial Sequence
  Description of Artificial Sequence: Synthetic oligonucleotide
acuguuaacuggugagugg

SEQ ID NO: 2339952 - RNA, 19 nt, Artificial Sequence
  Description of Artificial Sequence: Synthetic oligonucleotide
uaaaaucguaaacaucaau

SEQ ID NO: 2339953 - RNA, 19 nt, Artificial Sequence
  Description of Artificial Sequence: Synthetic oligonucleotide
uauacuggccacaaacaaa

SEQ ID NO: 2339954 - RNA, 19 nt, Artificial Sequence
  Description of Artificial Sequence: Synthetic oligonucleotide
uccacggauagaaagccca

SEQ ID NO: 2339955 - RNA, 19 nt, Artificial Sequence
  Description of Artificial Sequence: Synthetic oligonucleotide
agcugaauaccacaaguca

SEQ ID NO: 2339956 - RNA, 19 nt, Artificial Sequence
  Description of Artificial Sequence: Synthetic oligonucleotide
uauaggguauuuugugacc

SEQ ID NO: 2339957 - RNA, 19 nt, Artificial Sequence
  Description of Artificial Sequence: Synthetic oligonucleotide
ugagagaucaacagagcau

SEQ ID NO: 2339958 - RNA, 19 nt, Artificial Sequence
  Description of Artificial Sequence: Synthetic oligonucleotide
uaguguuacugagugagag

SEQ ID NO: 2339959 - RNA, 19 nt, Artificial Sequence
  Description of Artificial Sequence: Synthetic oligonucleotide
cugaauaccacaagucaug

SEQ ID NO: 2339960 - RNA, 19 nt, Artificial Sequence
  Description of Artificial Sequence: Synthetic oligonucleotide
cuuccuuauuaacacaaug

SEQ ID NO: 2339961 - RNA, 19 nt, Artificial Sequence
  Description of Artificial Sequence: Synthetic oligonucleotide
aacagagcauccccuaaca

SEQ ID NO: 2339962 - RNA, 19 nt, Artificial Sequence
  Description of Artificial Sequence: Synthetic oligonucleotide
aucaaugaacacucuaagu

SEQ ID NO: 2339963 - RNA, 19 nt, Artificial Sequence
  Description of Artificial Sequence: Synthetic oligonucleotide
caucaaugaacacucuaag

SEQ ID NO: 2339964 - RNA, 19 nt, Artificial Sequence
  Description of Artificial Sequence: Synthetic oligonucleotide
cagagcauccccuaacacc

SEQ ID NO: 2339965 - RNA, 19 nt, Artificial Sequence
  Description of Artificial Sequence: Synthetic oligonucleotide
uugagcauaaaauucccuu

SEQ ID NO: 2339966 - RNA, 19 nt, Artificial Sequence
  Description of Artificial Sequence: Synthetic oligonucleotide
ucaauccugcauugcauag

SEQ ID NO: 2339967 - RNA, 19 nt, Artificial Sequence
  Description of Artificial Sequence: Synthetic oligonucleotide
ugcaucucucuacugaagu

SEQ ID NO: 2339968 - RNA, 19 nt, Artificial Sequence
  Description of Artificial Sequence: Synthetic oligonucleotide
aacaauuucuguguugaaa

SEQ ID NO: 2339969 - RNA, 19 nt, Artificial Sequence
  Description of Artificial Sequence: Synthetic oligonucleotide
auuucuguguugaaauagg

SEQ ID NO: 2339970 - RNA, 19 nt, Artificial Sequence
  Description of Artificial Sequence: Synthetic oligonucleotide
aacagaugugauaugugug

SEQ ID NO: 2339971 - RNA, 19 nt, Artificial Sequence
  Description of Artificial Sequence: Synthetic oligonucleotide
uuccgugugggucuccacg

SEQ ID NO: 2339972 - RNA, 19 nt, Artificial Sequence
  Description of Artificial Sequence: Synthetic oligonucleotide
uggugagugguuucgagga

SEQ ID NO: 2339973 - RNA, 19 nt, Artificial Sequence
  Description of Artificial Sequence: Synthetic oligonucleotide
ucaguucuuguauuugaca

SEQ ID NO: 2339974 - RNA, 19 nt, Artificial Sequence
  Description of Artificial Sequence: Synthetic oligonucleotide
uugacauuuguaguguuac

SEQ ID NO: 2339975 - RNA, 19 nt, Artificial Sequence
  Description of Artificial Sequence: Synthetic oligonucleotide
guugaaauaggauuuauuu

SEQ ID NO: 2339976 - RNA, 19 nt, Artificial Sequence
  Description of Artificial Sequence: Synthetic oligonucleotide
agaacagaggucuaucaau

SEQ ID NO: 2339977 - RNA, 19 nt, Artificial Sequence
  Description of Artificial Sequence: Synthetic oligonucleotide
ucuggugcucuuuaaggca

SEQ ID NO: 2339978 - RNA, 19 nt, Artificial Sequence
  Description of Artificial Sequence: Synthetic oligonucleotide
uuaaaaucguaaacaucaa

SEQ ID NO: 2339979 - RNA, 19 nt, Artificial Sequence
  Description of Artificial Sequence: Synthetic oligonucleotide
uauccaggccacuguaacg

SEQ ID NO: 2339980 - RNA, 19 nt, Artificial Sequence
  Description of Artificial Sequence: Synthetic oligonucleotide
uuccauucccuauacuggc

SEQ ID NO: 2339981 - RNA, 19 nt, Artificial Sequence
  Description of Artificial Sequence: Synthetic oligonucleotide
uucaacaauuucuguguug

SEQ ID NO: 2339982 - RNA, 19 nt, Artificial Sequence
  Description of Artificial Sequence: Synthetic oligonucleotide
ugugggucuccacggauag

SEQ ID NO: 2339983 - RNA, 19 nt, Artificial Sequence
  Description of Artificial Sequence: Synthetic oligonucleotide
uuuuaacgggaauuaacua

SEQ ID NO: 2339984 - RNA, 19 nt, Artificial Sequence
  Description of Artificial Sequence: Synthetic oligonucleotide
guuauaggguauuuuguga

SEQ ID NO: 2339985 - RNA, 19 nt, Artificial Sequence
  Description of Artificial Sequence: Synthetic oligonucleotide
uauuugacauuuguagugu

SEQ ID NO: 2339986 - RNA, 19 nt, Artificial Sequence
  Description of Artificial Sequence: Synthetic oligonucleotide
acggauagaaagcccaucu

SEQ ID NO: 2339987 - RNA, 19 nt, Artificial Sequence
  Description of Artificial Sequence: Synthetic oligonucleotide
acaacacucaagccuuccg

SEQ ID NO: 2339988 - RNA, 19 nt, Artificial Sequence
  Description of Artificial Sequence: Synthetic oligonucleotide
uguugaaauaggauuuauu

SEQ ID NO: 2339989 - RNA, 19 nt, Artificial Sequence
  Description of Artificial Sequence: Synthetic oligonucleotide
guauuuugugaccgaaggc

SEQ ID NO: 2339990 - RNA, 19 nt, Artificial Sequence
  Description of Artificial Sequence: Synthetic oligonucleotide
cacaaugcgaccaauccca

SEQ ID NO: 2339991 - RNA, 19 nt, Artificial Sequence
  Description of Artificial Sequence: Synthetic oligonucleotide
uuaucagcugaaaggguaa

SEQ ID NO: 2339992 - RNA, 19 nt, Artificial Sequence
  Description of Artificial Sequence: Synthetic oligonucleotide
ugagcauaaaauucccuuu

SEQ ID NO: 2339993 - RNA, 19 nt, Artificial Sequence
  Description of Artificial Sequence: Synthetic oligonucleotide
ugcaucauagugccuccag

SEQ ID NO: 2339994 - RNA, 19 nt, Artificial Sequence
  Description of Artificial Sequence: Synthetic oligonucleotide
ugcauugcauagaaucgac

SEQ ID NO: 2339995 - RNA, 19 nt, Artificial Sequence
  Description of Artificial Sequence: Synthetic oligonucleotide
guaaacaucaaugaacacu

SEQ ID NO: 2339996 - RNA, 19 nt, Artificial Sequence
  Description of Artificial Sequence: Synthetic oligonucleotide
gagucuugcaucucucuac

SEQ ID NO: 2339997 - RNA, 19 nt, Artificial Sequence
  Description of Artificial Sequence: Synthetic oligonucleotide
ucuuuaaggcaaaguugug

SEQ ID NO: 2339998 - RNA, 19 nt, Artificial Sequence
  Description of Artificial Sequence: Synthetic oligonucleotide
aggucuaucaauccugcau

SEQ ID NO: 2339999 - RNA, 19 nt, Artificial Sequence
  Description of Artificial Sequence: Synthetic oligonucleotide
ucgacaacacucaagccuu

SEQ ID NO: 2340000 - RNA, 19 nt, Artificial Sequence
  Description of Artificial Sequence: Synthetic oligonucleotide
cauugcauagaaucgacaa

SEQ ID NO: 2340001 - RNA, 19 nt, Artificial Sequence
  Description of Artificial Sequence: Synthetic oligonucleotide
acagaggucuaucaauccu

SEQ ID NO: 2340002 - RNA, 19 nt, Artificial Sequence
  Description of Artificial Sequence: Synthetic oligonucleotide
uaucaauccugcauugcau

SEQ ID NO: 2340003 - RNA, 19 nt, Artificial Sequence
  Description of Artificial Sequence: Synthetic oligonucleotide
uccaggcaauuuuaacggg

SEQ ID NO: 2340004 - RNA, 19 nt, Artificial Sequence
  Description of Artificial Sequence: Synthetic oligonucleotide
cuggugagugguuucgagg

SEQ ID NO: 2340005 - RNA, 19 nt, Artificial Sequence
  Description of Artificial Sequence: Synthetic oligonucleotide
cuuagaacaugaagccuug

SEQ ID NO: 2340006 - RNA, 19 nt, Artificial Sequence
  Description of Artificial Sequence: Synthetic oligonucleotide
uaacgggaauuaacuauca

SEQ ID NO: 2340007 - RNA, 19 nt, Artificial Sequence
  Description of Artificial Sequence: Synthetic oligonucleotide
acagaacagaggucuauca

SEQ ID NO: 2340008 - RNA, 19 nt, Artificial Sequence
  Description of Artificial Sequence: Synthetic oligonucleotide
agaggucuaucaauccugc

SEQ ID NO: 2340009 - RNA, 19 nt, Artificial Sequence
  Description of Artificial Sequence: Synthetic oligonucleotide
uccgugugggucuccacgg

SEQ ID NO: 2340010 - RNA, 19 nt, Artificial Sequence
  Description of Artificial Sequence: Synthetic oligonucleotide
auagaaagcccaucuuaga

SEQ ID NO: 2340011 - RNA, 19 nt, Artificial Sequence
  Description of Artificial Sequence: Synthetic oligonucleotide
agcugaaaggguaacaaga

SEQ ID NO: 2340012 - RNA, 19 nt, Artificial Sequence
  Description of Artificial Sequence: Synthetic oligonucleotide
gaacagaugugauaugugu

SEQ ID NO: 2340013 - RNA, 19 nt, Artificial Sequence
  Description of Artificial Sequence: Synthetic oligonucleotide
ugcauagaaucgacaacac

SEQ ID NO: 2340014 - RNA, 19 nt, Artificial Sequence
  Description of Artificial Sequence: Synthetic oligonucleotide
caagucaugugggaguugc

SEQ ID NO: 2340015 - RNA, 19 nt, Artificial Sequence
  Description of Artificial Sequence: Synthetic oligonucleotide
uaacacaaugcgaccaauc

SEQ ID NO: 2340016 - RNA, 19 nt, Artificial Sequence
  Description of Artificial Sequence: Synthetic oligonucleotide
ucagcugaaaggguaacaa

SEQ ID NO: 2340017 - RNA, 19 nt, Artificial Sequence
  Description of Artificial Sequence: Synthetic oligonucleotide
cagaggucuaucaauccug

SEQ ID NO: 2340018 - RNA, 19 nt, Artificial Sequence
  Description of Artificial Sequence: Synthetic oligonucleotide
cucuuuaaggcaaaguugu

SEQ ID NO: 2340019 - RNA, 19 nt, Artificial Sequence
  Description of Artificial Sequence: Synthetic oligonucleotide
auagaaucgacaacacuca

SEQ ID NO: 2340020 - RNA, 19 nt, Artificial Sequence
  Description of Artificial Sequence: Synthetic oligonucleotide
uuucgaggagucuugcauc

SEQ ID NO: 2340021 - RNA, 19 nt, Artificial Sequence
  Description of Artificial Sequence: Synthetic oligonucleotide
auaauguuauuugagcaua

SEQ ID NO: 2340022 - RNA, 19 nt, Artificial Sequence
  Description of Artificial Sequence: Synthetic oligonucleotide
uccccuaacaccucaucac

SEQ ID NO: 2340023 - RNA, 19 nt, Artificial Sequence
  Description of Artificial Sequence: Synthetic oligonucleotide
ugaaggucuaagccccuca

SEQ ID NO: 2340024 - RNA, 19 nt, Artificial Sequence
  Description of Artificial Sequence: Synthetic oligonucleotide
aguugugucaguucuugua

SEQ ID NO: 2340025 - RNA, 19 nt, Artificial Sequence
  Description of Artificial Sequence: Synthetic oligonucleotide
gaacagaggucuaucaauc

SEQ ID NO: 2340026 - RNA, 19 nt, Artificial Sequence
  Description of Artificial Sequence: Synthetic oligonucleotide
auguucauacccugcugag

SEQ ID NO: 2340027 - RNA, 19 nt, Artificial Sequence
  Description of Artificial Sequence: Synthetic oligonucleotide
ucuaucaauccugcauugc

SEQ ID NO: 2340028 - RNA, 19 nt, Artificial Sequence
  Description of Artificial Sequence: Synthetic oligonucleotide
aaugaacacucuaagucuu

SEQ ID NO: 2340029 - RNA, 19 nt, Artificial Sequence
  Description of Artificial Sequence: Synthetic oligonucleotide
auacccugcugagugaggg

SEQ ID NO: 2340030 - RNA, 19 nt, Artificial Sequence
  Description of Artificial Sequence: Synthetic oligonucleotide
ccaguuauaggguauuuug

SEQ ID NO: 2340031 - RNA, 19 nt, Artificial Sequence
  Description of Artificial Sequence: Synthetic oligonucleotide
uggucuggacuguuaacug

SEQ ID NO: 2340032 - RNA, 19 nt, Artificial Sequence
  Description of Artificial Sequence: Synthetic oligonucleotide
cuaucaauccugcauugca

SEQ ID NO: 2340033 - RNA, 19 nt, Artificial Sequence
  Description of Artificial Sequence: Synthetic oligonucleotide
aguguuacugagugagaga

SEQ ID NO: 2340034 - RNA, 19 nt, Artificial Sequence
  Description of Artificial Sequence: Synthetic oligonucleotide
agaaucgacaacacucaag

SEQ ID NO: 2340035 - RNA, 19 nt, Artificial Sequence
  Description of Artificial Sequence: Synthetic oligonucleotide
uugcaucucucuacugaag

SEQ ID NO: 2340036 - RNA, 19 nt, Artificial Sequence
  Description of Artificial Sequence: Synthetic oligonucleotide
agucuugcaucucucuacu

SEQ ID NO: 2340037 - RNA, 19 nt, Artificial Sequence
  Description of Artificial Sequence: Synthetic oligonucleotide
ucaugugggaguugccaca

SEQ ID NO: 2340038 - RNA, 19 nt, Artificial Sequence
  Description of Artificial Sequence: Synthetic oligonucleotide
auacuggccacaaacaaaa

SEQ ID NO: 2340039 - RNA, 19 nt, Artificial Sequence
  Description of Artificial Sequence: Synthetic oligonucleotide
acucaagccuuccgugugg

SEQ ID NO: 2340040 - RNA, 19 nt, Artificial Sequence
  Description of Artificial Sequence: Synthetic oligonucleotide
auccccuaacaccucauca

SEQ ID NO: 2340041 - RNA, 19 nt, Artificial Sequence
  Description of Artificial Sequence: Synthetic oligonucleotide
acaucaaugaacacucuaa

SEQ ID NO: 2340042 - RNA, 19 nt, Artificial Sequence
  Description of Artificial Sequence: Synthetic oligonucleotide
cuugcaucauagugccucc

SEQ ID NO: 2340043 - RNA, 19 nt, Artificial Sequence
  Description of Artificial Sequence: Synthetic oligonucleotide
auaccacaagucauguggg

SEQ ID NO: 2340044 - RNA, 19 nt, Artificial Sequence
  Description of Artificial Sequence: Synthetic oligonucleotide
ucccuuuaaccuugaaggu

SEQ ID NO: 2340045 - RNA, 19 nt, Artificial Sequence
  Description of Artificial Sequence: Synthetic oligonucleotide
ggucuccacggauagaaag

SEQ ID NO: 2340046 - RNA, 19 nt, Artificial Sequence
  Description of Artificial Sequence: Synthetic oligonucleotide
agacugcugucuuucaggu

SEQ ID NO: 2340047 - RNA, 19 nt, Artificial Sequence
  Description of Artificial Sequence: Synthetic oligonucleotide
ccuugaaggucuaagcccc

SEQ ID NO: 2340048 - RNA, 19 nt, Artificial Sequence
  Description of Artificial Sequence: Synthetic oligonucleotide
aacgggaauuaacuaucaa

SEQ ID NO: 2340049 - RNA, 19 nt, Artificial Sequence
  Description of Artificial Sequence: Synthetic oligonucleotide
accacaagucaugugggag

SEQ ID NO: 2340050 - RNA, 19 nt, Artificial Sequence
  Description of Artificial Sequence: Synthetic oligonucleotide
cuuguauuugacauuugua

SEQ ID NO: 2340051 - RNA, 19 nt, Artificial Sequence
  Description of Artificial Sequence: Synthetic oligonucleotide
agaugugauaugugugcca

SEQ ID NO: 2340052 - RNA, 19 nt, Artificial Sequence
  Description of Artificial Sequence: Synthetic oligonucleotide
ugagugguuucgaggaguc

SEQ ID NO: 2340053 - RNA, 19 nt, Artificial Sequence
  Description of Artificial Sequence: Synthetic oligonucleotide
ucuaagccccucaugccuc

SEQ ID NO: 2340054 - RNA, 19 nt, Artificial Sequence
  Description of Artificial Sequence: Synthetic oligonucleotide
cagcugaauaccacaaguc

SEQ ID NO: 2340055 - RNA, 19 nt, Artificial Sequence
  Description of Artificial Sequence: Synthetic oligonucleotide
gucuaucaauccugcauug

SEQ ID NO: 2340056 - RNA, 19 nt, Artificial Sequence
  Description of Artificial Sequence: Synthetic oligonucleotide
ugcgaccaaucccagucug

SEQ ID NO: 2340057 - RNA, 19 nt, Artificial Sequence
  Description of Artificial Sequence: Synthetic oligonucleotide
ucuuccuuauuaacacaau

SEQ ID NO: 2340058 - RNA, 19 nt, Artificial Sequence
  Description of Artificial Sequence: Synthetic oligonucleotide
gagcauaaaauucccuuua

SEQ ID NO: 2340059 - RNA, 19 nt, Artificial Sequence
  Description of Artificial Sequence: Synthetic oligonucleotide
caaugaacacucuaagucu

SEQ ID NO: 2340060 - RNA, 19 nt, Artificial Sequence
  Description of Artificial Sequence: Synthetic oligonucleotide
ucuggacuguuaacuggug

SEQ ID NO: 2340061 - RNA, 19 nt, Artificial Sequence
  Description of Artificial Sequence: Synthetic oligonucleotide
gggaauuaacuaucaacac

SEQ ID NO: 2340062 - RNA, 19 nt, Artificial Sequence
  Description of Artificial Sequence: Synthetic oligonucleotide
ucaccucagaacagaugug

SEQ ID NO: 2340063 - RNA, 19 nt, Artificial Sequence
  Description of Artificial Sequence: Synthetic oligonucleotide
acggccuucagaaauauua

SEQ ID NO: 2340064 - RNA, 19 nt, Artificial Sequence
  Description of Artificial Sequence: Synthetic oligonucleotide
aucaauccugcauugcaua

SEQ ID NO: 2340065 - RNA, 19 nt, Artificial Sequence
  Description of Artificial Sequence: Synthetic oligonucleotide
cagcugaaaggguaacaag

SEQ ID NO: 2340066 - RNA, 19 nt, Artificial Sequence
  Description of Artificial Sequence: Synthetic oligonucleotide
auggugcuggggcucgccc

SEQ ID NO: 2340067 - RNA, 19 nt, Artificial Sequence
  Description of Artificial Sequence: Synthetic oligonucleotide
gacacuuccauucccuaua

SEQ ID NO: 2340068 - RNA, 19 nt, Artificial Sequence
  Description of Artificial Sequence: Synthetic oligonucleotide
uagaaucgacaacacucaa

SEQ ID NO: 2340069 - RNA, 19 nt, Artificial Sequence
  Description of Artificial Sequence: Synthetic oligonucleotide
acugagugagagaucaaca

SEQ ID NO: 2340070 - RNA, 19 nt, Artificial Sequence
  Description of Artificial Sequence: Synthetic oligonucleotide
auuuugugaccgaaggccu

SEQ ID NO: 2340071 - RNA, 19 nt, Artificial Sequence
  Description of Artificial Sequence: Synthetic oligonucleotide
cagaugugauaugugugcc

SEQ ID NO: 2340072 - RNA, 19 nt, Artificial Sequence
  Description of Artificial Sequence: Synthetic oligonucleotide
aagacacuuccauucccua

SEQ ID NO: 2340073 - RNA, 19 nt, Artificial Sequence
  Description of Artificial Sequence: Synthetic oligonucleotide
acacucaagccuuccgugu

SEQ ID NO: 2340074 - RNA, 19 nt, Artificial Sequence
  Description of Artificial Sequence: Synthetic oligonucleotide
agacuucugccgucuggac

SEQ ID NO: 2340075 - RNA, 19 nt, Artificial Sequence
  Description of Artificial Sequence: Synthetic oligonucleotide
agaacagaugugauaugug

SEQ ID NO: 2340076 - RNA, 19 nt, Artificial Sequence
  Description of Artificial Sequence: Synthetic oligonucleotide
gucaugugggaguugccac

SEQ ID NO: 2340077 - RNA, 19 nt, Artificial Sequence
  Description of Artificial Sequence: Synthetic oligonucleotide
uagugccuccaguuauagg

SEQ ID NO: 2340078 - RNA, 19 nt, Artificial Sequence
  Description of Artificial Sequence: Synthetic oligonucleotide
gucuccacggauagaaagc

SEQ ID NO: 2340079 - RNA, 19 nt, Artificial Sequence
  Description of Artificial Sequence: Synthetic oligonucleotide
gacuucugccgucuggaca

SEQ ID NO: 2340080 - RNA, 19 nt, Artificial Sequence
  Description of Artificial Sequence: Synthetic oligonucleotide
uguuacugagugagagauc

SEQ ID NO: 2340081 - RNA, 19 nt, Artificial Sequence
  Description of Artificial Sequence: Synthetic oligonucleotide
caacagagcauccccuaac

SEQ ID NO: 2340082 - RNA, 19 nt, Artificial Sequence
  Description of Artificial Sequence: Synthetic oligonucleotide
aucauagugccuccaguua

SEQ ID NO: 2340083 - RNA, 19 nt, Artificial Sequence
  Description of Artificial Sequence: Synthetic oligonucleotide
uuuugcuaugagacaguuu

SEQ ID NO: 2340084 - RNA, 19 nt, Artificial Sequence
  Description of Artificial Sequence: Synthetic oligonucleotide
gugaccgaaggccuucagc

SEQ ID NO: 2340085 - RNA, 19 nt, Artificial Sequence
  Description of Artificial Sequence: Synthetic oligonucleotide
acacucuaagucuuccuua

SEQ ID NO: 2340086 - RNA, 19 nt, Artificial Sequence
  Description of Artificial Sequence: Synthetic oligonucleotide
auagugccuccaguuauag

SEQ ID NO: 2340087 - RNA, 19 nt, Artificial Sequence
  Description of Artificial Sequence: Synthetic oligonucleotide
uguucauacccugcugagu

SEQ ID NO: 2340088 - RNA, 19 nt, Artificial Sequence
  Description of Artificial Sequence: Synthetic oligonucleotide
gcucuuuaaggcaaaguug

SEQ ID NO: 2340089 - RNA, 19 nt, Artificial Sequence
  Description of Artificial Sequence: Synthetic oligonucleotide
uuguaguguuacugaguga

SEQ ID NO: 2340090 - RNA, 19 nt, Artificial Sequence
  Description of Artificial Sequence: Synthetic oligonucleotide
cugaaaggguaacaagaca

SEQ ID NO: 2340091 - RNA, 19 nt, Artificial Sequence
  Description of Artificial Sequence: Synthetic oligonucleotide
uucauacccugcugaguga

SEQ ID NO: 2340092 - RNA, 19 nt, Artificial Sequence
  Description of Artificial Sequence: Synthetic oligonucleotide
uuagaacaugaagccuugc

SEQ ID NO: 2340093 - RNA, 19 nt, Artificial Sequence
  Description of Artificial Sequence: Synthetic oligonucleotide
uuuugugaccgaaggccuu

SEQ ID NO: 2340094 - RNA, 19 nt, Artificial Sequence
  Description of Artificial Sequence: Synthetic oligonucleotide
ggauagaaagcccaucuua

SEQ ID NO: 2340095 - RNA, 19 nt, Artificial Sequence
  Description of Artificial Sequence: Synthetic oligonucleotide
uaggguauuuugugaccga

SEQ ID NO: 2340096 - RNA, 19 nt, Artificial Sequence
  Description of Artificial Sequence: Synthetic oligonucleotide
ugaaguuuuccaggcaauu

SEQ ID NO: 2340097 - RNA, 19 nt, Artificial Sequence
  Description of Artificial Sequence: Synthetic oligonucleotide
gacagaacagaggucuauc

SEQ ID NO: 2340098 - RNA, 19 nt, Artificial Sequence
  Description of Artificial Sequence: Synthetic oligonucleotide
cgggaauuaacuaucaaca

SEQ ID NO: 2340099 - RNA, 19 nt, Artificial Sequence
  Description of Artificial Sequence: Synthetic oligonucleotide
cuaacaccucaucaccauc

SEQ ID NO: 2340100 - RNA, 19 nt, Artificial Sequence
  Description of Artificial Sequence: Synthetic oligonucleotide
auuugacauuuguaguguu

SEQ ID NO: 2340101 - RNA, 19 nt, Artificial Sequence
  Description of Artificial Sequence: Synthetic oligonucleotide
agacacuuccauucccuau

SEQ ID NO: 2340102 - RNA, 19 nt, Artificial Sequence
  Description of Artificial Sequence: Synthetic oligonucleotide
uugcuaugagacaguuuuc

SEQ ID NO: 2340103 - RNA, 19 nt, Artificial Sequence
  Description of Artificial Sequence: Synthetic oligonucleotide
aucaacagagcauccccua

SEQ ID NO: 2340104 - RNA, 19 nt, Artificial Sequence
  Description of Artificial Sequence: Synthetic oligonucleotide
cauggacagaacagagguc

SEQ ID NO: 2340105 - RNA, 19 nt, Artificial Sequence
  Description of Artificial Sequence: Synthetic oligonucleotide
uuaacacaaugcgaccaau

SEQ ID NO: 2340106 - RNA, 19 nt, Artificial Sequence
  Description of Artificial Sequence: Synthetic oligonucleotide
uuugugaccgaaggccuuc

SEQ ID NO: 2340107 - RNA, 19 nt, Artificial Sequence
  Description of Artificial Sequence: Synthetic oligonucleotide
cauacccugcugagugagg

SEQ ID NO: 2340108 - RNA, 19 nt, Artificial Sequence
  Description of Artificial Sequence: Synthetic oligonucleotide
ccuuauuaacacaaugcga

SEQ ID NO: 2340109 - RNA, 19 nt, Artificial Sequence
  Description of Artificial Sequence: Synthetic oligonucleotide
cuccacggauagaaagccc

SEQ ID NO: 2340110 - RNA, 19 nt, Artificial Sequence
  Description of Artificial Sequence: Synthetic oligonucleotide
caagccuuccguguggguc

SEQ ID NO: 2340111 - RNA, 19 nt, Artificial Sequence
  Description of Artificial Sequence: Synthetic oligonucleotide
accaucaccucagaacaga

SEQ ID NO: 2340112 - RNA, 19 nt, Artificial Sequence
  Description of Artificial Sequence: Synthetic oligonucleotide
gaccaaucccagucuggug

SEQ ID NO: 2340113 - RNA, 19 nt, Artificial Sequence
  Description of Artificial Sequence: Synthetic oligonucleotide
cacuguaacggccuucaga

SEQ ID NO: 2340114 - RNA, 19 nt, Artificial Sequence
  Description of Artificial Sequence: Synthetic oligonucleotide
cacucaagccuuccgugug

SEQ ID NO: 2340115 - RNA, 19 nt, Artificial Sequence
  Description of Artificial Sequence: Synthetic oligonucleotide
cugagugagggcccacccc

SEQ ID NO: 2340116 - RNA, 19 nt, Artificial Sequence
  Description of Artificial Sequence: Synthetic oligonucleotide
gagauggugcuggggcucg

SEQ ID NO: 2340117 - RNA, 19 nt, Artificial Sequence
  Description of Artificial Sequence: Synthetic oligonucleotide
gguaacaagacacuuccau

SEQ ID NO: 2340118 - RNA, 19 nt, Artificial Sequence
  Description of Artificial Sequence: Synthetic oligonucleotide
guugugucaguucuuguau

SEQ ID NO: 2340119 - RNA, 19 nt, Artificial Sequence
  Description of Artificial Sequence: Synthetic oligonucleotide
uugugucaguucuuguauu

SEQ ID NO: 2340120 - RNA, 19 nt, Artificial Sequence
  Description of Artificial Sequence: Synthetic oligonucleotide
ucucucuacugaaguuuuc

SEQ ID NO: 2340121 - RNA, 19 nt, Artificial Sequence
  Description of Artificial Sequence: Synthetic oligonucleotide
augugggaguugccacagc

SEQ ID NO: 2340122 - RNA, 19 nt, Artificial Sequence
  Description of Artificial Sequence: Synthetic oligonucleotide
guuucgaggagucuugcau

SEQ ID NO: 2340123 - RNA, 19 nt, Artificial Sequence
  Description of Artificial Sequence: Synthetic oligonucleotide
uaucagcugaaaggguaac

SEQ ID NO: 2340124 - RNA, 19 nt, Artificial Sequence
  Description of Artificial Sequence: Synthetic oligonucleotide
uccaguuauaggguauuuu

SEQ ID NO: 2340125 - RNA, 19 nt, Artificial Sequence
  Description of Artificial Sequence: Synthetic oligonucleotide
ccuucagcauuuuaaauaa

SEQ ID NO: 2340126 - RNA, 19 nt, Artificial Sequence
  Description of Artificial Sequence: Synthetic oligonucleotide
cauucccuauacuggccac

SEQ ID NO: 2340127 - RNA, 19 nt, Artificial Sequence
  Description of Artificial Sequence: Synthetic oligonucleotide
cuaagccccucaugccucc

SEQ ID NO: 2340128 - RNA, 19 nt, Artificial Sequence
  Description of Artificial Sequence: Synthetic oligonucleotide
gccuucagcauuuuaaaua

SEQ ID NO: 2340129 - RNA, 19 nt, Artificial Sequence
  Description of Artificial Sequence: Synthetic oligonucleotide
uguuaacuggugagugguu

SEQ ID NO: 2340130 - RNA, 19 nt, Artificial Sequence
  Description of Artificial Sequence: Synthetic oligonucleotide
gcugaaaggguaacaagac

SEQ ID NO: 2340131 - RNA, 19 nt, Artificial Sequence
  Description of Artificial Sequence: Synthetic oligonucleotide
gaaaggguaacaagacacu

SEQ ID NO: 2340132 - RNA, 19 nt, Artificial Sequence
  Description of Artificial Sequence: Synthetic oligonucleotide
uuuaaccuugaaggucuaa

SEQ ID NO: 2340133 - RNA, 19 nt, Artificial Sequence
  Description of Artificial Sequence: Synthetic oligonucleotide
accgaaggccuucagcauu

SEQ ID NO: 2340134 - RNA, 19 nt, Artificial Sequence
  Description of Artificial Sequence: Synthetic oligonucleotide
uucccuauacuggccacaa

SEQ ID NO: 2340135 - RNA, 19 nt, Artificial Sequence
  Description of Artificial Sequence: Synthetic oligonucleotide
guaacaagacacuuccauu

SEQ ID NO: 2340136 - RNA, 19 nt, Artificial Sequence
  Description of Artificial Sequence: Synthetic oligonucleotide
caggcaauuuuaacgggaa

SEQ ID NO: 2340137 - RNA, 19 nt, Artificial Sequence
  Description of Artificial Sequence: Synthetic oligonucleotide
ggucuaagccccucaugcc

SEQ ID NO: 2340138 - RNA, 19 nt, Artificial Sequence
  Description of Artificial Sequence: Synthetic oligonucleotide
cucaagccuuccguguggg

SEQ ID NO: 2340139 - RNA, 19 nt, Artificial Sequence
  Description of Artificial Sequence: Synthetic oligonucleotide
caccaucaccucagaacag

SEQ ID NO: 2340140 - RNA, 19 nt, Artificial Sequence
  Description of Artificial Sequence: Synthetic oligonucleotide
caguuauaggguauuuugu

SEQ ID NO: 2340141 - RNA, 19 nt, Artificial Sequence
  Description of Artificial Sequence: Synthetic oligonucleotide
caccucagaacagauguga

SEQ ID NO: 2340142 - RNA, 19 nt, Artificial Sequence
  Description of Artificial Sequence: Synthetic oligonucleotide
guguuacugagugagagau

SEQ ID NO: 2340143 - RNA, 19 nt, Artificial Sequence
  Description of Artificial Sequence: Synthetic oligonucleotide
agcccaucuuagaacauga

SEQ ID NO: 2340144 - RNA, 19 nt, Artificial Sequence
  Description of Artificial Sequence: Synthetic oligonucleotide
cuggacuguuaacugguga

SEQ ID NO: 2340145 - RNA, 19 nt, Artificial Sequence
  Description of Artificial Sequence: Synthetic oligonucleotide
aacuggugagugguuucga

SEQ ID NO: 2340146 - RNA, 19 nt, Artificial Sequence
  Description of Artificial Sequence: Synthetic oligonucleotide
cagaacagaggucuaucaa

SEQ ID NO: 2340147 - RNA, 19 nt, Artificial Sequence
  Description of Artificial Sequence: Synthetic oligonucleotide
ugccgucuggacagcugag

SEQ ID NO: 2340148 - RNA, 19 nt, Artificial Sequence
  Description of Artificial Sequence: Synthetic oligonucleotide
uacccugcugagugagggc

SEQ ID NO: 2340149 - RNA, 19 nt, Artificial Sequence
  Description of Artificial Sequence: Synthetic oligonucleotide
ccucaugccuccacugugg

SEQ ID NO: 2340150 - RNA, 19 nt, Artificial Sequence
  Description of Artificial Sequence: Synthetic oligonucleotide
ccuugcaucauagugccuc

SEQ ID NO: 2340151 - RNA, 19 nt, Artificial Sequence
  Description of Artificial Sequence: Synthetic oligonucleotide
augcgaccaaucccagucu

SEQ ID NO: 2340152 - RNA, 19 nt, Artificial Sequence
  Description of Artificial Sequence: Synthetic oligonucleotide
gucuaagccccucaugccu

SEQ ID NO: 2340153 - RNA, 19 nt, Artificial Sequence
  Description of Artificial Sequence: Synthetic oligonucleotide
gaggucuaucaauccugca

SEQ ID NO: 2340154 - RNA, 19 nt, Artificial Sequence
  Description of Artificial Sequence: Synthetic oligonucleotide
ggcaaaguugugucaguuc

SEQ ID NO: 2340155 - RNA, 19 nt, Artificial Sequence
  Description of Artificial Sequence: Synthetic oligonucleotide
ugcugagugagggcccacc

SEQ ID NO: 2340156 - RNA, 19 nt, Artificial Sequence
  Description of Artificial Sequence: Synthetic oligonucleotide
uggacagaacagaggucua

SEQ ID NO: 2340157 - RNA, 19 nt, Artificial Sequence
  Description of Artificial Sequence: Synthetic oligonucleotide
auucccuauacuggccaca

SEQ ID NO: 2340158 - RNA, 19 nt, Artificial Sequence
  Description of Artificial Sequence: Synthetic oligonucleotide
gaacacucuaagucuuccu

SEQ ID NO: 2340159 - RNA, 19 nt, Artificial Sequence
  Description of Artificial Sequence: Synthetic oligonucleotide
caagacacuuccauucccu

SEQ ID NO: 2340160 - RNA, 19 nt, Artificial Sequence
  Description of Artificial Sequence: Synthetic oligonucleotide
aaauucccuuuaaccuuga

SEQ ID NO: 2340161 - RNA, 19 nt, Artificial Sequence
  Description of Artificial Sequence: Synthetic oligonucleotide
ccuauacuggccacaaaca

SEQ ID NO: 2340162 - RNA, 19 nt, Artificial Sequence
  Description of Artificial Sequence: Synthetic oligonucleotide
aggguauuuugugaccgaa

SEQ ID NO: 2340163 - RNA, 19 nt, Artificial Sequence
  Description of Artificial Sequence: Synthetic oligonucleotide
uaacggccuucagaaauau

SEQ ID NO: 2340164 - RNA, 19 nt, Artificial Sequence
  Description of Artificial Sequence: Synthetic oligonucleotide
gaucaacagagcauccccu

SEQ ID NO: 2340165 - RNA, 19 nt, Artificial Sequence
  Description of Artificial Sequence: Synthetic oligonucleotide
ccccuaacaccucaucacc

SEQ ID NO: 2340166 - RNA, 19 nt, Artificial Sequence
  Description of Artificial Sequence: Synthetic oligonucleotide
ggguauuuugugaccgaag

SEQ ID NO: 2340167 - RNA, 19 nt, Artificial Sequence
  Description of Artificial Sequence: Synthetic oligonucleotide
acaaugcgaccaaucccag

SEQ ID NO: 2340168 - RNA, 19 nt, Artificial Sequence
  Description of Artificial Sequence: Synthetic oligonucleotide
aaagcccaucuuagaacau

SEQ ID NO: 2340169 - RNA, 19 nt, Artificial Sequence
  Description of Artificial Sequence: Synthetic oligonucleotide
cauccccuaacaccucauc

SEQ ID NO: 2340170 - RNA, 19 nt, Artificial Sequence
  Description of Artificial Sequence: Synthetic oligonucleotide
uugaaggucuaagccccuc

SEQ ID NO: 2340171 - RNA, 19 nt, Artificial Sequence
  Description of Artificial Sequence: Synthetic oligonucleotide
gaaguuuuccaggcaauuu

SEQ ID NO: 2340172 - RNA, 19 nt, Artificial Sequence
  Description of Artificial Sequence: Synthetic oligonucleotide
caugaagccuugcaucaua

SEQ ID NO: 2340173 - RNA, 19 nt, Artificial Sequence
  Description of Artificial Sequence: Synthetic oligonucleotide
gugccauggacagaacaga

SEQ ID NO: 2340174 - RNA, 19 nt, Artificial Sequence
  Description of Artificial Sequence: Synthetic oligonucleotide
caucauagugccuccaguu

SEQ ID NO: 2340175 - RNA, 19 nt, Artificial Sequence
  Description of Artificial Sequence: Synthetic oligonucleotide
aucucucuacugaaguuuu

SEQ ID NO: 2340176 - RNA, 19 nt, Artificial Sequence
  Description of Artificial Sequence: Synthetic oligonucleotide
ucaagccuuccgugugggu

SEQ ID NO: 2340177 - RNA, 19 nt, Artificial Sequence
  Description of Artificial Sequence: Synthetic oligonucleotide
gaggagucuugcaucucuc

SEQ ID NO: 2340178 - RNA, 19 nt, Artificial Sequence
  Description of Artificial Sequence: Synthetic oligonucleotide
cuggucuggacuguuaacu

SEQ ID NO: 2340179 - RNA, 19 nt, Artificial Sequence
  Description of Artificial Sequence: Synthetic oligonucleotide
uugcaucauagugccucca

SEQ ID NO: 2340180 - RNA, 19 nt, Artificial Sequence
  Description of Artificial Sequence: Synthetic oligonucleotide
cauagugccuccaguuaua

SEQ ID NO: 2340181 - RNA, 19 nt, Artificial Sequence
  Description of Artificial Sequence: Synthetic oligonucleotide
cuguuaacuggugaguggu

SEQ ID NO: 2340182 - RNA, 19 nt, Artificial Sequence
  Description of Artificial Sequence: Synthetic oligonucleotide
ccauggacagaacagaggu

SEQ ID NO: 2340183 - RNA, 19 nt, Artificial Sequence
  Description of Artificial Sequence: Synthetic oligonucleotide
cacggauagaaagcccauc

SEQ ID NO: 2340184 - RNA, 19 nt, Artificial Sequence
  Description of Artificial Sequence: Synthetic oligonucleotide
gaaggucuaagccccucau

SEQ ID NO: 2340185 - RNA, 19 nt, Artificial Sequence
  Description of Artificial Sequence: Synthetic oligonucleotide
cugccgucuggacagcuga

SEQ ID NO: 2340186 - RNA, 19 nt, Artificial Sequence
  Description of Artificial Sequence: Synthetic oligonucleotide
caacacucaagccuuccgu

SEQ ID NO: 2340187 - RNA, 19 nt, Artificial Sequence
  Description of Artificial Sequence: Synthetic oligonucleotide
gggcugaaauguucauacc

SEQ ID NO: 2340188 - RNA, 19 nt, Artificial Sequence
  Description of Artificial Sequence: Synthetic oligonucleotide
aggcaaaguugugucaguu

SEQ ID NO: 2340189 - RNA, 19 nt, Artificial Sequence
  Description of Artificial Sequence: Synthetic oligonucleotide
ggucuaucaauccugcauu

SEQ ID NO: 2340190 - RNA, 19 nt, Artificial Sequence
  Description of Artificial Sequence: Synthetic oligonucleotide
gcacauauccaggccacug

SEQ ID NO: 2340191 - RNA, 19 nt, Artificial Sequence
  Description of Artificial Sequence: Synthetic oligonucleotide
ggccuucagaaauauuaaa

SEQ ID NO: 2340192 - RNA, 19 nt, Artificial Sequence
  Description of Artificial Sequence: Synthetic oligonucleotide
uugugaccgaaggccuuca

SEQ ID NO: 2340193 - RNA, 19 nt, Artificial Sequence
  Description of Artificial Sequence: Synthetic oligonucleotide
ccaggcaauuuuaacggga

SEQ ID NO: 2340194 - RNA, 19 nt, Artificial Sequence
  Description of Artificial Sequence: Synthetic oligonucleotide
guaguguuacugagugaga

SEQ ID NO: 2340195 - RNA, 19 nt, Artificial Sequence
  Description of Artificial Sequence: Synthetic oligonucleotide
guggugggcugaaauguuc

SEQ ID NO: 2340196 - RNA, 19 nt, Artificial Sequence
  Description of Artificial Sequence: Synthetic oligonucleotide
acaagucaugugggaguug

SEQ ID NO: 2340197 - RNA, 19 nt, Artificial Sequence
  Description of Artificial Sequence: Synthetic oligonucleotide
guaacggccuucagaaaua

SEQ ID NO: 2340198 - RNA, 19 nt, Artificial Sequence
  Description of Artificial Sequence: Synthetic oligonucleotide
cccuuuaaccuugaagguc

SEQ ID NO: 2340199 - RNA, 19 nt, Artificial Sequence
  Description of Artificial Sequence: Synthetic oligonucleotide
ucccuauacuggccacaaa

SEQ ID NO: 2340200 - RNA, 19 nt, Artificial Sequence
  Description of Artificial Sequence: Synthetic oligonucleotide
cacucuaagucuuccuuau

SEQ ID NO: 2340201 - RNA, 19 nt, Artificial Sequence
  Description of Artificial Sequence: Synthetic oligonucleotide
agauggugcuggggcucgc

SEQ ID NO: 2340202 - RNA, 19 nt, Artificial Sequence
  Description of Artificial Sequence: Synthetic oligonucleotide
guuaacuggugagugguuu

SEQ ID NO: 2340203 - RNA, 19 nt, Artificial Sequence
  Description of Artificial Sequence: Synthetic oligonucleotide
accucagaacagaugugau

SEQ ID NO: 2340204 - RNA, 19 nt, Artificial Sequence
  Description of Artificial Sequence: Synthetic oligonucleotide
acaugaagccuugcaucau

SEQ ID NO: 2340205 - RNA, 19 nt, Artificial Sequence
  Description of Artificial Sequence: Synthetic oligonucleotide
ggagucuugcaucucucua

SEQ ID NO: 2340206 - RNA, 19 nt, Artificial Sequence
  Description of Artificial Sequence: Synthetic oligonucleotide
caacaauuucuguguugaa

SEQ ID NO: 2340207 - RNA, 19 nt, Artificial Sequence
  Description of Artificial Sequence: Synthetic oligonucleotide
cacauauccaggccacugu

SEQ ID NO: 2340208 - RNA, 19 nt, Artificial Sequence
  Description of Artificial Sequence: Synthetic oligonucleotide
agcacauauccaggccacu

SEQ ID NO: 2340209 - RNA, 19 nt, Artificial Sequence
  Description of Artificial Sequence: Synthetic oligonucleotide
uucugccgucuggacagcu

SEQ ID NO: 2340210 - RNA, 19 nt, Artificial Sequence
  Description of Artificial Sequence: Synthetic oligonucleotide
gcgaccaaucccagucugg

SEQ ID NO: 2340211 - RNA, 19 nt, Artificial Sequence
  Description of Artificial Sequence: Synthetic oligonucleotide
cugaaguuuuccaggcaau

SEQ ID NO: 2340212 - RNA, 19 nt, Artificial Sequence
  Description of Artificial Sequence: Synthetic oligonucleotide
cccgccucagcugaauacc

SEQ ID NO: 2340213 - RNA, 19 nt, Artificial Sequence
  Description of Artificial Sequence: Synthetic oligonucleotide
ccuggucuggacuguuaac

SEQ ID NO: 2340214 - RNA, 19 nt, Artificial Sequence
  Description of Artificial Sequence: Synthetic oligonucleotide
cuuuaaccuugaaggucua

SEQ ID NO: 2340215 - RNA, 19 nt, Artificial Sequence
  Description of Artificial Sequence: Synthetic oligonucleotide
gugggcugaaauguucaua

SEQ ID NO: 2340216 - RNA, 19 nt, Artificial Sequence
  Description of Artificial Sequence: Synthetic oligonucleotide
aacggccuucagaaauauu

SEQ ID NO: 2340217 - RNA, 19 nt, Artificial Sequence
  Description of Artificial Sequence: Synthetic oligonucleotide
gcauugcauagaaucgaca

SEQ ID NO: 2340218 - RNA, 19 nt, Artificial Sequence
  Description of Artificial Sequence: Synthetic oligonucleotide
cccucaugccuccacugug

SEQ ID NO: 2340219 - RNA, 19 nt, Artificial Sequence
  Description of Artificial Sequence: Synthetic oligonucleotide
ucgaggagucuugcaucuc

SEQ ID NO: 2340220 - RNA, 19 nt, Artificial Sequence
  Description of Artificial Sequence: Synthetic oligonucleotide
ccaccccuggucuggacug

SEQ ID NO: 2340221 - RNA, 19 nt, Artificial Sequence
  Description of Artificial Sequence: Synthetic oligonucleotide
cccuaacaccucaucacca

SEQ ID NO: 2340222 - RNA, 19 nt, Artificial Sequence
  Description of Artificial Sequence: Synthetic oligonucleotide
gaccgaaggccuucagcau

SEQ ID NO: 2340223 - RNA, 19 nt, Artificial Sequence
  Description of Artificial Sequence: Synthetic oligonucleotide
cuguaacggccuucagaaa

SEQ ID NO: 2340224 - RNA, 19 nt, Artificial Sequence
  Description of Artificial Sequence: Synthetic oligonucleotide
cgucuggacagcugagaug

SEQ ID NO: 2340225 - RNA, 19 nt, Artificial Sequence
  Description of Artificial Sequence: Synthetic oligonucleotide
ugcugucuuucagguuauc

SEQ ID NO: 2340226 - RNA, 19 nt, Artificial Sequence
  Description of Artificial Sequence: Synthetic oligonucleotide
gguuaucagcugaaagggu

SEQ ID NO: 2340227 - RNA, 19 nt, Artificial Sequence
  Description of Artificial Sequence: Synthetic oligonucleotide
caaugcgaccaaucccagu

SEQ ID NO: 2340228 - RNA, 19 nt, Artificial Sequence
  Description of Artificial Sequence: Synthetic oligonucleotide
ggacuguuaacuggugagu

SEQ ID NO: 2340229 - RNA, 19 nt, Artificial Sequence
  Description of Artificial Sequence: Synthetic oligonucleotide
caaucccagucuggugcuc

SEQ ID NO: 2340230 - RNA, 19 nt, Artificial Sequence
  Description of Artificial Sequence: Synthetic oligonucleotide
cccugcugagugagggccc

SEQ ID NO: 2340231 - RNA, 19 nt, Artificial Sequence
  Description of Artificial Sequence: Synthetic oligonucleotide
ccacaagucaugugggagu

SEQ ID NO: 2340232 - RNA, 19 nt, Artificial Sequence
  Description of Artificial Sequence: Synthetic oligonucleotide
gagcauccccuaacaccuc

SEQ ID NO: 2340233 - RNA, 19 nt, Artificial Sequence
  Description of Artificial Sequence: Synthetic oligonucleotide
ggccuucagcauuuuaaau

SEQ ID NO: 2340234 - RNA, 19 nt, Artificial Sequence
  Description of Artificial Sequence: Synthetic oligonucleotide
ggcucgcccgccucagcug

SEQ ID NO: 2340235 - RNA, 19 nt, Artificial Sequence
  Description of Artificial Sequence: Synthetic oligonucleotide
gugccuccaguuauagggu

SEQ ID NO: 2340236 - RNA, 19 nt, Artificial Sequence
  Description of Artificial Sequence: Synthetic oligonucleotide
gcucgcccgccucagcuga

SEQ ID NO: 2340237 - RNA, 19 nt, Artificial Sequence
  Description of Artificial Sequence: Synthetic oligonucleotide
gagugguuucgaggagucu

SEQ ID NO: 2340238 - RNA, 19 nt, Artificial Sequence
  Description of Artificial Sequence: Synthetic oligonucleotide
gcaucucucuacugaaguu

SEQ ID NO: 2340239 - RNA, 19 nt, Artificial Sequence
  Description of Artificial Sequence: Synthetic oligonucleotide
cacagcagacugcugucuu

SEQ ID NO: 2340240 - RNA, 19 nt, Artificial Sequence
  Description of Artificial Sequence: Synthetic oligonucleotide
ggacagaacagaggucuau

SEQ ID NO: 2340241 - RNA, 19 nt, Artificial Sequence
  Description of Artificial Sequence: Synthetic oligonucleotide
gccgucuggacagcugaga

SEQ ID NO: 2340242 - RNA, 19 nt, Artificial Sequence
  Description of Artificial Sequence: Synthetic oligonucleotide
gugggucuccacggauaga

SEQ ID NO: 2340243 - RNA, 19 nt, Artificial Sequence
  Description of Artificial Sequence: Synthetic oligonucleotide
cccuggucuggacuguuaa

SEQ ID NO: 2340244 - RNA, 19 nt, Artificial Sequence
  Description of Artificial Sequence: Synthetic oligonucleotide
gggcucgcccgccucagcu

SEQ ID NO: 2340245 - RNA, 19 nt, Artificial Sequence
  Description of Artificial Sequence: Synthetic oligonucleotide
accccuggucuggacuguu

SEQ ID NO: 2340246 - RNA, 19 nt, Artificial Sequence
  Description of Artificial Sequence: Synthetic oligonucleotide
cgacaacacucaagccuuc

SEQ ID NO: 2340247 - RNA, 19 nt, Artificial Sequence
  Description of Artificial Sequence: Synthetic oligonucleotide
gcccaucuuagaacaugaa

SEQ ID NO: 2340248 - RNA, 19 nt, Artificial Sequence
  Description of Artificial Sequence: Synthetic oligonucleotide
cuccaguuauaggguauuu

SEQ ID NO: 2340249 - RNA, 19 nt, Artificial Sequence
  Description of Artificial Sequence: Synthetic oligonucleotide
ggggcucgcccgccucagc

SEQ ID NO: 2340250 - RNA, 19 nt, Artificial Sequence
  Description of Artificial Sequence: Synthetic oligonucleotide
gggucuccacggauagaaa

SEQ ID NO: 2340251 - RNA, 19 nt, Artificial Sequence
  Description of Artificial Sequence: Synthetic oligonucleotide
ccuuccgugugggucucca

SEQ ID NO: 2340252 - RNA, 19 nt, Artificial Sequence
  Description of Artificial Sequence: Synthetic oligonucleotide
ccgucuggacagcugagau

SEQ ID NO: 2340253 - RNA, 19 nt, Artificial Sequence
  Description of Artificial Sequence: Synthetic oligonucleotide
cucgcccgccucagcugaa

SEQ ID NO: 2340254 - RNA, 19 nt, Artificial Sequence
  Description of Artificial Sequence: Synthetic oligonucleotide
gccuccaguuauaggguau

SEQ ID NO: 2340255 - RNA, 19 nt, Artificial Sequence
  Description of Artificial Sequence: Synthetic oligonucleotide
ccgugugggucuccacgga

SEQ ID NO: 2340256 - RNA, 19 nt, Artificial Sequence
  Description of Artificial Sequence: Synthetic oligonucleotide
cgaccaaucccagucuggu

SEQ ID NO: 2340257 - RNA, 19 nt, Artificial Sequence
  Description of Artificial Sequence: Synthetic oligonucleotide
ccccaccccuggucuggac

SEQ ID NO: 2340258 - RNA, 19 nt, Artificial Sequence
  Description of Artificial Sequence: Synthetic oligonucleotide
ccuccaguuauaggguauu

SEQ ID NO: 2340259 - RNA, 19 nt, Artificial Sequence
  Description of Artificial Sequence: Synthetic oligonucleotide
cggauagaaagcccaucuu

SEQ ID NO: 2340260 - RNA, 19 nt, Artificial Sequence
  Description of Artificial Sequence: Synthetic oligonucleotide
caccccuggucuggacugu

SEQ ID NO: 2340261 - RNA, 19 nt, Artificial Sequence
  Description of Artificial Sequence: Synthetic oligonucleotide
gccuuccgugugggucucc

SEQ ID NO: 2340262 - RNA, 19 nt, Artificial Sequence
  Description of Artificial Sequence: Synthetic oligonucleotide
gccuugcaucauagugccu

SEQ ID NO: 2340263 - RNA, 19 nt, Artificial Sequence
  Description of Artificial Sequence: Synthetic oligonucleotide
uuaacaaucaacuuuaaac

SEQ ID NO: 2340264 - RNA, 19 nt, Artificial Sequence
  Description of Artificial Sequence: Synthetic oligonucleotide
aaacauugcaucuaaaugu

SEQ ID NO: 2340265 - RNA, 19 nt, Artificial Sequence
  Description of Artificial Sequence: Synthetic oligonucleotide
aaauuagacauucagauua

SEQ ID NO: 2340266 - RNA, 19 nt, Artificial Sequence
  Description of Artificial Sequence: Synthetic oligonucleotide
auaauaagcuaucucaaac

SEQ ID NO: 2340267 - RNA, 19 nt, Artificial Sequence
  Description of Artificial Sequence: Synthetic oligonucleotide
auucucuaaauacucagcc

SEQ ID NO: 2340268 - RNA, 19 nt, Artificial Sequence
  Description of Artificial Sequence: Synthetic oligonucleotide
uuuauuaacaaucaacuuu

SEQ ID NO: 2340269 - RNA, 19 nt, Artificial Sequence
  Description of Artificial Sequence: Synthetic oligonucleotide
aaauccuuccauuuuagug

SEQ ID NO: 2340270 - RNA, 19 nt, Artificial Sequence
  Description of Artificial Sequence: Synthetic oligonucleotide
uaaacauugcaucuaaaug

SEQ ID NO: 2340271 - RNA, 19 nt, Artificial Sequence
  Description of Artificial Sequence: Synthetic oligonucleotide
agcaguaauacugagaaac

SEQ ID NO: 2340272 - RNA, 19 nt, Artificial Sequence
  Description of Artificial Sequence: Synthetic oligonucleotide
ugcauaauaagcuaucuca

SEQ ID NO: 2340273 - RNA, 19 nt, Artificial Sequence
  Description of Artificial Sequence: Synthetic oligonucleotide
agaaacagugaacauacac

SEQ ID NO: 2340274 - RNA, 19 nt, Artificial Sequence
  Description of Artificial Sequence: Synthetic oligonucleotide
ucaucaaucacuuccaaca

SEQ ID NO: 2340275 - RNA, 19 nt, Artificial Sequence
  Description of Artificial Sequence: Synthetic oligonucleotide
aauccuuccauuuuagugu

SEQ ID NO: 2340276 - RNA, 19 nt, Artificial Sequence
  Description of Artificial Sequence: Synthetic oligonucleotide
aacuacacuacacacacca

SEQ ID NO: 2340277 - RNA, 19 nt, Artificial Sequence
  Description of Artificial Sequence: Synthetic oligonucleotide
uuagaaauuaaaugugaag

SEQ ID NO: 2340278 - RNA, 19 nt, Artificial Sequence
  Description of Artificial Sequence: Synthetic oligonucleotide
aauaagcuaucucaaacca

SEQ ID NO: 2340279 - RNA, 19 nt, Artificial Sequence
  Description of Artificial Sequence: Synthetic oligonucleotide
uuuauugcuaccuuuagau

SEQ ID NO: 2340280 - RNA, 19 nt, Artificial Sequence
  Description of Artificial Sequence: Synthetic oligonucleotide
uagaaauuaaaugugaagu

SEQ ID NO: 2340281 - RNA, 19 nt, Artificial Sequence
  Description of Artificial Sequence: Synthetic oligonucleotide
uuuuagaaauuaaauguga

SEQ ID NO: 2340282 - RNA, 19 nt, Artificial Sequence
  Description of Artificial Sequence: Synthetic oligonucleotide
uagacaacuacucaaugcc

SEQ ID NO: 2340283 - RNA, 19 nt, Artificial Sequence
  Description of Artificial Sequence: Synthetic oligonucleotide
uaagcuaucucaaaccagc

SEQ ID NO: 2340284 - RNA, 19 nt, Artificial Sequence
  Description of Artificial Sequence: Synthetic oligonucleotide
ugacucauccauuagaucu

SEQ ID NO: 2340285 - RNA, 19 nt, Artificial Sequence
  Description of Artificial Sequence: Synthetic oligonucleotide
gaaacuacacuacacacac

SEQ ID NO: 2340286 - RNA, 19 nt, Artificial Sequence
  Description of Artificial Sequence: Synthetic oligonucleotide
uauugcuaccuuuagauac

SEQ ID NO: 2340287 - RNA, 19 nt, Artificial Sequence
  Description of Artificial Sequence: Synthetic oligonucleotide
ugaacauacacaaaaggau

SEQ ID NO: 2340288 - RNA, 19 nt, Artificial Sequence
  Description of Artificial Sequence: Synthetic oligonucleotide
uaaaagcugcauaauaagc

SEQ ID NO: 2340289 - RNA, 19 nt, Artificial Sequence
  Description of Artificial Sequence: Synthetic oligonucleotide
agaaaagcuuuauugcuac

SEQ ID NO: 2340290 - RNA, 19 nt, Artificial Sequence
  Description of Artificial Sequence: Synthetic oligonucleotide
uaauaagcuaucucaaacc

SEQ ID NO: 2340291 - RNA, 19 nt, Artificial Sequence
  Description of Artificial Sequence: Synthetic oligonucleotide
aauuauagcucuucacucu

SEQ ID NO: 2340292 - RNA, 19 nt, Artificial Sequence
  Description of Artificial Sequence: Synthetic oligonucleotide
uuagacaacuacucaaugc

SEQ ID NO: 2340293 - RNA, 19 nt, Artificial Sequence
  Description of Artificial Sequence: Synthetic oligonucleotide
auuauucaagcaguaauac

SEQ ID NO: 2340294 - RNA, 19 nt, Artificial Sequence
  Description of Artificial Sequence: Synthetic oligonucleotide
acacccacaaauuauagcu

SEQ ID NO: 2340295 - RNA, 19 nt, Artificial Sequence
  Description of Artificial Sequence: Synthetic oligonucleotide
ucucaaaccagcuuuggug

SEQ ID NO: 2340296 - RNA, 19 nt, Artificial Sequence
  Description of Artificial Sequence: Synthetic oligonucleotide
uguacagagaauuauucaa

SEQ ID NO: 2340297 - RNA, 19 nt, Artificial Sequence
  Description of Artificial Sequence: Synthetic oligonucleotide
ugucauuuagacaacuacu

SEQ ID NO: 2340298 - RNA, 19 nt, Artificial Sequence
  Description of Artificial Sequence: Synthetic oligonucleotide
uuagauaccccgugaauag

SEQ ID NO: 2340299 - RNA, 19 nt, Artificial Sequence
  Description of Artificial Sequence: Synthetic oligonucleotide
cuaaaugugcaccaguuac

SEQ ID NO: 2340300 - RNA, 19 nt, Artificial Sequence
  Description of Artificial Sequence: Synthetic oligonucleotide
aaaagcugcauaauaagcu

SEQ ID NO: 2340301 - RNA, 19 nt, Artificial Sequence
  Description of Artificial Sequence: Synthetic oligonucleotide
aaaugugcaccaguuacac

SEQ ID NO: 2340302 - RNA, 19 nt, Artificial Sequence
  Description of Artificial Sequence: Synthetic oligonucleotide
uccauuagaucucaaaauc

SEQ ID NO: 2340303 - RNA, 19 nt, Artificial Sequence
  Description of Artificial Sequence: Synthetic oligonucleotide
caaauaugcaugugcaucc

SEQ ID NO: 2340304 - RNA, 19 nt, Artificial Sequence
  Description of Artificial Sequence: Synthetic oligonucleotide
cucaaaccagcuuuggugg

SEQ ID NO: 2340305 - RNA, 19 nt, Artificial Sequence
  Description of Artificial Sequence: Synthetic oligonucleotide
aucaacuuuaaacauugca

SEQ ID NO: 2340306 - RNA, 19 nt, Artificial Sequence
  Description of Artificial Sequence: Synthetic oligonucleotide
aaaagcuuuauugcuaccu

SEQ ID NO: 2340307 - RNA, 19 nt, Artificial Sequence
  Description of Artificial Sequence: Synthetic oligonucleotide
auaaaugccuucaucuccc

SEQ ID NO: 2340308 - RNA, 19 nt, Artificial Sequence
  Description of Artificial Sequence: Synthetic oligonucleotide
uacacuacacacaccagug

SEQ ID NO: 2340309 - RNA, 19 nt, Artificial Sequence
  Description of Artificial Sequence: Synthetic oligonucleotide
uacucaaugccuugaauug

SEQ ID NO: 2340310 - RNA, 19 nt, Artificial Sequence
  Description of Artificial Sequence: Synthetic oligonucleotide
ucauuuagacaacuacuca

SEQ ID NO: 2340311 - RNA, 19 nt, Artificial Sequence
  Description of Artificial Sequence: Synthetic oligonucleotide
accaguguaaauuugguuu

SEQ ID NO: 2340312 - RNA, 19 nt, Artificial Sequence
  Description of Artificial Sequence: Synthetic oligonucleotide
auagcacaaacaaaucccc

SEQ ID NO: 2340313 - RNA, 19 nt, Artificial Sequence
  Description of Artificial Sequence: Synthetic oligonucleotide
uagaaacuacacuacacac

SEQ ID NO: 2340314 - RNA, 19 nt, Artificial Sequence
  Description of Artificial Sequence: Synthetic oligonucleotide
uacugagaaacagugaaca

SEQ ID NO: 2340315 - RNA, 19 nt, Artificial Sequence
  Description of Artificial Sequence: Synthetic oligonucleotide
ucaaaacccaccugucgcg

SEQ ID NO: 2340316 - RNA, 19 nt, Artificial Sequence
  Description of Artificial Sequence: Synthetic oligonucleotide
aaacccaccugucgcggcc

SEQ ID NO: 2340317 - RNA, 19 nt, Artificial Sequence
  Description of Artificial Sequence: Synthetic oligonucleotide
aaagcugcauaauaagcua

SEQ ID NO: 2340318 - RNA, 19 nt, Artificial Sequence
  Description of Artificial Sequence: Synthetic oligonucleotide
guaagcuagggcuugucag

SEQ ID NO: 2340319 - RNA, 19 nt, Artificial Sequence
  Description of Artificial Sequence: Synthetic oligonucleotide
uaaaugugcaccaguuaca

SEQ ID NO: 2340320 - RNA, 19 nt, Artificial Sequence
  Description of Artificial Sequence: Synthetic oligonucleotide
aaaacccaccugucgcggc

SEQ ID NO: 2340321 - RNA, 19 nt, Artificial Sequence
  Description of Artificial Sequence: Synthetic oligonucleotide
aauuauucaagcaguaaua

SEQ ID NO: 2340322 - RNA, 19 nt, Artificial Sequence
  Description of Artificial Sequence: Synthetic oligonucleotide
uuagacauucagauuacua

SEQ ID NO: 2340323 - RNA, 19 nt, Artificial Sequence
  Description of Artificial Sequence: Synthetic oligonucleotide
aaauccccuguacagagaa

SEQ ID NO: 2340324 - RNA, 19 nt, Artificial Sequence
  Description of Artificial Sequence: Synthetic oligonucleotide
cucaaaacccaccugucgc

SEQ ID NO: 2340325 - RNA, 19 nt, Artificial Sequence
  Description of Artificial Sequence: Synthetic oligonucleotide
ucaagcaguaauacugaga

SEQ ID NO: 2340326 - RNA, 19 nt, Artificial Sequence
  Description of Artificial Sequence: Synthetic oligonucleotide
uuauucaagcaguaauacu

SEQ ID NO: 2340327 - RNA, 19 nt, Artificial Sequence
  Description of Artificial Sequence: Synthetic oligonucleotide
auuauagcucuucacucug

SEQ ID NO: 2340328 - RNA, 19 nt, Artificial Sequence
  Description of Artificial Sequence: Synthetic oligonucleotide
gcuaccuuuagauaccccg

SEQ ID NO: 2340329 - RNA, 19 nt, Artificial Sequence
  Description of Artificial Sequence: Synthetic oligonucleotide
uauagcucuucacucugcc

SEQ ID NO: 2340330 - RNA, 19 nt, Artificial Sequence
  Description of Artificial Sequence: Synthetic oligonucleotide
uuuagauaccccgugaaua

SEQ ID NO: 2340331 - RNA, 19 nt, Artificial Sequence
  Description of Artificial Sequence: Synthetic oligonucleotide
cuucugucagucaaaggag

SEQ ID NO: 2340332 - RNA, 19 nt, Artificial Sequence
  Description of Artificial Sequence: Synthetic oligonucleotide
agcacaaacaaauccccug

SEQ ID NO: 2340333 - RNA, 19 nt, Artificial Sequence
  Description of Artificial Sequence: Synthetic oligonucleotide
ugcaugugcauccaaucac

SEQ ID NO: 2340334 - RNA, 19 nt, Artificial Sequence
  Description of Artificial Sequence: Synthetic oligonucleotide
auugcuaccuuuagauacc

SEQ ID NO: 2340335 - RNA, 19 nt, Artificial Sequence
  Description of Artificial Sequence: Synthetic oligonucleotide
uaugcuuuggacuuuccuu

SEQ ID NO: 2340336 - RNA, 19 nt, Artificial Sequence
  Description of Artificial Sequence: Synthetic oligonucleotide
cugucauuuagacaacuac

SEQ ID NO: 2340337 - RNA, 19 nt, Artificial Sequence
  Description of Artificial Sequence: Synthetic oligonucleotide
uaagcuagggcuugucagc

SEQ ID NO: 2340338 - RNA, 19 nt, Artificial Sequence
  Description of Artificial Sequence: Synthetic oligonucleotide
uuccuuggacuacagauaa

SEQ ID NO: 2340339 - RNA, 19 nt, Artificial Sequence
  Description of Artificial Sequence: Synthetic oligonucleotide
uucugucagucaaaggagc

SEQ ID NO: 2340340 - RNA, 19 nt, Artificial Sequence
  Description of Artificial Sequence: Synthetic oligonucleotide
gaauuauucaagcaguaau

SEQ ID NO: 2340341 - RNA, 19 nt, Artificial Sequence
  Description of Artificial Sequence: Synthetic oligonucleotide
ucuguuuaccucccagccc

SEQ ID NO: 2340342 - RNA, 19 nt, Artificial Sequence
  Description of Artificial Sequence: Synthetic oligonucleotide
uguaagcuagggcuuguca

SEQ ID NO: 2340343 - RNA, 19 nt, Artificial Sequence
  Description of Artificial Sequence: Synthetic oligonucleotide
caaaacauggucagcacca

SEQ ID NO: 2340344 - RNA, 19 nt, Artificial Sequence
  Description of Artificial Sequence: Synthetic oligonucleotide
uuuggacuuuccuuggacu

SEQ ID NO: 2340345 - RNA, 19 nt, Artificial Sequence
  Description of Artificial Sequence: Synthetic oligonucleotide
ucucccuaugcuuuggacu

SEQ ID NO: 2340346 - RNA, 19 nt, Artificial Sequence
  Description of Artificial Sequence: Synthetic oligonucleotide
agagaauuauucaagcagu

SEQ ID NO: 2340347 - RNA, 19 nt, Artificial Sequence
  Description of Artificial Sequence: Synthetic oligonucleotide
auccauuagaucucaaaau

SEQ ID NO: 2340348 - RNA, 19 nt, Artificial Sequence
  Description of Artificial Sequence: Synthetic oligonucleotide
ucagauuacuagaaauuuu

SEQ ID NO: 2340349 - RNA, 19 nt, Artificial Sequence
  Description of Artificial Sequence: Synthetic oligonucleotide
gugaacauacacaaaagga

SEQ ID NO: 2340350 - RNA, 19 nt, Artificial Sequence
  Description of Artificial Sequence: Synthetic oligonucleotide
aaaugcaugggugggcuug

SEQ ID NO: 2340351 - RNA, 19 nt, Artificial Sequence
  Description of Artificial Sequence: Synthetic oligonucleotide
uucucuaaauacucagccu

SEQ ID NO: 2340352 - RNA, 19 nt, Artificial Sequence
  Description of Artificial Sequence: Synthetic oligonucleotide
uucaagcaguaauacugag

SEQ ID NO: 2340353 - RNA, 19 nt, Artificial Sequence
  Description of Artificial Sequence: Synthetic oligonucleotide
agugacuccacaaaacaug

SEQ ID NO: 2340354 - RNA, 19 nt, Artificial Sequence
  Description of Artificial Sequence: Synthetic oligonucleotide
uucagauuacuagaaauuu

SEQ ID NO: 2340355 - RNA, 19 nt, Artificial Sequence
  Description of Artificial Sequence: Synthetic oligonucleotide
cuuggacuacagauaaaag

SEQ ID NO: 2340356 - RNA, 19 nt, Artificial Sequence
  Description of Artificial Sequence: Synthetic oligonucleotide
uaugcaugugcauccaauc

SEQ ID NO: 2340357 - RNA, 19 nt, Artificial Sequence
  Description of Artificial Sequence: Synthetic oligonucleotide
uggcacuucaaauaugcau

SEQ ID NO: 2340358 - RNA, 19 nt, Artificial Sequence
  Description of Artificial Sequence: Synthetic oligonucleotide
cauuuagacaacuacucaa

SEQ ID NO: 2340359 - RNA, 19 nt, Artificial Sequence
  Description of Artificial Sequence: Synthetic oligonucleotide
acccacaaauuauagcucu

SEQ ID NO: 2340360 - RNA, 19 nt, Artificial Sequence
  Description of Artificial Sequence: Synthetic oligonucleotide
acagaaaugcauggguggg

SEQ ID NO: 2340361 - RNA, 19 nt, Artificial Sequence
  Description of Artificial Sequence: Synthetic oligonucleotide
ucaaaccagcuuugguggg

SEQ ID NO: 2340362 - RNA, 19 nt, Artificial Sequence
  Description of Artificial Sequence: Synthetic oligonucleotide
ucuaaaugugcaccaguua

SEQ ID NO: 2340363 - RNA, 19 nt, Artificial Sequence
  Description of Artificial Sequence: Synthetic oligonucleotide
gucuguuuaccucccagcc

SEQ ID NO: 2340364 - RNA, 19 nt, Artificial Sequence
  Description of Artificial Sequence: Synthetic oligonucleotide
ucaaugccuugaauugucc

SEQ ID NO: 2340365 - RNA, 19 nt, Artificial Sequence
  Description of Artificial Sequence: Synthetic oligonucleotide
aggcucaaaacccaccugu

SEQ ID NO: 2340366 - RNA, 19 nt, Artificial Sequence
  Description of Artificial Sequence: Synthetic oligonucleotide
agagguggaucacaggggu

SEQ ID NO: 2340367 - RNA, 19 nt, Artificial Sequence
  Description of Artificial Sequence: Synthetic oligonucleotide
uaccuuuagauaccccgug

SEQ ID NO: 2340368 - RNA, 19 nt, Artificial Sequence
  Description of Artificial Sequence: Synthetic oligonucleotide
aaucacacccacaaauuau

SEQ ID NO: 2340369 - RNA, 19 nt, Artificial Sequence
  Description of Artificial Sequence: Synthetic oligonucleotide
ccauuagaucucaaaaucc

SEQ ID NO: 2340370 - RNA, 19 nt, Artificial Sequence
  Description of Artificial Sequence: Synthetic oligonucleotide
caguuacacaccuucauca

SEQ ID NO: 2340371 - RNA, 19 nt, Artificial Sequence
  Description of Artificial Sequence: Synthetic oligonucleotide
caugggugggcuuguaagc

SEQ ID NO: 2340372 - RNA, 19 nt, Artificial Sequence
  Description of Artificial Sequence: Synthetic oligonucleotide
uguccacuccaucuggaga

SEQ ID NO: 2340373 - RNA, 19 nt, Artificial Sequence
  Description of Artificial Sequence: Synthetic oligonucleotide
aucucccuaugcuuuggac

SEQ ID NO: 2340374 - RNA, 19 nt, Artificial Sequence
  Description of Artificial Sequence: Synthetic oligonucleotide
caaugccuugaauuguccc

SEQ ID NO: 2340375 - RNA, 19 nt, Artificial Sequence
  Description of Artificial Sequence: Synthetic oligonucleotide
gugaauagcacaaacaaau

SEQ ID NO: 2340376 - RNA, 19 nt, Artificial Sequence
  Description of Artificial Sequence: Synthetic oligonucleotide
agucaaaggagcauucucu

SEQ ID NO: 2340377 - RNA, 19 nt, Artificial Sequence
  Description of Artificial Sequence: Synthetic oligonucleotide
gaaaagcuuuauugcuacc

SEQ ID NO: 2340378 - RNA, 19 nt, Artificial Sequence
  Description of Artificial Sequence: Synthetic oligonucleotide
agaaacuacacuacacaca

SEQ ID NO: 2340379 - RNA, 19 nt, Artificial Sequence
  Description of Artificial Sequence: Synthetic oligonucleotide
augcaugugcauccaauca

SEQ ID NO: 2340380 - RNA, 19 nt, Artificial Sequence
  Description of Artificial Sequence: Synthetic oligonucleotide
uacacaccuucaucaauca

SEQ ID NO: 2340381 - RNA, 19 nt, Artificial Sequence
  Description of Artificial Sequence: Synthetic oligonucleotide
cagagguggaucacagggg

SEQ ID NO: 2340382 - RNA, 19 nt, Artificial Sequence
  Description of Artificial Sequence: Synthetic oligonucleotide
uauuaacaaucaacuuuaa

SEQ ID NO: 2340383 - RNA, 19 nt, Artificial Sequence
  Description of Artificial Sequence: Synthetic oligonucleotide
aaugugcaccaguuacaca

SEQ ID NO: 2340384 - RNA, 19 nt, Artificial Sequence
  Description of Artificial Sequence: Synthetic oligonucleotide
caucaaucacuuccaacac

SEQ ID NO: 2340385 - RNA, 19 nt, Artificial Sequence
  Description of Artificial Sequence: Synthetic oligonucleotide
auaagcuaucucaaaccag

SEQ ID NO: 2340386 - RNA, 19 nt, Artificial Sequence
  Description of Artificial Sequence: Synthetic oligonucleotide
cuuuggacuuuccuuggac

SEQ ID NO: 2340387 - RNA, 19 nt, Artificial Sequence
  Description of Artificial Sequence: Synthetic oligonucleotide
acauugcaucuaaaugugc

SEQ ID NO: 2340388 - RNA, 19 nt, Artificial Sequence
  Description of Artificial Sequence: Synthetic oligonucleotide
uuauugcuaccuuuagaua

SEQ ID NO: 2340389 - RNA, 19 nt, Artificial Sequence
  Description of Artificial Sequence: Synthetic oligonucleotide
aauacucagccugacucau

SEQ ID NO: 2340390 - RNA, 19 nt, Artificial Sequence
  Description of Artificial Sequence: Synthetic oligonucleotide
aaauaugcaugugcaucca

SEQ ID NO: 2340391 - RNA, 19 nt, Artificial Sequence
  Description of Artificial Sequence: Synthetic oligonucleotide
aucucaaaauccuuccauu

SEQ ID NO: 2340392 - RNA, 19 nt, Artificial Sequence
  Description of Artificial Sequence: Synthetic oligonucleotide
uuggacuuuccuuggacua

SEQ ID NO: 2340393 - RNA, 19 nt, Artificial Sequence
  Description of Artificial Sequence: Synthetic oligonucleotide
ucaaaggagcauucucuaa

SEQ ID NO: 2340394 - RNA, 19 nt, Artificial Sequence
  Description of Artificial Sequence: Synthetic oligonucleotide
gcaaacaggcucaaaaccc

SEQ ID NO: 2340395 - RNA, 19 nt, Artificial Sequence
  Description of Artificial Sequence: Synthetic oligonucleotide
auuuagacaacuacucaau

SEQ ID NO: 2340396 - RNA, 19 nt, Artificial Sequence
  Description of Artificial Sequence: Synthetic oligonucleotide
aguguguguccacuccauc

SEQ ID NO: 2340397 - RNA, 19 nt, Artificial Sequence
  Description of Artificial Sequence: Synthetic oligonucleotide
uagcacaaacaaauccccu

SEQ ID NO: 2340398 - RNA, 19 nt, Artificial Sequence
  Description of Artificial Sequence: Synthetic oligonucleotide
ucuaaauacucagccugac

SEQ ID NO: 2340399 - RNA, 19 nt, Artificial Sequence
  Description of Artificial Sequence: Synthetic oligonucleotide
uaccccgugaauagcacaa

SEQ ID NO: 2340400 - RNA, 19 nt, Artificial Sequence
  Description of Artificial Sequence: Synthetic oligonucleotide
ucacucugcccauccagcc

SEQ ID NO: 2340401 - RNA, 19 nt, Artificial Sequence
  Description of Artificial Sequence: Synthetic oligonucleotide
agccuuuaggccuccuguc

SEQ ID NO: 2340402 - RNA, 19 nt, Artificial Sequence
  Description of Artificial Sequence: Synthetic oligonucleotide
cauaauaagcuaucucaaa

SEQ ID NO: 2340403 - RNA, 19 nt, Artificial Sequence
  Description of Artificial Sequence: Synthetic oligonucleotide
ccuccugucauuuagacaa

SEQ ID NO: 2340404 - RNA, 19 nt, Artificial Sequence
  Description of Artificial Sequence: Synthetic oligonucleotide
acauucagauuacuagaaa

SEQ ID NO: 2340405 - RNA, 19 nt, Artificial Sequence
  Description of Artificial Sequence: Synthetic oligonucleotide
aucucaaaccagcuuuggu

SEQ ID NO: 2340406 - RNA, 19 nt, Artificial Sequence
  Description of Artificial Sequence: Synthetic oligonucleotide
agaaaugcaugggugggcu

SEQ ID NO: 2340407 - RNA, 19 nt, Artificial Sequence
  Description of Artificial Sequence: Synthetic oligonucleotide
agucaucucaaagcugguc

SEQ ID NO: 2340408 - RNA, 19 nt, Artificial Sequence
  Description of Artificial Sequence: Synthetic oligonucleotide
caaacaggcucaaaaccca

SEQ ID NO: 2340409 - RNA, 19 nt, Artificial Sequence
  Description of Artificial Sequence: Synthetic oligonucleotide
cugcauaauaagcuaucuc

SEQ ID NO: 2340410 - RNA, 19 nt, Artificial Sequence
  Description of Artificial Sequence: Synthetic oligonucleotide
agaauuauucaagcaguaa

SEQ ID NO: 2340411 - RNA, 19 nt, Artificial Sequence
  Description of Artificial Sequence: Synthetic oligonucleotide
agacuucugucagucaaag

SEQ ID NO: 2340412 - RNA, 19 nt, Artificial Sequence
  Description of Artificial Sequence: Synthetic oligonucleotide
aagcagagguggaucacag

SEQ ID NO: 2340413 - RNA, 19 nt, Artificial Sequence
  Description of Artificial Sequence: Synthetic oligonucleotide
uuaccucccagcccucagc

SEQ ID NO: 2340414 - RNA, 19 nt, Artificial Sequence
  Description of Artificial Sequence: Synthetic oligonucleotide
auucaagcaguaauacuga

SEQ ID NO: 2340415 - RNA, 19 nt, Artificial Sequence
  Description of Artificial Sequence: Synthetic oligonucleotide
aaggagcauucucuaaaua

SEQ ID NO: 2340416 - RNA, 19 nt, Artificial Sequence
  Description of Artificial Sequence: Synthetic oligonucleotide
gccugagucaucucaaagc

SEQ ID NO: 2340417 - RNA, 19 nt, Artificial Sequence
  Description of Artificial Sequence: Synthetic oligonucleotide
ugucgcggccuccuggcag

SEQ ID NO: 2340418 - RNA, 19 nt, Artificial Sequence
  Description of Artificial Sequence: Synthetic oligonucleotide
agcugcauaauaagcuauc

SEQ ID NO: 2340419 - RNA, 19 nt, Artificial Sequence
  Description of Artificial Sequence: Synthetic oligonucleotide
gcucaaaacccaccugucg

SEQ ID NO: 2340420 - RNA, 19 nt, Artificial Sequence
  Description of Artificial Sequence: Synthetic oligonucleotide
caaagacaaauaaaugccu

SEQ ID NO: 2340421 - RNA, 19 nt, Artificial Sequence
  Description of Artificial Sequence: Synthetic oligonucleotide
gaucucaaaauccuuccau

SEQ ID NO: 2340422 - RNA, 19 nt, Artificial Sequence
  Description of Artificial Sequence: Synthetic oligonucleotide
auggucagcaccaugggaa

SEQ ID NO: 2340423 - RNA, 19 nt, Artificial Sequence
  Description of Artificial Sequence: Synthetic oligonucleotide
acuacucaaugccuugaau

SEQ ID NO: 2340424 - RNA, 19 nt, Artificial Sequence
  Description of Artificial Sequence: Synthetic oligonucleotide
guguguccacuccaucugg

SEQ ID NO: 2340425 - RNA, 19 nt, Artificial Sequence
  Description of Artificial Sequence: Synthetic oligonucleotide
accuuuagauaccccguga

SEQ ID NO: 2340426 - RNA, 19 nt, Artificial Sequence
  Description of Artificial Sequence: Synthetic oligonucleotide
caucuggagacuucuguca

SEQ ID NO: 2340427 - RNA, 19 nt, Artificial Sequence
  Description of Artificial Sequence: Synthetic oligonucleotide
gcagccacaccccuggcgg

SEQ ID NO: 2340428 - RNA, 19 nt, Artificial Sequence
  Description of Artificial Sequence: Synthetic oligonucleotide
ccuguacagagaauuauuc

SEQ ID NO: 2340429 - RNA, 19 nt, Artificial Sequence
  Description of Artificial Sequence: Synthetic oligonucleotide
aagcuagggcuugucagca

SEQ ID NO: 2340430 - RNA, 19 nt, Artificial Sequence
  Description of Artificial Sequence: Synthetic oligonucleotide
uccacaaaacauggucagc

SEQ ID NO: 2340431 - RNA, 19 nt, Artificial Sequence
  Description of Artificial Sequence: Synthetic oligonucleotide
caaaccagcuuuggugggg

SEQ ID NO: 2340432 - RNA, 19 nt, Artificial Sequence
  Description of Artificial Sequence: Synthetic oligonucleotide
ugucagucaaaggagcauu

SEQ ID NO: 2340433 - RNA, 19 nt, Artificial Sequence
  Description of Artificial Sequence: Synthetic oligonucleotide
acuacagauaaaagcugca

SEQ ID NO: 2340434 - RNA, 19 nt, Artificial Sequence
  Description of Artificial Sequence: Synthetic oligonucleotide
gaacauacacaaaaggauu

SEQ ID NO: 2340435 - RNA, 19 nt, Artificial Sequence
  Description of Artificial Sequence: Synthetic oligonucleotide
agguggaucacaggggugu

SEQ ID NO: 2340436 - RNA, 19 nt, Artificial Sequence
  Description of Artificial Sequence: Synthetic oligonucleotide
caaaacccaccugucgcgg

SEQ ID NO: 2340437 - RNA, 19 nt, Artificial Sequence
  Description of Artificial Sequence: Synthetic oligonucleotide
agauaccccgugaauagca

SEQ ID NO: 2340438 - RNA, 19 nt, Artificial Sequence
  Description of Artificial Sequence: Synthetic oligonucleotide
acucaaugccuugaauugu

SEQ ID NO: 2340439 - RNA, 19 nt, Artificial Sequence
  Description of Artificial Sequence: Synthetic oligonucleotide
auaccccgugaauagcaca

SEQ ID NO: 2340440 - RNA, 19 nt, Artificial Sequence
  Description of Artificial Sequence: Synthetic oligonucleotide
gacucauccauuagaucuc

SEQ ID NO: 2340441 - RNA, 19 nt, Artificial Sequence
  Description of Artificial Sequence: Synthetic oligonucleotide
uagauaccccgugaauagc

SEQ ID NO: 2340442 - RNA, 19 nt, Artificial Sequence
  Description of Artificial Sequence: Synthetic oligonucleotide
ugacuccacaaaacauggu

SEQ ID NO: 2340443 - RNA, 19 nt, Artificial Sequence
  Description of Artificial Sequence: Synthetic oligonucleotide
gaagcagagguggaucaca

SEQ ID NO: 2340444 - RNA, 19 nt, Artificial Sequence
  Description of Artificial Sequence: Synthetic oligonucleotide
ugcuaccuuuagauacccc

SEQ ID NO: 2340445 - RNA, 19 nt, Artificial Sequence
  Description of Artificial Sequence: Synthetic oligonucleotide
aagcuaucucaaaccagcu

SEQ ID NO: 2340446 - RNA, 19 nt, Artificial Sequence
  Description of Artificial Sequence: Synthetic oligonucleotide
cuacucaaugccuugaauu

SEQ ID NO: 2340447 - RNA, 19 nt, Artificial Sequence
  Description of Artificial Sequence: Synthetic oligonucleotide
uugcuaccuuuagauaccc

SEQ ID NO: 2340448 - RNA, 19 nt, Artificial Sequence
  Description of Artificial Sequence: Synthetic oligonucleotide
cuggagacuucugucaguc

SEQ ID NO: 2340449 - RNA, 19 nt, Artificial Sequence
  Description of Artificial Sequence: Synthetic oligonucleotide
agcuuuggugggguggcac

SEQ ID NO: 2340450 - RNA, 19 nt, Artificial Sequence
  Description of Artificial Sequence: Synthetic oligonucleotide
aaaugccuucaucucccua

SEQ ID NO: 2340451 - RNA, 19 nt, Artificial Sequence
  Description of Artificial Sequence: Synthetic oligonucleotide
gcagugacuccacaaaaca

SEQ ID NO: 2340452 - RNA, 19 nt, Artificial Sequence
  Description of Artificial Sequence: Synthetic oligonucleotide
gcgcgagcagcucaggugg

SEQ ID NO: 2340453 - RNA, 19 nt, Artificial Sequence
  Description of Artificial Sequence: Synthetic oligonucleotide
aaugcaugggugggcuugu

SEQ ID NO: 2340454 - RNA, 19 nt, Artificial Sequence
  Description of Artificial Sequence: Synthetic oligonucleotide
gagaauuauucaagcagua

SEQ ID NO: 2340455 - RNA, 19 nt, Artificial Sequence
  Description of Artificial Sequence: Synthetic oligonucleotide
accugucgcggccuccugg

SEQ ID NO: 2340456 - RNA, 19 nt, Artificial Sequence
  Description of Artificial Sequence: Synthetic oligonucleotide
auaugcaugugcauccaau

SEQ ID NO: 2340457 - RNA, 19 nt, Artificial Sequence
  Description of Artificial Sequence: Synthetic oligonucleotide
cugagaaacagugaacaua

SEQ ID NO: 2340458 - RNA, 19 nt, Artificial Sequence
  Description of Artificial Sequence: Synthetic oligonucleotide
cagaaaugcaugggugggc

SEQ ID NO: 2340459 - RNA, 19 nt, Artificial Sequence
  Description of Artificial Sequence: Synthetic oligonucleotide
uaaaugccuucaucucccu

SEQ ID NO: 2340460 - RNA, 19 nt, Artificial Sequence
  Description of Artificial Sequence: Synthetic oligonucleotide
uccugucauuuagacaacu

SEQ ID NO: 2340461 - RNA, 19 nt, Artificial Sequence
  Description of Artificial Sequence: Synthetic oligonucleotide
cucaaagcuggucuguuua

SEQ ID NO: 2340462 - RNA, 19 nt, Artificial Sequence
  Description of Artificial Sequence: Synthetic oligonucleotide
agcuaucucaaaccagcuu

SEQ ID NO: 2340463 - RNA, 19 nt, Artificial Sequence
  Description of Artificial Sequence: Synthetic oligonucleotide
ugcaugggugggcuuguaa

SEQ ID NO: 2340464 - RNA, 19 nt, Artificial Sequence
  Description of Artificial Sequence: Synthetic oligonucleotide
gauaccccgugaauagcac

SEQ ID NO: 2340465 - RNA, 19 nt, Artificial Sequence
  Description of Artificial Sequence: Synthetic oligonucleotide
augccuugaauuguccccu

SEQ ID NO: 2340466 - RNA, 19 nt, Artificial Sequence
  Description of Artificial Sequence: Synthetic oligonucleotide
auccccuguacagagaauu

SEQ ID NO: 2340467 - RNA, 19 nt, Artificial Sequence
  Description of Artificial Sequence: Synthetic oligonucleotide
agacaacuacucaaugccu

SEQ ID NO: 2340468 - RNA, 19 nt, Artificial Sequence
  Description of Artificial Sequence: Synthetic oligonucleotide
ucagccugacucauccauu

SEQ ID NO: 2340469 - RNA, 19 nt, Artificial Sequence
  Description of Artificial Sequence: Synthetic oligonucleotide
cuguuuaccucccagcccu

SEQ ID NO: 2340470 - RNA, 19 nt, Artificial Sequence
  Description of Artificial Sequence: Synthetic oligonucleotide
ucucaaagcuggucuguuu

SEQ ID NO: 2340471 - RNA, 19 nt, Artificial Sequence
  Description of Artificial Sequence: Synthetic oligonucleotide
gggcuuguaagcuagggcu

SEQ ID NO: 2340472 - RNA, 19 nt, Artificial Sequence
  Description of Artificial Sequence: Synthetic oligonucleotide
uuuaggccuccugucauuu

SEQ ID NO: 2340473 - RNA, 19 nt, Artificial Sequence
  Description of Artificial Sequence: Synthetic oligonucleotide
augggugggcuuguaagcu

SEQ ID NO: 2340474 - RNA, 19 nt, Artificial Sequence
  Description of Artificial Sequence: Synthetic oligonucleotide
uccccuguacagagaauua

SEQ ID NO: 2340475 - RNA, 19 nt, Artificial Sequence
  Description of Artificial Sequence: Synthetic oligonucleotide
acucugcccauccagccuu

SEQ ID NO: 2340476 - RNA, 19 nt, Artificial Sequence
  Description of Artificial Sequence: Synthetic oligonucleotide
agcuuuauugcuaccuuua

SEQ ID NO: 2340477 - RNA, 19 nt, Artificial Sequence
  Description of Artificial Sequence: Synthetic oligonucleotide
guguguguccacuccaucu

SEQ ID NO: 2340478 - RNA, 19 nt, Artificial Sequence
  Description of Artificial Sequence: Synthetic oligonucleotide
gcccauccagccuuuaggc

SEQ ID NO: 2340479 - RNA, 19 nt, Artificial Sequence
  Description of Artificial Sequence: Synthetic oligonucleotide
cucagcagugacuccacaa

SEQ ID NO: 2340480 - RNA, 19 nt, Artificial Sequence
  Description of Artificial Sequence: Synthetic oligonucleotide
cacugccugagucaucuca

SEQ ID NO: 2340481 - RNA, 19 nt, Artificial Sequence
  Description of Artificial Sequence: Synthetic oligonucleotide
cauccagccuuuaggccuc

SEQ ID NO: 2340482 - RNA, 19 nt, Artificial Sequence
  Description of Artificial Sequence: Synthetic oligonucleotide
uccuuggacuacagauaaa

SEQ ID NO: 2340483 - RNA, 19 nt, Artificial Sequence
  Description of Artificial Sequence: Synthetic oligonucleotide
cagggguguccacagugug

SEQ ID NO: 2340484 - RNA, 19 nt, Artificial Sequence
  Description of Artificial Sequence: Synthetic oligonucleotide
gucagucaaaggagcauuc

SEQ ID NO: 2340485 - RNA, 19 nt, Artificial Sequence
  Description of Artificial Sequence: Synthetic oligonucleotide
ccaguuacacaccuucauc

SEQ ID NO: 2340486 - RNA, 19 nt, Artificial Sequence
  Description of Artificial Sequence: Synthetic oligonucleotide
caggcucaaaacccaccug

SEQ ID NO: 2340487 - RNA, 19 nt, Artificial Sequence
  Description of Artificial Sequence: Synthetic oligonucleotide
cuaaauacucagccugacu

SEQ ID NO: 2340488 - RNA, 19 nt, Artificial Sequence
  Description of Artificial Sequence: Synthetic oligonucleotide
cuaccuuuagauaccccgu

SEQ ID NO: 2340489 - RNA, 19 nt, Artificial Sequence
  Description of Artificial Sequence: Synthetic oligonucleotide
gcauaauaagcuaucucaa

SEQ ID NO: 2340490 - RNA, 19 nt, Artificial Sequence
  Description of Artificial Sequence: Synthetic oligonucleotide
cucggcgcgagcagcucag

SEQ ID NO: 2340491 - RNA, 19 nt, Artificial Sequence
  Description of Artificial Sequence: Synthetic oligonucleotide
guuacacaccuucaucaau

SEQ ID NO: 2340492 - RNA, 19 nt, Artificial Sequence
  Description of Artificial Sequence: Synthetic oligonucleotide
ugcaccaguuacacaccuu

SEQ ID NO: 2340493 - RNA, 19 nt, Artificial Sequence
  Description of Artificial Sequence: Synthetic oligonucleotide
cuccugucauuuagacaac

SEQ ID NO: 2340494 - RNA, 19 nt, Artificial Sequence
  Description of Artificial Sequence: Synthetic oligonucleotide
gagacuucugucagucaaa

SEQ ID NO: 2340495 - RNA, 19 nt, Artificial Sequence
  Description of Artificial Sequence: Synthetic oligonucleotide
cacgccgcaccucggcgcg

SEQ ID NO: 2340496 - RNA, 19 nt, Artificial Sequence
  Description of Artificial Sequence: Synthetic oligonucleotide
cuuccaacacaaagacaaa

SEQ ID NO: 2340497 - RNA, 19 nt, Artificial Sequence
  Description of Artificial Sequence: Synthetic oligonucleotide
ugggugggcuuguaagcua

SEQ ID NO: 2340498 - RNA, 19 nt, Artificial Sequence
  Description of Artificial Sequence: Synthetic oligonucleotide
gacaacuacucaaugccuu

SEQ ID NO: 2340499 - RNA, 19 nt, Artificial Sequence
  Description of Artificial Sequence: Synthetic oligonucleotide
gcaucuaaaugugcaccag

SEQ ID NO: 2340500 - RNA, 19 nt, Artificial Sequence
  Description of Artificial Sequence: Synthetic oligonucleotide
auacucagccugacucauc

SEQ ID NO: 2340501 - RNA, 19 nt, Artificial Sequence
  Description of Artificial Sequence: Synthetic oligonucleotide
uuguaagcuagggcuuguc

SEQ ID NO: 2340502 - RNA, 19 nt, Artificial Sequence
  Description of Artificial Sequence: Synthetic oligonucleotide
caaauccccuguacagaga

SEQ ID NO: 2340503 - RNA, 19 nt, Artificial Sequence
  Description of Artificial Sequence: Synthetic oligonucleotide
acagggguguccacagugu

SEQ ID NO: 2340504 - RNA, 19 nt, Artificial Sequence
  Description of Artificial Sequence: Synthetic oligonucleotide
gccugacucauccauuaga

SEQ ID NO: 2340505 - RNA, 19 nt, Artificial Sequence
  Description of Artificial Sequence: Synthetic oligonucleotide
ccuuggacuacagauaaaa

SEQ ID NO: 2340506 - RNA, 19 nt, Artificial Sequence
  Description of Artificial Sequence: Synthetic oligonucleotide
cuuuagauaccccgugaau

SEQ ID NO: 2340507 - RNA, 19 nt, Artificial Sequence
  Description of Artificial Sequence: Synthetic oligonucleotide
uuaggccuccugucauuua

SEQ ID NO: 2340508 - RNA, 19 nt, Artificial Sequence
  Description of Artificial Sequence: Synthetic oligonucleotide
gcuuguaagcuagggcuug

SEQ ID NO: 2340509 - RNA, 19 nt, Artificial Sequence
  Description of Artificial Sequence: Synthetic oligonucleotide
cacacaccaguguaaauuu

SEQ ID NO: 2340510 - RNA, 19 nt, Artificial Sequence
  Description of Artificial Sequence: Synthetic oligonucleotide
caacuacucaaugccuuga

SEQ ID NO: 2340511 - RNA, 19 nt, Artificial Sequence
  Description of Artificial Sequence: Synthetic oligonucleotide
cccgugaauagcacaaaca

SEQ ID NO: 2340512 - RNA, 19 nt, Artificial Sequence
  Description of Artificial Sequence: Synthetic oligonucleotide
ugccuugaauuguccccuc

SEQ ID NO: 2340513 - RNA, 19 nt, Artificial Sequence
  Description of Artificial Sequence: Synthetic oligonucleotide
cagccugacucauccauua

SEQ ID NO: 2340514 - RNA, 19 nt, Artificial Sequence
  Description of Artificial Sequence: Synthetic oligonucleotide
aauccccuguacagagaau

SEQ ID NO: 2340515 - RNA, 19 nt, Artificial Sequence
  Description of Artificial Sequence: Synthetic oligonucleotide
ggucccgccacgccgcacc

SEQ ID NO: 2340516 - RNA, 19 nt, Artificial Sequence
  Description of Artificial Sequence: Synthetic oligonucleotide
agggguguccacagugugu

SEQ ID NO: 2340517 - RNA, 19 nt, Artificial Sequence
  Description of Artificial Sequence: Synthetic oligonucleotide
cagugacuccacaaaacau

SEQ ID NO: 2340518 - RNA, 19 nt, Artificial Sequence
  Description of Artificial Sequence: Synthetic oligonucleotide
gccuuuaggccuccuguca

SEQ ID NO: 2340519 - RNA, 19 nt, Artificial Sequence
  Description of Artificial Sequence: Synthetic oligonucleotide
gccuugaauuguccccucc

SEQ ID NO: 2340520 - RNA, 19 nt, Artificial Sequence
  Description of Artificial Sequence: Synthetic oligonucleotide
gcuagggcuugucagcaaa

SEQ ID NO: 2340521 - RNA, 19 nt, Artificial Sequence
  Description of Artificial Sequence: Synthetic oligonucleotide
acaccccuggcggccgggc

SEQ ID NO: 2340522 - RNA, 19 nt, Artificial Sequence
  Description of Artificial Sequence: Synthetic oligonucleotide
cagccacaccccuggcggc

SEQ ID NO: 2340523 - RNA, 19 nt, Artificial Sequence
  Description of Artificial Sequence: Synthetic oligonucleotide
caucucccuaugcuuugga

SEQ ID NO: 2340524 - RNA, 19 nt, Artificial Sequence
  Description of Artificial Sequence: Synthetic oligonucleotide
caaucacuuccaacacaaa

SEQ ID NO: 2340525 - RNA, 19 nt, Artificial Sequence
  Description of Artificial Sequence: Synthetic oligonucleotide
guggcacuucaaauaugca

SEQ ID NO: 2340526 - RNA, 19 nt, Artificial Sequence
  Description of Artificial Sequence: Synthetic oligonucleotide
ccuuuagauaccccgugaa

SEQ ID NO: 2340527 - RNA, 19 nt, Artificial Sequence
  Description of Artificial Sequence: Synthetic oligonucleotide
agcuagggcuugucagcaa

SEQ ID NO: 2340528 - RNA, 19 nt, Artificial Sequence
  Description of Artificial Sequence: Synthetic oligonucleotide
ccccgugaauagcacaaac

SEQ ID NO: 2340529 - RNA, 19 nt, Artificial Sequence
  Description of Artificial Sequence: Synthetic oligonucleotide
guccacaguguguguccac

SEQ ID NO: 2340530 - RNA, 19 nt, Artificial Sequence
  Description of Artificial Sequence: Synthetic oligonucleotide
caccuucaucaaucacuuc

SEQ ID NO: 2340531 - RNA, 19 nt, Artificial Sequence
  Description of Artificial Sequence: Synthetic oligonucleotide
gugggguggcacuucaaau

SEQ ID NO: 2340532 - RNA, 19 nt, Artificial Sequence
  Description of Artificial Sequence: Synthetic oligonucleotide
cccgccacgccgcaccucg

SEQ ID NO: 2340533 - RNA, 19 nt, Artificial Sequence
  Description of Artificial Sequence: Synthetic oligonucleotide
ccuaugcuuuggacuuucc

SEQ ID NO: 2340534 - RNA, 19 nt, Artificial Sequence
  Description of Artificial Sequence: Synthetic oligonucleotide
guuuaccucccagcccuca

SEQ ID NO: 2340535 - RNA, 19 nt, Artificial Sequence
  Description of Artificial Sequence: Synthetic oligonucleotide
cgugaauagcacaaacaaa

SEQ ID NO: 2340536 - RNA, 19 nt, Artificial Sequence
  Description of Artificial Sequence: Synthetic oligonucleotide
gugcaccaguuacacaccu

SEQ ID NO: 2340537 - RNA, 19 nt, Artificial Sequence
  Description of Artificial Sequence: Synthetic oligonucleotide
gccacgccgcaccucggcg

SEQ ID NO: 2340538 - RNA, 19 nt, Artificial Sequence
  Description of Artificial Sequence: Synthetic oligonucleotide
gcuuuggacuuuccuugga

SEQ ID NO: 2340539 - RNA, 19 nt, Artificial Sequence
  Description of Artificial Sequence: Synthetic oligonucleotide
gggguggcacuucaaauau

SEQ ID NO: 2340540 - RNA, 19 nt, Artificial Sequence
  Description of Artificial Sequence: Synthetic oligonucleotide
ggugggcuuguaagcuagg

SEQ ID NO: 2340541 - RNA, 19 nt, Artificial Sequence
  Description of Artificial Sequence: Synthetic oligonucleotide
caccaguguaaauuugguu

SEQ ID NO: 2340542 - RNA, 19 nt, Artificial Sequence
  Description of Artificial Sequence: Synthetic oligonucleotide
ggcucaaaacccaccuguc

SEQ ID NO: 2340543 - RNA, 19 nt, Artificial Sequence
  Description of Artificial Sequence: Synthetic oligonucleotide
cugccugagucaucucaaa

SEQ ID NO: 2340544 - RNA, 19 nt, Artificial Sequence
  Description of Artificial Sequence: Synthetic oligonucleotide
cucauccauuagaucucaa

SEQ ID NO: 2340545 - RNA, 19 nt, Artificial Sequence
  Description of Artificial Sequence: Synthetic oligonucleotide
gaaaugcaugggugggcuu

SEQ ID NO: 2340546 - RNA, 19 nt, Artificial Sequence
  Description of Artificial Sequence: Synthetic oligonucleotide
gcgcggucccgccacgccg

SEQ ID NO: 2340547 - RNA, 19 nt, Artificial Sequence
  Description of Artificial Sequence: Synthetic oligonucleotide
caucucaaagcuggucugu

SEQ ID NO: 2340548 - RNA, 19 nt, Artificial Sequence
  Description of Artificial Sequence: Synthetic oligonucleotide
accucggcgcgagcagcuc

SEQ ID NO: 2340549 - RNA, 19 nt, Artificial Sequence
  Description of Artificial Sequence: Synthetic oligonucleotide
cuggcggccgggcgcgcgc

SEQ ID NO: 2340550 - RNA, 19 nt, Artificial Sequence
  Description of Artificial Sequence: Synthetic oligonucleotide
cuggucuguuuaccuccca

SEQ ID NO: 2340551 - RNA, 19 nt, Artificial Sequence
  Description of Artificial Sequence: Synthetic oligonucleotide
ggguggcacuucaaauaug

SEQ ID NO: 2340552 - RNA, 19 nt, Artificial Sequence
  Description of Artificial Sequence: Synthetic oligonucleotide
ucccuaugcuuuggacuuu

SEQ ID NO: 2340553 - RNA, 19 nt, Artificial Sequence
  Description of Artificial Sequence: Synthetic oligonucleotide
cgagcagcucaggugggcg

SEQ ID NO: 2340554 - RNA, 19 nt, Artificial Sequence
  Description of Artificial Sequence: Synthetic oligonucleotide
accccgugaauagcacaaa

SEQ ID NO: 2340555 - RNA, 19 nt, Artificial Sequence
  Description of Artificial Sequence: Synthetic oligonucleotide
ccaaucacacccacaaauu

SEQ ID NO: 2340556 - RNA, 19 nt, Artificial Sequence
  Description of Artificial Sequence: Synthetic oligonucleotide
cugucagucaaaggagcau

SEQ ID NO: 2340557 - RNA, 19 nt, Artificial Sequence
  Description of Artificial Sequence: Synthetic oligonucleotide
ucugcccauccagccuuua

SEQ ID NO: 2340558 - RNA, 19 nt, Artificial Sequence
  Description of Artificial Sequence: Synthetic oligonucleotide
caguguguguccacuccau

SEQ ID NO: 2340559 - RNA, 19 nt, Artificial Sequence
  Description of Artificial Sequence: Synthetic oligonucleotide
cacaccccuggcggccggg

SEQ ID NO: 2340560 - RNA, 19 nt, Artificial Sequence
  Description of Artificial Sequence: Synthetic oligonucleotide
gguggaucacagggguguc

SEQ ID NO: 2340561 - RNA, 19 nt, Artificial Sequence
  Description of Artificial Sequence: Synthetic oligonucleotide
cccuaugcuuuggacuuuc

SEQ ID NO: 2340562 - RNA, 19 nt, Artificial Sequence
  Description of Artificial Sequence: Synthetic oligonucleotide
caccugucgcggccuccug

SEQ ID NO: 2340563 - RNA, 19 nt, Artificial Sequence
  Description of Artificial Sequence: Synthetic oligonucleotide
ucgcggccuccuggcagcc

SEQ ID NO: 2340564 - RNA, 19 nt, Artificial Sequence
  Description of Artificial Sequence: Synthetic oligonucleotide
gcgagcagcucaggugggc

SEQ ID NO: 2340565 - RNA, 19 nt, Artificial Sequence
  Description of Artificial Sequence: Synthetic oligonucleotide
gccacaccccuggcggccg

SEQ ID NO: 2340566 - RNA, 19 nt, Artificial Sequence
  Description of Artificial Sequence: Synthetic oligonucleotide
cccuguacagagaauuauu

SEQ ID NO: 2340567 - RNA, 19 nt, Artificial Sequence
  Description of Artificial Sequence: Synthetic oligonucleotide
cugucgcggccuccuggca

SEQ ID NO: 2340568 - RNA, 19 nt, Artificial Sequence
  Description of Artificial Sequence: Synthetic oligonucleotide
caccucggcgcgagcagcu

SEQ ID NO: 2340569 - RNA, 19 nt, Artificial Sequence
  Description of Artificial Sequence: Synthetic oligonucleotide
cgcgagcagcucagguggg

SEQ ID NO: 2340570 - RNA, 19 nt, Artificial Sequence
  Description of Artificial Sequence: Synthetic oligonucleotide
ccuuuaggccuccugucau

SEQ ID NO: 2340571 - RNA, 19 nt, Artificial Sequence
  Description of Artificial Sequence: Synthetic oligonucleotide
ggcuuguaagcuagggcuu

SEQ ID NO: 2340572 - RNA, 19 nt, Artificial Sequence
  Description of Artificial Sequence: Synthetic oligonucleotide
augcaugggugggcuugua

SEQ ID NO: 2340573 - RNA, 19 nt, Artificial Sequence
  Description of Artificial Sequence: Synthetic oligonucleotide
ucccgccacgccgcaccuc

SEQ ID NO: 2340574 - RNA, 19 nt, Artificial Sequence
  Description of Artificial Sequence: Synthetic oligonucleotide
ccucggcgcgagcagcuca

SEQ ID NO: 2340575 - RNA, 19 nt, Artificial Sequence
  Description of Artificial Sequence: Synthetic oligonucleotide
ccacaccccuggcggccgg

SEQ ID NO: 2340576 - RNA, 19 nt, Artificial Sequence
  Description of Artificial Sequence: Synthetic oligonucleotide
cgccacgccgcaccucggc

SEQ ID NO: 2340577 - RNA, 19 nt, Artificial Sequence
  Description of Artificial Sequence: Synthetic oligonucleotide
ccccuggcggccgggcgcg

SEQ ID NO: 2340578 - RNA, 19 nt, Artificial Sequence
  Description of Artificial Sequence: Synthetic oligonucleotide
cccaccugucgcggccucc

SEQ ID NO: 2340579 - RNA, 19 nt, Artificial Sequence
  Description of Artificial Sequence: Synthetic oligonucleotide
ccccuguacagagaauuau

SEQ ID NO: 2340580 - RNA, 19 nt, Artificial Sequence
  Description of Artificial Sequence: Synthetic oligonucleotide
cgcgcggucccgccacgcc

SEQ ID NO: 2340581 - RNA, 19 nt, Artificial Sequence
  Description of Artificial Sequence: Synthetic oligonucleotide
ccgccacgccgcaccucgg

SEQ ID NO: 2340582 - RNA, 19 nt, Artificial Sequence
  Description of Artificial Sequence: Synthetic oligonucleotide
ccgcaccucggcgcgagca

SEQ ID NO: 2340583 - RNA, 19 nt, Artificial Sequence
  Description of Artificial Sequence: Synthetic oligonucleotide
cucugcccauccagccuuu

SEQ ID NO: 2340584 - RNA, 19 nt, Artificial Sequence
  Description of Artificial Sequence: Synthetic oligonucleotide
gccgcaccucggcgcgagc

SEQ ID NO: 2340585 - RNA, 19 nt, Artificial Sequence
  Description of Artificial Sequence: Synthetic oligonucleotide
acgccgcaccucggcgcga

SEQ ID NO: 2340586 - RNA, 19 nt, Artificial Sequence
  Description of Artificial Sequence: Synthetic oligonucleotide
ccaccugucgcggccuccu

SEQ ID NO: 2340587 - RNA, 19 nt, Artificial Sequence
  Description of Artificial Sequence: Synthetic oligonucleotide
cgggcgcgcgcggucccgc

SEQ ID NO: 2340588 - RNA, 19 nt, Artificial Sequence
  Description of Artificial Sequence: Synthetic oligonucleotide
cggcgcgagcagcucaggu

SEQ ID NO: 2340589 - RNA, 19 nt, Artificial Sequence
  Description of Artificial Sequence: Synthetic oligonucleotide
cggucccgccacgccgcac

SEQ ID NO: 2340590 - RNA, 19 nt, Artificial Sequence
  Description of Artificial Sequence: Synthetic oligonucleotide
uccaaaauaugucacaugg

SEQ ID NO: 2340591 - RNA, 19 nt, Artificial Sequence
  Description of Artificial Sequence: Synthetic oligonucleotide
gauccuggaacauaggagg

SEQ ID NO: 2340592 - RNA, 19 nt, Artificial Sequence
  Description of Artificial Sequence: Synthetic oligonucleotide
aguaucagguacuauuacc

SEQ ID NO: 2340593 - RNA, 19 nt, Artificial Sequence
  Description of Artificial Sequence: Synthetic oligonucleotide
uauugcuuggcccagacga

SEQ ID NO: 2340594 - RNA, 19 nt, Artificial Sequence
  Description of Artificial Sequence: Synthetic oligonucleotide
aaaauaugucacaugguac

SEQ ID NO: 2340595 - RNA, 19 nt, Artificial Sequence
  Description of Artificial Sequence: Synthetic oligonucleotide
uccuuuugcuuaaagaaag

SEQ ID NO: 2340596 - RNA, 19 nt, Artificial Sequence
  Description of Artificial Sequence: Synthetic oligonucleotide
  modified_base (2)..(2): a, c, u, g, unknown or other
anguuuucccucuaacuag

SEQ ID NO: 2340597 - RNA, 19 nt, Artificial Sequence
  Description of Artificial Sequence: Synthetic oligonucleotide
aaugcacucauauccaucu

SEQ ID NO: 2340598 - RNA, 19 nt, Artificial Sequence
  Description of Artificial Sequence: Synthetic oligonucleotide
ucugcauugguuaagaguu

SEQ ID NO: 2340599 - RNA, 19 nt, Artificial Sequence
  Description of Artificial Sequence: Synthetic oligonucleotide
aucagguacuauuaccucc

SEQ ID NO: 2340600 - RNA, 19 nt, Artificial Sequence
  Description of Artificial Sequence: Synthetic oligonucleotide
aagucuguuggauuucuuc

SEQ ID NO: 2340601 - RNA, 19 nt, Artificial Sequence
  Description of Artificial Sequence: Synthetic oligonucleotide
uugucuuucagaaugcacu

SEQ ID NO: 2340602 - RNA, 19 nt, Artificial Sequence
  Description of Artificial Sequence: Synthetic oligonucleotide
ucacaugguacuuggacgg

SEQ ID NO: 2340603 - RNA, 19 nt, Artificial Sequence
  Description of Artificial Sequence: Synthetic oligonucleotide
uacaaucuggaaaaucucc

SEQ ID NO: 2340604 - RNA, 19 nt, Artificial Sequence
  Description of Artificial Sequence: Synthetic oligonucleotide
auaaccguauugcuuggcc

SEQ ID NO: 2340605 - RNA, 19 nt, Artificial Sequence
  Description of Artificial Sequence: Synthetic oligonucleotide
ucaaauucugcauugguua

SEQ ID NO: 2340606 - RNA, 19 nt, Artificial Sequence
  Description of Artificial Sequence: Synthetic oligonucleotide
ucuaacuagcuccagggac

SEQ ID NO: 2340607 - RNA, 19 nt, Artificial Sequence
  Description of Artificial Sequence: Synthetic oligonucleotide
ugagaaggauccugaaucg

SEQ ID NO: 2340608 - RNA, 19 nt, Artificial Sequence
  Description of Artificial Sequence: Synthetic oligonucleotide
ugagguuucacauggugug

SEQ ID NO: 2340609 - RNA, 19 nt, Artificial Sequence
  Description of Artificial Sequence: Synthetic oligonucleotide
uucauauucuuugauauuc

SEQ ID NO: 2340610 - RNA, 19 nt, Artificial Sequence
  Description of Artificial Sequence: Synthetic oligonucleotide
aagaaagucuguuggauuu

SEQ ID NO: 2340611 - RNA, 19 nt, Artificial Sequence
  Description of Artificial Sequence: Synthetic oligonucleotide
acguccuaaucucagaguc

SEQ ID NO: 2340612 - RNA, 19 nt, Artificial Sequence
  Description of Artificial Sequence: Synthetic oligonucleotide
  modified_base (11)..(11): a, c, u, g, unknown or other
uguuccuacanguuuuccc

SEQ ID NO: 2340613 - RNA, 19 nt, Artificial Sequence
  Description of Artificial Sequence: Synthetic oligonucleotide
auauccaucuuggauuucc

SEQ ID NO: 2340614 - RNA, 19 nt, Artificial Sequence
  Description of Artificial Sequence: Synthetic oligonucleotide
ucuuggaggguucagcagc

SEQ ID NO: 2340615 - RNA, 19 nt, Artificial Sequence
  Description of Artificial Sequence: Synthetic oligonucleotide
cugagaaggauccugaauc

SEQ ID NO: 2340616 - RNA, 19 nt, Artificial Sequence
  Description of Artificial Sequence: Synthetic oligonucleotide
gucacaugguacuuggacg

SEQ ID NO: 2340617 - RNA, 19 nt, Artificial Sequence
  Description of Artificial Sequence: Synthetic oligonucleotide
uuagacguccuaaucucag

SEQ ID NO: 2340618 - RNA, 19 nt, Artificial Sequence
  Description of Artificial Sequence: Synthetic oligonucleotide
aaucguugucuucugcuug

SEQ ID NO: 2340619 - RNA, 19 nt, Artificial Sequence
  Description of Artificial Sequence: Synthetic oligonucleotide
acuauuaccuccucccaag

SEQ ID NO: 2340620 - RNA, 19 nt, Artificial Sequence
  Description of Artificial Sequence: Synthetic oligonucleotide
aaucucucgaguaucaggu

SEQ ID NO: 2340621 - RNA, 19 nt, Artificial Sequence
  Description of Artificial Sequence: Synthetic oligonucleotide
uucuuugauauucugugau

SEQ ID NO: 2340622 - RNA, 19 nt, Artificial Sequence
  Description of Artificial Sequence: Synthetic oligonucleotide
ugucacaugguacuuggac

SEQ ID NO: 2340623 - RNA, 19 nt, Artificial Sequence
  Description of Artificial Sequence: Synthetic oligonucleotide
uuucuaucaugccuggcca

SEQ ID NO: 2340624 - RNA, 19 nt, Artificial Sequence
  Description of Artificial Sequence: Synthetic oligonucleotide
  modified_base (4)..(4): a, c, u, g, unknown or other
acanguuuucccucuaacu

SEQ ID NO: 2340625 - RNA, 19 nt, Artificial Sequence
  Description of Artificial Sequence: Synthetic oligonucleotide
gauggauccuggaacauag

SEQ ID NO: 2340626 - RNA, 19 nt, Artificial Sequence
  Description of Artificial Sequence: Synthetic oligonucleotide
gguacuauuaccuccuccc

SEQ ID NO: 2340627 - RNA, 19 nt, Artificial Sequence
  Description of Artificial Sequence: Synthetic oligonucleotide
uuuguguaggugaagcaaa

SEQ ID NO: 2340628 - RNA, 19 nt, Artificial Sequence
  Description of Artificial Sequence: Synthetic oligonucleotide
agaagaugcaaucucucga

SEQ ID NO: 2340629 - RNA, 19 nt, Artificial Sequence
  Description of Artificial Sequence: Synthetic oligonucleotide
aaagaaagucuguuggauu

SEQ ID NO: 2340630 - RNA, 19 nt, Artificial Sequence
  Description of Artificial Sequence: Synthetic oligonucleotide
auaggaggaccccugaucu

SEQ ID NO: 2340631 - RNA, 19 nt, Artificial Sequence
  Description of Artificial Sequence: Synthetic oligonucleotide
ugaaucguugucuucugcu

SEQ ID NO: 2340632 - RNA, 19 nt, Artificial Sequence
  Description of Artificial Sequence: Synthetic oligonucleotide
ucuuugauauucugugaug

SEQ ID NO: 2340633 - RNA, 19 nt, Artificial Sequence
  Description of Artificial Sequence: Synthetic oligonucleotide
ucagguacuauuaccuccu

SEQ ID NO: 2340634 - RNA, 19 nt, Artificial Sequence
  Description of Artificial Sequence: Synthetic oligonucleotide
agguacuauuaccuccucc

SEQ ID NO: 2340635 - RNA, 19 nt, Artificial Sequence
  Description of Artificial Sequence: Synthetic oligonucleotide
cuuccguaguacaaucugg

SEQ ID NO: 2340636 - RNA, 19 nt, Artificial Sequence
  Description of Artificial Sequence: Synthetic oligonucleotide
caaucucucgaguaucagg

SEQ ID NO: 2340637 - RNA, 19 nt, Artificial Sequence
  Description of Artificial Sequence: Synthetic oligonucleotide
uggaaaaucuccucaaauu

SEQ ID NO: 2340638 - RNA, 19 nt, Artificial Sequence
  Description of Artificial Sequence: Synthetic oligonucleotide
aaccguauugcuuggccca

SEQ ID NO: 2340639 - RNA, 19 nt, Artificial Sequence
  Description of Artificial Sequence: Synthetic oligonucleotide
  modified_base (5)..(5): a, c, u, g, unknown or other
uacanguuuucccucuaac

SEQ ID NO: 2340640 - RNA, 19 nt, Artificial Sequence
  Description of Artificial Sequence: Synthetic oligonucleotide
ucgaguaucagguacuauu

SEQ ID NO: 2340641 - RNA, 19 nt, Artificial Sequence
  Description of Artificial Sequence: Synthetic oligonucleotide
agacguccuaaucucagag

SEQ ID NO: 2340642 - RNA, 19 nt, Artificial Sequence
  Description of Artificial Sequence: Synthetic oligonucleotide
uuccguaguacaaucugga

SEQ ID NO: 2340643 - RNA, 19 nt, Artificial Sequence
  Description of Artificial Sequence: Synthetic oligonucleotide
ucuagagaagaugcaaucu

SEQ ID NO: 2340644 - RNA, 19 nt, Artificial Sequence
  Description of Artificial Sequence: Synthetic oligonucleotide
cuagagaagaugcaaucuc

SEQ ID NO: 2340645 - RNA, 19 nt, Artificial Sequence
  Description of Artificial Sequence: Synthetic oligonucleotide
caaaauaugucacauggua

SEQ ID NO: 2340646 - RNA, 19 nt, Artificial Sequence
  Description of Artificial Sequence: Synthetic oligonucleotide
uuuuguguaggugaagcaa

SEQ ID NO: 2340647 - RNA, 19 nt, Artificial Sequence
  Description of Artificial Sequence: Synthetic oligonucleotide
cacgagaaacucuuucucc

SEQ ID NO: 2340648 - RNA, 19 nt, Artificial Sequence
  Description of Artificial Sequence: Synthetic oligonucleotide
aaauucugcauugguuaag

SEQ ID NO: 2340649 - RNA, 19 nt, Artificial Sequence
  Description of Artificial Sequence: Synthetic oligonucleotide
uaaccguauugcuuggccc

SEQ ID NO: 2340650 - RNA, 19 nt, Artificial Sequence
  Description of Artificial Sequence: Synthetic oligonucleotide
auugguuaagaguuuguuu

SEQ ID NO: 2340651 - RNA, 19 nt, Artificial Sequence
  Description of Artificial Sequence: Synthetic oligonucleotide
uccuccuuuugcuuaaaga

SEQ ID NO: 2340652 - RNA, 19 nt, Artificial Sequence
  Description of Artificial Sequence: Synthetic oligonucleotide
ucuucuagagaagaugcaa

SEQ ID NO: 2340653 - RNA, 19 nt, Artificial Sequence
  Description of Artificial Sequence: Synthetic oligonucleotide
ucuucggauuucuuccucc

SEQ ID NO: 2340654 - RNA, 19 nt, Artificial Sequence
  Description of Artificial Sequence: Synthetic oligonucleotide
acgagaaacucuuucucca

SEQ ID NO: 2340655 - RNA, 19 nt, Artificial Sequence
  Description of Artificial Sequence: Synthetic oligonucleotide
gaccccugaucugagaagg

SEQ ID NO: 2340656 - RNA, 19 nt, Artificial Sequence
  Description of Artificial Sequence: Synthetic oligonucleotide
cugacugggauccacgcac

SEQ ID NO: 2340657 - RNA, 19 nt, Artificial Sequence
  Description of Artificial Sequence: Synthetic oligonucleotide
uguuggauuucuucuugga

SEQ ID NO: 2340658 - RNA, 19 nt, Artificial Sequence
  Description of Artificial Sequence: Synthetic oligonucleotide
ugcaaucucucgaguauca

SEQ ID NO: 2340659 - RNA, 19 nt, Artificial Sequence
  Description of Artificial Sequence: Synthetic oligonucleotide
ucuuuguucccuuuucaua

SEQ ID NO: 2340660 - RNA, 19 nt, Artificial Sequence
  Description of Artificial Sequence: Synthetic oligonucleotide
uccucuucuagagaagaug

SEQ ID NO: 2340661 - RNA, 19 nt, Artificial Sequence
  Description of Artificial Sequence: Synthetic oligonucleotide
acggcagggaaucaagaug

SEQ ID NO: 2340662 - RNA, 19 nt, Artificial Sequence
  Description of Artificial Sequence: Synthetic oligonucleotide
aggaucaguuucuaucaug

SEQ ID NO: 2340663 - RNA, 19 nt, Artificial Sequence
  Description of Artificial Sequence: Synthetic oligonucleotide
ggcugguuugucuugagcc

SEQ ID NO: 2340664 - RNA, 19 nt, Artificial Sequence
  Description of Artificial Sequence: Synthetic oligonucleotide
gaaggauccugaaucguug

SEQ ID NO: 2340665 - RNA, 19 nt, Artificial Sequence
  Description of Artificial Sequence: Synthetic oligonucleotide
uucagaaugcacucauauc

SEQ ID NO: 2340666 - RNA, 19 nt, Artificial Sequence
  Description of Artificial Sequence: Synthetic oligonucleotide
uacuauuaccuccucccaa

SEQ ID NO: 2340667 - RNA, 19 nt, Artificial Sequence
  Description of Artificial Sequence: Synthetic oligonucleotide
cauggugugacuuuugugu

SEQ ID NO: 2340668 - RNA, 19 nt, Artificial Sequence
  Description of Artificial Sequence: Synthetic oligonucleotide
aaggauccugaaucguugu

SEQ ID NO: 2340669 - RNA, 19 nt, Artificial Sequence
  Description of Artificial Sequence: Synthetic oligonucleotide
acuagcuccagggacagcu

SEQ ID NO: 2340670 - RNA, 19 nt, Artificial Sequence
  Description of Artificial Sequence: Synthetic oligonucleotide
guugggaccaugcucugug

SEQ ID NO: 2340671 - RNA, 19 nt, Artificial Sequence
  Description of Artificial Sequence: Synthetic oligonucleotide
ccugaucugagaaggaucc

SEQ ID NO: 2340672 - RNA, 19 nt, Artificial Sequence
  Description of Artificial Sequence: Synthetic oligonucleotide
aacauaggaggaccccuga

SEQ ID NO: 2340673 - RNA, 19 nt, Artificial Sequence
  Description of Artificial Sequence: Synthetic oligonucleotide
ugugacuuuuguguaggug

SEQ ID NO: 2340674 - RNA, 19 nt, Artificial Sequence
  Description of Artificial Sequence: Synthetic oligonucleotide
ucauauccaucuuggauuu

SEQ ID NO: 2340675 - RNA, 19 nt, Artificial Sequence
  Description of Artificial Sequence: Synthetic oligonucleotide
cuaacuagcuccagggaca

SEQ ID NO: 2340676 - RNA, 19 nt, Artificial Sequence
  Description of Artificial Sequence: Synthetic oligonucleotide
ugcauugguuaagaguuug

SEQ ID NO: 2340677 - RNA, 19 nt, Artificial Sequence
  Description of Artificial Sequence: Synthetic oligonucleotide
ggaucaguuucuaucaugc

SEQ ID NO: 2340678 - RNA, 19 nt, Artificial Sequence
  Description of Artificial Sequence: Synthetic oligonucleotide
gacgauggauccuggaaca

SEQ ID NO: 2340679 - RNA, 19 nt, Artificial Sequence
  Description of Artificial Sequence: Synthetic oligonucleotide
acgcacgagaaacucuuuc

SEQ ID NO: 2340680 - RNA, 19 nt, Artificial Sequence
  Description of Artificial Sequence: Synthetic oligonucleotide
cuguuggauuucuucuugg

SEQ ID NO: 2340681 - RNA, 19 nt, Artificial Sequence
  Description of Artificial Sequence: Synthetic oligonucleotide
ucagcaugcugacugggau

SEQ ID NO: 2340682 - RNA, 19 nt, Artificial Sequence
  Description of Artificial Sequence: Synthetic oligonucleotide
  modified_base (3)..(3): a, c, u, g, unknown or other
canguuuucccucuaacua

SEQ ID NO: 2340683 - RNA, 19 nt, Artificial Sequence
  Description of Artificial Sequence: Synthetic oligonucleotide
agagaagaugcaaucucuc

SEQ ID NO: 2340684 - RNA, 19 nt, Artificial Sequence
  Description of Artificial Sequence: Synthetic oligonucleotide
uggacggcagggaaucaag

SEQ ID NO: 2340685 - RNA, 19 nt, Artificial Sequence
  Description of Artificial Sequence: Synthetic oligonucleotide
acuuggacggcagggaauc

SEQ ID NO: 2340686 - RNA, 19 nt, Artificial Sequence
  Description of Artificial Sequence: Synthetic oligonucleotide
ugacuuuuguguaggugaa

SEQ ID NO: 2340687 - RNA, 19 nt, Artificial Sequence
  Description of Artificial Sequence: Synthetic oligonucleotide
ccucuucuagagaagaugc

SEQ ID NO: 2340688 - RNA, 19 nt, Artificial Sequence
  Description of Artificial Sequence: Synthetic oligonucleotide
accagggauaaccguauug

SEQ ID NO: 2340689 - RNA, 19 nt, Artificial Sequence
  Description of Artificial Sequence: Synthetic oligonucleotide
uggugugacuuuuguguag

SEQ ID NO: 2340690 - RNA, 19 nt, Artificial Sequence
  Description of Artificial Sequence: Synthetic oligonucleotide
  modified_base (15)..(15): a, c, u, g, unknown or other
uccuuguuccuacanguuu

SEQ ID NO: 2340691 - RNA, 19 nt, Artificial Sequence
  Description of Artificial Sequence: Synthetic oligonucleotide
gaguaucagguacuauuac

SEQ ID NO: 2340692 - RNA, 19 nt, Artificial Sequence
  Description of Artificial Sequence: Synthetic oligonucleotide
ugacugggauccacgcacg

SEQ ID NO: 2340693 - RNA, 19 nt, Artificial Sequence
  Description of Artificial Sequence: Synthetic oligonucleotide
  modified_base (8)..(8): a, c, u, g, unknown or other
uccuacanguuuucccucu

SEQ ID NO: 2340694 - RNA, 19 nt, Artificial Sequence
  Description of Artificial Sequence: Synthetic oligonucleotide
uggaggguucagcagccag

SEQ ID NO: 2340695 - RNA, 19 nt, Artificial Sequence
  Description of Artificial Sequence: Synthetic oligonucleotide
ucggauuucuuccuccuuu

SEQ ID NO: 2340696 - RNA, 19 nt, Artificial Sequence
  Description of Artificial Sequence: Synthetic oligonucleotide
uccucaaauucugcauugg

SEQ ID NO: 2340697 - RNA, 19 nt, Artificial Sequence
  Description of Artificial Sequence: Synthetic oligonucleotide
uuguucccuuuucauauuc

SEQ ID NO: 2340698 - RNA, 19 nt, Artificial Sequence
  Description of Artificial Sequence: Synthetic oligonucleotide
uuuucucaucuucggauuu

SEQ ID NO: 2340699 - RNA, 19 nt, Artificial Sequence
  Description of Artificial Sequence: Synthetic oligonucleotide
ccuuccaugagucagccug

SEQ ID NO: 2340700 - RNA, 19 nt, Artificial Sequence
  Description of Artificial Sequence: Synthetic oligonucleotide
uaucagguacuauuaccuc

SEQ ID NO: 2340701 - RNA, 19 nt, Artificial Sequence
  Description of Artificial Sequence: Synthetic oligonucleotide
ucuaucaugccuggccacc

SEQ ID NO: 2340702 - RNA, 19 nt, Artificial Sequence
  Description of Artificial Sequence: Synthetic oligonucleotide
ccucuaacuagcuccaggg

SEQ ID NO: 2340703 - RNA, 19 nt, Artificial Sequence
  Description of Artificial Sequence: Synthetic oligonucleotide
cauaggaggaccccugauc

SEQ ID NO: 2340704 - RNA, 19 nt, Artificial Sequence
  Description of Artificial Sequence: Synthetic oligonucleotide
uggccaccagggauaaccg

SEQ ID NO: 2340705 - RNA, 19 nt, Artificial Sequence
  Description of Artificial Sequence: Synthetic oligonucleotide
acaaucuggaaaaucuccu

SEQ ID NO: 2340706 - RNA, 19 nt, Artificial Sequence
  Description of Artificial Sequence: Synthetic oligonucleotide
cuggaacauaggaggaccc

SEQ ID NO: 2340707 - RNA, 19 nt, Artificial Sequence
  Description of Artificial Sequence: Synthetic oligonucleotide
uuguaguccuuguuccuac

SEQ ID NO: 2340708 - RNA, 19 nt, Artificial Sequence
  Description of Artificial Sequence: Synthetic oligonucleotide
agguuucacauggugugac

SEQ ID NO: 2340709 - RNA, 19 nt, Artificial Sequence
  Description of Artificial Sequence: Synthetic oligonucleotide
guuugucuugagccuuucg

SEQ ID NO: 2340710 - RNA, 19 nt, Artificial Sequence
  Description of Artificial Sequence: Synthetic oligonucleotide
aggauccugaaucguuguc

SEQ ID NO: 2340711 - RNA, 19 nt, Artificial Sequence
  Description of Artificial Sequence: Synthetic oligonucleotide
gaaaaucuccucaaauucu

SEQ ID NO: 2340712 - RNA, 19 nt, Artificial Sequence
  Description of Artificial Sequence: Synthetic oligonucleotide
uccaugagucagccugagg

SEQ ID NO: 2340713 - RNA, 19 nt, Artificial Sequence
  Description of Artificial Sequence: Synthetic oligonucleotide
uucccucuaacuagcucca

SEQ ID NO: 2340714 - RNA, 19 nt, Artificial Sequence
  Description of Artificial Sequence: Synthetic oligonucleotide
aguuucuaucaugccuggc

SEQ ID NO: 2340715 - RNA, 19 nt, Artificial Sequence
  Description of Artificial Sequence: Synthetic oligonucleotide
uauuaccuccucccaagua

SEQ ID NO: 2340716 - RNA, 19 nt, Artificial Sequence
  Description of Artificial Sequence: Synthetic oligonucleotide
cuccaaaauaugucacaug

SEQ ID NO: 2340717 - RNA, 19 nt, Artificial Sequence
  Description of Artificial Sequence: Synthetic oligonucleotide
ugggaccaugcucuguggc

SEQ ID NO: 2340718 - RNA, 19 nt, Artificial Sequence
  Description of Artificial Sequence: Synthetic oligonucleotide
aucguugucuucugcuugu

SEQ ID NO: 2340719 - RNA, 19 nt, Artificial Sequence
  Description of Artificial Sequence: Synthetic oligonucleotide
uggcccagacgauggaucc

SEQ ID NO: 2340720 - RNA, 19 nt, Artificial Sequence
  Description of Artificial Sequence: Synthetic oligonucleotide
ugucuugagccuuucgcuu

SEQ ID NO: 2340721 - RNA, 19 nt, Artificial Sequence
  Description of Artificial Sequence: Synthetic oligonucleotide
uaacuagcuccagggacag

SEQ ID NO: 2340722 - RNA, 19 nt, Artificial Sequence
  Description of Artificial Sequence: Synthetic oligonucleotide
auaugucacaugguacuug

SEQ ID NO: 2340723 - RNA, 19 nt, Artificial Sequence
  Description of Artificial Sequence: Synthetic oligonucleotide
gaacauaggaggaccccug

SEQ ID NO: 2340724 - RNA, 19 nt, Artificial Sequence
  Description of Artificial Sequence: Synthetic oligonucleotide
guaucagguacuauuaccu

SEQ ID NO: 2340725 - RNA, 19 nt, Artificial Sequence
  Description of Artificial Sequence: Synthetic oligonucleotide
ggugugacuuuuguguagg

SEQ ID NO: 2340726 - RNA, 19 nt, Artificial Sequence
  Description of Artificial Sequence: Synthetic oligonucleotide
caguuucuaucaugccugg

SEQ ID NO: 2340727 - RNA, 19 nt, Artificial Sequence
  Description of Artificial Sequence: Synthetic oligonucleotide
guauugcuuggcccagacg

SEQ ID NO: 2340728 - RNA, 19 nt, Artificial Sequence
  Description of Artificial Sequence: Synthetic oligonucleotide
uccacgcacgagaaacucu

SEQ ID NO: 2340729 - RNA, 19 nt, Artificial Sequence
  Description of Artificial Sequence: Synthetic oligonucleotide
uugggaccaugcucugugg

SEQ ID NO: 2340730 - RNA, 19 nt, Artificial Sequence
  Description of Artificial Sequence: Synthetic oligonucleotide
uggaacauaggaggacccc

SEQ ID NO: 2340731 - RNA, 19 nt, Artificial Sequence
  Description of Artificial Sequence: Synthetic oligonucleotide
uagacguccuaaucucaga

SEQ ID NO: 2340732 - RNA, 19 nt, Artificial Sequence
  Description of Artificial Sequence: Synthetic oligonucleotide
uggcuuagacguccuaauc

SEQ ID NO: 2340733 - RNA, 19 nt, Artificial Sequence
  Description of Artificial Sequence: Synthetic oligonucleotide
uggcugguuugucuugagc

SEQ ID NO: 2340734 - RNA, 19 nt, Artificial Sequence
  Description of Artificial Sequence: Synthetic oligonucleotide
uccucccaaguacuccugc

SEQ ID NO: 2340735 - RNA, 19 nt, Artificial Sequence
  Description of Artificial Sequence: Synthetic oligonucleotide
uucuaucaugccuggccac

SEQ ID NO: 2340736 - RNA, 19 nt, Artificial Sequence
  Description of Artificial Sequence: Synthetic oligonucleotide
aggugaagcaaagguuuuc

SEQ ID NO: 2340737 - RNA, 19 nt, Artificial Sequence
  Description of Artificial Sequence: Synthetic oligonucleotide
ggauccacgcacgagaaac

SEQ ID NO: 2340738 - RNA, 19 nt, Artificial Sequence
  Description of Artificial Sequence: Synthetic oligonucleotide
gauaaccguauugcuuggc

SEQ ID NO: 2340739 - RNA, 19 nt, Artificial Sequence
  Description of Artificial Sequence: Synthetic oligonucleotide
cuuugggcuggcucugggc

SEQ ID NO: 2340740 - RNA, 19 nt, Artificial Sequence
  Description of Artificial Sequence: Synthetic oligonucleotide
gccucuagagagcuggucc

SEQ ID NO: 2340741 - RNA, 19 nt, Artificial Sequence
  Description of Artificial Sequence: Synthetic oligonucleotide
gcacucauauccaucuugg

SEQ ID NO: 2340742 - RNA, 19 nt, Artificial Sequence
  Description of Artificial Sequence: Synthetic oligonucleotide
uccguaguacaaucuggaa

SEQ ID NO: 2340743 - RNA, 19 nt, Artificial Sequence
  Description of Artificial Sequence: Synthetic oligonucleotide
aggaccccugaucugagaa

SEQ ID NO: 2340744 - RNA, 19 nt, Artificial Sequence
  Description of Artificial Sequence: Synthetic oligonucleotide
gaaugcacucauauccauc

SEQ ID NO: 2340745 - RNA, 19 nt, Artificial Sequence
  Description of Artificial Sequence: Synthetic oligonucleotide
cuuagacguccuaaucuca

SEQ ID NO: 2340746 - RNA, 19 nt, Artificial Sequence
  Description of Artificial Sequence: Synthetic oligonucleotide
guccuaaucucagagucca

SEQ ID NO: 2340747 - RNA, 19 nt, Artificial Sequence
  Description of Artificial Sequence: Synthetic oligonucleotide
auccacgcacgagaaacuc

SEQ ID NO: 2340748 - RNA, 19 nt, Artificial Sequence
  Description of Artificial Sequence: Synthetic oligonucleotide
  modified_base (12)..(12): a, c, u, g, unknown or other
uuguuccuacanguuuucc

SEQ ID NO: 2340749 - RNA, 19 nt, Artificial Sequence
  Description of Artificial Sequence: Synthetic oligonucleotide
  modified_base (9)..(9): a, c, u, g, unknown or other
uuccuacanguuuucccuc

SEQ ID NO: 2340750 - RNA, 19 nt, Artificial Sequence
  Description of Artificial Sequence: Synthetic oligonucleotide
ugggauccacgcacgagaa

SEQ ID NO: 2340751 - RNA, 19 nt, Artificial Sequence
  Description of Artificial Sequence: Synthetic oligonucleotide
ccagggauaaccguauugc

SEQ ID NO: 2340752 - RNA, 19 nt, Artificial Sequence
  Description of Artificial Sequence: Synthetic oligonucleotide
gcuuagacguccuaaucuc

SEQ ID NO: 2340753 - RNA, 19 nt, Artificial Sequence
  Description of Artificial Sequence: Synthetic oligonucleotide
uacuuggacggcagggaau

SEQ ID NO: 2340754 - RNA, 19 nt, Artificial Sequence
  Description of Artificial Sequence: Synthetic oligonucleotide
gacuuuuguguaggugaag

SEQ ID NO: 2340755 - RNA, 19 nt, Artificial Sequence
  Description of Artificial Sequence: Synthetic oligonucleotide
auggugugacuuuugugua

SEQ ID NO: 2340756 - RNA, 19 nt, Artificial Sequence
  Description of Artificial Sequence: Synthetic oligonucleotide
gggaaucaagaugagacga

SEQ ID NO: 2340757 - RNA, 19 nt, Artificial Sequence
  Description of Artificial Sequence: Synthetic oligonucleotide
gaaacucuuucuccaaaau

SEQ ID NO: 2340758 - RNA, 19 nt, Artificial Sequence
  Description of Artificial Sequence: Synthetic oligonucleotide
uucacauggugugacuuuu

SEQ ID NO: 2340759 - RNA, 19 nt, Artificial Sequence
  Description of Artificial Sequence: Synthetic oligonucleotide
guacuauuaccuccuccca

SEQ ID NO: 2340760 - RNA, 19 nt, Artificial Sequence
  Description of Artificial Sequence: Synthetic oligonucleotide
cugggauccacgcacgaga

SEQ ID NO: 2340761 - RNA, 19 nt, Artificial Sequence
  Description of Artificial Sequence: Synthetic oligonucleotide
ggauaaccguauugcuugg

SEQ ID NO: 2340762 - RNA, 19 nt, Artificial Sequence
  Description of Artificial Sequence: Synthetic oligonucleotide
uuuguucccuuuucauauu

SEQ ID NO: 2340763 - RNA, 19 nt, Artificial Sequence
  Description of Artificial Sequence: Synthetic oligonucleotide
aggaggaccccugaucuga

SEQ ID NO: 2340764 - RNA, 19 nt, Artificial Sequence
  Description of Artificial Sequence: Synthetic oligonucleotide
agcaaagguuuucuuuguu

SEQ ID NO: 2340765 - RNA, 19 nt, Artificial Sequence
  Description of Artificial Sequence: Synthetic oligonucleotide
uugcuuggcccagacgaug

SEQ ID NO: 2340766 - RNA, 19 nt, Artificial Sequence
  Description of Artificial Sequence: Synthetic oligonucleotide
uaggaggaccccugaucug

SEQ ID NO: 2340767 - RNA, 19 nt, Artificial Sequence
  Description of Artificial Sequence: Synthetic oligonucleotide
agaaggauccugaaucguu

SEQ ID NO: 2340768 - RNA, 19 nt, Artificial Sequence
  Description of Artificial Sequence: Synthetic oligonucleotide
acugggauccacgcacgag

SEQ ID NO: 2340769 - RNA, 19 nt, Artificial Sequence
  Description of Artificial Sequence: Synthetic oligonucleotide
aucugagaaggauccugaa

SEQ ID NO: 2340770 - RNA, 19 nt, Artificial Sequence
  Description of Artificial Sequence: Synthetic oligonucleotide
uuccaugagucagccugag

SEQ ID NO: 2340771 - RNA, 19 nt, Artificial Sequence
  Description of Artificial Sequence: Synthetic oligonucleotide
acauaggaggaccccugau

SEQ ID NO: 2340772 - RNA, 19 nt, Artificial Sequence
  Description of Artificial Sequence: Synthetic oligonucleotide
caugcugacugggauccac

SEQ ID NO: 2340773 - RNA, 19 nt, Artificial Sequence
  Description of Artificial Sequence: Synthetic oligonucleotide
ccucuagagagcugguccc

SEQ ID NO: 2340774 - RNA, 19 nt, Artificial Sequence
  Description of Artificial Sequence: Synthetic oligonucleotide
agggauaaccguauugcuu

SEQ ID NO: 2340775 - RNA, 19 nt, Artificial Sequence
  Description of Artificial Sequence: Synthetic oligonucleotide
  modified_base (19)..(19): a, c, u, g, unknown or other
guaguccuuguuccuacan

SEQ ID NO: 2340776 - RNA, 19 nt, Artificial Sequence
  Description of Artificial Sequence: Synthetic oligonucleotide
ugccuggccaccagggaua

SEQ ID NO: 2340777 - RNA, 19 nt, Artificial Sequence
  Description of Artificial Sequence: Synthetic oligonucleotide
cagccugagguuucacaug

SEQ ID NO: 2340778 - RNA, 19 nt, Artificial Sequence
  Description of Artificial Sequence: Synthetic oligonucleotide
acaugguacuuggacggca

SEQ ID NO: 2340779 - RNA, 19 nt, Artificial Sequence
  Description of Artificial Sequence: Synthetic oligonucleotide
uccuaaucucagaguccac

SEQ ID NO: 2340780 - RNA, 19 nt, Artificial Sequence
  Description of Artificial Sequence: Synthetic oligonucleotide
ggcuuagacguccuaaucu

SEQ ID NO: 2340781 - RNA, 19 nt, Artificial Sequence
  Description of Artificial Sequence: Synthetic oligonucleotide
augagucagccugagguuu

SEQ ID NO: 2340782 - RNA, 19 nt, Artificial Sequence
  Description of Artificial Sequence: Synthetic oligonucleotide
cuccuuccaugagucagcc

SEQ ID NO: 2340783 - RNA, 19 nt, Artificial Sequence
  Description of Artificial Sequence: Synthetic oligonucleotide
cuuccaugagucagccuga

SEQ ID NO: 2340784 - RNA, 19 nt, Artificial Sequence
  Description of Artificial Sequence: Synthetic oligonucleotide
gaaucguugucuucugcuu

SEQ ID NO: 2340785 - RNA, 19 nt, Artificial Sequence
  Description of Artificial Sequence: Synthetic oligonucleotide
cuggaucccaagccuccag

SEQ ID NO: 2340786 - RNA, 19 nt, Artificial Sequence
  Description of Artificial Sequence: Synthetic oligonucleotide
guacuuggacggcagggaa

SEQ ID NO: 2340787 - RNA, 19 nt, Artificial Sequence
  Description of Artificial Sequence: Synthetic oligonucleotide
uuggacggcagggaaucaa

SEQ ID NO: 2340788 - RNA, 19 nt, Artificial Sequence
  Description of Artificial Sequence: Synthetic oligonucleotide
gauccugaaucguugucuu

SEQ ID NO: 2340789 - RNA, 19 nt, Artificial Sequence
  Description of Artificial Sequence: Synthetic oligonucleotide
cucuaacuagcuccaggga

SEQ ID NO: 2340790 - RNA, 19 nt, Artificial Sequence
  Description of Artificial Sequence: Synthetic oligonucleotide
gacguccuaaucucagagu

SEQ ID NO: 2340791 - RNA, 19 nt, Artificial Sequence
  Description of Artificial Sequence: Synthetic oligonucleotide
ugguuugucuugagccuuu

SEQ ID NO: 2340792 - RNA, 19 nt, Artificial Sequence
  Description of Artificial Sequence: Synthetic oligonucleotide
ucucgaguaucagguacua

SEQ ID NO: 2340793 - RNA, 19 nt, Artificial Sequence
  Description of Artificial Sequence: Synthetic oligonucleotide
ucugggccggcguggcuug

SEQ ID NO: 2340794 - RNA, 19 nt, Artificial Sequence
  Description of Artificial Sequence: Synthetic oligonucleotide
cccucuaacuagcuccagg

SEQ ID NO: 2340795 - RNA, 19 nt, Artificial Sequence
  Description of Artificial Sequence: Synthetic oligonucleotide
ggacuuccguaguacaauc

SEQ ID NO: 2340796 - RNA, 19 nt, Artificial Sequence
  Description of Artificial Sequence: Synthetic oligonucleotide
cuucuuugggcuggcucug

SEQ ID NO: 2340797 - RNA, 19 nt, Artificial Sequence
  Description of Artificial Sequence: Synthetic oligonucleotide
aaagucuguuggauuucuu

SEQ ID NO: 2340798 - RNA, 19 nt, Artificial Sequence
  Description of Artificial Sequence: Synthetic oligonucleotide
guuguaguccuuguuccua

SEQ ID NO: 2340799 - RNA, 19 nt, Artificial Sequence
  Description of Artificial Sequence: Synthetic oligonucleotide
uucccacucccuucuggau

SEQ ID NO: 2340800 - RNA, 19 nt, Artificial Sequence
  Description of Artificial Sequence: Synthetic oligonucleotide
cacucauauccaucuugga

SEQ ID NO: 2340801 - RNA, 19 nt, Artificial Sequence
  Description of Artificial Sequence: Synthetic oligonucleotide
  modified_base (6)..(6): a, c, u, g, unknown or other
cuacanguuuucccucuaa

SEQ ID NO: 2340802 - RNA, 19 nt, Artificial Sequence
  Description of Artificial Sequence: Synthetic oligonucleotide
cuaaucucagaguccacuu

SEQ ID NO: 2340803 - RNA, 19 nt, Artificial Sequence
  Description of Artificial Sequence: Synthetic oligonucleotide
cuuucagaaugcacucaua

SEQ ID NO: 2340804 - RNA, 19 nt, Artificial Sequence
  Description of Artificial Sequence: Synthetic oligonucleotide
aucucucgaguaucaggua

SEQ ID NO: 2340805 - RNA, 19 nt, Artificial Sequence
  Description of Artificial Sequence: Synthetic oligonucleotide
gacugggauccacgcacga

SEQ ID NO: 2340806 - RNA, 19 nt, Artificial Sequence
  Description of Artificial Sequence: Synthetic oligonucleotide
ccaucuuggauuuccucca

SEQ ID NO: 2340807 - RNA, 19 nt, Artificial Sequence
  Description of Artificial Sequence: Synthetic oligonucleotide
cagggacuuccguaguaca

SEQ ID NO: 2340808 - RNA, 19 nt, Artificial Sequence
  Description of Artificial Sequence: Synthetic oligonucleotide
cccugaucugagaaggauc

SEQ ID NO: 2340809 - RNA, 19 nt, Artificial Sequence
  Description of Artificial Sequence: Synthetic oligonucleotide
ccguaguacaaucuggaaa

SEQ ID NO: 2340810 - RNA, 19 nt, Artificial Sequence
  Description of Artificial Sequence: Synthetic oligonucleotide
agggacuuccguaguacaa

SEQ ID NO: 2340811 - RNA, 19 nt, Artificial Sequence
  Description of Artificial Sequence: Synthetic oligonucleotide
cucucgaguaucagguacu

SEQ ID NO: 2340812 - RNA, 19 nt, Artificial Sequence
  Description of Artificial Sequence: Synthetic oligonucleotide
gagaaggauccugaaucgu

SEQ ID NO: 2340813 - RNA, 19 nt, Artificial Sequence
  Description of Artificial Sequence: Synthetic oligonucleotide
cguccuaaucucagagucc

SEQ ID NO: 2340814 - RNA, 19 nt, Artificial Sequence
  Description of Artificial Sequence: Synthetic oligonucleotide
auugcuuggcccagacgau

SEQ ID NO: 2340815 - RNA, 19 nt, Artificial Sequence
  Description of Artificial Sequence: Synthetic oligonucleotide
uccuuccaugagucagccu

SEQ ID NO: 2340816 - RNA, 19 nt, Artificial Sequence
  Description of Artificial Sequence: Synthetic oligonucleotide
gguccuccuuccaugaguc

SEQ ID NO: 2340817 - RNA, 19 nt, Artificial Sequence
  Description of Artificial Sequence: Synthetic oligonucleotide
ggaaucaagaugagacgaa

SEQ ID NO: 2340818 - RNA, 19 nt, Artificial Sequence
  Description of Artificial Sequence: Synthetic oligonucleotide
cggcagggaaucaagauga

SEQ ID NO: 2340819 - RNA, 19 nt, Artificial Sequence
  Description of Artificial Sequence: Synthetic oligonucleotide
ucccucuaacuagcuccag

SEQ ID NO: 2340820 - RNA, 19 nt, Artificial Sequence
  Description of Artificial Sequence: Synthetic oligonucleotide
gcaaucucucgaguaucag

SEQ ID NO: 2340821 - RNA, 19 nt, Artificial Sequence
  Description of Artificial Sequence: Synthetic oligonucleotide
cuuggccucugccucuaga

SEQ ID NO: 2340822 - RNA, 19 nt, Artificial Sequence
  Description of Artificial Sequence: Synthetic oligonucleotide
cagggauaaccguauugcu

SEQ ID NO: 2340823 - RNA, 19 nt, Artificial Sequence
  Description of Artificial Sequence: Synthetic oligonucleotide
cuaucaugccuggccacca

SEQ ID NO: 2340824 - RNA, 19 nt, Artificial Sequence
  Description of Artificial Sequence: Synthetic oligonucleotide
cacauggugugacuuuugu

SEQ ID NO: 2340825 - RNA, 19 nt, Artificial Sequence
  Description of Artificial Sequence: Synthetic oligonucleotide
cuucggauuucuuccuccu

SEQ ID NO: 2340826 - RNA, 19 nt, Artificial Sequence
  Description of Artificial Sequence: Synthetic oligonucleotide
ggauccugaaucguugucu

SEQ ID NO: 2340827 - RNA, 19 nt, Artificial Sequence
  Description of Artificial Sequence: Synthetic oligonucleotide
gaggaccccugaucugaga

SEQ ID NO: 2340828 - RNA, 19 nt, Artificial Sequence
  Description of Artificial Sequence: Synthetic oligonucleotide
uuggaggguucagcagcca

SEQ ID NO: 2340829 - RNA, 19 nt, Artificial Sequence
  Description of Artificial Sequence: Synthetic oligonucleotide
guuucacauggugugacuu

SEQ ID NO: 2340830 - RNA, 19 nt, Artificial Sequence
  Description of Artificial Sequence: Synthetic oligonucleotide
cagguacuauuaccuccuc

SEQ ID NO: 2340831 - RNA, 19 nt, Artificial Sequence
  Description of Artificial Sequence: Synthetic oligonucleotide
gauccacgcacgagaaacu

SEQ ID NO: 2340832 - RNA, 19 nt, Artificial Sequence
  Description of Artificial Sequence: Synthetic oligonucleotide
cauugguuaagaguuuguu

SEQ ID NO: 2340833 - RNA, 19 nt, Artificial Sequence
  Description of Artificial Sequence: Synthetic oligonucleotide
gcagggacuuccguaguac

SEQ ID NO: 2340834 - RNA, 19 nt, Artificial Sequence
  Description of Artificial Sequence: Synthetic oligonucleotide
ggaacauaggaggaccccu

SEQ ID NO: 2340835 - RNA, 19 nt, Artificial Sequence
  Description of Artificial Sequence: Synthetic oligonucleotide
cuauuaccuccucccaagu

SEQ ID NO: 2340836 - RNA, 19 nt, Artificial Sequence
  Description of Artificial Sequence: Synthetic oligonucleotide
uccuuucuucuuggcuggu

SEQ ID NO: 2340837 - RNA, 19 nt, Artificial Sequence
  Description of Artificial Sequence: Synthetic oligonucleotide
  modified_base (14)..(14): a, c, u, g, unknown or other
ccuuguuccuacanguuuu

SEQ ID NO: 2340838 - RNA, 19 nt, Artificial Sequence
  Description of Artificial Sequence: Synthetic oligonucleotide
cuuggauuuccuccauuuu

SEQ ID NO: 2340839 - RNA, 19 nt, Artificial Sequence
  Description of Artificial Sequence: Synthetic oligonucleotide
gcccagacgauggauccug

SEQ ID NO: 2340840 - RNA, 19 nt, Artificial Sequence
  Description of Artificial Sequence: Synthetic oligonucleotide
augucacaugguacuugga

SEQ ID NO: 2340841 - RNA, 19 nt, Artificial Sequence
  Description of Artificial Sequence: Synthetic oligonucleotide
cguauugcuuggcccagac

SEQ ID NO: 2340842 - RNA, 19 nt, Artificial Sequence
  Description of Artificial Sequence: Synthetic oligonucleotide
gaccaugcucuguggcugu

SEQ ID NO: 2340843 - RNA, 19 nt, Artificial Sequence
  Description of Artificial Sequence: Synthetic oligonucleotide
ccaaaauaugucacauggu

SEQ ID NO: 2340844 - RNA, 19 nt, Artificial Sequence
  Description of Artificial Sequence: Synthetic oligonucleotide
aggucaggaucaguuucua

SEQ ID NO: 2340845 - RNA, 19 nt, Artificial Sequence
  Description of Artificial Sequence: Synthetic oligonucleotide
gggaccaugcucuguggcu

SEQ ID NO: 2340846 - RNA, 19 nt, Artificial Sequence
  Description of Artificial Sequence: Synthetic oligonucleotide
gguuucacauggugugacu

SEQ ID NO: 2340847 - RNA, 19 nt, Artificial Sequence
  Description of Artificial Sequence: Synthetic oligonucleotide
cccagacgauggauccugg

SEQ ID NO: 2340848 - RNA, 19 nt, Artificial Sequence
  Description of Artificial Sequence: Synthetic oligonucleotide
ggaggaccccugaucugag

SEQ ID NO: 2340849 - RNA, 19 nt, Artificial Sequence
  Description of Artificial Sequence: Synthetic oligonucleotide
gggguccuccuuccaugag

SEQ ID NO: 2340850 - RNA, 19 nt, Artificial Sequence
  Description of Artificial Sequence: Synthetic oligonucleotide
accccugaucugagaagga

SEQ ID NO: 2340851 - RNA, 19 nt, Artificial Sequence
  Description of Artificial Sequence: Synthetic oligonucleotide
ccccguugggaccaugcuc

SEQ ID NO: 2340852 - RNA, 19 nt, Artificial Sequence
  Description of Artificial Sequence: Synthetic oligonucleotide
gccaccagggauaaccgua

SEQ ID NO: 2340853 - RNA, 19 nt, Artificial Sequence
  Description of Artificial Sequence: Synthetic oligonucleotide
gugugacuuuuguguaggu

SEQ ID NO: 2340854 - RNA, 19 nt, Artificial Sequence
  Description of Artificial Sequence: Synthetic oligonucleotide
  modified_base (16)..(16): a, c, u, g, unknown or other
guccuuguuccuacanguu

SEQ ID NO: 2340855 - RNA, 19 nt, Artificial Sequence
  Description of Artificial Sequence: Synthetic oligonucleotide
ccuaaucucagaguccacu

SEQ ID NO: 2340856 - RNA, 19 nt, Artificial Sequence
  Description of Artificial Sequence: Synthetic oligonucleotide
gcguggcuuggccucugcc

SEQ ID NO: 2340857 - RNA, 19 nt, Artificial Sequence
  Description of Artificial Sequence: Synthetic oligonucleotide
cuuggacggcagggaauca

SEQ ID NO: 2340858 - RNA, 19 nt, Artificial Sequence
  Description of Artificial Sequence: Synthetic oligonucleotide
ccucaaauucugcauuggu

SEQ ID NO: 2340859 - RNA, 19 nt, Artificial Sequence
  Description of Artificial Sequence: Synthetic oligonucleotide
gccggcguggcuuggccuc

SEQ ID NO: 2340860 - RNA, 19 nt, Artificial Sequence
  Description of Artificial Sequence: Synthetic oligonucleotide
ccuggcuuagacguccuaa

SEQ ID NO: 2340861 - RNA, 19 nt, Artificial Sequence
  Description of Artificial Sequence: Synthetic oligonucleotide
  modified_base (7)..(7): a, c, u, g, unknown or other
ccuacanguuuucccucua

SEQ ID NO: 2340862 - RNA, 19 nt, Artificial Sequence
  Description of Artificial Sequence: Synthetic oligonucleotide
gggacuuccguaguacaau

SEQ ID NO: 2340863 - RNA, 19 nt, Artificial Sequence
  Description of Artificial Sequence: Synthetic oligonucleotide
caucuuggauuuccuccau

SEQ ID NO: 2340864 - RNA, 19 nt, Artificial Sequence
  Description of Artificial Sequence: Synthetic oligonucleotide
cugcauugguuaagaguuu

SEQ ID NO: 2340865 - RNA, 19 nt, Artificial Sequence
  Description of Artificial Sequence: Synthetic oligonucleotide
cgcacgagaaacucuuucu

SEQ ID NO: 2340866 - RNA, 19 nt, Artificial Sequence
  Description of Artificial Sequence: Synthetic oligonucleotide
ggcguggcuuggccucugc

SEQ ID NO: 2340867 - RNA, 19 nt, Artificial Sequence
  Description of Artificial Sequence: Synthetic oligonucleotide
cugaucugagaaggauccu

SEQ ID NO: 2340868 - RNA, 19 nt, Artificial Sequence
  Description of Artificial Sequence: Synthetic oligonucleotide
ccuccucccaaguacuccu

SEQ ID NO: 2340869 - RNA, 19 nt, Artificial Sequence
  Description of Artificial Sequence: Synthetic oligonucleotide
ccacuuccucuucuagaga

SEQ ID NO: 2340870 - RNA, 19 nt, Artificial Sequence
  Description of Artificial Sequence: Synthetic oligonucleotide
cacucccuucuggauccca

SEQ ID NO: 2340871 - RNA, 19 nt, Artificial Sequence
  Description of Artificial Sequence: Synthetic oligonucleotide
ccacgcacgagaaacucuu

SEQ ID NO: 2340872 - RNA, 19 nt, Artificial Sequence
  Description of Artificial Sequence: Synthetic oligonucleotide
cugggccggcguggcuugg

SEQ ID NO: 2340873 - RNA, 19 nt, Artificial Sequence
  Description of Artificial Sequence: Synthetic oligonucleotide
ggccaccagggauaaccgu

SEQ ID NO: 2340874 - RNA, 19 nt, Artificial Sequence
  Description of Artificial Sequence: Synthetic oligonucleotide
cucgaguaucagguacuau

SEQ ID NO: 2340875 - RNA, 19 nt, Artificial Sequence
  Description of Artificial Sequence: Synthetic oligonucleotide
ccguugggaccaugcucug

SEQ ID NO: 2340876 - RNA, 19 nt, Artificial Sequence
  Description of Artificial Sequence: Synthetic oligonucleotide
ccccaggucaggaucaguu

SEQ ID NO: 2340877 - RNA, 19 nt, Artificial Sequence
  Description of Artificial Sequence: Synthetic oligonucleotide
ccaccagggauaaccguau

SEQ ID NO: 2340878 - RNA, 19 nt, Artificial Sequence
  Description of Artificial Sequence: Synthetic oligonucleotide
cacgcacgagaaacucuuu

SEQ ID NO: 2340879 - RNA, 19 nt, Artificial Sequence
  Description of Artificial Sequence: Synthetic oligonucleotide
cucugggccggcguggcuu

SEQ ID NO: 2340880 - RNA, 19 nt, Artificial Sequence
  Description of Artificial Sequence: Synthetic oligonucleotide
cccaggucaggaucaguuu

SEQ ID NO: 2340881 - RNA, 19 nt, Artificial Sequence
  Description of Artificial Sequence: Synthetic oligonucleotide
gcaugcugacugggaucca

SEQ ID NO: 2340882 - RNA, 19 nt, Artificial Sequence
  Description of Artificial Sequence: Synthetic oligonucleotide
ggccggcguggcuuggccu

SEQ ID NO: 2340883 - RNA, 19 nt, Artificial Sequence
  Description of Artificial Sequence: Synthetic oligonucleotide
gccuggccaccagggauaa

SEQ ID NO: 2340884 - RNA, 19 nt, Artificial Sequence
  Description of Artificial Sequence: Synthetic oligonucleotide
gccuggcuuagacguccua

SEQ ID NO: 2340885 - RNA, 19 nt, Artificial Sequence
  Description of Artificial Sequence: Synthetic oligonucleotide
ggcccagacgauggauccu

SEQ ID NO: 2340886 - RNA, 19 nt, Artificial Sequence
  Description of Artificial Sequence: Synthetic oligonucleotide
ccccugaucugagaaggau

SEQ ID NO: 2340887 - RNA, 19 nt, Artificial Sequence
  Description of Artificial Sequence: Synthetic oligonucleotide
ccguauugcuuggcccaga

SEQ ID NO: 2340888 - RNA, 19 nt, Artificial Sequence
  Description of Artificial Sequence: Synthetic oligonucleotide
cuccuucuuugggcuggcu

SEQ ID NO: 2340889 - RNA, 19 nt, Artificial Sequence
  Description of Artificial Sequence: Synthetic oligonucleotide
ccagcuggccuggcuuaga

SEQ ID NO: 2340890 - RNA, 19 nt, Artificial Sequence
  Description of Artificial Sequence: Synthetic oligonucleotide
gcucugggccggcguggcu

SEQ ID NO: 2340891 - RNA, 19 nt, Artificial Sequence
  Description of Artificial Sequence: Synthetic oligonucleotide
cggcguggcuuggccucug

SEQ ID NO: 2340892 - RNA, 19 nt, Artificial Sequence
  Description of Artificial Sequence: Synthetic oligonucleotide
ccggcguggcuuggccucu

SEQ ID NO: 2340893 - RNA, 19 nt, Artificial Sequence
  Description of Artificial Sequence: Synthetic oligonucleotide
aaagaacuggucugggagc

SEQ ID NO: 2340894 - RNA, 19 nt, Artificial Sequence
  Description of Artificial Sequence: Synthetic oligonucleotide
aagucaaccacaguagagc

SEQ ID NO: 2340895 - RNA, 19 nt, Artificial Sequence
  Description of Artificial Sequence: Synthetic oligonucleotide
aauaaugguaaacuuucca

SEQ ID NO: 2340896 - RNA, 19 nt, Artificial Sequence
  Description of Artificial Sequence: Synthetic oligonucleotide
auacacgcaguccagggcc

SEQ ID NO: 2340897 - RNA, 19 nt, Artificial Sequence
  Description of Artificial Sequence: Synthetic oligonucleotide
ugaccagggacaaaugagg

SEQ ID NO: 2340898 - RNA, 19 nt, Artificial Sequence
  Description of Artificial Sequence: Synthetic oligonucleotide
aaugaccagggacaaauga

SEQ ID NO: 2340899 - RNA, 19 nt, Artificial Sequence
  Description of Artificial Sequence: Synthetic oligonucleotide
gauaagucaaccacaguag

SEQ ID NO: 2340900 - RNA, 19 nt, Artificial Sequence
  Description of Artificial Sequence: Synthetic oligonucleotide
ugagcagacacauaguauc

SEQ ID NO: 2340901 - RNA, 19 nt, Artificial Sequence
  Description of Artificial Sequence: Synthetic oligonucleotide
caacaagaggcguaaaggg

SEQ ID NO: 2340902 - RNA, 19 nt, Artificial Sequence
  Description of Artificial Sequence: Synthetic oligonucleotide
accacaguagagccgaggc

SEQ ID NO: 2340903 - RNA, 19 nt, Artificial Sequence
  Description of Artificial Sequence: Synthetic oligonucleotide
acacauaguauccagcaug

SEQ ID NO: 2340904 - RNA, 19 nt, Artificial Sequence
  Description of Artificial Sequence: Synthetic oligonucleotide
ucugacuauccccaaucgg

SEQ ID NO: 2340905 - RNA, 19 nt, Artificial Sequence
  Description of Artificial Sequence: Synthetic oligonucleotide
aaucgguccaccaucaaug

SEQ ID NO: 2340906 - RNA, 19 nt, Artificial Sequence
  Description of Artificial Sequence: Synthetic oligonucleotide
ucuugaaacuccucaacac

SEQ ID NO: 2340907 - RNA, 19 nt, Artificial Sequence
  Description of Artificial Sequence: Synthetic oligonucleotide
ugguaaacuuuccaggcac

SEQ ID NO: 2340908 - RNA, 19 nt, Artificial Sequence
  Description of Artificial Sequence: Synthetic oligonucleotide
uucuguuggaggauggcug

SEQ ID NO: 2340909 - RNA, 19 nt, Artificial Sequence
  Description of Artificial Sequence: Synthetic oligonucleotide
uugaaacuccucaacacuc

SEQ ID NO: 2340910 - RNA, 19 nt, Artificial Sequence
  Description of Artificial Sequence: Synthetic oligonucleotide
cuugaggcgauacacgcag

SEQ ID NO: 2340911 - RNA, 19 nt, Artificial Sequence
  Description of Artificial Sequence: Synthetic oligonucleotide
guagacgucggccacgcgg

SEQ ID NO: 2340912 - RNA, 19 nt, Artificial Sequence
  Description of Artificial Sequence: Synthetic oligonucleotide
acacucaaagaacuggucu

SEQ ID NO: 2340913 - RNA, 19 nt, Artificial Sequence
  Description of Artificial Sequence: Synthetic oligonucleotide
cauaguauccagcaugguc

SEQ ID NO: 2340914 - RNA, 19 nt, Artificial Sequence
  Description of Artificial Sequence: Synthetic oligonucleotide
accagggacaaaugaggcc

SEQ ID NO: 2340915 - RNA, 19 nt, Artificial Sequence
  Description of Artificial Sequence: Synthetic oligonucleotide
uccucaacacucaaagaac

SEQ ID NO: 2340916 - RNA, 19 nt, Artificial Sequence
  Description of Artificial Sequence: Synthetic oligonucleotide
ucaaugaccagggacaaau

SEQ ID NO: 2340917 - RNA, 19 nt, Artificial Sequence
  Description of Artificial Sequence: Synthetic oligonucleotide
aguaccuguagacgucggc

SEQ ID NO: 2340918 - RNA, 19 nt, Artificial Sequence
  Description of Artificial Sequence: Synthetic oligonucleotide
uuaggaauccggaugccaa

SEQ ID NO: 2340919 - RNA, 19 nt, Artificial Sequence
  Description of Artificial Sequence: Synthetic oligonucleotide
ugaaacuccucaacacuca

SEQ ID NO: 2340920 - RNA, 19 nt, Artificial Sequence
  Description of Artificial Sequence: Synthetic oligonucleotide
uccggaugccaacaagagg

SEQ ID NO: 2340921 - RNA, 19 nt, Artificial Sequence
  Description of Artificial Sequence: Synthetic oligonucleotide
ccggaugccaacaagaggc

SEQ ID NO: 2340922 - RNA, 19 nt, Artificial Sequence
  Description of Artificial Sequence: Synthetic oligonucleotide
acagauaagucaaccacag

SEQ ID NO: 2340923 - RNA, 19 nt, Artificial Sequence
  Description of Artificial Sequence: Synthetic oligonucleotide
aauccggaugccaacaaga

SEQ ID NO: 2340924 - RNA, 19 nt, Artificial Sequence
  Description of Artificial Sequence: Synthetic oligonucleotide
ccaaguuucaugaacauga

SEQ ID NO: 2340925 - RNA, 19 nt, Artificial Sequence
  Description of Artificial Sequence: Synthetic oligonucleotide
ugguccuggcaacaggucc

SEQ ID NO: 2340926 - RNA, 19 nt, Artificial Sequence
  Description of Artificial Sequence: Synthetic oligonucleotide
uugccaaccagugagcaga

SEQ ID NO: 2340927 - RNA, 19 nt, Artificial Sequence
  Description of Artificial Sequence: Synthetic oligonucleotide
caggccagaccguacagcg

SEQ ID NO: 2340928 - RNA, 19 nt, Artificial Sequence
  Description of Artificial Sequence: Synthetic oligonucleotide
agugagcagacacauagua

SEQ ID NO: 2340929 - RNA, 19 nt, Artificial Sequence
  Description of Artificial Sequence: Synthetic oligonucleotide
gauacacgcaguccagggc

SEQ ID NO: 2340930 - RNA, 19 nt, Artificial Sequence
  Description of Artificial Sequence: Synthetic oligonucleotide
aaggcgugguuaggaaucc

SEQ ID NO: 2340931 - RNA, 19 nt, Artificial Sequence
  Description of Artificial Sequence: Synthetic oligonucleotide
cucacaguaccuguagacg

SEQ ID NO: 2340932 - RNA, 19 nt, Artificial Sequence
  Description of Artificial Sequence: Synthetic oligonucleotide
cuucccaaguuucaugaac

SEQ ID NO: 2340933 - RNA, 19 nt, Artificial Sequence
  Description of Artificial Sequence: Synthetic oligonucleotide
gaauaaugguaaacuuucc

SEQ ID NO: 2340934 - RNA, 19 nt, Artificial Sequence
  Description of Artificial Sequence: Synthetic oligonucleotide
acagcgugucaguugggac

SEQ ID NO: 2340935 - RNA, 19 nt, Artificial Sequence
  Description of Artificial Sequence: Synthetic oligonucleotide
agccgcaacagccgggccc

SEQ ID NO: 2340936 - RNA, 19 nt, Artificial Sequence
  Description of Artificial Sequence: Synthetic oligonucleotide
agaaggcggcaucugcggc

SEQ ID NO: 2340937 - RNA, 19 nt, Artificial Sequence
  Description of Artificial Sequence: Synthetic oligonucleotide
aggcacagauaagucaacc

SEQ ID NO: 2340938 - RNA, 19 nt, Artificial Sequence
  Description of Artificial Sequence: Synthetic oligonucleotide
aguugggaccgccaccacg

SEQ ID NO: 2340939 - RNA, 19 nt, Artificial Sequence
  Description of Artificial Sequence: Synthetic oligonucleotide
gaauccggaugccaacaag

SEQ ID NO: 2340940 - RNA, 19 nt, Artificial Sequence
  Description of Artificial Sequence: Synthetic oligonucleotide
aaguccugcaugaaggcgu

SEQ ID NO: 2340941 - RNA, 19 nt, Artificial Sequence
  Description of Artificial Sequence: Synthetic oligonucleotide
guugggaccgccaccacgg

SEQ ID NO: 2340942 - RNA, 19 nt, Artificial Sequence
  Description of Artificial Sequence: Synthetic oligonucleotide
uagacgucggccacgcggc

SEQ ID NO: 2340943 - RNA, 19 nt, Artificial Sequence
  Description of Artificial Sequence: Synthetic oligonucleotide
gacuauccccaaucggucc

SEQ ID NO: 2340944 - RNA, 19 nt, Artificial Sequence
  Description of Artificial Sequence: Synthetic oligonucleotide
caaacauuugggccaaguc

SEQ ID NO: 2340945 - RNA, 19 nt, Artificial Sequence
  Description of Artificial Sequence: Synthetic oligonucleotide
ggacaaaugaggccagagg

SEQ ID NO: 2340946 - RNA, 19 nt, Artificial Sequence
  Description of Artificial Sequence: Synthetic oligonucleotide
cagcgugucaguugggacc

SEQ ID NO: 2340947 - RNA, 19 nt, Artificial Sequence
  Description of Artificial Sequence: Synthetic oligonucleotide
guuggcacuggucagugca

SEQ ID NO: 2340948 - RNA, 19 nt, Artificial Sequence
  Description of Artificial Sequence: Synthetic oligonucleotide
ucuguuggaggauggcugu

SEQ ID NO: 2340949 - RNA, 19 nt, Artificial Sequence
  Description of Artificial Sequence: Synthetic oligonucleotide
ugacuauccccaaucgguc

SEQ ID NO: 2340950 - RNA, 19 nt, Artificial Sequence
  Description of Artificial Sequence: Synthetic oligonucleotide
cucgcugcggcccuugagg

SEQ ID NO: 2340951 - RNA, 19 nt, Artificial Sequence
  Description of Artificial Sequence: Synthetic oligonucleotide
augaccagggacaaaugag

SEQ ID NO: 2340952 - RNA, 19 nt, Artificial Sequence
  Description of Artificial Sequence: Synthetic oligonucleotide
uggucagugcaaguggucc

SEQ ID NO: 2340953 - RNA, 19 nt, Artificial Sequence
  Description of Artificial Sequence: Synthetic oligonucleotide
cucugacuauccccaaucg

SEQ ID NO: 2340954 - RNA, 19 nt, Artificial Sequence
  Description of Artificial Sequence: Synthetic oligonucleotide
cucaacacucaaagaacug

SEQ ID NO: 2340955 - RNA, 19 nt, Artificial Sequence
  Description of Artificial Sequence: Synthetic oligonucleotide
agcgccucgguccaaccgg

SEQ ID NO: 2340956 - RNA, 19 nt, Artificial Sequence
  Description of Artificial Sequence: Synthetic oligonucleotide
augguaaacuuuccaggca

SEQ ID NO: 2340957 - RNA, 19 nt, Artificial Sequence
  Description of Artificial Sequence: Synthetic oligonucleotide
uauccagcaugguccuugg

SEQ ID NO: 2340958 - RNA, 19 nt, Artificial Sequence
  Description of Artificial Sequence: Synthetic oligonucleotide
acaagaggcguaaaggggu

SEQ ID NO: 2340959 - RNA, 19 nt, Artificial Sequence
  Description of Artificial Sequence: Synthetic oligonucleotide
gaaggcggcaucugcggcc

SEQ ID NO: 2340960 - RNA, 19 nt, Artificial Sequence
  Description of Artificial Sequence: Synthetic oligonucleotide
ugggccaaguccugcauga

SEQ ID NO: 2340961 - RNA, 19 nt, Artificial Sequence
  Description of Artificial Sequence: Synthetic oligonucleotide
aggcgauacacgcagucca

SEQ ID NO: 2340962 - RNA, 19 nt, Artificial Sequence
  Description of Artificial Sequence: Synthetic oligonucleotide
uuggaggauggcuguagug

SEQ ID NO: 2340963 - RNA, 19 nt, Artificial Sequence
  Description of Artificial Sequence: Synthetic oligonucleotide
guuucaugaacaugaccuc

SEQ ID NO: 2340964 - RNA, 19 nt, Artificial Sequence
  Description of Artificial Sequence: Synthetic oligonucleotide
uacacgcaguccagggccg

SEQ ID NO: 2340965 - RNA, 19 nt, Artificial Sequence
  Description of Artificial Sequence: Synthetic oligonucleotide
ugucaguugggaccgccac

SEQ ID NO: 2340966 - RNA, 19 nt, Artificial Sequence
  Description of Artificial Sequence: Synthetic oligonucleotide
ugaggcgauacacgcaguc

SEQ ID NO: 2340967 - RNA, 19 nt, Artificial Sequence
  Description of Artificial Sequence: Synthetic oligonucleotide
acaguaccuguagacgucg

SEQ ID NO: 2340968 - RNA, 19 nt, Artificial Sequence
  Description of Artificial Sequence: Synthetic oligonucleotide
uguuggaggauggcuguag

SEQ ID NO: 2340969 - RNA, 19 nt, Artificial Sequence
  Description of Artificial Sequence: Synthetic oligonucleotide
gaaggcgugguuaggaauc

SEQ ID NO: 2340970 - RNA, 19 nt, Artificial Sequence
  Description of Artificial Sequence: Synthetic oligonucleotide
cagcccguauuucuguugg

SEQ ID NO: 2340971 - RNA, 19 nt, Artificial Sequence
  Description of Artificial Sequence: Synthetic oligonucleotide
uaccuguagacgucggcca

SEQ ID NO: 2340972 - RNA, 19 nt, Artificial Sequence
  Description of Artificial Sequence: Synthetic oligonucleotide
gcacagauaagucaaccac

SEQ ID NO: 2340973 - RNA, 19 nt, Artificial Sequence
  Description of Artificial Sequence: Synthetic oligonucleotide
agaccguacagcgugucag

SEQ ID NO: 2340974 - RNA, 19 nt, Artificial Sequence
  Description of Artificial Sequence: Synthetic oligonucleotide
ggccuugccaaccagugag

SEQ ID NO: 2340975 - RNA, 19 nt, Artificial Sequence
  Description of Artificial Sequence: Synthetic oligonucleotide
cagaaggcggcaucugcgg

SEQ ID NO: 2340976 - RNA, 19 nt, Artificial Sequence
  Description of Artificial Sequence: Synthetic oligonucleotide
agcgugucaguugggaccg

SEQ ID NO: 2340977 - RNA, 19 nt, Artificial Sequence
  Description of Artificial Sequence: Synthetic oligonucleotide
aaccagugagcagacacau

SEQ ID NO: 2340978 - RNA, 19 nt, Artificial Sequence
  Description of Artificial Sequence: Synthetic oligonucleotide
acuauccccaaucggucca

SEQ ID NO: 2340979 - RNA, 19 nt, Artificial Sequence
  Description of Artificial Sequence: Synthetic oligonucleotide
gaccagggacaaaugaggc

SEQ ID NO: 2340980 - RNA, 19 nt, Artificial Sequence
  Description of Artificial Sequence: Synthetic oligonucleotide
accuguagacgucggccac

SEQ ID NO: 2340981 - RNA, 19 nt, Artificial Sequence
  Description of Artificial Sequence: Synthetic oligonucleotide
ugaaggcgugguuaggaau

SEQ ID NO: 2340982 - RNA, 19 nt, Artificial Sequence
  Description of Artificial Sequence: Synthetic oligonucleotide
ugaggccuugccaaccagu

SEQ ID NO: 2340983 - RNA, 19 nt, Artificial Sequence
  Description of Artificial Sequence: Synthetic oligonucleotide
uggcuguaguguuuuccag

SEQ ID NO: 2340984 - RNA, 19 nt, Artificial Sequence
  Description of Artificial Sequence: Synthetic oligonucleotide
augaccucugggaagggag

SEQ ID NO: 2340985 - RNA, 19 nt, Artificial Sequence
  Description of Artificial Sequence: Synthetic oligonucleotide
ugggcgaauaaugguaaac

SEQ ID NO: 2340986 - RNA, 19 nt, Artificial Sequence
  Description of Artificial Sequence: Synthetic oligonucleotide
cuuuccaggcacagauaag

SEQ ID NO: 2340987 - RNA, 19 nt, Artificial Sequence
  Description of Artificial Sequence: Synthetic oligonucleotide
guauccagcaugguccuug

SEQ ID NO: 2340988 - RNA, 19 nt, Artificial Sequence
  Description of Artificial Sequence: Synthetic oligonucleotide
cuugccaaccagugagcag

SEQ ID NO: 2340989 - RNA, 19 nt, Artificial Sequence
  Description of Artificial Sequence: Synthetic oligonucleotide
cuuggguacucucaccuca

SEQ ID NO: 2340990 - RNA, 19 nt, Artificial Sequence
  Description of Artificial Sequence: Synthetic oligonucleotide
cugacuauccccaaucggu

SEQ ID NO: 2340991 - RNA, 19 nt, Artificial Sequence
  Description of Artificial Sequence: Synthetic oligonucleotide
aaccggagcgcucggggcu

SEQ ID NO: 2340992 - RNA, 19 nt, Artificial Sequence
  Description of Artificial Sequence: Synthetic oligonucleotide
uugggccaaguccugcaug

SEQ ID NO: 2340993 - RNA, 19 nt, Artificial Sequence
  Description of Artificial Sequence: Synthetic oligonucleotide
acggcgagcggcuuggccu

SEQ ID NO: 2340994 - RNA, 19 nt, Artificial Sequence
  Description of Artificial Sequence: Synthetic oligonucleotide
cugccaaugaggccuugcc

SEQ ID NO: 2340995 - RNA, 19 nt, Artificial Sequence
  Description of Artificial Sequence: Synthetic oligonucleotide
uaguauccagcaugguccu

SEQ ID NO: 2340996 - RNA, 19 nt, Artificial Sequence
  Description of Artificial Sequence: Synthetic oligonucleotide
ugggaccgccaccacggcg

SEQ ID NO: 2340997 - RNA, 19 nt, Artificial Sequence
  Description of Artificial Sequence: Synthetic oligonucleotide
ucucaccucacaguaccug

SEQ ID NO: 2340998 - RNA, 19 nt, Artificial Sequence
  Description of Artificial Sequence: Synthetic oligonucleotide
aagaggcguaaagggguuc

SEQ ID NO: 2340999 - RNA, 19 nt, Artificial Sequence
  Description of Artificial Sequence: Synthetic oligonucleotide
uaggaauccggaugccaac

SEQ ID NO: 2341000 - RNA, 19 nt, Artificial Sequence
  Description of Artificial Sequence: Synthetic oligonucleotide
gccaacaagaggcguaaag

SEQ ID NO: 2341001 - RNA, 19 nt, Artificial Sequence
  Description of Artificial Sequence: Synthetic oligonucleotide
aucaccagggucacugguc

SEQ ID NO: 2341002 - RNA, 19 nt, Artificial Sequence
  Description of Artificial Sequence: Synthetic oligonucleotide
uacagcgugucaguuggga

SEQ ID NO: 2341003 - RNA, 19 nt, Artificial Sequence
  Description of Artificial Sequence: Synthetic oligonucleotide
agccucugccaaugaggcc

SEQ ID NO: 2341004 - RNA, 19 nt, Artificial Sequence
  Description of Artificial Sequence: Synthetic oligonucleotide
gucaaccacaguagagccg

SEQ ID NO: 2341005 - RNA, 19 nt, Artificial Sequence
  Description of Artificial Sequence: Synthetic oligonucleotide
cguacagcgugucaguugg

SEQ ID NO: 2341006 - RNA, 19 nt, Artificial Sequence
  Description of Artificial Sequence: Synthetic oligonucleotide
cuugaaacuccucaacacu

SEQ ID NO: 2341007 - RNA, 19 nt, Artificial Sequence
  Description of Artificial Sequence: Synthetic oligonucleotide
uacucucaccucacaguac

SEQ ID NO: 2341008 - RNA, 19 nt, Artificial Sequence
  Description of Artificial Sequence: Synthetic oligonucleotide
gaggcgauacacgcagucc

SEQ ID NO: 2341009 - RNA, 19 nt, Artificial Sequence
  Description of Artificial Sequence: Synthetic oligonucleotide
guacucucaccucacagua

SEQ ID NO: 2341010 - RNA, 19 nt, Artificial Sequence
  Description of Artificial Sequence: Synthetic oligonucleotide
aucgguccaccaucaauga

SEQ ID NO: 2341011 - RNA, 19 nt, Artificial Sequence
  Description of Artificial Sequence: Synthetic oligonucleotide
caugccggccgccaccgcg

SEQ ID NO: 2341012 - RNA, 19 nt, Artificial Sequence
  Description of Artificial Sequence: Synthetic oligonucleotide
acaguagagccgaggcggc

SEQ ID NO: 2341013 - RNA, 19 nt, Artificial Sequence
  Description of Artificial Sequence: Synthetic oligonucleotide
caccucacaguaccuguag

SEQ ID NO: 2341014 - RNA, 19 nt, Artificial Sequence
  Description of Artificial Sequence: Synthetic oligonucleotide
cacaguaccuguagacguc

SEQ ID NO: 2341015 - RNA, 19 nt, Artificial Sequence
  Description of Artificial Sequence: Synthetic oligonucleotide
uccucggagcgcugcauca

SEQ ID NO: 2341016 - RNA, 19 nt, Artificial Sequence
  Description of Artificial Sequence: Synthetic oligonucleotide
caaugaccagggacaaaug

SEQ ID NO: 2341017 - RNA, 19 nt, Artificial Sequence
  Description of Artificial Sequence: Synthetic oligonucleotide
ggucuugaaacuccucaac

SEQ ID NO: 2341018 - RNA, 19 nt, Artificial Sequence
  Description of Artificial Sequence: Synthetic oligonucleotide
cccguauuucuguuggagg

SEQ ID NO: 2341019 - RNA, 19 nt, Artificial Sequence
  Description of Artificial Sequence: Synthetic oligonucleotide
ucugccaaugaggccuugc

SEQ ID NO: 2341020 - RNA, 19 nt, Artificial Sequence
  Description of Artificial Sequence: Synthetic oligonucleotide
agcgcucggggcuggcggc

SEQ ID NO: 2341021 - RNA, 19 nt, Artificial Sequence
  Description of Artificial Sequence: Synthetic oligonucleotide
ucuucccaaguuucaugaa

SEQ ID NO: 2341022 - RNA, 19 nt, Artificial Sequence
  Description of Artificial Sequence: Synthetic oligonucleotide
ggguacucucaccucacag

SEQ ID NO: 2341023 - RNA, 19 nt, Artificial Sequence
  Description of Artificial Sequence: Synthetic oligonucleotide
uccccaaucgguccaccau

SEQ ID NO: 2341024 - RNA, 19 nt, Artificial Sequence
  Description of Artificial Sequence: Synthetic oligonucleotide
augaaggcgugguuaggaa

SEQ ID NO: 2341025 - RNA, 19 nt, Artificial Sequence
  Description of Artificial Sequence: Synthetic oligonucleotide
gccgaggcggcacucaggg

SEQ ID NO: 2341026 - RNA, 19 nt, Artificial Sequence
  Description of Artificial Sequence: Synthetic oligonucleotide
guaguguuuuccagggcac

SEQ ID NO: 2341027 - RNA, 19 nt, Artificial Sequence
  Description of Artificial Sequence: Synthetic oligonucleotide
aggcguaaagggguucagg

SEQ ID NO: 2341028 - RNA, 19 nt, Artificial Sequence
  Description of Artificial Sequence: Synthetic oligonucleotide
ucgguccaccaucaaugac

SEQ ID NO: 2341029 - RNA, 19 nt, Artificial Sequence
  Description of Artificial Sequence: Synthetic oligonucleotide
ggccagaccguacagcgug

SEQ ID NO: 2341030 - RNA, 19 nt, Artificial Sequence
  Description of Artificial Sequence: Synthetic oligonucleotide
cacugguccuggcaacagg

SEQ ID NO: 2341031 - RNA, 19 nt, Artificial Sequence
  Description of Artificial Sequence: Synthetic oligonucleotide
gaugccaacaagaggcgua

SEQ ID NO: 2341032 - RNA, 19 nt, Artificial Sequence
  Description of Artificial Sequence: Synthetic oligonucleotide
ccucgguccaaccggagcg

SEQ ID NO: 2341033 - RNA, 19 nt, Artificial Sequence
  Description of Artificial Sequence: Synthetic oligonucleotide
ugggaagggagcagcccgu

SEQ ID NO: 2341034 - RNA, 19 nt, Artificial Sequence
  Description of Artificial Sequence: Synthetic oligonucleotide
uguagacgucggccacgcg

SEQ ID NO: 2341035 - RNA, 19 nt, Artificial Sequence
  Description of Artificial Sequence: Synthetic oligonucleotide
cucagccccaugccggccg

SEQ ID NO: 2341036 - RNA, 19 nt, Artificial Sequence
  Description of Artificial Sequence: Synthetic oligonucleotide
ucgccgagcaggccagacc

SEQ ID NO: 2341037 - RNA, 19 nt, Artificial Sequence
  Description of Artificial Sequence: Synthetic oligonucleotide
cccuugaggcgauacacgc

SEQ ID NO: 2341038 - RNA, 19 nt, Artificial Sequence
  Description of Artificial Sequence: Synthetic oligonucleotide
agaggcguaaagggguuca

SEQ ID NO: 2341039 - RNA, 19 nt, Artificial Sequence
  Description of Artificial Sequence: Synthetic oligonucleotide
ggagcgcugcaucaccagg

SEQ ID NO: 2341040 - RNA, 19 nt, Artificial Sequence
  Description of Artificial Sequence: Synthetic oligonucleotide
ucacugguccuggcaacag

SEQ ID NO: 2341041 - RNA, 19 nt, Artificial Sequence
  Description of Artificial Sequence: Synthetic oligonucleotide
agggucacugguccuggca

SEQ ID NO: 2341042 - RNA, 19 nt, Artificial Sequence
  Description of Artificial Sequence: Synthetic oligonucleotide
uccuugggucuucccaagu

SEQ ID NO: 2341043 - RNA, 19 nt, Artificial Sequence
  Description of Artificial Sequence: Synthetic oligonucleotide
uggguacucucaccucaca

SEQ ID NO: 2341044 - RNA, 19 nt, Artificial Sequence
  Description of Artificial Sequence: Synthetic oligonucleotide
gguccaaccggagcgcucg

SEQ ID NO: 2341045 - RNA, 19 nt, Artificial Sequence
  Description of Artificial Sequence: Synthetic oligonucleotide
caaccggagcgcucggggc

SEQ ID NO: 2341046 - RNA, 19 nt, Artificial Sequence
  Description of Artificial Sequence: Synthetic oligonucleotide
ucggccacgcggcccaggc

SEQ ID NO: 2341047 - RNA, 19 nt, Artificial Sequence
  Description of Artificial Sequence: Synthetic oligonucleotide
gaacuggucugggagcuga

SEQ ID NO: 2341048 - RNA, 19 nt, Artificial Sequence
  Description of Artificial Sequence: Synthetic oligonucleotide
aggaauccggaugccaaca

SEQ ID NO: 2341049 - RNA, 19 nt, Artificial Sequence
  Description of Artificial Sequence: Synthetic oligonucleotide
gcagaaggcggcaucugcg

SEQ ID NO: 2341050 - RNA, 19 nt, Artificial Sequence
  Description of Artificial Sequence: Synthetic oligonucleotide
augaggccuugccaaccag

SEQ ID NO: 2341051 - RNA, 19 nt, Artificial Sequence
  Description of Artificial Sequence: Synthetic oligonucleotide
caaaugaggccagaggucu

SEQ ID NO: 2341052 - RNA, 19 nt, Artificial Sequence
  Description of Artificial Sequence: Synthetic oligonucleotide
caguaccuguagacgucgg

SEQ ID NO: 2341053 - RNA, 19 nt, Artificial Sequence
  Description of Artificial Sequence: Synthetic oligonucleotide
gagcaggccagaccguaca

SEQ ID NO: 2341054 - RNA, 19 nt, Artificial Sequence
  Description of Artificial Sequence: Synthetic oligonucleotide
ggcgugguuaggaauccgg

SEQ ID NO: 2341055 - RNA, 19 nt, Artificial Sequence
  Description of Artificial Sequence: Synthetic oligonucleotide
agcgcugcaucaccagggu

SEQ ID NO: 2341056 - RNA, 19 nt, Artificial Sequence
  Description of Artificial Sequence: Synthetic oligonucleotide
cuguagacgucggccacgc

SEQ ID NO: 2341057 - RNA, 19 nt, Artificial Sequence
  Description of Artificial Sequence: Synthetic oligonucleotide
gggacaaaugaggccagag

SEQ ID NO: 2341058 - RNA, 19 nt, Artificial Sequence
  Description of Artificial Sequence: Synthetic oligonucleotide
gcucugacuauccccaauc

SEQ ID NO: 2341059 - RNA, 19 nt, Artificial Sequence
  Description of Artificial Sequence: Synthetic oligonucleotide
guguuuuccagggcacagc

SEQ ID NO: 2341060 - RNA, 19 nt, Artificial Sequence
  Description of Artificial Sequence: Synthetic oligonucleotide
auccccaaucgguccacca

SEQ ID NO: 2341061 - RNA, 19 nt, Artificial Sequence
  Description of Artificial Sequence: Synthetic oligonucleotide
gagccgaggcggcacucag

SEQ ID NO: 2341062 - RNA, 19 nt, Artificial Sequence
  Description of Artificial Sequence: Synthetic oligonucleotide
uccaaccggagcgcucggg

SEQ ID NO: 2341063 - RNA, 19 nt, Artificial Sequence
  Description of Artificial Sequence: Synthetic oligonucleotide
uugaggcgauacacgcagu

SEQ ID NO: 2341064 - RNA, 19 nt, Artificial Sequence
  Description of Artificial Sequence: Synthetic oligonucleotide
cgauacacgcaguccaggg

SEQ ID NO: 2341065 - RNA, 19 nt, Artificial Sequence
  Description of Artificial Sequence: Synthetic oligonucleotide
gguucaggucuuuguugag

SEQ ID NO: 2341066 - RNA, 19 nt, Artificial Sequence
  Description of Artificial Sequence: Synthetic oligonucleotide
gacacauaguauccagcau

SEQ ID NO: 2341067 - RNA, 19 nt, Artificial Sequence
  Description of Artificial Sequence: Synthetic oligonucleotide
gaggcguaaagggguucag

SEQ ID NO: 2341068 - RNA, 19 nt, Artificial Sequence
  Description of Artificial Sequence: Synthetic oligonucleotide
ggcguaaagggguucaggu

SEQ ID NO: 2341069 - RNA, 19 nt, Artificial Sequence
  Description of Artificial Sequence: Synthetic oligonucleotide
gguacucucaccucacagu

SEQ ID NO: 2341070 - RNA, 19 nt, Artificial Sequence
  Description of Artificial Sequence: Synthetic oligonucleotide
cagcgccucgguccaaccg

SEQ ID NO: 2341071 - RNA, 19 nt, Artificial Sequence
  Description of Artificial Sequence: Synthetic oligonucleotide
ggagcugagguuggcacug

SEQ ID NO: 2341072 - RNA, 19 nt, Artificial Sequence
  Description of Artificial Sequence: Synthetic oligonucleotide
gaagggagcagcccguauu

SEQ ID NO: 2341073 - RNA, 19 nt, Artificial Sequence
  Description of Artificial Sequence: Synthetic oligonucleotide
agguuggcacuggucagug

SEQ ID NO: 2341074 - RNA, 19 nt, Artificial Sequence
  Description of Artificial Sequence: Synthetic oligonucleotide
gcacucagggcucugacua

SEQ ID NO: 2341075 - RNA, 19 nt, Artificial Sequence
  Description of Artificial Sequence: Synthetic oligonucleotide
ccacaguagagccgaggcg

SEQ ID NO: 2341076 - RNA, 19 nt, Artificial Sequence
  Description of Artificial Sequence: Synthetic oligonucleotide
augccaacaagaggcguaa

SEQ ID NO: 2341077 - RNA, 19 nt, Artificial Sequence
  Description of Artificial Sequence: Synthetic oligonucleotide
cugguccuggcaacagguc

SEQ ID NO: 2341078 - RNA, 19 nt, Artificial Sequence
  Description of Artificial Sequence: Synthetic oligonucleotide
uugggaccgccaccacggc

SEQ ID NO: 2341079 - RNA, 19 nt, Artificial Sequence
  Description of Artificial Sequence: Synthetic oligonucleotide
aguccugcaugaaggcgug

SEQ ID NO: 2341080 - RNA, 19 nt, Artificial Sequence
  Description of Artificial Sequence: Synthetic oligonucleotide
ccaaccggagcgcucgggg

SEQ ID NO: 2341081 - RNA, 19 nt, Artificial Sequence
  Description of Artificial Sequence: Synthetic oligonucleotide
agggagcagcccguauuuc

SEQ ID NO: 2341082 - RNA, 19 nt, Artificial Sequence
  Description of Artificial Sequence: Synthetic oligonucleotide
uauccccaaucgguccacc

SEQ ID NO: 2341083 - RNA, 19 nt, Artificial Sequence
  Description of Artificial Sequence: Synthetic oligonucleotide
gcccguauuucuguuggag

SEQ ID NO: 2341084 - RNA, 19 nt, Artificial Sequence
  Description of Artificial Sequence: Synthetic oligonucleotide
gggaccgccaccacggcgc

SEQ ID NO: 2341085 - RNA, 19 nt, Artificial Sequence
  Description of Artificial Sequence: Synthetic oligonucleotide
uuggccucgcugcggcccu

SEQ ID NO: 2341086 - RNA, 19 nt, Artificial Sequence
  Description of Artificial Sequence: Synthetic oligonucleotide
cucaccucacaguaccugu

SEQ ID NO: 2341087 - RNA, 19 nt, Artificial Sequence
  Description of Artificial Sequence: Synthetic oligonucleotide
cgccgagcaggccagaccg

SEQ ID NO: 2341088 - RNA, 19 nt, Artificial Sequence
  Description of Artificial Sequence: Synthetic oligonucleotide
gguccuugggucuucccaa

SEQ ID NO: 2341089 - RNA, 19 nt, Artificial Sequence
  Description of Artificial Sequence: Synthetic oligonucleotide
acgucggccacgcggccca

SEQ ID NO: 2341090 - RNA, 19 nt, Artificial Sequence
  Description of Artificial Sequence: Synthetic oligonucleotide
gucugggagcugagguugg

SEQ ID NO: 2341091 - RNA, 19 nt, Artificial Sequence
  Description of Artificial Sequence: Synthetic oligonucleotide
gcguaaagggguucagguc

SEQ ID NO: 2341092 - RNA, 19 nt, Artificial Sequence
  Description of Artificial Sequence: Synthetic oligonucleotide
cacggcgagcggcuuggcc

SEQ ID NO: 2341093 - RNA, 19 nt, Artificial Sequence
  Description of Artificial Sequence: Synthetic oligonucleotide
gagcggcuuggccucgcug

SEQ ID NO: 2341094 - RNA, 19 nt, Artificial Sequence
  Description of Artificial Sequence: Synthetic oligonucleotide
gagcuccuuggguacucuc

SEQ ID NO: 2341095 - RNA, 19 nt, Artificial Sequence
  Description of Artificial Sequence: Synthetic oligonucleotide
cucgguccaaccggagcgc

SEQ ID NO: 2341096 - RNA, 19 nt, Artificial Sequence
  Description of Artificial Sequence: Synthetic oligonucleotide
ggccacgcggcccaggcac

SEQ ID NO: 2341097 - RNA, 19 nt, Artificial Sequence
  Description of Artificial Sequence: Synthetic oligonucleotide
acucgccggagcggggcgc

SEQ ID NO: 2341098 - RNA, 19 nt, Artificial Sequence
  Description of Artificial Sequence: Synthetic oligonucleotide
aggcgugguuaggaauccg

SEQ ID NO: 2341099 - RNA, 19 nt, Artificial Sequence
  Description of Artificial Sequence: Synthetic oligonucleotide
agcagcccguauuucuguu

SEQ ID NO: 2341100 - RNA, 19 nt, Artificial Sequence
  Description of Artificial Sequence: Synthetic oligonucleotide
acgcaguccagggccgccg

SEQ ID NO: 2341101 - RNA, 19 nt, Artificial Sequence
  Description of Artificial Sequence: Synthetic oligonucleotide
gacgucggccacgcggccc

SEQ ID NO: 2341102 - RNA, 19 nt, Artificial Sequence
  Description of Artificial Sequence: Synthetic oligonucleotide
guuggaggauggcuguagu

SEQ ID NO: 2341103 - RNA, 19 nt, Artificial Sequence
  Description of Artificial Sequence: Synthetic oligonucleotide
cuccucggagcgcugcauc

SEQ ID NO: 2341104 - RNA, 19 nt, Artificial Sequence
  Description of Artificial Sequence: Synthetic oligonucleotide
cugcaugaaggcgugguua

SEQ ID NO: 2341105 - RNA, 19 nt, Artificial Sequence
  Description of Artificial Sequence: Synthetic oligonucleotide
cuauccccaaucgguccac

SEQ ID NO: 2341106 - RNA, 19 nt, Artificial Sequence
  Description of Artificial Sequence: Synthetic oligonucleotide
gcgauacacgcaguccagg

SEQ ID NO: 2341107 - RNA, 19 nt, Artificial Sequence
  Description of Artificial Sequence: Synthetic oligonucleotide
agcccguauuucuguugga

SEQ ID NO: 2341108 - RNA, 19 nt, Artificial Sequence
  Description of Artificial Sequence: Synthetic oligonucleotide
gcccuugaggcgauacacg

SEQ ID NO: 2341109 - RNA, 19 nt, Artificial Sequence
  Description of Artificial Sequence: Synthetic oligonucleotide
ggcgauacacgcaguccag

SEQ ID NO: 2341110 - RNA, 19 nt, Artificial Sequence
  Description of Artificial Sequence: Synthetic oligonucleotide
gggcgaauaaugguaaacu

SEQ ID NO: 2341111 - RNA, 19 nt, Artificial Sequence
  Description of Artificial Sequence: Synthetic oligonucleotide
agcuccucggagcgcugca

SEQ ID NO: 2341112 - RNA, 19 nt, Artificial Sequence
  Description of Artificial Sequence: Synthetic oligonucleotide
gcggcccaggcacacggcg

SEQ ID NO: 2341113 - RNA, 19 nt, Artificial Sequence
  Description of Artificial Sequence: Synthetic oligonucleotide
cguaaagggguucaggucu

SEQ ID NO: 2341114 - RNA, 19 nt, Artificial Sequence
  Description of Artificial Sequence: Synthetic oligonucleotide
gcgcagcucggccacggcg

SEQ ID NO: 2341115 - RNA, 19 nt, Artificial Sequence
  Description of Artificial Sequence: Synthetic oligonucleotide
ggcgaauaaugguaaacuu

SEQ ID NO: 2341116 - RNA, 19 nt, Artificial Sequence
  Description of Artificial Sequence: Synthetic oligonucleotide
gaccguacagcgugucagu

SEQ ID NO: 2341117 - RNA, 19 nt, Artificial Sequence
  Description of Artificial Sequence: Synthetic oligonucleotide
caaucgguccaccaucaau

SEQ ID NO: 2341118 - RNA, 19 nt, Artificial Sequence
  Description of Artificial Sequence: Synthetic oligonucleotide
cacucgccggagcggggcg

SEQ ID NO: 2341119 - RNA, 19 nt, Artificial Sequence
  Description of Artificial Sequence: Synthetic oligonucleotide
gcccgcagcgccucggucc

SEQ ID NO: 2341120 - RNA, 19 nt, Artificial Sequence
  Description of Artificial Sequence: Synthetic oligonucleotide
guacagcgugucaguuggg

SEQ ID NO: 2341121 - RNA, 19 nt, Artificial Sequence
  Description of Artificial Sequence: Synthetic oligonucleotide
ccgucgcucagccccaugc

SEQ ID NO: 2341122 - RNA, 19 nt, Artificial Sequence
  Description of Artificial Sequence: Synthetic oligonucleotide
augccggccgccaccgcgg

SEQ ID NO: 2341123 - RNA, 19 nt, Artificial Sequence
  Description of Artificial Sequence: Synthetic oligonucleotide
gagcagcccguauuucugu

SEQ ID NO: 2341124 - RNA, 19 nt, Artificial Sequence
  Description of Artificial Sequence: Synthetic oligonucleotide
cuugggucuucccaaguuu

SEQ ID NO: 2341125 - RNA, 19 nt, Artificial Sequence
  Description of Artificial Sequence: Synthetic oligonucleotide
ucgguccaaccggagcgcu

SEQ ID NO: 2341126 - RNA, 19 nt, Artificial Sequence
  Description of Artificial Sequence: Synthetic oligonucleotide
agagccgaggcggcacuca

SEQ ID NO: 2341127 - RNA, 19 nt, Artificial Sequence
  Description of Artificial Sequence: Synthetic oligonucleotide
cagaccguacagcguguca

SEQ ID NO: 2341128 - RNA, 19 nt, Artificial Sequence
  Description of Artificial Sequence: Synthetic oligonucleotide
ggaauccggaugccaacaa

SEQ ID NO: 2341129 - RNA, 19 nt, Artificial Sequence
  Description of Artificial Sequence: Synthetic oligonucleotide
gccucgguccaaccggagc

SEQ ID NO: 2341130 - RNA, 19 nt, Artificial Sequence
  Description of Artificial Sequence: Synthetic oligonucleotide
gugagcagacacauaguau

SEQ ID NO: 2341131 - RNA, 19 nt, Artificial Sequence
  Description of Artificial Sequence: Synthetic oligonucleotide
ccguacagcgugucaguug

SEQ ID NO: 2341132 - RNA, 19 nt, Artificial Sequence
  Description of Artificial Sequence: Synthetic oligonucleotide
agcucgccgagcaggccag

SEQ ID NO: 2341133 - RNA, 19 nt, Artificial Sequence
  Description of Artificial Sequence: Synthetic oligonucleotide
ccuguagacgucggccacg

SEQ ID NO: 2341134 - RNA, 19 nt, Artificial Sequence
  Description of Artificial Sequence: Synthetic oligonucleotide
gagguuggcacuggucagu

SEQ ID NO: 2341135 - RNA, 19 nt, Artificial Sequence
  Description of Artificial Sequence: Synthetic oligonucleotide
gguuggcacuggucagugc

SEQ ID NO: 2341136 - RNA, 19 nt, Artificial Sequence
  Description of Artificial Sequence: Synthetic oligonucleotide
cugggcgaauaaugguaaa

SEQ ID NO: 2341137 - RNA, 19 nt, Artificial Sequence
  Description of Artificial Sequence: Synthetic oligonucleotide
cggaugccaacaagaggcg

SEQ ID NO: 2341138 - RNA, 19 nt, Artificial Sequence
  Description of Artificial Sequence: Synthetic oligonucleotide
accguacagcgugucaguu

SEQ ID NO: 2341139 - RNA, 19 nt, Artificial Sequence
  Description of Artificial Sequence: Synthetic oligonucleotide
ccugggcgaauaaugguaa

SEQ ID NO: 2341140 - RNA, 19 nt, Artificial Sequence
  Description of Artificial Sequence: Synthetic oligonucleotide
gccagaggucuugaaacuc

SEQ ID NO: 2341141 - RNA, 19 nt, Artificial Sequence
  Description of Artificial Sequence: Synthetic oligonucleotide
ccccaaucgguccaccauc

SEQ ID NO: 2341142 - RNA, 19 nt, Artificial Sequence
  Description of Artificial Sequence: Synthetic oligonucleotide
aucugcggccagagcccgc

SEQ ID NO: 2341143 - RNA, 19 nt, Artificial Sequence
  Description of Artificial Sequence: Synthetic oligonucleotide
guccaccaucaaugaccag

SEQ ID NO: 2341144 - RNA, 19 nt, Artificial Sequence
  Description of Artificial Sequence: Synthetic oligonucleotide
cgcagaaggcggcaucugc

SEQ ID NO: 2341145 - RNA, 19 nt, Artificial Sequence
  Description of Artificial Sequence: Synthetic oligonucleotide
gccgccgagcagcucgccg

SEQ ID NO: 2341146 - RNA, 19 nt, Artificial Sequence
  Description of Artificial Sequence: Synthetic oligonucleotide
cucgccggagcggggcgcg

SEQ ID NO: 2341147 - RNA, 19 nt, Artificial Sequence
  Description of Artificial Sequence: Synthetic oligonucleotide
ccuggcaacagguccucca

SEQ ID NO: 2341148 - RNA, 19 nt, Artificial Sequence
  Description of Artificial Sequence: Synthetic oligonucleotide
cucgccgagcaggccagac

SEQ ID NO: 2341149 - RNA, 19 nt, Artificial Sequence
  Description of Artificial Sequence: Synthetic oligonucleotide
cacgcaguccagggccgcc

SEQ ID NO: 2341150 - RNA, 19 nt, Artificial Sequence
  Description of Artificial Sequence: Synthetic oligonucleotide
ugccaacaagaggcguaaa

SEQ ID NO: 2341151 - RNA, 19 nt, Artificial Sequence
  Description of Artificial Sequence: Synthetic oligonucleotide
gcugcggcccuugaggcga

SEQ ID NO: 2341152 - RNA, 19 nt, Artificial Sequence
  Description of Artificial Sequence: Synthetic oligonucleotide
gccgcaacagccgggcccc

SEQ ID NO: 2341153 - RNA, 19 nt, Artificial Sequence
  Description of Artificial Sequence: Synthetic oligonucleotide
cagauaagucaaccacagu

SEQ ID NO: 2341154 - RNA, 19 nt, Artificial Sequence
  Description of Artificial Sequence: Synthetic oligonucleotide
guccugcaugaaggcgugg

SEQ ID NO: 2341155 - RNA, 19 nt, Artificial Sequence
  Description of Artificial Sequence: Synthetic oligonucleotide
cccaaucgguccaccauca

SEQ ID NO: 2341156 - RNA, 19 nt, Artificial Sequence
  Description of Artificial Sequence: Synthetic oligonucleotide
ccuuggguacucucaccuc

SEQ ID NO: 2341157 - RNA, 19 nt, Artificial Sequence
  Description of Artificial Sequence: Synthetic oligonucleotide
cggcccgucgcucagcccc

SEQ ID NO: 2341158 - RNA, 19 nt, Artificial Sequence
  Description of Artificial Sequence: Synthetic oligonucleotide
cugggagcugagguuggca

SEQ ID NO: 2341159 - RNA, 19 nt, Artificial Sequence
  Description of Artificial Sequence: Synthetic oligonucleotide
cacggcgccggcgcgcagc

SEQ ID NO: 2341160 - RNA, 19 nt, Artificial Sequence
  Description of Artificial Sequence: Synthetic oligonucleotide
acacggcgagcggcuuggc

SEQ ID NO: 2341161 - RNA, 19 nt, Artificial Sequence
  Description of Artificial Sequence: Synthetic oligonucleotide
ggccagaggucuugaaacu

SEQ ID NO: 2341162 - RNA, 19 nt, Artificial Sequence
  Description of Artificial Sequence: Synthetic oligonucleotide
ggaggauggcuguaguguu

SEQ ID NO: 2341163 - RNA, 19 nt, Artificial Sequence
  Description of Artificial Sequence: Synthetic oligonucleotide
gcggcaucugcggccagag

SEQ ID NO: 2341164 - RNA, 19 nt, Artificial Sequence
  Description of Artificial Sequence: Synthetic oligonucleotide
caguugggaccgccaccac

SEQ ID NO: 2341165 - RNA, 19 nt, Artificial Sequence
  Description of Artificial Sequence: Synthetic oligonucleotide
caagaggcguaaagggguu

SEQ ID NO: 2341166 - RNA, 19 nt, Artificial Sequence
  Description of Artificial Sequence: Synthetic oligonucleotide
ggagcgcucggggcuggcg

SEQ ID NO: 2341167 - RNA, 19 nt, Artificial Sequence
  Description of Artificial Sequence: Synthetic oligonucleotide
cacgcggcccaggcacacg

SEQ ID NO: 2341168 - RNA, 19 nt, Artificial Sequence
  Description of Artificial Sequence: Synthetic oligonucleotide
guuuuccagggcacagccu

SEQ ID NO: 2341169 - RNA, 19 nt, Artificial Sequence
  Description of Artificial Sequence: Synthetic oligonucleotide
ccaggcacacggcgagcgg

SEQ ID NO: 2341170 - RNA, 19 nt, Artificial Sequence
  Description of Artificial Sequence: Synthetic oligonucleotide
aguauccagcaugguccuu

SEQ ID NO: 2341171 - RNA, 19 nt, Artificial Sequence
  Description of Artificial Sequence: Synthetic oligonucleotide
cucucaccucacaguaccu

SEQ ID NO: 2341172 - RNA, 19 nt, Artificial Sequence
  Description of Artificial Sequence: Synthetic oligonucleotide
gaccgccaccacggcgccg

SEQ ID NO: 2341173 - RNA, 19 nt, Artificial Sequence
  Description of Artificial Sequence: Synthetic oligonucleotide
gcagcgccucgguccaacc

SEQ ID NO: 2341174 - RNA, 19 nt, Artificial Sequence
  Description of Artificial Sequence: Synthetic oligonucleotide
gcggccagagcccgccggc

SEQ ID NO: 2341175 - RNA, 19 nt, Artificial Sequence
  Description of Artificial Sequence: Synthetic oligonucleotide
caccacggcgccggcgcgc

SEQ ID NO: 2341176 - RNA, 19 nt, Artificial Sequence
  Description of Artificial Sequence: Synthetic oligonucleotide
gccggcccgucgcucagcc

SEQ ID NO: 2341177 - RNA, 19 nt, Artificial Sequence
  Description of Artificial Sequence: Synthetic oligonucleotide
cgucgcucagccccaugcc

SEQ ID NO: 2341178 - RNA, 19 nt, Artificial Sequence
  Description of Artificial Sequence: Synthetic oligonucleotide
agccgggccccggcacucg

SEQ ID NO: 2341179 - RNA, 19 nt, Artificial Sequence
  Description of Artificial Sequence: Synthetic oligonucleotide
caguagagccgaggcggca

SEQ ID NO: 2341180 - RNA, 19 nt, Artificial Sequence
  Description of Artificial Sequence: Synthetic oligonucleotide
gcacucgccggagcggggc

SEQ ID NO: 2341181 - RNA, 19 nt, Artificial Sequence
  Description of Artificial Sequence: Synthetic oligonucleotide
ggcacuggucagugcaagu

SEQ ID NO: 2341182 - RNA, 19 nt, Artificial Sequence
  Description of Artificial Sequence: Synthetic oligonucleotide
ccucgcugcggcccuugag

SEQ ID NO: 2341183 - RNA, 19 nt, Artificial Sequence
  Description of Artificial Sequence: Synthetic oligonucleotide
ggaccgccaccacggcgcc

SEQ ID NO: 2341184 - RNA, 19 nt, Artificial Sequence
  Description of Artificial Sequence: Synthetic oligonucleotide
ucggggcuggcggccugca

SEQ ID NO: 2341185 - RNA, 19 nt, Artificial Sequence
  Description of Artificial Sequence: Synthetic oligonucleotide
cgggagccgcaacagccgg

SEQ ID NO: 2341186 - RNA, 19 nt, Artificial Sequence
  Description of Artificial Sequence: Synthetic oligonucleotide
gccggcgcgcagcucggcc

SEQ ID NO: 2341187 - RNA, 19 nt, Artificial Sequence
  Description of Artificial Sequence: Synthetic oligonucleotide
gggcgcagaaggcggcauc

SEQ ID NO: 2341188 - RNA, 19 nt, Artificial Sequence
  Description of Artificial Sequence: Synthetic oligonucleotide
cgagcaggccagaccguac

SEQ ID NO: 2341189 - RNA, 19 nt, Artificial Sequence
  Description of Artificial Sequence: Synthetic oligonucleotide
cucugccaaugaggccuug

SEQ ID NO: 2341190 - RNA, 19 nt, Artificial Sequence
  Description of Artificial Sequence: Synthetic oligonucleotide
ggcacagccugggcgaaua

SEQ ID NO: 2341191 - RNA, 19 nt, Artificial Sequence
  Description of Artificial Sequence: Synthetic oligonucleotide
ggaugccaacaagaggcgu

SEQ ID NO: 2341192 - RNA, 19 nt, Artificial Sequence
  Description of Artificial Sequence: Synthetic oligonucleotide
cggagcgcugcaucaccag

SEQ ID NO: 2341193 - RNA, 19 nt, Artificial Sequence
  Description of Artificial Sequence: Synthetic oligonucleotide
gcgcugcaucaccaggguc

SEQ ID NO: 2341194 - RNA, 19 nt, Artificial Sequence
  Description of Artificial Sequence: Synthetic oligonucleotide
aggcggcaucugcggccag

SEQ ID NO: 2341195 - RNA, 19 nt, Artificial Sequence
  Description of Artificial Sequence: Synthetic oligonucleotide
ggcacucgccggagcgggg

SEQ ID NO: 2341196 - RNA, 19 nt, Artificial Sequence
  Description of Artificial Sequence: Synthetic oligonucleotide
ggcgcagaaggcggcaucu

SEQ ID NO: 2341197 - RNA, 19 nt, Artificial Sequence
  Description of Artificial Sequence: Synthetic oligonucleotide
cacucagggcucugacuau

SEQ ID NO: 2341198 - RNA, 19 nt, Artificial Sequence
  Description of Artificial Sequence: Synthetic oligonucleotide
ccgccgagcagcucgccga

SEQ ID NO: 2341199 - RNA, 19 nt, Artificial Sequence
  Description of Artificial Sequence: Synthetic oligonucleotide
cuguuggaggauggcugua

SEQ ID NO: 2341200 - RNA, 19 nt, Artificial Sequence
  Description of Artificial Sequence: Synthetic oligonucleotide
gcggcccuugaggcgauac

SEQ ID NO: 2341201 - RNA, 19 nt, Artificial Sequence
  Description of Artificial Sequence: Synthetic oligonucleotide
ccaaacauuugggccaagu

SEQ ID NO: 2341202 - RNA, 19 nt, Artificial Sequence
  Description of Artificial Sequence: Synthetic oligonucleotide
ggcucugacuauccccaau

SEQ ID NO: 2341203 - RNA, 19 nt, Artificial Sequence
  Description of Artificial Sequence: Synthetic oligonucleotide
ccagaccguacagcguguc

SEQ ID NO: 2341204 - RNA, 19 nt, Artificial Sequence
  Description of Artificial Sequence: Synthetic oligonucleotide
ggccccggcacucgccgga

SEQ ID NO: 2341205 - RNA, 19 nt, Artificial Sequence
  Description of Artificial Sequence: Synthetic oligonucleotide
ccgaggcggcacucagggc

SEQ ID NO: 2341206 - RNA, 19 nt, Artificial Sequence
  Description of Artificial Sequence: Synthetic oligonucleotide
cagccgggccccggcacuc

SEQ ID NO: 2341207 - RNA, 19 nt, Artificial Sequence
  Description of Artificial Sequence: Synthetic oligonucleotide
cggcacucgccggagcggg

SEQ ID NO: 2341208 - RNA, 19 nt, Artificial Sequence
  Description of Artificial Sequence: Synthetic oligonucleotide
cagccccaugccggccgcc

SEQ ID NO: 2341209 - RNA, 19 nt, Artificial Sequence
  Description of Artificial Sequence: Synthetic oligonucleotide
ggcggcaucugcggccaga

SEQ ID NO: 2341210 - RNA, 19 nt, Artificial Sequence
  Description of Artificial Sequence: Synthetic oligonucleotide
gggcucugacuauccccaa

SEQ ID NO: 2341211 - RNA, 19 nt, Artificial Sequence
  Description of Artificial Sequence: Synthetic oligonucleotide
ccuugggucuucccaaguu

SEQ ID NO: 2341212 - RNA, 19 nt, Artificial Sequence
  Description of Artificial Sequence: Synthetic oligonucleotide
ccaaucgguccaccaucaa

SEQ ID NO: 2341213 - RNA, 19 nt, Artificial Sequence
  Description of Artificial Sequence: Synthetic oligonucleotide
ggcgcgggcgggcgcagaa

SEQ ID NO: 2341214 - RNA, 19 nt, Artificial Sequence
  Description of Artificial Sequence: Synthetic oligonucleotide
gcggcacucagggcucuga

SEQ ID NO: 2341215 - RNA, 19 nt, Artificial Sequence
  Description of Artificial Sequence: Synthetic oligonucleotide
cccgcagcgccucggucca

SEQ ID NO: 2341216 - RNA, 19 nt, Artificial Sequence
  Description of Artificial Sequence: Synthetic oligonucleotide
gccgggccccggcacucgc

SEQ ID NO: 2341217 - RNA, 19 nt, Artificial Sequence
  Description of Artificial Sequence: Synthetic oligonucleotide
gccgccaccgcggcccuca

SEQ ID NO: 2341218 - RNA, 19 nt, Artificial Sequence
  Description of Artificial Sequence: Synthetic oligonucleotide
cgccgagcagcucgccgag

SEQ ID NO: 2341219 - RNA, 19 nt, Artificial Sequence
  Description of Artificial Sequence: Synthetic oligonucleotide
gggaagggagcagcccgua

SEQ ID NO: 2341220 - RNA, 19 nt, Artificial Sequence
  Description of Artificial Sequence: Synthetic oligonucleotide
cggcgagcggcuuggccuc

SEQ ID NO: 2341221 - RNA, 19 nt, Artificial Sequence
  Description of Artificial Sequence: Synthetic oligonucleotide
ggagcuccuuggguacucu

SEQ ID NO: 2341222 - RNA, 19 nt, Artificial Sequence
  Description of Artificial Sequence: Synthetic oligonucleotide
gcccaggcacacggcgagc

SEQ ID NO: 2341223 - RNA, 19 nt, Artificial Sequence
  Description of Artificial Sequence: Synthetic oligonucleotide
gcgccucgguccaaccgga

SEQ ID NO: 2341224 - RNA, 19 nt, Artificial Sequence
  Description of Artificial Sequence: Synthetic oligonucleotide
ggccucgcugcggcccuug

SEQ ID NO: 2341225 - RNA, 19 nt, Artificial Sequence
  Description of Artificial Sequence: Synthetic oligonucleotide
cgcaacagccgggccccgg

SEQ ID NO: 2341226 - RNA, 19 nt, Artificial Sequence
  Description of Artificial Sequence: Synthetic oligonucleotide
ugcggcccuugaggcgaua

SEQ ID NO: 2341227 - RNA, 19 nt, Artificial Sequence
  Description of Artificial Sequence: Synthetic oligonucleotide
gccccggcacucgccggag

SEQ ID NO: 2341228 - RNA, 19 nt, Artificial Sequence
  Description of Artificial Sequence: Synthetic oligonucleotide
cgccucgguccaaccggag

SEQ ID NO: 2341229 - RNA, 19 nt, Artificial Sequence
  Description of Artificial Sequence: Synthetic oligonucleotide
ccggcccgucgcucagccc

SEQ ID NO: 2341230 - RNA, 19 nt, Artificial Sequence
  Description of Artificial Sequence: Synthetic oligonucleotide
ccugcaugaaggcgugguu

SEQ ID NO: 2341231 - RNA, 19 nt, Artificial Sequence
  Description of Artificial Sequence: Synthetic oligonucleotide
cagagcccgccggcccguc

SEQ ID NO: 2341232 - RNA, 19 nt, Artificial Sequence
  Description of Artificial Sequence: Synthetic oligonucleotide
ccgagcaggccagaccgua

SEQ ID NO: 2341233 - RNA, 19 nt, Artificial Sequence
  Description of Artificial Sequence: Synthetic oligonucleotide
gcgagcggcuuggccucgc

SEQ ID NO: 2341234 - RNA, 19 nt, Artificial Sequence
  Description of Artificial Sequence: Synthetic oligonucleotide
cccgucgcucagccccaug

SEQ ID NO: 2341235 - RNA, 19 nt, Artificial Sequence
  Description of Artificial Sequence: Synthetic oligonucleotide
cagggccgccgagcagcuc

SEQ ID NO: 2341236 - RNA, 19 nt, Artificial Sequence
  Description of Artificial Sequence: Synthetic oligonucleotide
ggcccgucgcucagcccca

SEQ ID NO: 2341237 - RNA, 19 nt, Artificial Sequence
  Description of Artificial Sequence: Synthetic oligonucleotide
gcgugucaguugggaccgc

SEQ ID NO: 2341238 - RNA, 19 nt, Artificial Sequence
  Description of Artificial Sequence: Synthetic oligonucleotide
ccgccggcccgucgcucag

SEQ ID NO: 2341239 - RNA, 19 nt, Artificial Sequence
  Description of Artificial Sequence: Synthetic oligonucleotide
ccggagcgcucggggcugg

SEQ ID NO: 2341240 - RNA, 19 nt, Artificial Sequence
  Description of Artificial Sequence: Synthetic oligonucleotide
gccagaccguacagcgugu

SEQ ID NO: 2341241 - RNA, 19 nt, Artificial Sequence
  Description of Artificial Sequence: Synthetic oligonucleotide
cggccagagcccgccggcc

SEQ ID NO: 2341242 - RNA, 19 nt, Artificial Sequence
  Description of Artificial Sequence: Synthetic oligonucleotide
ccccgcucuccgggagccg

SEQ ID NO: 2341243 - RNA, 19 nt, Artificial Sequence
  Description of Artificial Sequence: Synthetic oligonucleotide
cgcaguccagggccgccga

SEQ ID NO: 2341244 - RNA, 19 nt, Artificial Sequence
  Description of Artificial Sequence: Synthetic oligonucleotide
gcucgccgagcaggccaga

SEQ ID NO: 2341245 - RNA, 19 nt, Artificial Sequence
  Description of Artificial Sequence: Synthetic oligonucleotide
ccucugccaaugaggccuu

SEQ ID NO: 2341246 - RNA, 19 nt, Artificial Sequence
  Description of Artificial Sequence: Synthetic oligonucleotide
gccgagcaggccagaccgu

SEQ ID NO: 2341247 - RNA, 19 nt, Artificial Sequence
  Description of Artificial Sequence: Synthetic oligonucleotide
ccacggcgccggcgcgcag

SEQ ID NO: 2341248 - RNA, 19 nt, Artificial Sequence
  Description of Artificial Sequence: Synthetic oligonucleotide
ggcacacggcgagcggcuu

SEQ ID NO: 2341249 - RNA, 19 nt, Artificial Sequence
  Description of Artificial Sequence: Synthetic oligonucleotide
cggagcgcucggggcuggc

SEQ ID NO: 2341250 - RNA, 19 nt, Artificial Sequence
  Description of Artificial Sequence: Synthetic oligonucleotide
gggcacagccugggcgaau

SEQ ID NO: 2341251 - RNA, 19 nt, Artificial Sequence
  Description of Artificial Sequence: Synthetic oligonucleotide
cgccggcccgucgcucagc

SEQ ID NO: 2341252 - RNA, 19 nt, Artificial Sequence
  Description of Artificial Sequence: Synthetic oligonucleotide
cgcucuccgggagccgcaa

SEQ ID NO: 2341253 - RNA, 19 nt, Artificial Sequence
  Description of Artificial Sequence: Synthetic oligonucleotide
ccagagcccgccggcccgu

SEQ ID NO: 2341254 - RNA, 19 nt, Artificial Sequence
  Description of Artificial Sequence: Synthetic oligonucleotide
cgagcggcuuggccucgcu

SEQ ID NO: 2341255 - RNA, 19 nt, Artificial Sequence
  Description of Artificial Sequence: Synthetic oligonucleotide
gcccgucgcucagccccau

SEQ ID NO: 2341256 - RNA, 19 nt, Artificial Sequence
  Description of Artificial Sequence: Synthetic oligonucleotide
ccgcagcgccucgguccaa

SEQ ID NO: 2341257 - RNA, 19 nt, Artificial Sequence
  Description of Artificial Sequence: Synthetic oligonucleotide
aagaaagucacucaggguc

SEQ ID NO: 2341258 - RNA, 19 nt, Artificial Sequence
  Description of Artificial Sequence: Synthetic oligonucleotide
  modified_base (3)..(3): a, c, u, g, unknown or other
aanaaggucagguugaugu

SEQ ID NO: 2341259 - RNA, 19 nt, Artificial Sequence
  Description of Artificial Sequence: Synthetic oligonucleotide
uaauauauuuguuagcagg

SEQ ID NO: 2341260 - RNA, 19 nt, Artificial Sequence
  Description of Artificial Sequence: Synthetic oligonucleotide
aaugugauuaucaaagugg

SEQ ID NO: 2341261 - RNA, 19 nt, Artificial Sequence
  Description of Artificial Sequence: Synthetic oligonucleotide
uaaagaaagucacucaggg

SEQ ID NO: 2341262 - RNA, 19 nt, Artificial Sequence
  Description of Artificial Sequence: Synthetic oligonucleotide
uuugcugccaauaaaaccu

SEQ ID NO: 2341263 - RNA, 19 nt, Artificial Sequence
  Description of Artificial Sequence: Synthetic oligonucleotide
gaauauuccauuuacugug

SEQ ID NO: 2341264 - RNA, 19 nt, Artificial Sequence
  Description of Artificial Sequence: Synthetic oligonucleotide
uuuuauacugcccaucgag

SEQ ID NO: 2341265 - RNA, 19 nt, Artificial Sequence
  Description of Artificial Sequence: Synthetic oligonucleotide
gauuuuauacugcccaucg

SEQ ID NO: 2341266 - RNA, 19 nt, Artificial Sequence
  Description of Artificial Sequence: Synthetic oligonucleotide
auuugcugccaauaaaacc

SEQ ID NO: 2341267 - RNA, 19 nt, Artificial Sequence
  Description of Artificial Sequence: Synthetic oligonucleotide
aaugugccugcucauaugg

SEQ ID NO: 2341268 - RNA, 19 nt, Artificial Sequence
  Description of Artificial Sequence: Synthetic oligonucleotide
  modified_base (12)..(12): a, c, u, g, unknown or other
uuuggugguaanaagguca

SEQ ID NO: 2341269 - RNA, 19 nt, Artificial Sequence
  Description of Artificial Sequence: Synthetic oligonucleotide
gugauuaucaaaguggugg

SEQ ID NO: 2341270 - RNA, 19 nt, Artificial Sequence
  Description of Artificial Sequence: Synthetic oligonucleotide
  modified_base (7)..(7): a, c, u, g, unknown or other
ugguaanaaggucagguug

SEQ ID NO: 2341271 - RNA, 19 nt, Artificial Sequence
  Description of Artificial Sequence: Synthetic oligonucleotide
aaacuuaggaguccgacca

SEQ ID NO: 2341272 - RNA, 19 nt, Artificial Sequence
  Description of Artificial Sequence: Synthetic oligonucleotide
uuugauacacaucauugga

SEQ ID NO: 2341273 - RNA, 19 nt, Artificial Sequence
  Description of Artificial Sequence: Synthetic oligonucleotide
aguucuuuagcuuugcugu

SEQ ID NO: 2341274 - RNA, 19 nt, Artificial Sequence
  Description of Artificial Sequence: Synthetic oligonucleotide
uccaaaaggaaaagaauug

SEQ ID NO: 2341275 - RNA, 19 nt, Artificial Sequence
  Description of Artificial Sequence: Synthetic oligonucleotide
aaugggacagaauuugcug

SEQ ID NO: 2341276 - RNA, 19 nt, Artificial Sequence
  Description of Artificial Sequence: Synthetic oligonucleotide
aguaauauauuuguuagca

SEQ ID NO: 2341277 - RNA, 19 nt, Artificial Sequence
  Description of Artificial Sequence: Synthetic oligonucleotide
acuauuuccaguggcaacc

SEQ ID NO: 2341278 - RNA, 19 nt, Artificial Sequence
  Description of Artificial Sequence: Synthetic oligonucleotide
uaguuuaaugugauuauca

SEQ ID NO: 2341279 - RNA, 19 nt, Artificial Sequence
  Description of Artificial Sequence: Synthetic oligonucleotide
auggagguuacauuccugc

SEQ ID NO: 2341280 - RNA, 19 nt, Artificial Sequence
  Description of Artificial Sequence: Synthetic oligonucleotide
uacacaucauuggagaucg

SEQ ID NO: 2341281 - RNA, 19 nt, Artificial Sequence
  Description of Artificial Sequence: Synthetic oligonucleotide
ucacacuaaacuuaggagu

SEQ ID NO: 2341282 - RNA, 19 nt, Artificial Sequence
  Description of Artificial Sequence: Synthetic oligonucleotide
uauggcacgcgaaaugugg

SEQ ID NO: 2341283 - RNA, 19 nt, Artificial Sequence
  Description of Artificial Sequence: Synthetic oligonucleotide
uauauuuguuagcagggug

SEQ ID NO: 2341284 - RNA, 19 nt, Artificial Sequence
  Description of Artificial Sequence: Synthetic oligonucleotide
uucacacuaaacuuaggag

SEQ ID NO: 2341285 - RNA, 19 nt, Artificial Sequence
  Description of Artificial Sequence: Synthetic oligonucleotide
uuguuaacuauuuccagug

SEQ ID NO: 2341286 - RNA, 19 nt, Artificial Sequence
  Description of Artificial Sequence: Synthetic oligonucleotide
uguagaaugagcccaugug

SEQ ID NO: 2341287 - RNA, 19 nt, Artificial Sequence
  Description of Artificial Sequence: Synthetic oligonucleotide
aguccgaccauauauccac

SEQ ID NO: 2341288 - RNA, 19 nt, Artificial Sequence
  Description of Artificial Sequence: Synthetic oligonucleotide
uuuuauaccuuccugucuc

SEQ ID NO: 2341289 - RNA, 19 nt, Artificial Sequence
  Description of Artificial Sequence: Synthetic oligonucleotide
aacuauuuccaguggcaac

SEQ ID NO: 2341290 - RNA, 19 nt, Artificial Sequence
  Description of Artificial Sequence: Synthetic oligonucleotide
uuuguuaacuauuuccagu

SEQ ID NO: 2341291 - RNA, 19 nt, Artificial Sequence
  Description of Artificial Sequence: Synthetic oligonucleotide
cagauuuugauacacauca

SEQ ID NO: 2341292 - RNA, 19 nt, Artificial Sequence
  Description of Artificial Sequence: Synthetic oligonucleotide
uuaacuauuuccaguggca

SEQ ID NO: 2341293 - RNA, 19 nt, Artificial Sequence
  Description of Artificial Sequence: Synthetic oligonucleotide
uugauacacaucauuggag

SEQ ID NO: 2341294 - RNA, 19 nt, Artificial Sequence
  Description of Artificial Sequence: Synthetic oligonucleotide
uuuauuaguuuaaugugau

SEQ ID NO: 2341295 - RNA, 19 nt, Artificial Sequence
  Description of Artificial Sequence: Synthetic oligonucleotide
acugucaguauaaagaaag

SEQ ID NO: 2341296 - RNA, 19 nt, Artificial Sequence
  Description of Artificial Sequence: Synthetic oligonucleotide
ucagauggagguuacauuc

SEQ ID NO: 2341297 - RNA, 19 nt, Artificial Sequence
  Description of Artificial Sequence: Synthetic oligonucleotide
agaauauuccauuuacugu

SEQ ID NO: 2341298 - RNA, 19 nt, Artificial Sequence
  Description of Artificial Sequence: Synthetic oligonucleotide
guaagugcuguucaucugg

SEQ ID NO: 2341299 - RNA, 19 nt, Artificial Sequence
  Description of Artificial Sequence: Synthetic oligonucleotide
uuuauuccaggaaacugug

SEQ ID NO: 2341300 - RNA, 19 nt, Artificial Sequence
  Description of Artificial Sequence: Synthetic oligonucleotide
uuuuguaggcugcacgucc

SEQ ID NO: 2341301 - RNA, 19 nt, Artificial Sequence
  Description of Artificial Sequence: Synthetic oligonucleotide
aauuugcugccaauaaaac

SEQ ID NO: 2341302 - RNA, 19 nt, Artificial Sequence
  Description of Artificial Sequence: Synthetic oligonucleotide
aauccggccgaucuuugac

SEQ ID NO: 2341303 - RNA, 19 nt, Artificial Sequence
  Description of Artificial Sequence: Synthetic oligonucleotide
uauuccaggaaacuguguc

SEQ ID NO: 2341304 - RNA, 19 nt, Artificial Sequence
  Description of Artificial Sequence: Synthetic oligonucleotide
agcucucacaauuaauuuc

SEQ ID NO: 2341305 - RNA, 19 nt, Artificial Sequence
  Description of Artificial Sequence: Synthetic oligonucleotide
gagcccauucuuuacaucc

SEQ ID NO: 2341306 - RNA, 19 nt, Artificial Sequence
  Description of Artificial Sequence: Synthetic oligonucleotide
agcuuugcaguucuuuagc

SEQ ID NO: 2341307 - RNA, 19 nt, Artificial Sequence
  Description of Artificial Sequence: Synthetic oligonucleotide
uguagauuuuauacugccc

SEQ ID NO: 2341308 - RNA, 19 nt, Artificial Sequence
  Description of Artificial Sequence: Synthetic oligonucleotide
uguuaacuauuuccagugg

SEQ ID NO: 2341309 - RNA, 19 nt, Artificial Sequence
  Description of Artificial Sequence: Synthetic oligonucleotide
guagauuuuauacugccca

SEQ ID NO: 2341310 - RNA, 19 nt, Artificial Sequence
  Description of Artificial Sequence: Synthetic oligonucleotide
guuaacuauuuccaguggc

SEQ ID NO: 2341311 - RNA, 19 nt, Artificial Sequence
  Description of Artificial Sequence: Synthetic oligonucleotide
ugaucaggugcuuuuaugu

SEQ ID NO: 2341312 - RNA, 19 nt, Artificial Sequence
  Description of Artificial Sequence: Synthetic oligonucleotide
uuugcuguuuauuccagga

SEQ ID NO: 2341313 - RNA, 19 nt, Artificial Sequence
  Description of Artificial Sequence: Synthetic oligonucleotide
aguuuaauuuguuaacuau

SEQ ID NO: 2341314 - RNA, 19 nt, Artificial Sequence
  Description of Artificial Sequence: Synthetic oligonucleotide
auauuuguuagcagggugg

SEQ ID NO: 2341315 - RNA, 19 nt, Artificial Sequence
  Description of Artificial Sequence: Synthetic oligonucleotide
ucucacaauuaauuucagg

SEQ ID NO: 2341316 - RNA, 19 nt, Artificial Sequence
  Description of Artificial Sequence: Synthetic oligonucleotide
uaaacuuaggaguccgacc

SEQ ID NO: 2341317 - RNA, 19 nt, Artificial Sequence
  Description of Artificial Sequence: Synthetic oligonucleotide
cuaccgaugacaacgcagg

SEQ ID NO: 2341318 - RNA, 19 nt, Artificial Sequence
  Description of Artificial Sequence: Synthetic oligonucleotide
ugccaauaaaaccugaguu

SEQ ID NO: 2341319 - RNA, 19 nt, Artificial Sequence
  Description of Artificial Sequence: Synthetic oligonucleotide
gaucgugguacacuguucc

SEQ ID NO: 2341320 - RNA, 19 nt, Artificial Sequence
  Description of Artificial Sequence: Synthetic oligonucleotide
ugcccaucgaguaacaggu

SEQ ID NO: 2341321 - RNA, 19 nt, Artificial Sequence
  Description of Artificial Sequence: Synthetic oligonucleotide
uuaauuuguuaacuauuuc

SEQ ID NO: 2341322 - RNA, 19 nt, Artificial Sequence
  Description of Artificial Sequence: Synthetic oligonucleotide
caucauuggagaucgacug

SEQ ID NO: 2341323 - RNA, 19 nt, Artificial Sequence
  Description of Artificial Sequence: Synthetic oligonucleotide
uuuccauucugucauacuu

SEQ ID NO: 2341324 - RNA, 19 nt, Artificial Sequence
  Description of Artificial Sequence: Synthetic oligonucleotide
  modified_base (16)..(16): a, c, u, g, unknown or other
ugguuuuggugguaanaag

SEQ ID NO: 2341325 - RNA, 19 nt, Artificial Sequence
  Description of Artificial Sequence: Synthetic oligonucleotide
caaaguggugguaagcggc

SEQ ID NO: 2341326 - RNA, 19 nt, Artificial Sequence
  Description of Artificial Sequence: Synthetic oligonucleotide
uuuacuguguaagugcugu

SEQ ID NO: 2341327 - RNA, 19 nt, Artificial Sequence
  Description of Artificial Sequence: Synthetic oligonucleotide
ucauauggcacgcgaaaug

SEQ ID NO: 2341328 - RNA, 19 nt, Artificial Sequence
  Description of Artificial Sequence: Synthetic oligonucleotide
aaagaaagucacucagggu

SEQ ID NO: 2341329 - RNA, 19 nt, Artificial Sequence
  Description of Artificial Sequence: Synthetic oligonucleotide
uuuauacugcccaucgagu

SEQ ID NO: 2341330 - RNA, 19 nt, Artificial Sequence
  Description of Artificial Sequence: Synthetic oligonucleotide
ugaguuuaauuuguuaacu

SEQ ID NO: 2341331 - RNA, 19 nt, Artificial Sequence
  Description of Artificial Sequence: Synthetic oligonucleotide
uuuuaugucacagguuuca

SEQ ID NO: 2341332 - RNA, 19 nt, Artificial Sequence
  Description of Artificial Sequence: Synthetic oligonucleotide
  modified_base (11)..(11): a, c, u, g, unknown or other
uuggugguaanaaggucag

SEQ ID NO: 2341333 - RNA, 19 nt, Artificial Sequence
  Description of Artificial Sequence: Synthetic oligonucleotide
cuguagauuuuauacugcc

SEQ ID NO: 2341334 - RNA, 19 nt, Artificial Sequence
  Description of Artificial Sequence: Synthetic oligonucleotide
auuaguuuaaugugauuau

SEQ ID NO: 2341335 - RNA, 19 nt, Artificial Sequence
  Description of Artificial Sequence: Synthetic oligonucleotide
uucuagauguaugugguca

SEQ ID NO: 2341336 - RNA, 19 nt, Artificial Sequence
  Description of Artificial Sequence: Synthetic oligonucleotide
uaggaguccgaccauauau

SEQ ID NO: 2341337 - RNA, 19 nt, Artificial Sequence
  Description of Artificial Sequence: Synthetic oligonucleotide
cucacaauuaauuucaggu

SEQ ID NO: 2341338 - RNA, 19 nt, Artificial Sequence
  Description of Artificial Sequence: Synthetic oligonucleotide
uuaaugugauuaucaaagu

SEQ ID NO: 2341339 - RNA, 19 nt, Artificial Sequence
  Description of Artificial Sequence: Synthetic oligonucleotide
uccaugaacacuugaauuu

SEQ ID NO: 2341340 - RNA, 19 nt, Artificial Sequence
  Description of Artificial Sequence: Synthetic oligonucleotide
uuugcaguucuuuagcuuu

SEQ ID NO: 2341341 - RNA, 19 nt, Artificial Sequence
  Description of Artificial Sequence: Synthetic oligonucleotide
ucagguugauguuacccag

SEQ ID NO: 2341342 - RNA, 19 nt, Artificial Sequence
  Description of Artificial Sequence: Synthetic oligonucleotide
auguauguggucauggauc

SEQ ID NO: 2341343 - RNA, 19 nt, Artificial Sequence
  Description of Artificial Sequence: Synthetic oligonucleotide
aagccagauuuugauacac

SEQ ID NO: 2341344 - RNA, 19 nt, Artificial Sequence
  Description of Artificial Sequence: Synthetic oligonucleotide
cugaguuuaauuuguuaac

SEQ ID NO: 2341345 - RNA, 19 nt, Artificial Sequence
  Description of Artificial Sequence: Synthetic oligonucleotide
guucacacuaaacuuagga

SEQ ID NO: 2341346 - RNA, 19 nt, Artificial Sequence
  Description of Artificial Sequence: Synthetic oligonucleotide
cacacuaaacuuaggaguc

SEQ ID NO: 2341347 - RNA, 19 nt, Artificial Sequence
  Description of Artificial Sequence: Synthetic oligonucleotide
aguuuaaugugauuaucaa

SEQ ID NO: 2341348 - RNA, 19 nt, Artificial Sequence
  Description of Artificial Sequence: Synthetic oligonucleotide
guaagcggcaauccggccg

SEQ ID NO: 2341349 - RNA, 19 nt, Artificial Sequence
  Description of Artificial Sequence: Synthetic oligonucleotide
guggcaaccaaugaucagg

SEQ ID NO: 2341350 - RNA, 19 nt, Artificial Sequence
  Description of Artificial Sequence: Synthetic oligonucleotide
guuuauuaguuuaauguga

SEQ ID NO: 2341351 - RNA, 19 nt, Artificial Sequence
  Description of Artificial Sequence: Synthetic oligonucleotide
gugccuaccgaugacaacg

SEQ ID NO: 2341352 - RNA, 19 nt, Artificial Sequence
  Description of Artificial Sequence: Synthetic oligonucleotide
gcaaccaaugaucaggugc

SEQ ID NO: 2341353 - RNA, 19 nt, Artificial Sequence
  Description of Artificial Sequence: Synthetic oligonucleotide
ucaaugggacagaauuugc

SEQ ID NO: 2341354 - RNA, 19 nt, Artificial Sequence
  Description of Artificial Sequence: Synthetic oligonucleotide
uuggagaucgacuguagaa

SEQ ID NO: 2341355 - RNA, 19 nt, Artificial Sequence
  Description of Artificial Sequence: Synthetic oligonucleotide
aaaugugccugcucauaug

SEQ ID NO: 2341356 - RNA, 19 nt, Artificial Sequence
  Description of Artificial Sequence: Synthetic oligonucleotide
  modified_base (15)..(15): a, c, u, g, unknown or other
gguuuuggugguaanaagg

SEQ ID NO: 2341357 - RNA, 19 nt, Artificial Sequence
  Description of Artificial Sequence: Synthetic oligonucleotide
ugugguguucacacuaaac

SEQ ID NO: 2341358 - RNA, 19 nt, Artificial Sequence
  Description of Artificial Sequence: Synthetic oligonucleotide
  modified_base (13)..(13): a, c, u, g, unknown or other
uuuuggugguaanaagguc

SEQ ID NO: 2341359 - RNA, 19 nt, Artificial Sequence
  Description of Artificial Sequence: Synthetic oligonucleotide
uuccuguagauuuuauacu

SEQ ID NO: 2341360 - RNA, 19 nt, Artificial Sequence
  Description of Artificial Sequence: Synthetic oligonucleotide
ugugccugcucauauggca

SEQ ID NO: 2341361 - RNA, 19 nt, Artificial Sequence
  Description of Artificial Sequence: Synthetic oligonucleotide
aaagccagauuuugauaca

SEQ ID NO: 2341362 - RNA, 19 nt, Artificial Sequence
  Description of Artificial Sequence: Synthetic oligonucleotide
aaugaucaggugcuuuuau

SEQ ID NO: 2341363 - RNA, 19 nt, Artificial Sequence
  Description of Artificial Sequence: Synthetic oligonucleotide
accauauauccacugccag

SEQ ID NO: 2341364 - RNA, 19 nt, Artificial Sequence
  Description of Artificial Sequence: Synthetic oligonucleotide
auuggcaugccuucuagau

SEQ ID NO: 2341365 - RNA, 19 nt, Artificial Sequence
  Description of Artificial Sequence: Synthetic oligonucleotide
auacacaucauuggagauc

SEQ ID NO: 2341366 - RNA, 19 nt, Artificial Sequence
  Description of Artificial Sequence: Synthetic oligonucleotide
acauuccugccauggauuc

SEQ ID NO: 2341367 - RNA, 19 nt, Artificial Sequence
  Description of Artificial Sequence: Synthetic oligonucleotide
caguaauauauuuguuagc

SEQ ID NO: 2341368 - RNA, 19 nt, Artificial Sequence
  Description of Artificial Sequence: Synthetic oligonucleotide
ucgacuguagaaugagccc

SEQ ID NO: 2341369 - RNA, 19 nt, Artificial Sequence
  Description of Artificial Sequence: Synthetic oligonucleotide
gaauuggcaugccuucuag

SEQ ID NO: 2341370 - RNA, 19 nt, Artificial Sequence
  Description of Artificial Sequence: Synthetic oligonucleotide
aaaccugaguuuaauuugu

SEQ ID NO: 2341371 - RNA, 19 nt, Artificial Sequence
  Description of Artificial Sequence: Synthetic oligonucleotide
ucaggugcuuuuaugucac

SEQ ID NO: 2341372 - RNA, 19 nt, Artificial Sequence
  Description of Artificial Sequence: Synthetic oligonucleotide
aggaaacugugucucaucu

SEQ ID NO: 2341373 - RNA, 19 nt, Artificial Sequence
  Description of Artificial Sequence: Synthetic oligonucleotide
auuaucaaaguggugguaa

SEQ ID NO: 2341374 - RNA, 19 nt, Artificial Sequence
  Description of Artificial Sequence: Synthetic oligonucleotide
acuguguaagugcuguuca

SEQ ID NO: 2341375 - RNA, 19 nt, Artificial Sequence
  Description of Artificial Sequence: Synthetic oligonucleotide
agauuuuauacugcccauc

SEQ ID NO: 2341376 - RNA, 19 nt, Artificial Sequence
  Description of Artificial Sequence: Synthetic oligonucleotide
aagugcuguucaucuggac

SEQ ID NO: 2341377 - RNA, 19 nt, Artificial Sequence
  Description of Artificial Sequence: Synthetic oligonucleotide
uuauacugcccaucgagua

SEQ ID NO: 2341378 - RNA, 19 nt, Artificial Sequence
  Description of Artificial Sequence: Synthetic oligonucleotide
aacgcagggagaauuucuc

SEQ ID NO: 2341379 - RNA, 19 nt, Artificial Sequence
  Description of Artificial Sequence: Synthetic oligonucleotide
uagaaugagcccauguguu

SEQ ID NO: 2341380 - RNA, 19 nt, Artificial Sequence
  Description of Artificial Sequence: Synthetic oligonucleotide
uuaguuuaaugugauuauc

SEQ ID NO: 2341381 - RNA, 19 nt, Artificial Sequence
  Description of Artificial Sequence: Synthetic oligonucleotide
acuugaauuuccaaaugug

SEQ ID NO: 2341382 - RNA, 19 nt, Artificial Sequence
  Description of Artificial Sequence: Synthetic oligonucleotide
uauacugcccaucgaguaa

SEQ ID NO: 2341383 - RNA, 19 nt, Artificial Sequence
  Description of Artificial Sequence: Synthetic oligonucleotide
ugguaagcggcaauccggc

SEQ ID NO: 2341384 - RNA, 19 nt, Artificial Sequence
  Description of Artificial Sequence: Synthetic oligonucleotide
uguucacacuaaacuuagg

SEQ ID NO: 2341385 - RNA, 19 nt, Artificial Sequence
  Description of Artificial Sequence: Synthetic oligonucleotide
agaauuugcugccaauaaa

SEQ ID NO: 2341386 - RNA, 19 nt, Artificial Sequence
  Description of Artificial Sequence: Synthetic oligonucleotide
gguuggacagcguucagag

SEQ ID NO: 2341387 - RNA, 19 nt, Artificial Sequence
  Description of Artificial Sequence: Synthetic oligonucleotide
ucgaguaacaggucaaauu

SEQ ID NO: 2341388 - RNA, 19 nt, Artificial Sequence
  Description of Artificial Sequence: Synthetic oligonucleotide
aauuggcaugccuucuaga

SEQ ID NO: 2341389 - RNA, 19 nt, Artificial Sequence
  Description of Artificial Sequence: Synthetic oligonucleotide
cugcccaucgaguaacagg

SEQ ID NO: 2341390 - RNA, 19 nt, Artificial Sequence
  Description of Artificial Sequence: Synthetic oligonucleotide
  modified_base (17)..(17): a, c, u, g, unknown or other
uugguuuuggugguaanaa

SEQ ID NO: 2341391 - RNA, 19 nt, Artificial Sequence
  Description of Artificial Sequence: Synthetic oligonucleotide
augaucaggugcuuuuaug

SEQ ID NO: 2341392 - RNA, 19 nt, Artificial Sequence
  Description of Artificial Sequence: Synthetic oligonucleotide
ggguuuauuaguuuaaugu

SEQ ID NO: 2341393 - RNA, 19 nt, Artificial Sequence
  Description of Artificial Sequence: Synthetic oligonucleotide
uuuguaggcugcacgucca

SEQ ID NO: 2341394 - RNA, 19 nt, Artificial Sequence
  Description of Artificial Sequence: Synthetic oligonucleotide
uggucauggauccagucuu

SEQ ID NO: 2341395 - RNA, 19 nt, Artificial Sequence
  Description of Artificial Sequence: Synthetic oligonucleotide
guucucaguaauauauuug

SEQ ID NO: 2341396 - RNA, 19 nt, Artificial Sequence
  Description of Artificial Sequence: Synthetic oligonucleotide
  modified_base (2)..(2): a, c, u, g, unknown or other
anaaggucagguugauguu

SEQ ID NO: 2341397 - RNA, 19 nt, Artificial Sequence
  Description of Artificial Sequence: Synthetic oligonucleotide
uggacauguucucaguaau

SEQ ID NO: 2341398 - RNA, 19 nt, Artificial Sequence
  Description of Artificial Sequence: Synthetic oligonucleotide
acacuaaacuuaggagucc

SEQ ID NO: 2341399 - RNA, 19 nt, Artificial Sequence
  Description of Artificial Sequence: Synthetic oligonucleotide
ccauuuacuguguaagugc

SEQ ID NO: 2341400 - RNA, 19 nt, Artificial Sequence
  Description of Artificial Sequence: Synthetic oligonucleotide
ugguguucacacuaaacuu

SEQ ID NO: 2341401 - RNA, 19 nt, Artificial Sequence
  Description of Artificial Sequence: Synthetic oligonucleotide
gccuucuagauguaugugg

SEQ ID NO: 2341402 - RNA, 19 nt, Artificial Sequence
  Description of Artificial Sequence: Synthetic oligonucleotide
uaucaaaguggugguaagc

SEQ ID NO: 2341403 - RNA, 19 nt, Artificial Sequence
  Description of Artificial Sequence: Synthetic oligonucleotide
ucuuugacgcaguuccugu

SEQ ID NO: 2341404 - RNA, 19 nt, Artificial Sequence
  Description of Artificial Sequence: Synthetic oligonucleotide
cuaaacuuaggaguccgac

SEQ ID NO: 2341405 - RNA, 19 nt, Artificial Sequence
  Description of Artificial Sequence: Synthetic oligonucleotide
uacauccaugaacacuuga

SEQ ID NO: 2341406 - RNA, 19 nt, Artificial Sequence
  Description of Artificial Sequence: Synthetic oligonucleotide
augccuucuagauguaugu

SEQ ID NO: 2341407 - RNA, 19 nt, Artificial Sequence
  Description of Artificial Sequence: Synthetic oligonucleotide
uaagcggcaauccggccga

SEQ ID NO: 2341408 - RNA, 19 nt, Artificial Sequence
  Description of Artificial Sequence: Synthetic oligonucleotide
ucagagcucucacaauuaa

SEQ ID NO: 2341409 - RNA, 19 nt, Artificial Sequence
  Description of Artificial Sequence: Synthetic oligonucleotide
uucuggugccuaccgauga

SEQ ID NO: 2341410 - RNA, 19 nt, Artificial Sequence
  Description of Artificial Sequence: Synthetic oligonucleotide
cacuaaacuuaggaguccg

SEQ ID NO: 2341411 - RNA, 19 nt, Artificial Sequence
  Description of Artificial Sequence: Synthetic oligonucleotide
agaucgacuguagaaugag

SEQ ID NO: 2341412 - RNA, 19 nt, Artificial Sequence
  Description of Artificial Sequence: Synthetic oligonucleotide
gugguaagcggcaauccgg

SEQ ID NO: 2341413 - RNA, 19 nt, Artificial Sequence
  Description of Artificial Sequence: Synthetic oligonucleotide
uuuuccauucugucauacu

SEQ ID NO: 2341414 - RNA, 19 nt, Artificial Sequence
  Description of Artificial Sequence: Synthetic oligonucleotide
gguuacauuccugccaugg

SEQ ID NO: 2341415 - RNA, 19 nt, Artificial Sequence
  Description of Artificial Sequence: Synthetic oligonucleotide
gggagaauuucuccaaaag

SEQ ID NO: 2341416 - RNA, 19 nt, Artificial Sequence
  Description of Artificial Sequence: Synthetic oligonucleotide
cagauggagguuacauucc

SEQ ID NO: 2341417 - RNA, 19 nt, Artificial Sequence
  Description of Artificial Sequence: Synthetic oligonucleotide
auuuuauacugcccaucga

SEQ ID NO: 2341418 - RNA, 19 nt, Artificial Sequence
  Description of Artificial Sequence: Synthetic oligonucleotide
uauuuguuagcaggguggu

SEQ ID NO: 2341419 - RNA, 19 nt, Artificial Sequence
  Description of Artificial Sequence: Synthetic oligonucleotide
uuauuccaggaaacugugu

SEQ ID NO: 2341420 - RNA, 19 nt, Artificial Sequence
  Description of Artificial Sequence: Synthetic oligonucleotide
gaugacaacgcagggagaa

SEQ ID NO: 2341421 - RNA, 19 nt, Artificial Sequence
  Description of Artificial Sequence: Synthetic oligonucleotide
ucuuuagcuuugcuguuua

SEQ ID NO: 2341422 - RNA, 19 nt, Artificial Sequence
  Description of Artificial Sequence: Synthetic oligonucleotide
ucuagauguauguggucau

SEQ ID NO: 2341423 - RNA, 19 nt, Artificial Sequence
  Description of Artificial Sequence: Synthetic oligonucleotide
uagauuuuauacugcccau

SEQ ID NO: 2341424 - RNA, 19 nt, Artificial Sequence
  Description of Artificial Sequence: Synthetic oligonucleotide
guuacccagaucgugguac

SEQ ID NO: 2341425 - RNA, 19 nt, Artificial Sequence
  Description of Artificial Sequence: Synthetic oligonucleotide
gauuuugauacacaucauu

SEQ ID NO: 2341426 - RNA, 19 nt, Artificial Sequence
  Description of Artificial Sequence: Synthetic oligonucleotide
  modified_base (4)..(4): a, c, u, g, unknown or other
uaanaaggucagguugaug

SEQ ID NO: 2341427 - RNA, 19 nt, Artificial Sequence
  Description of Artificial Sequence: Synthetic oligonucleotide
ggugguaagcggcaauccg

SEQ ID NO: 2341428 - RNA, 19 nt, Artificial Sequence
  Description of Artificial Sequence: Synthetic oligonucleotide
uugauguuacccagaucgu

SEQ ID NO: 2341429 - RNA, 19 nt, Artificial Sequence
  Description of Artificial Sequence: Synthetic oligonucleotide
guagaaugagcccaugugu

SEQ ID NO: 2341430 - RNA, 19 nt, Artificial Sequence
  Description of Artificial Sequence: Synthetic oligonucleotide
auauauuuguuagcagggu

SEQ ID NO: 2341431 - RNA, 19 nt, Artificial Sequence
  Description of Artificial Sequence: Synthetic oligonucleotide
cugugucucaucugcuggg

SEQ ID NO: 2341432 - RNA, 19 nt, Artificial Sequence
  Description of Artificial Sequence: Synthetic oligonucleotide
uggagaucgacuguagaau

SEQ ID NO: 2341433 - RNA, 19 nt, Artificial Sequence
  Description of Artificial Sequence: Synthetic oligonucleotide
uaacuauuuccaguggcaa

SEQ ID NO: 2341434 - RNA, 19 nt, Artificial Sequence
  Description of Artificial Sequence: Synthetic oligonucleotide
ucucaguaauauauuuguu

SEQ ID NO: 2341435 - RNA, 19 nt, Artificial Sequence
  Description of Artificial Sequence: Synthetic oligonucleotide
auccggccgaucuuugacg

SEQ ID NO: 2341436 - RNA, 19 nt, Artificial Sequence
  Description of Artificial Sequence: Synthetic oligonucleotide
agagcucucacaauuaauu

SEQ ID NO: 2341437 - RNA, 19 nt, Artificial Sequence
  Description of Artificial Sequence: Synthetic oligonucleotide
ugcuggguuuauuaguuua

SEQ ID NO: 2341438 - RNA, 19 nt, Artificial Sequence
  Description of Artificial Sequence: Synthetic oligonucleotide
ugccugcucauauggcacg

SEQ ID NO: 2341439 - RNA, 19 nt, Artificial Sequence
  Description of Artificial Sequence: Synthetic oligonucleotide
uacacuguuccuccuccac

SEQ ID NO: 2341440 - RNA, 19 nt, Artificial Sequence
  Description of Artificial Sequence: Synthetic oligonucleotide
gaaaagaauuggcaugccu

SEQ ID NO: 2341441 - RNA, 19 nt, Artificial Sequence
  Description of Artificial Sequence: Synthetic oligonucleotide
ucugucauacuugguuuug

SEQ ID NO: 2341442 - RNA, 19 nt, Artificial Sequence
  Description of Artificial Sequence: Synthetic oligonucleotide
uugcaguucuuuagcuuug

SEQ ID NO: 2341443 - RNA, 19 nt, Artificial Sequence
  Description of Artificial Sequence: Synthetic oligonucleotide
  modified_base (14)..(14): a, c, u, g, unknown or other
guuuuggugguaanaaggu

SEQ ID NO: 2341444 - RNA, 19 nt, Artificial Sequence
  Description of Artificial Sequence: Synthetic oligonucleotide
ggauccagucuucuaaagc

SEQ ID NO: 2341445 - RNA, 19 nt, Artificial Sequence
  Description of Artificial Sequence: Synthetic oligonucleotide
uccgaccauauauccacug

SEQ ID NO: 2341446 - RNA, 19 nt, Artificial Sequence
  Description of Artificial Sequence: Synthetic oligonucleotide
cuuuuaugucacagguuuc

SEQ ID NO: 2341447 - RNA, 19 nt, Artificial Sequence
  Description of Artificial Sequence: Synthetic oligonucleotide
acgcaguuccuguagauuu

SEQ ID NO: 2341448 - RNA, 19 nt, Artificial Sequence
  Description of Artificial Sequence: Synthetic oligonucleotide
ggagaucgacuguagaaug

SEQ ID NO: 2341449 - RNA, 19 nt, Artificial Sequence
  Description of Artificial Sequence: Synthetic oligonucleotide
uuuccaaaugugccugcuc

SEQ ID NO: 2341450 - RNA, 19 nt, Artificial Sequence
  Description of Artificial Sequence: Synthetic oligonucleotide
aucauuggagaucgacugu

SEQ ID NO: 2341451 - RNA, 19 nt, Artificial Sequence
  Description of Artificial Sequence: Synthetic oligonucleotide
uugacgcaguuccuguaga

SEQ ID NO: 2341452 - RNA, 19 nt, Artificial Sequence
  Description of Artificial Sequence: Synthetic oligonucleotide
aguuccuguagauuuuaua

SEQ ID NO: 2341453 - RNA, 19 nt, Artificial Sequence
  Description of Artificial Sequence: Synthetic oligonucleotide
agggugguuucaaugggac

SEQ ID NO: 2341454 - RNA, 19 nt, Artificial Sequence
  Description of Artificial Sequence: Synthetic oligonucleotide
cauggauccagucuucuaa

SEQ ID NO: 2341455 - RNA, 19 nt, Artificial Sequence
  Description of Artificial Sequence: Synthetic oligonucleotide
uccggccgaucuuugacgc

SEQ ID NO: 2341456 - RNA, 19 nt, Artificial Sequence
  Description of Artificial Sequence: Synthetic oligonucleotide
  modified_base (6)..(6): a, c, u, g, unknown or other
gguaanaaggucagguuga

SEQ ID NO: 2341457 - RNA, 19 nt, Artificial Sequence
  Description of Artificial Sequence: Synthetic oligonucleotide
caaugagcccauucuuuac

SEQ ID NO: 2341458 - RNA, 19 nt, Artificial Sequence
  Description of Artificial Sequence: Synthetic oligonucleotide
cugucucaucagauggagg

SEQ ID NO: 2341459 - RNA, 19 nt, Artificial Sequence
  Description of Artificial Sequence: Synthetic oligonucleotide
uccugucucaucagaugga

SEQ ID NO: 2341460 - RNA, 19 nt, Artificial Sequence
  Description of Artificial Sequence: Synthetic oligonucleotide
ucucaucagauggagguua

SEQ ID NO: 2341461 - RNA, 19 nt, Artificial Sequence
  Description of Artificial Sequence: Synthetic oligonucleotide
auuucagguuuuccauucu

SEQ ID NO: 2341462 - RNA, 19 nt, Artificial Sequence
  Description of Artificial Sequence: Synthetic oligonucleotide
agggucacauuauuccccu

SEQ ID NO: 2341463 - RNA, 19 nt, Artificial Sequence
  Description of Artificial Sequence: Synthetic oligonucleotide
ccgaugacaacgcagggag

SEQ ID NO: 2341464 - RNA, 19 nt, Artificial Sequence
  Description of Artificial Sequence: Synthetic oligonucleotide
ggaguccgaccauauaucc

SEQ ID NO: 2341465 - RNA, 19 nt, Artificial Sequence
  Description of Artificial Sequence: Synthetic oligonucleotide
acagaauauuccauuuacu

SEQ ID NO: 2341466 - RNA, 19 nt, Artificial Sequence
  Description of Artificial Sequence: Synthetic oligonucleotide
  modified_base (10)..(10): a, c, u, g, unknown or other
uggugguaanaaggucagg

SEQ ID NO: 2341467 - RNA, 19 nt, Artificial Sequence
  Description of Artificial Sequence: Synthetic oligonucleotide
aggaguccgaccauauauc

SEQ ID NO: 2341468 - RNA, 19 nt, Artificial Sequence
  Description of Artificial Sequence: Synthetic oligonucleotide
uguaggcugcacguccagg

SEQ ID NO: 2341469 - RNA, 19 nt, Artificial Sequence
  Description of Artificial Sequence: Synthetic oligonucleotide
auguuacccagaucguggu

SEQ ID NO: 2341470 - RNA, 19 nt, Artificial Sequence
  Description of Artificial Sequence: Synthetic oligonucleotide
acacagaauauuccauuua

SEQ ID NO: 2341471 - RNA, 19 nt, Artificial Sequence
  Description of Artificial Sequence: Synthetic oligonucleotide
ugcucauauggcacgcgaa

SEQ ID NO: 2341472 - RNA, 19 nt, Artificial Sequence
  Description of Artificial Sequence: Synthetic oligonucleotide
acaacgcagggagaauuuc

SEQ ID NO: 2341473 - RNA, 19 nt, Artificial Sequence
  Description of Artificial Sequence: Synthetic oligonucleotide
gguacacuguuccuccucc

SEQ ID NO: 2341474 - RNA, 19 nt, Artificial Sequence
  Description of Artificial Sequence: Synthetic oligonucleotide
ugcuuuuaugucacagguu

SEQ ID NO: 2341475 - RNA, 19 nt, Artificial Sequence
  Description of Artificial Sequence: Synthetic oligonucleotide
gucacucagggucacauua

SEQ ID NO: 2341476 - RNA, 19 nt, Artificial Sequence
  Description of Artificial Sequence: Synthetic oligonucleotide
gaccauauauccacugcca

SEQ ID NO: 2341477 - RNA, 19 nt, Artificial Sequence
  Description of Artificial Sequence: Synthetic oligonucleotide
uuacccagaucgugguaca

SEQ ID NO: 2341478 - RNA, 19 nt, Artificial Sequence
  Description of Artificial Sequence: Synthetic oligonucleotide
ugccuaccgaugacaacgc

SEQ ID NO: 2341479 - RNA, 19 nt, Artificial Sequence
  Description of Artificial Sequence: Synthetic oligonucleotide
cugucauacuugguuuugg

SEQ ID NO: 2341480 - RNA, 19 nt, Artificial Sequence
  Description of Artificial Sequence: Synthetic oligonucleotide
cauauauccacugccagcu

SEQ ID NO: 2341481 - RNA, 19 nt, Artificial Sequence
  Description of Artificial Sequence: Synthetic oligonucleotide
uuuaugucacagguuucaa

SEQ ID NO: 2341482 - RNA, 19 nt, Artificial Sequence
  Description of Artificial Sequence: Synthetic oligonucleotide
cacagguuucaaugagccc

SEQ ID NO: 2341483 - RNA, 19 nt, Artificial Sequence
  Description of Artificial Sequence: Synthetic oligonucleotide
cacuccuucuccgagccag

SEQ ID NO: 2341484 - RNA, 19 nt, Artificial Sequence
  Description of Artificial Sequence: Synthetic oligonucleotide
gugcuuuuaugucacaggu

SEQ ID NO: 2341485 - RNA, 19 nt, Artificial Sequence
  Description of Artificial Sequence: Synthetic oligonucleotide
gauggagguuacauuccug

SEQ ID NO: 2341486 - RNA, 19 nt, Artificial Sequence
  Description of Artificial Sequence: Synthetic oligonucleotide
acagaauuugcugccaaua

SEQ ID NO: 2341487 - RNA, 19 nt, Artificial Sequence
  Description of Artificial Sequence: Synthetic oligonucleotide
guuacauuccugccaugga

SEQ ID NO: 2341488 - RNA, 19 nt, Artificial Sequence
  Description of Artificial Sequence: Synthetic oligonucleotide
ugcugccaauaaaaccuga

SEQ ID NO: 2341489 - RNA, 19 nt, Artificial Sequence
  Description of Artificial Sequence: Synthetic oligonucleotide
ccauauauccacugccagc

SEQ ID NO: 2341490 - RNA, 19 nt, Artificial Sequence
  Description of Artificial Sequence: Synthetic oligonucleotide
cauggauucuggugccuac

SEQ ID NO: 2341491 - RNA, 19 nt, Artificial Sequence
  Description of Artificial Sequence: Synthetic oligonucleotide
ucacucagggucacauuau

SEQ ID NO: 2341492 - RNA, 19 nt, Artificial Sequence
  Description of Artificial Sequence: Synthetic oligonucleotide
guguaagugcuguucaucu

SEQ ID NO: 2341493 - RNA, 19 nt, Artificial Sequence
  Description of Artificial Sequence: Synthetic oligonucleotide
ccuguagauuuuauacugc

SEQ ID NO: 2341494 - RNA, 19 nt, Artificial Sequence
  Description of Artificial Sequence: Synthetic oligonucleotide
cucaucagauggagguuac

SEQ ID NO: 2341495 - RNA, 19 nt, Artificial Sequence
  Description of Artificial Sequence: Synthetic oligonucleotide
gauucuggugccuaccgau

SEQ ID NO: 2341496 - RNA, 19 nt, Artificial Sequence
  Description of Artificial Sequence: Synthetic oligonucleotide
ccuaccgaugacaacgcag

SEQ ID NO: 2341497 - RNA, 19 nt, Artificial Sequence
  Description of Artificial Sequence: Synthetic oligonucleotide
agaauuggcaugccuucua

SEQ ID NO: 2341498 - RNA, 19 nt, Artificial Sequence
  Description of Artificial Sequence: Synthetic oligonucleotide
cuucuagauguaugugguc

SEQ ID NO: 2341499 - RNA, 19 nt, Artificial Sequence
  Description of Artificial Sequence: Synthetic oligonucleotide
caaccaaugaucaggugcu

SEQ ID NO: 2341500 - RNA, 19 nt, Artificial Sequence
  Description of Artificial Sequence: Synthetic oligonucleotide
uuguuagcagggugguuuc

SEQ ID NO: 2341501 - RNA, 19 nt, Artificial Sequence
  Description of Artificial Sequence: Synthetic oligonucleotide
accugaguuuaauuuguua

SEQ ID NO: 2341502 - RNA, 19 nt, Artificial Sequence
  Description of Artificial Sequence: Synthetic oligonucleotide
uggugccuaccgaugacaa

SEQ ID NO: 2341503 - RNA, 19 nt, Artificial Sequence
  Description of Artificial Sequence: Synthetic oligonucleotide
ggucagguugauguuaccc

SEQ ID NO: 2341504 - RNA, 19 nt, Artificial Sequence
  Description of Artificial Sequence: Synthetic oligonucleotide
guuuuccauucugucauac

SEQ ID NO: 2341505 - RNA, 19 nt, Artificial Sequence
  Description of Artificial Sequence: Synthetic oligonucleotide
uuaggaguccgaccauaua

SEQ ID NO: 2341506 - RNA, 19 nt, Artificial Sequence
  Description of Artificial Sequence: Synthetic oligonucleotide
gcucucacaauuaauuuca

SEQ ID NO: 2341507 - RNA, 19 nt, Artificial Sequence
  Description of Artificial Sequence: Synthetic oligonucleotide
gacauguucucaguaauau

SEQ ID NO: 2341508 - RNA, 19 nt, Artificial Sequence
  Description of Artificial Sequence: Synthetic oligonucleotide
uggcacgcgaaauguggug

SEQ ID NO: 2341509 - RNA, 19 nt, Artificial Sequence
  Description of Artificial Sequence: Synthetic oligonucleotide
cuaaagccagauuuugaua

SEQ ID NO: 2341510 - RNA, 19 nt, Artificial Sequence
  Description of Artificial Sequence: Synthetic oligonucleotide
aaacugugucucaucugcu

SEQ ID NO: 2341511 - RNA, 19 nt, Artificial Sequence
  Description of Artificial Sequence: Synthetic oligonucleotide
augaacacuugaauuucca

SEQ ID NO: 2341512 - RNA, 19 nt, Artificial Sequence
  Description of Artificial Sequence: Synthetic oligonucleotide
gagaucgacuguagaauga

SEQ ID NO: 2341513 - RNA, 19 nt, Artificial Sequence
  Description of Artificial Sequence: Synthetic oligonucleotide
ccaguggcaaccaaugauc

SEQ ID NO: 2341514 - RNA, 19 nt, Artificial Sequence
  Description of Artificial Sequence: Synthetic oligonucleotide
ugacaacgcagggagaauu

SEQ ID NO: 2341515 - RNA, 19 nt, Artificial Sequence
  Description of Artificial Sequence: Synthetic oligonucleotide
aucuggacauguucucagu

SEQ ID NO: 2341516 - RNA, 19 nt, Artificial Sequence
  Description of Artificial Sequence: Synthetic oligonucleotide
agaucgugguacacuguuc

SEQ ID NO: 2341517 - RNA, 19 nt, Artificial Sequence
  Description of Artificial Sequence: Synthetic oligonucleotide
gcuuuuaugucacagguuu

SEQ ID NO: 2341518 - RNA, 19 nt, Artificial Sequence
  Description of Artificial Sequence: Synthetic oligonucleotide
uccaaaugugccugcucau

SEQ ID NO: 2341519 - RNA, 19 nt, Artificial Sequence
  Description of Artificial Sequence: Synthetic oligonucleotide
cauucugucauacuugguu

SEQ ID NO: 2341520 - RNA, 19 nt, Artificial Sequence
  Description of Artificial Sequence: Synthetic oligonucleotide
ugccuucuagauguaugug

SEQ ID NO: 2341521 - RNA, 19 nt, Artificial Sequence
  Description of Artificial Sequence: Synthetic oligonucleotide
auuuccaaaugugccugcu

SEQ ID NO: 2341522 - RNA, 19 nt, Artificial Sequence
  Description of Artificial Sequence: Synthetic oligonucleotide
ugugucucaucugcugggu

SEQ ID NO: 2341523 - RNA, 19 nt, Artificial Sequence
  Description of Artificial Sequence: Synthetic oligonucleotide
auuuacuguguaagugcug

SEQ ID NO: 2341524 - RNA, 19 nt, Artificial Sequence
  Description of Artificial Sequence: Synthetic oligonucleotide
ucauggauccagucuucua

SEQ ID NO: 2341525 - RNA, 19 nt, Artificial Sequence
  Description of Artificial Sequence: Synthetic oligonucleotide
uacuugguuuuggugguaa

SEQ ID NO: 2341526 - RNA, 19 nt, Artificial Sequence
  Description of Artificial Sequence: Synthetic oligonucleotide
cuuuacauccaugaacacu

SEQ ID NO: 2341527 - RNA, 19 nt, Artificial Sequence
  Description of Artificial Sequence: Synthetic oligonucleotide
ugagcccauucuuuacauc

SEQ ID NO: 2341528 - RNA, 19 nt, Artificial Sequence
  Description of Artificial Sequence: Synthetic oligonucleotide
  modified_base (9)..(9): a, c, u, g, unknown or other
ggugguaanaaggucaggu

SEQ ID NO: 2341529 - RNA, 19 nt, Artificial Sequence
  Description of Artificial Sequence: Synthetic oligonucleotide
ugacgcaguuccuguagau

SEQ ID NO: 2341530 - RNA, 19 nt, Artificial Sequence
  Description of Artificial Sequence: Synthetic oligonucleotide
aucgugguacacuguuccu

SEQ ID NO: 2341531 - RNA, 19 nt, Artificial Sequence
  Description of Artificial Sequence: Synthetic oligonucleotide
auauuccauuuacugugua

SEQ ID NO: 2341532 - RNA, 19 nt, Artificial Sequence
  Description of Artificial Sequence: Synthetic oligonucleotide
gcuguuuauuccaggaaac

SEQ ID NO: 2341533 - RNA, 19 nt, Artificial Sequence
  Description of Artificial Sequence: Synthetic oligonucleotide
cuccuccacuccuucuccg

SEQ ID NO: 2341534 - RNA, 19 nt, Artificial Sequence
  Description of Artificial Sequence: Synthetic oligonucleotide
gaaaugugguguucacacu

SEQ ID NO: 2341535 - RNA, 19 nt, Artificial Sequence
  Description of Artificial Sequence: Synthetic oligonucleotide
uguuacccagaucguggua

SEQ ID NO: 2341536 - RNA, 19 nt, Artificial Sequence
  Description of Artificial Sequence: Synthetic oligonucleotide
  modified_base (18)..(18): a, c, u, g, unknown or other
cuugguuuuggugguaana

SEQ ID NO: 2341537 - RNA, 19 nt, Artificial Sequence
  Description of Artificial Sequence: Synthetic oligonucleotide
ccagauuuugauacacauc

SEQ ID NO: 2341538 - RNA, 19 nt, Artificial Sequence
  Description of Artificial Sequence: Synthetic oligonucleotide
caaugggacagaauuugcu

SEQ ID NO: 2341539 - RNA, 19 nt, Artificial Sequence
  Description of Artificial Sequence: Synthetic oligonucleotide
gauuaucaaagugguggua

SEQ ID NO: 2341540 - RNA, 19 nt, Artificial Sequence
  Description of Artificial Sequence: Synthetic oligonucleotide
aaagucacucagggucaca

SEQ ID NO: 2341541 - RNA, 19 nt, Artificial Sequence
  Description of Artificial Sequence: Synthetic oligonucleotide
ucaucagauggagguuaca

SEQ ID NO: 2341542 - RNA, 19 nt, Artificial Sequence
  Description of Artificial Sequence: Synthetic oligonucleotide
  modified_base (19)..(19): a, c, u, g, unknown or other
acuugguuuuggugguaan

SEQ ID NO: 2341543 - RNA, 19 nt, Artificial Sequence
  Description of Artificial Sequence: Synthetic oligonucleotide
auauggcacgcgaaaugug

SEQ ID NO: 2341544 - RNA, 19 nt, Artificial Sequence
  Description of Artificial Sequence: Synthetic oligonucleotide
aucgaguaacaggucaaau

SEQ ID NO: 2341545 - RNA, 19 nt, Artificial Sequence
  Description of Artificial Sequence: Synthetic oligonucleotide
guggucauggauccagucu

SEQ ID NO: 2341546 - RNA, 19 nt, Artificial Sequence
  Description of Artificial Sequence: Synthetic oligonucleotide
gguguucacacuaaacuua

SEQ ID NO: 2341547 - RNA, 19 nt, Artificial Sequence
  Description of Artificial Sequence: Synthetic oligonucleotide
auucuggugccuaccgaug

SEQ ID NO: 2341548 - RNA, 19 nt, Artificial Sequence
  Description of Artificial Sequence: Synthetic oligonucleotide
guaggguuggacagcguuc

SEQ ID NO: 2341549 - RNA, 19 nt, Artificial Sequence
  Description of Artificial Sequence: Synthetic oligonucleotide
cgugguacacuguuccucc

SEQ ID NO: 2341550 - RNA, 19 nt, Artificial Sequence
  Description of Artificial Sequence: Synthetic oligonucleotide
acugcccaucgaguaacag

SEQ ID NO: 2341551 - RNA, 19 nt, Artificial Sequence
  Description of Artificial Sequence: Synthetic oligonucleotide
cauauggcacgcgaaaugu

SEQ ID NO: 2341552 - RNA, 19 nt, Artificial Sequence
  Description of Artificial Sequence: Synthetic oligonucleotide
gaguccgaccauauaucca

SEQ ID NO: 2341553 - RNA, 19 nt, Artificial Sequence
  Description of Artificial Sequence: Synthetic oligonucleotide
acuaaacuuaggaguccga

SEQ ID NO: 2341554 - RNA, 19 nt, Artificial Sequence
  Description of Artificial Sequence: Synthetic oligonucleotide
cagggugguuucaauggga

SEQ ID NO: 2341555 - RNA, 19 nt, Artificial Sequence
  Description of Artificial Sequence: Synthetic oligonucleotide
agauuuugauacacaucau

SEQ ID NO: 2341556 - RNA, 19 nt, Artificial Sequence
  Description of Artificial Sequence: Synthetic oligonucleotide
acgcgaaaugugguguuca

SEQ ID NO: 2341557 - RNA, 19 nt, Artificial Sequence
  Description of Artificial Sequence: Synthetic oligonucleotide
uccuucuccgagccaguuu

SEQ ID NO: 2341558 - RNA, 19 nt, Artificial Sequence
  Description of Artificial Sequence: Synthetic oligonucleotide
cugccaauaaaaccugagu

SEQ ID NO: 2341559 - RNA, 19 nt, Artificial Sequence
  Description of Artificial Sequence: Synthetic oligonucleotide
guggugguaagcggcaauc

SEQ ID NO: 2341560 - RNA, 19 nt, Artificial Sequence
  Description of Artificial Sequence: Synthetic oligonucleotide
gugccugcucauauggcac

SEQ ID NO: 2341561 - RNA, 19 nt, Artificial Sequence
  Description of Artificial Sequence: Synthetic oligonucleotide
acccagaucgugguacacu

SEQ ID NO: 2341562 - RNA, 19 nt, Artificial Sequence
  Description of Artificial Sequence: Synthetic oligonucleotide
acuuaggaguccgaccaua

SEQ ID NO: 2341563 - RNA, 19 nt, Artificial Sequence
  Description of Artificial Sequence: Synthetic oligonucleotide
cugcucauauggcacgcga

SEQ ID NO: 2341564 - RNA, 19 nt, Artificial Sequence
  Description of Artificial Sequence: Synthetic oligonucleotide
ggaaaagaauuggcaugcc

SEQ ID NO: 2341565 - RNA, 19 nt, Artificial Sequence
  Description of Artificial Sequence: Synthetic oligonucleotide
gcguucagagcucucacaa

SEQ ID NO: 2341566 - RNA, 19 nt, Artificial Sequence
  Description of Artificial Sequence: Synthetic oligonucleotide
ccaugaacacuugaauuuc

SEQ ID NO: 2341567 - RNA, 19 nt, Artificial Sequence
  Description of Artificial Sequence: Synthetic oligonucleotide
caaaugugccugcucauau

SEQ ID NO: 2341568 - RNA, 19 nt, Artificial Sequence
  Description of Artificial Sequence: Synthetic oligonucleotide
  modified_base (8)..(8): a, c, u, g, unknown or other
gugguaanaaggucagguu

SEQ ID NO: 2341569 - RNA, 19 nt, Artificial Sequence
  Description of Artificial Sequence: Synthetic oligonucleotide
agccagauuuugauacaca

SEQ ID NO: 2341570 - RNA, 19 nt, Artificial Sequence
  Description of Artificial Sequence: Synthetic oligonucleotide
guuagcagggugguuucaa

SEQ ID NO: 2341571 - RNA, 19 nt, Artificial Sequence
  Description of Artificial Sequence: Synthetic oligonucleotide
auggcacgcgaaauguggu

SEQ ID NO: 2341572 - RNA, 19 nt, Artificial Sequence
  Description of Artificial Sequence: Synthetic oligonucleotide
aggguuggacagcguucag

SEQ ID NO: 2341573 - RNA, 19 nt, Artificial Sequence
  Description of Artificial Sequence: Synthetic oligonucleotide
auauauccacugccagcuu

SEQ ID NO: 2341574 - RNA, 19 nt, Artificial Sequence
  Description of Artificial Sequence: Synthetic oligonucleotide
gcucauauggcacgcgaaa

SEQ ID NO: 2341575 - RNA, 19 nt, Artificial Sequence
  Description of Artificial Sequence: Synthetic oligonucleotide
guacacuguuccuccucca

SEQ ID NO: 2341576 - RNA, 19 nt, Artificial Sequence
  Description of Artificial Sequence: Synthetic oligonucleotide
gguaagcggcaauccggcc

SEQ ID NO: 2341577 - RNA, 19 nt, Artificial Sequence
  Description of Artificial Sequence: Synthetic oligonucleotide
caacgcagggagaauuucu

SEQ ID NO: 2341578 - RNA, 19 nt, Artificial Sequence
  Description of Artificial Sequence: Synthetic oligonucleotide
cuauuuccaguggcaacca

SEQ ID NO: 2341579 - RNA, 19 nt, Artificial Sequence
  Description of Artificial Sequence: Synthetic oligonucleotide
gccagauuuugauacacau

SEQ ID NO: 2341580 - RNA, 19 nt, Artificial Sequence
  Description of Artificial Sequence: Synthetic oligonucleotide
cuguagaaugagcccaugu

SEQ ID NO: 2341581 - RNA, 19 nt, Artificial Sequence
  Description of Artificial Sequence: Synthetic oligonucleotide
cuuaggaguccgaccauau

SEQ ID NO: 2341582 - RNA, 19 nt, Artificial Sequence
  Description of Artificial Sequence: Synthetic oligonucleotide
caucagauggagguuacau

SEQ ID NO: 2341583 - RNA, 19 nt, Artificial Sequence
  Description of Artificial Sequence: Synthetic oligonucleotide
uacccagaucgugguacac

SEQ ID NO: 2341584 - RNA, 19 nt, Artificial Sequence
  Description of Artificial Sequence: Synthetic oligonucleotide
cuuugacgcaguuccugua

SEQ ID NO: 2341585 - RNA, 19 nt, Artificial Sequence
  Description of Artificial Sequence: Synthetic oligonucleotide
gucacauuauuccccugau

SEQ ID NO: 2341586 - RNA, 19 nt, Artificial Sequence
  Description of Artificial Sequence: Synthetic oligonucleotide
cccaucgaguaacagguca

SEQ ID NO: 2341587 - RNA, 19 nt, Artificial Sequence
  Description of Artificial Sequence: Synthetic oligonucleotide
cacguccagguaggguugg

SEQ ID NO: 2341588 - RNA, 19 nt, Artificial Sequence
  Description of Artificial Sequence: Synthetic oligonucleotide
caauccggccgaucuuuga

SEQ ID NO: 2341589 - RNA, 19 nt, Artificial Sequence
  Description of Artificial Sequence: Synthetic oligonucleotide
ccuucuagauguauguggu

SEQ ID NO: 2341590 - RNA, 19 nt, Artificial Sequence
  Description of Artificial Sequence: Synthetic oligonucleotide
gguugauguuacccagauc

SEQ ID NO: 2341591 - RNA, 19 nt, Artificial Sequence
  Description of Artificial Sequence: Synthetic oligonucleotide
gaguaacaggucaaauuuu

SEQ ID NO: 2341592 - RNA, 19 nt, Artificial Sequence
  Description of Artificial Sequence: Synthetic oligonucleotide
cacgcgaaaugugguguuc

SEQ ID NO: 2341593 - RNA, 19 nt, Artificial Sequence
  Description of Artificial Sequence: Synthetic oligonucleotide
ggauucuggugccuaccga

SEQ ID NO: 2341594 - RNA, 19 nt, Artificial Sequence
  Description of Artificial Sequence: Synthetic oligonucleotide
ggugccuaccgaugacaac

SEQ ID NO: 2341595 - RNA, 19 nt, Artificial Sequence
  Description of Artificial Sequence: Synthetic oligonucleotide
ggcaaccaaugaucaggug

SEQ ID NO: 2341596 - RNA, 19 nt, Artificial Sequence
  Description of Artificial Sequence: Synthetic oligonucleotide
augacaacgcagggagaau

SEQ ID NO: 2341597 - RNA, 19 nt, Artificial Sequence
  Description of Artificial Sequence: Synthetic oligonucleotide
ggacagaauuugcugccaa

SEQ ID NO: 2341598 - RNA, 19 nt, Artificial Sequence
  Description of Artificial Sequence: Synthetic oligonucleotide
  modified_base (5)..(5): a, c, u, g, unknown or other
guaanaaggucagguugau

SEQ ID NO: 2341599 - RNA, 19 nt, Artificial Sequence
  Description of Artificial Sequence: Synthetic oligonucleotide
caucgaguaacaggucaaa

SEQ ID NO: 2341600 - RNA, 19 nt, Artificial Sequence
  Description of Artificial Sequence: Synthetic oligonucleotide
gguaggguuggacagcguu

SEQ ID NO: 2341601 - RNA, 19 nt, Artificial Sequence
  Description of Artificial Sequence: Synthetic oligonucleotide
gggugguuucaaugggaca

SEQ ID NO: 2341602 - RNA, 19 nt, Artificial Sequence
  Description of Artificial Sequence: Synthetic oligonucleotide
agcggcaauccggccgauc

SEQ ID NO: 2341603 - RNA, 19 nt, Artificial Sequence
  Description of Artificial Sequence: Synthetic oligonucleotide
cagaucgugguacacuguu

SEQ ID NO: 2341604 - RNA, 19 nt, Artificial Sequence
  Description of Artificial Sequence: Synthetic oligonucleotide
gcuggguuuauuaguuuaa

SEQ ID NO: 2341605 - RNA, 19 nt, Artificial Sequence
  Description of Artificial Sequence: Synthetic oligonucleotide
gaucuuugacgcaguuccu

SEQ ID NO: 2341606 - RNA, 19 nt, Artificial Sequence
  Description of Artificial Sequence: Synthetic oligonucleotide
gacuguagaaugagcccau

SEQ ID NO: 2341607 - RNA, 19 nt, Artificial Sequence
  Description of Artificial Sequence: Synthetic oligonucleotide
ccuccacuccuucuccgag

SEQ ID NO: 2341608 - RNA, 19 nt, Artificial Sequence
  Description of Artificial Sequence: Synthetic oligonucleotide
cagagcucucacaauuaau

SEQ ID NO: 2341609 - RNA, 19 nt, Artificial Sequence
  Description of Artificial Sequence: Synthetic oligonucleotide
ccauguguugcuggguuuc

SEQ ID NO: 2341610 - RNA, 19 nt, Artificial Sequence
  Description of Artificial Sequence: Synthetic oligonucleotide
gacaacgcagggagaauuu

SEQ ID NO: 2341611 - RNA, 19 nt, Artificial Sequence
  Description of Artificial Sequence: Synthetic oligonucleotide
cucauauggcacgcgaaau

SEQ ID NO: 2341612 - RNA, 19 nt, Artificial Sequence
  Description of Artificial Sequence: Synthetic oligonucleotide
gcgaaaugugguguucaca

SEQ ID NO: 2341613 - RNA, 19 nt, Artificial Sequence
  Description of Artificial Sequence: Synthetic oligonucleotide
ccaucgaguaacaggucaa

SEQ ID NO: 2341614 - RNA, 19 nt, Artificial Sequence
  Description of Artificial Sequence: Synthetic oligonucleotide
guauguggucauggaucca

SEQ ID NO: 2341615 - RNA, 19 nt, Artificial Sequence
  Description of Artificial Sequence: Synthetic oligonucleotide
ggguuggacagcguucaga

SEQ ID NO: 2341616 - RNA, 19 nt, Artificial Sequence
  Description of Artificial Sequence: Synthetic oligonucleotide
gcggcaauccggccgaucu

SEQ ID NO: 2341617 - RNA, 19 nt, Artificial Sequence
  Description of Artificial Sequence: Synthetic oligonucleotide
gacgcaguuccuguagauu

SEQ ID NO: 2341618 - RNA, 19 nt, Artificial Sequence
  Description of Artificial Sequence: Synthetic oligonucleotide
auacuugguuuugguggua

SEQ ID NO: 2341619 - RNA, 19 nt, Artificial Sequence
  Description of Artificial Sequence: Synthetic oligonucleotide
gacagcguucagagcucuc

SEQ ID NO: 2341620 - RNA, 19 nt, Artificial Sequence
  Description of Artificial Sequence: Synthetic oligonucleotide
ggacauguucucaguaaua

SEQ ID NO: 2341621 - RNA, 19 nt, Artificial Sequence
  Description of Artificial Sequence: Synthetic oligonucleotide
cagguuucaaugagcccau

SEQ ID NO: 2341622 - RNA, 19 nt, Artificial Sequence
  Description of Artificial Sequence: Synthetic oligonucleotide
cuguguaagugcuguucau

SEQ ID NO: 2341623 - RNA, 19 nt, Artificial Sequence
  Description of Artificial Sequence: Synthetic oligonucleotide
ggucauggauccagucuuc

SEQ ID NO: 2341624 - RNA, 19 nt, Artificial Sequence
  Description of Artificial Sequence: Synthetic oligonucleotide
cgacuguagaaugagccca

SEQ ID NO: 2341625 - RNA, 19 nt, Artificial Sequence
  Description of Artificial Sequence: Synthetic oligonucleotide
cugccagcuuugcaguucu

SEQ ID NO: 2341626 - RNA, 19 nt, Artificial Sequence
  Description of Artificial Sequence: Synthetic oligonucleotide
cuggguuuauuaguuuaau

SEQ ID NO: 2341627 - RNA, 19 nt, Artificial Sequence
  Description of Artificial Sequence: Synthetic oligonucleotide
gcugcacguccagguaggg

SEQ ID NO: 2341628 - RNA, 19 nt, Artificial Sequence
  Description of Artificial Sequence: Synthetic oligonucleotide
gguuuuccauucugucaua

SEQ ID NO: 2341629 - RNA, 19 nt, Artificial Sequence
  Description of Artificial Sequence: Synthetic oligonucleotide
gcacguccagguaggguug

SEQ ID NO: 2341630 - RNA, 19 nt, Artificial Sequence
  Description of Artificial Sequence: Synthetic oligonucleotide
gccugcucauauggcacgc

SEQ ID NO: 2341631 - RNA, 19 nt, Artificial Sequence
  Description of Artificial Sequence: Synthetic oligonucleotide
cgcgaaaugugguguucac

SEQ ID NO: 2341632 - RNA, 19 nt, Artificial Sequence
  Description of Artificial Sequence: Synthetic oligonucleotide
ggcacgcgaaauguggugu

SEQ ID NO: 2341633 - RNA, 19 nt, Artificial Sequence
  Description of Artificial Sequence: Synthetic oligonucleotide
gcaauccggccgaucuuug

SEQ ID NO: 2341634 - RNA, 19 nt, Artificial Sequence
  Description of Artificial Sequence: Synthetic oligonucleotide
ccaaugaucaggugcuuuu

SEQ ID NO: 2341635 - RNA, 19 nt, Artificial Sequence
  Description of Artificial Sequence: Synthetic oligonucleotide
cggccgaucuuugacgcag

SEQ ID NO: 2341636 - RNA, 19 nt, Artificial Sequence
  Description of Artificial Sequence: Synthetic oligonucleotide
gcaguuccuguagauuuua

SEQ ID NO: 2341637 - RNA, 19 nt, Artificial Sequence
  Description of Artificial Sequence: Synthetic oligonucleotide
caguuccuguagauuuuau

SEQ ID NO: 2341638 - RNA, 19 nt, Artificial Sequence
  Description of Artificial Sequence: Synthetic oligonucleotide
gccuaccgaugacaacgca

SEQ ID NO: 2341639 - RNA, 19 nt, Artificial Sequence
  Description of Artificial Sequence: Synthetic oligonucleotide
gucucaucagauggagguu

SEQ ID NO: 2341640 - RNA, 19 nt, Artificial Sequence
  Description of Artificial Sequence: Synthetic oligonucleotide
agguaggguuggacagcgu

SEQ ID NO: 2341641 - RNA, 19 nt, Artificial Sequence
  Description of Artificial Sequence: Synthetic oligonucleotide
guccgaccauauauccacu

SEQ ID NO: 2341642 - RNA, 19 nt, Artificial Sequence
  Description of Artificial Sequence: Synthetic oligonucleotide
ggcaauccggccgaucuuu

SEQ ID NO: 2341643 - RNA, 19 nt, Artificial Sequence
  Description of Artificial Sequence: Synthetic oligonucleotide
aagcggcaauccggccgau

SEQ ID NO: 2341644 - RNA, 19 nt, Artificial Sequence
  Description of Artificial Sequence: Synthetic oligonucleotide
cugcacguccagguagggu

SEQ ID NO: 2341645 - RNA, 19 nt, Artificial Sequence
  Description of Artificial Sequence: Synthetic oligonucleotide
ggacagcguucagagcucu

SEQ ID NO: 2341646 - RNA, 19 nt, Artificial Sequence
  Description of Artificial Sequence: Synthetic oligonucleotide
cacugccagcuuugcaguu

SEQ ID NO: 2341647 - RNA, 19 nt, Artificial Sequence
  Description of Artificial Sequence: Synthetic oligonucleotide
cgaugacaacgcagggaga

SEQ ID NO: 2341648 - RNA, 19 nt, Artificial Sequence
  Description of Artificial Sequence: Synthetic oligonucleotide
gcccaucgaguaacagguc

SEQ ID NO: 2341649 - RNA, 19 nt, Artificial Sequence
  Description of Artificial Sequence: Synthetic oligonucleotide
gcacgcgaaaugugguguu

SEQ ID NO: 2341650 - RNA, 19 nt, Artificial Sequence
  Description of Artificial Sequence: Synthetic oligonucleotide
ccagaucgugguacacugu

SEQ ID NO: 2341651 - RNA, 19 nt, Artificial Sequence
  Description of Artificial Sequence: Synthetic oligonucleotide
ccggccgaucuuugacgca

SEQ ID NO: 2341652 - RNA, 19 nt, Artificial Sequence
  Description of Artificial Sequence: Synthetic oligonucleotide
cguucagagcucucacaau

SEQ ID NO: 2341653 - RNA, 19 nt, Artificial Sequence
  Description of Artificial Sequence: Synthetic oligonucleotide
ggcaugccuucuagaugua

SEQ ID NO: 2341654 - RNA, 19 nt, Artificial Sequence
  Description of Artificial Sequence: Synthetic oligonucleotide
cccauguguugcuggguuu

SEQ ID NO: 2341655 - RNA, 19 nt, Artificial Sequence
  Description of Artificial Sequence: Synthetic oligonucleotide
ggccgaucuuugacgcagu

SEQ ID NO: 2341656 - RNA, 19 nt, Artificial Sequence
  Description of Artificial Sequence: Synthetic oligonucleotide
cggcaauccggccgaucuu

SEQ ID NO: 2341657 - RNA, 19 nt, Artificial Sequence
  Description of Artificial Sequence: Synthetic oligonucleotide
uuaaagauuaaugauacag

SEQ ID NO: 2341658 - RNA, 19 nt, Artificial Sequence
  Description of Artificial Sequence: Synthetic oligonucleotide
aaagauuaaugauacagcu

SEQ ID NO: 2341659 - RNA, 19 nt, Artificial Sequence
  Description of Artificial Sequence: Synthetic oligonucleotide
agaaauguacauuaacugg

SEQ ID NO: 2341660 - RNA, 19 nt, Artificial Sequence
  Description of Artificial Sequence: Synthetic oligonucleotide
aacuuuaacauccaccucu

SEQ ID NO: 2341661 - RNA, 19 nt, Artificial Sequence
  Description of Artificial Sequence: Synthetic oligonucleotide
aacuugugauuauuuaagc

SEQ ID NO: 2341662 - RNA, 19 nt, Artificial Sequence
  Description of Artificial Sequence: Synthetic oligonucleotide
uuugauggaguucagaaac

SEQ ID NO: 2341663 - RNA, 19 nt, Artificial Sequence
  Description of Artificial Sequence: Synthetic oligonucleotide
aacuauaauaaguauuugu

SEQ ID NO: 2341664 - RNA, 19 nt, Artificial Sequence
  Description of Artificial Sequence: Synthetic oligonucleotide
auuuaaagauuaaugauac

SEQ ID NO: 2341665 - RNA, 19 nt, Artificial Sequence
  Description of Artificial Sequence: Synthetic oligonucleotide
uuaacuauaauaaguauuu

SEQ ID NO: 2341666 - RNA, 19 nt, Artificial Sequence
  Description of Artificial Sequence: Synthetic oligonucleotide
auuuaagccccucauaagg

SEQ ID NO: 2341667 - RNA, 19 nt, Artificial Sequence
  Description of Artificial Sequence: Synthetic oligonucleotide
acuugugauuauuuaagcc

SEQ ID NO: 2341668 - RNA, 19 nt, Artificial Sequence
  Description of Artificial Sequence: Synthetic oligonucleotide
ucauaaggaauuaagcagc

SEQ ID NO: 2341669 - RNA, 19 nt, Artificial Sequence
  Description of Artificial Sequence: Synthetic oligonucleotide
uucccuguaguucugaagg

SEQ ID NO: 2341670 - RNA, 19 nt, Artificial Sequence
  Description of Artificial Sequence: Synthetic oligonucleotide
ucaacuuuaacauccaccu

SEQ ID NO: 2341671 - RNA, 19 nt, Artificial Sequence
  Description of Artificial Sequence: Synthetic oligonucleotide
uuugcuuuagaaaugacuu

SEQ ID NO: 2341672 - RNA, 19 nt, Artificial Sequence
  Description of Artificial Sequence: Synthetic oligonucleotide
uuuaauauauauugguuaa

SEQ ID NO: 2341673 - RNA, 19 nt, Artificial Sequence
  Description of Artificial Sequence: Synthetic oligonucleotide
agauuaaugauacagcuau

SEQ ID NO: 2341674 - RNA, 19 nt, Artificial Sequence
  Description of Artificial Sequence: Synthetic oligonucleotide
acuuccaaccaucauuucc

SEQ ID NO: 2341675 - RNA, 19 nt, Artificial Sequence
  Description of Artificial Sequence: Synthetic oligonucleotide
cucauaaggaauuaagcag

SEQ ID NO: 2341676 - RNA, 19 nt, Artificial Sequence
  Description of Artificial Sequence: Synthetic oligonucleotide
uugguuaacuauaauaagu

SEQ ID NO: 2341677 - RNA, 19 nt, Artificial Sequence
  Description of Artificial Sequence: Synthetic oligonucleotide
agacauugcaucuuucuac

SEQ ID NO: 2341678 - RNA, 19 nt, Artificial Sequence
  Description of Artificial Sequence: Synthetic oligonucleotide
acauuaacugguuuccagc

SEQ ID NO: 2341679 - RNA, 19 nt, Artificial Sequence
  Description of Artificial Sequence: Synthetic oligonucleotide
uucaacuuuaacauccacc

SEQ ID NO: 2341680 - RNA, 19 nt, Artificial Sequence
  Description of Artificial Sequence: Synthetic oligonucleotide
acaaaguacuuuuauuuuc

SEQ ID NO: 2341681 - RNA, 19 nt, Artificial Sequence
  Description of Artificial Sequence: Synthetic oligonucleotide
uacauuauucucuaacuug

SEQ ID NO: 2341682 - RNA, 19 nt, Artificial Sequence
  Description of Artificial Sequence: Synthetic oligonucleotide
uauauauugguuaacuaua

SEQ ID NO: 2341683 - RNA, 19 nt, Artificial Sequence
  Description of Artificial Sequence: Synthetic oligonucleotide
cugacuugcaccaucagag

SEQ ID NO: 2341684 - RNA, 19 nt, Artificial Sequence
  Description of Artificial Sequence: Synthetic oligonucleotide
uugugauuauuuaagcccc

SEQ ID NO: 2341685 - RNA, 19 nt, Artificial Sequence
  Description of Artificial Sequence: Synthetic oligonucleotide
uaaguauuuguaaaauacu

SEQ ID NO: 2341686 - RNA, 19 nt, Artificial Sequence
  Description of Artificial Sequence: Synthetic oligonucleotide
uuuagaaaugacuuuuggu

SEQ ID NO: 2341687 - RNA, 19 nt, Artificial Sequence
  Description of Artificial Sequence: Synthetic oligonucleotide
uucuacuuuaguaacacau

SEQ ID NO: 2341688 - RNA, 19 nt, Artificial Sequence
  Description of Artificial Sequence: Synthetic oligonucleotide
acagcuauuuaauauauau

SEQ ID NO: 2341689 - RNA, 19 nt, Artificial Sequence
  Description of Artificial Sequence: Synthetic oligonucleotide
aacuucaauacucuuugcu

SEQ ID NO: 2341690 - RNA, 19 nt, Artificial Sequence
  Description of Artificial Sequence: Synthetic oligonucleotide
ucugaggaaaggaaaagcu

SEQ ID NO: 2341691 - RNA, 19 nt, Artificial Sequence
  Description of Artificial Sequence: Synthetic oligonucleotide
aaaucugcuucuuccaaug

SEQ ID NO: 2341692 - RNA, 19 nt, Artificial Sequence
  Description of Artificial Sequence: Synthetic oligonucleotide
auugguuaacuauaauaag

SEQ ID NO: 2341693 - RNA, 19 nt, Artificial Sequence
  Description of Artificial Sequence: Synthetic oligonucleotide
aacuguuagaguuuucuaa

SEQ ID NO: 2341694 - RNA, 19 nt, Artificial Sequence
  Description of Artificial Sequence: Synthetic oligonucleotide
auaauaaguauuuguaaaa

SEQ ID NO: 2341695 - RNA, 19 nt, Artificial Sequence
  Description of Artificial Sequence: Synthetic oligonucleotide
ugugagaaacauuuaaauc

SEQ ID NO: 2341696 - RNA, 19 nt, Artificial Sequence
  Description of Artificial Sequence: Synthetic oligonucleotide
cuuccaaccaucauuuccc

SEQ ID NO: 2341697 - RNA, 19 nt, Artificial Sequence
  Description of Artificial Sequence: Synthetic oligonucleotide
aaggaauuaagcagcacuc

SEQ ID NO: 2341698 - RNA, 19 nt, Artificial Sequence
  Description of Artificial Sequence: Synthetic oligonucleotide
auauugguuaacuauaaua

SEQ ID NO: 2341699 - RNA, 19 nt, Artificial Sequence
  Description of Artificial Sequence: Synthetic oligonucleotide
acauuuaaagauuaaugau

SEQ ID NO: 2341700 - RNA, 19 nt, Artificial Sequence
  Description of Artificial Sequence: Synthetic oligonucleotide
aagucuuugauguggcuca

SEQ ID NO: 2341701 - RNA, 19 nt, Artificial Sequence
  Description of Artificial Sequence: Synthetic oligonucleotide
agaguuuucuaaaaggcuc

SEQ ID NO: 2341702 - RNA, 19 nt, Artificial Sequence
  Description of Artificial Sequence: Synthetic oligonucleotide
uguagacauacauacuuca

SEQ ID NO: 2341703 - RNA, 19 nt, Artificial Sequence
  Description of Artificial Sequence: Synthetic oligonucleotide
agacaaaguacuuuuauuu

SEQ ID NO: 2341704 - RNA, 19 nt, Artificial Sequence
  Description of Artificial Sequence: Synthetic oligonucleotide
uagaaaugacuuuuggugu

SEQ ID NO: 2341705 - RNA, 19 nt, Artificial Sequence
  Description of Artificial Sequence: Synthetic oligonucleotide
ugguuaacuauaauaagua

SEQ ID NO: 2341706 - RNA, 19 nt, Artificial Sequence
  Description of Artificial Sequence: Synthetic oligonucleotide
uggccuuugagaaauguac

SEQ ID NO: 2341707 - RNA, 19 nt, Artificial Sequence
  Description of Artificial Sequence: Synthetic oligonucleotide
ucagaguaacuucuaaagu

SEQ ID NO: 2341708 - RNA, 19 nt, Artificial Sequence
  Description of Artificial Sequence: Synthetic oligonucleotide
uuuuccacaauuuuauauu

SEQ ID NO: 2341709 - RNA, 19 nt, Artificial Sequence
  Description of Artificial Sequence: Synthetic oligonucleotide
uagaguuuucuaaaaggcu

SEQ ID NO: 2341710 - RNA, 19 nt, Artificial Sequence
  Description of Artificial Sequence: Synthetic oligonucleotide
uggagucucugaaugauca

SEQ ID NO: 2341711 - RNA, 19 nt, Artificial Sequence
  Description of Artificial Sequence: Synthetic oligonucleotide
ugacuuuugguguagcacu

SEQ ID NO: 2341712 - RNA, 19 nt, Artificial Sequence
  Description of Artificial Sequence: Synthetic oligonucleotide
cucaagcucaaucaaacug

SEQ ID NO: 2341713 - RNA, 19 nt, Artificial Sequence
  Description of Artificial Sequence: Synthetic oligonucleotide
uuuaagccccucauaagga

SEQ ID NO: 2341714 - RNA, 19 nt, Artificial Sequence
  Description of Artificial Sequence: Synthetic oligonucleotide
ucagaaacugcugacuugc

SEQ ID NO: 2341715 - RNA, 19 nt, Artificial Sequence
  Description of Artificial Sequence: Synthetic oligonucleotide
ucaaaccucaagcucaauc

SEQ ID NO: 2341716 - RNA, 19 nt, Artificial Sequence
  Description of Artificial Sequence: Synthetic oligonucleotide
auuauucucuaacuuguga

SEQ ID NO: 2341717 - RNA, 19 nt, Artificial Sequence
  Description of Artificial Sequence: Synthetic oligonucleotide
cauuuaaagauuaaugaua

SEQ ID NO: 2341718 - RNA, 19 nt, Artificial Sequence
  Description of Artificial Sequence: Synthetic oligonucleotide
aaugacuuuugguguagca

SEQ ID NO: 2341719 - RNA, 19 nt, Artificial Sequence
  Description of Artificial Sequence: Synthetic oligonucleotide
gauacagcuauuuaauaua

SEQ ID NO: 2341720 - RNA, 19 nt, Artificial Sequence
  Description of Artificial Sequence: Synthetic oligonucleotide
ugucucauccagaagucug

SEQ ID NO: 2341721 - RNA, 19 nt, Artificial Sequence
  Description of Artificial Sequence: Synthetic oligonucleotide
uuaacugguuuccagcuau

SEQ ID NO: 2341722 - RNA, 19 nt, Artificial Sequence
  Description of Artificial Sequence: Synthetic oligonucleotide
ugauuauuuaagccccuca

SEQ ID NO: 2341723 - RNA, 19 nt, Artificial Sequence
  Description of Artificial Sequence: Synthetic oligonucleotide
aaaggcuccgaaguuaucu

SEQ ID NO: 2341724 - RNA, 19 nt, Artificial Sequence
  Description of Artificial Sequence: Synthetic oligonucleotide
aaguuguucaguggaacag

SEQ ID NO: 2341725 - RNA, 19 nt, Artificial Sequence
  Description of Artificial Sequence: Synthetic oligonucleotide
aacuucuaaagucaucauu

SEQ ID NO: 2341726 - RNA, 19 nt, Artificial Sequence
  Description of Artificial Sequence: Synthetic oligonucleotide
ugagaaacauuuaaaucuu

SEQ ID NO: 2341727 - RNA, 19 nt, Artificial Sequence
  Description of Artificial Sequence: Synthetic oligonucleotide
aguccuuuccccauuggcc

SEQ ID NO: 2341728 - RNA, 19 nt, Artificial Sequence
  Description of Artificial Sequence: Synthetic oligonucleotide
ugaaugaucacagcauucu

SEQ ID NO: 2341729 - RNA, 19 nt, Artificial Sequence
  Description of Artificial Sequence: Synthetic oligonucleotide
uaaaucuuuuggacagucc

SEQ ID NO: 2341730 - RNA, 19 nt, Artificial Sequence
  Description of Artificial Sequence: Synthetic oligonucleotide
uucuaaagucaucauugac

SEQ ID NO: 2341731 - RNA, 19 nt, Artificial Sequence
  Description of Artificial Sequence: Synthetic oligonucleotide
augacuuuugguguagcac

SEQ ID NO: 2341732 - RNA, 19 nt, Artificial Sequence
  Description of Artificial Sequence: Synthetic oligonucleotide
aaaugacuuuugguguagc

SEQ ID NO: 2341733 - RNA, 19 nt, Artificial Sequence
  Description of Artificial Sequence: Synthetic oligonucleotide
uccgaaguuaucuggaguc

SEQ ID NO: 2341734 - RNA, 19 nt, Artificial Sequence
  Description of Artificial Sequence: Synthetic oligonucleotide
aguuguucaguggaacagc

SEQ ID NO: 2341735 - RNA, 19 nt, Artificial Sequence
  Description of Artificial Sequence: Synthetic oligonucleotide
aaacugucuucugucuccc

SEQ ID NO: 2341736 - RNA, 19 nt, Artificial Sequence
  Description of Artificial Sequence: Synthetic oligonucleotide
acuauaauaaguauuugua

SEQ ID NO: 2341737 - RNA, 19 nt, Artificial Sequence
  Description of Artificial Sequence: Synthetic oligonucleotide
ucuaacuugugauuauuua

SEQ ID NO: 2341738 - RNA, 19 nt, Artificial Sequence
  Description of Artificial Sequence: Synthetic oligonucleotide
aaugugagugucucaucca

SEQ ID NO: 2341739 - RNA, 19 nt, Artificial Sequence
  Description of Artificial Sequence: Synthetic oligonucleotide
uuugagaaauguacauuaa

SEQ ID NO: 2341740 - RNA, 19 nt, Artificial Sequence
  Description of Artificial Sequence: Synthetic oligonucleotide
aauacaggcuuuguagaca

SEQ ID NO: 2341741 - RNA, 19 nt, Artificial Sequence
  Description of Artificial Sequence: Synthetic oligonucleotide
cuauaauaaguauuuguaa

SEQ ID NO: 2341742 - RNA, 19 nt, Artificial Sequence
  Description of Artificial Sequence: Synthetic oligonucleotide
uuuugauggaguucagaaa

SEQ ID NO: 2341743 - RNA, 19 nt, Artificial Sequence
  Description of Artificial Sequence: Synthetic oligonucleotide
uuugguguagcacuuccua

SEQ ID NO: 2341744 - RNA, 19 nt, Artificial Sequence
  Description of Artificial Sequence: Synthetic oligonucleotide
ucuacuuuaguaacacauu

SEQ ID NO: 2341745 - RNA, 19 nt, Artificial Sequence
  Description of Artificial Sequence: Synthetic oligonucleotide
uucucugagauccuuggua

SEQ ID NO: 2341746 - RNA, 19 nt, Artificial Sequence
  Description of Artificial Sequence: Synthetic oligonucleotide
gaucacagcauucugcaaa

SEQ ID NO: 2341747 - RNA, 19 nt, Artificial Sequence
  Description of Artificial Sequence: Synthetic oligonucleotide
cugaggaaaggaaaagcug

SEQ ID NO: 2341748 - RNA, 19 nt, Artificial Sequence
  Description of Artificial Sequence: Synthetic oligonucleotide
agcacucaaaccucaagcu

SEQ ID NO: 2341749 - RNA, 19 nt, Artificial Sequence
  Description of Artificial Sequence: Synthetic oligonucleotide
uaaaaggcuccgaaguuau

SEQ ID NO: 2341750 - RNA, 19 nt, Artificial Sequence
  Description of Artificial Sequence: Synthetic oligonucleotide
ucaguggaacagcagacaa

SEQ ID NO: 2341751 - RNA, 19 nt, Artificial Sequence
  Description of Artificial Sequence: Synthetic oligonucleotide
ucugaaugaucacagcauu

SEQ ID NO: 2341752 - RNA, 19 nt, Artificial Sequence
  Description of Artificial Sequence: Synthetic oligonucleotide
uucuugaguggccuuugag

SEQ ID NO: 2341753 - RNA, 19 nt, Artificial Sequence
  Description of Artificial Sequence: Synthetic oligonucleotide
cagcacucaaaccucaagc

SEQ ID NO: 2341754 - RNA, 19 nt, Artificial Sequence
  Description of Artificial Sequence: Synthetic oligonucleotide
guugccagggcaaacgggg

SEQ ID NO: 2341755 - RNA, 19 nt, Artificial Sequence
  Description of Artificial Sequence: Synthetic oligonucleotide
uuguagacauacauacuuc

SEQ ID NO: 2341756 - RNA, 19 nt, Artificial Sequence
  Description of Artificial Sequence: Synthetic oligonucleotide
uuccccauuggccaaccag

SEQ ID NO: 2341757 - RNA, 19 nt, Artificial Sequence
  Description of Artificial Sequence: Synthetic oligonucleotide
auuaaugauacagcuauuu

SEQ ID NO: 2341758 - RNA, 19 nt, Artificial Sequence
  Description of Artificial Sequence: Synthetic oligonucleotide
cuuuugguguagcacuucc

SEQ ID NO: 2341759 - RNA, 19 nt, Artificial Sequence
  Description of Artificial Sequence: Synthetic oligonucleotide
uguugccagggcaaacggg

SEQ ID NO: 2341760 - RNA, 19 nt, Artificial Sequence
  Description of Artificial Sequence: Synthetic oligonucleotide
augugagugucucauccag

SEQ ID NO: 2341761 - RNA, 19 nt, Artificial Sequence
  Description of Artificial Sequence: Synthetic oligonucleotide
auacauuauucucuaacuu

SEQ ID NO: 2341762 - RNA, 19 nt, Artificial Sequence
  Description of Artificial Sequence: Synthetic oligonucleotide
gaguuuucuaaaaggcucc

SEQ ID NO: 2341763 - RNA, 19 nt, Artificial Sequence
  Description of Artificial Sequence: Synthetic oligonucleotide
accucaagcucaaucaaac

SEQ ID NO: 2341764 - RNA, 19 nt, Artificial Sequence
  Description of Artificial Sequence: Synthetic oligonucleotide
uuuccacaauuuuauauuu

SEQ ID NO: 2341765 - RNA, 19 nt, Artificial Sequence
  Description of Artificial Sequence: Synthetic oligonucleotide
uugguguagcacuuccuag

SEQ ID NO: 2341766 - RNA, 19 nt, Artificial Sequence
  Description of Artificial Sequence: Synthetic oligonucleotide
acauuauucucuaacuugu

SEQ ID NO: 2341767 - RNA, 19 nt, Artificial Sequence
  Description of Artificial Sequence: Synthetic oligonucleotide
cagcauucugcaaaucugc

SEQ ID NO: 2341768 - RNA, 19 nt, Artificial Sequence
  Description of Artificial Sequence: Synthetic oligonucleotide
uauauugguuaacuauaau

SEQ ID NO: 2341769 - RNA, 19 nt, Artificial Sequence
  Description of Artificial Sequence: Synthetic oligonucleotide
aaggcuccgaaguuaucug

SEQ ID NO: 2341770 - RNA, 19 nt, Artificial Sequence
  Description of Artificial Sequence: Synthetic oligonucleotide
gaaauguacauuaacuggu

SEQ ID NO: 2341771 - RNA, 19 nt, Artificial Sequence
  Description of Artificial Sequence: Synthetic oligonucleotide
uucagaaacugcugacuug

SEQ ID NO: 2341772 - RNA, 19 nt, Artificial Sequence
  Description of Artificial Sequence: Synthetic oligonucleotide
uggaguucagaaacugcug

SEQ ID NO: 2341773 - RNA, 19 nt, Artificial Sequence
  Description of Artificial Sequence: Synthetic oligonucleotide
uacuuuaguaacacauuua

SEQ ID NO: 2341774 - RNA, 19 nt, Artificial Sequence
  Description of Artificial Sequence: Synthetic oligonucleotide
aaacuguuagaguuuucua

SEQ ID NO: 2341775 - RNA, 19 nt, Artificial Sequence
  Description of Artificial Sequence: Synthetic oligonucleotide
uuaaaucuuuuggacaguc

SEQ ID NO: 2341776 - RNA, 19 nt, Artificial Sequence
  Description of Artificial Sequence: Synthetic oligonucleotide
auacucuuugcuuuagaaa

SEQ ID NO: 2341777 - RNA, 19 nt, Artificial Sequence
  Description of Artificial Sequence: Synthetic oligonucleotide
caucauugacugugaaucc

SEQ ID NO: 2341778 - RNA, 19 nt, Artificial Sequence
  Description of Artificial Sequence: Synthetic oligonucleotide
ugugacccuguccugagaa

SEQ ID NO: 2341779 - RNA, 19 nt, Artificial Sequence
  Description of Artificial Sequence: Synthetic oligonucleotide
auuauuuaagccccucaua

SEQ ID NO: 2341780 - RNA, 19 nt, Artificial Sequence
  Description of Artificial Sequence: Synthetic oligonucleotide
uuuccagcuauacauuauu

SEQ ID NO: 2341781 - RNA, 19 nt, Artificial Sequence
  Description of Artificial Sequence: Synthetic oligonucleotide
ugcaccaucagaguaacuu

SEQ ID NO: 2341782 - RNA, 19 nt, Artificial Sequence
  Description of Artificial Sequence: Synthetic oligonucleotide
uauucucuaacuugugauu

SEQ ID NO: 2341783 - RNA, 19 nt, Artificial Sequence
  Description of Artificial Sequence: Synthetic oligonucleotide
ucaaucaaacugucuucug

SEQ ID NO: 2341784 - RNA, 19 nt, Artificial Sequence
  Description of Artificial Sequence: Synthetic oligonucleotide
auugcaucuuucuacuuua

SEQ ID NO: 2341785 - RNA, 19 nt, Artificial Sequence
  Description of Artificial Sequence: Synthetic oligonucleotide
cacucaaaccucaagcuca

SEQ ID NO: 2341786 - RNA, 19 nt, Artificial Sequence
  Description of Artificial Sequence: Synthetic oligonucleotide
ugguguagcacuuccuagu

SEQ ID NO: 2341787 - RNA, 19 nt, Artificial Sequence
  Description of Artificial Sequence: Synthetic oligonucleotide
gaaaugacuuuugguguag

SEQ ID NO: 2341788 - RNA, 19 nt, Artificial Sequence
  Description of Artificial Sequence: Synthetic oligonucleotide
uugauggaguucagaaacu

SEQ ID NO: 2341789 - RNA, 19 nt, Artificial Sequence
  Description of Artificial Sequence: Synthetic oligonucleotide
gauggaguucagaaacugc

SEQ ID NO: 2341790 - RNA, 19 nt, Artificial Sequence
  Description of Artificial Sequence: Synthetic oligonucleotide
aaucugcuucuuccaaugu

SEQ ID NO: 2341791 - RNA, 19 nt, Artificial Sequence
  Description of Artificial Sequence: Synthetic oligonucleotide
aucaaacugucuucugucu

SEQ ID NO: 2341792 - RNA, 19 nt, Artificial Sequence
  Description of Artificial Sequence: Synthetic oligonucleotide
ugugauuauuuaagccccu

SEQ ID NO: 2341793 - RNA, 19 nt, Artificial Sequence
  Description of Artificial Sequence: Synthetic oligonucleotide
uuuugguguagcacuuccu

SEQ ID NO: 2341794 - RNA, 19 nt, Artificial Sequence
  Description of Artificial Sequence: Synthetic oligonucleotide
agucucugaaugaucacag

SEQ ID NO: 2341795 - RNA, 19 nt, Artificial Sequence
  Description of Artificial Sequence: Synthetic oligonucleotide
agaaaugacuuuuggugua

SEQ ID NO: 2341796 - RNA, 19 nt, Artificial Sequence
  Description of Artificial Sequence: Synthetic oligonucleotide
aguuuucuaaaaggcuccg

SEQ ID NO: 2341797 - RNA, 19 nt, Artificial Sequence
  Description of Artificial Sequence: Synthetic oligonucleotide
uuccagcuauacauuauuc

SEQ ID NO: 2341798 - RNA, 19 nt, Artificial Sequence
  Description of Artificial Sequence: Synthetic oligonucleotide
auacaggcuuuguagacau

SEQ ID NO: 2341799 - RNA, 19 nt, Artificial Sequence
  Description of Artificial Sequence: Synthetic oligonucleotide
uucaauacucuuugcuuua

SEQ ID NO: 2341800 - RNA, 19 nt, Artificial Sequence
  Description of Artificial Sequence: Synthetic oligonucleotide
auugacugugaauccauuu

SEQ ID NO: 2341801 - RNA, 19 nt, Artificial Sequence
  Description of Artificial Sequence: Synthetic oligonucleotide
ugugagugucucauccaga

SEQ ID NO: 2341802 - RNA, 19 nt, Artificial Sequence
  Description of Artificial Sequence: Synthetic oligonucleotide
guaguucugaagguaauuc

SEQ ID NO: 2341803 - RNA, 19 nt, Artificial Sequence
  Description of Artificial Sequence: Synthetic oligonucleotide
aguaacuucuaaagucauc

SEQ ID NO: 2341804 - RNA, 19 nt, Artificial Sequence
  Description of Artificial Sequence: Synthetic oligonucleotide
cauuauucucuaacuugug

SEQ ID NO: 2341805 - RNA, 19 nt, Artificial Sequence
  Description of Artificial Sequence: Synthetic oligonucleotide
cugaaugaucacagcauuc

SEQ ID NO: 2341806 - RNA, 19 nt, Artificial Sequence
  Description of Artificial Sequence: Synthetic oligonucleotide
aagauuaaugauacagcua

SEQ ID NO: 2341807 - RNA, 19 nt, Artificial Sequence
  Description of Artificial Sequence: Synthetic oligonucleotide
aggcuccgaaguuaucugg

SEQ ID NO: 2341808 - RNA, 19 nt, Artificial Sequence
  Description of Artificial Sequence: Synthetic oligonucleotide
uuggacaguccuuucccca

SEQ ID NO: 2341809 - RNA, 19 nt, Artificial Sequence
  Description of Artificial Sequence: Synthetic oligonucleotide
uguccacuuccaaccauca

SEQ ID NO: 2341810 - RNA, 19 nt, Artificial Sequence
  Description of Artificial Sequence: Synthetic oligonucleotide
gucugaggaaaggaaaagc

SEQ ID NO: 2341811 - RNA, 19 nt, Artificial Sequence
  Description of Artificial Sequence: Synthetic oligonucleotide
aauucccuguaguucugaa

SEQ ID NO: 2341812 - RNA, 19 nt, Artificial Sequence
  Description of Artificial Sequence: Synthetic oligonucleotide
cauaaggaauuaagcagca

SEQ ID NO: 2341813 - RNA, 19 nt, Artificial Sequence
  Description of Artificial Sequence: Synthetic oligonucleotide
auauauugguuaacuauaa

SEQ ID NO: 2341814 - RNA, 19 nt, Artificial Sequence
  Description of Artificial Sequence: Synthetic oligonucleotide
aaauguacauuaacugguu

SEQ ID NO: 2341815 - RNA, 19 nt, Artificial Sequence
  Description of Artificial Sequence: Synthetic oligonucleotide
uuggccaaccagaucugga

SEQ ID NO: 2341816 - RNA, 19 nt, Artificial Sequence
  Description of Artificial Sequence: Synthetic oligonucleotide
cuagucugugacccugucc

SEQ ID NO: 2341817 - RNA, 19 nt, Artificial Sequence
  Description of Artificial Sequence: Synthetic oligonucleotide
cucauccagaagucugagg

SEQ ID NO: 2341818 - RNA, 19 nt, Artificial Sequence
  Description of Artificial Sequence: Synthetic oligonucleotide
uuuaaaucuuuuggacagu

SEQ ID NO: 2341819 - RNA, 19 nt, Artificial Sequence
  Description of Artificial Sequence: Synthetic oligonucleotide
uccaaguuguucaguggaa

SEQ ID NO: 2341820 - RNA, 19 nt, Artificial Sequence
  Description of Artificial Sequence: Synthetic oligonucleotide
ccucauaaggaauuaagca

SEQ ID NO: 2341821 - RNA, 19 nt, Artificial Sequence
  Description of Artificial Sequence: Synthetic oligonucleotide
ccagcuauacauuauucuc

SEQ ID NO: 2341822 - RNA, 19 nt, Artificial Sequence
  Description of Artificial Sequence: Synthetic oligonucleotide
auucucuaacuugugauua

SEQ ID NO: 2341823 - RNA, 19 nt, Artificial Sequence
  Description of Artificial Sequence: Synthetic oligonucleotide
cugguuuccagcuauacau

SEQ ID NO: 2341824 - RNA, 19 nt, Artificial Sequence
  Description of Artificial Sequence: Synthetic oligonucleotide
cccucauaaggaauuaagc

SEQ ID NO: 2341825 - RNA, 19 nt, Artificial Sequence
  Description of Artificial Sequence: Synthetic oligonucleotide
caagcucaaucaaacuguc

SEQ ID NO: 2341826 - RNA, 19 nt, Artificial Sequence
  Description of Artificial Sequence: Synthetic oligonucleotide
aucauugacugugaaucca

SEQ ID NO: 2341827 - RNA, 19 nt, Artificial Sequence
  Description of Artificial Sequence: Synthetic oligonucleotide
uuuucuugaguggccuuug

SEQ ID NO: 2341828 - RNA, 19 nt, Artificial Sequence
  Description of Artificial Sequence: Synthetic oligonucleotide
ucugagauccuugguauuu

SEQ ID NO: 2341829 - RNA, 19 nt, Artificial Sequence
  Description of Artificial Sequence: Synthetic oligonucleotide
caaguuguucaguggaaca

SEQ ID NO: 2341830 - RNA, 19 nt, Artificial Sequence
  Description of Artificial Sequence: Synthetic oligonucleotide
caguccuuuccccauuggc

SEQ ID NO: 2341831 - RNA, 19 nt, Artificial Sequence
  Description of Artificial Sequence: Synthetic oligonucleotide
gagucucugaaugaucaca

SEQ ID NO: 2341832 - RNA, 19 nt, Artificial Sequence
  Description of Artificial Sequence: Synthetic oligonucleotide
ggaauacaggcuuuguaga

SEQ ID NO: 2341833 - RNA, 19 nt, Artificial Sequence
  Description of Artificial Sequence: Synthetic oligonucleotide
aaaauucccuguaguucug

SEQ ID NO: 2341834 - RNA, 19 nt, Artificial Sequence
  Description of Artificial Sequence: Synthetic oligonucleotide
agaagggcuggaauacagg

SEQ ID NO: 2341835 - RNA, 19 nt, Artificial Sequence
  Description of Artificial Sequence: Synthetic oligonucleotide
auacagcuauuuaauauau

SEQ ID NO: 2341836 - RNA, 19 nt, Artificial Sequence
  Description of Artificial Sequence: Synthetic oligonucleotide
uucucuaacuugugauuau

SEQ ID NO: 2341837 - RNA, 19 nt, Artificial Sequence
  Description of Artificial Sequence: Synthetic oligonucleotide
cuguugccagggcaaacgg

SEQ ID NO: 2341838 - RNA, 19 nt, Artificial Sequence
  Description of Artificial Sequence: Synthetic oligonucleotide
ucauuucccugucucucaa

SEQ ID NO: 2341839 - RNA, 19 nt, Artificial Sequence
  Description of Artificial Sequence: Synthetic oligonucleotide
ugacuugcaccaucagagu

SEQ ID NO: 2341840 - RNA, 19 nt, Artificial Sequence
  Description of Artificial Sequence: Synthetic oligonucleotide
cuccaaguuguucagugga

SEQ ID NO: 2341841 - RNA, 19 nt, Artificial Sequence
  Description of Artificial Sequence: Synthetic oligonucleotide
ugaagucuuugauguggcu

SEQ ID NO: 2341842 - RNA, 19 nt, Artificial Sequence
  Description of Artificial Sequence: Synthetic oligonucleotide
uaacuucuaaagucaucau

SEQ ID NO: 2341843 - RNA, 19 nt, Artificial Sequence
  Description of Artificial Sequence: Synthetic oligonucleotide
uggauccuggugauggcuc

SEQ ID NO: 2341844 - RNA, 19 nt, Artificial Sequence
  Description of Artificial Sequence: Synthetic oligonucleotide
aggaauuaagcagcacuca

SEQ ID NO: 2341845 - RNA, 19 nt, Artificial Sequence
  Description of Artificial Sequence: Synthetic oligonucleotide
gugagugucucauccagaa

SEQ ID NO: 2341846 - RNA, 19 nt, Artificial Sequence
  Description of Artificial Sequence: Synthetic oligonucleotide
uguaguucugaagguaauu

SEQ ID NO: 2341847 - RNA, 19 nt, Artificial Sequence
  Description of Artificial Sequence: Synthetic oligonucleotide
auuggccaaccagaucugg

SEQ ID NO: 2341848 - RNA, 19 nt, Artificial Sequence
  Description of Artificial Sequence: Synthetic oligonucleotide
cugcuucuuccaaugugag

SEQ ID NO: 2341849 - RNA, 19 nt, Artificial Sequence
  Description of Artificial Sequence: Synthetic oligonucleotide
uggccaaccagaucuggau

SEQ ID NO: 2341850 - RNA, 19 nt, Artificial Sequence
  Description of Artificial Sequence: Synthetic oligonucleotide
ugcuucuuccaaugugagu

SEQ ID NO: 2341851 - RNA, 19 nt, Artificial Sequence
  Description of Artificial Sequence: Synthetic oligonucleotide
uguggcucacccugugaga

SEQ ID NO: 2341852 - RNA, 19 nt, Artificial Sequence
  Description of Artificial Sequence: Synthetic oligonucleotide
uuccuagucugugacccug

SEQ ID NO: 2341853 - RNA, 19 nt, Artificial Sequence
  Description of Artificial Sequence: Synthetic oligonucleotide
aaaaggcuccgaaguuauc

SEQ ID NO: 2341854 - RNA, 19 nt, Artificial Sequence
  Description of Artificial Sequence: Synthetic oligonucleotide
gacuugcaccaucagagua

SEQ ID NO: 2341855 - RNA, 19 nt, Artificial Sequence
  Description of Artificial Sequence: Synthetic oligonucleotide
ggcuccaaguuguucagug

SEQ ID NO: 2341856 - RNA, 19 nt, Artificial Sequence
  Description of Artificial Sequence: Synthetic oligonucleotide
agaucuggauccuggugau

SEQ ID NO: 2341857 - RNA, 19 nt, Artificial Sequence
  Description of Artificial Sequence: Synthetic oligonucleotide
cuugcaccaucagaguaac

SEQ ID NO: 2341858 - RNA, 19 nt, Artificial Sequence
  Description of Artificial Sequence: Synthetic oligonucleotide
gucucugaaugaucacagc

SEQ ID NO: 2341859 - RNA, 19 nt, Artificial Sequence
  Description of Artificial Sequence: Synthetic oligonucleotide
cauuaacugguuuccagcu

SEQ ID NO: 2341860 - RNA, 19 nt, Artificial Sequence
  Description of Artificial Sequence: Synthetic oligonucleotide
acccuguccugagaagggc

SEQ ID NO: 2341861 - RNA, 19 nt, Artificial Sequence
  Description of Artificial Sequence: Synthetic oligonucleotide
ugguuuccagcuauacauu

SEQ ID NO: 2341862 - RNA, 19 nt, Artificial Sequence
  Description of Artificial Sequence: Synthetic oligonucleotide
ggaauuaagcagcacucaa

SEQ ID NO: 2341863 - RNA, 19 nt, Artificial Sequence
  Description of Artificial Sequence: Synthetic oligonucleotide
ucccuguaguucugaaggu

SEQ ID NO: 2341864 - RNA, 19 nt, Artificial Sequence
  Description of Artificial Sequence: Synthetic oligonucleotide
uggacaguccuuuccccau

SEQ ID NO: 2341865 - RNA, 19 nt, Artificial Sequence
  Description of Artificial Sequence: Synthetic oligonucleotide
cagcuauacauuauucucu

SEQ ID NO: 2341866 - RNA, 19 nt, Artificial Sequence
  Description of Artificial Sequence: Synthetic oligonucleotide
acuugcaccaucagaguaa

SEQ ID NO: 2341867 - RNA, 19 nt, Artificial Sequence
  Description of Artificial Sequence: Synthetic oligonucleotide
caaucaaacugucuucugu

SEQ ID NO: 2341868 - RNA, 19 nt, Artificial Sequence
  Description of Artificial Sequence: Synthetic oligonucleotide
cuguuagaguuuucuaaaa

SEQ ID NO: 2341869 - RNA, 19 nt, Artificial Sequence
  Description of Artificial Sequence: Synthetic oligonucleotide
cuucaauacucuuugcuuu

SEQ ID NO: 2341870 - RNA, 19 nt, Artificial Sequence
  Description of Artificial Sequence: Synthetic oligonucleotide
ucucuaacuugugauuauu

SEQ ID NO: 2341871 - RNA, 19 nt, Artificial Sequence
  Description of Artificial Sequence: Synthetic oligonucleotide
ccccucauaaggaauuaag

SEQ ID NO: 2341872 - RNA, 19 nt, Artificial Sequence
  Description of Artificial Sequence: Synthetic oligonucleotide
caacuuuaacauccaccuc

SEQ ID NO: 2341873 - RNA, 19 nt, Artificial Sequence
  Description of Artificial Sequence: Synthetic oligonucleotide
aagcucaaucaaacugucu

SEQ ID NO: 2341874 - RNA, 19 nt, Artificial Sequence
  Description of Artificial Sequence: Synthetic oligonucleotide
uccuggugauggcuccaag

SEQ ID NO: 2341875 - RNA, 19 nt, Artificial Sequence
  Description of Artificial Sequence: Synthetic oligonucleotide
cuaaaaggcuccgaaguua

SEQ ID NO: 2341876 - RNA, 19 nt, Artificial Sequence
  Description of Artificial Sequence: Synthetic oligonucleotide
agucuuugauguggcucac

SEQ ID NO: 2341877 - RNA, 19 nt, Artificial Sequence
  Description of Artificial Sequence: Synthetic oligonucleotide
uccuagucugugacccugu

SEQ ID NO: 2341878 - RNA, 19 nt, Artificial Sequence
  Description of Artificial Sequence: Synthetic oligonucleotide
gcucaaucaaacugucuuc

SEQ ID NO: 2341879 - RNA, 19 nt, Artificial Sequence
  Description of Artificial Sequence: Synthetic oligonucleotide
cuucugucucccacuucug

SEQ ID NO: 2341880 - RNA, 19 nt, Artificial Sequence
  Description of Artificial Sequence: Synthetic oligonucleotide
gcugacuugcaccaucaga

SEQ ID NO: 2341881 - RNA, 19 nt, Artificial Sequence
  Description of Artificial Sequence: Synthetic oligonucleotide
ucacccugugagaaacauu

SEQ ID NO: 2341882 - RNA, 19 nt, Artificial Sequence
  Description of Artificial Sequence: Synthetic oligonucleotide
aagccccucauaaggaauu

SEQ ID NO: 2341883 - RNA, 19 nt, Artificial Sequence
  Description of Artificial Sequence: Synthetic oligonucleotide
cuguccugagaagggcugg

SEQ ID NO: 2341884 - RNA, 19 nt, Artificial Sequence
  Description of Artificial Sequence: Synthetic oligonucleotide
gugauuauuuaagccccuc

SEQ ID NO: 2341885 - RNA, 19 nt, Artificial Sequence
  Description of Artificial Sequence: Synthetic oligonucleotide
guuuucuaaaaggcuccga

SEQ ID NO: 2341886 - RNA, 19 nt, Artificial Sequence
  Description of Artificial Sequence: Synthetic oligonucleotide
gcacucaaaccucaagcuc

SEQ ID NO: 2341887 - RNA, 19 nt, Artificial Sequence
  Description of Artificial Sequence: Synthetic oligonucleotide
cucaaucaaacugucuucu

SEQ ID NO: 2341888 - RNA, 19 nt, Artificial Sequence
  Description of Artificial Sequence: Synthetic oligonucleotide
gcuccgaaguuaucuggag

SEQ ID NO: 2341889 - RNA, 19 nt, Artificial Sequence
  Description of Artificial Sequence: Synthetic oligonucleotide
guacauuaacugguuucca

SEQ ID NO: 2341890 - RNA, 19 nt, Artificial Sequence
  Description of Artificial Sequence: Synthetic oligonucleotide
gguuuccagcuauacauua

SEQ ID NO: 2341891 - RNA, 19 nt, Artificial Sequence
  Description of Artificial Sequence: Synthetic oligonucleotide
cugcugacuugcaccauca

SEQ ID NO: 2341892 - RNA, 19 nt, Artificial Sequence
  Description of Artificial Sequence: Synthetic oligonucleotide
acauugcaucuuucuacuu

SEQ ID NO: 2341893 - RNA, 19 nt, Artificial Sequence
  Description of Artificial Sequence: Synthetic oligonucleotide
cauugcaucuuucuacuuu

SEQ ID NO: 2341894 - RNA, 19 nt, Artificial Sequence
  Description of Artificial Sequence: Synthetic oligonucleotide
ggugauggcuccaaguugu

SEQ ID NO: 2341895 - RNA, 19 nt, Artificial Sequence
  Description of Artificial Sequence: Synthetic oligonucleotide
caaaucugcuucuuccaau

SEQ ID NO: 2341896 - RNA, 19 nt, Artificial Sequence
  Description of Artificial Sequence: Synthetic oligonucleotide
guggcucacccugugagaa

SEQ ID NO: 2341897 - RNA, 19 nt, Artificial Sequence
  Description of Artificial Sequence: Synthetic oligonucleotide
uugcaccaucagaguaacu

SEQ ID NO: 2341898 - RNA, 19 nt, Artificial Sequence
  Description of Artificial Sequence: Synthetic oligonucleotide
ggccuuugagaaauguaca

SEQ ID NO: 2341899 - RNA, 19 nt, Artificial Sequence
  Description of Artificial Sequence: Synthetic oligonucleotide
cucuaacuugugauuauuu

SEQ ID NO: 2341900 - RNA, 19 nt, Artificial Sequence
  Description of Artificial Sequence: Synthetic oligonucleotide
acucaaaccucaagcucaa

SEQ ID NO: 2341901 - RNA, 19 nt, Artificial Sequence
  Description of Artificial Sequence: Synthetic oligonucleotide
ggcucacccugugagaaac

SEQ ID NO: 2341902 - RNA, 19 nt, Artificial Sequence
  Description of Artificial Sequence: Synthetic oligonucleotide
gcagacaaaguacuuuuau

SEQ ID NO: 2341903 - RNA, 19 nt, Artificial Sequence
  Description of Artificial Sequence: Synthetic oligonucleotide
cacuuccaaccaucauuuc

SEQ ID NO: 2341904 - RNA, 19 nt, Artificial Sequence
  Description of Artificial Sequence: Synthetic oligonucleotide
cagcagacaaaguacuuuu

SEQ ID NO: 2341905 - RNA, 19 nt, Artificial Sequence
  Description of Artificial Sequence: Synthetic oligonucleotide
guagacauacauacuucau

SEQ ID NO: 2341906 - RNA, 19 nt, Artificial Sequence
  Description of Artificial Sequence: Synthetic oligonucleotide
gaguaacuucuaaagucau

SEQ ID NO: 2341907 - RNA, 19 nt, Artificial Sequence
  Description of Artificial Sequence: Synthetic oligonucleotide
ggccaaccagaucuggauc

SEQ ID NO: 2341908 - RNA, 19 nt, Artificial Sequence
  Description of Artificial Sequence: Synthetic oligonucleotide
agcagacaaaguacuuuua

SEQ ID NO: 2341909 - RNA, 19 nt, Artificial Sequence
  Description of Artificial Sequence: Synthetic oligonucleotide
uggcucacccugugagaaa

SEQ ID NO: 2341910 - RNA, 19 nt, Artificial Sequence
  Description of Artificial Sequence: Synthetic oligonucleotide
cuuugauguggcucacccu

SEQ ID NO: 2341911 - RNA, 19 nt, Artificial Sequence
  Description of Artificial Sequence: Synthetic oligonucleotide
gauccuggugauggcucca

SEQ ID NO: 2341912 - RNA, 19 nt, Artificial Sequence
  Description of Artificial Sequence: Synthetic oligonucleotide
gugagacauugcaucuuuc

SEQ ID NO: 2341913 - RNA, 19 nt, Artificial Sequence
  Description of Artificial Sequence: Synthetic oligonucleotide
cuccgaaguuaucuggagu

SEQ ID NO: 2341914 - RNA, 19 nt, Artificial Sequence
  Description of Artificial Sequence: Synthetic oligonucleotide
accaucagaguaacuucua

SEQ ID NO: 2341915 - RNA, 19 nt, Artificial Sequence
  Description of Artificial Sequence: Synthetic oligonucleotide
guguagcacuuccuagucu

SEQ ID NO: 2341916 - RNA, 19 nt, Artificial Sequence
  Description of Artificial Sequence: Synthetic oligonucleotide
gccuuugagaaauguacau

SEQ ID NO: 2341917 - RNA, 19 nt, Artificial Sequence
  Description of Artificial Sequence: Synthetic oligonucleotide
gcuauacauuauucucuaa

SEQ ID NO: 2341918 - RNA, 19 nt, Artificial Sequence
  Description of Artificial Sequence: Synthetic oligonucleotide
gcauguccacuuccaacca

SEQ ID NO: 2341919 - RNA, 19 nt, Artificial Sequence
  Description of Artificial Sequence: Synthetic oligonucleotide
guuuccagcuauacauuau

SEQ ID NO: 2341920 - RNA, 19 nt, Artificial Sequence
  Description of Artificial Sequence: Synthetic oligonucleotide
cauuucccugucucucaaa

SEQ ID NO: 2341921 - RNA, 19 nt, Artificial Sequence
  Description of Artificial Sequence: Synthetic oligonucleotide
ggcuccgaaguuaucugga

SEQ ID NO: 2341922 - RNA, 19 nt, Artificial Sequence
  Description of Artificial Sequence: Synthetic oligonucleotide
agcagcacucaaaccucaa

SEQ ID NO: 2341923 - RNA, 19 nt, Artificial Sequence
  Description of Artificial Sequence: Synthetic oligonucleotide
ccaucagaguaacuucuaa

SEQ ID NO: 2341924 - RNA, 19 nt, Artificial Sequence
  Description of Artificial Sequence: Synthetic oligonucleotide
gugucucauccagaagucu

SEQ ID NO: 2341925 - RNA, 19 nt, Artificial Sequence
  Description of Artificial Sequence: Synthetic oligonucleotide
cauugacugugaauccauu

SEQ ID NO: 2341926 - RNA, 19 nt, Artificial Sequence
  Description of Artificial Sequence: Synthetic oligonucleotide
agccccucauaaggaauua

SEQ ID NO: 2341927 - RNA, 19 nt, Artificial Sequence
  Description of Artificial Sequence: Synthetic oligonucleotide
cuuccuagucugugacccu

SEQ ID NO: 2341928 - RNA, 19 nt, Artificial Sequence
  Description of Artificial Sequence: Synthetic oligonucleotide
ccuagucugugacccuguc

SEQ ID NO: 2341929 - RNA, 19 nt, Artificial Sequence
  Description of Artificial Sequence: Synthetic oligonucleotide
cuggauccuggugauggcu

SEQ ID NO: 2341930 - RNA, 19 nt, Artificial Sequence
  Description of Artificial Sequence: Synthetic oligonucleotide
cugugacccuguccugaga

SEQ ID NO: 2341931 - RNA, 19 nt, Artificial Sequence
  Description of Artificial Sequence: Synthetic oligonucleotide
cucacccugugagaaacau

SEQ ID NO: 2341932 - RNA, 19 nt, Artificial Sequence
  Description of Artificial Sequence: Synthetic oligonucleotide
cccauuggccaaccagauc

SEQ ID NO: 2341933 - RNA, 19 nt, Artificial Sequence
  Description of Artificial Sequence: Synthetic oligonucleotide
ccuggugauggcuccaagu

SEQ ID NO: 2341934 - RNA, 19 nt, Artificial Sequence
  Description of Artificial Sequence: Synthetic oligonucleotide
ccucaagcucaaucaaacu

SEQ ID NO: 2341935 - RNA, 19 nt, Artificial Sequence
  Description of Artificial Sequence: Synthetic oligonucleotide
cccuguaguucugaaggua

SEQ ID NO: 2341936 - RNA, 19 nt, Artificial Sequence
  Description of Artificial Sequence: Synthetic oligonucleotide
gccccucauaaggaauuaa

SEQ ID NO: 2341937 - RNA, 19 nt, Artificial Sequence
  Description of Artificial Sequence: Synthetic oligonucleotide
gcucacccugugagaaaca

SEQ ID NO: 2341938 - RNA, 19 nt, Artificial Sequence
  Description of Artificial Sequence: Synthetic oligonucleotide
ccccauuggccaaccagau

SEQ ID NO: 2341939 - RNA, 19 nt, Artificial Sequence
  Description of Artificial Sequence: Synthetic oligonucleotide
cucaaaccucaagcucaau

SEQ ID NO: 2341940 - RNA, 19 nt, Artificial Sequence
  Description of Artificial Sequence: Synthetic oligonucleotide
gggcuucucugagauccuu

SEQ ID NO: 2341941 - RNA, 19 nt, Artificial Sequence
  Description of Artificial Sequence: Synthetic oligonucleotide
gggcuggaauacaggcuuu

SEQ ID NO: 2341942 - RNA, 19 nt, Artificial Sequence
  Description of Artificial Sequence: Synthetic oligonucleotide
uuuuauuuuauuuacgggg

SEQ ID NO: 2341943 - RNA, 19 nt, Artificial Sequence
  Description of Artificial Sequence: Synthetic oligonucleotide
uuauuuacgggguaagagg

SEQ ID NO: 2341944 - RNA, 19 nt, Artificial Sequence
  Description of Artificial Sequence: Synthetic oligonucleotide
auuuuauuuuauuuacggg

SEQ ID NO: 2341945 - RNA, 19 nt, Artificial Sequence
  Description of Artificial Sequence: Synthetic oligonucleotide
uuuauuuuauuuacggggu

SEQ ID NO: 2341946 - RNA, 19 nt, Artificial Sequence
  Description of Artificial Sequence: Synthetic oligonucleotide
uucaguuccagcagcagcg

SEQ ID NO: 2341947 - RNA, 19 nt, Artificial Sequence
  Description of Artificial Sequence: Synthetic oligonucleotide
aaguuuauuucagggacgc

SEQ ID NO: 2341948 - RNA, 19 nt, Artificial Sequence
  Description of Artificial Sequence: Synthetic oligonucleotide
uuuauuucagggacgcggg

SEQ ID NO: 2341949 - RNA, 19 nt, Artificial Sequence
  Description of Artificial Sequence: Synthetic oligonucleotide
uuuauuuacgggguaagag

SEQ ID NO: 2341950 - RNA, 19 nt, Artificial Sequence
  Description of Artificial Sequence: Synthetic oligonucleotide
gaauauggguagucgaugg

SEQ ID NO: 2341951 - RNA, 19 nt, Artificial Sequence
  Description of Artificial Sequence: Synthetic oligonucleotide
guaaguuuauuucagggac

SEQ ID NO: 2341952 - RNA, 19 nt, Artificial Sequence
  Description of Artificial Sequence: Synthetic oligonucleotide
uaaguuuauuucagggacg

SEQ ID NO: 2341953 - RNA, 19 nt, Artificial Sequence
  Description of Artificial Sequence: Synthetic oligonucleotide
uauuuacgggguaagagga

SEQ ID NO: 2341954 - RNA, 19 nt, Artificial Sequence
  Description of Artificial Sequence: Synthetic oligonucleotide
guuuauuucagggacgcgg

SEQ ID NO: 2341955 - RNA, 19 nt, Artificial Sequence
  Description of Artificial Sequence: Synthetic oligonucleotide
accagcgucacccggaagc

SEQ ID NO: 2341956 - RNA, 19 nt, Artificial Sequence
  Description of Artificial Sequence: Synthetic oligonucleotide
aauauggguagucgauggg

SEQ ID NO: 2341957 - RNA, 19 nt, Artificial Sequence
  Description of Artificial Sequence: Synthetic oligonucleotide
agggagaucacacucagga

SEQ ID NO: 2341958 - RNA, 19 nt, Artificial Sequence
  Description of Artificial Sequence: Synthetic oligonucleotide
gauggagaugcacacgucc

SEQ ID NO: 2341959 - RNA, 19 nt, Artificial Sequence
  Description of Artificial Sequence: Synthetic oligonucleotide
ugaggaaccggaaggcugg

SEQ ID NO: 2341960 - RNA, 19 nt, Artificial Sequence
  Description of Artificial Sequence: Synthetic oligonucleotide
ggagaucacacucaggagg

SEQ ID NO: 2341961 - RNA, 19 nt, Artificial Sequence
  Description of Artificial Sequence: Synthetic oligonucleotide
uagucaucguagaagaggu

SEQ ID NO: 2341962 - RNA, 19 nt, Artificial Sequence
  Description of Artificial Sequence: Synthetic oligonucleotide
uuugggugccacaucuugg

SEQ ID NO: 2341963 - RNA, 19 nt, Artificial Sequence
  Description of Artificial Sequence: Synthetic oligonucleotide
ucuucguccccaaagcagc

SEQ ID NO: 2341964 - RNA, 19 nt, Artificial Sequence
  Description of Artificial Sequence: Synthetic oligonucleotide
ugaggcguccacauuggcg

SEQ ID NO: 2341965 - RNA, 19 nt, Artificial Sequence
  Description of Artificial Sequence: Synthetic oligonucleotide
ucgccugaggcccacacgg

SEQ ID NO: 2341966 - RNA, 19 nt, Artificial Sequence
  Description of Artificial Sequence: Synthetic oligonucleotide
uagucuaucgccugaggcc

SEQ ID NO: 2341967 - RNA, 19 nt, Artificial Sequence
  Description of Artificial Sequence: Synthetic oligonucleotide
agucuaucgccugaggccc

SEQ ID NO: 2341968 - RNA, 19 nt, Artificial Sequence
  Description of Artificial Sequence: Synthetic oligonucleotide
uggaaccucagugagguag

SEQ ID NO: 2341969 - RNA, 19 nt, Artificial Sequence
  Description of Artificial Sequence: Synthetic oligonucleotide
ucugcgugggguuccaccg

SEQ ID NO: 2341970 - RNA, 19 nt, Artificial Sequence
  Description of Artificial Sequence: Synthetic oligonucleotide
augguccugacauucugcg

SEQ ID NO: 2341971 - RNA, 19 nt, Artificial Sequence
  Description of Artificial Sequence: Synthetic oligonucleotide
uucgccguccucauaguag

SEQ ID NO: 2341972 - RNA, 19 nt, Artificial Sequence
  Description of Artificial Sequence: Synthetic oligonucleotide
acauuggcgggcgagaagg

SEQ ID NO: 2341973 - RNA, 19 nt, Artificial Sequence
  Description of Artificial Sequence: Synthetic oligonucleotide
accgguuccuccugcagcc

SEQ ID NO: 2341974 - RNA, 19 nt, Artificial Sequence
  Description of Artificial Sequence: Synthetic oligonucleotide
gaggucugagcccucgucg

SEQ ID NO: 2341975 - RNA, 19 nt, Artificial Sequence
  Description of Artificial Sequence: Synthetic oligonucleotide
auauggguagucgaugggg

SEQ ID NO: 2341976 - RNA, 19 nt, Artificial Sequence
  Description of Artificial Sequence: Synthetic oligonucleotide
guagucuaucgccugaggc

SEQ ID NO: 2341977 - RNA, 19 nt, Artificial Sequence
  Description of Artificial Sequence: Synthetic oligonucleotide
uagucgauggggaacuuga

SEQ ID NO: 2341978 - RNA, 19 nt, Artificial Sequence
  Description of Artificial Sequence: Synthetic oligonucleotide
uuuacgggguaagaggacc

SEQ ID NO: 2341979 - RNA, 19 nt, Artificial Sequence
  Description of Artificial Sequence: Synthetic oligonucleotide
cuugaggcgagccuugaag

SEQ ID NO: 2341980 - RNA, 19 nt, Artificial Sequence
  Description of Artificial Sequence: Synthetic oligonucleotide
aggauggagaugcacacgu

SEQ ID NO: 2341981 - RNA, 19 nt, Artificial Sequence
  Description of Artificial Sequence: Synthetic oligonucleotide
cacgccaucacgcucugcg

SEQ ID NO: 2341982 - RNA, 19 nt, Artificial Sequence
  Description of Artificial Sequence: Synthetic oligonucleotide
aucacacucaggaggaugg

SEQ ID NO: 2341983 - RNA, 19 nt, Artificial Sequence
  Description of Artificial Sequence: Synthetic oligonucleotide
ugugggucgucaacugggg

SEQ ID NO: 2341984 - RNA, 19 nt, Artificial Sequence
  Description of Artificial Sequence: Synthetic oligonucleotide
uccccaaagcagcugucgg

SEQ ID NO: 2341985 - RNA, 19 nt, Artificial Sequence
  Description of Artificial Sequence: Synthetic oligonucleotide
auagauguuugggugccac

SEQ ID NO: 2341986 - RNA, 19 nt, Artificial Sequence
  Description of Artificial Sequence: Synthetic oligonucleotide
guggugggcaccuucacgc

SEQ ID NO: 2341987 - RNA, 19 nt, Artificial Sequence
  Description of Artificial Sequence: Synthetic oligonucleotide
cacauggaaccucagugag

SEQ ID NO: 2341988 - RNA, 19 nt, Artificial Sequence
  Description of Artificial Sequence: Synthetic oligonucleotide
cucuucguccccaaagcag

SEQ ID NO: 2341989 - RNA, 19 nt, Artificial Sequence
  Description of Artificial Sequence: Synthetic oligonucleotide
ucguagaagaggucugagc

SEQ ID NO: 2341990 - RNA, 19 nt, Artificial Sequence
  Description of Artificial Sequence: Synthetic oligonucleotide
uugaggcgagccuugaagu

SEQ ID NO: 2341991 - RNA, 19 nt, Artificial Sequence
  Description of Artificial Sequence: Synthetic oligonucleotide
auggagaugcacacguccc

SEQ ID NO: 2341992 - RNA, 19 nt, Artificial Sequence
  Description of Artificial Sequence: Synthetic oligonucleotide
ggaaccggaaggcuggugg

SEQ ID NO: 2341993 - RNA, 19 nt, Artificial Sequence
  Description of Artificial Sequence: Synthetic oligonucleotide
cacuucgccguccucauag

SEQ ID NO: 2341994 - RNA, 19 nt, Artificial Sequence
  Description of Artificial Sequence: Synthetic oligonucleotide
agggucacgggacgggagc

SEQ ID NO: 2341995 - RNA, 19 nt, Artificial Sequence
  Description of Artificial Sequence: Synthetic oligonucleotide
cguagaagaggucugagcc

SEQ ID NO: 2341996 - RNA, 19 nt, Artificial Sequence
  Description of Artificial Sequence: Synthetic oligonucleotide
gaaccggaaggcugguggg

SEQ ID NO: 2341997 - RNA, 19 nt, Artificial Sequence
  Description of Artificial Sequence: Synthetic oligonucleotide
gggacgggagcccacaugg

SEQ ID NO: 2341998 - RNA, 19 nt, Artificial Sequence
  Description of Artificial Sequence: Synthetic oligonucleotide
gaggaccuaagggucacgg

SEQ ID NO: 2341999 - RNA, 19 nt, Artificial Sequence
  Description of Artificial Sequence: Synthetic oligonucleotide
agaggucugagcccucguc

SEQ ID NO: 2342000 - RNA, 19 nt, Artificial Sequence
  Description of Artificial Sequence: Synthetic oligonucleotide
uuggcgggcgagaaggugu

SEQ ID NO: 2342001 - RNA, 19 nt, Artificial Sequence
  Description of Artificial Sequence: Synthetic oligonucleotide
caccuucacgccaucacgc

SEQ ID NO: 2342002 - RNA, 19 nt, Artificial Sequence
  Description of Artificial Sequence: Synthetic oligonucleotide
gguaagaggaccuaagggu

SEQ ID NO: 2342003 - RNA, 19 nt, Artificial Sequence
  Description of Artificial Sequence: Synthetic oligonucleotide
guaagaggaccuaaggguc

SEQ ID NO: 2342004 - RNA, 19 nt, Artificial Sequence
  Description of Artificial Sequence: Synthetic oligonucleotide
uguacucgcgguccuuccc

SEQ ID NO: 2342005 - RNA, 19 nt, Artificial Sequence
  Description of Artificial Sequence: Synthetic oligonucleotide
uguacaucacugaggcguc

SEQ ID NO: 2342006 - RNA, 19 nt, Artificial Sequence
  Description of Artificial Sequence: Synthetic oligonucleotide
ucgcccucguccaccagcg

SEQ ID NO: 2342007 - RNA, 19 nt, Artificial Sequence
  Description of Artificial Sequence: Synthetic oligonucleotide
uuacgggguaagaggaccu

SEQ ID NO: 2342008 - RNA, 19 nt, Artificial Sequence
  Description of Artificial Sequence: Synthetic oligonucleotide
ucugagcccucgucgggcg

SEQ ID NO: 2342009 - RNA, 19 nt, Artificial Sequence
  Description of Artificial Sequence: Synthetic oligonucleotide
accuaagggucacgggacg

SEQ ID NO: 2342010 - RNA, 19 nt, Artificial Sequence
  Description of Artificial Sequence: Synthetic oligonucleotide
uucugcgugggguuccacc

SEQ ID NO: 2342011 - RNA, 19 nt, Artificial Sequence
  Description of Artificial Sequence: Synthetic oligonucleotide
agcagcgccuucugcgagc

SEQ ID NO: 2342012 - RNA, 19 nt, Artificial Sequence
  Description of Artificial Sequence: Synthetic oligonucleotide
gagaucacacucaggagga

SEQ ID NO: 2342013 - RNA, 19 nt, Artificial Sequence
  Description of Artificial Sequence: Synthetic oligonucleotide
acaucuuggugaggaaccg

SEQ ID NO: 2342014 - RNA, 19 nt, Artificial Sequence
  Description of Artificial Sequence: Synthetic oligonucleotide
gggguaagaggaccuaagg

SEQ ID NO: 2342015 - RNA, 19 nt, Artificial Sequence
  Description of Artificial Sequence: Synthetic oligonucleotide
aggaccuaagggucacggg

SEQ ID NO: 2342016 - RNA, 19 nt, Artificial Sequence
  Description of Artificial Sequence: Synthetic oligonucleotide
cucggugccagagucgucc

SEQ ID NO: 2342017 - RNA, 19 nt, Artificial Sequence
  Description of Artificial Sequence: Synthetic oligonucleotide
gcugagguaaaauuuguaa

SEQ ID NO: 2342018 - RNA, 19 nt, Artificial Sequence
  Description of Artificial Sequence: Synthetic oligonucleotide
auggaggauggagaugcac

SEQ ID NO: 2342019 - RNA, 19 nt, Artificial Sequence
  Description of Artificial Sequence: Synthetic oligonucleotide
uuauuucagggacgcgggu

SEQ ID NO: 2342020 - RNA, 19 nt, Artificial Sequence
  Description of Artificial Sequence: Synthetic oligonucleotide
acccggaagcccuccaccg

SEQ ID NO: 2342021 - RNA, 19 nt, Artificial Sequence
  Description of Artificial Sequence: Synthetic oligonucleotide
ugcgagcugggcacuagug

SEQ ID NO: 2342022 - RNA, 19 nt, Artificial Sequence
  Description of Artificial Sequence: Synthetic oligonucleotide
auuuacgggguaagaggac

SEQ ID NO: 2342023 - RNA, 19 nt, Artificial Sequence
  Description of Artificial Sequence: Synthetic oligonucleotide
ucguccccaaagcagcugu

SEQ ID NO: 2342024 - RNA, 19 nt, Artificial Sequence
  Description of Artificial Sequence: Synthetic oligonucleotide
acauucugcgugggguucc

SEQ ID NO: 2342025 - RNA, 19 nt, Artificial Sequence
  Description of Artificial Sequence: Synthetic oligonucleotide
aggaccugcuuccggauga

SEQ ID NO: 2342026 - RNA, 19 nt, Artificial Sequence
  Description of Artificial Sequence: Synthetic oligonucleotide
cagugagguagucuaucgc

SEQ ID NO: 2342027 - RNA, 19 nt, Artificial Sequence
  Description of Artificial Sequence: Synthetic oligonucleotide
cacacaguacucagccagc

SEQ ID NO: 2342028 - RNA, 19 nt, Artificial Sequence
  Description of Artificial Sequence: Synthetic oligonucleotide
uccaccagcgucacccgga

SEQ ID NO: 2342029 - RNA, 19 nt, Artificial Sequence
  Description of Artificial Sequence: Synthetic oligonucleotide
uuccccuugcucuccuucc

SEQ ID NO: 2342030 - RNA, 19 nt, Artificial Sequence
  Description of Artificial Sequence: Synthetic oligonucleotide
acacggguccugcugaggu

SEQ ID NO: 2342031 - RNA, 19 nt, Artificial Sequence
  Description of Artificial Sequence: Synthetic oligonucleotide
cuguacaucacugaggcgu

SEQ ID NO: 2342032 - RNA, 19 nt, Artificial Sequence
  Description of Artificial Sequence: Synthetic oligonucleotide
cuuggucuucacacaguac

SEQ ID NO: 2342033 - RNA, 19 nt, Artificial Sequence
  Description of Artificial Sequence: Synthetic oligonucleotide
ggcgccuuggucuucacac

SEQ ID NO: 2342034 - RNA, 19 nt, Artificial Sequence
  Description of Artificial Sequence: Synthetic oligonucleotide
uagauguuugggugccaca

SEQ ID NO: 2342035 - RNA, 19 nt, Artificial Sequence
  Description of Artificial Sequence: Synthetic oligonucleotide
cagcuccccacucuguggg

SEQ ID NO: 2342036 - RNA, 19 nt, Artificial Sequence
  Description of Artificial Sequence: Synthetic oligonucleotide
aguuuauuucagggacgcg

SEQ ID NO: 2342037 - RNA, 19 nt, Artificial Sequence
  Description of Artificial Sequence: Synthetic oligonucleotide
aucacgcucugcguccacc

SEQ ID NO: 2342038 - RNA, 19 nt, Artificial Sequence
  Description of Artificial Sequence: Synthetic oligonucleotide
acuaguggccgggccaugg

SEQ ID NO: 2342039 - RNA, 19 nt, Artificial Sequence
  Description of Artificial Sequence: Synthetic oligonucleotide
uaucgccugaggcccacac

SEQ ID NO: 2342040 - RNA, 19 nt, Artificial Sequence
  Description of Artificial Sequence: Synthetic oligonucleotide
gugaggaaccggaaggcug

SEQ ID NO: 2342041 - RNA, 19 nt, Artificial Sequence
  Description of Artificial Sequence: Synthetic oligonucleotide
acauggaaccucagugagg

SEQ ID NO: 2342042 - RNA, 19 nt, Artificial Sequence
  Description of Artificial Sequence: Synthetic oligonucleotide
guacucgcgguccuucccc

SEQ ID NO: 2342043 - RNA, 19 nt, Artificial Sequence
  Description of Artificial Sequence: Synthetic oligonucleotide
aucguagaagaggucugag

SEQ ID NO: 2342044 - RNA, 19 nt, Artificial Sequence
  Description of Artificial Sequence: Synthetic oligonucleotide
cugaggcccacacgggucc

SEQ ID NO: 2342045 - RNA, 19 nt, Artificial Sequence
  Description of Artificial Sequence: Synthetic oligonucleotide
ggaauauggguagucgaug

SEQ ID NO: 2342046 - RNA, 19 nt, Artificial Sequence
  Description of Artificial Sequence: Synthetic oligonucleotide
gaccuaagggucacgggac

SEQ ID NO: 2342047 - RNA, 19 nt, Artificial Sequence
  Description of Artificial Sequence: Synthetic oligonucleotide
aggcgagccuugaaguagc

SEQ ID NO: 2342048 - RNA, 19 nt, Artificial Sequence
  Description of Artificial Sequence: Synthetic oligonucleotide
cacguccccugucucauag

SEQ ID NO: 2342049 - RNA, 19 nt, Artificial Sequence
  Description of Artificial Sequence: Synthetic oligonucleotide
agaugcacacguccccugu

SEQ ID NO: 2342050 - RNA, 19 nt, Artificial Sequence
  Description of Artificial Sequence: Synthetic oligonucleotide
uggguagucgauggggaac

SEQ ID NO: 2342051 - RNA, 19 nt, Artificial Sequence
  Description of Artificial Sequence: Synthetic oligonucleotide
acugaggcguccacauugg

SEQ ID NO: 2342052 - RNA, 19 nt, Artificial Sequence
  Description of Artificial Sequence: Synthetic oligonucleotide
aagaggucugagcccucgu

SEQ ID NO: 2342053 - RNA, 19 nt, Artificial Sequence
  Description of Artificial Sequence: Synthetic oligonucleotide
gucaucguagaagaggucu

SEQ ID NO: 2342054 - RNA, 19 nt, Artificial Sequence
  Description of Artificial Sequence: Synthetic oligonucleotide
ugggguuccaccgcucuga

SEQ ID NO: 2342055 - RNA, 19 nt, Artificial Sequence
  Description of Artificial Sequence: Synthetic oligonucleotide
ugacauucugcgugggguu

SEQ ID NO: 2342056 - RNA, 19 nt, Artificial Sequence
  Description of Artificial Sequence: Synthetic oligonucleotide
ugaggcgagccuugaagua

SEQ ID NO: 2342057 - RNA, 19 nt, Artificial Sequence
  Description of Artificial Sequence: Synthetic oligonucleotide
ucagggacgcgggucagga

SEQ ID NO: 2342058 - RNA, 19 nt, Artificial Sequence
  Description of Artificial Sequence: Synthetic oligonucleotide
gucuguguacucgcggucc

SEQ ID NO: 2342059 - RNA, 19 nt, Artificial Sequence
  Description of Artificial Sequence: Synthetic oligonucleotide
gguagucuaucgccugagg

SEQ ID NO: 2342060 - RNA, 19 nt, Artificial Sequence
  Description of Artificial Sequence: Synthetic oligonucleotide
guccccaaagcagcugucg

SEQ ID NO: 2342061 - RNA, 19 nt, Artificial Sequence
  Description of Artificial Sequence: Synthetic oligonucleotide
caccgguuccuccugcagc

SEQ ID NO: 2342062 - RNA, 19 nt, Artificial Sequence
  Description of Artificial Sequence: Synthetic oligonucleotide
gagguagucuaucgccuga

SEQ ID NO: 2342063 - RNA, 19 nt, Artificial Sequence
  Description of Artificial Sequence: Synthetic oligonucleotide
ugcgugggguuccaccgcu

SEQ ID NO: 2342064 - RNA, 19 nt, Artificial Sequence
  Description of Artificial Sequence: Synthetic oligonucleotide
ggucaggacuccucggugc

SEQ ID NO: 2342065 - RNA, 19 nt, Artificial Sequence
  Description of Artificial Sequence: Synthetic oligonucleotide
cucugugggucgucaacug

SEQ ID NO: 2342066 - RNA, 19 nt, Artificial Sequence
  Description of Artificial Sequence: Synthetic oligonucleotide
agggcagcuccccacucug

SEQ ID NO: 2342067 - RNA, 19 nt, Artificial Sequence
  Description of Artificial Sequence: Synthetic oligonucleotide
gcgagcugggcacuagugg

SEQ ID NO: 2342068 - RNA, 19 nt, Artificial Sequence
  Description of Artificial Sequence: Synthetic oligonucleotide
uccaccgcucugagggcag

SEQ ID NO: 2342069 - RNA, 19 nt, Artificial Sequence
  Description of Artificial Sequence: Synthetic oligonucleotide
uguguacucgcgguccuuc

SEQ ID NO: 2342070 - RNA, 19 nt, Artificial Sequence
  Description of Artificial Sequence: Synthetic oligonucleotide
uccucggugccagagucgu

SEQ ID NO: 2342071 - RNA, 19 nt, Artificial Sequence
  Description of Artificial Sequence: Synthetic oligonucleotide
uguacaggucgcccucguc

SEQ ID NO: 2342072 - RNA, 19 nt, Artificial Sequence
  Description of Artificial Sequence: Synthetic oligonucleotide
aguggccgggccauggcgg

SEQ ID NO: 2342073 - RNA, 19 nt, Artificial Sequence
  Description of Artificial Sequence: Synthetic oligonucleotide
cugguggggaauaugggua

SEQ ID NO: 2342074 - RNA, 19 nt, Artificial Sequence
  Description of Artificial Sequence: Synthetic oligonucleotide
accuucacgccaucacgcu

SEQ ID NO: 2342075 - RNA, 19 nt, Artificial Sequence
  Description of Artificial Sequence: Synthetic oligonucleotide
gaugcacacguccccuguc

SEQ ID NO: 2342076 - RNA, 19 nt, Artificial Sequence
  Description of Artificial Sequence: Synthetic oligonucleotide
gacgggagcccacauggaa

SEQ ID NO: 2342077 - RNA, 19 nt, Artificial Sequence
  Description of Artificial Sequence: Synthetic oligonucleotide
gagguaaaauuuguaaguu

SEQ ID NO: 2342078 - RNA, 19 nt, Artificial Sequence
  Description of Artificial Sequence: Synthetic oligonucleotide
cagggagaucacacucagg

SEQ ID NO: 2342079 - RNA, 19 nt, Artificial Sequence
  Description of Artificial Sequence: Synthetic oligonucleotide
caaagcagcugucggccuc

SEQ ID NO: 2342080 - RNA, 19 nt, Artificial Sequence
  Description of Artificial Sequence: Synthetic oligonucleotide
agguagucuaucgccugag

SEQ ID NO: 2342081 - RNA, 19 nt, Artificial Sequence
  Description of Artificial Sequence: Synthetic oligonucleotide
guagucgauggggaacuug

SEQ ID NO: 2342082 - RNA, 19 nt, Artificial Sequence
  Description of Artificial Sequence: Synthetic oligonucleotide
aagggucacgggacgggag

SEQ ID NO: 2342083 - RNA, 19 nt, Artificial Sequence
  Description of Artificial Sequence: Synthetic oligonucleotide
ucacccggaagcccuccac

SEQ ID NO: 2342084 - RNA, 19 nt, Artificial Sequence
  Description of Artificial Sequence: Synthetic oligonucleotide
cucugcguccaccuugguc

SEQ ID NO: 2342085 - RNA, 19 nt, Artificial Sequence
  Description of Artificial Sequence: Synthetic oligonucleotide
ugcacacguccccugucuc

SEQ ID NO: 2342086 - RNA, 19 nt, Artificial Sequence
  Description of Artificial Sequence: Synthetic oligonucleotide
auggguagucgauggggaa

SEQ ID NO: 2342087 - RNA, 19 nt, Artificial Sequence
  Description of Artificial Sequence: Synthetic oligonucleotide
agucaucguagaagagguc

SEQ ID NO: 2342088 - RNA, 19 nt, Artificial Sequence
  Description of Artificial Sequence: Synthetic oligonucleotide
acaggucgcccucguccac

SEQ ID NO: 2342089 - RNA, 19 nt, Artificial Sequence
  Description of Artificial Sequence: Synthetic oligonucleotide
cuucacgccaucacgcucu

SEQ ID NO: 2342090 - RNA, 19 nt, Artificial Sequence
  Description of Artificial Sequence: Synthetic oligonucleotide
guaaaauuuguaaguuuau

SEQ ID NO: 2342091 - RNA, 19 nt, Artificial Sequence
  Description of Artificial Sequence: Synthetic oligonucleotide
ucugcgagcugggcacuag

SEQ ID NO: 2342092 - RNA, 19 nt, Artificial Sequence
  Description of Artificial Sequence: Synthetic oligonucleotide
cuaguggccgggccauggc

SEQ ID NO: 2342093 - RNA, 19 nt, Artificial Sequence
  Description of Artificial Sequence: Synthetic oligonucleotide
cuuccggaugaugucugug

SEQ ID NO: 2342094 - RNA, 19 nt, Artificial Sequence
  Description of Artificial Sequence: Synthetic oligonucleotide
cuugguccccaggaccugc

SEQ ID NO: 2342095 - RNA, 19 nt, Artificial Sequence
  Description of Artificial Sequence: Synthetic oligonucleotide
guguacucgcgguccuucc

SEQ ID NO: 2342096 - RNA, 19 nt, Artificial Sequence
  Description of Artificial Sequence: Synthetic oligonucleotide
uucacgccaucacgcucug

SEQ ID NO: 2342097 - RNA, 19 nt, Artificial Sequence
  Description of Artificial Sequence: Synthetic oligonucleotide
uuucagggacgcgggucag

SEQ ID NO: 2342098 - RNA, 19 nt, Artificial Sequence
  Description of Artificial Sequence: Synthetic oligonucleotide
uucguccccaaagcagcug

SEQ ID NO: 2342099 - RNA, 19 nt, Artificial Sequence
  Description of Artificial Sequence: Synthetic oligonucleotide
ugagcccucgucgggcgcc

SEQ ID NO: 2342100 - RNA, 19 nt, Artificial Sequence
  Description of Artificial Sequence: Synthetic oligonucleotide
ggcucauucagcagggaga

SEQ ID NO: 2342101 - RNA, 19 nt, Artificial Sequence
  Description of Artificial Sequence: Synthetic oligonucleotide
cugggcacuaguggccggg

SEQ ID NO: 2342102 - RNA, 19 nt, Artificial Sequence
  Description of Artificial Sequence: Synthetic oligonucleotide
cccaaagcagcugucggcc

SEQ ID NO: 2342103 - RNA, 19 nt, Artificial Sequence
  Description of Artificial Sequence: Synthetic oligonucleotide
ucgcgguccuuccccuugc

SEQ ID NO: 2342104 - RNA, 19 nt, Artificial Sequence
  Description of Artificial Sequence: Synthetic oligonucleotide
agcgucacccggaagcccu

SEQ ID NO: 2342105 - RNA, 19 nt, Artificial Sequence
  Description of Artificial Sequence: Synthetic oligonucleotide
cugaggcguccacauuggc

SEQ ID NO: 2342106 - RNA, 19 nt, Artificial Sequence
  Description of Artificial Sequence: Synthetic oligonucleotide
cucaggaggaugguccuga

SEQ ID NO: 2342107 - RNA, 19 nt, Artificial Sequence
  Description of Artificial Sequence: Synthetic oligonucleotide
acuucgccguccucauagu

SEQ ID NO: 2342108 - RNA, 19 nt, Artificial Sequence
  Description of Artificial Sequence: Synthetic oligonucleotide
agaggaccuaagggucacg

SEQ ID NO: 2342109 - RNA, 19 nt, Artificial Sequence
  Description of Artificial Sequence: Synthetic oligonucleotide
acuugaggcgagccuugaa

SEQ ID NO: 2342110 - RNA, 19 nt, Artificial Sequence
  Description of Artificial Sequence: Synthetic oligonucleotide
guacucagccagcguggug

SEQ ID NO: 2342111 - RNA, 19 nt, Artificial Sequence
  Description of Artificial Sequence: Synthetic oligonucleotide
cugacauucugcguggggu

SEQ ID NO: 2342112 - RNA, 19 nt, Artificial Sequence
  Description of Artificial Sequence: Synthetic oligonucleotide
ggcagcuccccacucugug

SEQ ID NO: 2342113 - RNA, 19 nt, Artificial Sequence
  Description of Artificial Sequence: Synthetic oligonucleotide
ggucuucacacaguacuca

SEQ ID NO: 2342114 - RNA, 19 nt, Artificial Sequence
  Description of Artificial Sequence: Synthetic oligonucleotide
ucuaucgccugaggcccac

SEQ ID NO: 2342115 - RNA, 19 nt, Artificial Sequence
  Description of Artificial Sequence: Synthetic oligonucleotide
ccugacauucugcgugggg

SEQ ID NO: 2342116 - RNA, 19 nt, Artificial Sequence
  Description of Artificial Sequence: Synthetic oligonucleotide
acggguccugcugagguaa

SEQ ID NO: 2342117 - RNA, 19 nt, Artificial Sequence
  Description of Artificial Sequence: Synthetic oligonucleotide
ggcacuaguggccgggcca

SEQ ID NO: 2342118 - RNA, 19 nt, Artificial Sequence
  Description of Artificial Sequence: Synthetic oligonucleotide
cugcgugggguuccaccgc

SEQ ID NO: 2342119 - RNA, 19 nt, Artificial Sequence
  Description of Artificial Sequence: Synthetic oligonucleotide
guacaucacugaggcgucc

SEQ ID NO: 2342120 - RNA, 19 nt, Artificial Sequence
  Description of Artificial Sequence: Synthetic oligonucleotide
ucggugccagagucguccu

SEQ ID NO: 2342121 - RNA, 19 nt, Artificial Sequence
  Description of Artificial Sequence: Synthetic oligonucleotide
gugggguuccaccgcucug

SEQ ID NO: 2342122 - RNA, 19 nt, Artificial Sequence
  Description of Artificial Sequence: Synthetic oligonucleotide
gcugguggggaauaugggu

SEQ ID NO: 2342123 - RNA, 19 nt, Artificial Sequence
  Description of Artificial Sequence: Synthetic oligonucleotide
ccacaucuuggugaggaac

SEQ ID NO: 2342124 - RNA, 19 nt, Artificial Sequence
  Description of Artificial Sequence: Synthetic oligonucleotide
cacacggguccugcugagg

SEQ ID NO: 2342125 - RNA, 19 nt, Artificial Sequence
  Description of Artificial Sequence: Synthetic oligonucleotide
caggucgcccucguccacc

SEQ ID NO: 2342126 - RNA, 19 nt, Artificial Sequence
  Description of Artificial Sequence: Synthetic oligonucleotide
auucugcgugggguuccac

SEQ ID NO: 2342127 - RNA, 19 nt, Artificial Sequence
  Description of Artificial Sequence: Synthetic oligonucleotide
gugagguagucuaucgccu

SEQ ID NO: 2342128 - RNA, 19 nt, Artificial Sequence
  Description of Artificial Sequence: Synthetic oligonucleotide
cagcagcgccuucugcgag

SEQ ID NO: 2342129 - RNA, 19 nt, Artificial Sequence
  Description of Artificial Sequence: Synthetic oligonucleotide
ugggcacuaguggccgggc

SEQ ID NO: 2342130 - RNA, 19 nt, Artificial Sequence
  Description of Artificial Sequence: Synthetic oligonucleotide
ucacgggacgggagcccac

SEQ ID NO: 2342131 - RNA, 19 nt, Artificial Sequence
  Description of Artificial Sequence: Synthetic oligonucleotide
caguuguacaggucgcccu

SEQ ID NO: 2342132 - RNA, 19 nt, Artificial Sequence
  Description of Artificial Sequence: Synthetic oligonucleotide
uacgggguaagaggaccua

SEQ ID NO: 2342133 - RNA, 19 nt, Artificial Sequence
  Description of Artificial Sequence: Synthetic oligonucleotide
acgggguaagaggaccuaa

SEQ ID NO: 2342134 - RNA, 19 nt, Artificial Sequence
  Description of Artificial Sequence: Synthetic oligonucleotide
gcgagaagguguugggcuc

SEQ ID NO: 2342135 - RNA, 19 nt, Artificial Sequence
  Description of Artificial Sequence: Synthetic oligonucleotide
gaccugcuuccggaugaug

SEQ ID NO: 2342136 - RNA, 19 nt, Artificial Sequence
  Description of Artificial Sequence: Synthetic oligonucleotide
cucgucgggcgccggcgcc

SEQ ID NO: 2342137 - RNA, 19 nt, Artificial Sequence
  Description of Artificial Sequence: Synthetic oligonucleotide
ggacuccucggugccagag

SEQ ID NO: 2342138 - RNA, 19 nt, Artificial Sequence
  Description of Artificial Sequence: Synthetic oligonucleotide
aggaaccggaaggcuggug

SEQ ID NO: 2342139 - RNA, 19 nt, Artificial Sequence
  Description of Artificial Sequence: Synthetic oligonucleotide
cagcguggugggcaccuuc

SEQ ID NO: 2342140 - RNA, 19 nt, Artificial Sequence
  Description of Artificial Sequence: Synthetic oligonucleotide
acguccccugucucauaga

SEQ ID NO: 2342141 - RNA, 19 nt, Artificial Sequence
  Description of Artificial Sequence: Synthetic oligonucleotide
cagccagcguggugggcac

SEQ ID NO: 2342142 - RNA, 19 nt, Artificial Sequence
  Description of Artificial Sequence: Synthetic oligonucleotide
ccugaggcccacacggguc

SEQ ID NO: 2342143 - RNA, 19 nt, Artificial Sequence
  Description of Artificial Sequence: Synthetic oligonucleotide
cgggguaagaggaccuaag

SEQ ID NO: 2342144 - RNA, 19 nt, Artificial Sequence
  Description of Artificial Sequence: Synthetic oligonucleotide
gcgggucaggacuccucgg

SEQ ID NO: 2342145 - RNA, 19 nt, Artificial Sequence
  Description of Artificial Sequence: Synthetic oligonucleotide
acgcgggucaggacuccuc

SEQ ID NO: 2342146 - RNA, 19 nt, Artificial Sequence
  Description of Artificial Sequence: Synthetic oligonucleotide
ccgcucugagggcagcucc

SEQ ID NO: 2342147 - RNA, 19 nt, Artificial Sequence
  Description of Artificial Sequence: Synthetic oligonucleotide
cuucgccguccucauagua

SEQ ID NO: 2342148 - RNA, 19 nt, Artificial Sequence
  Description of Artificial Sequence: Synthetic oligonucleotide
cauagauguuugggugcca

SEQ ID NO: 2342149 - RNA, 19 nt, Artificial Sequence
  Description of Artificial Sequence: Synthetic oligonucleotide
gggauggaggauggagaug

SEQ ID NO: 2342150 - RNA, 19 nt, Artificial Sequence
  Description of Artificial Sequence: Synthetic oligonucleotide
cgcucugcguccaccuugg

SEQ ID NO: 2342151 - RNA, 19 nt, Artificial Sequence
  Description of Artificial Sequence: Synthetic oligonucleotide
ggcgccggcgccuuggucu

SEQ ID NO: 2342152 - RNA, 19 nt, Artificial Sequence
  Description of Artificial Sequence: Synthetic oligonucleotide
gucacgggacgggagccca

SEQ ID NO: 2342153 - RNA, 19 nt, Artificial Sequence
  Description of Artificial Sequence: Synthetic oligonucleotide
ccuucacgccaucacgcuc

SEQ ID NO: 2342154 - RNA, 19 nt, Artificial Sequence
  Description of Artificial Sequence: Synthetic oligonucleotide
gcccacacggguccugcug

SEQ ID NO: 2342155 - RNA, 19 nt, Artificial Sequence
  Description of Artificial Sequence: Synthetic oligonucleotide
ccagcgucacccggaagcc

SEQ ID NO: 2342156 - RNA, 19 nt, Artificial Sequence
  Description of Artificial Sequence: Synthetic oligonucleotide
cgcgggucaggacuccucg

SEQ ID NO: 2342157 - RNA, 19 nt, Artificial Sequence
  Description of Artificial Sequence: Synthetic oligonucleotide
cagggacgcgggucaggac

SEQ ID NO: 2342158 - RNA, 19 nt, Artificial Sequence
  Description of Artificial Sequence: Synthetic oligonucleotide
caucacgcucugcguccac

SEQ ID NO: 2342159 - RNA, 19 nt, Artificial Sequence
  Description of Artificial Sequence: Synthetic oligonucleotide
cacucaggaggaugguccu

SEQ ID NO: 2342160 - RNA, 19 nt, Artificial Sequence
  Description of Artificial Sequence: Synthetic oligonucleotide
cuucguccccaaagcagcu

SEQ ID NO: 2342161 - RNA, 19 nt, Artificial Sequence
  Description of Artificial Sequence: Synthetic oligonucleotide
ugaggcccacacggguccu

SEQ ID NO: 2342162 - RNA, 19 nt, Artificial Sequence
  Description of Artificial Sequence: Synthetic oligonucleotide
gggcacuaguggccgggcc

SEQ ID NO: 2342163 - RNA, 19 nt, Artificial Sequence
  Description of Artificial Sequence: Synthetic oligonucleotide
ggccgggccauggcggugg

SEQ ID NO: 2342164 - RNA, 19 nt, Artificial Sequence
  Description of Artificial Sequence: Synthetic oligonucleotide
ucacgccaucacgcucugc

SEQ ID NO: 2342165 - RNA, 19 nt, Artificial Sequence
  Description of Artificial Sequence: Synthetic oligonucleotide
ccucuucguccccaaagca

SEQ ID NO: 2342166 - RNA, 19 nt, Artificial Sequence
  Description of Artificial Sequence: Synthetic oligonucleotide
uccccacucugugggucgu

SEQ ID NO: 2342167 - RNA, 19 nt, Artificial Sequence
  Description of Artificial Sequence: Synthetic oligonucleotide
cucagccagcguggugggc

SEQ ID NO: 2342168 - RNA, 19 nt, Artificial Sequence
  Description of Artificial Sequence: Synthetic oligonucleotide
cugcuuccggaugaugucu

SEQ ID NO: 2342169 - RNA, 19 nt, Artificial Sequence
  Description of Artificial Sequence: Synthetic oligonucleotide
gcucugagggcagcucccc

SEQ ID NO: 2342170 - RNA, 19 nt, Artificial Sequence
  Description of Artificial Sequence: Synthetic oligonucleotide
ggucacgggacgggagccc

SEQ ID NO: 2342171 - RNA, 19 nt, Artificial Sequence
  Description of Artificial Sequence: Synthetic oligonucleotide
cauucugcgugggguucca

SEQ ID NO: 2342172 - RNA, 19 nt, Artificial Sequence
  Description of Artificial Sequence: Synthetic oligonucleotide
acacguccccugucucaua

SEQ ID NO: 2342173 - RNA, 19 nt, Artificial Sequence
  Description of Artificial Sequence: Synthetic oligonucleotide
ccucccucguaguaggugu

SEQ ID NO: 2342174 - RNA, 19 nt, Artificial Sequence
  Description of Artificial Sequence: Synthetic oligonucleotide
ccacacggguccugcugag

SEQ ID NO: 2342175 - RNA, 19 nt, Artificial Sequence
  Description of Artificial Sequence: Synthetic oligonucleotide
gcgccuuggucuucacaca

SEQ ID NO: 2342176 - RNA, 19 nt, Artificial Sequence
  Description of Artificial Sequence: Synthetic oligonucleotide
ggcgagccuugaaguagcc

SEQ ID NO: 2342177 - RNA, 19 nt, Artificial Sequence
  Description of Artificial Sequence: Synthetic oligonucleotide
cauuggcgggcgagaaggu

SEQ ID NO: 2342178 - RNA, 19 nt, Artificial Sequence
  Description of Artificial Sequence: Synthetic oligonucleotide
cacggguccugcugaggua

SEQ ID NO: 2342179 - RNA, 19 nt, Artificial Sequence
  Description of Artificial Sequence: Synthetic oligonucleotide
cugucggccuccuccacuu

SEQ ID NO: 2342180 - RNA, 19 nt, Artificial Sequence
  Description of Artificial Sequence: Synthetic oligonucleotide
gucuaucgccugaggccca

SEQ ID NO: 2342181 - RNA, 19 nt, Artificial Sequence
  Description of Artificial Sequence: Synthetic oligonucleotide
cacgggacgggagcccaca

SEQ ID NO: 2342182 - RNA, 19 nt, Artificial Sequence
  Description of Artificial Sequence: Synthetic oligonucleotide
gggacgcgggucaggacuc

SEQ ID NO: 2342183 - RNA, 19 nt, Artificial Sequence
  Description of Artificial Sequence: Synthetic oligonucleotide
gcgccuucugcgagcuggg

SEQ ID NO: 2342184 - RNA, 19 nt, Artificial Sequence
  Description of Artificial Sequence: Synthetic oligonucleotide
gcguggugggcaccuucac

SEQ ID NO: 2342185 - RNA, 19 nt, Artificial Sequence
  Description of Artificial Sequence: Synthetic oligonucleotide
cgguuccuccugcagcccc

SEQ ID NO: 2342186 - RNA, 19 nt, Artificial Sequence
  Description of Artificial Sequence: Synthetic oligonucleotide
ggaaggcugguggggaaua

SEQ ID NO: 2342187 - RNA, 19 nt, Artificial Sequence
  Description of Artificial Sequence: Synthetic oligonucleotide
cacacguccccugucucau

SEQ ID NO: 2342188 - RNA, 19 nt, Artificial Sequence
  Description of Artificial Sequence: Synthetic oligonucleotide
gcugucggccuccuccacu

SEQ ID NO: 2342189 - RNA, 19 nt, Artificial Sequence
  Description of Artificial Sequence: Synthetic oligonucleotide
cgccugaggcccacacggg

SEQ ID NO: 2342190 - RNA, 19 nt, Artificial Sequence
  Description of Artificial Sequence: Synthetic oligonucleotide
gaggaaccggaaggcuggu

SEQ ID NO: 2342191 - RNA, 19 nt, Artificial Sequence
  Description of Artificial Sequence: Synthetic oligonucleotide
guggccgggccauggcggu

SEQ ID NO: 2342192 - RNA, 19 nt, Artificial Sequence
  Description of Artificial Sequence: Synthetic oligonucleotide
ccucgucgggcgccggcgc

SEQ ID NO: 2342193 - RNA, 19 nt, Artificial Sequence
  Description of Artificial Sequence: Synthetic oligonucleotide
gacgcgggucaggacuccu

SEQ ID NO: 2342194 - RNA, 19 nt, Artificial Sequence
  Description of Artificial Sequence: Synthetic oligonucleotide
ggucgcccucguccaccag

SEQ ID NO: 2342195 - RNA, 19 nt, Artificial Sequence
  Description of Artificial Sequence: Synthetic oligonucleotide
cuaucgccugaggcccaca

SEQ ID NO: 2342196 - RNA, 19 nt, Artificial Sequence
  Description of Artificial Sequence: Synthetic oligonucleotide
ggacgcgggucaggacucc

SEQ ID NO: 2342197 - RNA, 19 nt, Artificial Sequence
  Description of Artificial Sequence: Synthetic oligonucleotide
agcccucgucgggcgccgg

SEQ ID NO: 2342198 - RNA, 19 nt, Artificial Sequence
  Description of Artificial Sequence: Synthetic oligonucleotide
gguggggaauauggguagu

SEQ ID NO: 2342199 - RNA, 19 nt, Artificial Sequence
  Description of Artificial Sequence: Synthetic oligonucleotide
gcguccaccuuggucccca

SEQ ID NO: 2342200 - RNA, 19 nt, Artificial Sequence
  Description of Artificial Sequence: Synthetic oligonucleotide
ggacgggagcccacaugga

SEQ ID NO: 2342201 - RNA, 19 nt, Artificial Sequence
  Description of Artificial Sequence: Synthetic oligonucleotide
cucccucguaguagguguu

SEQ ID NO: 2342202 - RNA, 19 nt, Artificial Sequence
  Description of Artificial Sequence: Synthetic oligonucleotide
cagcgccuucugcgagcug

SEQ ID NO: 2342203 - RNA, 19 nt, Artificial Sequence
  Description of Artificial Sequence: Synthetic oligonucleotide
cgggacgggagcccacaug

SEQ ID NO: 2342204 - RNA, 19 nt, Artificial Sequence
  Description of Artificial Sequence: Synthetic oligonucleotide
gcccucgucgggcgccggc

SEQ ID NO: 2342205 - RNA, 19 nt, Artificial Sequence
  Description of Artificial Sequence: Synthetic oligonucleotide
cguccccaaagcagcuguc

SEQ ID NO: 2342206 - RNA, 19 nt, Artificial Sequence
  Description of Artificial Sequence: Synthetic oligonucleotide
gucgggcgccggcgccuug

SEQ ID NO: 2342207 - RNA, 19 nt, Artificial Sequence
  Description of Artificial Sequence: Synthetic oligonucleotide
ggcgggcgagaagguguug

SEQ ID NO: 2342208 - RNA, 19 nt, Artificial Sequence
  Description of Artificial Sequence: Synthetic oligonucleotide
ccucggugccagagucguc

SEQ ID NO: 2342209 - RNA, 19 nt, Artificial Sequence
  Description of Artificial Sequence: Synthetic oligonucleotide
gcagcgccuucugcgagcu

SEQ ID NO: 2342210 - RNA, 19 nt, Artificial Sequence
  Description of Artificial Sequence: Synthetic oligonucleotide
gccggcgccuuggucuuca

SEQ ID NO: 2342211 - RNA, 19 nt, Artificial Sequence
  Description of Artificial Sequence: Synthetic oligonucleotide
ccaccgcucugagggcagc

SEQ ID NO: 2342212 - RNA, 19 nt, Artificial Sequence
  Description of Artificial Sequence: Synthetic oligonucleotide
gcgagccuugaaguagccu

SEQ ID NO: 2342213 - RNA, 19 nt, Artificial Sequence
  Description of Artificial Sequence: Synthetic oligonucleotide
gcacuaguggccgggccau

SEQ ID NO: 2342214 - RNA, 19 nt, Artificial Sequence
  Description of Artificial Sequence: Synthetic oligonucleotide
cgccguccucauaguaguc

SEQ ID NO: 2342215 - RNA, 19 nt, Artificial Sequence
  Description of Artificial Sequence: Synthetic oligonucleotide
cacgcucugcguccaccuu

SEQ ID NO: 2342216 - RNA, 19 nt, Artificial Sequence
  Description of Artificial Sequence: Synthetic oligonucleotide
gccgggccauggcgguggc

SEQ ID NO: 2342217 - RNA, 19 nt, Artificial Sequence
  Description of Artificial Sequence: Synthetic oligonucleotide
caccgcucugagggcagcu

SEQ ID NO: 2342218 - RNA, 19 nt, Artificial Sequence
  Description of Artificial Sequence: Synthetic oligonucleotide
gggcgccggcgccuugguc

SEQ ID NO: 2342219 - RNA, 19 nt, Artificial Sequence
  Description of Artificial Sequence: Synthetic oligonucleotide
gcgucacccggaagcccuc

SEQ ID NO: 2342220 - RNA, 19 nt, Artificial Sequence
  Description of Artificial Sequence: Synthetic oligonucleotide
gguagucgauggggaacuu

SEQ ID NO: 2342221 - RNA, 19 nt, Artificial Sequence
  Description of Artificial Sequence: Synthetic oligonucleotide
ggaccugcuuccggaugau

SEQ ID NO: 2342222 - RNA, 19 nt, Artificial Sequence
  Description of Artificial Sequence: Synthetic oligonucleotide
gcucugcguccaccuuggu

SEQ ID NO: 2342223 - RNA, 19 nt, Artificial Sequence
  Description of Artificial Sequence: Synthetic oligonucleotide
gcgccggcgccuuggucuu

SEQ ID NO: 2342224 - RNA, 19 nt, Artificial Sequence
  Description of Artificial Sequence: Synthetic oligonucleotide
cggguccugcugagguaaa

SEQ ID NO: 2342225 - RNA, 19 nt, Artificial Sequence
  Description of Artificial Sequence: Synthetic oligonucleotide
cgccggcgccuuggucuuc

SEQ ID NO: 2342226 - RNA, 19 nt, Artificial Sequence
  Description of Artificial Sequence: Synthetic oligonucleotide
cgucgggcgccggcgccuu

SEQ ID NO: 2342227 - RNA, 19 nt, Artificial Sequence
  Description of Artificial Sequence: Synthetic oligonucleotide
cuugcugucaguuacaucg

SEQ ID NO: 2342228 - RNA, 19 nt, Artificial Sequence
  Description of Artificial Sequence: Synthetic oligonucleotide
uuugugaugacgaagagga

SEQ ID NO: 2342229 - RNA, 19 nt, Artificial Sequence
  Description of Artificial Sequence: Synthetic oligonucleotide
aacagcuucaccuugaacu

SEQ ID NO: 2342230 - RNA, 19 nt, Artificial Sequence
  Description of Artificial Sequence: Synthetic oligonucleotide
uacaauaucauuacuguug

SEQ ID NO: 2342231 - RNA, 19 nt, Artificial Sequence
  Description of Artificial Sequence: Synthetic oligonucleotide
aauucuauguccuuaacuu

SEQ ID NO: 2342232 - RNA, 19 nt, Artificial Sequence
  Description of Artificial Sequence: Synthetic oligonucleotide
uuauuagugauagaaacag

SEQ ID NO: 2342233 - RNA, 19 nt, Artificial Sequence
  Description of Artificial Sequence: Synthetic oligonucleotide
auaacuuuauuagugauag

SEQ ID NO: 2342234 - RNA, 19 nt, Artificial Sequence
  Description of Artificial Sequence: Synthetic oligonucleotide
uccauaauagcauuuacaa

SEQ ID NO: 2342235 - RNA, 19 nt, Artificial Sequence
  Description of Artificial Sequence: Synthetic oligonucleotide
aagggaaacauccuugcug

SEQ ID NO: 2342236 - RNA, 19 nt, Artificial Sequence
  Description of Artificial Sequence: Synthetic oligonucleotide
uacgguuggagucugagug

SEQ ID NO: 2342237 - RNA, 19 nt, Artificial Sequence
  Description of Artificial Sequence: Synthetic oligonucleotide
uguaaccugucgaagaccc

SEQ ID NO: 2342238 - RNA, 19 nt, Artificial Sequence
  Description of Artificial Sequence: Synthetic oligonucleotide
ucuaguaaccccuguaacc

SEQ ID NO: 2342239 - RNA, 19 nt, Artificial Sequence
  Description of Artificial Sequence: Synthetic oligonucleotide
uguugcaggaggaagccgg

SEQ ID NO: 2342240 - RNA, 19 nt, Artificial Sequence
  Description of Artificial Sequence: Synthetic oligonucleotide
ucaccaggcauuuugugcg

SEQ ID NO: 2342241 - RNA, 19 nt, Artificial Sequence
  Description of Artificial Sequence: Synthetic oligonucleotide
agaagggaaacauccuugc

SEQ ID NO: 2342242 - RNA, 19 nt, Artificial Sequence
  Description of Artificial Sequence: Synthetic oligonucleotide
ugugacaugaccaauucua

SEQ ID NO: 2342243 - RNA, 19 nt, Artificial Sequence
  Description of Artificial Sequence: Synthetic oligonucleotide
uagugauagaaacaguaca

SEQ ID NO: 2342244 - RNA, 19 nt, Artificial Sequence
  Description of Artificial Sequence: Synthetic oligonucleotide
aaaacuauguaggugucug

SEQ ID NO: 2342245 - RNA, 19 nt, Artificial Sequence
  Description of Artificial Sequence: Synthetic oligonucleotide
caaaccaagcuguaguucc

SEQ ID NO: 2342246 - RNA, 19 nt, Artificial Sequence
  Description of Artificial Sequence: Synthetic oligonucleotide
ucaguuacaucguuaauuc

SEQ ID NO: 2342247 - RNA, 19 nt, Artificial Sequence
  Description of Artificial Sequence: Synthetic oligonucleotide
uuagugauagaaacaguac

SEQ ID NO: 2342248 - RNA, 19 nt, Artificial Sequence
  Description of Artificial Sequence: Synthetic oligonucleotide
uucuauguccuuaacuucu

SEQ ID NO: 2342249 - RNA, 19 nt, Artificial Sequence
  Description of Artificial Sequence: Synthetic oligonucleotide
uuccauaauagcauuuaca

SEQ ID NO: 2342250 - RNA, 19 nt, Artificial Sequence
  Description of Artificial Sequence: Synthetic oligonucleotide
aaacaguacaaauuucaaa

SEQ ID NO: 2342251 - RNA, 19 nt, Artificial Sequence
  Description of Artificial Sequence: Synthetic oligonucleotide
uuggacauagccuuccuug

SEQ ID NO: 2342252 - RNA, 19 nt, Artificial Sequence
  Description of Artificial Sequence: Synthetic oligonucleotide
uugcucuugauacauuugc

SEQ ID NO: 2342253 - RNA, 19 nt, Artificial Sequence
  Description of Artificial Sequence: Synthetic oligonucleotide
uuuugugaugacgaagagg

SEQ ID NO: 2342254 - RNA, 19 nt, Artificial Sequence
  Description of Artificial Sequence: Synthetic oligonucleotide
cugacucuguuccagaucc

SEQ ID NO: 2342255 - RNA, 19 nt, Artificial Sequence
  Description of Artificial Sequence: Synthetic oligonucleotide
auuccauaauagcauuuac

SEQ ID NO: 2342256 - RNA, 19 nt, Artificial Sequence
  Description of Artificial Sequence: Synthetic oligonucleotide
uguaggugucugaagcugg

SEQ ID NO: 2342257 - RNA, 19 nt, Artificial Sequence
  Description of Artificial Sequence: Synthetic oligonucleotide
ugauacauuugcuugugac

SEQ ID NO: 2342258 - RNA, 19 nt, Artificial Sequence
  Description of Artificial Sequence: Synthetic oligonucleotide
auagugacucuaguaaccc

SEQ ID NO: 2342259 - RNA, 19 nt, Artificial Sequence
  Description of Artificial Sequence: Synthetic oligonucleotide
uccugaauguuugaaacag

SEQ ID NO: 2342260 - RNA, 19 nt, Artificial Sequence
  Description of Artificial Sequence: Synthetic oligonucleotide
ucguuaauuccauaauagc

SEQ ID NO: 2342261 - RNA, 19 nt, Artificial Sequence
  Description of Artificial Sequence: Synthetic oligonucleotide
gagcgagugagcgagagcg

SEQ ID NO: 2342262 - RNA, 19 nt, Artificial Sequence
  Description of Artificial Sequence: Synthetic oligonucleotide
uacaucguuaauuccauaa

SEQ ID NO: 2342263 - RNA, 19 nt, Artificial Sequence
  Description of Artificial Sequence: Synthetic oligonucleotide
uacugauucaucacugucu

SEQ ID NO: 2342264 - RNA, 19 nt, Artificial Sequence
  Description of Artificial Sequence: Synthetic oligonucleotide
agauccagcuguuugagga

SEQ ID NO: 2342265 - RNA, 19 nt, Artificial Sequence
  Description of Artificial Sequence: Synthetic oligonucleotide
aacuucuacaccuguuuca

SEQ ID NO: 2342266 - RNA, 19 nt, Artificial Sequence
  Description of Artificial Sequence: Synthetic oligonucleotide
uuuacugacuggcucuuca

SEQ ID NO: 2342267 - RNA, 19 nt, Artificial Sequence
  Description of Artificial Sequence: Synthetic oligonucleotide
gauacauuugcuugugaca

SEQ ID NO: 2342268 - RNA, 19 nt, Artificial Sequence
  Description of Artificial Sequence: Synthetic oligonucleotide
aucguuaauuccauaauag

SEQ ID NO: 2342269 - RNA, 19 nt, Artificial Sequence
  Description of Artificial Sequence: Synthetic oligonucleotide
cucuugauacauuugcuug

SEQ ID NO: 2342270 - RNA, 19 nt, Artificial Sequence
  Description of Artificial Sequence: Synthetic oligonucleotide
uuucaguggcuucaccagg

SEQ ID NO: 2342271 - RNA, 19 nt, Artificial Sequence
  Description of Artificial Sequence: Synthetic oligonucleotide
cugucgaagacccaguuug

SEQ ID NO: 2342272 - RNA, 19 nt, Artificial Sequence
  Description of Artificial Sequence: Synthetic oligonucleotide
uguggaguccuguuccucg

SEQ ID NO: 2342273 - RNA, 19 nt, Artificial Sequence
  Description of Artificial Sequence: Synthetic oligonucleotide
uacaccuguuucaucaacc

SEQ ID NO: 2342274 - RNA, 19 nt, Artificial Sequence
  Description of Artificial Sequence: Synthetic oligonucleotide
aggagcugcugucucagcc

SEQ ID NO: 2342275 - RNA, 19 nt, Artificial Sequence
  Description of Artificial Sequence: Synthetic oligonucleotide
gauagugacucuaguaacc

SEQ ID NO: 2342276 - RNA, 19 nt, Artificial Sequence
  Description of Artificial Sequence: Synthetic oligonucleotide
ggacgcagaaccaagaugg

SEQ ID NO: 2342277 - RNA, 19 nt, Artificial Sequence
  Description of Artificial Sequence: Synthetic oligonucleotide
guuugaaacagcuucaccu

SEQ ID NO: 2342278 - RNA, 19 nt, Artificial Sequence
  Description of Artificial Sequence: Synthetic oligonucleotide
ucuugauacauuugcuugu

SEQ ID NO: 2342279 - RNA, 19 nt, Artificial Sequence
  Description of Artificial Sequence: Synthetic oligonucleotide
uuccacuuuugaaacacca

SEQ ID NO: 2342280 - RNA, 19 nt, Artificial Sequence
  Description of Artificial Sequence: Synthetic oligonucleotide
ucuuguagacaucugguuu

SEQ ID NO: 2342281 - RNA, 19 nt, Artificial Sequence
  Description of Artificial Sequence: Synthetic oligonucleotide
uguuugaaacagcuucacc

SEQ ID NO: 2342282 - RNA, 19 nt, Artificial Sequence
  Description of Artificial Sequence: Synthetic oligonucleotide
gauggcggcggaaagagag

SEQ ID NO: 2342283 - RNA, 19 nt, Artificial Sequence
  Description of Artificial Sequence: Synthetic oligonucleotide
uugccuucuuuucacuccg

SEQ ID NO: 2342284 - RNA, 19 nt, Artificial Sequence
  Description of Artificial Sequence: Synthetic oligonucleotide
uuuggauuuccggauagug

SEQ ID NO: 2342285 - RNA, 19 nt, Artificial Sequence
  Description of Artificial Sequence: Synthetic oligonucleotide
aauguuugaaacagcuuca

SEQ ID NO: 2342286 - RNA, 19 nt, Artificial Sequence
  Description of Artificial Sequence: Synthetic oligonucleotide
gacaugaccaauucuaugu

SEQ ID NO: 2342287 - RNA, 19 nt, Artificial Sequence
  Description of Artificial Sequence: Synthetic oligonucleotide
agggaaacauccuugcugu

SEQ ID NO: 2342288 - RNA, 19 nt, Artificial Sequence
  Description of Artificial Sequence: Synthetic oligonucleotide
aagauggcggcggaaagag

SEQ ID NO: 2342289 - RNA, 19 nt, Artificial Sequence
  Description of Artificial Sequence: Synthetic oligonucleotide
caugaccaauucuaugucc

SEQ ID NO: 2342290 - RNA, 19 nt, Artificial Sequence
  Description of Artificial Sequence: Synthetic oligonucleotide
uuugcucuugauacauuug

SEQ ID NO: 2342291 - RNA, 19 nt, Artificial Sequence
  Description of Artificial Sequence: Synthetic oligonucleotide
auuagugauagaaacagua

SEQ ID NO: 2342292 - RNA, 19 nt, Artificial Sequence
  Description of Artificial Sequence: Synthetic oligonucleotide
uuugcuuuacugacuggcu

SEQ ID NO: 2342293 - RNA, 19 nt, Artificial Sequence
  Description of Artificial Sequence: Synthetic oligonucleotide
uugaaacagcuucaccuug

SEQ ID NO: 2342294 - RNA, 19 nt, Artificial Sequence
  Description of Artificial Sequence: Synthetic oligonucleotide
ugaaacagcuucaccuuga

SEQ ID NO: 2342295 - RNA, 19 nt, Artificial Sequence
  Description of Artificial Sequence: Synthetic oligonucleotide
cuugccuucuuuucacucc

SEQ ID NO: 2342296 - RNA, 19 nt, Artificial Sequence
  Description of Artificial Sequence: Synthetic oligonucleotide
acucuguuuugcuuuacug

SEQ ID NO: 2342297 - RNA, 19 nt, Artificial Sequence
  Description of Artificial Sequence: Synthetic oligonucleotide
cauuuugugcggaggacgc

SEQ ID NO: 2342298 - RNA, 19 nt, Artificial Sequence
  Description of Artificial Sequence: Synthetic oligonucleotide
aucgauuucagcugcugcu

SEQ ID NO: 2342299 - RNA, 19 nt, Artificial Sequence
  Description of Artificial Sequence: Synthetic oligonucleotide
uucacuccgacucuguuuu

SEQ ID NO: 2342300 - RNA, 19 nt, Artificial Sequence
  Description of Artificial Sequence: Synthetic oligonucleotide
aauuccauaauagcauuua

SEQ ID NO: 2342301 - RNA, 19 nt, Artificial Sequence
  Description of Artificial Sequence: Synthetic oligonucleotide
agaaccaagauggcggcgg

SEQ ID NO: 2342302 - RNA, 19 nt, Artificial Sequence
  Description of Artificial Sequence: Synthetic oligonucleotide
acuauguaggugucugaag

SEQ ID NO: 2342303 - RNA, 19 nt, Artificial Sequence
  Description of Artificial Sequence: Synthetic oligonucleotide
uauguaggugucugaagcu

SEQ ID NO: 2342304 - RNA, 19 nt, Artificial Sequence
  Description of Artificial Sequence: Synthetic oligonucleotide
ugacaugaccaauucuaug

SEQ ID NO: 2342305 - RNA, 19 nt, Artificial Sequence
  Description of Artificial Sequence: Synthetic oligonucleotide
guagacaucugguuuugug

SEQ ID NO: 2342306 - RNA, 19 nt, Artificial Sequence
  Description of Artificial Sequence: Synthetic oligonucleotide
aaagagagcgagcgaguga

SEQ ID NO: 2342307 - RNA, 19 nt, Artificial Sequence
  Description of Artificial Sequence: Synthetic oligonucleotide
ugucgaagacccaguuugg

SEQ ID NO: 2342308 - RNA, 19 nt, Artificial Sequence
  Description of Artificial Sequence: Synthetic oligonucleotide
uaaccugucgaagacccag

SEQ ID NO: 2342309 - RNA, 19 nt, Artificial Sequence
  Description of Artificial Sequence: Synthetic oligonucleotide
auacauuugcuugugacau

SEQ ID NO: 2342310 - RNA, 19 nt, Artificial Sequence
  Description of Artificial Sequence: Synthetic oligonucleotide
agaagccauaacuuuauua

SEQ ID NO: 2342311 - RNA, 19 nt, Artificial Sequence
  Description of Artificial Sequence: Synthetic oligonucleotide
ugcuuuacugacuggcucu

SEQ ID NO: 2342312 - RNA, 19 nt, Artificial Sequence
  Description of Artificial Sequence: Synthetic oligonucleotide
cuucaucgauuucagcugc

SEQ ID NO: 2342313 - RNA, 19 nt, Artificial Sequence
  Description of Artificial Sequence: Synthetic oligonucleotide
agccauaacuuuauuagug

SEQ ID NO: 2342314 - RNA, 19 nt, Artificial Sequence
  Description of Artificial Sequence: Synthetic oligonucleotide
uuccugaauguuugaaaca

SEQ ID NO: 2342315 - RNA, 19 nt, Artificial Sequence
  Description of Artificial Sequence: Synthetic oligonucleotide
gugcggaggacgcagaacc

SEQ ID NO: 2342316 - RNA, 19 nt, Artificial Sequence
  Description of Artificial Sequence: Synthetic oligonucleotide
aaccccuguaaccugucga

SEQ ID NO: 2342317 - RNA, 19 nt, Artificial Sequence
  Description of Artificial Sequence: Synthetic oligonucleotide
aaacuauguaggugucuga

SEQ ID NO: 2342318 - RNA, 19 nt, Artificial Sequence
  Description of Artificial Sequence: Synthetic oligonucleotide
cauccuugcugucaguuac

SEQ ID NO: 2342319 - RNA, 19 nt, Artificial Sequence
  Description of Artificial Sequence: Synthetic oligonucleotide
caguacaaauuucaaacca

SEQ ID NO: 2342320 - RNA, 19 nt, Artificial Sequence
  Description of Artificial Sequence: Synthetic oligonucleotide
ugcucuugauacauuugcu

SEQ ID NO: 2342321 - RNA, 19 nt, Artificial Sequence
  Description of Artificial Sequence: Synthetic oligonucleotide
cuguguggaguccuguucc

SEQ ID NO: 2342322 - RNA, 19 nt, Artificial Sequence
  Description of Artificial Sequence: Synthetic oligonucleotide
aacuauguaggugucugaa

SEQ ID NO: 2342323 - RNA, 19 nt, Artificial Sequence
  Description of Artificial Sequence: Synthetic oligonucleotide
agguuguggcaacuccugc

SEQ ID NO: 2342324 - RNA, 19 nt, Artificial Sequence
  Description of Artificial Sequence: Synthetic oligonucleotide
auguuugaaacagcuucac

SEQ ID NO: 2342325 - RNA, 19 nt, Artificial Sequence
  Description of Artificial Sequence: Synthetic oligonucleotide
gagucugaguguuuuccug

SEQ ID NO: 2342326 - RNA, 19 nt, Artificial Sequence
  Description of Artificial Sequence: Synthetic oligonucleotide
agacaucugguuuugugau

SEQ ID NO: 2342327 - RNA, 19 nt, Artificial Sequence
  Description of Artificial Sequence: Synthetic oligonucleotide
uguacgguuggagucugag

SEQ ID NO: 2342328 - RNA, 19 nt, Artificial Sequence
  Description of Artificial Sequence: Synthetic oligonucleotide
acucuaguaaccccuguaa

SEQ ID NO: 2342329 - RNA, 19 nt, Artificial Sequence
  Description of Artificial Sequence: Synthetic oligonucleotide
accuugaacuuugaauuuc

SEQ ID NO: 2342330 - RNA, 19 nt, Artificial Sequence
  Description of Artificial Sequence: Synthetic oligonucleotide
ucgaagacccaguuuggac

SEQ ID NO: 2342331 - RNA, 19 nt, Artificial Sequence
  Description of Artificial Sequence: Synthetic oligonucleotide
uugcuuuacugacuggcuc

SEQ ID NO: 2342332 - RNA, 19 nt, Artificial Sequence
  Description of Artificial Sequence: Synthetic oligonucleotide
agugagcgagagcguaacc

SEQ ID NO: 2342333 - RNA, 19 nt, Artificial Sequence
  Description of Artificial Sequence: Synthetic oligonucleotide
ugaauguuugaaacagcuu

SEQ ID NO: 2342334 - RNA, 19 nt, Artificial Sequence
  Description of Artificial Sequence: Synthetic oligonucleotide
gaaagagagcgagcgagug

SEQ ID NO: 2342335 - RNA, 19 nt, Artificial Sequence
  Description of Artificial Sequence: Synthetic oligonucleotide
uggcucuucaucgauuuca

SEQ ID NO: 2342336 - RNA, 19 nt, Artificial Sequence
  Description of Artificial Sequence: Synthetic oligonucleotide
cucuuguacgguuggaguc

SEQ ID NO: 2342337 - RNA, 19 nt, Artificial Sequence
  Description of Artificial Sequence: Synthetic oligonucleotide
acaucguuaauuccauaau

SEQ ID NO: 2342338 - RNA, 19 nt, Artificial Sequence
  Description of Artificial Sequence: Synthetic oligonucleotide
uccuuaacuucuacaccug

SEQ ID NO: 2342339 - RNA, 19 nt, Artificial Sequence
  Description of Artificial Sequence: Synthetic oligonucleotide
ugcucgguagcagggacgg

SEQ ID NO: 2342340 - RNA, 19 nt, Artificial Sequence
  Description of Artificial Sequence: Synthetic oligonucleotide
uuccggauagugacucuag

SEQ ID NO: 2342341 - RNA, 19 nt, Artificial Sequence
  Description of Artificial Sequence: Synthetic oligonucleotide
aucugguuuugugaugacg

SEQ ID NO: 2342342 - RNA, 19 nt, Artificial Sequence
  Description of Artificial Sequence: Synthetic oligonucleotide
uaaccccuguaaccugucg

SEQ ID NO: 2342343 - RNA, 19 nt, Artificial Sequence
  Description of Artificial Sequence: Synthetic oligonucleotide
caucgauuucagcugcugc

SEQ ID NO: 2342344 - RNA, 19 nt, Artificial Sequence
  Description of Artificial Sequence: Synthetic oligonucleotide
acaccuguuucaucaaccu

SEQ ID NO: 2342345 - RNA, 19 nt, Artificial Sequence
  Description of Artificial Sequence: Synthetic oligonucleotide
gauuuccggauagugacuc

SEQ ID NO: 2342346 - RNA, 19 nt, Artificial Sequence
  Description of Artificial Sequence: Synthetic oligonucleotide
ugugcuugcugagacaaau

SEQ ID NO: 2342347 - RNA, 19 nt, Artificial Sequence
  Description of Artificial Sequence: Synthetic oligonucleotide
ucgcucuccucuuguacgg

SEQ ID NO: 2342348 - RNA, 19 nt, Artificial Sequence
  Description of Artificial Sequence: Synthetic oligonucleotide
uugugacaugaccaauucu

SEQ ID NO: 2342349 - RNA, 19 nt, Artificial Sequence
  Description of Artificial Sequence: Synthetic oligonucleotide
ucuuguacgguuggagucu

SEQ ID NO: 2342350 - RNA, 19 nt, Artificial Sequence
  Description of Artificial Sequence: Synthetic oligonucleotide
aguacaaauuucaaaccaa

SEQ ID NO: 2342351 - RNA, 19 nt, Artificial Sequence
  Description of Artificial Sequence: Synthetic oligonucleotide
guuaauuccauaauagcau

SEQ ID NO: 2342352 - RNA, 19 nt, Artificial Sequence
  Description of Artificial Sequence: Synthetic oligonucleotide
uccucuuguacgguuggag

SEQ ID NO: 2342353 - RNA, 19 nt, Artificial Sequence
  Description of Artificial Sequence: Synthetic oligonucleotide
cugaauguuugaaacagcu

SEQ ID NO: 2342354 - RNA, 19 nt, Artificial Sequence
  Description of Artificial Sequence: Synthetic oligonucleotide
cugagguuguggcaacucc

SEQ ID NO: 2342355 - RNA, 19 nt, Artificial Sequence
  Description of Artificial Sequence: Synthetic oligonucleotide
cauaacuuuauuagugaua

SEQ ID NO: 2342356 - RNA, 19 nt, Artificial Sequence
  Description of Artificial Sequence: Synthetic oligonucleotide
aggugucugaagcugggcu

SEQ ID NO: 2342357 - RNA, 19 nt, Artificial Sequence
  Description of Artificial Sequence: Synthetic oligonucleotide
ucugacucuguuccagauc

SEQ ID NO: 2342358 - RNA, 19 nt, Artificial Sequence
  Description of Artificial Sequence: Synthetic oligonucleotide
cuugauacauuugcuugug

SEQ ID NO: 2342359 - RNA, 19 nt, Artificial Sequence
  Description of Artificial Sequence: Synthetic oligonucleotide
uaacccacgccuguugcag

SEQ ID NO: 2342360 - RNA, 19 nt, Artificial Sequence
  Description of Artificial Sequence: Synthetic oligonucleotide
gagagcguaacccacgccu

SEQ ID NO: 2342361 - RNA, 19 nt, Artificial Sequence
  Description of Artificial Sequence: Synthetic oligonucleotide
gugagcgagagcguaaccc

SEQ ID NO: 2342362 - RNA, 19 nt, Artificial Sequence
  Description of Artificial Sequence: Synthetic oligonucleotide
uguuccucgagcucuggua

SEQ ID NO: 2342363 - RNA, 19 nt, Artificial Sequence
  Description of Artificial Sequence: Synthetic oligonucleotide
aacccacgccuguugcagg

SEQ ID NO: 2342364 - RNA, 19 nt, Artificial Sequence
  Description of Artificial Sequence: Synthetic oligonucleotide
ggcggaaagagagcgagcg

SEQ ID NO: 2342365 - RNA, 19 nt, Artificial Sequence
  Description of Artificial Sequence: Synthetic oligonucleotide
ucgauuucagcugcugcug

SEQ ID NO: 2342366 - RNA, 19 nt, Artificial Sequence
  Description of Artificial Sequence: Synthetic oligonucleotide
guacugauucaucacuguc

SEQ ID NO: 2342367 - RNA, 19 nt, Artificial Sequence
  Description of Artificial Sequence: Synthetic oligonucleotide
uccgacucuguuuugcuuu

SEQ ID NO: 2342368 - RNA, 19 nt, Artificial Sequence
  Description of Artificial Sequence: Synthetic oligonucleotide
ggauagugacucuaguaac

SEQ ID NO: 2342369 - RNA, 19 nt, Artificial Sequence
  Description of Artificial Sequence: Synthetic oligonucleotide
guuccucgagcucugguac

SEQ ID NO: 2342370 - RNA, 19 nt, Artificial Sequence
  Description of Artificial Sequence: Synthetic oligonucleotide
augaccaauucuauguccu

SEQ ID NO: 2342371 - RNA, 19 nt, Artificial Sequence
  Description of Artificial Sequence: Synthetic oligonucleotide
cucugguacugauucauca

SEQ ID NO: 2342372 - RNA, 19 nt, Artificial Sequence
  Description of Artificial Sequence: Synthetic oligonucleotide
uuucacuccgacucuguuu

SEQ ID NO: 2342373 - RNA, 19 nt, Artificial Sequence
  Description of Artificial Sequence: Synthetic oligonucleotide
cguuaauuccauaauagca

SEQ ID NO: 2342374 - RNA, 19 nt, Artificial Sequence
  Description of Artificial Sequence: Synthetic oligonucleotide
agcugcuaacugugcuugc

SEQ ID NO: 2342375 - RNA, 19 nt, Artificial Sequence
  Description of Artificial Sequence: Synthetic oligonucleotide
auguaggugucugaagcug

SEQ ID NO: 2342376 - RNA, 19 nt, Artificial Sequence
  Description of Artificial Sequence: Synthetic oligonucleotide
acgcagaaccaagauggcg

SEQ ID NO: 2342377 - RNA, 19 nt, Artificial Sequence
  Description of Artificial Sequence: Synthetic oligonucleotide
agacccaguuuggacauag

SEQ ID NO: 2342378 - RNA, 19 nt, Artificial Sequence
  Description of Artificial Sequence: Synthetic oligonucleotide
caucguuaauuccauaaua

SEQ ID NO: 2342379 - RNA, 19 nt, Artificial Sequence
  Description of Artificial Sequence: Synthetic oligonucleotide
gcagggacgguuucagugg

SEQ ID NO: 2342380 - RNA, 19 nt, Artificial Sequence
  Description of Artificial Sequence: Synthetic oligonucleotide
ugggcuuguugugugguug

SEQ ID NO: 2342381 - RNA, 19 nt, Artificial Sequence
  Description of Artificial Sequence: Synthetic oligonucleotide
acugugcuugcugagacaa

SEQ ID NO: 2342382 - RNA, 19 nt, Artificial Sequence
  Description of Artificial Sequence: Synthetic oligonucleotide
uccggauagugacucuagu

SEQ ID NO: 2342383 - RNA, 19 nt, Artificial Sequence
  Description of Artificial Sequence: Synthetic oligonucleotide
gcauuuugugcggaggacg

SEQ ID NO: 2342384 - RNA, 19 nt, Artificial Sequence
  Description of Artificial Sequence: Synthetic oligonucleotide
ugucugacucuguuccaga

SEQ ID NO: 2342385 - RNA, 19 nt, Artificial Sequence
  Description of Artificial Sequence: Synthetic oligonucleotide
gagguuguggcaacuccug

SEQ ID NO: 2342386 - RNA, 19 nt, Artificial Sequence
  Description of Artificial Sequence: Synthetic oligonucleotide
ggcaacuccugcucgguag

SEQ ID NO: 2342387 - RNA, 19 nt, Artificial Sequence
  Description of Artificial Sequence: Synthetic oligonucleotide
uucaucgauuucagcugcu

SEQ ID NO: 2342388 - RNA, 19 nt, Artificial Sequence
  Description of Artificial Sequence: Synthetic oligonucleotide
guaggugucugaagcuggg

SEQ ID NO: 2342389 - RNA, 19 nt, Artificial Sequence
  Description of Artificial Sequence: Synthetic oligonucleotide
caauucuauguccuuaacu

SEQ ID NO: 2342390 - RNA, 19 nt, Artificial Sequence
  Description of Artificial Sequence: Synthetic oligonucleotide
ugguugucuguguggaguc

SEQ ID NO: 2342391 - RNA, 19 nt, Artificial Sequence
  Description of Artificial Sequence: Synthetic oligonucleotide
uggaguccuguuccucgag

SEQ ID NO: 2342392 - RNA, 19 nt, Artificial Sequence
  Description of Artificial Sequence: Synthetic oligonucleotide
aauuucaaaccaagcugua

SEQ ID NO: 2342393 - RNA, 19 nt, Artificial Sequence
  Description of Artificial Sequence: Synthetic oligonucleotide
ugacucuaguaaccccugu

SEQ ID NO: 2342394 - RNA, 19 nt, Artificial Sequence
  Description of Artificial Sequence: Synthetic oligonucleotide
gacgguuucaguggcuuca

SEQ ID NO: 2342395 - RNA, 19 nt, Artificial Sequence
  Description of Artificial Sequence: Synthetic oligonucleotide
uguguggaguccuguuccu

SEQ ID NO: 2342396 - RNA, 19 nt, Artificial Sequence
  Description of Artificial Sequence: Synthetic oligonucleotide
uuacugacuggcucuucau

SEQ ID NO: 2342397 - RNA, 19 nt, Artificial Sequence
  Description of Artificial Sequence: Synthetic oligonucleotide
gccauaacuuuauuaguga

SEQ ID NO: 2342398 - RNA, 19 nt, Artificial Sequence
  Description of Artificial Sequence: Synthetic oligonucleotide
cugcucgguagcagggacg

SEQ ID NO: 2342399 - RNA, 19 nt, Artificial Sequence
  Description of Artificial Sequence: Synthetic oligonucleotide
caggcauuuugugcggagg

SEQ ID NO: 2342400 - RNA, 19 nt, Artificial Sequence
  Description of Artificial Sequence: Synthetic oligonucleotide
gacucuaguaaccccugua

SEQ ID NO: 2342401 - RNA, 19 nt, Artificial Sequence
  Description of Artificial Sequence: Synthetic oligonucleotide
ugccuuugcucuugauaca

SEQ ID NO: 2342402 - RNA, 19 nt, Artificial Sequence
  Description of Artificial Sequence: Synthetic oligonucleotide
uuuccggauagugacucua

SEQ ID NO: 2342403 - RNA, 19 nt, Artificial Sequence
  Description of Artificial Sequence: Synthetic oligonucleotide
acuccgacucuguuuugcu

SEQ ID NO: 2342404 - RNA, 19 nt, Artificial Sequence
  Description of Artificial Sequence: Synthetic oligonucleotide
acgguuggagucugagugu

SEQ ID NO: 2342405 - RNA, 19 nt, Artificial Sequence
  Description of Artificial Sequence: Synthetic oligonucleotide
augacgaagaggauauuuu

SEQ ID NO: 2342406 - RNA, 19 nt, Artificial Sequence
  Description of Artificial Sequence: Synthetic oligonucleotide
cuaguaaccccuguaaccu

SEQ ID NO: 2342407 - RNA, 19 nt, Artificial Sequence
  Description of Artificial Sequence: Synthetic oligonucleotide
aguaaccccuguaaccugu

SEQ ID NO: 2342408 - RNA, 19 nt, Artificial Sequence
  Description of Artificial Sequence: Synthetic oligonucleotide
ugacuggcucuucaucgau

SEQ ID NO: 2342409 - RNA, 19 nt, Artificial Sequence
  Description of Artificial Sequence: Synthetic oligonucleotide
gcuaacugugcuugcugag

SEQ ID NO: 2342410 - RNA, 19 nt, Artificial Sequence
  Description of Artificial Sequence: Synthetic oligonucleotide
accccuguaaccugucgaa

SEQ ID NO: 2342411 - RNA, 19 nt, Artificial Sequence
  Description of Artificial Sequence: Synthetic oligonucleotide
agcgagagcguaacccacg

SEQ ID NO: 2342412 - RNA, 19 nt, Artificial Sequence
  Description of Artificial Sequence: Synthetic oligonucleotide
gucaguuacaucguuaauu

SEQ ID NO: 2342413 - RNA, 19 nt, Artificial Sequence
  Description of Artificial Sequence: Synthetic oligonucleotide
guugcaggaggaagccggg

SEQ ID NO: 2342414 - RNA, 19 nt, Artificial Sequence
  Description of Artificial Sequence: Synthetic oligonucleotide
gaugacgaagaggauauuu

SEQ ID NO: 2342415 - RNA, 19 nt, Artificial Sequence
  Description of Artificial Sequence: Synthetic oligonucleotide
cacuccgacucuguuuugc

SEQ ID NO: 2342416 - RNA, 19 nt, Artificial Sequence
  Description of Artificial Sequence: Synthetic oligonucleotide
uuacaucguuaauuccaua

SEQ ID NO: 2342417 - RNA, 19 nt, Artificial Sequence
  Description of Artificial Sequence: Synthetic oligonucleotide
uccauccaacaagaagcca

SEQ ID NO: 2342418 - RNA, 19 nt, Artificial Sequence
  Description of Artificial Sequence: Synthetic oligonucleotide
ugaccaauucuauguccuu

SEQ ID NO: 2342419 - RNA, 19 nt, Artificial Sequence
  Description of Artificial Sequence: Synthetic oligonucleotide
auggcggcggaaagagagc

SEQ ID NO: 2342420 - RNA, 19 nt, Artificial Sequence
  Description of Artificial Sequence: Synthetic oligonucleotide
cuuguagacaucugguuuu

SEQ ID NO: 2342421 - RNA, 19 nt, Artificial Sequence
  Description of Artificial Sequence: Synthetic oligonucleotide
ggaaacauccuugcuguca

SEQ ID NO: 2342422 - RNA, 19 nt, Artificial Sequence
  Description of Artificial Sequence: Synthetic oligonucleotide
gagugagcgagagcguaac

SEQ ID NO: 2342423 - RNA, 19 nt, Artificial Sequence
  Description of Artificial Sequence: Synthetic oligonucleotide
ugacucuguuccagaucca

SEQ ID NO: 2342424 - RNA, 19 nt, Artificial Sequence
  Description of Artificial Sequence: Synthetic oligonucleotide
cuaacugugcuugcugaga

SEQ ID NO: 2342425 - RNA, 19 nt, Artificial Sequence
  Description of Artificial Sequence: Synthetic oligonucleotide
ccuguaaccugucgaagac

SEQ ID NO: 2342426 - RNA, 19 nt, Artificial Sequence
  Description of Artificial Sequence: Synthetic oligonucleotide
uugugcggaggacgcagaa

SEQ ID NO: 2342427 - RNA, 19 nt, Artificial Sequence
  Description of Artificial Sequence: Synthetic oligonucleotide
acgguuucaguggcuucac

SEQ ID NO: 2342428 - RNA, 19 nt, Artificial Sequence
  Description of Artificial Sequence: Synthetic oligonucleotide
gaagggaaacauccuugcu

SEQ ID NO: 2342429 - RNA, 19 nt, Artificial Sequence
  Description of Artificial Sequence: Synthetic oligonucleotide
aguggcuucaccaggcauu

SEQ ID NO: 2342430 - RNA, 19 nt, Artificial Sequence
  Description of Artificial Sequence: Synthetic oligonucleotide
ucgguagcagggacgguuu

SEQ ID NO: 2342431 - RNA, 19 nt, Artificial Sequence
  Description of Artificial Sequence: Synthetic oligonucleotide
uugugaugacgaagaggau

SEQ ID NO: 2342432 - RNA, 19 nt, Artificial Sequence
  Description of Artificial Sequence: Synthetic oligonucleotide
ugugcggaggacgcagaac

SEQ ID NO: 2342433 - RNA, 19 nt, Artificial Sequence
  Description of Artificial Sequence: Synthetic oligonucleotide
uuccucgagcucugguacu

SEQ ID NO: 2342434 - RNA, 19 nt, Artificial Sequence
  Description of Artificial Sequence: Synthetic oligonucleotide
ugcugucaguuacaucguu

SEQ ID NO: 2342435 - RNA, 19 nt, Artificial Sequence
  Description of Artificial Sequence: Synthetic oligonucleotide
agagcguaacccacgccug

SEQ ID NO: 2342436 - RNA, 19 nt, Artificial Sequence
  Description of Artificial Sequence: Synthetic oligonucleotide
gugaugacgaagaggauau

SEQ ID NO: 2342437 - RNA, 19 nt, Artificial Sequence
  Description of Artificial Sequence: Synthetic oligonucleotide
acauagccuuccuugccuu

SEQ ID NO: 2342438 - RNA, 19 nt, Artificial Sequence
  Description of Artificial Sequence: Synthetic oligonucleotide
guaacccacgccuguugca

SEQ ID NO: 2342439 - RNA, 19 nt, Artificial Sequence
  Description of Artificial Sequence: Synthetic oligonucleotide
cauccaacaagaagccaua

SEQ ID NO: 2342440 - RNA, 19 nt, Artificial Sequence
  Description of Artificial Sequence: Synthetic oligonucleotide
gaaccaagauggcggcgga

SEQ ID NO: 2342441 - RNA, 19 nt, Artificial Sequence
  Description of Artificial Sequence: Synthetic oligonucleotide
caguuuggacauagccuuc

SEQ ID NO: 2342442 - RNA, 19 nt, Artificial Sequence
  Description of Artificial Sequence: Synthetic oligonucleotide
cugacuggcucuucaucga

SEQ ID NO: 2342443 - RNA, 19 nt, Artificial Sequence
  Description of Artificial Sequence: Synthetic oligonucleotide
cuuguacgguuggagucug

SEQ ID NO: 2342444 - RNA, 19 nt, Artificial Sequence
  Description of Artificial Sequence: Synthetic oligonucleotide
uccuugcugucaguuacau

SEQ ID NO: 2342445 - RNA, 19 nt, Artificial Sequence
  Description of Artificial Sequence: Synthetic oligonucleotide
ugcuugugacaugaccaau

SEQ ID NO: 2342446 - RNA, 19 nt, Artificial Sequence
  Description of Artificial Sequence: Synthetic oligonucleotide
caucugguuuugugaugac

SEQ ID NO: 2342447 - RNA, 19 nt, Artificial Sequence
  Description of Artificial Sequence: Synthetic oligonucleotide
guuacaucguuaauuccau

SEQ ID NO: 2342448 - RNA, 19 nt, Artificial Sequence
  Description of Artificial Sequence: Synthetic oligonucleotide
gagcgagagcguaacccac

SEQ ID NO: 2342449 - RNA, 19 nt, Artificial Sequence
  Description of Artificial Sequence: Synthetic oligonucleotide
auuuugugcggaggacgca

SEQ ID NO: 2342450 - RNA, 19 nt, Artificial Sequence
  Description of Artificial Sequence: Synthetic oligonucleotide
caagauggcggcggaaaga

SEQ ID NO: 2342451 - RNA, 19 nt, Artificial Sequence
  Description of Artificial Sequence: Synthetic oligonucleotide
uuguacgguuggagucuga

SEQ ID NO: 2342452 - RNA, 19 nt, Artificial Sequence
  Description of Artificial Sequence: Synthetic oligonucleotide
uugcaggaggaagccgggc

SEQ ID NO: 2342453 - RNA, 19 nt, Artificial Sequence
  Description of Artificial Sequence: Synthetic oligonucleotide
accugucgaagacccaguu

SEQ ID NO: 2342454 - RNA, 19 nt, Artificial Sequence
  Description of Artificial Sequence: Synthetic oligonucleotide
cuguuccagauccagcugu

SEQ ID NO: 2342455 - RNA, 19 nt, Artificial Sequence
  Description of Artificial Sequence: Synthetic oligonucleotide
cugguuuugugaugacgaa

SEQ ID NO: 2342456 - RNA, 19 nt, Artificial Sequence
  Description of Artificial Sequence: Synthetic oligonucleotide
gccuguugcaggaggaagc

SEQ ID NO: 2342457 - RNA, 19 nt, Artificial Sequence
  Description of Artificial Sequence: Synthetic oligonucleotide
gucgaagacccaguuugga

SEQ ID NO: 2342458 - RNA, 19 nt, Artificial Sequence
  Description of Artificial Sequence: Synthetic oligonucleotide
cgaagacccaguuuggaca

SEQ ID NO: 2342459 - RNA, 19 nt, Artificial Sequence
  Description of Artificial Sequence: Synthetic oligonucleotide
gcggcggaaagagagcgag

SEQ ID NO: 2342460 - RNA, 19 nt, Artificial Sequence
  Description of Artificial Sequence: Synthetic oligonucleotide
auccaacaagaagccauaa

SEQ ID NO: 2342461 - RNA, 19 nt, Artificial Sequence
  Description of Artificial Sequence: Synthetic oligonucleotide
guggaguccuguuccucga

SEQ ID NO: 2342462 - RNA, 19 nt, Artificial Sequence
  Description of Artificial Sequence: Synthetic oligonucleotide
cucggacugccuuugcucu

SEQ ID NO: 2342463 - RNA, 19 nt, Artificial Sequence
  Description of Artificial Sequence: Synthetic oligonucleotide
gcgagagcguaacccacgc

SEQ ID NO: 2342464 - RNA, 19 nt, Artificial Sequence
  Description of Artificial Sequence: Synthetic oligonucleotide
uggcaacuccugcucggua

SEQ ID NO: 2342465 - RNA, 19 nt, Artificial Sequence
  Description of Artificial Sequence: Synthetic oligonucleotide
aaccaagauggcggcggaa

SEQ ID NO: 2342466 - RNA, 19 nt, Artificial Sequence
  Description of Artificial Sequence: Synthetic oligonucleotide
cggauagugacucuaguaa

SEQ ID NO: 2342467 - RNA, 19 nt, Artificial Sequence
  Description of Artificial Sequence: Synthetic oligonucleotide
cacgccuguugcaggagga

SEQ ID NO: 2342468 - RNA, 19 nt, Artificial Sequence
  Description of Artificial Sequence: Synthetic oligonucleotide
gccuucuuuucacuccgac

SEQ ID NO: 2342469 - RNA, 19 nt, Artificial Sequence
  Description of Artificial Sequence: Synthetic oligonucleotide
gacccaguuuggacauagc

SEQ ID NO: 2342470 - RNA, 19 nt, Artificial Sequence
  Description of Artificial Sequence: Synthetic oligonucleotide
guugugugguugucugugu

SEQ ID NO: 2342471 - RNA, 19 nt, Artificial Sequence
  Description of Artificial Sequence: Synthetic oligonucleotide
gaguguuuuccugaauguu

SEQ ID NO: 2342472 - RNA, 19 nt, Artificial Sequence
  Description of Artificial Sequence: Synthetic oligonucleotide
cucuuguagacaucugguu

SEQ ID NO: 2342473 - RNA, 19 nt, Artificial Sequence
  Description of Artificial Sequence: Synthetic oligonucleotide
cccuguaaccugucgaaga

SEQ ID NO: 2342474 - RNA, 19 nt, Artificial Sequence
  Description of Artificial Sequence: Synthetic oligonucleotide
guugucuguguggaguccu

SEQ ID NO: 2342475 - RNA, 19 nt, Artificial Sequence
  Description of Artificial Sequence: Synthetic oligonucleotide
cguaacccacgccuguugc

SEQ ID NO: 2342476 - RNA, 19 nt, Artificial Sequence
  Description of Artificial Sequence: Synthetic oligonucleotide
ggcauuuugugcggaggac

SEQ ID NO: 2342477 - RNA, 19 nt, Artificial Sequence
  Description of Artificial Sequence: Synthetic oligonucleotide
cuuuucacuccgacucugu

SEQ ID NO: 2342478 - RNA, 19 nt, Artificial Sequence
  Description of Artificial Sequence: Synthetic oligonucleotide
uccucgcucuccucuugua

SEQ ID NO: 2342479 - RNA, 19 nt, Artificial Sequence
  Description of Artificial Sequence: Synthetic oligonucleotide
guuggagucugaguguuuu

SEQ ID NO: 2342480 - RNA, 19 nt, Artificial Sequence
  Description of Artificial Sequence: Synthetic oligonucleotide
ccauccaacaagaagccau

SEQ ID NO: 2342481 - RNA, 19 nt, Artificial Sequence
  Description of Artificial Sequence: Synthetic oligonucleotide
ccaggcauuuugugcggag

SEQ ID NO: 2342482 - RNA, 19 nt, Artificial Sequence
  Description of Artificial Sequence: Synthetic oligonucleotide
gguugucuguguggagucc

SEQ ID NO: 2342483 - RNA, 19 nt, Artificial Sequence
  Description of Artificial Sequence: Synthetic oligonucleotide
guacgguuggagucugagu

SEQ ID NO: 2342484 - RNA, 19 nt, Artificial Sequence
  Description of Artificial Sequence: Synthetic oligonucleotide
gugacaugaccaauucuau

SEQ ID NO: 2342485 - RNA, 19 nt, Artificial Sequence
  Description of Artificial Sequence: Synthetic oligonucleotide
ucggacugccuuugcucuu

SEQ ID NO: 2342486 - RNA, 19 nt, Artificial Sequence
  Description of Artificial Sequence: Synthetic oligonucleotide
gagcguaacccacgccugu

SEQ ID NO: 2342487 - RNA, 19 nt, Artificial Sequence
  Description of Artificial Sequence: Synthetic oligonucleotide
gcguaacccacgccuguug

SEQ ID NO: 2342488 - RNA, 19 nt, Artificial Sequence
  Description of Artificial Sequence: Synthetic oligonucleotide
cgauuucagcugcugcugc

SEQ ID NO: 2342489 - RNA, 19 nt, Artificial Sequence
  Description of Artificial Sequence: Synthetic oligonucleotide
ccacgccuguugcaggagg

SEQ ID NO: 2342490 - RNA, 19 nt, Artificial Sequence
  Description of Artificial Sequence: Synthetic oligonucleotide
ccugcucgguagcagggac

SEQ ID NO: 2342491 - RNA, 19 nt, Artificial Sequence
  Description of Artificial Sequence: Synthetic oligonucleotide
ccucgcucuccucuuguac

SEQ ID NO: 2342492 - RNA, 19 nt, Artificial Sequence
  Description of Artificial Sequence: Synthetic oligonucleotide
gugucugaagcugggcucu

SEQ ID NO: 2342493 - RNA, 19 nt, Artificial Sequence
  Description of Artificial Sequence: Synthetic oligonucleotide
guaaccugucgaagaccca

SEQ ID NO: 2342494 - RNA, 19 nt, Artificial Sequence
  Description of Artificial Sequence: Synthetic oligonucleotide
ggaggacgcagaaccaaga

SEQ ID NO: 2342495 - RNA, 19 nt, Artificial Sequence
  Description of Artificial Sequence: Synthetic oligonucleotide
ugaugacgaagaggauauu

SEQ ID NO: 2342496 - RNA, 19 nt, Artificial Sequence
  Description of Artificial Sequence: Synthetic oligonucleotide
ccuugaacuuugaauuucu

SEQ ID NO: 2342497 - RNA, 19 nt, Artificial Sequence
  Description of Artificial Sequence: Synthetic oligonucleotide
gcucuuguagacaucuggu

SEQ ID NO: 2342498 - RNA, 19 nt, Artificial Sequence
  Description of Artificial Sequence: Synthetic oligonucleotide
gcgagcgagugagcgagag

SEQ ID NO: 2342499 - RNA, 19 nt, Artificial Sequence
  Description of Artificial Sequence: Synthetic oligonucleotide
guguggaguccuguuccuc

SEQ ID NO: 2342500 - RNA, 19 nt, Artificial Sequence
  Description of Artificial Sequence: Synthetic oligonucleotide
agcguaacccacgccuguu

SEQ ID NO: 2342501 - RNA, 19 nt, Artificial Sequence
  Description of Artificial Sequence: Synthetic oligonucleotide
caccuugaacuuugaauuu

SEQ ID NO: 2342502 - RNA, 19 nt, Artificial Sequence
  Description of Artificial Sequence: Synthetic oligonucleotide
ccggauagugacucuagua

SEQ ID NO: 2342503 - RNA, 19 nt, Artificial Sequence
  Description of Artificial Sequence: Synthetic oligonucleotide
cggaggacgcagaaccaag

SEQ ID NO: 2342504 - RNA, 19 nt, Artificial Sequence
  Description of Artificial Sequence: Synthetic oligonucleotide
ccauaacuuuauuagugau

SEQ ID NO: 2342505 - RNA, 19 nt, Artificial Sequence
  Description of Artificial Sequence: Synthetic oligonucleotide
aagacccaguuuggacaua

SEQ ID NO: 2342506 - RNA, 19 nt, Artificial Sequence
  Description of Artificial Sequence: Synthetic oligonucleotide
gcugucaguuacaucguua

SEQ ID NO: 2342507 - RNA, 19 nt, Artificial Sequence
  Description of Artificial Sequence: Synthetic oligonucleotide
ggacgguuucaguggcuuc

SEQ ID NO: 2342508 - RNA, 19 nt, Artificial Sequence
  Description of Artificial Sequence: Synthetic oligonucleotide
gggaaacauccuugcuguc

SEQ ID NO: 2342509 - RNA, 19 nt, Artificial Sequence
  Description of Artificial Sequence: Synthetic oligonucleotide
agauggcggcggaaagaga

SEQ ID NO: 2342510 - RNA, 19 nt, Artificial Sequence
  Description of Artificial Sequence: Synthetic oligonucleotide
gcggaaagagagcgagcga

SEQ ID NO: 2342511 - RNA, 19 nt, Artificial Sequence
  Description of Artificial Sequence: Synthetic oligonucleotide
cugugcuugcugagacaaa

SEQ ID NO: 2342512 - RNA, 19 nt, Artificial Sequence
  Description of Artificial Sequence: Synthetic oligonucleotide
ccugagguuguggcaacuc

SEQ ID NO: 2342513 - RNA, 19 nt, Artificial Sequence
  Description of Artificial Sequence: Synthetic oligonucleotide
ccccuguaaccugucgaag

SEQ ID NO: 2342514 - RNA, 19 nt, Artificial Sequence
  Description of Artificial Sequence: Synthetic oligonucleotide
cuccucuuguacgguugga

SEQ ID NO: 2342515 - RNA, 19 nt, Artificial Sequence
  Description of Artificial Sequence: Synthetic oligonucleotide
cuguuccucgagcucuggu

SEQ ID NO: 2342516 - RNA, 19 nt, Artificial Sequence
  Description of Artificial Sequence: Synthetic oligonucleotide
gacuggcucuucaucgauu

SEQ ID NO: 2342517 - RNA, 19 nt, Artificial Sequence
  Description of Artificial Sequence: Synthetic oligonucleotide
ggauuuccggauagugacu

SEQ ID NO: 2342518 - RNA, 19 nt, Artificial Sequence
  Description of Artificial Sequence: Synthetic oligonucleotide
caucacugucugacucugu

SEQ ID NO: 2342519 - RNA, 19 nt, Artificial Sequence
  Description of Artificial Sequence: Synthetic oligonucleotide
cgagagcguaacccacgcc

SEQ ID NO: 2342520 - RNA, 19 nt, Artificial Sequence
  Description of Artificial Sequence: Synthetic oligonucleotide
cgagcgagugagcgagagc

SEQ ID NO: 2342521 - RNA, 19 nt, Artificial Sequence
  Description of Artificial Sequence: Synthetic oligonucleotide
cuccucgcucuccucuugu

SEQ ID NO: 2342522 - RNA, 19 nt, Artificial Sequence
  Description of Artificial Sequence: Synthetic oligonucleotide
gcuugcugagacaaaucuu

SEQ ID NO: 2342523 - RNA, 19 nt, Artificial Sequence
  Description of Artificial Sequence: Synthetic oligonucleotide
cgguuucaguggcuucacc

SEQ ID NO: 2342524 - RNA, 19 nt, Artificial Sequence
  Description of Artificial Sequence: Synthetic oligonucleotide
agcgagcgagugagcgaga

SEQ ID NO: 2342525 - RNA, 19 nt, Artificial Sequence
  Description of Artificial Sequence: Synthetic oligonucleotide
cggcggaaagagagcgagc

SEQ ID NO: 2342526 - RNA, 19 nt, Artificial Sequence
  Description of Artificial Sequence: Synthetic oligonucleotide
uggcuucaccaggcauuuu

SEQ ID NO: 2342527 - RNA, 19 nt, Artificial Sequence
  Description of Artificial Sequence: Synthetic oligonucleotide
cggacugccuuugcucuug

SEQ ID NO: 2342528 - RNA, 19 nt, Artificial Sequence
  Description of Artificial Sequence: Synthetic oligonucleotide
cugggcuuguugugugguu

SEQ ID NO: 2342529 - RNA, 19 nt, Artificial Sequence
  Description of Artificial Sequence: Synthetic oligonucleotide
ccgacucuguuuugcuuua

SEQ ID NO: 2342530 - RNA, 19 nt, Artificial Sequence
  Description of Artificial Sequence: Synthetic oligonucleotide
ccuguuucaucaaccucuu

SEQ ID NO: 2342531 - RNA, 19 nt, Artificial Sequence
  Description of Artificial Sequence: Synthetic oligonucleotide
cgagugagcgagagcguaa

SEQ ID NO: 2342532 - RNA, 19 nt, Artificial Sequence
  Description of Artificial Sequence: Synthetic oligonucleotide
ggcggcggaaagagagcga

SEQ ID NO: 2342533 - RNA, 19 nt, Artificial Sequence
  Description of Artificial Sequence: Synthetic oligonucleotide
cccacgccuguugcaggag

SEQ ID NO: 2342534 - RNA, 19 nt, Artificial Sequence
  Description of Artificial Sequence: Synthetic oligonucleotide
gcuuuacugacuggcucuu

SEQ ID NO: 2342535 - RNA, 19 nt, Artificial Sequence
  Description of Artificial Sequence: Synthetic oligonucleotide
ccugucgaagacccaguuu

SEQ ID NO: 2342536 - RNA, 19 nt, Artificial Sequence
  Description of Artificial Sequence: Synthetic oligonucleotide
ccuuugcucuugauacauu

SEQ ID NO: 2342537 - RNA, 19 nt, Artificial Sequence
  Description of Artificial Sequence: Synthetic oligonucleotide
gguuggagucugaguguuu

SEQ ID NO: 2342538 - RNA, 19 nt, Artificial Sequence
  Description of Artificial Sequence: Synthetic oligonucleotide
cgguuggagucugaguguu

SEQ ID NO: 2342539 - RNA, 19 nt, Artificial Sequence
  Description of Artificial Sequence: Synthetic oligonucleotide
gcucgguagcagggacggu

SEQ ID NO: 2342540 - RNA, 19 nt, Artificial Sequence
  Description of Artificial Sequence: Synthetic oligonucleotide
aauagagagagagagagag

SEQ ID NO: 2342541 - RNA, 19 nt, Artificial Sequence
  Description of Artificial Sequence: Synthetic oligonucleotide
aaaaccugggcuaugaggc

SEQ ID NO: 2342542 - RNA, 19 nt, Artificial Sequence
  Description of Artificial Sequence: Synthetic oligonucleotide
gaaauagagagagagagag

SEQ ID NO: 2342543 - RNA, 19 nt, Artificial Sequence
  Description of Artificial Sequence: Synthetic oligonucleotide
uuaccagcaacauugaggc

SEQ ID NO: 2342544 - RNA, 19 nt, Artificial Sequence
  Description of Artificial Sequence: Synthetic oligonucleotide
acugguacagaucacugcc

SEQ ID NO: 2342545 - RNA, 19 nt, Artificial Sequence
  Description of Artificial Sequence: Synthetic oligonucleotide
gagaaauagagagagagag

SEQ ID NO: 2342546 - RNA, 19 nt, Artificial Sequence
  Description of Artificial Sequence: Synthetic oligonucleotide
uuuaauaguaggaagguuu

SEQ ID NO: 2342547 - RNA, 19 nt, Artificial Sequence
  Description of Artificial Sequence: Synthetic oligonucleotide
aagagagagagagagagag

SEQ ID NO: 2342548 - RNA, 19 nt, Artificial Sequence
  Description of Artificial Sequence: Synthetic oligonucleotide
uuauuggagacguugagca

SEQ ID NO: 2342549 - RNA, 19 nt, Artificial Sequence
  Description of Artificial Sequence: Synthetic oligonucleotide
ucaagagagagagagagag

SEQ ID NO: 2342550 - RNA, 19 nt, Artificial Sequence
  Description of Artificial Sequence: Synthetic oligonucleotide
ucaggauccacccauagcu

SEQ ID NO: 2342551 - RNA, 19 nt, Artificial Sequence
  Description of Artificial Sequence: Synthetic oligonucleotide
uuuaaacucucaaagccug

SEQ ID NO: 2342552 - RNA, 19 nt, Artificial Sequence
  Description of Artificial Sequence: Synthetic oligonucleotide
uccaucaagagagagagag

SEQ ID NO: 2342553 - RNA, 19 nt, Artificial Sequence
  Description of Artificial Sequence: Synthetic oligonucleotide
aacugguacagaucacugc

SEQ ID NO: 2342554 - RNA, 19 nt, Artificial Sequence
  Description of Artificial Sequence: Synthetic oligonucleotide
uuuaugguuccaaagggcu

SEQ ID NO: 2342555 - RNA, 19 nt, Artificial Sequence
  Description of Artificial Sequence: Synthetic oligonucleotide
uuuuaugguuccaaagggc

SEQ ID NO: 2342556 - RNA, 19 nt, Artificial Sequence
  Description of Artificial Sequence: Synthetic oligonucleotide
uagagagagagagagagag

SEQ ID NO: 2342557 - RNA, 19 nt, Artificial Sequence
  Description of Artificial Sequence: Synthetic oligonucleotide
ugacuuugagaccaggcag

SEQ ID NO: 2342558 - RNA, 19 nt, Artificial Sequence
  Description of Artificial Sequence: Synthetic oligonucleotide
aagcauggcagucagagaa

SEQ ID NO: 2342559 - RNA, 19 nt, Artificial Sequence
  Description of Artificial Sequence: Synthetic oligonucleotide
gagagagagagaaauagag

SEQ ID NO: 2342560 - RNA, 19 nt, Artificial Sequence
  Description of Artificial Sequence: Synthetic oligonucleotide
uguucaaaagcaagcagga

SEQ ID NO: 2342561 - RNA, 19 nt, Artificial Sequence
  Description of Artificial Sequence: Synthetic oligonucleotide
auuauuggagacguugagc

SEQ ID NO: 2342562 - RNA, 19 nt, Artificial Sequence
  Description of Artificial Sequence: Synthetic oligonucleotide
agaaagagugaacugggag

SEQ ID NO: 2342563 - RNA, 19 nt, Artificial Sequence
  Description of Artificial Sequence: Synthetic oligonucleotide
guuaccagcaacauugagg

SEQ ID NO: 2342564 - RNA, 19 nt, Artificial Sequence
  Description of Artificial Sequence: Synthetic oligonucleotide
gagagagagagagagagag

SEQ ID NO: 2342565 - RNA, 19 nt, Artificial Sequence
  Description of Artificial Sequence: Synthetic oligonucleotide
gagagagagagagaaauag

SEQ ID NO: 2342566 - RNA, 19 nt, Artificial Sequence
  Description of Artificial Sequence: Synthetic oligonucleotide
uacgaugagaaaaccuggg

SEQ ID NO: 2342567 - RNA, 19 nt, Artificial Sequence
  Description of Artificial Sequence: Synthetic oligonucleotide
aagccugcccuagugaugc

SEQ ID NO: 2342568 - RNA, 19 nt, Artificial Sequence
  Description of Artificial Sequence: Synthetic oligonucleotide
uaugacuuugagaccaggc

SEQ ID NO: 2342569 - RNA, 19 nt, Artificial Sequence
  Description of Artificial Sequence: Synthetic oligonucleotide
cuagugaugcacuuccucc

SEQ ID NO: 2342570 - RNA, 19 nt, Artificial Sequence
  Description of Artificial Sequence: Synthetic oligonucleotide
caucaagagagagagagag

SEQ ID NO: 2342571 - RNA, 19 nt, Artificial Sequence
  Description of Artificial Sequence: Synthetic oligonucleotide
acgaugagaaaaccugggc

SEQ ID NO: 2342572 - RNA, 19 nt, Artificial Sequence
  Description of Artificial Sequence: Synthetic oligonucleotide
uccagaauggagcugcucu

SEQ ID NO: 2342573 - RNA, 19 nt, Artificial Sequence
  Description of Artificial Sequence: Synthetic oligonucleotide
aaggcuuuaaacucucaaa

SEQ ID NO: 2342574 - RNA, 19 nt, Artificial Sequence
  Description of Artificial Sequence: Synthetic oligonucleotide
auuggagacguugagcacg

SEQ ID NO: 2342575 - RNA, 19 nt, Artificial Sequence
  Description of Artificial Sequence: Synthetic oligonucleotide
ucacguguucaaaagcaag

SEQ ID NO: 2342576 - RNA, 19 nt, Artificial Sequence
  Description of Artificial Sequence: Synthetic oligonucleotide
caucaugucagagaggcag

SEQ ID NO: 2342577 - RNA, 19 nt, Artificial Sequence
  Description of Artificial Sequence: Synthetic oligonucleotide
cuaaaaguccaucauguca

SEQ ID NO: 2342578 - RNA, 19 nt, Artificial Sequence
  Description of Artificial Sequence: Synthetic oligonucleotide
uuaauaguaggaagguuua

SEQ ID NO: 2342579 - RNA, 19 nt, Artificial Sequence
  Description of Artificial Sequence: Synthetic oligonucleotide
ucugcauagggcaggauuc

SEQ ID NO: 2342580 - RNA, 19 nt, Artificial Sequence
  Description of Artificial Sequence: Synthetic oligonucleotide
agcucacguguucaaaagc

SEQ ID NO: 2342581 - RNA, 19 nt, Artificial Sequence
  Description of Artificial Sequence: Synthetic oligonucleotide
cuaccagcaagcauggcag

SEQ ID NO: 2342582 - RNA, 19 nt, Artificial Sequence
  Description of Artificial Sequence: Synthetic oligonucleotide
cuacgaugagaaaaccugg

SEQ ID NO: 2342583 - RNA, 19 nt, Artificial Sequence
  Description of Artificial Sequence: Synthetic oligonucleotide
ucuuccagaauggagcugc

SEQ ID NO: 2342584 - RNA, 19 nt, Artificial Sequence
  Description of Artificial Sequence: Synthetic oligonucleotide
aacucucaaagccugcccu

SEQ ID NO: 2342585 - RNA, 19 nt, Artificial Sequence
  Description of Artificial Sequence: Synthetic oligonucleotide
agagcuacgaugagaaaac

SEQ ID NO: 2342586 - RNA, 19 nt, Artificial Sequence
  Description of Artificial Sequence: Synthetic oligonucleotide
gguauaaggcuuuaaacuc

SEQ ID NO: 2342587 - RNA, 19 nt, Artificial Sequence
  Description of Artificial Sequence: Synthetic oligonucleotide
auaguaggaagguuuauuu

SEQ ID NO: 2342588 - RNA, 19 nt, Artificial Sequence
  Description of Artificial Sequence: Synthetic oligonucleotide
gugguauaaggcuuuaaac

SEQ ID NO: 2342589 - RNA, 19 nt, Artificial Sequence
  Description of Artificial Sequence: Synthetic oligonucleotide
uaaggcuuuaaacucucaa

SEQ ID NO: 2342590 - RNA, 19 nt, Artificial Sequence
  Description of Artificial Sequence: Synthetic oligonucleotide
ugggcuaugaggcaccuuc

SEQ ID NO: 2342591 - RNA, 19 nt, Artificial Sequence
  Description of Artificial Sequence: Synthetic oligonucleotide
uuuguuuuaugguuccaaa

SEQ ID NO: 2342592 - RNA, 19 nt, Artificial Sequence
  Description of Artificial Sequence: Synthetic oligonucleotide
auggcuauggggccugggc

SEQ ID NO: 2342593 - RNA, 19 nt, Artificial Sequence
  Description of Artificial Sequence: Synthetic oligonucleotide
aucuaugacuuugagacca

SEQ ID NO: 2342594 - RNA, 19 nt, Artificial Sequence
  Description of Artificial Sequence: Synthetic oligonucleotide
acguucuccaucuaugacu

SEQ ID NO: 2342595 - RNA, 19 nt, Artificial Sequence
  Description of Artificial Sequence: Synthetic oligonucleotide
caagcuaucaccggccugg

SEQ ID NO: 2342596 - RNA, 19 nt, Artificial Sequence
  Description of Artificial Sequence: Synthetic oligonucleotide
gaugagaaaaccugggcua

SEQ ID NO: 2342597 - RNA, 19 nt, Artificial Sequence
  Description of Artificial Sequence: Synthetic oligonucleotide
ugaugcacuuccuccauca

SEQ ID NO: 2342598 - RNA, 19 nt, Artificial Sequence
  Description of Artificial Sequence: Synthetic oligonucleotide
cagcucucgaaccacagcc

SEQ ID NO: 2342599 - RNA, 19 nt, Artificial Sequence
  Description of Artificial Sequence: Synthetic oligonucleotide
guggcuaccagcaagcaug

SEQ ID NO: 2342600 - RNA, 19 nt, Artificial Sequence
  Description of Artificial Sequence: Synthetic oligonucleotide
uuggagacguugagcacgg

SEQ ID NO: 2342601 - RNA, 19 nt, Artificial Sequence
  Description of Artificial Sequence: Synthetic oligonucleotide
aggucaaggcauuccugcc

SEQ ID NO: 2342602 - RNA, 19 nt, Artificial Sequence
  Description of Artificial Sequence: Synthetic oligonucleotide
caggucaaggcauuccugc

SEQ ID NO: 2342603 - RNA, 19 nt, Artificial Sequence
  Description of Artificial Sequence: Synthetic oligonucleotide
gaaagaagcugagagcuca

SEQ ID NO: 2342604 - RNA, 19 nt, Artificial Sequence
  Description of Artificial Sequence: Synthetic oligonucleotide
gagagagagagagagcuac

SEQ ID NO: 2342605 - RNA, 19 nt, Artificial Sequence
  Description of Artificial Sequence: Synthetic oligonucleotide
gagaaagaagcugagagcu

SEQ ID NO: 2342606 - RNA, 19 nt, Artificial Sequence
  Description of Artificial Sequence: Synthetic oligonucleotide
gggaguggcacacaguggg

SEQ ID NO: 2342607 - RNA, 19 nt, Artificial Sequence
  Description of Artificial Sequence: Synthetic oligonucleotide
gcuaucaccggccuggcgg

SEQ ID NO: 2342608 - RNA, 19 nt, Artificial Sequence
  Description of Artificial Sequence: Synthetic oligonucleotide
gagagagagagagagagaa

SEQ ID NO: 2342609 - RNA, 19 nt, Artificial Sequence
  Description of Artificial Sequence: Synthetic oligonucleotide
cuaugaggcaccuucagaa

SEQ ID NO: 2342610 - RNA, 19 nt, Artificial Sequence
  Description of Artificial Sequence: Synthetic oligonucleotide
agagagagagcuacgauga

SEQ ID NO: 2342611 - RNA, 19 nt, Artificial Sequence
  Description of Artificial Sequence: Synthetic oligonucleotide
uggcagucagagaaagaag

SEQ ID NO: 2342612 - RNA, 19 nt, Artificial Sequence
  Description of Artificial Sequence: Synthetic oligonucleotide
uccuccaucaagagagaga

SEQ ID NO: 2342613 - RNA, 19 nt, Artificial Sequence
  Description of Artificial Sequence: Synthetic oligonucleotide
cacaguggguugcugagcc

SEQ ID NO: 2342614 - RNA, 19 nt, Artificial Sequence
  Description of Artificial Sequence: Synthetic oligonucleotide
ugaacugggagugguauaa

SEQ ID NO: 2342615 - RNA, 19 nt, Artificial Sequence
  Description of Artificial Sequence: Synthetic oligonucleotide
gagcucacguguucaaaag

SEQ ID NO: 2342616 - RNA, 19 nt, Artificial Sequence
  Description of Artificial Sequence: Synthetic oligonucleotide
gacuuugagaccaggcagc

SEQ ID NO: 2342617 - RNA, 19 nt, Artificial Sequence
  Description of Artificial Sequence: Synthetic oligonucleotide
cauagggcaggauucccag

SEQ ID NO: 2342618 - RNA, 19 nt, Artificial Sequence
  Description of Artificial Sequence: Synthetic oligonucleotide
gagagcuacgaugagaaaa

SEQ ID NO: 2342619 - RNA, 19 nt, Artificial Sequence
  Description of Artificial Sequence: Synthetic oligonucleotide
agacguggcuaccagcaag

SEQ ID NO: 2342620 - RNA, 19 nt, Artificial Sequence
  Description of Artificial Sequence: Synthetic oligonucleotide
ucagccgauuauuggagac

SEQ ID NO: 2342621 - RNA, 19 nt, Artificial Sequence
  Description of Artificial Sequence: Synthetic oligonucleotide
ucaugucagagaggcaggg

SEQ ID NO: 2342622 - RNA, 19 nt, Artificial Sequence
  Description of Artificial Sequence: Synthetic oligonucleotide
cugggccaagcuaucaccg

SEQ ID NO: 2342623 - RNA, 19 nt, Artificial Sequence
  Description of Artificial Sequence: Synthetic oligonucleotide
auggcagucagagaaagaa

SEQ ID NO: 2342624 - RNA, 19 nt, Artificial Sequence
  Description of Artificial Sequence: Synthetic oligonucleotide
ucuccaucuaugacuuuga

SEQ ID NO: 2342625 - RNA, 19 nt, Artificial Sequence
  Description of Artificial Sequence: Synthetic oligonucleotide
augaggcaccuucagaaga

SEQ ID NO: 2342626 - RNA, 19 nt, Artificial Sequence
  Description of Artificial Sequence: Synthetic oligonucleotide
cacacguucuccaucuaug

SEQ ID NO: 2342627 - RNA, 19 nt, Artificial Sequence
  Description of Artificial Sequence: Synthetic oligonucleotide
uacuccaggcccuguagcc

SEQ ID NO: 2342628 - RNA, 19 nt, Artificial Sequence
  Description of Artificial Sequence: Synthetic oligonucleotide
acagaucacugccccgccc

SEQ ID NO: 2342629 - RNA, 19 nt, Artificial Sequence
  Description of Artificial Sequence: Synthetic oligonucleotide
acaacugguacagaucacu

SEQ ID NO: 2342630 - RNA, 19 nt, Artificial Sequence
  Description of Artificial Sequence: Synthetic oligonucleotide
ugcugagccgggccaaagg

SEQ ID NO: 2342631 - RNA, 19 nt, Artificial Sequence
  Description of Artificial Sequence: Synthetic oligonucleotide
gcuacgaugagaaaaccug

SEQ ID NO: 2342632 - RNA, 19 nt, Artificial Sequence
  Description of Artificial Sequence: Synthetic oligonucleotide
gagagagagagagagagcu

SEQ ID NO: 2342633 - RNA, 19 nt, Artificial Sequence
  Description of Artificial Sequence: Synthetic oligonucleotide
aaggcauuccugccagugu

SEQ ID NO: 2342634 - RNA, 19 nt, Artificial Sequence
  Description of Artificial Sequence: Synthetic oligonucleotide
aucacugccccgcccacuc

SEQ ID NO: 2342635 - RNA, 19 nt, Artificial Sequence
  Description of Artificial Sequence: Synthetic oligonucleotide
uuuuaauaguaggaagguu

SEQ ID NO: 2342636 - RNA, 19 nt, Artificial Sequence
  Description of Artificial Sequence: Synthetic oligonucleotide
agagcucacguguucaaaa

SEQ ID NO: 2342637 - RNA, 19 nt, Artificial Sequence
  Description of Artificial Sequence: Synthetic oligonucleotide
caucuaugacuuugagacc

SEQ ID NO: 2342638 - RNA, 19 nt, Artificial Sequence
  Description of Artificial Sequence: Synthetic oligonucleotide
uuaugguuccaaagggcua

SEQ ID NO: 2342639 - RNA, 19 nt, Artificial Sequence
  Description of Artificial Sequence: Synthetic oligonucleotide
ugagccgggccaaaggguc

SEQ ID NO: 2342640 - RNA, 19 nt, Artificial Sequence
  Description of Artificial Sequence: Synthetic oligonucleotide
cuuuaaacucucaaagccu

SEQ ID NO: 2342641 - RNA, 19 nt, Artificial Sequence
  Description of Artificial Sequence: Synthetic oligonucleotide
uuuucacaggcagccaaug

SEQ ID NO: 2342642 - RNA, 19 nt, Artificial Sequence
  Description of Artificial Sequence: Synthetic oligonucleotide
agagagagagagagagagc

SEQ ID NO: 2342643 - RNA, 19 nt, Artificial Sequence
  Description of Artificial Sequence: Synthetic oligonucleotide
acacguucuccaucuauga

SEQ ID NO: 2342644 - RNA, 19 nt, Artificial Sequence
  Description of Artificial Sequence: Synthetic oligonucleotide
aggaagguuuauuuuguuu

SEQ ID NO: 2342645 - RNA, 19 nt, Artificial Sequence
  Description of Artificial Sequence: Synthetic oligonucleotide
gaacuguccaggucucggc

SEQ ID NO: 2342646 - RNA, 19 nt, Artificial Sequence
  Description of Artificial Sequence: Synthetic oligonucleotide
aaauagagagagagagaga

SEQ ID NO: 2342647 - RNA, 19 nt, Artificial Sequence
  Description of Artificial Sequence: Synthetic oligonucleotide
aguggcacacaguggguug

SEQ ID NO: 2342648 - RNA, 19 nt, Artificial Sequence
  Description of Artificial Sequence: Synthetic oligonucleotide
gccucuauggcuauggggc

SEQ ID NO: 2342649 - RNA, 19 nt, Artificial Sequence
  Description of Artificial Sequence: Synthetic oligonucleotide
gagacguugagcacggcca

SEQ ID NO: 2342650 - RNA, 19 nt, Artificial Sequence
  Description of Artificial Sequence: Synthetic oligonucleotide
uaguaggaagguuuauuuu

SEQ ID NO: 2342651 - RNA, 19 nt, Artificial Sequence
  Description of Artificial Sequence: Synthetic oligonucleotide
aaauagagagagagaaaua

SEQ ID NO: 2342652 - RNA, 19 nt, Artificial Sequence
  Description of Artificial Sequence: Synthetic oligonucleotide
agggcuaaaaguccaucau

SEQ ID NO: 2342653 - RNA, 19 nt, Artificial Sequence
  Description of Artificial Sequence: Synthetic oligonucleotide
ugggccaagcuaucaccgg

SEQ ID NO: 2342654 - RNA, 19 nt, Artificial Sequence
  Description of Artificial Sequence: Synthetic oligonucleotide
uggcuauggggccugggcu

SEQ ID NO: 2342655 - RNA, 19 nt, Artificial Sequence
  Description of Artificial Sequence: Synthetic oligonucleotide
uauuggagacguugagcac

SEQ ID NO: 2342656 - RNA, 19 nt, Artificial Sequence
  Description of Artificial Sequence: Synthetic oligonucleotide
caggccucuuccagaaugg

SEQ ID NO: 2342657 - RNA, 19 nt, Artificial Sequence
  Description of Artificial Sequence: Synthetic oligonucleotide
ccuccaucaagagagagag

SEQ ID NO: 2342658 - RNA, 19 nt, Artificial Sequence
  Description of Artificial Sequence: Synthetic oligonucleotide
gacgcagaaagagugaacu

SEQ ID NO: 2342659 - RNA, 19 nt, Artificial Sequence
  Description of Artificial Sequence: Synthetic oligonucleotide
gcagaaagagugaacuggg

SEQ ID NO: 2342660 - RNA, 19 nt, Artificial Sequence
  Description of Artificial Sequence: Synthetic oligonucleotide
gagagagagagagagaaau

SEQ ID NO: 2342661 - RNA, 19 nt, Artificial Sequence
  Description of Artificial Sequence: Synthetic oligonucleotide
aagcaagcaggacgcagaa

SEQ ID NO: 2342662 - RNA, 19 nt, Artificial Sequence
  Description of Artificial Sequence: Synthetic oligonucleotide
auggagcugcucugcauag

SEQ ID NO: 2342663 - RNA, 19 nt, Artificial Sequence
  Description of Artificial Sequence: Synthetic oligonucleotide
uugagaccaggcagcagcu

SEQ ID NO: 2342664 - RNA, 19 nt, Artificial Sequence
  Description of Artificial Sequence: Synthetic oligonucleotide
cucggcacaacugguacag

SEQ ID NO: 2342665 - RNA, 19 nt, Artificial Sequence
  Description of Artificial Sequence: Synthetic oligonucleotide
ugccaguguguccuggaac

SEQ ID NO: 2342666 - RNA, 19 nt, Artificial Sequence
  Description of Artificial Sequence: Synthetic oligonucleotide
agaaauagagagagagaga

SEQ ID NO: 2342667 - RNA, 19 nt, Artificial Sequence
  Description of Artificial Sequence: Synthetic oligonucleotide
agagagagagagcuacgau

SEQ ID NO: 2342668 - RNA, 19 nt, Artificial Sequence
  Description of Artificial Sequence: Synthetic oligonucleotide
uggguugcugagccgggcc

SEQ ID NO: 2342669 - RNA, 19 nt, Artificial Sequence
  Description of Artificial Sequence: Synthetic oligonucleotide
agagagagagagaaauaga

SEQ ID NO: 2342670 - RNA, 19 nt, Artificial Sequence
  Description of Artificial Sequence: Synthetic oligonucleotide
acgcagaaagagugaacug

SEQ ID NO: 2342671 - RNA, 19 nt, Artificial Sequence
  Description of Artificial Sequence: Synthetic oligonucleotide
gucaggauccacccauagc

SEQ ID NO: 2342672 - RNA, 19 nt, Artificial Sequence
  Description of Artificial Sequence: Synthetic oligonucleotide
agucagccgauuauuggag

SEQ ID NO: 2342673 - RNA, 19 nt, Artificial Sequence
  Description of Artificial Sequence: Synthetic oligonucleotide
gcuaccagcaagcauggca

SEQ ID NO: 2342674 - RNA, 19 nt, Artificial Sequence
  Description of Artificial Sequence: Synthetic oligonucleotide
agaaagaagcugagagcuc

SEQ ID NO: 2342675 - RNA, 19 nt, Artificial Sequence
  Description of Artificial Sequence: Synthetic oligonucleotide
cagucagccgauuauugga

SEQ ID NO: 2342676 - RNA, 19 nt, Artificial Sequence
  Description of Artificial Sequence: Synthetic oligonucleotide
caguggguugcugagccgg

SEQ ID NO: 2342677 - RNA, 19 nt, Artificial Sequence
  Description of Artificial Sequence: Synthetic oligonucleotide
gagagagagagagcuacga

SEQ ID NO: 2342678 - RNA, 19 nt, Artificial Sequence
  Description of Artificial Sequence: Synthetic oligonucleotide
agugaacugggagugguau

SEQ ID NO: 2342679 - RNA, 19 nt, Artificial Sequence
  Description of Artificial Sequence: Synthetic oligonucleotide
aagcuaucaccggccuggc

SEQ ID NO: 2342680 - RNA, 19 nt, Artificial Sequence
  Description of Artificial Sequence: Synthetic oligonucleotide
gcugagccgggccaaaggg

SEQ ID NO: 2342681 - RNA, 19 nt, Artificial Sequence
  Description of Artificial Sequence: Synthetic oligonucleotide
aucaugucagagaggcagg

SEQ ID NO: 2342682 - RNA, 19 nt, Artificial Sequence
  Description of Artificial Sequence: Synthetic oligonucleotide
gcaacauugaggcucugca

SEQ ID NO: 2342683 - RNA, 19 nt, Artificial Sequence
  Description of Artificial Sequence: Synthetic oligonucleotide
gucagagaaagaagcugag

SEQ ID NO: 2342684 - RNA, 19 nt, Artificial Sequence
  Description of Artificial Sequence: Synthetic oligonucleotide
cauuccugccagugugucc

SEQ ID NO: 2342685 - RNA, 19 nt, Artificial Sequence
  Description of Artificial Sequence: Synthetic oligonucleotide
agccgauuauuggagacgu

SEQ ID NO: 2342686 - RNA, 19 nt, Artificial Sequence
  Description of Artificial Sequence: Synthetic oligonucleotide
caacagaggagguggcuuc

SEQ ID NO: 2342687 - RNA, 19 nt, Artificial Sequence
  Description of Artificial Sequence: Synthetic oligonucleotide
ggccucuauggcuaugggg

SEQ ID NO: 2342688 - RNA, 19 nt, Artificial Sequence
  Description of Artificial Sequence: Synthetic oligonucleotide
cuaugacuuugagaccagg

SEQ ID NO: 2342689 - RNA, 19 nt, Artificial Sequence
  Description of Artificial Sequence: Synthetic oligonucleotide
ucucggcacaacugguaca

SEQ ID NO: 2342690 - RNA, 19 nt, Artificial Sequence
  Description of Artificial Sequence: Synthetic oligonucleotide
gguacagaucacugccccg

SEQ ID NO: 2342691 - RNA, 19 nt, Artificial Sequence
  Description of Artificial Sequence: Synthetic oligonucleotide
ucucgaaccacagcccagu

SEQ ID NO: 2342692 - RNA, 19 nt, Artificial Sequence
  Description of Artificial Sequence: Synthetic oligonucleotide
agcuacgaugagaaaaccu

SEQ ID NO: 2342693 - RNA, 19 nt, Artificial Sequence
  Description of Artificial Sequence: Synthetic oligonucleotide
agagagagagagagcuacg

SEQ ID NO: 2342694 - RNA, 19 nt, Artificial Sequence
  Description of Artificial Sequence: Synthetic oligonucleotide
accagcaagcauggcaguc

SEQ ID NO: 2342695 - RNA, 19 nt, Artificial Sequence
  Description of Artificial Sequence: Synthetic oligonucleotide
ugcggcgcaaggaacuguc

SEQ ID NO: 2342696 - RNA, 19 nt, Artificial Sequence
  Description of Artificial Sequence: Synthetic oligonucleotide
caaggcauuccugccagug

SEQ ID NO: 2342697 - RNA, 19 nt, Artificial Sequence
  Description of Artificial Sequence: Synthetic oligonucleotide
agggagacguggcuaccag

SEQ ID NO: 2342698 - RNA, 19 nt, Artificial Sequence
  Description of Artificial Sequence: Synthetic oligonucleotide
cagccgauuauuggagacg

SEQ ID NO: 2342699 - RNA, 19 nt, Artificial Sequence
  Description of Artificial Sequence: Synthetic oligonucleotide
cuccaucuaugacuuugag

SEQ ID NO: 2342700 - RNA, 19 nt, Artificial Sequence
  Description of Artificial Sequence: Synthetic oligonucleotide
cacguucuccaucuaugac

SEQ ID NO: 2342701 - RNA, 19 nt, Artificial Sequence
  Description of Artificial Sequence: Synthetic oligonucleotide
ccagucagccgauuauugg

SEQ ID NO: 2342702 - RNA, 19 nt, Artificial Sequence
  Description of Artificial Sequence: Synthetic oligonucleotide
ugagaaaaccugggcuaug

SEQ ID NO: 2342703 - RNA, 19 nt, Artificial Sequence
  Description of Artificial Sequence: Synthetic oligonucleotide
ugagagcucacguguucaa

SEQ ID NO: 2342704 - RNA, 19 nt, Artificial Sequence
  Description of Artificial Sequence: Synthetic oligonucleotide
gcaggacgcagaaagagug

SEQ ID NO: 2342705 - RNA, 19 nt, Artificial Sequence
  Description of Artificial Sequence: Synthetic oligonucleotide
ugcauagggcaggauuccc

SEQ ID NO: 2342706 - RNA, 19 nt, Artificial Sequence
  Description of Artificial Sequence: Synthetic oligonucleotide
gcaggccucuuccagaaug

SEQ ID NO: 2342707 - RNA, 19 nt, Artificial Sequence
  Description of Artificial Sequence: Synthetic oligonucleotide
ggaacuguccaggucucgg

SEQ ID NO: 2342708 - RNA, 19 nt, Artificial Sequence
  Description of Artificial Sequence: Synthetic oligonucleotide
caggauccacccauagcug

SEQ ID NO: 2342709 - RNA, 19 nt, Artificial Sequence
  Description of Artificial Sequence: Synthetic oligonucleotide
cgcagaaagagugaacugg

SEQ ID NO: 2342710 - RNA, 19 nt, Artificial Sequence
  Description of Artificial Sequence: Synthetic oligonucleotide
gguacuccaggcccuguag

SEQ ID NO: 2342711 - RNA, 19 nt, Artificial Sequence
  Description of Artificial Sequence: Synthetic oligonucleotide
aggaguggccagcagguua

SEQ ID NO: 2342712 - RNA, 19 nt, Artificial Sequence
  Description of Artificial Sequence: Synthetic oligonucleotide
cagcaagcauggcagucag

SEQ ID NO: 2342713 - RNA, 19 nt, Artificial Sequence
  Description of Artificial Sequence: Synthetic oligonucleotide
aucaccggccuggcggucc

SEQ ID NO: 2342714 - RNA, 19 nt, Artificial Sequence
  Description of Artificial Sequence: Synthetic oligonucleotide
gcccuagugaugcacuucc

SEQ ID NO: 2342715 - RNA, 19 nt, Artificial Sequence
  Description of Artificial Sequence: Synthetic oligonucleotide
ggcgcaaggaacuguccag

SEQ ID NO: 2342716 - RNA, 19 nt, Artificial Sequence
  Description of Artificial Sequence: Synthetic oligonucleotide
gguuaccagcaacauugag

SEQ ID NO: 2342717 - RNA, 19 nt, Artificial Sequence
  Description of Artificial Sequence: Synthetic oligonucleotide
gagcuacgaugagaaaacc

SEQ ID NO: 2342718 - RNA, 19 nt, Artificial Sequence
  Description of Artificial Sequence: Synthetic oligonucleotide
ccgauuauuggagacguug

SEQ ID NO: 2342719 - RNA, 19 nt, Artificial Sequence
  Description of Artificial Sequence: Synthetic oligonucleotide
ccucagguacuccaggccc

SEQ ID NO: 2342720 - RNA, 19 nt, Artificial Sequence
  Description of Artificial Sequence: Synthetic oligonucleotide
augagaaaaccugggcuau

SEQ ID NO: 2342721 - RNA, 19 nt, Artificial Sequence
  Description of Artificial Sequence: Synthetic oligonucleotide
acaacagaggagguggcuu

SEQ ID NO: 2342722 - RNA, 19 nt, Artificial Sequence
  Description of Artificial Sequence: Synthetic oligonucleotide
guaggagggaguggcacac

SEQ ID NO: 2342723 - RNA, 19 nt, Artificial Sequence
  Description of Artificial Sequence: Synthetic oligonucleotide
guagcccagccagacacug

SEQ ID NO: 2342724 - RNA, 19 nt, Artificial Sequence
  Description of Artificial Sequence: Synthetic oligonucleotide
caagagagagagagagaga

SEQ ID NO: 2342725 - RNA, 19 nt, Artificial Sequence
  Description of Artificial Sequence: Synthetic oligonucleotide
auagagagagagagagaga

SEQ ID NO: 2342726 - RNA, 19 nt, Artificial Sequence
  Description of Artificial Sequence: Synthetic oligonucleotide
cucacguguucaaaagcaa

SEQ ID NO: 2342727 - RNA, 19 nt, Artificial Sequence
  Description of Artificial Sequence: Synthetic oligonucleotide
agcccaguaggagggagug

SEQ ID NO: 2342728 - RNA, 19 nt, Artificial Sequence
  Description of Artificial Sequence: Synthetic oligonucleotide
cagaaagagugaacuggga

SEQ ID NO: 2342729 - RNA, 19 nt, Artificial Sequence
  Description of Artificial Sequence: Synthetic oligonucleotide
gcuaaaaguccaucauguc

SEQ ID NO: 2342730 - RNA, 19 nt, Artificial Sequence
  Description of Artificial Sequence: Synthetic oligonucleotide
aggacgcagaaagagugaa

SEQ ID NO: 2342731 - RNA, 19 nt, Artificial Sequence
  Description of Artificial Sequence: Synthetic oligonucleotide
accugggcuaugaggcacc

SEQ ID NO: 2342732 - RNA, 19 nt, Artificial Sequence
  Description of Artificial Sequence: Synthetic oligonucleotide
agcaggacgcagaaagagu

SEQ ID NO: 2342733 - RNA, 19 nt, Artificial Sequence
  Description of Artificial Sequence: Synthetic oligonucleotide
agcccagucagccgauuau

SEQ ID NO: 2342734 - RNA, 19 nt, Artificial Sequence
  Description of Artificial Sequence: Synthetic oligonucleotide
ggcuaaaaguccaucaugu

SEQ ID NO: 2342735 - RNA, 19 nt, Artificial Sequence
  Description of Artificial Sequence: Synthetic oligonucleotide
ggagacguggcuaccagca

SEQ ID NO: 2342736 - RNA, 19 nt, Artificial Sequence
  Description of Artificial Sequence: Synthetic oligonucleotide
aucaagagagagagagaga

SEQ ID NO: 2342737 - RNA, 19 nt, Artificial Sequence
  Description of Artificial Sequence: Synthetic oligonucleotide
gcucacguguucaaaagca

SEQ ID NO: 2342738 - RNA, 19 nt, Artificial Sequence
  Description of Artificial Sequence: Synthetic oligonucleotide
cacucacacguucuccauc

SEQ ID NO: 2342739 - RNA, 19 nt, Artificial Sequence
  Description of Artificial Sequence: Synthetic oligonucleotide
gucagccgauuauuggaga

SEQ ID NO: 2342740 - RNA, 19 nt, Artificial Sequence
  Description of Artificial Sequence: Synthetic oligonucleotide
ggccaaagggucccggagc

SEQ ID NO: 2342741 - RNA, 19 nt, Artificial Sequence
  Description of Artificial Sequence: Synthetic oligonucleotide
ggcuauggggccugggcug

SEQ ID NO: 2342742 - RNA, 19 nt, Artificial Sequence
  Description of Artificial Sequence: Synthetic oligonucleotide
aggaacuguccaggucucg

SEQ ID NO: 2342743 - RNA, 19 nt, Artificial Sequence
  Description of Artificial Sequence: Synthetic oligonucleotide
ggauccacccauagcuggg

SEQ ID NO: 2342744 - RNA, 19 nt, Artificial Sequence
  Description of Artificial Sequence: Synthetic oligonucleotide
uagucaggauccacccaua

SEQ ID NO: 2342745 - RNA, 19 nt, Artificial Sequence
  Description of Artificial Sequence: Synthetic oligonucleotide
uaccagcaagcauggcagu

SEQ ID NO: 2342746 - RNA, 19 nt, Artificial Sequence
  Description of Artificial Sequence: Synthetic oligonucleotide
agagagagagagagagaga

SEQ ID NO: 2342747 - RNA, 19 nt, Artificial Sequence
  Description of Artificial Sequence: Synthetic oligonucleotide
gcauggcagucagagaaag

SEQ ID NO: 2342748 - RNA, 19 nt, Artificial Sequence
  Description of Artificial Sequence: Synthetic oligonucleotide
agcagcucucgaaccacag

SEQ ID NO: 2342749 - RNA, 19 nt, Artificial Sequence
  Description of Artificial Sequence: Synthetic oligonucleotide
agagagagagagagaaaua

SEQ ID NO: 2342750 - RNA, 19 nt, Artificial Sequence
  Description of Artificial Sequence: Synthetic oligonucleotide
gcuaugaggcaccuucaga

SEQ ID NO: 2342751 - RNA, 19 nt, Artificial Sequence
  Description of Artificial Sequence: Synthetic oligonucleotide
agagagcuacgaugagaaa

SEQ ID NO: 2342752 - RNA, 19 nt, Artificial Sequence
  Description of Artificial Sequence: Synthetic oligonucleotide
ccuagugaugcacuuccuc

SEQ ID NO: 2342753 - RNA, 19 nt, Artificial Sequence
  Description of Artificial Sequence: Synthetic oligonucleotide
auaaggcuuuaaacucuca

SEQ ID NO: 2342754 - RNA, 19 nt, Artificial Sequence
  Description of Artificial Sequence: Synthetic oligonucleotide
ucccggagccucagguacu

SEQ ID NO: 2342755 - RNA, 19 nt, Artificial Sequence
  Description of Artificial Sequence: Synthetic oligonucleotide
uugcugagccgggccaaag

SEQ ID NO: 2342756 - RNA, 19 nt, Artificial Sequence
  Description of Artificial Sequence: Synthetic oligonucleotide
uauggggccugggcuggag

SEQ ID NO: 2342757 - RNA, 19 nt, Artificial Sequence
  Description of Artificial Sequence: Synthetic oligonucleotide
gggccaaagggucccggag

SEQ ID NO: 2342758 - RNA, 19 nt, Artificial Sequence
  Description of Artificial Sequence: Synthetic oligonucleotide
caggacgcagaaagaguga

SEQ ID NO: 2342759 - RNA, 19 nt, Artificial Sequence
  Description of Artificial Sequence: Synthetic oligonucleotide
ggagcugcggcgcaaggaa

SEQ ID NO: 2342760 - RNA, 19 nt, Artificial Sequence
  Description of Artificial Sequence: Synthetic oligonucleotide
ggaguggccagcagguuac

SEQ ID NO: 2342761 - RNA, 19 nt, Artificial Sequence
  Description of Artificial Sequence: Synthetic oligonucleotide
ccucuauggcuauggggcc

SEQ ID NO: 2342762 - RNA, 19 nt, Artificial Sequence
  Description of Artificial Sequence: Synthetic oligonucleotide
gaaccacagcccaguagga

SEQ ID NO: 2342763 - RNA, 19 nt, Artificial Sequence
  Description of Artificial Sequence: Synthetic oligonucleotide
gcgcaaggaacuguccagg

SEQ ID NO: 2342764 - RNA, 19 nt, Artificial Sequence
  Description of Artificial Sequence: Synthetic oligonucleotide
gugaugcacuuccuccauc

SEQ ID NO: 2342765 - RNA, 19 nt, Artificial Sequence
  Description of Artificial Sequence: Synthetic oligonucleotide
uuccagaauggagcugcuc

SEQ ID NO: 2342766 - RNA, 19 nt, Artificial Sequence
  Description of Artificial Sequence: Synthetic oligonucleotide
cccagucagccgauuauug

SEQ ID NO: 2342767 - RNA, 19 nt, Artificial Sequence
  Description of Artificial Sequence: Synthetic oligonucleotide
agagagagagagagagaaa

SEQ ID NO: 2342768 - RNA, 19 nt, Artificial Sequence
  Description of Artificial Sequence: Synthetic oligonucleotide
ggcaccuucagaagacaac

SEQ ID NO: 2342769 - RNA, 19 nt, Artificial Sequence
  Description of Artificial Sequence: Synthetic oligonucleotide
cagagaggcagggagacgu

SEQ ID NO: 2342770 - RNA, 19 nt, Artificial Sequence
  Description of Artificial Sequence: Synthetic oligonucleotide
agguacuccaggcccugua

SEQ ID NO: 2342771 - RNA, 19 nt, Artificial Sequence
  Description of Artificial Sequence: Synthetic oligonucleotide
gcacacaguggguugcuga

SEQ ID NO: 2342772 - RNA, 19 nt, Artificial Sequence
  Description of Artificial Sequence: Synthetic oligonucleotide
gaggcaccuucagaagaca

SEQ ID NO: 2342773 - RNA, 19 nt, Artificial Sequence
  Description of Artificial Sequence: Synthetic oligonucleotide
gagacguggcuaccagcaa

SEQ ID NO: 2342774 - RNA, 19 nt, Artificial Sequence
  Description of Artificial Sequence: Synthetic oligonucleotide
gagagcucacguguucaaa

SEQ ID NO: 2342775 - RNA, 19 nt, Artificial Sequence
  Description of Artificial Sequence: Synthetic oligonucleotide
ucaccggccuggcggucca

SEQ ID NO: 2342776 - RNA, 19 nt, Artificial Sequence
  Description of Artificial Sequence: Synthetic oligonucleotide
ggcacaacugguacagauc

SEQ ID NO: 2342777 - RNA, 19 nt, Artificial Sequence
  Description of Artificial Sequence: Synthetic oligonucleotide
ggcaggauucccaguaguc

SEQ ID NO: 2342778 - RNA, 19 nt, Artificial Sequence
  Description of Artificial Sequence: Synthetic oligonucleotide
gcuauggggccugggcugg

SEQ ID NO: 2342779 - RNA, 19 nt, Artificial Sequence
  Description of Artificial Sequence: Synthetic oligonucleotide
gacaacagaggagguggcu

SEQ ID NO: 2342780 - RNA, 19 nt, Artificial Sequence
  Description of Artificial Sequence: Synthetic oligonucleotide
cgauuauuggagacguuga

SEQ ID NO: 2342781 - RNA, 19 nt, Artificial Sequence
  Description of Artificial Sequence: Synthetic oligonucleotide
agguuaccagcaacauuga

SEQ ID NO: 2342782 - RNA, 19 nt, Artificial Sequence
  Description of Artificial Sequence: Synthetic oligonucleotide
ggauucccaguagucagga

SEQ ID NO: 2342783 - RNA, 19 nt, Artificial Sequence
  Description of Artificial Sequence: Synthetic oligonucleotide
caugucagagaggcaggga

SEQ ID NO: 2342784 - RNA, 19 nt, Artificial Sequence
  Description of Artificial Sequence: Synthetic oligonucleotide
gggccucuauggcuauggg

SEQ ID NO: 2342785 - RNA, 19 nt, Artificial Sequence
  Description of Artificial Sequence: Synthetic oligonucleotide
agagagagagagagagcua

SEQ ID NO: 2342786 - RNA, 19 nt, Artificial Sequence
  Description of Artificial Sequence: Synthetic oligonucleotide
aggcaccuucagaagacaa

SEQ ID NO: 2342787 - RNA, 19 nt, Artificial Sequence
  Description of Artificial Sequence: Synthetic oligonucleotide
ccauagcugggccucuaug

SEQ ID NO: 2342788 - RNA, 19 nt, Artificial Sequence
  Description of Artificial Sequence: Synthetic oligonucleotide
gccggcaggccucuuccag

SEQ ID NO: 2342789 - RNA, 19 nt, Artificial Sequence
  Description of Artificial Sequence: Synthetic oligonucleotide
cuauggcuauggggccugg

SEQ ID NO: 2342790 - RNA, 19 nt, Artificial Sequence
  Description of Artificial Sequence: Synthetic oligonucleotide
aggucucggcacaacuggu

SEQ ID NO: 2342791 - RNA, 19 nt, Artificial Sequence
  Description of Artificial Sequence: Synthetic oligonucleotide
cugccccgcccacucacac

SEQ ID NO: 2342792 - RNA, 19 nt, Artificial Sequence
  Description of Artificial Sequence: Synthetic oligonucleotide
ugccggcaggccucuucca

SEQ ID NO: 2342793 - RNA, 19 nt, Artificial Sequence
  Description of Artificial Sequence: Synthetic oligonucleotide
guggguugcugagccgggc

SEQ ID NO: 2342794 - RNA, 19 nt, Artificial Sequence
  Description of Artificial Sequence: Synthetic oligonucleotide
ucggcacaacugguacaga

SEQ ID NO: 2342795 - RNA, 19 nt, Artificial Sequence
  Description of Artificial Sequence: Synthetic oligonucleotide
cuccaucaagagagagaga

SEQ ID NO: 2342796 - RNA, 19 nt, Artificial Sequence
  Description of Artificial Sequence: Synthetic oligonucleotide
cuaucaccggccuggcggu

SEQ ID NO: 2342797 - RNA, 19 nt, Artificial Sequence
  Description of Artificial Sequence: Synthetic oligonucleotide
cccacucacacguucucca

SEQ ID NO: 2342798 - RNA, 19 nt, Artificial Sequence
  Description of Artificial Sequence: Synthetic oligonucleotide
ggacgcagaaagagugaac

SEQ ID NO: 2342799 - RNA, 19 nt, Artificial Sequence
  Description of Artificial Sequence: Synthetic oligonucleotide
cgaugagaaaaccugggcu

SEQ ID NO: 2342800 - RNA, 19 nt, Artificial Sequence
  Description of Artificial Sequence: Synthetic oligonucleotide
ccaucaagagagagagaga

SEQ ID NO: 2342801 - RNA, 19 nt, Artificial Sequence
  Description of Artificial Sequence: Synthetic oligonucleotide
gcauagggcaggauuccca

SEQ ID NO: 2342802 - RNA, 19 nt, Artificial Sequence
  Description of Artificial Sequence: Synthetic oligonucleotide
gaguggccagcagguuacc

SEQ ID NO: 2342803 - RNA, 19 nt, Artificial Sequence
  Description of Artificial Sequence: Synthetic oligonucleotide
guuuucacaggcagccaau

SEQ ID NO: 2342804 - RNA, 19 nt, Artificial Sequence
  Description of Artificial Sequence: Synthetic oligonucleotide
gagugaacugggaguggua

SEQ ID NO: 2342805 - RNA, 19 nt, Artificial Sequence
  Description of Artificial Sequence: Synthetic oligonucleotide
cugagccgggccaaagggu

SEQ ID NO: 2342806 - RNA, 19 nt, Artificial Sequence
  Description of Artificial Sequence: Synthetic oligonucleotide
aggcagggagacguggcua

SEQ ID NO: 2342807 - RNA, 19 nt, Artificial Sequence
  Description of Artificial Sequence: Synthetic oligonucleotide
ccaagcuaucaccggccug

SEQ ID NO: 2342808 - RNA, 19 nt, Artificial Sequence
  Description of Artificial Sequence: Synthetic oligonucleotide
ggguugcugagccgggcca

SEQ ID NO: 2342809 - RNA, 19 nt, Artificial Sequence
  Description of Artificial Sequence: Synthetic oligonucleotide
gccaauggcuccagcccag

SEQ ID NO: 2342810 - RNA, 19 nt, Artificial Sequence
  Description of Artificial Sequence: Synthetic oligonucleotide
cugccaguguguccuggaa

SEQ ID NO: 2342811 - RNA, 19 nt, Artificial Sequence
  Description of Artificial Sequence: Synthetic oligonucleotide
gaguggcacacaguggguu

SEQ ID NO: 2342812 - RNA, 19 nt, Artificial Sequence
  Description of Artificial Sequence: Synthetic oligonucleotide
gcccacucacacguucucc

SEQ ID NO: 2342813 - RNA, 19 nt, Artificial Sequence
  Description of Artificial Sequence: Synthetic oligonucleotide
ccaggaguggccagcaggu

SEQ ID NO: 2342814 - RNA, 19 nt, Artificial Sequence
  Description of Artificial Sequence: Synthetic oligonucleotide
uaucaccggccuggcgguc

SEQ ID NO: 2342815 - RNA, 19 nt, Artificial Sequence
  Description of Artificial Sequence: Synthetic oligonucleotide
cuuccagaauggagcugcu

SEQ ID NO: 2342816 - RNA, 19 nt, Artificial Sequence
  Description of Artificial Sequence: Synthetic oligonucleotide
ccacccauagcugggccuc

SEQ ID NO: 2342817 - RNA, 19 nt, Artificial Sequence
  Description of Artificial Sequence: Synthetic oligonucleotide
cagcccagucagccgauua

SEQ ID NO: 2342818 - RNA, 19 nt, Artificial Sequence
  Description of Artificial Sequence: Synthetic oligonucleotide
cucgaaccacagcccagua

SEQ ID NO: 2342819 - RNA, 19 nt, Artificial Sequence
  Description of Artificial Sequence: Synthetic oligonucleotide
gggcaggauucccaguagu

SEQ ID NO: 2342820 - RNA, 19 nt, Artificial Sequence
  Description of Artificial Sequence: Synthetic oligonucleotide
gggcuaugaggcaccuuca

SEQ ID NO: 2342821 - RNA, 19 nt, Artificial Sequence
  Description of Artificial Sequence: Synthetic oligonucleotide
cagcccaguaggagggagu

SEQ ID NO: 2342822 - RNA, 19 nt, Artificial Sequence
  Description of Artificial Sequence: Synthetic oligonucleotide
ggucucggcacaacuggua

SEQ ID NO: 2342823 - RNA, 19 nt, Artificial Sequence
  Description of Artificial Sequence: Synthetic oligonucleotide
gcagguuaccagcaacauu

SEQ ID NO: 2342824 - RNA, 19 nt, Artificial Sequence
  Description of Artificial Sequence: Synthetic oligonucleotide
gccccgcccacucacacgu

SEQ ID NO: 2342825 - RNA, 19 nt, Artificial Sequence
  Description of Artificial Sequence: Synthetic oligonucleotide
ccaucaugucagagaggca

SEQ ID NO: 2342826 - RNA, 19 nt, Artificial Sequence
  Description of Artificial Sequence: Synthetic oligonucleotide
gccaagcuaucaccggccu

SEQ ID NO: 2342827 - RNA, 19 nt, Artificial Sequence
  Description of Artificial Sequence: Synthetic oligonucleotide
ggagugguauaaggcuuua

SEQ ID NO: 2342828 - RNA, 19 nt, Artificial Sequence
  Description of Artificial Sequence: Synthetic oligonucleotide
gcggcgcaaggaacugucc

SEQ ID NO: 2342829 - RNA, 19 nt, Artificial Sequence
  Description of Artificial Sequence: Synthetic oligonucleotide
acccauagcugggccucua

SEQ ID NO: 2342830 - RNA, 19 nt, Artificial Sequence
  Description of Artificial Sequence: Synthetic oligonucleotide
cggcgcaaggaacugucca

SEQ ID NO: 2342831 - RNA, 19 nt, Artificial Sequence
  Description of Artificial Sequence: Synthetic oligonucleotide
gggagugguauaaggcuuu

SEQ ID NO: 2342832 - RNA, 19 nt, Artificial Sequence
  Description of Artificial Sequence: Synthetic oligonucleotide
gaacugccggcaggccucu

SEQ ID NO: 2342833 - RNA, 19 nt, Artificial Sequence
  Description of Artificial Sequence: Synthetic oligonucleotide
cuauggggccugggcugga

SEQ ID NO: 2342834 - RNA, 19 nt, Artificial Sequence
  Description of Artificial Sequence: Synthetic oligonucleotide
ccgggccaaagggucccgg

SEQ ID NO: 2342835 - RNA, 19 nt, Artificial Sequence
  Description of Artificial Sequence: Synthetic oligonucleotide
cccggagccucagguacuc

SEQ ID NO: 2342836 - RNA, 19 nt, Artificial Sequence
  Description of Artificial Sequence: Synthetic oligonucleotide
gccgggccaaagggucccg

SEQ ID NO: 2342837 - RNA, 19 nt, Artificial Sequence
  Description of Artificial Sequence: Synthetic oligonucleotide
aacugccggcaggccucuu

SEQ ID NO: 2342838 - RNA, 19 nt, Artificial Sequence
  Description of Artificial Sequence: Synthetic oligonucleotide
cggcacaacugguacagau

SEQ ID NO: 2342839 - RNA, 19 nt, Artificial Sequence
  Description of Artificial Sequence: Synthetic oligonucleotide
ccggagccucagguacucc

SEQ ID NO: 2342840 - RNA, 19 nt, Artificial Sequence
  Description of Artificial Sequence: Synthetic oligonucleotide
cugcggcgcaaggaacugu

SEQ ID NO: 2342841 - RNA, 19 nt, Artificial Sequence
  Description of Artificial Sequence: Synthetic oligonucleotide
gcccagucagccgauuauu

SEQ ID NO: 2342842 - RNA, 19 nt, Artificial Sequence
  Description of Artificial Sequence: Synthetic oligonucleotide
ccacucacacguucuccau

SEQ ID NO: 2342843 - RNA, 19 nt, Artificial Sequence
  Description of Artificial Sequence: Synthetic oligonucleotide
cccuagugaugcacuuccu

SEQ ID NO: 2342844 - RNA, 19 nt, Artificial Sequence
  Description of Artificial Sequence: Synthetic oligonucleotide
ccgcccacucacacguucu

SEQ ID NO: 2342845 - RNA, 19 nt, Artificial Sequence
  Description of Artificial Sequence: Synthetic oligonucleotide
cacccauagcugggccucu

SEQ ID NO: 2342846 - RNA, 19 nt, Artificial Sequence
  Description of Artificial Sequence: Synthetic oligonucleotide
caggaguggccagcagguu

SEQ ID NO: 2342847 - RNA, 19 nt, Artificial Sequence
  Description of Artificial Sequence: Synthetic oligonucleotide
cugggcuaugaggcaccuu

SEQ ID NO: 2342848 - RNA, 19 nt, Artificial Sequence
  Description of Artificial Sequence: Synthetic oligonucleotide
gccgauuauuggagacguu

SEQ ID NO: 2342849 - RNA, 19 nt, Artificial Sequence
  Description of Artificial Sequence: Synthetic oligonucleotide
ccaaagggucccggagccu

SEQ ID NO: 2342850 - RNA, 19 nt, Artificial Sequence
  Description of Artificial Sequence: Synthetic oligonucleotide
ccugggcuaugaggcaccu

SEQ ID NO: 2342851 - RNA, 19 nt, Artificial Sequence
  Description of Artificial Sequence: Synthetic oligonucleotide
ccccgcccacucacacguu

SEQ ID NO: 2342852 - RNA, 19 nt, Artificial Sequence
  Description of Artificial Sequence: Synthetic oligonucleotide
cuuuuaauauuucagaggg

SEQ ID NO: 2342853 - RNA, 19 nt, Artificial Sequence
  Description of Artificial Sequence: Synthetic oligonucleotide
aauaguauuccacaaaaca

SEQ ID NO: 2342854 - RNA, 19 nt, Artificial Sequence
  Description of Artificial Sequence: Synthetic oligonucleotide
uaagacuagaauuaaaggc

SEQ ID NO: 2342855 - RNA, 19 nt, Artificial Sequence
  Description of Artificial Sequence: Synthetic oligonucleotide
aagauuaccagacugcuug

SEQ ID NO: 2342856 - RNA, 19 nt, Artificial Sequence
  Description of Artificial Sequence: Synthetic oligonucleotide
aauacaaccuaauaagacu

SEQ ID NO: 2342857 - RNA, 19 nt, Artificial Sequence
  Description of Artificial Sequence: Synthetic oligonucleotide
aauaagacuagaauuaaag

SEQ ID NO: 2342858 - RNA, 19 nt, Artificial Sequence
  Description of Artificial Sequence: Synthetic oligonucleotide
uauuccacaaaacagaauc

SEQ ID NO: 2342859 - RNA, 19 nt, Artificial Sequence
  Description of Artificial Sequence: Synthetic oligonucleotide
agagauacuauacugauca

SEQ ID NO: 2342860 - RNA, 19 nt, Artificial Sequence
  Description of Artificial Sequence: Synthetic oligonucleotide
acgaguuccauuuauguac

SEQ ID NO: 2342861 - RNA, 19 nt, Artificial Sequence
  Description of Artificial Sequence: Synthetic oligonucleotide
uacuauacugaucagaccu

SEQ ID NO: 2342862 - RNA, 19 nt, Artificial Sequence
  Description of Artificial Sequence: Synthetic oligonucleotide
aaauacaaccuaauaagac

SEQ ID NO: 2342863 - RNA, 19 nt, Artificial Sequence
  Description of Artificial Sequence: Synthetic oligonucleotide
uucaguuguaauaaaagga

SEQ ID NO: 2342864 - RNA, 19 nt, Artificial Sequence
  Description of Artificial Sequence: Synthetic oligonucleotide
ucagcugacaguuuaauug

SEQ ID NO: 2342865 - RNA, 19 nt, Artificial Sequence
  Description of Artificial Sequence: Synthetic oligonucleotide
caaaacagaauccacacgc

SEQ ID NO: 2342866 - RNA, 19 nt, Artificial Sequence
  Description of Artificial Sequence: Synthetic oligonucleotide
auaagacuagaauuaaagg

SEQ ID NO: 2342867 - RNA, 19 nt, Artificial Sequence
  Description of Artificial Sequence: Synthetic oligonucleotide
ucuucaguuguaauaaaag

SEQ ID NO: 2342868 - RNA, 19 nt, Artificial Sequence
  Description of Artificial Sequence: Synthetic oligonucleotide
aacagagugagcuguguac

SEQ ID NO: 2342869 - RNA, 19 nt, Artificial Sequence
  Description of Artificial Sequence: Synthetic oligonucleotide
aaagaagugucccauucag

SEQ ID NO: 2342870 - RNA, 19 nt, Artificial Sequence
  Description of Artificial Sequence: Synthetic oligonucleotide
uuauccagacccaugauga

SEQ ID NO: 2342871 - RNA, 19 nt, Artificial Sequence
  Description of Artificial Sequence: Synthetic oligonucleotide
cuucaguuguaauaaaagg

SEQ ID NO: 2342872 - RNA, 19 nt, Artificial Sequence
  Description of Artificial Sequence: Synthetic oligonucleotide
aaacagaauccacacgccg

SEQ ID NO: 2342873 - RNA, 19 nt, Artificial Sequence
  Description of Artificial Sequence: Synthetic oligonucleotide
uuuauaucaccacucuugc

SEQ ID NO: 2342874 - RNA, 19 nt, Artificial Sequence
  Description of Artificial Sequence: Synthetic oligonucleotide
uuuaauugacacauauucu

SEQ ID NO: 2342875 - RNA, 19 nt, Artificial Sequence
  Description of Artificial Sequence: Synthetic oligonucleotide
aagacuagaauuaaaggca

SEQ ID NO: 2342876 - RNA, 19 nt, Artificial Sequence
  Description of Artificial Sequence: Synthetic oligonucleotide
uguaaagucaauccuuaca

SEQ ID NO: 2342877 - RNA, 19 nt, Artificial Sequence
  Description of Artificial Sequence: Synthetic oligonucleotide
uuuccagucucccuaaaag

SEQ ID NO: 2342878 - RNA, 19 nt, Artificial Sequence
  Description of Artificial Sequence: Synthetic oligonucleotide
uaguauuccacaaaacaga

SEQ ID NO: 2342879 - RNA, 19 nt, Artificial Sequence
  Description of Artificial Sequence: Synthetic oligonucleotide
uuuccaacauauaauguac

SEQ ID NO: 2342880 - RNA, 19 nt, Artificial Sequence
  Description of Artificial Sequence: Synthetic oligonucleotide
uuuauccagacccaugaug

SEQ ID NO: 2342881 - RNA, 19 nt, Artificial Sequence
  Description of Artificial Sequence: Synthetic oligonucleotide
gauacuauacugaucagac

SEQ ID NO: 2342882 - RNA, 19 nt, Artificial Sequence
  Description of Artificial Sequence: Synthetic oligonucleotide
uaauugacacauauucugc

SEQ ID NO: 2342883 - RNA, 19 nt, Artificial Sequence
  Description of Artificial Sequence: Synthetic oligonucleotide
agcaaaaccucaguaauac

SEQ ID NO: 2342884 - RNA, 19 nt, Artificial Sequence
  Description of Artificial Sequence: Synthetic oligonucleotide
aauugacacauauucugcu

SEQ ID NO: 2342885 - RNA, 19 nt, Artificial Sequence
  Description of Artificial Sequence: Synthetic oligonucleotide
uacauaugcagacuuacaa

SEQ ID NO: 2342886 - RNA, 19 nt, Artificial Sequence
  Description of Artificial Sequence: Synthetic oligonucleotide
auaguauuccacaaaacag

SEQ ID NO: 2342887 - RNA, 19 nt, Artificial Sequence
  Description of Artificial Sequence: Synthetic oligonucleotide
ugagcuguguacuuggggc

SEQ ID NO: 2342888 - RNA, 19 nt, Artificial Sequence
  Description of Artificial Sequence: Synthetic oligonucleotide
aaccuaauaagacuagaau

SEQ ID NO: 2342889 - RNA, 19 nt, Artificial Sequence
  Description of Artificial Sequence: Synthetic oligonucleotide
uccaacauauaauguacag

SEQ ID NO: 2342890 - RNA, 19 nt, Artificial Sequence
  Description of Artificial Sequence: Synthetic oligonucleotide
gauccggucauccagacga

SEQ ID NO: 2342891 - RNA, 19 nt, Artificial Sequence
  Description of Artificial Sequence: Synthetic oligonucleotide
aucguaguccucccgauac

SEQ ID NO: 2342892 - RNA, 19 nt, Artificial Sequence
  Description of Artificial Sequence: Synthetic oligonucleotide
ugaagaguucauaaaucug

SEQ ID NO: 2342893 - RNA, 19 nt, Artificial Sequence
  Description of Artificial Sequence: Synthetic oligonucleotide
uguacuuggggcuuucacc

SEQ ID NO: 2342894 - RNA, 19 nt, Artificial Sequence
  Description of Artificial Sequence: Synthetic oligonucleotide
uaauauuucagagggaaaa

SEQ ID NO: 2342895 - RNA, 19 nt, Artificial Sequence
  Description of Artificial Sequence: Synthetic oligonucleotide
uuuugaccuaguaacagaa

SEQ ID NO: 2342896 - RNA, 19 nt, Artificial Sequence
  Description of Artificial Sequence: Synthetic oligonucleotide
aaaagaagugucccauuca

SEQ ID NO: 2342897 - RNA, 19 nt, Artificial Sequence
  Description of Artificial Sequence: Synthetic oligonucleotide
ugcaacagagauacuauac

SEQ ID NO: 2342898 - RNA, 19 nt, Artificial Sequence
  Description of Artificial Sequence: Synthetic oligonucleotide
auuuccaacauauaaugua

SEQ ID NO: 2342899 - RNA, 19 nt, Artificial Sequence
  Description of Artificial Sequence: Synthetic oligonucleotide
uuuugugccaguuugccau

SEQ ID NO: 2342900 - RNA, 19 nt, Artificial Sequence
  Description of Artificial Sequence: Synthetic oligonucleotide
auacuauacugaucagacc

SEQ ID NO: 2342901 - RNA, 19 nt, Artificial Sequence
  Description of Artificial Sequence: Synthetic oligonucleotide
accuaauaagacuagaauu

SEQ ID NO: 2342902 - RNA, 19 nt, Artificial Sequence
  Description of Artificial Sequence: Synthetic oligonucleotide
cugacaguuuaauugacac

SEQ ID NO: 2342903 - RNA, 19 nt, Artificial Sequence
  Description of Artificial Sequence: Synthetic oligonucleotide
acauggugcagacacgaac

SEQ ID NO: 2342904 - RNA, 19 nt, Artificial Sequence
  Description of Artificial Sequence: Synthetic oligonucleotide
auacugaucagaccuuggg

SEQ ID NO: 2342905 - RNA, 19 nt, Artificial Sequence
  Description of Artificial Sequence: Synthetic oligonucleotide
uguacagucuuuucuucag

SEQ ID NO: 2342906 - RNA, 19 nt, Artificial Sequence
  Description of Artificial Sequence: Synthetic oligonucleotide
auuuauguaccgcauggca

SEQ ID NO: 2342907 - RNA, 19 nt, Artificial Sequence
  Description of Artificial Sequence: Synthetic oligonucleotide
uauucugcugcccaggaau

SEQ ID NO: 2342908 - RNA, 19 nt, Artificial Sequence
  Description of Artificial Sequence: Synthetic oligonucleotide
cagacuauagcaaaaccuc

SEQ ID NO: 2342909 - RNA, 19 nt, Artificial Sequence
  Description of Artificial Sequence: Synthetic oligonucleotide
aaaccucaguaauacauau

SEQ ID NO: 2342910 - RNA, 19 nt, Artificial Sequence
  Description of Artificial Sequence: Synthetic oligonucleotide
cuaguaacagaaaauacaa

SEQ ID NO: 2342911 - RNA, 19 nt, Artificial Sequence
  Description of Artificial Sequence: Synthetic oligonucleotide
agaaaguggcuuccagugc

SEQ ID NO: 2342912 - RNA, 19 nt, Artificial Sequence
  Description of Artificial Sequence: Synthetic oligonucleotide
uuuauguaccgcauggcau

SEQ ID NO: 2342913 - RNA, 19 nt, Artificial Sequence
  Description of Artificial Sequence: Synthetic oligonucleotide
uauacugaucagaccuugg

SEQ ID NO: 2342914 - RNA, 19 nt, Artificial Sequence
  Description of Artificial Sequence: Synthetic oligonucleotide
uaacagaaaauacaaccua

SEQ ID NO: 2342915 - RNA, 19 nt, Artificial Sequence
  Description of Artificial Sequence: Synthetic oligonucleotide
acugcuuguaaagucaauc

SEQ ID NO: 2342916 - RNA, 19 nt, Artificial Sequence
  Description of Artificial Sequence: Synthetic oligonucleotide
uuaaaggcauucuuuugga

SEQ ID NO: 2342917 - RNA, 19 nt, Artificial Sequence
  Description of Artificial Sequence: Synthetic oligonucleotide
cuccuuaaagccugcaucc

SEQ ID NO: 2342918 - RNA, 19 nt, Artificial Sequence
  Description of Artificial Sequence: Synthetic oligonucleotide
agaccguccacguccauac

SEQ ID NO: 2342919 - RNA, 19 nt, Artificial Sequence
  Description of Artificial Sequence: Synthetic oligonucleotide
ugccaguuugccauagccg

SEQ ID NO: 2342920 - RNA, 19 nt, Artificial Sequence
  Description of Artificial Sequence: Synthetic oligonucleotide
auugucaccccggaagugc

SEQ ID NO: 2342921 - RNA, 19 nt, Artificial Sequence
  Description of Artificial Sequence: Synthetic oligonucleotide
uggguaauguucuccaaca

SEQ ID NO: 2342922 - RNA, 19 nt, Artificial Sequence
  Description of Artificial Sequence: Synthetic oligonucleotide
uuuuaauauuucagaggga

SEQ ID NO: 2342923 - RNA, 19 nt, Artificial Sequence
  Description of Artificial Sequence: Synthetic oligonucleotide
cagaaaguggcuuccagug

SEQ ID NO: 2342924 - RNA, 19 nt, Artificial Sequence
  Description of Artificial Sequence: Synthetic oligonucleotide
cuuaaagccugcaucccag

SEQ ID NO: 2342925 - RNA, 19 nt, Artificial Sequence
  Description of Artificial Sequence: Synthetic oligonucleotide
ucucccuaaaagaaguguc

SEQ ID NO: 2342926 - RNA, 19 nt, Artificial Sequence
  Description of Artificial Sequence: Synthetic oligonucleotide
uacaaccuaauaagacuag

SEQ ID NO: 2342927 - RNA, 19 nt, Artificial Sequence
  Description of Artificial Sequence: Synthetic oligonucleotide
gcagacacgaaccacgacg

SEQ ID NO: 2342928 - RNA, 19 nt, Artificial Sequence
  Description of Artificial Sequence: Synthetic oligonucleotide
uaauaagacuagaauuaaa

SEQ ID NO: 2342929 - RNA, 19 nt, Artificial Sequence
  Description of Artificial Sequence: Synthetic oligonucleotide
uccagucucccuaaaagaa

SEQ ID NO: 2342930 - RNA, 19 nt, Artificial Sequence
  Description of Artificial Sequence: Synthetic oligonucleotide
uuguaauaaaaggaaagua

SEQ ID NO: 2342931 - RNA, 19 nt, Artificial Sequence
  Description of Artificial Sequence: Synthetic oligonucleotide
guaugauccggucauccag

SEQ ID NO: 2342932 - RNA, 19 nt, Artificial Sequence
  Description of Artificial Sequence: Synthetic oligonucleotide
acucaucucgaaccugacc

SEQ ID NO: 2342933 - RNA, 19 nt, Artificial Sequence
  Description of Artificial Sequence: Synthetic oligonucleotide
uuaauauuucagagggaaa

SEQ ID NO: 2342934 - RNA, 19 nt, Artificial Sequence
  Description of Artificial Sequence: Synthetic oligonucleotide
ugugcguaugauccgguca

SEQ ID NO: 2342935 - RNA, 19 nt, Artificial Sequence
  Description of Artificial Sequence: Synthetic oligonucleotide
acagacuauagcaaaaccu

SEQ ID NO: 2342936 - RNA, 19 nt, Artificial Sequence
  Description of Artificial Sequence: Synthetic oligonucleotide
cucccuaaaagaagugucc

SEQ ID NO: 2342937 - RNA, 19 nt, Artificial Sequence
  Description of Artificial Sequence: Synthetic oligonucleotide
uuggguaauguucuccaac

SEQ ID NO: 2342938 - RNA, 19 nt, Artificial Sequence
  Description of Artificial Sequence: Synthetic oligonucleotide
acagagauacuauacugau

SEQ ID NO: 2342939 - RNA, 19 nt, Artificial Sequence
  Description of Artificial Sequence: Synthetic oligonucleotide
uaugauccggucauccaga

SEQ ID NO: 2342940 - RNA, 19 nt, Artificial Sequence
  Description of Artificial Sequence: Synthetic oligonucleotide
ugaccuaguaacagaaaau

SEQ ID NO: 2342941 - RNA, 19 nt, Artificial Sequence
  Description of Artificial Sequence: Synthetic oligonucleotide
cagaccuuggguaauguuc

SEQ ID NO: 2342942 - RNA, 19 nt, Artificial Sequence
  Description of Artificial Sequence: Synthetic oligonucleotide
uuccaacauauaauguaca

SEQ ID NO: 2342943 - RNA, 19 nt, Artificial Sequence
  Description of Artificial Sequence: Synthetic oligonucleotide
augaucuucuuuauaucac

SEQ ID NO: 2342944 - RNA, 19 nt, Artificial Sequence
  Description of Artificial Sequence: Synthetic oligonucleotide
acugaucagaccuugggua

SEQ ID NO: 2342945 - RNA, 19 nt, Artificial Sequence
  Description of Artificial Sequence: Synthetic oligonucleotide
agacgaguuccauuuaugu

SEQ ID NO: 2342946 - RNA, 19 nt, Artificial Sequence
  Description of Artificial Sequence: Synthetic oligonucleotide
ugaagauuaccagacugcu

SEQ ID NO: 2342947 - RNA, 19 nt, Artificial Sequence
  Description of Artificial Sequence: Synthetic oligonucleotide
ucgaauaguauuccacaaa

SEQ ID NO: 2342948 - RNA, 19 nt, Artificial Sequence
  Description of Artificial Sequence: Synthetic oligonucleotide
acuauagcaaaaccucagu

SEQ ID NO: 2342949 - RNA, 19 nt, Artificial Sequence
  Description of Artificial Sequence: Synthetic oligonucleotide
gacacgaaccacgacgcgg

SEQ ID NO: 2342950 - RNA, 19 nt, Artificial Sequence
  Description of Artificial Sequence: Synthetic oligonucleotide
ugacaguuuaauugacaca

SEQ ID NO: 2342951 - RNA, 19 nt, Artificial Sequence
  Description of Artificial Sequence: Synthetic oligonucleotide
gaagaguucauaaaucugu

SEQ ID NO: 2342952 - RNA, 19 nt, Artificial Sequence
  Description of Artificial Sequence: Synthetic oligonucleotide
cucucgaauaguauuccac

SEQ ID NO: 2342953 - RNA, 19 nt, Artificial Sequence
  Description of Artificial Sequence: Synthetic oligonucleotide
aacauauaauguacagucu

SEQ ID NO: 2342954 - RNA, 19 nt, Artificial Sequence
  Description of Artificial Sequence: Synthetic oligonucleotide
ucugcucucgaauaguauu

SEQ ID NO: 2342955 - RNA, 19 nt, Artificial Sequence
  Description of Artificial Sequence: Synthetic oligonucleotide
acauaugcagacuuacaau

SEQ ID NO: 2342956 - RNA, 19 nt, Artificial Sequence
  Description of Artificial Sequence: Synthetic oligonucleotide
cagacacgaaccacgacgc

SEQ ID NO: 2342957 - RNA, 19 nt, Artificial Sequence
  Description of Artificial Sequence: Synthetic oligonucleotide
ucaucaacagagugagcug

SEQ ID NO: 2342958 - RNA, 19 nt, Artificial Sequence
  Description of Artificial Sequence: Synthetic oligonucleotide
cauaugcagacuuacaaua

SEQ ID NO: 2342959 - RNA, 19 nt, Artificial Sequence
  Description of Artificial Sequence: Synthetic oligonucleotide
agauacuauacugaucaga

SEQ ID NO: 2342960 - RNA, 19 nt, Artificial Sequence
  Description of Artificial Sequence: Synthetic oligonucleotide
aguaauacauaugcagacu

SEQ ID NO: 2342961 - RNA, 19 nt, Artificial Sequence
  Description of Artificial Sequence: Synthetic oligonucleotide
uuauguaccgcauggcauu

SEQ ID NO: 2342962 - RNA, 19 nt, Artificial Sequence
  Description of Artificial Sequence: Synthetic oligonucleotide
ucaccacucuugcugaaga

SEQ ID NO: 2342963 - RNA, 19 nt, Artificial Sequence
  Description of Artificial Sequence: Synthetic oligonucleotide
ugaugaucuucuuuauauc

SEQ ID NO: 2342964 - RNA, 19 nt, Artificial Sequence
  Description of Artificial Sequence: Synthetic oligonucleotide
ugcagacuuacaauauaaa

SEQ ID NO: 2342965 - RNA, 19 nt, Artificial Sequence
  Description of Artificial Sequence: Synthetic oligonucleotide
acacauauucugcugccca

SEQ ID NO: 2342966 - RNA, 19 nt, Artificial Sequence
  Description of Artificial Sequence: Synthetic oligonucleotide
auaucaccacucuugcuga

SEQ ID NO: 2342967 - RNA, 19 nt, Artificial Sequence
  Description of Artificial Sequence: Synthetic oligonucleotide
ucccuaaaagaaguguccc

SEQ ID NO: 2342968 - RNA, 19 nt, Artificial Sequence
  Description of Artificial Sequence: Synthetic oligonucleotide
gaggccaccggacauggug

SEQ ID NO: 2342969 - RNA, 19 nt, Artificial Sequence
  Description of Artificial Sequence: Synthetic oligonucleotide
uaccgcauggcauucucug

SEQ ID NO: 2342970 - RNA, 19 nt, Artificial Sequence
  Description of Artificial Sequence: Synthetic oligonucleotide
uuaccagacugcuuguaaa

SEQ ID NO: 2342971 - RNA, 19 nt, Artificial Sequence
  Description of Artificial Sequence: Synthetic oligonucleotide
accccggaagugcuggucc

SEQ ID NO: 2342972 - RNA, 19 nt, Artificial Sequence
  Description of Artificial Sequence: Synthetic oligonucleotide
gaauaguauuccacaaaac

SEQ ID NO: 2342973 - RNA, 19 nt, Artificial Sequence
  Description of Artificial Sequence: Synthetic oligonucleotide
ccauuuauguaccgcaugg

SEQ ID NO: 2342974 - RNA, 19 nt, Artificial Sequence
  Description of Artificial Sequence: Synthetic oligonucleotide
ucuuuauaucaccacucuu

SEQ ID NO: 2342975 - RNA, 19 nt, Artificial Sequence
  Description of Artificial Sequence: Synthetic oligonucleotide
gaauuaaaggcauucuuuu

SEQ ID NO: 2342976 - RNA, 19 nt, Artificial Sequence
  Description of Artificial Sequence: Synthetic oligonucleotide
cugcaucccagucugugcg

SEQ ID NO: 2342977 - RNA, 19 nt, Artificial Sequence
  Description of Artificial Sequence: Synthetic oligonucleotide
aggaaaguauuuccaacau

SEQ ID NO: 2342978 - RNA, 19 nt, Artificial Sequence
  Description of Artificial Sequence: Synthetic oligonucleotide
accgcauggcauucucugc

SEQ ID NO: 2342979 - RNA, 19 nt, Artificial Sequence
  Description of Artificial Sequence: Synthetic oligonucleotide
acugcguagcgccuucagg

SEQ ID NO: 2342980 - RNA, 19 nt, Artificial Sequence
  Description of Artificial Sequence: Synthetic oligonucleotide
auuaccagacugcuuguaa

SEQ ID NO: 2342981 - RNA, 19 nt, Artificial Sequence
  Description of Artificial Sequence: Synthetic oligonucleotide
acacgaaccacgacgcggc

SEQ ID NO: 2342982 - RNA, 19 nt, Artificial Sequence
  Description of Artificial Sequence: Synthetic oligonucleotide
cauuucuguccccaugaag

SEQ ID NO: 2342983 - RNA, 19 nt, Artificial Sequence
  Description of Artificial Sequence: Synthetic oligonucleotide
accuuggguaauguucucc

SEQ ID NO: 2342984 - RNA, 19 nt, Artificial Sequence
  Description of Artificial Sequence: Synthetic oligonucleotide
aaaacccagaaaguggcuu

SEQ ID NO: 2342985 - RNA, 19 nt, Artificial Sequence
  Description of Artificial Sequence: Synthetic oligonucleotide
aaaucauuucuguccccau

SEQ ID NO: 2342986 - RNA, 19 nt, Artificial Sequence
  Description of Artificial Sequence: Synthetic oligonucleotide
guaggagucacugcguagc

SEQ ID NO: 2342987 - RNA, 19 nt, Artificial Sequence
  Description of Artificial Sequence: Synthetic oligonucleotide
auccagacgaguuccauuu

SEQ ID NO: 2342988 - RNA, 19 nt, Artificial Sequence
  Description of Artificial Sequence: Synthetic oligonucleotide
acguccauacugccugccc

SEQ ID NO: 2342989 - RNA, 19 nt, Artificial Sequence
  Description of Artificial Sequence: Synthetic oligonucleotide
ggugcagacacgaaccacg

SEQ ID NO: 2342990 - RNA, 19 nt, Artificial Sequence
  Description of Artificial Sequence: Synthetic oligonucleotide
gugccaguuugccauagcc

SEQ ID NO: 2342991 - RNA, 19 nt, Artificial Sequence
  Description of Artificial Sequence: Synthetic oligonucleotide
uuauaucaccacucuugcu

SEQ ID NO: 2342992 - RNA, 19 nt, Artificial Sequence
  Description of Artificial Sequence: Synthetic oligonucleotide
ucaucucgaaccugacccc

SEQ ID NO: 2342993 - RNA, 19 nt, Artificial Sequence
  Description of Artificial Sequence: Synthetic oligonucleotide
ugauccggucauccagacg

SEQ ID NO: 2342994 - RNA, 19 nt, Artificial Sequence
  Description of Artificial Sequence: Synthetic oligonucleotide
uuguaaagucaauccuuac

SEQ ID NO: 2342995 - RNA, 19 nt, Artificial Sequence
  Description of Artificial Sequence: Synthetic oligonucleotide
augauccggucauccagac

SEQ ID NO: 2342996 - RNA, 19 nt, Artificial Sequence
  Description of Artificial Sequence: Synthetic oligonucleotide
auacaaccuaauaagacua

SEQ ID NO: 2342997 - RNA, 19 nt, Artificial Sequence
  Description of Artificial Sequence: Synthetic oligonucleotide
acauauucugcugcccagg

SEQ ID NO: 2342998 - RNA, 19 nt, Artificial Sequence
  Description of Artificial Sequence: Synthetic oligonucleotide
gaccuaguaacagaaaaua

SEQ ID NO: 2342999 - RNA, 19 nt, Artificial Sequence
  Description of Artificial Sequence: Synthetic oligonucleotide
guucuucauugucaccccg

SEQ ID NO: 2343000 - RNA, 19 nt, Artificial Sequence
  Description of Artificial Sequence: Synthetic oligonucleotide
cuuguaaagucaauccuua

SEQ ID NO: 2343001 - RNA, 19 nt, Artificial Sequence
  Description of Artificial Sequence: Synthetic oligonucleotide
guuguaauaaaaggaaagu

SEQ ID NO: 2343002 - RNA, 19 nt, Artificial Sequence
  Description of Artificial Sequence: Synthetic oligonucleotide
uaaagucaauccuuacauu

SEQ ID NO: 2343003 - RNA, 19 nt, Artificial Sequence
  Description of Artificial Sequence: Synthetic oligonucleotide
agucugugcguaugauccg

SEQ ID NO: 2343004 - RNA, 19 nt, Artificial Sequence
  Description of Artificial Sequence: Synthetic oligonucleotide
gaguuccauuuauguaccg

SEQ ID NO: 2343005 - RNA, 19 nt, Artificial Sequence
  Description of Artificial Sequence: Synthetic oligonucleotide
agcaucguaguccucccga

SEQ ID NO: 2343006 - RNA, 19 nt, Artificial Sequence
  Description of Artificial Sequence: Synthetic oligonucleotide
auauaauguacagucuuuu

SEQ ID NO: 2343007 - RNA, 19 nt, Artificial Sequence
  Description of Artificial Sequence: Synthetic oligonucleotide
aauccacacgccguuuucu

SEQ ID NO: 2343008 - RNA, 19 nt, Artificial Sequence
  Description of Artificial Sequence: Synthetic oligonucleotide
caaccuaauaagacuagaa

SEQ ID NO: 2343009 - RNA, 19 nt, Artificial Sequence
  Description of Artificial Sequence: Synthetic oligonucleotide
auagccgccucucccagca

SEQ ID NO: 2343010 - RNA, 19 nt, Artificial Sequence
  Description of Artificial Sequence: Synthetic oligonucleotide
agacccaugaugaucuucu

SEQ ID NO: 2343011 - RNA, 19 nt, Artificial Sequence
  Description of Artificial Sequence: Synthetic oligonucleotide
accguccacguccauacug

SEQ ID NO: 2343012 - RNA, 19 nt, Artificial Sequence
  Description of Artificial Sequence: Synthetic oligonucleotide
ugcguagcgccuucaggag

SEQ ID NO: 2343013 - RNA, 19 nt, Artificial Sequence
  Description of Artificial Sequence: Synthetic oligonucleotide
uguaccgcauggcauucuc

SEQ ID NO: 2343014 - RNA, 19 nt, Artificial Sequence
  Description of Artificial Sequence: Synthetic oligonucleotide
uccacguaggagucacugc

SEQ ID NO: 2343015 - RNA, 19 nt, Artificial Sequence
  Description of Artificial Sequence: Synthetic oligonucleotide
gauacucaucucgaaccug

SEQ ID NO: 2343016 - RNA, 19 nt, Artificial Sequence
  Description of Artificial Sequence: Synthetic oligonucleotide
uaaaggcauucuuuuggau

SEQ ID NO: 2343017 - RNA, 19 nt, Artificial Sequence
  Description of Artificial Sequence: Synthetic oligonucleotide
uuucuguccccaugaagau

SEQ ID NO: 2343018 - RNA, 19 nt, Artificial Sequence
  Description of Artificial Sequence: Synthetic oligonucleotide
ugagcuccacguaggaguc

SEQ ID NO: 2343019 - RNA, 19 nt, Artificial Sequence
  Description of Artificial Sequence: Synthetic oligonucleotide
ucuguucuucaguuguaau

SEQ ID NO: 2343020 - RNA, 19 nt, Artificial Sequence
  Description of Artificial Sequence: Synthetic oligonucleotide
gcagacuuacaauauaaaa

SEQ ID NO: 2343021 - RNA, 19 nt, Artificial Sequence
  Description of Artificial Sequence: Synthetic oligonucleotide
ucccgguacucgcugagcu

SEQ ID NO: 2343022 - RNA, 19 nt, Artificial Sequence
  Description of Artificial Sequence: Synthetic oligonucleotide
cugcguagcgccuucagga

SEQ ID NO: 2343023 - RNA, 19 nt, Artificial Sequence
  Description of Artificial Sequence: Synthetic oligonucleotide
aaccucaguaauacauaug

SEQ ID NO: 2343024 - RNA, 19 nt, Artificial Sequence
  Description of Artificial Sequence: Synthetic oligonucleotide
acagagugagcuguguacu

SEQ ID NO: 2343025 - RNA, 19 nt, Artificial Sequence
  Description of Artificial Sequence: Synthetic oligonucleotide
cagacgaguuccauuuaug

SEQ ID NO: 2343026 - RNA, 19 nt, Artificial Sequence
  Description of Artificial Sequence: Synthetic oligonucleotide
acaaccuaauaagacuaga

SEQ ID NO: 2343027 - RNA, 19 nt, Artificial Sequence
  Description of Artificial Sequence: Synthetic oligonucleotide
aagaguucauaaaucuguu

SEQ ID NO: 2343028 - RNA, 19 nt, Artificial Sequence
  Description of Artificial Sequence: Synthetic oligonucleotide
auacucaucucgaaccuga

SEQ ID NO: 2343029 - RNA, 19 nt, Artificial Sequence
  Description of Artificial Sequence: Synthetic oligonucleotide
guccccaugaagauuacca

SEQ ID NO: 2343030 - RNA, 19 nt, Artificial Sequence
  Description of Artificial Sequence: Synthetic oligonucleotide
aaguggcuuccagugcaac

SEQ ID NO: 2343031 - RNA, 19 nt, Artificial Sequence
  Description of Artificial Sequence: Synthetic oligonucleotide
ccacguaggagucacugcg

SEQ ID NO: 2343032 - RNA, 19 nt, Artificial Sequence
  Description of Artificial Sequence: Synthetic oligonucleotide
gacgaguuccauuuaugua

SEQ ID NO: 2343033 - RNA, 19 nt, Artificial Sequence
  Description of Artificial Sequence: Synthetic oligonucleotide
cagagauacuauacugauc

SEQ ID NO: 2343034 - RNA, 19 nt, Artificial Sequence
  Description of Artificial Sequence: Synthetic oligonucleotide
cuguucuucaguuguaaua

SEQ ID NO: 2343035 - RNA, 19 nt, Artificial Sequence
  Description of Artificial Sequence: Synthetic oligonucleotide
gucugugcguaugauccgg

SEQ ID NO: 2343036 - RNA, 19 nt, Artificial Sequence
  Description of Artificial Sequence: Synthetic oligonucleotide
ugccugcccuccuuaaagc

SEQ ID NO: 2343037 - RNA, 19 nt, Artificial Sequence
  Description of Artificial Sequence: Synthetic oligonucleotide
agagugagcuguguacuug

SEQ ID NO: 2343038 - RNA, 19 nt, Artificial Sequence
  Description of Artificial Sequence: Synthetic oligonucleotide
agauuaccagacugcuugu

SEQ ID NO: 2343039 - RNA, 19 nt, Artificial Sequence
  Description of Artificial Sequence: Synthetic oligonucleotide
aggccaccggacauggugc

SEQ ID NO: 2343040 - RNA, 19 nt, Artificial Sequence
  Description of Artificial Sequence: Synthetic oligonucleotide
cucgaauaguauuccacaa

SEQ ID NO: 2343041 - RNA, 19 nt, Artificial Sequence
  Description of Artificial Sequence: Synthetic oligonucleotide
ugugccaguuugccauagc

SEQ ID NO: 2343042 - RNA, 19 nt, Artificial Sequence
  Description of Artificial Sequence: Synthetic oligonucleotide
ucaggaggccaccggacau

SEQ ID NO: 2343043 - RNA, 19 nt, Artificial Sequence
  Description of Artificial Sequence: Synthetic oligonucleotide
agacacgaaccacgacgcg

SEQ ID NO: 2343044 - RNA, 19 nt, Artificial Sequence
  Description of Artificial Sequence: Synthetic oligonucleotide
uugucaccccggaagugcu

SEQ ID NO: 2343045 - RNA, 19 nt, Artificial Sequence
  Description of Artificial Sequence: Synthetic oligonucleotide
guacucgcugagcuccacg

SEQ ID NO: 2343046 - RNA, 19 nt, Artificial Sequence
  Description of Artificial Sequence: Synthetic oligonucleotide
gaauccacacgccguuuuc

SEQ ID NO: 2343047 - RNA, 19 nt, Artificial Sequence
  Description of Artificial Sequence: Synthetic oligonucleotide
aagugcuggucccgguacu

SEQ ID NO: 2343048 - RNA, 19 nt, Artificial Sequence
  Description of Artificial Sequence: Synthetic oligonucleotide
auaugcagacuuacaauau

SEQ ID NO: 2343049 - RNA, 19 nt, Artificial Sequence
  Description of Artificial Sequence: Synthetic oligonucleotide
gaucagaccuuggguaaug

SEQ ID NO: 2343050 - RNA, 19 nt, Artificial Sequence
  Description of Artificial Sequence: Synthetic oligonucleotide
ucugugcguaugauccggu

SEQ ID NO: 2343051 - RNA, 19 nt, Artificial Sequence
  Description of Artificial Sequence: Synthetic oligonucleotide
auggugcagacacgaacca

SEQ ID NO: 2343052 - RNA, 19 nt, Artificial Sequence
  Description of Artificial Sequence: Synthetic oligonucleotide
aguuuaauugacacauauu

SEQ ID NO: 2343053 - RNA, 19 nt, Artificial Sequence
  Description of Artificial Sequence: Synthetic oligonucleotide
cugagcuccacguaggagu

SEQ ID NO: 2343054 - RNA, 19 nt, Artificial Sequence
  Description of Artificial Sequence: Synthetic oligonucleotide
cacgacgcggccacguccc

SEQ ID NO: 2343055 - RNA, 19 nt, Artificial Sequence
  Description of Artificial Sequence: Synthetic oligonucleotide
uaguccucccgauacucau

SEQ ID NO: 2343056 - RNA, 19 nt, Artificial Sequence
  Description of Artificial Sequence: Synthetic oligonucleotide
uacucaucucgaaccugac

SEQ ID NO: 2343057 - RNA, 19 nt, Artificial Sequence
  Description of Artificial Sequence: Synthetic oligonucleotide
cuuccagugcaacagagau

SEQ ID NO: 2343058 - RNA, 19 nt, Artificial Sequence
  Description of Artificial Sequence: Synthetic oligonucleotide
gucaccccggaagugcugg

SEQ ID NO: 2343059 - RNA, 19 nt, Artificial Sequence
  Description of Artificial Sequence: Synthetic oligonucleotide
cuuggggcuuucaccacuc

SEQ ID NO: 2343060 - RNA, 19 nt, Artificial Sequence
  Description of Artificial Sequence: Synthetic oligonucleotide
ggucauccagacgaguucc

SEQ ID NO: 2343061 - RNA, 19 nt, Artificial Sequence
  Description of Artificial Sequence: Synthetic oligonucleotide
caguuuaauugacacauau

SEQ ID NO: 2343062 - RNA, 19 nt, Artificial Sequence
  Description of Artificial Sequence: Synthetic oligonucleotide
cugaucagaccuuggguaa

SEQ ID NO: 2343063 - RNA, 19 nt, Artificial Sequence
  Description of Artificial Sequence: Synthetic oligonucleotide
agucuuuucuucaguaauu

SEQ ID NO: 2343064 - RNA, 19 nt, Artificial Sequence
  Description of Artificial Sequence: Synthetic oligonucleotide
ccacaaaacagaauccaca

SEQ ID NO: 2343065 - RNA, 19 nt, Artificial Sequence
  Description of Artificial Sequence: Synthetic oligonucleotide
ugcagacacgaaccacgac

SEQ ID NO: 2343066 - RNA, 19 nt, Artificial Sequence
  Description of Artificial Sequence: Synthetic oligonucleotide
ucagaccuuggguaauguu

SEQ ID NO: 2343067 - RNA, 19 nt, Artificial Sequence
  Description of Artificial Sequence: Synthetic oligonucleotide
ucguaguccucccgauacu

SEQ ID NO: 2343068 - RNA, 19 nt, Artificial Sequence
  Description of Artificial Sequence: Synthetic oligonucleotide
aguuugccauagccgccuc

SEQ ID NO: 2343069 - RNA, 19 nt, Artificial Sequence
  Description of Artificial Sequence: Synthetic oligonucleotide
uccacacgccguuuucuuc

SEQ ID NO: 2343070 - RNA, 19 nt, Artificial Sequence
  Description of Artificial Sequence: Synthetic oligonucleotide
caucaucaacagagugagc

SEQ ID NO: 2343071 - RNA, 19 nt, Artificial Sequence
  Description of Artificial Sequence: Synthetic oligonucleotide
uauguaccgcauggcauuc

SEQ ID NO: 2343072 - RNA, 19 nt, Artificial Sequence
  Description of Artificial Sequence: Synthetic oligonucleotide
uugugccaguuugccauag

SEQ ID NO: 2343073 - RNA, 19 nt, Artificial Sequence
  Description of Artificial Sequence: Synthetic oligonucleotide
cauauaauguacagucuuu

SEQ ID NO: 2343074 - RNA, 19 nt, Artificial Sequence
  Description of Artificial Sequence: Synthetic oligonucleotide
cacucuugcugaagaguuc

SEQ ID NO: 2343075 - RNA, 19 nt, Artificial Sequence
  Description of Artificial Sequence: Synthetic oligonucleotide
aucuguucuucaguuguaa

SEQ ID NO: 2343076 - RNA, 19 nt, Artificial Sequence
  Description of Artificial Sequence: Synthetic oligonucleotide
cucccgauacucaucucga

SEQ ID NO: 2343077 - RNA, 19 nt, Artificial Sequence
  Description of Artificial Sequence: Synthetic oligonucleotide
uuugugccaguuugccaua

SEQ ID NO: 2343078 - RNA, 19 nt, Artificial Sequence
  Description of Artificial Sequence: Synthetic oligonucleotide
ugaucagaccuuggguaau

SEQ ID NO: 2343079 - RNA, 19 nt, Artificial Sequence
  Description of Artificial Sequence: Synthetic oligonucleotide
accacgacgcggccacguc

SEQ ID NO: 2343080 - RNA, 19 nt, Artificial Sequence
  Description of Artificial Sequence: Synthetic oligonucleotide
acguaggagucacugcgua

SEQ ID NO: 2343081 - RNA, 19 nt, Artificial Sequence
  Description of Artificial Sequence: Synthetic oligonucleotide
ggaaaguauuuccaacaua

SEQ ID NO: 2343082 - RNA, 19 nt, Artificial Sequence
  Description of Artificial Sequence: Synthetic oligonucleotide
uggugcagacacgaaccac

SEQ ID NO: 2343083 - RNA, 19 nt, Artificial Sequence
  Description of Artificial Sequence: Synthetic oligonucleotide
cauucagcugacaguuuaa

SEQ ID NO: 2343084 - RNA, 19 nt, Artificial Sequence
  Description of Artificial Sequence: Synthetic oligonucleotide
cgaguuccauuuauguacc

SEQ ID NO: 2343085 - RNA, 19 nt, Artificial Sequence
  Description of Artificial Sequence: Synthetic oligonucleotide
aaccacgacgcggccacgu

SEQ ID NO: 2343086 - RNA, 19 nt, Artificial Sequence
  Description of Artificial Sequence: Synthetic oligonucleotide
agucucccuaaaagaagug

SEQ ID NO: 2343087 - RNA, 19 nt, Artificial Sequence
  Description of Artificial Sequence: Synthetic oligonucleotide
uaucaccacucuugcugaa

SEQ ID NO: 2343088 - RNA, 19 nt, Artificial Sequence
  Description of Artificial Sequence: Synthetic oligonucleotide
ccccagaccguccacgucc

SEQ ID NO: 2343089 - RNA, 19 nt, Artificial Sequence
  Description of Artificial Sequence: Synthetic oligonucleotide
cgaauaguauuccacaaaa

SEQ ID NO: 2343090 - RNA, 19 nt, Artificial Sequence
  Description of Artificial Sequence: Synthetic oligonucleotide
ucccgauacucaucucgaa

SEQ ID NO: 2343091 - RNA, 19 nt, Artificial Sequence
  Description of Artificial Sequence: Synthetic oligonucleotide
aaaguggcuuccagugcaa

SEQ ID NO: 2343092 - RNA, 19 nt, Artificial Sequence
  Description of Artificial Sequence: Synthetic oligonucleotide
acuauacugaucagaccuu

SEQ ID NO: 2343093 - RNA, 19 nt, Artificial Sequence
  Description of Artificial Sequence: Synthetic oligonucleotide
uccagacgaguuccauuua

SEQ ID NO: 2343094 - RNA, 19 nt, Artificial Sequence
  Description of Artificial Sequence: Synthetic oligonucleotide
cagcaucguaguccucccg

SEQ ID NO: 2343095 - RNA, 19 nt, Artificial Sequence
  Description of Artificial Sequence: Synthetic oligonucleotide
gagcuguguacuuggggcu

SEQ ID NO: 2343096 - RNA, 19 nt, Artificial Sequence
  Description of Artificial Sequence: Synthetic oligonucleotide
caucugcucucgaauagua

SEQ ID NO: 2343097 - RNA, 19 nt, Artificial Sequence
  Description of Artificial Sequence: Synthetic oligonucleotide
cugugcguaugauccgguc

SEQ ID NO: 2343098 - RNA, 19 nt, Artificial Sequence
  Description of Artificial Sequence: Synthetic oligonucleotide
gugcaacagagauacuaua

SEQ ID NO: 2343099 - RNA, 19 nt, Artificial Sequence
  Description of Artificial Sequence: Synthetic oligonucleotide
ccguccacguccauacugc

SEQ ID NO: 2343100 - RNA, 19 nt, Artificial Sequence
  Description of Artificial Sequence: Synthetic oligonucleotide
cccgauacucaucucgaac

SEQ ID NO: 2343101 - RNA, 19 nt, Artificial Sequence
  Description of Artificial Sequence: Synthetic oligonucleotide
aucagaccuuggguaaugu

SEQ ID NO: 2343102 - RNA, 19 nt, Artificial Sequence
  Description of Artificial Sequence: Synthetic oligonucleotide
acugccugcccuccuuaaa

SEQ ID NO: 2343103 - RNA, 19 nt, Artificial Sequence
  Description of Artificial Sequence: Synthetic oligonucleotide
cacugcguagcgccuucag

SEQ ID NO: 2343104 - RNA, 19 nt, Artificial Sequence
  Description of Artificial Sequence: Synthetic oligonucleotide
ggauucugucuuuuaauau

SEQ ID NO: 2343105 - RNA, 19 nt, Artificial Sequence
  Description of Artificial Sequence: Synthetic oligonucleotide
cuuggguaauguucuccaa

SEQ ID NO: 2343106 - RNA, 19 nt, Artificial Sequence
  Description of Artificial Sequence: Synthetic oligonucleotide
gcuuucaccacucacuguu

SEQ ID NO: 2343107 - RNA, 19 nt, Artificial Sequence
  Description of Artificial Sequence: Synthetic oligonucleotide
gcguagcgccuucaggagg

SEQ ID NO: 2343108 - RNA, 19 nt, Artificial Sequence
  Description of Artificial Sequence: Synthetic oligonucleotide
gauuaccagacugcuugua

SEQ ID NO: 2343109 - RNA, 19 nt, Artificial Sequence
  Description of Artificial Sequence: Synthetic oligonucleotide
caucaacagagugagcugu

SEQ ID NO: 2343110 - RNA, 19 nt, Artificial Sequence
  Description of Artificial Sequence: Synthetic oligonucleotide
ggcuuccagugcaacagag

SEQ ID NO: 2343111 - RNA, 19 nt, Artificial Sequence
  Description of Artificial Sequence: Synthetic oligonucleotide
gccucucccagcaucguag

SEQ ID NO: 2343112 - RNA, 19 nt, Artificial Sequence
  Description of Artificial Sequence: Synthetic oligonucleotide
caccggacauggugcagac

SEQ ID NO: 2343113 - RNA, 19 nt, Artificial Sequence
  Description of Artificial Sequence: Synthetic oligonucleotide
gccugcccuccuuaaagcc

SEQ ID NO: 2343114 - RNA, 19 nt, Artificial Sequence
  Description of Artificial Sequence: Synthetic oligonucleotide
gcguaugauccggucaucc

SEQ ID NO: 2343115 - RNA, 19 nt, Artificial Sequence
  Description of Artificial Sequence: Synthetic oligonucleotide
ccuuggguaauguucucca

SEQ ID NO: 2343116 - RNA, 19 nt, Artificial Sequence
  Description of Artificial Sequence: Synthetic oligonucleotide
cuggucccgguacucgcug

SEQ ID NO: 2343117 - RNA, 19 nt, Artificial Sequence
  Description of Artificial Sequence: Synthetic oligonucleotide
gucucccuaaaagaagugu

SEQ ID NO: 2343118 - RNA, 19 nt, Artificial Sequence
  Description of Artificial Sequence: Synthetic oligonucleotide
gugcguaugauccggucau

SEQ ID NO: 2343119 - RNA, 19 nt, Artificial Sequence
  Description of Artificial Sequence: Synthetic oligonucleotide
guacagucuuuucuucagu

SEQ ID NO: 2343120 - RNA, 19 nt, Artificial Sequence
  Description of Artificial Sequence: Synthetic oligonucleotide
ccagucugugcguaugauc

SEQ ID NO: 2343121 - RNA, 19 nt, Artificial Sequence
  Description of Artificial Sequence: Synthetic oligonucleotide
guaguccucccgauacuca

SEQ ID NO: 2343122 - RNA, 19 nt, Artificial Sequence
  Description of Artificial Sequence: Synthetic oligonucleotide
caacagagugagcugugua

SEQ ID NO: 2343123 - RNA, 19 nt, Artificial Sequence
  Description of Artificial Sequence: Synthetic oligonucleotide
uccggucauccagacgagu

SEQ ID NO: 2343124 - RNA, 19 nt, Artificial Sequence
  Description of Artificial Sequence: Synthetic oligonucleotide
aucugcucucgaauaguau

SEQ ID NO: 2343125 - RNA, 19 nt, Artificial Sequence
  Description of Artificial Sequence: Synthetic oligonucleotide
cccagaaaguggcuuccag

SEQ ID NO: 2343126 - RNA, 19 nt, Artificial Sequence
  Description of Artificial Sequence: Synthetic oligonucleotide
acgccguuuucuucauuuu

SEQ ID NO: 2343127 - RNA, 19 nt, Artificial Sequence
  Description of Artificial Sequence: Synthetic oligonucleotide
cucucccagcaucguaguc

SEQ ID NO: 2343128 - RNA, 19 nt, Artificial Sequence
  Description of Artificial Sequence: Synthetic oligonucleotide
ccuuaaagccugcauccca

SEQ ID NO: 2343129 - RNA, 19 nt, Artificial Sequence
  Description of Artificial Sequence: Synthetic oligonucleotide
cacgaaccacgacgcggcc

SEQ ID NO: 2343130 - RNA, 19 nt, Artificial Sequence
  Description of Artificial Sequence: Synthetic oligonucleotide
ccucaguaauacauaugca

SEQ ID NO: 2343131 - RNA, 19 nt, Artificial Sequence
  Description of Artificial Sequence: Synthetic oligonucleotide
gcucucgaauaguauucca

SEQ ID NO: 2343132 - RNA, 19 nt, Artificial Sequence
  Description of Artificial Sequence: Synthetic oligonucleotide
ccagcaucguaguccuccc

SEQ ID NO: 2343133 - RNA, 19 nt, Artificial Sequence
  Description of Artificial Sequence: Synthetic oligonucleotide
gugcagacacgaaccacga

SEQ ID NO: 2343134 - RNA, 19 nt, Artificial Sequence
  Description of Artificial Sequence: Synthetic oligonucleotide
cacgccguuuucuucauuu

SEQ ID NO: 2343135 - RNA, 19 nt, Artificial Sequence
  Description of Artificial Sequence: Synthetic oligonucleotide
acgaaccacgacgcggcca

SEQ ID NO: 2343136 - RNA, 19 nt, Artificial Sequence
  Description of Artificial Sequence: Synthetic oligonucleotide
auucugcugcccaggaaua

SEQ ID NO: 2343137 - RNA, 19 nt, Artificial Sequence
  Description of Artificial Sequence: Synthetic oligonucleotide
gaagauuaccagacugcuu

SEQ ID NO: 2343138 - RNA, 19 nt, Artificial Sequence
  Description of Artificial Sequence: Synthetic oligonucleotide
cccuaaaagaaguguccca

SEQ ID NO: 2343139 - RNA, 19 nt, Artificial Sequence
  Description of Artificial Sequence: Synthetic oligonucleotide
ugcguaugauccggucauc

SEQ ID NO: 2343140 - RNA, 19 nt, Artificial Sequence
  Description of Artificial Sequence: Synthetic oligonucleotide
cucccagcaucguaguccu

SEQ ID NO: 2343141 - RNA, 19 nt, Artificial Sequence
  Description of Artificial Sequence: Synthetic oligonucleotide
ccacacgccguuuucuuca

SEQ ID NO: 2343142 - RNA, 19 nt, Artificial Sequence
  Description of Artificial Sequence: Synthetic oligonucleotide
ggcauucuuuuggauucug

SEQ ID NO: 2343143 - RNA, 19 nt, Artificial Sequence
  Description of Artificial Sequence: Synthetic oligonucleotide
agcuguguacuuggggcuu

SEQ ID NO: 2343144 - RNA, 19 nt, Artificial Sequence
  Description of Artificial Sequence: Synthetic oligonucleotide
cguaggagucacugcguag

SEQ ID NO: 2343145 - RNA, 19 nt, Artificial Sequence
  Description of Artificial Sequence: Synthetic oligonucleotide
ucacugcguagcgccuuca

SEQ ID NO: 2343146 - RNA, 19 nt, Artificial Sequence
  Description of Artificial Sequence: Synthetic oligonucleotide
acgacgcggccacgucccg

SEQ ID NO: 2343147 - RNA, 19 nt, Artificial Sequence
  Description of Artificial Sequence: Synthetic oligonucleotide
gccgccucucccagcaucg

SEQ ID NO: 2343148 - RNA, 19 nt, Artificial Sequence
  Description of Artificial Sequence: Synthetic oligonucleotide
cgaaccacgacgcggccac

SEQ ID NO: 2343149 - RNA, 19 nt, Artificial Sequence
  Description of Artificial Sequence: Synthetic oligonucleotide
gaaccacgacgcggccacg

SEQ ID NO: 2343150 - RNA, 19 nt, Artificial Sequence
  Description of Artificial Sequence: Synthetic oligonucleotide
ccauucagcugacaguuua

SEQ ID NO: 2343151 - RNA, 19 nt, Artificial Sequence
  Description of Artificial Sequence: Synthetic oligonucleotide
auccggucauccagacgag

SEQ ID NO: 2343152 - RNA, 19 nt, Artificial Sequence
  Description of Artificial Sequence: Synthetic oligonucleotide
acccagaaaguggcuucca

SEQ ID NO: 2343153 - RNA, 19 nt, Artificial Sequence
  Description of Artificial Sequence: Synthetic oligonucleotide
caucguaguccucccgaua

SEQ ID NO: 2343154 - RNA, 19 nt, Artificial Sequence
  Description of Artificial Sequence: Synthetic oligonucleotide
ccacgacgcggccacgucc

SEQ ID NO: 2343155 - RNA, 19 nt, Artificial Sequence
  Description of Artificial Sequence: Synthetic oligonucleotide
cacguaggagucacugcgu

SEQ ID NO: 2343156 - RNA, 19 nt, Artificial Sequence
  Description of Artificial Sequence: Synthetic oligonucleotide
gcauggcauucucugcauc

SEQ ID NO: 2343157 - RNA, 19 nt, Artificial Sequence
  Description of Artificial Sequence: Synthetic oligonucleotide
cuguguacuuggggcuuuc

SEQ ID NO: 2343158 - RNA, 19 nt, Artificial Sequence
  Description of Artificial Sequence: Synthetic oligonucleotide
guuugccauagccgccucu

SEQ ID NO: 2343159 - RNA, 19 nt, Artificial Sequence
  Description of Artificial Sequence: Synthetic oligonucleotide
ccuaaaagaagugucccau

SEQ ID NO: 2343160 - RNA, 19 nt, Artificial Sequence
  Description of Artificial Sequence: Synthetic oligonucleotide
cugcccaggaauacaguuu

SEQ ID NO: 2343161 - RNA, 19 nt, Artificial Sequence
  Description of Artificial Sequence: Synthetic oligonucleotide
ccagaaaguggcuuccagu

SEQ ID NO: 2343162 - RNA, 19 nt, Artificial Sequence
  Description of Artificial Sequence: Synthetic oligonucleotide
ccauagccgccucucccag

SEQ ID NO: 2343163 - RNA, 19 nt, Artificial Sequence
  Description of Artificial Sequence: Synthetic oligonucleotide
ccgcauggcauucucugca

SEQ ID NO: 2343164 - RNA, 19 nt, Artificial Sequence
  Description of Artificial Sequence: Synthetic oligonucleotide
gcugcccaggaauacaguu

SEQ ID NO: 2343165 - RNA, 19 nt, Artificial Sequence
  Description of Artificial Sequence: Synthetic oligonucleotide
cggacauggugcagacacg

SEQ ID NO: 2343166 - RNA, 19 nt, Artificial Sequence
  Description of Artificial Sequence: Synthetic oligonucleotide
acacgccguuuucuucauu

SEQ ID NO: 2343167 - RNA, 19 nt, Artificial Sequence
  Description of Artificial Sequence: Synthetic oligonucleotide
gacugcuuguaaagucaau

SEQ ID NO: 2343168 - RNA, 19 nt, Artificial Sequence
  Description of Artificial Sequence: Synthetic oligonucleotide
cagaccguccacguccaua

SEQ ID NO: 2343169 - RNA, 19 nt, Artificial Sequence
  Description of Artificial Sequence: Synthetic oligonucleotide
cauacugccugcccuccuu

SEQ ID NO: 2343170 - RNA, 19 nt, Artificial Sequence
  Description of Artificial Sequence: Synthetic oligonucleotide
ggcauucucugcaucugcu

SEQ ID NO: 2343171 - RNA, 19 nt, Artificial Sequence
  Description of Artificial Sequence: Synthetic oligonucleotide
ccacucuugcugaagaguu

SEQ ID NO: 2343172 - RNA, 19 nt, Artificial Sequence
  Description of Artificial Sequence: Synthetic oligonucleotide
guaccgcauggcauucucu

SEQ ID NO: 2343173 - RNA, 19 nt, Artificial Sequence
  Description of Artificial Sequence: Synthetic oligonucleotide
guccacguccauacugccu

SEQ ID NO: 2343174 - RNA, 19 nt, Artificial Sequence
  Description of Artificial Sequence: Synthetic oligonucleotide
cccggaagugcuggucccg

SEQ ID NO: 2343175 - RNA, 19 nt, Artificial Sequence
  Description of Artificial Sequence: Synthetic oligonucleotide
gagucacugcguagcgccu

SEQ ID NO: 2343176 - RNA, 19 nt, Artificial Sequence
  Description of Artificial Sequence: Synthetic oligonucleotide
gguacucgcugagcuccac

SEQ ID NO: 2343177 - RNA, 19 nt, Artificial Sequence
  Description of Artificial Sequence: Synthetic oligonucleotide
gcaucugcucucgaauagu

SEQ ID NO: 2343178 - RNA, 19 nt, Artificial Sequence
  Description of Artificial Sequence: Synthetic oligonucleotide
gaccguccacguccauacu

SEQ ID NO: 2343179 - RNA, 19 nt, Artificial Sequence
  Description of Artificial Sequence: Synthetic oligonucleotide
ccagacgaguuccauuuau

SEQ ID NO: 2343180 - RNA, 19 nt, Artificial Sequence
  Description of Artificial Sequence: Synthetic oligonucleotide
gccaccggacauggugcag

SEQ ID NO: 2343181 - RNA, 19 nt, Artificial Sequence
  Description of Artificial Sequence: Synthetic oligonucleotide
ccaccggacauggugcaga

SEQ ID NO: 2343182 - RNA, 19 nt, Artificial Sequence
  Description of Artificial Sequence: Synthetic oligonucleotide
gcaucguaguccucccgau

SEQ ID NO: 2343183 - RNA, 19 nt, Artificial Sequence
  Description of Artificial Sequence: Synthetic oligonucleotide
cgauacucaucucgaaccu

SEQ ID NO: 2343184 - RNA, 19 nt, Artificial Sequence
  Description of Artificial Sequence: Synthetic oligonucleotide
gcgccuucaggaggccacc

SEQ ID NO: 2343185 - RNA, 19 nt, Artificial Sequence
  Description of Artificial Sequence: Synthetic oligonucleotide
cacacgccguuuucuucau

SEQ ID NO: 2343186 - RNA, 19 nt, Artificial Sequence
  Description of Artificial Sequence: Synthetic oligonucleotide
gcaucccagucugugcgua

SEQ ID NO: 2343187 - RNA, 19 nt, Artificial Sequence
  Description of Artificial Sequence: Synthetic oligonucleotide
ccggucauccagacgaguu

SEQ ID NO: 2343188 - RNA, 19 nt, Artificial Sequence
  Description of Artificial Sequence: Synthetic oligonucleotide
cgccuucaggaggccaccg

SEQ ID NO: 2343189 - RNA, 19 nt, Artificial Sequence
  Description of Artificial Sequence: Synthetic oligonucleotide
cgcugagcuccacguagga

SEQ ID NO: 2343190 - RNA, 19 nt, Artificial Sequence
  Description of Artificial Sequence: Synthetic oligonucleotide
ccucucccagcaucguagu

SEQ ID NO: 2343191 - RNA, 19 nt, Artificial Sequence
  Description of Artificial Sequence: Synthetic oligonucleotide
gcuguguacuuggggcuuu

SEQ ID NO: 2343192 - RNA, 19 nt, Artificial Sequence
  Description of Artificial Sequence: Synthetic oligonucleotide
ccauacugccugcccuccu

SEQ ID NO: 2343193 - RNA, 19 nt, Artificial Sequence
  Description of Artificial Sequence: Synthetic oligonucleotide
cgguacucgcugagcucca

SEQ ID NO: 2343194 - RNA, 19 nt, Artificial Sequence
  Description of Artificial Sequence: Synthetic oligonucleotide
ccagacccaugaugaucuu

SEQ ID NO: 2343195 - RNA, 19 nt, Artificial Sequence
  Description of Artificial Sequence: Synthetic oligonucleotide
uuaauugaaaugaacaugg

SEQ ID NO: 2343196 - RNA, 19 nt, Artificial Sequence
  Description of Artificial Sequence: Synthetic oligonucleotide
ugaguuauaaaauuggccc

SEQ ID NO: 2343197 - RNA, 19 nt, Artificial Sequence
  Description of Artificial Sequence: Synthetic oligonucleotide
aauauaggcaguuccaagg

SEQ ID NO: 2343198 - RNA, 19 nt, Artificial Sequence
  Description of Artificial Sequence: Synthetic oligonucleotide
uauaaaauuggccccacgg

SEQ ID NO: 2343199 - RNA, 19 nt, Artificial Sequence
  Description of Artificial Sequence: Synthetic oligonucleotide
uucaccauaaacucgaucc

SEQ ID NO: 2343200 - RNA, 19 nt, Artificial Sequence
  Description of Artificial Sequence: Synthetic oligonucleotide
ucaucuaugauuauaauuu

SEQ ID NO: 2343201 - RNA, 19 nt, Artificial Sequence
  Description of Artificial Sequence: Synthetic oligonucleotide
uauuccaugaauauaggca

SEQ ID NO: 2343202 - RNA, 19 nt, Artificial Sequence
  Description of Artificial Sequence: Synthetic oligonucleotide
aaagagaguucaauaaucc

SEQ ID NO: 2343203 - RNA, 19 nt, Artificial Sequence
  Description of Artificial Sequence: Synthetic oligonucleotide
aagagacuauuucauuucc

SEQ ID NO: 2343204 - RNA, 19 nt, Artificial Sequence
  Description of Artificial Sequence: Synthetic oligonucleotide
uuuauguaguagcaaagag

SEQ ID NO: 2343205 - RNA, 19 nt, Artificial Sequence
  Description of Artificial Sequence: Synthetic oligonucleotide
ugauauuggaaccucacca

SEQ ID NO: 2343206 - RNA, 19 nt, Artificial Sequence
  Description of Artificial Sequence: Synthetic oligonucleotide
aaaauuacccuccuuuugu

SEQ ID NO: 2343207 - RNA, 19 nt, Artificial Sequence
  Description of Artificial Sequence: Synthetic oligonucleotide
auaaaauuggccccacggc

SEQ ID NO: 2343208 - RNA, 19 nt, Artificial Sequence
  Description of Artificial Sequence: Synthetic oligonucleotide
uuucgguauaaucugaagc

SEQ ID NO: 2343209 - RNA, 19 nt, Artificial Sequence
  Description of Artificial Sequence: Synthetic oligonucleotide
aaaugcacuuaccuuuggc

SEQ ID NO: 2343210 - RNA, 19 nt, Artificial Sequence
  Description of Artificial Sequence: Synthetic oligonucleotide
ucaggaauaaauuugggau

SEQ ID NO: 2343211 - RNA, 19 nt, Artificial Sequence
  Description of Artificial Sequence: Synthetic oligonucleotide
uuuaauugaaaugaacaug

SEQ ID NO: 2343212 - RNA, 19 nt, Artificial Sequence
  Description of Artificial Sequence: Synthetic oligonucleotide
aaaucccagccauaaacac

SEQ ID NO: 2343213 - RNA, 19 nt, Artificial Sequence
  Description of Artificial Sequence: Synthetic oligonucleotide
aaugaccaguaugaaaugc

SEQ ID NO: 2343214 - RNA, 19 nt, Artificial Sequence
  Description of Artificial Sequence: Synthetic oligonucleotide
uuauguaguagcaaagaga

SEQ ID NO: 2343215 - RNA, 19 nt, Artificial Sequence
  Description of Artificial Sequence: Synthetic oligonucleotide
uguaauucaacugucuugc

SEQ ID NO: 2343216 - RNA, 19 nt, Artificial Sequence
  Description of Artificial Sequence: Synthetic oligonucleotide
gagaucagcauccauaaug

SEQ ID NO: 2343217 - RNA, 19 nt, Artificial Sequence
  Description of Artificial Sequence: Synthetic oligonucleotide
ucaaaucccagccauaaac

SEQ ID NO: 2343218 - RNA, 19 nt, Artificial Sequence
  Description of Artificial Sequence: Synthetic oligonucleotide
acuuggauucaccauaaac

SEQ ID NO: 2343219 - RNA, 19 nt, Artificial Sequence
  Description of Artificial Sequence: Synthetic oligonucleotide
uuuguagcgaguuccagag

SEQ ID NO: 2343220 - RNA, 19 nt, Artificial Sequence
  Description of Artificial Sequence: Synthetic oligonucleotide
auaaacucgauccacaaau

SEQ ID NO: 2343221 - RNA, 19 nt, Artificial Sequence
  Description of Artificial Sequence: Synthetic oligonucleotide
gaugacauaauuuccugug

SEQ ID NO: 2343222 - RNA, 19 nt, Artificial Sequence
  Description of Artificial Sequence: Synthetic oligonucleotide
gaagcuuccuguuaagucc

SEQ ID NO: 2343223 - RNA, 19 nt, Artificial Sequence
  Description of Artificial Sequence: Synthetic oligonucleotide
aacaugguaaguauaaaug

SEQ ID NO: 2343224 - RNA, 19 nt, Artificial Sequence
  Description of Artificial Sequence: Synthetic oligonucleotide
gacaaaaucagugacccag

SEQ ID NO: 2343225 - RNA, 19 nt, Artificial Sequence
  Description of Artificial Sequence: Synthetic oligonucleotide
auauaggcaguuccaaggc

SEQ ID NO: 2343226 - RNA, 19 nt, Artificial Sequence
  Description of Artificial Sequence: Synthetic oligonucleotide
agacuauuucauuuccucc

SEQ ID NO: 2343227 - RNA, 19 nt, Artificial Sequence
  Description of Artificial Sequence: Synthetic oligonucleotide
ugcucgaacaaucaucucc

SEQ ID NO: 2343228 - RNA, 19 nt, Artificial Sequence
  Description of Artificial Sequence: Synthetic oligonucleotide
aagacauagccuuuggaga

SEQ ID NO: 2343229 - RNA, 19 nt, Artificial Sequence
  Description of Artificial Sequence: Synthetic oligonucleotide
guugauugaacucucggag

SEQ ID NO: 2343230 - RNA, 19 nt, Artificial Sequence
  Description of Artificial Sequence: Synthetic oligonucleotide
agaaccgaguacuuguccc

SEQ ID NO: 2343231 - RNA, 19 nt, Artificial Sequence
  Description of Artificial Sequence: Synthetic oligonucleotide
aauucugucuggcccauag

SEQ ID NO: 2343232 - RNA, 19 nt, Artificial Sequence
  Description of Artificial Sequence: Synthetic oligonucleotide
auuggaaccucaccaaugg

SEQ ID NO: 2343233 - RNA, 19 nt, Artificial Sequence
  Description of Artificial Sequence: Synthetic oligonucleotide
auugaaaugaacaugguaa

SEQ ID NO: 2343234 - RNA, 19 nt, Artificial Sequence
  Description of Artificial Sequence: Synthetic oligonucleotide
uucgguauaaucugaagcu

SEQ ID NO: 2343235 - RNA, 19 nt, Artificial Sequence
  Description of Artificial Sequence: Synthetic oligonucleotide
caugaauauaggcaguucc

SEQ ID NO: 2343236 - RNA, 19 nt, Artificial Sequence
  Description of Artificial Sequence: Synthetic oligonucleotide
ucugaguuauaaaauuggc

SEQ ID NO: 2343237 - RNA, 19 nt, Artificial Sequence
  Description of Artificial Sequence: Synthetic oligonucleotide
ucuaugauuauaauuucau

SEQ ID NO: 2343238 - RNA, 19 nt, Artificial Sequence
  Description of Artificial Sequence: Synthetic oligonucleotide
augauuauaauuucauagu

SEQ ID NO: 2343239 - RNA, 19 nt, Artificial Sequence
  Description of Artificial Sequence: Synthetic oligonucleotide
uguaguagcaaagagaguu

SEQ ID NO: 2343240 - RNA, 19 nt, Artificial Sequence
  Description of Artificial Sequence: Synthetic oligonucleotide
uuuauuccaugaauauagg

SEQ ID NO: 2343241 - RNA, 19 nt, Artificial Sequence
  Description of Artificial Sequence: Synthetic oligonucleotide
auaaauuugggauggugug

SEQ ID NO: 2343242 - RNA, 19 nt, Artificial Sequence
  Description of Artificial Sequence: Synthetic oligonucleotide
uauaaucugaagcuuccug

SEQ ID NO: 2343243 - RNA, 19 nt, Artificial Sequence
  Description of Artificial Sequence: Synthetic oligonucleotide
agacauagccuuuggagac

SEQ ID NO: 2343244 - RNA, 19 nt, Artificial Sequence
  Description of Artificial Sequence: Synthetic oligonucleotide
uugaaaugaacaugguaag

SEQ ID NO: 2343245 - RNA, 19 nt, Artificial Sequence
  Description of Artificial Sequence: Synthetic oligonucleotide
aauugaaaugaacauggua

SEQ ID NO: 2343246 - RNA, 19 nt, Artificial Sequence
  Description of Artificial Sequence: Synthetic oligonucleotide
auugacaaaaucagugacc

SEQ ID NO: 2343247 - RNA, 19 nt, Artificial Sequence
  Description of Artificial Sequence: Synthetic oligonucleotide
auugaacucucggagaagc

SEQ ID NO: 2343248 - RNA, 19 nt, Artificial Sequence
  Description of Artificial Sequence: Synthetic oligonucleotide
uaaaauuggccccacggcu

SEQ ID NO: 2343249 - RNA, 19 nt, Artificial Sequence
  Description of Artificial Sequence: Synthetic oligonucleotide
uaucaagagagcauugaca

SEQ ID NO: 2343250 - RNA, 19 nt, Artificial Sequence
  Description of Artificial Sequence: Synthetic oligonucleotide
uguagcgaguuccagagac

SEQ ID NO: 2343251 - RNA, 19 nt, Artificial Sequence
  Description of Artificial Sequence: Synthetic oligonucleotide
uuaaguccgacgcuccugg

SEQ ID NO: 2343252 - RNA, 19 nt, Artificial Sequence
  Description of Artificial Sequence: Synthetic oligonucleotide
caugguaaguauaaaugag

SEQ ID NO: 2343253 - RNA, 19 nt, Artificial Sequence
  Description of Artificial Sequence: Synthetic oligonucleotide
aaaugaacaugguaaguau

SEQ ID NO: 2343254 - RNA, 19 nt, Artificial Sequence
  Description of Artificial Sequence: Synthetic oligonucleotide
acaugguaaguauaaauga

SEQ ID NO: 2343255 - RNA, 19 nt, Artificial Sequence
  Description of Artificial Sequence: Synthetic oligonucleotide
auuacccuccuuuuguuuc

SEQ ID NO: 2343256 - RNA, 19 nt, Artificial Sequence
  Description of Artificial Sequence: Synthetic oligonucleotide
ugauuauaauuucauaguu

SEQ ID NO: 2343257 - RNA, 19 nt, Artificial Sequence
  Description of Artificial Sequence: Synthetic oligonucleotide
uuauuccaugaauauaggc

SEQ ID NO: 2343258 - RNA, 19 nt, Artificial Sequence
  Description of Artificial Sequence: Synthetic oligonucleotide
uaguugauugaacucucgg

SEQ ID NO: 2343259 - RNA, 19 nt, Artificial Sequence
  Description of Artificial Sequence: Synthetic oligonucleotide
aggaauaaauuugggaugg

SEQ ID NO: 2343260 - RNA, 19 nt, Artificial Sequence
  Description of Artificial Sequence: Synthetic oligonucleotide
aucaagagagcauugacaa

SEQ ID NO: 2343261 - RNA, 19 nt, Artificial Sequence
  Description of Artificial Sequence: Synthetic oligonucleotide
uuccuguuaaguccgacgc

SEQ ID NO: 2343262 - RNA, 19 nt, Artificial Sequence
  Description of Artificial Sequence: Synthetic oligonucleotide
uucucuuacuuuuaauuga

SEQ ID NO: 2343263 - RNA, 19 nt, Artificial Sequence
  Description of Artificial Sequence: Synthetic oligonucleotide
aaauuugggauggugugag

SEQ ID NO: 2343264 - RNA, 19 nt, Artificial Sequence
  Description of Artificial Sequence: Synthetic oligonucleotide
cuucucuuacuuuuaauug

SEQ ID NO: 2343265 - RNA, 19 nt, Artificial Sequence
  Description of Artificial Sequence: Synthetic oligonucleotide
aauuucauaguugauugaa

SEQ ID NO: 2343266 - RNA, 19 nt, Artificial Sequence
  Description of Artificial Sequence: Synthetic oligonucleotide
auaaucugaagcuuccugu

SEQ ID NO: 2343267 - RNA, 19 nt, Artificial Sequence
  Description of Artificial Sequence: Synthetic oligonucleotide
uucuuuucgguauaaucug

SEQ ID NO: 2343268 - RNA, 19 nt, Artificial Sequence
  Description of Artificial Sequence: Synthetic oligonucleotide
cuuuuauguaguagcaaag

SEQ ID NO: 2343269 - RNA, 19 nt, Artificial Sequence
  Description of Artificial Sequence: Synthetic oligonucleotide
guucaauaauccuuucagg

SEQ ID NO: 2343270 - RNA, 19 nt, Artificial Sequence
  Description of Artificial Sequence: Synthetic oligonucleotide
aaacucgauccacaaauga

SEQ ID NO: 2343271 - RNA, 19 nt, Artificial Sequence
  Description of Artificial Sequence: Synthetic oligonucleotide
cacaaaugauauuggaacc

SEQ ID NO: 2343272 - RNA, 19 nt, Artificial Sequence
  Description of Artificial Sequence: Synthetic oligonucleotide
aaaaucugaguuauaaaau

SEQ ID NO: 2343273 - RNA, 19 nt, Artificial Sequence
  Description of Artificial Sequence: Synthetic oligonucleotide
agagcauugacaaaaucag

SEQ ID NO: 2343274 - RNA, 19 nt, Artificial Sequence
  Description of Artificial Sequence: Synthetic oligonucleotide
aagagaguucaauaauccu

SEQ ID NO: 2343275 - RNA, 19 nt, Artificial Sequence
  Description of Artificial Sequence: Synthetic oligonucleotide
caaagagaguucaauaauc

SEQ ID NO: 2343276 - RNA, 19 nt, Artificial Sequence
  Description of Artificial Sequence: Synthetic oligonucleotide
uuuuauguaguagcaaaga

SEQ ID NO: 2343277 - RNA, 19 nt, Artificial Sequence
  Description of Artificial Sequence: Synthetic oligonucleotide
ucaauguaucaagagagca

SEQ ID NO: 2343278 - RNA, 19 nt, Artificial Sequence
  Description of Artificial Sequence: Synthetic oligonucleotide
ucuuucuuuucaaauccca

SEQ ID NO: 2343279 - RNA, 19 nt, Artificial Sequence
  Description of Artificial Sequence: Synthetic oligonucleotide
aaaauggaguuucuccaga

SEQ ID NO: 2343280 - RNA, 19 nt, Artificial Sequence
  Description of Artificial Sequence: Synthetic oligonucleotide
uuauaaaauuggccccacg

SEQ ID NO: 2343281 - RNA, 19 nt, Artificial Sequence
  Description of Artificial Sequence: Synthetic oligonucleotide
aaaaucagugacccaggcu

SEQ ID NO: 2343282 - RNA, 19 nt, Artificial Sequence
  Description of Artificial Sequence: Synthetic oligonucleotide
ucauuuccucccaacuugg

SEQ ID NO: 2343283 - RNA, 19 nt, Artificial Sequence
  Description of Artificial Sequence: Synthetic oligonucleotide
gauaaauucaggaauaaau

SEQ ID NO: 2343284 - RNA, 19 nt, Artificial Sequence
  Description of Artificial Sequence: Synthetic oligonucleotide
augacauaauuuccugugg

SEQ ID NO: 2343285 - RNA, 19 nt, Artificial Sequence
  Description of Artificial Sequence: Synthetic oligonucleotide
ugaaaugcacuuaccuuug

SEQ ID NO: 2343286 - RNA, 19 nt, Artificial Sequence
  Description of Artificial Sequence: Synthetic oligonucleotide
uuaccuuuggcucaaugua

SEQ ID NO: 2343287 - RNA, 19 nt, Artificial Sequence
  Description of Artificial Sequence: Synthetic oligonucleotide
aaaugaccaguaugaaaug

SEQ ID NO: 2343288 - RNA, 19 nt, Artificial Sequence
  Description of Artificial Sequence: Synthetic oligonucleotide
agcaaagagaguucaauaa

SEQ ID NO: 2343289 - RNA, 19 nt, Artificial Sequence
  Description of Artificial Sequence: Synthetic oligonucleotide
augcacuuaccuuuggcuc

SEQ ID NO: 2343290 - RNA, 19 nt, Artificial Sequence
  Description of Artificial Sequence: Synthetic oligonucleotide
gauggugugagagaucagc

SEQ ID NO: 2343291 - RNA, 19 nt, Artificial Sequence
  Description of Artificial Sequence: Synthetic oligonucleotide
ugauugaacucucggagaa

SEQ ID NO: 2343292 - RNA, 19 nt, Artificial Sequence
  Description of Artificial Sequence: Synthetic oligonucleotide
ucuugcucgaacaaucauc

SEQ ID NO: 2343293 - RNA, 19 nt, Artificial Sequence
  Description of Artificial Sequence: Synthetic oligonucleotide
uaugaaaugcacuuaccuu

SEQ ID NO: 2343294 - RNA, 19 nt, Artificial Sequence
  Description of Artificial Sequence: Synthetic oligonucleotide
uuuucgguauaaucugaag

SEQ ID NO: 2343295 - RNA, 19 nt, Artificial Sequence
  Description of Artificial Sequence: Synthetic oligonucleotide
uugcagaacuucuuuucgg

SEQ ID NO: 2343296 - RNA, 19 nt, Artificial Sequence
  Description of Artificial Sequence: Synthetic oligonucleotide
uucucuugucccaucuggg

SEQ ID NO: 2343297 - RNA, 19 nt, Artificial Sequence
  Description of Artificial Sequence: Synthetic oligonucleotide
cuuggauucaccauaaacu

SEQ ID NO: 2343298 - RNA, 19 nt, Artificial Sequence
  Description of Artificial Sequence: Synthetic oligonucleotide
aguugauugaacucucgga

SEQ ID NO: 2343299 - RNA, 19 nt, Artificial Sequence
  Description of Artificial Sequence: Synthetic oligonucleotide
ucucuuacuuuuaauugaa

SEQ ID NO: 2343300 - RNA, 19 nt, Artificial Sequence
  Description of Artificial Sequence: Synthetic oligonucleotide
gagacuauuucauuuccuc

SEQ ID NO: 2343301 - RNA, 19 nt, Artificial Sequence
  Description of Artificial Sequence: Synthetic oligonucleotide
uaauucaacugucuugcuc

SEQ ID NO: 2343302 - RNA, 19 nt, Artificial Sequence
  Description of Artificial Sequence: Synthetic oligonucleotide
ugucccgucgcgaggagcg

SEQ ID NO: 2343303 - RNA, 19 nt, Artificial Sequence
  Description of Artificial Sequence: Synthetic oligonucleotide
uuaggagaauucugucugg

SEQ ID NO: 2343304 - RNA, 19 nt, Artificial Sequence
  Description of Artificial Sequence: Synthetic oligonucleotide
ucaacugucuugcucgaac

SEQ ID NO: 2343305 - RNA, 19 nt, Artificial Sequence
  Description of Artificial Sequence: Synthetic oligonucleotide
ucggcaacuucucuugucc

SEQ ID NO: 2343306 - RNA, 19 nt, Artificial Sequence
  Description of Artificial Sequence: Synthetic oligonucleotide
ugaagcuuccuguuaaguc

SEQ ID NO: 2343307 - RNA, 19 nt, Artificial Sequence
  Description of Artificial Sequence: Synthetic oligonucleotide
uaaacucgauccacaaaug

SEQ ID NO: 2343308 - RNA, 19 nt, Artificial Sequence
  Description of Artificial Sequence: Synthetic oligonucleotide
caggaauaaauuugggaug

SEQ ID NO: 2343309 - RNA, 19 nt, Artificial Sequence
  Description of Artificial Sequence: Synthetic oligonucleotide
gaauaaauuugggauggug

SEQ ID NO: 2343310 - RNA, 19 nt, Artificial Sequence
  Description of Artificial Sequence: Synthetic oligonucleotide
cagagaaaugaccaguaug

SEQ ID NO: 2343311 - RNA, 19 nt, Artificial Sequence
  Description of Artificial Sequence: Synthetic oligonucleotide
cuuccuguuaaguccgacg

SEQ ID NO: 2343312 - RNA, 19 nt, Artificial Sequence
  Description of Artificial Sequence: Synthetic oligonucleotide
ugaguaauucuuuuaugua

SEQ ID NO: 2343313 - RNA, 19 nt, Artificial Sequence
  Description of Artificial Sequence: Synthetic oligonucleotide
ucggagaagcucuucacca

SEQ ID NO: 2343314 - RNA, 19 nt, Artificial Sequence
  Description of Artificial Sequence: Synthetic oligonucleotide
ucuuuucaaaucccagcca

SEQ ID NO: 2343315 - RNA, 19 nt, Artificial Sequence
  Description of Artificial Sequence: Synthetic oligonucleotide
ucucccguggucuuaggag

SEQ ID NO: 2343316 - RNA, 19 nt, Artificial Sequence
  Description of Artificial Sequence: Synthetic oligonucleotide
gaaccgaguacuugucccg

SEQ ID NO: 2343317 - RNA, 19 nt, Artificial Sequence
  Description of Artificial Sequence: Synthetic oligonucleotide
uggucuuaggagaauucug

SEQ ID NO: 2343318 - RNA, 19 nt, Artificial Sequence
  Description of Artificial Sequence: Synthetic oligonucleotide
uugauugaacucucggaga

SEQ ID NO: 2343319 - RNA, 19 nt, Artificial Sequence
  Description of Artificial Sequence: Synthetic oligonucleotide
ccaucugaaagacauagcc

SEQ ID NO: 2343320 - RNA, 19 nt, Artificial Sequence
  Description of Artificial Sequence: Synthetic oligonucleotide
ucucagcaaaaucugaguu

SEQ ID NO: 2343321 - RNA, 19 nt, Artificial Sequence
  Description of Artificial Sequence: Synthetic oligonucleotide
cucaauguaucaagagagc

SEQ ID NO: 2343322 - RNA, 19 nt, Artificial Sequence
  Description of Artificial Sequence: Synthetic oligonucleotide
ucuuuucgguauaaucuga

SEQ ID NO: 2343323 - RNA, 19 nt, Artificial Sequence
  Description of Artificial Sequence: Synthetic oligonucleotide
uccauaaugaugacauaau

SEQ ID NO: 2343324 - RNA, 19 nt, Artificial Sequence
  Description of Artificial Sequence: Synthetic oligonucleotide
agcagaaccgaguacuugu

SEQ ID NO: 2343325 - RNA, 19 nt, Artificial Sequence
  Description of Artificial Sequence: Synthetic oligonucleotide
cugauuaucuuucuuuuca

SEQ ID NO: 2343326 - RNA, 19 nt, Artificial Sequence
  Description of Artificial Sequence: Synthetic oligonucleotide
auggaguuucuccagagaa

SEQ ID NO: 2343327 - RNA, 19 nt, Artificial Sequence
  Description of Artificial Sequence: Synthetic oligonucleotide
aguaauucuuuuauguagu

SEQ ID NO: 2343328 - RNA, 19 nt, Artificial Sequence
  Description of Artificial Sequence: Synthetic oligonucleotide
uguaucaagagagcauuga

SEQ ID NO: 2343329 - RNA, 19 nt, Artificial Sequence
  Description of Artificial Sequence: Synthetic oligonucleotide
auaggcaguuccaaggccg

SEQ ID NO: 2343330 - RNA, 19 nt, Artificial Sequence
  Description of Artificial Sequence: Synthetic oligonucleotide
ggagaauucugucuggccc

SEQ ID NO: 2343331 - RNA, 19 nt, Artificial Sequence
  Description of Artificial Sequence: Synthetic oligonucleotide
aaguccgacgcuccugguc

SEQ ID NO: 2343332 - RNA, 19 nt, Artificial Sequence
  Description of Artificial Sequence: Synthetic oligonucleotide
auucaccauaaacucgauc

SEQ ID NO: 2343333 - RNA, 19 nt, Artificial Sequence
  Description of Artificial Sequence: Synthetic oligonucleotide
gauauuggaaccucaccaa

SEQ ID NO: 2343334 - RNA, 19 nt, Artificial Sequence
  Description of Artificial Sequence: Synthetic oligonucleotide
gcucaauguaucaagagag

SEQ ID NO: 2343335 - RNA, 19 nt, Artificial Sequence
  Description of Artificial Sequence: Synthetic oligonucleotide
ugcacuuaccuuuggcuca

SEQ ID NO: 2343336 - RNA, 19 nt, Artificial Sequence
  Description of Artificial Sequence: Synthetic oligonucleotide
agcaaaaucugaguuauaa

SEQ ID NO: 2343337 - RNA, 19 nt, Artificial Sequence
  Description of Artificial Sequence: Synthetic oligonucleotide
aaaauuggccccacggcug

SEQ ID NO: 2343338 - RNA, 19 nt, Artificial Sequence
  Description of Artificial Sequence: Synthetic oligonucleotide
gacauaauuuccuguggca

SEQ ID NO: 2343339 - RNA, 19 nt, Artificial Sequence
  Description of Artificial Sequence: Synthetic oligonucleotide
uaauugaaaugaacauggu

SEQ ID NO: 2343340 - RNA, 19 nt, Artificial Sequence
  Description of Artificial Sequence: Synthetic oligonucleotide
uaaauuugggaugguguga

SEQ ID NO: 2343341 - RNA, 19 nt, Artificial Sequence
  Description of Artificial Sequence: Synthetic oligonucleotide
aguuauaaaauuggcccca

SEQ ID NO: 2343342 - RNA, 19 nt, Artificial Sequence
  Description of Artificial Sequence: Synthetic oligonucleotide
auccauaaugaugacauaa

SEQ ID NO: 2343343 - RNA, 19 nt, Artificial Sequence
  Description of Artificial Sequence: Synthetic oligonucleotide
uuuccucccaacuuggauu

SEQ ID NO: 2343344 - RNA, 19 nt, Artificial Sequence
  Description of Artificial Sequence: Synthetic oligonucleotide
gaaaugcacuuaccuuugg

SEQ ID NO: 2343345 - RNA, 19 nt, Artificial Sequence
  Description of Artificial Sequence: Synthetic oligonucleotide
ugaauauaggcaguuccaa

SEQ ID NO: 2343346 - RNA, 19 nt, Artificial Sequence
  Description of Artificial Sequence: Synthetic oligonucleotide
aaauuacccuccuuuuguu

SEQ ID NO: 2343347 - RNA, 19 nt, Artificial Sequence
  Description of Artificial Sequence: Synthetic oligonucleotide
gaguucaauaauccuuuca

SEQ ID NO: 2343348 - RNA, 19 nt, Artificial Sequence
  Description of Artificial Sequence: Synthetic oligonucleotide
uccaucugaaagacauagc

SEQ ID NO: 2343349 - RNA, 19 nt, Artificial Sequence
  Description of Artificial Sequence: Synthetic oligonucleotide
cauaguugauugaacucuc

SEQ ID NO: 2343350 - RNA, 19 nt, Artificial Sequence
  Description of Artificial Sequence: Synthetic oligonucleotide
caaaaucagugacccaggc

SEQ ID NO: 2343351 - RNA, 19 nt, Artificial Sequence
  Description of Artificial Sequence: Synthetic oligonucleotide
agaucagcauccauaauga

SEQ ID NO: 2343352 - RNA, 19 nt, Artificial Sequence
  Description of Artificial Sequence: Synthetic oligonucleotide
ucaucuccaucugaaagac

SEQ ID NO: 2343353 - RNA, 19 nt, Artificial Sequence
  Description of Artificial Sequence: Synthetic oligonucleotide
ugagcggcagguucucgcg

SEQ ID NO: 2343354 - RNA, 19 nt, Artificial Sequence
  Description of Artificial Sequence: Synthetic oligonucleotide
agaguucaauaauccuuuc

SEQ ID NO: 2343355 - RNA, 19 nt, Artificial Sequence
  Description of Artificial Sequence: Synthetic oligonucleotide
augguaaguauaaaugagu

SEQ ID NO: 2343356 - RNA, 19 nt, Artificial Sequence
  Description of Artificial Sequence: Synthetic oligonucleotide
uagcaaagagaguucaaua

SEQ ID NO: 2343357 - RNA, 19 nt, Artificial Sequence
  Description of Artificial Sequence: Synthetic oligonucleotide
guaugaaaugcacuuaccu

SEQ ID NO: 2343358 - RNA, 19 nt, Artificial Sequence
  Description of Artificial Sequence: Synthetic oligonucleotide
aaauuggccccacggcuga

SEQ ID NO: 2343359 - RNA, 19 nt, Artificial Sequence
  Description of Artificial Sequence: Synthetic oligonucleotide
ugguguaauucaacugucu

SEQ ID NO: 2343360 - RNA, 19 nt, Artificial Sequence
  Description of Artificial Sequence: Synthetic oligonucleotide
ucgcgcucguuguaggugg

SEQ ID NO: 2343361 - RNA, 19 nt, Artificial Sequence
  Description of Artificial Sequence: Synthetic oligonucleotide
gaguacuugucccgucgcg

SEQ ID NO: 2343362 - RNA, 19 nt, Artificial Sequence
  Description of Artificial Sequence: Synthetic oligonucleotide
cugucuugcucgaacaauc

SEQ ID NO: 2343363 - RNA, 19 nt, Artificial Sequence
  Description of Artificial Sequence: Synthetic oligonucleotide
ugauaaauucaggaauaaa

SEQ ID NO: 2343364 - RNA, 19 nt, Artificial Sequence
  Description of Artificial Sequence: Synthetic oligonucleotide
gaacaaucaucuccaucug

SEQ ID NO: 2343365 - RNA, 19 nt, Artificial Sequence
  Description of Artificial Sequence: Synthetic oligonucleotide
aguccgacgcuccuggucu

SEQ ID NO: 2343366 - RNA, 19 nt, Artificial Sequence
  Description of Artificial Sequence: Synthetic oligonucleotide
caaaucccagccauaaaca

SEQ ID NO: 2343367 - RNA, 19 nt, Artificial Sequence
  Description of Artificial Sequence: Synthetic oligonucleotide
gaacaugguaaguauaaau

SEQ ID NO: 2343368 - RNA, 19 nt, Artificial Sequence
  Description of Artificial Sequence: Synthetic oligonucleotide
aacucgauccacaaaugau

SEQ ID NO: 2343369 - RNA, 19 nt, Artificial Sequence
  Description of Artificial Sequence: Synthetic oligonucleotide
uaguagcaaagagaguuca

SEQ ID NO: 2343370 - RNA, 19 nt, Artificial Sequence
  Description of Artificial Sequence: Synthetic oligonucleotide
ucgaacaaucaucuccauc

SEQ ID NO: 2343371 - RNA, 19 nt, Artificial Sequence
  Description of Artificial Sequence: Synthetic oligonucleotide
cucaccaaugguguaauuc

SEQ ID NO: 2343372 - RNA, 19 nt, Artificial Sequence
  Description of Artificial Sequence: Synthetic oligonucleotide
aauuuccuguggcauguuu

SEQ ID NO: 2343373 - RNA, 19 nt, Artificial Sequence
  Description of Artificial Sequence: Synthetic oligonucleotide
uaccuuuggcucaauguau

SEQ ID NO: 2343374 - RNA, 19 nt, Artificial Sequence
  Description of Artificial Sequence: Synthetic oligonucleotide
uuacccuccuuuuguuucc

SEQ ID NO: 2343375 - RNA, 19 nt, Artificial Sequence
  Description of Artificial Sequence: Synthetic oligonucleotide
cauaaugaugacauaauuu

SEQ ID NO: 2343376 - RNA, 19 nt, Artificial Sequence
  Description of Artificial Sequence: Synthetic oligonucleotide
uaaucugaagcuuccuguu

SEQ ID NO: 2343377 - RNA, 19 nt, Artificial Sequence
  Description of Artificial Sequence: Synthetic oligonucleotide
acaaaaucagugacccagg

SEQ ID NO: 2343378 - RNA, 19 nt, Artificial Sequence
  Description of Artificial Sequence: Synthetic oligonucleotide
accaaugguguaauucaac

SEQ ID NO: 2343379 - RNA, 19 nt, Artificial Sequence
  Description of Artificial Sequence: Synthetic oligonucleotide
auauuggaaccucaccaau

SEQ ID NO: 2343380 - RNA, 19 nt, Artificial Sequence
  Description of Artificial Sequence: Synthetic oligonucleotide
ucugucuggcccauagauc

SEQ ID NO: 2343381 - RNA, 19 nt, Artificial Sequence
  Description of Artificial Sequence: Synthetic oligonucleotide
aucuaugauuauaauuuca

SEQ ID NO: 2343382 - RNA, 19 nt, Artificial Sequence
  Description of Artificial Sequence: Synthetic oligonucleotide
aacugucuugcucgaacaa

SEQ ID NO: 2343383 - RNA, 19 nt, Artificial Sequence
  Description of Artificial Sequence: Synthetic oligonucleotide
augaauauaggcaguucca

SEQ ID NO: 2343384 - RNA, 19 nt, Artificial Sequence
  Description of Artificial Sequence: Synthetic oligonucleotide
auaguugauugaacucucg

SEQ ID NO: 2343385 - RNA, 19 nt, Artificial Sequence
  Description of Artificial Sequence: Synthetic oligonucleotide
uuuucucccguggucuuag

SEQ ID NO: 2343386 - RNA, 19 nt, Artificial Sequence
  Description of Artificial Sequence: Synthetic oligonucleotide
uuccaugaauauaggcagu

SEQ ID NO: 2343387 - RNA, 19 nt, Artificial Sequence
  Description of Artificial Sequence: Synthetic oligonucleotide
auagccuuuggagacacau

SEQ ID NO: 2343388 - RNA, 19 nt, Artificial Sequence
  Description of Artificial Sequence: Synthetic oligonucleotide
uuccucccaacuuggauuc

SEQ ID NO: 2343389 - RNA, 19 nt, Artificial Sequence
  Description of Artificial Sequence: Synthetic oligonucleotide
ugaacucucggagaagcuc

SEQ ID NO: 2343390 - RNA, 19 nt, Artificial Sequence
  Description of Artificial Sequence: Synthetic oligonucleotide
cuugcucgaacaaucaucu

SEQ ID NO: 2343391 - RNA, 19 nt, Artificial Sequence
  Description of Artificial Sequence: Synthetic oligonucleotide
ugacccaggcuucucuuac

SEQ ID NO: 2343392 - RNA, 19 nt, Artificial Sequence
  Description of Artificial Sequence: Synthetic oligonucleotide
uccaucaucuaugauuaua

SEQ ID NO: 2343393 - RNA, 19 nt, Artificial Sequence
  Description of Artificial Sequence: Synthetic oligonucleotide
gucaaaauuacccuccuuu

SEQ ID NO: 2343394 - RNA, 19 nt, Artificial Sequence
  Description of Artificial Sequence: Synthetic oligonucleotide
ucugaaagacauagccuuu

SEQ ID NO: 2343395 - RNA, 19 nt, Artificial Sequence
  Description of Artificial Sequence: Synthetic oligonucleotide
acuuaccuuuggcucaaug

SEQ ID NO: 2343396 - RNA, 19 nt, Artificial Sequence
  Description of Artificial Sequence: Synthetic oligonucleotide
guacuugucccgucgcgag

SEQ ID NO: 2343397 - RNA, 19 nt, Artificial Sequence
  Description of Artificial Sequence: Synthetic oligonucleotide
gguauaaucugaagcuucc

SEQ ID NO: 2343398 - RNA, 19 nt, Artificial Sequence
  Description of Artificial Sequence: Synthetic oligonucleotide
ggugugagagaucagcauc

SEQ ID NO: 2343399 - RNA, 19 nt, Artificial Sequence
  Description of Artificial Sequence: Synthetic oligonucleotide
aguuguucggcaacuucuc

SEQ ID NO: 2343400 - RNA, 19 nt, Artificial Sequence
  Description of Artificial Sequence: Synthetic oligonucleotide
aauuugggauggugugaga

SEQ ID NO: 2343401 - RNA, 19 nt, Artificial Sequence
  Description of Artificial Sequence: Synthetic oligonucleotide
cuuaccuuuggcucaaugu

SEQ ID NO: 2343402 - RNA, 19 nt, Artificial Sequence
  Description of Artificial Sequence: Synthetic oligonucleotide
cuguuaaguccgacgcucc

SEQ ID NO: 2343403 - RNA, 19 nt, Artificial Sequence
  Description of Artificial Sequence: Synthetic oligonucleotide
gauugaacucucggagaag

SEQ ID NO: 2343404 - RNA, 19 nt, Artificial Sequence
  Description of Artificial Sequence: Synthetic oligonucleotide
cugaaagacauagccuuug

SEQ ID NO: 2343405 - RNA, 19 nt, Artificial Sequence
  Description of Artificial Sequence: Synthetic oligonucleotide
uucucccguggucuuagga

SEQ ID NO: 2343406 - RNA, 19 nt, Artificial Sequence
  Description of Artificial Sequence: Synthetic oligonucleotide
cuaugauuauaauuucaua

SEQ ID NO: 2343407 - RNA, 19 nt, Artificial Sequence
  Description of Artificial Sequence: Synthetic oligonucleotide
uucucgcgcucguuguagg

SEQ ID NO: 2343408 - RNA, 19 nt, Artificial Sequence
  Description of Artificial Sequence: Synthetic oligonucleotide
augaccaguaugaaaugca

SEQ ID NO: 2343409 - RNA, 19 nt, Artificial Sequence
  Description of Artificial Sequence: Synthetic oligonucleotide
cagaaccgaguacuugucc

SEQ ID NO: 2343410 - RNA, 19 nt, Artificial Sequence
  Description of Artificial Sequence: Synthetic oligonucleotide
uucaaaucccagccauaaa

SEQ ID NO: 2343411 - RNA, 19 nt, Artificial Sequence
  Description of Artificial Sequence: Synthetic oligonucleotide
uccuguuaaguccgacgcu

SEQ ID NO: 2343412 - RNA, 19 nt, Artificial Sequence
  Description of Artificial Sequence: Synthetic oligonucleotide
cuguggcauguuuuauucc

SEQ ID NO: 2343413 - RNA, 19 nt, Artificial Sequence
  Description of Artificial Sequence: Synthetic oligonucleotide
cugucuggcccauagaucu

SEQ ID NO: 2343414 - RNA, 19 nt, Artificial Sequence
  Description of Artificial Sequence: Synthetic oligonucleotide
agaacuucuuuucgguaua

SEQ ID NO: 2343415 - RNA, 19 nt, Artificial Sequence
  Description of Artificial Sequence: Synthetic oligonucleotide
gcauugacaaaaucaguga

SEQ ID NO: 2343416 - RNA, 19 nt, Artificial Sequence
  Description of Artificial Sequence: Synthetic oligonucleotide
gguaaguauaaaugaguaa

SEQ ID NO: 2343417 - RNA, 19 nt, Artificial Sequence
  Description of Artificial Sequence: Synthetic oligonucleotide
uccuggucucagcaaaauc

SEQ ID NO: 2343418 - RNA, 19 nt, Artificial Sequence
  Description of Artificial Sequence: Synthetic oligonucleotide
gcgaguuccagagacaaug

SEQ ID NO: 2343419 - RNA, 19 nt, Artificial Sequence
  Description of Artificial Sequence: Synthetic oligonucleotide
ggauucaccauaaacucga

SEQ ID NO: 2343420 - RNA, 19 nt, Artificial Sequence
  Description of Artificial Sequence: Synthetic oligonucleotide
ugacaaaaucagugaccca

SEQ ID NO: 2343421 - RNA, 19 nt, Artificial Sequence
  Description of Artificial Sequence: Synthetic oligonucleotide
ucuugucccaucugggcuu

SEQ ID NO: 2343422 - RNA, 19 nt, Artificial Sequence
  Description of Artificial Sequence: Synthetic oligonucleotide
cacgaugagcggcagguuc

SEQ ID NO: 2343423 - RNA, 19 nt, Artificial Sequence
  Description of Artificial Sequence: Synthetic oligonucleotide
uuggaaccucaccaauggu

SEQ ID NO: 2343424 - RNA, 19 nt, Artificial Sequence
  Description of Artificial Sequence: Synthetic oligonucleotide
gacgcuccuggucucagca

SEQ ID NO: 2343425 - RNA, 19 nt, Artificial Sequence
  Description of Artificial Sequence: Synthetic oligonucleotide
uagcgaguuccagagacaa

SEQ ID NO: 2343426 - RNA, 19 nt, Artificial Sequence
  Description of Artificial Sequence: Synthetic oligonucleotide
cuuuucgguauaaucugaa

SEQ ID NO: 2343427 - RNA, 19 nt, Artificial Sequence
  Description of Artificial Sequence: Synthetic oligonucleotide
acucgauccacaaaugaua

SEQ ID NO: 2343428 - RNA, 19 nt, Artificial Sequence
  Description of Artificial Sequence: Synthetic oligonucleotide
cauguuuuauuccaugaau

SEQ ID NO: 2343429 - RNA, 19 nt, Artificial Sequence
  Description of Artificial Sequence: Synthetic oligonucleotide
cucccaacuuggauucacc

SEQ ID NO: 2343430 - RNA, 19 nt, Artificial Sequence
  Description of Artificial Sequence: Synthetic oligonucleotide
aguacuugucccgucgcga

SEQ ID NO: 2343431 - RNA, 19 nt, Artificial Sequence
  Description of Artificial Sequence: Synthetic oligonucleotide
ggcauguuuuauuccauga

SEQ ID NO: 2343432 - RNA, 19 nt, Artificial Sequence
  Description of Artificial Sequence: Synthetic oligonucleotide
ccccauuuccuuuguagcg

SEQ ID NO: 2343433 - RNA, 19 nt, Artificial Sequence
  Description of Artificial Sequence: Synthetic oligonucleotide
caccauaaacucgauccac

SEQ ID NO: 2343434 - RNA, 19 nt, Artificial Sequence
  Description of Artificial Sequence: Synthetic oligonucleotide
guuaaguccgacgcuccug

SEQ ID NO: 2343435 - RNA, 19 nt, Artificial Sequence
  Description of Artificial Sequence: Synthetic oligonucleotide
uucggcaacuucucuuguc

SEQ ID NO: 2343436 - RNA, 19 nt, Artificial Sequence
  Description of Artificial Sequence: Synthetic oligonucleotide
uccuguggcauguuuuauu

SEQ ID NO: 2343437 - RNA, 19 nt, Artificial Sequence
  Description of Artificial Sequence: Synthetic oligonucleotide
guuauaaaauuggccccac

SEQ ID NO: 2343438 - RNA, 19 nt, Artificial Sequence
  Description of Artificial Sequence: Synthetic oligonucleotide
auucaacugucuugcucga

SEQ ID NO: 2343439 - RNA, 19 nt, Artificial Sequence
  Description of Artificial Sequence: Synthetic oligonucleotide
ugugagagaucagcaucca

SEQ ID NO: 2343440 - RNA, 19 nt, Artificial Sequence
  Description of Artificial Sequence: Synthetic oligonucleotide
agagacuauuucauuuccu

SEQ ID NO: 2343441 - RNA, 19 nt, Artificial Sequence
  Description of Artificial Sequence: Synthetic oligonucleotide
aagagagcauugacaaaau

SEQ ID NO: 2343442 - RNA, 19 nt, Artificial Sequence
  Description of Artificial Sequence: Synthetic oligonucleotide
caucugaaagacauagccu

SEQ ID NO: 2343443 - RNA, 19 nt, Artificial Sequence
  Description of Artificial Sequence: Synthetic oligonucleotide
ucgguauaaucugaagcuu

SEQ ID NO: 2343444 - RNA, 19 nt, Artificial Sequence
  Description of Artificial Sequence: Synthetic oligonucleotide
gcccauagaucuuuuccag

SEQ ID NO: 2343445 - RNA, 19 nt, Artificial Sequence
  Description of Artificial Sequence: Synthetic oligonucleotide
caacugucuugcucgaaca

SEQ ID NO: 2343446 - RNA, 19 nt, Artificial Sequence
  Description of Artificial Sequence: Synthetic oligonucleotide
accgaguacuugucccguc

SEQ ID NO: 2343447 - RNA, 19 nt, Artificial Sequence
  Description of Artificial Sequence: Synthetic oligonucleotide
ccuguggcauguuuuauuc

SEQ ID NO: 2343448 - RNA, 19 nt, Artificial Sequence
  Description of Artificial Sequence: Synthetic oligonucleotide
aacuucuuuucgguauaau

SEQ ID NO: 2343449 - RNA, 19 nt, Artificial Sequence
  Description of Artificial Sequence: Synthetic oligonucleotide
aaccgaguacuugucccgu

SEQ ID NO: 2343450 - RNA, 19 nt, Artificial Sequence
  Description of Artificial Sequence: Synthetic oligonucleotide
uuguagcgaguuccagaga

SEQ ID NO: 2343451 - RNA, 19 nt, Artificial Sequence
  Description of Artificial Sequence: Synthetic oligonucleotide
acugucuugcucgaacaau

SEQ ID NO: 2343452 - RNA, 19 nt, Artificial Sequence
  Description of Artificial Sequence: Synthetic oligonucleotide
gggauggugugagagauca

SEQ ID NO: 2343453 - RNA, 19 nt, Artificial Sequence
  Description of Artificial Sequence: Synthetic oligonucleotide
gaugagcggcagguucucg

SEQ ID NO: 2343454 - RNA, 19 nt, Artificial Sequence
  Description of Artificial Sequence: Synthetic oligonucleotide
ucccaucugggcuuccauc

SEQ ID NO: 2343455 - RNA, 19 nt, Artificial Sequence
  Description of Artificial Sequence: Synthetic oligonucleotide
cauaaacucgauccacaaa

SEQ ID NO: 2343456 - RNA, 19 nt, Artificial Sequence
  Description of Artificial Sequence: Synthetic oligonucleotide
uuucucccguggucuuagg

SEQ ID NO: 2343457 - RNA, 19 nt, Artificial Sequence
  Description of Artificial Sequence: Synthetic oligonucleotide
auaauccuuucaggaaaga

SEQ ID NO: 2343458 - RNA, 19 nt, Artificial Sequence
  Description of Artificial Sequence: Synthetic oligonucleotide
cucccguggucuuaggaga

SEQ ID NO: 2343459 - RNA, 19 nt, Artificial Sequence
  Description of Artificial Sequence: Synthetic oligonucleotide
caauguaucaagagagcau

SEQ ID NO: 2343460 - RNA, 19 nt, Artificial Sequence
  Description of Artificial Sequence: Synthetic oligonucleotide
gcugauuaucuuucuuuuc

SEQ ID NO: 2343461 - RNA, 19 nt, Artificial Sequence
  Description of Artificial Sequence: Synthetic oligonucleotide
ucccguggucuuaggagaa

SEQ ID NO: 2343462 - RNA, 19 nt, Artificial Sequence
  Description of Artificial Sequence: Synthetic oligonucleotide
uuggccccacggcugauua

SEQ ID NO: 2343463 - RNA, 19 nt, Artificial Sequence
  Description of Artificial Sequence: Synthetic oligonucleotide
ucucgcgcucguuguaggu

SEQ ID NO: 2343464 - RNA, 19 nt, Artificial Sequence
  Description of Artificial Sequence: Synthetic oligonucleotide
agagaucagcauccauaau

SEQ ID NO: 2343465 - RNA, 19 nt, Artificial Sequence
  Description of Artificial Sequence: Synthetic oligonucleotide
ccugauaaauucaggaaua

SEQ ID NO: 2343466 - RNA, 19 nt, Artificial Sequence
  Description of Artificial Sequence: Synthetic oligonucleotide
agcggcagguucucgcgcu

SEQ ID NO: 2343467 - RNA, 19 nt, Artificial Sequence
  Description of Artificial Sequence: Synthetic oligonucleotide
uagccuuuggagacacauu

SEQ ID NO: 2343468 - RNA, 19 nt, Artificial Sequence
  Description of Artificial Sequence: Synthetic oligonucleotide
guagcaaagagaguucaau

SEQ ID NO: 2343469 - RNA, 19 nt, Artificial Sequence
  Description of Artificial Sequence: Synthetic oligonucleotide
cagaacuucuuuucgguau

SEQ ID NO: 2343470 - RNA, 19 nt, Artificial Sequence
  Description of Artificial Sequence: Synthetic oligonucleotide
cucgauccacaaaugauau

SEQ ID NO: 2343471 - RNA, 19 nt, Artificial Sequence
  Description of Artificial Sequence: Synthetic oligonucleotide
ccuggucucagcaaaaucu

SEQ ID NO: 2343472 - RNA, 19 nt, Artificial Sequence
  Description of Artificial Sequence: Synthetic oligonucleotide
gcauguuuuauuccaugaa

SEQ ID NO: 2343473 - RNA, 19 nt, Artificial Sequence
  Description of Artificial Sequence: Synthetic oligonucleotide
caaucaucuccaucugaaa

SEQ ID NO: 2343474 - RNA, 19 nt, Artificial Sequence
  Description of Artificial Sequence: Synthetic oligonucleotide
gacauagccuuuggagaca

SEQ ID NO: 2343475 - RNA, 19 nt, Artificial Sequence
  Description of Artificial Sequence: Synthetic oligonucleotide
ucguuguaggugggcagca

SEQ ID NO: 2343476 - RNA, 19 nt, Artificial Sequence
  Description of Artificial Sequence: Synthetic oligonucleotide
gcucgaacaaucaucucca

SEQ ID NO: 2343477 - RNA, 19 nt, Artificial Sequence
  Description of Artificial Sequence: Synthetic oligonucleotide
ucgauccacaaaugauauu

SEQ ID NO: 2343478 - RNA, 19 nt, Artificial Sequence
  Description of Artificial Sequence: Synthetic oligonucleotide
cagccacacgaugagcggc

SEQ ID NO: 2343479 - RNA, 19 nt, Artificial Sequence
  Description of Artificial Sequence: Synthetic oligonucleotide
ugggauggugugagagauc

SEQ ID NO: 2343480 - RNA, 19 nt, Artificial Sequence
  Description of Artificial Sequence: Synthetic oligonucleotide
cucuuacuuuuaauugaaa

SEQ ID NO: 2343481 - RNA, 19 nt, Artificial Sequence
  Description of Artificial Sequence: Synthetic oligonucleotide
acggcugauuaucuuucuu

SEQ ID NO: 2343482 - RNA, 19 nt, Artificial Sequence
  Description of Artificial Sequence: Synthetic oligonucleotide
gagcggcagguucucgcgc

SEQ ID NO: 2343483 - RNA, 19 nt, Artificial Sequence
  Description of Artificial Sequence: Synthetic oligonucleotide
ccgaguacuugucccgucg

SEQ ID NO: 2343484 - RNA, 19 nt, Artificial Sequence
  Description of Artificial Sequence: Synthetic oligonucleotide
ggcaacuucucuuguccca

SEQ ID NO: 2343485 - RNA, 19 nt, Artificial Sequence
  Description of Artificial Sequence: Synthetic oligonucleotide
gcaaagagaguucaauaau

SEQ ID NO: 2343486 - RNA, 19 nt, Artificial Sequence
  Description of Artificial Sequence: Synthetic oligonucleotide
gaccaguaugaaaugcacu

SEQ ID NO: 2343487 - RNA, 19 nt, Artificial Sequence
  Description of Artificial Sequence: Synthetic oligonucleotide
cgguauaaucugaagcuuc

SEQ ID NO: 2343488 - RNA, 19 nt, Artificial Sequence
  Description of Artificial Sequence: Synthetic oligonucleotide
ggucuuaggagaauucugu

SEQ ID NO: 2343489 - RNA, 19 nt, Artificial Sequence
  Description of Artificial Sequence: Synthetic oligonucleotide
uugcucgaacaaucaucuc

SEQ ID NO: 2343490 - RNA, 19 nt, Artificial Sequence
  Description of Artificial Sequence: Synthetic oligonucleotide
cagcagaaccgaguacuug

SEQ ID NO: 2343491 - RNA, 19 nt, Artificial Sequence
  Description of Artificial Sequence: Synthetic oligonucleotide
cucgcgcucguuguaggug

SEQ ID NO: 2343492 - RNA, 19 nt, Artificial Sequence
  Description of Artificial Sequence: Synthetic oligonucleotide
cuauuucauuuccucccaa

SEQ ID NO: 2343493 - RNA, 19 nt, Artificial Sequence
  Description of Artificial Sequence: Synthetic oligonucleotide
gguguaauucaacugucuu

SEQ ID NO: 2343494 - RNA, 19 nt, Artificial Sequence
  Description of Artificial Sequence: Synthetic oligonucleotide
gagcauugacaaaaucagu

SEQ ID NO: 2343495 - RNA, 19 nt, Artificial Sequence
  Description of Artificial Sequence: Synthetic oligonucleotide
uucaacugucuugcucgaa

SEQ ID NO: 2343496 - RNA, 19 nt, Artificial Sequence
  Description of Artificial Sequence: Synthetic oligonucleotide
guggucuuaggagaauucu

SEQ ID NO: 2343497 - RNA, 19 nt, Artificial Sequence
  Description of Artificial Sequence: Synthetic oligonucleotide
caacuucucuugucccauc

SEQ ID NO: 2343498 - RNA, 19 nt, Artificial Sequence
  Description of Artificial Sequence: Synthetic oligonucleotide
uugucccgucgcgaggagc

SEQ ID NO: 2343499 - RNA, 19 nt, Artificial Sequence
  Description of Artificial Sequence: Synthetic oligonucleotide
ucccagccauaaacacccc

SEQ ID NO: 2343500 - RNA, 19 nt, Artificial Sequence
  Description of Artificial Sequence: Synthetic oligonucleotide
auguaguagcaaagagagu

SEQ ID NO: 2343501 - RNA, 19 nt, Artificial Sequence
  Description of Artificial Sequence: Synthetic oligonucleotide
guuguucggcaacuucucu

SEQ ID NO: 2343502 - RNA, 19 nt, Artificial Sequence
  Description of Artificial Sequence: Synthetic oligonucleotide
ugucuggcccauagaucuu

SEQ ID NO: 2343503 - RNA, 19 nt, Artificial Sequence
  Description of Artificial Sequence: Synthetic oligonucleotide
guaauucaacugucuugcu

SEQ ID NO: 2343504 - RNA, 19 nt, Artificial Sequence
  Description of Artificial Sequence: Synthetic oligonucleotide
agaauucugucuggcccau

SEQ ID NO: 2343505 - RNA, 19 nt, Artificial Sequence
  Description of Artificial Sequence: Synthetic oligonucleotide
gaucagcauccauaaugau

SEQ ID NO: 2343506 - RNA, 19 nt, Artificial Sequence
  Description of Artificial Sequence: Synthetic oligonucleotide
guagcgaguuccagagaca

SEQ ID NO: 2343507 - RNA, 19 nt, Artificial Sequence
  Description of Artificial Sequence: Synthetic oligonucleotide
cagcauccauaaugaugac

SEQ ID NO: 2343508 - RNA, 19 nt, Artificial Sequence
  Description of Artificial Sequence: Synthetic oligonucleotide
gcgaggagcggcccugcgg

SEQ ID NO: 2343509 - RNA, 19 nt, Artificial Sequence
  Description of Artificial Sequence: Synthetic oligonucleotide
cuugucccgucgcgaggag

SEQ ID NO: 2343510 - RNA, 19 nt, Artificial Sequence
  Description of Artificial Sequence: Synthetic oligonucleotide
guauaaucugaagcuuccu

SEQ ID NO: 2343511 - RNA, 19 nt, Artificial Sequence
  Description of Artificial Sequence: Synthetic oligonucleotide
ccacggcugauuaucuuuc

SEQ ID NO: 2343512 - RNA, 19 nt, Artificial Sequence
  Description of Artificial Sequence: Synthetic oligonucleotide
caucaucuaugauuauaau

SEQ ID NO: 2343513 - RNA, 19 nt, Artificial Sequence
  Description of Artificial Sequence: Synthetic oligonucleotide
ccauaaacucgauccacaa

SEQ ID NO: 2343514 - RNA, 19 nt, Artificial Sequence
  Description of Artificial Sequence: Synthetic oligonucleotide
ucccgucgcgaggagcggc

SEQ ID NO: 2343515 - RNA, 19 nt, Artificial Sequence
  Description of Artificial Sequence: Synthetic oligonucleotide
cauccauaaugaugacaua

SEQ ID NO: 2343516 - RNA, 19 nt, Artificial Sequence
  Description of Artificial Sequence: Synthetic oligonucleotide
cuugucccaucugggcuuc

SEQ ID NO: 2343517 - RNA, 19 nt, Artificial Sequence
  Description of Artificial Sequence: Synthetic oligonucleotide
ggcugauuaucuuucuuuu

SEQ ID NO: 2343518 - RNA, 19 nt, Artificial Sequence
  Description of Artificial Sequence: Synthetic oligonucleotide
uccgacgcuccuggucuca

SEQ ID NO: 2343519 - RNA, 19 nt, Artificial Sequence
  Description of Artificial Sequence: Synthetic oligonucleotide
gucuugcucgaacaaucau

SEQ ID NO: 2343520 - RNA, 19 nt, Artificial Sequence
  Description of Artificial Sequence: Synthetic oligonucleotide
cguggucuuaggagaauuc

SEQ ID NO: 2343521 - RNA, 19 nt, Artificial Sequence
  Description of Artificial Sequence: Synthetic oligonucleotide
gucgcgaggagcggcccug

SEQ ID NO: 2343522 - RNA, 19 nt, Artificial Sequence
  Description of Artificial Sequence: Synthetic oligonucleotide
cggagaagcucuucaccag

SEQ ID NO: 2343523 - RNA, 19 nt, Artificial Sequence
  Description of Artificial Sequence: Synthetic oligonucleotide
ccaugaauauaggcaguuc

SEQ ID NO: 2343524 - RNA, 19 nt, Artificial Sequence
  Description of Artificial Sequence: Synthetic oligonucleotide
aauuggccccacggcugau

SEQ ID NO: 2343525 - RNA, 19 nt, Artificial Sequence
  Description of Artificial Sequence: Synthetic oligonucleotide
acgcuccuggucucagcaa

SEQ ID NO: 2343526 - RNA, 19 nt, Artificial Sequence
  Description of Artificial Sequence: Synthetic oligonucleotide
gacccaggcuucucuuacu

SEQ ID NO: 2343527 - RNA, 19 nt, Artificial Sequence
  Description of Artificial Sequence: Synthetic oligonucleotide
cgaguacuugucccgucgc

SEQ ID NO: 2343528 - RNA, 19 nt, Artificial Sequence
  Description of Artificial Sequence: Synthetic oligonucleotide
ggccccacggcugauuauc

SEQ ID NO: 2343529 - RNA, 19 nt, Artificial Sequence
  Description of Artificial Sequence: Synthetic oligonucleotide
cccauuuccuuuguagcga

SEQ ID NO: 2343530 - RNA, 19 nt, Artificial Sequence
  Description of Artificial Sequence: Synthetic oligonucleotide
guucggcaacuucucuugu

SEQ ID NO: 2343531 - RNA, 19 nt, Artificial Sequence
  Description of Artificial Sequence: Synthetic oligonucleotide
ccauaaugaugacauaauu

SEQ ID NO: 2343532 - RNA, 19 nt, Artificial Sequence
  Description of Artificial Sequence: Synthetic oligonucleotide
gauucaccauaaacucgau

SEQ ID NO: 2343533 - RNA, 19 nt, Artificial Sequence
  Description of Artificial Sequence: Synthetic oligonucleotide
ccucccaacuuggauucac

SEQ ID NO: 2343534 - RNA, 19 nt, Artificial Sequence
  Description of Artificial Sequence: Synthetic oligonucleotide
gcuuccuguuaaguccgac

SEQ ID NO: 2343535 - RNA, 19 nt, Artificial Sequence
  Description of Artificial Sequence: Synthetic oligonucleotide
uggccccacggcugauuau

SEQ ID NO: 2343536 - RNA, 19 nt, Artificial Sequence
  Description of Artificial Sequence: Synthetic oligonucleotide
cauuuccuuuguagcgagu

SEQ ID NO: 2343537 - RNA, 19 nt, Artificial Sequence
  Description of Artificial Sequence: Synthetic oligonucleotide
agcgaguuccagagacaau

SEQ ID NO: 2343538 - RNA, 19 nt, Artificial Sequence
  Description of Artificial Sequence: Synthetic oligonucleotide
gucccgucgcgaggagcgg

SEQ ID NO: 2343539 - RNA, 19 nt, Artificial Sequence
  Description of Artificial Sequence: Synthetic oligonucleotide
cacggcugauuaucuuucu

SEQ ID NO: 2343540 - RNA, 19 nt, Artificial Sequence
  Description of Artificial Sequence: Synthetic oligonucleotide
uugucccaucugggcuucc

SEQ ID NO: 2343541 - RNA, 19 nt, Artificial Sequence
  Description of Artificial Sequence: Synthetic oligonucleotide
cccgucgcgaggagcggcc

SEQ ID NO: 2343542 - RNA, 19 nt, Artificial Sequence
  Description of Artificial Sequence: Synthetic oligonucleotide
guccgacgcuccuggucuc

SEQ ID NO: 2343543 - RNA, 19 nt, Artificial Sequence
  Description of Artificial Sequence: Synthetic oligonucleotide
ggaauaaauuugggauggu

SEQ ID NO: 2343544 - RNA, 19 nt, Artificial Sequence
  Description of Artificial Sequence: Synthetic oligonucleotide
ccaguaugaaaugcacuua

SEQ ID NO: 2343545 - RNA, 19 nt, Artificial Sequence
  Description of Artificial Sequence: Synthetic oligonucleotide
gguucucgcgcucguugua

SEQ ID NO: 2343546 - RNA, 19 nt, Artificial Sequence
  Description of Artificial Sequence: Synthetic oligonucleotide
cucgaacaaucaucuccau

SEQ ID NO: 2343547 - RNA, 19 nt, Artificial Sequence
  Description of Artificial Sequence: Synthetic oligonucleotide
cccauagaucuuuuccagu

SEQ ID NO: 2343548 - RNA, 19 nt, Artificial Sequence
  Description of Artificial Sequence: Synthetic oligonucleotide
gccacacgaugagcggcag

SEQ ID NO: 2343549 - RNA, 19 nt, Artificial Sequence
  Description of Artificial Sequence: Synthetic oligonucleotide
ggcccugcggcggccgggg

SEQ ID NO: 2343550 - RNA, 19 nt, Artificial Sequence
  Description of Artificial Sequence: Synthetic oligonucleotide
gcacuuaccuuuggcucaa

SEQ ID NO: 2343551 - RNA, 19 nt, Artificial Sequence
  Description of Artificial Sequence: Synthetic oligonucleotide
ccagagaaaugaccaguau

SEQ ID NO: 2343552 - RNA, 19 nt, Artificial Sequence
  Description of Artificial Sequence: Synthetic oligonucleotide
gcgcucguuguaggugggc

SEQ ID NO: 2343553 - RNA, 19 nt, Artificial Sequence
  Description of Artificial Sequence: Synthetic oligonucleotide
cgacgcuccuggucucagc

SEQ ID NO: 2343554 - RNA, 19 nt, Artificial Sequence
  Description of Artificial Sequence: Synthetic oligonucleotide
cggcugauuaucuuucuuu

SEQ ID NO: 2343555 - RNA, 19 nt, Artificial Sequence
  Description of Artificial Sequence: Synthetic oligonucleotide
gcggcagguucucgcgcuc

SEQ ID NO: 2343556 - RNA, 19 nt, Artificial Sequence
  Description of Artificial Sequence: Synthetic oligonucleotide
cggcagguucucgcgcucg

SEQ ID NO: 2343557 - RNA, 19 nt, Artificial Sequence
  Description of Artificial Sequence: Synthetic oligonucleotide
ccgacgcuccuggucucag

SEQ ID NO: 2343558 - RNA, 19 nt, Artificial Sequence
  Description of Artificial Sequence: Synthetic oligonucleotide
cgcucguuguaggugggca

SEQ ID NO: 2343559 - RNA, 19 nt, Artificial Sequence
  Description of Artificial Sequence: Synthetic oligonucleotide
ccugcggcggccggggaga

SEQ ID NO: 2343560 - RNA, 19 nt, Artificial Sequence
  Description of Artificial Sequence: Synthetic oligonucleotide
cgaugagcggcagguucuc

SEQ ID NO: 2343561 - RNA, 19 nt, Artificial Sequence
  Description of Artificial Sequence: Synthetic oligonucleotide
ccgucgcgaggagcggccc

SEQ ID NO: 2343562 - RNA, 19 nt, Artificial Sequence
  Description of Artificial Sequence: Synthetic oligonucleotide
ccguggucuuaggagaauu

SEQ ID NO: 2343563 - RNA, 19 nt, Artificial Sequence
  Description of Artificial Sequence: Synthetic oligonucleotide
ccucaccaaugguguaauu

SEQ ID NO: 2343564 - RNA, 19 nt, Artificial Sequence
  Description of Artificial Sequence: Synthetic oligonucleotide
cacuuaccuuuggcucaau

SEQ ID NO: 2343565 - RNA, 19 nt, Artificial Sequence
  Description of Artificial Sequence: Synthetic oligonucleotide
ccccacggcugauuaucuu

SEQ ID NO: 2343566 - RNA, 19 nt, Artificial Sequence
  Description of Artificial Sequence: Synthetic oligonucleotide
gcccugcggcggccgggga

SEQ ID NO: 2343567 - RNA, 19 nt, Artificial Sequence
  Description of Artificial Sequence: Synthetic oligonucleotide
cccguggucuuaggagaau

SEQ ID NO: 2343568 - RNA, 19 nt, Artificial Sequence
  Description of Artificial Sequence: Synthetic oligonucleotide
cgucgcgaggagcggcccu

SEQ ID NO: 2343569 - RNA, 19 nt, Artificial Sequence
  Description of Artificial Sequence: Synthetic oligonucleotide
uuaacuaucuguaaaauug

SEQ ID NO: 2343570 - RNA, 19 nt, Artificial Sequence
  Description of Artificial Sequence: Synthetic oligonucleotide
aaaguaaagcuucaguuuc

SEQ ID NO: 2343571 - RNA, 19 nt, Artificial Sequence
  Description of Artificial Sequence: Synthetic oligonucleotide
aauugguuaguuuacuggg

SEQ ID NO: 2343572 - RNA, 19 nt, Artificial Sequence
  Description of Artificial Sequence: Synthetic oligonucleotide
aaccuugucacuuaaagug

SEQ ID NO: 2343573 - RNA, 19 nt, Artificial Sequence
  Description of Artificial Sequence: Synthetic oligonucleotide
aaauugguuaguuuacugg

SEQ ID NO: 2343574 - RNA, 19 nt, Artificial Sequence
  Description of Artificial Sequence: Synthetic oligonucleotide
aaagcuucaguuucuggcc

SEQ ID NO: 2343575 - RNA, 19 nt, Artificial Sequence
  Description of Artificial Sequence: Synthetic oligonucleotide
aguaaguaggacuuguccc

SEQ ID NO: 2343576 - RNA, 19 nt, Artificial Sequence
  Description of Artificial Sequence: Synthetic oligonucleotide
gaacuaauguuucucaggg

SEQ ID NO: 2343577 - RNA, 19 nt, Artificial Sequence
  Description of Artificial Sequence: Synthetic oligonucleotide
acuaauguuucucagggag

SEQ ID NO: 2343578 - RNA, 19 nt, Artificial Sequence
  Description of Artificial Sequence: Synthetic oligonucleotide
augcaguucauauuucucc

SEQ ID NO: 2343579 - RNA, 19 nt, Artificial Sequence
  Description of Artificial Sequence: Synthetic oligonucleotide
aaaauugguuaguuuacug

SEQ ID NO: 2343580 - RNA, 19 nt, Artificial Sequence
  Description of Artificial Sequence: Synthetic oligonucleotide
uaacuaucuguaaaauugg

SEQ ID NO: 2343581 - RNA, 19 nt, Artificial Sequence
  Description of Artificial Sequence: Synthetic oligonucleotide
aguaagucauaguugauca

SEQ ID NO: 2343582 - RNA, 19 nt, Artificial Sequence
  Description of Artificial Sequence: Synthetic oligonucleotide
acgagcuauacauucaggg

SEQ ID NO: 2343583 - RNA, 19 nt, Artificial Sequence
  Description of Artificial Sequence: Synthetic oligonucleotide
aaauuucaaacagcuggcc

SEQ ID NO: 2343584 - RNA, 19 nt, Artificial Sequence
  Description of Artificial Sequence: Synthetic oligonucleotide
aagacuaauuuuaacuauc

SEQ ID NO: 2343585 - RNA, 19 nt, Artificial Sequence
  Description of Artificial Sequence: Synthetic oligonucleotide
agucagaugccauacagug

SEQ ID NO: 2343586 - RNA, 19 nt, Artificial Sequence
  Description of Artificial Sequence: Synthetic oligonucleotide
guaaguaggacuugucccg

SEQ ID NO: 2343587 - RNA, 19 nt, Artificial Sequence
  Description of Artificial Sequence: Synthetic oligonucleotide
uaucuguaaaauugguuag

SEQ ID NO: 2343588 - RNA, 19 nt, Artificial Sequence
  Description of Artificial Sequence: Synthetic oligonucleotide
cuaaccuugucacuuaaag

SEQ ID NO: 2343589 - RNA, 19 nt, Artificial Sequence
  Description of Artificial Sequence: Synthetic oligonucleotide
uuggacuucaaacacugcu

SEQ ID NO: 2343590 - RNA, 19 nt, Artificial Sequence
  Description of Artificial Sequence: Synthetic oligonucleotide
ucucauggagcucuauccg

SEQ ID NO: 2343591 - RNA, 19 nt, Artificial Sequence
  Description of Artificial Sequence: Synthetic oligonucleotide
ucuucgaaagcucuugaac

SEQ ID NO: 2343592 - RNA, 19 nt, Artificial Sequence
  Description of Artificial Sequence: Synthetic oligonucleotide
aguugauccucacucuucg

SEQ ID NO: 2343593 - RNA, 19 nt, Artificial Sequence
  Description of Artificial Sequence: Synthetic oligonucleotide
aguggcaucuucuuggcug

SEQ ID NO: 2343594 - RNA, 19 nt, Artificial Sequence
  Description of Artificial Sequence: Synthetic oligonucleotide
uugaacaacuggaacguga

SEQ ID NO: 2343595 - RNA, 19 nt, Artificial Sequence
  Description of Artificial Sequence: Synthetic oligonucleotide
uacccaacgagcuauacau

SEQ ID NO: 2343596 - RNA, 19 nt, Artificial Sequence
  Description of Artificial Sequence: Synthetic oligonucleotide
ugcgucuucacucugcuuc

SEQ ID NO: 2343597 - RNA, 19 nt, Artificial Sequence
  Description of Artificial Sequence: Synthetic oligonucleotide
cuaucuguaaaauugguua

SEQ ID NO: 2343598 - RNA, 19 nt, Artificial Sequence
  Description of Artificial Sequence: Synthetic oligonucleotide
uugguuaguuuacugggug

SEQ ID NO: 2343599 - RNA, 19 nt, Artificial Sequence
  Description of Artificial Sequence: Synthetic oligonucleotide
aguucuggccuuugguacc

SEQ ID NO: 2343600 - RNA, 19 nt, Artificial Sequence
  Description of Artificial Sequence: Synthetic oligonucleotide
uuuaacuaucuguaaaauu

SEQ ID NO: 2343601 - RNA, 19 nt, Artificial Sequence
  Description of Artificial Sequence: Synthetic oligonucleotide
aagcuucaguuucuggccg

SEQ ID NO: 2343602 - RNA, 19 nt, Artificial Sequence
  Description of Artificial Sequence: Synthetic oligonucleotide
uaagacuaauuuuaacuau

SEQ ID NO: 2343603 - RNA, 19 nt, Artificial Sequence
  Description of Artificial Sequence: Synthetic oligonucleotide
cuuaaagugccauuuagaa

SEQ ID NO: 2343604 - RNA, 19 nt, Artificial Sequence
  Description of Artificial Sequence: Synthetic oligonucleotide
ugaacaacuggaacgugac

SEQ ID NO: 2343605 - RNA, 19 nt, Artificial Sequence
  Description of Artificial Sequence: Synthetic oligonucleotide
aggcauugcgucuucacuc

SEQ ID NO: 2343606 - RNA, 19 nt, Artificial Sequence
  Description of Artificial Sequence: Synthetic oligonucleotide
uugaucacaggcauugcgu

SEQ ID NO: 2343607 - RNA, 19 nt, Artificial Sequence
  Description of Artificial Sequence: Synthetic oligonucleotide
gauccucacucuucgaaag

SEQ ID NO: 2343608 - RNA, 19 nt, Artificial Sequence
  Description of Artificial Sequence: Synthetic oligonucleotide
uaguugaucacaggcauug

SEQ ID NO: 2343609 - RNA, 19 nt, Artificial Sequence
  Description of Artificial Sequence: Synthetic oligonucleotide
ucuaguucuggccuuuggu

SEQ ID NO: 2343610 - RNA, 19 nt, Artificial Sequence
  Description of Artificial Sequence: Synthetic oligonucleotide
aguaggacuugucccgagc

SEQ ID NO: 2343611 - RNA, 19 nt, Artificial Sequence
  Description of Artificial Sequence: Synthetic oligonucleotide
ucauggagcucuauccgag

SEQ ID NO: 2343612 - RNA, 19 nt, Artificial Sequence
  Description of Artificial Sequence: Synthetic oligonucleotide
uuaguuuacugggugauuc

SEQ ID NO: 2343613 - RNA, 19 nt, Artificial Sequence
  Description of Artificial Sequence: Synthetic oligonucleotide
ucugcuauuucaccucaug

SEQ ID NO: 2343614 - RNA, 19 nt, Artificial Sequence
  Description of Artificial Sequence: Synthetic oligonucleotide
ggaacuaauguuucucagg

SEQ ID NO: 2343615 - RNA, 19 nt, Artificial Sequence
  Description of Artificial Sequence: Synthetic oligonucleotide
guaagacuaauuuuaacua

SEQ ID NO: 2343616 - RNA, 19 nt, Artificial Sequence
  Description of Artificial Sequence: Synthetic oligonucleotide
cuucgaaagcucuugaaca

SEQ ID NO: 2343617 - RNA, 19 nt, Artificial Sequence
  Description of Artificial Sequence: Synthetic oligonucleotide
caguaaguaggacuugucc

SEQ ID NO: 2343618 - RNA, 19 nt, Artificial Sequence
  Description of Artificial Sequence: Synthetic oligonucleotide
uaauguuucucagggagga

SEQ ID NO: 2343619 - RNA, 19 nt, Artificial Sequence
  Description of Artificial Sequence: Synthetic oligonucleotide
uaaccuugucacuuaaagu

SEQ ID NO: 2343620 - RNA, 19 nt, Artificial Sequence
  Description of Artificial Sequence: Synthetic oligonucleotide
uucaggggaacuaauguuu

SEQ ID NO: 2343621 - RNA, 19 nt, Artificial Sequence
  Description of Artificial Sequence: Synthetic oligonucleotide
uuuacugggugauucuagu

SEQ ID NO: 2343622 - RNA, 19 nt, Artificial Sequence
  Description of Artificial Sequence: Synthetic oligonucleotide
cagaguaagucauaguuga

SEQ ID NO: 2343623 - RNA, 19 nt, Artificial Sequence
  Description of Artificial Sequence: Synthetic oligonucleotide
ugugcaaaguaaagcuuca

SEQ ID NO: 2343624 - RNA, 19 nt, Artificial Sequence
  Description of Artificial Sequence: Synthetic oligonucleotide
agcuucaaaccucuccuuc

SEQ ID NO: 2343625 - RNA, 19 nt, Artificial Sequence
  Description of Artificial Sequence: Synthetic oligonucleotide
cacuuaaagugccauuuag

SEQ ID NO: 2343626 - RNA, 19 nt, Artificial Sequence
  Description of Artificial Sequence: Synthetic oligonucleotide
ucauguucuggccuggcaa

SEQ ID NO: 2343627 - RNA, 19 nt, Artificial Sequence
  Description of Artificial Sequence: Synthetic oligonucleotide
acucucauggagcucuauc

SEQ ID NO: 2343628 - RNA, 19 nt, Artificial Sequence
  Description of Artificial Sequence: Synthetic oligonucleotide
accuugucacuuaaagugc

SEQ ID NO: 2343629 - RNA, 19 nt, Artificial Sequence
  Description of Artificial Sequence: Synthetic oligonucleotide
acugggugauucuaguucu

SEQ ID NO: 2343630 - RNA, 19 nt, Artificial Sequence
  Description of Artificial Sequence: Synthetic oligonucleotide
uuuuaacuaucuguaaaau

SEQ ID NO: 2343631 - RNA, 19 nt, Artificial Sequence
  Description of Artificial Sequence: Synthetic oligonucleotide
guaaaauugguuaguuuac

SEQ ID NO: 2343632 - RNA, 19 nt, Artificial Sequence
  Description of Artificial Sequence: Synthetic oligonucleotide
uugauccucacucuucgaa

SEQ ID NO: 2343633 - RNA, 19 nt, Artificial Sequence
  Description of Artificial Sequence: Synthetic oligonucleotide
cugcucuuggacuucaaac

SEQ ID NO: 2343634 - RNA, 19 nt, Artificial Sequence
  Description of Artificial Sequence: Synthetic oligonucleotide
cagugcacaguccagcugc

SEQ ID NO: 2343635 - RNA, 19 nt, Artificial Sequence
  Description of Artificial Sequence: Synthetic oligonucleotide
uucgaaagcucuugaacaa

SEQ ID NO: 2343636 - RNA, 19 nt, Artificial Sequence
  Description of Artificial Sequence: Synthetic oligonucleotide
ugugcucuagugccggugc

SEQ ID NO: 2343637 - RNA, 19 nt, Artificial Sequence
  Description of Artificial Sequence: Synthetic oligonucleotide
aagcucuugaacaacugga

SEQ ID NO: 2343638 - RNA, 19 nt, Artificial Sequence
  Description of Artificial Sequence: Synthetic oligonucleotide
aaguugauccucacucuuc

SEQ ID NO: 2343639 - RNA, 19 nt, Artificial Sequence
  Description of Artificial Sequence: Synthetic oligonucleotide
uucacucugcuucacccga

SEQ ID NO: 2343640 - RNA, 19 nt, Artificial Sequence
  Description of Artificial Sequence: Synthetic oligonucleotide
ucaaaccucuccuucugcu

SEQ ID NO: 2343641 - RNA, 19 nt, Artificial Sequence
  Description of Artificial Sequence: Synthetic oligonucleotide
uauacauucaggggaacua

SEQ ID NO: 2343642 - RNA, 19 nt, Artificial Sequence
  Description of Artificial Sequence: Synthetic oligonucleotide
ugccauuuagaacauuguu

SEQ ID NO: 2343643 - RNA, 19 nt, Artificial Sequence
  Description of Artificial Sequence: Synthetic oligonucleotide
gaguaagucauaguugauc

SEQ ID NO: 2343644 - RNA, 19 nt, Artificial Sequence
  Description of Artificial Sequence: Synthetic oligonucleotide
ggagucagaugccauacag

SEQ ID NO: 2343645 - RNA, 19 nt, Artificial Sequence
  Description of Artificial Sequence: Synthetic oligonucleotide
acagaguaagucauaguug

SEQ ID NO: 2343646 - RNA, 19 nt, Artificial Sequence
  Description of Artificial Sequence: Synthetic oligonucleotide
ggagacagcacagaguaag

SEQ ID NO: 2343647 - RNA, 19 nt, Artificial Sequence
  Description of Artificial Sequence: Synthetic oligonucleotide
agauggaugcaguggcauc

SEQ ID NO: 2343648 - RNA, 19 nt, Artificial Sequence
  Description of Artificial Sequence: Synthetic oligonucleotide
gaaccugugcaaaguaaag

SEQ ID NO: 2343649 - RNA, 19 nt, Artificial Sequence
  Description of Artificial Sequence: Synthetic oligonucleotide
caacgagcuauacauucag

SEQ ID NO: 2343650 - RNA, 19 nt, Artificial Sequence
  Description of Artificial Sequence: Synthetic oligonucleotide
aacuaucuguaaaauuggu

SEQ ID NO: 2343651 - RNA, 19 nt, Artificial Sequence
  Description of Artificial Sequence: Synthetic oligonucleotide
guaggacuugucccgagcc

SEQ ID NO: 2343652 - RNA, 19 nt, Artificial Sequence
  Description of Artificial Sequence: Synthetic oligonucleotide
aacgagcuauacauucagg

SEQ ID NO: 2343653 - RNA, 19 nt, Artificial Sequence
  Description of Artificial Sequence: Synthetic oligonucleotide
aacagagcuucaaaccucu

SEQ ID NO: 2343654 - RNA, 19 nt, Artificial Sequence
  Description of Artificial Sequence: Synthetic oligonucleotide
ugggugauucuaguucugg

SEQ ID NO: 2343655 - RNA, 19 nt, Artificial Sequence
  Description of Artificial Sequence: Synthetic oligonucleotide
ugguuaguuuacuggguga

SEQ ID NO: 2343656 - RNA, 19 nt, Artificial Sequence
  Description of Artificial Sequence: Synthetic oligonucleotide
aggggaacuaauguuucuc

SEQ ID NO: 2343657 - RNA, 19 nt, Artificial Sequence
  Description of Artificial Sequence: Synthetic oligonucleotide
ucgggcuugcugaaguuga

SEQ ID NO: 2343658 - RNA, 19 nt, Artificial Sequence
  Description of Artificial Sequence: Synthetic oligonucleotide
gcuauuucaccucauguuc

SEQ ID NO: 2343659 - RNA, 19 nt, Artificial Sequence
  Description of Artificial Sequence: Synthetic oligonucleotide
ugccagauggaugcagugg

SEQ ID NO: 2343660 - RNA, 19 nt, Artificial Sequence
  Description of Artificial Sequence: Synthetic oligonucleotide
acaacuggaacgugaccug

SEQ ID NO: 2343661 - RNA, 19 nt, Artificial Sequence
  Description of Artificial Sequence: Synthetic oligonucleotide
caugcaguucauauuucuc

SEQ ID NO: 2343662 - RNA, 19 nt, Artificial Sequence
  Description of Artificial Sequence: Synthetic oligonucleotide
aagcuagcccagcugccag

SEQ ID NO: 2343663 - RNA, 19 nt, Artificial Sequence
  Description of Artificial Sequence: Synthetic oligonucleotide
uggaacgugaccuggucau

SEQ ID NO: 2343664 - RNA, 19 nt, Artificial Sequence
  Description of Artificial Sequence: Synthetic oligonucleotide
caugcacaaccacacuggg

SEQ ID NO: 2343665 - RNA, 19 nt, Artificial Sequence
  Description of Artificial Sequence: Synthetic oligonucleotide
auucaggggaacuaauguu

SEQ ID NO: 2343666 - RNA, 19 nt, Artificial Sequence
  Description of Artificial Sequence: Synthetic oligonucleotide
agacuaauuuuaacuaucu

SEQ ID NO: 2343667 - RNA, 19 nt, Artificial Sequence
  Description of Artificial Sequence: Synthetic oligonucleotide
acuuaaagugccauuuaga

SEQ ID NO: 2343668 - RNA, 19 nt, Artificial Sequence
  Description of Artificial Sequence: Synthetic oligonucleotide
cuauccgagcucucgcugc

SEQ ID NO: 2343669 - RNA, 19 nt, Artificial Sequence
  Description of Artificial Sequence: Synthetic oligonucleotide
aaguaggacuugucccgag

SEQ ID NO: 2343670 - RNA, 19 nt, Artificial Sequence
  Description of Artificial Sequence: Synthetic oligonucleotide
ucuagugccggugcagcag

SEQ ID NO: 2343671 - RNA, 19 nt, Artificial Sequence
  Description of Artificial Sequence: Synthetic oligonucleotide
uuucaaacagcuggccaca

SEQ ID NO: 2343672 - RNA, 19 nt, Artificial Sequence
  Description of Artificial Sequence: Synthetic oligonucleotide
guuuacugggugauucuag

SEQ ID NO: 2343673 - RNA, 19 nt, Artificial Sequence
  Description of Artificial Sequence: Synthetic oligonucleotide
gaaagcucuugaacaacug

SEQ ID NO: 2343674 - RNA, 19 nt, Artificial Sequence
  Description of Artificial Sequence: Synthetic oligonucleotide
auugcgucuucacucugcu

SEQ ID NO: 2343675 - RNA, 19 nt, Artificial Sequence
  Description of Artificial Sequence: Synthetic oligonucleotide
cuugcugaaguugauccuc

SEQ ID NO: 2343676 - RNA, 19 nt, Artificial Sequence
  Description of Artificial Sequence: Synthetic oligonucleotide
cuugucccgagccuccccg

SEQ ID NO: 2343677 - RNA, 19 nt, Artificial Sequence
  Description of Artificial Sequence: Synthetic oligonucleotide
gaacaacuggaacgugacc

SEQ ID NO: 2343678 - RNA, 19 nt, Artificial Sequence
  Description of Artificial Sequence: Synthetic oligonucleotide
uuugguacccaacgagcua

SEQ ID NO: 2343679 - RNA, 19 nt, Artificial Sequence
  Description of Artificial Sequence: Synthetic oligonucleotide
ucugcucuuggacuucaaa

SEQ ID NO: 2343680 - RNA, 19 nt, Artificial Sequence
  Description of Artificial Sequence: Synthetic oligonucleotide
uaguuuacugggugauucu

SEQ ID NO: 2343681 - RNA, 19 nt, Artificial Sequence
  Description of Artificial Sequence: Synthetic oligonucleotide
ugcucacucagcgcggccg

SEQ ID NO: 2343682 - RNA, 19 nt, Artificial Sequence
  Description of Artificial Sequence: Synthetic oligonucleotide
aagcuuggagacagcacag

SEQ ID NO: 2343683 - RNA, 19 nt, Artificial Sequence
  Description of Artificial Sequence: Synthetic oligonucleotide
uacauucaggggaacuaau

SEQ ID NO: 2343684 - RNA, 19 nt, Artificial Sequence
  Description of Artificial Sequence: Synthetic oligonucleotide
agcucuauccgagcucucg

SEQ ID NO: 2343685 - RNA, 19 nt, Artificial Sequence
  Description of Artificial Sequence: Synthetic oligonucleotide
uggacucgguuccugcaug

SEQ ID NO: 2343686 - RNA, 19 nt, Artificial Sequence
  Description of Artificial Sequence: Synthetic oligonucleotide
uggucaucauagaggggug

SEQ ID NO: 2343687 - RNA, 19 nt, Artificial Sequence
  Description of Artificial Sequence: Synthetic oligonucleotide
caaagcuagcccagcugcc

SEQ ID NO: 2343688 - RNA, 19 nt, Artificial Sequence
  Description of Artificial Sequence: Synthetic oligonucleotide
aggacuugucccgagccuc

SEQ ID NO: 2343689 - RNA, 19 nt, Artificial Sequence
  Description of Artificial Sequence: Synthetic oligonucleotide
guaagucauaguugaucac

SEQ ID NO: 2343690 - RNA, 19 nt, Artificial Sequence
  Description of Artificial Sequence: Synthetic oligonucleotide
auggagcucuauccgagcu

SEQ ID NO: 2343691 - RNA, 19 nt, Artificial Sequence
  Description of Artificial Sequence: Synthetic oligonucleotide
gucagaugccauacagugg

SEQ ID NO: 2343692 - RNA, 19 nt, Artificial Sequence
  Description of Artificial Sequence: Synthetic oligonucleotide
gggaacuaauguuucucag

SEQ ID NO: 2343693 - RNA, 19 nt, Artificial Sequence
  Description of Artificial Sequence: Synthetic oligonucleotide
aucuguaaaauugguuagu

SEQ ID NO: 2343694 - RNA, 19 nt, Artificial Sequence
  Description of Artificial Sequence: Synthetic oligonucleotide
uugguacccaacgagcuau

SEQ ID NO: 2343695 - RNA, 19 nt, Artificial Sequence
  Description of Artificial Sequence: Synthetic oligonucleotide
gaggagucagaugccauac

SEQ ID NO: 2343696 - RNA, 19 nt, Artificial Sequence
  Description of Artificial Sequence: Synthetic oligonucleotide
acauucaggggaacuaaug

SEQ ID NO: 2343697 - RNA, 19 nt, Artificial Sequence
  Description of Artificial Sequence: Synthetic oligonucleotide
gaggggugaacagagcuuc

SEQ ID NO: 2343698 - RNA, 19 nt, Artificial Sequence
  Description of Artificial Sequence: Synthetic oligonucleotide
gcuucacccgacuggaggg

SEQ ID NO: 2343699 - RNA, 19 nt, Artificial Sequence
  Description of Artificial Sequence: Synthetic oligonucleotide
uaggacuugucccgagccu

SEQ ID NO: 2343700 - RNA, 19 nt, Artificial Sequence
  Description of Artificial Sequence: Synthetic oligonucleotide
auagaggggugaacagagc

SEQ ID NO: 2343701 - RNA, 19 nt, Artificial Sequence
  Description of Artificial Sequence: Synthetic oligonucleotide
gccauuuagaacauuguuc

SEQ ID NO: 2343702 - RNA, 19 nt, Artificial Sequence
  Description of Artificial Sequence: Synthetic oligonucleotide
guagcagcaggaggcacgg

SEQ ID NO: 2343703 - RNA, 19 nt, Artificial Sequence
  Description of Artificial Sequence: Synthetic oligonucleotide
gaacagagcuucaaaccuc

SEQ ID NO: 2343704 - RNA, 19 nt, Artificial Sequence
  Description of Artificial Sequence: Synthetic oligonucleotide
uccccggacaccugaaccu

SEQ ID NO: 2343705 - RNA, 19 nt, Artificial Sequence
  Description of Artificial Sequence: Synthetic oligonucleotide
ccuuugguacccaacgagc

SEQ ID NO: 2343706 - RNA, 19 nt, Artificial Sequence
  Description of Artificial Sequence: Synthetic oligonucleotide
cuccccggacaccugaacc

SEQ ID NO: 2343707 - RNA, 19 nt, Artificial Sequence
  Description of Artificial Sequence: Synthetic oligonucleotide
uauccgagcucucgcugca

SEQ ID NO: 2343708 - RNA, 19 nt, Artificial Sequence
  Description of Artificial Sequence: Synthetic oligonucleotide
uaaguaggacuugucccga

SEQ ID NO: 2343709 - RNA, 19 nt, Artificial Sequence
  Description of Artificial Sequence: Synthetic oligonucleotide
cauggagcucuauccgagc

SEQ ID NO: 2343710 - RNA, 19 nt, Artificial Sequence
  Description of Artificial Sequence: Synthetic oligonucleotide
auugguuaguuuacugggu

SEQ ID NO: 2343711 - RNA, 19 nt, Artificial Sequence
  Description of Artificial Sequence: Synthetic oligonucleotide
ucaucauagaggggugaac

SEQ ID NO: 2343712 - RNA, 19 nt, Artificial Sequence
  Description of Artificial Sequence: Synthetic oligonucleotide
caaaguaaagcuucaguuu

SEQ ID NO: 2343713 - RNA, 19 nt, Artificial Sequence
  Description of Artificial Sequence: Synthetic oligonucleotide
cuaguucuggccuuuggua

SEQ ID NO: 2343714 - RNA, 19 nt, Artificial Sequence
  Description of Artificial Sequence: Synthetic oligonucleotide
uuacugggugauucuaguu

SEQ ID NO: 2343715 - RNA, 19 nt, Artificial Sequence
  Description of Artificial Sequence: Synthetic oligonucleotide
acagugcacaguccagcug

SEQ ID NO: 2343716 - RNA, 19 nt, Artificial Sequence
  Description of Artificial Sequence: Synthetic oligonucleotide
cuggcccaagcuuggagac

SEQ ID NO: 2343717 - RNA, 19 nt, Artificial Sequence
  Description of Artificial Sequence: Synthetic oligonucleotide
uugucacuuaaagugccau

SEQ ID NO: 2343718 - RNA, 19 nt, Artificial Sequence
  Description of Artificial Sequence: Synthetic oligonucleotide
uucucagggaggagucaga

SEQ ID NO: 2343719 - RNA, 19 nt, Artificial Sequence
  Description of Artificial Sequence: Synthetic oligonucleotide
ggacuucaaacacugcuuc

SEQ ID NO: 2343720 - RNA, 19 nt, Artificial Sequence
  Description of Artificial Sequence: Synthetic oligonucleotide
caacuggaacgugaccugg

SEQ ID NO: 2343721 - RNA, 19 nt, Artificial Sequence
  Description of Artificial Sequence: Synthetic oligonucleotide
cauucaggggaacuaaugu

SEQ ID NO: 2343722 - RNA, 19 nt, Artificial Sequence
  Description of Artificial Sequence: Synthetic oligonucleotide
gaacgugaccuggucauca

SEQ ID NO: 2343723 - RNA, 19 nt, Artificial Sequence
  Description of Artificial Sequence: Synthetic oligonucleotide
uggagcucuauccgagcuc

SEQ ID NO: 2343724 - RNA, 19 nt, Artificial Sequence
  Description of Artificial Sequence: Synthetic oligonucleotide
guacccaacgagcuauaca

SEQ ID NO: 2343725 - RNA, 19 nt, Artificial Sequence
  Description of Artificial Sequence: Synthetic oligonucleotide
aacgugaccuggucaucau

SEQ ID NO: 2343726 - RNA, 19 nt, Artificial Sequence
  Description of Artificial Sequence: Synthetic oligonucleotide
gauggaugcaguggcaucu

SEQ ID NO: 2343727 - RNA, 19 nt, Artificial Sequence
  Description of Artificial Sequence: Synthetic oligonucleotide
cuuggugggcugugguggc

SEQ ID NO: 2343728 - RNA, 19 nt, Artificial Sequence
  Description of Artificial Sequence: Synthetic oligonucleotide
cacucuucgaaagcucuug

SEQ ID NO: 2343729 - RNA, 19 nt, Artificial Sequence
  Description of Artificial Sequence: Synthetic oligonucleotide
ugcagccucgggcuugcug

SEQ ID NO: 2343730 - RNA, 19 nt, Artificial Sequence
  Description of Artificial Sequence: Synthetic oligonucleotide
cccaacgagcuauacauuc

SEQ ID NO: 2343731 - RNA, 19 nt, Artificial Sequence
  Description of Artificial Sequence: Synthetic oligonucleotide
cucagcgcggccgugggag

SEQ ID NO: 2343732 - RNA, 19 nt, Artificial Sequence
  Description of Artificial Sequence: Synthetic oligonucleotide
cuuugguacccaacgagcu

SEQ ID NO: 2343733 - RNA, 19 nt, Artificial Sequence
  Description of Artificial Sequence: Synthetic oligonucleotide
cuugucacuuaaagugcca

SEQ ID NO: 2343734 - RNA, 19 nt, Artificial Sequence
  Description of Artificial Sequence: Synthetic oligonucleotide
augcacaaccacacugggg

SEQ ID NO: 2343735 - RNA, 19 nt, Artificial Sequence
  Description of Artificial Sequence: Synthetic oligonucleotide
caccucauguucuggccug

SEQ ID NO: 2343736 - RNA, 19 nt, Artificial Sequence
  Description of Artificial Sequence: Synthetic oligonucleotide
ggccacaucugcuauuuca

SEQ ID NO: 2343737 - RNA, 19 nt, Artificial Sequence
  Description of Artificial Sequence: Synthetic oligonucleotide
cgugaccuggucaucauag

SEQ ID NO: 2343738 - RNA, 19 nt, Artificial Sequence
  Description of Artificial Sequence: Synthetic oligonucleotide
agcuauacauucaggggaa

SEQ ID NO: 2343739 - RNA, 19 nt, Artificial Sequence
  Description of Artificial Sequence: Synthetic oligonucleotide
cuggccuuugguacccaac

SEQ ID NO: 2343740 - RNA, 19 nt, Artificial Sequence
  Description of Artificial Sequence: Synthetic oligonucleotide
gguggcaguaaguaggacu

SEQ ID NO: 2343741 - RNA, 19 nt, Artificial Sequence
  Description of Artificial Sequence: Synthetic oligonucleotide
uugucccgagccuccccgg

SEQ ID NO: 2343742 - RNA, 19 nt, Artificial Sequence
  Description of Artificial Sequence: Synthetic oligonucleotide
cagaugccauacagugggg

SEQ ID NO: 2343743 - RNA, 19 nt, Artificial Sequence
  Description of Artificial Sequence: Synthetic oligonucleotide
ucacucugcuucacccgac

SEQ ID NO: 2343744 - RNA, 19 nt, Artificial Sequence
  Description of Artificial Sequence: Synthetic oligonucleotide
cuggccguggaagucacuc

SEQ ID NO: 2343745 - RNA, 19 nt, Artificial Sequence
  Description of Artificial Sequence: Synthetic oligonucleotide
uucuggccguggaagucac

SEQ ID NO: 2343746 - RNA, 19 nt, Artificial Sequence
  Description of Artificial Sequence: Synthetic oligonucleotide
aguuuacugggugauucua

SEQ ID NO: 2343747 - RNA, 19 nt, Artificial Sequence
  Description of Artificial Sequence: Synthetic oligonucleotide
gaucacaggcauugcgucu

SEQ ID NO: 2343748 - RNA, 19 nt, Artificial Sequence
  Description of Artificial Sequence: Synthetic oligonucleotide
cuugaacaacuggaacgug

SEQ ID NO: 2343749 - RNA, 19 nt, Artificial Sequence
  Description of Artificial Sequence: Synthetic oligonucleotide
cauguucuggccuggcaaa

SEQ ID NO: 2343750 - RNA, 19 nt, Artificial Sequence
  Description of Artificial Sequence: Synthetic oligonucleotide
caucugcuauuucaccuca

SEQ ID NO: 2343751 - RNA, 19 nt, Artificial Sequence
  Description of Artificial Sequence: Synthetic oligonucleotide
cuuggagacagcacagagu

SEQ ID NO: 2343752 - RNA, 19 nt, Artificial Sequence
  Description of Artificial Sequence: Synthetic oligonucleotide
gugccggugcagcaguagc

SEQ ID NO: 2343753 - RNA, 19 nt, Artificial Sequence
  Description of Artificial Sequence: Synthetic oligonucleotide
cuucacccgacuggagggg

SEQ ID NO: 2343754 - RNA, 19 nt, Artificial Sequence
  Description of Artificial Sequence: Synthetic oligonucleotide
gaugcaguggcaucuucuu

SEQ ID NO: 2343755 - RNA, 19 nt, Artificial Sequence
  Description of Artificial Sequence: Synthetic oligonucleotide
cugggugauucuaguucug

SEQ ID NO: 2343756 - RNA, 19 nt, Artificial Sequence
  Description of Artificial Sequence: Synthetic oligonucleotide
acaccugaaccugugcaaa

SEQ ID NO: 2343757 - RNA, 19 nt, Artificial Sequence
  Description of Artificial Sequence: Synthetic oligonucleotide
cuggaacgugaccugguca

SEQ ID NO: 2343758 - RNA, 19 nt, Artificial Sequence
  Description of Artificial Sequence: Synthetic oligonucleotide
uggagacagcacagaguaa

SEQ ID NO: 2343759 - RNA, 19 nt, Artificial Sequence
  Description of Artificial Sequence: Synthetic oligonucleotide
uggccguggaagucacucu

SEQ ID NO: 2343760 - RNA, 19 nt, Artificial Sequence
  Description of Artificial Sequence: Synthetic oligonucleotide
ggaggcacgggugcagugg

SEQ ID NO: 2343761 - RNA, 19 nt, Artificial Sequence
  Description of Artificial Sequence: Synthetic oligonucleotide
ccacaucugcuauuucacc

SEQ ID NO: 2343762 - RNA, 19 nt, Artificial Sequence
  Description of Artificial Sequence: Synthetic oligonucleotide
ucuggccuuugguacccaa

SEQ ID NO: 2343763 - RNA, 19 nt, Artificial Sequence
  Description of Artificial Sequence: Synthetic oligonucleotide
cucgggcuugcugaaguug

SEQ ID NO: 2343764 - RNA, 19 nt, Artificial Sequence
  Description of Artificial Sequence: Synthetic oligonucleotide
gcucuauccgagcucucgc

SEQ ID NO: 2343765 - RNA, 19 nt, Artificial Sequence
  Description of Artificial Sequence: Synthetic oligonucleotide
guugauccucacucuucga

SEQ ID NO: 2343766 - RNA, 19 nt, Artificial Sequence
  Description of Artificial Sequence: Synthetic oligonucleotide
guuucuggccguggaaguc

SEQ ID NO: 2343767 - RNA, 19 nt, Artificial Sequence
  Description of Artificial Sequence: Synthetic oligonucleotide
auucuaguucuggccuuug

SEQ ID NO: 2343768 - RNA, 19 nt, Artificial Sequence
  Description of Artificial Sequence: Synthetic oligonucleotide
ucgguuccugcaugcaguu

SEQ ID NO: 2343769 - RNA, 19 nt, Artificial Sequence
  Description of Artificial Sequence: Synthetic oligonucleotide
uggcaguaaguaggacuug

SEQ ID NO: 2343770 - RNA, 19 nt, Artificial Sequence
  Description of Artificial Sequence: Synthetic oligonucleotide
cacucagcgcggccguggg

SEQ ID NO: 2343771 - RNA, 19 nt, Artificial Sequence
  Description of Artificial Sequence: Synthetic oligonucleotide
gugaccuggucaucauaga

SEQ ID NO: 2343772 - RNA, 19 nt, Artificial Sequence
  Description of Artificial Sequence: Synthetic oligonucleotide
gaggaacugcuuggugggc

SEQ ID NO: 2343773 - RNA, 19 nt, Artificial Sequence
  Description of Artificial Sequence: Synthetic oligonucleotide
agcuagcccagcugccaga

SEQ ID NO: 2343774 - RNA, 19 nt, Artificial Sequence
  Description of Artificial Sequence: Synthetic oligonucleotide
ggacucgguuccugcaugc

SEQ ID NO: 2343775 - RNA, 19 nt, Artificial Sequence
  Description of Artificial Sequence: Synthetic oligonucleotide
cucauguucuggccuggca

SEQ ID NO: 2343776 - RNA, 19 nt, Artificial Sequence
  Description of Artificial Sequence: Synthetic oligonucleotide
agaguaagucauaguugau

SEQ ID NO: 2343777 - RNA, 19 nt, Artificial Sequence
  Description of Artificial Sequence: Synthetic oligonucleotide
gucaucauagaggggugaa

SEQ ID NO: 2343778 - RNA, 19 nt, Artificial Sequence
  Description of Artificial Sequence: Synthetic oligonucleotide
cucgguuccugcaugcagu

SEQ ID NO: 2343779 - RNA, 19 nt, Artificial Sequence
  Description of Artificial Sequence: Synthetic oligonucleotide
ucacaggcauugcgucuuc

SEQ ID NO: 2343780 - RNA, 19 nt, Artificial Sequence
  Description of Artificial Sequence: Synthetic oligonucleotide
agcuuccgggcgccggguc

SEQ ID NO: 2343781 - RNA, 19 nt, Artificial Sequence
  Description of Artificial Sequence: Synthetic oligonucleotide
cuauacauucaggggaacu

SEQ ID NO: 2343782 - RNA, 19 nt, Artificial Sequence
  Description of Artificial Sequence: Synthetic oligonucleotide
cugugcucuagugccggug

SEQ ID NO: 2343783 - RNA, 19 nt, Artificial Sequence
  Description of Artificial Sequence: Synthetic oligonucleotide
agaggggugaacagagcuu

SEQ ID NO: 2343784 - RNA, 19 nt, Artificial Sequence
  Description of Artificial Sequence: Synthetic oligonucleotide
gugguggcaguaaguagga

SEQ ID NO: 2343785 - RNA, 19 nt, Artificial Sequence
  Description of Artificial Sequence: Synthetic oligonucleotide
acccgacuggaggggaggg

SEQ ID NO: 2343786 - RNA, 19 nt, Artificial Sequence
  Description of Artificial Sequence: Synthetic oligonucleotide
ucagcgcggccgugggagc

SEQ ID NO: 2343787 - RNA, 19 nt, Artificial Sequence
  Description of Artificial Sequence: Synthetic oligonucleotide
agccuccccggacaccuga

SEQ ID NO: 2343788 - RNA, 19 nt, Artificial Sequence
  Description of Artificial Sequence: Synthetic oligonucleotide
ggcugugcucuagugccgg

SEQ ID NO: 2343789 - RNA, 19 nt, Artificial Sequence
  Description of Artificial Sequence: Synthetic oligonucleotide
ggccguggaagucacucuc

SEQ ID NO: 2343790 - RNA, 19 nt, Artificial Sequence
  Description of Artificial Sequence: Synthetic oligonucleotide
ugguacccaacgagcuaua

SEQ ID NO: 2343791 - RNA, 19 nt, Artificial Sequence
  Description of Artificial Sequence: Synthetic oligonucleotide
ccaacgagcuauacauuca

SEQ ID NO: 2343792 - RNA, 19 nt, Artificial Sequence
  Description of Artificial Sequence: Synthetic oligonucleotide
ggaggagucagaugccaua

SEQ ID NO: 2343793 - RNA, 19 nt, Artificial Sequence
  Description of Artificial Sequence: Synthetic oligonucleotide
gguggacucgguuccugca

SEQ ID NO: 2343794 - RNA, 19 nt, Artificial Sequence
  Description of Artificial Sequence: Synthetic oligonucleotide
ucuggccguggaagucacu

SEQ ID NO: 2343795 - RNA, 19 nt, Artificial Sequence
  Description of Artificial Sequence: Synthetic oligonucleotide
ggguggacucgguuccugc

SEQ ID NO: 2343796 - RNA, 19 nt, Artificial Sequence
  Description of Artificial Sequence: Synthetic oligonucleotide
acgugaccuggucaucaua

SEQ ID NO: 2343797 - RNA, 19 nt, Artificial Sequence
  Description of Artificial Sequence: Synthetic oligonucleotide
gagacagcacagaguaagu

SEQ ID NO: 2343798 - RNA, 19 nt, Artificial Sequence
  Description of Artificial Sequence: Synthetic oligonucleotide
gggugaacagagcuucaaa

SEQ ID NO: 2343799 - RNA, 19 nt, Artificial Sequence
  Description of Artificial Sequence: Synthetic oligonucleotide
ucacucucauggagcucua

SEQ ID NO: 2343800 - RNA, 19 nt, Artificial Sequence
  Description of Artificial Sequence: Synthetic oligonucleotide
caggcauugcgucuucacu

SEQ ID NO: 2343801 - RNA, 19 nt, Artificial Sequence
  Description of Artificial Sequence: Synthetic oligonucleotide
uggccacaucugcuauuuc

SEQ ID NO: 2343802 - RNA, 19 nt, Artificial Sequence
  Description of Artificial Sequence: Synthetic oligonucleotide
ugguggcaguaaguaggac

SEQ ID NO: 2343803 - RNA, 19 nt, Artificial Sequence
  Description of Artificial Sequence: Synthetic oligonucleotide
gacucgguuccugcaugca

SEQ ID NO: 2343804 - RNA, 19 nt, Artificial Sequence
  Description of Artificial Sequence: Synthetic oligonucleotide
ccucacucuucgaaagcuc

SEQ ID NO: 2343805 - RNA, 19 nt, Artificial Sequence
  Description of Artificial Sequence: Synthetic oligonucleotide
gcucuagugccggugcagc

SEQ ID NO: 2343806 - RNA, 19 nt, Artificial Sequence
  Description of Artificial Sequence: Synthetic oligonucleotide
uuggugggcugugguggca

SEQ ID NO: 2343807 - RNA, 19 nt, Artificial Sequence
  Description of Artificial Sequence: Synthetic oligonucleotide
ggcauugcgucuucacucu

SEQ ID NO: 2343808 - RNA, 19 nt, Artificial Sequence
  Description of Artificial Sequence: Synthetic oligonucleotide
gguacccaacgagcuauac

SEQ ID NO: 2343809 - RNA, 19 nt, Artificial Sequence
  Description of Artificial Sequence: Synthetic oligonucleotide
agugcacaguccagcugcu

SEQ ID NO: 2343810 - RNA, 19 nt, Artificial Sequence
  Description of Artificial Sequence: Synthetic oligonucleotide
ggccuuugguacccaacga

SEQ ID NO: 2343811 - RNA, 19 nt, Artificial Sequence
  Description of Artificial Sequence: Synthetic oligonucleotide
ggagcucuauccgagcucu

SEQ ID NO: 2343812 - RNA, 19 nt, Artificial Sequence
  Description of Artificial Sequence: Synthetic oligonucleotide
gcaguaaguaggacuuguc

SEQ ID NO: 2343813 - RNA, 19 nt, Artificial Sequence
  Description of Artificial Sequence: Synthetic oligonucleotide
gauucuaguucuggccuuu

SEQ ID NO: 2343814 - RNA, 19 nt, Artificial Sequence
  Description of Artificial Sequence: Synthetic oligonucleotide
gugcucuagugccggugca

SEQ ID NO: 2343815 - RNA, 19 nt, Artificial Sequence
  Description of Artificial Sequence: Synthetic oligonucleotide
gguuaguuuacugggugau

SEQ ID NO: 2343816 - RNA, 19 nt, Artificial Sequence
  Description of Artificial Sequence: Synthetic oligonucleotide
uagugccggugcagcagua

SEQ ID NO: 2343817 - RNA, 19 nt, Artificial Sequence
  Description of Artificial Sequence: Synthetic oligonucleotide
gucccgagccuccccggac

SEQ ID NO: 2343818 - RNA, 19 nt, Artificial Sequence
  Description of Artificial Sequence: Synthetic oligonucleotide
ggucaucauagagggguga

SEQ ID NO: 2343819 - RNA, 19 nt, Artificial Sequence
  Description of Artificial Sequence: Synthetic oligonucleotide
gcauugcgucuucacucug

SEQ ID NO: 2343820 - RNA, 19 nt, Artificial Sequence
  Description of Artificial Sequence: Synthetic oligonucleotide
gcgucuucacucugcuuca

SEQ ID NO: 2343821 - RNA, 19 nt, Artificial Sequence
  Description of Artificial Sequence: Synthetic oligonucleotide
acucagcgcggccguggga

SEQ ID NO: 2343822 - RNA, 19 nt, Artificial Sequence
  Description of Artificial Sequence: Synthetic oligonucleotide
cuuccgggcgccgggucug

SEQ ID NO: 2343823 - RNA, 19 nt, Artificial Sequence
  Description of Artificial Sequence: Synthetic oligonucleotide
caggggaacuaauguuucu

SEQ ID NO: 2343824 - RNA, 19 nt, Artificial Sequence
  Description of Artificial Sequence: Synthetic oligonucleotide
ggcuaaccuugucacuuaa

SEQ ID NO: 2343825 - RNA, 19 nt, Artificial Sequence
  Description of Artificial Sequence: Synthetic oligonucleotide
gugggagcuuccgggcgcc

SEQ ID NO: 2343826 - RNA, 19 nt, Artificial Sequence
  Description of Artificial Sequence: Synthetic oligonucleotide
gcuauacauucaggggaac

SEQ ID NO: 2343827 - RNA, 19 nt, Artificial Sequence
  Description of Artificial Sequence: Synthetic oligonucleotide
aggggugaacagagcuuca

SEQ ID NO: 2343828 - RNA, 19 nt, Artificial Sequence
  Description of Artificial Sequence: Synthetic oligonucleotide
aucugcuauuucaccucau

SEQ ID NO: 2343829 - RNA, 19 nt, Artificial Sequence
  Description of Artificial Sequence: Synthetic oligonucleotide
guggacucgguuccugcau

SEQ ID NO: 2343830 - RNA, 19 nt, Artificial Sequence
  Description of Artificial Sequence: Synthetic oligonucleotide
uuccugcaugcaguucaua

SEQ ID NO: 2343831 - RNA, 19 nt, Artificial Sequence
  Description of Artificial Sequence: Synthetic oligonucleotide
acgggugcaguggcugggu

SEQ ID NO: 2343832 - RNA, 19 nt, Artificial Sequence
  Description of Artificial Sequence: Synthetic oligonucleotide
gggagcuuccgggcgccgg

SEQ ID NO: 2343833 - RNA, 19 nt, Artificial Sequence
  Description of Artificial Sequence: Synthetic oligonucleotide
ccggacaccugaaccugug

SEQ ID NO: 2343834 - RNA, 19 nt, Artificial Sequence
  Description of Artificial Sequence: Synthetic oligonucleotide
ccagauggaugcaguggca

SEQ ID NO: 2343835 - RNA, 19 nt, Artificial Sequence
  Description of Artificial Sequence: Synthetic oligonucleotide
ccugaaccugugcaaagua

SEQ ID NO: 2343836 - RNA, 19 nt, Artificial Sequence
  Description of Artificial Sequence: Synthetic oligonucleotide
acccaacgagcuauacauu

SEQ ID NO: 2343837 - RNA, 19 nt, Artificial Sequence
  Description of Artificial Sequence: Synthetic oligonucleotide
cgaaagcucuugaacaacu

SEQ ID NO: 2343838 - RNA, 19 nt, Artificial Sequence
  Description of Artificial Sequence: Synthetic oligonucleotide
ggggcuaaccuugucacuu

SEQ ID NO: 2343839 - RNA, 19 nt, Artificial Sequence
  Description of Artificial Sequence: Synthetic oligonucleotide
ggaacgugaccuggucauc

SEQ ID NO: 2343840 - RNA, 19 nt, Artificial Sequence
  Description of Artificial Sequence: Synthetic oligonucleotide
ggggugaacagagcuucaa

SEQ ID NO: 2343841 - RNA, 19 nt, Artificial Sequence
  Description of Artificial Sequence: Synthetic oligonucleotide
gcuaaccuugucacuuaaa

SEQ ID NO: 2343842 - RNA, 19 nt, Artificial Sequence
  Description of Artificial Sequence: Synthetic oligonucleotide
gcggccgugggagcuuccg

SEQ ID NO: 2343843 - RNA, 19 nt, Artificial Sequence
  Description of Artificial Sequence: Synthetic oligonucleotide
cugcuuggugggcuguggu

SEQ ID NO: 2343844 - RNA, 19 nt, Artificial Sequence
  Description of Artificial Sequence: Synthetic oligonucleotide
gggcuaaccuugucacuua

SEQ ID NO: 2343845 - RNA, 19 nt, Artificial Sequence
  Description of Artificial Sequence: Synthetic oligonucleotide
gagcucuauccgagcucuc

SEQ ID NO: 2343846 - RNA, 19 nt, Artificial Sequence
  Description of Artificial Sequence: Synthetic oligonucleotide
gugcacaguccagcugcuc

SEQ ID NO: 2343847 - RNA, 19 nt, Artificial Sequence
  Description of Artificial Sequence: Synthetic oligonucleotide
gccguggaagucacucuca

SEQ ID NO: 2343848 - RNA, 19 nt, Artificial Sequence
  Description of Artificial Sequence: Synthetic oligonucleotide
gggguggacucgguuccug

SEQ ID NO: 2343849 - RNA, 19 nt, Artificial Sequence
  Description of Artificial Sequence: Synthetic oligonucleotide
cgggcgccgggucugagug

SEQ ID NO: 2343850 - RNA, 19 nt, Artificial Sequence
  Description of Artificial Sequence: Synthetic oligonucleotide
gccucgggcuugcugaagu

SEQ ID NO: 2343851 - RNA, 19 nt, Artificial Sequence
  Description of Artificial Sequence: Synthetic oligonucleotide
ccuccccggacaccugaac

SEQ ID NO: 2343852 - RNA, 19 nt, Artificial Sequence
  Description of Artificial Sequence: Synthetic oligonucleotide
uuccgggcgccgggucuga

SEQ ID NO: 2343853 - RNA, 19 nt, Artificial Sequence
  Description of Artificial Sequence: Synthetic oligonucleotide
ggcuggguucacagugcac

SEQ ID NO: 2343854 - RNA, 19 nt, Artificial Sequence
  Description of Artificial Sequence: Synthetic oligonucleotide
caguggcaucuucuuggcu

SEQ ID NO: 2343855 - RNA, 19 nt, Artificial Sequence
  Description of Artificial Sequence: Synthetic oligonucleotide
cacaguccagcugcucacu

SEQ ID NO: 2343856 - RNA, 19 nt, Artificial Sequence
  Description of Artificial Sequence: Synthetic oligonucleotide
cccgacuggaggggagggc

SEQ ID NO: 2343857 - RNA, 19 nt, Artificial Sequence
  Description of Artificial Sequence: Synthetic oligonucleotide
gcuuccgggcgccgggucu

SEQ ID NO: 2343858 - RNA, 19 nt, Artificial Sequence
  Description of Artificial Sequence: Synthetic oligonucleotide
gagcuuccgggcgccgggu

SEQ ID NO: 2343859 - RNA, 19 nt, Artificial Sequence
  Description of Artificial Sequence: Synthetic oligonucleotide
gggaggagucagaugccau

SEQ ID NO: 2343860 - RNA, 19 nt, Artificial Sequence
  Description of Artificial Sequence: Synthetic oligonucleotide
ccgacuggaggggagggcu

SEQ ID NO: 2343861 - RNA, 19 nt, Artificial Sequence
  Description of Artificial Sequence: Synthetic oligonucleotide
gcuggccacaucugcuauu

SEQ ID NO: 2343862 - RNA, 19 nt, Artificial Sequence
  Description of Artificial Sequence: Synthetic oligonucleotide
ggcgccgggucugagugau

SEQ ID NO: 2343863 - RNA, 19 nt, Artificial Sequence
  Description of Artificial Sequence: Synthetic oligonucleotide
gggcgccgggucugaguga

SEQ ID NO: 2343864 - RNA, 19 nt, Artificial Sequence
  Description of Artificial Sequence: Synthetic oligonucleotide
cacucucauggagcucuau

SEQ ID NO: 2343865 - RNA, 19 nt, Artificial Sequence
  Description of Artificial Sequence: Synthetic oligonucleotide
ccguggaagucacucucau

SEQ ID NO: 2343866 - RNA, 19 nt, Artificial Sequence
  Description of Artificial Sequence: Synthetic oligonucleotide
cagcgcggccgugggagcu

SEQ ID NO: 2343867 - RNA, 19 nt, Artificial Sequence
  Description of Artificial Sequence: Synthetic oligonucleotide
cccggacaccugaaccugu

SEQ ID NO: 2343868 - RNA, 19 nt, Artificial Sequence
  Description of Artificial Sequence: Synthetic oligonucleotide
gccuccccggacaccugaa

SEQ ID NO: 2343869 - RNA, 19 nt, Artificial Sequence
  Description of Artificial Sequence: Synthetic oligonucleotide
gccgggucugagugauuuu

SEQ ID NO: 2343870 - RNA, 19 nt, Artificial Sequence
  Description of Artificial Sequence: Synthetic oligonucleotide
gcgcggccgugggagcuuc

SEQ ID NO: 2343871 - RNA, 19 nt, Artificial Sequence
  Description of Artificial Sequence: Synthetic oligonucleotide
ccucgggcuugcugaaguu

SEQ ID NO: 2343872 - RNA, 19 nt, Artificial Sequence
  Description of Artificial Sequence: Synthetic oligonucleotide
cgcggccgugggagcuucc

SEQ ID NO: 2343873 - RNA, 19 nt, Artificial Sequence
  Description of Artificial Sequence: Synthetic oligonucleotide
cgggcuugcugaaguugau

SEQ ID NO: 2343874 - RNA, 19 nt, Artificial Sequence
  Description of Artificial Sequence: Synthetic oligonucleotide
cugcagccucgggcuugcu

SEQ ID NO: 2343875 - RNA, 19 nt, Artificial Sequence
  Description of Artificial Sequence: Synthetic oligonucleotide
gcgccgggucugagugauu

SEQ ID NO: 2343876 - RNA, 19 nt, Artificial Sequence
  Description of Artificial Sequence: Synthetic oligonucleotide
  modified_base (6)..(6): a, c, u, g, unknown or other
aaaacncccgcucauuguc

SEQ ID NO: 2343877 - RNA, 19 nt, Artificial Sequence
  Description of Artificial Sequence: Synthetic oligonucleotide
  modified_base (14)..(14): a, c, u, g, unknown or other
acagcuggaaaacncccgc

SEQ ID NO: 2343878 - RNA, 19 nt, Artificial Sequence
  Description of Artificial Sequence: Synthetic oligonucleotide
gaagucgaaggucaggagg

SEQ ID NO: 2343879 - RNA, 19 nt, Artificial Sequence
  Description of Artificial Sequence: Synthetic oligonucleotide
uccgaaaugaggauaaccu

SEQ ID NO: 2343880 - RNA, 19 nt, Artificial Sequence
  Description of Artificial Sequence: Synthetic oligonucleotide
auuguaguagcccucgcgg

SEQ ID NO: 2343881 - RNA, 19 nt, Artificial Sequence
  Description of Artificial Sequence: Synthetic oligonucleotide
uuuucguccacgauggucu

SEQ ID NO: 2343882 - RNA, 19 nt, Artificial Sequence
  Description of Artificial Sequence: Synthetic oligonucleotide
ucagguaguugcuuggccg

SEQ ID NO: 2343883 - RNA, 19 nt, Artificial Sequence
  Description of Artificial Sequence: Synthetic oligonucleotide
cauguauucauuguaguag

SEQ ID NO: 2343884 - RNA, 19 nt, Artificial Sequence
  Description of Artificial Sequence: Synthetic oligonucleotide
uauucauuguaguagcccu

SEQ ID NO: 2343885 - RNA, 19 nt, Artificial Sequence
  Description of Artificial Sequence: Synthetic oligonucleotide
ucuuaagcaauucccaauc

SEQ ID NO: 2343886 - RNA, 19 nt, Artificial Sequence
  Description of Artificial Sequence: Synthetic oligonucleotide
cagcaaaucacccaugccc

SEQ ID NO: 2343887 - RNA, 19 nt, Artificial Sequence
  Description of Artificial Sequence: Synthetic oligonucleotide
uugcauguauucauuguag

SEQ ID NO: 2343888 - RNA, 19 nt, Artificial Sequence
  Description of Artificial Sequence: Synthetic oligonucleotide
cuguuuucguccacgaugg

SEQ ID NO: 2343889 - RNA, 19 nt, Artificial Sequence
  Description of Artificial Sequence: Synthetic oligonucleotide
uuggcuacgaacugcagca

SEQ ID NO: 2343890 - RNA, 19 nt, Artificial Sequence
  Description of Artificial Sequence: Synthetic oligonucleotide
auaaccucgaagcagcccu

SEQ ID NO: 2343891 - RNA, 19 nt, Artificial Sequence
  Description of Artificial Sequence: Synthetic oligonucleotide
uucaauacaucuucagcac

SEQ ID NO: 2343892 - RNA, 19 nt, Artificial Sequence
  Description of Artificial Sequence: Synthetic oligonucleotide
ucucccacguagaauaggc

SEQ ID NO: 2343893 - RNA, 19 nt, Artificial Sequence
  Description of Artificial Sequence: Synthetic oligonucleotide
uagaauaggcgcucgaagu

SEQ ID NO: 2343894 - RNA, 19 nt, Artificial Sequence
  Description of Artificial Sequence: Synthetic oligonucleotide
uggucuucaauacaucuuc

SEQ ID NO: 2343895 - RNA, 19 nt, Artificial Sequence
  Description of Artificial Sequence: Synthetic oligonucleotide
cagguauucacugagcacc

SEQ ID NO: 2343896 - RNA, 19 nt, Artificial Sequence
  Description of Artificial Sequence: Synthetic oligonucleotide
aaaucacccaugcccggcg

SEQ ID NO: 2343897 - RNA, 19 nt, Artificial Sequence
  Description of Artificial Sequence: Synthetic oligonucleotide
gaugaggcggugcaugggg

SEQ ID NO: 2343898 - RNA, 19 nt, Artificial Sequence
  Description of Artificial Sequence: Synthetic oligonucleotide
auuugcaccgucucccacg

SEQ ID NO: 2343899 - RNA, 19 nt, Artificial Sequence
  Description of Artificial Sequence: Synthetic oligonucleotide
ugcagcaaaucacccaugc

SEQ ID NO: 2343900 - RNA, 19 nt, Artificial Sequence
  Description of Artificial Sequence: Synthetic oligonucleotide
auccgaaaugaggauaacc

SEQ ID NO: 2343901 - RNA, 19 nt, Artificial Sequence
  Description of Artificial Sequence: Synthetic oligonucleotide
uucauuguaguagcccucg

SEQ ID NO: 2343902 - RNA, 19 nt, Artificial Sequence
  Description of Artificial Sequence: Synthetic oligonucleotide
aggugauggucuucaauac

SEQ ID NO: 2343903 - RNA, 19 nt, Artificial Sequence
  Description of Artificial Sequence: Synthetic oligonucleotide
ucccacguagaauaggcgc

SEQ ID NO: 2343904 - RNA, 19 nt, Artificial Sequence
  Description of Artificial Sequence: Synthetic oligonucleotide
ucgucgaagucgaagguca

SEQ ID NO: 2343905 - RNA, 19 nt, Artificial Sequence
  Description of Artificial Sequence: Synthetic oligonucleotide
guagaauaggcgcucgaag

SEQ ID NO: 2343906 - RNA, 19 nt, Artificial Sequence
  Description of Artificial Sequence: Synthetic oligonucleotide
agaauaggcgcucgaagug

SEQ ID NO: 2343907 - RNA, 19 nt, Artificial Sequence
  Description of Artificial Sequence: Synthetic oligonucleotide
ugaggauaaccucgaagca

SEQ ID NO: 2343908 - RNA, 19 nt, Artificial Sequence
  Description of Artificial Sequence: Synthetic oligonucleotide
uaggccaacagcuggaaaa

SEQ ID NO: 2343909 - RNA, 19 nt, Artificial Sequence
  Description of Artificial Sequence: Synthetic oligonucleotide
  modified_base (4)..(4): a, c, u, g, unknown or other
aacncccgcucauugucag

SEQ ID NO: 2343910 - RNA, 19 nt, Artificial Sequence
  Description of Artificial Sequence: Synthetic oligonucleotide
ugcuugcacauguuggcgg

SEQ ID NO: 2343911 - RNA, 19 nt, Artificial Sequence
  Description of Artificial Sequence: Synthetic oligonucleotide
cauuguaguagcccucgcg

SEQ ID NO: 2343912 - RNA, 19 nt, Artificial Sequence
  Description of Artificial Sequence: Synthetic oligonucleotide
caggcucucagguaguugc

SEQ ID NO: 2343913 - RNA, 19 nt, Artificial Sequence
  Description of Artificial Sequence: Synthetic oligonucleotide
uauucacugagcaccuugu

SEQ ID NO: 2343914 - RNA, 19 nt, Artificial Sequence
  Description of Artificial Sequence: Synthetic oligonucleotide
augguacucguagacagcg

SEQ ID NO: 2343915 - RNA, 19 nt, Artificial Sequence
  Description of Artificial Sequence: Synthetic oligonucleotide
  modified_base (15)..(15): a, c, u, g, unknown or other
aacagcuggaaaacncccg

SEQ ID NO: 2343916 - RNA, 19 nt, Artificial Sequence
  Description of Artificial Sequence: Synthetic oligonucleotide
acgaacugcagcaaaucac

SEQ ID NO: 2343917 - RNA, 19 nt, Artificial Sequence
  Description of Artificial Sequence: Synthetic oligonucleotide
gguacucguagacagcgcg

SEQ ID NO: 2343918 - RNA, 19 nt, Artificial Sequence
  Description of Artificial Sequence: Synthetic oligonucleotide
accguaggccaacagcugg

SEQ ID NO: 2343919 - RNA, 19 nt, Artificial Sequence
  Description of Artificial Sequence: Synthetic oligonucleotide
guauucauuguaguagccc

SEQ ID NO: 2343920 - RNA, 19 nt, Artificial Sequence
  Description of Artificial Sequence: Synthetic oligonucleotide
gaagaugcggcggaauaag

SEQ ID NO: 2343921 - RNA, 19 nt, Artificial Sequence
  Description of Artificial Sequence: Synthetic oligonucleotide
cgaaaugaggauaaccucg

SEQ ID NO: 2343922 - RNA, 19 nt, Artificial Sequence
  Description of Artificial Sequence: Synthetic oligonucleotide
uccucacgucccuagacag

SEQ ID NO: 2343923 - RNA, 19 nt, Artificial Sequence
  Description of Artificial Sequence: Synthetic oligonucleotide
agacgcguugcauguauuc

SEQ ID NO: 2343924 - RNA, 19 nt, Artificial Sequence
  Description of Artificial Sequence: Synthetic oligonucleotide
aagugcacgccgucgcggg

SEQ ID NO: 2343925 - RNA, 19 nt, Artificial Sequence
  Description of Artificial Sequence: Synthetic oligonucleotide
guauucacugagcaccuug

SEQ ID NO: 2343926 - RNA, 19 nt, Artificial Sequence
  Description of Artificial Sequence: Synthetic oligonucleotide
ucauugucaguguauuauc

SEQ ID NO: 2343927 - RNA, 19 nt, Artificial Sequence
  Description of Artificial Sequence: Synthetic oligonucleotide
aagucgaaggucaggagga

SEQ ID NO: 2343928 - RNA, 19 nt, Artificial Sequence
  Description of Artificial Sequence: Synthetic oligonucleotide
cucgaagcagcccuguuug

SEQ ID NO: 2343929 - RNA, 19 nt, Artificial Sequence
  Description of Artificial Sequence: Synthetic oligonucleotide
gaauaggcgcucgaagugc

SEQ ID NO: 2343930 - RNA, 19 nt, Artificial Sequence
  Description of Artificial Sequence: Synthetic oligonucleotide
uacuugaagacgcguugca

SEQ ID NO: 2343931 - RNA, 19 nt, Artificial Sequence
  Description of Artificial Sequence: Synthetic oligonucleotide
uaagccgugguggccagcg

SEQ ID NO: 2343932 - RNA, 19 nt, Artificial Sequence
  Description of Artificial Sequence: Synthetic oligonucleotide
gaggaagcgaggugcgccg

SEQ ID NO: 2343933 - RNA, 19 nt, Artificial Sequence
  Description of Artificial Sequence: Synthetic oligonucleotide
auguuggcggggcagcgcg

SEQ ID NO: 2343934 - RNA, 19 nt, Artificial Sequence
  Description of Artificial Sequence: Synthetic oligonucleotide
ucgaagugcacgccgucgc

SEQ ID NO: 2343935 - RNA, 19 nt, Artificial Sequence
  Description of Artificial Sequence: Synthetic oligonucleotide
cagguaguugcuuggccgg

SEQ ID NO: 2343936 - RNA, 19 nt, Artificial Sequence
  Description of Artificial Sequence: Synthetic oligonucleotide
agaagucauuugcaccguc

SEQ ID NO: 2343937 - RNA, 19 nt, Artificial Sequence
  Description of Artificial Sequence: Synthetic oligonucleotide
cacgcagguauucacugag

SEQ ID NO: 2343938 - RNA, 19 nt, Artificial Sequence
  Description of Artificial Sequence: Synthetic oligonucleotide
agccgugguggccagcggc

SEQ ID NO: 2343939 - RNA, 19 nt, Artificial Sequence
  Description of Artificial Sequence: Synthetic oligonucleotide
gaaaugaggauaaccucga

SEQ ID NO: 2343940 - RNA, 19 nt, Artificial Sequence
  Description of Artificial Sequence: Synthetic oligonucleotide
cucucagguaguugcuugg

SEQ ID NO: 2343941 - RNA, 19 nt, Artificial Sequence
  Description of Artificial Sequence: Synthetic oligonucleotide
aggucucucggccguacac

SEQ ID NO: 2343942 - RNA, 19 nt, Artificial Sequence
  Description of Artificial Sequence: Synthetic oligonucleotide
gucgucgcuguuuucgucc

SEQ ID NO: 2343943 - RNA, 19 nt, Artificial Sequence
  Description of Artificial Sequence: Synthetic oligonucleotide
cucacgcagguauucacug

SEQ ID NO: 2343944 - RNA, 19 nt, Artificial Sequence
  Description of Artificial Sequence: Synthetic oligonucleotide
agccccaaggggcagaagu

SEQ ID NO: 2343945 - RNA, 19 nt, Artificial Sequence
  Description of Artificial Sequence: Synthetic oligonucleotide
uuugcaccgucucccacgu

SEQ ID NO: 2343946 - RNA, 19 nt, Artificial Sequence
  Description of Artificial Sequence: Synthetic oligonucleotide
uguaguagcccucgcggua

SEQ ID NO: 2343947 - RNA, 19 nt, Artificial Sequence
  Description of Artificial Sequence: Synthetic oligonucleotide
uuucccagggcaccacgug

SEQ ID NO: 2343948 - RNA, 19 nt, Artificial Sequence
  Description of Artificial Sequence: Synthetic oligonucleotide
gaauaagccgugguggcca

SEQ ID NO: 2343949 - RNA, 19 nt, Artificial Sequence
  Description of Artificial Sequence: Synthetic oligonucleotide
aauucccaauccugcccug

SEQ ID NO: 2343950 - RNA, 19 nt, Artificial Sequence
  Description of Artificial Sequence: Synthetic oligonucleotide
agcgucagcaguccucgag

SEQ ID NO: 2343951 - RNA, 19 nt, Artificial Sequence
  Description of Artificial Sequence: Synthetic oligonucleotide
guaguugcuuggccgggcg

SEQ ID NO: 2343952 - RNA, 19 nt, Artificial Sequence
  Description of Artificial Sequence: Synthetic oligonucleotide
  modified_base (8)..(8): a, c, u, g, unknown or other
ggaaaacncccgcucauug

SEQ ID NO: 2343953 - RNA, 19 nt, Artificial Sequence
  Description of Artificial Sequence: Synthetic oligonucleotide
gauaaccucgaagcagccc

SEQ ID NO: 2343954 - RNA, 19 nt, Artificial Sequence
  Description of Artificial Sequence: Synthetic oligonucleotide
ucagcaguccucgagcguc

SEQ ID NO: 2343955 - RNA, 19 nt, Artificial Sequence
  Description of Artificial Sequence: Synthetic oligonucleotide
ucguagacagcgcgcaggu

SEQ ID NO: 2343956 - RNA, 19 nt, Artificial Sequence
  Description of Artificial Sequence: Synthetic oligonucleotide
auucauuguaguagcccuc

SEQ ID NO: 2343957 - RNA, 19 nt, Artificial Sequence
  Description of Artificial Sequence: Synthetic oligonucleotide
  modified_base (7)..(7): a, c, u, g, unknown or other
gaaaacncccgcucauugu

SEQ ID NO: 2343958 - RNA, 19 nt, Artificial Sequence
  Description of Artificial Sequence: Synthetic oligonucleotide
ugaagaugcggcggaauaa

SEQ ID NO: 2343959 - RNA, 19 nt, Artificial Sequence
  Description of Artificial Sequence: Synthetic oligonucleotide
ucucgucgaagucgaaggu

SEQ ID NO: 2343960 - RNA, 19 nt, Artificial Sequence
  Description of Artificial Sequence: Synthetic oligonucleotide
aagcgaggugcgccgggcg

SEQ ID NO: 2343961 - RNA, 19 nt, Artificial Sequence
  Description of Artificial Sequence: Synthetic oligonucleotide
cucagguaguugcuuggcc

SEQ ID NO: 2343962 - RNA, 19 nt, Artificial Sequence
  Description of Artificial Sequence: Synthetic oligonucleotide
uaggcgcucgaagugcacg

SEQ ID NO: 2343963 - RNA, 19 nt, Artificial Sequence
  Description of Artificial Sequence: Synthetic oligonucleotide
gaagugcacgccgucgcgg

SEQ ID NO: 2343964 - RNA, 19 nt, Artificial Sequence
  Description of Artificial Sequence: Synthetic oligonucleotide
agcgaggugcgccgggcgc

SEQ ID NO: 2343965 - RNA, 19 nt, Artificial Sequence
  Description of Artificial Sequence: Synthetic oligonucleotide
aauaggcgcucgaagugca

SEQ ID NO: 2343966 - RNA, 19 nt, Artificial Sequence
  Description of Artificial Sequence: Synthetic oligonucleotide
gaugguacucguagacagc

SEQ ID NO: 2343967 - RNA, 19 nt, Artificial Sequence
  Description of Artificial Sequence: Synthetic oligonucleotide
uacucguagacagcgcgca

SEQ ID NO: 2343968 - RNA, 19 nt, Artificial Sequence
  Description of Artificial Sequence: Synthetic oligonucleotide
auccucacgucccuagaca

SEQ ID NO: 2343969 - RNA, 19 nt, Artificial Sequence
  Description of Artificial Sequence: Synthetic oligonucleotide
cucccacguagaauaggcg

SEQ ID NO: 2343970 - RNA, 19 nt, Artificial Sequence
  Description of Artificial Sequence: Synthetic oligonucleotide
gcggaauaagccguggugg

SEQ ID NO: 2343971 - RNA, 19 nt, Artificial Sequence
  Description of Artificial Sequence: Synthetic oligonucleotide
cgaacugcagcaaaucacc

SEQ ID NO: 2343972 - RNA, 19 nt, Artificial Sequence
  Description of Artificial Sequence: Synthetic oligonucleotide
cucguagacagcgcgcagg

SEQ ID NO: 2343973 - RNA, 19 nt, Artificial Sequence
  Description of Artificial Sequence: Synthetic oligonucleotide
gaacugcagcaaaucaccc

SEQ ID NO: 2343974 - RNA, 19 nt, Artificial Sequence
  Description of Artificial Sequence: Synthetic oligonucleotide
guagccgcgccuugggaag

SEQ ID NO: 2343975 - RNA, 19 nt, Artificial Sequence
  Description of Artificial Sequence: Synthetic oligonucleotide
agucgucgcuguuuucguc

SEQ ID NO: 2343976 - RNA, 19 nt, Artificial Sequence
  Description of Artificial Sequence: Synthetic oligonucleotide
gucucucggccguacaccc

SEQ ID NO: 2343977 - RNA, 19 nt, Artificial Sequence
  Description of Artificial Sequence: Synthetic oligonucleotide
cagggcacucuccacuccg

SEQ ID NO: 2343978 - RNA, 19 nt, Artificial Sequence
  Description of Artificial Sequence: Synthetic oligonucleotide
gucgcuguuuucguccacg

SEQ ID NO: 2343979 - RNA, 19 nt, Artificial Sequence
  Description of Artificial Sequence: Synthetic oligonucleotide
uccgaagguguuggcaucc

SEQ ID NO: 2343980 - RNA, 19 nt, Artificial Sequence
  Description of Artificial Sequence: Synthetic oligonucleotide
ucucagguaguugcuuggc

SEQ ID NO: 2343981 - RNA, 19 nt, Artificial Sequence
  Description of Artificial Sequence: Synthetic oligonucleotide
ucggcggccguuucccagg

SEQ ID NO: 2343982 - RNA, 19 nt, Artificial Sequence
  Description of Artificial Sequence: Synthetic oligonucleotide
guaguagcccucgcgguag

SEQ ID NO: 2343983 - RNA, 19 nt, Artificial Sequence
  Description of Artificial Sequence: Synthetic oligonucleotide
caauacaucuucagcaccu

SEQ ID NO: 2343984 - RNA, 19 nt, Artificial Sequence
  Description of Artificial Sequence: Synthetic oligonucleotide
ucacgcagguauucacuga

SEQ ID NO: 2343985 - RNA, 19 nt, Artificial Sequence
  Description of Artificial Sequence: Synthetic oligonucleotide
  modified_base (5)..(5): a, c, u, g, unknown or other
aaacncccgcucauuguca

SEQ ID NO: 2343986 - RNA, 19 nt, Artificial Sequence
  Description of Artificial Sequence: Synthetic oligonucleotide
guuuucguccacgaugguc

SEQ ID NO: 2343987 - RNA, 19 nt, Artificial Sequence
  Description of Artificial Sequence: Synthetic oligonucleotide
cauccucacgucccuagac

SEQ ID NO: 2343988 - RNA, 19 nt, Artificial Sequence
  Description of Artificial Sequence: Synthetic oligonucleotide
ugguacucguagacagcgc

SEQ ID NO: 2343989 - RNA, 19 nt, Artificial Sequence
  Description of Artificial Sequence: Synthetic oligonucleotide
gaagguguuggcauccgaa

SEQ ID NO: 2343990 - RNA, 19 nt, Artificial Sequence
  Description of Artificial Sequence: Synthetic oligonucleotide
accucggcggccguuuccc

SEQ ID NO: 2343991 - RNA, 19 nt, Artificial Sequence
  Description of Artificial Sequence: Synthetic oligonucleotide
ucuccccgaguuccccugg

SEQ ID NO: 2343992 - RNA, 19 nt, Artificial Sequence
  Description of Artificial Sequence: Synthetic oligonucleotide
ggcaccguaggccaacagc

SEQ ID NO: 2343993 - RNA, 19 nt, Artificial Sequence
  Description of Artificial Sequence: Synthetic oligonucleotide
ucccuagacaggcaccgua

SEQ ID NO: 2343994 - RNA, 19 nt, Artificial Sequence
  Description of Artificial Sequence: Synthetic oligonucleotide
uggcacgcaggcucucagg

SEQ ID NO: 2343995 - RNA, 19 nt, Artificial Sequence
  Description of Artificial Sequence: Synthetic oligonucleotide
ggcggaauaagccguggug

SEQ ID NO: 2343996 - RNA, 19 nt, Artificial Sequence
  Description of Artificial Sequence: Synthetic oligonucleotide
cacgucccuagacaggcac

SEQ ID NO: 2343997 - RNA, 19 nt, Artificial Sequence
  Description of Artificial Sequence: Synthetic oligonucleotide
acgcguugcauguauucau

SEQ ID NO: 2343998 - RNA, 19 nt, Artificial Sequence
  Description of Artificial Sequence: Synthetic oligonucleotide
agcgcgagcagcugugcgu

SEQ ID NO: 2343999 - RNA, 19 nt, Artificial Sequence
  Description of Artificial Sequence: Synthetic oligonucleotide
caguccucgagcgucgggc

SEQ ID NO: 2344000 - RNA, 19 nt, Artificial Sequence
  Description of Artificial Sequence: Synthetic oligonucleotide
uaguugcuuggccgggcgc

SEQ ID NO: 2344001 - RNA, 19 nt, Artificial Sequence
  Description of Artificial Sequence: Synthetic oligonucleotide
gacgcguugcauguauuca

SEQ ID NO: 2344002 - RNA, 19 nt, Artificial Sequence
  Description of Artificial Sequence: Synthetic oligonucleotide
uagacagcgcgcaggucuc

SEQ ID NO: 2344003 - RNA, 19 nt, Artificial Sequence
  Description of Artificial Sequence: Synthetic oligonucleotide
aucgagucgucgcuguuuu

SEQ ID NO: 2344004 - RNA, 19 nt, Artificial Sequence
  Description of Artificial Sequence: Synthetic oligonucleotide
ucgcuguuuucguccacga

SEQ ID NO: 2344005 - RNA, 19 nt, Artificial Sequence
  Description of Artificial Sequence: Synthetic oligonucleotide
cucucggccguacacccug

SEQ ID NO: 2344006 - RNA, 19 nt, Artificial Sequence
  Description of Artificial Sequence: Synthetic oligonucleotide
aagcagcccuguuuggcua

SEQ ID NO: 2344007 - RNA, 19 nt, Artificial Sequence
  Description of Artificial Sequence: Synthetic oligonucleotide
ugcggcggaauaagccgug

SEQ ID NO: 2344008 - RNA, 19 nt, Artificial Sequence
  Description of Artificial Sequence: Synthetic oligonucleotide
  modified_base (2)..(2): a, c, u, g, unknown or other
cncccgcucauugucagug

SEQ ID NO: 2344009 - RNA, 19 nt, Artificial Sequence
  Description of Artificial Sequence: Synthetic oligonucleotide
caccuguugcagguguugg

SEQ ID NO: 2344010 - RNA, 19 nt, Artificial Sequence
  Description of Artificial Sequence: Synthetic oligonucleotide
ucguccacgauggucucgu

SEQ ID NO: 2344011 - RNA, 19 nt, Artificial Sequence
  Description of Artificial Sequence: Synthetic oligonucleotide
ggggaugguacucguagac

SEQ ID NO: 2344012 - RNA, 19 nt, Artificial Sequence
  Description of Artificial Sequence: Synthetic oligonucleotide
acgaucgagucgucgcugu

SEQ ID NO: 2344013 - RNA, 19 nt, Artificial Sequence
  Description of Artificial Sequence: Synthetic oligonucleotide
gucgaaggucaggaggaag

SEQ ID NO: 2344014 - RNA, 19 nt, Artificial Sequence
  Description of Artificial Sequence: Synthetic oligonucleotide
ucgucgcuguuuucgucca

SEQ ID NO: 2344015 - RNA, 19 nt, Artificial Sequence
  Description of Artificial Sequence: Synthetic oligonucleotide
cacguagaauaggcgcucg

SEQ ID NO: 2344016 - RNA, 19 nt, Artificial Sequence
  Description of Artificial Sequence: Synthetic oligonucleotide
cucgucgaagucgaagguc

SEQ ID NO: 2344017 - RNA, 19 nt, Artificial Sequence
  Description of Artificial Sequence: Synthetic oligonucleotide
uccccgcuugccagcagcc

SEQ ID NO: 2344018 - RNA, 19 nt, Artificial Sequence
  Description of Artificial Sequence: Synthetic oligonucleotide
acgucccuagacaggcacc

SEQ ID NO: 2344019 - RNA, 19 nt, Artificial Sequence
  Description of Artificial Sequence: Synthetic oligonucleotide
ggucuuaagcaauucccaa

SEQ ID NO: 2344020 - RNA, 19 nt, Artificial Sequence
  Description of Artificial Sequence: Synthetic oligonucleotide
guuggcgcaccucggcggc

SEQ ID NO: 2344021 - RNA, 19 nt, Artificial Sequence
  Description of Artificial Sequence: Synthetic oligonucleotide
gcaaaucacccaugcccgg

SEQ ID NO: 2344022 - RNA, 19 nt, Artificial Sequence
  Description of Artificial Sequence: Synthetic oligonucleotide
acuugaagacgcguugcau

SEQ ID NO: 2344023 - RNA, 19 nt, Artificial Sequence
  Description of Artificial Sequence: Synthetic oligonucleotide
guacucguagacagcgcgc

SEQ ID NO: 2344024 - RNA, 19 nt, Artificial Sequence
  Description of Artificial Sequence: Synthetic oligonucleotide
acguggagcgcggaaggag

SEQ ID NO: 2344025 - RNA, 19 nt, Artificial Sequence
  Description of Artificial Sequence: Synthetic oligonucleotide
  modified_base (11)..(11): a, c, u, g, unknown or other
gcuggaaaacncccgcuca

SEQ ID NO: 2344026 - RNA, 19 nt, Artificial Sequence
  Description of Artificial Sequence: Synthetic oligonucleotide
cacauguuggcggggcagc

SEQ ID NO: 2344027 - RNA, 19 nt, Artificial Sequence
  Description of Artificial Sequence: Synthetic oligonucleotide
cucauugucaguguauuau

SEQ ID NO: 2344028 - RNA, 19 nt, Artificial Sequence
  Description of Artificial Sequence: Synthetic oligonucleotide
acguagaauaggcgcucga

SEQ ID NO: 2344029 - RNA, 19 nt, Artificial Sequence
  Description of Artificial Sequence: Synthetic oligonucleotide
gaagacgcguugcauguau

SEQ ID NO: 2344030 - RNA, 19 nt, Artificial Sequence
  Description of Artificial Sequence: Synthetic oligonucleotide
uccugcccugucuccgccg

SEQ ID NO: 2344031 - RNA, 19 nt, Artificial Sequence
  Description of Artificial Sequence: Synthetic oligonucleotide
ccgaaaugaggauaaccuc

SEQ ID NO: 2344032 - RNA, 19 nt, Artificial Sequence
  Description of Artificial Sequence: Synthetic oligonucleotide
uguuuucguccacgauggu

SEQ ID NO: 2344033 - RNA, 19 nt, Artificial Sequence
  Description of Artificial Sequence: Synthetic oligonucleotide
cagcaguccucgagcgucg

SEQ ID NO: 2344034 - RNA, 19 nt, Artificial Sequence
  Description of Artificial Sequence: Synthetic oligonucleotide
agguaguugcuuggccggg

SEQ ID NO: 2344035 - RNA, 19 nt, Artificial Sequence
  Description of Artificial Sequence: Synthetic oligonucleotide
cucgcgguagguggcacgc

SEQ ID NO: 2344036 - RNA, 19 nt, Artificial Sequence
  Description of Artificial Sequence: Synthetic oligonucleotide
gaguuccccuggcagguga

SEQ ID NO: 2344037 - RNA, 19 nt, Artificial Sequence
  Description of Artificial Sequence: Synthetic oligonucleotide
ggcgcagcgcgcacgaucg

SEQ ID NO: 2344038 - RNA, 19 nt, Artificial Sequence
  Description of Artificial Sequence: Synthetic oligonucleotide
gaagcgaggugcgccgggc

SEQ ID NO: 2344039 - RNA, 19 nt, Artificial Sequence
  Description of Artificial Sequence: Synthetic oligonucleotide
  modified_base (9)..(9): a, c, u, g, unknown or other
uggaaaacncccgcucauu

SEQ ID NO: 2344040 - RNA, 19 nt, Artificial Sequence
  Description of Artificial Sequence: Synthetic oligonucleotide
uggcauccgaaaugaggau

SEQ ID NO: 2344041 - RNA, 19 nt, Artificial Sequence
  Description of Artificial Sequence: Synthetic oligonucleotide
gcguugcauguauucauug

SEQ ID NO: 2344042 - RNA, 19 nt, Artificial Sequence
  Description of Artificial Sequence: Synthetic oligonucleotide
ggaauaagccgugguggcc

SEQ ID NO: 2344043 - RNA, 19 nt, Artificial Sequence
  Description of Artificial Sequence: Synthetic oligonucleotide
caccguaggccaacagcug

SEQ ID NO: 2344044 - RNA, 19 nt, Artificial Sequence
  Description of Artificial Sequence: Synthetic oligonucleotide
cugaagaugcggcggaaua

SEQ ID NO: 2344045 - RNA, 19 nt, Artificial Sequence
  Description of Artificial Sequence: Synthetic oligonucleotide
aaccucgaagcagcccugu

SEQ ID NO: 2344046 - RNA, 19 nt, Artificial Sequence
  Description of Artificial Sequence: Synthetic oligonucleotide
guggcacgcaggcucucag

SEQ ID NO: 2344047 - RNA, 19 nt, Artificial Sequence
  Description of Artificial Sequence: Synthetic oligonucleotide
ucacgucccuagacaggca

SEQ ID NO: 2344048 - RNA, 19 nt, Artificial Sequence
  Description of Artificial Sequence: Synthetic oligonucleotide
uuucguccacgauggucuc

SEQ ID NO: 2344049 - RNA, 19 nt, Artificial Sequence
  Description of Artificial Sequence: Synthetic oligonucleotide
cucuccacuccgaaggugu

SEQ ID NO: 2344050 - RNA, 19 nt, Artificial Sequence
  Description of Artificial Sequence: Synthetic oligonucleotide
ucucucggccguacacccu

SEQ ID NO: 2344051 - RNA, 19 nt, Artificial Sequence
  Description of Artificial Sequence: Synthetic oligonucleotide
ggagcgcggaaggagcugg

SEQ ID NO: 2344052 - RNA, 19 nt, Artificial Sequence
  Description of Artificial Sequence: Synthetic oligonucleotide
ggugcaugggguagccgcg

SEQ ID NO: 2344053 - RNA, 19 nt, Artificial Sequence
  Description of Artificial Sequence: Synthetic oligonucleotide
cugcagcaaaucacccaug

SEQ ID NO: 2344054 - RNA, 19 nt, Artificial Sequence
  Description of Artificial Sequence: Synthetic oligonucleotide
gucgcgggcccgcucacgc

SEQ ID NO: 2344055 - RNA, 19 nt, Artificial Sequence
  Description of Artificial Sequence: Synthetic oligonucleotide
cuccgaagguguuggcauc

SEQ ID NO: 2344056 - RNA, 19 nt, Artificial Sequence
  Description of Artificial Sequence: Synthetic oligonucleotide
gcgucagcaguccucgagc

SEQ ID NO: 2344057 - RNA, 19 nt, Artificial Sequence
  Description of Artificial Sequence: Synthetic oligonucleotide
ucggccguacacccugcuc

SEQ ID NO: 2344058 - RNA, 19 nt, Artificial Sequence
  Description of Artificial Sequence: Synthetic oligonucleotide
cccuagacaggcaccguag

SEQ ID NO: 2344059 - RNA, 19 nt, Artificial Sequence
  Description of Artificial Sequence: Synthetic oligonucleotide
caauucccaauccugcccu

SEQ ID NO: 2344060 - RNA, 19 nt, Artificial Sequence
  Description of Artificial Sequence: Synthetic oligonucleotide
cauguuggcggggcagcgc

SEQ ID NO: 2344061 - RNA, 19 nt, Artificial Sequence
  Description of Artificial Sequence: Synthetic oligonucleotide
ccguacacccugcucaccc

SEQ ID NO: 2344062 - RNA, 19 nt, Artificial Sequence
  Description of Artificial Sequence: Synthetic oligonucleotide
auucccaauccugcccugu

SEQ ID NO: 2344063 - RNA, 19 nt, Artificial Sequence
  Description of Artificial Sequence: Synthetic oligonucleotide
ucucggccguacacccugc

SEQ ID NO: 2344064 - RNA, 19 nt, Artificial Sequence
  Description of Artificial Sequence: Synthetic oligonucleotide
cgagucgucgcuguuuucg

SEQ ID NO: 2344065 - RNA, 19 nt, Artificial Sequence
  Description of Artificial Sequence: Synthetic oligonucleotide
cucuccccgaguuccccug

SEQ ID NO: 2344066 - RNA, 19 nt, Artificial Sequence
  Description of Artificial Sequence: Synthetic oligonucleotide
gcccuguuuggcuacgaac

SEQ ID NO: 2344067 - RNA, 19 nt, Artificial Sequence
  Description of Artificial Sequence: Synthetic oligonucleotide
gggaaggccacguccccgc

SEQ ID NO: 2344068 - RNA, 19 nt, Artificial Sequence
  Description of Artificial Sequence: Synthetic oligonucleotide
uccccuggcaggugauggu

SEQ ID NO: 2344069 - RNA, 19 nt, Artificial Sequence
  Description of Artificial Sequence: Synthetic oligonucleotide
ggcgcagccauccucacgu

SEQ ID NO: 2344070 - RNA, 19 nt, Artificial Sequence
  Description of Artificial Sequence: Synthetic oligonucleotide
cccgaguuccccuggcagg

SEQ ID NO: 2344071 - RNA, 19 nt, Artificial Sequence
  Description of Artificial Sequence: Synthetic oligonucleotide
guuggcggggcagcgcgag

SEQ ID NO: 2344072 - RNA, 19 nt, Artificial Sequence
  Description of Artificial Sequence: Synthetic oligonucleotide
uguuggcggggcagcgcga

SEQ ID NO: 2344073 - RNA, 19 nt, Artificial Sequence
  Description of Artificial Sequence: Synthetic oligonucleotide
ugcacgccgucgcgggccc

SEQ ID NO: 2344074 - RNA, 19 nt, Artificial Sequence
  Description of Artificial Sequence: Synthetic oligonucleotide
ggguugcugaagaugcggc

SEQ ID NO: 2344075 - RNA, 19 nt, Artificial Sequence
  Description of Artificial Sequence: Synthetic oligonucleotide
aggaagcgaggugcgccgg

SEQ ID NO: 2344076 - RNA, 19 nt, Artificial Sequence
  Description of Artificial Sequence: Synthetic oligonucleotide
ccuguuuggcuacgaacug

SEQ ID NO: 2344077 - RNA, 19 nt, Artificial Sequence
  Description of Artificial Sequence: Synthetic oligonucleotide
cacgaucgagucgucgcug

SEQ ID NO: 2344078 - RNA, 19 nt, Artificial Sequence
  Description of Artificial Sequence: Synthetic oligonucleotide
gagcgucgggcccggccgg

SEQ ID NO: 2344079 - RNA, 19 nt, Artificial Sequence
  Description of Artificial Sequence: Synthetic oligonucleotide
aggcaccguaggccaacag

SEQ ID NO: 2344080 - RNA, 19 nt, Artificial Sequence
  Description of Artificial Sequence: Synthetic oligonucleotide
ggucucucggccguacacc

SEQ ID NO: 2344081 - RNA, 19 nt, Artificial Sequence
  Description of Artificial Sequence: Synthetic oligonucleotide
gguagccgcgccuugggaa

SEQ ID NO: 2344082 - RNA, 19 nt, Artificial Sequence
  Description of Artificial Sequence: Synthetic oligonucleotide
cacgcagggcacucuccac

SEQ ID NO: 2344083 - RNA, 19 nt, Artificial Sequence
  Description of Artificial Sequence: Synthetic oligonucleotide
  modified_base (10)..(10): a, c, u, g, unknown or other
cuggaaaacncccgcucau

SEQ ID NO: 2344084 - RNA, 19 nt, Artificial Sequence
  Description of Artificial Sequence: Synthetic oligonucleotide
uagccgcgccuugggaagg

SEQ ID NO: 2344085 - RNA, 19 nt, Artificial Sequence
  Description of Artificial Sequence: Synthetic oligonucleotide
cgcacgaucgagucgucgc

SEQ ID NO: 2344086 - RNA, 19 nt, Artificial Sequence
  Description of Artificial Sequence: Synthetic oligonucleotide
gcgcucgaagugcacgccg

SEQ ID NO: 2344087 - RNA, 19 nt, Artificial Sequence
  Description of Artificial Sequence: Synthetic oligonucleotide
guugcuuggccgggcgcag

SEQ ID NO: 2344088 - RNA, 19 nt, Artificial Sequence
  Description of Artificial Sequence: Synthetic oligonucleotide
  modified_base (3)..(3): a, c, u, g, unknown or other
acncccgcucauugucagu

SEQ ID NO: 2344089 - RNA, 19 nt, Artificial Sequence
  Description of Artificial Sequence: Synthetic oligonucleotide
cauccgaaaugaggauaac

SEQ ID NO: 2344090 - RNA, 19 nt, Artificial Sequence
  Description of Artificial Sequence: Synthetic oligonucleotide
ccucacgucccuagacagg

SEQ ID NO: 2344091 - RNA, 19 nt, Artificial Sequence
  Description of Artificial Sequence: Synthetic oligonucleotide
gcauccgaaaugaggauaa

SEQ ID NO: 2344092 - RNA, 19 nt, Artificial Sequence
  Description of Artificial Sequence: Synthetic oligonucleotide
agcccuguuuggcuacgaa

SEQ ID NO: 2344093 - RNA, 19 nt, Artificial Sequence
  Description of Artificial Sequence: Synthetic oligonucleotide
augcggcggaauaagccgu

SEQ ID NO: 2344094 - RNA, 19 nt, Artificial Sequence
  Description of Artificial Sequence: Synthetic oligonucleotide
gggguagccgcgccuuggg

SEQ ID NO: 2344095 - RNA, 19 nt, Artificial Sequence
  Description of Artificial Sequence: Synthetic oligonucleotide
cgucagcaguccucgagcg

SEQ ID NO: 2344096 - RNA, 19 nt, Artificial Sequence
  Description of Artificial Sequence: Synthetic oligonucleotide
cguggagcgcggaaggagc

SEQ ID NO: 2344097 - RNA, 19 nt, Artificial Sequence
  Description of Artificial Sequence: Synthetic oligonucleotide
augggguagccgcgccuug

SEQ ID NO: 2344098 - RNA, 19 nt, Artificial Sequence
  Description of Artificial Sequence: Synthetic oligonucleotide
ugaagacgcguugcaugua

SEQ ID NO: 2344099 - RNA, 19 nt, Artificial Sequence
  Description of Artificial Sequence: Synthetic oligonucleotide
gagucgucgcuguuuucgu

SEQ ID NO: 2344100 - RNA, 19 nt, Artificial Sequence
  Description of Artificial Sequence: Synthetic oligonucleotide
aagacgcguugcauguauu

SEQ ID NO: 2344101 - RNA, 19 nt, Artificial Sequence
  Description of Artificial Sequence: Synthetic oligonucleotide
agcaguccucgagcgucgg

SEQ ID NO: 2344102 - RNA, 19 nt, Artificial Sequence
  Description of Artificial Sequence: Synthetic oligonucleotide
cccuguuuggcuacgaacu

SEQ ID NO: 2344103 - RNA, 19 nt, Artificial Sequence
  Description of Artificial Sequence: Synthetic oligonucleotide
ugagcaccuugugcuugca

SEQ ID NO: 2344104 - RNA, 19 nt, Artificial Sequence
  Description of Artificial Sequence: Synthetic oligonucleotide
ggauaaccucgaagcagcc

SEQ ID NO: 2344105 - RNA, 19 nt, Artificial Sequence
  Description of Artificial Sequence: Synthetic oligonucleotide
uuggcggggcagcgcgagc

SEQ ID NO: 2344106 - RNA, 19 nt, Artificial Sequence
  Description of Artificial Sequence: Synthetic oligonucleotide
gugcguguggaagggccgc

SEQ ID NO: 2344107 - RNA, 19 nt, Artificial Sequence
  Description of Artificial Sequence: Synthetic oligonucleotide
gagcgcggaaggagcuggg

SEQ ID NO: 2344108 - RNA, 19 nt, Artificial Sequence
  Description of Artificial Sequence: Synthetic oligonucleotide
cccgcuugccagcagcccc

SEQ ID NO: 2344109 - RNA, 19 nt, Artificial Sequence
  Description of Artificial Sequence: Synthetic oligonucleotide
ccgucucccacguagaaua

SEQ ID NO: 2344110 - RNA, 19 nt, Artificial Sequence
  Description of Artificial Sequence: Synthetic oligonucleotide
gcggccguuucccagggca

SEQ ID NO: 2344111 - RNA, 19 nt, Artificial Sequence
  Description of Artificial Sequence: Synthetic oligonucleotide
caccucggcggccguuucc

SEQ ID NO: 2344112 - RNA, 19 nt, Artificial Sequence
  Description of Artificial Sequence: Synthetic oligonucleotide
augaggcggugcauggggu

SEQ ID NO: 2344113 - RNA, 19 nt, Artificial Sequence
  Description of Artificial Sequence: Synthetic oligonucleotide
gggaugguacucguagaca

SEQ ID NO: 2344114 - RNA, 19 nt, Artificial Sequence
  Description of Artificial Sequence: Synthetic oligonucleotide
ucgagucgucgcuguuuuc

SEQ ID NO: 2344115 - RNA, 19 nt, Artificial Sequence
  Description of Artificial Sequence: Synthetic oligonucleotide
agucgaaggucaggaggaa

SEQ ID NO: 2344116 - RNA, 19 nt, Artificial Sequence
  Description of Artificial Sequence: Synthetic oligonucleotide
cgucccuagacaggcaccg

SEQ ID NO: 2344117 - RNA, 19 nt, Artificial Sequence
  Description of Artificial Sequence: Synthetic oligonucleotide
uggcuacgaacugcagcaa

SEQ ID NO: 2344118 - RNA, 19 nt, Artificial Sequence
  Description of Artificial Sequence: Synthetic oligonucleotide
gugcaugggguagccgcgc

SEQ ID NO: 2344119 - RNA, 19 nt, Artificial Sequence
  Description of Artificial Sequence: Synthetic oligonucleotide
gcaccguaggccaacagcu

SEQ ID NO: 2344120 - RNA, 19 nt, Artificial Sequence
  Description of Artificial Sequence: Synthetic oligonucleotide
gucgggcccggccggguug

SEQ ID NO: 2344121 - RNA, 19 nt, Artificial Sequence
  Description of Artificial Sequence: Synthetic oligonucleotide
ggccggguugcugaagaug

SEQ ID NO: 2344122 - RNA, 19 nt, Artificial Sequence
  Description of Artificial Sequence: Synthetic oligonucleotide
cgcagguauucacugagca

SEQ ID NO: 2344123 - RNA, 19 nt, Artificial Sequence
  Description of Artificial Sequence: Synthetic oligonucleotide
gggcgcagccauccucacg

SEQ ID NO: 2344124 - RNA, 19 nt, Artificial Sequence
  Description of Artificial Sequence: Synthetic oligonucleotide
gcaguccucgagcgucggg

SEQ ID NO: 2344125 - RNA, 19 nt, Artificial Sequence
  Description of Artificial Sequence: Synthetic oligonucleotide
gaucgagucgucgcuguuu

SEQ ID NO: 2344126 - RNA, 19 nt, Artificial Sequence
  Description of Artificial Sequence: Synthetic oligonucleotide
ccccgaguuccccuggcag

SEQ ID NO: 2344127 - RNA, 19 nt, Artificial Sequence
  Description of Artificial Sequence: Synthetic oligonucleotide
ggccguacacccugcucac

SEQ ID NO: 2344128 - RNA, 19 nt, Artificial Sequence
  Description of Artificial Sequence: Synthetic oligonucleotide
gcacgcagggcacucucca

SEQ ID NO: 2344129 - RNA, 19 nt, Artificial Sequence
  Description of Artificial Sequence: Synthetic oligonucleotide
ggcacgcaggcucucaggu

SEQ ID NO: 2344130 - RNA, 19 nt, Artificial Sequence
  Description of Artificial Sequence: Synthetic oligonucleotide
gcgcgcaggucucucggcc

SEQ ID NO: 2344131 - RNA, 19 nt, Artificial Sequence
  Description of Artificial Sequence: Synthetic oligonucleotide
caaggggcagaagucauuu

SEQ ID NO: 2344132 - RNA, 19 nt, Artificial Sequence
  Description of Artificial Sequence: Synthetic oligonucleotide
ucgcgggcccgcucacgca

SEQ ID NO: 2344133 - RNA, 19 nt, Artificial Sequence
  Description of Artificial Sequence: Synthetic oligonucleotide
cgaagugcacgccgucgcg

SEQ ID NO: 2344134 - RNA, 19 nt, Artificial Sequence
  Description of Artificial Sequence: Synthetic oligonucleotide
gggcaccacguggagcgcg

SEQ ID NO: 2344135 - RNA, 19 nt, Artificial Sequence
  Description of Artificial Sequence: Synthetic oligonucleotide
ccucgcgguagguggcacg

SEQ ID NO: 2344136 - RNA, 19 nt, Artificial Sequence
  Description of Artificial Sequence: Synthetic oligonucleotide
ucgggcccggccggguugc

SEQ ID NO: 2344137 - RNA, 19 nt, Artificial Sequence
  Description of Artificial Sequence: Synthetic oligonucleotide
ccugcccugucuccgccgc

SEQ ID NO: 2344138 - RNA, 19 nt, Artificial Sequence
  Description of Artificial Sequence: Synthetic oligonucleotide
ggccguuucccagggcacc

SEQ ID NO: 2344139 - RNA, 19 nt, Artificial Sequence
  Description of Artificial Sequence: Synthetic oligonucleotide
agggcacucuccacuccga

SEQ ID NO: 2344140 - RNA, 19 nt, Artificial Sequence
  Description of Artificial Sequence: Synthetic oligonucleotide
gucagcaguccucgagcgu

SEQ ID NO: 2344141 - RNA, 19 nt, Artificial Sequence
  Description of Artificial Sequence: Synthetic oligonucleotide
ugcgccgggcgcagccauc

SEQ ID NO: 2344142 - RNA, 19 nt, Artificial Sequence
  Description of Artificial Sequence: Synthetic oligonucleotide
gggcgcagcgcgcacgauc

SEQ ID NO: 2344143 - RNA, 19 nt, Artificial Sequence
  Description of Artificial Sequence: Synthetic oligonucleotide
gcgcacgaucgagucgucg

SEQ ID NO: 2344144 - RNA, 19 nt, Artificial Sequence
  Description of Artificial Sequence: Synthetic oligonucleotide
ucgcgguagguggcacgca

SEQ ID NO: 2344145 - RNA, 19 nt, Artificial Sequence
  Description of Artificial Sequence: Synthetic oligonucleotide
agguggcacgcaggcucuc

SEQ ID NO: 2344146 - RNA, 19 nt, Artificial Sequence
  Description of Artificial Sequence: Synthetic oligonucleotide
ggcccggccggguugcuga

SEQ ID NO: 2344147 - RNA, 19 nt, Artificial Sequence
  Description of Artificial Sequence: Synthetic oligonucleotide
ccacguagaauaggcgcuc

SEQ ID NO: 2344148 - RNA, 19 nt, Artificial Sequence
  Description of Artificial Sequence: Synthetic oligonucleotide
gcggcggaauaagccgugg

SEQ ID NO: 2344149 - RNA, 19 nt, Artificial Sequence
  Description of Artificial Sequence: Synthetic oligonucleotide
cccacguagaauaggcgcu

SEQ ID NO: 2344150 - RNA, 19 nt, Artificial Sequence
  Description of Artificial Sequence: Synthetic oligonucleotide
cacgccgucgcgggcccgc

SEQ ID NO: 2344151 - RNA, 19 nt, Artificial Sequence
  Description of Artificial Sequence: Synthetic oligonucleotide
caccgucucccacguagaa

SEQ ID NO: 2344152 - RNA, 19 nt, Artificial Sequence
  Description of Artificial Sequence: Synthetic oligonucleotide
ccaugcccggcgacagggg

SEQ ID NO: 2344153 - RNA, 19 nt, Artificial Sequence
  Description of Artificial Sequence: Synthetic oligonucleotide
ggcgcucgaagugcacgcc

SEQ ID NO: 2344154 - RNA, 19 nt, Artificial Sequence
  Description of Artificial Sequence: Synthetic oligonucleotide
cgcgcaggucucucggccg

SEQ ID NO: 2344155 - RNA, 19 nt, Artificial Sequence
  Description of Artificial Sequence: Synthetic oligonucleotide
gcagcccuguuuggcuacg

SEQ ID NO: 2344156 - RNA, 19 nt, Artificial Sequence
  Description of Artificial Sequence: Synthetic oligonucleotide
caggucucucggccguaca

SEQ ID NO: 2344157 - RNA, 19 nt, Artificial Sequence
  Description of Artificial Sequence: Synthetic oligonucleotide
cgucgaagucgaaggucag

SEQ ID NO: 2344158 - RNA, 19 nt, Artificial Sequence
  Description of Artificial Sequence: Synthetic oligonucleotide
gacaggcaccguaggccaa

SEQ ID NO: 2344159 - RNA, 19 nt, Artificial Sequence
  Description of Artificial Sequence: Synthetic oligonucleotide
cgucucccacguagaauag

SEQ ID NO: 2344160 - RNA, 19 nt, Artificial Sequence
  Description of Artificial Sequence: Synthetic oligonucleotide
agcaccuguugcagguguu

SEQ ID NO: 2344161 - RNA, 19 nt, Artificial Sequence
  Description of Artificial Sequence: Synthetic oligonucleotide
cacguggagcgcggaagga

SEQ ID NO: 2344162 - RNA, 19 nt, Artificial Sequence
  Description of Artificial Sequence: Synthetic oligonucleotide
ccgaagguguuggcauccg

SEQ ID NO: 2344163 - RNA, 19 nt, Artificial Sequence
  Description of Artificial Sequence: Synthetic oligonucleotide
gaaggccacguccccgcuu

SEQ ID NO: 2344164 - RNA, 19 nt, Artificial Sequence
  Description of Artificial Sequence: Synthetic oligonucleotide
ccguaggccaacagcugga

SEQ ID NO: 2344165 - RNA, 19 nt, Artificial Sequence
  Description of Artificial Sequence: Synthetic oligonucleotide
gcacgaucgagucgucgcu

SEQ ID NO: 2344166 - RNA, 19 nt, Artificial Sequence
  Description of Artificial Sequence: Synthetic oligonucleotide
uugcaccgucucccacgua

SEQ ID NO: 2344167 - RNA, 19 nt, Artificial Sequence
  Description of Artificial Sequence: Synthetic oligonucleotide
cgcgccuugggaaggccac

SEQ ID NO: 2344168 - RNA, 19 nt, Artificial Sequence
  Description of Artificial Sequence: Synthetic oligonucleotide
ccgggcgcagccauccuca

SEQ ID NO: 2344169 - RNA, 19 nt, Artificial Sequence
  Description of Artificial Sequence: Synthetic oligonucleotide
cagaagucauuugcaccgu

SEQ ID NO: 2344170 - RNA, 19 nt, Artificial Sequence
  Description of Artificial Sequence: Synthetic oligonucleotide
gcgccuugggaaggccacg

SEQ ID NO: 2344171 - RNA, 19 nt, Artificial Sequence
  Description of Artificial Sequence: Synthetic oligonucleotide
acgcaggcucucagguagu

SEQ ID NO: 2344172 - RNA, 19 nt, Artificial Sequence
  Description of Artificial Sequence: Synthetic oligonucleotide
gccgucgcgggcccgcuca

SEQ ID NO: 2344173 - RNA, 19 nt, Artificial Sequence
  Description of Artificial Sequence: Synthetic oligonucleotide
guggagcgcggaaggagcu

SEQ ID NO: 2344174 - RNA, 19 nt, Artificial Sequence
  Description of Artificial Sequence: Synthetic oligonucleotide
gcccugucuccgccgccgg

SEQ ID NO: 2344175 - RNA, 19 nt, Artificial Sequence
  Description of Artificial Sequence: Synthetic oligonucleotide
ggguagccgcgccuuggga

SEQ ID NO: 2344176 - RNA, 19 nt, Artificial Sequence
  Description of Artificial Sequence: Synthetic oligonucleotide
gguggcacgcaggcucuca

SEQ ID NO: 2344177 - RNA, 19 nt, Artificial Sequence
  Description of Artificial Sequence: Synthetic oligonucleotide
gggcacucuccacuccgaa

SEQ ID NO: 2344178 - RNA, 19 nt, Artificial Sequence
  Description of Artificial Sequence: Synthetic oligonucleotide
gcagcgcgagcagcugugc

SEQ ID NO: 2344179 - RNA, 19 nt, Artificial Sequence
  Description of Artificial Sequence: Synthetic oligonucleotide
gcgcggaaggagcugggcu

SEQ ID NO: 2344180 - RNA, 19 nt, Artificial Sequence
  Description of Artificial Sequence: Synthetic oligonucleotide
gcaggucucucggccguac

SEQ ID NO: 2344181 - RNA, 19 nt, Artificial Sequence
  Description of Artificial Sequence: Synthetic oligonucleotide
gaggugcgccgggcgcagc

SEQ ID NO: 2344182 - RNA, 19 nt, Artificial Sequence
  Description of Artificial Sequence: Synthetic oligonucleotide
caggcaccguaggccaaca

SEQ ID NO: 2344183 - RNA, 19 nt, Artificial Sequence
  Description of Artificial Sequence: Synthetic oligonucleotide
ccauccucacgucccuaga

SEQ ID NO: 2344184 - RNA, 19 nt, Artificial Sequence
  Description of Artificial Sequence: Synthetic oligonucleotide
gccguuucccagggcacca

SEQ ID NO: 2344185 - RNA, 19 nt, Artificial Sequence
  Description of Artificial Sequence: Synthetic oligonucleotide
gcgccgggcgcagccaucc

SEQ ID NO: 2344186 - RNA, 19 nt, Artificial Sequence
  Description of Artificial Sequence: Synthetic oligonucleotide
gccgugguggccagcggca

SEQ ID NO: 2344187 - RNA, 19 nt, Artificial Sequence
  Description of Artificial Sequence: Synthetic oligonucleotide
agccauccucacgucccua

SEQ ID NO: 2344188 - RNA, 19 nt, Artificial Sequence
  Description of Artificial Sequence: Synthetic oligonucleotide
gcaccgucucccacguaga

SEQ ID NO: 2344189 - RNA, 19 nt, Artificial Sequence
  Description of Artificial Sequence: Synthetic oligonucleotide
gccguacacccugcucacc

SEQ ID NO: 2344190 - RNA, 19 nt, Artificial Sequence
  Description of Artificial Sequence: Synthetic oligonucleotide
cgcgggcccgcucacgcag

SEQ ID NO: 2344191 - RNA, 19 nt, Artificial Sequence
  Description of Artificial Sequence: Synthetic oligonucleotide
ccgcuugccagcagcccca

SEQ ID NO: 2344192 - RNA, 19 nt, Artificial Sequence
  Description of Artificial Sequence: Synthetic oligonucleotide
cagcgucagcaguccucga

SEQ ID NO: 2344193 - RNA, 19 nt, Artificial Sequence
  Description of Artificial Sequence: Synthetic oligonucleotide
cgcagcgcgcacgaucgag

SEQ ID NO: 2344194 - RNA, 19 nt, Artificial Sequence
  Description of Artificial Sequence: Synthetic oligonucleotide
gccggcucuccccgaguuc

SEQ ID NO: 2344195 - RNA, 19 nt, Artificial Sequence
  Description of Artificial Sequence: Synthetic oligonucleotide
cggccguuucccagggcac

SEQ ID NO: 2344196 - RNA, 19 nt, Artificial Sequence
  Description of Artificial Sequence: Synthetic oligonucleotide
cagcccuguuuggcuacga

SEQ ID NO: 2344197 - RNA, 19 nt, Artificial Sequence
  Description of Artificial Sequence: Synthetic oligonucleotide
ggcggccguuucccagggc

SEQ ID NO: 2344198 - RNA, 19 nt, Artificial Sequence
  Description of Artificial Sequence: Synthetic oligonucleotide
cgaagguguuggcauccga

SEQ ID NO: 2344199 - RNA, 19 nt, Artificial Sequence
  Description of Artificial Sequence: Synthetic oligonucleotide
gcaugggguagccgcgccu

SEQ ID NO: 2344200 - RNA, 19 nt, Artificial Sequence
  Description of Artificial Sequence: Synthetic oligonucleotide
ccucgaagcagcccuguuu

SEQ ID NO: 2344201 - RNA, 19 nt, Artificial Sequence
  Description of Artificial Sequence: Synthetic oligonucleotide
gcgaggugcgccgggcgca

SEQ ID NO: 2344202 - RNA, 19 nt, Artificial Sequence
  Description of Artificial Sequence: Synthetic oligonucleotide
gcgggcccgcucacgcagg

SEQ ID NO: 2344203 - RNA, 19 nt, Artificial Sequence
  Description of Artificial Sequence: Synthetic oligonucleotide
cucggccguacacccugcu

SEQ ID NO: 2344204 - RNA, 19 nt, Artificial Sequence
  Description of Artificial Sequence: Synthetic oligonucleotide
ccccgcuugccagcagccc

SEQ ID NO: 2344205 - RNA, 19 nt, Artificial Sequence
  Description of Artificial Sequence: Synthetic oligonucleotide
cccaaggggcagaagucau

SEQ ID NO: 2344206 - RNA, 19 nt, Artificial Sequence
  Description of Artificial Sequence: Synthetic oligonucleotide
ggaaggccacguccccgcu

SEQ ID NO: 2344207 - RNA, 19 nt, Artificial Sequence
  Description of Artificial Sequence: Synthetic oligonucleotide
ccgcgccuugggaaggcca

SEQ ID NO: 2344208 - RNA, 19 nt, Artificial Sequence
  Description of Artificial Sequence: Synthetic oligonucleotide
gcaccucggcggccguuuc

SEQ ID NO: 2344209 - RNA, 19 nt, Artificial Sequence
  Description of Artificial Sequence: Synthetic oligonucleotide
ggugcgccgggcgcagcca

SEQ ID NO: 2344210 - RNA, 19 nt, Artificial Sequence
  Description of Artificial Sequence: Synthetic oligonucleotide
cucgagcgucgggcccggc

SEQ ID NO: 2344211 - RNA, 19 nt, Artificial Sequence
  Description of Artificial Sequence: Synthetic oligonucleotide
gcucacccagguacuugaa

SEQ ID NO: 2344212 - RNA, 19 nt, Artificial Sequence
  Description of Artificial Sequence: Synthetic oligonucleotide
gcgcagccauccucacguc

SEQ ID NO: 2344213 - RNA, 19 nt, Artificial Sequence
  Description of Artificial Sequence: Synthetic oligonucleotide
gggccgcagcgucagcagu

SEQ ID NO: 2344214 - RNA, 19 nt, Artificial Sequence
  Description of Artificial Sequence: Synthetic oligonucleotide
ccucgagcgucgggcccgg

SEQ ID NO: 2344215 - RNA, 19 nt, Artificial Sequence
  Description of Artificial Sequence: Synthetic oligonucleotide
ggcucucagguaguugcuu

SEQ ID NO: 2344216 - RNA, 19 nt, Artificial Sequence
  Description of Artificial Sequence: Synthetic oligonucleotide
cggcacgcagggcacucuc

SEQ ID NO: 2344217 - RNA, 19 nt, Artificial Sequence
  Description of Artificial Sequence: Synthetic oligonucleotide
gggcccggccggguugcug

SEQ ID NO: 2344218 - RNA, 19 nt, Artificial Sequence
  Description of Artificial Sequence: Synthetic oligonucleotide
cccucgcgguagguggcac

SEQ ID NO: 2344219 - RNA, 19 nt, Artificial Sequence
  Description of Artificial Sequence: Synthetic oligonucleotide
gcccucgcgguagguggca

SEQ ID NO: 2344220 - RNA, 19 nt, Artificial Sequence
  Description of Artificial Sequence: Synthetic oligonucleotide
cgcguugcauguauucauu

SEQ ID NO: 2344221 - RNA, 19 nt, Artificial Sequence
  Description of Artificial Sequence: Synthetic oligonucleotide
gcaccacguggagcgcgga

SEQ ID NO: 2344222 - RNA, 19 nt, Artificial Sequence
  Description of Artificial Sequence: Synthetic oligonucleotide
cccggccggguugcugaag

SEQ ID NO: 2344223 - RNA, 19 nt, Artificial Sequence
  Description of Artificial Sequence: Synthetic oligonucleotide
cgucgcgggcccgcucacg

SEQ ID NO: 2344224 - RNA, 19 nt, Artificial Sequence
  Description of Artificial Sequence: Synthetic oligonucleotide
ccucggcggccguuuccca

SEQ ID NO: 2344225 - RNA, 19 nt, Artificial Sequence
  Description of Artificial Sequence: Synthetic oligonucleotide
gcacgccgucgcgggcccg

SEQ ID NO: 2344226 - RNA, 19 nt, Artificial Sequence
  Description of Artificial Sequence: Synthetic oligonucleotide
ccgucgcgggcccgcucac

SEQ ID NO: 2344227 - RNA, 19 nt, Artificial Sequence
  Description of Artificial Sequence: Synthetic oligonucleotide
gcgcagcgcgcacgaucga

SEQ ID NO: 2344228 - RNA, 19 nt, Artificial Sequence
  Description of Artificial Sequence: Synthetic oligonucleotide
cgcgcacgaucgagucguc

SEQ ID NO: 2344229 - RNA, 19 nt, Artificial Sequence
  Description of Artificial Sequence: Synthetic oligonucleotide
cggcggaauaagccguggu

SEQ ID NO: 2344230 - RNA, 19 nt, Artificial Sequence
  Description of Artificial Sequence: Synthetic oligonucleotide
gcccggccggguugcugaa

SEQ ID NO: 2344231 - RNA, 19 nt, Artificial Sequence
  Description of Artificial Sequence: Synthetic oligonucleotide
cgcuguuuucguccacgau

SEQ ID NO: 2344232 - RNA, 19 nt, Artificial Sequence
  Description of Artificial Sequence: Synthetic oligonucleotide
gggcccgcucacgcaggua

SEQ ID NO: 2344233 - RNA, 19 nt, Artificial Sequence
  Description of Artificial Sequence: Synthetic oligonucleotide
cgaucgagucgucgcuguu

SEQ ID NO: 2344234 - RNA, 19 nt, Artificial Sequence
  Description of Artificial Sequence: Synthetic oligonucleotide
gcccgcucacgcagguauu

SEQ ID NO: 2344235 - RNA, 19 nt, Artificial Sequence
  Description of Artificial Sequence: Synthetic oligonucleotide
ccgccggcucuccccgagu

SEQ ID NO: 2344236 - RNA, 19 nt, Artificial Sequence
  Description of Artificial Sequence: Synthetic oligonucleotide
cgccggcucuccccgaguu

SEQ ID NO: 2344237 - RNA, 19 nt, Artificial Sequence
  Description of Artificial Sequence: Synthetic oligonucleotide
cggccggguugcugaagau

SEQ ID NO: 2344238 - RNA, 19 nt, Artificial Sequence
  Description of Artificial Sequence: Synthetic oligonucleotide
cgcaccucggcggccguuu

SEQ ID NO: 2344239 - RNA, 19 nt, Artificial Sequence
  Description of Artificial Sequence: Synthetic oligonucleotide
gcgcaccucggcggccguu

SEQ ID NO: 2344240 - RNA, 19 nt, Artificial Sequence
  Description of Artificial Sequence: Synthetic oligonucleotide
uucagaacuauccauaagc

SEQ ID NO: 2344241 - RNA, 19 nt, Artificial Sequence
  Description of Artificial Sequence: Synthetic oligonucleotide
ucggauguagccauaagcg

SEQ ID NO: 2344242 - RNA, 19 nt, Artificial Sequence
  Description of Artificial Sequence: Synthetic oligonucleotide
uagaacuguaguuaugugg

SEQ ID NO: 2344243 - RNA, 19 nt, Artificial Sequence
  Description of Artificial Sequence: Synthetic oligonucleotide
uaagcgaugguuuuguuca

SEQ ID NO: 2344244 - RNA, 19 nt, Artificial Sequence
  Description of Artificial Sequence: Synthetic oligonucleotide
uuuuguucacaguaaaccc

SEQ ID NO: 2344245 - RNA, 19 nt, Artificial Sequence
  Description of Artificial Sequence: Synthetic oligonucleotide
aaagggagauuucagguga

SEQ ID NO: 2344246 - RNA, 19 nt, Artificial Sequence
  Description of Artificial Sequence: Synthetic oligonucleotide
acuguaguuaugugggacc

SEQ ID NO: 2344247 - RNA, 19 nt, Artificial Sequence
  Description of Artificial Sequence: Synthetic oligonucleotide
uguuuugccuguauccugg

SEQ ID NO: 2344248 - RNA, 19 nt, Artificial Sequence
  Description of Artificial Sequence: Synthetic oligonucleotide
agaacuguaguuauguggg

SEQ ID NO: 2344249 - RNA, 19 nt, Artificial Sequence
  Description of Artificial Sequence: Synthetic oligonucleotide
aacagcgguagccucuacc

SEQ ID NO: 2344250 - RNA, 19 nt, Artificial Sequence
  Description of Artificial Sequence: Synthetic oligonucleotide
cagaucuucagaacuaucc

SEQ ID NO: 2344251 - RNA, 19 nt, Artificial Sequence
  Description of Artificial Sequence: Synthetic oligonucleotide
acagcgguagccucuaccc

SEQ ID NO: 2344252 - RNA, 19 nt, Artificial Sequence
  Description of Artificial Sequence: Synthetic oligonucleotide
acugguaagcaguaugcac

SEQ ID NO: 2344253 - RNA, 19 nt, Artificial Sequence
  Description of Artificial Sequence: Synthetic oligonucleotide
uuucucgaugcucagggag

SEQ ID NO: 2344254 - RNA, 19 nt, Artificial Sequence
  Description of Artificial Sequence: Synthetic oligonucleotide
acaaaggauagccguaugg

SEQ ID NO: 2344255 - RNA, 19 nt, Artificial Sequence
  Description of Artificial Sequence: Synthetic oligonucleotide
uggagaaugguacggcugg

SEQ ID NO: 2344256 - RNA, 19 nt, Artificial Sequence
  Description of Artificial Sequence: Synthetic oligonucleotide
aguaaacccgaagucagcc

SEQ ID NO: 2344257 - RNA, 19 nt, Artificial Sequence
  Description of Artificial Sequence: Synthetic oligonucleotide
ucaaagggagauuucaggu

SEQ ID NO: 2344258 - RNA, 19 nt, Artificial Sequence
  Description of Artificial Sequence: Synthetic oligonucleotide
uggccguuucuccagaugg

SEQ ID NO: 2344259 - RNA, 19 nt, Artificial Sequence
  Description of Artificial Sequence: Synthetic oligonucleotide
gugucgauagccuuucucg

SEQ ID NO: 2344260 - RNA, 19 nt, Artificial Sequence
  Description of Artificial Sequence: Synthetic oligonucleotide
aacuguaguuaugugggac

SEQ ID NO: 2344261 - RNA, 19 nt, Artificial Sequence
  Description of Artificial Sequence: Synthetic oligonucleotide
uguagaacuguaguuaugu

SEQ ID NO: 2344262 - RNA, 19 nt, Artificial Sequence
  Description of Artificial Sequence: Synthetic oligonucleotide
aucgagaacauccuggaga

SEQ ID NO: 2344263 - RNA, 19 nt, Artificial Sequence
  Description of Artificial Sequence: Synthetic oligonucleotide
uacacugguaagcaguaug

SEQ ID NO: 2344264 - RNA, 19 nt, Artificial Sequence
  Description of Artificial Sequence: Synthetic oligonucleotide
guaagcaguaugcacgggg

SEQ ID NO: 2344265 - RNA, 19 nt, Artificial Sequence
  Description of Artificial Sequence: Synthetic oligonucleotide
aaacauaggcaccuccucu

SEQ ID NO: 2344266 - RNA, 19 nt, Artificial Sequence
  Description of Artificial Sequence: Synthetic oligonucleotide
guagccugcauugacaagg

SEQ ID NO: 2344267 - RNA, 19 nt, Artificial Sequence
  Description of Artificial Sequence: Synthetic oligonucleotide
augcuuggcaccugcagcc

SEQ ID NO: 2344268 - RNA, 19 nt, Artificial Sequence
  Description of Artificial Sequence: Synthetic oligonucleotide
aaaguccagagagaccggc

SEQ ID NO: 2344269 - RNA, 19 nt, Artificial Sequence
  Description of Artificial Sequence: Synthetic oligonucleotide
gaugguuuuguucacagua

SEQ ID NO: 2344270 - RNA, 19 nt, Artificial Sequence
  Description of Artificial Sequence: Synthetic oligonucleotide
uauccauaagcuggcaucg

SEQ ID NO: 2344271 - RNA, 19 nt, Artificial Sequence
  Description of Artificial Sequence: Synthetic oligonucleotide
aguccagagagaccggccc

SEQ ID NO: 2344272 - RNA, 19 nt, Artificial Sequence
  Description of Artificial Sequence: Synthetic oligonucleotide
agcacaucaguagaugccc

SEQ ID NO: 2344273 - RNA, 19 nt, Artificial Sequence
  Description of Artificial Sequence: Synthetic oligonucleotide
cuguguuuugccuguaucc

SEQ ID NO: 2344274 - RNA, 19 nt, Artificial Sequence
  Description of Artificial Sequence: Synthetic oligonucleotide
auuucaggugaaccugggc

SEQ ID NO: 2344275 - RNA, 19 nt, Artificial Sequence
  Description of Artificial Sequence: Synthetic oligonucleotide
ugguaagcaguaugcacgg

SEQ ID NO: 2344276 - RNA, 19 nt, Artificial Sequence
  Description of Artificial Sequence: Synthetic oligonucleotide
aaugguacggcuggcuggg

SEQ ID NO: 2344277 - RNA, 19 nt, Artificial Sequence
  Description of Artificial Sequence: Synthetic oligonucleotide
uaaacccgaagucagcccu

SEQ ID NO: 2344278 - RNA, 19 nt, Artificial Sequence
  Description of Artificial Sequence: Synthetic oligonucleotide
cucggauguagccauaagc

SEQ ID NO: 2344279 - RNA, 19 nt, Artificial Sequence
  Description of Artificial Sequence: Synthetic oligonucleotide
ucuacccugcagcacauca

SEQ ID NO: 2344280 - RNA, 19 nt, Artificial Sequence
  Description of Artificial Sequence: Synthetic oligonucleotide
aguuaugugggaccaguug

SEQ ID NO: 2344281 - RNA, 19 nt, Artificial Sequence
  Description of Artificial Sequence: Synthetic oligonucleotide
agugucgauagccuuucuc

SEQ ID NO: 2344282 - RNA, 19 nt, Artificial Sequence
  Description of Artificial Sequence: Synthetic oligonucleotide
cuauccauaagcuggcauc

SEQ ID NO: 2344283 - RNA, 19 nt, Artificial Sequence
  Description of Artificial Sequence: Synthetic oligonucleotide
uccccaacaaaggauagcc

SEQ ID NO: 2344284 - RNA, 19 nt, Artificial Sequence
  Description of Artificial Sequence: Synthetic oligonucleotide
uuguugucagggucaaagg

SEQ ID NO: 2344285 - RNA, 19 nt, Artificial Sequence
  Description of Artificial Sequence: Synthetic oligonucleotide
ugcucagggagucaauggc

SEQ ID NO: 2344286 - RNA, 19 nt, Artificial Sequence
  Description of Artificial Sequence: Synthetic oligonucleotide
uugacaaggccaugcuugg

SEQ ID NO: 2344287 - RNA, 19 nt, Artificial Sequence
  Description of Artificial Sequence: Synthetic oligonucleotide
uuaugugggaccaguugug

SEQ ID NO: 2344288 - RNA, 19 nt, Artificial Sequence
  Description of Artificial Sequence: Synthetic oligonucleotide
cuccaggccaaacauaggc

SEQ ID NO: 2344289 - RNA, 19 nt, Artificial Sequence
  Description of Artificial Sequence: Synthetic oligonucleotide
ugugcaguacaggagucgg

SEQ ID NO: 2344290 - RNA, 19 nt, Artificial Sequence
  Description of Artificial Sequence: Synthetic oligonucleotide
aggucucaggucugcaugc

SEQ ID NO: 2344291 - RNA, 19 nt, Artificial Sequence
  Description of Artificial Sequence: Synthetic oligonucleotide
uggugaguggagaagggga

SEQ ID NO: 2344292 - RNA, 19 nt, Artificial Sequence
  Description of Artificial Sequence: Synthetic oligonucleotide
gagucaauggcacgguagc

SEQ ID NO: 2344293 - RNA, 19 nt, Artificial Sequence
  Description of Artificial Sequence: Synthetic oligonucleotide
guagccucuacccugcagc

SEQ ID NO: 2344294 - RNA, 19 nt, Artificial Sequence
  Description of Artificial Sequence: Synthetic oligonucleotide
aguacaggagucggcaggc

SEQ ID NO: 2344295 - RNA, 19 nt, Artificial Sequence
  Description of Artificial Sequence: Synthetic oligonucleotide
caaaggauagccguauggc

SEQ ID NO: 2344296 - RNA, 19 nt, Artificial Sequence
  Description of Artificial Sequence: Synthetic oligonucleotide
ucacaguaaacccgaaguc

SEQ ID NO: 2344297 - RNA, 19 nt, Artificial Sequence
  Description of Artificial Sequence: Synthetic oligonucleotide
ugaguggagaaggggaagg

SEQ ID NO: 2344298 - RNA, 19 nt, Artificial Sequence
  Description of Artificial Sequence: Synthetic oligonucleotide
gaaggcuguguuuugccug

SEQ ID NO: 2344299 - RNA, 19 nt, Artificial Sequence
  Description of Artificial Sequence: Synthetic oligonucleotide
ucgauagccuuucucgaug

SEQ ID NO: 2344300 - RNA, 19 nt, Artificial Sequence
  Description of Artificial Sequence: Synthetic oligonucleotide
uguauccugggucucggga

SEQ ID NO: 2344301 - RNA, 19 nt, Artificial Sequence
  Description of Artificial Sequence: Synthetic oligonucleotide
ugcauugacaaggccaugc

SEQ ID NO: 2344302 - RNA, 19 nt, Artificial Sequence
  Description of Artificial Sequence: Synthetic oligonucleotide
ucgagaacauccuggagaa

SEQ ID NO: 2344303 - RNA, 19 nt, Artificial Sequence
  Description of Artificial Sequence: Synthetic oligonucleotide
cucuccacucuucacaaag

SEQ ID NO: 2344304 - RNA, 19 nt, Artificial Sequence
  Description of Artificial Sequence: Synthetic oligonucleotide
caugccagugucgauagcc

SEQ ID NO: 2344305 - RNA, 19 nt, Artificial Sequence
  Description of Artificial Sequence: Synthetic oligonucleotide
uucucuccaaggcauacuc

SEQ ID NO: 2344306 - RNA, 19 nt, Artificial Sequence
  Description of Artificial Sequence: Synthetic oligonucleotide
aggauagccguauggcccg

SEQ ID NO: 2344307 - RNA, 19 nt, Artificial Sequence
  Description of Artificial Sequence: Synthetic oligonucleotide
aacaaaggauagccguaug

SEQ ID NO: 2344308 - RNA, 19 nt, Artificial Sequence
  Description of Artificial Sequence: Synthetic oligonucleotide
agcaucgagaacauccugg

SEQ ID NO: 2344309 - RNA, 19 nt, Artificial Sequence
  Description of Artificial Sequence: Synthetic oligonucleotide
aucaguagaugcccuucac

SEQ ID NO: 2344310 - RNA, 19 nt, Artificial Sequence
  Description of Artificial Sequence: Synthetic oligonucleotide
aguuguguugggccacagc

SEQ ID NO: 2344311 - RNA, 19 nt, Artificial Sequence
  Description of Artificial Sequence: Synthetic oligonucleotide
aguguggcgguuuccaaug

SEQ ID NO: 2344312 - RNA, 19 nt, Artificial Sequence
  Description of Artificial Sequence: Synthetic oligonucleotide
uaucccgggugucaucagg

SEQ ID NO: 2344313 - RNA, 19 nt, Artificial Sequence
  Description of Artificial Sequence: Synthetic oligonucleotide
aaggcauacucuccacucu

SEQ ID NO: 2344314 - RNA, 19 nt, Artificial Sequence
  Description of Artificial Sequence: Synthetic oligonucleotide
uguguuuugccuguauccu

SEQ ID NO: 2344315 - RNA, 19 nt, Artificial Sequence
  Description of Artificial Sequence: Synthetic oligonucleotide
aaggccucauugcucaggu

SEQ ID NO: 2344316 - RNA, 19 nt, Artificial Sequence
  Description of Artificial Sequence: Synthetic oligonucleotide
cauaagcuggcaucggaac

SEQ ID NO: 2344317 - RNA, 19 nt, Artificial Sequence
  Description of Artificial Sequence: Synthetic oligonucleotide
caugcuuggcaccugcagc

SEQ ID NO: 2344318 - RNA, 19 nt, Artificial Sequence
  Description of Artificial Sequence: Synthetic oligonucleotide
augcucagggagucaaugg

SEQ ID NO: 2344319 - RNA, 19 nt, Artificial Sequence
  Description of Artificial Sequence: Synthetic oligonucleotide
auaagcuggcaucggaacu

SEQ ID NO: 2344320 - RNA, 19 nt, Artificial Sequence
  Description of Artificial Sequence: Synthetic oligonucleotide
uccauaagcuggcaucgga

SEQ ID NO: 2344321 - RNA, 19 nt, Artificial Sequence
  Description of Artificial Sequence: Synthetic oligonucleotide
agugaggcacaccaggcgu

SEQ ID NO: 2344322 - RNA, 19 nt, Artificial Sequence
  Description of Artificial Sequence: Synthetic oligonucleotide
uuguguugggccacagccc

SEQ ID NO: 2344323 - RNA, 19 nt, Artificial Sequence
  Description of Artificial Sequence: Synthetic oligonucleotide
ugucgauagccuuucucga

SEQ ID NO: 2344324 - RNA, 19 nt, Artificial Sequence
  Description of Artificial Sequence: Synthetic oligonucleotide
auagccuuucucgaugcuc

SEQ ID NO: 2344325 - RNA, 19 nt, Artificial Sequence
  Description of Artificial Sequence: Synthetic oligonucleotide
cagcacaucaguagaugcc

SEQ ID NO: 2344326 - RNA, 19 nt, Artificial Sequence
  Description of Artificial Sequence: Synthetic oligonucleotide
cacagccccaccuacggcc

SEQ ID NO: 2344327 - RNA, 19 nt, Artificial Sequence
  Description of Artificial Sequence: Synthetic oligonucleotide
guucacaguaaacccgaag

SEQ ID NO: 2344328 - RNA, 19 nt, Artificial Sequence
  Description of Artificial Sequence: Synthetic oligonucleotide
agccguauggcccggacca

SEQ ID NO: 2344329 - RNA, 19 nt, Artificial Sequence
  Description of Artificial Sequence: Synthetic oligonucleotide
gaugcucagggagucaaug

SEQ ID NO: 2344330 - RNA, 19 nt, Artificial Sequence
  Description of Artificial Sequence: Synthetic oligonucleotide
uccuguagaacuguaguua

SEQ ID NO: 2344331 - RNA, 19 nt, Artificial Sequence
  Description of Artificial Sequence: Synthetic oligonucleotide
gaacuauccauaagcuggc

SEQ ID NO: 2344332 - RNA, 19 nt, Artificial Sequence
  Description of Artificial Sequence: Synthetic oligonucleotide
gcaucggaacuucugaucc

SEQ ID NO: 2344333 - RNA, 19 nt, Artificial Sequence
  Description of Artificial Sequence: Synthetic oligonucleotide
agcuggugaguggagaagg

SEQ ID NO: 2344334 - RNA, 19 nt, Artificial Sequence
  Description of Artificial Sequence: Synthetic oligonucleotide
accaggcgucgguagaggc

SEQ ID NO: 2344335 - RNA, 19 nt, Artificial Sequence
  Description of Artificial Sequence: Synthetic oligonucleotide
agauuucaggugaaccugg

SEQ ID NO: 2344336 - RNA, 19 nt, Artificial Sequence
  Description of Artificial Sequence: Synthetic oligonucleotide
uugugcaguacaggagucg

SEQ ID NO: 2344337 - RNA, 19 nt, Artificial Sequence
  Description of Artificial Sequence: Synthetic oligonucleotide
gauccuguagaacuguagu

SEQ ID NO: 2344338 - RNA, 19 nt, Artificial Sequence
  Description of Artificial Sequence: Synthetic oligonucleotide
uuugugcaguacaggaguc

SEQ ID NO: 2344339 - RNA, 19 nt, Artificial Sequence
  Description of Artificial Sequence: Synthetic oligonucleotide
guuaugugggaccaguugu

SEQ ID NO: 2344340 - RNA, 19 nt, Artificial Sequence
  Description of Artificial Sequence: Synthetic oligonucleotide
agcgguagccucuacccug

SEQ ID NO: 2344341 - RNA, 19 nt, Artificial Sequence
  Description of Artificial Sequence: Synthetic oligonucleotide
ugccgcacgcugcuuaucc

SEQ ID NO: 2344342 - RNA, 19 nt, Artificial Sequence
  Description of Artificial Sequence: Synthetic oligonucleotide
agcccuccgaacauggccc

SEQ ID NO: 2344343 - RNA, 19 nt, Artificial Sequence
  Description of Artificial Sequence: Synthetic oligonucleotide
ccuuucucgaugcucaggg

SEQ ID NO: 2344344 - RNA, 19 nt, Artificial Sequence
  Description of Artificial Sequence: Synthetic oligonucleotide
gucgguagaggccugccgc

SEQ ID NO: 2344345 - RNA, 19 nt, Artificial Sequence
  Description of Artificial Sequence: Synthetic oligonucleotide
accugggcaggauagguga

SEQ ID NO: 2344346 - RNA, 19 nt, Artificial Sequence
  Description of Artificial Sequence: Synthetic oligonucleotide
acaucaguagaugcccuuc

SEQ ID NO: 2344347 - RNA, 19 nt, Artificial Sequence
  Description of Artificial Sequence: Synthetic oligonucleotide
guagaacuguaguuaugug

SEQ ID NO: 2344348 - RNA, 19 nt, Artificial Sequence
  Description of Artificial Sequence: Synthetic oligonucleotide
guaaacccgaagucagccc

SEQ ID NO: 2344349 - RNA, 19 nt, Artificial Sequence
  Description of Artificial Sequence: Synthetic oligonucleotide
cacaaaguccagagagacc

SEQ ID NO: 2344350 - RNA, 19 nt, Artificial Sequence
  Description of Artificial Sequence: Synthetic oligonucleotide
auagccguauggcccggac

SEQ ID NO: 2344351 - RNA, 19 nt, Artificial Sequence
  Description of Artificial Sequence: Synthetic oligonucleotide
agggugugggaaguguggc

SEQ ID NO: 2344352 - RNA, 19 nt, Artificial Sequence
  Description of Artificial Sequence: Synthetic oligonucleotide
acuauccauaagcuggcau

SEQ ID NO: 2344353 - RNA, 19 nt, Artificial Sequence
  Description of Artificial Sequence: Synthetic oligonucleotide
uccagauggccuccaggcc

SEQ ID NO: 2344354 - RNA, 19 nt, Artificial Sequence
  Description of Artificial Sequence: Synthetic oligonucleotide
ucucggauguagccauaag

SEQ ID NO: 2344355 - RNA, 19 nt, Artificial Sequence
  Description of Artificial Sequence: Synthetic oligonucleotide
auaggcaccuccucuucca

SEQ ID NO: 2344356 - RNA, 19 nt, Artificial Sequence
  Description of Artificial Sequence: Synthetic oligonucleotide
uggggucucggauguagcc

SEQ ID NO: 2344357 - RNA, 19 nt, Artificial Sequence
  Description of Artificial Sequence: Synthetic oligonucleotide
ugaaccugggcaggauagg

SEQ ID NO: 2344358 - RNA, 19 nt, Artificial Sequence
  Description of Artificial Sequence: Synthetic oligonucleotide
guguuuugccuguauccug

SEQ ID NO: 2344359 - RNA, 19 nt, Artificial Sequence
  Description of Artificial Sequence: Synthetic oligonucleotide
aauggcacgguagccugca

SEQ ID NO: 2344360 - RNA, 19 nt, Artificial Sequence
  Description of Artificial Sequence: Synthetic oligonucleotide
ucugauccuguagaacugu

SEQ ID NO: 2344361 - RNA, 19 nt, Artificial Sequence
  Description of Artificial Sequence: Synthetic oligonucleotide
ugaggcacaccaggcgucg

SEQ ID NO: 2344362 - RNA, 19 nt, Artificial Sequence
  Description of Artificial Sequence: Synthetic oligonucleotide
gugaaccugggcaggauag

SEQ ID NO: 2344363 - RNA, 19 nt, Artificial Sequence
  Description of Artificial Sequence: Synthetic oligonucleotide
caugcccagaucuucagaa

SEQ ID NO: 2344364 - RNA, 19 nt, Artificial Sequence
  Description of Artificial Sequence: Synthetic oligonucleotide
cauaggcaccuccucuucc

SEQ ID NO: 2344365 - RNA, 19 nt, Artificial Sequence
  Description of Artificial Sequence: Synthetic oligonucleotide
ggaccaguuguguugggcc

SEQ ID NO: 2344366 - RNA, 19 nt, Artificial Sequence
  Description of Artificial Sequence: Synthetic oligonucleotide
ggugugggaaguguggcgg

SEQ ID NO: 2344367 - RNA, 19 nt, Artificial Sequence
  Description of Artificial Sequence: Synthetic oligonucleotide
uguaguuaugugggaccag

SEQ ID NO: 2344368 - RNA, 19 nt, Artificial Sequence
  Description of Artificial Sequence: Synthetic oligonucleotide
uucacccgcuuguugucag

SEQ ID NO: 2344369 - RNA, 19 nt, Artificial Sequence
  Description of Artificial Sequence: Synthetic oligonucleotide
auggccugaacagcgguag

SEQ ID NO: 2344370 - RNA, 19 nt, Artificial Sequence
  Description of Artificial Sequence: Synthetic oligonucleotide
caguaaacccgaagucagc

SEQ ID NO: 2344371 - RNA, 19 nt, Artificial Sequence
  Description of Artificial Sequence: Synthetic oligonucleotide
ugcucaggucagcaucgag

SEQ ID NO: 2344372 - RNA, 19 nt, Artificial Sequence
  Description of Artificial Sequence: Synthetic oligonucleotide
cucaggucagcaucgagaa

SEQ ID NO: 2344373 - RNA, 19 nt, Artificial Sequence
  Description of Artificial Sequence: Synthetic oligonucleotide
agccugcauugacaaggcc

SEQ ID NO: 2344374 - RNA, 19 nt, Artificial Sequence
  Description of Artificial Sequence: Synthetic oligonucleotide
acuggggucucggauguag

SEQ ID NO: 2344375 - RNA, 19 nt, Artificial Sequence
  Description of Artificial Sequence: Synthetic oligonucleotide
cagcccuccgaacauggcc

SEQ ID NO: 2344376 - RNA, 19 nt, Artificial Sequence
  Description of Artificial Sequence: Synthetic oligonucleotide
acaggagucggcaggcagg

SEQ ID NO: 2344377 - RNA, 19 nt, Artificial Sequence
  Description of Artificial Sequence: Synthetic oligonucleotide
ggcacgguagccugcauug

SEQ ID NO: 2344378 - RNA, 19 nt, Artificial Sequence
  Description of Artificial Sequence: Synthetic oligonucleotide
uaugugggaccaguugugu

SEQ ID NO: 2344379 - RNA, 19 nt, Artificial Sequence
  Description of Artificial Sequence: Synthetic oligonucleotide
ugagcaugcccagaucuuc

SEQ ID NO: 2344380 - RNA, 19 nt, Artificial Sequence
  Description of Artificial Sequence: Synthetic oligonucleotide
cuguagaacuguaguuaug

SEQ ID NO: 2344381 - RNA, 19 nt, Artificial Sequence
  Description of Artificial Sequence: Synthetic oligonucleotide
aucggaacuucugauccug

SEQ ID NO: 2344382 - RNA, 19 nt, Artificial Sequence
  Description of Artificial Sequence: Synthetic oligonucleotide
aagcuggcaucggaacuuc

SEQ ID NO: 2344383 - RNA, 19 nt, Artificial Sequence
  Description of Artificial Sequence: Synthetic oligonucleotide
uagccguauggcccggacc

SEQ ID NO: 2344384 - RNA, 19 nt, Artificial Sequence
  Description of Artificial Sequence: Synthetic oligonucleotide
uaagcuggcaucggaacuu

SEQ ID NO: 2344385 - RNA, 19 nt, Artificial Sequence
  Description of Artificial Sequence: Synthetic oligonucleotide
gagaccggcccaccacugg

SEQ ID NO: 2344386 - RNA, 19 nt, Artificial Sequence
  Description of Artificial Sequence: Synthetic oligonucleotide
aaacccgaagucagcccuc

SEQ ID NO: 2344387 - RNA, 19 nt, Artificial Sequence
  Description of Artificial Sequence: Synthetic oligonucleotide
ugucaucaggucucagguc

SEQ ID NO: 2344388 - RNA, 19 nt, Artificial Sequence
  Description of Artificial Sequence: Synthetic oligonucleotide
agggagauuucaggugaac

SEQ ID NO: 2344389 - RNA, 19 nt, Artificial Sequence
  Description of Artificial Sequence: Synthetic oligonucleotide
gugggaccaguuguguugg

SEQ ID NO: 2344390 - RNA, 19 nt, Artificial Sequence
  Description of Artificial Sequence: Synthetic oligonucleotide
guagaggccugccgcacgc

SEQ ID NO: 2344391 - RNA, 19 nt, Artificial Sequence
  Description of Artificial Sequence: Synthetic oligonucleotide
caucgagaacauccuggag

SEQ ID NO: 2344392 - RNA, 19 nt, Artificial Sequence
  Description of Artificial Sequence: Synthetic oligonucleotide
gggagauuucaggugaacc

SEQ ID NO: 2344393 - RNA, 19 nt, Artificial Sequence
  Description of Artificial Sequence: Synthetic oligonucleotide
cuuaucccgggugucauca

SEQ ID NO: 2344394 - RNA, 19 nt, Artificial Sequence
  Description of Artificial Sequence: Synthetic oligonucleotide
cccaccuacggccagguag

SEQ ID NO: 2344395 - RNA, 19 nt, Artificial Sequence
  Description of Artificial Sequence: Synthetic oligonucleotide
agccugguacacugguaag

SEQ ID NO: 2344396 - RNA, 19 nt, Artificial Sequence
  Description of Artificial Sequence: Synthetic oligonucleotide
gcgaugguuuuguucacag

SEQ ID NO: 2344397 - RNA, 19 nt, Artificial Sequence
  Description of Artificial Sequence: Synthetic oligonucleotide
ggcauuugugcaguacagg

SEQ ID NO: 2344398 - RNA, 19 nt, Artificial Sequence
  Description of Artificial Sequence: Synthetic oligonucleotide
ucgguagaggccugccgca

SEQ ID NO: 2344399 - RNA, 19 nt, Artificial Sequence
  Description of Artificial Sequence: Synthetic oligonucleotide
uaguuaugugggaccaguu

SEQ ID NO: 2344400 - RNA, 19 nt, Artificial Sequence
  Description of Artificial Sequence: Synthetic oligonucleotide
ucauugcucaggucagcau

SEQ ID NO: 2344401 - RNA, 19 nt, Artificial Sequence
  Description of Artificial Sequence: Synthetic oligonucleotide
agcucucaccagcugguga

SEQ ID NO: 2344402 - RNA, 19 nt, Artificial Sequence
  Description of Artificial Sequence: Synthetic oligonucleotide
ucacccgcuuguugucagg

SEQ ID NO: 2344403 - RNA, 19 nt, Artificial Sequence
  Description of Artificial Sequence: Synthetic oligonucleotide
uguagccauaagcgauggu

SEQ ID NO: 2344404 - RNA, 19 nt, Artificial Sequence
  Description of Artificial Sequence: Synthetic oligonucleotide
ccaggccaaacauaggcac

SEQ ID NO: 2344405 - RNA, 19 nt, Artificial Sequence
  Description of Artificial Sequence: Synthetic oligonucleotide
aacuauccauaagcuggca

SEQ ID NO: 2344406 - RNA, 19 nt, Artificial Sequence
  Description of Artificial Sequence: Synthetic oligonucleotide
caccuccucuuccacagug

SEQ ID NO: 2344407 - RNA, 19 nt, Artificial Sequence
  Description of Artificial Sequence: Synthetic oligonucleotide
uuaucccgggugucaucag

SEQ ID NO: 2344408 - RNA, 19 nt, Artificial Sequence
  Description of Artificial Sequence: Synthetic oligonucleotide
uggcaucggaacuucugau

SEQ ID NO: 2344409 - RNA, 19 nt, Artificial Sequence
  Description of Artificial Sequence: Synthetic oligonucleotide
ucggaacuucugauccugu

SEQ ID NO: 2344410 - RNA, 19 nt, Artificial Sequence
  Description of Artificial Sequence: Synthetic oligonucleotide
cuggcaucggaacuucuga

SEQ ID NO: 2344411 - RNA, 19 nt, Artificial Sequence
  Description of Artificial Sequence: Synthetic oligonucleotide
cauggcccaccacuuggcc

SEQ ID NO: 2344412 - RNA, 19 nt, Artificial Sequence
  Description of Artificial Sequence: Synthetic oligonucleotide
gggacaugcagcucccagc

SEQ ID NO: 2344413 - RNA, 19 nt, Artificial Sequence
  Description of Artificial Sequence: Synthetic oligonucleotide
ugggaaguguggcgguuuc

SEQ ID NO: 2344414 - RNA, 19 nt, Artificial Sequence
  Description of Artificial Sequence: Synthetic oligonucleotide
agccauaagcgaugguuuu

SEQ ID NO: 2344415 - RNA, 19 nt, Artificial Sequence
  Description of Artificial Sequence: Synthetic oligonucleotide
gggaaggccucauugcuca

SEQ ID NO: 2344416 - RNA, 19 nt, Artificial Sequence
  Description of Artificial Sequence: Synthetic oligonucleotide
cuggggucucggauguagc

SEQ ID NO: 2344417 - RNA, 19 nt, Artificial Sequence
  Description of Artificial Sequence: Synthetic oligonucleotide
auccauaagcuggcaucgg

SEQ ID NO: 2344418 - RNA, 19 nt, Artificial Sequence
  Description of Artificial Sequence: Synthetic oligonucleotide
ucucgaugcucagggaguc

SEQ ID NO: 2344419 - RNA, 19 nt, Artificial Sequence
  Description of Artificial Sequence: Synthetic oligonucleotide
gguacggcuggcugggccc

SEQ ID NO: 2344420 - RNA, 19 nt, Artificial Sequence
  Description of Artificial Sequence: Synthetic oligonucleotide
caauggcacgguagccugc

SEQ ID NO: 2344421 - RNA, 19 nt, Artificial Sequence
  Description of Artificial Sequence: Synthetic oligonucleotide
caucaguagaugcccuuca

SEQ ID NO: 2344422 - RNA, 19 nt, Artificial Sequence
  Description of Artificial Sequence: Synthetic oligonucleotide
gguagaggccugccgcacg

SEQ ID NO: 2344423 - RNA, 19 nt, Artificial Sequence
  Description of Artificial Sequence: Synthetic oligonucleotide
agaggccugccgcacgcug

SEQ ID NO: 2344424 - RNA, 19 nt, Artificial Sequence
  Description of Artificial Sequence: Synthetic oligonucleotide
gggugugggaaguguggcg

SEQ ID NO: 2344425 - RNA, 19 nt, Artificial Sequence
  Description of Artificial Sequence: Synthetic oligonucleotide
cuguaguuaugugggacca

SEQ ID NO: 2344426 - RNA, 19 nt, Artificial Sequence
  Description of Artificial Sequence: Synthetic oligonucleotide
cacccgcuuguugucaggg

SEQ ID NO: 2344427 - RNA, 19 nt, Artificial Sequence
  Description of Artificial Sequence: Synthetic oligonucleotide
uggccugaacagcgguagc

SEQ ID NO: 2344428 - RNA, 19 nt, Artificial Sequence
  Description of Artificial Sequence: Synthetic oligonucleotide
cugggucucgggacacagg

SEQ ID NO: 2344429 - RNA, 19 nt, Artificial Sequence
  Description of Artificial Sequence: Synthetic oligonucleotide
ggcaucggaacuucugauc

SEQ ID NO: 2344430 - RNA, 19 nt, Artificial Sequence
  Description of Artificial Sequence: Synthetic oligonucleotide
cagccugguacacugguaa

SEQ ID NO: 2344431 - RNA, 19 nt, Artificial Sequence
  Description of Artificial Sequence: Synthetic oligonucleotide
agggucaaagggagauuuc

SEQ ID NO: 2344432 - RNA, 19 nt, Artificial Sequence
  Description of Artificial Sequence: Synthetic oligonucleotide
cccugcagcacaucaguag

SEQ ID NO: 2344433 - RNA, 19 nt, Artificial Sequence
  Description of Artificial Sequence: Synthetic oligonucleotide
gcaucgagaacauccugga

SEQ ID NO: 2344434 - RNA, 19 nt, Artificial Sequence
  Description of Artificial Sequence: Synthetic oligonucleotide
guaguuaugugggaccagu

SEQ ID NO: 2344435 - RNA, 19 nt, Artificial Sequence
  Description of Artificial Sequence: Synthetic oligonucleotide
cagcaucgagaacauccug

SEQ ID NO: 2344436 - RNA, 19 nt, Artificial Sequence
  Description of Artificial Sequence: Synthetic oligonucleotide
acuuggccguuucuccaga

SEQ ID NO: 2344437 - RNA, 19 nt, Artificial Sequence
  Description of Artificial Sequence: Synthetic oligonucleotide
gucugcaugccagugucga

SEQ ID NO: 2344438 - RNA, 19 nt, Artificial Sequence
  Description of Artificial Sequence: Synthetic oligonucleotide
caucaggucucaggucugc

SEQ ID NO: 2344439 - RNA, 19 nt, Artificial Sequence
  Description of Artificial Sequence: Synthetic oligonucleotide
ucugcaugccagugucgau

SEQ ID NO: 2344440 - RNA, 19 nt, Artificial Sequence
  Description of Artificial Sequence: Synthetic oligonucleotide
ggggacaugcagcucccag

SEQ ID NO: 2344441 - RNA, 19 nt, Artificial Sequence
  Description of Artificial Sequence: Synthetic oligonucleotide
gcugagcaugcccagaucu

SEQ ID NO: 2344442 - RNA, 19 nt, Artificial Sequence
  Description of Artificial Sequence: Synthetic oligonucleotide
gguagccugcauugacaag

SEQ ID NO: 2344443 - RNA, 19 nt, Artificial Sequence
  Description of Artificial Sequence: Synthetic oligonucleotide
ccaauggccugaacagcgg

SEQ ID NO: 2344444 - RNA, 19 nt, Artificial Sequence
  Description of Artificial Sequence: Synthetic oligonucleotide
gguagccucuacccugcag

SEQ ID NO: 2344445 - RNA, 19 nt, Artificial Sequence
  Description of Artificial Sequence: Synthetic oligonucleotide
acgguagccugcauugaca

SEQ ID NO: 2344446 - RNA, 19 nt, Artificial Sequence
  Description of Artificial Sequence: Synthetic oligonucleotide
aagggagauuucaggugaa

SEQ ID NO: 2344447 - RNA, 19 nt, Artificial Sequence
  Description of Artificial Sequence: Synthetic oligonucleotide
agccucuacccugcagcac

SEQ ID NO: 2344448 - RNA, 19 nt, Artificial Sequence
  Description of Artificial Sequence: Synthetic oligonucleotide
cuuucucgaugcucaggga

SEQ ID NO: 2344449 - RNA, 19 nt, Artificial Sequence
  Description of Artificial Sequence: Synthetic oligonucleotide
aggcaccuccucuuccaca

SEQ ID NO: 2344450 - RNA, 19 nt, Artificial Sequence
  Description of Artificial Sequence: Synthetic oligonucleotide
caccacuuggccguuucuc

SEQ ID NO: 2344451 - RNA, 19 nt, Artificial Sequence
  Description of Artificial Sequence: Synthetic oligonucleotide
agaaggggaaggccucauu

SEQ ID NO: 2344452 - RNA, 19 nt, Artificial Sequence
  Description of Artificial Sequence: Synthetic oligonucleotide
gccucuacccugcagcaca

SEQ ID NO: 2344453 - RNA, 19 nt, Artificial Sequence
  Description of Artificial Sequence: Synthetic oligonucleotide
ggccugaacagcgguagcc

SEQ ID NO: 2344454 - RNA, 19 nt, Artificial Sequence
  Description of Artificial Sequence: Synthetic oligonucleotide
ccccaacaaaggauagccg

SEQ ID NO: 2344455 - RNA, 19 nt, Artificial Sequence
  Description of Artificial Sequence: Synthetic oligonucleotide
aucccgggugucaucaggu

SEQ ID NO: 2344456 - RNA, 19 nt, Artificial Sequence
  Description of Artificial Sequence: Synthetic oligonucleotide
acccgaagucagcccuccg

SEQ ID NO: 2344457 - RNA, 19 nt, Artificial Sequence
  Description of Artificial Sequence: Synthetic oligonucleotide
agucagcccuccgaacaug

SEQ ID NO: 2344458 - RNA, 19 nt, Artificial Sequence
  Description of Artificial Sequence: Synthetic oligonucleotide
cagggcauuugugcaguac

SEQ ID NO: 2344459 - RNA, 19 nt, Artificial Sequence
  Description of Artificial Sequence: Synthetic oligonucleotide
ccgcacgcugcuuaucccg

SEQ ID NO: 2344460 - RNA, 19 nt, Artificial Sequence
  Description of Artificial Sequence: Synthetic oligonucleotide
gguaagcaguaugcacggg

SEQ ID NO: 2344461 - RNA, 19 nt, Artificial Sequence
  Description of Artificial Sequence: Synthetic oligonucleotide
gauggccuccaggccaaac

SEQ ID NO: 2344462 - RNA, 19 nt, Artificial Sequence
  Description of Artificial Sequence: Synthetic oligonucleotide
cgauagccuuucucgaugc

SEQ ID NO: 2344463 - RNA, 19 nt, Artificial Sequence
  Description of Artificial Sequence: Synthetic oligonucleotide
gccguuucuccagauggcc

SEQ ID NO: 2344464 - RNA, 19 nt, Artificial Sequence
  Description of Artificial Sequence: Synthetic oligonucleotide
ucccgggugucaucagguc

SEQ ID NO: 2344465 - RNA, 19 nt, Artificial Sequence
  Description of Artificial Sequence: Synthetic oligonucleotide
gauagccuuucucgaugcu

SEQ ID NO: 2344466 - RNA, 19 nt, Artificial Sequence
  Description of Artificial Sequence: Synthetic oligonucleotide
accggcccaccacuggggu

SEQ ID NO: 2344467 - RNA, 19 nt, Artificial Sequence
  Description of Artificial Sequence: Synthetic oligonucleotide
ccaggcgucgguagaggcc

SEQ ID NO: 2344468 - RNA, 19 nt, Artificial Sequence
  Description of Artificial Sequence: Synthetic oligonucleotide
gccauaagcgaugguuuug

SEQ ID NO: 2344469 - RNA, 19 nt, Artificial Sequence
  Description of Artificial Sequence: Synthetic oligonucleotide
ucagggucaaagggagauu

SEQ ID NO: 2344470 - RNA, 19 nt, Artificial Sequence
  Description of Artificial Sequence: Synthetic oligonucleotide
gagaaugguacggcuggcu

SEQ ID NO: 2344471 - RNA, 19 nt, Artificial Sequence
  Description of Artificial Sequence: Synthetic oligonucleotide
cccaacaaaggauagccgu

SEQ ID NO: 2344472 - RNA, 19 nt, Artificial Sequence
  Description of Artificial Sequence: Synthetic oligonucleotide
acccgcuuguugucagggu

SEQ ID NO: 2344473 - RNA, 19 nt, Artificial Sequence
  Description of Artificial Sequence: Synthetic oligonucleotide
aggccugccgcacgcugcu

SEQ ID NO: 2344474 - RNA, 19 nt, Artificial Sequence
  Description of Artificial Sequence: Synthetic oligonucleotide
agggagucaauggcacggu

SEQ ID NO: 2344475 - RNA, 19 nt, Artificial Sequence
  Description of Artificial Sequence: Synthetic oligonucleotide
gucgauagccuuucucgau

SEQ ID NO: 2344476 - RNA, 19 nt, Artificial Sequence
  Description of Artificial Sequence: Synthetic oligonucleotide
gaggcacaccaggcgucgg

SEQ ID NO: 2344477 - RNA, 19 nt, Artificial Sequence
  Description of Artificial Sequence: Synthetic oligonucleotide
caccaggcgucgguagagg

SEQ ID NO: 2344478 - RNA, 19 nt, Artificial Sequence
  Description of Artificial Sequence: Synthetic oligonucleotide
ccgggugucaucaggucuc

SEQ ID NO: 2344479 - RNA, 19 nt, Artificial Sequence
  Description of Artificial Sequence: Synthetic oligonucleotide
uugcucaggucagcaucga

SEQ ID NO: 2344480 - RNA, 19 nt, Artificial Sequence
  Description of Artificial Sequence: Synthetic oligonucleotide
cuccgaacauggcccacca

SEQ ID NO: 2344481 - RNA, 19 nt, Artificial Sequence
  Description of Artificial Sequence: Synthetic oligonucleotide
cugauccuguagaacugua

SEQ ID NO: 2344482 - RNA, 19 nt, Artificial Sequence
  Description of Artificial Sequence: Synthetic oligonucleotide
gggacacagggcauuugug

SEQ ID NO: 2344483 - RNA, 19 nt, Artificial Sequence
  Description of Artificial Sequence: Synthetic oligonucleotide
cugcaugccagugucgaua

SEQ ID NO: 2344484 - RNA, 19 nt, Artificial Sequence
  Description of Artificial Sequence: Synthetic oligonucleotide
gugaggcacaccaggcguc

SEQ ID NO: 2344485 - RNA, 19 nt, Artificial Sequence
  Description of Artificial Sequence: Synthetic oligonucleotide
gcucagggagucaauggca

SEQ ID NO: 2344486 - RNA, 19 nt, Artificial Sequence
  Description of Artificial Sequence: Synthetic oligonucleotide
ggucugcaugccagugucg

SEQ ID NO: 2344487 - RNA, 19 nt, Artificial Sequence
  Description of Artificial Sequence: Synthetic oligonucleotide
gccuuucucgaugcucagg

SEQ ID NO: 2344488 - RNA, 19 nt, Artificial Sequence
  Description of Artificial Sequence: Synthetic oligonucleotide
ccauaagcuggcaucggaa

SEQ ID NO: 2344489 - RNA, 19 nt, Artificial Sequence
  Description of Artificial Sequence: Synthetic oligonucleotide
ggugaaccugggcaggaua

SEQ ID NO: 2344490 - RNA, 19 nt, Artificial Sequence
  Description of Artificial Sequence: Synthetic oligonucleotide
ggagaaugguacggcuggc

SEQ ID NO: 2344491 - RNA, 19 nt, Artificial Sequence
  Description of Artificial Sequence: Synthetic oligonucleotide
ccaacaaaggauagccgua

SEQ ID NO: 2344492 - RNA, 19 nt, Artificial Sequence
  Description of Artificial Sequence: Synthetic oligonucleotide
caacaaaggauagccguau

SEQ ID NO: 2344493 - RNA, 19 nt, Artificial Sequence
  Description of Artificial Sequence: Synthetic oligonucleotide
cuucacccgcuuguuguca

SEQ ID NO: 2344494 - RNA, 19 nt, Artificial Sequence
  Description of Artificial Sequence: Synthetic oligonucleotide
caguuguguugggccacag

SEQ ID NO: 2344495 - RNA, 19 nt, Artificial Sequence
  Description of Artificial Sequence: Synthetic oligonucleotide
cauugacaaggccaugcuu

SEQ ID NO: 2344496 - RNA, 19 nt, Artificial Sequence
  Description of Artificial Sequence: Synthetic oligonucleotide
caauggccugaacagcggu

SEQ ID NO: 2344497 - RNA, 19 nt, Artificial Sequence
  Description of Artificial Sequence: Synthetic oligonucleotide
caucggaacuucugauccu

SEQ ID NO: 2344498 - RNA, 19 nt, Artificial Sequence
  Description of Artificial Sequence: Synthetic oligonucleotide
gauagccguauggcccgga

SEQ ID NO: 2344499 - RNA, 19 nt, Artificial Sequence
  Description of Artificial Sequence: Synthetic oligonucleotide
cugcauugacaaggccaug

SEQ ID NO: 2344500 - RNA, 19 nt, Artificial Sequence
  Description of Artificial Sequence: Synthetic oligonucleotide
gagucggcaggcagggugu

SEQ ID NO: 2344501 - RNA, 19 nt, Artificial Sequence
  Description of Artificial Sequence: Synthetic oligonucleotide
ggggucucggauguagcca

SEQ ID NO: 2344502 - RNA, 19 nt, Artificial Sequence
  Description of Artificial Sequence: Synthetic oligonucleotide
gcaugcccagaucuucaga

SEQ ID NO: 2344503 - RNA, 19 nt, Artificial Sequence
  Description of Artificial Sequence: Synthetic oligonucleotide
uccugggucucgggacaca

SEQ ID NO: 2344504 - RNA, 19 nt, Artificial Sequence
  Description of Artificial Sequence: Synthetic oligonucleotide
ccuguagaacuguaguuau

SEQ ID NO: 2344505 - RNA, 19 nt, Artificial Sequence
  Description of Artificial Sequence: Synthetic oligonucleotide
ggugcccugcagcucucac

SEQ ID NO: 2344506 - RNA, 19 nt, Artificial Sequence
  Description of Artificial Sequence: Synthetic oligonucleotide
caggcgucgguagaggccu

SEQ ID NO: 2344507 - RNA, 19 nt, Artificial Sequence
  Description of Artificial Sequence: Synthetic oligonucleotide
gggaaguguggcgguuucc

SEQ ID NO: 2344508 - RNA, 19 nt, Artificial Sequence
  Description of Artificial Sequence: Synthetic oligonucleotide
acagccugguacacuggua

SEQ ID NO: 2344509 - RNA, 19 nt, Artificial Sequence
  Description of Artificial Sequence: Synthetic oligonucleotide
cgcacgcugcuuaucccgg

SEQ ID NO: 2344510 - RNA, 19 nt, Artificial Sequence
  Description of Artificial Sequence: Synthetic oligonucleotide
ccagugucgauagccuuuc

SEQ ID NO: 2344511 - RNA, 19 nt, Artificial Sequence
  Description of Artificial Sequence: Synthetic oligonucleotide
uagaggccugccgcacgcu

SEQ ID NO: 2344512 - RNA, 19 nt, Artificial Sequence
  Description of Artificial Sequence: Synthetic oligonucleotide
agucggcaggcagggugug

SEQ ID NO: 2344513 - RNA, 19 nt, Artificial Sequence
  Description of Artificial Sequence: Synthetic oligonucleotide
gcgguuuccaauggccuga

SEQ ID NO: 2344514 - RNA, 19 nt, Artificial Sequence
  Description of Artificial Sequence: Synthetic oligonucleotide
gccgcacgcugcuuauccc

SEQ ID NO: 2344515 - RNA, 19 nt, Artificial Sequence
  Description of Artificial Sequence: Synthetic oligonucleotide
cucaggucugcaugccagu

SEQ ID NO: 2344516 - RNA, 19 nt, Artificial Sequence
  Description of Artificial Sequence: Synthetic oligonucleotide
gguuuccaauggccugaac

SEQ ID NO: 2344517 - RNA, 19 nt, Artificial Sequence
  Description of Artificial Sequence: Synthetic oligonucleotide
gcgguagccucuacccugc

SEQ ID NO: 2344518 - RNA, 19 nt, Artificial Sequence
  Description of Artificial Sequence: Synthetic oligonucleotide
cugcagcacaucaguagau

SEQ ID NO: 2344519 - RNA, 19 nt, Artificial Sequence
  Description of Artificial Sequence: Synthetic oligonucleotide
cgucgguagaggccugccg

SEQ ID NO: 2344520 - RNA, 19 nt, Artificial Sequence
  Description of Artificial Sequence: Synthetic oligonucleotide
gggccacagccccaccuac

SEQ ID NO: 2344521 - RNA, 19 nt, Artificial Sequence
  Description of Artificial Sequence: Synthetic oligonucleotide
gcuuaucccgggugucauc

SEQ ID NO: 2344522 - RNA, 19 nt, Artificial Sequence
  Description of Artificial Sequence: Synthetic oligonucleotide
gcugcuuaucccggguguc

SEQ ID NO: 2344523 - RNA, 19 nt, Artificial Sequence
  Description of Artificial Sequence: Synthetic oligonucleotide
ggauagccguauggcccgg

SEQ ID NO: 2344524 - RNA, 19 nt, Artificial Sequence
  Description of Artificial Sequence: Synthetic oligonucleotide
ccguauggcccggaccagg

SEQ ID NO: 2344525 - RNA, 19 nt, Artificial Sequence
  Description of Artificial Sequence: Synthetic oligonucleotide
cccgaagucagcccuccga

SEQ ID NO: 2344526 - RNA, 19 nt, Artificial Sequence
  Description of Artificial Sequence: Synthetic oligonucleotide
auggcacgguagccugcau

SEQ ID NO: 2344527 - RNA, 19 nt, Artificial Sequence
  Description of Artificial Sequence: Synthetic oligonucleotide
cugagcaugcccagaucuu

SEQ ID NO: 2344528 - RNA, 19 nt, Artificial Sequence
  Description of Artificial Sequence: Synthetic oligonucleotide
gggucucggauguagccau

SEQ ID NO: 2344529 - RNA, 19 nt, Artificial Sequence
  Description of Artificial Sequence: Synthetic oligonucleotide
cauaagcgaugguuuuguu

SEQ ID NO: 2344530 - RNA, 19 nt, Artificial Sequence
  Description of Artificial Sequence: Synthetic oligonucleotide
ccuggagaaugguacggcu

SEQ ID NO: 2344531 - RNA, 19 nt, Artificial Sequence
  Description of Artificial Sequence: Synthetic oligonucleotide
cucuacccugcagcacauc

SEQ ID NO: 2344532 - RNA, 19 nt, Artificial Sequence
  Description of Artificial Sequence: Synthetic oligonucleotide
gcaugccagugucgauagc

SEQ ID NO: 2344533 - RNA, 19 nt, Artificial Sequence
  Description of Artificial Sequence: Synthetic oligonucleotide
cccaccacuuggccguuuc

SEQ ID NO: 2344534 - RNA, 19 nt, Artificial Sequence
  Description of Artificial Sequence: Synthetic oligonucleotide
ccauaagcgaugguuuugu

SEQ ID NO: 2344535 - RNA, 19 nt, Artificial Sequence
  Description of Artificial Sequence: Synthetic oligonucleotide
ccaccuacggccagguagu

SEQ ID NO: 2344536 - RNA, 19 nt, Artificial Sequence
  Description of Artificial Sequence: Synthetic oligonucleotide
caccacuggggucucggau

SEQ ID NO: 2344537 - RNA, 19 nt, Artificial Sequence
  Description of Artificial Sequence: Synthetic oligonucleotide
cuuggccguuucuccagau

SEQ ID NO: 2344538 - RNA, 19 nt, Artificial Sequence
  Description of Artificial Sequence: Synthetic oligonucleotide
gcccagaucuucagaacua

SEQ ID NO: 2344539 - RNA, 19 nt, Artificial Sequence
  Description of Artificial Sequence: Synthetic oligonucleotide
ggcgucgguagaggccugc

SEQ ID NO: 2344540 - RNA, 19 nt, Artificial Sequence
  Description of Artificial Sequence: Synthetic oligonucleotide
cagcgguagccucuacccu

SEQ ID NO: 2344541 - RNA, 19 nt, Artificial Sequence
  Description of Artificial Sequence: Synthetic oligonucleotide
guacacugguaagcaguau

SEQ ID NO: 2344542 - RNA, 19 nt, Artificial Sequence
  Description of Artificial Sequence: Synthetic oligonucleotide
cgguagccugcauugacaa

SEQ ID NO: 2344543 - RNA, 19 nt, Artificial Sequence
  Description of Artificial Sequence: Synthetic oligonucleotide
ccaaggcauacucuccacu

SEQ ID NO: 2344544 - RNA, 19 nt, Artificial Sequence
  Description of Artificial Sequence: Synthetic oligonucleotide
aggagucggcaggcagggu

SEQ ID NO: 2344545 - RNA, 19 nt, Artificial Sequence
  Description of Artificial Sequence: Synthetic oligonucleotide
gccugaacagcgguagccu

SEQ ID NO: 2344546 - RNA, 19 nt, Artificial Sequence
  Description of Artificial Sequence: Synthetic oligonucleotide
gcgucgguagaggccugcc

SEQ ID NO: 2344547 - RNA, 19 nt, Artificial Sequence
  Description of Artificial Sequence: Synthetic oligonucleotide
cugccgcacgcugcuuauc

SEQ ID NO: 2344548 - RNA, 19 nt, Artificial Sequence
  Description of Artificial Sequence: Synthetic oligonucleotide
cagccaucacagccuggua

SEQ ID NO: 2344549 - RNA, 19 nt, Artificial Sequence
  Description of Artificial Sequence: Synthetic oligonucleotide
ggccaaacauaggcaccuc

SEQ ID NO: 2344550 - RNA, 19 nt, Artificial Sequence
  Description of Artificial Sequence: Synthetic oligonucleotide
gccguauggcccggaccag

SEQ ID NO: 2344551 - RNA, 19 nt, Artificial Sequence
  Description of Artificial Sequence: Synthetic oligonucleotide
ggcacaccaggcgucggua

SEQ ID NO: 2344552 - RNA, 19 nt, Artificial Sequence
  Description of Artificial Sequence: Synthetic oligonucleotide
gugggaaguguggcgguuu

SEQ ID NO: 2344553 - RNA, 19 nt, Artificial Sequence
  Description of Artificial Sequence: Synthetic oligonucleotide
gccugccgcacgcugcuua

SEQ ID NO: 2344554 - RNA, 19 nt, Artificial Sequence
  Description of Artificial Sequence: Synthetic oligonucleotide
gcacaucaguagaugcccu

SEQ ID NO: 2344555 - RNA, 19 nt, Artificial Sequence
  Description of Artificial Sequence: Synthetic oligonucleotide
gcacgguagccugcauuga

SEQ ID NO: 2344556 - RNA, 19 nt, Artificial Sequence
  Description of Artificial Sequence: Synthetic oligonucleotide
cccgggugucaucaggucu

SEQ ID NO: 2344557 - RNA, 19 nt, Artificial Sequence
  Description of Artificial Sequence: Synthetic oligonucleotide
aggcuguguuuugccugua

SEQ ID NO: 2344558 - RNA, 19 nt, Artificial Sequence
  Description of Artificial Sequence: Synthetic oligonucleotide
guacggcuggcugggcccu

SEQ ID NO: 2344559 - RNA, 19 nt, Artificial Sequence
  Description of Artificial Sequence: Synthetic oligonucleotide
aggcgucgguagaggccug

SEQ ID NO: 2344560 - RNA, 19 nt, Artificial Sequence
  Description of Artificial Sequence: Synthetic oligonucleotide
gucucgggacacagggcau

SEQ ID NO: 2344561 - RNA, 19 nt, Artificial Sequence
  Description of Artificial Sequence: Synthetic oligonucleotide
cagugucgauagccuuucu

SEQ ID NO: 2344562 - RNA, 19 nt, Artificial Sequence
  Description of Artificial Sequence: Synthetic oligonucleotide
cguauggcccggaccaggu

SEQ ID NO: 2344563 - RNA, 19 nt, Artificial Sequence
  Description of Artificial Sequence: Synthetic oligonucleotide
cgguagaggccugccgcac

SEQ ID NO: 2344564 - RNA, 19 nt, Artificial Sequence
  Description of Artificial Sequence: Synthetic oligonucleotide
gcuuguugucagggucaaa

SEQ ID NO: 2344565 - RNA, 19 nt, Artificial Sequence
  Description of Artificial Sequence: Synthetic oligonucleotide
caccuacggccagguagua

SEQ ID NO: 2344566 - RNA, 19 nt, Artificial Sequence
  Description of Artificial Sequence: Synthetic oligonucleotide
ccugccgcacgcugcuuau

SEQ ID NO: 2344567 - RNA, 19 nt, Artificial Sequence
  Description of Artificial Sequence: Synthetic oligonucleotide
ccaccacuuggccguuucu

SEQ ID NO: 2344568 - RNA, 19 nt, Artificial Sequence
  Description of Artificial Sequence: Synthetic oligonucleotide
cgcuuguugucagggucaa

SEQ ID NO: 2344569 - RNA, 19 nt, Artificial Sequence
  Description of Artificial Sequence: Synthetic oligonucleotide
cacuggggucucggaugua

SEQ ID NO: 2344570 - RNA, 19 nt, Artificial Sequence
  Description of Artificial Sequence: Synthetic oligonucleotide
ggcccggaccaggugcccu

SEQ ID NO: 2344571 - RNA, 19 nt, Artificial Sequence
  Description of Artificial Sequence: Synthetic oligonucleotide
ccccaccuacggccaggua

SEQ ID NO: 2344572 - RNA, 19 nt, Artificial Sequence
  Description of Artificial Sequence: Synthetic oligonucleotide
cgagaacauccuggagaau

SEQ ID NO: 2344573 - RNA, 19 nt, Artificial Sequence
  Description of Artificial Sequence: Synthetic oligonucleotide
aaacaaauggaaucgaacc

SEQ ID NO: 2344574 - RNA, 19 nt, Artificial Sequence
  Description of Artificial Sequence: Synthetic oligonucleotide
ucugaaguaaccaugaggg

SEQ ID NO: 2344575 - RNA, 19 nt, Artificial Sequence
  Description of Artificial Sequence: Synthetic oligonucleotide
aaucgaaccaugucacucc

SEQ ID NO: 2344576 - RNA, 19 nt, Artificial Sequence
  Description of Artificial Sequence: Synthetic oligonucleotide
uauucgguaagaauggugc

SEQ ID NO: 2344577 - RNA, 19 nt, Artificial Sequence
  Description of Artificial Sequence: Synthetic oligonucleotide
ugaauguaaaaccuuccgg

SEQ ID NO: 2344578 - RNA, 19 nt, Artificial Sequence
  Description of Artificial Sequence: Synthetic oligonucleotide
aaccaugucacucccuucc

SEQ ID NO: 2344579 - RNA, 19 nt, Artificial Sequence
  Description of Artificial Sequence: Synthetic oligonucleotide
ugcucaaggaaccuaaggg

SEQ ID NO: 2344580 - RNA, 19 nt, Artificial Sequence
  Description of Artificial Sequence: Synthetic oligonucleotide
ugauauucgguaagaaugg

SEQ ID NO: 2344581 - RNA, 19 nt, Artificial Sequence
  Description of Artificial Sequence: Synthetic oligonucleotide
uucugaaguaaccaugagg

SEQ ID NO: 2344582 - RNA, 19 nt, Artificial Sequence
  Description of Artificial Sequence: Synthetic oligonucleotide
uuagagucacacaugaccc

SEQ ID NO: 2344583 - RNA, 19 nt, Artificial Sequence
  Description of Artificial Sequence: Synthetic oligonucleotide
aaaaucuccuuggagcucc

SEQ ID NO: 2344584 - RNA, 19 nt, Artificial Sequence
  Description of Artificial Sequence: Synthetic oligonucleotide
ucugagugaauguaaaacc

SEQ ID NO: 2344585 - RNA, 19 nt, Artificial Sequence
  Description of Artificial Sequence: Synthetic oligonucleotide
aauggaaucgaaccauguc

SEQ ID NO: 2344586 - RNA, 19 nt, Artificial Sequence
  Description of Artificial Sequence: Synthetic oligonucleotide
agaaagacucucuucacgg

SEQ ID NO: 2344587 - RNA, 19 nt, Artificial Sequence
  Description of Artificial Sequence: Synthetic oligonucleotide
aauaaugcccacauacucg

SEQ ID NO: 2344588 - RNA, 19 nt, Artificial Sequence
  Description of Artificial Sequence: Synthetic oligonucleotide
cacaaaaucuccuuggagc

SEQ ID NO: 2344589 - RNA, 19 nt, Artificial Sequence
  Description of Artificial Sequence: Synthetic oligonucleotide
uuugucugagacaucacag

SEQ ID NO: 2344590 - RNA, 19 nt, Artificial Sequence
  Description of Artificial Sequence: Synthetic oligonucleotide
auuccacucagacagaaag

SEQ ID NO: 2344591 - RNA, 19 nt, Artificial Sequence
  Description of Artificial Sequence: Synthetic oligonucleotide
aacaaauggaaucgaacca

SEQ ID NO: 2344592 - RNA, 19 nt, Artificial Sequence
  Description of Artificial Sequence: Synthetic oligonucleotide
aaugcccacauacucggcg

SEQ ID NO: 2344593 - RNA, 19 nt, Artificial Sequence
  Description of Artificial Sequence: Synthetic oligonucleotide
uggauaucaaacaaaugga

SEQ ID NO: 2344594 - RNA, 19 nt, Artificial Sequence
  Description of Artificial Sequence: Synthetic oligonucleotide
ucauuagagucacacauga

SEQ ID NO: 2344595 - RNA, 19 nt, Artificial Sequence
  Description of Artificial Sequence: Synthetic oligonucleotide
aaaaccuuccgguaagugu

SEQ ID NO: 2344596 - RNA, 19 nt, Artificial Sequence
  Description of Artificial Sequence: Synthetic oligonucleotide
agcaguuucucaucugucc

SEQ ID NO: 2344597 - RNA, 19 nt, Artificial Sequence
  Description of Artificial Sequence: Synthetic oligonucleotide
acuggagacaucuggaauc

SEQ ID NO: 2344598 - RNA, 19 nt, Artificial Sequence
  Description of Artificial Sequence: Synthetic oligonucleotide
uuuaguguugcuuccaggu

SEQ ID NO: 2344599 - RNA, 19 nt, Artificial Sequence
  Description of Artificial Sequence: Synthetic oligonucleotide
auaaugcccacauacucgg

SEQ ID NO: 2344600 - RNA, 19 nt, Artificial Sequence
  Description of Artificial Sequence: Synthetic oligonucleotide
ucauaggagggcaugaugu

SEQ ID NO: 2344601 - RNA, 19 nt, Artificial Sequence
  Description of Artificial Sequence: Synthetic oligonucleotide
gucuagaacaugcugagcc

SEQ ID NO: 2344602 - RNA, 19 nt, Artificial Sequence
  Description of Artificial Sequence: Synthetic oligonucleotide
aaccuaaggggugauauuc

SEQ ID NO: 2344603 - RNA, 19 nt, Artificial Sequence
  Description of Artificial Sequence: Synthetic oligonucleotide
uuaauaaugcccacauacu

SEQ ID NO: 2344604 - RNA, 19 nt, Artificial Sequence
  Description of Artificial Sequence: Synthetic oligonucleotide
ucacaaguacccuagaguc

SEQ ID NO: 2344605 - RNA, 19 nt, Artificial Sequence
  Description of Artificial Sequence: Synthetic oligonucleotide
uucacaaguacccuagagu

SEQ ID NO: 2344606 - RNA, 19 nt, Artificial Sequence
  Description of Artificial Sequence: Synthetic oligonucleotide
auggaaucgaaccauguca

SEQ ID NO: 2344607 - RNA, 19 nt, Artificial Sequence
  Description of Artificial Sequence: Synthetic oligonucleotide
ucuuacaugccuuauggau

SEQ ID NO: 2344608 - RNA, 19 nt, Artificial Sequence
  Description of Artificial Sequence: Synthetic oligonucleotide
ucuuuugucugagacauca

SEQ ID NO: 2344609 - RNA, 19 nt, Artificial Sequence
  Description of Artificial Sequence: Synthetic oligonucleotide
ucuagaacaugcugagccg

SEQ ID NO: 2344610 - RNA, 19 nt, Artificial Sequence
  Description of Artificial Sequence: Synthetic oligonucleotide
agacuugagcaucugcagc

SEQ ID NO: 2344611 - RNA, 19 nt, Artificial Sequence
  Description of Artificial Sequence: Synthetic oligonucleotide
gaagguuuaguguugcuuc

SEQ ID NO: 2344612 - RNA, 19 nt, Artificial Sequence
  Description of Artificial Sequence: Synthetic oligonucleotide
guuacuugucagcagauac

SEQ ID NO: 2344613 - RNA, 19 nt, Artificial Sequence
  Description of Artificial Sequence: Synthetic oligonucleotide
uggagguaguuaauaaugc

SEQ ID NO: 2344614 - RNA, 19 nt, Artificial Sequence
  Description of Artificial Sequence: Synthetic oligonucleotide
agcgacuuuguguucauuc

SEQ ID NO: 2344615 - RNA, 19 nt, Artificial Sequence
  Description of Artificial Sequence: Synthetic oligonucleotide
guaagugucuagaacaugc

SEQ ID NO: 2344616 - RNA, 19 nt, Artificial Sequence
  Description of Artificial Sequence: Synthetic oligonucleotide
gagguaguuaauaaugccc

SEQ ID NO: 2344617 - RNA, 19 nt, Artificial Sequence
  Description of Artificial Sequence: Synthetic oligonucleotide
ugccccaaaaggaaacugg

SEQ ID NO: 2344618 - RNA, 19 nt, Artificial Sequence
  Description of Artificial Sequence: Synthetic oligonucleotide
uuugggcaggucauuagag

SEQ ID NO: 2344619 - RNA, 19 nt, Artificial Sequence
  Description of Artificial Sequence: Synthetic oligonucleotide
uaguguugcuuccagguug

SEQ ID NO: 2344620 - RNA, 19 nt, Artificial Sequence
  Description of Artificial Sequence: Synthetic oligonucleotide
aggauaaccagcgugagca

SEQ ID NO: 2344621 - RNA, 19 nt, Artificial Sequence
  Description of Artificial Sequence: Synthetic oligonucleotide
auucgguaagaauggugcc

SEQ ID NO: 2344622 - RNA, 19 nt, Artificial Sequence
  Description of Artificial Sequence: Synthetic oligonucleotide
auacucggcggccagcugc

SEQ ID NO: 2344623 - RNA, 19 nt, Artificial Sequence
  Description of Artificial Sequence: Synthetic oligonucleotide
gacaucuggaaucuuccag

SEQ ID NO: 2344624 - RNA, 19 nt, Artificial Sequence
  Description of Artificial Sequence: Synthetic oligonucleotide
aagugucuagaacaugcug

SEQ ID NO: 2344625 - RNA, 19 nt, Artificial Sequence
  Description of Artificial Sequence: Synthetic oligonucleotide
ugggacaauguuuugggca

SEQ ID NO: 2344626 - RNA, 19 nt, Artificial Sequence
  Description of Artificial Sequence: Synthetic oligonucleotide
gaaguuacuugucagcaga

SEQ ID NO: 2344627 - RNA, 19 nt, Artificial Sequence
  Description of Artificial Sequence: Synthetic oligonucleotide
uaguuaauaaugcccacau

SEQ ID NO: 2344628 - RNA, 19 nt, Artificial Sequence
  Description of Artificial Sequence: Synthetic oligonucleotide
agagucgugguccaccagg

SEQ ID NO: 2344629 - RNA, 19 nt, Artificial Sequence
  Description of Artificial Sequence: Synthetic oligonucleotide
aaugcugaaguuacuuguc

SEQ ID NO: 2344630 - RNA, 19 nt, Artificial Sequence
  Description of Artificial Sequence: Synthetic oligonucleotide
uuguguucauuccacucag

SEQ ID NO: 2344631 - RNA, 19 nt, Artificial Sequence
  Description of Artificial Sequence: Synthetic oligonucleotide
ugagacaucacagugucuc

SEQ ID NO: 2344632 - RNA, 19 nt, Artificial Sequence
  Description of Artificial Sequence: Synthetic oligonucleotide
gaaguaaccaugagggcag

SEQ ID NO: 2344633 - RNA, 19 nt, Artificial Sequence
  Description of Artificial Sequence: Synthetic oligonucleotide
uggaaucgaaccaugucac

SEQ ID NO: 2344634 - RNA, 19 nt, Artificial Sequence
  Description of Artificial Sequence: Synthetic oligonucleotide
uuucucaucugucccauuc

SEQ ID NO: 2344635 - RNA, 19 nt, Artificial Sequence
  Description of Artificial Sequence: Synthetic oligonucleotide
guugcuuccagguugcuca

SEQ ID NO: 2344636 - RNA, 19 nt, Artificial Sequence
  Description of Artificial Sequence: Synthetic oligonucleotide
acagaaagacucucuucac

SEQ ID NO: 2344637 - RNA, 19 nt, Artificial Sequence
  Description of Artificial Sequence: Synthetic oligonucleotide
agacagaaagacucucuuc

SEQ ID NO: 2344638 - RNA, 19 nt, Artificial Sequence
  Description of Artificial Sequence: Synthetic oligonucleotide
uuuugggcaggucauuaga

SEQ ID NO: 2344639 - RNA, 19 nt, Artificial Sequence
  Description of Artificial Sequence: Synthetic oligonucleotide
ggaucuggcucuuacaugc

SEQ ID NO: 2344640 - RNA, 19 nt, Artificial Sequence
  Description of Artificial Sequence: Synthetic oligonucleotide
ugaaguuacuugucagcag

SEQ ID NO: 2344641 - RNA, 19 nt, Artificial Sequence
  Description of Artificial Sequence: Synthetic oligonucleotide
aaccagcgugaccacgugc

SEQ ID NO: 2344642 - RNA, 19 nt, Artificial Sequence
  Description of Artificial Sequence: Synthetic oligonucleotide
uaagaauggugccaucuuc

SEQ ID NO: 2344643 - RNA, 19 nt, Artificial Sequence
  Description of Artificial Sequence: Synthetic oligonucleotide
uaaccaugagggcagcgcc

SEQ ID NO: 2344644 - RNA, 19 nt, Artificial Sequence
  Description of Artificial Sequence: Synthetic oligonucleotide
acaaugcugaaguuacuug

SEQ ID NO: 2344645 - RNA, 19 nt, Artificial Sequence
  Description of Artificial Sequence: Synthetic oligonucleotide
ugcugaaguuacuugucag

SEQ ID NO: 2344646 - RNA, 19 nt, Artificial Sequence
  Description of Artificial Sequence: Synthetic oligonucleotide
cucgcaguagccaaccagc

SEQ ID NO: 2344647 - RNA, 19 nt, Artificial Sequence
  Description of Artificial Sequence: Synthetic oligonucleotide
aucgaaccaugucacuccc

SEQ ID NO: 2344648 - RNA, 19 nt, Artificial Sequence
  Description of Artificial Sequence: Synthetic oligonucleotide
caucucuuuugucugagac

SEQ ID NO: 2344649 - RNA, 19 nt, Artificial Sequence
  Description of Artificial Sequence: Synthetic oligonucleotide
uucacaucuugguacuuug

SEQ ID NO: 2344650 - RNA, 19 nt, Artificial Sequence
  Description of Artificial Sequence: Synthetic oligonucleotide
gaugucaucuuggaagggc

SEQ ID NO: 2344651 - RNA, 19 nt, Artificial Sequence
  Description of Artificial Sequence: Synthetic oligonucleotide
uaaggggugauauucggua

SEQ ID NO: 2344652 - RNA, 19 nt, Artificial Sequence
  Description of Artificial Sequence: Synthetic oligonucleotide
uccacucagacagaaagac

SEQ ID NO: 2344653 - RNA, 19 nt, Artificial Sequence
  Description of Artificial Sequence: Synthetic oligonucleotide
gcucaaggaaccuaagggg

SEQ ID NO: 2344654 - RNA, 19 nt, Artificial Sequence
  Description of Artificial Sequence: Synthetic oligonucleotide
ugucccauucugaaguaac

SEQ ID NO: 2344655 - RNA, 19 nt, Artificial Sequence
  Description of Artificial Sequence: Synthetic oligonucleotide
aaacuggagacaucuggaa

SEQ ID NO: 2344656 - RNA, 19 nt, Artificial Sequence
  Description of Artificial Sequence: Synthetic oligonucleotide
gguguucacaucuugguac

SEQ ID NO: 2344657 - RNA, 19 nt, Artificial Sequence
  Description of Artificial Sequence: Synthetic oligonucleotide
guuuaguguugcuuccagg

SEQ ID NO: 2344658 - RNA, 19 nt, Artificial Sequence
  Description of Artificial Sequence: Synthetic oligonucleotide
ucugacuuccuuccucagc

SEQ ID NO: 2344659 - RNA, 19 nt, Artificial Sequence
  Description of Artificial Sequence: Synthetic oligonucleotide
ugagccgugggucuuucug

SEQ ID NO: 2344660 - RNA, 19 nt, Artificial Sequence
  Description of Artificial Sequence: Synthetic oligonucleotide
uacccuagagucguggucc

SEQ ID NO: 2344661 - RNA, 19 nt, Artificial Sequence
  Description of Artificial Sequence: Synthetic oligonucleotide
acacaugacccucgugccc

SEQ ID NO: 2344662 - RNA, 19 nt, Artificial Sequence
  Description of Artificial Sequence: Synthetic oligonucleotide
aggucguuugccacaaugc

SEQ ID NO: 2344663 - RNA, 19 nt, Artificial Sequence
  Description of Artificial Sequence: Synthetic oligonucleotide
uaagugucuagaacaugcu

SEQ ID NO: 2344664 - RNA, 19 nt, Artificial Sequence
  Description of Artificial Sequence: Synthetic oligonucleotide
gugucuagaacaugcugag

SEQ ID NO: 2344665 - RNA, 19 nt, Artificial Sequence
  Description of Artificial Sequence: Synthetic oligonucleotide
uccgguaagugucuagaac

SEQ ID NO: 2344666 - RNA, 19 nt, Artificial Sequence
  Description of Artificial Sequence: Synthetic oligonucleotide
uccccaaugcgccucagcu

SEQ ID NO: 2344667 - RNA, 19 nt, Artificial Sequence
  Description of Artificial Sequence: Synthetic oligonucleotide
gaaagacucucuucacggc

SEQ ID NO: 2344668 - RNA, 19 nt, Artificial Sequence
  Description of Artificial Sequence: Synthetic oligonucleotide
agcgugaccacgugcucgc

SEQ ID NO: 2344669 - RNA, 19 nt, Artificial Sequence
  Description of Artificial Sequence: Synthetic oligonucleotide
cuuauggauaucaaacaaa

SEQ ID NO: 2344670 - RNA, 19 nt, Artificial Sequence
  Description of Artificial Sequence: Synthetic oligonucleotide
aauguuuugggcaggucau

SEQ ID NO: 2344671 - RNA, 19 nt, Artificial Sequence
  Description of Artificial Sequence: Synthetic oligonucleotide
caauguuuugggcagguca

SEQ ID NO: 2344672 - RNA, 19 nt, Artificial Sequence
  Description of Artificial Sequence: Synthetic oligonucleotide
ucgcaguagccaaccagcg

SEQ ID NO: 2344673 - RNA, 19 nt, Artificial Sequence
  Description of Artificial Sequence: Synthetic oligonucleotide
auguaaaaccuuccgguaa

SEQ ID NO: 2344674 - RNA, 19 nt, Artificial Sequence
  Description of Artificial Sequence: Synthetic oligonucleotide
aaguacccuagagucgugg

SEQ ID NO: 2344675 - RNA, 19 nt, Artificial Sequence
  Description of Artificial Sequence: Synthetic oligonucleotide
guguucauuccacucagac

SEQ ID NO: 2344676 - RNA, 19 nt, Artificial Sequence
  Description of Artificial Sequence: Synthetic oligonucleotide
gaaucgaaccaugucacuc

SEQ ID NO: 2344677 - RNA, 19 nt, Artificial Sequence
  Description of Artificial Sequence: Synthetic oligonucleotide
acaaguacccuagagucgu

SEQ ID NO: 2344678 - RNA, 19 nt, Artificial Sequence
  Description of Artificial Sequence: Synthetic oligonucleotide
aaauggaaucgaaccaugu

SEQ ID NO: 2344679 - RNA, 19 nt, Artificial Sequence
  Description of Artificial Sequence: Synthetic oligonucleotide
ugucucugagugaauguaa

SEQ ID NO: 2344680 - RNA, 19 nt, Artificial Sequence
  Description of Artificial Sequence: Synthetic oligonucleotide
aucucuuuugucugagaca

SEQ ID NO: 2344681 - RNA, 19 nt, Artificial Sequence
  Description of Artificial Sequence: Synthetic oligonucleotide
gagugaauguaaaaccuuc

SEQ ID NO: 2344682 - RNA, 19 nt, Artificial Sequence
  Description of Artificial Sequence: Synthetic oligonucleotide
uuccacucagacagaaaga

SEQ ID NO: 2344683 - RNA, 19 nt, Artificial Sequence
  Description of Artificial Sequence: Synthetic oligonucleotide
uucuccuccauaaggccac

SEQ ID NO: 2344684 - RNA, 19 nt, Artificial Sequence
  Description of Artificial Sequence: Synthetic oligonucleotide
auucugaaguaaccaugag

SEQ ID NO: 2344685 - RNA, 19 nt, Artificial Sequence
  Description of Artificial Sequence: Synthetic oligonucleotide
acucccuuccacgugcccc

SEQ ID NO: 2344686 - RNA, 19 nt, Artificial Sequence
  Description of Artificial Sequence: Synthetic oligonucleotide
uucgguaagaauggugcca

SEQ ID NO: 2344687 - RNA, 19 nt, Artificial Sequence
  Description of Artificial Sequence: Synthetic oligonucleotide
gagagacuugagcaucugc

SEQ ID NO: 2344688 - RNA, 19 nt, Artificial Sequence
  Description of Artificial Sequence: Synthetic oligonucleotide
ucuggagagacuugagcau

SEQ ID NO: 2344689 - RNA, 19 nt, Artificial Sequence
  Description of Artificial Sequence: Synthetic oligonucleotide
aaccagcgugagcaguuuc

SEQ ID NO: 2344690 - RNA, 19 nt, Artificial Sequence
  Description of Artificial Sequence: Synthetic oligonucleotide
gggacaauguuuugggcag

SEQ ID NO: 2344691 - RNA, 19 nt, Artificial Sequence
  Description of Artificial Sequence: Synthetic oligonucleotide
gcaguagccaaccagcgug

SEQ ID NO: 2344692 - RNA, 19 nt, Artificial Sequence
  Description of Artificial Sequence: Synthetic oligonucleotide
aggggugauauucgguaag

SEQ ID NO: 2344693 - RNA, 19 nt, Artificial Sequence
  Description of Artificial Sequence: Synthetic oligonucleotide
aaaggaaacuggagacauc

SEQ ID NO: 2344694 - RNA, 19 nt, Artificial Sequence
  Description of Artificial Sequence: Synthetic oligonucleotide
agggaucuggcucuuacau

SEQ ID NO: 2344695 - RNA, 19 nt, Artificial Sequence
  Description of Artificial Sequence: Synthetic oligonucleotide
gucgugguccaccaggggc

SEQ ID NO: 2344696 - RNA, 19 nt, Artificial Sequence
  Description of Artificial Sequence: Synthetic oligonucleotide
cugaaguaaccaugagggc

SEQ ID NO: 2344697 - RNA, 19 nt, Artificial Sequence
  Description of Artificial Sequence: Synthetic oligonucleotide
cuuacaugccuuauggaua

SEQ ID NO: 2344698 - RNA, 19 nt, Artificial Sequence
  Description of Artificial Sequence: Synthetic oligonucleotide
ucgugguccaccaggggca

SEQ ID NO: 2344699 - RNA, 19 nt, Artificial Sequence
  Description of Artificial Sequence: Synthetic oligonucleotide
uagaacaugcugagccgug

SEQ ID NO: 2344700 - RNA, 19 nt, Artificial Sequence
  Description of Artificial Sequence: Synthetic oligonucleotide
ucuuccucgcaguagccaa

SEQ ID NO: 2344701 - RNA, 19 nt, Artificial Sequence
  Description of Artificial Sequence: Synthetic oligonucleotide
uguguugccagguguucac

SEQ ID NO: 2344702 - RNA, 19 nt, Artificial Sequence
  Description of Artificial Sequence: Synthetic oligonucleotide
cuccauaaggccacagcug

SEQ ID NO: 2344703 - RNA, 19 nt, Artificial Sequence
  Description of Artificial Sequence: Synthetic oligonucleotide
cacaggauaaccagcguga

SEQ ID NO: 2344704 - RNA, 19 nt, Artificial Sequence
  Description of Artificial Sequence: Synthetic oligonucleotide
agggcaugaugucaucuug

SEQ ID NO: 2344705 - RNA, 19 nt, Artificial Sequence
  Description of Artificial Sequence: Synthetic oligonucleotide
augacccucgugcccagcg

SEQ ID NO: 2344706 - RNA, 19 nt, Artificial Sequence
  Description of Artificial Sequence: Synthetic oligonucleotide
auauucgguaagaauggug

SEQ ID NO: 2344707 - RNA, 19 nt, Artificial Sequence
  Description of Artificial Sequence: Synthetic oligonucleotide
ccuuucuccuccauaaggc

SEQ ID NO: 2344708 - RNA, 19 nt, Artificial Sequence
  Description of Artificial Sequence: Synthetic oligonucleotide
gacuuuguguucauuccac

SEQ ID NO: 2344709 - RNA, 19 nt, Artificial Sequence
  Description of Artificial Sequence: Synthetic oligonucleotide
gucacucccuuccacgugc

SEQ ID NO: 2344710 - RNA, 19 nt, Artificial Sequence
  Description of Artificial Sequence: Synthetic oligonucleotide
ccucacaggauaaccagcg

SEQ ID NO: 2344711 - RNA, 19 nt, Artificial Sequence
  Description of Artificial Sequence: Synthetic oligonucleotide
cauccuucaucuccagccc

SEQ ID NO: 2344712 - RNA, 19 nt, Artificial Sequence
  Description of Artificial Sequence: Synthetic oligonucleotide
ucucugagugaauguaaaa

SEQ ID NO: 2344713 - RNA, 19 nt, Artificial Sequence
  Description of Artificial Sequence: Synthetic oligonucleotide
gauacugggacaauguuuu

SEQ ID NO: 2344714 - RNA, 19 nt, Artificial Sequence
  Description of Artificial Sequence: Synthetic oligonucleotide
agcgugagcaguuucucau

SEQ ID NO: 2344715 - RNA, 19 nt, Artificial Sequence
  Description of Artificial Sequence: Synthetic oligonucleotide
guaaccaugagggcagcgc

SEQ ID NO: 2344716 - RNA, 19 nt, Artificial Sequence
  Description of Artificial Sequence: Synthetic oligonucleotide
agaacaugcugagccgugg

SEQ ID NO: 2344717 - RNA, 19 nt, Artificial Sequence
  Description of Artificial Sequence: Synthetic oligonucleotide
uuggaagguuuaguguugc

SEQ ID NO: 2344718 - RNA, 19 nt, Artificial Sequence
  Description of Artificial Sequence: Synthetic oligonucleotide
uuaguguugcuuccagguu

SEQ ID NO: 2344719 - RNA, 19 nt, Artificial Sequence
  Description of Artificial Sequence: Synthetic oligonucleotide
ucagcuccucacaggauaa

SEQ ID NO: 2344720 - RNA, 19 nt, Artificial Sequence
  Description of Artificial Sequence: Synthetic oligonucleotide
ccacacuucacaaguaccc

SEQ ID NO: 2344721 - RNA, 19 nt, Artificial Sequence
  Description of Artificial Sequence: Synthetic oligonucleotide
uagagucacacaugacccu

SEQ ID NO: 2344722 - RNA, 19 nt, Artificial Sequence
  Description of Artificial Sequence: Synthetic oligonucleotide
aaugcgccucagcugucug

SEQ ID NO: 2344723 - RNA, 19 nt, Artificial Sequence
  Description of Artificial Sequence: Synthetic oligonucleotide
acaugccuuauggauauca

SEQ ID NO: 2344724 - RNA, 19 nt, Artificial Sequence
  Description of Artificial Sequence: Synthetic oligonucleotide
ugcucuggggccacaaaau

SEQ ID NO: 2344725 - RNA, 19 nt, Artificial Sequence
  Description of Artificial Sequence: Synthetic oligonucleotide
caggucguuugccacaaug

SEQ ID NO: 2344726 - RNA, 19 nt, Artificial Sequence
  Description of Artificial Sequence: Synthetic oligonucleotide
gacccucgugcccagcggg

SEQ ID NO: 2344727 - RNA, 19 nt, Artificial Sequence
  Description of Artificial Sequence: Synthetic oligonucleotide
cugaaguuacuugucagca

SEQ ID NO: 2344728 - RNA, 19 nt, Artificial Sequence
  Description of Artificial Sequence: Synthetic oligonucleotide
cugagugaauguaaaaccu

SEQ ID NO: 2344729 - RNA, 19 nt, Artificial Sequence
  Description of Artificial Sequence: Synthetic oligonucleotide
acgugcucgcucuggagag

SEQ ID NO: 2344730 - RNA, 19 nt, Artificial Sequence
  Description of Artificial Sequence: Synthetic oligonucleotide
cauuagagucacacaugac

SEQ ID NO: 2344731 - RNA, 19 nt, Artificial Sequence
  Description of Artificial Sequence: Synthetic oligonucleotide
caucugucccauucugaag

SEQ ID NO: 2344732 - RNA, 19 nt, Artificial Sequence
  Description of Artificial Sequence: Synthetic oligonucleotide
ucuucacggcuccuucccc

SEQ ID NO: 2344733 - RNA, 19 nt, Artificial Sequence
  Description of Artificial Sequence: Synthetic oligonucleotide
gagagagcgacuuuguguu

SEQ ID NO: 2344734 - RNA, 19 nt, Artificial Sequence
  Description of Artificial Sequence: Synthetic oligonucleotide
aguacccuagagucguggu

SEQ ID NO: 2344735 - RNA, 19 nt, Artificial Sequence
  Description of Artificial Sequence: Synthetic oligonucleotide
gagucgugguccaccaggg

SEQ ID NO: 2344736 - RNA, 19 nt, Artificial Sequence
  Description of Artificial Sequence: Synthetic oligonucleotide
aggucauuagagucacaca

SEQ ID NO: 2344737 - RNA, 19 nt, Artificial Sequence
  Description of Artificial Sequence: Synthetic oligonucleotide
ugacccucgugcccagcgg

SEQ ID NO: 2344738 - RNA, 19 nt, Artificial Sequence
  Description of Artificial Sequence: Synthetic oligonucleotide
aucaaacaaauggaaucga

SEQ ID NO: 2344739 - RNA, 19 nt, Artificial Sequence
  Description of Artificial Sequence: Synthetic oligonucleotide
cuuggagcucccuguggcc

SEQ ID NO: 2344740 - RNA, 19 nt, Artificial Sequence
  Description of Artificial Sequence: Synthetic oligonucleotide
augucacucccuuccacgu

SEQ ID NO: 2344741 - RNA, 19 nt, Artificial Sequence
  Description of Artificial Sequence: Synthetic oligonucleotide
auaggagggcaugauguca

SEQ ID NO: 2344742 - RNA, 19 nt, Artificial Sequence
  Description of Artificial Sequence: Synthetic oligonucleotide
accuaaggggugauauucg

SEQ ID NO: 2344743 - RNA, 19 nt, Artificial Sequence
  Description of Artificial Sequence: Synthetic oligonucleotide
cugggacaauguuuugggc

SEQ ID NO: 2344744 - RNA, 19 nt, Artificial Sequence
  Description of Artificial Sequence: Synthetic oligonucleotide
gguuuaguguugcuuccag

SEQ ID NO: 2344745 - RNA, 19 nt, Artificial Sequence
  Description of Artificial Sequence: Synthetic oligonucleotide
gucguuugccacaaugcug

SEQ ID NO: 2344746 - RNA, 19 nt, Artificial Sequence
  Description of Artificial Sequence: Synthetic oligonucleotide
uugguacuuuggaagguuu

SEQ ID NO: 2344747 - RNA, 19 nt, Artificial Sequence
  Description of Artificial Sequence: Synthetic oligonucleotide
ggucauuagagucacacau

SEQ ID NO: 2344748 - RNA, 19 nt, Artificial Sequence
  Description of Artificial Sequence: Synthetic oligonucleotide
gaauggugccaucuuccuc

SEQ ID NO: 2344749 - RNA, 19 nt, Artificial Sequence
  Description of Artificial Sequence: Synthetic oligonucleotide
uguuguggagguaguuaau

SEQ ID NO: 2344750 - RNA, 19 nt, Artificial Sequence
  Description of Artificial Sequence: Synthetic oligonucleotide
ucauuccacucagacagaa

SEQ ID NO: 2344751 - RNA, 19 nt, Artificial Sequence
  Description of Artificial Sequence: Synthetic oligonucleotide
aaaucuccuuggagcuccc

SEQ ID NO: 2344752 - RNA, 19 nt, Artificial Sequence
  Description of Artificial Sequence: Synthetic oligonucleotide
caaugcugaaguuacuugu

SEQ ID NO: 2344753 - RNA, 19 nt, Artificial Sequence
  Description of Artificial Sequence: Synthetic oligonucleotide
agagagcgacuuuguguuc

SEQ ID NO: 2344754 - RNA, 19 nt, Artificial Sequence
  Description of Artificial Sequence: Synthetic oligonucleotide
ucuugguacuuuggaaggu

SEQ ID NO: 2344755 - RNA, 19 nt, Artificial Sequence
  Description of Artificial Sequence: Synthetic oligonucleotide
uguuuugggcaggucauua

SEQ ID NO: 2344756 - RNA, 19 nt, Artificial Sequence
  Description of Artificial Sequence: Synthetic oligonucleotide
cuguuguggagguaguuaa

SEQ ID NO: 2344757 - RNA, 19 nt, Artificial Sequence
  Description of Artificial Sequence: Synthetic oligonucleotide
uucauuccacucagacaga

SEQ ID NO: 2344758 - RNA, 19 nt, Artificial Sequence
  Description of Artificial Sequence: Synthetic oligonucleotide
aguuaauaaugcccacaua

SEQ ID NO: 2344759 - RNA, 19 nt, Artificial Sequence
  Description of Artificial Sequence: Synthetic oligonucleotide
agcaucugcagcccgugaa

SEQ ID NO: 2344760 - RNA, 19 nt, Artificial Sequence
  Description of Artificial Sequence: Synthetic oligonucleotide
ccuaaggggugauauucgg

SEQ ID NO: 2344761 - RNA, 19 nt, Artificial Sequence
  Description of Artificial Sequence: Synthetic oligonucleotide
uggggccacaaaaucuccu

SEQ ID NO: 2344762 - RNA, 19 nt, Artificial Sequence
  Description of Artificial Sequence: Synthetic oligonucleotide
cauaaggccacagcugcuc

SEQ ID NO: 2344763 - RNA, 19 nt, Artificial Sequence
  Description of Artificial Sequence: Synthetic oligonucleotide
caggauaaccagcgugagc

SEQ ID NO: 2344764 - RNA, 19 nt, Artificial Sequence
  Description of Artificial Sequence: Synthetic oligonucleotide
ugucuagaacaugcugagc

SEQ ID NO: 2344765 - RNA, 19 nt, Artificial Sequence
  Description of Artificial Sequence: Synthetic oligonucleotide
acaggauaaccagcgugag

SEQ ID NO: 2344766 - RNA, 19 nt, Artificial Sequence
  Description of Artificial Sequence: Synthetic oligonucleotide
uaaugcccacauacucggc

SEQ ID NO: 2344767 - RNA, 19 nt, Artificial Sequence
  Description of Artificial Sequence: Synthetic oligonucleotide
ugccacaaugcugaaguua

SEQ ID NO: 2344768 - RNA, 19 nt, Artificial Sequence
  Description of Artificial Sequence: Synthetic oligonucleotide
gagagcgacuuuguguuca

SEQ ID NO: 2344769 - RNA, 19 nt, Artificial Sequence
  Description of Artificial Sequence: Synthetic oligonucleotide
gguaguuaauaaugcccac

SEQ ID NO: 2344770 - RNA, 19 nt, Artificial Sequence
  Description of Artificial Sequence: Synthetic oligonucleotide
acacuucacaaguacccua

SEQ ID NO: 2344771 - RNA, 19 nt, Artificial Sequence
  Description of Artificial Sequence: Synthetic oligonucleotide
agucgugguccaccagggg

SEQ ID NO: 2344772 - RNA, 19 nt, Artificial Sequence
  Description of Artificial Sequence: Synthetic oligonucleotide
ccgguaagugucuagaaca

SEQ ID NO: 2344773 - RNA, 19 nt, Artificial Sequence
  Description of Artificial Sequence: Synthetic oligonucleotide
agguguucacaucuuggua

SEQ ID NO: 2344774 - RNA, 19 nt, Artificial Sequence
  Description of Artificial Sequence: Synthetic oligonucleotide
guagccaaccagcgugacc

SEQ ID NO: 2344775 - RNA, 19 nt, Artificial Sequence
  Description of Artificial Sequence: Synthetic oligonucleotide
ggauaucaaacaaauggaa

SEQ ID NO: 2344776 - RNA, 19 nt, Artificial Sequence
  Description of Artificial Sequence: Synthetic oligonucleotide
acgugccccaaaaggaaac

SEQ ID NO: 2344777 - RNA, 19 nt, Artificial Sequence
  Description of Artificial Sequence: Synthetic oligonucleotide
gucagcagauacugggaca

SEQ ID NO: 2344778 - RNA, 19 nt, Artificial Sequence
  Description of Artificial Sequence: Synthetic oligonucleotide
gucccauucugaaguaacc

SEQ ID NO: 2344779 - RNA, 19 nt, Artificial Sequence
  Description of Artificial Sequence: Synthetic oligonucleotide
acaauguuuugggcagguc

SEQ ID NO: 2344780 - RNA, 19 nt, Artificial Sequence
  Description of Artificial Sequence: Synthetic oligonucleotide
aaguuacuugucagcagau

SEQ ID NO: 2344781 - RNA, 19 nt, Artificial Sequence
  Description of Artificial Sequence: Synthetic oligonucleotide
cugucugacuuccuuccuc

SEQ ID NO: 2344782 - RNA, 19 nt, Artificial Sequence
  Description of Artificial Sequence: Synthetic oligonucleotide
cugcagcccgugaaggaag

SEQ ID NO: 2344783 - RNA, 19 nt, Artificial Sequence
  Description of Artificial Sequence: Synthetic oligonucleotide
auacugggacaauguuuug

SEQ ID NO: 2344784 - RNA, 19 nt, Artificial Sequence
  Description of Artificial Sequence: Synthetic oligonucleotide
uuucugcagggaucuggcu

SEQ ID NO: 2344785 - RNA, 19 nt, Artificial Sequence
  Description of Artificial Sequence: Synthetic oligonucleotide
uuccucgcaguagccaacc

SEQ ID NO: 2344786 - RNA, 19 nt, Artificial Sequence
  Description of Artificial Sequence: Synthetic oligonucleotide
cuuccacgugccccaaaag

SEQ ID NO: 2344787 - RNA, 19 nt, Artificial Sequence
  Description of Artificial Sequence: Synthetic oligonucleotide
cuggagagacuugagcauc

SEQ ID NO: 2344788 - RNA, 19 nt, Artificial Sequence
  Description of Artificial Sequence: Synthetic oligonucleotide
ucgcucuggagagacuuga

SEQ ID NO: 2344789 - RNA, 19 nt, Artificial Sequence
  Description of Artificial Sequence: Synthetic oligonucleotide
aguagccaaccagcgugac

SEQ ID NO: 2344790 - RNA, 19 nt, Artificial Sequence
  Description of Artificial Sequence: Synthetic oligonucleotide
cucagacagaaagacucuc

SEQ ID NO: 2344791 - RNA, 19 nt, Artificial Sequence
  Description of Artificial Sequence: Synthetic oligonucleotide
cucaucugucccauucuga

SEQ ID NO: 2344792 - RNA, 19 nt, Artificial Sequence
  Description of Artificial Sequence: Synthetic oligonucleotide
uguugcuuccagguugcuc

SEQ ID NO: 2344793 - RNA, 19 nt, Artificial Sequence
  Description of Artificial Sequence: Synthetic oligonucleotide
uggaagguuuaguguugcu

SEQ ID NO: 2344794 - RNA, 19 nt, Artificial Sequence
  Description of Artificial Sequence: Synthetic oligonucleotide
guugcucaaggaaccuaag

SEQ ID NO: 2344795 - RNA, 19 nt, Artificial Sequence
  Description of Artificial Sequence: Synthetic oligonucleotide
guacccuagagucgugguc

SEQ ID NO: 2344796 - RNA, 19 nt, Artificial Sequence
  Description of Artificial Sequence: Synthetic oligonucleotide
guugccagguguucacauc

SEQ ID NO: 2344797 - RNA, 19 nt, Artificial Sequence
  Description of Artificial Sequence: Synthetic oligonucleotide
ugcagcccgugaaggaagu

SEQ ID NO: 2344798 - RNA, 19 nt, Artificial Sequence
  Description of Artificial Sequence: Synthetic oligonucleotide
ucacucccuuccacgugcc

SEQ ID NO: 2344799 - RNA, 19 nt, Artificial Sequence
  Description of Artificial Sequence: Synthetic oligonucleotide
acauacucggcggccagcu

SEQ ID NO: 2344800 - RNA, 19 nt, Artificial Sequence
  Description of Artificial Sequence: Synthetic oligonucleotide
guuguggagguaguuaaua

SEQ ID NO: 2344801 - RNA, 19 nt, Artificial Sequence
  Description of Artificial Sequence: Synthetic oligonucleotide
ggagagagcgacuuugugu

SEQ ID NO: 2344802 - RNA, 19 nt, Artificial Sequence
  Description of Artificial Sequence: Synthetic oligonucleotide
cuuccucgcaguagccaac

SEQ ID NO: 2344803 - RNA, 19 nt, Artificial Sequence
  Description of Artificial Sequence: Synthetic oligonucleotide
cucuuacaugccuuaugga

SEQ ID NO: 2344804 - RNA, 19 nt, Artificial Sequence
  Description of Artificial Sequence: Synthetic oligonucleotide
aaccaugagggcagcgccu

SEQ ID NO: 2344805 - RNA, 19 nt, Artificial Sequence
  Description of Artificial Sequence: Synthetic oligonucleotide
cccgugaaggaagucaucc

SEQ ID NO: 2344806 - RNA, 19 nt, Artificial Sequence
  Description of Artificial Sequence: Synthetic oligonucleotide
accaugucacucccuucca

SEQ ID NO: 2344807 - RNA, 19 nt, Artificial Sequence
  Description of Artificial Sequence: Synthetic oligonucleotide
cuuccgguaagugucuaga

SEQ ID NO: 2344808 - RNA, 19 nt, Artificial Sequence
  Description of Artificial Sequence: Synthetic oligonucleotide
ucgaaccaugucacucccu

SEQ ID NO: 2344809 - RNA, 19 nt, Artificial Sequence
  Description of Artificial Sequence: Synthetic oligonucleotide
gaucuggcucuuacaugcc

SEQ ID NO: 2344810 - RNA, 19 nt, Artificial Sequence
  Description of Artificial Sequence: Synthetic oligonucleotide
auaaccagcgugagcaguu

SEQ ID NO: 2344811 - RNA, 19 nt, Artificial Sequence
  Description of Artificial Sequence: Synthetic oligonucleotide
ggugauauucgguaagaau

SEQ ID NO: 2344812 - RNA, 19 nt, Artificial Sequence
  Description of Artificial Sequence: Synthetic oligonucleotide
gcaucugcagcccgugaag

SEQ ID NO: 2344813 - RNA, 19 nt, Artificial Sequence
  Description of Artificial Sequence: Synthetic oligonucleotide
ggccacacuucacaaguac

SEQ ID NO: 2344814 - RNA, 19 nt, Artificial Sequence
  Description of Artificial Sequence: Synthetic oligonucleotide
caaaaucuccuuggagcuc

SEQ ID NO: 2344815 - RNA, 19 nt, Artificial Sequence
  Description of Artificial Sequence: Synthetic oligonucleotide
gggaucuggcucuuacaug

SEQ ID NO: 2344816 - RNA, 19 nt, Artificial Sequence
  Description of Artificial Sequence: Synthetic oligonucleotide
uucacggcuccuuccccaa

SEQ ID NO: 2344817 - RNA, 19 nt, Artificial Sequence
  Description of Artificial Sequence: Synthetic oligonucleotide
cacgugcucgcucuggaga

SEQ ID NO: 2344818 - RNA, 19 nt, Artificial Sequence
  Description of Artificial Sequence: Synthetic oligonucleotide
cuucacggcuccuucccca

SEQ ID NO: 2344819 - RNA, 19 nt, Artificial Sequence
  Description of Artificial Sequence: Synthetic oligonucleotide
gauauucgguaagaauggu

SEQ ID NO: 2344820 - RNA, 19 nt, Artificial Sequence
  Description of Artificial Sequence: Synthetic oligonucleotide
agguuuaguguugcuucca

SEQ ID NO: 2344821 - RNA, 19 nt, Artificial Sequence
  Description of Artificial Sequence: Synthetic oligonucleotide
caaggaaccuaagggguga

SEQ ID NO: 2344822 - RNA, 19 nt, Artificial Sequence
  Description of Artificial Sequence: Synthetic oligonucleotide
uccaggucguuugccacaa

SEQ ID NO: 2344823 - RNA, 19 nt, Artificial Sequence
  Description of Artificial Sequence: Synthetic oligonucleotide
gauaaccagcgugagcagu

SEQ ID NO: 2344824 - RNA, 19 nt, Artificial Sequence
  Description of Artificial Sequence: Synthetic oligonucleotide
gucacacaugacccucgug

SEQ ID NO: 2344825 - RNA, 19 nt, Artificial Sequence
  Description of Artificial Sequence: Synthetic oligonucleotide
accagcgugagcaguuucu

SEQ ID NO: 2344826 - RNA, 19 nt, Artificial Sequence
  Description of Artificial Sequence: Synthetic oligonucleotide
aguuacuugucagcagaua

SEQ ID NO: 2344827 - RNA, 19 nt, Artificial Sequence
  Description of Artificial Sequence: Synthetic oligonucleotide
ggauaaccagcgugagcag

SEQ ID NO: 2344828 - RNA, 19 nt, Artificial Sequence
  Description of Artificial Sequence: Synthetic oligonucleotide
cucgcucuggagagacuug

SEQ ID NO: 2344829 - RNA, 19 nt, Artificial Sequence
  Description of Artificial Sequence: Synthetic oligonucleotide
gugccccaaaaggaaacug

SEQ ID NO: 2344830 - RNA, 19 nt, Artificial Sequence
  Description of Artificial Sequence: Synthetic oligonucleotide
cacaugacccucgugccca

SEQ ID NO: 2344831 - RNA, 19 nt, Artificial Sequence
  Description of Artificial Sequence: Synthetic oligonucleotide
ugcccagcgggcuguugug

SEQ ID NO: 2344832 - RNA, 19 nt, Artificial Sequence
  Description of Artificial Sequence: Synthetic oligonucleotide
uccucgcaguagccaacca

SEQ ID NO: 2344833 - RNA, 19 nt, Artificial Sequence
  Description of Artificial Sequence: Synthetic oligonucleotide
guguucacaucuugguacu

SEQ ID NO: 2344834 - RNA, 19 nt, Artificial Sequence
  Description of Artificial Sequence: Synthetic oligonucleotide
uggagcucccuguggccac

SEQ ID NO: 2344835 - RNA, 19 nt, Artificial Sequence
  Description of Artificial Sequence: Synthetic oligonucleotide
cuaaggggugauauucggu

SEQ ID NO: 2344836 - RNA, 19 nt, Artificial Sequence
  Description of Artificial Sequence: Synthetic oligonucleotide
gagacaucacagugucucu

SEQ ID NO: 2344837 - RNA, 19 nt, Artificial Sequence
  Description of Artificial Sequence: Synthetic oligonucleotide
agagcgacuuuguguucau

SEQ ID NO: 2344838 - RNA, 19 nt, Artificial Sequence
  Description of Artificial Sequence: Synthetic oligonucleotide
gcagggaucuggcucuuac

SEQ ID NO: 2344839 - RNA, 19 nt, Artificial Sequence
  Description of Artificial Sequence: Synthetic oligonucleotide
ccucgcaguagccaaccag

SEQ ID NO: 2344840 - RNA, 19 nt, Artificial Sequence
  Description of Artificial Sequence: Synthetic oligonucleotide
ccagugagccgggagagag

SEQ ID NO: 2344841 - RNA, 19 nt, Artificial Sequence
  Description of Artificial Sequence: Synthetic oligonucleotide
ccuagagucgugguccacc

SEQ ID NO: 2344842 - RNA, 19 nt, Artificial Sequence
  Description of Artificial Sequence: Synthetic oligonucleotide
cugcucuggggccacaaaa

SEQ ID NO: 2344843 - RNA, 19 nt, Artificial Sequence
  Description of Artificial Sequence: Synthetic oligonucleotide
guaagaauggugccaucuu

SEQ ID NO: 2344844 - RNA, 19 nt, Artificial Sequence
  Description of Artificial Sequence: Synthetic oligonucleotide
acaugacccucgugcccag

SEQ ID NO: 2344845 - RNA, 19 nt, Artificial Sequence
  Description of Artificial Sequence: Synthetic oligonucleotide
uggccacacuucacaagua

SEQ ID NO: 2344846 - RNA, 19 nt, Artificial Sequence
  Description of Artificial Sequence: Synthetic oligonucleotide
ccgugggucuuucugcagg

SEQ ID NO: 2344847 - RNA, 19 nt, Artificial Sequence
  Description of Artificial Sequence: Synthetic oligonucleotide
gguugcucaaggaaccuaa

SEQ ID NO: 2344848 - RNA, 19 nt, Artificial Sequence
  Description of Artificial Sequence: Synthetic oligonucleotide
agggccuuucuccuccaua

SEQ ID NO: 2344849 - RNA, 19 nt, Artificial Sequence
  Description of Artificial Sequence: Synthetic oligonucleotide
gacaauguuuugggcaggu

SEQ ID NO: 2344850 - RNA, 19 nt, Artificial Sequence
  Description of Artificial Sequence: Synthetic oligonucleotide
ggucguuugccacaaugcu

SEQ ID NO: 2344851 - RNA, 19 nt, Artificial Sequence
  Description of Artificial Sequence: Synthetic oligonucleotide
gccagguguucacaucuug

SEQ ID NO: 2344852 - RNA, 19 nt, Artificial Sequence
  Description of Artificial Sequence: Synthetic oligonucleotide
acccuagagucguggucca

SEQ ID NO: 2344853 - RNA, 19 nt, Artificial Sequence
  Description of Artificial Sequence: Synthetic oligonucleotide
ggacaauguuuugggcagg

SEQ ID NO: 2344854 - RNA, 19 nt, Artificial Sequence
  Description of Artificial Sequence: Synthetic oligonucleotide
uugcuuccagguugcucaa

SEQ ID NO: 2344855 - RNA, 19 nt, Artificial Sequence
  Description of Artificial Sequence: Synthetic oligonucleotide
cucccuuccacgugcccca

SEQ ID NO: 2344856 - RNA, 19 nt, Artificial Sequence
  Description of Artificial Sequence: Synthetic oligonucleotide
gucugagacaucacagugu

SEQ ID NO: 2344857 - RNA, 19 nt, Artificial Sequence
  Description of Artificial Sequence: Synthetic oligonucleotide
caaccagcgugaccacgug

SEQ ID NO: 2344858 - RNA, 19 nt, Artificial Sequence
  Description of Artificial Sequence: Synthetic oligonucleotide
cagcccgugaaggaaguca

SEQ ID NO: 2344859 - RNA, 19 nt, Artificial Sequence
  Description of Artificial Sequence: Synthetic oligonucleotide
gcucuggggccacaaaauc

SEQ ID NO: 2344860 - RNA, 19 nt, Artificial Sequence
  Description of Artificial Sequence: Synthetic oligonucleotide
cagcccagugagccgggag

SEQ ID NO: 2344861 - RNA, 19 nt, Artificial Sequence
  Description of Artificial Sequence: Synthetic oligonucleotide
gagggcaugaugucaucuu

SEQ ID NO: 2344862 - RNA, 19 nt, Artificial Sequence
  Description of Artificial Sequence: Synthetic oligonucleotide
ggaaccuaaggggugauau

SEQ ID NO: 2344863 - RNA, 19 nt, Artificial Sequence
  Description of Artificial Sequence: Synthetic oligonucleotide
cacgugccccaaaaggaaa

SEQ ID NO: 2344864 - RNA, 19 nt, Artificial Sequence
  Description of Artificial Sequence: Synthetic oligonucleotide
cuagaacaugcugagccgu

SEQ ID NO: 2344865 - RNA, 19 nt, Artificial Sequence
  Description of Artificial Sequence: Synthetic oligonucleotide
agcccgugaaggaagucau

SEQ ID NO: 2344866 - RNA, 19 nt, Artificial Sequence
  Description of Artificial Sequence: Synthetic oligonucleotide
cuguguugccagguguuca

SEQ ID NO: 2344867 - RNA, 19 nt, Artificial Sequence
  Description of Artificial Sequence: Synthetic oligonucleotide
gaaccuaaggggugauauu

SEQ ID NO: 2344868 - RNA, 19 nt, Artificial Sequence
  Description of Artificial Sequence: Synthetic oligonucleotide
cauacucggcggccagcug

SEQ ID NO: 2344869 - RNA, 19 nt, Artificial Sequence
  Description of Artificial Sequence: Synthetic oligonucleotide
caucuggaaucuuccagau

SEQ ID NO: 2344870 - RNA, 19 nt, Artificial Sequence
  Description of Artificial Sequence: Synthetic oligonucleotide
cuggcucuuacaugccuua

SEQ ID NO: 2344871 - RNA, 19 nt, Artificial Sequence
  Description of Artificial Sequence: Synthetic oligonucleotide
ccuuccgguaagugucuag

SEQ ID NO: 2344872 - RNA, 19 nt, Artificial Sequence
  Description of Artificial Sequence: Synthetic oligonucleotide
uaaccagcgugagcaguuu

SEQ ID NO: 2344873 - RNA, 19 nt, Artificial Sequence
  Description of Artificial Sequence: Synthetic oligonucleotide
uggugccaucuuccucgca

SEQ ID NO: 2344874 - RNA, 19 nt, Artificial Sequence
  Description of Artificial Sequence: Synthetic oligonucleotide
uggcucuuacaugccuuau

SEQ ID NO: 2344875 - RNA, 19 nt, Artificial Sequence
  Description of Artificial Sequence: Synthetic oligonucleotide
cacaaugcugaaguuacuu

SEQ ID NO: 2344876 - RNA, 19 nt, Artificial Sequence
  Description of Artificial Sequence: Synthetic oligonucleotide
gggucuuucugcagggauc

SEQ ID NO: 2344877 - RNA, 19 nt, Artificial Sequence
  Description of Artificial Sequence: Synthetic oligonucleotide
cacucccuuccacgugccc

SEQ ID NO: 2344878 - RNA, 19 nt, Artificial Sequence
  Description of Artificial Sequence: Synthetic oligonucleotide
cuggagacaucuggaaucu

SEQ ID NO: 2344879 - RNA, 19 nt, Artificial Sequence
  Description of Artificial Sequence: Synthetic oligonucleotide
ggucuuucugcagggaucu

SEQ ID NO: 2344880 - RNA, 19 nt, Artificial Sequence
  Description of Artificial Sequence: Synthetic oligonucleotide
accaugagggcagcgccua

SEQ ID NO: 2344881 - RNA, 19 nt, Artificial Sequence
  Description of Artificial Sequence: Synthetic oligonucleotide
ggggugauauucgguaaga

SEQ ID NO: 2344882 - RNA, 19 nt, Artificial Sequence
  Description of Artificial Sequence: Synthetic oligonucleotide
agguugcucaaggaaccua

SEQ ID NO: 2344883 - RNA, 19 nt, Artificial Sequence
  Description of Artificial Sequence: Synthetic oligonucleotide
guaaaaccuuccgguaagu

SEQ ID NO: 2344884 - RNA, 19 nt, Artificial Sequence
  Description of Artificial Sequence: Synthetic oligonucleotide
gcuguuguggagguaguua

SEQ ID NO: 2344885 - RNA, 19 nt, Artificial Sequence
  Description of Artificial Sequence: Synthetic oligonucleotide
gccaaccagcgugaccacg

SEQ ID NO: 2344886 - RNA, 19 nt, Artificial Sequence
  Description of Artificial Sequence: Synthetic oligonucleotide
cacacuucacaaguacccu

SEQ ID NO: 2344887 - RNA, 19 nt, Artificial Sequence
  Description of Artificial Sequence: Synthetic oligonucleotide
ccgggagagagcgacuuug

SEQ ID NO: 2344888 - RNA, 19 nt, Artificial Sequence
  Description of Artificial Sequence: Synthetic oligonucleotide
agccgggagagagcgacuu

SEQ ID NO: 2344889 - RNA, 19 nt, Artificial Sequence
  Description of Artificial Sequence: Synthetic oligonucleotide
ggaaucgaaccaugucacu

SEQ ID NO: 2344890 - RNA, 19 nt, Artificial Sequence
  Description of Artificial Sequence: Synthetic oligonucleotide
cuugguacuuuggaagguu

SEQ ID NO: 2344891 - RNA, 19 nt, Artificial Sequence
  Description of Artificial Sequence: Synthetic oligonucleotide
gcgugagcaguuucucauc

SEQ ID NO: 2344892 - RNA, 19 nt, Artificial Sequence
  Description of Artificial Sequence: Synthetic oligonucleotide
ccccaaugcgccucagcug

SEQ ID NO: 2344893 - RNA, 19 nt, Artificial Sequence
  Description of Artificial Sequence: Synthetic oligonucleotide
uacaugccuuauggauauc

SEQ ID NO: 2344894 - RNA, 19 nt, Artificial Sequence
  Description of Artificial Sequence: Synthetic oligonucleotide
gcaucucuuuugucugaga

SEQ ID NO: 2344895 - RNA, 19 nt, Artificial Sequence
  Description of Artificial Sequence: Synthetic oligonucleotide
cucacaggauaaccagcgu

SEQ ID NO: 2344896 - RNA, 19 nt, Artificial Sequence
  Description of Artificial Sequence: Synthetic oligonucleotide
cgacuuuguguucauucca

SEQ ID NO: 2344897 - RNA, 19 nt, Artificial Sequence
  Description of Artificial Sequence: Synthetic oligonucleotide
gggugauauucgguaagaa

SEQ ID NO: 2344898 - RNA, 19 nt, Artificial Sequence
  Description of Artificial Sequence: Synthetic oligonucleotide
aggaaccuaaggggugaua

SEQ ID NO: 2344899 - RNA, 19 nt, Artificial Sequence
  Description of Artificial Sequence: Synthetic oligonucleotide
agcucccuguggccacacu

SEQ ID NO: 2344900 - RNA, 19 nt, Artificial Sequence
  Description of Artificial Sequence: Synthetic oligonucleotide
ccacgugcucgcucuggag

SEQ ID NO: 2344901 - RNA, 19 nt, Artificial Sequence
  Description of Artificial Sequence: Synthetic oligonucleotide
ccacgugccccaaaaggaa

SEQ ID NO: 2344902 - RNA, 19 nt, Artificial Sequence
  Description of Artificial Sequence: Synthetic oligonucleotide
cuuccccaaugcgccucag

SEQ ID NO: 2344903 - RNA, 19 nt, Artificial Sequence
  Description of Artificial Sequence: Synthetic oligonucleotide
ccuuccacgugccccaaaa

SEQ ID NO: 2344904 - RNA, 19 nt, Artificial Sequence
  Description of Artificial Sequence: Synthetic oligonucleotide
caucauaggagggcaugau

SEQ ID NO: 2344905 - RNA, 19 nt, Artificial Sequence
  Description of Artificial Sequence: Synthetic oligonucleotide
ccuguguugccagguguuc

SEQ ID NO: 2344906 - RNA, 19 nt, Artificial Sequence
  Description of Artificial Sequence: Synthetic oligonucleotide
ccaaccagcgugaccacgu

SEQ ID NO: 2344907 - RNA, 19 nt, Artificial Sequence
  Description of Artificial Sequence: Synthetic oligonucleotide
ugcagggaucuggcucuua

SEQ ID NO: 2344908 - RNA, 19 nt, Artificial Sequence
  Description of Artificial Sequence: Synthetic oligonucleotide
gagcucccuguggccacac

SEQ ID NO: 2344909 - RNA, 19 nt, Artificial Sequence
  Description of Artificial Sequence: Synthetic oligonucleotide
caaugcgccucagcugucu

SEQ ID NO: 2344910 - RNA, 19 nt, Artificial Sequence
  Description of Artificial Sequence: Synthetic oligonucleotide
ccaugagggcagcgccuag

SEQ ID NO: 2344911 - RNA, 19 nt, Artificial Sequence
  Description of Artificial Sequence: Synthetic oligonucleotide
ccucgugcccagcgggcug

SEQ ID NO: 2344912 - RNA, 19 nt, Artificial Sequence
  Description of Artificial Sequence: Synthetic oligonucleotide
ccaaugcgccucagcuguc

SEQ ID NO: 2344913 - RNA, 19 nt, Artificial Sequence
  Description of Artificial Sequence: Synthetic oligonucleotide
ccgugaaggaagucauccu

SEQ ID NO: 2344914 - RNA, 19 nt, Artificial Sequence
  Description of Artificial Sequence: Synthetic oligonucleotide
cuccuuccccaaugcgccu

SEQ ID NO: 2344915 - RNA, 19 nt, Artificial Sequence
  Description of Artificial Sequence: Synthetic oligonucleotide
ccuuccccaaugcgccuca

SEQ ID NO: 2344916 - RNA, 19 nt, Artificial Sequence
  Description of Artificial Sequence: Synthetic oligonucleotide
ccauaaggccacagcugcu

SEQ ID NO: 2344917 - RNA, 19 nt, Artificial Sequence
  Description of Artificial Sequence: Synthetic oligonucleotide
cgguaagugucuagaacau

SEQ ID NO: 2344918 - RNA, 19 nt, Artificial Sequence
  Description of Artificial Sequence: Synthetic oligonucleotide
gcugagccgugggucuuuc

SEQ ID NO: 2344919 - RNA, 19 nt, Artificial Sequence
  Description of Artificial Sequence: Synthetic oligonucleotide
cucgugcccagcgggcugu

SEQ ID NO: 2344920 - RNA, 19 nt, Artificial Sequence
  Description of Artificial Sequence: Synthetic oligonucleotide
gcagcccgugaaggaaguc

SEQ ID NO: 2344921 - RNA, 19 nt, Artificial Sequence
  Description of Artificial Sequence: Synthetic oligonucleotide
gagcgacuuuguguucauu

SEQ ID NO: 2344922 - RNA, 19 nt, Artificial Sequence
  Description of Artificial Sequence: Synthetic oligonucleotide
cccuagagucgugguccac

SEQ ID NO: 2344923 - RNA, 19 nt, Artificial Sequence
  Description of Artificial Sequence: Synthetic oligonucleotide
ucgugcccagcgggcuguu

SEQ ID NO: 2344924 - RNA, 19 nt, Artificial Sequence
  Description of Artificial Sequence: Synthetic oligonucleotide
ggcuguuguggagguaguu

SEQ ID NO: 2344925 - RNA, 19 nt, Artificial Sequence
  Description of Artificial Sequence: Synthetic oligonucleotide
cgcaguagccaaccagcgu

SEQ ID NO: 2344926 - RNA, 19 nt, Artificial Sequence
  Description of Artificial Sequence: Synthetic oligonucleotide
gccgggagagagcgacuuu

SEQ ID NO: 2344927 - RNA, 19 nt, Artificial Sequence
  Description of Artificial Sequence: Synthetic oligonucleotide
cgugcucgcucuggagaga

SEQ ID NO: 2344928 - RNA, 19 nt, Artificial Sequence
  Description of Artificial Sequence: Synthetic oligonucleotide
cugcagggaucuggcucuu

SEQ ID NO: 2344929 - RNA, 19 nt, Artificial Sequence
  Description of Artificial Sequence: Synthetic oligonucleotide
gcgugaccacgugcucgcu

SEQ ID NO: 2344930 - RNA, 19 nt, Artificial Sequence
  Description of Artificial Sequence: Synthetic oligonucleotide
ccaggucguuugccacaau

SEQ ID NO: 2344931 - RNA, 19 nt, Artificial Sequence
  Description of Artificial Sequence: Synthetic oligonucleotide
uuuguuuguaauaaaauac

SEQ ID NO: 2344932 - RNA, 19 nt, Artificial Sequence
  Description of Artificial Sequence: Synthetic oligonucleotide
aaugaagcggauaaagggc

SEQ ID NO: 2344933 - RNA, 19 nt, Artificial Sequence
  Description of Artificial Sequence: Synthetic oligonucleotide
uugaguauggugauugggg

SEQ ID NO: 2344934 - RNA, 19 nt, Artificial Sequence
  Description of Artificial Sequence: Synthetic oligonucleotide
aaugaaaggguggauguac

SEQ ID NO: 2344935 - RNA, 19 nt, Artificial Sequence
  Description of Artificial Sequence: Synthetic oligonucleotide
uuuacuuugcugucgauga

SEQ ID NO: 2344936 - RNA, 19 nt, Artificial Sequence
  Description of Artificial Sequence: Synthetic oligonucleotide
uguaauaaaauacuuuauu

SEQ ID NO: 2344937 - RNA, 19 nt, Artificial Sequence
  Description of Artificial Sequence: Synthetic oligonucleotide
auugccgucaaugaaaggg

SEQ ID NO: 2344938 - RNA, 19 nt, Artificial Sequence
  Description of Artificial Sequence: Synthetic oligonucleotide
aauacaugguaguacucag

SEQ ID NO: 2344939 - RNA, 19 nt, Artificial Sequence
  Description of Artificial Sequence: Synthetic oligonucleotide
uuguuuguaauaaaauacu

SEQ ID NO: 2344940 - RNA, 19 nt, Artificial Sequence
  Description of Artificial Sequence: Synthetic oligonucleotide
aaauuaaugccaagggagg

SEQ ID NO: 2344941 - RNA, 19 nt, Artificial Sequence
  Description of Artificial Sequence: Synthetic oligonucleotide
gauaaagggccgcacgucg

SEQ ID NO: 2344942 - RNA, 19 nt, Artificial Sequence
  Description of Artificial Sequence: Synthetic oligonucleotide
ugaauugagccacugugug

SEQ ID NO: 2344943 - RNA, 19 nt, Artificial Sequence
  Description of Artificial Sequence: Synthetic oligonucleotide
uacaugguaguacucagac

SEQ ID NO: 2344944 - RNA, 19 nt, Artificial Sequence
  Description of Artificial Sequence: Synthetic oligonucleotide
guaauaaaauacuuuauua

SEQ ID NO: 2344945 - RNA, 19 nt, Artificial Sequence
  Description of Artificial Sequence: Synthetic oligonucleotide
ucuacauaccccagcaccc

SEQ ID NO: 2344946 - RNA, 19 nt, Artificial Sequence
  Description of Artificial Sequence: Synthetic oligonucleotide
ugccuaaucuccgagagag

SEQ ID NO: 2344947 - RNA, 19 nt, Artificial Sequence
  Description of Artificial Sequence: Synthetic oligonucleotide
ucaaugaaaggguggaugu

SEQ ID NO: 2344948 - RNA, 19 nt, Artificial Sequence
  Description of Artificial Sequence: Synthetic oligonucleotide
aguguugauguacuucacg

SEQ ID NO: 2344949 - RNA, 19 nt, Artificial Sequence
  Description of Artificial Sequence: Synthetic oligonucleotide
ucgaugaugcugaaguacc

SEQ ID NO: 2344950 - RNA, 19 nt, Artificial Sequence
  Description of Artificial Sequence: Synthetic oligonucleotide
uccaauacaugguaguacu

SEQ ID NO: 2344951 - RNA, 19 nt, Artificial Sequence
  Description of Artificial Sequence: Synthetic oligonucleotide
uguuuguaauaaaauacuu

SEQ ID NO: 2344952 - RNA, 19 nt, Artificial Sequence
  Description of Artificial Sequence: Synthetic oligonucleotide
auguacacaaguuuguaau

SEQ ID NO: 2344953 - RNA, 19 nt, Artificial Sequence
  Description of Artificial Sequence: Synthetic oligonucleotide
aauugagccacugugugaa

SEQ ID NO: 2344954 - RNA, 19 nt, Artificial Sequence
  Description of Artificial Sequence: Synthetic oligonucleotide
caggaugugccuaaucucc

SEQ ID NO: 2344955 - RNA, 19 nt, Artificial Sequence
  Description of Artificial Sequence: Synthetic oligonucleotide
gucuacauaccccagcacc

SEQ ID NO: 2344956 - RNA, 19 nt, Artificial Sequence
  Description of Artificial Sequence: Synthetic oligonucleotide
augaagcggauaaagggcc

SEQ ID NO: 2344957 - RNA, 19 nt, Artificial Sequence
  Description of Artificial Sequence: Synthetic oligonucleotide
uagauguggugguaguagg

SEQ ID NO: 2344958 - RNA, 19 nt, Artificial Sequence
  Description of Artificial Sequence: Synthetic oligonucleotide
ggcgacuuccaauacaugg

SEQ ID NO: 2344959 - RNA, 19 nt, Artificial Sequence
  Description of Artificial Sequence: Synthetic oligonucleotide
guaguguugauguacuuca

SEQ ID NO: 2344960 - RNA, 19 nt, Artificial Sequence
  Description of Artificial Sequence: Synthetic oligonucleotide
aaugccaagggagggcugg

SEQ ID NO: 2344961 - RNA, 19 nt, Artificial Sequence
  Description of Artificial Sequence: Synthetic oligonucleotide
uaaucuccgagagagugag

SEQ ID NO: 2344962 - RNA, 19 nt, Artificial Sequence
  Description of Artificial Sequence: Synthetic oligonucleotide
uguugauguacuucacggc

SEQ ID NO: 2344963 - RNA, 19 nt, Artificial Sequence
  Description of Artificial Sequence: Synthetic oligonucleotide
aucuccgagagagugaggg

SEQ ID NO: 2344964 - RNA, 19 nt, Artificial Sequence
  Description of Artificial Sequence: Synthetic oligonucleotide
acuuugcugucgaugaugc

SEQ ID NO: 2344965 - RNA, 19 nt, Artificial Sequence
  Description of Artificial Sequence: Synthetic oligonucleotide
accaggguaguguugaugu

SEQ ID NO: 2344966 - RNA, 19 nt, Artificial Sequence
  Description of Artificial Sequence: Synthetic oligonucleotide
aaugguugggcugggcuuc

SEQ ID NO: 2344967 - RNA, 19 nt, Artificial Sequence
  Description of Artificial Sequence: Synthetic oligonucleotide
uccgaaaucuuccugccuc

SEQ ID NO: 2344968 - RNA, 19 nt, Artificial Sequence
  Description of Artificial Sequence: Synthetic oligonucleotide
gaucaccucguucugcucc

SEQ ID NO: 2344969 - RNA, 19 nt, Artificial Sequence
  Description of Artificial Sequence: Synthetic oligonucleotide
acacaaguuuguaaugggc

SEQ ID NO: 2344970 - RNA, 19 nt, Artificial Sequence
  Description of Artificial Sequence: Synthetic oligonucleotide
cuugagcccagaaugguug

SEQ ID NO: 2344971 - RNA, 19 nt, Artificial Sequence
  Description of Artificial Sequence: Synthetic oligonucleotide
uccuccgaaaucuuccugc

SEQ ID NO: 2344972 - RNA, 19 nt, Artificial Sequence
  Description of Artificial Sequence: Synthetic oligonucleotide
gggagugucuccuugagcc

SEQ ID NO: 2344973 - RNA, 19 nt, Artificial Sequence
  Description of Artificial Sequence: Synthetic oligonucleotide
uucuuuacuuugcugucga

SEQ ID NO: 2344974 - RNA, 19 nt, Artificial Sequence
  Description of Artificial Sequence: Synthetic oligonucleotide
ugcgaacucaacugggugc

SEQ ID NO: 2344975 - RNA, 19 nt, Artificial Sequence
  Description of Artificial Sequence: Synthetic oligonucleotide
cucagugguggcaaggagc

SEQ ID NO: 2344976 - RNA, 19 nt, Artificial Sequence
  Description of Artificial Sequence: Synthetic oligonucleotide
cuuagggauggacaugacc

SEQ ID NO: 2344977 - RNA, 19 nt, Artificial Sequence
  Description of Artificial Sequence: Synthetic oligonucleotide
caugguaguacucagaccu

SEQ ID NO: 2344978 - RNA, 19 nt, Artificial Sequence
  Description of Artificial Sequence: Synthetic oligonucleotide
aggagcaauguguccagcg

SEQ ID NO: 2344979 - RNA, 19 nt, Artificial Sequence
  Description of Artificial Sequence: Synthetic oligonucleotide
acuuccaauacaugguagu

SEQ ID NO: 2344980 - RNA, 19 nt, Artificial Sequence
  Description of Artificial Sequence: Synthetic oligonucleotide
ugugaacuccugcaucugc

SEQ ID NO: 2344981 - RNA, 19 nt, Artificial Sequence
  Description of Artificial Sequence: Synthetic oligonucleotide
acacuuggcaaugaagcgg

SEQ ID NO: 2344982 - RNA, 19 nt, Artificial Sequence
  Description of Artificial Sequence: Synthetic oligonucleotide
aacucaacugggugcaggu

SEQ ID NO: 2344983 - RNA, 19 nt, Artificial Sequence
  Description of Artificial Sequence: Synthetic oligonucleotide
ugcuucucgacaucccggg

SEQ ID NO: 2344984 - RNA, 19 nt, Artificial Sequence
  Description of Artificial Sequence: Synthetic oligonucleotide
uucacggccgcaugcaugc

SEQ ID NO: 2344985 - RNA, 19 nt, Artificial Sequence
  Description of Artificial Sequence: Synthetic oligonucleotide
uaguaggucuccuccauga

SEQ ID NO: 2344986 - RNA, 19 nt, Artificial Sequence
  Description of Artificial Sequence: Synthetic oligonucleotide
uuggcgacuuccaauacau

SEQ ID NO: 2344987 - RNA, 19 nt, Artificial Sequence
  Description of Artificial Sequence: Synthetic oligonucleotide
ugcguagcgggucuccagg

SEQ ID NO: 2344988 - RNA, 19 nt, Artificial Sequence
  Description of Artificial Sequence: Synthetic oligonucleotide
acugggucuacauacccca

SEQ ID NO: 2344989 - RNA, 19 nt, Artificial Sequence
  Description of Artificial Sequence: Synthetic oligonucleotide
cuugaguauggugauuggg

SEQ ID NO: 2344990 - RNA, 19 nt, Artificial Sequence
  Description of Artificial Sequence: Synthetic oligonucleotide
uugcugucgaugaugcuga

SEQ ID NO: 2344991 - RNA, 19 nt, Artificial Sequence
  Description of Artificial Sequence: Synthetic oligonucleotide
ucauuggcgacuuccaaua

SEQ ID NO: 2344992 - RNA, 19 nt, Artificial Sequence
  Description of Artificial Sequence: Synthetic oligonucleotide
ugauguacuucacggccgc

SEQ ID NO: 2344993 - RNA, 19 nt, Artificial Sequence
  Description of Artificial Sequence: Synthetic oligonucleotide
guggauguacacaaguuug

SEQ ID NO: 2344994 - RNA, 19 nt, Artificial Sequence
  Description of Artificial Sequence: Synthetic oligonucleotide
gauguacacaaguuuguaa

SEQ ID NO: 2344995 - RNA, 19 nt, Artificial Sequence
  Description of Artificial Sequence: Synthetic oligonucleotide
agaaugguugggcugggcu

SEQ ID NO: 2344996 - RNA, 19 nt, Artificial Sequence
  Description of Artificial Sequence: Synthetic oligonucleotide
augucggugucccaccagg

SEQ ID NO: 2344997 - RNA, 19 nt, Artificial Sequence
  Description of Artificial Sequence: Synthetic oligonucleotide
aaugggcuaaggcugcgaa

SEQ ID NO: 2344998 - RNA, 19 nt, Artificial Sequence
  Description of Artificial Sequence: Synthetic oligonucleotide
guacucagaccucugcucc

SEQ ID NO: 2344999 - RNA, 19 nt, Artificial Sequence
  Description of Artificial Sequence: Synthetic oligonucleotide
ucaacugggugcagguuca

SEQ ID NO: 2345000 - RNA, 19 nt, Artificial Sequence
  Description of Artificial Sequence: Synthetic oligonucleotide
uugccgucaaugaaagggu

SEQ ID NO: 2345001 - RNA, 19 nt, Artificial Sequence
  Description of Artificial Sequence: Synthetic oligonucleotide
agcgccacagaguacucag

SEQ ID NO: 2345002 - RNA, 19 nt, Artificial Sequence
  Description of Artificial Sequence: Synthetic oligonucleotide
agagugaggguguugcccu

SEQ ID NO: 2345003 - RNA, 19 nt, Artificial Sequence
  Description of Artificial Sequence: Synthetic oligonucleotide
gaucagguucaucagcaga

SEQ ID NO: 2345004 - RNA, 19 nt, Artificial Sequence
  Description of Artificial Sequence: Synthetic oligonucleotide
cagguuagggccucacagg

SEQ ID NO: 2345005 - RNA, 19 nt, Artificial Sequence
  Description of Artificial Sequence: Synthetic oligonucleotide
ugaaaggguggauguacac

SEQ ID NO: 2345006 - RNA, 19 nt, Artificial Sequence
  Description of Artificial Sequence: Synthetic oligonucleotide
auuggcgacuuccaauaca

SEQ ID NO: 2345007 - RNA, 19 nt, Artificial Sequence
  Description of Artificial Sequence: Synthetic oligonucleotide
caugaccuucuuuacuuug

SEQ ID NO: 2345008 - RNA, 19 nt, Artificial Sequence
  Description of Artificial Sequence: Synthetic oligonucleotide
ugaccuucuuuacuuugcu

SEQ ID NO: 2345009 - RNA, 19 nt, Artificial Sequence
  Description of Artificial Sequence: Synthetic oligonucleotide
uugagcccagaaugguugg

SEQ ID NO: 2345010 - RNA, 19 nt, Artificial Sequence
  Description of Artificial Sequence: Synthetic oligonucleotide
cucaacugggugcagguuc

SEQ ID NO: 2345011 - RNA, 19 nt, Artificial Sequence
  Description of Artificial Sequence: Synthetic oligonucleotide
ucgauggugacagacccga

SEQ ID NO: 2345012 - RNA, 19 nt, Artificial Sequence
  Description of Artificial Sequence: Synthetic oligonucleotide
uaaagggccgcacgucgcc

SEQ ID NO: 2345013 - RNA, 19 nt, Artificial Sequence
  Description of Artificial Sequence: Synthetic oligonucleotide
gaacucaacugggugcagg

SEQ ID NO: 2345014 - RNA, 19 nt, Artificial Sequence
  Description of Artificial Sequence: Synthetic oligonucleotide
uccacugggucuacauacc

SEQ ID NO: 2345015 - RNA, 19 nt, Artificial Sequence
  Description of Artificial Sequence: Synthetic oligonucleotide
cauggcguccucugaauug

SEQ ID NO: 2345016 - RNA, 19 nt, Artificial Sequence
  Description of Artificial Sequence: Synthetic oligonucleotide
ggcaaugaagcggauaaag

SEQ ID NO: 2345017 - RNA, 19 nt, Artificial Sequence
  Description of Artificial Sequence: Synthetic oligonucleotide
caugacccugcgcagggcg

SEQ ID NO: 2345018 - RNA, 19 nt, Artificial Sequence
  Description of Artificial Sequence: Synthetic oligonucleotide
auaaagggccgcacgucgc

SEQ ID NO: 2345019 - RNA, 19 nt, Artificial Sequence
  Description of Artificial Sequence: Synthetic oligonucleotide
gacuuccaauacaugguag

SEQ ID NO: 2345020 - RNA, 19 nt, Artificial Sequence
  Description of Artificial Sequence: Synthetic oligonucleotide
gaauugagccacuguguga

SEQ ID NO: 2345021 - RNA, 19 nt, Artificial Sequence
  Description of Artificial Sequence: Synthetic oligonucleotide
aaagggccgcacgucgccc

SEQ ID NO: 2345022 - RNA, 19 nt, Artificial Sequence
  Description of Artificial Sequence: Synthetic oligonucleotide
uggacaugaccuucuuuac

SEQ ID NO: 2345023 - RNA, 19 nt, Artificial Sequence
  Description of Artificial Sequence: Synthetic oligonucleotide
cucgacaucccggggaugg

SEQ ID NO: 2345024 - RNA, 19 nt, Artificial Sequence
  Description of Artificial Sequence: Synthetic oligonucleotide
gcaaugaagcggauaaagg

SEQ ID NO: 2345025 - RNA, 19 nt, Artificial Sequence
  Description of Artificial Sequence: Synthetic oligonucleotide
gaaaggguggauguacaca

SEQ ID NO: 2345026 - RNA, 19 nt, Artificial Sequence
  Description of Artificial Sequence: Synthetic oligonucleotide
caccgugugguagaugugg

SEQ ID NO: 2345027 - RNA, 19 nt, Artificial Sequence
  Description of Artificial Sequence: Synthetic oligonucleotide
caauacaugguaguacuca

SEQ ID NO: 2345028 - RNA, 19 nt, Artificial Sequence
  Description of Artificial Sequence: Synthetic oligonucleotide
ugccgucaaugaaagggug

SEQ ID NO: 2345029 - RNA, 19 nt, Artificial Sequence
  Description of Artificial Sequence: Synthetic oligonucleotide
gucgaugaugcugaaguac

SEQ ID NO: 2345030 - RNA, 19 nt, Artificial Sequence
  Description of Artificial Sequence: Synthetic oligonucleotide
cacgucgcccucauuggcg

SEQ ID NO: 2345031 - RNA, 19 nt, Artificial Sequence
  Description of Artificial Sequence: Synthetic oligonucleotide
uggcaaggagcaauguguc

SEQ ID NO: 2345032 - RNA, 19 nt, Artificial Sequence
  Description of Artificial Sequence: Synthetic oligonucleotide
cucgauugccaccgugugg

SEQ ID NO: 2345033 - RNA, 19 nt, Artificial Sequence
  Description of Artificial Sequence: Synthetic oligonucleotide
cacugggucuacauacccc

SEQ ID NO: 2345034 - RNA, 19 nt, Artificial Sequence
  Description of Artificial Sequence: Synthetic oligonucleotide
caaggagcaauguguccag

SEQ ID NO: 2345035 - RNA, 19 nt, Artificial Sequence
  Description of Artificial Sequence: Synthetic oligonucleotide
gaugcgggagaccagggua

SEQ ID NO: 2345036 - RNA, 19 nt, Artificial Sequence
  Description of Artificial Sequence: Synthetic oligonucleotide
gugacagacccgaugcggg

SEQ ID NO: 2345037 - RNA, 19 nt, Artificial Sequence
  Description of Artificial Sequence: Synthetic oligonucleotide
ugagccacugugugaacuc

SEQ ID NO: 2345038 - RNA, 19 nt, Artificial Sequence
  Description of Artificial Sequence: Synthetic oligonucleotide
gacaugaccuucuuuacuu

SEQ ID NO: 2345039 - RNA, 19 nt, Artificial Sequence
  Description of Artificial Sequence: Synthetic oligonucleotide
guagcgggucuccaggaug

SEQ ID NO: 2345040 - RNA, 19 nt, Artificial Sequence
  Description of Artificial Sequence: Synthetic oligonucleotide
cacaaguuuguaaugggcu

SEQ ID NO: 2345041 - RNA, 19 nt, Artificial Sequence
  Description of Artificial Sequence: Synthetic oligonucleotide
uccccuuagggauggacau

SEQ ID NO: 2345042 - RNA, 19 nt, Artificial Sequence
  Description of Artificial Sequence: Synthetic oligonucleotide
uucucgacaucccggggau

SEQ ID NO: 2345043 - RNA, 19 nt, Artificial Sequence
  Description of Artificial Sequence: Synthetic oligonucleotide
uaguguugauguacuucac

SEQ ID NO: 2345044 - RNA, 19 nt, Artificial Sequence
  Description of Artificial Sequence: Synthetic oligonucleotide
ugguaguacucagaccucu

SEQ ID NO: 2345045 - RNA, 19 nt, Artificial Sequence
  Description of Artificial Sequence: Synthetic oligonucleotide
gaugucggugucccaccag

SEQ ID NO: 2345046 - RNA, 19 nt, Artificial Sequence
  Description of Artificial Sequence: Synthetic oligonucleotide
cuccgagagagugagggug

SEQ ID NO: 2345047 - RNA, 19 nt, Artificial Sequence
  Description of Artificial Sequence: Synthetic oligonucleotide
guacuucacggccgcaugc

SEQ ID NO: 2345048 - RNA, 19 nt, Artificial Sequence
  Description of Artificial Sequence: Synthetic oligonucleotide
accuccguacacuuggcaa

SEQ ID NO: 2345049 - RNA, 19 nt, Artificial Sequence
  Description of Artificial Sequence: Synthetic oligonucleotide
caauguguccagcgugacc

SEQ ID NO: 2345050 - RNA, 19 nt, Artificial Sequence
  Description of Artificial Sequence: Synthetic oligonucleotide
uacucagugguggcaagga

SEQ ID NO: 2345051 - RNA, 19 nt, Artificial Sequence
  Description of Artificial Sequence: Synthetic oligonucleotide
cacagaguacucaguggug

SEQ ID NO: 2345052 - RNA, 19 nt, Artificial Sequence
  Description of Artificial Sequence: Synthetic oligonucleotide
uucccuggcacugcguagc

SEQ ID NO: 2345053 - RNA, 19 nt, Artificial Sequence
  Description of Artificial Sequence: Synthetic oligonucleotide
gaagcggauaaagggccgc

SEQ ID NO: 2345054 - RNA, 19 nt, Artificial Sequence
  Description of Artificial Sequence: Synthetic oligonucleotide
cacugugugaacuccugca

SEQ ID NO: 2345055 - RNA, 19 nt, Artificial Sequence
  Description of Artificial Sequence: Synthetic oligonucleotide
cuaaucuccgagagaguga

SEQ ID NO: 2345056 - RNA, 19 nt, Artificial Sequence
  Description of Artificial Sequence: Synthetic oligonucleotide
gguggcaaggagcaaugug

SEQ ID NO: 2345057 - RNA, 19 nt, Artificial Sequence
  Description of Artificial Sequence: Synthetic oligonucleotide
guaguaggucuccuccaug

SEQ ID NO: 2345058 - RNA, 19 nt, Artificial Sequence
  Description of Artificial Sequence: Synthetic oligonucleotide
cugugugaacuccugcauc

SEQ ID NO: 2345059 - RNA, 19 nt, Artificial Sequence
  Description of Artificial Sequence: Synthetic oligonucleotide
cugcgaacucaacugggug

SEQ ID NO: 2345060 - RNA, 19 nt, Artificial Sequence
  Description of Artificial Sequence: Synthetic oligonucleotide
ugucggugucccaccagga

SEQ ID NO: 2345061 - RNA, 19 nt, Artificial Sequence
  Description of Artificial Sequence: Synthetic oligonucleotide
ccuaaucuccgagagagug

SEQ ID NO: 2345062 - RNA, 19 nt, Artificial Sequence
  Description of Artificial Sequence: Synthetic oligonucleotide
ugacagacccgaugcggga

SEQ ID NO: 2345063 - RNA, 19 nt, Artificial Sequence
  Description of Artificial Sequence: Synthetic oligonucleotide
uuacuuugcugucgaugau

SEQ ID NO: 2345064 - RNA, 19 nt, Artificial Sequence
  Description of Artificial Sequence: Synthetic oligonucleotide
uaaugccaagggagggcug

SEQ ID NO: 2345065 - RNA, 19 nt, Artificial Sequence
  Description of Artificial Sequence: Synthetic oligonucleotide
agcacccuccuguggaucu

SEQ ID NO: 2345066 - RNA, 19 nt, Artificial Sequence
  Description of Artificial Sequence: Synthetic oligonucleotide
uucauggcguccucugaau

SEQ ID NO: 2345067 - RNA, 19 nt, Artificial Sequence
  Description of Artificial Sequence: Synthetic oligonucleotide
agcccagaaugguugggcu

SEQ ID NO: 2345068 - RNA, 19 nt, Artificial Sequence
  Description of Artificial Sequence: Synthetic oligonucleotide
cauugccgucaaugaaagg

SEQ ID NO: 2345069 - RNA, 19 nt, Artificial Sequence
  Description of Artificial Sequence: Synthetic oligonucleotide
ucccuggcacugcguagcg

SEQ ID NO: 2345070 - RNA, 19 nt, Artificial Sequence
  Description of Artificial Sequence: Synthetic oligonucleotide
ucauggcguccucugaauu

SEQ ID NO: 2345071 - RNA, 19 nt, Artificial Sequence
  Description of Artificial Sequence: Synthetic oligonucleotide
cuucucgacaucccgggga

SEQ ID NO: 2345072 - RNA, 19 nt, Artificial Sequence
  Description of Artificial Sequence: Synthetic oligonucleotide
agugaggguguugcccucg

SEQ ID NO: 2345073 - RNA, 19 nt, Artificial Sequence
  Description of Artificial Sequence: Synthetic oligonucleotide
ggcggagcuccccuuaggg

SEQ ID NO: 2345074 - RNA, 19 nt, Artificial Sequence
  Description of Artificial Sequence: Synthetic oligonucleotide
gacagacccgaugcgggag

SEQ ID NO: 2345075 - RNA, 19 nt, Artificial Sequence
  Description of Artificial Sequence: Synthetic oligonucleotide
gguaguguugauguacuuc

SEQ ID NO: 2345076 - RNA, 19 nt, Artificial Sequence
  Description of Artificial Sequence: Synthetic oligonucleotide
agcaauguguccagcguga

SEQ ID NO: 2345077 - RNA, 19 nt, Artificial Sequence
  Description of Artificial Sequence: Synthetic oligonucleotide
ugcaugccgaucaccucgu

SEQ ID NO: 2345078 - RNA, 19 nt, Artificial Sequence
  Description of Artificial Sequence: Synthetic oligonucleotide
gacccgaugcgggagacca

SEQ ID NO: 2345079 - RNA, 19 nt, Artificial Sequence
  Description of Artificial Sequence: Synthetic oligonucleotide
gcggauaaagggccgcacg

SEQ ID NO: 2345080 - RNA, 19 nt, Artificial Sequence
  Description of Artificial Sequence: Synthetic oligonucleotide
ugaccuccguacacuuggc

SEQ ID NO: 2345081 - RNA, 19 nt, Artificial Sequence
  Description of Artificial Sequence: Synthetic oligonucleotide
uacauaccccagcacccuc

SEQ ID NO: 2345082 - RNA, 19 nt, Artificial Sequence
  Description of Artificial Sequence: Synthetic oligonucleotide
ccauugccgucaaugaaag

SEQ ID NO: 2345083 - RNA, 19 nt, Artificial Sequence
  Description of Artificial Sequence: Synthetic oligonucleotide
cuucccuggcacugcguag

SEQ ID NO: 2345084 - RNA, 19 nt, Artificial Sequence
  Description of Artificial Sequence: Synthetic oligonucleotide
ucuccgagagagugagggu

SEQ ID NO: 2345085 - RNA, 19 nt, Artificial Sequence
  Description of Artificial Sequence: Synthetic oligonucleotide
uccuugagcccagaauggu

SEQ ID NO: 2345086 - RNA, 19 nt, Artificial Sequence
  Description of Artificial Sequence: Synthetic oligonucleotide
guucauggcguccucugaa

SEQ ID NO: 2345087 - RNA, 19 nt, Artificial Sequence
  Description of Artificial Sequence: Synthetic oligonucleotide
auggcguccucugaauuga

SEQ ID NO: 2345088 - RNA, 19 nt, Artificial Sequence
  Description of Artificial Sequence: Synthetic oligonucleotide
cugaauugagccacugugu

SEQ ID NO: 2345089 - RNA, 19 nt, Artificial Sequence
  Description of Artificial Sequence: Synthetic oligonucleotide
augaaaggguggauguaca

SEQ ID NO: 2345090 - RNA, 19 nt, Artificial Sequence
  Description of Artificial Sequence: Synthetic oligonucleotide
auacaugguaguacucaga

SEQ ID NO: 2345091 - RNA, 19 nt, Artificial Sequence
  Description of Artificial Sequence: Synthetic oligonucleotide
gguguugcccucgauugcc

SEQ ID NO: 2345092 - RNA, 19 nt, Artificial Sequence
  Description of Artificial Sequence: Synthetic oligonucleotide
gggagguccucccauugcc

SEQ ID NO: 2345093 - RNA, 19 nt, Artificial Sequence
  Description of Artificial Sequence: Synthetic oligonucleotide
guaaugggcuaaggcugcg

SEQ ID NO: 2345094 - RNA, 19 nt, Artificial Sequence
  Description of Artificial Sequence: Synthetic oligonucleotide
cacggccgcaugcaugccg

SEQ ID NO: 2345095 - RNA, 19 nt, Artificial Sequence
  Description of Artificial Sequence: Synthetic oligonucleotide
cauuggcgacuuccaauac

SEQ ID NO: 2345096 - RNA, 19 nt, Artificial Sequence
  Description of Artificial Sequence: Synthetic oligonucleotide
aagcggauaaagggccgca

SEQ ID NO: 2345097 - RNA, 19 nt, Artificial Sequence
  Description of Artificial Sequence: Synthetic oligonucleotide
uccucugaauugagccacu

SEQ ID NO: 2345098 - RNA, 19 nt, Artificial Sequence
  Description of Artificial Sequence: Synthetic oligonucleotide
aaucuccgagagagugagg

SEQ ID NO: 2345099 - RNA, 19 nt, Artificial Sequence
  Description of Artificial Sequence: Synthetic oligonucleotide
acgggagguccucccauug

SEQ ID NO: 2345100 - RNA, 19 nt, Artificial Sequence
  Description of Artificial Sequence: Synthetic oligonucleotide
caugcaugccgaucaccuc

SEQ ID NO: 2345101 - RNA, 19 nt, Artificial Sequence
  Description of Artificial Sequence: Synthetic oligonucleotide
gagccacugugugaacucc

SEQ ID NO: 2345102 - RNA, 19 nt, Artificial Sequence
  Description of Artificial Sequence: Synthetic oligonucleotide
uggcgacuuccaauacaug

SEQ ID NO: 2345103 - RNA, 19 nt, Artificial Sequence
  Description of Artificial Sequence: Synthetic oligonucleotide
aggaccuggguccuccgaa

SEQ ID NO: 2345104 - RNA, 19 nt, Artificial Sequence
  Description of Artificial Sequence: Synthetic oligonucleotide
accucguucugcuccucca

SEQ ID NO: 2345105 - RNA, 19 nt, Artificial Sequence
  Description of Artificial Sequence: Synthetic oligonucleotide
uaaugggcuaaggcugcga

SEQ ID NO: 2345106 - RNA, 19 nt, Artificial Sequence
  Description of Artificial Sequence: Synthetic oligonucleotide
ucuuuacuuugcugucgau

SEQ ID NO: 2345107 - RNA, 19 nt, Artificial Sequence
  Description of Artificial Sequence: Synthetic oligonucleotide
cuaaggcugcgaacucaac

SEQ ID NO: 2345108 - RNA, 19 nt, Artificial Sequence
  Description of Artificial Sequence: Synthetic oligonucleotide
ggcaaggagcaaugugucc

SEQ ID NO: 2345109 - RNA, 19 nt, Artificial Sequence
  Description of Artificial Sequence: Synthetic oligonucleotide
caaguuuguaaugggcuaa

SEQ ID NO: 2345110 - RNA, 19 nt, Artificial Sequence
  Description of Artificial Sequence: Synthetic oligonucleotide
uuagggccucacagggagu

SEQ ID NO: 2345111 - RNA, 19 nt, Artificial Sequence
  Description of Artificial Sequence: Synthetic oligonucleotide
uggcguccucugaauugag

SEQ ID NO: 2345112 - RNA, 19 nt, Artificial Sequence
  Description of Artificial Sequence: Synthetic oligonucleotide
gcuucuggcagcgccacag

SEQ ID NO: 2345113 - RNA, 19 nt, Artificial Sequence
  Description of Artificial Sequence: Synthetic oligonucleotide
cccagaaugguugggcugg

SEQ ID NO: 2345114 - RNA, 19 nt, Artificial Sequence
  Description of Artificial Sequence: Synthetic oligonucleotide
uguccagcgugaccuccgu

SEQ ID NO: 2345115 - RNA, 19 nt, Artificial Sequence
  Description of Artificial Sequence: Synthetic oligonucleotide
acgucgcccucauuggcga

SEQ ID NO: 2345116 - RNA, 19 nt, Artificial Sequence
  Description of Artificial Sequence: Synthetic oligonucleotide
gccgucaaugaaagggugg

SEQ ID NO: 2345117 - RNA, 19 nt, Artificial Sequence
  Description of Artificial Sequence: Synthetic oligonucleotide
gagcuccccuuagggaugg

SEQ ID NO: 2345118 - RNA, 19 nt, Artificial Sequence
  Description of Artificial Sequence: Synthetic oligonucleotide
guucaucagcagacgggag

SEQ ID NO: 2345119 - RNA, 19 nt, Artificial Sequence
  Description of Artificial Sequence: Synthetic oligonucleotide
agcgugaccuccguacacu

SEQ ID NO: 2345120 - RNA, 19 nt, Artificial Sequence
  Description of Artificial Sequence: Synthetic oligonucleotide
guccuccgaaaucuuccug

SEQ ID NO: 2345121 - RNA, 19 nt, Artificial Sequence
  Description of Artificial Sequence: Synthetic oligonucleotide
cuccguacacuuggcaaug

SEQ ID NO: 2345122 - RNA, 19 nt, Artificial Sequence
  Description of Artificial Sequence: Synthetic oligonucleotide
ucgacaucccggggauggg

SEQ ID NO: 2345123 - RNA, 19 nt, Artificial Sequence
  Description of Artificial Sequence: Synthetic oligonucleotide
gaccuccguacacuuggca

SEQ ID NO: 2345124 - RNA, 19 nt, Artificial Sequence
  Description of Artificial Sequence: Synthetic oligonucleotide
gaaugguugggcugggcuu

SEQ ID NO: 2345125 - RNA, 19 nt, Artificial Sequence
  Description of Artificial Sequence: Synthetic oligonucleotide
gccgcaugcaugccgauca

SEQ ID NO: 2345126 - RNA, 19 nt, Artificial Sequence
  Description of Artificial Sequence: Synthetic oligonucleotide
ccuugaguauggugauugg

SEQ ID NO: 2345127 - RNA, 19 nt, Artificial Sequence
  Description of Artificial Sequence: Synthetic oligonucleotide
agggcggagcuccccuuag

SEQ ID NO: 2345128 - RNA, 19 nt, Artificial Sequence
  Description of Artificial Sequence: Synthetic oligonucleotide
agacccgaugcgggagacc

SEQ ID NO: 2345129 - RNA, 19 nt, Artificial Sequence
  Description of Artificial Sequence: Synthetic oligonucleotide
agacgggagguccucccau

SEQ ID NO: 2345130 - RNA, 19 nt, Artificial Sequence
  Description of Artificial Sequence: Synthetic oligonucleotide
ggcugcgaacucaacuggg

SEQ ID NO: 2345131 - RNA, 19 nt, Artificial Sequence
  Description of Artificial Sequence: Synthetic oligonucleotide
ccgaaaucuuccugccucc

SEQ ID NO: 2345132 - RNA, 19 nt, Artificial Sequence
  Description of Artificial Sequence: Synthetic oligonucleotide
gguggauguacacaaguuu

SEQ ID NO: 2345133 - RNA, 19 nt, Artificial Sequence
  Description of Artificial Sequence: Synthetic oligonucleotide
uccguacacuuggcaauga

SEQ ID NO: 2345134 - RNA, 19 nt, Artificial Sequence
  Description of Artificial Sequence: Synthetic oligonucleotide
ggagguccucccauugccg

SEQ ID NO: 2345135 - RNA, 19 nt, Artificial Sequence
  Description of Artificial Sequence: Synthetic oligonucleotide
augacccugcgcagggcgg

SEQ ID NO: 2345136 - RNA, 19 nt, Artificial Sequence
  Description of Artificial Sequence: Synthetic oligonucleotide
cagcgugaccuccguacac

SEQ ID NO: 2345137 - RNA, 19 nt, Artificial Sequence
  Description of Artificial Sequence: Synthetic oligonucleotide
cugcaucugcuucucgaca

SEQ ID NO: 2345138 - RNA, 19 nt, Artificial Sequence
  Description of Artificial Sequence: Synthetic oligonucleotide
ccgcacgucgcccucauug

SEQ ID NO: 2345139 - RNA, 19 nt, Artificial Sequence
  Description of Artificial Sequence: Synthetic oligonucleotide
ccaauacaugguaguacuc

SEQ ID NO: 2345140 - RNA, 19 nt, Artificial Sequence
  Description of Artificial Sequence: Synthetic oligonucleotide
ccacugggucuacauaccc

SEQ ID NO: 2345141 - RNA, 19 nt, Artificial Sequence
  Description of Artificial Sequence: Synthetic oligonucleotide
cccauugccgucaaugaaa

SEQ ID NO: 2345142 - RNA, 19 nt, Artificial Sequence
  Description of Artificial Sequence: Synthetic oligonucleotide
gagguccucccauugccgu

SEQ ID NO: 2345143 - RNA, 19 nt, Artificial Sequence
  Description of Artificial Sequence: Synthetic oligonucleotide
gggaugucggugucccacc

SEQ ID NO: 2345144 - RNA, 19 nt, Artificial Sequence
  Description of Artificial Sequence: Synthetic oligonucleotide
gcuucucgacaucccgggg

SEQ ID NO: 2345145 - RNA, 19 nt, Artificial Sequence
  Description of Artificial Sequence: Synthetic oligonucleotide
ugaggguguugcccucgau

SEQ ID NO: 2345146 - RNA, 19 nt, Artificial Sequence
  Description of Artificial Sequence: Synthetic oligonucleotide
cucagaccucugcuccuug

SEQ ID NO: 2345147 - RNA, 19 nt, Artificial Sequence
  Description of Artificial Sequence: Synthetic oligonucleotide
ggucuacauaccccagcac

SEQ ID NO: 2345148 - RNA, 19 nt, Artificial Sequence
  Description of Artificial Sequence: Synthetic oligonucleotide
gugugaacuccugcaucug

SEQ ID NO: 2345149 - RNA, 19 nt, Artificial Sequence
  Description of Artificial Sequence: Synthetic oligonucleotide
gugccuaaucuccgagaga

SEQ ID NO: 2345150 - RNA, 19 nt, Artificial Sequence
  Description of Artificial Sequence: Synthetic oligonucleotide
ugguggcaaggagcaaugu

SEQ ID NO: 2345151 - RNA, 19 nt, Artificial Sequence
  Description of Artificial Sequence: Synthetic oligonucleotide
gcccagaaugguugggcug

SEQ ID NO: 2345152 - RNA, 19 nt, Artificial Sequence
  Description of Artificial Sequence: Synthetic oligonucleotide
ggggaugucggugucccac

SEQ ID NO: 2345153 - RNA, 19 nt, Artificial Sequence
  Description of Artificial Sequence: Synthetic oligonucleotide
gcccucauuggcgacuucc

SEQ ID NO: 2345154 - RNA, 19 nt, Artificial Sequence
  Description of Artificial Sequence: Synthetic oligonucleotide
cagaaugguugggcugggc

SEQ ID NO: 2345155 - RNA, 19 nt, Artificial Sequence
  Description of Artificial Sequence: Synthetic oligonucleotide
ggauaaagggccgcacguc

SEQ ID NO: 2345156 - RNA, 19 nt, Artificial Sequence
  Description of Artificial Sequence: Synthetic oligonucleotide
acugcguagcgggucucca

SEQ ID NO: 2345157 - RNA, 19 nt, Artificial Sequence
  Description of Artificial Sequence: Synthetic oligonucleotide
ggacaugaccuucuuuacu

SEQ ID NO: 2345158 - RNA, 19 nt, Artificial Sequence
  Description of Artificial Sequence: Synthetic oligonucleotide
ugcgcagggcggagcuccc

SEQ ID NO: 2345159 - RNA, 19 nt, Artificial Sequence
  Description of Artificial Sequence: Synthetic oligonucleotide
gcagacgggagguccuccc

SEQ ID NO: 2345160 - RNA, 19 nt, Artificial Sequence
  Description of Artificial Sequence: Synthetic oligonucleotide
gauguacuucacggccgca

SEQ ID NO: 2345161 - RNA, 19 nt, Artificial Sequence
  Description of Artificial Sequence: Synthetic oligonucleotide
cacugcguagcgggucucc

SEQ ID NO: 2345162 - RNA, 19 nt, Artificial Sequence
  Description of Artificial Sequence: Synthetic oligonucleotide
ucucgacaucccggggaug

SEQ ID NO: 2345163 - RNA, 19 nt, Artificial Sequence
  Description of Artificial Sequence: Synthetic oligonucleotide
gcgaacucaacugggugca

SEQ ID NO: 2345164 - RNA, 19 nt, Artificial Sequence
  Description of Artificial Sequence: Synthetic oligonucleotide
ggauguacacaaguuugua

SEQ ID NO: 2345165 - RNA, 19 nt, Artificial Sequence
  Description of Artificial Sequence: Synthetic oligonucleotide
uggcacugcguagcggguc

SEQ ID NO: 2345166 - RNA, 19 nt, Artificial Sequence
  Description of Artificial Sequence: Synthetic oligonucleotide
cucugaauugagccacugu

SEQ ID NO: 2345167 - RNA, 19 nt, Artificial Sequence
  Description of Artificial Sequence: Synthetic oligonucleotide
agccacugugugaacuccu

SEQ ID NO: 2345168 - RNA, 19 nt, Artificial Sequence
  Description of Artificial Sequence: Synthetic oligonucleotide
agaccaggguaguguugau

SEQ ID NO: 2345169 - RNA, 19 nt, Artificial Sequence
  Description of Artificial Sequence: Synthetic oligonucleotide
caaugaaaggguggaugua

SEQ ID NO: 2345170 - RNA, 19 nt, Artificial Sequence
  Description of Artificial Sequence: Synthetic oligonucleotide
ccacagaguacucaguggu

SEQ ID NO: 2345171 - RNA, 19 nt, Artificial Sequence
  Description of Artificial Sequence: Synthetic oligonucleotide
gccugcaucaggaucaggu

SEQ ID NO: 2345172 - RNA, 19 nt, Artificial Sequence
  Description of Artificial Sequence: Synthetic oligonucleotide
acggccgcaugcaugccga

SEQ ID NO: 2345173 - RNA, 19 nt, Artificial Sequence
  Description of Artificial Sequence: Synthetic oligonucleotide
gcacgucgcccucauuggc

SEQ ID NO: 2345174 - RNA, 19 nt, Artificial Sequence
  Description of Artificial Sequence: Synthetic oligonucleotide
ggagcuccccuuagggaug

SEQ ID NO: 2345175 - RNA, 19 nt, Artificial Sequence
  Description of Artificial Sequence: Synthetic oligonucleotide
cccuuagggauggacauga

SEQ ID NO: 2345176 - RNA, 19 nt, Artificial Sequence
  Description of Artificial Sequence: Synthetic oligonucleotide
gguacccugccugcaucag

SEQ ID NO: 2345177 - RNA, 19 nt, Artificial Sequence
  Description of Artificial Sequence: Synthetic oligonucleotide
ggcguccucugaauugagc

SEQ ID NO: 2345178 - RNA, 19 nt, Artificial Sequence
  Description of Artificial Sequence: Synthetic oligonucleotide
cgcacgucgcccucauugg

SEQ ID NO: 2345179 - RNA, 19 nt, Artificial Sequence
  Description of Artificial Sequence: Synthetic oligonucleotide
ggaugucggugucccacca

SEQ ID NO: 2345180 - RNA, 19 nt, Artificial Sequence
  Description of Artificial Sequence: Synthetic oligonucleotide
cuucuggcagcgccacaga

SEQ ID NO: 2345181 - RNA, 19 nt, Artificial Sequence
  Description of Artificial Sequence: Synthetic oligonucleotide
ggcuaaggcugcgaacuca

SEQ ID NO: 2345182 - RNA, 19 nt, Artificial Sequence
  Description of Artificial Sequence: Synthetic oligonucleotide
ggguacccugccugcauca

SEQ ID NO: 2345183 - RNA, 19 nt, Artificial Sequence
  Description of Artificial Sequence: Synthetic oligonucleotide
gguaguaggucuccuccau

SEQ ID NO: 2345184 - RNA, 19 nt, Artificial Sequence
  Description of Artificial Sequence: Synthetic oligonucleotide
gcaugcaugccgaucaccu

SEQ ID NO: 2345185 - RNA, 19 nt, Artificial Sequence
  Description of Artificial Sequence: Synthetic oligonucleotide
gugaggguguugcccucga

SEQ ID NO: 2345186 - RNA, 19 nt, Artificial Sequence
  Description of Artificial Sequence: Synthetic oligonucleotide
gcuaaggcugcgaacucaa

SEQ ID NO: 2345187 - RNA, 19 nt, Artificial Sequence
  Description of Artificial Sequence: Synthetic oligonucleotide
acucaacugggugcagguu

SEQ ID NO: 2345188 - RNA, 19 nt, Artificial Sequence
  Description of Artificial Sequence: Synthetic oligonucleotide
gguagauguggugguagua

SEQ ID NO: 2345189 - RNA, 19 nt, Artificial Sequence
  Description of Artificial Sequence: Synthetic oligonucleotide
gggcggagcuccccuuagg

SEQ ID NO: 2345190 - RNA, 19 nt, Artificial Sequence
  Description of Artificial Sequence: Synthetic oligonucleotide
cagacccgaugcgggagac

SEQ ID NO: 2345191 - RNA, 19 nt, Artificial Sequence
  Description of Artificial Sequence: Synthetic oligonucleotide
gggagggcuggcagguuag

SEQ ID NO: 2345192 - RNA, 19 nt, Artificial Sequence
  Description of Artificial Sequence: Synthetic oligonucleotide
cagacgggagguccuccca

SEQ ID NO: 2345193 - RNA, 19 nt, Artificial Sequence
  Description of Artificial Sequence: Synthetic oligonucleotide
ggcagguuagggccucaca

SEQ ID NO: 2345194 - RNA, 19 nt, Artificial Sequence
  Description of Artificial Sequence: Synthetic oligonucleotide
ccgugugguagauguggug

SEQ ID NO: 2345195 - RNA, 19 nt, Artificial Sequence
  Description of Artificial Sequence: Synthetic oligonucleotide
ccgucaaugaaagggugga

SEQ ID NO: 2345196 - RNA, 19 nt, Artificial Sequence
  Description of Artificial Sequence: Synthetic oligonucleotide
gcgacuuccaauacauggu

SEQ ID NO: 2345197 - RNA, 19 nt, Artificial Sequence
  Description of Artificial Sequence: Synthetic oligonucleotide
ggagggcuggcagguuagg

SEQ ID NO: 2345198 - RNA, 19 nt, Artificial Sequence
  Description of Artificial Sequence: Synthetic oligonucleotide
cuacauaccccagcacccu

SEQ ID NO: 2345199 - RNA, 19 nt, Artificial Sequence
  Description of Artificial Sequence: Synthetic oligonucleotide
gcaauguguccagcgugac

SEQ ID NO: 2345200 - RNA, 19 nt, Artificial Sequence
  Description of Artificial Sequence: Synthetic oligonucleotide
ucacggccgcaugcaugcc

SEQ ID NO: 2345201 - RNA, 19 nt, Artificial Sequence
  Description of Artificial Sequence: Synthetic oligonucleotide
ucgcccucauuggcgacuu

SEQ ID NO: 2345202 - RNA, 19 nt, Artificial Sequence
  Description of Artificial Sequence: Synthetic oligonucleotide
gcggagcuccccuuaggga

SEQ ID NO: 2345203 - RNA, 19 nt, Artificial Sequence
  Description of Artificial Sequence: Synthetic oligonucleotide
uugccaccgugugguagau

SEQ ID NO: 2345204 - RNA, 19 nt, Artificial Sequence
  Description of Artificial Sequence: Synthetic oligonucleotide
augguugggcugggcuucu

SEQ ID NO: 2345205 - RNA, 19 nt, Artificial Sequence
  Description of Artificial Sequence: Synthetic oligonucleotide
gguccuccgaaaucuuccu

SEQ ID NO: 2345206 - RNA, 19 nt, Artificial Sequence
  Description of Artificial Sequence: Synthetic oligonucleotide
ccucugcuccuugaguaug

SEQ ID NO: 2345207 - RNA, 19 nt, Artificial Sequence
  Description of Artificial Sequence: Synthetic oligonucleotide
ugcccucgauugccaccgu

SEQ ID NO: 2345208 - RNA, 19 nt, Artificial Sequence
  Description of Artificial Sequence: Synthetic oligonucleotide
ccuuagggauggacaugac

SEQ ID NO: 2345209 - RNA, 19 nt, Artificial Sequence
  Description of Artificial Sequence: Synthetic oligonucleotide
ccucugaauugagccacug

SEQ ID NO: 2345210 - RNA, 19 nt, Artificial Sequence
  Description of Artificial Sequence: Synthetic oligonucleotide
cuuugcugucgaugaugcu

SEQ ID NO: 2345211 - RNA, 19 nt, Artificial Sequence
  Description of Artificial Sequence: Synthetic oligonucleotide
cuccgaaaucuuccugccu

SEQ ID NO: 2345212 - RNA, 19 nt, Artificial Sequence
  Description of Artificial Sequence: Synthetic oligonucleotide
gggcuaaggcugcgaacuc

SEQ ID NO: 2345213 - RNA, 19 nt, Artificial Sequence
  Description of Artificial Sequence: Synthetic oligonucleotide
uccucccauugccgucaau

SEQ ID NO: 2345214 - RNA, 19 nt, Artificial Sequence
  Description of Artificial Sequence: Synthetic oligonucleotide
cagcacccuccuguggauc

SEQ ID NO: 2345215 - RNA, 19 nt, Artificial Sequence
  Description of Artificial Sequence: Synthetic oligonucleotide
gcuccccuuagggauggac

SEQ ID NO: 2345216 - RNA, 19 nt, Artificial Sequence
  Description of Artificial Sequence: Synthetic oligonucleotide
agggccucacagggagugu

SEQ ID NO: 2345217 - RNA, 19 nt, Artificial Sequence
  Description of Artificial Sequence: Synthetic oligonucleotide
agcgggucuccaggaugug

SEQ ID NO: 2345218 - RNA, 19 nt, Artificial Sequence
  Description of Artificial Sequence: Synthetic oligonucleotide
gacgggagguccucccauu

SEQ ID NO: 2345219 - RNA, 19 nt, Artificial Sequence
  Description of Artificial Sequence: Synthetic oligonucleotide
cccuccuguggaucuccag

SEQ ID NO: 2345220 - RNA, 19 nt, Artificial Sequence
  Description of Artificial Sequence: Synthetic oligonucleotide
ggcacugcguagcgggucu

SEQ ID NO: 2345221 - RNA, 19 nt, Artificial Sequence
  Description of Artificial Sequence: Synthetic oligonucleotide
gggccucacagggaguguc

SEQ ID NO: 2345222 - RNA, 19 nt, Artificial Sequence
  Description of Artificial Sequence: Synthetic oligonucleotide
ccuggguccuccgaaaucu

SEQ ID NO: 2345223 - RNA, 19 nt, Artificial Sequence
  Description of Artificial Sequence: Synthetic oligonucleotide
acccgaugcgggagaccag

SEQ ID NO: 2345224 - RNA, 19 nt, Artificial Sequence
  Description of Artificial Sequence: Synthetic oligonucleotide
gcguagcgggucuccagga

SEQ ID NO: 2345225 - RNA, 19 nt, Artificial Sequence
  Description of Artificial Sequence: Synthetic oligonucleotide
cagcgccacagaguacuca

SEQ ID NO: 2345226 - RNA, 19 nt, Artificial Sequence
  Description of Artificial Sequence: Synthetic oligonucleotide
cgacaucccggggaugggg

SEQ ID NO: 2345227 - RNA, 19 nt, Artificial Sequence
  Description of Artificial Sequence: Synthetic oligonucleotide
gcugcgaacucaacugggu

SEQ ID NO: 2345228 - RNA, 19 nt, Artificial Sequence
  Description of Artificial Sequence: Synthetic oligonucleotide
cgacuuccaauacauggua

SEQ ID NO: 2345229 - RNA, 19 nt, Artificial Sequence
  Description of Artificial Sequence: Synthetic oligonucleotide
ccuccguacacuuggcaau

SEQ ID NO: 2345230 - RNA, 19 nt, Artificial Sequence
  Description of Artificial Sequence: Synthetic oligonucleotide
cccucgauugccaccgugu

SEQ ID NO: 2345231 - RNA, 19 nt, Artificial Sequence
  Description of Artificial Sequence: Synthetic oligonucleotide
ggguggauguacacaaguu

SEQ ID NO: 2345232 - RNA, 19 nt, Artificial Sequence
  Description of Artificial Sequence: Synthetic oligonucleotide
cagggcggagcuccccuua

SEQ ID NO: 2345233 - RNA, 19 nt, Artificial Sequence
  Description of Artificial Sequence: Synthetic oligonucleotide
guccagcgugaccuccgua

SEQ ID NO: 2345234 - RNA, 19 nt, Artificial Sequence
  Description of Artificial Sequence: Synthetic oligonucleotide
ccccuuagggauggacaug

SEQ ID NO: 2345235 - RNA, 19 nt, Artificial Sequence
  Description of Artificial Sequence: Synthetic oligonucleotide
ccguacacuuggcaaugaa

SEQ ID NO: 2345236 - RNA, 19 nt, Artificial Sequence
  Description of Artificial Sequence: Synthetic oligonucleotide
gcgggagaccaggguagug

SEQ ID NO: 2345237 - RNA, 19 nt, Artificial Sequence
  Description of Artificial Sequence: Synthetic oligonucleotide
ggccgcaugcaugccgauc

SEQ ID NO: 2345238 - RNA, 19 nt, Artificial Sequence
  Description of Artificial Sequence: Synthetic oligonucleotide
cggauaaagggccgcacgu

SEQ ID NO: 2345239 - RNA, 19 nt, Artificial Sequence
  Description of Artificial Sequence: Synthetic oligonucleotide
ccgcaugcaugccgaucac

SEQ ID NO: 2345240 - RNA, 19 nt, Artificial Sequence
  Description of Artificial Sequence: Synthetic oligonucleotide
ccugccuccacugggucua

SEQ ID NO: 2345241 - RNA, 19 nt, Artificial Sequence
  Description of Artificial Sequence: Synthetic oligonucleotide
cugccuccacugggucuac

SEQ ID NO: 2345242 - RNA, 19 nt, Artificial Sequence
  Description of Artificial Sequence: Synthetic oligonucleotide
cggagcuccccuuagggau

SEQ ID NO: 2345243 - RNA, 19 nt, Artificial Sequence
  Description of Artificial Sequence: Synthetic oligonucleotide
cgaucaccucguucugcuc

SEQ ID NO: 2345244 - RNA, 19 nt, Artificial Sequence
  Description of Artificial Sequence: Synthetic oligonucleotide
ggguaguguugauguacuu

SEQ ID NO: 2345245 - RNA, 19 nt, Artificial Sequence
  Description of Artificial Sequence: Synthetic oligonucleotide
ggcuucuggcagcgccaca

SEQ ID NO: 2345246 - RNA, 19 nt, Artificial Sequence
  Description of Artificial Sequence: Synthetic oligonucleotide
ccaggguaguguugaugua

SEQ ID NO: 2345247 - RNA, 19 nt, Artificial Sequence
  Description of Artificial Sequence: Synthetic oligonucleotide
cgaacucaacugggugcag

SEQ ID NO: 2345248 - RNA, 19 nt, Artificial Sequence
  Description of Artificial Sequence: Synthetic oligonucleotide
gcagcgccacagaguacuc

SEQ ID NO: 2345249 - RNA, 19 nt, Artificial Sequence
  Description of Artificial Sequence: Synthetic oligonucleotide
agcuccccuuagggaugga

SEQ ID NO: 2345250 - RNA, 19 nt, Artificial Sequence
  Description of Artificial Sequence: Synthetic oligonucleotide
ggccucacagggagugucu

SEQ ID NO: 2345251 - RNA, 19 nt, Artificial Sequence
  Description of Artificial Sequence: Synthetic oligonucleotide
gcgugaccuccguacacuu

SEQ ID NO: 2345252 - RNA, 19 nt, Artificial Sequence
  Description of Artificial Sequence: Synthetic oligonucleotide
gccuaaucuccgagagagu

SEQ ID NO: 2345253 - RNA, 19 nt, Artificial Sequence
  Description of Artificial Sequence: Synthetic oligonucleotide
cgucgcccucauuggcgac

SEQ ID NO: 2345254 - RNA, 19 nt, Artificial Sequence
  Description of Artificial Sequence: Synthetic oligonucleotide
cgggagaccaggguagugu

SEQ ID NO: 2345255 - RNA, 19 nt, Artificial Sequence
  Description of Artificial Sequence: Synthetic oligonucleotide
gcgcagggcggagcucccc

SEQ ID NO: 2345256 - RNA, 19 nt, Artificial Sequence
  Description of Artificial Sequence: Synthetic oligonucleotide
gcacugcguagcgggucuc

SEQ ID NO: 2345257 - RNA, 19 nt, Artificial Sequence
  Description of Artificial Sequence: Synthetic oligonucleotide
caacugggugcagguucau

SEQ ID NO: 2345258 - RNA, 19 nt, Artificial Sequence
  Description of Artificial Sequence: Synthetic oligonucleotide
gcgccacagaguacucagu

SEQ ID NO: 2345259 - RNA, 19 nt, Artificial Sequence
  Description of Artificial Sequence: Synthetic oligonucleotide
gggccgcacgucgcccuca

SEQ ID NO: 2345260 - RNA, 19 nt, Artificial Sequence
  Description of Artificial Sequence: Synthetic oligonucleotide
ggccgcacgucgcccucau

SEQ ID NO: 2345261 - RNA, 19 nt, Artificial Sequence
  Description of Artificial Sequence: Synthetic oligonucleotide
cgucaaugaaaggguggau

SEQ ID NO: 2345262 - RNA, 19 nt, Artificial Sequence
  Description of Artificial Sequence: Synthetic oligonucleotide
cgcagggcggagcuccccu

SEQ ID NO: 2345263 - RNA, 19 nt, Artificial Sequence
  Description of Artificial Sequence: Synthetic oligonucleotide
cgauggugacagacccgau

SEQ ID NO: 2345264 - RNA, 19 nt, Artificial Sequence
  Description of Artificial Sequence: Synthetic oligonucleotide
gccgcacgucgcccucauu

SEQ ID NO: 2345265 - RNA, 19 nt, Artificial Sequence
  Description of Artificial Sequence: Synthetic oligonucleotide
cggccgcaugcaugccgau

SEQ ID NO: 2345266 - RNA, 19 nt, Artificial Sequence
  Description of Artificial Sequence: Synthetic oligonucleotide
aaaucaguuggguacggcc

SEQ ID NO: 2345267 - RNA, 19 nt, Artificial Sequence
  Description of Artificial Sequence: Synthetic oligonucleotide
aucucggugaauuagcagc

SEQ ID NO: 2345268 - RNA, 19 nt, Artificial Sequence
  Description of Artificial Sequence: Synthetic oligonucleotide
uauuuaaugauuucuucug

SEQ ID NO: 2345269 - RNA, 19 nt, Artificial Sequence
  Description of Artificial Sequence: Synthetic oligonucleotide
aaugauuucuucugaggag

SEQ ID NO: 2345270 - RNA, 19 nt, Artificial Sequence
  Description of Artificial Sequence: Synthetic oligonucleotide
uuaaugauuucuucugagg

SEQ ID NO: 2345271 - RNA, 19 nt, Artificial Sequence
  Description of Artificial Sequence: Synthetic oligonucleotide
ugacauaaccuccacauca

SEQ ID NO: 2345272 - RNA, 19 nt, Artificial Sequence
  Description of Artificial Sequence: Synthetic oligonucleotide
uaaugauuucuucugagga

SEQ ID NO: 2345273 - RNA, 19 nt, Artificial Sequence
  Description of Artificial Sequence: Synthetic oligonucleotide
ugucauuugacugccaugg

SEQ ID NO: 2345274 - RNA, 19 nt, Artificial Sequence
  Description of Artificial Sequence: Synthetic oligonucleotide
agacaugucauuugacugc

SEQ ID NO: 2345275 - RNA, 19 nt, Artificial Sequence
  Description of Artificial Sequence: Synthetic oligonucleotide
aggguuguucaucugaccc

SEQ ID NO: 2345276 - RNA, 19 nt, Artificial Sequence
  Description of Artificial Sequence: Synthetic oligonucleotide
ucugauuucuugaaauugc

SEQ ID NO: 2345277 - RNA, 19 nt, Artificial Sequence
  Description of Artificial Sequence: Synthetic oligonucleotide
ugcagcacuagucugugcg

SEQ ID NO: 2345278 - RNA, 19 nt, Artificial Sequence
  Description of Artificial Sequence: Synthetic oligonucleotide
agucuguugacauaaccuc

SEQ ID NO: 2345279 - RNA, 19 nt, Artificial Sequence
  Description of Artificial Sequence: Synthetic oligonucleotide
ugauuaagugccaacuuca

SEQ ID NO: 2345280 - RNA, 19 nt, Artificial Sequence
  Description of Artificial Sequence: Synthetic oligonucleotide
uucucuauugacuugaguu

SEQ ID NO: 2345281 - RNA, 19 nt, Artificial Sequence
  Description of Artificial Sequence: Synthetic oligonucleotide
agagucuguugacauaacc

SEQ ID NO: 2345282 - RNA, 19 nt, Artificial Sequence
  Description of Artificial Sequence: Synthetic oligonucleotide
cucuaaaucaguuggguac

SEQ ID NO: 2345283 - RNA, 19 nt, Artificial Sequence
  Description of Artificial Sequence: Synthetic oligonucleotide
auugacuugaguuucuccu

SEQ ID NO: 2345284 - RNA, 19 nt, Artificial Sequence
  Description of Artificial Sequence: Synthetic oligonucleotide
uaaugccugcauuucaugg

SEQ ID NO: 2345285 - RNA, 19 nt, Artificial Sequence
  Description of Artificial Sequence: Synthetic oligonucleotide
uauaaguucccucgacagg

SEQ ID NO: 2345286 - RNA, 19 nt, Artificial Sequence
  Description of Artificial Sequence: Synthetic oligonucleotide
ugcuugaagagucuguuga

SEQ ID NO: 2345287 - RNA, 19 nt, Artificial Sequence
  Description of Artificial Sequence: Synthetic oligonucleotide
ugcacuaauccuaugugca

SEQ ID NO: 2345288 - RNA, 19 nt, Artificial Sequence
  Description of Artificial Sequence: Synthetic oligonucleotide
ucuauaaguucccucgaca

SEQ ID NO: 2345289 - RNA, 19 nt, Artificial Sequence
  Description of Artificial Sequence: Synthetic oligonucleotide
ucuccuggaacccaaguca

SEQ ID NO: 2345290 - RNA, 19 nt, Artificial Sequence
  Description of Artificial Sequence: Synthetic oligonucleotide
cuugaaaguccccaucucg

SEQ ID NO: 2345291 - RNA, 19 nt, Artificial Sequence
  Description of Artificial Sequence: Synthetic oligonucleotide
cuauaaguucccucgacag

SEQ ID NO: 2345292 - RNA, 19 nt, Artificial Sequence
  Description of Artificial Sequence: Synthetic oligonucleotide
ucuaaaucaguuggguacg

SEQ ID NO: 2345293 - RNA, 19 nt, Artificial Sequence
  Description of Artificial Sequence: Synthetic oligonucleotide
ugcauauuuaaugauuucu

SEQ ID NO: 2345294 - RNA, 19 nt, Artificial Sequence
  Description of Artificial Sequence: Synthetic oligonucleotide
aaggguuguucaucugacc

SEQ ID NO: 2345295 - RNA, 19 nt, Artificial Sequence
  Description of Artificial Sequence: Synthetic oligonucleotide
cuuguugugcccaggaggc

SEQ ID NO: 2345296 - RNA, 19 nt, Artificial Sequence
  Description of Artificial Sequence: Synthetic oligonucleotide
cuucucaucucuaaaucag

SEQ ID NO: 2345297 - RNA, 19 nt, Artificial Sequence
  Description of Artificial Sequence: Synthetic oligonucleotide
ucuaccugcugcaagggca

SEQ ID NO: 2345298 - RNA, 19 nt, Artificial Sequence
  Description of Artificial Sequence: Synthetic oligonucleotide
ugaaauugccagcauuucu

SEQ ID NO: 2345299 - RNA, 19 nt, Artificial Sequence
  Description of Artificial Sequence: Synthetic oligonucleotide
ugaagaagccgccaucgcc

SEQ ID NO: 2345300 - RNA, 19 nt, Artificial Sequence
  Description of Artificial Sequence: Synthetic oligonucleotide
gagauggccauucacacca

SEQ ID NO: 2345301 - RNA, 19 nt, Artificial Sequence
  Description of Artificial Sequence: Synthetic oligonucleotide
uuuucuaaugccugcauuu

SEQ ID NO: 2345302 - RNA, 19 nt, Artificial Sequence
  Description of Artificial Sequence: Synthetic oligonucleotide
agauagcaccuuuucuugc

SEQ ID NO: 2345303 - RNA, 19 nt, Artificial Sequence
  Description of Artificial Sequence: Synthetic oligonucleotide
aaguucccucgacaggacc

SEQ ID NO: 2345304 - RNA, 19 nt, Artificial Sequence
  Description of Artificial Sequence: Synthetic oligonucleotide
uugguaaacagcuguugcc

SEQ ID NO: 2345305 - RNA, 19 nt, Artificial Sequence
  Description of Artificial Sequence: Synthetic oligonucleotide
gaauuagcagcuccaagac

SEQ ID NO: 2345306 - RNA, 19 nt, Artificial Sequence
  Description of Artificial Sequence: Synthetic oligonucleotide
acuugaguuucuccuuugc

SEQ ID NO: 2345307 - RNA, 19 nt, Artificial Sequence
  Description of Artificial Sequence: Synthetic oligonucleotide
uggccauucacaccacucg

SEQ ID NO: 2345308 - RNA, 19 nt, Artificial Sequence
  Description of Artificial Sequence: Synthetic oligonucleotide
ggugguagcauguucacag

SEQ ID NO: 2345309 - RNA, 19 nt, Artificial Sequence
  Description of Artificial Sequence: Synthetic oligonucleotide
ugauuucuugaaauugcca

SEQ ID NO: 2345310 - RNA, 19 nt, Artificial Sequence
  Description of Artificial Sequence: Synthetic oligonucleotide
uuucaugguggacuuuucc

SEQ ID NO: 2345311 - RNA, 19 nt, Artificial Sequence
  Description of Artificial Sequence: Synthetic oligonucleotide
uuucuugaaauugccagca

SEQ ID NO: 2345312 - RNA, 19 nt, Artificial Sequence
  Description of Artificial Sequence: Synthetic oligonucleotide
cugauuucuugaaauugcc

SEQ ID NO: 2345313 - RNA, 19 nt, Artificial Sequence
  Description of Artificial Sequence: Synthetic oligonucleotide
uugcacuaauccuaugugc

SEQ ID NO: 2345314 - RNA, 19 nt, Artificial Sequence
  Description of Artificial Sequence: Synthetic oligonucleotide
cugaauaucacugucucuc

SEQ ID NO: 2345315 - RNA, 19 nt, Artificial Sequence
  Description of Artificial Sequence: Synthetic oligonucleotide
gagauagcaccuuuucuug

SEQ ID NO: 2345316 - RNA, 19 nt, Artificial Sequence
  Description of Artificial Sequence: Synthetic oligonucleotide
aggucugggguuuacaugu

SEQ ID NO: 2345317 - RNA, 19 nt, Artificial Sequence
  Description of Artificial Sequence: Synthetic oligonucleotide
auuugacugccauggguac

SEQ ID NO: 2345318 - RNA, 19 nt, Artificial Sequence
  Description of Artificial Sequence: Synthetic oligonucleotide
aacgccugccauuaccgag

SEQ ID NO: 2345319 - RNA, 19 nt, Artificial Sequence
  Description of Artificial Sequence: Synthetic oligonucleotide
cuaugugcauauuuaauga

SEQ ID NO: 2345320 - RNA, 19 nt, Artificial Sequence
  Description of Artificial Sequence: Synthetic oligonucleotide
ucuuccagcgcagacagca

SEQ ID NO: 2345321 - RNA, 19 nt, Artificial Sequence
  Description of Artificial Sequence: Synthetic oligonucleotide
uugcuugguaaacagcugu

SEQ ID NO: 2345322 - RNA, 19 nt, Artificial Sequence
  Description of Artificial Sequence: Synthetic oligonucleotide
ugcugaauaucacugucuc

SEQ ID NO: 2345323 - RNA, 19 nt, Artificial Sequence
  Description of Artificial Sequence: Synthetic oligonucleotide
auaaguucccucgacagga

SEQ ID NO: 2345324 - RNA, 19 nt, Artificial Sequence
  Description of Artificial Sequence: Synthetic oligonucleotide
uccaacagaaagucacugc

SEQ ID NO: 2345325 - RNA, 19 nt, Artificial Sequence
  Description of Artificial Sequence: Synthetic oligonucleotide
gaagaagccgccaucgccc

SEQ ID NO: 2345326 - RNA, 19 nt, Artificial Sequence
  Description of Artificial Sequence: Synthetic oligonucleotide
ucuugcuuucucuauugac

SEQ ID NO: 2345327 - RNA, 19 nt, Artificial Sequence
  Description of Artificial Sequence: Synthetic oligonucleotide
uuucuauaaguucccucga

SEQ ID NO: 2345328 - RNA, 19 nt, Artificial Sequence
  Description of Artificial Sequence: Synthetic oligonucleotide
ucggugaauuagcagcucc

SEQ ID NO: 2345329 - RNA, 19 nt, Artificial Sequence
  Description of Artificial Sequence: Synthetic oligonucleotide
uucuaaugccugcauuuca

SEQ ID NO: 2345330 - RNA, 19 nt, Artificial Sequence
  Description of Artificial Sequence: Synthetic oligonucleotide
ugauuuggugguagcaugu

SEQ ID NO: 2345331 - RNA, 19 nt, Artificial Sequence
  Description of Artificial Sequence: Synthetic oligonucleotide
cugauuaagugccaacuuc

SEQ ID NO: 2345332 - RNA, 19 nt, Artificial Sequence
  Description of Artificial Sequence: Synthetic oligonucleotide
aaauugccagcauuucuau

SEQ ID NO: 2345333 - RNA, 19 nt, Artificial Sequence
  Description of Artificial Sequence: Synthetic oligonucleotide
aggaggcuccaacagaaag

SEQ ID NO: 2345334 - RNA, 19 nt, Artificial Sequence
  Description of Artificial Sequence: Synthetic oligonucleotide
cuugcacuaauccuaugug

SEQ ID NO: 2345335 - RNA, 19 nt, Artificial Sequence
  Description of Artificial Sequence: Synthetic oligonucleotide
ucuugaaauugccagcauu

SEQ ID NO: 2345336 - RNA, 19 nt, Artificial Sequence
  Description of Artificial Sequence: Synthetic oligonucleotide
ucucuauugacuugaguuu

SEQ ID NO: 2345337 - RNA, 19 nt, Artificial Sequence
  Description of Artificial Sequence: Synthetic oligonucleotide
acuugaagaagccgccauc

SEQ ID NO: 2345338 - RNA, 19 nt, Artificial Sequence
  Description of Artificial Sequence: Synthetic oligonucleotide
uugaguuucuccuuugcuu

SEQ ID NO: 2345339 - RNA, 19 nt, Artificial Sequence
  Description of Artificial Sequence: Synthetic oligonucleotide
uucuauaaguucccucgac

SEQ ID NO: 2345340 - RNA, 19 nt, Artificial Sequence
  Description of Artificial Sequence: Synthetic oligonucleotide
ugcaagggcauccccuggg

SEQ ID NO: 2345341 - RNA, 19 nt, Artificial Sequence
  Description of Artificial Sequence: Synthetic oligonucleotide
ccuaugugcauauuuaaug

SEQ ID NO: 2345342 - RNA, 19 nt, Artificial Sequence
  Description of Artificial Sequence: Synthetic oligonucleotide
ucagagucgcugcugcugc

SEQ ID NO: 2345343 - RNA, 19 nt, Artificial Sequence
  Description of Artificial Sequence: Synthetic oligonucleotide
agcacuagucugugcgugc

SEQ ID NO: 2345344 - RNA, 19 nt, Artificial Sequence
  Description of Artificial Sequence: Synthetic oligonucleotide
ucucggugaauuagcagcu

SEQ ID NO: 2345345 - RNA, 19 nt, Artificial Sequence
  Description of Artificial Sequence: Synthetic oligonucleotide
uucucaucucuaaaucagu

SEQ ID NO: 2345346 - RNA, 19 nt, Artificial Sequence
  Description of Artificial Sequence: Synthetic oligonucleotide
guugacauaaccuccacau

SEQ ID NO: 2345347 - RNA, 19 nt, Artificial Sequence
  Description of Artificial Sequence: Synthetic oligonucleotide
ugugcgugcucucacgccu

SEQ ID NO: 2345348 - RNA, 19 nt, Artificial Sequence
  Description of Artificial Sequence: Synthetic oligonucleotide
aauccuaugugcauauuua

SEQ ID NO: 2345349 - RNA, 19 nt, Artificial Sequence
  Description of Artificial Sequence: Synthetic oligonucleotide
ucaucugacccagcaaucc

SEQ ID NO: 2345350 - RNA, 19 nt, Artificial Sequence
  Description of Artificial Sequence: Synthetic oligonucleotide
uaaacagcuguugccagga

SEQ ID NO: 2345351 - RNA, 19 nt, Artificial Sequence
  Description of Artificial Sequence: Synthetic oligonucleotide
uccuaugugcauauuuaau

SEQ ID NO: 2345352 - RNA, 19 nt, Artificial Sequence
  Description of Artificial Sequence: Synthetic oligonucleotide
gaagagucuguugacauaa

SEQ ID NO: 2345353 - RNA, 19 nt, Artificial Sequence
  Description of Artificial Sequence: Synthetic oligonucleotide
ugaauaucacugucucucu

SEQ ID NO: 2345354 - RNA, 19 nt, Artificial Sequence
  Description of Artificial Sequence: Synthetic oligonucleotide
ucucaucucuaaaucaguu

SEQ ID NO: 2345355 - RNA, 19 nt, Artificial Sequence
  Description of Artificial Sequence: Synthetic oligonucleotide
ucugugcgugcucucacgc

SEQ ID NO: 2345356 - RNA, 19 nt, Artificial Sequence
  Description of Artificial Sequence: Synthetic oligonucleotide
ugucccucuugucagggcu

SEQ ID NO: 2345357 - RNA, 19 nt, Artificial Sequence
  Description of Artificial Sequence: Synthetic oligonucleotide
gugauuuggugguagcaug

SEQ ID NO: 2345358 - RNA, 19 nt, Artificial Sequence
  Description of Artificial Sequence: Synthetic oligonucleotide
ugguagcauguucacagac

SEQ ID NO: 2345359 - RNA, 19 nt, Artificial Sequence
  Description of Artificial Sequence: Synthetic oligonucleotide
acuaauccuaugugcauau

SEQ ID NO: 2345360 - RNA, 19 nt, Artificial Sequence
  Description of Artificial Sequence: Synthetic oligonucleotide
agcaccuuuucuugcuuuc

SEQ ID NO: 2345361 - RNA, 19 nt, Artificial Sequence
  Description of Artificial Sequence: Synthetic oligonucleotide
gacaugucauuugacugcc

SEQ ID NO: 2345362 - RNA, 19 nt, Artificial Sequence
  Description of Artificial Sequence: Synthetic oligonucleotide
auuaccgagacgccgccca

SEQ ID NO: 2345363 - RNA, 19 nt, Artificial Sequence
  Description of Artificial Sequence: Synthetic oligonucleotide
aucaguuggguacggccuc

SEQ ID NO: 2345364 - RNA, 19 nt, Artificial Sequence
  Description of Artificial Sequence: Synthetic oligonucleotide
ucucacgccuucuucaguc

SEQ ID NO: 2345365 - RNA, 19 nt, Artificial Sequence
  Description of Artificial Sequence: Synthetic oligonucleotide
gaaauugccagcauuucua

SEQ ID NO: 2345366 - RNA, 19 nt, Artificial Sequence
  Description of Artificial Sequence: Synthetic oligonucleotide
acauaaccuccacaucauc

SEQ ID NO: 2345367 - RNA, 19 nt, Artificial Sequence
  Description of Artificial Sequence: Synthetic oligonucleotide
auaaccuccacaucaucuu

SEQ ID NO: 2345368 - RNA, 19 nt, Artificial Sequence
  Description of Artificial Sequence: Synthetic oligonucleotide
auucacaccacucguggaa

SEQ ID NO: 2345369 - RNA, 19 nt, Artificial Sequence
  Description of Artificial Sequence: Synthetic oligonucleotide
uuuacaugucccucuuguc

SEQ ID NO: 2345370 - RNA, 19 nt, Artificial Sequence
  Description of Artificial Sequence: Synthetic oligonucleotide
ugccauuaccgagacgccg

SEQ ID NO: 2345371 - RNA, 19 nt, Artificial Sequence
  Description of Artificial Sequence: Synthetic oligonucleotide
ugugauuuggugguagcau

SEQ ID NO: 2345372 - RNA, 19 nt, Artificial Sequence
  Description of Artificial Sequence: Synthetic oligonucleotide
aacagcuguugccaggauu

SEQ ID NO: 2345373 - RNA, 19 nt, Artificial Sequence
  Description of Artificial Sequence: Synthetic oligonucleotide
uguucaucugacccagcaa

SEQ ID NO: 2345374 - RNA, 19 nt, Artificial Sequence
  Description of Artificial Sequence: Synthetic oligonucleotide
caacagaaagucacugcug

SEQ ID NO: 2345375 - RNA, 19 nt, Artificial Sequence
  Description of Artificial Sequence: Synthetic oligonucleotide
uccaagaccugguuuuccu

SEQ ID NO: 2345376 - RNA, 19 nt, Artificial Sequence
  Description of Artificial Sequence: Synthetic oligonucleotide
agaaagucacugcugugau

SEQ ID NO: 2345377 - RNA, 19 nt, Artificial Sequence
  Description of Artificial Sequence: Synthetic oligonucleotide
uuccuuguugugcccagga

SEQ ID NO: 2345378 - RNA, 19 nt, Artificial Sequence
  Description of Artificial Sequence: Synthetic oligonucleotide
guuggguacggccuccgag

SEQ ID NO: 2345379 - RNA, 19 nt, Artificial Sequence
  Description of Artificial Sequence: Synthetic oligonucleotide
uugacauaaccuccacauc

SEQ ID NO: 2345380 - RNA, 19 nt, Artificial Sequence
  Description of Artificial Sequence: Synthetic oligonucleotide
agucugugcgugcucucac

SEQ ID NO: 2345381 - RNA, 19 nt, Artificial Sequence
  Description of Artificial Sequence: Synthetic oligonucleotide
uucaucugacccagcaauc

SEQ ID NO: 2345382 - RNA, 19 nt, Artificial Sequence
  Description of Artificial Sequence: Synthetic oligonucleotide
ugacccagcaauccacuuc

SEQ ID NO: 2345383 - RNA, 19 nt, Artificial Sequence
  Description of Artificial Sequence: Synthetic oligonucleotide
cuggaacccaagucagugg

SEQ ID NO: 2345384 - RNA, 19 nt, Artificial Sequence
  Description of Artificial Sequence: Synthetic oligonucleotide
uucuccuuugcuugguaaa

SEQ ID NO: 2345385 - RNA, 19 nt, Artificial Sequence
  Description of Artificial Sequence: Synthetic oligonucleotide
augucauuugacugccaug

SEQ ID NO: 2345386 - RNA, 19 nt, Artificial Sequence
  Description of Artificial Sequence: Synthetic oligonucleotide
ucacgccuucuucagucag

SEQ ID NO: 2345387 - RNA, 19 nt, Artificial Sequence
  Description of Artificial Sequence: Synthetic oligonucleotide
cucuauugacuugaguuuc

SEQ ID NO: 2345388 - RNA, 19 nt, Artificial Sequence
  Description of Artificial Sequence: Synthetic oligonucleotide
ugcugcaagggcauccccu

SEQ ID NO: 2345389 - RNA, 19 nt, Artificial Sequence
  Description of Artificial Sequence: Synthetic oligonucleotide
gaaggguuguucaucugac

SEQ ID NO: 2345390 - RNA, 19 nt, Artificial Sequence
  Description of Artificial Sequence: Synthetic oligonucleotide
ccuuguugugcccaggagg

SEQ ID NO: 2345391 - RNA, 19 nt, Artificial Sequence
  Description of Artificial Sequence: Synthetic oligonucleotide
cauuugacugccaugggua

SEQ ID NO: 2345392 - RNA, 19 nt, Artificial Sequence
  Description of Artificial Sequence: Synthetic oligonucleotide
caugguggacuuuucccug

SEQ ID NO: 2345393 - RNA, 19 nt, Artificial Sequence
  Description of Artificial Sequence: Synthetic oligonucleotide
guuuacaugucccucuugu

SEQ ID NO: 2345394 - RNA, 19 nt, Artificial Sequence
  Description of Artificial Sequence: Synthetic oligonucleotide
uuucuaaugccugcauuuc

SEQ ID NO: 2345395 - RNA, 19 nt, Artificial Sequence
  Description of Artificial Sequence: Synthetic oligonucleotide
agaggucugggguuuacau

SEQ ID NO: 2345396 - RNA, 19 nt, Artificial Sequence
  Description of Artificial Sequence: Synthetic oligonucleotide
aguucuugaaaguccccau

SEQ ID NO: 2345397 - RNA, 19 nt, Artificial Sequence
  Description of Artificial Sequence: Synthetic oligonucleotide
accgagacgccgcccagac

SEQ ID NO: 2345398 - RNA, 19 nt, Artificial Sequence
  Description of Artificial Sequence: Synthetic oligonucleotide
aucugacccagcaauccac

SEQ ID NO: 2345399 - RNA, 19 nt, Artificial Sequence
  Description of Artificial Sequence: Synthetic oligonucleotide
caucucggugaauuagcag

SEQ ID NO: 2345400 - RNA, 19 nt, Artificial Sequence
  Description of Artificial Sequence: Synthetic oligonucleotide
agcuccaagaccugguuuu

SEQ ID NO: 2345401 - RNA, 19 nt, Artificial Sequence
  Description of Artificial Sequence: Synthetic oligonucleotide
uaaaucaguuggguacggc

SEQ ID NO: 2345402 - RNA, 19 nt, Artificial Sequence
  Description of Artificial Sequence: Synthetic oligonucleotide
guacuguggagcaaggaca

SEQ ID NO: 2345403 - RNA, 19 nt, Artificial Sequence
  Description of Artificial Sequence: Synthetic oligonucleotide
aauugccagcauuucuaua

SEQ ID NO: 2345404 - RNA, 19 nt, Artificial Sequence
  Description of Artificial Sequence: Synthetic oligonucleotide
ugcugugauuuggugguag

SEQ ID NO: 2345405 - RNA, 19 nt, Artificial Sequence
  Description of Artificial Sequence: Synthetic oligonucleotide
agcauugcuugcacuaauc

SEQ ID NO: 2345406 - RNA, 19 nt, Artificial Sequence
  Description of Artificial Sequence: Synthetic oligonucleotide
gauagcaccuuuucuugcu

SEQ ID NO: 2345407 - RNA, 19 nt, Artificial Sequence
  Description of Artificial Sequence: Synthetic oligonucleotide
gcauugcuugcacuaaucc

SEQ ID NO: 2345408 - RNA, 19 nt, Artificial Sequence
  Description of Artificial Sequence: Synthetic oligonucleotide
uugaaauugccagcauuuc

SEQ ID NO: 2345409 - RNA, 19 nt, Artificial Sequence
  Description of Artificial Sequence: Synthetic oligonucleotide
ugaagagucuguugacaua

SEQ ID NO: 2345410 - RNA, 19 nt, Artificial Sequence
  Description of Artificial Sequence: Synthetic oligonucleotide
acucguggaaggguuguuc

SEQ ID NO: 2345411 - RNA, 19 nt, Artificial Sequence
  Description of Artificial Sequence: Synthetic oligonucleotide
gagucuguugacauaaccu

SEQ ID NO: 2345412 - RNA, 19 nt, Artificial Sequence
  Description of Artificial Sequence: Synthetic oligonucleotide
auggccauucacaccacuc

SEQ ID NO: 2345413 - RNA, 19 nt, Artificial Sequence
  Description of Artificial Sequence: Synthetic oligonucleotide
caagaccugguuuuccuca

SEQ ID NO: 2345414 - RNA, 19 nt, Artificial Sequence
  Description of Artificial Sequence: Synthetic oligonucleotide
uugcuugcacuaauccuau

SEQ ID NO: 2345415 - RNA, 19 nt, Artificial Sequence
  Description of Artificial Sequence: Synthetic oligonucleotide
ggacuuuucccugauuaag

SEQ ID NO: 2345416 - RNA, 19 nt, Artificial Sequence
  Description of Artificial Sequence: Synthetic oligonucleotide
cauuuuccuuguugugccc

SEQ ID NO: 2345417 - RNA, 19 nt, Artificial Sequence
  Description of Artificial Sequence: Synthetic oligonucleotide
ucacugucucucuucucga

SEQ ID NO: 2345418 - RNA, 19 nt, Artificial Sequence
  Description of Artificial Sequence: Synthetic oligonucleotide
acuagucugugcgugcucu

SEQ ID NO: 2345419 - RNA, 19 nt, Artificial Sequence
  Description of Artificial Sequence: Synthetic oligonucleotide
uaaguucccucgacaggac

SEQ ID NO: 2345420 - RNA, 19 nt, Artificial Sequence
  Description of Artificial Sequence: Synthetic oligonucleotide
ggaaggguuguucaucuga

SEQ ID NO: 2345421 - RNA, 19 nt, Artificial Sequence
  Description of Artificial Sequence: Synthetic oligonucleotide
ggcuccaacagaaagucac

SEQ ID NO: 2345422 - RNA, 19 nt, Artificial Sequence
  Description of Artificial Sequence: Synthetic oligonucleotide
gucugugcgugcucucacg

SEQ ID NO: 2345423 - RNA, 19 nt, Artificial Sequence
  Description of Artificial Sequence: Synthetic oligonucleotide
auguucacagacaugucau

SEQ ID NO: 2345424 - RNA, 19 nt, Artificial Sequence
  Description of Artificial Sequence: Synthetic oligonucleotide
acagcuguugccaggauuu

SEQ ID NO: 2345425 - RNA, 19 nt, Artificial Sequence
  Description of Artificial Sequence: Synthetic oligonucleotide
ugcuugguaaacagcuguu

SEQ ID NO: 2345426 - RNA, 19 nt, Artificial Sequence
  Description of Artificial Sequence: Synthetic oligonucleotide
ccaacgccugccauuaccg

SEQ ID NO: 2345427 - RNA, 19 nt, Artificial Sequence
  Description of Artificial Sequence: Synthetic oligonucleotide
uucuugaaauugccagcau

SEQ ID NO: 2345428 - RNA, 19 nt, Artificial Sequence
  Description of Artificial Sequence: Synthetic oligonucleotide
aggacaucuggcagucuac

SEQ ID NO: 2345429 - RNA, 19 nt, Artificial Sequence
  Description of Artificial Sequence: Synthetic oligonucleotide
cacacagcauugcuugcac

SEQ ID NO: 2345430 - RNA, 19 nt, Artificial Sequence
  Description of Artificial Sequence: Synthetic oligonucleotide
gggagauggccauucacac

SEQ ID NO: 2345431 - RNA, 19 nt, Artificial Sequence
  Description of Artificial Sequence: Synthetic oligonucleotide
ucccugauuaagugccaac

SEQ ID NO: 2345432 - RNA, 19 nt, Artificial Sequence
  Description of Artificial Sequence: Synthetic oligonucleotide
uguucacagacaugucauu

SEQ ID NO: 2345433 - RNA, 19 nt, Artificial Sequence
  Description of Artificial Sequence: Synthetic oligonucleotide
uuaccgagacgccgcccag

SEQ ID NO: 2345434 - RNA, 19 nt, Artificial Sequence
  Description of Artificial Sequence: Synthetic oligonucleotide
cugggagauggccauucac

SEQ ID NO: 2345435 - RNA, 19 nt, Artificial Sequence
  Description of Artificial Sequence: Synthetic oligonucleotide
uggcagucuaccugcugca

SEQ ID NO: 2345436 - RNA, 19 nt, Artificial Sequence
  Description of Artificial Sequence: Synthetic oligonucleotide
cacaccacucguggaaggg

SEQ ID NO: 2345437 - RNA, 19 nt, Artificial Sequence
  Description of Artificial Sequence: Synthetic oligonucleotide
cucguggaaggguuguuca

SEQ ID NO: 2345438 - RNA, 19 nt, Artificial Sequence
  Description of Artificial Sequence: Synthetic oligonucleotide
ccccacuugaagaagccgc

SEQ ID NO: 2345439 - RNA, 19 nt, Artificial Sequence
  Description of Artificial Sequence: Synthetic oligonucleotide
aguucccucgacaggaccu

SEQ ID NO: 2345440 - RNA, 19 nt, Artificial Sequence
  Description of Artificial Sequence: Synthetic oligonucleotide
cgagacgccgcccagacgc

SEQ ID NO: 2345441 - RNA, 19 nt, Artificial Sequence
  Description of Artificial Sequence: Synthetic oligonucleotide
cacagcauugcuugcacua

SEQ ID NO: 2345442 - RNA, 19 nt, Artificial Sequence
  Description of Artificial Sequence: Synthetic oligonucleotide
ggagauggccauucacacc

SEQ ID NO: 2345443 - RNA, 19 nt, Artificial Sequence
  Description of Artificial Sequence: Synthetic oligonucleotide
ucgacaggaccuccagguc

SEQ ID NO: 2345444 - RNA, 19 nt, Artificial Sequence
  Description of Artificial Sequence: Synthetic oligonucleotide
cucgacaggaccuccaggu

SEQ ID NO: 2345445 - RNA, 19 nt, Artificial Sequence
  Description of Artificial Sequence: Synthetic oligonucleotide
caagggcauccccugggag

SEQ ID NO: 2345446 - RNA, 19 nt, Artificial Sequence
  Description of Artificial Sequence: Synthetic oligonucleotide
uagucugugcgugcucuca

SEQ ID NO: 2345447 - RNA, 19 nt, Artificial Sequence
  Description of Artificial Sequence: Synthetic oligonucleotide
cuauugacuugaguuucuc

SEQ ID NO: 2345448 - RNA, 19 nt, Artificial Sequence
  Description of Artificial Sequence: Synthetic oligonucleotide
acacagcauugcuugcacu

SEQ ID NO: 2345449 - RNA, 19 nt, Artificial Sequence
  Description of Artificial Sequence: Synthetic oligonucleotide
caccuuuucuugcuuucuc

SEQ ID NO: 2345450 - RNA, 19 nt, Artificial Sequence
  Description of Artificial Sequence: Synthetic oligonucleotide
cugugcgugcucucacgcc

SEQ ID NO: 2345451 - RNA, 19 nt, Artificial Sequence
  Description of Artificial Sequence: Synthetic oligonucleotide
aggucuuccagcgcagaca

SEQ ID NO: 2345452 - RNA, 19 nt, Artificial Sequence
  Description of Artificial Sequence: Synthetic oligonucleotide
cuuccagcgcagacagcag

SEQ ID NO: 2345453 - RNA, 19 nt, Artificial Sequence
  Description of Artificial Sequence: Synthetic oligonucleotide
cacugucucucuucucgac

SEQ ID NO: 2345454 - RNA, 19 nt, Artificial Sequence
  Description of Artificial Sequence: Synthetic oligonucleotide
ccuuugcuugguaaacagc

SEQ ID NO: 2345455 - RNA, 19 nt, Artificial Sequence
  Description of Artificial Sequence: Synthetic oligonucleotide
auagcaccuuuucuugcuu

SEQ ID NO: 2345456 - RNA, 19 nt, Artificial Sequence
  Description of Artificial Sequence: Synthetic oligonucleotide
aaacagcuguugccaggau

SEQ ID NO: 2345457 - RNA, 19 nt, Artificial Sequence
  Description of Artificial Sequence: Synthetic oligonucleotide
caguucuugaaagucccca

SEQ ID NO: 2345458 - RNA, 19 nt, Artificial Sequence
  Description of Artificial Sequence: Synthetic oligonucleotide
gcagucuaccugcugcaag

SEQ ID NO: 2345459 - RNA, 19 nt, Artificial Sequence
  Description of Artificial Sequence: Synthetic oligonucleotide
cccaucucggugaauuagc

SEQ ID NO: 2345460 - RNA, 19 nt, Artificial Sequence
  Description of Artificial Sequence: Synthetic oligonucleotide
agccgcucgcgcgugcugc

SEQ ID NO: 2345461 - RNA, 19 nt, Artificial Sequence
  Description of Artificial Sequence: Synthetic oligonucleotide
uggugguagcauguucaca

SEQ ID NO: 2345462 - RNA, 19 nt, Artificial Sequence
  Description of Artificial Sequence: Synthetic oligonucleotide
gcuugaagagucuguugac

SEQ ID NO: 2345463 - RNA, 19 nt, Artificial Sequence
  Description of Artificial Sequence: Synthetic oligonucleotide
ccgagggucuccuggaacc

SEQ ID NO: 2345464 - RNA, 19 nt, Artificial Sequence
  Description of Artificial Sequence: Synthetic oligonucleotide
ucguggaaggguuguucau

SEQ ID NO: 2345465 - RNA, 19 nt, Artificial Sequence
  Description of Artificial Sequence: Synthetic oligonucleotide
cuguugccaggauuugcuc

SEQ ID NO: 2345466 - RNA, 19 nt, Artificial Sequence
  Description of Artificial Sequence: Synthetic oligonucleotide
uagaggucugggguuuaca

SEQ ID NO: 2345467 - RNA, 19 nt, Artificial Sequence
  Description of Artificial Sequence: Synthetic oligonucleotide
caucugacccagcaaucca

SEQ ID NO: 2345468 - RNA, 19 nt, Artificial Sequence
  Description of Artificial Sequence: Synthetic oligonucleotide
uuagaggucugggguuuac

SEQ ID NO: 2345469 - RNA, 19 nt, Artificial Sequence
  Description of Artificial Sequence: Synthetic oligonucleotide
cauucacaccacucgugga

SEQ ID NO: 2345470 - RNA, 19 nt, Artificial Sequence
  Description of Artificial Sequence: Synthetic oligonucleotide
cuccaagaccugguuuucc

SEQ ID NO: 2345471 - RNA, 19 nt, Artificial Sequence
  Description of Artificial Sequence: Synthetic oligonucleotide
caggucuuccagcgcagac

SEQ ID NO: 2345472 - RNA, 19 nt, Artificial Sequence
  Description of Artificial Sequence: Synthetic oligonucleotide
uucccugauuaagugccaa

SEQ ID NO: 2345473 - RNA, 19 nt, Artificial Sequence
  Description of Artificial Sequence: Synthetic oligonucleotide
ucccucgacaggaccucca

SEQ ID NO: 2345474 - RNA, 19 nt, Artificial Sequence
  Description of Artificial Sequence: Synthetic oligonucleotide
gcugugauuuggugguagc

SEQ ID NO: 2345475 - RNA, 19 nt, Artificial Sequence
  Description of Artificial Sequence: Synthetic oligonucleotide
aaguccccaucucggugaa

SEQ ID NO: 2345476 - RNA, 19 nt, Artificial Sequence
  Description of Artificial Sequence: Synthetic oligonucleotide
gguagcauguucacagaca

SEQ ID NO: 2345477 - RNA, 19 nt, Artificial Sequence
  Description of Artificial Sequence: Synthetic oligonucleotide
acagcauugcuugcacuaa

SEQ ID NO: 2345478 - RNA, 19 nt, Artificial Sequence
  Description of Artificial Sequence: Synthetic oligonucleotide
agggcucugcagcacuagu

SEQ ID NO: 2345479 - RNA, 19 nt, Artificial Sequence
  Description of Artificial Sequence: Synthetic oligonucleotide
gccaacgccugccauuacc

SEQ ID NO: 2345480 - RNA, 19 nt, Artificial Sequence
  Description of Artificial Sequence: Synthetic oligonucleotide
cagcacuagucugugcgug

SEQ ID NO: 2345481 - RNA, 19 nt, Artificial Sequence
  Description of Artificial Sequence: Synthetic oligonucleotide
ccuggaacccaagucagug

SEQ ID NO: 2345482 - RNA, 19 nt, Artificial Sequence
  Description of Artificial Sequence: Synthetic oligonucleotide
aauccacuucucaucucua

SEQ ID NO: 2345483 - RNA, 19 nt, Artificial Sequence
  Description of Artificial Sequence: Synthetic oligonucleotide
gccuccgagggucuccugg

SEQ ID NO: 2345484 - RNA, 19 nt, Artificial Sequence
  Description of Artificial Sequence: Synthetic oligonucleotide
ugguggacuuuucccugau

SEQ ID NO: 2345485 - RNA, 19 nt, Artificial Sequence
  Description of Artificial Sequence: Synthetic oligonucleotide
uccccugggagauggccau

SEQ ID NO: 2345486 - RNA, 19 nt, Artificial Sequence
  Description of Artificial Sequence: Synthetic oligonucleotide
ucgcgcgugcugccaacgc

SEQ ID NO: 2345487 - RNA, 19 nt, Artificial Sequence
  Description of Artificial Sequence: Synthetic oligonucleotide
gguuuacaugucccucuug

SEQ ID NO: 2345488 - RNA, 19 nt, Artificial Sequence
  Description of Artificial Sequence: Synthetic oligonucleotide
gguacggccuccgaggguc

SEQ ID NO: 2345489 - RNA, 19 nt, Artificial Sequence
  Description of Artificial Sequence: Synthetic oligonucleotide
gugguagcauguucacaga

SEQ ID NO: 2345490 - RNA, 19 nt, Artificial Sequence
  Description of Artificial Sequence: Synthetic oligonucleotide
gauuaagugccaacuucau

SEQ ID NO: 2345491 - RNA, 19 nt, Artificial Sequence
  Description of Artificial Sequence: Synthetic oligonucleotide
gccauuaccgagacgccgc

SEQ ID NO: 2345492 - RNA, 19 nt, Artificial Sequence
  Description of Artificial Sequence: Synthetic oligonucleotide
ggacaucuggcagucuacc

SEQ ID NO: 2345493 - RNA, 19 nt, Artificial Sequence
  Description of Artificial Sequence: Synthetic oligonucleotide
cugcugaauaucacugucu

SEQ ID NO: 2345494 - RNA, 19 nt, Artificial Sequence
  Description of Artificial Sequence: Synthetic oligonucleotide
agcagccgcucgcgcgugc

SEQ ID NO: 2345495 - RNA, 19 nt, Artificial Sequence
  Description of Artificial Sequence: Synthetic oligonucleotide
acaccacucguggaagggu

SEQ ID NO: 2345496 - RNA, 19 nt, Artificial Sequence
  Description of Artificial Sequence: Synthetic oligonucleotide
cucuugucagggcucugca

SEQ ID NO: 2345497 - RNA, 19 nt, Artificial Sequence
  Description of Artificial Sequence: Synthetic oligonucleotide
aguuggguacggccuccga

SEQ ID NO: 2345498 - RNA, 19 nt, Artificial Sequence
  Description of Artificial Sequence: Synthetic oligonucleotide
cauuaccgagacgccgccc

SEQ ID NO: 2345499 - RNA, 19 nt, Artificial Sequence
  Description of Artificial Sequence: Synthetic oligonucleotide
gacauaaccuccacaucau

SEQ ID NO: 2345500 - RNA, 19 nt, Artificial Sequence
  Description of Artificial Sequence: Synthetic oligonucleotide
cuccuuugcuugguaaaca

SEQ ID NO: 2345501 - RNA, 19 nt, Artificial Sequence
  Description of Artificial Sequence: Synthetic oligonucleotide
cacuaauccuaugugcaua

SEQ ID NO: 2345502 - RNA, 19 nt, Artificial Sequence
  Description of Artificial Sequence: Synthetic oligonucleotide
acgccugccauuaccgaga

SEQ ID NO: 2345503 - RNA, 19 nt, Artificial Sequence
  Description of Artificial Sequence: Synthetic oligonucleotide
uccccaucucggugaauua

SEQ ID NO: 2345504 - RNA, 19 nt, Artificial Sequence
  Description of Artificial Sequence: Synthetic oligonucleotide
ugucagggcucugcagcac

SEQ ID NO: 2345505 - RNA, 19 nt, Artificial Sequence
  Description of Artificial Sequence: Synthetic oligonucleotide
auccccugggagauggcca

SEQ ID NO: 2345506 - RNA, 19 nt, Artificial Sequence
  Description of Artificial Sequence: Synthetic oligonucleotide
aguggugcacacacagcau

SEQ ID NO: 2345507 - RNA, 19 nt, Artificial Sequence
  Description of Artificial Sequence: Synthetic oligonucleotide
caggauuugcucugccucu

SEQ ID NO: 2345508 - RNA, 19 nt, Artificial Sequence
  Description of Artificial Sequence: Synthetic oligonucleotide
cucacgccuucuucaguca

SEQ ID NO: 2345509 - RNA, 19 nt, Artificial Sequence
  Description of Artificial Sequence: Synthetic oligonucleotide
cacgccuucuucagucaga

SEQ ID NO: 2345510 - RNA, 19 nt, Artificial Sequence
  Description of Artificial Sequence: Synthetic oligonucleotide
ggugaauuagcagcuccaa

SEQ ID NO: 2345511 - RNA, 19 nt, Artificial Sequence
  Description of Artificial Sequence: Synthetic oligonucleotide
accacucguggaaggguug

SEQ ID NO: 2345512 - RNA, 19 nt, Artificial Sequence
  Description of Artificial Sequence: Synthetic oligonucleotide
cucgcgcgugcugccaacg

SEQ ID NO: 2345513 - RNA, 19 nt, Artificial Sequence
  Description of Artificial Sequence: Synthetic oligonucleotide
cauuucaugguggacuuuu

SEQ ID NO: 2345514 - RNA, 19 nt, Artificial Sequence
  Description of Artificial Sequence: Synthetic oligonucleotide
uaccgagacgccgcccaga

SEQ ID NO: 2345515 - RNA, 19 nt, Artificial Sequence
  Description of Artificial Sequence: Synthetic oligonucleotide
caguuggguacggccuccg

SEQ ID NO: 2345516 - RNA, 19 nt, Artificial Sequence
  Description of Artificial Sequence: Synthetic oligonucleotide
cacuagucugugcgugcuc

SEQ ID NO: 2345517 - RNA, 19 nt, Artificial Sequence
  Description of Artificial Sequence: Synthetic oligonucleotide
gggguuuacaugucccucu

SEQ ID NO: 2345518 - RNA, 19 nt, Artificial Sequence
  Description of Artificial Sequence: Synthetic oligonucleotide
cucggugaauuagcagcuc

SEQ ID NO: 2345519 - RNA, 19 nt, Artificial Sequence
  Description of Artificial Sequence: Synthetic oligonucleotide
guucccucgacaggaccuc

SEQ ID NO: 2345520 - RNA, 19 nt, Artificial Sequence
  Description of Artificial Sequence: Synthetic oligonucleotide
caacgccugccauuaccga

SEQ ID NO: 2345521 - RNA, 19 nt, Artificial Sequence
  Description of Artificial Sequence: Synthetic oligonucleotide
ccaucucggugaauuagca

SEQ ID NO: 2345522 - RNA, 19 nt, Artificial Sequence
  Description of Artificial Sequence: Synthetic oligonucleotide
guggugcacacacagcauu

SEQ ID NO: 2345523 - RNA, 19 nt, Artificial Sequence
  Description of Artificial Sequence: Synthetic oligonucleotide
cagggcucugcagcacuag

SEQ ID NO: 2345524 - RNA, 19 nt, Artificial Sequence
  Description of Artificial Sequence: Synthetic oligonucleotide
aggauuugcucugccucuu

SEQ ID NO: 2345525 - RNA, 19 nt, Artificial Sequence
  Description of Artificial Sequence: Synthetic oligonucleotide
ccucuugucagggcucugc

SEQ ID NO: 2345526 - RNA, 19 nt, Artificial Sequence
  Description of Artificial Sequence: Synthetic oligonucleotide
agucaguggugcacacaca

SEQ ID NO: 2345527 - RNA, 19 nt, Artificial Sequence
  Description of Artificial Sequence: Synthetic oligonucleotide
ccucgacaggaccuccagg

SEQ ID NO: 2345528 - RNA, 19 nt, Artificial Sequence
  Description of Artificial Sequence: Synthetic oligonucleotide
gccugcauuucauggugga

SEQ ID NO: 2345529 - RNA, 19 nt, Artificial Sequence
  Description of Artificial Sequence: Synthetic oligonucleotide
ccauuaccgagacgccgcc

SEQ ID NO: 2345530 - RNA, 19 nt, Artificial Sequence
  Description of Artificial Sequence: Synthetic oligonucleotide
ccaagucaguggugcacac

SEQ ID NO: 2345531 - RNA, 19 nt, Artificial Sequence
  Description of Artificial Sequence: Synthetic oligonucleotide
ugccaacgccugccauuac

SEQ ID NO: 2345532 - RNA, 19 nt, Artificial Sequence
  Description of Artificial Sequence: Synthetic oligonucleotide
gucagggcucugcagcacu

SEQ ID NO: 2345533 - RNA, 19 nt, Artificial Sequence
  Description of Artificial Sequence: Synthetic oligonucleotide
ccccaucucggugaauuag

SEQ ID NO: 2345534 - RNA, 19 nt, Artificial Sequence
  Description of Artificial Sequence: Synthetic oligonucleotide
gcugaauaucacugucucu

SEQ ID NO: 2345535 - RNA, 19 nt, Artificial Sequence
  Description of Artificial Sequence: Synthetic oligonucleotide
gauuuggugguagcauguu

SEQ ID NO: 2345536 - RNA, 19 nt, Artificial Sequence
  Description of Artificial Sequence: Synthetic oligonucleotide
ccauggguacuguggagca

SEQ ID NO: 2345537 - RNA, 19 nt, Artificial Sequence
  Description of Artificial Sequence: Synthetic oligonucleotide
agagucgcugcugcugcuu

SEQ ID NO: 2345538 - RNA, 19 nt, Artificial Sequence
  Description of Artificial Sequence: Synthetic oligonucleotide
ugacugccauggguacugu

SEQ ID NO: 2345539 - RNA, 19 nt, Artificial Sequence
  Description of Artificial Sequence: Synthetic oligonucleotide
cuaccugcugcaagggcau

SEQ ID NO: 2345540 - RNA, 19 nt, Artificial Sequence
  Description of Artificial Sequence: Synthetic oligonucleotide
acaugucauuugacugcca

SEQ ID NO: 2345541 - RNA, 19 nt, Artificial Sequence
  Description of Artificial Sequence: Synthetic oligonucleotide
aggcuccaacagaaaguca

SEQ ID NO: 2345542 - RNA, 19 nt, Artificial Sequence
  Description of Artificial Sequence: Synthetic oligonucleotide
cugccaacgccugccauua

SEQ ID NO: 2345543 - RNA, 19 nt, Artificial Sequence
  Description of Artificial Sequence: Synthetic oligonucleotide
ggccauucacaccacucgu

SEQ ID NO: 2345544 - RNA, 19 nt, Artificial Sequence
  Description of Artificial Sequence: Synthetic oligonucleotide
guccccaucucggugaauu

SEQ ID NO: 2345545 - RNA, 19 nt, Artificial Sequence
  Description of Artificial Sequence: Synthetic oligonucleotide
cccucgacaggaccuccag

SEQ ID NO: 2345546 - RNA, 19 nt, Artificial Sequence
  Description of Artificial Sequence: Synthetic oligonucleotide
cguggaaggguuguucauc

SEQ ID NO: 2345547 - RNA, 19 nt, Artificial Sequence
  Description of Artificial Sequence: Synthetic oligonucleotide
cggugaauuagcagcucca

SEQ ID NO: 2345548 - RNA, 19 nt, Artificial Sequence
  Description of Artificial Sequence: Synthetic oligonucleotide
caccacucguggaaggguu

SEQ ID NO: 2345549 - RNA, 19 nt, Artificial Sequence
  Description of Artificial Sequence: Synthetic oligonucleotide
acgccgcccagacgcuccu

SEQ ID NO: 2345550 - RNA, 19 nt, Artificial Sequence
  Description of Artificial Sequence: Synthetic oligonucleotide
cccaagucaguggugcaca

SEQ ID NO: 2345551 - RNA, 19 nt, Artificial Sequence
  Description of Artificial Sequence: Synthetic oligonucleotide
cagcauugcuugcacuaau

SEQ ID NO: 2345552 - RNA, 19 nt, Artificial Sequence
  Description of Artificial Sequence: Synthetic oligonucleotide
gcuccaagaccugguuuuc

SEQ ID NO: 2345553 - RNA, 19 nt, Artificial Sequence
  Description of Artificial Sequence: Synthetic oligonucleotide
gcagcacuagucugugcgu

SEQ ID NO: 2345554 - RNA, 19 nt, Artificial Sequence
  Description of Artificial Sequence: Synthetic oligonucleotide
gccugccauuaccgagacg

SEQ ID NO: 2345555 - RNA, 19 nt, Artificial Sequence
  Description of Artificial Sequence: Synthetic oligonucleotide
cccugauuaagugccaacu

SEQ ID NO: 2345556 - RNA, 19 nt, Artificial Sequence
  Description of Artificial Sequence: Synthetic oligonucleotide
gcauuucuauaaguucccu

SEQ ID NO: 2345557 - RNA, 19 nt, Artificial Sequence
  Description of Artificial Sequence: Synthetic oligonucleotide
gccgcccagacgcuccuuc

SEQ ID NO: 2345558 - RNA, 19 nt, Artificial Sequence
  Description of Artificial Sequence: Synthetic oligonucleotide
ccugauuaagugccaacuu

SEQ ID NO: 2345559 - RNA, 19 nt, Artificial Sequence
  Description of Artificial Sequence: Synthetic oligonucleotide
cucucacgccuucuucagu

SEQ ID NO: 2345560 - RNA, 19 nt, Artificial Sequence
  Description of Artificial Sequence: Synthetic oligonucleotide
cagccgcucgcgcgugcug

SEQ ID NO: 2345561 - RNA, 19 nt, Artificial Sequence
  Description of Artificial Sequence: Synthetic oligonucleotide
cccugggagauggccauuc

SEQ ID NO: 2345562 - RNA, 19 nt, Artificial Sequence
  Description of Artificial Sequence: Synthetic oligonucleotide
ggucugggguuuacauguc

SEQ ID NO: 2345563 - RNA, 19 nt, Artificial Sequence
  Description of Artificial Sequence: Synthetic oligonucleotide
gcgugcugccaacgccugc

SEQ ID NO: 2345564 - RNA, 19 nt, Artificial Sequence
  Description of Artificial Sequence: Synthetic oligonucleotide
gcugccaacgccugccauu

SEQ ID NO: 2345565 - RNA, 19 nt, Artificial Sequence
  Description of Artificial Sequence: Synthetic oligonucleotide
ccgagacgccgcccagacg

SEQ ID NO: 2345566 - RNA, 19 nt, Artificial Sequence
  Description of Artificial Sequence: Synthetic oligonucleotide
ccacuugaagaagccgcca

SEQ ID NO: 2345567 - RNA, 19 nt, Artificial Sequence
  Description of Artificial Sequence: Synthetic oligonucleotide
ggcagucuaccugcugcaa

SEQ ID NO: 2345568 - RNA, 19 nt, Artificial Sequence
  Description of Artificial Sequence: Synthetic oligonucleotide
gccgcucgcgcgugcugcc

SEQ ID NO: 2345569 - RNA, 19 nt, Artificial Sequence
  Description of Artificial Sequence: Synthetic oligonucleotide
gcaccuuuucuugcuuucu

SEQ ID NO: 2345570 - RNA, 19 nt, Artificial Sequence
  Description of Artificial Sequence: Synthetic oligonucleotide
cgacaggaccuccaggucu

SEQ ID NO: 2345571 - RNA, 19 nt, Artificial Sequence
  Description of Artificial Sequence: Synthetic oligonucleotide
gcucgcgcgugcugccaac

SEQ ID NO: 2345572 - RNA, 19 nt, Artificial Sequence
  Description of Artificial Sequence: Synthetic oligonucleotide
ccugggagauggccauuca

SEQ ID NO: 2345573 - RNA, 19 nt, Artificial Sequence
  Description of Artificial Sequence: Synthetic oligonucleotide
gcacuagucugugcgugcu

SEQ ID NO: 2345574 - RNA, 19 nt, Artificial Sequence
  Description of Artificial Sequence: Synthetic oligonucleotide
cuaauccuaugugcauauu

SEQ ID NO: 2345575 - RNA, 19 nt, Artificial Sequence
  Description of Artificial Sequence: Synthetic oligonucleotide
aguccccaucucggugaau

SEQ ID NO: 2345576 - RNA, 19 nt, Artificial Sequence
  Description of Artificial Sequence: Synthetic oligonucleotide
ggauuugcucugccucuuu

SEQ ID NO: 2345577 - RNA, 19 nt, Artificial Sequence
  Description of Artificial Sequence: Synthetic oligonucleotide
gcgcgugcugccaacgccu

SEQ ID NO: 2345578 - RNA, 19 nt, Artificial Sequence
  Description of Artificial Sequence: Synthetic oligonucleotide
ggccuccgagggucuccug

SEQ ID NO: 2345579 - RNA, 19 nt, Artificial Sequence
  Description of Artificial Sequence: Synthetic oligonucleotide
ccuuagaggucugggguuu

SEQ ID NO: 2345580 - RNA, 19 nt, Artificial Sequence
  Description of Artificial Sequence: Synthetic oligonucleotide
gggcauccccugggagaug

SEQ ID NO: 2345581 - RNA, 19 nt, Artificial Sequence
  Description of Artificial Sequence: Synthetic oligonucleotide
cccucuugucagggcucug

SEQ ID NO: 2345582 - RNA, 19 nt, Artificial Sequence
  Description of Artificial Sequence: Synthetic oligonucleotide
ccgcccagacgcuccuucu

SEQ ID NO: 2345583 - RNA, 19 nt, Artificial Sequence
  Description of Artificial Sequence: Synthetic oligonucleotide
cgugcucucacgccuucuu

SEQ ID NO: 2345584 - RNA, 19 nt, Artificial Sequence
  Description of Artificial Sequence: Synthetic oligonucleotide
gcgugcucucacgccuucu

SEQ ID NO: 2345585 - RNA, 19 nt, Artificial Sequence
  Description of Artificial Sequence: Synthetic oligonucleotide
cgcucgcgcgugcugccaa

SEQ ID NO: 2345586 - RNA, 19 nt, Artificial Sequence
  Description of Artificial Sequence: Synthetic oligonucleotide
cgccuucuucagucagagu

SEQ ID NO: 2345587 - RNA, 19 nt, Artificial Sequence
  Description of Artificial Sequence: Synthetic oligonucleotide
ccccugggagauggccauu

SEQ ID NO: 2345588 - RNA, 19 nt, Artificial Sequence
  Description of Artificial Sequence: Synthetic oligonucleotide
cgccgcccagacgcuccuu

SEQ ID NO: 2345589 - RNA, 19 nt, Artificial Sequence
  Description of Artificial Sequence: Synthetic oligonucleotide
ucuauuuuagucauuaaag

SEQ ID NO: 2345590 - RNA, 19 nt, Artificial Sequence
  Description of Artificial Sequence: Synthetic oligonucleotide
aaaauaagccuuucagacc

SEQ ID NO: 2345591 - RNA, 19 nt, Artificial Sequence
  Description of Artificial Sequence: Synthetic oligonucleotide
auuuaaaugucccaggcgg

SEQ ID NO: 2345592 - RNA, 19 nt, Artificial Sequence
  Description of Artificial Sequence: Synthetic oligonucleotide
aagucuauuacuucagaac

SEQ ID NO: 2345593 - RNA, 19 nt, Artificial Sequence
  Description of Artificial Sequence: Synthetic oligonucleotide
uccuaaaugaagcuggugg

SEQ ID NO: 2345594 - RNA, 19 nt, Artificial Sequence
  Description of Artificial Sequence: Synthetic oligonucleotide
guuuauuaaguuuaucucg

SEQ ID NO: 2345595 - RNA, 19 nt, Artificial Sequence
  Description of Artificial Sequence: Synthetic oligonucleotide
cauaauuucuguuagaguc

SEQ ID NO: 2345596 - RNA, 19 nt, Artificial Sequence
  Description of Artificial Sequence: Synthetic oligonucleotide
aaauaagccuuucagaccu

SEQ ID NO: 2345597 - RNA, 19 nt, Artificial Sequence
  Description of Artificial Sequence: Synthetic oligonucleotide
guuuaagugaaucugaaug

SEQ ID NO: 2345598 - RNA, 19 nt, Artificial Sequence
  Description of Artificial Sequence: Synthetic oligonucleotide
uuuuagucauuaaagaaug

SEQ ID NO: 2345599 - RNA, 19 nt, Artificial Sequence
  Description of Artificial Sequence: Synthetic oligonucleotide
aauagaacgacguaguuuu

SEQ ID NO: 2345600 - RNA, 19 nt, Artificial Sequence
  Description of Artificial Sequence: Synthetic oligonucleotide
uucauuuugcuuuugacug

SEQ ID NO: 2345601 - RNA, 19 nt, Artificial Sequence
  Description of Artificial Sequence: Synthetic oligonucleotide
aacgacguaguuuucugcc

SEQ ID NO: 2345602 - RNA, 19 nt, Artificial Sequence
  Description of Artificial Sequence: Synthetic oligonucleotide
aguuuauuaaguuuaucuc

SEQ ID NO: 2345603 - RNA, 19 nt, Artificial Sequence
  Description of Artificial Sequence: Synthetic oligonucleotide
aauuuaaaugucccaggcg

SEQ ID NO: 2345604 - RNA, 19 nt, Artificial Sequence
  Description of Artificial Sequence: Synthetic oligonucleotide
ucuuuugaaaaucaguacu

SEQ ID NO: 2345605 - RNA, 19 nt, Artificial Sequence
  Description of Artificial Sequence: Synthetic oligonucleotide
uauuacuucagaacuauca

SEQ ID NO: 2345606 - RNA, 19 nt, Artificial Sequence
  Description of Artificial Sequence: Synthetic oligonucleotide
uaaguaaugcuucauuugc

SEQ ID NO: 2345607 - RNA, 19 nt, Artificial Sequence
  Description of Artificial Sequence: Synthetic oligonucleotide
uuuaagugaaucugaaugc

SEQ ID NO: 2345608 - RNA, 19 nt, Artificial Sequence
  Description of Artificial Sequence: Synthetic oligonucleotide
aaucucuugauccauagaa

SEQ ID NO: 2345609 - RNA, 19 nt, Artificial Sequence
  Description of Artificial Sequence: Synthetic oligonucleotide
uuguuuauauaucucagca

SEQ ID NO: 2345610 - RNA, 19 nt, Artificial Sequence
  Description of Artificial Sequence: Synthetic oligonucleotide
aaacuaaggucacuggcac

SEQ ID NO: 2345611 - RNA, 19 nt, Artificial Sequence
  Description of Artificial Sequence: Synthetic oligonucleotide
guagcaauucuucagagag

SEQ ID NO: 2345612 - RNA, 19 nt, Artificial Sequence
  Description of Artificial Sequence: Synthetic oligonucleotide
uuuauuaaguuuaucucga

SEQ ID NO: 2345613 - RNA, 19 nt, Artificial Sequence
  Description of Artificial Sequence: Synthetic oligonucleotide
uuaaguuuaucucgaagcc

SEQ ID NO: 2345614 - RNA, 19 nt, Artificial Sequence
  Description of Artificial Sequence: Synthetic oligonucleotide
uuagaguccuaaaugaagc

SEQ ID NO: 2345615 - RNA, 19 nt, Artificial Sequence
  Description of Artificial Sequence: Synthetic oligonucleotide
ucuguuagaguccuaaaug

SEQ ID NO: 2345616 - RNA, 19 nt, Artificial Sequence
  Description of Artificial Sequence: Synthetic oligonucleotide
gauagauucuauuuuaguc

SEQ ID NO: 2345617 - RNA, 19 nt, Artificial Sequence
  Description of Artificial Sequence: Synthetic oligonucleotide
aaacuuuggaucuugaaua

SEQ ID NO: 2345618 - RNA, 19 nt, Artificial Sequence
  Description of Artificial Sequence: Synthetic oligonucleotide
ugacuuuugaaacuaaggu

SEQ ID NO: 2345619 - RNA, 19 nt, Artificial Sequence
  Description of Artificial Sequence: Synthetic oligonucleotide
ucuuuaauaaguaaugcuu

SEQ ID NO: 2345620 - RNA, 19 nt, Artificial Sequence
  Description of Artificial Sequence: Synthetic oligonucleotide
aaucugaaugcuugagagc

SEQ ID NO: 2345621 - RNA, 19 nt, Artificial Sequence
  Description of Artificial Sequence: Synthetic oligonucleotide
auagauucuauuuuaguca

SEQ ID NO: 2345622 - RNA, 19 nt, Artificial Sequence
  Description of Artificial Sequence: Synthetic oligonucleotide
aguacuaaagucuauuacu

SEQ ID NO: 2345623 - RNA, 19 nt, Artificial Sequence
  Description of Artificial Sequence: Synthetic oligonucleotide
uauggaagagguuuaagug

SEQ ID NO: 2345624 - RNA, 19 nt, Artificial Sequence
  Description of Artificial Sequence: Synthetic oligonucleotide
aaacuuucuuauaaggugg

SEQ ID NO: 2345625 - RNA, 19 nt, Artificial Sequence
  Description of Artificial Sequence: Synthetic oligonucleotide
uucugugugaccaaacaag

SEQ ID NO: 2345626 - RNA, 19 nt, Artificial Sequence
  Description of Artificial Sequence: Synthetic oligonucleotide
uaauuuaaaugucccaggc

SEQ ID NO: 2345627 - RNA, 19 nt, Artificial Sequence
  Description of Artificial Sequence: Synthetic oligonucleotide
acugugucaauucaaagug

SEQ ID NO: 2345628 - RNA, 19 nt, Artificial Sequence
  Description of Artificial Sequence: Synthetic oligonucleotide
agagcuaggucuuuauggc

SEQ ID NO: 2345629 - RNA, 19 nt, Artificial Sequence
  Description of Artificial Sequence: Synthetic oligonucleotide
aaucggaauuuucacuugg

SEQ ID NO: 2345630 - RNA, 19 nt, Artificial Sequence
  Description of Artificial Sequence: Synthetic oligonucleotide
uauuuuagucauuaaagaa

SEQ ID NO: 2345631 - RNA, 19 nt, Artificial Sequence
  Description of Artificial Sequence: Synthetic oligonucleotide
uagguuauauggaagaggu

SEQ ID NO: 2345632 - RNA, 19 nt, Artificial Sequence
  Description of Artificial Sequence: Synthetic oligonucleotide
ugaaaaucaguacuaccag

SEQ ID NO: 2345633 - RNA, 19 nt, Artificial Sequence
  Description of Artificial Sequence: Synthetic oligonucleotide
caucuucuagguuauaugg

SEQ ID NO: 2345634 - RNA, 19 nt, Artificial Sequence
  Description of Artificial Sequence: Synthetic oligonucleotide
aaugaagcaacauuuucaa

SEQ ID NO: 2345635 - RNA, 19 nt, Artificial Sequence
  Description of Artificial Sequence: Synthetic oligonucleotide
gucaauucaaaguggauag

SEQ ID NO: 2345636 - RNA, 19 nt, Artificial Sequence
  Description of Artificial Sequence: Synthetic oligonucleotide
ucaaaugacuucauuuugc

SEQ ID NO: 2345637 - RNA, 19 nt, Artificial Sequence
  Description of Artificial Sequence: Synthetic oligonucleotide
uuuagcaaacuuuggaucu

SEQ ID NO: 2345638 - RNA, 19 nt, Artificial Sequence
  Description of Artificial Sequence: Synthetic oligonucleotide
uucauguccagaaauuuug

SEQ ID NO: 2345639 - RNA, 19 nt, Artificial Sequence
  Description of Artificial Sequence: Synthetic oligonucleotide
gaaauuuuggcuugcaauc

SEQ ID NO: 2345640 - RNA, 19 nt, Artificial Sequence
  Description of Artificial Sequence: Synthetic oligonucleotide
acuaaagucuauuacuuca

SEQ ID NO: 2345641 - RNA, 19 nt, Artificial Sequence
  Description of Artificial Sequence: Synthetic oligonucleotide
agucuauuacuucagaacu

SEQ ID NO: 2345642 - RNA, 19 nt, Artificial Sequence
  Description of Artificial Sequence: Synthetic oligonucleotide
ugaaacuaaggucacuggc

SEQ ID NO: 2345643 - RNA, 19 nt, Artificial Sequence
  Description of Artificial Sequence: Synthetic oligonucleotide
caaacuuucuuauaaggug

SEQ ID NO: 2345644 - RNA, 19 nt, Artificial Sequence
  Description of Artificial Sequence: Synthetic oligonucleotide
ucucuugauccauagaagc

SEQ ID NO: 2345645 - RNA, 19 nt, Artificial Sequence
  Description of Artificial Sequence: Synthetic oligonucleotide
uguuauuuucaguucaugu

SEQ ID NO: 2345646 - RNA, 19 nt, Artificial Sequence
  Description of Artificial Sequence: Synthetic oligonucleotide
uucagaacuaucaucuucu

SEQ ID NO: 2345647 - RNA, 19 nt, Artificial Sequence
  Description of Artificial Sequence: Synthetic oligonucleotide
aagguggguaauuuaaaug

SEQ ID NO: 2345648 - RNA, 19 nt, Artificial Sequence
  Description of Artificial Sequence: Synthetic oligonucleotide
uucggauucuuuaauaagu

SEQ ID NO: 2345649 - RNA, 19 nt, Artificial Sequence
  Description of Artificial Sequence: Synthetic oligonucleotide
uucuauuuuagucauuaaa

SEQ ID NO: 2345650 - RNA, 19 nt, Artificial Sequence
  Description of Artificial Sequence: Synthetic oligonucleotide
uuugaaaaucaguacuacc

SEQ ID NO: 2345651 - RNA, 19 nt, Artificial Sequence
  Description of Artificial Sequence: Synthetic oligonucleotide
ucauuaaagaaugauucug

SEQ ID NO: 2345652 - RNA, 19 nt, Artificial Sequence
  Description of Artificial Sequence: Synthetic oligonucleotide
uuugaaacuaaggucacug

SEQ ID NO: 2345653 - RNA, 19 nt, Artificial Sequence
  Description of Artificial Sequence: Synthetic oligonucleotide
acagaaucggaauuuucac

SEQ ID NO: 2345654 - RNA, 19 nt, Artificial Sequence
  Description of Artificial Sequence: Synthetic oligonucleotide
aucucgaagccuuuuaauc

SEQ ID NO: 2345655 - RNA, 19 nt, Artificial Sequence
  Description of Artificial Sequence: Synthetic oligonucleotide
auaaguaaugcuucauuug

SEQ ID NO: 2345656 - RNA, 19 nt, Artificial Sequence
  Description of Artificial Sequence: Synthetic oligonucleotide
uucaaaugacuucauuuug

SEQ ID NO: 2345657 - RNA, 19 nt, Artificial Sequence
  Description of Artificial Sequence: Synthetic oligonucleotide
acuaucaucuucuagguua

SEQ ID NO: 2345658 - RNA, 19 nt, Artificial Sequence
  Description of Artificial Sequence: Synthetic oligonucleotide
uuaaugaagcaacauuuuc

SEQ ID NO: 2345659 - RNA, 19 nt, Artificial Sequence
  Description of Artificial Sequence: Synthetic oligonucleotide
agguggguaauuuaaaugu

SEQ ID NO: 2345660 - RNA, 19 nt, Artificial Sequence
  Description of Artificial Sequence: Synthetic oligonucleotide
auauggaagagguuuaagu

SEQ ID NO: 2345661 - RNA, 19 nt, Artificial Sequence
  Description of Artificial Sequence: Synthetic oligonucleotide
aguaaugcuucauuugcag

SEQ ID NO: 2345662 - RNA, 19 nt, Artificial Sequence
  Description of Artificial Sequence: Synthetic oligonucleotide
aaagucuauuacuucagaa

SEQ ID NO: 2345663 - RNA, 19 nt, Artificial Sequence
  Description of Artificial Sequence: Synthetic oligonucleotide
ugugucaauucaaagugga

SEQ ID NO: 2345664 - RNA, 19 nt, Artificial Sequence
  Description of Artificial Sequence: Synthetic oligonucleotide
aagagguuuaagugaaucu

SEQ ID NO: 2345665 - RNA, 19 nt, Artificial Sequence
  Description of Artificial Sequence: Synthetic oligonucleotide
aauaagcucuuccaaaaua

SEQ ID NO: 2345666 - RNA, 19 nt, Artificial Sequence
  Description of Artificial Sequence: Synthetic oligonucleotide
cuuuguuuauauaucucag

SEQ ID NO: 2345667 - RNA, 19 nt, Artificial Sequence
  Description of Artificial Sequence: Synthetic oligonucleotide
uucuguuauuuucaguuca

SEQ ID NO: 2345668 - RNA, 19 nt, Artificial Sequence
  Description of Artificial Sequence: Synthetic oligonucleotide
uugcaaucuggauaauucg

SEQ ID NO: 2345669 - RNA, 19 nt, Artificial Sequence
  Description of Artificial Sequence: Synthetic oligonucleotide
uggguaauuuaaauguccc

SEQ ID NO: 2345670 - RNA, 19 nt, Artificial Sequence
  Description of Artificial Sequence: Synthetic oligonucleotide
uaccagauguuuuacaaac

SEQ ID NO: 2345671 - RNA, 19 nt, Artificial Sequence
  Description of Artificial Sequence: Synthetic oligonucleotide
cuugcaaucuggauaauuc

SEQ ID NO: 2345672 - RNA, 19 nt, Artificial Sequence
  Description of Artificial Sequence: Synthetic oligonucleotide
ugugugaccaaacaagcau

SEQ ID NO: 2345673 - RNA, 19 nt, Artificial Sequence
  Description of Artificial Sequence: Synthetic oligonucleotide
aauaucaggcauaauuucu

SEQ ID NO: 2345674 - RNA, 19 nt, Artificial Sequence
  Description of Artificial Sequence: Synthetic oligonucleotide
acuaacacuggauaacucu

SEQ ID NO: 2345675 - RNA, 19 nt, Artificial Sequence
  Description of Artificial Sequence: Synthetic oligonucleotide
uauaucucagcauuccacu

SEQ ID NO: 2345676 - RNA, 19 nt, Artificial Sequence
  Description of Artificial Sequence: Synthetic oligonucleotide
agaaugauucugugugacc

SEQ ID NO: 2345677 - RNA, 19 nt, Artificial Sequence
  Description of Artificial Sequence: Synthetic oligonucleotide
uuucacuuggacuaacacu

SEQ ID NO: 2345678 - RNA, 19 nt, Artificial Sequence
  Description of Artificial Sequence: Synthetic oligonucleotide
uucuagguuauauggaaga

SEQ ID NO: 2345679 - RNA, 19 nt, Artificial Sequence
  Description of Artificial Sequence: Synthetic oligonucleotide
aauguuuagcaaacuuugg

SEQ ID NO: 2345680 - RNA, 19 nt, Artificial Sequence
  Description of Artificial Sequence: Synthetic oligonucleotide
gaguccuaaaugaagcugg

SEQ ID NO: 2345681 - RNA, 19 nt, Artificial Sequence
  Description of Artificial Sequence: Synthetic oligonucleotide
ccuuuuaaucucuugaucc

SEQ ID NO: 2345682 - RNA, 19 nt, Artificial Sequence
  Description of Artificial Sequence: Synthetic oligonucleotide
aauuuuggcuugcaaucug

SEQ ID NO: 2345683 - RNA, 19 nt, Artificial Sequence
  Description of Artificial Sequence: Synthetic oligonucleotide
ugaauaagcucuuccaaaa

SEQ ID NO: 2345684 - RNA, 19 nt, Artificial Sequence
  Description of Artificial Sequence: Synthetic oligonucleotide
acuaagaguacuaaagucu

SEQ ID NO: 2345685 - RNA, 19 nt, Artificial Sequence
  Description of Artificial Sequence: Synthetic oligonucleotide
ugaaucugaaugcuugaga

SEQ ID NO: 2345686 - RNA, 19 nt, Artificial Sequence
  Description of Artificial Sequence: Synthetic oligonucleotide
guucaugucuuaaugaagc

SEQ ID NO: 2345687 - RNA, 19 nt, Artificial Sequence
  Description of Artificial Sequence: Synthetic oligonucleotide
aaguggauagauucuauuu

SEQ ID NO: 2345688 - RNA, 19 nt, Artificial Sequence
  Description of Artificial Sequence: Synthetic oligonucleotide
uggauagauucuauuuuag

SEQ ID NO: 2345689 - RNA, 19 nt, Artificial Sequence
  Description of Artificial Sequence: Synthetic oligonucleotide
ucaguucaugucuuaauga

SEQ ID NO: 2345690 - RNA, 19 nt, Artificial Sequence
  Description of Artificial Sequence: Synthetic oligonucleotide
uuuauggccaccuucuaau

SEQ ID NO: 2345691 - RNA, 19 nt, Artificial Sequence
  Description of Artificial Sequence: Synthetic oligonucleotide
ucucgaagccuuuuaaucu

SEQ ID NO: 2345692 - RNA, 19 nt, Artificial Sequence
  Description of Artificial Sequence: Synthetic oligonucleotide
uuuucacuuggacuaacac

SEQ ID NO: 2345693 - RNA, 19 nt, Artificial Sequence
  Description of Artificial Sequence: Synthetic oligonucleotide
ucuucuagguuauauggaa

SEQ ID NO: 2345694 - RNA, 19 nt, Artificial Sequence
  Description of Artificial Sequence: Synthetic oligonucleotide
cuauuuuagucauuaaaga

SEQ ID NO: 2345695 - RNA, 19 nt, Artificial Sequence
  Description of Artificial Sequence: Synthetic oligonucleotide
uugaaacuaaggucacugg

SEQ ID NO: 2345696 - RNA, 19 nt, Artificial Sequence
  Description of Artificial Sequence: Synthetic oligonucleotide
auucggauucuuuaauaag

SEQ ID NO: 2345697 - RNA, 19 nt, Artificial Sequence
  Description of Artificial Sequence: Synthetic oligonucleotide
uucuuuugaaaaucaguac

SEQ ID NO: 2345698 - RNA, 19 nt, Artificial Sequence
  Description of Artificial Sequence: Synthetic oligonucleotide
uuuaaaugucccaggcggc

SEQ ID NO: 2345699 - RNA, 19 nt, Artificial Sequence
  Description of Artificial Sequence: Synthetic oligonucleotide
cuaaagucuauuacuucag

SEQ ID NO: 2345700 - RNA, 19 nt, Artificial Sequence
  Description of Artificial Sequence: Synthetic oligonucleotide
uaagcucuuccaaaauaag

SEQ ID NO: 2345701 - RNA, 19 nt, Artificial Sequence
  Description of Artificial Sequence: Synthetic oligonucleotide
uuuggaucuugaauaucag

SEQ ID NO: 2345702 - RNA, 19 nt, Artificial Sequence
  Description of Artificial Sequence: Synthetic oligonucleotide
auuuuagucauuaaagaau

SEQ ID NO: 2345703 - RNA, 19 nt, Artificial Sequence
  Description of Artificial Sequence: Synthetic oligonucleotide
gauaauucggauucuuuaa

SEQ ID NO: 2345704 - RNA, 19 nt, Artificial Sequence
  Description of Artificial Sequence: Synthetic oligonucleotide
gaguacuaaagucuauuac

SEQ ID NO: 2345705 - RNA, 19 nt, Artificial Sequence
  Description of Artificial Sequence: Synthetic oligonucleotide
augacuuuugaaacuaagg

SEQ ID NO: 2345706 - RNA, 19 nt, Artificial Sequence
  Description of Artificial Sequence: Synthetic oligonucleotide
auguuuagcaaacuuugga

SEQ ID NO: 2345707 - RNA, 19 nt, Artificial Sequence
  Description of Artificial Sequence: Synthetic oligonucleotide
agaaucggaauuuucacuu

SEQ ID NO: 2345708 - RNA, 19 nt, Artificial Sequence
  Description of Artificial Sequence: Synthetic oligonucleotide
uugaauaagcucuuccaaa

SEQ ID NO: 2345709 - RNA, 19 nt, Artificial Sequence
  Description of Artificial Sequence: Synthetic oligonucleotide
uucuaaugccgaaagcugu

SEQ ID NO: 2345710 - RNA, 19 nt, Artificial Sequence
  Description of Artificial Sequence: Synthetic oligonucleotide
aucugaaugcuugagagcu

SEQ ID NO: 2345711 - RNA, 19 nt, Artificial Sequence
  Description of Artificial Sequence: Synthetic oligonucleotide
uuggcuugcaaucuggaua

SEQ ID NO: 2345712 - RNA, 19 nt, Artificial Sequence
  Description of Artificial Sequence: Synthetic oligonucleotide
agagguuuaagugaaucug

SEQ ID NO: 2345713 - RNA, 19 nt, Artificial Sequence
  Description of Artificial Sequence: Synthetic oligonucleotide
aaugaagcuggugggaucu

SEQ ID NO: 2345714 - RNA, 19 nt, Artificial Sequence
  Description of Artificial Sequence: Synthetic oligonucleotide
uuagucauuaaagaaugau

SEQ ID NO: 2345715 - RNA, 19 nt, Artificial Sequence
  Description of Artificial Sequence: Synthetic oligonucleotide
gaaugauucugugugacca

SEQ ID NO: 2345716 - RNA, 19 nt, Artificial Sequence
  Description of Artificial Sequence: Synthetic oligonucleotide
cacuaauagaacgacguag

SEQ ID NO: 2345717 - RNA, 19 nt, Artificial Sequence
  Description of Artificial Sequence: Synthetic oligonucleotide
ucauugacaugacuuuuga

SEQ ID NO: 2345718 - RNA, 19 nt, Artificial Sequence
  Description of Artificial Sequence: Synthetic oligonucleotide
cucagcauuccacuaagag

SEQ ID NO: 2345719 - RNA, 19 nt, Artificial Sequence
  Description of Artificial Sequence: Synthetic oligonucleotide
cuagguuauauggaagagg

SEQ ID NO: 2345720 - RNA, 19 nt, Artificial Sequence
  Description of Artificial Sequence: Synthetic oligonucleotide
caugacuuuugaaacuaag

SEQ ID NO: 2345721 - RNA, 19 nt, Artificial Sequence
  Description of Artificial Sequence: Synthetic oligonucleotide
guuuagcaaacuuuggauc

SEQ ID NO: 2345722 - RNA, 19 nt, Artificial Sequence
  Description of Artificial Sequence: Synthetic oligonucleotide
uaaagucuauuacuucaga

SEQ ID NO: 2345723 - RNA, 19 nt, Artificial Sequence
  Description of Artificial Sequence: Synthetic oligonucleotide
cuucuaaugccgaaagcug

SEQ ID NO: 2345724 - RNA, 19 nt, Artificial Sequence
  Description of Artificial Sequence: Synthetic oligonucleotide
cacuaagaguacuaaaguc

SEQ ID NO: 2345725 - RNA, 19 nt, Artificial Sequence
  Description of Artificial Sequence: Synthetic oligonucleotide
cugagaauguuuagcaaac

SEQ ID NO: 2345726 - RNA, 19 nt, Artificial Sequence
  Description of Artificial Sequence: Synthetic oligonucleotide
aacuuuggaucuugaauau

SEQ ID NO: 2345727 - RNA, 19 nt, Artificial Sequence
  Description of Artificial Sequence: Synthetic oligonucleotide
ugucaauucaaaguggaua

SEQ ID NO: 2345728 - RNA, 19 nt, Artificial Sequence
  Description of Artificial Sequence: Synthetic oligonucleotide
aaaguggauagauucuauu

SEQ ID NO: 2345729 - RNA, 19 nt, Artificial Sequence
  Description of Artificial Sequence: Synthetic oligonucleotide
uguuagaguccuaaaugaa

SEQ ID NO: 2345730 - RNA, 19 nt, Artificial Sequence
  Description of Artificial Sequence: Synthetic oligonucleotide
aacuuucuuauaagguggg

SEQ ID NO: 2345731 - RNA, 19 nt, Artificial Sequence
  Description of Artificial Sequence: Synthetic oligonucleotide
ggaauuuucacuuggacua

SEQ ID NO: 2345732 - RNA, 19 nt, Artificial Sequence
  Description of Artificial Sequence: Synthetic oligonucleotide
gccuuucagaccuugaagg

SEQ ID NO: 2345733 - RNA, 19 nt, Artificial Sequence
  Description of Artificial Sequence: Synthetic oligonucleotide
aguacuaccagauguuuua

SEQ ID NO: 2345734 - RNA, 19 nt, Artificial Sequence
  Description of Artificial Sequence: Synthetic oligonucleotide
ucuagguuauauggaagag

SEQ ID NO: 2345735 - RNA, 19 nt, Artificial Sequence
  Description of Artificial Sequence: Synthetic oligonucleotide
uucuaauugcauuucuuua

SEQ ID NO: 2345736 - RNA, 19 nt, Artificial Sequence
  Description of Artificial Sequence: Synthetic oligonucleotide
cacuggcacuaauagaacg

SEQ ID NO: 2345737 - RNA, 19 nt, Artificial Sequence
  Description of Artificial Sequence: Synthetic oligonucleotide
uggcacuaauagaacgacg

SEQ ID NO: 2345738 - RNA, 19 nt, Artificial Sequence
  Description of Artificial Sequence: Synthetic oligonucleotide
caucuuaucucuuggcuuc

SEQ ID NO: 2345739 - RNA, 19 nt, Artificial Sequence
  Description of Artificial Sequence: Synthetic oligonucleotide
ucuauuacuucagaacuau

SEQ ID NO: 2345740 - RNA, 19 nt, Artificial Sequence
  Description of Artificial Sequence: Synthetic oligonucleotide
gaaacuaaggucacuggca

SEQ ID NO: 2345741 - RNA, 19 nt, Artificial Sequence
  Description of Artificial Sequence: Synthetic oligonucleotide
uaagguggguaauuuaaau

SEQ ID NO: 2345742 - RNA, 19 nt, Artificial Sequence
  Description of Artificial Sequence: Synthetic oligonucleotide
uaguuuucugccuuugaaa

SEQ ID NO: 2345743 - RNA, 19 nt, Artificial Sequence
  Description of Artificial Sequence: Synthetic oligonucleotide
gauucuauuuuagucauua

SEQ ID NO: 2345744 - RNA, 19 nt, Artificial Sequence
  Description of Artificial Sequence: Synthetic oligonucleotide
cuucuagguuauauggaag

SEQ ID NO: 2345745 - RNA, 19 nt, Artificial Sequence
  Description of Artificial Sequence: Synthetic oligonucleotide
aggauugcagacagaaucg

SEQ ID NO: 2345746 - RNA, 19 nt, Artificial Sequence
  Description of Artificial Sequence: Synthetic oligonucleotide
uuccaaaauaagccuuuca

SEQ ID NO: 2345747 - RNA, 19 nt, Artificial Sequence
  Description of Artificial Sequence: Synthetic oligonucleotide
uuuaaguccuguagcaauu

SEQ ID NO: 2345748 - RNA, 19 nt, Artificial Sequence
  Description of Artificial Sequence: Synthetic oligonucleotide
uauauggaagagguuuaag

SEQ ID NO: 2345749 - RNA, 19 nt, Artificial Sequence
  Description of Artificial Sequence: Synthetic oligonucleotide
auaauucggauucuuuaau

SEQ ID NO: 2345750 - RNA, 19 nt, Artificial Sequence
  Description of Artificial Sequence: Synthetic oligonucleotide
uggcuugcaaucuggauaa

SEQ ID NO: 2345751 - RNA, 19 nt, Artificial Sequence
  Description of Artificial Sequence: Synthetic oligonucleotide
cuguuagaguccuaaauga

SEQ ID NO: 2345752 - RNA, 19 nt, Artificial Sequence
  Description of Artificial Sequence: Synthetic oligonucleotide
agaacgacguaguuuucug

SEQ ID NO: 2345753 - RNA, 19 nt, Artificial Sequence
  Description of Artificial Sequence: Synthetic oligonucleotide
acuaauagaacgacguagu

SEQ ID NO: 2345754 - RNA, 19 nt, Artificial Sequence
  Description of Artificial Sequence: Synthetic oligonucleotide
guaaugcuucauuugcagc

SEQ ID NO: 2345755 - RNA, 19 nt, Artificial Sequence
  Description of Artificial Sequence: Synthetic oligonucleotide
gaucuugaggucuucuguc

SEQ ID NO: 2345756 - RNA, 19 nt, Artificial Sequence
  Description of Artificial Sequence: Synthetic oligonucleotide
cuucagaacuaucaucuuc

SEQ ID NO: 2345757 - RNA, 19 nt, Artificial Sequence
  Description of Artificial Sequence: Synthetic oligonucleotide
uaauucggauucuuuaaua

SEQ ID NO: 2345758 - RNA, 19 nt, Artificial Sequence
  Description of Artificial Sequence: Synthetic oligonucleotide
ugagagcuaggucuuuaug

SEQ ID NO: 2345759 - RNA, 19 nt, Artificial Sequence
  Description of Artificial Sequence: Synthetic oligonucleotide
gacaucugagaauguuuag

SEQ ID NO: 2345760 - RNA, 19 nt, Artificial Sequence
  Description of Artificial Sequence: Synthetic oligonucleotide
uucaugucuuaaugaagca

SEQ ID NO: 2345761 - RNA, 19 nt, Artificial Sequence
  Description of Artificial Sequence: Synthetic oligonucleotide
uaucucagcauuccacuaa

SEQ ID NO: 2345762 - RNA, 19 nt, Artificial Sequence
  Description of Artificial Sequence: Synthetic oligonucleotide
ucggauucuuuaauaagua

SEQ ID NO: 2345763 - RNA, 19 nt, Artificial Sequence
  Description of Artificial Sequence: Synthetic oligonucleotide
agccuuucagaccuugaag

SEQ ID NO: 2345764 - RNA, 19 nt, Artificial Sequence
  Description of Artificial Sequence: Synthetic oligonucleotide
uaaguuuaucucgaagccu

SEQ ID NO: 2345765 - RNA, 19 nt, Artificial Sequence
  Description of Artificial Sequence: Synthetic oligonucleotide
uguucuaauugcauuucuu

SEQ ID NO: 2345766 - RNA, 19 nt, Artificial Sequence
  Description of Artificial Sequence: Synthetic oligonucleotide
gaagagguuuaagugaauc

SEQ ID NO: 2345767 - RNA, 19 nt, Artificial Sequence
  Description of Artificial Sequence: Synthetic oligonucleotide
gacugugucaauucaaagu

SEQ ID NO: 2345768 - RNA, 19 nt, Artificial Sequence
  Description of Artificial Sequence: Synthetic oligonucleotide
aaguuuaucucgaagccuu

SEQ ID NO: 2345769 - RNA, 19 nt, Artificial Sequence
  Description of Artificial Sequence: Synthetic oligonucleotide
auguuuuacaaacuuucuu

SEQ ID NO: 2345770 - RNA, 19 nt, Artificial Sequence
  Description of Artificial Sequence: Synthetic oligonucleotide
ggcauaauuucuguuagag

SEQ ID NO: 2345771 - RNA, 19 nt, Artificial Sequence
  Description of Artificial Sequence: Synthetic oligonucleotide
aaugauucugugugaccaa

SEQ ID NO: 2345772 - RNA, 19 nt, Artificial Sequence
  Description of Artificial Sequence: Synthetic oligonucleotide
ucacuuggacuaacacugg

SEQ ID NO: 2345773 - RNA, 19 nt, Artificial Sequence
  Description of Artificial Sequence: Synthetic oligonucleotide
uacuaaagucuauuacuuc

SEQ ID NO: 2345774 - RNA, 19 nt, Artificial Sequence
  Description of Artificial Sequence: Synthetic oligonucleotide
ucuugaauaucaggcauaa

SEQ ID NO: 2345775 - RNA, 19 nt, Artificial Sequence
  Description of Artificial Sequence: Synthetic oligonucleotide
aagaguacuaaagucuauu

SEQ ID NO: 2345776 - RNA, 19 nt, Artificial Sequence
  Description of Artificial Sequence: Synthetic oligonucleotide
cuuuugaaacuaaggucac

SEQ ID NO: 2345777 - RNA, 19 nt, Artificial Sequence
  Description of Artificial Sequence: Synthetic oligonucleotide
uaauagaacgacguaguuu

SEQ ID NO: 2345778 - RNA, 19 nt, Artificial Sequence
  Description of Artificial Sequence: Synthetic oligonucleotide
gaaucggaauuuucacuug

SEQ ID NO: 2345779 - RNA, 19 nt, Artificial Sequence
  Description of Artificial Sequence: Synthetic oligonucleotide
guggguaauuuaaaugucc

SEQ ID NO: 2345780 - RNA, 19 nt, Artificial Sequence
  Description of Artificial Sequence: Synthetic oligonucleotide
ucuguuauuuucaguucau

SEQ ID NO: 2345781 - RNA, 19 nt, Artificial Sequence
  Description of Artificial Sequence: Synthetic oligonucleotide
uuuuggcuugcaaucugga

SEQ ID NO: 2345782 - RNA, 19 nt, Artificial Sequence
  Description of Artificial Sequence: Synthetic oligonucleotide
auucugugugaccaaacaa

SEQ ID NO: 2345783 - RNA, 19 nt, Artificial Sequence
  Description of Artificial Sequence: Synthetic oligonucleotide
aagccuuucagaccuugaa

SEQ ID NO: 2345784 - RNA, 19 nt, Artificial Sequence
  Description of Artificial Sequence: Synthetic oligonucleotide
uagaguccuaaaugaagcu

SEQ ID NO: 2345785 - RNA, 19 nt, Artificial Sequence
  Description of Artificial Sequence: Synthetic oligonucleotide
uuauaagguggguaauuua

SEQ ID NO: 2345786 - RNA, 19 nt, Artificial Sequence
  Description of Artificial Sequence: Synthetic oligonucleotide
uaucaggcauaauuucugu

SEQ ID NO: 2345787 - RNA, 19 nt, Artificial Sequence
  Description of Artificial Sequence: Synthetic oligonucleotide
uaaugccgaaagcuguucu

SEQ ID NO: 2345788 - RNA, 19 nt, Artificial Sequence
  Description of Artificial Sequence: Synthetic oligonucleotide
uuuucauguccagaaauuu

SEQ ID NO: 2345789 - RNA, 19 nt, Artificial Sequence
  Description of Artificial Sequence: Synthetic oligonucleotide
auaucaggcauaauuucug

SEQ ID NO: 2345790 - RNA, 19 nt, Artificial Sequence
  Description of Artificial Sequence: Synthetic oligonucleotide
agagagaucuucauugaca

SEQ ID NO: 2345791 - RNA, 19 nt, Artificial Sequence
  Description of Artificial Sequence: Synthetic oligonucleotide
uggcuucuuuugaaaauca

SEQ ID NO: 2345792 - RNA, 19 nt, Artificial Sequence
  Description of Artificial Sequence: Synthetic oligonucleotide
auuuuggcuugcaaucugg

SEQ ID NO: 2345793 - RNA, 19 nt, Artificial Sequence
  Description of Artificial Sequence: Synthetic oligonucleotide
aguucaugucuuaaugaag

SEQ ID NO: 2345794 - RNA, 19 nt, Artificial Sequence
  Description of Artificial Sequence: Synthetic oligonucleotide
agaguacuaaagucuauua

SEQ ID NO: 2345795 - RNA, 19 nt, Artificial Sequence
  Description of Artificial Sequence: Synthetic oligonucleotide
ugauccauagaagcagaug

SEQ ID NO: 2345796 - RNA, 19 nt, Artificial Sequence
  Description of Artificial Sequence: Synthetic oligonucleotide
gaacgacguaguuuucugc

SEQ ID NO: 2345797 - RNA, 19 nt, Artificial Sequence
  Description of Artificial Sequence: Synthetic oligonucleotide
agugaaucugaaugcuuga

SEQ ID NO: 2345798 - RNA, 19 nt, Artificial Sequence
  Description of Artificial Sequence: Synthetic oligonucleotide
aaugccgaaagcuguucua

SEQ ID NO: 2345799 - RNA, 19 nt, Artificial Sequence
  Description of Artificial Sequence: Synthetic oligonucleotide
ucaugucuuaaugaagcaa

SEQ ID NO: 2345800 - RNA, 19 nt, Artificial Sequence
  Description of Artificial Sequence: Synthetic oligonucleotide
aaguaaugcuucauuugca

SEQ ID NO: 2345801 - RNA, 19 nt, Artificial Sequence
  Description of Artificial Sequence: Synthetic oligonucleotide
agaguccuaaaugaagcug

SEQ ID NO: 2345802 - RNA, 19 nt, Artificial Sequence
  Description of Artificial Sequence: Synthetic oligonucleotide
cagaacuaucaucuucuag

SEQ ID NO: 2345803 - RNA, 19 nt, Artificial Sequence
  Description of Artificial Sequence: Synthetic oligonucleotide
auuucuguuagaguccuaa

SEQ ID NO: 2345804 - RNA, 19 nt, Artificial Sequence
  Description of Artificial Sequence: Synthetic oligonucleotide
uaagugaaucugaaugcuu

SEQ ID NO: 2345805 - RNA, 19 nt, Artificial Sequence
  Description of Artificial Sequence: Synthetic oligonucleotide
cuaagaguacuaaagucua

SEQ ID NO: 2345806 - RNA, 19 nt, Artificial Sequence
  Description of Artificial Sequence: Synthetic oligonucleotide
uccauagaagcagaugaaa

SEQ ID NO: 2345807 - RNA, 19 nt, Artificial Sequence
  Description of Artificial Sequence: Synthetic oligonucleotide
ucuaaugccgaaagcuguu

SEQ ID NO: 2345808 - RNA, 19 nt, Artificial Sequence
  Description of Artificial Sequence: Synthetic oligonucleotide
cugaaugcuugagagcuag

SEQ ID NO: 2345809 - RNA, 19 nt, Artificial Sequence
  Description of Artificial Sequence: Synthetic oligonucleotide
uuauggccaccuucuaaug

SEQ ID NO: 2345810 - RNA, 19 nt, Artificial Sequence
  Description of Artificial Sequence: Synthetic oligonucleotide
uuaucucuuggcuucuuuu

SEQ ID NO: 2345811 - RNA, 19 nt, Artificial Sequence
  Description of Artificial Sequence: Synthetic oligonucleotide
gaccuugaaggauugcaga

SEQ ID NO: 2345812 - RNA, 19 nt, Artificial Sequence
  Description of Artificial Sequence: Synthetic oligonucleotide
cauuaaagaaugauucugu

SEQ ID NO: 2345813 - RNA, 19 nt, Artificial Sequence
  Description of Artificial Sequence: Synthetic oligonucleotide
cucgaagccuuuuaaucuc

SEQ ID NO: 2345814 - RNA, 19 nt, Artificial Sequence
  Description of Artificial Sequence: Synthetic oligonucleotide
uacuaccagauguuuuaca

SEQ ID NO: 2345815 - RNA, 19 nt, Artificial Sequence
  Description of Artificial Sequence: Synthetic oligonucleotide
ugcagacagaaucggaauu

SEQ ID NO: 2345816 - RNA, 19 nt, Artificial Sequence
  Description of Artificial Sequence: Synthetic oligonucleotide
uggccaccuucuaaugccg

SEQ ID NO: 2345817 - RNA, 19 nt, Artificial Sequence
  Description of Artificial Sequence: Synthetic oligonucleotide
gagguuuaagugaaucuga

SEQ ID NO: 2345818 - RNA, 19 nt, Artificial Sequence
  Description of Artificial Sequence: Synthetic oligonucleotide
uaagaguacuaaagucuau

SEQ ID NO: 2345819 - RNA, 19 nt, Artificial Sequence
  Description of Artificial Sequence: Synthetic oligonucleotide
uagaacgacguaguuuucu

SEQ ID NO: 2345820 - RNA, 19 nt, Artificial Sequence
  Description of Artificial Sequence: Synthetic oligonucleotide
gagagaucuucauugacau

SEQ ID NO: 2345821 - RNA, 19 nt, Artificial Sequence
  Description of Artificial Sequence: Synthetic oligonucleotide
gaaagcuguucuaauugca

SEQ ID NO: 2345822 - RNA, 19 nt, Artificial Sequence
  Description of Artificial Sequence: Synthetic oligonucleotide
gucccaggcggcuagguug

SEQ ID NO: 2345823 - RNA, 19 nt, Artificial Sequence
  Description of Artificial Sequence: Synthetic oligonucleotide
uuauauggaagagguuuaa

SEQ ID NO: 2345824 - RNA, 19 nt, Artificial Sequence
  Description of Artificial Sequence: Synthetic oligonucleotide
ucuuuaaguccuguagcaa

SEQ ID NO: 2345825 - RNA, 19 nt, Artificial Sequence
  Description of Artificial Sequence: Synthetic oligonucleotide
ugucuuaaugaagcaacau

SEQ ID NO: 2345826 - RNA, 19 nt, Artificial Sequence
  Description of Artificial Sequence: Synthetic oligonucleotide
cucuugauccauagaagca

SEQ ID NO: 2345827 - RNA, 19 nt, Artificial Sequence
  Description of Artificial Sequence: Synthetic oligonucleotide
uuuggcuugcaaucuggau

SEQ ID NO: 2345828 - RNA, 19 nt, Artificial Sequence
  Description of Artificial Sequence: Synthetic oligonucleotide
ucgaagccuuuuaaucucu

SEQ ID NO: 2345829 - RNA, 19 nt, Artificial Sequence
  Description of Artificial Sequence: Synthetic oligonucleotide
uaagccuuucagaccuuga

SEQ ID NO: 2345830 - RNA, 19 nt, Artificial Sequence
  Description of Artificial Sequence: Synthetic oligonucleotide
uugcagacagaaucggaau

SEQ ID NO: 2345831 - RNA, 19 nt, Artificial Sequence
  Description of Artificial Sequence: Synthetic oligonucleotide
acaagcauucuguugccua

SEQ ID NO: 2345832 - RNA, 19 nt, Artificial Sequence
  Description of Artificial Sequence: Synthetic oligonucleotide
ucaauucaaaguggauaga

SEQ ID NO: 2345833 - RNA, 19 nt, Artificial Sequence
  Description of Artificial Sequence: Synthetic oligonucleotide
gugaaucugaaugcuugag

SEQ ID NO: 2345834 - RNA, 19 nt, Artificial Sequence
  Description of Artificial Sequence: Synthetic oligonucleotide
ugagaauguuuagcaaacu

SEQ ID NO: 2345835 - RNA, 19 nt, Artificial Sequence
  Description of Artificial Sequence: Synthetic oligonucleotide
aagcauucuguugccuaag

SEQ ID NO: 2345836 - RNA, 19 nt, Artificial Sequence
  Description of Artificial Sequence: Synthetic oligonucleotide
acuggcacuaauagaacga

SEQ ID NO: 2345837 - RNA, 19 nt, Artificial Sequence
  Description of Artificial Sequence: Synthetic oligonucleotide
guccagaaauuuuggcuug

SEQ ID NO: 2345838 - RNA, 19 nt, Artificial Sequence
  Description of Artificial Sequence: Synthetic oligonucleotide
caguucaugucuuaaugaa

SEQ ID NO: 2345839 - RNA, 19 nt, Artificial Sequence
  Description of Artificial Sequence: Synthetic oligonucleotide
uugauccauagaagcagau

SEQ ID NO: 2345840 - RNA, 19 nt, Artificial Sequence
  Description of Artificial Sequence: Synthetic oligonucleotide
auucuguugccuaaguuua

SEQ ID NO: 2345841 - RNA, 19 nt, Artificial Sequence
  Description of Artificial Sequence: Synthetic oligonucleotide
uuaaguccuguagcaauuc

SEQ ID NO: 2345842 - RNA, 19 nt, Artificial Sequence
  Description of Artificial Sequence: Synthetic oligonucleotide
cuuggacuaacacuggaua

SEQ ID NO: 2345843 - RNA, 19 nt, Artificial Sequence
  Description of Artificial Sequence: Synthetic oligonucleotide
cuauuacuucagaacuauc

SEQ ID NO: 2345844 - RNA, 19 nt, Artificial Sequence
  Description of Artificial Sequence: Synthetic oligonucleotide
ggauaauucggauucuuua

SEQ ID NO: 2345845 - RNA, 19 nt, Artificial Sequence
  Description of Artificial Sequence: Synthetic oligonucleotide
uaggucuuuauggccaccu

SEQ ID NO: 2345846 - RNA, 19 nt, Artificial Sequence
  Description of Artificial Sequence: Synthetic oligonucleotide
ucucagcauuccacuaaga

SEQ ID NO: 2345847 - RNA, 19 nt, Artificial Sequence
  Description of Artificial Sequence: Synthetic oligonucleotide
auaucucagcauuccacua

SEQ ID NO: 2345848 - RNA, 19 nt, Artificial Sequence
  Description of Artificial Sequence: Synthetic oligonucleotide
aacaagcauucuguugccu

SEQ ID NO: 2345849 - RNA, 19 nt, Artificial Sequence
  Description of Artificial Sequence: Synthetic oligonucleotide
uccagaaauuuuggcuugc

SEQ ID NO: 2345850 - RNA, 19 nt, Artificial Sequence
  Description of Artificial Sequence: Synthetic oligonucleotide
gaccaaacaagcauucugu

SEQ ID NO: 2345851 - RNA, 19 nt, Artificial Sequence
  Description of Artificial Sequence: Synthetic oligonucleotide
uugagagcuaggucuuuau

SEQ ID NO: 2345852 - RNA, 19 nt, Artificial Sequence
  Description of Artificial Sequence: Synthetic oligonucleotide
aucuucuagguuauaugga

SEQ ID NO: 2345853 - RNA, 19 nt, Artificial Sequence
  Description of Artificial Sequence: Synthetic oligonucleotide
ccaaacaagcauucuguug

SEQ ID NO: 2345854 - RNA, 19 nt, Artificial Sequence
  Description of Artificial Sequence: Synthetic oligonucleotide
gcuagguugaauaagcucu

SEQ ID NO: 2345855 - RNA, 19 nt, Artificial Sequence
  Description of Artificial Sequence: Synthetic oligonucleotide
ccgaaagcuguucuaauug

SEQ ID NO: 2345856 - RNA, 19 nt, Artificial Sequence
  Description of Artificial Sequence: Synthetic oligonucleotide
acgacguaguuuucugccu

SEQ ID NO: 2345857 - RNA, 19 nt, Artificial Sequence
  Description of Artificial Sequence: Synthetic oligonucleotide
cuggcacuaauagaacgac

SEQ ID NO: 2345858 - RNA, 19 nt, Artificial Sequence
  Description of Artificial Sequence: Synthetic oligonucleotide
cuuucuuauaaggugggua

SEQ ID NO: 2345859 - RNA, 19 nt, Artificial Sequence
  Description of Artificial Sequence: Synthetic oligonucleotide
auaagccuuucagaccuug

SEQ ID NO: 2345860 - RNA, 19 nt, Artificial Sequence
  Description of Artificial Sequence: Synthetic oligonucleotide
ugaagcuggugggaucuug

SEQ ID NO: 2345861 - RNA, 19 nt, Artificial Sequence
  Description of Artificial Sequence: Synthetic oligonucleotide
accaaacaagcauucuguu

SEQ ID NO: 2345862 - RNA, 19 nt, Artificial Sequence
  Description of Artificial Sequence: Synthetic oligonucleotide
gauugcagacagaaucgga

SEQ ID NO: 2345863 - RNA, 19 nt, Artificial Sequence
  Description of Artificial Sequence: Synthetic oligonucleotide
ugcuugagagcuaggucuu

SEQ ID NO: 2345864 - RNA, 19 nt, Artificial Sequence
  Description of Artificial Sequence: Synthetic oligonucleotide
ggauugcagacagaaucgg

SEQ ID NO: 2345865 - RNA, 19 nt, Artificial Sequence
  Description of Artificial Sequence: Synthetic oligonucleotide
ucaguacuaccagauguuu

SEQ ID NO: 2345866 - RNA, 19 nt, Artificial Sequence
  Description of Artificial Sequence: Synthetic oligonucleotide
gguuauauggaagagguuu

SEQ ID NO: 2345867 - RNA, 19 nt, Artificial Sequence
  Description of Artificial Sequence: Synthetic oligonucleotide
augucuuaaugaagcaaca

SEQ ID NO: 2345868 - RNA, 19 nt, Artificial Sequence
  Description of Artificial Sequence: Synthetic oligonucleotide
guuauauggaagagguuua

SEQ ID NO: 2345869 - RNA, 19 nt, Artificial Sequence
  Description of Artificial Sequence: Synthetic oligonucleotide
uucuuauaagguggguaau

SEQ ID NO: 2345870 - RNA, 19 nt, Artificial Sequence
  Description of Artificial Sequence: Synthetic oligonucleotide
aaacuccauucuguuauuu

SEQ ID NO: 2345871 - RNA, 19 nt, Artificial Sequence
  Description of Artificial Sequence: Synthetic oligonucleotide
uucuguugccuaaguuuau

SEQ ID NO: 2345872 - RNA, 19 nt, Artificial Sequence
  Description of Artificial Sequence: Synthetic oligonucleotide
cauuccacuaagaguacua

SEQ ID NO: 2345873 - RNA, 19 nt, Artificial Sequence
  Description of Artificial Sequence: Synthetic oligonucleotide
auaagguggguaauuuaaa

SEQ ID NO: 2345874 - RNA, 19 nt, Artificial Sequence
  Description of Artificial Sequence: Synthetic oligonucleotide
aaggucacuggcacuaaua

SEQ ID NO: 2345875 - RNA, 19 nt, Artificial Sequence
  Description of Artificial Sequence: Synthetic oligonucleotide
auuccacuaagaguacuaa

SEQ ID NO: 2345876 - RNA, 19 nt, Artificial Sequence
  Description of Artificial Sequence: Synthetic oligonucleotide
cugugugaccaaacaagca

SEQ ID NO: 2345877 - RNA, 19 nt, Artificial Sequence
  Description of Artificial Sequence: Synthetic oligonucleotide
gaauaagcucuuccaaaau

SEQ ID NO: 2345878 - RNA, 19 nt, Artificial Sequence
  Description of Artificial Sequence: Synthetic oligonucleotide
ggcuagguugaauaagcuc

SEQ ID NO: 2345879 - RNA, 19 nt, Artificial Sequence
  Description of Artificial Sequence: Synthetic oligonucleotide
cuaccagauguuuuacaaa

SEQ ID NO: 2345880 - RNA, 19 nt, Artificial Sequence
  Description of Artificial Sequence: Synthetic oligonucleotide
agcauuccacuaagaguac

SEQ ID NO: 2345881 - RNA, 19 nt, Artificial Sequence
  Description of Artificial Sequence: Synthetic oligonucleotide
cuuaaugaagcaacauuuu

SEQ ID NO: 2345882 - RNA, 19 nt, Artificial Sequence
  Description of Artificial Sequence: Synthetic oligonucleotide
ucuguugccuaaguuuauu

SEQ ID NO: 2345883 - RNA, 19 nt, Artificial Sequence
  Description of Artificial Sequence: Synthetic oligonucleotide
ggguaauuuaaauguccca

SEQ ID NO: 2345884 - RNA, 19 nt, Artificial Sequence
  Description of Artificial Sequence: Synthetic oligonucleotide
gacuaacacuggauaacuc

SEQ ID NO: 2345885 - RNA, 19 nt, Artificial Sequence
  Description of Artificial Sequence: Synthetic oligonucleotide
uuagcaaacuuuggaucuu

SEQ ID NO: 2345886 - RNA, 19 nt, Artificial Sequence
  Description of Artificial Sequence: Synthetic oligonucleotide
cgaaagcuguucuaauugc

SEQ ID NO: 2345887 - RNA, 19 nt, Artificial Sequence
  Description of Artificial Sequence: Synthetic oligonucleotide
cauuucuuuaaguccugua

SEQ ID NO: 2345888 - RNA, 19 nt, Artificial Sequence
  Description of Artificial Sequence: Synthetic oligonucleotide
agguuuaagugaaucugaa

SEQ ID NO: 2345889 - RNA, 19 nt, Artificial Sequence
  Description of Artificial Sequence: Synthetic oligonucleotide
aucaguacuaccagauguu

SEQ ID NO: 2345890 - RNA, 19 nt, Artificial Sequence
  Description of Artificial Sequence: Synthetic oligonucleotide
cuaaugccgaaagcuguuc

SEQ ID NO: 2345891 - RNA, 19 nt, Artificial Sequence
  Description of Artificial Sequence: Synthetic oligonucleotide
ggauucuuuaauaaguaau

SEQ ID NO: 2345892 - RNA, 19 nt, Artificial Sequence
  Description of Artificial Sequence: Synthetic oligonucleotide
guacuaaagucuauuacuu

SEQ ID NO: 2345893 - RNA, 19 nt, Artificial Sequence
  Description of Artificial Sequence: Synthetic oligonucleotide
cagaaucggaauuuucacu

SEQ ID NO: 2345894 - RNA, 19 nt, Artificial Sequence
  Description of Artificial Sequence: Synthetic oligonucleotide
ugccgaaagcuguucuaau

SEQ ID NO: 2345895 - RNA, 19 nt, Artificial Sequence
  Description of Artificial Sequence: Synthetic oligonucleotide
ggcacuaauagaacgacgu

SEQ ID NO: 2345896 - RNA, 19 nt, Artificial Sequence
  Description of Artificial Sequence: Synthetic oligonucleotide
ucagaccuugaaggauugc

SEQ ID NO: 2345897 - RNA, 19 nt, Artificial Sequence
  Description of Artificial Sequence: Synthetic oligonucleotide
cauugacaugacuuuugaa

SEQ ID NO: 2345898 - RNA, 19 nt, Artificial Sequence
  Description of Artificial Sequence: Synthetic oligonucleotide
auagaacgacguaguuuuc

SEQ ID NO: 2345899 - RNA, 19 nt, Artificial Sequence
  Description of Artificial Sequence: Synthetic oligonucleotide
guacuaccagauguuuuac

SEQ ID NO: 2345900 - RNA, 19 nt, Artificial Sequence
  Description of Artificial Sequence: Synthetic oligonucleotide
gcggcuagguugaauaagc

SEQ ID NO: 2345901 - RNA, 19 nt, Artificial Sequence
  Description of Artificial Sequence: Synthetic oligonucleotide
aucggaauuuucacuugga

SEQ ID NO: 2345902 - RNA, 19 nt, Artificial Sequence
  Description of Artificial Sequence: Synthetic oligonucleotide
augauucugugugaccaaa

SEQ ID NO: 2345903 - RNA, 19 nt, Artificial Sequence
  Description of Artificial Sequence: Synthetic oligonucleotide
ggauagauucuauuuuagu

SEQ ID NO: 2345904 - RNA, 19 nt, Artificial Sequence
  Description of Artificial Sequence: Synthetic oligonucleotide
aucuugaauaucaggcaua

SEQ ID NO: 2345905 - RNA, 19 nt, Artificial Sequence
  Description of Artificial Sequence: Synthetic oligonucleotide
uaaaugucccaggcggcua

SEQ ID NO: 2345906 - RNA, 19 nt, Artificial Sequence
  Description of Artificial Sequence: Synthetic oligonucleotide
ugggaucuugaggucuucu

SEQ ID NO: 2345907 - RNA, 19 nt, Artificial Sequence
  Description of Artificial Sequence: Synthetic oligonucleotide
augccgaaagcuguucuaa

SEQ ID NO: 2345908 - RNA, 19 nt, Artificial Sequence
  Description of Artificial Sequence: Synthetic oligonucleotide
caggcggcuagguugaaua

SEQ ID NO: 2345909 - RNA, 19 nt, Artificial Sequence
  Description of Artificial Sequence: Synthetic oligonucleotide
guccuaaaugaagcuggug

SEQ ID NO: 2345910 - RNA, 19 nt, Artificial Sequence
  Description of Artificial Sequence: Synthetic oligonucleotide
gguggguaauuuaaauguc

SEQ ID NO: 2345911 - RNA, 19 nt, Artificial Sequence
  Description of Artificial Sequence: Synthetic oligonucleotide
cuguugccuaaguuuauua

SEQ ID NO: 2345912 - RNA, 19 nt, Artificial Sequence
  Description of Artificial Sequence: Synthetic oligonucleotide
aguccuaaaugaagcuggu

SEQ ID NO: 2345913 - RNA, 19 nt, Artificial Sequence
  Description of Artificial Sequence: Synthetic oligonucleotide
ugucccaggcggcuagguu

SEQ ID NO: 2345914 - RNA, 19 nt, Artificial Sequence
  Description of Artificial Sequence: Synthetic oligonucleotide
caaucuggauaauucggau

SEQ ID NO: 2345915 - RNA, 19 nt, Artificial Sequence
  Description of Artificial Sequence: Synthetic oligonucleotide
ggcggcuagguugaauaag

SEQ ID NO: 2345916 - RNA, 19 nt, Artificial Sequence
  Description of Artificial Sequence: Synthetic oligonucleotide
cuuauaagguggguaauuu

SEQ ID NO: 2345917 - RNA, 19 nt, Artificial Sequence
  Description of Artificial Sequence: Synthetic oligonucleotide
agcaaacuuuggaucuuga

SEQ ID NO: 2345918 - RNA, 19 nt, Artificial Sequence
  Description of Artificial Sequence: Synthetic oligonucleotide
cuaucaucuucuagguuau

SEQ ID NO: 2345919 - RNA, 19 nt, Artificial Sequence
  Description of Artificial Sequence: Synthetic oligonucleotide
ccccaaauucugcaaacuc

SEQ ID NO: 2345920 - RNA, 19 nt, Artificial Sequence
  Description of Artificial Sequence: Synthetic oligonucleotide
cuaggucuuuauggccacc

SEQ ID NO: 2345921 - RNA, 19 nt, Artificial Sequence
  Description of Artificial Sequence: Synthetic oligonucleotide
aucuuaucucuuggcuucu

SEQ ID NO: 2345922 - RNA, 19 nt, Artificial Sequence
  Description of Artificial Sequence: Synthetic oligonucleotide
cagauguuuuacaaacuuu

SEQ ID NO: 2345923 - RNA, 19 nt, Artificial Sequence
  Description of Artificial Sequence: Synthetic oligonucleotide
gcucuuccaaaauaagccu

SEQ ID NO: 2345924 - RNA, 19 nt, Artificial Sequence
  Description of Artificial Sequence: Synthetic oligonucleotide
gcauaauuucuguuagagu

SEQ ID NO: 2345925 - RNA, 19 nt, Artificial Sequence
  Description of Artificial Sequence: Synthetic oligonucleotide
aggcggcuagguugaauaa

SEQ ID NO: 2345926 - RNA, 19 nt, Artificial Sequence
  Description of Artificial Sequence: Synthetic oligonucleotide
ccuuucagaccuugaagga

SEQ ID NO: 2345927 - RNA, 19 nt, Artificial Sequence
  Description of Artificial Sequence: Synthetic oligonucleotide
gcuguucuaauugcauuuc

SEQ ID NO: 2345928 - RNA, 19 nt, Artificial Sequence
  Description of Artificial Sequence: Synthetic oligonucleotide
cuguucuaauugcauuucu

SEQ ID NO: 2345929 - RNA, 19 nt, Artificial Sequence
  Description of Artificial Sequence: Synthetic oligonucleotide
cuaauagaacgacguaguu

SEQ ID NO: 2345930 - RNA, 19 nt, Artificial Sequence
  Description of Artificial Sequence: Synthetic oligonucleotide
gguuuaagugaaucugaau

SEQ ID NO: 2345931 - RNA, 19 nt, Artificial Sequence
  Description of Artificial Sequence: Synthetic oligonucleotide
aauuucuguuagaguccua

SEQ ID NO: 2345932 - RNA, 19 nt, Artificial Sequence
  Description of Artificial Sequence: Synthetic oligonucleotide
ggacuaacacuggauaacu

SEQ ID NO: 2345933 - RNA, 19 nt, Artificial Sequence
  Description of Artificial Sequence: Synthetic oligonucleotide
cuugagagcuaggucuuua

SEQ ID NO: 2345934 - RNA, 19 nt, Artificial Sequence
  Description of Artificial Sequence: Synthetic oligonucleotide
agauucuauuuuagucauu

SEQ ID NO: 2345935 - RNA, 19 nt, Artificial Sequence
  Description of Artificial Sequence: Synthetic oligonucleotide
ccacuaagaguacuaaagu

SEQ ID NO: 2345936 - RNA, 19 nt, Artificial Sequence
  Description of Artificial Sequence: Synthetic oligonucleotide
gacguaguuuucugccuuu

SEQ ID NO: 2345937 - RNA, 19 nt, Artificial Sequence
  Description of Artificial Sequence: Synthetic oligonucleotide
gcacuaauagaacgacgua

SEQ ID NO: 2345938 - RNA, 19 nt, Artificial Sequence
  Description of Artificial Sequence: Synthetic oligonucleotide
agguuauauggaagagguu

SEQ ID NO: 2345939 - RNA, 19 nt, Artificial Sequence
  Description of Artificial Sequence: Synthetic oligonucleotide
cggaauuuucacuuggacu

SEQ ID NO: 2345940 - RNA, 19 nt, Artificial Sequence
  Description of Artificial Sequence: Synthetic oligonucleotide
caguacuaccagauguuuu

SEQ ID NO: 2345941 - RNA, 19 nt, Artificial Sequence
  Description of Artificial Sequence: Synthetic oligonucleotide
cuuaucucuuggcuucuuu

SEQ ID NO: 2345942 - RNA, 19 nt, Artificial Sequence
  Description of Artificial Sequence: Synthetic oligonucleotide
guuuaucucgaagccuuuu

SEQ ID NO: 2345943 - RNA, 19 nt, Artificial Sequence
  Description of Artificial Sequence: Synthetic oligonucleotide
cggauucuuuaauaaguaa

SEQ ID NO: 2345944 - RNA, 19 nt, Artificial Sequence
  Description of Artificial Sequence: Synthetic oligonucleotide
cuaaggucacuggcacuaa

SEQ ID NO: 2345945 - RNA, 19 nt, Artificial Sequence
  Description of Artificial Sequence: Synthetic oligonucleotide
gcuuuugacugugucaauu

SEQ ID NO: 2345946 - RNA, 19 nt, Artificial Sequence
  Description of Artificial Sequence: Synthetic oligonucleotide
gccgaaagcuguucuaauu

SEQ ID NO: 2345947 - RNA, 19 nt, Artificial Sequence
  Description of Artificial Sequence: Synthetic oligonucleotide
caaacuccauucuguuauu

SEQ ID NO: 2345948 - RNA, 19 nt, Artificial Sequence
  Description of Artificial Sequence: Synthetic oligonucleotide
cagacagaaucggaauuuu

SEQ ID NO: 2345949 - RNA, 19 nt, Artificial Sequence
  Description of Artificial Sequence: Synthetic oligonucleotide
augaagcuggugggaucuu

SEQ ID NO: 2345950 - RNA, 19 nt, Artificial Sequence
  Description of Artificial Sequence: Synthetic oligonucleotide
cuugaauaucaggcauaau

SEQ ID NO: 2345951 - RNA, 19 nt, Artificial Sequence
  Description of Artificial Sequence: Synthetic oligonucleotide
gcauuccacuaagaguacu

SEQ ID NO: 2345952 - RNA, 19 nt, Artificial Sequence
  Description of Artificial Sequence: Synthetic oligonucleotide
ccaccuucuaaugccgaaa

SEQ ID NO: 2345953 - RNA, 19 nt, Artificial Sequence
  Description of Artificial Sequence: Synthetic oligonucleotide
ggaagagguuuaagugaau

SEQ ID NO: 2345954 - RNA, 19 nt, Artificial Sequence
  Description of Artificial Sequence: Synthetic oligonucleotide
cggcuagguugaauaagcu

SEQ ID NO: 2345955 - RNA, 19 nt, Artificial Sequence
  Description of Artificial Sequence: Synthetic oligonucleotide
cgacguaguuuucugccuu

SEQ ID NO: 2345956 - RNA, 19 nt, Artificial Sequence
  Description of Artificial Sequence: Synthetic oligonucleotide
ggcuugcaaucuggauaau

SEQ ID NO: 2345957 - RNA, 19 nt, Artificial Sequence
  Description of Artificial Sequence: Synthetic oligonucleotide
uauauauaaguuaacagug

SEQ ID NO: 2345958 - RNA, 19 nt, Artificial Sequence
  Description of Artificial Sequence: Synthetic oligonucleotide
gaucaaagcaguuagagcc

SEQ ID NO: 2345959 - RNA, 19 nt, Artificial Sequence
  Description of Artificial Sequence: Synthetic oligonucleotide
aguuauaaacgcuacaaac

SEQ ID NO: 2345960 - RNA, 19 nt, Artificial Sequence
  Description of Artificial Sequence: Synthetic oligonucleotide
uuuuaauaccuaaugaugc

SEQ ID NO: 2345961 - RNA, 19 nt, Artificial Sequence
  Description of Artificial Sequence: Synthetic oligonucleotide
aauaguucacaggaaaugc

SEQ ID NO: 2345962 - RNA, 19 nt, Artificial Sequence
  Description of Artificial Sequence: Synthetic oligonucleotide
uguuuuaaugguaauacug

SEQ ID NO: 2345963 - RNA, 19 nt, Artificial Sequence
  Description of Artificial Sequence: Synthetic oligonucleotide
ugaauguaaagacacuugg

SEQ ID NO: 2345964 - RNA, 19 nt, Artificial Sequence
  Description of Artificial Sequence: Synthetic oligonucleotide
ugguaauuuaaacugauug

SEQ ID NO: 2345965 - RNA, 19 nt, Artificial Sequence
  Description of Artificial Sequence: Synthetic oligonucleotide
aauguaaagacacuugggu

SEQ ID NO: 2345966 - RNA, 19 nt, Artificial Sequence
  Description of Artificial Sequence: Synthetic oligonucleotide
uuaaugguaauacugaauc

SEQ ID NO: 2345967 - RNA, 19 nt, Artificial Sequence
  Description of Artificial Sequence: Synthetic oligonucleotide
aaacauaccaaaaugcuag

SEQ ID NO: 2345968 - RNA, 19 nt, Artificial Sequence
  Description of Artificial Sequence: Synthetic oligonucleotide
aaugcuagcaagcagugcu

SEQ ID NO: 2345969 - RNA, 19 nt, Artificial Sequence
  Description of Artificial Sequence: Synthetic oligonucleotide
ugauacuuucucuuuaugg

SEQ ID NO: 2345970 - RNA, 19 nt, Artificial Sequence
  Description of Artificial Sequence: Synthetic oligonucleotide
ucauguacuauauauaagu

SEQ ID NO: 2345971 - RNA, 19 nt, Artificial Sequence
  Description of Artificial Sequence: Synthetic oligonucleotide
aguacuuccauggaaauac

SEQ ID NO: 2345972 - RNA, 19 nt, Artificial Sequence
  Description of Artificial Sequence: Synthetic oligonucleotide
aaugacuugagaaaaggag

SEQ ID NO: 2345973 - RNA, 19 nt, Artificial Sequence
  Description of Artificial Sequence: Synthetic oligonucleotide
cuugcaaagaauacgaaug

SEQ ID NO: 2345974 - RNA, 19 nt, Artificial Sequence
  Description of Artificial Sequence: Synthetic oligonucleotide
ugcuauuugcucaugauca

SEQ ID NO: 2345975 - RNA, 19 nt, Artificial Sequence
  Description of Artificial Sequence: Synthetic oligonucleotide
ucuaaaagcauaugcagca

SEQ ID NO: 2345976 - RNA, 19 nt, Artificial Sequence
  Description of Artificial Sequence: Synthetic oligonucleotide
uccaaacauaccaaaaugc

SEQ ID NO: 2345977 - RNA, 19 nt, Artificial Sequence
  Description of Artificial Sequence: Synthetic oligonucleotide
aauaucuuuuaauacacuu

SEQ ID NO: 2345978 - RNA, 19 nt, Artificial Sequence
  Description of Artificial Sequence: Synthetic oligonucleotide
ucugaaaaugagaagcacc

SEQ ID NO: 2345979 - RNA, 19 nt, Artificial Sequence
  Description of Artificial Sequence: Synthetic oligonucleotide
uuaaguaucccaugcuugg

SEQ ID NO: 2345980 - RNA, 19 nt, Artificial Sequence
  Description of Artificial Sequence: Synthetic oligonucleotide
uguaaagacacuuggguga

SEQ ID NO: 2345981 - RNA, 19 nt, Artificial Sequence
  Description of Artificial Sequence: Synthetic oligonucleotide
uucauaaacucccuuaacu

SEQ ID NO: 2345982 - RNA, 19 nt, Artificial Sequence
  Description of Artificial Sequence: Synthetic oligonucleotide
cuuuuaauaccuaaugaug

SEQ ID NO: 2345983 - RNA, 19 nt, Artificial Sequence
  Description of Artificial Sequence: Synthetic oligonucleotide
uauaaguuaacaguguucu

SEQ ID NO: 2345984 - RNA, 19 nt, Artificial Sequence
  Description of Artificial Sequence: Synthetic oligonucleotide
aaacgcuacaaacuaauga

SEQ ID NO: 2345985 - RNA, 19 nt, Artificial Sequence
  Description of Artificial Sequence: Synthetic oligonucleotide
ucucuaaaagcauaugcag

SEQ ID NO: 2345986 - RNA, 19 nt, Artificial Sequence
  Description of Artificial Sequence: Synthetic oligonucleotide
uuuaauugcucauuucacc

SEQ ID NO: 2345987 - RNA, 19 nt, Artificial Sequence
  Description of Artificial Sequence: Synthetic oligonucleotide
aacgcuacaaacuaaugaa

SEQ ID NO: 2345988 - RNA, 19 nt, Artificial Sequence
  Description of Artificial Sequence: Synthetic oligonucleotide
uuaacugaauguaaagaca

SEQ ID NO: 2345989 - RNA, 19 nt, Artificial Sequence
  Description of Artificial Sequence: Synthetic oligonucleotide
uuuacuuuaccuuuucaac

SEQ ID NO: 2345990 - RNA, 19 nt, Artificial Sequence
  Description of Artificial Sequence: Synthetic oligonucleotide
aacucugauaccuguagag

SEQ ID NO: 2345991 - RNA, 19 nt, Artificial Sequence
  Description of Artificial Sequence: Synthetic oligonucleotide
uaacugaauguaaagacac

SEQ ID NO: 2345992 - RNA, 19 nt, Artificial Sequence
  Description of Artificial Sequence: Synthetic oligonucleotide
ugagaagcaccauuaauag

SEQ ID NO: 2345993 - RNA, 19 nt, Artificial Sequence
  Description of Artificial Sequence: Synthetic oligonucleotide
aaaaucaucugaaaaugag

SEQ ID NO: 2345994 - RNA, 19 nt, Artificial Sequence
  Description of Artificial Sequence: Synthetic oligonucleotide
uuaacaguguucuucauaa

SEQ ID NO: 2345995 - RNA, 19 nt, Artificial Sequence
  Description of Artificial Sequence: Synthetic oligonucleotide
uugcaaagaauacgaaugg

SEQ ID NO: 2345996 - RNA, 19 nt, Artificial Sequence
  Description of Artificial Sequence: Synthetic oligonucleotide
guaauuuaaacugauugcc

SEQ ID NO: 2345997 - RNA, 19 nt, Artificial Sequence
  Description of Artificial Sequence: Synthetic oligonucleotide
aacauaccaaaaugcuagc

SEQ ID NO: 2345998 - RNA, 19 nt, Artificial Sequence
  Description of Artificial Sequence: Synthetic oligonucleotide
aaacugauugccaauaaug

SEQ ID NO: 2345999 - RNA, 19 nt, Artificial Sequence
  Description of Artificial Sequence: Synthetic oligonucleotide
caaauuuggaauauccuug

SEQ ID NO: 2346000 - RNA, 19 nt, Artificial Sequence
  Description of Artificial Sequence: Synthetic oligonucleotide
uuugaugacacaguaggag

SEQ ID NO: 2346001 - RNA, 19 nt, Artificial Sequence
  Description of Artificial Sequence: Synthetic oligonucleotide
auagaauuuauuuacuuua

SEQ ID NO: 2346002 - RNA, 19 nt, Artificial Sequence
  Description of Artificial Sequence: Synthetic oligonucleotide
uuauaaacgcuacaaacua

SEQ ID NO: 2346003 - RNA, 19 nt, Artificial Sequence
  Description of Artificial Sequence: Synthetic oligonucleotide
aggaaaugcagcgaggacc

SEQ ID NO: 2346004 - RNA, 19 nt, Artificial Sequence
  Description of Artificial Sequence: Synthetic oligonucleotide
ucuuuuaauacacuuguuu

SEQ ID NO: 2346005 - RNA, 19 nt, Artificial Sequence
  Description of Artificial Sequence: Synthetic oligonucleotide
augaaaauaucuuuuaaua

SEQ ID NO: 2346006 - RNA, 19 nt, Artificial Sequence
  Description of Artificial Sequence: Synthetic oligonucleotide
acugauugccaauaaugac

SEQ ID NO: 2346007 - RNA, 19 nt, Artificial Sequence
  Description of Artificial Sequence: Synthetic oligonucleotide
aaauagaauuuauuuacuu

SEQ ID NO: 2346008 - RNA, 19 nt, Artificial Sequence
  Description of Artificial Sequence: Synthetic oligonucleotide
aaguccucaguuugauucc

SEQ ID NO: 2346009 - RNA, 19 nt, Artificial Sequence
  Description of Artificial Sequence: Synthetic oligonucleotide
aaauuuggaauauccuugu

SEQ ID NO: 2346010 - RNA, 19 nt, Artificial Sequence
  Description of Artificial Sequence: Synthetic oligonucleotide
auuaauaguucacaggaaa

SEQ ID NO: 2346011 - RNA, 19 nt, Artificial Sequence
  Description of Artificial Sequence: Synthetic oligonucleotide
uuuuacuuuaccuuuucaa

SEQ ID NO: 2346012 - RNA, 19 nt, Artificial Sequence
  Description of Artificial Sequence: Synthetic oligonucleotide
aagcaguuagagcccagcc

SEQ ID NO: 2346013 - RNA, 19 nt, Artificial Sequence
  Description of Artificial Sequence: Synthetic oligonucleotide
uuacuuuaccuuuucaacu

SEQ ID NO: 2346014 - RNA, 19 nt, Artificial Sequence
  Description of Artificial Sequence: Synthetic oligonucleotide
gagucucauguuuuaaugg

SEQ ID NO: 2346015 - RNA, 19 nt, Artificial Sequence
  Description of Artificial Sequence: Synthetic oligonucleotide
uguuuaaggaucugauucc

SEQ ID NO: 2346016 - RNA, 19 nt, Artificial Sequence
  Description of Artificial Sequence: Synthetic oligonucleotide
caucucuaaaagcauaugc

SEQ ID NO: 2346017 - RNA, 19 nt, Artificial Sequence
  Description of Artificial Sequence: Synthetic oligonucleotide
aguaggagaacuuuuaaua

SEQ ID NO: 2346018 - RNA, 19 nt, Artificial Sequence
  Description of Artificial Sequence: Synthetic oligonucleotide
uauuugcucaugaucacug

SEQ ID NO: 2346019 - RNA, 19 nt, Artificial Sequence
  Description of Artificial Sequence: Synthetic oligonucleotide
aauacacuuguuuaacaau

SEQ ID NO: 2346020 - RNA, 19 nt, Artificial Sequence
  Description of Artificial Sequence: Synthetic oligonucleotide
uacuauauauaaguuaaca

SEQ ID NO: 2346021 - RNA, 19 nt, Artificial Sequence
  Description of Artificial Sequence: Synthetic oligonucleotide
aaguaucccaugcuugggg

SEQ ID NO: 2346022 - RNA, 19 nt, Artificial Sequence
  Description of Artificial Sequence: Synthetic oligonucleotide
uguagaguuauaaacgcua

SEQ ID NO: 2346023 - RNA, 19 nt, Artificial Sequence
  Description of Artificial Sequence: Synthetic oligonucleotide
uaaugaugcuacaaucugc

SEQ ID NO: 2346024 - RNA, 19 nt, Artificial Sequence
  Description of Artificial Sequence: Synthetic oligonucleotide
acuuguuuaacaaugagaa

SEQ ID NO: 2346025 - RNA, 19 nt, Artificial Sequence
  Description of Artificial Sequence: Synthetic oligonucleotide
gguaauuuaaacugauugc

SEQ ID NO: 2346026 - RNA, 19 nt, Artificial Sequence
  Description of Artificial Sequence: Synthetic oligonucleotide
uuuaauaccuaaugaugcu

SEQ ID NO: 2346027 - RNA, 19 nt, Artificial Sequence
  Description of Artificial Sequence: Synthetic oligonucleotide
accuaaugaugcuacaauc

SEQ ID NO: 2346028 - RNA, 19 nt, Artificial Sequence
  Description of Artificial Sequence: Synthetic oligonucleotide
uaccuguagaguuauaaac

SEQ ID NO: 2346029 - RNA, 19 nt, Artificial Sequence
  Description of Artificial Sequence: Synthetic oligonucleotide
aaugagaagcaccauuaau

SEQ ID NO: 2346030 - RNA, 19 nt, Artificial Sequence
  Description of Artificial Sequence: Synthetic oligonucleotide
aguaucccaugcuuggggc

SEQ ID NO: 2346031 - RNA, 19 nt, Artificial Sequence
  Description of Artificial Sequence: Synthetic oligonucleotide
uuuaaacucugauaccugu

SEQ ID NO: 2346032 - RNA, 19 nt, Artificial Sequence
  Description of Artificial Sequence: Synthetic oligonucleotide
uaauaccuaaugaugcuac

SEQ ID NO: 2346033 - RNA, 19 nt, Artificial Sequence
  Description of Artificial Sequence: Synthetic oligonucleotide
uuuaauacacuuguuuaac

SEQ ID NO: 2346034 - RNA, 19 nt, Artificial Sequence
  Description of Artificial Sequence: Synthetic oligonucleotide
aacaacugauacuuucucu

SEQ ID NO: 2346035 - RNA, 19 nt, Artificial Sequence
  Description of Artificial Sequence: Synthetic oligonucleotide
uggucaaaugcucaccaag

SEQ ID NO: 2346036 - RNA, 19 nt, Artificial Sequence
  Description of Artificial Sequence: Synthetic oligonucleotide
ugguaauacugaaucaucu

SEQ ID NO: 2346037 - RNA, 19 nt, Artificial Sequence
  Description of Artificial Sequence: Synthetic oligonucleotide
uauauaaguuaacaguguu

SEQ ID NO: 2346038 - RNA, 19 nt, Artificial Sequence
  Description of Artificial Sequence: Synthetic oligonucleotide
aaagcaguuagagcccagc

SEQ ID NO: 2346039 - RNA, 19 nt, Artificial Sequence
  Description of Artificial Sequence: Synthetic oligonucleotide
aucugauuccuuuucaugu

SEQ ID NO: 2346040 - RNA, 19 nt, Artificial Sequence
  Description of Artificial Sequence: Synthetic oligonucleotide
uuuggaauauccuuguauu

SEQ ID NO: 2346041 - RNA, 19 nt, Artificial Sequence
  Description of Artificial Sequence: Synthetic oligonucleotide
uuuaaugguaauacugaau

SEQ ID NO: 2346042 - RNA, 19 nt, Artificial Sequence
  Description of Artificial Sequence: Synthetic oligonucleotide
agugcuugcaaagaauacg

SEQ ID NO: 2346043 - RNA, 19 nt, Artificial Sequence
  Description of Artificial Sequence: Synthetic oligonucleotide
uuaauacacuuguuuaaca

SEQ ID NO: 2346044 - RNA, 19 nt, Artificial Sequence
  Description of Artificial Sequence: Synthetic oligonucleotide
aaugaugcuacaaucugcu

SEQ ID NO: 2346045 - RNA, 19 nt, Artificial Sequence
  Description of Artificial Sequence: Synthetic oligonucleotide
gugaguguuacccagcagc

SEQ ID NO: 2346046 - RNA, 19 nt, Artificial Sequence
  Description of Artificial Sequence: Synthetic oligonucleotide
uuaauaguucacaggaaau

SEQ ID NO: 2346047 - RNA, 19 nt, Artificial Sequence
  Description of Artificial Sequence: Synthetic oligonucleotide
ucaugaguguuaaguaucc

SEQ ID NO: 2346048 - RNA, 19 nt, Artificial Sequence
  Description of Artificial Sequence: Synthetic oligonucleotide
gaauguaaagacacuuggg

SEQ ID NO: 2346049 - RNA, 19 nt, Artificial Sequence
  Description of Artificial Sequence: Synthetic oligonucleotide
uaauaguucacaggaaaug

SEQ ID NO: 2346050 - RNA, 19 nt, Artificial Sequence
  Description of Artificial Sequence: Synthetic oligonucleotide
uaaguuaacaguguucuuc

SEQ ID NO: 2346051 - RNA, 19 nt, Artificial Sequence
  Description of Artificial Sequence: Synthetic oligonucleotide
uucaugaguguuaaguauc

SEQ ID NO: 2346052 - RNA, 19 nt, Artificial Sequence
  Description of Artificial Sequence: Synthetic oligonucleotide
uguuguuuggcauuaugaa

SEQ ID NO: 2346053 - RNA, 19 nt, Artificial Sequence
  Description of Artificial Sequence: Synthetic oligonucleotide
uuaccuuuucaacuuaauc

SEQ ID NO: 2346054 - RNA, 19 nt, Artificial Sequence
  Description of Artificial Sequence: Synthetic oligonucleotide
augggaaggagucucaugu

SEQ ID NO: 2346055 - RNA, 19 nt, Artificial Sequence
  Description of Artificial Sequence: Synthetic oligonucleotide
uuugguaauuuaaacugau

SEQ ID NO: 2346056 - RNA, 19 nt, Artificial Sequence
  Description of Artificial Sequence: Synthetic oligonucleotide
caaagaauacgaaugguga

SEQ ID NO: 2346057 - RNA, 19 nt, Artificial Sequence
  Description of Artificial Sequence: Synthetic oligonucleotide
ucaaaugcucaccaagcac

SEQ ID NO: 2346058 - RNA, 19 nt, Artificial Sequence
  Description of Artificial Sequence: Synthetic oligonucleotide
ucucauguuuuaaugguaa

SEQ ID NO: 2346059 - RNA, 19 nt, Artificial Sequence
  Description of Artificial Sequence: Synthetic oligonucleotide
aaaucaucugaaaaugaga

SEQ ID NO: 2346060 - RNA, 19 nt, Artificial Sequence
  Description of Artificial Sequence: Synthetic oligonucleotide
auuuggaauauccuuguau

SEQ ID NO: 2346061 - RNA, 19 nt, Artificial Sequence
  Description of Artificial Sequence: Synthetic oligonucleotide
cuaaugaugcuacaaucug

SEQ ID NO: 2346062 - RNA, 19 nt, Artificial Sequence
  Description of Artificial Sequence: Synthetic oligonucleotide
guaggagaacuuuuaauac

SEQ ID NO: 2346063 - RNA, 19 nt, Artificial Sequence
  Description of Artificial Sequence: Synthetic oligonucleotide
aacugauugccaauaauga

SEQ ID NO: 2346064 - RNA, 19 nt, Artificial Sequence
  Description of Artificial Sequence: Synthetic oligonucleotide
uuuugcuauuugcucauga

SEQ ID NO: 2346065 - RNA, 19 nt, Artificial Sequence
  Description of Artificial Sequence: Synthetic oligonucleotide
aagaauacgaauggugagu

SEQ ID NO: 2346066 - RNA, 19 nt, Artificial Sequence
  Description of Artificial Sequence: Synthetic oligonucleotide
gaaaaggaguacuuccaug

SEQ ID NO: 2346067 - RNA, 19 nt, Artificial Sequence
  Description of Artificial Sequence: Synthetic oligonucleotide
auggaaauacacggcagcc

SEQ ID NO: 2346068 - RNA, 19 nt, Artificial Sequence
  Description of Artificial Sequence: Synthetic oligonucleotide
uuucaugaguguuaaguau

SEQ ID NO: 2346069 - RNA, 19 nt, Artificial Sequence
  Description of Artificial Sequence: Synthetic oligonucleotide
auauaaguuaacaguguuc

SEQ ID NO: 2346070 - RNA, 19 nt, Artificial Sequence
  Description of Artificial Sequence: Synthetic oligonucleotide
augaguguuaaguauccca

SEQ ID NO: 2346071 - RNA, 19 nt, Artificial Sequence
  Description of Artificial Sequence: Synthetic oligonucleotide
uaaugguaauacugaauca

SEQ ID NO: 2346072 - RNA, 19 nt, Artificial Sequence
  Description of Artificial Sequence: Synthetic oligonucleotide
ugaggaguguagcucagug

SEQ ID NO: 2346073 - RNA, 19 nt, Artificial Sequence
  Description of Artificial Sequence: Synthetic oligonucleotide
ugauugccaauaaugacua

SEQ ID NO: 2346074 - RNA, 19 nt, Artificial Sequence
  Description of Artificial Sequence: Synthetic oligonucleotide
uguuaaguaucccaugcuu

SEQ ID NO: 2346075 - RNA, 19 nt, Artificial Sequence
  Description of Artificial Sequence: Synthetic oligonucleotide
acuuccauggaaauacacg

SEQ ID NO: 2346076 - RNA, 19 nt, Artificial Sequence
  Description of Artificial Sequence: Synthetic oligonucleotide
uacacuuguuuaacaauga

SEQ ID NO: 2346077 - RNA, 19 nt, Artificial Sequence
  Description of Artificial Sequence: Synthetic oligonucleotide
uagucaacaacugauacuu

SEQ ID NO: 2346078 - RNA, 19 nt, Artificial Sequence
  Description of Artificial Sequence: Synthetic oligonucleotide
agucucauguuuuaauggu

SEQ ID NO: 2346079 - RNA, 19 nt, Artificial Sequence
  Description of Artificial Sequence: Synthetic oligonucleotide
aauaccuaaugaugcuaca

SEQ ID NO: 2346080 - RNA, 19 nt, Artificial Sequence
  Description of Artificial Sequence: Synthetic oligonucleotide
ugacuugagaaaaggagua

SEQ ID NO: 2346081 - RNA, 19 nt, Artificial Sequence
  Description of Artificial Sequence: Synthetic oligonucleotide
ucucagugcagguuuaaac

SEQ ID NO: 2346082 - RNA, 19 nt, Artificial Sequence
  Description of Artificial Sequence: Synthetic oligonucleotide
uauaaacgcuacaaacuaa

SEQ ID NO: 2346083 - RNA, 19 nt, Artificial Sequence
  Description of Artificial Sequence: Synthetic oligonucleotide
ugaucacuggaccacuaug

SEQ ID NO: 2346084 - RNA, 19 nt, Artificial Sequence
  Description of Artificial Sequence: Synthetic oligonucleotide
aaugggaaggagucucaug

SEQ ID NO: 2346085 - RNA, 19 nt, Artificial Sequence
  Description of Artificial Sequence: Synthetic oligonucleotide
cuuuuaauacacuuguuua

SEQ ID NO: 2346086 - RNA, 19 nt, Artificial Sequence
  Description of Artificial Sequence: Synthetic oligonucleotide
agaaguagucaacaacuga

SEQ ID NO: 2346087 - RNA, 19 nt, Artificial Sequence
  Description of Artificial Sequence: Synthetic oligonucleotide
aacucccuuaacugaaugu

SEQ ID NO: 2346088 - RNA, 19 nt, Artificial Sequence
  Description of Artificial Sequence: Synthetic oligonucleotide
acacuugggugaucaaagc

SEQ ID NO: 2346089 - RNA, 19 nt, Artificial Sequence
  Description of Artificial Sequence: Synthetic oligonucleotide
agaguuauaaacgcuacaa

SEQ ID NO: 2346090 - RNA, 19 nt, Artificial Sequence
  Description of Artificial Sequence: Synthetic oligonucleotide
auaucuuuuaauacacuug

SEQ ID NO: 2346091 - RNA, 19 nt, Artificial Sequence
  Description of Artificial Sequence: Synthetic oligonucleotide
aaacucccuuaacugaaug

SEQ ID NO: 2346092 - RNA, 19 nt, Artificial Sequence
  Description of Artificial Sequence: Synthetic oligonucleotide
uaaacgcuacaaacuaaug

SEQ ID NO: 2346093 - RNA, 19 nt, Artificial Sequence
  Description of Artificial Sequence: Synthetic oligonucleotide
auacacuuguuuaacaaug

SEQ ID NO: 2346094 - RNA, 19 nt, Artificial Sequence
  Description of Artificial Sequence: Synthetic oligonucleotide
accacuauguuguuuggca

SEQ ID NO: 2346095 - RNA, 19 nt, Artificial Sequence
  Description of Artificial Sequence: Synthetic oligonucleotide
cugaauguaaagacacuug

SEQ ID NO: 2346096 - RNA, 19 nt, Artificial Sequence
  Description of Artificial Sequence: Synthetic oligonucleotide
uuaaggaucugauuccuuu

SEQ ID NO: 2346097 - RNA, 19 nt, Artificial Sequence
  Description of Artificial Sequence: Synthetic oligonucleotide
uaaacugauugccaauaau

SEQ ID NO: 2346098 - RNA, 19 nt, Artificial Sequence
  Description of Artificial Sequence: Synthetic oligonucleotide
acaacugauacuuucucuu

SEQ ID NO: 2346099 - RNA, 19 nt, Artificial Sequence
  Description of Artificial Sequence: Synthetic oligonucleotide
uuaaacugauugccaauaa

SEQ ID NO: 2346100 - RNA, 19 nt, Artificial Sequence
  Description of Artificial Sequence: Synthetic oligonucleotide
auguacuauauauaaguua

SEQ ID NO: 2346101 - RNA, 19 nt, Artificial Sequence
  Description of Artificial Sequence: Synthetic oligonucleotide
uuggcauuaugaaaauauc

SEQ ID NO: 2346102 - RNA, 19 nt, Artificial Sequence
  Description of Artificial Sequence: Synthetic oligonucleotide
uucuucauaaacucccuua

SEQ ID NO: 2346103 - RNA, 19 nt, Artificial Sequence
  Description of Artificial Sequence: Synthetic oligonucleotide
ugaguguuacccagcagcu

SEQ ID NO: 2346104 - RNA, 19 nt, Artificial Sequence
  Description of Artificial Sequence: Synthetic oligonucleotide
ucucuuuauggcuccaaac

SEQ ID NO: 2346105 - RNA, 19 nt, Artificial Sequence
  Description of Artificial Sequence: Synthetic oligonucleotide
uagaguuauaaacgcuaca

SEQ ID NO: 2346106 - RNA, 19 nt, Artificial Sequence
  Description of Artificial Sequence: Synthetic oligonucleotide
aaaggaguacuuccaugga

SEQ ID NO: 2346107 - RNA, 19 nt, Artificial Sequence
  Description of Artificial Sequence: Synthetic oligonucleotide
aaaaugcuagcaagcagug

SEQ ID NO: 2346108 - RNA, 19 nt, Artificial Sequence
  Description of Artificial Sequence: Synthetic oligonucleotide
aucugaaaaugagaagcac

SEQ ID NO: 2346109 - RNA, 19 nt, Artificial Sequence
  Description of Artificial Sequence: Synthetic oligonucleotide
uugcucaugaucacuggac

SEQ ID NO: 2346110 - RNA, 19 nt, Artificial Sequence
  Description of Artificial Sequence: Synthetic oligonucleotide
cuagcagcuuugaugacac

SEQ ID NO: 2346111 - RNA, 19 nt, Artificial Sequence
  Description of Artificial Sequence: Synthetic oligonucleotide
uaauugcucauuucaccug

SEQ ID NO: 2346112 - RNA, 19 nt, Artificial Sequence
  Description of Artificial Sequence: Synthetic oligonucleotide
caccauuaauaguucacag

SEQ ID NO: 2346113 - RNA, 19 nt, Artificial Sequence
  Description of Artificial Sequence: Synthetic oligonucleotide
agcagcuuugaugacacag

SEQ ID NO: 2346114 - RNA, 19 nt, Artificial Sequence
  Description of Artificial Sequence: Synthetic oligonucleotide
uacaaacuaaugaaacauu

SEQ ID NO: 2346115 - RNA, 19 nt, Artificial Sequence
  Description of Artificial Sequence: Synthetic oligonucleotide
uacuuucucuuuauggcuc

SEQ ID NO: 2346116 - RNA, 19 nt, Artificial Sequence
  Description of Artificial Sequence: Synthetic oligonucleotide
ggaaauacacggcagcccc

SEQ ID NO: 2346117 - RNA, 19 nt, Artificial Sequence
  Description of Artificial Sequence: Synthetic oligonucleotide
uaccuaaugaugcuacaau

SEQ ID NO: 2346118 - RNA, 19 nt, Artificial Sequence
  Description of Artificial Sequence: Synthetic oligonucleotide
aaugcagcgaggacccaac

SEQ ID NO: 2346119 - RNA, 19 nt, Artificial Sequence
  Description of Artificial Sequence: Synthetic oligonucleotide
augcuaaguccucaguuug

SEQ ID NO: 2346120 - RNA, 19 nt, Artificial Sequence
  Description of Artificial Sequence: Synthetic oligonucleotide
ucugauaccuguagaguua

SEQ ID NO: 2346121 - RNA, 19 nt, Artificial Sequence
  Description of Artificial Sequence: Synthetic oligonucleotide
augacuugagaaaaggagu

SEQ ID NO: 2346122 - RNA, 19 nt, Artificial Sequence
  Description of Artificial Sequence: Synthetic oligonucleotide
uacuuuaccuuuucaacuu

SEQ ID NO: 2346123 - RNA, 19 nt, Artificial Sequence
  Description of Artificial Sequence: Synthetic oligonucleotide
aacugauacuuucucuuua

SEQ ID NO: 2346124 - RNA, 19 nt, Artificial Sequence
  Description of Artificial Sequence: Synthetic oligonucleotide
gauaccuguagaguuauaa

SEQ ID NO: 2346125 - RNA, 19 nt, Artificial Sequence
  Description of Artificial Sequence: Synthetic oligonucleotide
auuuaaacugauugccaau

SEQ ID NO: 2346126 - RNA, 19 nt, Artificial Sequence
  Description of Artificial Sequence: Synthetic oligonucleotide
ugcagguuuaaacucugau

SEQ ID NO: 2346127 - RNA, 19 nt, Artificial Sequence
  Description of Artificial Sequence: Synthetic oligonucleotide
aguguuacccagcagcuuu

SEQ ID NO: 2346128 - RNA, 19 nt, Artificial Sequence
  Description of Artificial Sequence: Synthetic oligonucleotide
caguguucuucauaaacuc

SEQ ID NO: 2346129 - RNA, 19 nt, Artificial Sequence
  Description of Artificial Sequence: Synthetic oligonucleotide
aaauaucuuuuaauacacu

SEQ ID NO: 2346130 - RNA, 19 nt, Artificial Sequence
  Description of Artificial Sequence: Synthetic oligonucleotide
ugcagcgaggacccaacag

SEQ ID NO: 2346131 - RNA, 19 nt, Artificial Sequence
  Description of Artificial Sequence: Synthetic oligonucleotide
ucccuuaacugaauguaaa

SEQ ID NO: 2346132 - RNA, 19 nt, Artificial Sequence
  Description of Artificial Sequence: Synthetic oligonucleotide
uuaaacucugauaccugua

SEQ ID NO: 2346133 - RNA, 19 nt, Artificial Sequence
  Description of Artificial Sequence: Synthetic oligonucleotide
auauauaaguuaacagugu

SEQ ID NO: 2346134 - RNA, 19 nt, Artificial Sequence
  Description of Artificial Sequence: Synthetic oligonucleotide
guuauaaacgcuacaaacu

SEQ ID NO: 2346135 - RNA, 19 nt, Artificial Sequence
  Description of Artificial Sequence: Synthetic oligonucleotide
augguaauacugaaucauc

SEQ ID NO: 2346136 - RNA, 19 nt, Artificial Sequence
  Description of Artificial Sequence: Synthetic oligonucleotide
aagcaccauuaauaguuca

SEQ ID NO: 2346137 - RNA, 19 nt, Artificial Sequence
  Description of Artificial Sequence: Synthetic oligonucleotide
uuaauaccuaaugaugcua

SEQ ID NO: 2346138 - RNA, 19 nt, Artificial Sequence
  Description of Artificial Sequence: Synthetic oligonucleotide
ccuguagaguuauaaacgc

SEQ ID NO: 2346139 - RNA, 19 nt, Artificial Sequence
  Description of Artificial Sequence: Synthetic oligonucleotide
ucaguggucaaaugcucac

SEQ ID NO: 2346140 - RNA, 19 nt, Artificial Sequence
  Description of Artificial Sequence: Synthetic oligonucleotide
acuugagaaaaggaguacu

SEQ ID NO: 2346141 - RNA, 19 nt, Artificial Sequence
  Description of Artificial Sequence: Synthetic oligonucleotide
agaaaaggaguacuuccau

SEQ ID NO: 2346142 - RNA, 19 nt, Artificial Sequence
  Description of Artificial Sequence: Synthetic oligonucleotide
gggugaucaaagcaguuag

SEQ ID NO: 2346143 - RNA, 19 nt, Artificial Sequence
  Description of Artificial Sequence: Synthetic oligonucleotide
ucaccugcuguuuaaggau

SEQ ID NO: 2346144 - RNA, 19 nt, Artificial Sequence
  Description of Artificial Sequence: Synthetic oligonucleotide
gaugcuacaaucugcuccu

SEQ ID NO: 2346145 - RNA, 19 nt, Artificial Sequence
  Description of Artificial Sequence: Synthetic oligonucleotide
ccauuaauaguucacagga

SEQ ID NO: 2346146 - RNA, 19 nt, Artificial Sequence
  Description of Artificial Sequence: Synthetic oligonucleotide
uccucaguuugauucccag

SEQ ID NO: 2346147 - RNA, 19 nt, Artificial Sequence
  Description of Artificial Sequence: Synthetic oligonucleotide
cagaaguagucaacaacug

SEQ ID NO: 2346148 - RNA, 19 nt, Artificial Sequence
  Description of Artificial Sequence: Synthetic oligonucleotide
acugauacuuucucuuuau

SEQ ID NO: 2346149 - RNA, 19 nt, Artificial Sequence
  Description of Artificial Sequence: Synthetic oligonucleotide
auaaacgcuacaaacuaau

SEQ ID NO: 2346150 - RNA, 19 nt, Artificial Sequence
  Description of Artificial Sequence: Synthetic oligonucleotide
uugagaaaaggaguacuuc

SEQ ID NO: 2346151 - RNA, 19 nt, Artificial Sequence
  Description of Artificial Sequence: Synthetic oligonucleotide
auaaugacuagcagcuuug

SEQ ID NO: 2346152 - RNA, 19 nt, Artificial Sequence
  Description of Artificial Sequence: Synthetic oligonucleotide
agcaguuagagcccagccu

SEQ ID NO: 2346153 - RNA, 19 nt, Artificial Sequence
  Description of Artificial Sequence: Synthetic oligonucleotide
uggaaauacacggcagccc

SEQ ID NO: 2346154 - RNA, 19 nt, Artificial Sequence
  Description of Artificial Sequence: Synthetic oligonucleotide
acaugcuaaguccucaguu

SEQ ID NO: 2346155 - RNA, 19 nt, Artificial Sequence
  Description of Artificial Sequence: Synthetic oligonucleotide
auguuguuuggcauuauga

SEQ ID NO: 2346156 - RNA, 19 nt, Artificial Sequence
  Description of Artificial Sequence: Synthetic oligonucleotide
gcaguuagagcccagccug

SEQ ID NO: 2346157 - RNA, 19 nt, Artificial Sequence
  Description of Artificial Sequence: Synthetic oligonucleotide
agaacuuuuaauaccuaau

SEQ ID NO: 2346158 - RNA, 19 nt, Artificial Sequence
  Description of Artificial Sequence: Synthetic oligonucleotide
uggugaguguuacccagca

SEQ ID NO: 2346159 - RNA, 19 nt, Artificial Sequence
  Description of Artificial Sequence: Synthetic oligonucleotide
gaguuauaaacgcuacaaa

SEQ ID NO: 2346160 - RNA, 19 nt, Artificial Sequence
  Description of Artificial Sequence: Synthetic oligonucleotide
uucucuuuauggcuccaaa

SEQ ID NO: 2346161 - RNA, 19 nt, Artificial Sequence
  Description of Artificial Sequence: Synthetic oligonucleotide
gcaaagaauacgaauggug

SEQ ID NO: 2346162 - RNA, 19 nt, Artificial Sequence
  Description of Artificial Sequence: Synthetic oligonucleotide
aauuuggaauauccuugua

SEQ ID NO: 2346163 - RNA, 19 nt, Artificial Sequence
  Description of Artificial Sequence: Synthetic oligonucleotide
ugcaaagaauacgaauggu

SEQ ID NO: 2346164 - RNA, 19 nt, Artificial Sequence
  Description of Artificial Sequence: Synthetic oligonucleotide
caucugaaaaugagaagca

SEQ ID NO: 2346165 - RNA, 19 nt, Artificial Sequence
  Description of Artificial Sequence: Synthetic oligonucleotide
aguccucaguuugauuccc

SEQ ID NO: 2346166 - RNA, 19 nt, Artificial Sequence
  Description of Artificial Sequence: Synthetic oligonucleotide
ugcuaaguccucaguuuga

SEQ ID NO: 2346167 - RNA, 19 nt, Artificial Sequence
  Description of Artificial Sequence: Synthetic oligonucleotide
gaaguagucaacaacugau

SEQ ID NO: 2346168 - RNA, 19 nt, Artificial Sequence
  Description of Artificial Sequence: Synthetic oligonucleotide
caugcuuggggcugaggag

SEQ ID NO: 2346169 - RNA, 19 nt, Artificial Sequence
  Description of Artificial Sequence: Synthetic oligonucleotide
ucaucucuaaaagcauaug

SEQ ID NO: 2346170 - RNA, 19 nt, Artificial Sequence
  Description of Artificial Sequence: Synthetic oligonucleotide
uugguaauuuaaacugauu

SEQ ID NO: 2346171 - RNA, 19 nt, Artificial Sequence
  Description of Artificial Sequence: Synthetic oligonucleotide
cuggcaaagaaugacuuga

SEQ ID NO: 2346172 - RNA, 19 nt, Artificial Sequence
  Description of Artificial Sequence: Synthetic oligonucleotide
aguuagagcccagccuggc

SEQ ID NO: 2346173 - RNA, 19 nt, Artificial Sequence
  Description of Artificial Sequence: Synthetic oligonucleotide
uucacaggaaaugcagcga

SEQ ID NO: 2346174 - RNA, 19 nt, Artificial Sequence
  Description of Artificial Sequence: Synthetic oligonucleotide
guagaguuauaaacgcuac

SEQ ID NO: 2346175 - RNA, 19 nt, Artificial Sequence
  Description of Artificial Sequence: Synthetic oligonucleotide
gucaaaugcucaccaagca

SEQ ID NO: 2346176 - RNA, 19 nt, Artificial Sequence
  Description of Artificial Sequence: Synthetic oligonucleotide
guuuaaacucugauaccug

SEQ ID NO: 2346177 - RNA, 19 nt, Artificial Sequence
  Description of Artificial Sequence: Synthetic oligonucleotide
uuauggcuccaaacauacc

SEQ ID NO: 2346178 - RNA, 19 nt, Artificial Sequence
  Description of Artificial Sequence: Synthetic oligonucleotide
ucaaagcaguuagagccca

SEQ ID NO: 2346179 - RNA, 19 nt, Artificial Sequence
  Description of Artificial Sequence: Synthetic oligonucleotide
auaguucacaggaaaugca

SEQ ID NO: 2346180 - RNA, 19 nt, Artificial Sequence
  Description of Artificial Sequence: Synthetic oligonucleotide
cucaugaucacuggaccac

SEQ ID NO: 2346181 - RNA, 19 nt, Artificial Sequence
  Description of Artificial Sequence: Synthetic oligonucleotide
gaauggugaguguuaccca

SEQ ID NO: 2346182 - RNA, 19 nt, Artificial Sequence
  Description of Artificial Sequence: Synthetic oligonucleotide
aggagucucauguuuuaau

SEQ ID NO: 2346183 - RNA, 19 nt, Artificial Sequence
  Description of Artificial Sequence: Synthetic oligonucleotide
uacgaauggugaguguuac

SEQ ID NO: 2346184 - RNA, 19 nt, Artificial Sequence
  Description of Artificial Sequence: Synthetic oligonucleotide
cucagugcagguuuaaacu

SEQ ID NO: 2346185 - RNA, 19 nt, Artificial Sequence
  Description of Artificial Sequence: Synthetic oligonucleotide
cucaccaagcacaugcuaa

SEQ ID NO: 2346186 - RNA, 19 nt, Artificial Sequence
  Description of Artificial Sequence: Synthetic oligonucleotide
auacugaaucaucucuaaa

SEQ ID NO: 2346187 - RNA, 19 nt, Artificial Sequence
  Description of Artificial Sequence: Synthetic oligonucleotide
auaccuaaugaugcuacaa

SEQ ID NO: 2346188 - RNA, 19 nt, Artificial Sequence
  Description of Artificial Sequence: Synthetic oligonucleotide
ggucaaaugcucaccaagc

SEQ ID NO: 2346189 - RNA, 19 nt, Artificial Sequence
  Description of Artificial Sequence: Synthetic oligonucleotide
acauaccaaaaugcuagca

SEQ ID NO: 2346190 - RNA, 19 nt, Artificial Sequence
  Description of Artificial Sequence: Synthetic oligonucleotide
ugcuugcaaagaauacgaa

SEQ ID NO: 2346191 - RNA, 19 nt, Artificial Sequence
  Description of Artificial Sequence: Synthetic oligonucleotide
uaucccaugcuuggggcug

SEQ ID NO: 2346192 - RNA, 19 nt, Artificial Sequence
  Description of Artificial Sequence: Synthetic oligonucleotide
gacuugagaaaaggaguac

SEQ ID NO: 2346193 - RNA, 19 nt, Artificial Sequence
  Description of Artificial Sequence: Synthetic oligonucleotide
aaaugcagcgaggacccaa

SEQ ID NO: 2346194 - RNA, 19 nt, Artificial Sequence
  Description of Artificial Sequence: Synthetic oligonucleotide
aaguagucaacaacugaua

SEQ ID NO: 2346195 - RNA, 19 nt, Artificial Sequence
  Description of Artificial Sequence: Synthetic oligonucleotide
cuuuauggcuccaaacaua

SEQ ID NO: 2346196 - RNA, 19 nt, Artificial Sequence
  Description of Artificial Sequence: Synthetic oligonucleotide
aucaucucuaaaagcauau

SEQ ID NO: 2346197 - RNA, 19 nt, Artificial Sequence
  Description of Artificial Sequence: Synthetic oligonucleotide
gacccaacagaaguaguca

SEQ ID NO: 2346198 - RNA, 19 nt, Artificial Sequence
  Description of Artificial Sequence: Synthetic oligonucleotide
cacuggaccacuauguugu

SEQ ID NO: 2346199 - RNA, 19 nt, Artificial Sequence
  Description of Artificial Sequence: Synthetic oligonucleotide
aagcacaugcuaaguccuc

SEQ ID NO: 2346200 - RNA, 19 nt, Artificial Sequence
  Description of Artificial Sequence: Synthetic oligonucleotide
guagucaacaacugauacu

SEQ ID NO: 2346201 - RNA, 19 nt, Artificial Sequence
  Description of Artificial Sequence: Synthetic oligonucleotide
acucccuuaacugaaugua

SEQ ID NO: 2346202 - RNA, 19 nt, Artificial Sequence
  Description of Artificial Sequence: Synthetic oligonucleotide
cauuaauaguucacaggaa

SEQ ID NO: 2346203 - RNA, 19 nt, Artificial Sequence
  Description of Artificial Sequence: Synthetic oligonucleotide
gguuucaugaguguuaagu

SEQ ID NO: 2346204 - RNA, 19 nt, Artificial Sequence
  Description of Artificial Sequence: Synthetic oligonucleotide
aaaugggaaggagucucau

SEQ ID NO: 2346205 - RNA, 19 nt, Artificial Sequence
  Description of Artificial Sequence: Synthetic oligonucleotide
uagcaagcagugcuugcaa

SEQ ID NO: 2346206 - RNA, 19 nt, Artificial Sequence
  Description of Artificial Sequence: Synthetic oligonucleotide
agcuuugaugacacaguag

SEQ ID NO: 2346207 - RNA, 19 nt, Artificial Sequence
  Description of Artificial Sequence: Synthetic oligonucleotide
ugggugaucaaagcaguua

SEQ ID NO: 2346208 - RNA, 19 nt, Artificial Sequence
  Description of Artificial Sequence: Synthetic oligonucleotide
uaaugacuagcagcuuuga

SEQ ID NO: 2346209 - RNA, 19 nt, Artificial Sequence
  Description of Artificial Sequence: Synthetic oligonucleotide
gaagcaccauuaauaguuc

SEQ ID NO: 2346210 - RNA, 19 nt, Artificial Sequence
  Description of Artificial Sequence: Synthetic oligonucleotide
cucaguggucaaaugcuca

SEQ ID NO: 2346211 - RNA, 19 nt, Artificial Sequence
  Description of Artificial Sequence: Synthetic oligonucleotide
auuccuuuucauguacuau

SEQ ID NO: 2346212 - RNA, 19 nt, Artificial Sequence
  Description of Artificial Sequence: Synthetic oligonucleotide
cgaauggugaguguuaccc

SEQ ID NO: 2346213 - RNA, 19 nt, Artificial Sequence
  Description of Artificial Sequence: Synthetic oligonucleotide
guagcucaguggucaaaug

SEQ ID NO: 2346214 - RNA, 19 nt, Artificial Sequence
  Description of Artificial Sequence: Synthetic oligonucleotide
gaccacuauguuguuuggc

SEQ ID NO: 2346215 - RNA, 19 nt, Artificial Sequence
  Description of Artificial Sequence: Synthetic oligonucleotide
cacuugggugaucaaagca

SEQ ID NO: 2346216 - RNA, 19 nt, Artificial Sequence
  Description of Artificial Sequence: Synthetic oligonucleotide
caugaguguuaaguauccc

SEQ ID NO: 2346217 - RNA, 19 nt, Artificial Sequence
  Description of Artificial Sequence: Synthetic oligonucleotide
acuauguuguuuggcauua

SEQ ID NO: 2346218 - RNA, 19 nt, Artificial Sequence
  Description of Artificial Sequence: Synthetic oligonucleotide
auaaguuaacaguguucuu

SEQ ID NO: 2346219 - RNA, 19 nt, Artificial Sequence
  Description of Artificial Sequence: Synthetic oligonucleotide
acccaacagaaguagucaa

SEQ ID NO: 2346220 - RNA, 19 nt, Artificial Sequence
  Description of Artificial Sequence: Synthetic oligonucleotide
ugcuagcaagcagugcuug

SEQ ID NO: 2346221 - RNA, 19 nt, Artificial Sequence
  Description of Artificial Sequence: Synthetic oligonucleotide
uaggugguuucaugagugu

SEQ ID NO: 2346222 - RNA, 19 nt, Artificial Sequence
  Description of Artificial Sequence: Synthetic oligonucleotide
guacuauauauaaguuaac

SEQ ID NO: 2346223 - RNA, 19 nt, Artificial Sequence
  Description of Artificial Sequence: Synthetic oligonucleotide
cuuuaccuuuucaacuuaa

SEQ ID NO: 2346224 - RNA, 19 nt, Artificial Sequence
  Description of Artificial Sequence: Synthetic oligonucleotide
gaaggagucucauguuuua

SEQ ID NO: 2346225 - RNA, 19 nt, Artificial Sequence
  Description of Artificial Sequence: Synthetic oligonucleotide
uggcuccaaacauaccaaa

SEQ ID NO: 2346226 - RNA, 19 nt, Artificial Sequence
  Description of Artificial Sequence: Synthetic oligonucleotide
aaggagucucauguuuuaa

SEQ ID NO: 2346227 - RNA, 19 nt, Artificial Sequence
  Description of Artificial Sequence: Synthetic oligonucleotide
augaucacuggaccacuau

SEQ ID NO: 2346228 - RNA, 19 nt, Artificial Sequence
  Description of Artificial Sequence: Synthetic oligonucleotide
aucacuggaccacuauguu

SEQ ID NO: 2346229 - RNA, 19 nt, Artificial Sequence
  Description of Artificial Sequence: Synthetic oligonucleotide
cccuuaacugaauguaaag

SEQ ID NO: 2346230 - RNA, 19 nt, Artificial Sequence
  Description of Artificial Sequence: Synthetic oligonucleotide
uaacaguguucuucauaaa

SEQ ID NO: 2346231 - RNA, 19 nt, Artificial Sequence
  Description of Artificial Sequence: Synthetic oligonucleotide
agugcagguuuaaacucug

SEQ ID NO: 2346232 - RNA, 19 nt, Artificial Sequence
  Description of Artificial Sequence: Synthetic oligonucleotide
caccugcuguuuaaggauc

SEQ ID NO: 2346233 - RNA, 19 nt, Artificial Sequence
  Description of Artificial Sequence: Synthetic oligonucleotide
agcacaugcuaaguccuca

SEQ ID NO: 2346234 - RNA, 19 nt, Artificial Sequence
  Description of Artificial Sequence: Synthetic oligonucleotide
caggaaaugcagcgaggac

SEQ ID NO: 2346235 - RNA, 19 nt, Artificial Sequence
  Description of Artificial Sequence: Synthetic oligonucleotide
agcaagcagugcuugcaaa

SEQ ID NO: 2346236 - RNA, 19 nt, Artificial Sequence
  Description of Artificial Sequence: Synthetic oligonucleotide
ugguuucaugaguguuaag

SEQ ID NO: 2346237 - RNA, 19 nt, Artificial Sequence
  Description of Artificial Sequence: Synthetic oligonucleotide
cuagcaagcagugcuugca

SEQ ID NO: 2346238 - RNA, 19 nt, Artificial Sequence
  Description of Artificial Sequence: Synthetic oligonucleotide
ccauggaaauacacggcag

SEQ ID NO: 2346239 - RNA, 19 nt, Artificial Sequence
  Description of Artificial Sequence: Synthetic oligonucleotide
cauguacuauauauaaguu

SEQ ID NO: 2346240 - RNA, 19 nt, Artificial Sequence
  Description of Artificial Sequence: Synthetic oligonucleotide
cucccuuaacugaauguaa

SEQ ID NO: 2346241 - RNA, 19 nt, Artificial Sequence
  Description of Artificial Sequence: Synthetic oligonucleotide
gcuauuugcucaugaucac

SEQ ID NO: 2346242 - RNA, 19 nt, Artificial Sequence
  Description of Artificial Sequence: Synthetic oligonucleotide
cuugggugaucaaagcagu

SEQ ID NO: 2346243 - RNA, 19 nt, Artificial Sequence
  Description of Artificial Sequence: Synthetic oligonucleotide
caagcacaugcuaaguccu

SEQ ID NO: 2346244 - RNA, 19 nt, Artificial Sequence
  Description of Artificial Sequence: Synthetic oligonucleotide
cuugagaaaaggaguacuu

SEQ ID NO: 2346245 - RNA, 19 nt, Artificial Sequence
  Description of Artificial Sequence: Synthetic oligonucleotide
ggaccacuauguuguuugg

SEQ ID NO: 2346246 - RNA, 19 nt, Artificial Sequence
  Description of Artificial Sequence: Synthetic oligonucleotide
ccuuaacugaauguaaaga

SEQ ID NO: 2346247 - RNA, 19 nt, Artificial Sequence
  Description of Artificial Sequence: Synthetic oligonucleotide
caagcagugcuugcaaaga

SEQ ID NO: 2346248 - RNA, 19 nt, Artificial Sequence
  Description of Artificial Sequence: Synthetic oligonucleotide
agccuggcaaagaaugacu

SEQ ID NO: 2346249 - RNA, 19 nt, Artificial Sequence
  Description of Artificial Sequence: Synthetic oligonucleotide
ccuaaugaugcuacaaucu

SEQ ID NO: 2346250 - RNA, 19 nt, Artificial Sequence
  Description of Artificial Sequence: Synthetic oligonucleotide
cucugauaccuguagaguu

SEQ ID NO: 2346251 - RNA, 19 nt, Artificial Sequence
  Description of Artificial Sequence: Synthetic oligonucleotide
ccaaacauaccaaaaugcu

SEQ ID NO: 2346252 - RNA, 19 nt, Artificial Sequence
  Description of Artificial Sequence: Synthetic oligonucleotide
acgcuacaaacuaaugaaa

SEQ ID NO: 2346253 - RNA, 19 nt, Artificial Sequence
  Description of Artificial Sequence: Synthetic oligonucleotide
cuguagaguuauaaacgcu

SEQ ID NO: 2346254 - RNA, 19 nt, Artificial Sequence
  Description of Artificial Sequence: Synthetic oligonucleotide
guguuaaguaucccaugcu

SEQ ID NO: 2346255 - RNA, 19 nt, Artificial Sequence
  Description of Artificial Sequence: Synthetic oligonucleotide
gaauacgaauggugagugu

SEQ ID NO: 2346256 - RNA, 19 nt, Artificial Sequence
  Description of Artificial Sequence: Synthetic oligonucleotide
caugcuaaguccucaguuu

SEQ ID NO: 2346257 - RNA, 19 nt, Artificial Sequence
  Description of Artificial Sequence: Synthetic oligonucleotide
cccaacagaaguagucaac

SEQ ID NO: 2346258 - RNA, 19 nt, Artificial Sequence
  Description of Artificial Sequence: Synthetic oligonucleotide
ggugaguguuacccagcag

SEQ ID NO: 2346259 - RNA, 19 nt, Artificial Sequence
  Description of Artificial Sequence: Synthetic oligonucleotide
auacgaauggugaguguua

SEQ ID NO: 2346260 - RNA, 19 nt, Artificial Sequence
  Description of Artificial Sequence: Synthetic oligonucleotide
ccaacagaaguagucaaca

SEQ ID NO: 2346261 - RNA, 19 nt, Artificial Sequence
  Description of Artificial Sequence: Synthetic oligonucleotide
cagcuuugaugacacagua

SEQ ID NO: 2346262 - RNA, 19 nt, Artificial Sequence
  Description of Artificial Sequence: Synthetic oligonucleotide
gcuugcaaagaauacgaau

SEQ ID NO: 2346263 - RNA, 19 nt, Artificial Sequence
  Description of Artificial Sequence: Synthetic oligonucleotide
caguaggagaacuuuuaau

SEQ ID NO: 2346264 - RNA, 19 nt, Artificial Sequence
  Description of Artificial Sequence: Synthetic oligonucleotide
ugauaccuguagaguuaua

SEQ ID NO: 2346265 - RNA, 19 nt, Artificial Sequence
  Description of Artificial Sequence: Synthetic oligonucleotide
cagcgaggacccaacagaa

SEQ ID NO: 2346266 - RNA, 19 nt, Artificial Sequence
  Description of Artificial Sequence: Synthetic oligonucleotide
agcgaggacccaacagaag

SEQ ID NO: 2346267 - RNA, 19 nt, Artificial Sequence
  Description of Artificial Sequence: Synthetic oligonucleotide
aggugguuucaugaguguu

SEQ ID NO: 2346268 - RNA, 19 nt, Artificial Sequence
  Description of Artificial Sequence: Synthetic oligonucleotide
gcgaggacccaacagaagu

SEQ ID NO: 2346269 - RNA, 19 nt, Artificial Sequence
  Description of Artificial Sequence: Synthetic oligonucleotide
auugcucauuucaccugcu

SEQ ID NO: 2346270 - RNA, 19 nt, Artificial Sequence
  Description of Artificial Sequence: Synthetic oligonucleotide
ugcuccuaggugguuucau

SEQ ID NO: 2346271 - RNA, 19 nt, Artificial Sequence
  Description of Artificial Sequence: Synthetic oligonucleotide
augcagcgaggacccaaca

SEQ ID NO: 2346272 - RNA, 19 nt, Artificial Sequence
  Description of Artificial Sequence: Synthetic oligonucleotide
ccccagaucucagugcagg

SEQ ID NO: 2346273 - RNA, 19 nt, Artificial Sequence
  Description of Artificial Sequence: Synthetic oligonucleotide
cagaucucagugcagguuu

SEQ ID NO: 2346274 - RNA, 19 nt, Artificial Sequence
  Description of Artificial Sequence: Synthetic oligonucleotide
aggacccaacagaaguagu

SEQ ID NO: 2346275 - RNA, 19 nt, Artificial Sequence
  Description of Artificial Sequence: Synthetic oligonucleotide
gaucucagugcagguuuaa

SEQ ID NO: 2346276 - RNA, 19 nt, Artificial Sequence
  Description of Artificial Sequence: Synthetic oligonucleotide
guaucccaugcuuggggcu

SEQ ID NO: 2346277 - RNA, 19 nt, Artificial Sequence
  Description of Artificial Sequence: Synthetic oligonucleotide
uagcagcuuugaugacaca

SEQ ID NO: 2346278 - RNA, 19 nt, Artificial Sequence
  Description of Artificial Sequence: Synthetic oligonucleotide
guaaagacacuugggugau

SEQ ID NO: 2346279 - RNA, 19 nt, Artificial Sequence
  Description of Artificial Sequence: Synthetic oligonucleotide
cucauguuuuaaugguaau

SEQ ID NO: 2346280 - RNA, 19 nt, Artificial Sequence
  Description of Artificial Sequence: Synthetic oligonucleotide
cacuauguuguuuggcauu

SEQ ID NO: 2346281 - RNA, 19 nt, Artificial Sequence
  Description of Artificial Sequence: Synthetic oligonucleotide
caacugauacuuucucuuu

SEQ ID NO: 2346282 - RNA, 19 nt, Artificial Sequence
  Description of Artificial Sequence: Synthetic oligonucleotide
aaucugcuccuaggugguu

SEQ ID NO: 2346283 - RNA, 19 nt, Artificial Sequence
  Description of Artificial Sequence: Synthetic oligonucleotide
agaucucagugcagguuua

SEQ ID NO: 2346284 - RNA, 19 nt, Artificial Sequence
  Description of Artificial Sequence: Synthetic oligonucleotide
augcuagcaagcagugcuu

SEQ ID NO: 2346285 - RNA, 19 nt, Artificial Sequence
  Description of Artificial Sequence: Synthetic oligonucleotide
cacaugcuaaguccucagu

SEQ ID NO: 2346286 - RNA, 19 nt, Artificial Sequence
  Description of Artificial Sequence: Synthetic oligonucleotide
gcugaggaguguagcucag

SEQ ID NO: 2346287 - RNA, 19 nt, Artificial Sequence
  Description of Artificial Sequence: Synthetic oligonucleotide
gggcugaggaguguagcuc

SEQ ID NO: 2346288 - RNA, 19 nt, Artificial Sequence
  Description of Artificial Sequence: Synthetic oligonucleotide
cugauaccuguagaguuau

SEQ ID NO: 2346289 - RNA, 19 nt, Artificial Sequence
  Description of Artificial Sequence: Synthetic oligonucleotide
guccucaguuugauuccca

SEQ ID NO: 2346290 - RNA, 19 nt, Artificial Sequence
  Description of Artificial Sequence: Synthetic oligonucleotide
cucauuucaccugcuguuu

SEQ ID NO: 2346291 - RNA, 19 nt, Artificial Sequence
  Description of Artificial Sequence: Synthetic oligonucleotide
ggaaggagucucauguuuu

SEQ ID NO: 2346292 - RNA, 19 nt, Artificial Sequence
  Description of Artificial Sequence: Synthetic oligonucleotide
gcuaaguccucaguuugau

SEQ ID NO: 2346293 - RNA, 19 nt, Artificial Sequence
  Description of Artificial Sequence: Synthetic oligonucleotide
gaguguuacccagcagcuu

SEQ ID NO: 2346294 - RNA, 19 nt, Artificial Sequence
  Description of Artificial Sequence: Synthetic oligonucleotide
caccaagcacaugcuaagu

SEQ ID NO: 2346295 - RNA, 19 nt, Artificial Sequence
  Description of Artificial Sequence: Synthetic oligonucleotide
caauaaugacuagcagcuu

SEQ ID NO: 2346296 - RNA, 19 nt, Artificial Sequence
  Description of Artificial Sequence: Synthetic oligonucleotide
ccacuauguuguuuggcau

SEQ ID NO: 2346297 - RNA, 19 nt, Artificial Sequence
  Description of Artificial Sequence: Synthetic oligonucleotide
cugcuccuaggugguuuca

SEQ ID NO: 2346298 - RNA, 19 nt, Artificial Sequence
  Description of Artificial Sequence: Synthetic oligonucleotide
cgaggacccaacagaagua

SEQ ID NO: 2346299 - RNA, 19 nt, Artificial Sequence
  Description of Artificial Sequence: Synthetic oligonucleotide
cuauguuguuuggcauuau

SEQ ID NO: 2346300 - RNA, 19 nt, Artificial Sequence
  Description of Artificial Sequence: Synthetic oligonucleotide
guguuacccagcagcuuuu

SEQ ID NO: 2346301 - RNA, 19 nt, Artificial Sequence
  Description of Artificial Sequence: Synthetic oligonucleotide
cuggaccacuauguuguuu

SEQ ID NO: 2346302 - RNA, 19 nt, Artificial Sequence
  Description of Artificial Sequence: Synthetic oligonucleotide
cccagaucucagugcaggu

SEQ ID NO: 2346303 - RNA, 19 nt, Artificial Sequence
  Description of Artificial Sequence: Synthetic oligonucleotide
auaaagaugauggagaacc

SEQ ID NO: 2346304 - RNA, 19 nt, Artificial Sequence
  Description of Artificial Sequence: Synthetic oligonucleotide
uauaguaaugaucagagca

SEQ ID NO: 2346305 - RNA, 19 nt, Artificial Sequence
  Description of Artificial Sequence: Synthetic oligonucleotide
uuccauucaaaacagacag

SEQ ID NO: 2346306 - RNA, 19 nt, Artificial Sequence
  Description of Artificial Sequence: Synthetic oligonucleotide
agugguuuggcauagauug

SEQ ID NO: 2346307 - RNA, 19 nt, Artificial Sequence
  Description of Artificial Sequence: Synthetic oligonucleotide
uguggaauuacauaaggag

SEQ ID NO: 2346308 - RNA, 19 nt, Artificial Sequence
  Description of Artificial Sequence: Synthetic oligonucleotide
augcugacaaucuacaccc

SEQ ID NO: 2346309 - RNA, 19 nt, Artificial Sequence
  Description of Artificial Sequence: Synthetic oligonucleotide
ugaacagagaguuguaucg

SEQ ID NO: 2346310 - RNA, 19 nt, Artificial Sequence
  Description of Artificial Sequence: Synthetic oligonucleotide
agagguuuguuuuagugac

SEQ ID NO: 2346311 - RNA, 19 nt, Artificial Sequence
  Description of Artificial Sequence: Synthetic oligonucleotide
ucaacuaagaacauacaac

SEQ ID NO: 2346312 - RNA, 19 nt, Artificial Sequence
  Description of Artificial Sequence: Synthetic oligonucleotide
ucaucaaggcuccagagag

SEQ ID NO: 2346313 - RNA, 19 nt, Artificial Sequence
  Description of Artificial Sequence: Synthetic oligonucleotide
aggaagauaaagaugaugg

SEQ ID NO: 2346314 - RNA, 19 nt, Artificial Sequence
  Description of Artificial Sequence: Synthetic oligonucleotide
ugacaaauuggucugaaga

SEQ ID NO: 2346315 - RNA, 19 nt, Artificial Sequence
  Description of Artificial Sequence: Synthetic oligonucleotide
uggaauuacauaaggagug

SEQ ID NO: 2346316 - RNA, 19 nt, Artificial Sequence
  Description of Artificial Sequence: Synthetic oligonucleotide
uguugaguaagaaucaaga

SEQ ID NO: 2346317 - RNA, 19 nt, Artificial Sequence
  Description of Artificial Sequence: Synthetic oligonucleotide
uacaacuuacacauuauca

SEQ ID NO: 2346318 - RNA, 19 nt, Artificial Sequence
  Description of Artificial Sequence: Synthetic oligonucleotide
ucuguggaauuacauaagg

SEQ ID NO: 2346319 - RNA, 19 nt, Artificial Sequence
  Description of Artificial Sequence: Synthetic oligonucleotide
acaaucuacacccacggag

SEQ ID NO: 2346320 - RNA, 19 nt, Artificial Sequence
  Description of Artificial Sequence: Synthetic oligonucleotide
aucaaaaugucccguuucc

SEQ ID NO: 2346321 - RNA, 19 nt, Artificial Sequence
  Description of Artificial Sequence: Synthetic oligonucleotide
uuguuuuagugacaaauug

SEQ ID NO: 2346322 - RNA, 19 nt, Artificial Sequence
  Description of Artificial Sequence: Synthetic oligonucleotide
auaaggaguggucaguaac

SEQ ID NO: 2346323 - RNA, 19 nt, Artificial Sequence
  Description of Artificial Sequence: Synthetic oligonucleotide
cuaaauccacuacugaugg

SEQ ID NO: 2346324 - RNA, 19 nt, Artificial Sequence
  Description of Artificial Sequence: Synthetic oligonucleotide
aaaagcagcagaacuauag

SEQ ID NO: 2346325 - RNA, 19 nt, Artificial Sequence
  Description of Artificial Sequence: Synthetic oligonucleotide
ugaacaucuaccccaagca

SEQ ID NO: 2346326 - RNA, 19 nt, Artificial Sequence
  Description of Artificial Sequence: Synthetic oligonucleotide
ugacaaucuacacccacgg

SEQ ID NO: 2346327 - RNA, 19 nt, Artificial Sequence
  Description of Artificial Sequence: Synthetic oligonucleotide
aaugguuccagucacucaa

SEQ ID NO: 2346328 - RNA, 19 nt, Artificial Sequence
  Description of Artificial Sequence: Synthetic oligonucleotide
aaaggcaucuacaaucuuc

SEQ ID NO: 2346329 - RNA, 19 nt, Artificial Sequence
  Description of Artificial Sequence: Synthetic oligonucleotide
acuauaguaaugaucagag

SEQ ID NO: 2346330 - RNA, 19 nt, Artificial Sequence
  Description of Artificial Sequence: Synthetic oligonucleotide
aagagguuuguuuuaguga

SEQ ID NO: 2346331 - RNA, 19 nt, Artificial Sequence
  Description of Artificial Sequence: Synthetic oligonucleotide
uuugcuacugacuuccuga

SEQ ID NO: 2346332 - RNA, 19 nt, Artificial Sequence
  Description of Artificial Sequence: Synthetic oligonucleotide
aagcuguuacauuacagca

SEQ ID NO: 2346333 - RNA, 19 nt, Artificial Sequence
  Description of Artificial Sequence: Synthetic oligonucleotide
aagauaaagaugauggaga

SEQ ID NO: 2346334 - RNA, 19 nt, Artificial Sequence
  Description of Artificial Sequence: Synthetic oligonucleotide
cuaagaacauacaacuuac

SEQ ID NO: 2346335 - RNA, 19 nt, Artificial Sequence
  Description of Artificial Sequence: Synthetic oligonucleotide
cuugacugaacaucuaccc

SEQ ID NO: 2346336 - RNA, 19 nt, Artificial Sequence
  Description of Artificial Sequence: Synthetic oligonucleotide
uuagugacaaauuggucug

SEQ ID NO: 2346337 - RNA, 19 nt, Artificial Sequence
  Description of Artificial Sequence: Synthetic oligonucleotide
uacaaucuucauuucaacc

SEQ ID NO: 2346338 - RNA, 19 nt, Artificial Sequence
  Description of Artificial Sequence: Synthetic oligonucleotide
aaauccacuacugauggcu

SEQ ID NO: 2346339 - RNA, 19 nt, Artificial Sequence
  Description of Artificial Sequence: Synthetic oligonucleotide
uuuccauucaaaacagaca

SEQ ID NO: 2346340 - RNA, 19 nt, Artificial Sequence
  Description of Artificial Sequence: Synthetic oligonucleotide
aauuacauaaggagugguc

SEQ ID NO: 2346341 - RNA, 19 nt, Artificial Sequence
  Description of Artificial Sequence: Synthetic oligonucleotide
caagcuguuacauuacagc

SEQ ID NO: 2346342 - RNA, 19 nt, Artificial Sequence
  Description of Artificial Sequence: Synthetic oligonucleotide
uccguuaccgcacucagca

SEQ ID NO: 2346343 - RNA, 19 nt, Artificial Sequence
  Description of Artificial Sequence: Synthetic oligonucleotide
gacaaauuggucugaagac

SEQ ID NO: 2346344 - RNA, 19 nt, Artificial Sequence
  Description of Artificial Sequence: Synthetic oligonucleotide
auaguaaugaucagagcac

SEQ ID NO: 2346345 - RNA, 19 nt, Artificial Sequence
  Description of Artificial Sequence: Synthetic oligonucleotide
ugauggagaaccuagcuau

SEQ ID NO: 2346346 - RNA, 19 nt, Artificial Sequence
  Description of Artificial Sequence: Synthetic oligonucleotide
acuaagaacauacaacuua

SEQ ID NO: 2346347 - RNA, 19 nt, Artificial Sequence
  Description of Artificial Sequence: Synthetic oligonucleotide
ucaagaagaggccuccaag

SEQ ID NO: 2346348 - RNA, 19 nt, Artificial Sequence
  Description of Artificial Sequence: Synthetic oligonucleotide
aucacuguuacuacuuucc

SEQ ID NO: 2346349 - RNA, 19 nt, Artificial Sequence
  Description of Artificial Sequence: Synthetic oligonucleotide
acaacuuacacauuaucaa

SEQ ID NO: 2346350 - RNA, 19 nt, Artificial Sequence
  Description of Artificial Sequence: Synthetic oligonucleotide
uaaggaguggucaguaacc

SEQ ID NO: 2346351 - RNA, 19 nt, Artificial Sequence
  Description of Artificial Sequence: Synthetic oligonucleotide
uggucugaagacacgaaag

SEQ ID NO: 2346352 - RNA, 19 nt, Artificial Sequence
  Description of Artificial Sequence: Synthetic oligonucleotide
agaaccaugccagccaucc

SEQ ID NO: 2346353 - RNA, 19 nt, Artificial Sequence
  Description of Artificial Sequence: Synthetic oligonucleotide
ugacugaacaucuacccca

SEQ ID NO: 2346354 - RNA, 19 nt, Artificial Sequence
  Description of Artificial Sequence: Synthetic oligonucleotide
aaaacagacaggaauccug

SEQ ID NO: 2346355 - RNA, 19 nt, Artificial Sequence
  Description of Artificial Sequence: Synthetic oligonucleotide
agccuuucaugucugaagg

SEQ ID NO: 2346356 - RNA, 19 nt, Artificial Sequence
  Description of Artificial Sequence: Synthetic oligonucleotide
auacaacuuacacauuauc

SEQ ID NO: 2346357 - RNA, 19 nt, Artificial Sequence
  Description of Artificial Sequence: Synthetic oligonucleotide
agucacucaacuaagaaca

SEQ ID NO: 2346358 - RNA, 19 nt, Artificial Sequence
  Description of Artificial Sequence: Synthetic oligonucleotide
aaagcagcagaacuauagu

SEQ ID NO: 2346359 - RNA, 19 nt, Artificial Sequence
  Description of Artificial Sequence: Synthetic oligonucleotide
agagcgaggaggaacacgc

SEQ ID NO: 2346360 - RNA, 19 nt, Artificial Sequence
  Description of Artificial Sequence: Synthetic oligonucleotide
uggaacucaggcaagugca

SEQ ID NO: 2346361 - RNA, 19 nt, Artificial Sequence
  Description of Artificial Sequence: Synthetic oligonucleotide
agccuaaaacuccuucucc

SEQ ID NO: 2346362 - RNA, 19 nt, Artificial Sequence
  Description of Artificial Sequence: Synthetic oligonucleotide
acucacugccuuuauagag

SEQ ID NO: 2346363 - RNA, 19 nt, Artificial Sequence
  Description of Artificial Sequence: Synthetic oligonucleotide
uuacauaaggaguggucag

SEQ ID NO: 2346364 - RNA, 19 nt, Artificial Sequence
  Description of Artificial Sequence: Synthetic oligonucleotide
caaauuggucugaagacac

SEQ ID NO: 2346365 - RNA, 19 nt, Artificial Sequence
  Description of Artificial Sequence: Synthetic oligonucleotide
auagauugguuccagcaca

SEQ ID NO: 2346366 - RNA, 19 nt, Artificial Sequence
  Description of Artificial Sequence: Synthetic oligonucleotide
guuguaucguguuuggaug

SEQ ID NO: 2346367 - RNA, 19 nt, Artificial Sequence
  Description of Artificial Sequence: Synthetic oligonucleotide
aguaaccgcugccugacac

SEQ ID NO: 2346368 - RNA, 19 nt, Artificial Sequence
  Description of Artificial Sequence: Synthetic oligonucleotide
auuacauaaggagugguca

SEQ ID NO: 2346369 - RNA, 19 nt, Artificial Sequence
  Description of Artificial Sequence: Synthetic oligonucleotide
uuggaacucaggcaagugc

SEQ ID NO: 2346370 - RNA, 19 nt, Artificial Sequence
  Description of Artificial Sequence: Synthetic oligonucleotide
aaucuacacccacggaguc

SEQ ID NO: 2346371 - RNA, 19 nt, Artificial Sequence
  Description of Artificial Sequence: Synthetic oligonucleotide
acggagucuguuuugcuac

SEQ ID NO: 2346372 - RNA, 19 nt, Artificial Sequence
  Description of Artificial Sequence: Synthetic oligonucleotide
acgaaaguugucaucaagg

SEQ ID NO: 2346373 - RNA, 19 nt, Artificial Sequence
  Description of Artificial Sequence: Synthetic oligonucleotide
acuggcucgagggaaaagc

SEQ ID NO: 2346374 - RNA, 19 nt, Artificial Sequence
  Description of Artificial Sequence: Synthetic oligonucleotide
aaugucccguuuccguuac

SEQ ID NO: 2346375 - RNA, 19 nt, Artificial Sequence
  Description of Artificial Sequence: Synthetic oligonucleotide
ucucccuaaauccacuacu

SEQ ID NO: 2346376 - RNA, 19 nt, Artificial Sequence
  Description of Artificial Sequence: Synthetic oligonucleotide
cuuuauagagcucugugga

SEQ ID NO: 2346377 - RNA, 19 nt, Artificial Sequence
  Description of Artificial Sequence: Synthetic oligonucleotide
gaaccuagcuaucccagag

SEQ ID NO: 2346378 - RNA, 19 nt, Artificial Sequence
  Description of Artificial Sequence: Synthetic oligonucleotide
acuguuacuacuuuccauu

SEQ ID NO: 2346379 - RNA, 19 nt, Artificial Sequence
  Description of Artificial Sequence: Synthetic oligonucleotide
aauuggucugaagacacga

SEQ ID NO: 2346380 - RNA, 19 nt, Artificial Sequence
  Description of Artificial Sequence: Synthetic oligonucleotide
cugacuuccugaaagccag

SEQ ID NO: 2346381 - RNA, 19 nt, Artificial Sequence
  Description of Artificial Sequence: Synthetic oligonucleotide
cugacaaucuacacccacg

SEQ ID NO: 2346382 - RNA, 19 nt, Artificial Sequence
  Description of Artificial Sequence: Synthetic oligonucleotide
aaggaguggucaguaaccg

SEQ ID NO: 2346383 - RNA, 19 nt, Artificial Sequence
  Description of Artificial Sequence: Synthetic oligonucleotide
cugaacaucuaccccaagc

SEQ ID NO: 2346384 - RNA, 19 nt, Artificial Sequence
  Description of Artificial Sequence: Synthetic oligonucleotide
ugacacaccuuccaagcug

SEQ ID NO: 2346385 - RNA, 19 nt, Artificial Sequence
  Description of Artificial Sequence: Synthetic oligonucleotide
gcuacugacuuccugaaag

SEQ ID NO: 2346386 - RNA, 19 nt, Artificial Sequence
  Description of Artificial Sequence: Synthetic oligonucleotide
gaacaucuaccccaagcag

SEQ ID NO: 2346387 - RNA, 19 nt, Artificial Sequence
  Description of Artificial Sequence: Synthetic oligonucleotide
cucacugccuuuauagagc

SEQ ID NO: 2346388 - RNA, 19 nt, Artificial Sequence
  Description of Artificial Sequence: Synthetic oligonucleotide
agcagaacuauaguaauga

SEQ ID NO: 2346389 - RNA, 19 nt, Artificial Sequence
  Description of Artificial Sequence: Synthetic oligonucleotide
aagcagaucacuguuacua

SEQ ID NO: 2346390 - RNA, 19 nt, Artificial Sequence
  Description of Artificial Sequence: Synthetic oligonucleotide
gcuuuauuggaacucaggc

SEQ ID NO: 2346391 - RNA, 19 nt, Artificial Sequence
  Description of Artificial Sequence: Synthetic oligonucleotide
ucaaaaugucccguuuccg

SEQ ID NO: 2346392 - RNA, 19 nt, Artificial Sequence
  Description of Artificial Sequence: Synthetic oligonucleotide
agaguuguaucguguuugg

SEQ ID NO: 2346393 - RNA, 19 nt, Artificial Sequence
  Description of Artificial Sequence: Synthetic oligonucleotide
gacacgaaaguugucauca

SEQ ID NO: 2346394 - RNA, 19 nt, Artificial Sequence
  Description of Artificial Sequence: Synthetic oligonucleotide
agauaaagaugauggagaa

SEQ ID NO: 2346395 - RNA, 19 nt, Artificial Sequence
  Description of Artificial Sequence: Synthetic oligonucleotide
auggagaaccuagcuaucc

SEQ ID NO: 2346396 - RNA, 19 nt, Artificial Sequence
  Description of Artificial Sequence: Synthetic oligonucleotide
uuuccguuaccgcacucag

SEQ ID NO: 2346397 - RNA, 19 nt, Artificial Sequence
  Description of Artificial Sequence: Synthetic oligonucleotide
gagaguuguaucguguuug

SEQ ID NO: 2346398 - RNA, 19 nt, Artificial Sequence
  Description of Artificial Sequence: Synthetic oligonucleotide
uuguaucguguuuggaugc

SEQ ID NO: 2346399 - RNA, 19 nt, Artificial Sequence
  Description of Artificial Sequence: Synthetic oligonucleotide
uuauuggaacucaggcaag

SEQ ID NO: 2346400 - RNA, 19 nt, Artificial Sequence
  Description of Artificial Sequence: Synthetic oligonucleotide
ucgagggaaaagcagcaga

SEQ ID NO: 2346401 - RNA, 19 nt, Artificial Sequence
  Description of Artificial Sequence: Synthetic oligonucleotide
aaggcaucuacaaucuuca

SEQ ID NO: 2346402 - RNA, 19 nt, Artificial Sequence
  Description of Artificial Sequence: Synthetic oligonucleotide
ugucaucaaggcuccagag

SEQ ID NO: 2346403 - RNA, 19 nt, Artificial Sequence
  Description of Artificial Sequence: Synthetic oligonucleotide
cauagauugguuccagcac

SEQ ID NO: 2346404 - RNA, 19 nt, Artificial Sequence
  Description of Artificial Sequence: Synthetic oligonucleotide
cuagcuaucccagaggcuc

SEQ ID NO: 2346405 - RNA, 19 nt, Artificial Sequence
  Description of Artificial Sequence: Synthetic oligonucleotide
agagccuaaaacuccuucu

SEQ ID NO: 2346406 - RNA, 19 nt, Artificial Sequence
  Description of Artificial Sequence: Synthetic oligonucleotide
uggaugcugacaaucuaca

SEQ ID NO: 2346407 - RNA, 19 nt, Artificial Sequence
  Description of Artificial Sequence: Synthetic oligonucleotide
uguuacauuacagcagccu

SEQ ID NO: 2346408 - RNA, 19 nt, Artificial Sequence
  Description of Artificial Sequence: Synthetic oligonucleotide
aagacacgaaaguugucau

SEQ ID NO: 2346409 - RNA, 19 nt, Artificial Sequence
  Description of Artificial Sequence: Synthetic oligonucleotide
gauggcuugacugaacauc

SEQ ID NO: 2346410 - RNA, 19 nt, Artificial Sequence
  Description of Artificial Sequence: Synthetic oligonucleotide
uaguaaugaucagagcacc

SEQ ID NO: 2346411 - RNA, 19 nt, Artificial Sequence
  Description of Artificial Sequence: Synthetic oligonucleotide
gaaagccagggcucaagag

SEQ ID NO: 2346412 - RNA, 19 nt, Artificial Sequence
  Description of Artificial Sequence: Synthetic oligonucleotide
aggaggaacacgccagcac

SEQ ID NO: 2346413 - RNA, 19 nt, Artificial Sequence
  Description of Artificial Sequence: Synthetic oligonucleotide
uaucguguuuggaugcuga

SEQ ID NO: 2346414 - RNA, 19 nt, Artificial Sequence
  Description of Artificial Sequence: Synthetic oligonucleotide
uuggucugaagacacgaaa

SEQ ID NO: 2346415 - RNA, 19 nt, Artificial Sequence
  Description of Artificial Sequence: Synthetic oligonucleotide
uggagaaccuagcuauccc

SEQ ID NO: 2346416 - RNA, 19 nt, Artificial Sequence
  Description of Artificial Sequence: Synthetic oligonucleotide
cugggaauucacuggcucg

SEQ ID NO: 2346417 - RNA, 19 nt, Artificial Sequence
  Description of Artificial Sequence: Synthetic oligonucleotide
acaaauuggucugaagaca

SEQ ID NO: 2346418 - RNA, 19 nt, Artificial Sequence
  Description of Artificial Sequence: Synthetic oligonucleotide
auccgugacaucaaaaugu

SEQ ID NO: 2346419 - RNA, 19 nt, Artificial Sequence
  Description of Artificial Sequence: Synthetic oligonucleotide
uaaagaugauggagaaccu

SEQ ID NO: 2346420 - RNA, 19 nt, Artificial Sequence
  Description of Artificial Sequence: Synthetic oligonucleotide
ugucccguuuccguuaccg

SEQ ID NO: 2346421 - RNA, 19 nt, Artificial Sequence
  Description of Artificial Sequence: Synthetic oligonucleotide
uuuauagagcucuguggaa

SEQ ID NO: 2346422 - RNA, 19 nt, Artificial Sequence
  Description of Artificial Sequence: Synthetic oligonucleotide
aggaguggucaguaaccgc

SEQ ID NO: 2346423 - RNA, 19 nt, Artificial Sequence
  Description of Artificial Sequence: Synthetic oligonucleotide
uuacauuacagcagccuuu

SEQ ID NO: 2346424 - RNA, 19 nt, Artificial Sequence
  Description of Artificial Sequence: Synthetic oligonucleotide
ucacuguuacuacuuucca

SEQ ID NO: 2346425 - RNA, 19 nt, Artificial Sequence
  Description of Artificial Sequence: Synthetic oligonucleotide
ccuuuauagagcucugugg

SEQ ID NO: 2346426 - RNA, 19 nt, Artificial Sequence
  Description of Artificial Sequence: Synthetic oligonucleotide
agcaccgaggaagauaaag

SEQ ID NO: 2346427 - RNA, 19 nt, Artificial Sequence
  Description of Artificial Sequence: Synthetic oligonucleotide
cuacugacuuccugaaagc

SEQ ID NO: 2346428 - RNA, 19 nt, Artificial Sequence
  Description of Artificial Sequence: Synthetic oligonucleotide
gccuaucucuuccaaaugg

SEQ ID NO: 2346429 - RNA, 19 nt, Artificial Sequence
  Description of Artificial Sequence: Synthetic oligonucleotide
aguaaugaucagagcaccg

SEQ ID NO: 2346430 - RNA, 19 nt, Artificial Sequence
  Description of Artificial Sequence: Synthetic oligonucleotide
agacaggaauccuggagug

SEQ ID NO: 2346431 - RNA, 19 nt, Artificial Sequence
  Description of Artificial Sequence: Synthetic oligonucleotide
uccgugacaucaaaauguc

SEQ ID NO: 2346432 - RNA, 19 nt, Artificial Sequence
  Description of Artificial Sequence: Synthetic oligonucleotide
guugaguaagaaucaagaa

SEQ ID NO: 2346433 - RNA, 19 nt, Artificial Sequence
  Description of Artificial Sequence: Synthetic oligonucleotide
aucaaggcuccagagagug

SEQ ID NO: 2346434 - RNA, 19 nt, Artificial Sequence
  Description of Artificial Sequence: Synthetic oligonucleotide
cucccuaaauccacuacug

SEQ ID NO: 2346435 - RNA, 19 nt, Artificial Sequence
  Description of Artificial Sequence: Synthetic oligonucleotide
cauccgugacaucaaaaug

SEQ ID NO: 2346436 - RNA, 19 nt, Artificial Sequence
  Description of Artificial Sequence: Synthetic oligonucleotide
gaucacuguuacuacuuuc

SEQ ID NO: 2346437 - RNA, 19 nt, Artificial Sequence
  Description of Artificial Sequence: Synthetic oligonucleotide
ucacugccuuuauagagcu

SEQ ID NO: 2346438 - RNA, 19 nt, Artificial Sequence
  Description of Artificial Sequence: Synthetic oligonucleotide
uccaagcuguuacauuaca

SEQ ID NO: 2346439 - RNA, 19 nt, Artificial Sequence
  Description of Artificial Sequence: Synthetic oligonucleotide
aucguguuuggaugcugac

SEQ ID NO: 2346440 - RNA, 19 nt, Artificial Sequence
  Description of Artificial Sequence: Synthetic oligonucleotide
cucuguggaauuacauaag

SEQ ID NO: 2346441 - RNA, 19 nt, Artificial Sequence
  Description of Artificial Sequence: Synthetic oligonucleotide
ccuaaauccacuacugaug

SEQ ID NO: 2346442 - RNA, 19 nt, Artificial Sequence
  Description of Artificial Sequence: Synthetic oligonucleotide
gaauccuggagugugggca

SEQ ID NO: 2346443 - RNA, 19 nt, Artificial Sequence
  Description of Artificial Sequence: Synthetic oligonucleotide
ggcaagugcacucacugcc

SEQ ID NO: 2346444 - RNA, 19 nt, Artificial Sequence
  Description of Artificial Sequence: Synthetic oligonucleotide
caucaaaaugucccguuuc

SEQ ID NO: 2346445 - RNA, 19 nt, Artificial Sequence
  Description of Artificial Sequence: Synthetic oligonucleotide
gauugguuccagcacaugu

SEQ ID NO: 2346446 - RNA, 19 nt, Artificial Sequence
  Description of Artificial Sequence: Synthetic oligonucleotide
cuuccaagcuguuacauua

SEQ ID NO: 2346447 - RNA, 19 nt, Artificial Sequence
  Description of Artificial Sequence: Synthetic oligonucleotide
uuuggaugcugacaaucua

SEQ ID NO: 2346448 - RNA, 19 nt, Artificial Sequence
  Description of Artificial Sequence: Synthetic oligonucleotide
aaaugucccguuuccguua

SEQ ID NO: 2346449 - RNA, 19 nt, Artificial Sequence
  Description of Artificial Sequence: Synthetic oligonucleotide
ucccuaaauccacuacuga

SEQ ID NO: 2346450 - RNA, 19 nt, Artificial Sequence
  Description of Artificial Sequence: Synthetic oligonucleotide
gacuuccugaaagccaggg

SEQ ID NO: 2346451 - RNA, 19 nt, Artificial Sequence
  Description of Artificial Sequence: Synthetic oligonucleotide
gauaaagaugauggagaac

SEQ ID NO: 2346452 - RNA, 19 nt, Artificial Sequence
  Description of Artificial Sequence: Synthetic oligonucleotide
cacgaaaguugucaucaag

SEQ ID NO: 2346453 - RNA, 19 nt, Artificial Sequence
  Description of Artificial Sequence: Synthetic oligonucleotide
gaaaguugucaucaaggcu

SEQ ID NO: 2346454 - RNA, 19 nt, Artificial Sequence
  Description of Artificial Sequence: Synthetic oligonucleotide
uggagugugggcacugaac

SEQ ID NO: 2346455 - RNA, 19 nt, Artificial Sequence
  Description of Artificial Sequence: Synthetic oligonucleotide
caagaagaggccuccaaga

SEQ ID NO: 2346456 - RNA, 19 nt, Artificial Sequence
  Description of Artificial Sequence: Synthetic oligonucleotide
ucccguuuccguuaccgca

SEQ ID NO: 2346457 - RNA, 19 nt, Artificial Sequence
  Description of Artificial Sequence: Synthetic oligonucleotide
gagccuaaaacuccuucuc

SEQ ID NO: 2346458 - RNA, 19 nt, Artificial Sequence
  Description of Artificial Sequence: Synthetic oligonucleotide
gauggcgcugaggaaagcc

SEQ ID NO: 2346459 - RNA, 19 nt, Artificial Sequence
  Description of Artificial Sequence: Synthetic oligonucleotide
gagaaccuagcuaucccag

SEQ ID NO: 2346460 - RNA, 19 nt, Artificial Sequence
  Description of Artificial Sequence: Synthetic oligonucleotide
acaggaauccuggagugug

SEQ ID NO: 2346461 - RNA, 19 nt, Artificial Sequence
  Description of Artificial Sequence: Synthetic oligonucleotide
auuucaaccucuggggcug

SEQ ID NO: 2346462 - RNA, 19 nt, Artificial Sequence
  Description of Artificial Sequence: Synthetic oligonucleotide
uccagucacucaacuaaga

SEQ ID NO: 2346463 - RNA, 19 nt, Artificial Sequence
  Description of Artificial Sequence: Synthetic oligonucleotide
aggccuaucucuuccaaau

SEQ ID NO: 2346464 - RNA, 19 nt, Artificial Sequence
  Description of Artificial Sequence: Synthetic oligonucleotide
gaucagagcgaggaggaac

SEQ ID NO: 2346465 - RNA, 19 nt, Artificial Sequence
  Description of Artificial Sequence: Synthetic oligonucleotide
uucucccuaaauccacuac

SEQ ID NO: 2346466 - RNA, 19 nt, Artificial Sequence
  Description of Artificial Sequence: Synthetic oligonucleotide
accaagacccagaucagag

SEQ ID NO: 2346467 - RNA, 19 nt, Artificial Sequence
  Description of Artificial Sequence: Synthetic oligonucleotide
ggaauuacauaaggagugg

SEQ ID NO: 2346468 - RNA, 19 nt, Artificial Sequence
  Description of Artificial Sequence: Synthetic oligonucleotide
augauggagaaccuagcua

SEQ ID NO: 2346469 - RNA, 19 nt, Artificial Sequence
  Description of Artificial Sequence: Synthetic oligonucleotide
aaucuucauuucaaccucu

SEQ ID NO: 2346470 - RNA, 19 nt, Artificial Sequence
  Description of Artificial Sequence: Synthetic oligonucleotide
uuccagcacauguugagua

SEQ ID NO: 2346471 - RNA, 19 nt, Artificial Sequence
  Description of Artificial Sequence: Synthetic oligonucleotide
cucaagagguuuguuuuag

SEQ ID NO: 2346472 - RNA, 19 nt, Artificial Sequence
  Description of Artificial Sequence: Synthetic oligonucleotide
caacuuacacauuaucaaa

SEQ ID NO: 2346473 - RNA, 19 nt, Artificial Sequence
  Description of Artificial Sequence: Synthetic oligonucleotide
accgcugccugacacaccu

SEQ ID NO: 2346474 - RNA, 19 nt, Artificial Sequence
  Description of Artificial Sequence: Synthetic oligonucleotide
uuucaugucugaaggccua

SEQ ID NO: 2346475 - RNA, 19 nt, Artificial Sequence
  Description of Artificial Sequence: Synthetic oligonucleotide
uaaauccacuacugauggc

SEQ ID NO: 2346476 - RNA, 19 nt, Artificial Sequence
  Description of Artificial Sequence: Synthetic oligonucleotide
uauuggaacucaggcaagu

SEQ ID NO: 2346477 - RNA, 19 nt, Artificial Sequence
  Description of Artificial Sequence: Synthetic oligonucleotide
aagauggcgcugaggaaag

SEQ ID NO: 2346478 - RNA, 19 nt, Artificial Sequence
  Description of Artificial Sequence: Synthetic oligonucleotide
gugacaaauuggucugaag

SEQ ID NO: 2346479 - RNA, 19 nt, Artificial Sequence
  Description of Artificial Sequence: Synthetic oligonucleotide
agagagugccucugugcuc

SEQ ID NO: 2346480 - RNA, 19 nt, Artificial Sequence
  Description of Artificial Sequence: Synthetic oligonucleotide
uuacuacuuuccauucaaa

SEQ ID NO: 2346481 - RNA, 19 nt, Artificial Sequence
  Description of Artificial Sequence: Synthetic oligonucleotide
ccuccaagaaagauggcgc

SEQ ID NO: 2346482 - RNA, 19 nt, Artificial Sequence
  Description of Artificial Sequence: Synthetic oligonucleotide
uuccugaaagccagggcuc

SEQ ID NO: 2346483 - RNA, 19 nt, Artificial Sequence
  Description of Artificial Sequence: Synthetic oligonucleotide
ucaagagguuuguuuuagu

SEQ ID NO: 2346484 - RNA, 19 nt, Artificial Sequence
  Description of Artificial Sequence: Synthetic oligonucleotide
agagcaccgaggaagauaa

SEQ ID NO: 2346485 - RNA, 19 nt, Artificial Sequence
  Description of Artificial Sequence: Synthetic oligonucleotide
uuccaagcuguuacauuac

SEQ ID NO: 2346486 - RNA, 19 nt, Artificial Sequence
  Description of Artificial Sequence: Synthetic oligonucleotide
aaggccuaucucuuccaaa

SEQ ID NO: 2346487 - RNA, 19 nt, Artificial Sequence
  Description of Artificial Sequence: Synthetic oligonucleotide
uacauaaggaguggucagu

SEQ ID NO: 2346488 - RNA, 19 nt, Artificial Sequence
  Description of Artificial Sequence: Synthetic oligonucleotide
cuguggaauuacauaagga

SEQ ID NO: 2346489 - RNA, 19 nt, Artificial Sequence
  Description of Artificial Sequence: Synthetic oligonucleotide
cuguuacuacuuuccauuc

SEQ ID NO: 2346490 - RNA, 19 nt, Artificial Sequence
  Description of Artificial Sequence: Synthetic oligonucleotide
ucaguaaccgcugccugac

SEQ ID NO: 2346491 - RNA, 19 nt, Artificial Sequence
  Description of Artificial Sequence: Synthetic oligonucleotide
acauguugaguaagaauca

SEQ ID NO: 2346492 - RNA, 19 nt, Artificial Sequence
  Description of Artificial Sequence: Synthetic oligonucleotide
agcgaggaggaacacgcca

SEQ ID NO: 2346493 - RNA, 19 nt, Artificial Sequence
  Description of Artificial Sequence: Synthetic oligonucleotide
uccaagaaagauggcgcug

SEQ ID NO: 2346494 - RNA, 19 nt, Artificial Sequence
  Description of Artificial Sequence: Synthetic oligonucleotide
ugggaauucacuggcucga

SEQ ID NO: 2346495 - RNA, 19 nt, Artificial Sequence
  Description of Artificial Sequence: Synthetic oligonucleotide
agcucuguggaauuacaua

SEQ ID NO: 2346496 - RNA, 19 nt, Artificial Sequence
  Description of Artificial Sequence: Synthetic oligonucleotide
uagauugguuccagcacau

SEQ ID NO: 2346497 - RNA, 19 nt, Artificial Sequence
  Description of Artificial Sequence: Synthetic oligonucleotide
gccuaaaacuccuucuccc

SEQ ID NO: 2346498 - RNA, 19 nt, Artificial Sequence
  Description of Artificial Sequence: Synthetic oligonucleotide
acaucaaaaugucccguuu

SEQ ID NO: 2346499 - RNA, 19 nt, Artificial Sequence
  Description of Artificial Sequence: Synthetic oligonucleotide
guaaugaucagagcaccga

SEQ ID NO: 2346500 - RNA, 19 nt, Artificial Sequence
  Description of Artificial Sequence: Synthetic oligonucleotide
auggcuugacugaacaucu

SEQ ID NO: 2346501 - RNA, 19 nt, Artificial Sequence
  Description of Artificial Sequence: Synthetic oligonucleotide
ugacuuccugaaagccagg

SEQ ID NO: 2346502 - RNA, 19 nt, Artificial Sequence
  Description of Artificial Sequence: Synthetic oligonucleotide
gccuccaagaaagauggcg

SEQ ID NO: 2346503 - RNA, 19 nt, Artificial Sequence
  Description of Artificial Sequence: Synthetic oligonucleotide
ggagugugggcacugaaca

SEQ ID NO: 2346504 - RNA, 19 nt, Artificial Sequence
  Description of Artificial Sequence: Synthetic oligonucleotide
acccagaucagagcgagga

SEQ ID NO: 2346505 - RNA, 19 nt, Artificial Sequence
  Description of Artificial Sequence: Synthetic oligonucleotide
agacccagaucagagcgag

SEQ ID NO: 2346506 - RNA, 19 nt, Artificial Sequence
  Description of Artificial Sequence: Synthetic oligonucleotide
agaaccuagcuaucccaga

SEQ ID NO: 2346507 - RNA, 19 nt, Artificial Sequence
  Description of Artificial Sequence: Synthetic oligonucleotide
gcauagauugguuccagca

SEQ ID NO: 2346508 - RNA, 19 nt, Artificial Sequence
  Description of Artificial Sequence: Synthetic oligonucleotide
ucuucuguuggugggcaga

SEQ ID NO: 2346509 - RNA, 19 nt, Artificial Sequence
  Description of Artificial Sequence: Synthetic oligonucleotide
gucaucaaggcuccagaga

SEQ ID NO: 2346510 - RNA, 19 nt, Artificial Sequence
  Description of Artificial Sequence: Synthetic oligonucleotide
gagagugccucugugcuca

SEQ ID NO: 2346511 - RNA, 19 nt, Artificial Sequence
  Description of Artificial Sequence: Synthetic oligonucleotide
acugacuuccugaaagcca

SEQ ID NO: 2346512 - RNA, 19 nt, Artificial Sequence
  Description of Artificial Sequence: Synthetic oligonucleotide
ucguguuuggaugcugaca

SEQ ID NO: 2346513 - RNA, 19 nt, Artificial Sequence
  Description of Artificial Sequence: Synthetic oligonucleotide
uccagcacauguugaguaa

SEQ ID NO: 2346514 - RNA, 19 nt, Artificial Sequence
  Description of Artificial Sequence: Synthetic oligonucleotide
caggaauccuggagugugg

SEQ ID NO: 2346515 - RNA, 19 nt, Artificial Sequence
  Description of Artificial Sequence: Synthetic oligonucleotide
gugggcagagccuaaaacu

SEQ ID NO: 2346516 - RNA, 19 nt, Artificial Sequence
  Description of Artificial Sequence: Synthetic oligonucleotide
ugaagacacgaaaguuguc

SEQ ID NO: 2346517 - RNA, 19 nt, Artificial Sequence
  Description of Artificial Sequence: Synthetic oligonucleotide
aucagagcgaggaggaaca

SEQ ID NO: 2346518 - RNA, 19 nt, Artificial Sequence
  Description of Artificial Sequence: Synthetic oligonucleotide
gagucuguuuugcuacuga

SEQ ID NO: 2346519 - RNA, 19 nt, Artificial Sequence
  Description of Artificial Sequence: Synthetic oligonucleotide
ggaauucacuggcucgagg

SEQ ID NO: 2346520 - RNA, 19 nt, Artificial Sequence
  Description of Artificial Sequence: Synthetic oligonucleotide
aggaccgcagugguuuggc

SEQ ID NO: 2346521 - RNA, 19 nt, Artificial Sequence
  Description of Artificial Sequence: Synthetic oligonucleotide
uuccguuaccgcacucagc

SEQ ID NO: 2346522 - RNA, 19 nt, Artificial Sequence
  Description of Artificial Sequence: Synthetic oligonucleotide
agagaguuguaucguguuu

SEQ ID NO: 2346523 - RNA, 19 nt, Artificial Sequence
  Description of Artificial Sequence: Synthetic oligonucleotide
gacauagcggccgaugaaa

SEQ ID NO: 2346524 - RNA, 19 nt, Artificial Sequence
  Description of Artificial Sequence: Synthetic oligonucleotide
auuggaacucaggcaagug

SEQ ID NO: 2346525 - RNA, 19 nt, Artificial Sequence
  Description of Artificial Sequence: Synthetic oligonucleotide
guggaauuacauaaggagu

SEQ ID NO: 2346526 - RNA, 19 nt, Artificial Sequence
  Description of Artificial Sequence: Synthetic oligonucleotide
accccaagcagaucacugu

SEQ ID NO: 2346527 - RNA, 19 nt, Artificial Sequence
  Description of Artificial Sequence: Synthetic oligonucleotide
gccuuuauagagcucugug

SEQ ID NO: 2346528 - RNA, 19 nt, Artificial Sequence
  Description of Artificial Sequence: Synthetic oligonucleotide
uugcuacugacuuccugaa

SEQ ID NO: 2346529 - RNA, 19 nt, Artificial Sequence
  Description of Artificial Sequence: Synthetic oligonucleotide
cagagccuaaaacuccuuc

SEQ ID NO: 2346530 - RNA, 19 nt, Artificial Sequence
  Description of Artificial Sequence: Synthetic oligonucleotide
auccacuacugauggcuug

SEQ ID NO: 2346531 - RNA, 19 nt, Artificial Sequence
  Description of Artificial Sequence: Synthetic oligonucleotide
uguaucguguuuggaugcu

SEQ ID NO: 2346532 - RNA, 19 nt, Artificial Sequence
  Description of Artificial Sequence: Synthetic oligonucleotide
ccaagcuguuacauuacag

SEQ ID NO: 2346533 - RNA, 19 nt, Artificial Sequence
  Description of Artificial Sequence: Synthetic oligonucleotide
ccagaucagagcgaggagg

SEQ ID NO: 2346534 - RNA, 19 nt, Artificial Sequence
  Description of Artificial Sequence: Synthetic oligonucleotide
acagagaguuguaucgugu

SEQ ID NO: 2346535 - RNA, 19 nt, Artificial Sequence
  Description of Artificial Sequence: Synthetic oligonucleotide
ugccucugugcucauccgu

SEQ ID NO: 2346536 - RNA, 19 nt, Artificial Sequence
  Description of Artificial Sequence: Synthetic oligonucleotide
guuacauuacagcagccuu

SEQ ID NO: 2346537 - RNA, 19 nt, Artificial Sequence
  Description of Artificial Sequence: Synthetic oligonucleotide
uagagcucuguggaauuac

SEQ ID NO: 2346538 - RNA, 19 nt, Artificial Sequence
  Description of Artificial Sequence: Synthetic oligonucleotide
gacaaucuacacccacgga

SEQ ID NO: 2346539 - RNA, 19 nt, Artificial Sequence
  Description of Artificial Sequence: Synthetic oligonucleotide
gugguuuggcauagauugg

SEQ ID NO: 2346540 - RNA, 19 nt, Artificial Sequence
  Description of Artificial Sequence: Synthetic oligonucleotide
ggcuugacugaacaucuac

SEQ ID NO: 2346541 - RNA, 19 nt, Artificial Sequence
  Description of Artificial Sequence: Synthetic oligonucleotide
acaucuaccccaagcagau

SEQ ID NO: 2346542 - RNA, 19 nt, Artificial Sequence
  Description of Artificial Sequence: Synthetic oligonucleotide
ugauggcuugacugaacau

SEQ ID NO: 2346543 - RNA, 19 nt, Artificial Sequence
  Description of Artificial Sequence: Synthetic oligonucleotide
gucaguaaccgcugccuga

SEQ ID NO: 2346544 - RNA, 19 nt, Artificial Sequence
  Description of Artificial Sequence: Synthetic oligonucleotide
ucacucaacuaagaacaua

SEQ ID NO: 2346545 - RNA, 19 nt, Artificial Sequence
  Description of Artificial Sequence: Synthetic oligonucleotide
caaucuacacccacggagu

SEQ ID NO: 2346546 - RNA, 19 nt, Artificial Sequence
  Description of Artificial Sequence: Synthetic oligonucleotide
ggugggcagagccuaaaac

SEQ ID NO: 2346547 - RNA, 19 nt, Artificial Sequence
  Description of Artificial Sequence: Synthetic oligonucleotide
uagcuaucccagaggcucu

SEQ ID NO: 2346548 - RNA, 19 nt, Artificial Sequence
  Description of Artificial Sequence: Synthetic oligonucleotide
ugccugacacaccuuccaa

SEQ ID NO: 2346549 - RNA, 19 nt, Artificial Sequence
  Description of Artificial Sequence: Synthetic oligonucleotide
ggagaaccuagcuauccca

SEQ ID NO: 2346550 - RNA, 19 nt, Artificial Sequence
  Description of Artificial Sequence: Synthetic oligonucleotide
acugaacaucuaccccaag

SEQ ID NO: 2346551 - RNA, 19 nt, Artificial Sequence
  Description of Artificial Sequence: Synthetic oligonucleotide
ugcacucacugccuuuaua

SEQ ID NO: 2346552 - RNA, 19 nt, Artificial Sequence
  Description of Artificial Sequence: Synthetic oligonucleotide
gcuugacugaacaucuacc

SEQ ID NO: 2346553 - RNA, 19 nt, Artificial Sequence
  Description of Artificial Sequence: Synthetic oligonucleotide
cagagcgaggaggaacacg

SEQ ID NO: 2346554 - RNA, 19 nt, Artificial Sequence
  Description of Artificial Sequence: Synthetic oligonucleotide
gaauuacauaaggaguggu

SEQ ID NO: 2346555 - RNA, 19 nt, Artificial Sequence
  Description of Artificial Sequence: Synthetic oligonucleotide
aucuucuguuggugggcag

SEQ ID NO: 2346556 - RNA, 19 nt, Artificial Sequence
  Description of Artificial Sequence: Synthetic oligonucleotide
cagcaggacauagcggccg

SEQ ID NO: 2346557 - RNA, 19 nt, Artificial Sequence
  Description of Artificial Sequence: Synthetic oligonucleotide
acauaaggaguggucagua

SEQ ID NO: 2346558 - RNA, 19 nt, Artificial Sequence
  Description of Artificial Sequence: Synthetic oligonucleotide
gaucuucuguuggugggca

SEQ ID NO: 2346559 - RNA, 19 nt, Artificial Sequence
  Description of Artificial Sequence: Synthetic oligonucleotide
cagacaggaauccuggagu

SEQ ID NO: 2346560 - RNA, 19 nt, Artificial Sequence
  Description of Artificial Sequence: Synthetic oligonucleotide
guuuccguuaccgcacuca

SEQ ID NO: 2346561 - RNA, 19 nt, Artificial Sequence
  Description of Artificial Sequence: Synthetic oligonucleotide
aagugcacucacugccuuu

SEQ ID NO: 2346562 - RNA, 19 nt, Artificial Sequence
  Description of Artificial Sequence: Synthetic oligonucleotide
ugcugacaaucuacaccca

SEQ ID NO: 2346563 - RNA, 19 nt, Artificial Sequence
  Description of Artificial Sequence: Synthetic oligonucleotide
aauccacuacugauggcuu

SEQ ID NO: 2346564 - RNA, 19 nt, Artificial Sequence
  Description of Artificial Sequence: Synthetic oligonucleotide
agcacauguugaguaagaa

SEQ ID NO: 2346565 - RNA, 19 nt, Artificial Sequence
  Description of Artificial Sequence: Synthetic oligonucleotide
ugccuuuauagagcucugu

SEQ ID NO: 2346566 - RNA, 19 nt, Artificial Sequence
  Description of Artificial Sequence: Synthetic oligonucleotide
gcugacaaucuacacccac

SEQ ID NO: 2346567 - RNA, 19 nt, Artificial Sequence
  Description of Artificial Sequence: Synthetic oligonucleotide
guaaccgcugccugacaca

SEQ ID NO: 2346568 - RNA, 19 nt, Artificial Sequence
  Description of Artificial Sequence: Synthetic oligonucleotide
augguuccagucacucaac

SEQ ID NO: 2346569 - RNA, 19 nt, Artificial Sequence
  Description of Artificial Sequence: Synthetic oligonucleotide
cguuaccgcacucagcagg

SEQ ID NO: 2346570 - RNA, 19 nt, Artificial Sequence
  Description of Artificial Sequence: Synthetic oligonucleotide
gaaggccuaucucuuccaa

SEQ ID NO: 2346571 - RNA, 19 nt, Artificial Sequence
  Description of Artificial Sequence: Synthetic oligonucleotide
acucaacuaagaacauaca

SEQ ID NO: 2346572 - RNA, 19 nt, Artificial Sequence
  Description of Artificial Sequence: Synthetic oligonucleotide
cauuucaaccucuggggcu

SEQ ID NO: 2346573 - RNA, 19 nt, Artificial Sequence
  Description of Artificial Sequence: Synthetic oligonucleotide
gauggagaaccuagcuauc

SEQ ID NO: 2346574 - RNA, 19 nt, Artificial Sequence
  Description of Artificial Sequence: Synthetic oligonucleotide
uggugggcagagccuaaaa

SEQ ID NO: 2346575 - RNA, 19 nt, Artificial Sequence
  Description of Artificial Sequence: Synthetic oligonucleotide
gacaucaaaaugucccguu

SEQ ID NO: 2346576 - RNA, 19 nt, Artificial Sequence
  Description of Artificial Sequence: Synthetic oligonucleotide
cauuacagcagccuuucau

SEQ ID NO: 2346577 - RNA, 19 nt, Artificial Sequence
  Description of Artificial Sequence: Synthetic oligonucleotide
cucugugcucauccgugac

SEQ ID NO: 2346578 - RNA, 19 nt, Artificial Sequence
  Description of Artificial Sequence: Synthetic oligonucleotide
guuaccgcacucagcagga

SEQ ID NO: 2346579 - RNA, 19 nt, Artificial Sequence
  Description of Artificial Sequence: Synthetic oligonucleotide
gccugacacaccuuccaag

SEQ ID NO: 2346580 - RNA, 19 nt, Artificial Sequence
  Description of Artificial Sequence: Synthetic oligonucleotide
ggcauagauugguuccagc

SEQ ID NO: 2346581 - RNA, 19 nt, Artificial Sequence
  Description of Artificial Sequence: Synthetic oligonucleotide
cagaggcucuggacaacag

SEQ ID NO: 2346582 - RNA, 19 nt, Artificial Sequence
  Description of Artificial Sequence: Synthetic oligonucleotide
cacucacugccuuuauaga

SEQ ID NO: 2346583 - RNA, 19 nt, Artificial Sequence
  Description of Artificial Sequence: Synthetic oligonucleotide
cauaaggaguggucaguaa

SEQ ID NO: 2346584 - RNA, 19 nt, Artificial Sequence
  Description of Artificial Sequence: Synthetic oligonucleotide
guaucguguuuggaugcug

SEQ ID NO: 2346585 - RNA, 19 nt, Artificial Sequence
  Description of Artificial Sequence: Synthetic oligonucleotide
gugccucugugcucauccg

SEQ ID NO: 2346586 - RNA, 19 nt, Artificial Sequence
  Description of Artificial Sequence: Synthetic oligonucleotide
acucaggcaagugcacuca

SEQ ID NO: 2346587 - RNA, 19 nt, Artificial Sequence
  Description of Artificial Sequence: Synthetic oligonucleotide
ggucaguaaccgcugccug

SEQ ID NO: 2346588 - RNA, 19 nt, Artificial Sequence
  Description of Artificial Sequence: Synthetic oligonucleotide
acacgaaaguugucaucaa

SEQ ID NO: 2346589 - RNA, 19 nt, Artificial Sequence
  Description of Artificial Sequence: Synthetic oligonucleotide
gucccguuuccguuaccgc

SEQ ID NO: 2346590 - RNA, 19 nt, Artificial Sequence
  Description of Artificial Sequence: Synthetic oligonucleotide
guuuggaugcugacaaucu

SEQ ID NO: 2346591 - RNA, 19 nt, Artificial Sequence
  Description of Artificial Sequence: Synthetic oligonucleotide
aucuacacccacggagucu

SEQ ID NO: 2346592 - RNA, 19 nt, Artificial Sequence
  Description of Artificial Sequence: Synthetic oligonucleotide
gcugggaauucacuggcuc

SEQ ID NO: 2346593 - RNA, 19 nt, Artificial Sequence
  Description of Artificial Sequence: Synthetic oligonucleotide
agcaggacauagcggccga

SEQ ID NO: 2346594 - RNA, 19 nt, Artificial Sequence
  Description of Artificial Sequence: Synthetic oligonucleotide
cugccuuuauagagcucug

SEQ ID NO: 2346595 - RNA, 19 nt, Artificial Sequence
  Description of Artificial Sequence: Synthetic oligonucleotide
augucccguuuccguuacc

SEQ ID NO: 2346596 - RNA, 19 nt, Artificial Sequence
  Description of Artificial Sequence: Synthetic oligonucleotide
gaacagagaguuguaucgu

SEQ ID NO: 2346597 - RNA, 19 nt, Artificial Sequence
  Description of Artificial Sequence: Synthetic oligonucleotide
agugcacucacugccuuua

SEQ ID NO: 2346598 - RNA, 19 nt, Artificial Sequence
  Description of Artificial Sequence: Synthetic oligonucleotide
cagcacauguugaguaaga

SEQ ID NO: 2346599 - RNA, 19 nt, Artificial Sequence
  Description of Artificial Sequence: Synthetic oligonucleotide
gagguuuguuuuagugaca

SEQ ID NO: 2346600 - RNA, 19 nt, Artificial Sequence
  Description of Artificial Sequence: Synthetic oligonucleotide
acacccacggagucuguuu

SEQ ID NO: 2346601 - RNA, 19 nt, Artificial Sequence
  Description of Artificial Sequence: Synthetic oligonucleotide
ggucugaagacacgaaagu

SEQ ID NO: 2346602 - RNA, 19 nt, Artificial Sequence
  Description of Artificial Sequence: Synthetic oligonucleotide
acccacggagucuguuuug

SEQ ID NO: 2346603 - RNA, 19 nt, Artificial Sequence
  Description of Artificial Sequence: Synthetic oligonucleotide
caccgaggaagauaaagau

SEQ ID NO: 2346604 - RNA, 19 nt, Artificial Sequence
  Description of Artificial Sequence: Synthetic oligonucleotide
auggcgcugaggaaagcca

SEQ ID NO: 2346605 - RNA, 19 nt, Artificial Sequence
  Description of Artificial Sequence: Synthetic oligonucleotide
caggacauagcggccgaug

SEQ ID NO: 2346606 - RNA, 19 nt, Artificial Sequence
  Description of Artificial Sequence: Synthetic oligonucleotide
gacacaccuuccaagcugu

SEQ ID NO: 2346607 - RNA, 19 nt, Artificial Sequence
  Description of Artificial Sequence: Synthetic oligonucleotide
auuggucugaagacacgaa

SEQ ID NO: 2346608 - RNA, 19 nt, Artificial Sequence
  Description of Artificial Sequence: Synthetic oligonucleotide
ggcucuggacaacagcaca

SEQ ID NO: 2346609 - RNA, 19 nt, Artificial Sequence
  Description of Artificial Sequence: Synthetic oligonucleotide
cacggagucuguuuugcua

SEQ ID NO: 2346610 - RNA, 19 nt, Artificial Sequence
  Description of Artificial Sequence: Synthetic oligonucleotide
agauugguuccagcacaug

SEQ ID NO: 2346611 - RNA, 19 nt, Artificial Sequence
  Description of Artificial Sequence: Synthetic oligonucleotide
gaguuguaucguguuugga

SEQ ID NO: 2346612 - RNA, 19 nt, Artificial Sequence
  Description of Artificial Sequence: Synthetic oligonucleotide
uucuguuggugggcagagc

SEQ ID NO: 2346613 - RNA, 19 nt, Artificial Sequence
  Description of Artificial Sequence: Synthetic oligonucleotide
gggaaaagcagcagaacua

SEQ ID NO: 2346614 - RNA, 19 nt, Artificial Sequence
  Description of Artificial Sequence: Synthetic oligonucleotide
ggccuaucucuuccaaaug

SEQ ID NO: 2346615 - RNA, 19 nt, Artificial Sequence
  Description of Artificial Sequence: Synthetic oligonucleotide
gcaccgaggaagauaaaga

SEQ ID NO: 2346616 - RNA, 19 nt, Artificial Sequence
  Description of Artificial Sequence: Synthetic oligonucleotide
ggaguggucaguaaccgcu

SEQ ID NO: 2346617 - RNA, 19 nt, Artificial Sequence
  Description of Artificial Sequence: Synthetic oligonucleotide
auagagcucuguggaauua

SEQ ID NO: 2346618 - RNA, 19 nt, Artificial Sequence
  Description of Artificial Sequence: Synthetic oligonucleotide
uggcuugacugaacaucua

SEQ ID NO: 2346619 - RNA, 19 nt, Artificial Sequence
  Description of Artificial Sequence: Synthetic oligonucleotide
gcgaggaggaacacgccag

SEQ ID NO: 2346620 - RNA, 19 nt, Artificial Sequence
  Description of Artificial Sequence: Synthetic oligonucleotide
cuccaagaaagauggcgcu

SEQ ID NO: 2346621 - RNA, 19 nt, Artificial Sequence
  Description of Artificial Sequence: Synthetic oligonucleotide
acauagcggccgaugaaaa

SEQ ID NO: 2346622 - RNA, 19 nt, Artificial Sequence
  Description of Artificial Sequence: Synthetic oligonucleotide
cuucucccuaaauccacua

SEQ ID NO: 2346623 - RNA, 19 nt, Artificial Sequence
  Description of Artificial Sequence: Synthetic oligonucleotide
gaccgcagugguuuggcau

SEQ ID NO: 2346624 - RNA, 19 nt, Artificial Sequence
  Description of Artificial Sequence: Synthetic oligonucleotide
gacccagaucagagcgagg

SEQ ID NO: 2346625 - RNA, 19 nt, Artificial Sequence
  Description of Artificial Sequence: Synthetic oligonucleotide
uccuggagugugggcacug

SEQ ID NO: 2346626 - RNA, 19 nt, Artificial Sequence
  Description of Artificial Sequence: Synthetic oligonucleotide
aggaacacgccagcaccca

SEQ ID NO: 2346627 - RNA, 19 nt, Artificial Sequence
  Description of Artificial Sequence: Synthetic oligonucleotide
cagaucacuguuacuacuu

SEQ ID NO: 2346628 - RNA, 19 nt, Artificial Sequence
  Description of Artificial Sequence: Synthetic oligonucleotide
ggcucaagagguuuguuuu

SEQ ID NO: 2346629 - RNA, 19 nt, Artificial Sequence
  Description of Artificial Sequence: Synthetic oligonucleotide
aggcaucuacaaucuucau

SEQ ID NO: 2346630 - RNA, 19 nt, Artificial Sequence
  Description of Artificial Sequence: Synthetic oligonucleotide
ccagcacauguugaguaag

SEQ ID NO: 2346631 - RNA, 19 nt, Artificial Sequence
  Description of Artificial Sequence: Synthetic oligonucleotide
gguuccagucacucaacua

SEQ ID NO: 2346632 - RNA, 19 nt, Artificial Sequence
  Description of Artificial Sequence: Synthetic oligonucleotide
cacuguuacuacuuuccau

SEQ ID NO: 2346633 - RNA, 19 nt, Artificial Sequence
  Description of Artificial Sequence: Synthetic oligonucleotide
gagcgaggaggaacacgcc

SEQ ID NO: 2346634 - RNA, 19 nt, Artificial Sequence
  Description of Artificial Sequence: Synthetic oligonucleotide
uuggugggcagagccuaaa

SEQ ID NO: 2346635 - RNA, 19 nt, Artificial Sequence
  Description of Artificial Sequence: Synthetic oligonucleotide
ggcaucuacaaucuucauu

SEQ ID NO: 2346636 - RNA, 19 nt, Artificial Sequence
  Description of Artificial Sequence: Synthetic oligonucleotide
gcagcagaacuauaguaau

SEQ ID NO: 2346637 - RNA, 19 nt, Artificial Sequence
  Description of Artificial Sequence: Synthetic oligonucleotide
ggaacucaggcaagugcac

SEQ ID NO: 2346638 - RNA, 19 nt, Artificial Sequence
  Description of Artificial Sequence: Synthetic oligonucleotide
gucugaagacacgaaaguu

SEQ ID NO: 2346639 - RNA, 19 nt, Artificial Sequence
  Description of Artificial Sequence: Synthetic oligonucleotide
caccuuccaagcuguuaca

SEQ ID NO: 2346640 - RNA, 19 nt, Artificial Sequence
  Description of Artificial Sequence: Synthetic oligonucleotide
ccaagaaagauggcgcuga

SEQ ID NO: 2346641 - RNA, 19 nt, Artificial Sequence
  Description of Artificial Sequence: Synthetic oligonucleotide
gaacacgccagcacccacu

SEQ ID NO: 2346642 - RNA, 19 nt, Artificial Sequence
  Description of Artificial Sequence: Synthetic oligonucleotide
acccacucccagaaccaug

SEQ ID NO: 2346643 - RNA, 19 nt, Artificial Sequence
  Description of Artificial Sequence: Synthetic oligonucleotide
gcagaucacuguuacuacu

SEQ ID NO: 2346644 - RNA, 19 nt, Artificial Sequence
  Description of Artificial Sequence: Synthetic oligonucleotide
gccucugugcucauccgug

SEQ ID NO: 2346645 - RNA, 19 nt, Artificial Sequence
  Description of Artificial Sequence: Synthetic oligonucleotide
ucagagcaccgaggaagau

SEQ ID NO: 2346646 - RNA, 19 nt, Artificial Sequence
  Description of Artificial Sequence: Synthetic oligonucleotide
gcacauguugaguaagaau

SEQ ID NO: 2346647 - RNA, 19 nt, Artificial Sequence
  Description of Artificial Sequence: Synthetic oligonucleotide
gggaauucacuggcucgag

SEQ ID NO: 2346648 - RNA, 19 nt, Artificial Sequence
  Description of Artificial Sequence: Synthetic oligonucleotide
agaucagagcgaggaggaa

SEQ ID NO: 2346649 - RNA, 19 nt, Artificial Sequence
  Description of Artificial Sequence: Synthetic oligonucleotide
cacuggcucgagggaaaag

SEQ ID NO: 2346650 - RNA, 19 nt, Artificial Sequence
  Description of Artificial Sequence: Synthetic oligonucleotide
cagagcaccgaggaagaua

SEQ ID NO: 2346651 - RNA, 19 nt, Artificial Sequence
  Description of Artificial Sequence: Synthetic oligonucleotide
cacugccuuuauagagcuc

SEQ ID NO: 2346652 - RNA, 19 nt, Artificial Sequence
  Description of Artificial Sequence: Synthetic oligonucleotide
ccagggcucaagagguuug

SEQ ID NO: 2346653 - RNA, 19 nt, Artificial Sequence
  Description of Artificial Sequence: Synthetic oligonucleotide
ggacauagcggccgaugaa

SEQ ID NO: 2346654 - RNA, 19 nt, Artificial Sequence
  Description of Artificial Sequence: Synthetic oligonucleotide
cagagaguuguaucguguu

SEQ ID NO: 2346655 - RNA, 19 nt, Artificial Sequence
  Description of Artificial Sequence: Synthetic oligonucleotide
cccacggagucuguuuugc

SEQ ID NO: 2346656 - RNA, 19 nt, Artificial Sequence
  Description of Artificial Sequence: Synthetic oligonucleotide
caagcagaucacuguuacu

SEQ ID NO: 2346657 - RNA, 19 nt, Artificial Sequence
  Description of Artificial Sequence: Synthetic oligonucleotide
gcucaagagguuuguuuua

SEQ ID NO: 2346658 - RNA, 19 nt, Artificial Sequence
  Description of Artificial Sequence: Synthetic oligonucleotide
cuggagugugggcacugaa

SEQ ID NO: 2346659 - RNA, 19 nt, Artificial Sequence
  Description of Artificial Sequence: Synthetic oligonucleotide
cccuaaauccacuacugau

SEQ ID NO: 2346660 - RNA, 19 nt, Artificial Sequence
  Description of Artificial Sequence: Synthetic oligonucleotide
cccagaucagagcgaggag

SEQ ID NO: 2346661 - RNA, 19 nt, Artificial Sequence
  Description of Artificial Sequence: Synthetic oligonucleotide
caucaaggcuccagagagu

SEQ ID NO: 2346662 - RNA, 19 nt, Artificial Sequence
  Description of Artificial Sequence: Synthetic oligonucleotide
cagugguuuggcauagauu

SEQ ID NO: 2346663 - RNA, 19 nt, Artificial Sequence
  Description of Artificial Sequence: Synthetic oligonucleotide
caucuaccccaagcagauc

SEQ ID NO: 2346664 - RNA, 19 nt, Artificial Sequence
  Description of Artificial Sequence: Synthetic oligonucleotide
cacuacugauggcuugacu

SEQ ID NO: 2346665 - RNA, 19 nt, Artificial Sequence
  Description of Artificial Sequence: Synthetic oligonucleotide
gcaggaccgcagugguuug

SEQ ID NO: 2346666 - RNA, 19 nt, Artificial Sequence
  Description of Artificial Sequence: Synthetic oligonucleotide
gcucauccgugacaucaaa

SEQ ID NO: 2346667 - RNA, 19 nt, Artificial Sequence
  Description of Artificial Sequence: Synthetic oligonucleotide
gucacucaacuaagaacau

SEQ ID NO: 2346668 - RNA, 19 nt, Artificial Sequence
  Description of Artificial Sequence: Synthetic oligonucleotide
cuggggcugggaauucacu

SEQ ID NO: 2346669 - RNA, 19 nt, Artificial Sequence
  Description of Artificial Sequence: Synthetic oligonucleotide
agagugccucugugcucau

SEQ ID NO: 2346670 - RNA, 19 nt, Artificial Sequence
  Description of Artificial Sequence: Synthetic oligonucleotide
guuggugggcagagccuaa

SEQ ID NO: 2346671 - RNA, 19 nt, Artificial Sequence
  Description of Artificial Sequence: Synthetic oligonucleotide
gagugccucugugcucauc

SEQ ID NO: 2346672 - RNA, 19 nt, Artificial Sequence
  Description of Artificial Sequence: Synthetic oligonucleotide
caguaaccgcugccugaca

SEQ ID NO: 2346673 - RNA, 19 nt, Artificial Sequence
  Description of Artificial Sequence: Synthetic oligonucleotide
gcacccacucccagaacca

SEQ ID NO: 2346674 - RNA, 19 nt, Artificial Sequence
  Description of Artificial Sequence: Synthetic oligonucleotide
ccguuaccgcacucagcag

SEQ ID NO: 2346675 - RNA, 19 nt, Artificial Sequence
  Description of Artificial Sequence: Synthetic oligonucleotide
ggaccgcagugguuuggca

SEQ ID NO: 2346676 - RNA, 19 nt, Artificial Sequence
  Description of Artificial Sequence: Synthetic oligonucleotide
acgccagcacccacuccca

SEQ ID NO: 2346677 - RNA, 19 nt, Artificial Sequence
  Description of Artificial Sequence: Synthetic oligonucleotide
cacccacggagucuguuuu

SEQ ID NO: 2346678 - RNA, 19 nt, Artificial Sequence
  Description of Artificial Sequence: Synthetic oligonucleotide
ccacuacugauggcuugac

SEQ ID NO: 2346679 - RNA, 19 nt, Artificial Sequence
  Description of Artificial Sequence: Synthetic oligonucleotide
ccgcagugguuuggcauag

SEQ ID NO: 2346680 - RNA, 19 nt, Artificial Sequence
  Description of Artificial Sequence: Synthetic oligonucleotide
ccuagcuaucccagaggcu

SEQ ID NO: 2346681 - RNA, 19 nt, Artificial Sequence
  Description of Artificial Sequence: Synthetic oligonucleotide
gagcaccgaggaagauaaa

SEQ ID NO: 2346682 - RNA, 19 nt, Artificial Sequence
  Description of Artificial Sequence: Synthetic oligonucleotide
cccagaggcucuggacaac

SEQ ID NO: 2346683 - RNA, 19 nt, Artificial Sequence
  Description of Artificial Sequence: Synthetic oligonucleotide
cuacacccacggagucugu

SEQ ID NO: 2346684 - RNA, 19 nt, Artificial Sequence
  Description of Artificial Sequence: Synthetic oligonucleotide
cguuuccguuaccgcacuc

SEQ ID NO: 2346685 - RNA, 19 nt, Artificial Sequence
  Description of Artificial Sequence: Synthetic oligonucleotide
ccccaagcagaucacuguu

SEQ ID NO: 2346686 - RNA, 19 nt, Artificial Sequence
  Description of Artificial Sequence: Synthetic oligonucleotide
cacccacucccagaaccau

SEQ ID NO: 2346687 - RNA, 19 nt, Artificial Sequence
  Description of Artificial Sequence: Synthetic oligonucleotide
gccagggcucaagagguuu

SEQ ID NO: 2346688 - RNA, 19 nt, Artificial Sequence
  Description of Artificial Sequence: Synthetic oligonucleotide
ccacggagucuguuuugcu

SEQ ID NO: 2346689 - RNA, 19 nt, Artificial Sequence
  Description of Artificial Sequence: Synthetic oligonucleotide
ccguuuccguuaccgcacu

SEQ ID NO: 2346690 - RNA, 19 nt, Artificial Sequence
  Description of Artificial Sequence: Synthetic oligonucleotide
gcaggacauagcggccgau

SEQ ID NO: 2346691 - RNA, 19 nt, Artificial Sequence
  Description of Artificial Sequence: Synthetic oligonucleotide
cgcagugguuuggcauaga

SEQ ID NO: 2346692 - RNA, 19 nt, Artificial Sequence
  Description of Artificial Sequence: Synthetic oligonucleotide
ccgcugccugacacaccuu

SEQ ID NO: 2346693 - RNA, 19 nt, Artificial Sequence
  Description of Artificial Sequence: Synthetic oligonucleotide
uuuaauauacaucacauga

SEQ ID NO: 2346694 - RNA, 19 nt, Artificial Sequence
  Description of Artificial Sequence: Synthetic oligonucleotide
aaaauguuaacuuuuauaa

SEQ ID NO: 2346695 - RNA, 19 nt, Artificial Sequence
  Description of Artificial Sequence: Synthetic oligonucleotide
aauguuaacuuuuauaaaa

SEQ ID NO: 2346696 - RNA, 19 nt, Artificial Sequence
  Description of Artificial Sequence: Synthetic oligonucleotide
uauauacucuauuauagag

SEQ ID NO: 2346697 - RNA, 19 nt, Artificial Sequence
  Description of Artificial Sequence: Synthetic oligonucleotide
aaagccagucuuuuaagac

SEQ ID NO: 2346698 - RNA, 19 nt, Artificial Sequence
  Description of Artificial Sequence: Synthetic oligonucleotide
ucuauuauagaguucauaa

SEQ ID NO: 2346699 - RNA, 19 nt, Artificial Sequence
  Description of Artificial Sequence: Synthetic oligonucleotide
uguuuauuaugcaaaaugu

SEQ ID NO: 2346700 - RNA, 19 nt, Artificial Sequence
  Description of Artificial Sequence: Synthetic oligonucleotide
auauacaucacaugauuac

SEQ ID NO: 2346701 - RNA, 19 nt, Artificial Sequence
  Description of Artificial Sequence: Synthetic oligonucleotide
uuaggggaagugaagaggg

SEQ ID NO: 2346702 - RNA, 19 nt, Artificial Sequence
  Description of Artificial Sequence: Synthetic oligonucleotide
auguuuauuaugcaaaaug

SEQ ID NO: 2346703 - RNA, 19 nt, Artificial Sequence
  Description of Artificial Sequence: Synthetic oligonucleotide
caugauuacagaaagucac

SEQ ID NO: 2346704 - RNA, 19 nt, Artificial Sequence
  Description of Artificial Sequence: Synthetic oligonucleotide
aaagcuauauacucuauua

SEQ ID NO: 2346705 - RNA, 19 nt, Artificial Sequence
  Description of Artificial Sequence: Synthetic oligonucleotide
guagcagugguucaugucg

SEQ ID NO: 2346706 - RNA, 19 nt, Artificial Sequence
  Description of Artificial Sequence: Synthetic oligonucleotide
agaucagaaaaccagcucu

SEQ ID NO: 2346707 - RNA, 19 nt, Artificial Sequence
  Description of Artificial Sequence: Synthetic oligonucleotide
uuggagaucacaaguuccg

SEQ ID NO: 2346708 - RNA, 19 nt, Artificial Sequence
  Description of Artificial Sequence: Synthetic oligonucleotide
uaagacuugggagucaggg

SEQ ID NO: 2346709 - RNA, 19 nt, Artificial Sequence
  Description of Artificial Sequence: Synthetic oligonucleotide
aaggagaucagaaaaccag

SEQ ID NO: 2346710 - RNA, 19 nt, Artificial Sequence
  Description of Artificial Sequence: Synthetic oligonucleotide
uuuaggggaagugaagagg

SEQ ID NO: 2346711 - RNA, 19 nt, Artificial Sequence
  Description of Artificial Sequence: Synthetic oligonucleotide
aaaagccagucuuuuaaga

SEQ ID NO: 2346712 - RNA, 19 nt, Artificial Sequence
  Description of Artificial Sequence: Synthetic oligonucleotide
aaauguuaacuuuuauaaa

SEQ ID NO: 2346713 - RNA, 19 nt, Artificial Sequence
  Description of Artificial Sequence: Synthetic oligonucleotide
aaaguuuaauauacaucac

SEQ ID NO: 2346714 - RNA, 19 nt, Artificial Sequence
  Description of Artificial Sequence: Synthetic oligonucleotide
uuaugcaaaauguuaacuu

SEQ ID NO: 2346715 - RNA, 19 nt, Artificial Sequence
  Description of Artificial Sequence: Synthetic oligonucleotide
ucuuacgcugccuuggcag

SEQ ID NO: 2346716 - RNA, 19 nt, Artificial Sequence
  Description of Artificial Sequence: Synthetic oligonucleotide
uaagcugagugccucgcgg

SEQ ID NO: 2346717 - RNA, 19 nt, Artificial Sequence
  Description of Artificial Sequence: Synthetic oligonucleotide
ucauaaucagggcagcaga

SEQ ID NO: 2346718 - RNA, 19 nt, Artificial Sequence
  Description of Artificial Sequence: Synthetic oligonucleotide
gaggauguagucuaugaca

SEQ ID NO: 2346719 - RNA, 19 nt, Artificial Sequence
  Description of Artificial Sequence: Synthetic oligonucleotide
aaaagcuauauacucuauu

SEQ ID NO: 2346720 - RNA, 19 nt, Artificial Sequence
  Description of Artificial Sequence: Synthetic oligonucleotide
aagccagucuuuuaagacu

SEQ ID NO: 2346721 - RNA, 19 nt, Artificial Sequence
  Description of Artificial Sequence: Synthetic oligonucleotide
uaugcaaaauguuaacuuu

SEQ ID NO: 2346722 - RNA, 19 nt, Artificial Sequence
  Description of Artificial Sequence: Synthetic oligonucleotide
ucuggaucgggagaugugg

SEQ ID NO: 2346723 - RNA, 19 nt, Artificial Sequence
  Description of Artificial Sequence: Synthetic oligonucleotide
uguagucuaugacacgcug

SEQ ID NO: 2346724 - RNA, 19 nt, Artificial Sequence
  Description of Artificial Sequence: Synthetic oligonucleotide
uauacaucacaugauuaca

SEQ ID NO: 2346725 - RNA, 19 nt, Artificial Sequence
  Description of Artificial Sequence: Synthetic oligonucleotide
agcgcuagcucuucaggcc

SEQ ID NO: 2346726 - RNA, 19 nt, Artificial Sequence
  Description of Artificial Sequence: Synthetic oligonucleotide
uccgagaggcagcacaccg

SEQ ID NO: 2346727 - RNA, 19 nt, Artificial Sequence
  Description of Artificial Sequence: Synthetic oligonucleotide
gaguucauaaucagggcag

SEQ ID NO: 2346728 - RNA, 19 nt, Artificial Sequence
  Description of Artificial Sequence: Synthetic oligonucleotide
ucagaaaaccagcucuuac

SEQ ID NO: 2346729 - RNA, 19 nt, Artificial Sequence
  Description of Artificial Sequence: Synthetic oligonucleotide
gaucacaaguuccggagug

SEQ ID NO: 2346730 - RNA, 19 nt, Artificial Sequence
  Description of Artificial Sequence: Synthetic oligonucleotide
gcuauauacucuauuauag

SEQ ID NO: 2346731 - RNA, 19 nt, Artificial Sequence
  Description of Artificial Sequence: Synthetic oligonucleotide
uucauaaucagggcagcag

SEQ ID NO: 2346732 - RNA, 19 nt, Artificial Sequence
  Description of Artificial Sequence: Synthetic oligonucleotide
ucuaugacacgcugcagga

SEQ ID NO: 2346733 - RNA, 19 nt, Artificial Sequence
  Description of Artificial Sequence: Synthetic oligonucleotide
aguuuaauauacaucacau

SEQ ID NO: 2346734 - RNA, 19 nt, Artificial Sequence
  Description of Artificial Sequence: Synthetic oligonucleotide
aggagaucagaaaaccagc

SEQ ID NO: 2346735 - RNA, 19 nt, Artificial Sequence
  Description of Artificial Sequence: Synthetic oligonucleotide
accgcuucguagcagccgc

SEQ ID NO: 2346736 - RNA, 19 nt, Artificial Sequence
  Description of Artificial Sequence: Synthetic oligonucleotide
ucgaggcucauccaugccc

SEQ ID NO: 2346737 - RNA, 19 nt, Artificial Sequence
  Description of Artificial Sequence: Synthetic oligonucleotide
cauaaucagggcagcagag

SEQ ID NO: 2346738 - RNA, 19 nt, Artificial Sequence
  Description of Artificial Sequence: Synthetic oligonucleotide
aggggaagugaagagggcc

SEQ ID NO: 2346739 - RNA, 19 nt, Artificial Sequence
  Description of Artificial Sequence: Synthetic oligonucleotide
agcuauauacucuauuaua

SEQ ID NO: 2346740 - RNA, 19 nt, Artificial Sequence
  Description of Artificial Sequence: Synthetic oligonucleotide
aagcugagugccucgcggg

SEQ ID NO: 2346741 - RNA, 19 nt, Artificial Sequence
  Description of Artificial Sequence: Synthetic oligonucleotide
guuuaggggaagugaagag

SEQ ID NO: 2346742 - RNA, 19 nt, Artificial Sequence
  Description of Artificial Sequence: Synthetic oligonucleotide
uagaguucauaaucagggc

SEQ ID NO: 2346743 - RNA, 19 nt, Artificial Sequence
  Description of Artificial Sequence: Synthetic oligonucleotide
aauguuuauuaugcaaaau

SEQ ID NO: 2346744 - RNA, 19 nt, Artificial Sequence
  Description of Artificial Sequence: Synthetic oligonucleotide
ugauuacagaaagucaccu

SEQ ID NO: 2346745 - RNA, 19 nt, Artificial Sequence
  Description of Artificial Sequence: Synthetic oligonucleotide
ucucggaaaagccagucuu

SEQ ID NO: 2346746 - RNA, 19 nt, Artificial Sequence
  Description of Artificial Sequence: Synthetic oligonucleotide
agucccagggucccaagcg

SEQ ID NO: 2346747 - RNA, 19 nt, Artificial Sequence
  Description of Artificial Sequence: Synthetic oligonucleotide
gagauguggacuguccggg

SEQ ID NO: 2346748 - RNA, 19 nt, Artificial Sequence
  Description of Artificial Sequence: Synthetic oligonucleotide
ugcaaaauguuaacuuuua

SEQ ID NO: 2346749 - RNA, 19 nt, Artificial Sequence
  Description of Artificial Sequence: Synthetic oligonucleotide
aguucauaaucagggcagc

SEQ ID NO: 2346750 - RNA, 19 nt, Artificial Sequence
  Description of Artificial Sequence: Synthetic oligonucleotide
ucgaggauguagucuauga

SEQ ID NO: 2346751 - RNA, 19 nt, Artificial Sequence
  Description of Artificial Sequence: Synthetic oligonucleotide
ucagcugucuggaucggga

SEQ ID NO: 2346752 - RNA, 19 nt, Artificial Sequence
  Description of Artificial Sequence: Synthetic oligonucleotide
ugucguuggagaucacaag

SEQ ID NO: 2346753 - RNA, 19 nt, Artificial Sequence
  Description of Artificial Sequence: Synthetic oligonucleotide
cuauauacucuauuauaga

SEQ ID NO: 2346754 - RNA, 19 nt, Artificial Sequence
  Description of Artificial Sequence: Synthetic oligonucleotide
gaucgaggcucauccaugc

SEQ ID NO: 2346755 - RNA, 19 nt, Artificial Sequence
  Description of Artificial Sequence: Synthetic oligonucleotide
ugcaggucgaggauguagu

SEQ ID NO: 2346756 - RNA, 19 nt, Artificial Sequence
  Description of Artificial Sequence: Synthetic oligonucleotide
gcaaaagcuccucuugucg

SEQ ID NO: 2346757 - RNA, 19 nt, Artificial Sequence
  Description of Artificial Sequence: Synthetic oligonucleotide
ucgggaggugccaggaccg

SEQ ID NO: 2346758 - RNA, 19 nt, Artificial Sequence
  Description of Artificial Sequence: Synthetic oligonucleotide
uuaagacuugggagucagg

SEQ ID NO: 2346759 - RNA, 19 nt, Artificial Sequence
  Description of Artificial Sequence: Synthetic oligonucleotide
agcagagccguucuccaag

SEQ ID NO: 2346760 - RNA, 19 nt, Artificial Sequence
  Description of Artificial Sequence: Synthetic oligonucleotide
acagaaagucaccuuccug

SEQ ID NO: 2346761 - RNA, 19 nt, Artificial Sequence
  Description of Artificial Sequence: Synthetic oligonucleotide
guagcagccgcgcaccggg

SEQ ID NO: 2346762 - RNA, 19 nt, Artificial Sequence
  Description of Artificial Sequence: Synthetic oligonucleotide
cuuccggccggagagaggg

SEQ ID NO: 2346763 - RNA, 19 nt, Artificial Sequence
  Description of Artificial Sequence: Synthetic oligonucleotide
ucgaggcagggguuuaggg

SEQ ID NO: 2346764 - RNA, 19 nt, Artificial Sequence
  Description of Artificial Sequence: Synthetic oligonucleotide
caguccuucgcucucgggc

SEQ ID NO: 2346765 - RNA, 19 nt, Artificial Sequence
  Description of Artificial Sequence: Synthetic oligonucleotide
agcaccugcguucgggagg

SEQ ID NO: 2346766 - RNA, 19 nt, Artificial Sequence
  Description of Artificial Sequence: Synthetic oligonucleotide
augcccucgggcuuccggc

SEQ ID NO: 2346767 - RNA, 19 nt, Artificial Sequence
  Description of Artificial Sequence: Synthetic oligonucleotide
uggcaaaagcuccucuugu

SEQ ID NO: 2346768 - RNA, 19 nt, Artificial Sequence
  Description of Artificial Sequence: Synthetic oligonucleotide
aggccacccaaguucaguc

SEQ ID NO: 2346769 - RNA, 19 nt, Artificial Sequence
  Description of Artificial Sequence: Synthetic oligonucleotide
agagggccgggcgagaucg

SEQ ID NO: 2346770 - RNA, 19 nt, Artificial Sequence
  Description of Artificial Sequence: Synthetic oligonucleotide
uccggagugagcucagcug

SEQ ID NO: 2346771 - RNA, 19 nt, Artificial Sequence
  Description of Artificial Sequence: Synthetic oligonucleotide
cuuuuaagacuugggaguc

SEQ ID NO: 2346772 - RNA, 19 nt, Artificial Sequence
  Description of Artificial Sequence: Synthetic oligonucleotide
aaccagcucuuacgcugcc

SEQ ID NO: 2346773 - RNA, 19 nt, Artificial Sequence
  Description of Artificial Sequence: Synthetic oligonucleotide
uucucggaaaagccagucu

SEQ ID NO: 2346774 - RNA, 19 nt, Artificial Sequence
  Description of Artificial Sequence: Synthetic oligonucleotide
ugagcggcuccucugccgc

SEQ ID NO: 2346775 - RNA, 19 nt, Artificial Sequence
  Description of Artificial Sequence: Synthetic oligonucleotide
ggagauguggacuguccgg

SEQ ID NO: 2346776 - RNA, 19 nt, Artificial Sequence
  Description of Artificial Sequence: Synthetic oligonucleotide
aucgaggcucauccaugcc

SEQ ID NO: 2346777 - RNA, 19 nt, Artificial Sequence
  Description of Artificial Sequence: Synthetic oligonucleotide
aaguuccggagugagcuca

SEQ ID NO: 2346778 - RNA, 19 nt, Artificial Sequence
  Description of Artificial Sequence: Synthetic oligonucleotide
cagcacaccgcuucguagc

SEQ ID NO: 2346779 - RNA, 19 nt, Artificial Sequence
  Description of Artificial Sequence: Synthetic oligonucleotide
aagcggaacgggcgccagc

SEQ ID NO: 2346780 - RNA, 19 nt, Artificial Sequence
  Description of Artificial Sequence: Synthetic oligonucleotide
aguccuucgcucucgggcu

SEQ ID NO: 2346781 - RNA, 19 nt, Artificial Sequence
  Description of Artificial Sequence: Synthetic oligonucleotide
ucugccgccgggcucuugc

SEQ ID NO: 2346782 - RNA, 19 nt, Artificial Sequence
  Description of Artificial Sequence: Synthetic oligonucleotide
aagguacaaaagcuauaua

SEQ ID NO: 2346783 - RNA, 19 nt, Artificial Sequence
  Description of Artificial Sequence: Synthetic oligonucleotide
agugaagagggccgggcga

SEQ ID NO: 2346784 - RNA, 19 nt, Artificial Sequence
  Description of Artificial Sequence: Synthetic oligonucleotide
agcucuuacgcugccuugg

SEQ ID NO: 2346785 - RNA, 19 nt, Artificial Sequence
  Description of Artificial Sequence: Synthetic oligonucleotide
agauguggacuguccgggg

SEQ ID NO: 2346786 - RNA, 19 nt, Artificial Sequence
  Description of Artificial Sequence: Synthetic oligonucleotide
gacuugggagucagggugg

SEQ ID NO: 2346787 - RNA, 19 nt, Artificial Sequence
  Description of Artificial Sequence: Synthetic oligonucleotide
cacaccgcuucguagcagc

SEQ ID NO: 2346788 - RNA, 19 nt, Artificial Sequence
  Description of Artificial Sequence: Synthetic oligonucleotide
gcgagaucgaggcucaucc

SEQ ID NO: 2346789 - RNA, 19 nt, Artificial Sequence
  Description of Artificial Sequence: Synthetic oligonucleotide
guagucuaugacacgcugc

SEQ ID NO: 2346790 - RNA, 19 nt, Artificial Sequence
  Description of Artificial Sequence: Synthetic oligonucleotide
cagcgcuagcucuucaggc

SEQ ID NO: 2346791 - RNA, 19 nt, Artificial Sequence
  Description of Artificial Sequence: Synthetic oligonucleotide
cuaagcugagugccucgcg

SEQ ID NO: 2346792 - RNA, 19 nt, Artificial Sequence
  Description of Artificial Sequence: Synthetic oligonucleotide
aagagggccgggcgagauc

SEQ ID NO: 2346793 - RNA, 19 nt, Artificial Sequence
  Description of Artificial Sequence: Synthetic oligonucleotide
ccauucucggaaaagccag

SEQ ID NO: 2346794 - RNA, 19 nt, Artificial Sequence
  Description of Artificial Sequence: Synthetic oligonucleotide
cacgcugcaggauuuccac

SEQ ID NO: 2346795 - RNA, 19 nt, Artificial Sequence
  Description of Artificial Sequence: Synthetic oligonucleotide
caccuggcuaagcugagug

SEQ ID NO: 2346796 - RNA, 19 nt, Artificial Sequence
  Description of Artificial Sequence: Synthetic oligonucleotide
cagggucccaagcggaacg

SEQ ID NO: 2346797 - RNA, 19 nt, Artificial Sequence
  Description of Artificial Sequence: Synthetic oligonucleotide
caccaguucccgcaggcgc

SEQ ID NO: 2346798 - RNA, 19 nt, Artificial Sequence
  Description of Artificial Sequence: Synthetic oligonucleotide
cuugccgcggccccgcgcg

SEQ ID NO: 2346799 - RNA, 19 nt, Artificial Sequence
  Description of Artificial Sequence: Synthetic oligonucleotide
gggagauguggacuguccg

SEQ ID NO: 2346800 - RNA, 19 nt, Artificial Sequence
  Description of Artificial Sequence: Synthetic oligonucleotide
cuucguagcagccgcgcac

SEQ ID NO: 2346801 - RNA, 19 nt, Artificial Sequence
  Description of Artificial Sequence: Synthetic oligonucleotide
aggaccgccgggucagugg

SEQ ID NO: 2346802 - RNA, 19 nt, Artificial Sequence
  Description of Artificial Sequence: Synthetic oligonucleotide
ucuucaggccacccaaguu

SEQ ID NO: 2346803 - RNA, 19 nt, Artificial Sequence
  Description of Artificial Sequence: Synthetic oligonucleotide
gucguuggagaucacaagu

SEQ ID NO: 2346804 - RNA, 19 nt, Artificial Sequence
  Description of Artificial Sequence: Synthetic oligonucleotide
gaccgggugacguugccca

SEQ ID NO: 2346805 - RNA, 19 nt, Artificial Sequence
  Description of Artificial Sequence: Synthetic oligonucleotide
agugccucgcgggacuccc

SEQ ID NO: 2346806 - RNA, 19 nt, Artificial Sequence
  Description of Artificial Sequence: Synthetic oligonucleotide
uucguagcagccgcgcacc

SEQ ID NO: 2346807 - RNA, 19 nt, Artificial Sequence
  Description of Artificial Sequence: Synthetic oligonucleotide
uggaucgggagauguggac

SEQ ID NO: 2346808 - RNA, 19 nt, Artificial Sequence
  Description of Artificial Sequence: Synthetic oligonucleotide
accugcguucgggaggugc

SEQ ID NO: 2346809 - RNA, 19 nt, Artificial Sequence
  Description of Artificial Sequence: Synthetic oligonucleotide
ucccaagcggaacgggcgc

SEQ ID NO: 2346810 - RNA, 19 nt, Artificial Sequence
  Description of Artificial Sequence: Synthetic oligonucleotide
acccaaguucaguccuucg

SEQ ID NO: 2346811 - RNA, 19 nt, Artificial Sequence
  Description of Artificial Sequence: Synthetic oligonucleotide
gucccagggucccaagcgg

SEQ ID NO: 2346812 - RNA, 19 nt, Artificial Sequence
  Description of Artificial Sequence: Synthetic oligonucleotide
ggauguagucuaugacacg

SEQ ID NO: 2346813 - RNA, 19 nt, Artificial Sequence
  Description of Artificial Sequence: Synthetic oligonucleotide
ucaguccuucgcucucggg

SEQ ID NO: 2346814 - RNA, 19 nt, Artificial Sequence
  Description of Artificial Sequence: Synthetic oligonucleotide
gagccguucuccaaggaga

SEQ ID NO: 2346815 - RNA, 19 nt, Artificial Sequence
  Description of Artificial Sequence: Synthetic oligonucleotide
gucccaagcggaacgggcg

SEQ ID NO: 2346816 - RNA, 19 nt, Artificial Sequence
  Description of Artificial Sequence: Synthetic oligonucleotide
agagagggucccagagucc

SEQ ID NO: 2346817 - RNA, 19 nt, Artificial Sequence
  Description of Artificial Sequence: Synthetic oligonucleotide
cucagcgccuucauguuga

SEQ ID NO: 2346818 - RNA, 19 nt, Artificial Sequence
  Description of Artificial Sequence: Synthetic oligonucleotide
cugagcggcuccucugccg

SEQ ID NO: 2346819 - RNA, 19 nt, Artificial Sequence
  Description of Artificial Sequence: Synthetic oligonucleotide
ggggaagugaagagggccg

SEQ ID NO: 2346820 - RNA, 19 nt, Artificial Sequence
  Description of Artificial Sequence: Synthetic oligonucleotide
acucccggcaccaguuccc

SEQ ID NO: 2346821 - RNA, 19 nt, Artificial Sequence
  Description of Artificial Sequence: Synthetic oligonucleotide
caguccagccucgaggcag

SEQ ID NO: 2346822 - RNA, 19 nt, Artificial Sequence
  Description of Artificial Sequence: Synthetic oligonucleotide
acguugcccagcugcugac

SEQ ID NO: 2346823 - RNA, 19 nt, Artificial Sequence
  Description of Artificial Sequence: Synthetic oligonucleotide
aggcugcguuccgagaggc

SEQ ID NO: 2346824 - RNA, 19 nt, Artificial Sequence
  Description of Artificial Sequence: Synthetic oligonucleotide
agaucgaggcucauccaug

SEQ ID NO: 2346825 - RNA, 19 nt, Artificial Sequence
  Description of Artificial Sequence: Synthetic oligonucleotide
caggauuuccaccuggcua

SEQ ID NO: 2346826 - RNA, 19 nt, Artificial Sequence
  Description of Artificial Sequence: Synthetic oligonucleotide
ggucaguggcaaaagcucc

SEQ ID NO: 2346827 - RNA, 19 nt, Artificial Sequence
  Description of Artificial Sequence: Synthetic oligonucleotide
cagugguucaugucgucca

SEQ ID NO: 2346828 - RNA, 19 nt, Artificial Sequence
  Description of Artificial Sequence: Synthetic oligonucleotide
gacacgcugcaggauuucc

SEQ ID NO: 2346829 - RNA, 19 nt, Artificial Sequence
  Description of Artificial Sequence: Synthetic oligonucleotide
ucggaaaagccagucuuuu

SEQ ID NO: 2346830 - RNA, 19 nt, Artificial Sequence
  Description of Artificial Sequence: Synthetic oligonucleotide
agcacaccgcuucguagca

SEQ ID NO: 2346831 - RNA, 19 nt, Artificial Sequence
  Description of Artificial Sequence: Synthetic oligonucleotide
gugaagagggccgggcgag

SEQ ID NO: 2346832 - RNA, 19 nt, Artificial Sequence
  Description of Artificial Sequence: Synthetic oligonucleotide
cugcguuccgagaggcagc

SEQ ID NO: 2346833 - RNA, 19 nt, Artificial Sequence
  Description of Artificial Sequence: Synthetic oligonucleotide
gagaucgaggcucauccau

SEQ ID NO: 2346834 - RNA, 19 nt, Artificial Sequence
  Description of Artificial Sequence: Synthetic oligonucleotide
ggagucaggguggggaccg

SEQ ID NO: 2346835 - RNA, 19 nt, Artificial Sequence
  Description of Artificial Sequence: Synthetic oligonucleotide
cuugucguuggagaucaca

SEQ ID NO: 2346836 - RNA, 19 nt, Artificial Sequence
  Description of Artificial Sequence: Synthetic oligonucleotide
ugcguuccgagaggcagca

SEQ ID NO: 2346837 - RNA, 19 nt, Artificial Sequence
  Description of Artificial Sequence: Synthetic oligonucleotide
ucaguggcaaaagcuccuc

SEQ ID NO: 2346838 - RNA, 19 nt, Artificial Sequence
  Description of Artificial Sequence: Synthetic oligonucleotide
aucacaaguuccggaguga

SEQ ID NO: 2346839 - RNA, 19 nt, Artificial Sequence
  Description of Artificial Sequence: Synthetic oligonucleotide
uuacgcugccuuggcagug

SEQ ID NO: 2346840 - RNA, 19 nt, Artificial Sequence
  Description of Artificial Sequence: Synthetic oligonucleotide
gcugcguuccgagaggcag

SEQ ID NO: 2346841 - RNA, 19 nt, Artificial Sequence
  Description of Artificial Sequence: Synthetic oligonucleotide
agccagucuuuuaagacuu

SEQ ID NO: 2346842 - RNA, 19 nt, Artificial Sequence
  Description of Artificial Sequence: Synthetic oligonucleotide
guuccgagaggcagcacac

SEQ ID NO: 2346843 - RNA, 19 nt, Artificial Sequence
  Description of Artificial Sequence: Synthetic oligonucleotide
ugccaggaccgccggguca

SEQ ID NO: 2346844 - RNA, 19 nt, Artificial Sequence
  Description of Artificial Sequence: Synthetic oligonucleotide
ccccauucucggaaaagcc

SEQ ID NO: 2346845 - RNA, 19 nt, Artificial Sequence
  Description of Artificial Sequence: Synthetic oligonucleotide
guucauaaucagggcagca

SEQ ID NO: 2346846 - RNA, 19 nt, Artificial Sequence
  Description of Artificial Sequence: Synthetic oligonucleotide
uggggaccgggugacguug

SEQ ID NO: 2346847 - RNA, 19 nt, Artificial Sequence
  Description of Artificial Sequence: Synthetic oligonucleotide
acaccgcuucguagcagcc

SEQ ID NO: 2346848 - RNA, 19 nt, Artificial Sequence
  Description of Artificial Sequence: Synthetic oligonucleotide
ggcuaagcugagugccucg

SEQ ID NO: 2346849 - RNA, 19 nt, Artificial Sequence
  Description of Artificial Sequence: Synthetic oligonucleotide
gcagcacaccgcuucguag

SEQ ID NO: 2346850 - RNA, 19 nt, Artificial Sequence
  Description of Artificial Sequence: Synthetic oligonucleotide
agcggaacgggcgccagca

SEQ ID NO: 2346851 - RNA, 19 nt, Artificial Sequence
  Description of Artificial Sequence: Synthetic oligonucleotide
cucgaggcagggguuuagg

SEQ ID NO: 2346852 - RNA, 19 nt, Artificial Sequence
  Description of Artificial Sequence: Synthetic oligonucleotide
ucgggcuuccggccggaga

SEQ ID NO: 2346853 - RNA, 19 nt, Artificial Sequence
  Description of Artificial Sequence: Synthetic oligonucleotide
agggucccaagcggaacgg

SEQ ID NO: 2346854 - RNA, 19 nt, Artificial Sequence
  Description of Artificial Sequence: Synthetic oligonucleotide
cucuauuauagaguucaua

SEQ ID NO: 2346855 - RNA, 19 nt, Artificial Sequence
  Description of Artificial Sequence: Synthetic oligonucleotide
ugcguucgggaggugccag

SEQ ID NO: 2346856 - RNA, 19 nt, Artificial Sequence
  Description of Artificial Sequence: Synthetic oligonucleotide
ggccgggcgagaucgaggc

SEQ ID NO: 2346857 - RNA, 19 nt, Artificial Sequence
  Description of Artificial Sequence: Synthetic oligonucleotide
gucgaggauguagucuaug

SEQ ID NO: 2346858 - RNA, 19 nt, Artificial Sequence
  Description of Artificial Sequence: Synthetic oligonucleotide
gggaagugaagagggccgg

SEQ ID NO: 2346859 - RNA, 19 nt, Artificial Sequence
  Description of Artificial Sequence: Synthetic oligonucleotide
aucagaaaaccagcucuua

SEQ ID NO: 2346860 - RNA, 19 nt, Artificial Sequence
  Description of Artificial Sequence: Synthetic oligonucleotide
caaguuccggagugagcuc

SEQ ID NO: 2346861 - RNA, 19 nt, Artificial Sequence
  Description of Artificial Sequence: Synthetic oligonucleotide
ucccgcaggcgcgaguagc

SEQ ID NO: 2346862 - RNA, 19 nt, Artificial Sequence
  Description of Artificial Sequence: Synthetic oligonucleotide
ugacguugcccagcugcug

SEQ ID NO: 2346863 - RNA, 19 nt, Artificial Sequence
  Description of Artificial Sequence: Synthetic oligonucleotide
uggcuaagcugagugccuc

SEQ ID NO: 2346864 - RNA, 19 nt, Artificial Sequence
  Description of Artificial Sequence: Synthetic oligonucleotide
caggcgccggcucugccag

SEQ ID NO: 2346865 - RNA, 19 nt, Artificial Sequence
  Description of Artificial Sequence: Synthetic oligonucleotide
cuggaucgggagaugugga

SEQ ID NO: 2346866 - RNA, 19 nt, Artificial Sequence
  Description of Artificial Sequence: Synthetic oligonucleotide
ccagcgcuagcucuucagg

SEQ ID NO: 2346867 - RNA, 19 nt, Artificial Sequence
  Description of Artificial Sequence: Synthetic oligonucleotide
caccgcuucguagcagccg

SEQ ID NO: 2346868 - RNA, 19 nt, Artificial Sequence
  Description of Artificial Sequence: Synthetic oligonucleotide
gcagugguucaugucgucc

SEQ ID NO: 2346869 - RNA, 19 nt, Artificial Sequence
  Description of Artificial Sequence: Synthetic oligonucleotide
uucccgcaggcgcgaguag

SEQ ID NO: 2346870 - RNA, 19 nt, Artificial Sequence
  Description of Artificial Sequence: Synthetic oligonucleotide
aggcgcgaguagcaguggu

SEQ ID NO: 2346871 - RNA, 19 nt, Artificial Sequence
  Description of Artificial Sequence: Synthetic oligonucleotide
gaucagaaaaccagcucuu

SEQ ID NO: 2346872 - RNA, 19 nt, Artificial Sequence
  Description of Artificial Sequence: Synthetic oligonucleotide
ccugcguucgggaggugcc

SEQ ID NO: 2346873 - RNA, 19 nt, Artificial Sequence
  Description of Artificial Sequence: Synthetic oligonucleotide
gucuggaucgggagaugug

SEQ ID NO: 2346874 - RNA, 19 nt, Artificial Sequence
  Description of Artificial Sequence: Synthetic oligonucleotide
ggcgccagcaccugcguuc

SEQ ID NO: 2346875 - RNA, 19 nt, Artificial Sequence
  Description of Artificial Sequence: Synthetic oligonucleotide
uacgcugccuuggcagugu

SEQ ID NO: 2346876 - RNA, 19 nt, Artificial Sequence
  Description of Artificial Sequence: Synthetic oligonucleotide
ccguucuccaaggagauca

SEQ ID NO: 2346877 - RNA, 19 nt, Artificial Sequence
  Description of Artificial Sequence: Synthetic oligonucleotide
cccauucucggaaaagcca

SEQ ID NO: 2346878 - RNA, 19 nt, Artificial Sequence
  Description of Artificial Sequence: Synthetic oligonucleotide
ggcugagcggcuccucugc

SEQ ID NO: 2346879 - RNA, 19 nt, Artificial Sequence
  Description of Artificial Sequence: Synthetic oligonucleotide
ggaccgccgggucaguggc

SEQ ID NO: 2346880 - RNA, 19 nt, Artificial Sequence
  Description of Artificial Sequence: Synthetic oligonucleotide
ucgggagauguggacuguc

SEQ ID NO: 2346881 - RNA, 19 nt, Artificial Sequence
  Description of Artificial Sequence: Synthetic oligonucleotide
cgaggauguagucuaugac

SEQ ID NO: 2346882 - RNA, 19 nt, Artificial Sequence
  Description of Artificial Sequence: Synthetic oligonucleotide
ucuugucguuggagaucac

SEQ ID NO: 2346883 - RNA, 19 nt, Artificial Sequence
  Description of Artificial Sequence: Synthetic oligonucleotide
ugaagagggccgggcgaga

SEQ ID NO: 2346884 - RNA, 19 nt, Artificial Sequence
  Description of Artificial Sequence: Synthetic oligonucleotide
gcaggcgcgaguagcagug

SEQ ID NO: 2346885 - RNA, 19 nt, Artificial Sequence
  Description of Artificial Sequence: Synthetic oligonucleotide
gcucuuacgcugccuuggc

SEQ ID NO: 2346886 - RNA, 19 nt, Artificial Sequence
  Description of Artificial Sequence: Synthetic oligonucleotide
cacccaaguucaguccuuc

SEQ ID NO: 2346887 - RNA, 19 nt, Artificial Sequence
  Description of Artificial Sequence: Synthetic oligonucleotide
cucgcgggacucccggcac

SEQ ID NO: 2346888 - RNA, 19 nt, Artificial Sequence
  Description of Artificial Sequence: Synthetic oligonucleotide
cucuuacgcugccuuggca

SEQ ID NO: 2346889 - RNA, 19 nt, Artificial Sequence
  Description of Artificial Sequence: Synthetic oligonucleotide
acucuauuauagaguucau

SEQ ID NO: 2346890 - RNA, 19 nt, Artificial Sequence
  Description of Artificial Sequence: Synthetic oligonucleotide
ucagcgccuucauguugaa

SEQ ID NO: 2346891 - RNA, 19 nt, Artificial Sequence
  Description of Artificial Sequence: Synthetic oligonucleotide
cuuacgcugccuuggcagu

SEQ ID NO: 2346892 - RNA, 19 nt, Artificial Sequence
  Description of Artificial Sequence: Synthetic oligonucleotide
gcaaaauguuaacuuuuau

SEQ ID NO: 2346893 - RNA, 19 nt, Artificial Sequence
  Description of Artificial Sequence: Synthetic oligonucleotide
agccguucuccaaggagau

SEQ ID NO: 2346894 - RNA, 19 nt, Artificial Sequence
  Description of Artificial Sequence: Synthetic oligonucleotide
ugaccagcgcuagcucuuc

SEQ ID NO: 2346895 - RNA, 19 nt, Artificial Sequence
  Description of Artificial Sequence: Synthetic oligonucleotide
gcagcagagccguucucca

SEQ ID NO: 2346896 - RNA, 19 nt, Artificial Sequence
  Description of Artificial Sequence: Synthetic oligonucleotide
ccgcgcaccgggcucagcg

SEQ ID NO: 2346897 - RNA, 19 nt, Artificial Sequence
  Description of Artificial Sequence: Synthetic oligonucleotide
ggccaggcugcguuccgag

SEQ ID NO: 2346898 - RNA, 19 nt, Artificial Sequence
  Description of Artificial Sequence: Synthetic oligonucleotide
cauucucggaaaagccagu

SEQ ID NO: 2346899 - RNA, 19 nt, Artificial Sequence
  Description of Artificial Sequence: Synthetic oligonucleotide
aucgggagauguggacugu

SEQ ID NO: 2346900 - RNA, 19 nt, Artificial Sequence
  Description of Artificial Sequence: Synthetic oligonucleotide
caagcggaacgggcgccag

SEQ ID NO: 2346901 - RNA, 19 nt, Artificial Sequence
  Description of Artificial Sequence: Synthetic oligonucleotide
acgcugccuuggcagugug

SEQ ID NO: 2346902 - RNA, 19 nt, Artificial Sequence
  Description of Artificial Sequence: Synthetic oligonucleotide
ugagugccucgcgggacuc

SEQ ID NO: 2346903 - RNA, 19 nt, Artificial Sequence
  Description of Artificial Sequence: Synthetic oligonucleotide
gaccagcgcuagcucuuca

SEQ ID NO: 2346904 - RNA, 19 nt, Artificial Sequence
  Description of Artificial Sequence: Synthetic oligonucleotide
cucggaaaagccagucuuu

SEQ ID NO: 2346905 - RNA, 19 nt, Artificial Sequence
  Description of Artificial Sequence: Synthetic oligonucleotide
gcgcuagcucuucaggcca

SEQ ID NO: 2346906 - RNA, 19 nt, Artificial Sequence
  Description of Artificial Sequence: Synthetic oligonucleotide
cgggcuuccggccggagag

SEQ ID NO: 2346907 - RNA, 19 nt, Artificial Sequence
  Description of Artificial Sequence: Synthetic oligonucleotide
ccaaguucaguccuucgcu

SEQ ID NO: 2346908 - RNA, 19 nt, Artificial Sequence
  Description of Artificial Sequence: Synthetic oligonucleotide
ucccggcaccaguucccgc

SEQ ID NO: 2346909 - RNA, 19 nt, Artificial Sequence
  Description of Artificial Sequence: Synthetic oligonucleotide
guuccggagugagcucagc

SEQ ID NO: 2346910 - RNA, 19 nt, Artificial Sequence
  Description of Artificial Sequence: Synthetic oligonucleotide
cugccgccgggcucuugcc

SEQ ID NO: 2346911 - RNA, 19 nt, Artificial Sequence
  Description of Artificial Sequence: Synthetic oligonucleotide
cgggagauguggacugucc

SEQ ID NO: 2346912 - RNA, 19 nt, Artificial Sequence
  Description of Artificial Sequence: Synthetic oligonucleotide
guucccgcaggcgcgagua

SEQ ID NO: 2346913 - RNA, 19 nt, Artificial Sequence
  Description of Artificial Sequence: Synthetic oligonucleotide
caggcgcgaguagcagugg

SEQ ID NO: 2346914 - RNA, 19 nt, Artificial Sequence
  Description of Artificial Sequence: Synthetic oligonucleotide
ggcuuccggccggagagag

SEQ ID NO: 2346915 - RNA, 19 nt, Artificial Sequence
  Description of Artificial Sequence: Synthetic oligonucleotide
ggagagagggucccagagu

SEQ ID NO: 2346916 - RNA, 19 nt, Artificial Sequence
  Description of Artificial Sequence: Synthetic oligonucleotide
gagugccucgcgggacucc

SEQ ID NO: 2346917 - RNA, 19 nt, Artificial Sequence
  Description of Artificial Sequence: Synthetic oligonucleotide
gcugagcggcuccucugcc

SEQ ID NO: 2346918 - RNA, 19 nt, Artificial Sequence
  Description of Artificial Sequence: Synthetic oligonucleotide
gcguucgggaggugccagg

SEQ ID NO: 2346919 - RNA, 19 nt, Artificial Sequence
  Description of Artificial Sequence: Synthetic oligonucleotide
gcgcgaguagcagugguuc

SEQ ID NO: 2346920 - RNA, 19 nt, Artificial Sequence
  Description of Artificial Sequence: Synthetic oligonucleotide
gaacgggcgccagcaccug

SEQ ID NO: 2346921 - RNA, 19 nt, Artificial Sequence
  Description of Artificial Sequence: Synthetic oligonucleotide
cugcugaccagcgcuagcu

SEQ ID NO: 2346922 - RNA, 19 nt, Artificial Sequence
  Description of Artificial Sequence: Synthetic oligonucleotide
gccaggaccgccgggucag

SEQ ID NO: 2346923 - RNA, 19 nt, Artificial Sequence
  Description of Artificial Sequence: Synthetic oligonucleotide
cguuccgagaggcagcaca

SEQ ID NO: 2346924 - RNA, 19 nt, Artificial Sequence
  Description of Artificial Sequence: Synthetic oligonucleotide
cugucuggaucgggagaug

SEQ ID NO: 2346925 - RNA, 19 nt, Artificial Sequence
  Description of Artificial Sequence: Synthetic oligonucleotide
ggaucgggagauguggacu

SEQ ID NO: 2346926 - RNA, 19 nt, Artificial Sequence
  Description of Artificial Sequence: Synthetic oligonucleotide
caggucgaggauguagucu

SEQ ID NO: 2346927 - RNA, 19 nt, Artificial Sequence
  Description of Artificial Sequence: Synthetic oligonucleotide
guccuucgcucucgggcuc

SEQ ID NO: 2346928 - RNA, 19 nt, Artificial Sequence
  Description of Artificial Sequence: Synthetic oligonucleotide
accgggcucagcgccuuca

SEQ ID NO: 2346929 - RNA, 19 nt, Artificial Sequence
  Description of Artificial Sequence: Synthetic oligonucleotide
cagcgccuucauguugaag

SEQ ID NO: 2346930 - RNA, 19 nt, Artificial Sequence
  Description of Artificial Sequence: Synthetic oligonucleotide
ggaccgggugacguugccc

SEQ ID NO: 2346931 - RNA, 19 nt, Artificial Sequence
  Description of Artificial Sequence: Synthetic oligonucleotide
uuccggccggagagagggu

SEQ ID NO: 2346932 - RNA, 19 nt, Artificial Sequence
  Description of Artificial Sequence: Synthetic oligonucleotide
gcucucgggcucccagucc

SEQ ID NO: 2346933 - RNA, 19 nt, Artificial Sequence
  Description of Artificial Sequence: Synthetic oligonucleotide
cggaacgggcgccagcacc

SEQ ID NO: 2346934 - RNA, 19 nt, Artificial Sequence
  Description of Artificial Sequence: Synthetic oligonucleotide
gcuucguagcagccgcgca

SEQ ID NO: 2346935 - RNA, 19 nt, Artificial Sequence
  Description of Artificial Sequence: Synthetic oligonucleotide
gccggagagagggucccag

SEQ ID NO: 2346936 - RNA, 19 nt, Artificial Sequence
  Description of Artificial Sequence: Synthetic oligonucleotide
ccgggcgagaucgaggcuc

SEQ ID NO: 2346937 - RNA, 19 nt, Artificial Sequence
  Description of Artificial Sequence: Synthetic oligonucleotide
gcugagugccucgcgggac

SEQ ID NO: 2346938 - RNA, 19 nt, Artificial Sequence
  Description of Artificial Sequence: Synthetic oligonucleotide
cugagugccucgcgggacu

SEQ ID NO: 2346939 - RNA, 19 nt, Artificial Sequence
  Description of Artificial Sequence: Synthetic oligonucleotide
gccgggucaguggcaaaag

SEQ ID NO: 2346940 - RNA, 19 nt, Artificial Sequence
  Description of Artificial Sequence: Synthetic oligonucleotide
gcuagcucuucaggccacc

SEQ ID NO: 2346941 - RNA, 19 nt, Artificial Sequence
  Description of Artificial Sequence: Synthetic oligonucleotide
gaagagggccgggcgagau

SEQ ID NO: 2346942 - RNA, 19 nt, Artificial Sequence
  Description of Artificial Sequence: Synthetic oligonucleotide
cagcagagccguucuccaa

SEQ ID NO: 2346943 - RNA, 19 nt, Artificial Sequence
  Description of Artificial Sequence: Synthetic oligonucleotide
gggaggugccaggaccgcc

SEQ ID NO: 2346944 - RNA, 19 nt, Artificial Sequence
  Description of Artificial Sequence: Synthetic oligonucleotide
ggcagcacaccgcuucgua

SEQ ID NO: 2346945 - RNA, 19 nt, Artificial Sequence
  Description of Artificial Sequence: Synthetic oligonucleotide
ccggccggagagagggucc

SEQ ID NO: 2346946 - RNA, 19 nt, Artificial Sequence
  Description of Artificial Sequence: Synthetic oligonucleotide
caggaccgccgggucagug

SEQ ID NO: 2346947 - RNA, 19 nt, Artificial Sequence
  Description of Artificial Sequence: Synthetic oligonucleotide
gggaccgggugacguugcc

SEQ ID NO: 2346948 - RNA, 19 nt, Artificial Sequence
  Description of Artificial Sequence: Synthetic oligonucleotide
caguggcaaaagcuccucu

SEQ ID NO: 2346949 - RNA, 19 nt, Artificial Sequence
  Description of Artificial Sequence: Synthetic oligonucleotide
ggcgagaucgaggcucauc

SEQ ID NO: 2346950 - RNA, 19 nt, Artificial Sequence
  Description of Artificial Sequence: Synthetic oligonucleotide
cccggcaccaguucccgca

SEQ ID NO: 2346951 - RNA, 19 nt, Artificial Sequence
  Description of Artificial Sequence: Synthetic oligonucleotide
aggcgccggcucugccagg

SEQ ID NO: 2346952 - RNA, 19 nt, Artificial Sequence
  Description of Artificial Sequence: Synthetic oligonucleotide
gcugucuggaucgggagau

SEQ ID NO: 2346953 - RNA, 19 nt, Artificial Sequence
  Description of Artificial Sequence: Synthetic oligonucleotide
gggcucuugccgcggcccc

SEQ ID NO: 2346954 - RNA, 19 nt, Artificial Sequence
  Description of Artificial Sequence: Synthetic oligonucleotide
ggcucuugccgcggccccg

SEQ ID NO: 2346955 - RNA, 19 nt, Artificial Sequence
  Description of Artificial Sequence: Synthetic oligonucleotide
ggaacgggcgccagcaccu

SEQ ID NO: 2346956 - RNA, 19 nt, Artificial Sequence
  Description of Artificial Sequence: Synthetic oligonucleotide
gugccucgcgggacucccg

SEQ ID NO: 2346957 - RNA, 19 nt, Artificial Sequence
  Description of Artificial Sequence: Synthetic oligonucleotide
ggcagggguuuaggggaag

SEQ ID NO: 2346958 - RNA, 19 nt, Artificial Sequence
  Description of Artificial Sequence: Synthetic oligonucleotide
cagagucccagggucccaa

SEQ ID NO: 2346959 - RNA, 19 nt, Artificial Sequence
  Description of Artificial Sequence: Synthetic oligonucleotide
gccggcucugccaggacca

SEQ ID NO: 2346960 - RNA, 19 nt, Artificial Sequence
  Description of Artificial Sequence: Synthetic oligonucleotide
ccggagugagcucagcugu

SEQ ID NO: 2346961 - RNA, 19 nt, Artificial Sequence
  Description of Artificial Sequence: Synthetic oligonucleotide
cagcugcugaccagcgcua

SEQ ID NO: 2346962 - RNA, 19 nt, Artificial Sequence
  Description of Artificial Sequence: Synthetic oligonucleotide
uugccgcggccccgcgcga

SEQ ID NO: 2346963 - RNA, 19 nt, Artificial Sequence
  Description of Artificial Sequence: Synthetic oligonucleotide
ccgcgcgauggccaggcug

SEQ ID NO: 2346964 - RNA, 19 nt, Artificial Sequence
  Description of Artificial Sequence: Synthetic oligonucleotide
gcuuccggccggagagagg

SEQ ID NO: 2346965 - RNA, 19 nt, Artificial Sequence
  Description of Artificial Sequence: Synthetic oligonucleotide
cugcguucgggaggugcca

SEQ ID NO: 2346966 - RNA, 19 nt, Artificial Sequence
  Description of Artificial Sequence: Synthetic oligonucleotide
ccgcuucguagcagccgcg

SEQ ID NO: 2346967 - RNA, 19 nt, Artificial Sequence
  Description of Artificial Sequence: Synthetic oligonucleotide
gcacaccgcuucguagcag

SEQ ID NO: 2346968 - RNA, 19 nt, Artificial Sequence
  Description of Artificial Sequence: Synthetic oligonucleotide
ggccccgcgcgauggccag

SEQ ID NO: 2346969 - RNA, 19 nt, Artificial Sequence
  Description of Artificial Sequence: Synthetic oligonucleotide
cauccaugcccucgggcuu

SEQ ID NO: 2346970 - RNA, 19 nt, Artificial Sequence
  Description of Artificial Sequence: Synthetic oligonucleotide
cccaagcggaacgggcgcc

SEQ ID NO: 2346971 - RNA, 19 nt, Artificial Sequence
  Description of Artificial Sequence: Synthetic oligonucleotide
ccggcaccaguucccgcag

SEQ ID NO: 2346972 - RNA, 19 nt, Artificial Sequence
  Description of Artificial Sequence: Synthetic oligonucleotide
gguggggaccgggugacgu

SEQ ID NO: 2346973 - RNA, 19 nt, Artificial Sequence
  Description of Artificial Sequence: Synthetic oligonucleotide
caguucccgcaggcgcgag

SEQ ID NO: 2346974 - RNA, 19 nt, Artificial Sequence
  Description of Artificial Sequence: Synthetic oligonucleotide
gcucuugccgcggccccgc

SEQ ID NO: 2346975 - RNA, 19 nt, Artificial Sequence
  Description of Artificial Sequence: Synthetic oligonucleotide
cccucgggcuuccggccgg

SEQ ID NO: 2346976 - RNA, 19 nt, Artificial Sequence
  Description of Artificial Sequence: Synthetic oligonucleotide
cccgcaggcgcgaguagca

SEQ ID NO: 2346977 - RNA, 19 nt, Artificial Sequence
  Description of Artificial Sequence: Synthetic oligonucleotide
cguagcagccgcgcaccgg

SEQ ID NO: 2346978 - RNA, 19 nt, Artificial Sequence
  Description of Artificial Sequence: Synthetic oligonucleotide
ggggaccgggugacguugc

SEQ ID NO: 2346979 - RNA, 19 nt, Artificial Sequence
  Description of Artificial Sequence: Synthetic oligonucleotide
ggaccaccugcaggucgag

SEQ ID NO: 2346980 - RNA, 19 nt, Artificial Sequence
  Description of Artificial Sequence: Synthetic oligonucleotide
gcggcuccucugccgccgg

SEQ ID NO: 2346981 - RNA, 19 nt, Artificial Sequence
  Description of Artificial Sequence: Synthetic oligonucleotide
cgccggcucugccaggacc

SEQ ID NO: 2346982 - RNA, 19 nt, Artificial Sequence
  Description of Artificial Sequence: Synthetic oligonucleotide
ccucgaggcagggguuuag

SEQ ID NO: 2346983 - RNA, 19 nt, Artificial Sequence
  Description of Artificial Sequence: Synthetic oligonucleotide
cucgggcuuccggccggag

SEQ ID NO: 2346984 - RNA, 19 nt, Artificial Sequence
  Description of Artificial Sequence: Synthetic oligonucleotide
gcgauggccaggcugcguu

SEQ ID NO: 2346985 - RNA, 19 nt, Artificial Sequence
  Description of Artificial Sequence: Synthetic oligonucleotide
cgcuucguagcagccgcgc

SEQ ID NO: 2346986 - RNA, 19 nt, Artificial Sequence
  Description of Artificial Sequence: Synthetic oligonucleotide
gaccgccgggucaguggca

SEQ ID NO: 2346987 - RNA, 19 nt, Artificial Sequence
  Description of Artificial Sequence: Synthetic oligonucleotide
cggagugagcucagcuguc

SEQ ID NO: 2346988 - RNA, 19 nt, Artificial Sequence
  Description of Artificial Sequence: Synthetic oligonucleotide
ccucgcgggacucccggca

SEQ ID NO: 2346989 - RNA, 19 nt, Artificial Sequence
  Description of Artificial Sequence: Synthetic oligonucleotide
cgagaucgaggcucaucca

SEQ ID NO: 2346990 - RNA, 19 nt, Artificial Sequence
  Description of Artificial Sequence: Synthetic oligonucleotide
ccgccgggcucuugccgcg

SEQ ID NO: 2346991 - RNA, 19 nt, Artificial Sequence
  Description of Artificial Sequence: Synthetic oligonucleotide
cgcugccuuggcagugugc

SEQ ID NO: 2346992 - RNA, 19 nt, Artificial Sequence
  Description of Artificial Sequence: Synthetic oligonucleotide
cguugcccagcugcugacc

SEQ ID NO: 2346993 - RNA, 19 nt, Artificial Sequence
  Description of Artificial Sequence: Synthetic oligonucleotide
gccgggcucuugccgcggc

SEQ ID NO: 2346994 - RNA, 19 nt, Artificial Sequence
  Description of Artificial Sequence: Synthetic oligonucleotide
cggaaaagccagucuuuua

SEQ ID NO: 2346995 - RNA, 19 nt, Artificial Sequence
  Description of Artificial Sequence: Synthetic oligonucleotide
gcgaguagcagugguucau

SEQ ID NO: 2346996 - RNA, 19 nt, Artificial Sequence
  Description of Artificial Sequence: Synthetic oligonucleotide
guggggaccgggugacguu

SEQ ID NO: 2346997 - RNA, 19 nt, Artificial Sequence
  Description of Artificial Sequence: Synthetic oligonucleotide
ccccgcgcgauggccaggc

SEQ ID NO: 2346998 - RNA, 19 nt, Artificial Sequence
  Description of Artificial Sequence: Synthetic oligonucleotide
gcggaacgggcgccagcac

SEQ ID NO: 2346999 - RNA, 19 nt, Artificial Sequence
  Description of Artificial Sequence: Synthetic oligonucleotide
cgcgaguagcagugguuca

SEQ ID NO: 2347000 - RNA, 19 nt, Artificial Sequence
  Description of Artificial Sequence: Synthetic oligonucleotide
cagccgcgcaccgggcuca

SEQ ID NO: 2347001 - RNA, 19 nt, Artificial Sequence
  Description of Artificial Sequence: Synthetic oligonucleotide
cgggcucuugccgcggccc

SEQ ID NO: 2347002 - RNA, 19 nt, Artificial Sequence
  Description of Artificial Sequence: Synthetic oligonucleotide
caccgggcucagcgccuuc

SEQ ID NO: 2347003 - RNA, 19 nt, Artificial Sequence
  Description of Artificial Sequence: Synthetic oligonucleotide
gccguucuccaaggagauc

SEQ ID NO: 2347004 - RNA, 19 nt, Artificial Sequence
  Description of Artificial Sequence: Synthetic oligonucleotide
gcggccccgcgcgauggcc

SEQ ID NO: 2347005 - RNA, 19 nt, Artificial Sequence
  Description of Artificial Sequence: Synthetic oligonucleotide
ggcugcguuccgagaggca

SEQ ID NO: 2347006 - RNA, 19 nt, Artificial Sequence
  Description of Artificial Sequence: Synthetic oligonucleotide
ccgcaggcgcgaguagcag

SEQ ID NO: 2347007 - RNA, 19 nt, Artificial Sequence
  Description of Artificial Sequence: Synthetic oligonucleotide
ccaagcggaacgggcgcca

SEQ ID NO: 2347008 - RNA, 19 nt, Artificial Sequence
  Description of Artificial Sequence: Synthetic oligonucleotide
ccuucgcucucgggcuccc

SEQ ID NO: 2347009 - RNA, 19 nt, Artificial Sequence
  Description of Artificial Sequence: Synthetic oligonucleotide
cguucgggaggugccagga

SEQ ID NO: 2347010 - RNA, 19 nt, Artificial Sequence
  Description of Artificial Sequence: Synthetic oligonucleotide
gggacucccggcaccaguu

SEQ ID NO: 2347011 - RNA, 19 nt, Artificial Sequence
  Description of Artificial Sequence: Synthetic oligonucleotide
gccgcggccccgcgcgaug

SEQ ID NO: 2347012 - RNA, 19 nt, Artificial Sequence
  Description of Artificial Sequence: Synthetic oligonucleotide
cggcaccaguucccgcagg

SEQ ID NO: 2347013 - RNA, 19 nt, Artificial Sequence
  Description of Artificial Sequence: Synthetic oligonucleotide
ccaguucccgcaggcgcga

SEQ ID NO: 2347014 - RNA, 19 nt, Artificial Sequence
  Description of Artificial Sequence: Synthetic oligonucleotide
ggcgcgaguagcagugguu

SEQ ID NO: 2347015 - RNA, 19 nt, Artificial Sequence
  Description of Artificial Sequence: Synthetic oligonucleotide
gggcuuccggccggagaga

SEQ ID NO: 2347016 - RNA, 19 nt, Artificial Sequence
  Description of Artificial Sequence: Synthetic oligonucleotide
ggucgaggauguagucuau

SEQ ID NO: 2347017 - RNA, 19 nt, Artificial Sequence
  Description of Artificial Sequence: Synthetic oligonucleotide
gcgggacucccggcaccag

SEQ ID NO: 2347018 - RNA, 19 nt, Artificial Sequence
  Description of Artificial Sequence: Synthetic oligonucleotide
gcgccggcucugccaggac

SEQ ID NO: 2347019 - RNA, 19 nt, Artificial Sequence
  Description of Artificial Sequence: Synthetic oligonucleotide
ccggcucugccaggaccac

SEQ ID NO: 2347020 - RNA, 19 nt, Artificial Sequence
  Description of Artificial Sequence: Synthetic oligonucleotide
ggccggagagaggguccca

SEQ ID NO: 2347021 - RNA, 19 nt, Artificial Sequence
  Description of Artificial Sequence: Synthetic oligonucleotide
gccccgcgcgauggccagg

SEQ ID NO: 2347022 - RNA, 19 nt, Artificial Sequence
  Description of Artificial Sequence: Synthetic oligonucleotide
gcguuccgagaggcagcac

SEQ ID NO: 2347023 - RNA, 19 nt, Artificial Sequence
  Description of Artificial Sequence: Synthetic oligonucleotide
gccucgaggcagggguuua

SEQ ID NO: 2347024 - RNA, 19 nt, Artificial Sequence
  Description of Artificial Sequence: Synthetic oligonucleotide
cgggugacguugcccagcu

SEQ ID NO: 2347025 - RNA, 19 nt, Artificial Sequence
  Description of Artificial Sequence: Synthetic oligonucleotide
ccacccaaguucaguccuu

SEQ ID NO: 2347026 - RNA, 19 nt, Artificial Sequence
  Description of Artificial Sequence: Synthetic oligonucleotide
gccgggcgagaucgaggcu

SEQ ID NO: 2347027 - RNA, 19 nt, Artificial Sequence
  Description of Artificial Sequence: Synthetic oligonucleotide
cggccccgcgcgauggcca

SEQ ID NO: 2347028 - RNA, 19 nt, Artificial Sequence
  Description of Artificial Sequence: Synthetic oligonucleotide
ccaccuggcuaagcugagu

SEQ ID NO: 2347029 - RNA, 19 nt, Artificial Sequence
  Description of Artificial Sequence: Synthetic oligonucleotide
gggcgccagcaccugcguu

SEQ ID NO: 2347030 - RNA, 19 nt, Artificial Sequence
  Description of Artificial Sequence: Synthetic oligonucleotide
cgccgggcucuugccgcgg

SEQ ID NO: 2347031 - RNA, 19 nt, Artificial Sequence
  Description of Artificial Sequence: Synthetic oligonucleotide
cgcggccccgcgcgauggc

SEQ ID NO: 2347032 - RNA, 19 nt, Artificial Sequence
  Description of Artificial Sequence: Synthetic oligonucleotide
ccgggcucagcgccuucau

SEQ ID NO: 2347033 - RNA, 19 nt, Artificial Sequence
  Description of Artificial Sequence: Synthetic oligonucleotide
ccgccgggucaguggcaaa

SEQ ID NO: 2347034 - RNA, 19 nt, Artificial Sequence
  Description of Artificial Sequence: Synthetic oligonucleotide
gggcgagaucgaggcucau

SEQ ID NO: 2347035 - RNA, 19 nt, Artificial Sequence
  Description of Artificial Sequence: Synthetic oligonucleotide
cgcgauggccaggcugcgu

SEQ ID NO: 2347036 - RNA, 19 nt, Artificial Sequence
  Description of Artificial Sequence: Synthetic oligonucleotide
cccgcgcgauggccaggcu

SEQ ID NO: 2347037 - RNA, 19 nt, Artificial Sequence
  Description of Artificial Sequence: Synthetic oligonucleotide
ccaggaccgccgggucagu

SEQ ID NO: 2347038 - RNA, 19 nt, Artificial Sequence
  Description of Artificial Sequence: Synthetic oligonucleotide
acuaaauggugacagagcc

SEQ ID NO: 2347039 - RNA, 19 nt, Artificial Sequence
  Description of Artificial Sequence: Synthetic oligonucleotide
uucacgaaggacuaaaugg

SEQ ID NO: 2347040 - RNA, 19 nt, Artificial Sequence
  Description of Artificial Sequence: Synthetic oligonucleotide
augaaaacuaucuuggaac

SEQ ID NO: 2347041 - RNA, 19 nt, Artificial Sequence
  Description of Artificial Sequence: Synthetic oligonucleotide
uuaacacugugcaagaggg

SEQ ID NO: 2347042 - RNA, 19 nt, Artificial Sequence
  Description of Artificial Sequence: Synthetic oligonucleotide
aacuauacugugugaaacc

SEQ ID NO: 2347043 - RNA, 19 nt, Artificial Sequence
  Description of Artificial Sequence: Synthetic oligonucleotide
acugugugaaaccaggugc

SEQ ID NO: 2347044 - RNA, 19 nt, Artificial Sequence
  Description of Artificial Sequence: Synthetic oligonucleotide
aguaugaaaacuaucuugg

SEQ ID NO: 2347045 - RNA, 19 nt, Artificial Sequence
  Description of Artificial Sequence: Synthetic oligonucleotide
aauccuauuggccgugacg

SEQ ID NO: 2347046 - RNA, 19 nt, Artificial Sequence
  Description of Artificial Sequence: Synthetic oligonucleotide
ugaaaacuaucuuggaacc

SEQ ID NO: 2347047 - RNA, 19 nt, Artificial Sequence
  Description of Artificial Sequence: Synthetic oligonucleotide
ugagugguggcacugagca

SEQ ID NO: 2347048 - RNA, 19 nt, Artificial Sequence
  Description of Artificial Sequence: Synthetic oligonucleotide
gucucaauccuauuggccg

SEQ ID NO: 2347049 - RNA, 19 nt, Artificial Sequence
  Description of Artificial Sequence: Synthetic oligonucleotide
uaugaaaacuaucuuggaa

SEQ ID NO: 2347050 - RNA, 19 nt, Artificial Sequence
  Description of Artificial Sequence: Synthetic oligonucleotide
acagucaugaaaagggugc

SEQ ID NO: 2347051 - RNA, 19 nt, Artificial Sequence
  Description of Artificial Sequence: Synthetic oligonucleotide
agcaaaacacaugaugugg

SEQ ID NO: 2347052 - RNA, 19 nt, Artificial Sequence
  Description of Artificial Sequence: Synthetic oligonucleotide
ucacgaaggacuaaauggu

SEQ ID NO: 2347053 - RNA, 19 nt, Artificial Sequence
  Description of Artificial Sequence: Synthetic oligonucleotide
uugccaagacccauggagg

SEQ ID NO: 2347054 - RNA, 19 nt, Artificial Sequence
  Description of Artificial Sequence: Synthetic oligonucleotide
aaacacaugauguggggau

SEQ ID NO: 2347055 - RNA, 19 nt, Artificial Sequence
  Description of Artificial Sequence: Synthetic oligonucleotide
aggagcaccguucaucugg

SEQ ID NO: 2347056 - RNA, 19 nt, Artificial Sequence
  Description of Artificial Sequence: Synthetic oligonucleotide
cuaggcgcuaacuauacug

SEQ ID NO: 2347057 - RNA, 19 nt, Artificial Sequence
  Description of Artificial Sequence: Synthetic oligonucleotide
aaaccaggugcccaguaug

SEQ ID NO: 2347058 - RNA, 19 nt, Artificial Sequence
  Description of Artificial Sequence: Synthetic oligonucleotide
cuaaugucuguucuucacg

SEQ ID NO: 2347059 - RNA, 19 nt, Artificial Sequence
  Description of Artificial Sequence: Synthetic oligonucleotide
acugcguuugagcaguggg

SEQ ID NO: 2347060 - RNA, 19 nt, Artificial Sequence
  Description of Artificial Sequence: Synthetic oligonucleotide
agcgucucaauccuauugg

SEQ ID NO: 2347061 - RNA, 19 nt, Artificial Sequence
  Description of Artificial Sequence: Synthetic oligonucleotide
aagcagaguggcuuuacug

SEQ ID NO: 2347062 - RNA, 19 nt, Artificial Sequence
  Description of Artificial Sequence: Synthetic oligonucleotide
cugagcaaaacacaugaug

SEQ ID NO: 2347063 - RNA, 19 nt, Artificial Sequence
  Description of Artificial Sequence: Synthetic oligonucleotide
auccuauuggccgugacgg

SEQ ID NO: 2347064 - RNA, 19 nt, Artificial Sequence
  Description of Artificial Sequence: Synthetic oligonucleotide
aaagggugcuugccaagac

SEQ ID NO: 2347065 - RNA, 19 nt, Artificial Sequence
  Description of Artificial Sequence: Synthetic oligonucleotide
aaaacuaucuuggaaccaa

SEQ ID NO: 2347066 - RNA, 19 nt, Artificial Sequence
  Description of Artificial Sequence: Synthetic oligonucleotide
aaaacuggggaaccugccu

SEQ ID NO: 2347067 - RNA, 19 nt, Artificial Sequence
  Description of Artificial Sequence: Synthetic oligonucleotide
gacuccuuaacacugugca

SEQ ID NO: 2347068 - RNA, 19 nt, Artificial Sequence
  Description of Artificial Sequence: Synthetic oligonucleotide
acugcaguacguuguugcc

SEQ ID NO: 2347069 - RNA, 19 nt, Artificial Sequence
  Description of Artificial Sequence: Synthetic oligonucleotide
agcucacccacucuggagg

SEQ ID NO: 2347070 - RNA, 19 nt, Artificial Sequence
  Description of Artificial Sequence: Synthetic oligonucleotide
caagaggggcaucauaagg

SEQ ID NO: 2347071 - RNA, 19 nt, Artificial Sequence
  Description of Artificial Sequence: Synthetic oligonucleotide
ugugaaaccaggugcccag

SEQ ID NO: 2347072 - RNA, 19 nt, Artificial Sequence
  Description of Artificial Sequence: Synthetic oligonucleotide
uacugugugaaaccaggug

SEQ ID NO: 2347073 - RNA, 19 nt, Artificial Sequence
  Description of Artificial Sequence: Synthetic oligonucleotide
gacacuggaagaguucugg

SEQ ID NO: 2347074 - RNA, 19 nt, Artificial Sequence
  Description of Artificial Sequence: Synthetic oligonucleotide
uaacuauacugugugaaac

SEQ ID NO: 2347075 - RNA, 19 nt, Artificial Sequence
  Description of Artificial Sequence: Synthetic oligonucleotide
uugggacuccuuaacacug

SEQ ID NO: 2347076 - RNA, 19 nt, Artificial Sequence
  Description of Artificial Sequence: Synthetic oligonucleotide
uggcuuuacugccacuagg

SEQ ID NO: 2347077 - RNA, 19 nt, Artificial Sequence
  Description of Artificial Sequence: Synthetic oligonucleotide
cucaaucugugucagguug

SEQ ID NO: 2347078 - RNA, 19 nt, Artificial Sequence
  Description of Artificial Sequence: Synthetic oligonucleotide
uggcugacagucaugaaaa

SEQ ID NO: 2347079 - RNA, 19 nt, Artificial Sequence
  Description of Artificial Sequence: Synthetic oligonucleotide
agccgauguaagcagcagc

SEQ ID NO: 2347080 - RNA, 19 nt, Artificial Sequence
  Description of Artificial Sequence: Synthetic oligonucleotide
uguugugcagucccaggag

SEQ ID NO: 2347081 - RNA, 19 nt, Artificial Sequence
  Description of Artificial Sequence: Synthetic oligonucleotide
uaagguuggggacaaggaa

SEQ ID NO: 2347082 - RNA, 19 nt, Artificial Sequence
  Description of Artificial Sequence: Synthetic oligonucleotide
ugucucuaaugucuguucu

SEQ ID NO: 2347083 - RNA, 19 nt, Artificial Sequence
  Description of Artificial Sequence: Synthetic oligonucleotide
gagcaaaacacaugaugug

SEQ ID NO: 2347084 - RNA, 19 nt, Artificial Sequence
  Description of Artificial Sequence: Synthetic oligonucleotide
cuccuuaacacugugcaag

SEQ ID NO: 2347085 - RNA, 19 nt, Artificial Sequence
  Description of Artificial Sequence: Synthetic oligonucleotide
agggucagguuguuguggc

SEQ ID NO: 2347086 - RNA, 19 nt, Artificial Sequence
  Description of Artificial Sequence: Synthetic oligonucleotide
uuccuuuuggcugacaguc

SEQ ID NO: 2347087 - RNA, 19 nt, Artificial Sequence
  Description of Artificial Sequence: Synthetic oligonucleotide
aacuggggaaccugccuuc

SEQ ID NO: 2347088 - RNA, 19 nt, Artificial Sequence
  Description of Artificial Sequence: Synthetic oligonucleotide
ugcaguacguuguugccca

SEQ ID NO: 2347089 - RNA, 19 nt, Artificial Sequence
  Description of Artificial Sequence: Synthetic oligonucleotide
gaacaaguccuccuccacc

SEQ ID NO: 2347090 - RNA, 19 nt, Artificial Sequence
  Description of Artificial Sequence: Synthetic oligonucleotide
ugauguggggauagagucc

SEQ ID NO: 2347091 - RNA, 19 nt, Artificial Sequence
  Description of Artificial Sequence: Synthetic oligonucleotide
ucugugucagguuggucag

SEQ ID NO: 2347092 - RNA, 19 nt, Artificial Sequence
  Description of Artificial Sequence: Synthetic oligonucleotide
ugggcacucgcccagcucc

SEQ ID NO: 2347093 - RNA, 19 nt, Artificial Sequence
  Description of Artificial Sequence: Synthetic oligonucleotide
ugcuugccaagacccaugg

SEQ ID NO: 2347094 - RNA, 19 nt, Artificial Sequence
  Description of Artificial Sequence: Synthetic oligonucleotide
cugugugaaaccaggugcc

SEQ ID NO: 2347095 - RNA, 19 nt, Artificial Sequence
  Description of Artificial Sequence: Synthetic oligonucleotide
aaagcagaguggcuuuacu

SEQ ID NO: 2347096 - RNA, 19 nt, Artificial Sequence
  Description of Artificial Sequence: Synthetic oligonucleotide
augaaaagggugcuugcca

SEQ ID NO: 2347097 - RNA, 19 nt, Artificial Sequence
  Description of Artificial Sequence: Synthetic oligonucleotide
uaacacugugcaagagggg

SEQ ID NO: 2347098 - RNA, 19 nt, Artificial Sequence
  Description of Artificial Sequence: Synthetic oligonucleotide
ugcuccugcaggcuacacg

SEQ ID NO: 2347099 - RNA, 19 nt, Artificial Sequence
  Description of Artificial Sequence: Synthetic oligonucleotide
uaggcgcuaacuauacugu

SEQ ID NO: 2347100 - RNA, 19 nt, Artificial Sequence
  Description of Artificial Sequence: Synthetic oligonucleotide
acagagccgauguaagcag

SEQ ID NO: 2347101 - RNA, 19 nt, Artificial Sequence
  Description of Artificial Sequence: Synthetic oligonucleotide
cuauacugugugaaaccag

SEQ ID NO: 2347102 - RNA, 19 nt, Artificial Sequence
  Description of Artificial Sequence: Synthetic oligonucleotide
agaccacugcguuugagca

SEQ ID NO: 2347103 - RNA, 19 nt, Artificial Sequence
  Description of Artificial Sequence: Synthetic oligonucleotide
gaaaagggugcuugccaag

SEQ ID NO: 2347104 - RNA, 19 nt, Artificial Sequence
  Description of Artificial Sequence: Synthetic oligonucleotide
gagcgucucaauccuauug

SEQ ID NO: 2347105 - RNA, 19 nt, Artificial Sequence
  Description of Artificial Sequence: Synthetic oligonucleotide
gauagaguccaggggaagc

SEQ ID NO: 2347106 - RNA, 19 nt, Artificial Sequence
  Description of Artificial Sequence: Synthetic oligonucleotide
gacuaaauggugacagagc

SEQ ID NO: 2347107 - RNA, 19 nt, Artificial Sequence
  Description of Artificial Sequence: Synthetic oligonucleotide
acuauacugugugaaacca

SEQ ID NO: 2347108 - RNA, 19 nt, Artificial Sequence
  Description of Artificial Sequence: Synthetic oligonucleotide
aaaagggugcuugccaaga

SEQ ID NO: 2347109 - RNA, 19 nt, Artificial Sequence
  Description of Artificial Sequence: Synthetic oligonucleotide
aaacuggggaaccugccuu

SEQ ID NO: 2347110 - RNA, 19 nt, Artificial Sequence
  Description of Artificial Sequence: Synthetic oligonucleotide
agguaggcacuccagccgg

SEQ ID NO: 2347111 - RNA, 19 nt, Artificial Sequence
  Description of Artificial Sequence: Synthetic oligonucleotide
ugcucguuuggccuggggu

SEQ ID NO: 2347112 - RNA, 19 nt, Artificial Sequence
  Description of Artificial Sequence: Synthetic oligonucleotide
cagaccacugcguuugagc

SEQ ID NO: 2347113 - RNA, 19 nt, Artificial Sequence
  Description of Artificial Sequence: Synthetic oligonucleotide
ugucagcucuccagagucg

SEQ ID NO: 2347114 - RNA, 19 nt, Artificial Sequence
  Description of Artificial Sequence: Synthetic oligonucleotide
ucucuaaugucuguucuuc

SEQ ID NO: 2347115 - RNA, 19 nt, Artificial Sequence
  Description of Artificial Sequence: Synthetic oligonucleotide
aggggcaucauaagguugg

SEQ ID NO: 2347116 - RNA, 19 nt, Artificial Sequence
  Description of Artificial Sequence: Synthetic oligonucleotide
aguacguuguugcccaggu

SEQ ID NO: 2347117 - RNA, 19 nt, Artificial Sequence
  Description of Artificial Sequence: Synthetic oligonucleotide
ugaacaaguccuccuccac

SEQ ID NO: 2347118 - RNA, 19 nt, Artificial Sequence
  Description of Artificial Sequence: Synthetic oligonucleotide
caaggaaggagcaccguuc

SEQ ID NO: 2347119 - RNA, 19 nt, Artificial Sequence
  Description of Artificial Sequence: Synthetic oligonucleotide
caugaaaagggugcuugcc

SEQ ID NO: 2347120 - RNA, 19 nt, Artificial Sequence
  Description of Artificial Sequence: Synthetic oligonucleotide
agagcccgcagcuuccgac

SEQ ID NO: 2347121 - RNA, 19 nt, Artificial Sequence
  Description of Artificial Sequence: Synthetic oligonucleotide
uguggggauagaguccagg

SEQ ID NO: 2347122 - RNA, 19 nt, Artificial Sequence
  Description of Artificial Sequence: Synthetic oligonucleotide
ugacagagccgauguaagc

SEQ ID NO: 2347123 - RNA, 19 nt, Artificial Sequence
  Description of Artificial Sequence: Synthetic oligonucleotide
gacggccagguucuggagg

SEQ ID NO: 2347124 - RNA, 19 nt, Artificial Sequence
  Description of Artificial Sequence: Synthetic oligonucleotide
gacagagccgauguaagca

SEQ ID NO: 2347125 - RNA, 19 nt, Artificial Sequence
  Description of Artificial Sequence: Synthetic oligonucleotide
ggacuaaauggugacagag

SEQ ID NO: 2347126 - RNA, 19 nt, Artificial Sequence
  Description of Artificial Sequence: Synthetic oligonucleotide
uugagcagugggcacucgc

SEQ ID NO: 2347127 - RNA, 19 nt, Artificial Sequence
  Description of Artificial Sequence: Synthetic oligonucleotide
ucuaaagcagaguggcuuu

SEQ ID NO: 2347128 - RNA, 19 nt, Artificial Sequence
  Description of Artificial Sequence: Synthetic oligonucleotide
ucucaauccuauuggccgu

SEQ ID NO: 2347129 - RNA, 19 nt, Artificial Sequence
  Description of Artificial Sequence: Synthetic oligonucleotide
agucuccucccuucuuggc

SEQ ID NO: 2347130 - RNA, 19 nt, Artificial Sequence
  Description of Artificial Sequence: Synthetic oligonucleotide
cugcguuugagcagugggc

SEQ ID NO: 2347131 - RNA, 19 nt, Artificial Sequence
  Description of Artificial Sequence: Synthetic oligonucleotide
agcaccguucaucugggga

SEQ ID NO: 2347132 - RNA, 19 nt, Artificial Sequence
  Description of Artificial Sequence: Synthetic oligonucleotide
agacccauggaggagaaaa

SEQ ID NO: 2347133 - RNA, 19 nt, Artificial Sequence
  Description of Artificial Sequence: Synthetic oligonucleotide
cacgaaggacuaaauggug

SEQ ID NO: 2347134 - RNA, 19 nt, Artificial Sequence
  Description of Artificial Sequence: Synthetic oligonucleotide
uugucucuaaugucuguuc

SEQ ID NO: 2347135 - RNA, 19 nt, Artificial Sequence
  Description of Artificial Sequence: Synthetic oligonucleotide
ugccaagacccauggagga

SEQ ID NO: 2347136 - RNA, 19 nt, Artificial Sequence
  Description of Artificial Sequence: Synthetic oligonucleotide
guggcacugagcaaaacac

SEQ ID NO: 2347137 - RNA, 19 nt, Artificial Sequence
  Description of Artificial Sequence: Synthetic oligonucleotide
uucuucacgaaggacuaaa

SEQ ID NO: 2347138 - RNA, 19 nt, Artificial Sequence
  Description of Artificial Sequence: Synthetic oligonucleotide
ugccccgaagcucaaucug

SEQ ID NO: 2347139 - RNA, 19 nt, Artificial Sequence
  Description of Artificial Sequence: Synthetic oligonucleotide
agucccaggagagcugggc

SEQ ID NO: 2347140 - RNA, 19 nt, Artificial Sequence
  Description of Artificial Sequence: Synthetic oligonucleotide
gcuccugcaggcuacacgc

SEQ ID NO: 2347141 - RNA, 19 nt, Artificial Sequence
  Description of Artificial Sequence: Synthetic oligonucleotide
guaugaaaacuaucuugga

SEQ ID NO: 2347142 - RNA, 19 nt, Artificial Sequence
  Description of Artificial Sequence: Synthetic oligonucleotide
caggcuacacgcucaggcc

SEQ ID NO: 2347143 - RNA, 19 nt, Artificial Sequence
  Description of Artificial Sequence: Synthetic oligonucleotide
ucagcucacccacucugga

SEQ ID NO: 2347144 - RNA, 19 nt, Artificial Sequence
  Description of Artificial Sequence: Synthetic oligonucleotide
cuggggauuagccagccca

SEQ ID NO: 2347145 - RNA, 19 nt, Artificial Sequence
  Description of Artificial Sequence: Synthetic oligonucleotide
agugacugcaguacguugu

SEQ ID NO: 2347146 - RNA, 19 nt, Artificial Sequence
  Description of Artificial Sequence: Synthetic oligonucleotide
gaaaacuaucuuggaacca

SEQ ID NO: 2347147 - RNA, 19 nt, Artificial Sequence
  Description of Artificial Sequence: Synthetic oligonucleotide
cagcuuccgacacuggaag

SEQ ID NO: 2347148 - RNA, 19 nt, Artificial Sequence
  Description of Artificial Sequence: Synthetic oligonucleotide
ugcccaguaugaaaacuau

SEQ ID NO: 2347149 - RNA, 19 nt, Artificial Sequence
  Description of Artificial Sequence: Synthetic oligonucleotide
cagcgugcugaacaagucc

SEQ ID NO: 2347150 - RNA, 19 nt, Artificial Sequence
  Description of Artificial Sequence: Synthetic oligonucleotide
uuggucagcucacccacuc

SEQ ID NO: 2347151 - RNA, 19 nt, Artificial Sequence
  Description of Artificial Sequence: Synthetic oligonucleotide
gcaggcuacacgcucaggc

SEQ ID NO: 2347152 - RNA, 19 nt, Artificial Sequence
  Description of Artificial Sequence: Synthetic oligonucleotide
auaagguuggggacaagga

SEQ ID NO: 2347153 - RNA, 19 nt, Artificial Sequence
  Description of Artificial Sequence: Synthetic oligonucleotide
gauuagccagcccaagucu

SEQ ID NO: 2347154 - RNA, 19 nt, Artificial Sequence
  Description of Artificial Sequence: Synthetic oligonucleotide
uccuuuuggcugacaguca

SEQ ID NO: 2347155 - RNA, 19 nt, Artificial Sequence
  Description of Artificial Sequence: Synthetic oligonucleotide
ugugugaaaccaggugccc

SEQ ID NO: 2347156 - RNA, 19 nt, Artificial Sequence
  Description of Artificial Sequence: Synthetic oligonucleotide
cacuaggcgcuaacuauac

SEQ ID NO: 2347157 - RNA, 19 nt, Artificial Sequence
  Description of Artificial Sequence: Synthetic oligonucleotide
gaccacugcguuugagcag

SEQ ID NO: 2347158 - RNA, 19 nt, Artificial Sequence
  Description of Artificial Sequence: Synthetic oligonucleotide
gcuuuacugccacuaggcg

SEQ ID NO: 2347159 - RNA, 19 nt, Artificial Sequence
  Description of Artificial Sequence: Synthetic oligonucleotide
agagucgcuccuucaccuc

SEQ ID NO: 2347160 - RNA, 19 nt, Artificial Sequence
  Description of Artificial Sequence: Synthetic oligonucleotide
acgaaggacuaaaugguga

SEQ ID NO: 2347161 - RNA, 19 nt, Artificial Sequence
  Description of Artificial Sequence: Synthetic oligonucleotide
ggauuagccagcccaaguc

SEQ ID NO: 2347162 - RNA, 19 nt, Artificial Sequence
  Description of Artificial Sequence: Synthetic oligonucleotide
ugccacuaggcgcuaacua

SEQ ID NO: 2347163 - RNA, 19 nt, Artificial Sequence
  Description of Artificial Sequence: Synthetic oligonucleotide
guugccccgaagcucaauc

SEQ ID NO: 2347164 - RNA, 19 nt, Artificial Sequence
  Description of Artificial Sequence: Synthetic oligonucleotide
agaggggcaucauaagguu

SEQ ID NO: 2347165 - RNA, 19 nt, Artificial Sequence
  Description of Artificial Sequence: Synthetic oligonucleotide
uaaagcagaguggcuuuac

SEQ ID NO: 2347166 - RNA, 19 nt, Artificial Sequence
  Description of Artificial Sequence: Synthetic oligonucleotide
accacugcguuugagcagu

SEQ ID NO: 2347167 - RNA, 19 nt, Artificial Sequence
  Description of Artificial Sequence: Synthetic oligonucleotide
guggcuuuacugccacuag

SEQ ID NO: 2347168 - RNA, 19 nt, Artificial Sequence
  Description of Artificial Sequence: Synthetic oligonucleotide
ugaaaccaggugcccagua

SEQ ID NO: 2347169 - RNA, 19 nt, Artificial Sequence
  Description of Artificial Sequence: Synthetic oligonucleotide
uccgacacuggaagaguuc

SEQ ID NO: 2347170 - RNA, 19 nt, Artificial Sequence
  Description of Artificial Sequence: Synthetic oligonucleotide
ggcuuuacugccacuaggc

SEQ ID NO: 2347171 - RNA, 19 nt, Artificial Sequence
  Description of Artificial Sequence: Synthetic oligonucleotide
acggccagguucuggaggu

SEQ ID NO: 2347172 - RNA, 19 nt, Artificial Sequence
  Description of Artificial Sequence: Synthetic oligonucleotide
cagagccgauguaagcagc

SEQ ID NO: 2347173 - RNA, 19 nt, Artificial Sequence
  Description of Artificial Sequence: Synthetic oligonucleotide
aggcgcuaacuauacugug

SEQ ID NO: 2347174 - RNA, 19 nt, Artificial Sequence
  Description of Artificial Sequence: Synthetic oligonucleotide
ugggacuccuuaacacugu

SEQ ID NO: 2347175 - RNA, 19 nt, Artificial Sequence
  Description of Artificial Sequence: Synthetic oligonucleotide
agcgugcugaacaaguccu

SEQ ID NO: 2347176 - RNA, 19 nt, Artificial Sequence
  Description of Artificial Sequence: Synthetic oligonucleotide
uggggauuagccagcccaa

SEQ ID NO: 2347177 - RNA, 19 nt, Artificial Sequence
  Description of Artificial Sequence: Synthetic oligonucleotide
cugcaguacguuguugccc

SEQ ID NO: 2347178 - RNA, 19 nt, Artificial Sequence
  Description of Artificial Sequence: Synthetic oligonucleotide
uaggcacuccagccgguug

SEQ ID NO: 2347179 - RNA, 19 nt, Artificial Sequence
  Description of Artificial Sequence: Synthetic oligonucleotide
aaggagcaccguucaucug

SEQ ID NO: 2347180 - RNA, 19 nt, Artificial Sequence
  Description of Artificial Sequence: Synthetic oligonucleotide
gcgcuaacuauacugugug

SEQ ID NO: 2347181 - RNA, 19 nt, Artificial Sequence
  Description of Artificial Sequence: Synthetic oligonucleotide
gaaggacuaaauggugaca

SEQ ID NO: 2347182 - RNA, 19 nt, Artificial Sequence
  Description of Artificial Sequence: Synthetic oligonucleotide
gcuugggacuccuuaacac

SEQ ID NO: 2347183 - RNA, 19 nt, Artificial Sequence
  Description of Artificial Sequence: Synthetic oligonucleotide
aaacuaucuuggaaccaaa

SEQ ID NO: 2347184 - RNA, 19 nt, Artificial Sequence
  Description of Artificial Sequence: Synthetic oligonucleotide
aguggcuuuacugccacua

SEQ ID NO: 2347185 - RNA, 19 nt, Artificial Sequence
  Description of Artificial Sequence: Synthetic oligonucleotide
uugccccgaagcucaaucu

SEQ ID NO: 2347186 - RNA, 19 nt, Artificial Sequence
  Description of Artificial Sequence: Synthetic oligonucleotide
caccagaccacugcguuug

SEQ ID NO: 2347187 - RNA, 19 nt, Artificial Sequence
  Description of Artificial Sequence: Synthetic oligonucleotide
cagccgguugccccgaagc

SEQ ID NO: 2347188 - RNA, 19 nt, Artificial Sequence
  Description of Artificial Sequence: Synthetic oligonucleotide
cagugacugcaguacguug

SEQ ID NO: 2347189 - RNA, 19 nt, Artificial Sequence
  Description of Artificial Sequence: Synthetic oligonucleotide
ucacccacucuggagggca

SEQ ID NO: 2347190 - RNA, 19 nt, Artificial Sequence
  Description of Artificial Sequence: Synthetic oligonucleotide
ccuuccuuuuggcugacag

SEQ ID NO: 2347191 - RNA, 19 nt, Artificial Sequence
  Description of Artificial Sequence: Synthetic oligonucleotide
uuccgacacuggaagaguu

SEQ ID NO: 2347192 - RNA, 19 nt, Artificial Sequence
  Description of Artificial Sequence: Synthetic oligonucleotide
acuccuuaacacugugcaa

SEQ ID NO: 2347193 - RNA, 19 nt, Artificial Sequence
  Description of Artificial Sequence: Synthetic oligonucleotide
ugcccaacuugucucuaau

SEQ ID NO: 2347194 - RNA, 19 nt, Artificial Sequence
  Description of Artificial Sequence: Synthetic oligonucleotide
uccuauuggccgugacggc

SEQ ID NO: 2347195 - RNA, 19 nt, Artificial Sequence
  Description of Artificial Sequence: Synthetic oligonucleotide
uugugcugaggguccuugc

SEQ ID NO: 2347196 - RNA, 19 nt, Artificial Sequence
  Description of Artificial Sequence: Synthetic oligonucleotide
gaggggcaucauaagguug

SEQ ID NO: 2347197 - RNA, 19 nt, Artificial Sequence
  Description of Artificial Sequence: Synthetic oligonucleotide
gugcugaggguccuugcug

SEQ ID NO: 2347198 - RNA, 19 nt, Artificial Sequence
  Description of Artificial Sequence: Synthetic oligonucleotide
cuguugugcagucccagga

SEQ ID NO: 2347199 - RNA, 19 nt, Artificial Sequence
  Description of Artificial Sequence: Synthetic oligonucleotide
uauuggccgugacggccag

SEQ ID NO: 2347200 - RNA, 19 nt, Artificial Sequence
  Description of Artificial Sequence: Synthetic oligonucleotide
aacacaugauguggggaua

SEQ ID NO: 2347201 - RNA, 19 nt, Artificial Sequence
  Description of Artificial Sequence: Synthetic oligonucleotide
gcuaacuauacugugugaa

SEQ ID NO: 2347202 - RNA, 19 nt, Artificial Sequence
  Description of Artificial Sequence: Synthetic oligonucleotide
gugacggccagguucugga

SEQ ID NO: 2347203 - RNA, 19 nt, Artificial Sequence
  Description of Artificial Sequence: Synthetic oligonucleotide
cucuaaugucuguucuuca

SEQ ID NO: 2347204 - RNA, 19 nt, Artificial Sequence
  Description of Artificial Sequence: Synthetic oligonucleotide
ccaacuugucucuaauguc

SEQ ID NO: 2347205 - RNA, 19 nt, Artificial Sequence
  Description of Artificial Sequence: Synthetic oligonucleotide
cccaguaugaaaacuaucu

SEQ ID NO: 2347206 - RNA, 19 nt, Artificial Sequence
  Description of Artificial Sequence: Synthetic oligonucleotide
aucauaagguuggggacaa

SEQ ID NO: 2347207 - RNA, 19 nt, Artificial Sequence
  Description of Artificial Sequence: Synthetic oligonucleotide
cuugggacuccuuaacacu

SEQ ID NO: 2347208 - RNA, 19 nt, Artificial Sequence
  Description of Artificial Sequence: Synthetic oligonucleotide
uacacgcucaggccugcuc

SEQ ID NO: 2347209 - RNA, 19 nt, Artificial Sequence
  Description of Artificial Sequence: Synthetic oligonucleotide
aacccggcuggcuguugug

SEQ ID NO: 2347210 - RNA, 19 nt, Artificial Sequence
  Description of Artificial Sequence: Synthetic oligonucleotide
ugacggccagguucuggag

SEQ ID NO: 2347211 - RNA, 19 nt, Artificial Sequence
  Description of Artificial Sequence: Synthetic oligonucleotide
cuauuggccgugacggcca

SEQ ID NO: 2347212 - RNA, 19 nt, Artificial Sequence
  Description of Artificial Sequence: Synthetic oligonucleotide
auacugugugaaaccaggu

SEQ ID NO: 2347213 - RNA, 19 nt, Artificial Sequence
  Description of Artificial Sequence: Synthetic oligonucleotide
ggugagugguggcacugag

SEQ ID NO: 2347214 - RNA, 19 nt, Artificial Sequence
  Description of Artificial Sequence: Synthetic oligonucleotide
ggaaggagcaccguucauc

SEQ ID NO: 2347215 - RNA, 19 nt, Artificial Sequence
  Description of Artificial Sequence: Synthetic oligonucleotide
ggucagguuguuguggcug

SEQ ID NO: 2347216 - RNA, 19 nt, Artificial Sequence
  Description of Artificial Sequence: Synthetic oligonucleotide
caauccuauuggccgugac

SEQ ID NO: 2347217 - RNA, 19 nt, Artificial Sequence
  Description of Artificial Sequence: Synthetic oligonucleotide
ucccaguggugaccucucc

SEQ ID NO: 2347218 - RNA, 19 nt, Artificial Sequence
  Description of Artificial Sequence: Synthetic oligonucleotide
agagccgauguaagcagca

SEQ ID NO: 2347219 - RNA, 19 nt, Artificial Sequence
  Description of Artificial Sequence: Synthetic oligonucleotide
caguacguuguugcccagg

SEQ ID NO: 2347220 - RNA, 19 nt, Artificial Sequence
  Description of Artificial Sequence: Synthetic oligonucleotide
ucaauccuauuggccguga

SEQ ID NO: 2347221 - RNA, 19 nt, Artificial Sequence
  Description of Artificial Sequence: Synthetic oligonucleotide
guuguugcccaggugcaga

SEQ ID NO: 2347222 - RNA, 19 nt, Artificial Sequence
  Description of Artificial Sequence: Synthetic oligonucleotide
cgaaggacuaaauggugac

SEQ ID NO: 2347223 - RNA, 19 nt, Artificial Sequence
  Description of Artificial Sequence: Synthetic oligonucleotide
cucguuuggccugggguug

SEQ ID NO: 2347224 - RNA, 19 nt, Artificial Sequence
  Description of Artificial Sequence: Synthetic oligonucleotide
guacguuguugcccaggug

SEQ ID NO: 2347225 - RNA, 19 nt, Artificial Sequence
  Description of Artificial Sequence: Synthetic oligonucleotide
gggcagugacugcaguacg

SEQ ID NO: 2347226 - RNA, 19 nt, Artificial Sequence
  Description of Artificial Sequence: Synthetic oligonucleotide
gaaaccaggugcccaguau

SEQ ID NO: 2347227 - RNA, 19 nt, Artificial Sequence
  Description of Artificial Sequence: Synthetic oligonucleotide
ccuauuggccgugacggcc

SEQ ID NO: 2347228 - RNA, 19 nt, Artificial Sequence
  Description of Artificial Sequence: Synthetic oligonucleotide
cgucucaauccuauuggcc

SEQ ID NO: 2347229 - RNA, 19 nt, Artificial Sequence
  Description of Artificial Sequence: Synthetic oligonucleotide
agccgguugccccgaagcu

SEQ ID NO: 2347230 - RNA, 19 nt, Artificial Sequence
  Description of Artificial Sequence: Synthetic oligonucleotide
gcgucucaauccuauuggc

SEQ ID NO: 2347231 - RNA, 19 nt, Artificial Sequence
  Description of Artificial Sequence: Synthetic oligonucleotide
ggcggcagcgugcugaaca

SEQ ID NO: 2347232 - RNA, 19 nt, Artificial Sequence
  Description of Artificial Sequence: Synthetic oligonucleotide
gcucacccacucuggaggg

SEQ ID NO: 2347233 - RNA, 19 nt, Artificial Sequence
  Description of Artificial Sequence: Synthetic oligonucleotide
aaaacccggcuggcuguug

SEQ ID NO: 2347234 - RNA, 19 nt, Artificial Sequence
  Description of Artificial Sequence: Synthetic oligonucleotide
cucaauccuauuggccgug

SEQ ID NO: 2347235 - RNA, 19 nt, Artificial Sequence
  Description of Artificial Sequence: Synthetic oligonucleotide
caggaggccgaugucagca

SEQ ID NO: 2347236 - RNA, 19 nt, Artificial Sequence
  Description of Artificial Sequence: Synthetic oligonucleotide
gagcccgcagcuuccgaca

SEQ ID NO: 2347237 - RNA, 19 nt, Artificial Sequence
  Description of Artificial Sequence: Synthetic oligonucleotide
gugagugguggcacugagc

SEQ ID NO: 2347238 - RNA, 19 nt, Artificial Sequence
  Description of Artificial Sequence: Synthetic oligonucleotide
gccgauguaagcagcagca

SEQ ID NO: 2347239 - RNA, 19 nt, Artificial Sequence
  Description of Artificial Sequence: Synthetic oligonucleotide
ggccgugacggccagguuc

SEQ ID NO: 2347240 - RNA, 19 nt, Artificial Sequence
  Description of Artificial Sequence: Synthetic oligonucleotide
ugcaggcuacacgcucagg

SEQ ID NO: 2347241 - RNA, 19 nt, Artificial Sequence
  Description of Artificial Sequence: Synthetic oligonucleotide
ggagggucagguuguugug

SEQ ID NO: 2347242 - RNA, 19 nt, Artificial Sequence
  Description of Artificial Sequence: Synthetic oligonucleotide
ggcugacagucaugaaaag

SEQ ID NO: 2347243 - RNA, 19 nt, Artificial Sequence
  Description of Artificial Sequence: Synthetic oligonucleotide
acacugugcaagaggggca

SEQ ID NO: 2347244 - RNA, 19 nt, Artificial Sequence
  Description of Artificial Sequence: Synthetic oligonucleotide
ggagcaccguucaucuggg

SEQ ID NO: 2347245 - RNA, 19 nt, Artificial Sequence
  Description of Artificial Sequence: Synthetic oligonucleotide
ugugcaagaggggcaucau

SEQ ID NO: 2347246 - RNA, 19 nt, Artificial Sequence
  Description of Artificial Sequence: Synthetic oligonucleotide
ccagagucgcuccuucacc

SEQ ID NO: 2347247 - RNA, 19 nt, Artificial Sequence
  Description of Artificial Sequence: Synthetic oligonucleotide
ucauaagguuggggacaag

SEQ ID NO: 2347248 - RNA, 19 nt, Artificial Sequence
  Description of Artificial Sequence: Synthetic oligonucleotide
gugugaaaccaggugccca

SEQ ID NO: 2347249 - RNA, 19 nt, Artificial Sequence
  Description of Artificial Sequence: Synthetic oligonucleotide
cuggggaaccugccuuccc

SEQ ID NO: 2347250 - RNA, 19 nt, Artificial Sequence
  Description of Artificial Sequence: Synthetic oligonucleotide
guuugagcagugggcacuc

SEQ ID NO: 2347251 - RNA, 19 nt, Artificial Sequence
  Description of Artificial Sequence: Synthetic oligonucleotide
gugcccaguaugaaaacua

SEQ ID NO: 2347252 - RNA, 19 nt, Artificial Sequence
  Description of Artificial Sequence: Synthetic oligonucleotide
augcccaacuugucucuaa

SEQ ID NO: 2347253 - RNA, 19 nt, Artificial Sequence
  Description of Artificial Sequence: Synthetic oligonucleotide
cacugcguuugagcagugg

SEQ ID NO: 2347254 - RNA, 19 nt, Artificial Sequence
  Description of Artificial Sequence: Synthetic oligonucleotide
ggccgaugucagcaggaag

SEQ ID NO: 2347255 - RNA, 19 nt, Artificial Sequence
  Description of Artificial Sequence: Synthetic oligonucleotide
acugugcaagaggggcauc

SEQ ID NO: 2347256 - RNA, 19 nt, Artificial Sequence
  Description of Artificial Sequence: Synthetic oligonucleotide
gaucuaaagcagaguggcu

SEQ ID NO: 2347257 - RNA, 19 nt, Artificial Sequence
  Description of Artificial Sequence: Synthetic oligonucleotide
cagagucgcuccuucaccu

SEQ ID NO: 2347258 - RNA, 19 nt, Artificial Sequence
  Description of Artificial Sequence: Synthetic oligonucleotide
cccaacuugucucuaaugu

SEQ ID NO: 2347259 - RNA, 19 nt, Artificial Sequence
  Description of Artificial Sequence: Synthetic oligonucleotide
cugcucguuuggccugggg

SEQ ID NO: 2347260 - RNA, 19 nt, Artificial Sequence
  Description of Artificial Sequence: Synthetic oligonucleotide
aaauggugacagagccgau

SEQ ID NO: 2347261 - RNA, 19 nt, Artificial Sequence
  Description of Artificial Sequence: Synthetic oligonucleotide
gggguugugcugagggucc

SEQ ID NO: 2347262 - RNA, 19 nt, Artificial Sequence
  Description of Artificial Sequence: Synthetic oligonucleotide
cgaagcucaaucuguguca

SEQ ID NO: 2347263 - RNA, 19 nt, Artificial Sequence
  Description of Artificial Sequence: Synthetic oligonucleotide
ggcuguugugcagucccag

SEQ ID NO: 2347264 - RNA, 19 nt, Artificial Sequence
  Description of Artificial Sequence: Synthetic oligonucleotide
cacccacucuggagggcag

SEQ ID NO: 2347265 - RNA, 19 nt, Artificial Sequence
  Description of Artificial Sequence: Synthetic oligonucleotide
ccuuaacacugugcaagag

SEQ ID NO: 2347266 - RNA, 19 nt, Artificial Sequence
  Description of Artificial Sequence: Synthetic oligonucleotide
cugugucagguuggucagc

SEQ ID NO: 2347267 - RNA, 19 nt, Artificial Sequence
  Description of Artificial Sequence: Synthetic oligonucleotide
ucguuuggccugggguugu

SEQ ID NO: 2347268 - RNA, 19 nt, Artificial Sequence
  Description of Artificial Sequence: Synthetic oligonucleotide
gugcaagaggggcaucaua

SEQ ID NO: 2347269 - RNA, 19 nt, Artificial Sequence
  Description of Artificial Sequence: Synthetic oligonucleotide
gucucuaaugucuguucuu

SEQ ID NO: 2347270 - RNA, 19 nt, Artificial Sequence
  Description of Artificial Sequence: Synthetic oligonucleotide
aagacccauggaggagaaa

SEQ ID NO: 2347271 - RNA, 19 nt, Artificial Sequence
  Description of Artificial Sequence: Synthetic oligonucleotide
ucccuucuuggcagcucua

SEQ ID NO: 2347272 - RNA, 19 nt, Artificial Sequence
  Description of Artificial Sequence: Synthetic oligonucleotide
auuggccgugacggccagg

SEQ ID NO: 2347273 - RNA, 19 nt, Artificial Sequence
  Description of Artificial Sequence: Synthetic oligonucleotide
ggggauuagccagcccaag

SEQ ID NO: 2347274 - RNA, 19 nt, Artificial Sequence
  Description of Artificial Sequence: Synthetic oligonucleotide
gccacuaggcgcuaacuau

SEQ ID NO: 2347275 - RNA, 19 nt, Artificial Sequence
  Description of Artificial Sequence: Synthetic oligonucleotide
gugcagucccaggagagcu

SEQ ID NO: 2347276 - RNA, 19 nt, Artificial Sequence
  Description of Artificial Sequence: Synthetic oligonucleotide
cuaaagcagaguggcuuua

SEQ ID NO: 2347277 - RNA, 19 nt, Artificial Sequence
  Description of Artificial Sequence: Synthetic oligonucleotide
gggauuagccagcccaagu

SEQ ID NO: 2347278 - RNA, 19 nt, Artificial Sequence
  Description of Artificial Sequence: Synthetic oligonucleotide
agccuuccuuuuggcugac

SEQ ID NO: 2347279 - RNA, 19 nt, Artificial Sequence
  Description of Artificial Sequence: Synthetic oligonucleotide
gcguuugagcagugggcac

SEQ ID NO: 2347280 - RNA, 19 nt, Artificial Sequence
  Description of Artificial Sequence: Synthetic oligonucleotide
gugaccucuccaugcccaa

SEQ ID NO: 2347281 - RNA, 19 nt, Artificial Sequence
  Description of Artificial Sequence: Synthetic oligonucleotide
ccgguugccccgaagcuca

SEQ ID NO: 2347282 - RNA, 19 nt, Artificial Sequence
  Description of Artificial Sequence: Synthetic oligonucleotide
gcagcuuccgacacuggaa

SEQ ID NO: 2347283 - RNA, 19 nt, Artificial Sequence
  Description of Artificial Sequence: Synthetic oligonucleotide
gcaccguucaucuggggau

SEQ ID NO: 2347284 - RNA, 19 nt, Artificial Sequence
  Description of Artificial Sequence: Synthetic oligonucleotide
gacaaggaaggagcaccgu

SEQ ID NO: 2347285 - RNA, 19 nt, Artificial Sequence
  Description of Artificial Sequence: Synthetic oligonucleotide
gugggcacucgcccagcuc

SEQ ID NO: 2347286 - RNA, 19 nt, Artificial Sequence
  Description of Artificial Sequence: Synthetic oligonucleotide
ggcgcuaacuauacugugu

SEQ ID NO: 2347287 - RNA, 19 nt, Artificial Sequence
  Description of Artificial Sequence: Synthetic oligonucleotide
ccgauguaagcagcagcag

SEQ ID NO: 2347288 - RNA, 19 nt, Artificial Sequence
  Description of Artificial Sequence: Synthetic oligonucleotide
cagucaugaaaagggugcu

SEQ ID NO: 2347289 - RNA, 19 nt, Artificial Sequence
  Description of Artificial Sequence: Synthetic oligonucleotide
cccgcagcuuccgacacug

SEQ ID NO: 2347290 - RNA, 19 nt, Artificial Sequence
  Description of Artificial Sequence: Synthetic oligonucleotide
gggauagaguccaggggaa

SEQ ID NO: 2347291 - RNA, 19 nt, Artificial Sequence
  Description of Artificial Sequence: Synthetic oligonucleotide
gcccaguaugaaaacuauc

SEQ ID NO: 2347292 - RNA, 19 nt, Artificial Sequence
  Description of Artificial Sequence: Synthetic oligonucleotide
cuuccgacacuggaagagu

SEQ ID NO: 2347293 - RNA, 19 nt, Artificial Sequence
  Description of Artificial Sequence: Synthetic oligonucleotide
ggugcccaguaugaaaacu

SEQ ID NO: 2347294 - RNA, 19 nt, Artificial Sequence
  Description of Artificial Sequence: Synthetic oligonucleotide
cucgcccagcuccacaggu

SEQ ID NO: 2347295 - RNA, 19 nt, Artificial Sequence
  Description of Artificial Sequence: Synthetic oligonucleotide
ggcagcgugcugaacaagu

SEQ ID NO: 2347296 - RNA, 19 nt, Artificial Sequence
  Description of Artificial Sequence: Synthetic oligonucleotide
ccacuaggcgcuaacuaua

SEQ ID NO: 2347297 - RNA, 19 nt, Artificial Sequence
  Description of Artificial Sequence: Synthetic oligonucleotide
gcagcgugcugaacaaguc

SEQ ID NO: 2347298 - RNA, 19 nt, Artificial Sequence
  Description of Artificial Sequence: Synthetic oligonucleotide
gcaguacguuguugcccag

SEQ ID NO: 2347299 - RNA, 19 nt, Artificial Sequence
  Description of Artificial Sequence: Synthetic oligonucleotide
auguggggauagaguccag

SEQ ID NO: 2347300 - RNA, 19 nt, Artificial Sequence
  Description of Artificial Sequence: Synthetic oligonucleotide
uacugccacuaggcgcuaa

SEQ ID NO: 2347301 - RNA, 19 nt, Artificial Sequence
  Description of Artificial Sequence: Synthetic oligonucleotide
gcucguuuggccugggguu

SEQ ID NO: 2347302 - RNA, 19 nt, Artificial Sequence
  Description of Artificial Sequence: Synthetic oligonucleotide
ccggcuggcuguugugcag

SEQ ID NO: 2347303 - RNA, 19 nt, Artificial Sequence
  Description of Artificial Sequence: Synthetic oligonucleotide
accguucaucuggggauua

SEQ ID NO: 2347304 - RNA, 19 nt, Artificial Sequence
  Description of Artificial Sequence: Synthetic oligonucleotide
cagcucuaaagccuuccuu

SEQ ID NO: 2347305 - RNA, 19 nt, Artificial Sequence
  Description of Artificial Sequence: Synthetic oligonucleotide
gcucuaaagccuuccuuuu

SEQ ID NO: 2347306 - RNA, 19 nt, Artificial Sequence
  Description of Artificial Sequence: Synthetic oligonucleotide
gcuugccaagacccaugga

SEQ ID NO: 2347307 - RNA, 19 nt, Artificial Sequence
  Description of Artificial Sequence: Synthetic oligonucleotide
gccgguugccccgaagcuc

SEQ ID NO: 2347308 - RNA, 19 nt, Artificial Sequence
  Description of Artificial Sequence: Synthetic oligonucleotide
ggcagugacugcaguacgu

SEQ ID NO: 2347309 - RNA, 19 nt, Artificial Sequence
  Description of Artificial Sequence: Synthetic oligonucleotide
aggcggcagcgugcugaac

SEQ ID NO: 2347310 - RNA, 19 nt, Artificial Sequence
  Description of Artificial Sequence: Synthetic oligonucleotide
gcggcagcgugcugaacaa

SEQ ID NO: 2347311 - RNA, 19 nt, Artificial Sequence
  Description of Artificial Sequence: Synthetic oligonucleotide
cgugacggccagguucugg

SEQ ID NO: 2347312 - RNA, 19 nt, Artificial Sequence
  Description of Artificial Sequence: Synthetic oligonucleotide
caugcccaacuugucucua

SEQ ID NO: 2347313 - RNA, 19 nt, Artificial Sequence
  Description of Artificial Sequence: Synthetic oligonucleotide
cacugugcaagaggggcau

SEQ ID NO: 2347314 - RNA, 19 nt, Artificial Sequence
  Description of Artificial Sequence: Synthetic oligonucleotide
caggcggcagcgugcugaa

SEQ ID NO: 2347315 - RNA, 19 nt, Artificial Sequence
  Description of Artificial Sequence: Synthetic oligonucleotide
ccgaugucagcaggaagga

SEQ ID NO: 2347316 - RNA, 19 nt, Artificial Sequence
  Description of Artificial Sequence: Synthetic oligonucleotide
ccguucaucuggggauuag

SEQ ID NO: 2347317 - RNA, 19 nt, Artificial Sequence
  Description of Artificial Sequence: Synthetic oligonucleotide
gcacucgcccagcuccaca

SEQ ID NO: 2347318 - RNA, 19 nt, Artificial Sequence
  Description of Artificial Sequence: Synthetic oligonucleotide
cagagcccgcagcuuccga

SEQ ID NO: 2347319 - RNA, 19 nt, Artificial Sequence
  Description of Artificial Sequence: Synthetic oligonucleotide
gggagcgucucaauccuau

SEQ ID NO: 2347320 - RNA, 19 nt, Artificial Sequence
  Description of Artificial Sequence: Synthetic oligonucleotide
cagcccaagucuccucccu

SEQ ID NO: 2347321 - RNA, 19 nt, Artificial Sequence
  Description of Artificial Sequence: Synthetic oligonucleotide
gcgugcugaacaaguccuc

SEQ ID NO: 2347322 - RNA, 19 nt, Artificial Sequence
  Description of Artificial Sequence: Synthetic oligonucleotide
cguuguugcccaggugcag

SEQ ID NO: 2347323 - RNA, 19 nt, Artificial Sequence
  Description of Artificial Sequence: Synthetic oligonucleotide
cgcuaacuauacuguguga

SEQ ID NO: 2347324 - RNA, 19 nt, Artificial Sequence
  Description of Artificial Sequence: Synthetic oligonucleotide
ccgacacuggaagaguucu

SEQ ID NO: 2347325 - RNA, 19 nt, Artificial Sequence
  Description of Artificial Sequence: Synthetic oligonucleotide
ggagagcugggcugcucgu

SEQ ID NO: 2347326 - RNA, 19 nt, Artificial Sequence
  Description of Artificial Sequence: Synthetic oligonucleotide
cugccacuaggcgcuaacu

SEQ ID NO: 2347327 - RNA, 19 nt, Artificial Sequence
  Description of Artificial Sequence: Synthetic oligonucleotide
gggugcuugccaagaccca

SEQ ID NO: 2347328 - RNA, 19 nt, Artificial Sequence
  Description of Artificial Sequence: Synthetic oligonucleotide
gccgugacggccagguucu

SEQ ID NO: 2347329 - RNA, 19 nt, Artificial Sequence
  Description of Artificial Sequence: Synthetic oligonucleotide
gcugcucguuuggccuggg

SEQ ID NO: 2347330 - RNA, 19 nt, Artificial Sequence
  Description of Artificial Sequence: Synthetic oligonucleotide
cccggcuggcuguugugca

SEQ ID NO: 2347331 - RNA, 19 nt, Artificial Sequence
  Description of Artificial Sequence: Synthetic oligonucleotide
gggucagguuguuguggcu

SEQ ID NO: 2347332 - RNA, 19 nt, Artificial Sequence
  Description of Artificial Sequence: Synthetic oligonucleotide
gcucaggccugcuccuugu

SEQ ID NO: 2347333 - RNA, 19 nt, Artificial Sequence
  Description of Artificial Sequence: Synthetic oligonucleotide
gcacuccagccgguugccc

SEQ ID NO: 2347334 - RNA, 19 nt, Artificial Sequence
  Description of Artificial Sequence: Synthetic oligonucleotide
gcagugacugcaguacguu

SEQ ID NO: 2347335 - RNA, 19 nt, Artificial Sequence
  Description of Artificial Sequence: Synthetic oligonucleotide
acgcucaggccugcuccuu

SEQ ID NO: 2347336 - RNA, 19 nt, Artificial Sequence
  Description of Artificial Sequence: Synthetic oligonucleotide
ccuucaccucaggcggcag

SEQ ID NO: 2347337 - RNA, 19 nt, Artificial Sequence
  Description of Artificial Sequence: Synthetic oligonucleotide
guaggcacuccagccgguu

SEQ ID NO: 2347338 - RNA, 19 nt, Artificial Sequence
  Description of Artificial Sequence: Synthetic oligonucleotide
ggagcgucucaauccuauu

SEQ ID NO: 2347339 - RNA, 19 nt, Artificial Sequence
  Description of Artificial Sequence: Synthetic oligonucleotide
ccacugcguuugagcagug

SEQ ID NO: 2347340 - RNA, 19 nt, Artificial Sequence
  Description of Artificial Sequence: Synthetic oligonucleotide
ggcacucgcccagcuccac

SEQ ID NO: 2347341 - RNA, 19 nt, Artificial Sequence
  Description of Artificial Sequence: Synthetic oligonucleotide
caccguucaucuggggauu

SEQ ID NO: 2347342 - RNA, 19 nt, Artificial Sequence
  Description of Artificial Sequence: Synthetic oligonucleotide
cguuugagcagugggcacu

SEQ ID NO: 2347343 - RNA, 19 nt, Artificial Sequence
  Description of Artificial Sequence: Synthetic oligonucleotide
gggcacucgcccagcucca

SEQ ID NO: 2347344 - RNA, 19 nt, Artificial Sequence
  Description of Artificial Sequence: Synthetic oligonucleotide
cuacacgcucaggccugcu

SEQ ID NO: 2347345 - RNA, 19 nt, Artificial Sequence
  Description of Artificial Sequence: Synthetic oligonucleotide
ggggagcgucucaauccua

SEQ ID NO: 2347346 - RNA, 19 nt, Artificial Sequence
  Description of Artificial Sequence: Synthetic oligonucleotide
ggguugugcugaggguccu

SEQ ID NO: 2347347 - RNA, 19 nt, Artificial Sequence
  Description of Artificial Sequence: Synthetic oligonucleotide
gccuuccuuuuggcugaca

SEQ ID NO: 2347348 - RNA, 19 nt, Artificial Sequence
  Description of Artificial Sequence: Synthetic oligonucleotide
gcccgcagcuuccgacacu

SEQ ID NO: 2347349 - RNA, 19 nt, Artificial Sequence
  Description of Artificial Sequence: Synthetic oligonucleotide
gguugugcugaggguccuu

SEQ ID NO: 2347350 - RNA, 19 nt, Artificial Sequence
  Description of Artificial Sequence: Synthetic oligonucleotide
ccgugacggccagguucug

SEQ ID NO: 2347351 - RNA, 19 nt, Artificial Sequence
  Description of Artificial Sequence: Synthetic oligonucleotide
cgguugccccgaagcucaa

SEQ ID NO: 2347352 - RNA, 19 nt, Artificial Sequence
  Description of Artificial Sequence: Synthetic oligonucleotide
aauguacugaaauacauac

SEQ ID NO: 2347353 - RNA, 19 nt, Artificial Sequence
  Description of Artificial Sequence: Synthetic oligonucleotide
uuucuauuaaacuucaggg

SEQ ID NO: 2347354 - RNA, 19 nt, Artificial Sequence
  Description of Artificial Sequence: Synthetic oligonucleotide
aauucgacaacacagccuc

SEQ ID NO: 2347355 - RNA, 19 nt, Artificial Sequence
  Description of Artificial Sequence: Synthetic oligonucleotide
aauaccagagagcacaaac

SEQ ID NO: 2347356 - RNA, 19 nt, Artificial Sequence
  Description of Artificial Sequence: Synthetic oligonucleotide
aaagaagucagacucgggg

SEQ ID NO: 2347357 - RNA, 19 nt, Artificial Sequence
  Description of Artificial Sequence: Synthetic oligonucleotide
aggaauguuagucaugugc

SEQ ID NO: 2347358 - RNA, 19 nt, Artificial Sequence
  Description of Artificial Sequence: Synthetic oligonucleotide
auuucuauuaaacuucagg

SEQ ID NO: 2347359 - RNA, 19 nt, Artificial Sequence
  Description of Artificial Sequence: Synthetic oligonucleotide
ucuauuaaacuucagggca

SEQ ID NO: 2347360 - RNA, 19 nt, Artificial Sequence
  Description of Artificial Sequence: Synthetic oligonucleotide
uguaugagaagaaaagucu

SEQ ID NO: 2347361 - RNA, 19 nt, Artificial Sequence
  Description of Artificial Sequence: Synthetic oligonucleotide
acaguuaacuuauugcugg

SEQ ID NO: 2347362 - RNA, 19 nt, Artificial Sequence
  Description of Artificial Sequence: Synthetic oligonucleotide
uauguguugaaacuguaug

SEQ ID NO: 2347363 - RNA, 19 nt, Artificial Sequence
  Description of Artificial Sequence: Synthetic oligonucleotide
ugucuugucagucuuacca

SEQ ID NO: 2347364 - RNA, 19 nt, Artificial Sequence
  Description of Artificial Sequence: Synthetic oligonucleotide
agacuaauaucuucaagac

SEQ ID NO: 2347365 - RNA, 19 nt, Artificial Sequence
  Description of Artificial Sequence: Synthetic oligonucleotide
aagcuuucaugucaaaguc

SEQ ID NO: 2347366 - RNA, 19 nt, Artificial Sequence
  Description of Artificial Sequence: Synthetic oligonucleotide
gagacuaauaucuucaaga

SEQ ID NO: 2347367 - RNA, 19 nt, Artificial Sequence
  Description of Artificial Sequence: Synthetic oligonucleotide
auaucuucaagacaaccuc

SEQ ID NO: 2347368 - RNA, 19 nt, Artificial Sequence
  Description of Artificial Sequence: Synthetic oligonucleotide
aagagagagguauccagac

SEQ ID NO: 2347369 - RNA, 19 nt, Artificial Sequence
  Description of Artificial Sequence: Synthetic oligonucleotide
acaaacacaauucucuuug

SEQ ID NO: 2347370 - RNA, 19 nt, Artificial Sequence
  Description of Artificial Sequence: Synthetic oligonucleotide
uggcaauucgacaacacag

SEQ ID NO: 2347371 - RNA, 19 nt, Artificial Sequence
  Description of Artificial Sequence: Synthetic oligonucleotide
aaugacaagaacaaacaca

SEQ ID NO: 2347372 - RNA, 19 nt, Artificial Sequence
  Description of Artificial Sequence: Synthetic oligonucleotide
auauucuggcacuaaauag

SEQ ID NO: 2347373 - RNA, 19 nt, Artificial Sequence
  Description of Artificial Sequence: Synthetic oligonucleotide
uauucuggcacuaaauagu

SEQ ID NO: 2347374 - RNA, 19 nt, Artificial Sequence
  Description of Artificial Sequence: Synthetic oligonucleotide
uucuauuaaacuucagggc

SEQ ID NO: 2347375 - RNA, 19 nt, Artificial Sequence
  Description of Artificial Sequence: Synthetic oligonucleotide
aaaacggggugccagucac

SEQ ID NO: 2347376 - RNA, 19 nt, Artificial Sequence
  Description of Artificial Sequence: Synthetic oligonucleotide
uuagucaguaaacaggaaa

SEQ ID NO: 2347377 - RNA, 19 nt, Artificial Sequence
  Description of Artificial Sequence: Synthetic oligonucleotide
auguuagucaugugcauac

SEQ ID NO: 2347378 - RNA, 19 nt, Artificial Sequence
  Description of Artificial Sequence: Synthetic oligonucleotide
acaagaacaaacacaauuc

SEQ ID NO: 2347379 - RNA, 19 nt, Artificial Sequence
  Description of Artificial Sequence: Synthetic oligonucleotide
uaaacuucagggcacgggc

SEQ ID NO: 2347380 - RNA, 19 nt, Artificial Sequence
  Description of Artificial Sequence: Synthetic oligonucleotide
auaguauuucuauuaaacu

SEQ ID NO: 2347381 - RNA, 19 nt, Artificial Sequence
  Description of Artificial Sequence: Synthetic oligonucleotide
aacuguaugagaagaaaag

SEQ ID NO: 2347382 - RNA, 19 nt, Artificial Sequence
  Description of Artificial Sequence: Synthetic oligonucleotide
uuaagaaaauauucuggca

SEQ ID NO: 2347383 - RNA, 19 nt, Artificial Sequence
  Description of Artificial Sequence: Synthetic oligonucleotide
uaaauaguauuucuauuaa

SEQ ID NO: 2347384 - RNA, 19 nt, Artificial Sequence
  Description of Artificial Sequence: Synthetic oligonucleotide
uagucaguaaacaggaaac

SEQ ID NO: 2347385 - RNA, 19 nt, Artificial Sequence
  Description of Artificial Sequence: Synthetic oligonucleotide
aaagucuaaggaauguuag

SEQ ID NO: 2347386 - RNA, 19 nt, Artificial Sequence
  Description of Artificial Sequence: Synthetic oligonucleotide
ucguccaugucuaaggggc

SEQ ID NO: 2347387 - RNA, 19 nt, Artificial Sequence
  Description of Artificial Sequence: Synthetic oligonucleotide
agucuaaggaauguuaguc

SEQ ID NO: 2347388 - RNA, 19 nt, Artificial Sequence
  Description of Artificial Sequence: Synthetic oligonucleotide
uccaauaccagagagcaca

SEQ ID NO: 2347389 - RNA, 19 nt, Artificial Sequence
  Description of Artificial Sequence: Synthetic oligonucleotide
uaaggaaugguuccgccgc

SEQ ID NO: 2347390 - RNA, 19 nt, Artificial Sequence
  Description of Artificial Sequence: Synthetic oligonucleotide
uuccaaucggcuuuggcag

SEQ ID NO: 2347391 - RNA, 19 nt, Artificial Sequence
  Description of Artificial Sequence: Synthetic oligonucleotide
guuuccaccggagacaucg

SEQ ID NO: 2347392 - RNA, 19 nt, Artificial Sequence
  Description of Artificial Sequence: Synthetic oligonucleotide
agagcauauaaagugauca

SEQ ID NO: 2347393 - RNA, 19 nt, Artificial Sequence
  Description of Artificial Sequence: Synthetic oligonucleotide
auacacauuagucaguaaa

SEQ ID NO: 2347394 - RNA, 19 nt, Artificial Sequence
  Description of Artificial Sequence: Synthetic oligonucleotide
aucaacaaugacaagaaca

SEQ ID NO: 2347395 - RNA, 19 nt, Artificial Sequence
  Description of Artificial Sequence: Synthetic oligonucleotide
agaacaaacacaauucucu

SEQ ID NO: 2347396 - RNA, 19 nt, Artificial Sequence
  Description of Artificial Sequence: Synthetic oligonucleotide
aaauaguauuucuauuaaa

SEQ ID NO: 2347397 - RNA, 19 nt, Artificial Sequence
  Description of Artificial Sequence: Synthetic oligonucleotide
agaagcguggcuuccugcc

SEQ ID NO: 2347398 - RNA, 19 nt, Artificial Sequence
  Description of Artificial Sequence: Synthetic oligonucleotide
ucuuauguguugaaacugu

SEQ ID NO: 2347399 - RNA, 19 nt, Artificial Sequence
  Description of Artificial Sequence: Synthetic oligonucleotide
cuguaugagaagaaaaguc

SEQ ID NO: 2347400 - RNA, 19 nt, Artificial Sequence
  Description of Artificial Sequence: Synthetic oligonucleotide
ugagacuaauaucuucaag

SEQ ID NO: 2347401 - RNA, 19 nt, Artificial Sequence
  Description of Artificial Sequence: Synthetic oligonucleotide
uguuucuuucugagaagcg

SEQ ID NO: 2347402 - RNA, 19 nt, Artificial Sequence
  Description of Artificial Sequence: Synthetic oligonucleotide
uaccagagagcacaaacug

SEQ ID NO: 2347403 - RNA, 19 nt, Artificial Sequence
  Description of Artificial Sequence: Synthetic oligonucleotide
uaaggaauguuagucaugu

SEQ ID NO: 2347404 - RNA, 19 nt, Artificial Sequence
  Description of Artificial Sequence: Synthetic oligonucleotide
aaaauguacugaaauacau

SEQ ID NO: 2347405 - RNA, 19 nt, Artificial Sequence
  Description of Artificial Sequence: Synthetic oligonucleotide
aaacacaauucucuuugcu

SEQ ID NO: 2347406 - RNA, 19 nt, Artificial Sequence
  Description of Artificial Sequence: Synthetic oligonucleotide
cacauuagucaguaaacag

SEQ ID NO: 2347407 - RNA, 19 nt, Artificial Sequence
  Description of Artificial Sequence: Synthetic oligonucleotide
cuaaauaguauuucuauua

SEQ ID NO: 2347408 - RNA, 19 nt, Artificial Sequence
  Description of Artificial Sequence: Synthetic oligonucleotide
guuaacuuauugcugggug

SEQ ID NO: 2347409 - RNA, 19 nt, Artificial Sequence
  Description of Artificial Sequence: Synthetic oligonucleotide
aacuucagggcacgggccg

SEQ ID NO: 2347410 - RNA, 19 nt, Artificial Sequence
  Description of Artificial Sequence: Synthetic oligonucleotide
gagagagguauccagacuc

SEQ ID NO: 2347411 - RNA, 19 nt, Artificial Sequence
  Description of Artificial Sequence: Synthetic oligonucleotide
uaugagaagaaaagucuaa

SEQ ID NO: 2347412 - RNA, 19 nt, Artificial Sequence
  Description of Artificial Sequence: Synthetic oligonucleotide
aaacuggguuucuuccucg

SEQ ID NO: 2347413 - RNA, 19 nt, Artificial Sequence
  Description of Artificial Sequence: Synthetic oligonucleotide
aggaaacugagguuuagug

SEQ ID NO: 2347414 - RNA, 19 nt, Artificial Sequence
  Description of Artificial Sequence: Synthetic oligonucleotide
uuaacuuauugcugggugu

SEQ ID NO: 2347415 - RNA, 19 nt, Artificial Sequence
  Description of Artificial Sequence: Synthetic oligonucleotide
gagagcacaaacuggacuc

SEQ ID NO: 2347416 - RNA, 19 nt, Artificial Sequence
  Description of Artificial Sequence: Synthetic oligonucleotide
aacugagguuuagugagac

SEQ ID NO: 2347417 - RNA, 19 nt, Artificial Sequence
  Description of Artificial Sequence: Synthetic oligonucleotide
uuaaacuucagggcacggg

SEQ ID NO: 2347418 - RNA, 19 nt, Artificial Sequence
  Description of Artificial Sequence: Synthetic oligonucleotide
agucuuaccaccauuuaag

SEQ ID NO: 2347419 - RNA, 19 nt, Artificial Sequence
  Description of Artificial Sequence: Synthetic oligonucleotide
uacuaccaccaaaagaugu

SEQ ID NO: 2347420 - RNA, 19 nt, Artificial Sequence
  Description of Artificial Sequence: Synthetic oligonucleotide
uauuaaacuucagggcacg

SEQ ID NO: 2347421 - RNA, 19 nt, Artificial Sequence
  Description of Artificial Sequence: Synthetic oligonucleotide
cuaaggaaugguuccgccg

SEQ ID NO: 2347422 - RNA, 19 nt, Artificial Sequence
  Description of Artificial Sequence: Synthetic oligonucleotide
aagucuaaggaauguuagu

SEQ ID NO: 2347423 - RNA, 19 nt, Artificial Sequence
  Description of Artificial Sequence: Synthetic oligonucleotide
augacaagaacaaacacaa

SEQ ID NO: 2347424 - RNA, 19 nt, Artificial Sequence
  Description of Artificial Sequence: Synthetic oligonucleotide
guugaaacuguaugagaag

SEQ ID NO: 2347425 - RNA, 19 nt, Artificial Sequence
  Description of Artificial Sequence: Synthetic oligonucleotide
aaggaaugguuccgccgcc

SEQ ID NO: 2347426 - RNA, 19 nt, Artificial Sequence
  Description of Artificial Sequence: Synthetic oligonucleotide
auguguugaaacuguauga

SEQ ID NO: 2347427 - RNA, 19 nt, Artificial Sequence
  Description of Artificial Sequence: Synthetic oligonucleotide
aaaagaugucagaaauauc

SEQ ID NO: 2347428 - RNA, 19 nt, Artificial Sequence
  Description of Artificial Sequence: Synthetic oligonucleotide
uuuucacagagggugcugg

SEQ ID NO: 2347429 - RNA, 19 nt, Artificial Sequence
  Description of Artificial Sequence: Synthetic oligonucleotide
uaucuucaagacaaccucu

SEQ ID NO: 2347430 - RNA, 19 nt, Artificial Sequence
  Description of Artificial Sequence: Synthetic oligonucleotide
gguuggagaauccaaacug

SEQ ID NO: 2347431 - RNA, 19 nt, Artificial Sequence
  Description of Artificial Sequence: Synthetic oligonucleotide
acacaauucucuuugcuau

SEQ ID NO: 2347432 - RNA, 19 nt, Artificial Sequence
  Description of Artificial Sequence: Synthetic oligonucleotide
cuauuaaacuucagggcac

SEQ ID NO: 2347433 - RNA, 19 nt, Artificial Sequence
  Description of Artificial Sequence: Synthetic oligonucleotide
uucuuauguguugaaacug

SEQ ID NO: 2347434 - RNA, 19 nt, Artificial Sequence
  Description of Artificial Sequence: Synthetic oligonucleotide
uuccgaagaagagagaggu

SEQ ID NO: 2347435 - RNA, 19 nt, Artificial Sequence
  Description of Artificial Sequence: Synthetic oligonucleotide
gagcuuuucagagccaagg

SEQ ID NO: 2347436 - RNA, 19 nt, Artificial Sequence
  Description of Artificial Sequence: Synthetic oligonucleotide
aaugguuccgccgccgccg

SEQ ID NO: 2347437 - RNA, 19 nt, Artificial Sequence
  Description of Artificial Sequence: Synthetic oligonucleotide
aaacuucagggcacgggcc

SEQ ID NO: 2347438 - RNA, 19 nt, Artificial Sequence
  Description of Artificial Sequence: Synthetic oligonucleotide
ucuugucagucuuaccacc

SEQ ID NO: 2347439 - RNA, 19 nt, Artificial Sequence
  Description of Artificial Sequence: Synthetic oligonucleotide
uauuucuauuaaacuucag

SEQ ID NO: 2347440 - RNA, 19 nt, Artificial Sequence
  Description of Artificial Sequence: Synthetic oligonucleotide
aaaagucuaaggaauguua

SEQ ID NO: 2347441 - RNA, 19 nt, Artificial Sequence
  Description of Artificial Sequence: Synthetic oligonucleotide
ucaugugcauacacauuag

SEQ ID NO: 2347442 - RNA, 19 nt, Artificial Sequence
  Description of Artificial Sequence: Synthetic oligonucleotide
acuaaauaguauuucuauu

SEQ ID NO: 2347443 - RNA, 19 nt, Artificial Sequence
  Description of Artificial Sequence: Synthetic oligonucleotide
cugauagccagccaccgag

SEQ ID NO: 2347444 - RNA, 19 nt, Artificial Sequence
  Description of Artificial Sequence: Synthetic oligonucleotide
guuccaaucggcuuuggca

SEQ ID NO: 2347445 - RNA, 19 nt, Artificial Sequence
  Description of Artificial Sequence: Synthetic oligonucleotide
uagucaugugcauacacau

SEQ ID NO: 2347446 - RNA, 19 nt, Artificial Sequence
  Description of Artificial Sequence: Synthetic oligonucleotide
agagagcacaaacuggacu

SEQ ID NO: 2347447 - RNA, 19 nt, Artificial Sequence
  Description of Artificial Sequence: Synthetic oligonucleotide
gacaacacagccucccuac

SEQ ID NO: 2347448 - RNA, 19 nt, Artificial Sequence
  Description of Artificial Sequence: Synthetic oligonucleotide
caaugacaagaacaaacac

SEQ ID NO: 2347449 - RNA, 19 nt, Artificial Sequence
  Description of Artificial Sequence: Synthetic oligonucleotide
cacaguuaacuuauugcug

SEQ ID NO: 2347450 - RNA, 19 nt, Artificial Sequence
  Description of Artificial Sequence: Synthetic oligonucleotide
uccaccggagacaucgucc

SEQ ID NO: 2347451 - RNA, 19 nt, Artificial Sequence
  Description of Artificial Sequence: Synthetic oligonucleotide
aagagcauauaaagugauc

SEQ ID NO: 2347452 - RNA, 19 nt, Artificial Sequence
  Description of Artificial Sequence: Synthetic oligonucleotide
guuuagugagacuaauauc

SEQ ID NO: 2347453 - RNA, 19 nt, Artificial Sequence
  Description of Artificial Sequence: Synthetic oligonucleotide
acuguaugagaagaaaagu

SEQ ID NO: 2347454 - RNA, 19 nt, Artificial Sequence
  Description of Artificial Sequence: Synthetic oligonucleotide
gacuaauaucuucaagaca

SEQ ID NO: 2347455 - RNA, 19 nt, Artificial Sequence
  Description of Artificial Sequence: Synthetic oligonucleotide
aggggcucugcugauagcc

SEQ ID NO: 2347456 - RNA, 19 nt, Artificial Sequence
  Description of Artificial Sequence: Synthetic oligonucleotide
uauugcugggugucaaagc

SEQ ID NO: 2347457 - RNA, 19 nt, Artificial Sequence
  Description of Artificial Sequence: Synthetic oligonucleotide
aacggggugccagucaccg

SEQ ID NO: 2347458 - RNA, 19 nt, Artificial Sequence
  Description of Artificial Sequence: Synthetic oligonucleotide
gucuguuucuuucugagaa

SEQ ID NO: 2347459 - RNA, 19 nt, Artificial Sequence
  Description of Artificial Sequence: Synthetic oligonucleotide
ucuuaccaccauuuaagaa

SEQ ID NO: 2347460 - RNA, 19 nt, Artificial Sequence
  Description of Artificial Sequence: Synthetic oligonucleotide
agacaaccucuccaauacc

SEQ ID NO: 2347461 - RNA, 19 nt, Artificial Sequence
  Description of Artificial Sequence: Synthetic oligonucleotide
gucaguaguucugagacac

SEQ ID NO: 2347462 - RNA, 19 nt, Artificial Sequence
  Description of Artificial Sequence: Synthetic oligonucleotide
aaguccuggauggcaauuc

SEQ ID NO: 2347463 - RNA, 19 nt, Artificial Sequence
  Description of Artificial Sequence: Synthetic oligonucleotide
cuguuucuuucugagaagc

SEQ ID NO: 2347464 - RNA, 19 nt, Artificial Sequence
  Description of Artificial Sequence: Synthetic oligonucleotide
guuagucaugugcauacac

SEQ ID NO: 2347465 - RNA, 19 nt, Artificial Sequence
  Description of Artificial Sequence: Synthetic oligonucleotide
uggagaauccaaacugggu

SEQ ID NO: 2347466 - RNA, 19 nt, Artificial Sequence
  Description of Artificial Sequence: Synthetic oligonucleotide
aucguccaugucuaagggg

SEQ ID NO: 2347467 - RNA, 19 nt, Artificial Sequence
  Description of Artificial Sequence: Synthetic oligonucleotide
acuaccaccaaaagauguc

SEQ ID NO: 2347468 - RNA, 19 nt, Artificial Sequence
  Description of Artificial Sequence: Synthetic oligonucleotide
uauuugucuugucagucuu

SEQ ID NO: 2347469 - RNA, 19 nt, Artificial Sequence
  Description of Artificial Sequence: Synthetic oligonucleotide
gucaugugcauacacauua

SEQ ID NO: 2347470 - RNA, 19 nt, Artificial Sequence
  Description of Artificial Sequence: Synthetic oligonucleotide
uuugucuugucagucuuac

SEQ ID NO: 2347471 - RNA, 19 nt, Artificial Sequence
  Description of Artificial Sequence: Synthetic oligonucleotide
uccaccgcuggcccuaagg

SEQ ID NO: 2347472 - RNA, 19 nt, Artificial Sequence
  Description of Artificial Sequence: Synthetic oligonucleotide
aauguuagucaugugcaua

SEQ ID NO: 2347473 - RNA, 19 nt, Artificial Sequence
  Description of Artificial Sequence: Synthetic oligonucleotide
agaaaagucuaaggaaugu

SEQ ID NO: 2347474 - RNA, 19 nt, Artificial Sequence
  Description of Artificial Sequence: Synthetic oligonucleotide
ucgguguccacaguuaacu

SEQ ID NO: 2347475 - RNA, 19 nt, Artificial Sequence
  Description of Artificial Sequence: Synthetic oligonucleotide
ucuuccucgugcccaaaga

SEQ ID NO: 2347476 - RNA, 19 nt, Artificial Sequence
  Description of Artificial Sequence: Synthetic oligonucleotide
gucuaaggaauguuaguca

SEQ ID NO: 2347477 - RNA, 19 nt, Artificial Sequence
  Description of Artificial Sequence: Synthetic oligonucleotide
agagcacaaacuggacucc

SEQ ID NO: 2347478 - RNA, 19 nt, Artificial Sequence
  Description of Artificial Sequence: Synthetic oligonucleotide
ugucuaaggggcucugcug

SEQ ID NO: 2347479 - RNA, 19 nt, Artificial Sequence
  Description of Artificial Sequence: Synthetic oligonucleotide
caaacacaauucucuuugc

SEQ ID NO: 2347480 - RNA, 19 nt, Artificial Sequence
  Description of Artificial Sequence: Synthetic oligonucleotide
ugcuauuugucuugucagu

SEQ ID NO: 2347481 - RNA, 19 nt, Artificial Sequence
  Description of Artificial Sequence: Synthetic oligonucleotide
agagccccacguuuccacc

SEQ ID NO: 2347482 - RNA, 19 nt, Artificial Sequence
  Description of Artificial Sequence: Synthetic oligonucleotide
ucgugcccaaagaagucag

SEQ ID NO: 2347483 - RNA, 19 nt, Artificial Sequence
  Description of Artificial Sequence: Synthetic oligonucleotide
acacauuagucaguaaaca

SEQ ID NO: 2347484 - RNA, 19 nt, Artificial Sequence
  Description of Artificial Sequence: Synthetic oligonucleotide
cucuuugcuauuugucuug

SEQ ID NO: 2347485 - RNA, 19 nt, Artificial Sequence
  Description of Artificial Sequence: Synthetic oligonucleotide
aguaaacaggaaacugagg

SEQ ID NO: 2347486 - RNA, 19 nt, Artificial Sequence
  Description of Artificial Sequence: Synthetic oligonucleotide
ugagguuuagugagacuaa

SEQ ID NO: 2347487 - RNA, 19 nt, Artificial Sequence
  Description of Artificial Sequence: Synthetic oligonucleotide
uucgacaacacagccuccc

SEQ ID NO: 2347488 - RNA, 19 nt, Artificial Sequence
  Description of Artificial Sequence: Synthetic oligonucleotide
gacaaccucuccaauacca

SEQ ID NO: 2347489 - RNA, 19 nt, Artificial Sequence
  Description of Artificial Sequence: Synthetic oligonucleotide
caguuaacuuauugcuggg

SEQ ID NO: 2347490 - RNA, 19 nt, Artificial Sequence
  Description of Artificial Sequence: Synthetic oligonucleotide
gaagcguggcuuccugccg

SEQ ID NO: 2347491 - RNA, 19 nt, Artificial Sequence
  Description of Artificial Sequence: Synthetic oligonucleotide
aucuucaagacaaccucuc

SEQ ID NO: 2347492 - RNA, 19 nt, Artificial Sequence
  Description of Artificial Sequence: Synthetic oligonucleotide
cuggauggcaauucgacaa

SEQ ID NO: 2347493 - RNA, 19 nt, Artificial Sequence
  Description of Artificial Sequence: Synthetic oligonucleotide
accaccaaaagaugucaga

SEQ ID NO: 2347494 - RNA, 19 nt, Artificial Sequence
  Description of Artificial Sequence: Synthetic oligonucleotide
cuucaagacaaccucucca

SEQ ID NO: 2347495 - RNA, 19 nt, Artificial Sequence
  Description of Artificial Sequence: Synthetic oligonucleotide
aaggaauguuagucaugug

SEQ ID NO: 2347496 - RNA, 19 nt, Artificial Sequence
  Description of Artificial Sequence: Synthetic oligonucleotide
uaacuuauugcuggguguc

SEQ ID NO: 2347497 - RNA, 19 nt, Artificial Sequence
  Description of Artificial Sequence: Synthetic oligonucleotide
ugagaagcguggcuuccug

SEQ ID NO: 2347498 - RNA, 19 nt, Artificial Sequence
  Description of Artificial Sequence: Synthetic oligonucleotide
ugcauacacauuagucagu

SEQ ID NO: 2347499 - RNA, 19 nt, Artificial Sequence
  Description of Artificial Sequence: Synthetic oligonucleotide
uccaaucggcuuuggcagg

SEQ ID NO: 2347500 - RNA, 19 nt, Artificial Sequence
  Description of Artificial Sequence: Synthetic oligonucleotide
gacaucguccaugucuaag

SEQ ID NO: 2347501 - RNA, 19 nt, Artificial Sequence
  Description of Artificial Sequence: Synthetic oligonucleotide
ugcccaaagaagucagacu

SEQ ID NO: 2347502 - RNA, 19 nt, Artificial Sequence
  Description of Artificial Sequence: Synthetic oligonucleotide
ggaaacugagguuuaguga

SEQ ID NO: 2347503 - RNA, 19 nt, Artificial Sequence
  Description of Artificial Sequence: Synthetic oligonucleotide
agacucggggugcacguuc

SEQ ID NO: 2347504 - RNA, 19 nt, Artificial Sequence
  Description of Artificial Sequence: Synthetic oligonucleotide
agucaguaaacaggaaacu

SEQ ID NO: 2347505 - RNA, 19 nt, Artificial Sequence
  Description of Artificial Sequence: Synthetic oligonucleotide
uucacagagggugcuggag

SEQ ID NO: 2347506 - RNA, 19 nt, Artificial Sequence
  Description of Artificial Sequence: Synthetic oligonucleotide
guuccgaagaagagagagg

SEQ ID NO: 2347507 - RNA, 19 nt, Artificial Sequence
  Description of Artificial Sequence: Synthetic oligonucleotide
guauuucuauuaaacuuca

SEQ ID NO: 2347508 - RNA, 19 nt, Artificial Sequence
  Description of Artificial Sequence: Synthetic oligonucleotide
ggaauguuagucaugugca

SEQ ID NO: 2347509 - RNA, 19 nt, Artificial Sequence
  Description of Artificial Sequence: Synthetic oligonucleotide
agucagagcuucggugucc

SEQ ID NO: 2347510 - RNA, 19 nt, Artificial Sequence
  Description of Artificial Sequence: Synthetic oligonucleotide
gucuugucagucuuaccac

SEQ ID NO: 2347511 - RNA, 19 nt, Artificial Sequence
  Description of Artificial Sequence: Synthetic oligonucleotide
gcaauucgacaacacagcc

SEQ ID NO: 2347512 - RNA, 19 nt, Artificial Sequence
  Description of Artificial Sequence: Synthetic oligonucleotide
aaucggcuuuggcaggggu

SEQ ID NO: 2347513 - RNA, 19 nt, Artificial Sequence
  Description of Artificial Sequence: Synthetic oligonucleotide
uauccagacucuggggaag

SEQ ID NO: 2347514 - RNA, 19 nt, Artificial Sequence
  Description of Artificial Sequence: Synthetic oligonucleotide
ccuacuaccaccaaaagau

SEQ ID NO: 2347515 - RNA, 19 nt, Artificial Sequence
  Description of Artificial Sequence: Synthetic oligonucleotide
gucuaaggggcucugcuga

SEQ ID NO: 2347516 - RNA, 19 nt, Artificial Sequence
  Description of Artificial Sequence: Synthetic oligonucleotide
aacuggguuucuuccucgu

SEQ ID NO: 2347517 - RNA, 19 nt, Artificial Sequence
  Description of Artificial Sequence: Synthetic oligonucleotide
gguuuagugagacuaauau

SEQ ID NO: 2347518 - RNA, 19 nt, Artificial Sequence
  Description of Artificial Sequence: Synthetic oligonucleotide
ucagucuuaccaccauuua

SEQ ID NO: 2347519 - RNA, 19 nt, Artificial Sequence
  Description of Artificial Sequence: Synthetic oligonucleotide
ucagacucggggugcacgu

SEQ ID NO: 2347520 - RNA, 19 nt, Artificial Sequence
  Description of Artificial Sequence: Synthetic oligonucleotide
guguugaaacuguaugaga

SEQ ID NO: 2347521 - RNA, 19 nt, Artificial Sequence
  Description of Artificial Sequence: Synthetic oligonucleotide
ucggcuuuggcagggguca

SEQ ID NO: 2347522 - RNA, 19 nt, Artificial Sequence
  Description of Artificial Sequence: Synthetic oligonucleotide
gugccagucaccgugauaa

SEQ ID NO: 2347523 - RNA, 19 nt, Artificial Sequence
  Description of Artificial Sequence: Synthetic oligonucleotide
gauggcaauucgacaacac

SEQ ID NO: 2347524 - RNA, 19 nt, Artificial Sequence
  Description of Artificial Sequence: Synthetic oligonucleotide
uucgguguccacaguuaac

SEQ ID NO: 2347525 - RNA, 19 nt, Artificial Sequence
  Description of Artificial Sequence: Synthetic oligonucleotide
cugcugauagccagccacc

SEQ ID NO: 2347526 - RNA, 19 nt, Artificial Sequence
  Description of Artificial Sequence: Synthetic oligonucleotide
cugagguuuagugagacua

SEQ ID NO: 2347527 - RNA, 19 nt, Artificial Sequence
  Description of Artificial Sequence: Synthetic oligonucleotide
ggagacaucguccaugucu

SEQ ID NO: 2347528 - RNA, 19 nt, Artificial Sequence
  Description of Artificial Sequence: Synthetic oligonucleotide
gagcacaaacuggacuccg

SEQ ID NO: 2347529 - RNA, 19 nt, Artificial Sequence
  Description of Artificial Sequence: Synthetic oligonucleotide
cacuaaauaguauuucuau

SEQ ID NO: 2347530 - RNA, 19 nt, Artificial Sequence
  Description of Artificial Sequence: Synthetic oligonucleotide
aguuaacuuauugcugggu

SEQ ID NO: 2347531 - RNA, 19 nt, Artificial Sequence
  Description of Artificial Sequence: Synthetic oligonucleotide
accgugauaaggucuguuu

SEQ ID NO: 2347532 - RNA, 19 nt, Artificial Sequence
  Description of Artificial Sequence: Synthetic oligonucleotide
aaacggggugccagucacc

SEQ ID NO: 2347533 - RNA, 19 nt, Artificial Sequence
  Description of Artificial Sequence: Synthetic oligonucleotide
gaaugguuccgccgccgcc

SEQ ID NO: 2347534 - RNA, 19 nt, Artificial Sequence
  Description of Artificial Sequence: Synthetic oligonucleotide
uugucuugucagucuuacc

SEQ ID NO: 2347535 - RNA, 19 nt, Artificial Sequence
  Description of Artificial Sequence: Synthetic oligonucleotide
uggcacuaaauaguauuuc

SEQ ID NO: 2347536 - RNA, 19 nt, Artificial Sequence
  Description of Artificial Sequence: Synthetic oligonucleotide
guaugagaagaaaagucua

SEQ ID NO: 2347537 - RNA, 19 nt, Artificial Sequence
  Description of Artificial Sequence: Synthetic oligonucleotide
ucuuugcuauuugucuugu

SEQ ID NO: 2347538 - RNA, 19 nt, Artificial Sequence
  Description of Artificial Sequence: Synthetic oligonucleotide
cuuccugccggguuggaga

SEQ ID NO: 2347539 - RNA, 19 nt, Artificial Sequence
  Description of Artificial Sequence: Synthetic oligonucleotide
ggcaauucgacaacacagc

SEQ ID NO: 2347540 - RNA, 19 nt, Artificial Sequence
  Description of Artificial Sequence: Synthetic oligonucleotide
ugucagucuuaccaccauu

SEQ ID NO: 2347541 - RNA, 19 nt, Artificial Sequence
  Description of Artificial Sequence: Synthetic oligonucleotide
ugcacguuccaaucggcuu

SEQ ID NO: 2347542 - RNA, 19 nt, Artificial Sequence
  Description of Artificial Sequence: Synthetic oligonucleotide
ucgacaacacagccucccu

SEQ ID NO: 2347543 - RNA, 19 nt, Artificial Sequence
  Description of Artificial Sequence: Synthetic oligonucleotide
uguuagucaugugcauaca

SEQ ID NO: 2347544 - RNA, 19 nt, Artificial Sequence
  Description of Artificial Sequence: Synthetic oligonucleotide
ugacaagaacaaacacaau

SEQ ID NO: 2347545 - RNA, 19 nt, Artificial Sequence
  Description of Artificial Sequence: Synthetic oligonucleotide
cuuucaugucaaaguccug

SEQ ID NO: 2347546 - RNA, 19 nt, Artificial Sequence
  Description of Artificial Sequence: Synthetic oligonucleotide
accgagguuccgaagaaga

SEQ ID NO: 2347547 - RNA, 19 nt, Artificial Sequence
  Description of Artificial Sequence: Synthetic oligonucleotide
acaggaaacugagguuuag

SEQ ID NO: 2347548 - RNA, 19 nt, Artificial Sequence
  Description of Artificial Sequence: Synthetic oligonucleotide
uugucagucuuaccaccau

SEQ ID NO: 2347549 - RNA, 19 nt, Artificial Sequence
  Description of Artificial Sequence: Synthetic oligonucleotide
uucuggcacuaaauaguau

SEQ ID NO: 2347550 - RNA, 19 nt, Artificial Sequence
  Description of Artificial Sequence: Synthetic oligonucleotide
cuccgaagcuuucauguca

SEQ ID NO: 2347551 - RNA, 19 nt, Artificial Sequence
  Description of Artificial Sequence: Synthetic oligonucleotide
gggugcacguuccaaucgg

SEQ ID NO: 2347552 - RNA, 19 nt, Artificial Sequence
  Description of Artificial Sequence: Synthetic oligonucleotide
acugagguuuagugagacu

SEQ ID NO: 2347553 - RNA, 19 nt, Artificial Sequence
  Description of Artificial Sequence: Synthetic oligonucleotide
gugcccaaagaagucagac

SEQ ID NO: 2347554 - RNA, 19 nt, Artificial Sequence
  Description of Artificial Sequence: Synthetic oligonucleotide
agcuucgguguccacaguu

SEQ ID NO: 2347555 - RNA, 19 nt, Artificial Sequence
  Description of Artificial Sequence: Synthetic oligonucleotide
gucagacucggggugcacg

SEQ ID NO: 2347556 - RNA, 19 nt, Artificial Sequence
  Description of Artificial Sequence: Synthetic oligonucleotide
gccgaguagguucauacca

SEQ ID NO: 2347557 - RNA, 19 nt, Artificial Sequence
  Description of Artificial Sequence: Synthetic oligonucleotide
ugucaaagccuggggcucc

SEQ ID NO: 2347558 - RNA, 19 nt, Artificial Sequence
  Description of Artificial Sequence: Synthetic oligonucleotide
gagagguauccagacucug

SEQ ID NO: 2347559 - RNA, 19 nt, Artificial Sequence
  Description of Artificial Sequence: Synthetic oligonucleotide
gagacaucguccaugucua

SEQ ID NO: 2347560 - RNA, 19 nt, Artificial Sequence
  Description of Artificial Sequence: Synthetic oligonucleotide
aacuggacuccgaagcuuu

SEQ ID NO: 2347561 - RNA, 19 nt, Artificial Sequence
  Description of Artificial Sequence: Synthetic oligonucleotide
cuuauguguugaaacugua

SEQ ID NO: 2347562 - RNA, 19 nt, Artificial Sequence
  Description of Artificial Sequence: Synthetic oligonucleotide
cagucuuaccaccauuuaa

SEQ ID NO: 2347563 - RNA, 19 nt, Artificial Sequence
  Description of Artificial Sequence: Synthetic oligonucleotide
accggagacaucguccaug

SEQ ID NO: 2347564 - RNA, 19 nt, Artificial Sequence
  Description of Artificial Sequence: Synthetic oligonucleotide
cuaccaccaaaagauguca

SEQ ID NO: 2347565 - RNA, 19 nt, Artificial Sequence
  Description of Artificial Sequence: Synthetic oligonucleotide
auucgacaacacagccucc

SEQ ID NO: 2347566 - RNA, 19 nt, Artificial Sequence
  Description of Artificial Sequence: Synthetic oligonucleotide
agccccacguuuccaccgg

SEQ ID NO: 2347567 - RNA, 19 nt, Artificial Sequence
  Description of Artificial Sequence: Synthetic oligonucleotide
guauccagacucuggggaa

SEQ ID NO: 2347568 - RNA, 19 nt, Artificial Sequence
  Description of Artificial Sequence: Synthetic oligonucleotide
uuccaccggagacaucguc

SEQ ID NO: 2347569 - RNA, 19 nt, Artificial Sequence
  Description of Artificial Sequence: Synthetic oligonucleotide
aggaaugguuccgccgccg

SEQ ID NO: 2347570 - RNA, 19 nt, Artificial Sequence
  Description of Artificial Sequence: Synthetic oligonucleotide
caaccucuccaauaccaga

SEQ ID NO: 2347571 - RNA, 19 nt, Artificial Sequence
  Description of Artificial Sequence: Synthetic oligonucleotide
ucuaaggggcucugcugau

SEQ ID NO: 2347572 - RNA, 19 nt, Artificial Sequence
  Description of Artificial Sequence: Synthetic oligonucleotide
cuauuugucuugucagucu

SEQ ID NO: 2347573 - RNA, 19 nt, Artificial Sequence
  Description of Artificial Sequence: Synthetic oligonucleotide
caccaaaagaugucagaaa

SEQ ID NO: 2347574 - RNA, 19 nt, Artificial Sequence
  Description of Artificial Sequence: Synthetic oligonucleotide
ggggugcacguuccaaucg

SEQ ID NO: 2347575 - RNA, 19 nt, Artificial Sequence
  Description of Artificial Sequence: Synthetic oligonucleotide
gagucagagcuucgguguc

SEQ ID NO: 2347576 - RNA, 19 nt, Artificial Sequence
  Description of Artificial Sequence: Synthetic oligonucleotide
gugagacuaauaucuucaa

SEQ ID NO: 2347577 - RNA, 19 nt, Artificial Sequence
  Description of Artificial Sequence: Synthetic oligonucleotide
agggcacgggccgaguagg

SEQ ID NO: 2347578 - RNA, 19 nt, Artificial Sequence
  Description of Artificial Sequence: Synthetic oligonucleotide
ccuaaggaaugguuccgcc

SEQ ID NO: 2347579 - RNA, 19 nt, Artificial Sequence
  Description of Artificial Sequence: Synthetic oligonucleotide
gaauguuagucaugugcau

SEQ ID NO: 2347580 - RNA, 19 nt, Artificial Sequence
  Description of Artificial Sequence: Synthetic oligonucleotide
gcuauuugucuugucaguc

SEQ ID NO: 2347581 - RNA, 19 nt, Artificial Sequence
  Description of Artificial Sequence: Synthetic oligonucleotide
ucggggugcacguuccaau

SEQ ID NO: 2347582 - RNA, 19 nt, Artificial Sequence
  Description of Artificial Sequence: Synthetic oligonucleotide
gaaaagucuaaggaauguu

SEQ ID NO: 2347583 - RNA, 19 nt, Artificial Sequence
  Description of Artificial Sequence: Synthetic oligonucleotide
cagucaccgugauaagguc

SEQ ID NO: 2347584 - RNA, 19 nt, Artificial Sequence
  Description of Artificial Sequence: Synthetic oligonucleotide
gggccgaguagguucauac

SEQ ID NO: 2347585 - RNA, 19 nt, Artificial Sequence
  Description of Artificial Sequence: Synthetic oligonucleotide
caauucgacaacacagccu

SEQ ID NO: 2347586 - RNA, 19 nt, Artificial Sequence
  Description of Artificial Sequence: Synthetic oligonucleotide
cuuccucgugcccaaagaa

SEQ ID NO: 2347587 - RNA, 19 nt, Artificial Sequence
  Description of Artificial Sequence: Synthetic oligonucleotide
uuuccaccggagacaucgu

SEQ ID NO: 2347588 - RNA, 19 nt, Artificial Sequence
  Description of Artificial Sequence: Synthetic oligonucleotide
agcguggcuuccugccggg

SEQ ID NO: 2347589 - RNA, 19 nt, Artificial Sequence
  Description of Artificial Sequence: Synthetic oligonucleotide
cuccaauaccagagagcac

SEQ ID NO: 2347590 - RNA, 19 nt, Artificial Sequence
  Description of Artificial Sequence: Synthetic oligonucleotide
cagggcacgggccgaguag

SEQ ID NO: 2347591 - RNA, 19 nt, Artificial Sequence
  Description of Artificial Sequence: Synthetic oligonucleotide
gacucggggugcacguucc

SEQ ID NO: 2347592 - RNA, 19 nt, Artificial Sequence
  Description of Artificial Sequence: Synthetic oligonucleotide
ggagucagagcuucggugu

SEQ ID NO: 2347593 - RNA, 19 nt, Artificial Sequence
  Description of Artificial Sequence: Synthetic oligonucleotide
accgcuggcccuaaggaau

SEQ ID NO: 2347594 - RNA, 19 nt, Artificial Sequence
  Description of Artificial Sequence: Synthetic oligonucleotide
auuagucaguaaacaggaa

SEQ ID NO: 2347595 - RNA, 19 nt, Artificial Sequence
  Description of Artificial Sequence: Synthetic oligonucleotide
auagccagccaccgagguu

SEQ ID NO: 2347596 - RNA, 19 nt, Artificial Sequence
  Description of Artificial Sequence: Synthetic oligonucleotide
ucagggcacgggccgagua

SEQ ID NO: 2347597 - RNA, 19 nt, Artificial Sequence
  Description of Artificial Sequence: Synthetic oligonucleotide
gcuuucaugucaaaguccu

SEQ ID NO: 2347598 - RNA, 19 nt, Artificial Sequence
  Description of Artificial Sequence: Synthetic oligonucleotide
ccacguuuccaccggagac

SEQ ID NO: 2347599 - RNA, 19 nt, Artificial Sequence
  Description of Artificial Sequence: Synthetic oligonucleotide
cuuucugagaagcguggcu

SEQ ID NO: 2347600 - RNA, 19 nt, Artificial Sequence
  Description of Artificial Sequence: Synthetic oligonucleotide
cacguuuccaccggagaca

SEQ ID NO: 2347601 - RNA, 19 nt, Artificial Sequence
  Description of Artificial Sequence: Synthetic oligonucleotide
ggaaugguuccgccgccgc

SEQ ID NO: 2347602 - RNA, 19 nt, Artificial Sequence
  Description of Artificial Sequence: Synthetic oligonucleotide
ggccgaguagguucauacc

SEQ ID NO: 2347603 - RNA, 19 nt, Artificial Sequence
  Description of Artificial Sequence: Synthetic oligonucleotide
acguuuccaccggagacau

SEQ ID NO: 2347604 - RNA, 19 nt, Artificial Sequence
  Description of Artificial Sequence: Synthetic oligonucleotide
aggagccaaagagccccac

SEQ ID NO: 2347605 - RNA, 19 nt, Artificial Sequence
  Description of Artificial Sequence: Synthetic oligonucleotide
agguuuagugagacuaaua

SEQ ID NO: 2347606 - RNA, 19 nt, Artificial Sequence
  Description of Artificial Sequence: Synthetic oligonucleotide
ugccggguuggagaaucca

SEQ ID NO: 2347607 - RNA, 19 nt, Artificial Sequence
  Description of Artificial Sequence: Synthetic oligonucleotide
cagagcuucgguguccaca

SEQ ID NO: 2347608 - RNA, 19 nt, Artificial Sequence
  Description of Artificial Sequence: Synthetic oligonucleotide
gccaccgagguuccgaaga

SEQ ID NO: 2347609 - RNA, 19 nt, Artificial Sequence
  Description of Artificial Sequence: Synthetic oligonucleotide
gugucaaagccuggggcuc

SEQ ID NO: 2347610 - RNA, 19 nt, Artificial Sequence
  Description of Artificial Sequence: Synthetic oligonucleotide
cauacacauuagucaguaa

SEQ ID NO: 2347611 - RNA, 19 nt, Artificial Sequence
  Description of Artificial Sequence: Synthetic oligonucleotide
ccaaggagccaaagagccc

SEQ ID NO: 2347612 - RNA, 19 nt, Artificial Sequence
  Description of Artificial Sequence: Synthetic oligonucleotide
uccgccgccgccgccgccg

SEQ ID NO: 2347613 - RNA, 19 nt, Artificial Sequence
  Description of Artificial Sequence: Synthetic oligonucleotide
agucagacucggggugcac

SEQ ID NO: 2347614 - RNA, 19 nt, Artificial Sequence
  Description of Artificial Sequence: Synthetic oligonucleotide
ccgagguuccgaagaagag

SEQ ID NO: 2347615 - RNA, 19 nt, Artificial Sequence
  Description of Artificial Sequence: Synthetic oligonucleotide
agccaccgagguuccgaag

SEQ ID NO: 2347616 - RNA, 19 nt, Artificial Sequence
  Description of Artificial Sequence: Synthetic oligonucleotide
cacguuccaaucggcuuug

SEQ ID NO: 2347617 - RNA, 19 nt, Artificial Sequence
  Description of Artificial Sequence: Synthetic oligonucleotide
cccuacuaccaccaaaaga

SEQ ID NO: 2347618 - RNA, 19 nt, Artificial Sequence
  Description of Artificial Sequence: Synthetic oligonucleotide
cagagccaaggagccaaag

SEQ ID NO: 2347619 - RNA, 19 nt, Artificial Sequence
  Description of Artificial Sequence: Synthetic oligonucleotide
ggucaguaguucugagaca

SEQ ID NO: 2347620 - RNA, 19 nt, Artificial Sequence
  Description of Artificial Sequence: Synthetic oligonucleotide
caaucggcuuuggcagggg

SEQ ID NO: 2347621 - RNA, 19 nt, Artificial Sequence
  Description of Artificial Sequence: Synthetic oligonucleotide
caccgagguuccgaagaag

SEQ ID NO: 2347622 - RNA, 19 nt, Artificial Sequence
  Description of Artificial Sequence: Synthetic oligonucleotide
cugccggguuggagaaucc

SEQ ID NO: 2347623 - RNA, 19 nt, Artificial Sequence
  Description of Artificial Sequence: Synthetic oligonucleotide
gcauacacauuagucagua

SEQ ID NO: 2347624 - RNA, 19 nt, Artificial Sequence
  Description of Artificial Sequence: Synthetic oligonucleotide
gcccuaaggaaugguuccg

SEQ ID NO: 2347625 - RNA, 19 nt, Artificial Sequence
  Description of Artificial Sequence: Synthetic oligonucleotide
ggagcuuuucagagccaag

SEQ ID NO: 2347626 - RNA, 19 nt, Artificial Sequence
  Description of Artificial Sequence: Synthetic oligonucleotide
gagguuuagugagacuaau

SEQ ID NO: 2347627 - RNA, 19 nt, Artificial Sequence
  Description of Artificial Sequence: Synthetic oligonucleotide
gucagucuuaccaccauuu

SEQ ID NO: 2347628 - RNA, 19 nt, Artificial Sequence
  Description of Artificial Sequence: Synthetic oligonucleotide
gucagagcuucggugucca

SEQ ID NO: 2347629 - RNA, 19 nt, Artificial Sequence
  Description of Artificial Sequence: Synthetic oligonucleotide
ucagagcuucgguguccac

SEQ ID NO: 2347630 - RNA, 19 nt, Artificial Sequence
  Description of Artificial Sequence: Synthetic oligonucleotide
ggugcacguuccaaucggc

SEQ ID NO: 2347631 - RNA, 19 nt, Artificial Sequence
  Description of Artificial Sequence: Synthetic oligonucleotide
ccaaucggcuuuggcaggg

SEQ ID NO: 2347632 - RNA, 19 nt, Artificial Sequence
  Description of Artificial Sequence: Synthetic oligonucleotide
agacaucguccaugucuaa

SEQ ID NO: 2347633 - RNA, 19 nt, Artificial Sequence
  Description of Artificial Sequence: Synthetic oligonucleotide
ggauggcaauucgacaaca

SEQ ID NO: 2347634 - RNA, 19 nt, Artificial Sequence
  Description of Artificial Sequence: Synthetic oligonucleotide
ucaccgugauaaggucugu

SEQ ID NO: 2347635 - RNA, 19 nt, Artificial Sequence
  Description of Artificial Sequence: Synthetic oligonucleotide
ccuggauggcaauucgaca

SEQ ID NO: 2347636 - RNA, 19 nt, Artificial Sequence
  Description of Artificial Sequence: Synthetic oligonucleotide
cacgggccgaguagguuca

SEQ ID NO: 2347637 - RNA, 19 nt, Artificial Sequence
  Description of Artificial Sequence: Synthetic oligonucleotide
guccuggauggcaauucga

SEQ ID NO: 2347638 - RNA, 19 nt, Artificial Sequence
  Description of Artificial Sequence: Synthetic oligonucleotide
ccagucaccgugauaaggu

SEQ ID NO: 2347639 - RNA, 19 nt, Artificial Sequence
  Description of Artificial Sequence: Synthetic oligonucleotide
agccagccaccgagguucc

SEQ ID NO: 2347640 - RNA, 19 nt, Artificial Sequence
  Description of Artificial Sequence: Synthetic oligonucleotide
caggggucaguaguucuga

SEQ ID NO: 2347641 - RNA, 19 nt, Artificial Sequence
  Description of Artificial Sequence: Synthetic oligonucleotide
acucggggugcacguucca

SEQ ID NO: 2347642 - RNA, 19 nt, Artificial Sequence
  Description of Artificial Sequence: Synthetic oligonucleotide
caccgcuggcccuaaggaa

SEQ ID NO: 2347643 - RNA, 19 nt, Artificial Sequence
  Description of Artificial Sequence: Synthetic oligonucleotide
cccuaaggaaugguuccgc

SEQ ID NO: 2347644 - RNA, 19 nt, Artificial Sequence
  Description of Artificial Sequence: Synthetic oligonucleotide
acguuccaaucggcuuugg

SEQ ID NO: 2347645 - RNA, 19 nt, Artificial Sequence
  Description of Artificial Sequence: Synthetic oligonucleotide
gcugauagccagccaccga

SEQ ID NO: 2347646 - RNA, 19 nt, Artificial Sequence
  Description of Artificial Sequence: Synthetic oligonucleotide
cguuccaaucggcuuuggc

SEQ ID NO: 2347647 - RNA, 19 nt, Artificial Sequence
  Description of Artificial Sequence: Synthetic oligonucleotide
cggggugccagucaccgug

SEQ ID NO: 2347648 - RNA, 19 nt, Artificial Sequence
  Description of Artificial Sequence: Synthetic oligonucleotide
ccgaagaagagagagguau

SEQ ID NO: 2347649 - RNA, 19 nt, Artificial Sequence
  Description of Artificial Sequence: Synthetic oligonucleotide
ccaccggagacaucgucca

SEQ ID NO: 2347650 - RNA, 19 nt, Artificial Sequence
  Description of Artificial Sequence: Synthetic oligonucleotide
cgugauaaggucuguuucu

SEQ ID NO: 2347651 - RNA, 19 nt, Artificial Sequence
  Description of Artificial Sequence: Synthetic oligonucleotide
ccgaguagguucauaccaa

SEQ ID NO: 2347652 - RNA, 19 nt, Artificial Sequence
  Description of Artificial Sequence: Synthetic oligonucleotide
agguuccgaagaagagaga

SEQ ID NO: 2347653 - RNA, 19 nt, Artificial Sequence
  Description of Artificial Sequence: Synthetic oligonucleotide
caauaccagagagcacaaa

SEQ ID NO: 2347654 - RNA, 19 nt, Artificial Sequence
  Description of Artificial Sequence: Synthetic oligonucleotide
acggggugccagucaccgu

SEQ ID NO: 2347655 - RNA, 19 nt, Artificial Sequence
  Description of Artificial Sequence: Synthetic oligonucleotide
caaaguccuggauggcaau

SEQ ID NO: 2347656 - RNA, 19 nt, Artificial Sequence
  Description of Artificial Sequence: Synthetic oligonucleotide
cuggcccuaaggaaugguu

SEQ ID NO: 2347657 - RNA, 19 nt, Artificial Sequence
  Description of Artificial Sequence: Synthetic oligonucleotide
ccggguuggagaauccaaa

SEQ ID NO: 2347658 - RNA, 19 nt, Artificial Sequence
  Description of Artificial Sequence: Synthetic oligonucleotide
cagccaccgagguuccgaa

SEQ ID NO: 2347659 - RNA, 19 nt, Artificial Sequence
  Description of Artificial Sequence: Synthetic oligonucleotide
gugcacguuccaaucggcu

SEQ ID NO: 2347660 - RNA, 19 nt, Artificial Sequence
  Description of Artificial Sequence: Synthetic oligonucleotide
ccaauaccagagagcacaa

SEQ ID NO: 2347661 - RNA, 19 nt, Artificial Sequence
  Description of Artificial Sequence: Synthetic oligonucleotide
cuaaggggcucugcugaua

SEQ ID NO: 2347662 - RNA, 19 nt, Artificial Sequence
  Description of Artificial Sequence: Synthetic oligonucleotide
gcacguuccaaucggcuuu

SEQ ID NO: 2347663 - RNA, 19 nt, Artificial Sequence
  Description of Artificial Sequence: Synthetic oligonucleotide
ccgcuggcccuaaggaaug

SEQ ID NO: 2347664 - RNA, 19 nt, Artificial Sequence
  Description of Artificial Sequence: Synthetic oligonucleotide
cuccaggcuggagcuuuuc

SEQ ID NO: 2347665 - RNA, 19 nt, Artificial Sequence
  Description of Artificial Sequence: Synthetic oligonucleotide
gacucuggggaaggucagu

SEQ ID NO: 2347666 - RNA, 19 nt, Artificial Sequence
  Description of Artificial Sequence: Synthetic oligonucleotide
gcuuuggcaggggucagua

SEQ ID NO: 2347667 - RNA, 19 nt, Artificial Sequence
  Description of Artificial Sequence: Synthetic oligonucleotide
cccacguuuccaccggaga

SEQ ID NO: 2347668 - RNA, 19 nt, Artificial Sequence
  Description of Artificial Sequence: Synthetic oligonucleotide
gcuucgguguccacaguua

SEQ ID NO: 2347669 - RNA, 19 nt, Artificial Sequence
  Description of Artificial Sequence: Synthetic oligonucleotide
ccucccuacuaccaccaaa

SEQ ID NO: 2347670 - RNA, 19 nt, Artificial Sequence
  Description of Artificial Sequence: Synthetic oligonucleotide
cgaguagguucauaccaaa

SEQ ID NO: 2347671 - RNA, 19 nt, Artificial Sequence
  Description of Artificial Sequence: Synthetic oligonucleotide
ggugccagucaccgugaua

SEQ ID NO: 2347672 - RNA, 19 nt, Artificial Sequence
  Description of Artificial Sequence: Synthetic oligonucleotide
cggggugcacguuccaauc

SEQ ID NO: 2347673 - RNA, 19 nt, Artificial Sequence
  Description of Artificial Sequence: Synthetic oligonucleotide
uuccgccgccgccgccgcc

SEQ ID NO: 2347674 - RNA, 19 nt, Artificial Sequence
  Description of Artificial Sequence: Synthetic oligonucleotide
gccggguuggagaauccaa

SEQ ID NO: 2347675 - RNA, 19 nt, Artificial Sequence
  Description of Artificial Sequence: Synthetic oligonucleotide
cugagaagcguggcuuccu

SEQ ID NO: 2347676 - RNA, 19 nt, Artificial Sequence
  Description of Artificial Sequence: Synthetic oligonucleotide
guccaccgcuggcccuaag

SEQ ID NO: 2347677 - RNA, 19 nt, Artificial Sequence
  Description of Artificial Sequence: Synthetic oligonucleotide
ccggagacaucguccaugu

SEQ ID NO: 2347678 - RNA, 19 nt, Artificial Sequence
  Description of Artificial Sequence: Synthetic oligonucleotide
uccugccggguuggagaau

SEQ ID NO: 2347679 - RNA, 19 nt, Artificial Sequence
  Description of Artificial Sequence: Synthetic oligonucleotide
gagcuucgguguccacagu

SEQ ID NO: 2347680 - RNA, 19 nt, Artificial Sequence
  Description of Artificial Sequence: Synthetic oligonucleotide
gccgccgccgccgccgccg

SEQ ID NO: 2347681 - RNA, 19 nt, Artificial Sequence
  Description of Artificial Sequence: Synthetic oligonucleotide
ccaccgagguuccgaagaa

SEQ ID NO: 2347682 - RNA, 19 nt, Artificial Sequence
  Description of Artificial Sequence: Synthetic oligonucleotide
ggggugccagucaccguga

SEQ ID NO: 2347683 - RNA, 19 nt, Artificial Sequence
  Description of Artificial Sequence: Synthetic oligonucleotide
caccgugauaaggucuguu

SEQ ID NO: 2347684 - RNA, 19 nt, Artificial Sequence
  Description of Artificial Sequence: Synthetic oligonucleotide
gccagccaccgagguuccg

SEQ ID NO: 2347685 - RNA, 19 nt, Artificial Sequence
  Description of Artificial Sequence: Synthetic oligonucleotide
cgacaacacagccucccua

SEQ ID NO: 2347686 - RNA, 19 nt, Artificial Sequence
  Description of Artificial Sequence: Synthetic oligonucleotide
gcuggcccuaaggaauggu

SEQ ID NO: 2347687 - RNA, 19 nt, Artificial Sequence
  Description of Artificial Sequence: Synthetic oligonucleotide
ggguccaccgcuggcccua

SEQ ID NO: 2347688 - RNA, 19 nt, Artificial Sequence
  Description of Artificial Sequence: Synthetic oligonucleotide
gccucccuacuaccaccaa

SEQ ID NO: 2347689 - RNA, 19 nt, Artificial Sequence
  Description of Artificial Sequence: Synthetic oligonucleotide
acgggccgaguagguucau

SEQ ID NO: 2347690 - RNA, 19 nt, Artificial Sequence
  Description of Artificial Sequence: Synthetic oligonucleotide
cguuuccaccggagacauc

SEQ ID NO: 2347691 - RNA, 19 nt, Artificial Sequence
  Description of Artificial Sequence: Synthetic oligonucleotide
cguccaugucuaaggggcu

SEQ ID NO: 2347692 - RNA, 19 nt, Artificial Sequence
  Description of Artificial Sequence: Synthetic oligonucleotide
gccgccgccgccgccgcca

SEQ ID NO: 2347693 - RNA, 19 nt, Artificial Sequence
  Description of Artificial Sequence: Synthetic oligonucleotide
cggagacaucguccauguc

SEQ ID NO: 2347694 - RNA, 19 nt, Artificial Sequence
  Description of Artificial Sequence: Synthetic oligonucleotide
gggugccagucaccgugau

SEQ ID NO: 2347695 - RNA, 19 nt, Artificial Sequence
  Description of Artificial Sequence: Synthetic oligonucleotide
cagacucggggugcacguu

SEQ ID NO: 2347696 - RNA, 19 nt, Artificial Sequence
  Description of Artificial Sequence: Synthetic oligonucleotide
ggcacgggccgaguagguu

SEQ ID NO: 2347697 - RNA, 19 nt, Artificial Sequence
  Description of Artificial Sequence: Synthetic oligonucleotide
gguccaccgcuggcccuaa

SEQ ID NO: 2347698 - RNA, 19 nt, Artificial Sequence
  Description of Artificial Sequence: Synthetic oligonucleotide
gggcacgggccgaguaggu

SEQ ID NO: 2347699 - RNA, 19 nt, Artificial Sequence
  Description of Artificial Sequence: Synthetic oligonucleotide
ccgccgccgccgccgccgc

SEQ ID NO: 2347700 - RNA, 19 nt, Artificial Sequence
  Description of Artificial Sequence: Synthetic oligonucleotide
ccgccgccgccgccgccac

SEQ ID NO: 2347701 - RNA, 19 nt, Artificial Sequence
  Description of Artificial Sequence: Synthetic oligonucleotide
cgggccgaguagguucaua

SEQ ID NO: 2347702 - RNA, 19 nt, Artificial Sequence
  Description of Artificial Sequence: Synthetic oligonucleotide
cgccgccgccgccgccgcc

SEQ ID NO: 2347703 - RNA, 19 nt, Artificial Sequence
  Description of Artificial Sequence: Synthetic oligonucleotide
uguuacaucaaaaucauca

SEQ ID NO: 2347704 - RNA, 19 nt, Artificial Sequence
  Description of Artificial Sequence: Synthetic oligonucleotide
auuauuagauuauucggcc

SEQ ID NO: 2347705 - RNA, 19 nt, Artificial Sequence
  Description of Artificial Sequence: Synthetic oligonucleotide
uuucucaauaccuaguucg

SEQ ID NO: 2347706 - RNA, 19 nt, Artificial Sequence
  Description of Artificial Sequence: Synthetic oligonucleotide
gaagaaaucaauaagaaga

SEQ ID NO: 2347707 - RNA, 19 nt, Artificial Sequence
  Description of Artificial Sequence: Synthetic oligonucleotide
uguaccaaaaguauccugg

SEQ ID NO: 2347708 - RNA, 19 nt, Artificial Sequence
  Description of Artificial Sequence: Synthetic oligonucleotide
uauuauuagauuauucggc

SEQ ID NO: 2347709 - RNA, 19 nt, Artificial Sequence
  Description of Artificial Sequence: Synthetic oligonucleotide
ucugaagaaaucaauaaga

SEQ ID NO: 2347710 - RNA, 19 nt, Artificial Sequence
  Description of Artificial Sequence: Synthetic oligonucleotide
accuaguucgaucauaucc

SEQ ID NO: 2347711 - RNA, 19 nt, Artificial Sequence
  Description of Artificial Sequence: Synthetic oligonucleotide
cuauuauuagauuauucgg

SEQ ID NO: 2347712 - RNA, 19 nt, Artificial Sequence
  Description of Artificial Sequence: Synthetic oligonucleotide
auagcuucgaaaguaaacc

SEQ ID NO: 2347713 - RNA, 19 nt, Artificial Sequence
  Description of Artificial Sequence: Synthetic oligonucleotide
uauaaaggucgucugaugc

SEQ ID NO: 2347714 - RNA, 19 nt, Artificial Sequence
  Description of Artificial Sequence: Synthetic oligonucleotide
aacauacuccaauccagcc

SEQ ID NO: 2347715 - RNA, 19 nt, Artificial Sequence
  Description of Artificial Sequence: Synthetic oligonucleotide
aacagcagcuuauagcuuc

SEQ ID NO: 2347716 - RNA, 19 nt, Artificial Sequence
  Description of Artificial Sequence: Synthetic oligonucleotide
acacaaauuucucaauacc

SEQ ID NO: 2347717 - RNA, 19 nt, Artificial Sequence
  Description of Artificial Sequence: Synthetic oligonucleotide
auaaagaacagucugacuu

SEQ ID NO: 2347718 - RNA, 19 nt, Artificial Sequence
  Description of Artificial Sequence: Synthetic oligonucleotide
ucaacagcagcuuauagcu

SEQ ID NO: 2347719 - RNA, 19 nt, Artificial Sequence
  Description of Artificial Sequence: Synthetic oligonucleotide
ucuuaauucucuuugauuu

SEQ ID NO: 2347720 - RNA, 19 nt, Artificial Sequence
  Description of Artificial Sequence: Synthetic oligonucleotide
aguuguaccaaaaguaucc

SEQ ID NO: 2347721 - RNA, 19 nt, Artificial Sequence
  Description of Artificial Sequence: Synthetic oligonucleotide
aaaguaaaccuucccguuc

SEQ ID NO: 2347722 - RNA, 19 nt, Artificial Sequence
  Description of Artificial Sequence: Synthetic oligonucleotide
aauuuauaaaggucgucug

SEQ ID NO: 2347723 - RNA, 19 nt, Artificial Sequence
  Description of Artificial Sequence: Synthetic oligonucleotide
caaacaugaauaaagaaca

SEQ ID NO: 2347724 - RNA, 19 nt, Artificial Sequence
  Description of Artificial Sequence: Synthetic oligonucleotide
uauacagaacuccguaugg

SEQ ID NO: 2347725 - RNA, 19 nt, Artificial Sequence
  Description of Artificial Sequence: Synthetic oligonucleotide
acaugguagucauacauac

SEQ ID NO: 2347726 - RNA, 19 nt, Artificial Sequence
  Description of Artificial Sequence: Synthetic oligonucleotide
acaugaauaaagaacaguc

SEQ ID NO: 2347727 - RNA, 19 nt, Artificial Sequence
  Description of Artificial Sequence: Synthetic oligonucleotide
auagucuucuguuacauca

SEQ ID NO: 2347728 - RNA, 19 nt, Artificial Sequence
  Description of Artificial Sequence: Synthetic oligonucleotide
uuauacagaacuccguaug

SEQ ID NO: 2347729 - RNA, 19 nt, Artificial Sequence
  Description of Artificial Sequence: Synthetic oligonucleotide
accaaaaguauccugggag

SEQ ID NO: 2347730 - RNA, 19 nt, Artificial Sequence
  Description of Artificial Sequence: Synthetic oligonucleotide
ccuauuauuagauuauucg

SEQ ID NO: 2347731 - RNA, 19 nt, Artificial Sequence
  Description of Artificial Sequence: Synthetic oligonucleotide
aacauggcauucuuaaugu

SEQ ID NO: 2347732 - RNA, 19 nt, Artificial Sequence
  Description of Artificial Sequence: Synthetic oligonucleotide
aguucgaucauauccagca

SEQ ID NO: 2347733 - RNA, 19 nt, Artificial Sequence
  Description of Artificial Sequence: Synthetic oligonucleotide
auaugaauccuuccaaaag

SEQ ID NO: 2347734 - RNA, 19 nt, Artificial Sequence
  Description of Artificial Sequence: Synthetic oligonucleotide
aaaaguuguaccaaaagua

SEQ ID NO: 2347735 - RNA, 19 nt, Artificial Sequence
  Description of Artificial Sequence: Synthetic oligonucleotide
ugaagugcagaacauacuc

SEQ ID NO: 2347736 - RNA, 19 nt, Artificial Sequence
  Description of Artificial Sequence: Synthetic oligonucleotide
uaaaccuucccguucagug

SEQ ID NO: 2347737 - RNA, 19 nt, Artificial Sequence
  Description of Artificial Sequence: Synthetic oligonucleotide
augguagucauacauacga

SEQ ID NO: 2347738 - RNA, 19 nt, Artificial Sequence
  Description of Artificial Sequence: Synthetic oligonucleotide
uuugcuuaggucuugcuuc

SEQ ID NO: 2347739 - RNA, 19 nt, Artificial Sequence
  Description of Artificial Sequence: Synthetic oligonucleotide
ucaccagcgaauaucaaca

SEQ ID NO: 2347740 - RNA, 19 nt, Artificial Sequence
  Description of Artificial Sequence: Synthetic oligonucleotide
aucaccagcgaauaucaac

SEQ ID NO: 2347741 - RNA, 19 nt, Artificial Sequence
  Description of Artificial Sequence: Synthetic oligonucleotide
aagaacuccaaugaugucu

SEQ ID NO: 2347742 - RNA, 19 nt, Artificial Sequence
  Description of Artificial Sequence: Synthetic oligonucleotide
ucaauaccuaguucgauca

SEQ ID NO: 2347743 - RNA, 19 nt, Artificial Sequence
  Description of Artificial Sequence: Synthetic oligonucleotide
acuuacuagucuuaauauc

SEQ ID NO: 2347744 - RNA, 19 nt, Artificial Sequence
  Description of Artificial Sequence: Synthetic oligonucleotide
gaaaagaacuccaaugaug

SEQ ID NO: 2347745 - RNA, 19 nt, Artificial Sequence
  Description of Artificial Sequence: Synthetic oligonucleotide
uauagcuucgaaaguaaac

SEQ ID NO: 2347746 - RNA, 19 nt, Artificial Sequence
  Description of Artificial Sequence: Synthetic oligonucleotide
ggacaauuuauaaaggucg

SEQ ID NO: 2347747 - RNA, 19 nt, Artificial Sequence
  Description of Artificial Sequence: Synthetic oligonucleotide
cagcuuauagcuucgaaag

SEQ ID NO: 2347748 - RNA, 19 nt, Artificial Sequence
  Description of Artificial Sequence: Synthetic oligonucleotide
uuuuauacagaacuccgua

SEQ ID NO: 2347749 - RNA, 19 nt, Artificial Sequence
  Description of Artificial Sequence: Synthetic oligonucleotide
uuaugggagccaaacauga

SEQ ID NO: 2347750 - RNA, 19 nt, Artificial Sequence
  Description of Artificial Sequence: Synthetic oligonucleotide
ucucuuccaguucaauucg

SEQ ID NO: 2347751 - RNA, 19 nt, Artificial Sequence
  Description of Artificial Sequence: Synthetic oligonucleotide
aaccuucccguucagugcg

SEQ ID NO: 2347752 - RNA, 19 nt, Artificial Sequence
  Description of Artificial Sequence: Synthetic oligonucleotide
uggacaauuuauaaagguc

SEQ ID NO: 2347753 - RNA, 19 nt, Artificial Sequence
  Description of Artificial Sequence: Synthetic oligonucleotide
acauuggacaccguggggc

SEQ ID NO: 2347754 - RNA, 19 nt, Artificial Sequence
  Description of Artificial Sequence: Synthetic oligonucleotide
uucuauagucuucuguuac

SEQ ID NO: 2347755 - RNA, 19 nt, Artificial Sequence
  Description of Artificial Sequence: Synthetic oligonucleotide
uuuugguucccucuucuca

SEQ ID NO: 2347756 - RNA, 19 nt, Artificial Sequence
  Description of Artificial Sequence: Synthetic oligonucleotide
aaguaaaccuucccguuca

SEQ ID NO: 2347757 - RNA, 19 nt, Artificial Sequence
  Description of Artificial Sequence: Synthetic oligonucleotide
aacaugaauaaagaacagu

SEQ ID NO: 2347758 - RNA, 19 nt, Artificial Sequence
  Description of Artificial Sequence: Synthetic oligonucleotide
ccagcgaauaucaacaugg

SEQ ID NO: 2347759 - RNA, 19 nt, Artificial Sequence
  Description of Artificial Sequence: Synthetic oligonucleotide
guugcauuugcauuucccc

SEQ ID NO: 2347760 - RNA, 19 nt, Artificial Sequence
  Description of Artificial Sequence: Synthetic oligonucleotide
ugcggugaagugcagaaca

SEQ ID NO: 2347761 - RNA, 19 nt, Artificial Sequence
  Description of Artificial Sequence: Synthetic oligonucleotide
agucuuaauauccuuuaga

SEQ ID NO: 2347762 - RNA, 19 nt, Artificial Sequence
  Description of Artificial Sequence: Synthetic oligonucleotide
ucgucugaugcuaagugug

SEQ ID NO: 2347763 - RNA, 19 nt, Artificial Sequence
  Description of Artificial Sequence: Synthetic oligonucleotide
cauggacaauuuauaaagg

SEQ ID NO: 2347764 - RNA, 19 nt, Artificial Sequence
  Description of Artificial Sequence: Synthetic oligonucleotide
ugaugucugauccucaaau

SEQ ID NO: 2347765 - RNA, 19 nt, Artificial Sequence
  Description of Artificial Sequence: Synthetic oligonucleotide
ucaaggaaucucuuagccc

SEQ ID NO: 2347766 - RNA, 19 nt, Artificial Sequence
  Description of Artificial Sequence: Synthetic oligonucleotide
auggacaauuuauaaaggu

SEQ ID NO: 2347767 - RNA, 19 nt, Artificial Sequence
  Description of Artificial Sequence: Synthetic oligonucleotide
cucaaggaaucucuuagcc

SEQ ID NO: 2347768 - RNA, 19 nt, Artificial Sequence
  Description of Artificial Sequence: Synthetic oligonucleotide
aucaacauggcauucuuaa

SEQ ID NO: 2347769 - RNA, 19 nt, Artificial Sequence
  Description of Artificial Sequence: Synthetic oligonucleotide
gcuuugggcauuuucaugg

SEQ ID NO: 2347770 - RNA, 19 nt, Artificial Sequence
  Description of Artificial Sequence: Synthetic oligonucleotide
aaaguauccugggagauau

SEQ ID NO: 2347771 - RNA, 19 nt, Artificial Sequence
  Description of Artificial Sequence: Synthetic oligonucleotide
agagacacaaauuucucaa

SEQ ID NO: 2347772 - RNA, 19 nt, Artificial Sequence
  Description of Artificial Sequence: Synthetic oligonucleotide
guacuugugucacaguugc

SEQ ID NO: 2347773 - RNA, 19 nt, Artificial Sequence
  Description of Artificial Sequence: Synthetic oligonucleotide
uggucuuguaauauuuucu

SEQ ID NO: 2347774 - RNA, 19 nt, Artificial Sequence
  Description of Artificial Sequence: Synthetic oligonucleotide
uucagugcggugaagugca

SEQ ID NO: 2347775 - RNA, 19 nt, Artificial Sequence
  Description of Artificial Sequence: Synthetic oligonucleotide
uucacugacuuuugguucc

SEQ ID NO: 2347776 - RNA, 19 nt, Artificial Sequence
  Description of Artificial Sequence: Synthetic oligonucleotide
uucauggacaauuuauaaa

SEQ ID NO: 2347777 - RNA, 19 nt, Artificial Sequence
  Description of Artificial Sequence: Synthetic oligonucleotide
aacuccguaugguuucuuc

SEQ ID NO: 2347778 - RNA, 19 nt, Artificial Sequence
  Description of Artificial Sequence: Synthetic oligonucleotide
aaguuguaccaaaaguauc

SEQ ID NO: 2347779 - RNA, 19 nt, Artificial Sequence
  Description of Artificial Sequence: Synthetic oligonucleotide
uucgaaaguaaaccuuccc

SEQ ID NO: 2347780 - RNA, 19 nt, Artificial Sequence
  Description of Artificial Sequence: Synthetic oligonucleotide
uucuuaauguuuucacuga

SEQ ID NO: 2347781 - RNA, 19 nt, Artificial Sequence
  Description of Artificial Sequence: Synthetic oligonucleotide
ugaaaagaacuccaaugau

SEQ ID NO: 2347782 - RNA, 19 nt, Artificial Sequence
  Description of Artificial Sequence: Synthetic oligonucleotide
aguauccugggagauauuc

SEQ ID NO: 2347783 - RNA, 19 nt, Artificial Sequence
  Description of Artificial Sequence: Synthetic oligonucleotide
aucaucaccagcgaauauc

SEQ ID NO: 2347784 - RNA, 19 nt, Artificial Sequence
  Description of Artificial Sequence: Synthetic oligonucleotide
auucgugguguucugcaac

SEQ ID NO: 2347785 - RNA, 19 nt, Artificial Sequence
  Description of Artificial Sequence: Synthetic oligonucleotide
auccuuuagagacacaaau

SEQ ID NO: 2347786 - RNA, 19 nt, Artificial Sequence
  Description of Artificial Sequence: Synthetic oligonucleotide
uuuaaucuucuauagucuu

SEQ ID NO: 2347787 - RNA, 19 nt, Artificial Sequence
  Description of Artificial Sequence: Synthetic oligonucleotide
uccaguucaauucguggug

SEQ ID NO: 2347788 - RNA, 19 nt, Artificial Sequence
  Description of Artificial Sequence: Synthetic oligonucleotide
uuuauaaaggucgucugau

SEQ ID NO: 2347789 - RNA, 19 nt, Artificial Sequence
  Description of Artificial Sequence: Synthetic oligonucleotide
uagucuuaauauccuuuag

SEQ ID NO: 2347790 - RNA, 19 nt, Artificial Sequence
  Description of Artificial Sequence: Synthetic oligonucleotide
uuuauacagaacuccguau

SEQ ID NO: 2347791 - RNA, 19 nt, Artificial Sequence
  Description of Artificial Sequence: Synthetic oligonucleotide
gaugucugauccucaaaug

SEQ ID NO: 2347792 - RNA, 19 nt, Artificial Sequence
  Description of Artificial Sequence: Synthetic oligonucleotide
ucugcauaugaauccuucc

SEQ ID NO: 2347793 - RNA, 19 nt, Artificial Sequence
  Description of Artificial Sequence: Synthetic oligonucleotide
gaugcuaaguguguccucc

SEQ ID NO: 2347794 - RNA, 19 nt, Artificial Sequence
  Description of Artificial Sequence: Synthetic oligonucleotide
uuagagacacaaauuucuc

SEQ ID NO: 2347795 - RNA, 19 nt, Artificial Sequence
  Description of Artificial Sequence: Synthetic oligonucleotide
uuacuagucuuaauauccu

SEQ ID NO: 2347796 - RNA, 19 nt, Artificial Sequence
  Description of Artificial Sequence: Synthetic oligonucleotide
aaacaugaauaaagaacag

SEQ ID NO: 2347797 - RNA, 19 nt, Artificial Sequence
  Description of Artificial Sequence: Synthetic oligonucleotide
ugcauaugaauccuuccaa

SEQ ID NO: 2347798 - RNA, 19 nt, Artificial Sequence
  Description of Artificial Sequence: Synthetic oligonucleotide
ucuucuuauuaugggagcc

SEQ ID NO: 2347799 - RNA, 19 nt, Artificial Sequence
  Description of Artificial Sequence: Synthetic oligonucleotide
uuauaaaggucgucugaug

SEQ ID NO: 2347800 - RNA, 19 nt, Artificial Sequence
  Description of Artificial Sequence: Synthetic oligonucleotide
guaccaaaaguauccuggg

SEQ ID NO: 2347801 - RNA, 19 nt, Artificial Sequence
  Description of Artificial Sequence: Synthetic oligonucleotide
acauacgaccuauuauuag

SEQ ID NO: 2347802 - RNA, 19 nt, Artificial Sequence
  Description of Artificial Sequence: Synthetic oligonucleotide
uguucugcaaccagauuuc

SEQ ID NO: 2347803 - RNA, 19 nt, Artificial Sequence
  Description of Artificial Sequence: Synthetic oligonucleotide
agaacauacuccaauccag

SEQ ID NO: 2347804 - RNA, 19 nt, Artificial Sequence
  Description of Artificial Sequence: Synthetic oligonucleotide
gaacagucugacuucuuug

SEQ ID NO: 2347805 - RNA, 19 nt, Artificial Sequence
  Description of Artificial Sequence: Synthetic oligonucleotide
agugcauacauaucucgga

SEQ ID NO: 2347806 - RNA, 19 nt, Artificial Sequence
  Description of Artificial Sequence: Synthetic oligonucleotide
ucugauccucaaauggucu

SEQ ID NO: 2347807 - RNA, 19 nt, Artificial Sequence
  Description of Artificial Sequence: Synthetic oligonucleotide
acgaccuauuauuagauua

SEQ ID NO: 2347808 - RNA, 19 nt, Artificial Sequence
  Description of Artificial Sequence: Synthetic oligonucleotide
aguguguccuccucagaac

SEQ ID NO: 2347809 - RNA, 19 nt, Artificial Sequence
  Description of Artificial Sequence: Synthetic oligonucleotide
gaaccagguccaucgacgg

SEQ ID NO: 2347810 - RNA, 19 nt, Artificial Sequence
  Description of Artificial Sequence: Synthetic oligonucleotide
uccucaaauggucuuguaa

SEQ ID NO: 2347811 - RNA, 19 nt, Artificial Sequence
  Description of Artificial Sequence: Synthetic oligonucleotide
ucggacauuggacaccgug

SEQ ID NO: 2347812 - RNA, 19 nt, Artificial Sequence
  Description of Artificial Sequence: Synthetic oligonucleotide
uggguuuuguucccucggg

SEQ ID NO: 2347813 - RNA, 19 nt, Artificial Sequence
  Description of Artificial Sequence: Synthetic oligonucleotide
cucaauaccuaguucgauc

SEQ ID NO: 2347814 - RNA, 19 nt, Artificial Sequence
  Description of Artificial Sequence: Synthetic oligonucleotide
ucucaaggaaucucuuagc

SEQ ID NO: 2347815 - RNA, 19 nt, Artificial Sequence
  Description of Artificial Sequence: Synthetic oligonucleotide
cauacgaccuauuauuaga

SEQ ID NO: 2347816 - RNA, 19 nt, Artificial Sequence
  Description of Artificial Sequence: Synthetic oligonucleotide
auaaaggucgucugaugcu

SEQ ID NO: 2347817 - RNA, 19 nt, Artificial Sequence
  Description of Artificial Sequence: Synthetic oligonucleotide
uucucaauaccuaguucga

SEQ ID NO: 2347818 - RNA, 19 nt, Artificial Sequence
  Description of Artificial Sequence: Synthetic oligonucleotide
aucucggaguacuuguguc

SEQ ID NO: 2347819 - RNA, 19 nt, Artificial Sequence
  Description of Artificial Sequence: Synthetic oligonucleotide
cagugcauacauaucucgg

SEQ ID NO: 2347820 - RNA, 19 nt, Artificial Sequence
  Description of Artificial Sequence: Synthetic oligonucleotide
auacauaucucggaguacu

SEQ ID NO: 2347821 - RNA, 19 nt, Artificial Sequence
  Description of Artificial Sequence: Synthetic oligonucleotide
uucuuaauucucuuugauu

SEQ ID NO: 2347822 - RNA, 19 nt, Artificial Sequence
  Description of Artificial Sequence: Synthetic oligonucleotide
aaagaacagucugacuucu

SEQ ID NO: 2347823 - RNA, 19 nt, Artificial Sequence
  Description of Artificial Sequence: Synthetic oligonucleotide
ugcagaacauacuccaauc

SEQ ID NO: 2347824 - RNA, 19 nt, Artificial Sequence
  Description of Artificial Sequence: Synthetic oligonucleotide
caugguagucauacauacg

SEQ ID NO: 2347825 - RNA, 19 nt, Artificial Sequence
  Description of Artificial Sequence: Synthetic oligonucleotide
ucuguaguuugcuuagguc

SEQ ID NO: 2347826 - RNA, 19 nt, Artificial Sequence
  Description of Artificial Sequence: Synthetic oligonucleotide
uuugguucccucuucucaa

SEQ ID NO: 2347827 - RNA, 19 nt, Artificial Sequence
  Description of Artificial Sequence: Synthetic oligonucleotide
accuauuauuagauuauuc

SEQ ID NO: 2347828 - RNA, 19 nt, Artificial Sequence
  Description of Artificial Sequence: Synthetic oligonucleotide
acauacuccaauccagcca

SEQ ID NO: 2347829 - RNA, 19 nt, Artificial Sequence
  Description of Artificial Sequence: Synthetic oligonucleotide
gugcauacauaucucggag

SEQ ID NO: 2347830 - RNA, 19 nt, Artificial Sequence
  Description of Artificial Sequence: Synthetic oligonucleotide
cuucgaaaguaaaccuucc

SEQ ID NO: 2347831 - RNA, 19 nt, Artificial Sequence
  Description of Artificial Sequence: Synthetic oligonucleotide
gaacauacuccaauccagc

SEQ ID NO: 2347832 - RNA, 19 nt, Artificial Sequence
  Description of Artificial Sequence: Synthetic oligonucleotide
ucgaucauauccagcacau

SEQ ID NO: 2347833 - RNA, 19 nt, Artificial Sequence
  Description of Artificial Sequence: Synthetic oligonucleotide
acugacuuuugguucccuc

SEQ ID NO: 2347834 - RNA, 19 nt, Artificial Sequence
  Description of Artificial Sequence: Synthetic oligonucleotide
uacauacgaccuauuauua

SEQ ID NO: 2347835 - RNA, 19 nt, Artificial Sequence
  Description of Artificial Sequence: Synthetic oligonucleotide
auggguuuuguucccucgg

SEQ ID NO: 2347836 - RNA, 19 nt, Artificial Sequence
  Description of Artificial Sequence: Synthetic oligonucleotide
uguaguuugcuuaggucuu

SEQ ID NO: 2347837 - RNA, 19 nt, Artificial Sequence
  Description of Artificial Sequence: Synthetic oligonucleotide
uccuuuagagacacaaauu

SEQ ID NO: 2347838 - RNA, 19 nt, Artificial Sequence
  Description of Artificial Sequence: Synthetic oligonucleotide
uccaucgacggucccaucu

SEQ ID NO: 2347839 - RNA, 19 nt, Artificial Sequence
  Description of Artificial Sequence: Synthetic oligonucleotide
uccuuccaaaaguuguacc

SEQ ID NO: 2347840 - RNA, 19 nt, Artificial Sequence
  Description of Artificial Sequence: Synthetic oligonucleotide
cucuucuuauuaugggagc

SEQ ID NO: 2347841 - RNA, 19 nt, Artificial Sequence
  Description of Artificial Sequence: Synthetic oligonucleotide
ucuugcuucugcauaugaa

SEQ ID NO: 2347842 - RNA, 19 nt, Artificial Sequence
  Description of Artificial Sequence: Synthetic oligonucleotide
uucgugguguucugcaacc

SEQ ID NO: 2347843 - RNA, 19 nt, Artificial Sequence
  Description of Artificial Sequence: Synthetic oligonucleotide
ucccugucucugcaggucg

SEQ ID NO: 2347844 - RNA, 19 nt, Artificial Sequence
  Description of Artificial Sequence: Synthetic oligonucleotide
agacacaaauuucucaaua

SEQ ID NO: 2347845 - RNA, 19 nt, Artificial Sequence
  Description of Artificial Sequence: Synthetic oligonucleotide
uaucucggaguacuugugu

SEQ ID NO: 2347846 - RNA, 19 nt, Artificial Sequence
  Description of Artificial Sequence: Synthetic oligonucleotide
cuaguucgaucauauccag

SEQ ID NO: 2347847 - RNA, 19 nt, Artificial Sequence
  Description of Artificial Sequence: Synthetic oligonucleotide
uucuucaacagcagcuuau

SEQ ID NO: 2347848 - RNA, 19 nt, Artificial Sequence
  Description of Artificial Sequence: Synthetic oligonucleotide
uaccaaaaguauccuggga

SEQ ID NO: 2347849 - RNA, 19 nt, Artificial Sequence
  Description of Artificial Sequence: Synthetic oligonucleotide
cauggguuuuguucccucg

SEQ ID NO: 2347850 - RNA, 19 nt, Artificial Sequence
  Description of Artificial Sequence: Synthetic oligonucleotide
ugcauacauaucucggagu

SEQ ID NO: 2347851 - RNA, 19 nt, Artificial Sequence
  Description of Artificial Sequence: Synthetic oligonucleotide
auuaugggagccaaacaug

SEQ ID NO: 2347852 - RNA, 19 nt, Artificial Sequence
  Description of Artificial Sequence: Synthetic oligonucleotide
gacauuggacaccgugggg

SEQ ID NO: 2347853 - RNA, 19 nt, Artificial Sequence
  Description of Artificial Sequence: Synthetic oligonucleotide
aauaccuaguucgaucaua

SEQ ID NO: 2347854 - RNA, 19 nt, Artificial Sequence
  Description of Artificial Sequence: Synthetic oligonucleotide
gagauauucuuucucuucu

SEQ ID NO: 2347855 - RNA, 19 nt, Artificial Sequence
  Description of Artificial Sequence: Synthetic oligonucleotide
uauccuuuagagacacaaa

SEQ ID NO: 2347856 - RNA, 19 nt, Artificial Sequence
  Description of Artificial Sequence: Synthetic oligonucleotide
caaggaaucucuuagcccu

SEQ ID NO: 2347857 - RNA, 19 nt, Artificial Sequence
  Description of Artificial Sequence: Synthetic oligonucleotide
cuccguaugguuucuucag

SEQ ID NO: 2347858 - RNA, 19 nt, Artificial Sequence
  Description of Artificial Sequence: Synthetic oligonucleotide
agcgaauaucaacaugggu

SEQ ID NO: 2347859 - RNA, 19 nt, Artificial Sequence
  Description of Artificial Sequence: Synthetic oligonucleotide
aaggucgucugaugcuaag

SEQ ID NO: 2347860 - RNA, 19 nt, Artificial Sequence
  Description of Artificial Sequence: Synthetic oligonucleotide
accagguccaucgacgguc

SEQ ID NO: 2347861 - RNA, 19 nt, Artificial Sequence
  Description of Artificial Sequence: Synthetic oligonucleotide
uuuaaucaacauggcauuc

SEQ ID NO: 2347862 - RNA, 19 nt, Artificial Sequence
  Description of Artificial Sequence: Synthetic oligonucleotide
agucggacauuggacaccg

SEQ ID NO: 2347863 - RNA, 19 nt, Artificial Sequence
  Description of Artificial Sequence: Synthetic oligonucleotide
ggacauuggacaccguggg

SEQ ID NO: 2347864 - RNA, 19 nt, Artificial Sequence
  Description of Artificial Sequence: Synthetic oligonucleotide
aguucaauucgugguguuc

SEQ ID NO: 2347865 - RNA, 19 nt, Artificial Sequence
  Description of Artificial Sequence: Synthetic oligonucleotide
ugguagucauacauacgac

SEQ ID NO: 2347866 - RNA, 19 nt, Artificial Sequence
  Description of Artificial Sequence: Synthetic oligonucleotide
aauucgugguguucugcaa

SEQ ID NO: 2347867 - RNA, 19 nt, Artificial Sequence
  Description of Artificial Sequence: Synthetic oligonucleotide
uaguucgaucauauccagc

SEQ ID NO: 2347868 - RNA, 19 nt, Artificial Sequence
  Description of Artificial Sequence: Synthetic oligonucleotide
cauaugaauccuuccaaaa

SEQ ID NO: 2347869 - RNA, 19 nt, Artificial Sequence
  Description of Artificial Sequence: Synthetic oligonucleotide
cuguaguuugcuuaggucu

SEQ ID NO: 2347870 - RNA, 19 nt, Artificial Sequence
  Description of Artificial Sequence: Synthetic oligonucleotide
ucggccucuucuuauuaug

SEQ ID NO: 2347871 - RNA, 19 nt, Artificial Sequence
  Description of Artificial Sequence: Synthetic oligonucleotide
agugcggugaagugcagaa

SEQ ID NO: 2347872 - RNA, 19 nt, Artificial Sequence
  Description of Artificial Sequence: Synthetic oligonucleotide
ugauccucaaauggucuug

SEQ ID NO: 2347873 - RNA, 19 nt, Artificial Sequence
  Description of Artificial Sequence: Synthetic oligonucleotide
acuccguaugguuucuuca

SEQ ID NO: 2347874 - RNA, 19 nt, Artificial Sequence
  Description of Artificial Sequence: Synthetic oligonucleotide
ucugcaggucgcuucuuca

SEQ ID NO: 2347875 - RNA, 19 nt, Artificial Sequence
  Description of Artificial Sequence: Synthetic oligonucleotide
uucaauucgugguguucug

SEQ ID NO: 2347876 - RNA, 19 nt, Artificial Sequence
  Description of Artificial Sequence: Synthetic oligonucleotide
cagcgaauaucaacauggg

SEQ ID NO: 2347877 - RNA, 19 nt, Artificial Sequence
  Description of Artificial Sequence: Synthetic oligonucleotide
uacagaacuccguaugguu

SEQ ID NO: 2347878 - RNA, 19 nt, Artificial Sequence
  Description of Artificial Sequence: Synthetic oligonucleotide
uccaaugaugucugauccu

SEQ ID NO: 2347879 - RNA, 19 nt, Artificial Sequence
  Description of Artificial Sequence: Synthetic oligonucleotide
cagcacaugguagucauac

SEQ ID NO: 2347880 - RNA, 19 nt, Artificial Sequence
  Description of Artificial Sequence: Synthetic oligonucleotide
cagaacauacuccaaucca

SEQ ID NO: 2347881 - RNA, 19 nt, Artificial Sequence
  Description of Artificial Sequence: Synthetic oligonucleotide
cauuggacaccguggggcc

SEQ ID NO: 2347882 - RNA, 19 nt, Artificial Sequence
  Description of Artificial Sequence: Synthetic oligonucleotide
uuauucggccucuucuuau

SEQ ID NO: 2347883 - RNA, 19 nt, Artificial Sequence
  Description of Artificial Sequence: Synthetic oligonucleotide
accagcgaauaucaacaug

SEQ ID NO: 2347884 - RNA, 19 nt, Artificial Sequence
  Description of Artificial Sequence: Synthetic oligonucleotide
uauagucuucuguuacauc

SEQ ID NO: 2347885 - RNA, 19 nt, Artificial Sequence
  Description of Artificial Sequence: Synthetic oligonucleotide
agcuuauagcuucgaaagu

SEQ ID NO: 2347886 - RNA, 19 nt, Artificial Sequence
  Description of Artificial Sequence: Synthetic oligonucleotide
gagagcuuugggcauuuuc

SEQ ID NO: 2347887 - RNA, 19 nt, Artificial Sequence
  Description of Artificial Sequence: Synthetic oligonucleotide
caugaauaaagaacagucu

SEQ ID NO: 2347888 - RNA, 19 nt, Artificial Sequence
  Description of Artificial Sequence: Synthetic oligonucleotide
acauggguuuuguucccuc

SEQ ID NO: 2347889 - RNA, 19 nt, Artificial Sequence
  Description of Artificial Sequence: Synthetic oligonucleotide
uccguaugguuucuucagu

SEQ ID NO: 2347890 - RNA, 19 nt, Artificial Sequence
  Description of Artificial Sequence: Synthetic oligonucleotide
ggugaagugcagaacauac

SEQ ID NO: 2347891 - RNA, 19 nt, Artificial Sequence
  Description of Artificial Sequence: Synthetic oligonucleotide
ucaauucgugguguucugc

SEQ ID NO: 2347892 - RNA, 19 nt, Artificial Sequence
  Description of Artificial Sequence: Synthetic oligonucleotide
ccaaaaguuguaccaaaag

SEQ ID NO: 2347893 - RNA, 19 nt, Artificial Sequence
  Description of Artificial Sequence: Synthetic oligonucleotide
uucuuauuaugggagccaa

SEQ ID NO: 2347894 - RNA, 19 nt, Artificial Sequence
  Description of Artificial Sequence: Synthetic oligonucleotide
ucaacauggcauucuuaau

SEQ ID NO: 2347895 - RNA, 19 nt, Artificial Sequence
  Description of Artificial Sequence: Synthetic oligonucleotide
agucauacauacgaccuau

SEQ ID NO: 2347896 - RNA, 19 nt, Artificial Sequence
  Description of Artificial Sequence: Synthetic oligonucleotide
guuuuguucccucggggca

SEQ ID NO: 2347897 - RNA, 19 nt, Artificial Sequence
  Description of Artificial Sequence: Synthetic oligonucleotide
cagaacuccguaugguuuc

SEQ ID NO: 2347898 - RNA, 19 nt, Artificial Sequence
  Description of Artificial Sequence: Synthetic oligonucleotide
auuagauuauucggccucu

SEQ ID NO: 2347899 - RNA, 19 nt, Artificial Sequence
  Description of Artificial Sequence: Synthetic oligonucleotide
cugcauaugaauccuucca

SEQ ID NO: 2347900 - RNA, 19 nt, Artificial Sequence
  Description of Artificial Sequence: Synthetic oligonucleotide
guucagugcggugaagugc

SEQ ID NO: 2347901 - RNA, 19 nt, Artificial Sequence
  Description of Artificial Sequence: Synthetic oligonucleotide
cuagucuuaauauccuuua

SEQ ID NO: 2347902 - RNA, 19 nt, Artificial Sequence
  Description of Artificial Sequence: Synthetic oligonucleotide
uucccguucagugcgguga

SEQ ID NO: 2347903 - RNA, 19 nt, Artificial Sequence
  Description of Artificial Sequence: Synthetic oligonucleotide
uaaaggucgucugaugcua

SEQ ID NO: 2347904 - RNA, 19 nt, Artificial Sequence
  Description of Artificial Sequence: Synthetic oligonucleotide
ugacuuuugguucccucuu

SEQ ID NO: 2347905 - RNA, 19 nt, Artificial Sequence
  Description of Artificial Sequence: Synthetic oligonucleotide
acauaucucggaguacuug

SEQ ID NO: 2347906 - RNA, 19 nt, Artificial Sequence
  Description of Artificial Sequence: Synthetic oligonucleotide
uagucauacauacgaccua

SEQ ID NO: 2347907 - RNA, 19 nt, Artificial Sequence
  Description of Artificial Sequence: Synthetic oligonucleotide
uugcuuaggucuugcuucu

SEQ ID NO: 2347908 - RNA, 19 nt, Artificial Sequence
  Description of Artificial Sequence: Synthetic oligonucleotide
aauccuuccaaaaguugua

SEQ ID NO: 2347909 - RNA, 19 nt, Artificial Sequence
  Description of Artificial Sequence: Synthetic oligonucleotide
auuauucggccucuucuua

SEQ ID NO: 2347910 - RNA, 19 nt, Artificial Sequence
  Description of Artificial Sequence: Synthetic oligonucleotide
agccaaacaugaauaaaga

SEQ ID NO: 2347911 - RNA, 19 nt, Artificial Sequence
  Description of Artificial Sequence: Synthetic oligonucleotide
uuucugucccugucucugc

SEQ ID NO: 2347912 - RNA, 19 nt, Artificial Sequence
  Description of Artificial Sequence: Synthetic oligonucleotide
caacauggguuuuguuccc

SEQ ID NO: 2347913 - RNA, 19 nt, Artificial Sequence
  Description of Artificial Sequence: Synthetic oligonucleotide
aguaaaccuucccguucag

SEQ ID NO: 2347914 - RNA, 19 nt, Artificial Sequence
  Description of Artificial Sequence: Synthetic oligonucleotide
accguggggccucugaaga

SEQ ID NO: 2347915 - RNA, 19 nt, Artificial Sequence
  Description of Artificial Sequence: Synthetic oligonucleotide
ggucgucugaugcuaagug

SEQ ID NO: 2347916 - RNA, 19 nt, Artificial Sequence
  Description of Artificial Sequence: Synthetic oligonucleotide
uacuagucuuaauauccuu

SEQ ID NO: 2347917 - RNA, 19 nt, Artificial Sequence
  Description of Artificial Sequence: Synthetic oligonucleotide
guagucauacauacgaccu

SEQ ID NO: 2347918 - RNA, 19 nt, Artificial Sequence
  Description of Artificial Sequence: Synthetic oligonucleotide
acuagucuuaauauccuuu

SEQ ID NO: 2347919 - RNA, 19 nt, Artificial Sequence
  Description of Artificial Sequence: Synthetic oligonucleotide
ugucucugcaggucgcuuc

SEQ ID NO: 2347920 - RNA, 19 nt, Artificial Sequence
  Description of Artificial Sequence: Synthetic oligonucleotide
caauucgugguguucugca

SEQ ID NO: 2347921 - RNA, 19 nt, Artificial Sequence
  Description of Artificial Sequence: Synthetic oligonucleotide
ugcaaccagauuucuucaa

SEQ ID NO: 2347922 - RNA, 19 nt, Artificial Sequence
  Description of Artificial Sequence: Synthetic oligonucleotide
uuccccugguuuucugucc

SEQ ID NO: 2347923 - RNA, 19 nt, Artificial Sequence
  Description of Artificial Sequence: Synthetic oligonucleotide
aggucuugcuucugcauau

SEQ ID NO: 2347924 - RNA, 19 nt, Artificial Sequence
  Description of Artificial Sequence: Synthetic oligonucleotide
auaccuaguucgaucauau

SEQ ID NO: 2347925 - RNA, 19 nt, Artificial Sequence
  Description of Artificial Sequence: Synthetic oligonucleotide
ggccucuucuuauuauggg

SEQ ID NO: 2347926 - RNA, 19 nt, Artificial Sequence
  Description of Artificial Sequence: Synthetic oligonucleotide
gaguacuugugucacaguu

SEQ ID NO: 2347927 - RNA, 19 nt, Artificial Sequence
  Description of Artificial Sequence: Synthetic oligonucleotide
cauaucucggaguacuugu

SEQ ID NO: 2347928 - RNA, 19 nt, Artificial Sequence
  Description of Artificial Sequence: Synthetic oligonucleotide
ggguuuuguucccucgggg

SEQ ID NO: 2347929 - RNA, 19 nt, Artificial Sequence
  Description of Artificial Sequence: Synthetic oligonucleotide
gcacuuacuagucuuaaua

SEQ ID NO: 2347930 - RNA, 19 nt, Artificial Sequence
  Description of Artificial Sequence: Synthetic oligonucleotide
aguuugcuuaggucuugcu

SEQ ID NO: 2347931 - RNA, 19 nt, Artificial Sequence
  Description of Artificial Sequence: Synthetic oligonucleotide
cauacauaucucggaguac

SEQ ID NO: 2347932 - RNA, 19 nt, Artificial Sequence
  Description of Artificial Sequence: Synthetic oligonucleotide
ugcuaaguguguccuccuc

SEQ ID NO: 2347933 - RNA, 19 nt, Artificial Sequence
  Description of Artificial Sequence: Synthetic oligonucleotide
agaaaucaauaagaagauu

SEQ ID NO: 2347934 - RNA, 19 nt, Artificial Sequence
  Description of Artificial Sequence: Synthetic oligonucleotide
auacgaccuauuauuagau

SEQ ID NO: 2347935 - RNA, 19 nt, Artificial Sequence
  Description of Artificial Sequence: Synthetic oligonucleotide
ccuuuaaucaacauggcau

SEQ ID NO: 2347936 - RNA, 19 nt, Artificial Sequence
  Description of Artificial Sequence: Synthetic oligonucleotide
gauuauucggccucuucuu

SEQ ID NO: 2347937 - RNA, 19 nt, Artificial Sequence
  Description of Artificial Sequence: Synthetic oligonucleotide
uacauaucucggaguacuu

SEQ ID NO: 2347938 - RNA, 19 nt, Artificial Sequence
  Description of Artificial Sequence: Synthetic oligonucleotide
guucgaucauauccagcac

SEQ ID NO: 2347939 - RNA, 19 nt, Artificial Sequence
  Description of Artificial Sequence: Synthetic oligonucleotide
gcagcuuauagcuucgaaa

SEQ ID NO: 2347940 - RNA, 19 nt, Artificial Sequence
  Description of Artificial Sequence: Synthetic oligonucleotide
ucucaauaccuaguucgau

SEQ ID NO: 2347941 - RNA, 19 nt, Artificial Sequence
  Description of Artificial Sequence: Synthetic oligonucleotide
gucugauccucaaaugguc

SEQ ID NO: 2347942 - RNA, 19 nt, Artificial Sequence
  Description of Artificial Sequence: Synthetic oligonucleotide
cucggaguacuugugucac

SEQ ID NO: 2347943 - RNA, 19 nt, Artificial Sequence
  Description of Artificial Sequence: Synthetic oligonucleotide
uacgaccuauuauuagauu

SEQ ID NO: 2347944 - RNA, 19 nt, Artificial Sequence
  Description of Artificial Sequence: Synthetic oligonucleotide
augaauccuuccaaaaguu

SEQ ID NO: 2347945 - RNA, 19 nt, Artificial Sequence
  Description of Artificial Sequence: Synthetic oligonucleotide
uauucggccucuucuuauu

SEQ ID NO: 2347946 - RNA, 19 nt, Artificial Sequence
  Description of Artificial Sequence: Synthetic oligonucleotide
uccuccucagaaccagguc

SEQ ID NO: 2347947 - RNA, 19 nt, Artificial Sequence
  Description of Artificial Sequence: Synthetic oligonucleotide
aaucaacauggcauucuua

SEQ ID NO: 2347948 - RNA, 19 nt, Artificial Sequence
  Description of Artificial Sequence: Synthetic oligonucleotide
gcaaccagauuucuucaac

SEQ ID NO: 2347949 - RNA, 19 nt, Artificial Sequence
  Description of Artificial Sequence: Synthetic oligonucleotide
ucgacggucccaucucuuc

SEQ ID NO: 2347950 - RNA, 19 nt, Artificial Sequence
  Description of Artificial Sequence: Synthetic oligonucleotide
auaucucggaguacuugug

SEQ ID NO: 2347951 - RNA, 19 nt, Artificial Sequence
  Description of Artificial Sequence: Synthetic oligonucleotide
augaugucugauccucaaa

SEQ ID NO: 2347952 - RNA, 19 nt, Artificial Sequence
  Description of Artificial Sequence: Synthetic oligonucleotide
gguuuucugucccugucuc

SEQ ID NO: 2347953 - RNA, 19 nt, Artificial Sequence
  Description of Artificial Sequence: Synthetic oligonucleotide
agcacaugguagucauaca

SEQ ID NO: 2347954 - RNA, 19 nt, Artificial Sequence
  Description of Artificial Sequence: Synthetic oligonucleotide
uucggccucuucuuauuau

SEQ ID NO: 2347955 - RNA, 19 nt, Artificial Sequence
  Description of Artificial Sequence: Synthetic oligonucleotide
uccagccagucggacauug

SEQ ID NO: 2347956 - RNA, 19 nt, Artificial Sequence
  Description of Artificial Sequence: Synthetic oligonucleotide
cuucuauagucuucuguua

SEQ ID NO: 2347957 - RNA, 19 nt, Artificial Sequence
  Description of Artificial Sequence: Synthetic oligonucleotide
cuguuacaucaaaaucauc

SEQ ID NO: 2347958 - RNA, 19 nt, Artificial Sequence
  Description of Artificial Sequence: Synthetic oligonucleotide
ugucccugucucugcaggu

SEQ ID NO: 2347959 - RNA, 19 nt, Artificial Sequence
  Description of Artificial Sequence: Synthetic oligonucleotide
gacggucccaucucuucca

SEQ ID NO: 2347960 - RNA, 19 nt, Artificial Sequence
  Description of Artificial Sequence: Synthetic oligonucleotide
gcuucgaaaguaaaccuuc

SEQ ID NO: 2347961 - RNA, 19 nt, Artificial Sequence
  Description of Artificial Sequence: Synthetic oligonucleotide
gcauacauaucucggagua

SEQ ID NO: 2347962 - RNA, 19 nt, Artificial Sequence
  Description of Artificial Sequence: Synthetic oligonucleotide
ugaugcuaaguguguccuc

SEQ ID NO: 2347963 - RNA, 19 nt, Artificial Sequence
  Description of Artificial Sequence: Synthetic oligonucleotide
guucaauucgugguguucu

SEQ ID NO: 2347964 - RNA, 19 nt, Artificial Sequence
  Description of Artificial Sequence: Synthetic oligonucleotide
cuucuuauuaugggagcca

SEQ ID NO: 2347965 - RNA, 19 nt, Artificial Sequence
  Description of Artificial Sequence: Synthetic oligonucleotide
ucccucggggcacuuacua

SEQ ID NO: 2347966 - RNA, 19 nt, Artificial Sequence
  Description of Artificial Sequence: Synthetic oligonucleotide
cacuuacuagucuuaauau

SEQ ID NO: 2347967 - RNA, 19 nt, Artificial Sequence
  Description of Artificial Sequence: Synthetic oligonucleotide
acagaacuccguaugguuu

SEQ ID NO: 2347968 - RNA, 19 nt, Artificial Sequence
  Description of Artificial Sequence: Synthetic oligonucleotide
gucuugcuucugcauauga

SEQ ID NO: 2347969 - RNA, 19 nt, Artificial Sequence
  Description of Artificial Sequence: Synthetic oligonucleotide
cuccucagaaccaggucca

SEQ ID NO: 2347970 - RNA, 19 nt, Artificial Sequence
  Description of Artificial Sequence: Synthetic oligonucleotide
uacuccaauccagccaguc

SEQ ID NO: 2347971 - RNA, 19 nt, Artificial Sequence
  Description of Artificial Sequence: Synthetic oligonucleotide
guaguuugcuuaggucuug

SEQ ID NO: 2347972 - RNA, 19 nt, Artificial Sequence
  Description of Artificial Sequence: Synthetic oligonucleotide
ucggggcacuuacuagucu

SEQ ID NO: 2347973 - RNA, 19 nt, Artificial Sequence
  Description of Artificial Sequence: Synthetic oligonucleotide
gcgaauaucaacauggguu

SEQ ID NO: 2347974 - RNA, 19 nt, Artificial Sequence
  Description of Artificial Sequence: Synthetic oligonucleotide
cggacauuggacaccgugg

SEQ ID NO: 2347975 - RNA, 19 nt, Artificial Sequence
  Description of Artificial Sequence: Synthetic oligonucleotide
accccuucauuuuccuggu

SEQ ID NO: 2347976 - RNA, 19 nt, Artificial Sequence
  Description of Artificial Sequence: Synthetic oligonucleotide
gcuuauagcuucgaaagua

SEQ ID NO: 2347977 - RNA, 19 nt, Artificial Sequence
  Description of Artificial Sequence: Synthetic oligonucleotide
cucggggcacuuacuaguc

SEQ ID NO: 2347978 - RNA, 19 nt, Artificial Sequence
  Description of Artificial Sequence: Synthetic oligonucleotide
gccucuucuuauuauggga

SEQ ID NO: 2347979 - RNA, 19 nt, Artificial Sequence
  Description of Artificial Sequence: Synthetic oligonucleotide
gcauaugaauccuuccaaa

SEQ ID NO: 2347980 - RNA, 19 nt, Artificial Sequence
  Description of Artificial Sequence: Synthetic oligonucleotide
ucggaguacuugugucaca

SEQ ID NO: 2347981 - RNA, 19 nt, Artificial Sequence
  Description of Artificial Sequence: Synthetic oligonucleotide
ccaaaaguauccugggaga

SEQ ID NO: 2347982 - RNA, 19 nt, Artificial Sequence
  Description of Artificial Sequence: Synthetic oligonucleotide
augcuaaguguguccuccu

SEQ ID NO: 2347983 - RNA, 19 nt, Artificial Sequence
  Description of Artificial Sequence: Synthetic oligonucleotide
aaaggucgucugaugcuaa

SEQ ID NO: 2347984 - RNA, 19 nt, Artificial Sequence
  Description of Artificial Sequence: Synthetic oligonucleotide
acggucccaucucuuccag

SEQ ID NO: 2347985 - RNA, 19 nt, Artificial Sequence
  Description of Artificial Sequence: Synthetic oligonucleotide
gccagucggacauuggaca

SEQ ID NO: 2347986 - RNA, 19 nt, Artificial Sequence
  Description of Artificial Sequence: Synthetic oligonucleotide
ccguaugguuucuucagug

SEQ ID NO: 2347987 - RNA, 19 nt, Artificial Sequence
  Description of Artificial Sequence: Synthetic oligonucleotide
caccguggggccucugaag

SEQ ID NO: 2347988 - RNA, 19 nt, Artificial Sequence
  Description of Artificial Sequence: Synthetic oligonucleotide
guuugcuuaggucuugcuu

SEQ ID NO: 2347989 - RNA, 19 nt, Artificial Sequence
  Description of Artificial Sequence: Synthetic oligonucleotide
gagacacaaauuucucaau

SEQ ID NO: 2347990 - RNA, 19 nt, Artificial Sequence
  Description of Artificial Sequence: Synthetic oligonucleotide
uaccuaguucgaucauauc

SEQ ID NO: 2347991 - RNA, 19 nt, Artificial Sequence
  Description of Artificial Sequence: Synthetic oligonucleotide
gacaccguggggccucuga

SEQ ID NO: 2347992 - RNA, 19 nt, Artificial Sequence
  Description of Artificial Sequence: Synthetic oligonucleotide
gucgucugaugcuaagugu

SEQ ID NO: 2347993 - RNA, 19 nt, Artificial Sequence
  Description of Artificial Sequence: Synthetic oligonucleotide
cagucggacauuggacacc

SEQ ID NO: 2347994 - RNA, 19 nt, Artificial Sequence
  Description of Artificial Sequence: Synthetic oligonucleotide
ggucuuguaauauuuucuu

SEQ ID NO: 2347995 - RNA, 19 nt, Artificial Sequence
  Description of Artificial Sequence: Synthetic oligonucleotide
cucugcaggucgcuucuuc

SEQ ID NO: 2347996 - RNA, 19 nt, Artificial Sequence
  Description of Artificial Sequence: Synthetic oligonucleotide
ucccguucagugcggugaa

SEQ ID NO: 2347997 - RNA, 19 nt, Artificial Sequence
  Description of Artificial Sequence: Synthetic oligonucleotide
aggucgucugaugcuaagu

SEQ ID NO: 2347998 - RNA, 19 nt, Artificial Sequence
  Description of Artificial Sequence: Synthetic oligonucleotide
gucugaugcuaaguguguc

SEQ ID NO: 2347999 - RNA, 19 nt, Artificial Sequence
  Description of Artificial Sequence: Synthetic oligonucleotide
agaacuccguaugguuucu

SEQ ID NO: 2348000 - RNA, 19 nt, Artificial Sequence
  Description of Artificial Sequence: Synthetic oligonucleotide
ucgugguguucugcaacca

SEQ ID NO: 2348001 - RNA, 19 nt, Artificial Sequence
  Description of Artificial Sequence: Synthetic oligonucleotide
acaccguggggccucugaa

SEQ ID NO: 2348002 - RNA, 19 nt, Artificial Sequence
  Description of Artificial Sequence: Synthetic oligonucleotide
gugcagaacauacuccaau

SEQ ID NO: 2348003 - RNA, 19 nt, Artificial Sequence
  Description of Artificial Sequence: Synthetic oligonucleotide
caaauggucuuguaauauu

SEQ ID NO: 2348004 - RNA, 19 nt, Artificial Sequence
  Description of Artificial Sequence: Synthetic oligonucleotide
guuguaccaaaaguauccu

SEQ ID NO: 2348005 - RNA, 19 nt, Artificial Sequence
  Description of Artificial Sequence: Synthetic oligonucleotide
cuucccguucagugcggug

SEQ ID NO: 2348006 - RNA, 19 nt, Artificial Sequence
  Description of Artificial Sequence: Synthetic oligonucleotide
ccagucggacauuggacac

SEQ ID NO: 2348007 - RNA, 19 nt, Artificial Sequence
  Description of Artificial Sequence: Synthetic oligonucleotide
uucccucggggcacuuacu

SEQ ID NO: 2348008 - RNA, 19 nt, Artificial Sequence
  Description of Artificial Sequence: Synthetic oligonucleotide
cccuuuaaucaacauggca

SEQ ID NO: 2348009 - RNA, 19 nt, Artificial Sequence
  Description of Artificial Sequence: Synthetic oligonucleotide
cuauagucuucuguuacau

SEQ ID NO: 2348010 - RNA, 19 nt, Artificial Sequence
  Description of Artificial Sequence: Synthetic oligonucleotide
ccucaaauggucuuguaau

SEQ ID NO: 2348011 - RNA, 19 nt, Artificial Sequence
  Description of Artificial Sequence: Synthetic oligonucleotide
ugcuuaggucuugcuucug

SEQ ID NO: 2348012 - RNA, 19 nt, Artificial Sequence
  Description of Artificial Sequence: Synthetic oligonucleotide
ggagccaaacaugaauaaa

SEQ ID NO: 2348013 - RNA, 19 nt, Artificial Sequence
  Description of Artificial Sequence: Synthetic oligonucleotide
aagaacagucugacuucuu

SEQ ID NO: 2348014 - RNA, 19 nt, Artificial Sequence
  Description of Artificial Sequence: Synthetic oligonucleotide
guauccugggagauauucu

SEQ ID NO: 2348015 - RNA, 19 nt, Artificial Sequence
  Description of Artificial Sequence: Synthetic oligonucleotide
auccucaaauggucuugua

SEQ ID NO: 2348016 - RNA, 19 nt, Artificial Sequence
  Description of Artificial Sequence: Synthetic oligonucleotide
ccccuuuaaucaacauggc

SEQ ID NO: 2348017 - RNA, 19 nt, Artificial Sequence
  Description of Artificial Sequence: Synthetic oligonucleotide
uugagagcuuugggcauuu

SEQ ID NO: 2348018 - RNA, 19 nt, Artificial Sequence
  Description of Artificial Sequence: Synthetic oligonucleotide
cugcaggucgcuucuucaa

SEQ ID NO: 2348019 - RNA, 19 nt, Artificial Sequence
  Description of Artificial Sequence: Synthetic oligonucleotide
cuugugucacaguugcauu

SEQ ID NO: 2348020 - RNA, 19 nt, Artificial Sequence
  Description of Artificial Sequence: Synthetic oligonucleotide
caaaaguauccugggagau

SEQ ID NO: 2348021 - RNA, 19 nt, Artificial Sequence
  Description of Artificial Sequence: Synthetic oligonucleotide
gugaagugcagaacauacu

SEQ ID NO: 2348022 - RNA, 19 nt, Artificial Sequence
  Description of Artificial Sequence: Synthetic oligonucleotide
cggaguacuugugucacag

SEQ ID NO: 2348023 - RNA, 19 nt, Artificial Sequence
  Description of Artificial Sequence: Synthetic oligonucleotide
gccucugaagaaaucaaua

SEQ ID NO: 2348024 - RNA, 19 nt, Artificial Sequence
  Description of Artificial Sequence: Synthetic oligonucleotide
gaccuauuauuagauuauu

SEQ ID NO: 2348025 - RNA, 19 nt, Artificial Sequence
  Description of Artificial Sequence: Synthetic oligonucleotide
cgaaaguaaaccuucccgu

SEQ ID NO: 2348026 - RNA, 19 nt, Artificial Sequence
  Description of Artificial Sequence: Synthetic oligonucleotide
ccagguccaucgacggucc

SEQ ID NO: 2348027 - RNA, 19 nt, Artificial Sequence
  Description of Artificial Sequence: Synthetic oligonucleotide
auccugggagauauucuuu

SEQ ID NO: 2348028 - RNA, 19 nt, Artificial Sequence
  Description of Artificial Sequence: Synthetic oligonucleotide
cguucagugcggugaagug

SEQ ID NO: 2348029 - RNA, 19 nt, Artificial Sequence
  Description of Artificial Sequence: Synthetic oligonucleotide
caucaccagcgaauaucaa

SEQ ID NO: 2348030 - RNA, 19 nt, Artificial Sequence
  Description of Artificial Sequence: Synthetic oligonucleotide
guaaaccuucccguucagu

SEQ ID NO: 2348031 - RNA, 19 nt, Artificial Sequence
  Description of Artificial Sequence: Synthetic oligonucleotide
cccucggggcacuuacuag

SEQ ID NO: 2348032 - RNA, 19 nt, Artificial Sequence
  Description of Artificial Sequence: Synthetic oligonucleotide
cugauccucaaauggucuu

SEQ ID NO: 2348033 - RNA, 19 nt, Artificial Sequence
  Description of Artificial Sequence: Synthetic oligonucleotide
ggucuugcuucugcauaug

SEQ ID NO: 2348034 - RNA, 19 nt, Artificial Sequence
  Description of Artificial Sequence: Synthetic oligonucleotide
accuucccguucagugcgg

SEQ ID NO: 2348035 - RNA, 19 nt, Artificial Sequence
  Description of Artificial Sequence: Synthetic oligonucleotide
ccaucgacggucccaucuc

SEQ ID NO: 2348036 - RNA, 19 nt, Artificial Sequence
  Description of Artificial Sequence: Synthetic oligonucleotide
uguucccucggggcacuua

SEQ ID NO: 2348037 - RNA, 19 nt, Artificial Sequence
  Description of Artificial Sequence: Synthetic oligonucleotide
cgacggucccaucucuucc

SEQ ID NO: 2348038 - RNA, 19 nt, Artificial Sequence
  Description of Artificial Sequence: Synthetic oligonucleotide
auacuccaauccagccagu

SEQ ID NO: 2348039 - RNA, 19 nt, Artificial Sequence
  Description of Artificial Sequence: Synthetic oligonucleotide
cccugucucugcaggucgc

SEQ ID NO: 2348040 - RNA, 19 nt, Artificial Sequence
  Description of Artificial Sequence: Synthetic oligonucleotide
cagugcggugaagugcaga

SEQ ID NO: 2348041 - RNA, 19 nt, Artificial Sequence
  Description of Artificial Sequence: Synthetic oligonucleotide
aucgacggucccaucucuu

SEQ ID NO: 2348042 - RNA, 19 nt, Artificial Sequence
  Description of Artificial Sequence: Synthetic oligonucleotide
caucgacggucccaucucu

SEQ ID NO: 2348043 - RNA, 19 nt, Artificial Sequence
  Description of Artificial Sequence: Synthetic oligonucleotide
ggucgcuucuucaaccccu

SEQ ID NO: 2348044 - RNA, 19 nt, Artificial Sequence
  Description of Artificial Sequence: Synthetic oligonucleotide
caauaccuaguucgaucau

SEQ ID NO: 2348045 - RNA, 19 nt, Artificial Sequence
  Description of Artificial Sequence: Synthetic oligonucleotide
ggcacuuacuagucuuaau

SEQ ID NO: 2348046 - RNA, 19 nt, Artificial Sequence
  Description of Artificial Sequence: Synthetic oligonucleotide
gggccucugaagaaaucaa

SEQ ID NO: 2348047 - RNA, 19 nt, Artificial Sequence
  Description of Artificial Sequence: Synthetic oligonucleotide
ugagagcuuugggcauuuu

SEQ ID NO: 2348048 - RNA, 19 nt, Artificial Sequence
  Description of Artificial Sequence: Synthetic oligonucleotide
caccagcgaauaucaacau

SEQ ID NO: 2348049 - RNA, 19 nt, Artificial Sequence
  Description of Artificial Sequence: Synthetic oligonucleotide
gggcacuuacuagucuuaa

SEQ ID NO: 2348050 - RNA, 19 nt, Artificial Sequence
  Description of Artificial Sequence: Synthetic oligonucleotide
ccucggggcacuuacuagu

SEQ ID NO: 2348051 - RNA, 19 nt, Artificial Sequence
  Description of Artificial Sequence: Synthetic oligonucleotide
ggaguacuugugucacagu

SEQ ID NO: 2348052 - RNA, 19 nt, Artificial Sequence
  Description of Artificial Sequence: Synthetic oligonucleotide
cgaccuauuauuagauuau

SEQ ID NO: 2348053 - RNA, 19 nt, Artificial Sequence
  Description of Artificial Sequence: Synthetic oligonucleotide
cccugguuuucugucccug

SEQ ID NO: 2348054 - RNA, 19 nt, Artificial Sequence
  Description of Artificial Sequence: Synthetic oligonucleotide
ccucagaaccagguccauc

SEQ ID NO: 2348055 - RNA, 19 nt, Artificial Sequence
  Description of Artificial Sequence: Synthetic oligonucleotide
caguucaauucgugguguu

SEQ ID NO: 2348056 - RNA, 19 nt, Artificial Sequence
  Description of Artificial Sequence: Synthetic oligonucleotide
guccaucgacggucccauc

SEQ ID NO: 2348057 - RNA, 19 nt, Artificial Sequence
  Description of Artificial Sequence: Synthetic oligonucleotide
cagcagcuuauagcuucga

SEQ ID NO: 2348058 - RNA, 19 nt, Artificial Sequence
  Description of Artificial Sequence: Synthetic oligonucleotide
ggggcacuuacuagucuua

SEQ ID NO: 2348059 - RNA, 19 nt, Artificial Sequence
  Description of Artificial Sequence: Synthetic oligonucleotide
gucauacauacgaccuauu

SEQ ID NO: 2348060 - RNA, 19 nt, Artificial Sequence
  Description of Artificial Sequence: Synthetic oligonucleotide
gguguucugcaaccagauu

SEQ ID NO: 2348061 - RNA, 19 nt, Artificial Sequence
  Description of Artificial Sequence: Synthetic oligonucleotide
gguccaucgacggucccau

SEQ ID NO: 2348062 - RNA, 19 nt, Artificial Sequence
  Description of Artificial Sequence: Synthetic oligonucleotide
guggggccucugaagaaau

SEQ ID NO: 2348063 - RNA, 19 nt, Artificial Sequence
  Description of Artificial Sequence: Synthetic oligonucleotide
ccaguucaauucguggugu

SEQ ID NO: 2348064 - RNA, 19 nt, Artificial Sequence
  Description of Artificial Sequence: Synthetic oligonucleotide
gaacuccguaugguuucuu

SEQ ID NO: 2348065 - RNA, 19 nt, Artificial Sequence
  Description of Artificial Sequence: Synthetic oligonucleotide
ccguucagugcggugaagu

SEQ ID NO: 2348066 - RNA, 19 nt, Artificial Sequence
  Description of Artificial Sequence: Synthetic oligonucleotide
cgucugaugcuaagugugu

SEQ ID NO: 2348067 - RNA, 19 nt, Artificial Sequence
  Description of Artificial Sequence: Synthetic oligonucleotide
cacugacuuuugguucccu

SEQ ID NO: 2348068 - RNA, 19 nt, Artificial Sequence
  Description of Artificial Sequence: Synthetic oligonucleotide
gcggugaagugcagaacau

SEQ ID NO: 2348069 - RNA, 19 nt, Artificial Sequence
  Description of Artificial Sequence: Synthetic oligonucleotide
cguggggccucugaagaaa

SEQ ID NO: 2348070 - RNA, 19 nt, Artificial Sequence
  Description of Artificial Sequence: Synthetic oligonucleotide
ccguggggccucugaagaa

SEQ ID NO: 2348071 - RNA, 19 nt, Artificial Sequence
  Description of Artificial Sequence: Synthetic oligonucleotide
cugucucugcaggucgcuu

SEQ ID NO: 2348072 - RNA, 19 nt, Artificial Sequence
  Description of Artificial Sequence: Synthetic oligonucleotide
cggggcacuuacuagucuu

SEQ ID NO: 2348073 - RNA, 19 nt, Artificial Sequence
  Description of Artificial Sequence: Synthetic oligonucleotide
ggacaccguggggccucug

SEQ ID NO: 2348074 - RNA, 19 nt, Artificial Sequence
  Description of Artificial Sequence: Synthetic oligonucleotide
gucggacauuggacaccgu

SEQ ID NO: 2348075 - RNA, 19 nt, Artificial Sequence
  Description of Artificial Sequence: Synthetic oligonucleotide
aauaaaacgucuuccaggc

SEQ ID NO: 2348076 - RNA, 19 nt, Artificial Sequence
  Description of Artificial Sequence: Synthetic oligonucleotide
aaauaaaacgucuuccagg

SEQ ID NO: 2348077 - RNA, 19 nt, Artificial Sequence
  Description of Artificial Sequence: Synthetic oligonucleotide
uaaaaguccccucaaaucg

SEQ ID NO: 2348078 - RNA, 19 nt, Artificial Sequence
  Description of Artificial Sequence: Synthetic oligonucleotide
agucauugauacuacaacc

SEQ ID NO: 2348079 - RNA, 19 nt, Artificial Sequence
  Description of Artificial Sequence: Synthetic oligonucleotide
aagaacuuccauucugucc

SEQ ID NO: 2348080 - RNA, 19 nt, Artificial Sequence
  Description of Artificial Sequence: Synthetic oligonucleotide
auaaaaguccccucaaauc

SEQ ID NO: 2348081 - RNA, 19 nt, Artificial Sequence
  Description of Artificial Sequence: Synthetic oligonucleotide
aauaaaaguccccucaaau

SEQ ID NO: 2348082 - RNA, 19 nt, Artificial Sequence
  Description of Artificial Sequence: Synthetic oligonucleotide
uuuacagaaauaaaacguc

SEQ ID NO: 2348083 - RNA, 19 nt, Artificial Sequence
  Description of Artificial Sequence: Synthetic oligonucleotide
uccccaaccaaaauaaaag

SEQ ID NO: 2348084 - RNA, 19 nt, Artificial Sequence
  Description of Artificial Sequence: Synthetic oligonucleotide
agaacuuccauucuguccu

SEQ ID NO: 2348085 - RNA, 19 nt, Artificial Sequence
  Description of Artificial Sequence: Synthetic oligonucleotide
uggauugcagggcugaagg

SEQ ID NO: 2348086 - RNA, 19 nt, Artificial Sequence
  Description of Artificial Sequence: Synthetic oligonucleotide
acagaaauaaaacgucuuc

SEQ ID NO: 2348087 - RNA, 19 nt, Artificial Sequence
  Description of Artificial Sequence: Synthetic oligonucleotide
uaaaacgucuuccaggccu

SEQ ID NO: 2348088 - RNA, 19 nt, Artificial Sequence
  Description of Artificial Sequence: Synthetic oligonucleotide
caagaauacauuaaaauaa

SEQ ID NO: 2348089 - RNA, 19 nt, Artificial Sequence
  Description of Artificial Sequence: Synthetic oligonucleotide
auuuacagaaauaaaacgu

SEQ ID NO: 2348090 - RNA, 19 nt, Artificial Sequence
  Description of Artificial Sequence: Synthetic oligonucleotide
uuuuccccaaccaaaauaa

SEQ ID NO: 2348091 - RNA, 19 nt, Artificial Sequence
  Description of Artificial Sequence: Synthetic oligonucleotide
uguaguaguacucgugacc

SEQ ID NO: 2348092 - RNA, 19 nt, Artificial Sequence
  Description of Artificial Sequence: Synthetic oligonucleotide
gaagauguaguaguacucg

SEQ ID NO: 2348093 - RNA, 19 nt, Artificial Sequence
  Description of Artificial Sequence: Synthetic oligonucleotide
acaaccuccacuguguagc

SEQ ID NO: 2348094 - RNA, 19 nt, Artificial Sequence
  Description of Artificial Sequence: Synthetic oligonucleotide
uuacagaaauaaaacgucu

SEQ ID NO: 2348095 - RNA, 19 nt, Artificial Sequence
  Description of Artificial Sequence: Synthetic oligonucleotide
augaguuuauugcaaagug

SEQ ID NO: 2348096 - RNA, 19 nt, Artificial Sequence
  Description of Artificial Sequence: Synthetic oligonucleotide
aaugaguuuauugcaaagu

SEQ ID NO: 2348097 - RNA, 19 nt, Artificial Sequence
  Description of Artificial Sequence: Synthetic oligonucleotide
aguacucgugaccaggacg

SEQ ID NO: 2348098 - RNA, 19 nt, Artificial Sequence
  Description of Artificial Sequence: Synthetic oligonucleotide
uuacuaggucacaugauca

SEQ ID NO: 2348099 - RNA, 19 nt, Artificial Sequence
  Description of Artificial Sequence: Synthetic oligonucleotide
ugauacuacaaccuccacu

SEQ ID NO: 2348100 - RNA, 19 nt, Artificial Sequence
  Description of Artificial Sequence: Synthetic oligonucleotide
cuaggucacaugaucaagg

SEQ ID NO: 2348101 - RNA, 19 nt, Artificial Sequence
  Description of Artificial Sequence: Synthetic oligonucleotide
aaaaguccccucaaaucgc

SEQ ID NO: 2348102 - RNA, 19 nt, Artificial Sequence
  Description of Artificial Sequence: Synthetic oligonucleotide
ugaguuuauugcaaagugu

SEQ ID NO: 2348103 - RNA, 19 nt, Artificial Sequence
  Description of Artificial Sequence: Synthetic oligonucleotide
ccaaccaaaauaaaagucc

SEQ ID NO: 2348104 - RNA, 19 nt, Artificial Sequence
  Description of Artificial Sequence: Synthetic oligonucleotide
uguguagccaccaccguca

SEQ ID NO: 2348105 - RNA, 19 nt, Artificial Sequence
  Description of Artificial Sequence: Synthetic oligonucleotide
caggacggaacucaaagcc

SEQ ID NO: 2348106 - RNA, 19 nt, Artificial Sequence
  Description of Artificial Sequence: Synthetic oligonucleotide
gaagaguuggaacucucug

SEQ ID NO: 2348107 - RNA, 19 nt, Artificial Sequence
  Description of Artificial Sequence: Synthetic oligonucleotide
acacaguacacauuugcug

SEQ ID NO: 2348108 - RNA, 19 nt, Artificial Sequence
  Description of Artificial Sequence: Synthetic oligonucleotide
accaggacggaacucaaag

SEQ ID NO: 2348109 - RNA, 19 nt, Artificial Sequence
  Description of Artificial Sequence: Synthetic oligonucleotide
uacuacaaccuccacugug

SEQ ID NO: 2348110 - RNA, 19 nt, Artificial Sequence
  Description of Artificial Sequence: Synthetic oligonucleotide
ugcaaaguguuguuuauau

SEQ ID NO: 2348111 - RNA, 19 nt, Artificial Sequence
  Description of Artificial Sequence: Synthetic oligonucleotide
uuugcugguuucuauuuac

SEQ ID NO: 2348112 - RNA, 19 nt, Artificial Sequence
  Description of Artificial Sequence: Synthetic oligonucleotide
aguggcuagaagaagaugu

SEQ ID NO: 2348113 - RNA, 19 nt, Artificial Sequence
  Description of Artificial Sequence: Synthetic oligonucleotide
uauugcaaaguguuguuua

SEQ ID NO: 2348114 - RNA, 19 nt, Artificial Sequence
  Description of Artificial Sequence: Synthetic oligonucleotide
aguagauguccagauaguc

SEQ ID NO: 2348115 - RNA, 19 nt, Artificial Sequence
  Description of Artificial Sequence: Synthetic oligonucleotide
  modified_base (6)..(6): a, c, u, g, unknown or other
ggaggnuccaacgacaggg

SEQ ID NO: 2348116 - RNA, 19 nt, Artificial Sequence
  Description of Artificial Sequence: Synthetic oligonucleotide
ucgccguucaccauguaca

SEQ ID NO: 2348117 - RNA, 19 nt, Artificial Sequence
  Description of Artificial Sequence: Synthetic oligonucleotide
ugaaaccugggguugcugc

SEQ ID NO: 2348118 - RNA, 19 nt, Artificial Sequence
  Description of Artificial Sequence: Synthetic oligonucleotide
cugguuucuauuuacagaa

SEQ ID NO: 2348119 - RNA, 19 nt, Artificial Sequence
  Description of Artificial Sequence: Synthetic oligonucleotide
cuagaagaagauguaguag

SEQ ID NO: 2348120 - RNA, 19 nt, Artificial Sequence
  Description of Artificial Sequence: Synthetic oligonucleotide
accaaaauaaaaguccccu

SEQ ID NO: 2348121 - RNA, 19 nt, Artificial Sequence
  Description of Artificial Sequence: Synthetic oligonucleotide
auaaaacgucuuccaggcc

SEQ ID NO: 2348122 - RNA, 19 nt, Artificial Sequence
  Description of Artificial Sequence: Synthetic oligonucleotide
aguaguacucgugaccagg

SEQ ID NO: 2348123 - RNA, 19 nt, Artificial Sequence
  Description of Artificial Sequence: Synthetic oligonucleotide
gaaaccugggguugcugcg

SEQ ID NO: 2348124 - RNA, 19 nt, Artificial Sequence
  Description of Artificial Sequence: Synthetic oligonucleotide
aaaguguuguuuauauccu

SEQ ID NO: 2348125 - RNA, 19 nt, Artificial Sequence
  Description of Artificial Sequence: Synthetic oligonucleotide
accuccacuguguagccac

SEQ ID NO: 2348126 - RNA, 19 nt, Artificial Sequence
  Description of Artificial Sequence: Synthetic oligonucleotide
uguccucaagaauacauua

SEQ ID NO: 2348127 - RNA, 19 nt, Artificial Sequence
  Description of Artificial Sequence: Synthetic oligonucleotide
ucagcguuggcgcgggccg

SEQ ID NO: 2348128 - RNA, 19 nt, Artificial Sequence
  Description of Artificial Sequence: Synthetic oligonucleotide
ugaagaguuggaacucucu

SEQ ID NO: 2348129 - RNA, 19 nt, Artificial Sequence
  Description of Artificial Sequence: Synthetic oligonucleotide
agggugcccaccugaaacc

SEQ ID NO: 2348130 - RNA, 19 nt, Artificial Sequence
  Description of Artificial Sequence: Synthetic oligonucleotide
uguccagauagucauugau

SEQ ID NO: 2348131 - RNA, 19 nt, Artificial Sequence
  Description of Artificial Sequence: Synthetic oligonucleotide
cuugaagccucgcugccgg

SEQ ID NO: 2348132 - RNA, 19 nt, Artificial Sequence
  Description of Artificial Sequence: Synthetic oligonucleotide
cauucccagcgcuugaagc

SEQ ID NO: 2348133 - RNA, 19 nt, Artificial Sequence
  Description of Artificial Sequence: Synthetic oligonucleotide
guagcggucagcguuggcg

SEQ ID NO: 2348134 - RNA, 19 nt, Artificial Sequence
  Description of Artificial Sequence: Synthetic oligonucleotide
gauguaccguuccaugcgc

SEQ ID NO: 2348135 - RNA, 19 nt, Artificial Sequence
  Description of Artificial Sequence: Synthetic oligonucleotide
uuuauugcaaaguguuguu

SEQ ID NO: 2348136 - RNA, 19 nt, Artificial Sequence
  Description of Artificial Sequence: Synthetic oligonucleotide
ugcgguuccaguagacugc

SEQ ID NO: 2348137 - RNA, 19 nt, Artificial Sequence
  Description of Artificial Sequence: Synthetic oligonucleotide
aguccccucaaaucgcagg

SEQ ID NO: 2348138 - RNA, 19 nt, Artificial Sequence
  Description of Artificial Sequence: Synthetic oligonucleotide
auugauacuacaaccucca

SEQ ID NO: 2348139 - RNA, 19 nt, Artificial Sequence
  Description of Artificial Sequence: Synthetic oligonucleotide
aguccaccccucuuuuccc

SEQ ID NO: 2348140 - RNA, 19 nt, Artificial Sequence
  Description of Artificial Sequence: Synthetic oligonucleotide
gauagucauugauacuaca

SEQ ID NO: 2348141 - RNA, 19 nt, Artificial Sequence
  Description of Artificial Sequence: Synthetic oligonucleotide
aaaaguccaccccucuuuu

SEQ ID NO: 2348142 - RNA, 19 nt, Artificial Sequence
  Description of Artificial Sequence: Synthetic oligonucleotide
gacugcguagcggucagcg

SEQ ID NO: 2348143 - RNA, 19 nt, Artificial Sequence
  Description of Artificial Sequence: Synthetic oligonucleotide
aggacggaacucaaagccc

SEQ ID NO: 2348144 - RNA, 19 nt, Artificial Sequence
  Description of Artificial Sequence: Synthetic oligonucleotide
guaguaguacucgugacca

SEQ ID NO: 2348145 - RNA, 19 nt, Artificial Sequence
  Description of Artificial Sequence: Synthetic oligonucleotide
caaaucgcaggucugaaaa

SEQ ID NO: 2348146 - RNA, 19 nt, Artificial Sequence
  Description of Artificial Sequence: Synthetic oligonucleotide
ggauguaccguuccaugcg

SEQ ID NO: 2348147 - RNA, 19 nt, Artificial Sequence
  Description of Artificial Sequence: Synthetic oligonucleotide
gaagccucgcugccggugg

SEQ ID NO: 2348148 - RNA, 19 nt, Artificial Sequence
  Description of Artificial Sequence: Synthetic oligonucleotide
  modified_base (2)..(2): a, c, u, g, unknown or other
gnuccaacgacagggaaaa

SEQ ID NO: 2348149 - RNA, 19 nt, Artificial Sequence
  Description of Artificial Sequence: Synthetic oligonucleotide
uguacaggauguaccguuc

SEQ ID NO: 2348150 - RNA, 19 nt, Artificial Sequence
  Description of Artificial Sequence: Synthetic oligonucleotide
aaaccugggguugcugcgg

SEQ ID NO: 2348151 - RNA, 19 nt, Artificial Sequence
  Description of Artificial Sequence: Synthetic oligonucleotide
aacucucugagaacuugag

SEQ ID NO: 2348152 - RNA, 19 nt, Artificial Sequence
  Description of Artificial Sequence: Synthetic oligonucleotide
uacaaccuccacuguguag

SEQ ID NO: 2348153 - RNA, 19 nt, Artificial Sequence
  Description of Artificial Sequence: Synthetic oligonucleotide
agcagcagcagcagcagcg

SEQ ID NO: 2348154 - RNA, 19 nt, Artificial Sequence
  Description of Artificial Sequence: Synthetic oligonucleotide
gaagaacuuccauucuguc

SEQ ID NO: 2348155 - RNA, 19 nt, Artificial Sequence
  Description of Artificial Sequence: Synthetic oligonucleotide
auagucauugauacuacaa

SEQ ID NO: 2348156 - RNA, 19 nt, Artificial Sequence
  Description of Artificial Sequence: Synthetic oligonucleotide
cugcgguuccaguagacug

SEQ ID NO: 2348157 - RNA, 19 nt, Artificial Sequence
  Description of Artificial Sequence: Synthetic oligonucleotide
acuaggucacaugaucaag

SEQ ID NO: 2348158 - RNA, 19 nt, Artificial Sequence
  Description of Artificial Sequence: Synthetic oligonucleotide
uacuaggucacaugaucaa

SEQ ID NO: 2348159 - RNA, 19 nt, Artificial Sequence
  Description of Artificial Sequence: Synthetic oligonucleotide
aaaacacaguacacauuug

SEQ ID NO: 2348160 - RNA, 19 nt, Artificial Sequence
  Description of Artificial Sequence: Synthetic oligonucleotide
guuuauugcaaaguguugu

SEQ ID NO: 2348161 - RNA, 19 nt, Artificial Sequence
  Description of Artificial Sequence: Synthetic oligonucleotide
cagauagucauugauacua

SEQ ID NO: 2348162 - RNA, 19 nt, Artificial Sequence
  Description of Artificial Sequence: Synthetic oligonucleotide
uaccguuccaugcgcucgg

SEQ ID NO: 2348163 - RNA, 19 nt, Artificial Sequence
  Description of Artificial Sequence: Synthetic oligonucleotide
auguacaggauguaccguu

SEQ ID NO: 2348164 - RNA, 19 nt, Artificial Sequence
  Description of Artificial Sequence: Synthetic oligonucleotide
acucaaagcccaggaaagg

SEQ ID NO: 2348165 - RNA, 19 nt, Artificial Sequence
  Description of Artificial Sequence: Synthetic oligonucleotide
cagggugcccaccugaaac

SEQ ID NO: 2348166 - RNA, 19 nt, Artificial Sequence
  Description of Artificial Sequence: Synthetic oligonucleotide
guuccaugcgcucggccgg

SEQ ID NO: 2348167 - RNA, 19 nt, Artificial Sequence
  Description of Artificial Sequence: Synthetic oligonucleotide
acuacaaccuccacugugu

SEQ ID NO: 2348168 - RNA, 19 nt, Artificial Sequence
  Description of Artificial Sequence: Synthetic oligonucleotide
aguuuauugcaaaguguug

SEQ ID NO: 2348169 - RNA, 19 nt, Artificial Sequence
  Description of Artificial Sequence: Synthetic oligonucleotide
uagacugcguagcggucag

SEQ ID NO: 2348170 - RNA, 19 nt, Artificial Sequence
  Description of Artificial Sequence: Synthetic oligonucleotide
guuggcgcgggccggaucc

SEQ ID NO: 2348171 - RNA, 19 nt, Artificial Sequence
  Description of Artificial Sequence: Synthetic oligonucleotide
ucaaaucgcaggucugaaa

SEQ ID NO: 2348172 - RNA, 19 nt, Artificial Sequence
  Description of Artificial Sequence: Synthetic oligonucleotide
guagauguccagauaguca

SEQ ID NO: 2348173 - RNA, 19 nt, Artificial Sequence
  Description of Artificial Sequence: Synthetic oligonucleotide
acauuugcugguuucuauu

SEQ ID NO: 2348174 - RNA, 19 nt, Artificial Sequence
  Description of Artificial Sequence: Synthetic oligonucleotide
ugcguagcggucagcguug

SEQ ID NO: 2348175 - RNA, 19 nt, Artificial Sequence
  Description of Artificial Sequence: Synthetic oligonucleotide
ucuuuuccccaaccaaaau

SEQ ID NO: 2348176 - RNA, 19 nt, Artificial Sequence
  Description of Artificial Sequence: Synthetic oligonucleotide
uagcggucagcguuggcgc

SEQ ID NO: 2348177 - RNA, 19 nt, Artificial Sequence
  Description of Artificial Sequence: Synthetic oligonucleotide
acaguacacauuugcuggu

SEQ ID NO: 2348178 - RNA, 19 nt, Artificial Sequence
  Description of Artificial Sequence: Synthetic oligonucleotide
guacaggauguaccguucc

SEQ ID NO: 2348179 - RNA, 19 nt, Artificial Sequence
  Description of Artificial Sequence: Synthetic oligonucleotide
uuagagccgguugugccug

SEQ ID NO: 2348180 - RNA, 19 nt, Artificial Sequence
  Description of Artificial Sequence: Synthetic oligonucleotide
aguguuguuuauauccuaa

SEQ ID NO: 2348181 - RNA, 19 nt, Artificial Sequence
  Description of Artificial Sequence: Synthetic oligonucleotide
uuauugcaaaguguuguuu

SEQ ID NO: 2348182 - RNA, 19 nt, Artificial Sequence
  Description of Artificial Sequence: Synthetic oligonucleotide
gaguuuauugcaaaguguu

SEQ ID NO: 2348183 - RNA, 19 nt, Artificial Sequence
  Description of Artificial Sequence: Synthetic oligonucleotide
agcggagccccguagugug

SEQ ID NO: 2348184 - RNA, 19 nt, Artificial Sequence
  Description of Artificial Sequence: Synthetic oligonucleotide
uugauacuacaaccuccac

SEQ ID NO: 2348185 - RNA, 19 nt, Artificial Sequence
  Description of Artificial Sequence: Synthetic oligonucleotide
auuugcugguuucuauuua

SEQ ID NO: 2348186 - RNA, 19 nt, Artificial Sequence
  Description of Artificial Sequence: Synthetic oligonucleotide
cucgccguucaccauguac

SEQ ID NO: 2348187 - RNA, 19 nt, Artificial Sequence
  Description of Artificial Sequence: Synthetic oligonucleotide
uaguaguacucgugaccag

SEQ ID NO: 2348188 - RNA, 19 nt, Artificial Sequence
  Description of Artificial Sequence: Synthetic oligonucleotide
guaccguuccaugcgcucg

SEQ ID NO: 2348189 - RNA, 19 nt, Artificial Sequence
  Description of Artificial Sequence: Synthetic oligonucleotide
ugggcaguagauguccaga

SEQ ID NO: 2348190 - RNA, 19 nt, Artificial Sequence
  Description of Artificial Sequence: Synthetic oligonucleotide
aggccuuagagccgguugu

SEQ ID NO: 2348191 - RNA, 19 nt, Artificial Sequence
  Description of Artificial Sequence: Synthetic oligonucleotide
uguaccguuccaugcgcuc

SEQ ID NO: 2348192 - RNA, 19 nt, Artificial Sequence
  Description of Artificial Sequence: Synthetic oligonucleotide
gucauugauacuacaaccu

SEQ ID NO: 2348193 - RNA, 19 nt, Artificial Sequence
  Description of Artificial Sequence: Synthetic oligonucleotide
ucguugcgcgcccgcagcg

SEQ ID NO: 2348194 - RNA, 19 nt, Artificial Sequence
  Description of Artificial Sequence: Synthetic oligonucleotide
aacgucuuccaggccuuag

SEQ ID NO: 2348195 - RNA, 19 nt, Artificial Sequence
  Description of Artificial Sequence: Synthetic oligonucleotide
auggccccggugcugccgc

SEQ ID NO: 2348196 - RNA, 19 nt, Artificial Sequence
  Description of Artificial Sequence: Synthetic oligonucleotide
uaguacucgugaccaggac

SEQ ID NO: 2348197 - RNA, 19 nt, Artificial Sequence
  Description of Artificial Sequence: Synthetic oligonucleotide
cuguguagccaccaccguc

SEQ ID NO: 2348198 - RNA, 19 nt, Artificial Sequence
  Description of Artificial Sequence: Synthetic oligonucleotide
aggccgguugcauucccag

SEQ ID NO: 2348199 - RNA, 19 nt, Artificial Sequence
  Description of Artificial Sequence: Synthetic oligonucleotide
gugcccaccugaaaccugg

SEQ ID NO: 2348200 - RNA, 19 nt, Artificial Sequence
  Description of Artificial Sequence: Synthetic oligonucleotide
gcuagaagaagauguagua

SEQ ID NO: 2348201 - RNA, 19 nt, Artificial Sequence
  Description of Artificial Sequence: Synthetic oligonucleotide
agugugggcaguagauguc

SEQ ID NO: 2348202 - RNA, 19 nt, Artificial Sequence
  Description of Artificial Sequence: Synthetic oligonucleotide
gaacucucugagaacuuga

SEQ ID NO: 2348203 - RNA, 19 nt, Artificial Sequence
  Description of Artificial Sequence: Synthetic oligonucleotide
ggauugcagggcugaaggg

SEQ ID NO: 2348204 - RNA, 19 nt, Artificial Sequence
  Description of Artificial Sequence: Synthetic oligonucleotide
caggccuuagagccgguug

SEQ ID NO: 2348205 - RNA, 19 nt, Artificial Sequence
  Description of Artificial Sequence: Synthetic oligonucleotide
  modified_base (4)..(4): a, c, u, g, unknown or other
aggnuccaacgacagggaa

SEQ ID NO: 2348206 - RNA, 19 nt, Artificial Sequence
  Description of Artificial Sequence: Synthetic oligonucleotide
guguuguuuauauccuaaa

SEQ ID NO: 2348207 - RNA, 19 nt, Artificial Sequence
  Description of Artificial Sequence: Synthetic oligonucleotide
aaccugggguugcugcggu

SEQ ID NO: 2348208 - RNA, 19 nt, Artificial Sequence
  Description of Artificial Sequence: Synthetic oligonucleotide
gagggcuugacaguggcua

SEQ ID NO: 2348209 - RNA, 19 nt, Artificial Sequence
  Description of Artificial Sequence: Synthetic oligonucleotide
ggcgccauggccccggugc

SEQ ID NO: 2348210 - RNA, 19 nt, Artificial Sequence
  Description of Artificial Sequence: Synthetic oligonucleotide
aaaacgucuuccaggccuu

SEQ ID NO: 2348211 - RNA, 19 nt, Artificial Sequence
  Description of Artificial Sequence: Synthetic oligonucleotide
auacuacaaccuccacugu

SEQ ID NO: 2348212 - RNA, 19 nt, Artificial Sequence
  Description of Artificial Sequence: Synthetic oligonucleotide
acuguguagccaccaccgu

SEQ ID NO: 2348213 - RNA, 19 nt, Artificial Sequence
  Description of Artificial Sequence: Synthetic oligonucleotide
uugcugcgguuccaguaga

SEQ ID NO: 2348214 - RNA, 19 nt, Artificial Sequence
  Description of Artificial Sequence: Synthetic oligonucleotide
aguagacugcguagcgguc

SEQ ID NO: 2348215 - RNA, 19 nt, Artificial Sequence
  Description of Artificial Sequence: Synthetic oligonucleotide
auccucguugcgcgcccgc

SEQ ID NO: 2348216 - RNA, 19 nt, Artificial Sequence
  Description of Artificial Sequence: Synthetic oligonucleotide
  modified_base (7)..(7): a, c, u, g, unknown or other
gggaggnuccaacgacagg

SEQ ID NO: 2348217 - RNA, 19 nt, Artificial Sequence
  Description of Artificial Sequence: Synthetic oligonucleotide
uugcaaaguguuguuuaua

SEQ ID NO: 2348218 - RNA, 19 nt, Artificial Sequence
  Description of Artificial Sequence: Synthetic oligonucleotide
ggugcugccgccgcgcucg

SEQ ID NO: 2348219 - RNA, 19 nt, Artificial Sequence
  Description of Artificial Sequence: Synthetic oligonucleotide
agccccguagugugggcag

SEQ ID NO: 2348220 - RNA, 19 nt, Artificial Sequence
  Description of Artificial Sequence: Synthetic oligonucleotide
gccggauccucguugcgcg

SEQ ID NO: 2348221 - RNA, 19 nt, Artificial Sequence
  Description of Artificial Sequence: Synthetic oligonucleotide
ugcccaccugaaaccuggg

SEQ ID NO: 2348222 - RNA, 19 nt, Artificial Sequence
  Description of Artificial Sequence: Synthetic oligonucleotide
acaggauguaccguuccau

SEQ ID NO: 2348223 - RNA, 19 nt, Artificial Sequence
  Description of Artificial Sequence: Synthetic oligonucleotide
uucccagcgcuugaagccu

SEQ ID NO: 2348224 - RNA, 19 nt, Artificial Sequence
  Description of Artificial Sequence: Synthetic oligonucleotide
aggaugcguggcccucgcc

SEQ ID NO: 2348225 - RNA, 19 nt, Artificial Sequence
  Description of Artificial Sequence: Synthetic oligonucleotide
guagacugcguagcgguca

SEQ ID NO: 2348226 - RNA, 19 nt, Artificial Sequence
  Description of Artificial Sequence: Synthetic oligonucleotide
cugcaggccgguugcauuc

SEQ ID NO: 2348227 - RNA, 19 nt, Artificial Sequence
  Description of Artificial Sequence: Synthetic oligonucleotide
ugagaacuugaggggcccc

SEQ ID NO: 2348228 - RNA, 19 nt, Artificial Sequence
  Description of Artificial Sequence: Synthetic oligonucleotide
cucguugcgcgcccgcagc

SEQ ID NO: 2348229 - RNA, 19 nt, Artificial Sequence
  Description of Artificial Sequence: Synthetic oligonucleotide
ggggugaagaguuggaacu

SEQ ID NO: 2348230 - RNA, 19 nt, Artificial Sequence
  Description of Artificial Sequence: Synthetic oligonucleotide
gacggaacucaaagcccag

SEQ ID NO: 2348231 - RNA, 19 nt, Artificial Sequence
  Description of Artificial Sequence: Synthetic oligonucleotide
cguuccaugcgcucggccg

SEQ ID NO: 2348232 - RNA, 19 nt, Artificial Sequence
  Description of Artificial Sequence: Synthetic oligonucleotide
guaguacucgugaccagga

SEQ ID NO: 2348233 - RNA, 19 nt, Artificial Sequence
  Description of Artificial Sequence: Synthetic oligonucleotide
ccaggacggaacucaaagc

SEQ ID NO: 2348234 - RNA, 19 nt, Artificial Sequence
  Description of Artificial Sequence: Synthetic oligonucleotide
gcaaaguguuguuuauauc

SEQ ID NO: 2348235 - RNA, 19 nt, Artificial Sequence
  Description of Artificial Sequence: Synthetic oligonucleotide
  modified_base (5)..(5): a, c, u, g, unknown or other
gaggnuccaacgacaggga

SEQ ID NO: 2348236 - RNA, 19 nt, Artificial Sequence
  Description of Artificial Sequence: Synthetic oligonucleotide
caguagacugcguagcggu

SEQ ID NO: 2348237 - RNA, 19 nt, Artificial Sequence
  Description of Artificial Sequence: Synthetic oligonucleotide
guccaccccucuuuucccc

SEQ ID NO: 2348238 - RNA, 19 nt, Artificial Sequence
  Description of Artificial Sequence: Synthetic oligonucleotide
cuuagagccgguugugccu

SEQ ID NO: 2348239 - RNA, 19 nt, Artificial Sequence
  Description of Artificial Sequence: Synthetic oligonucleotide
guugcgcgcccgcagcggc

SEQ ID NO: 2348240 - RNA, 19 nt, Artificial Sequence
  Description of Artificial Sequence: Synthetic oligonucleotide
gucagcguuggcgcgggcc

SEQ ID NO: 2348241 - RNA, 19 nt, Artificial Sequence
  Description of Artificial Sequence: Synthetic oligonucleotide
agcagcgggcgcugcgcgg

SEQ ID NO: 2348242 - RNA, 19 nt, Artificial Sequence
  Description of Artificial Sequence: Synthetic oligonucleotide
accgucacccagggugccc

SEQ ID NO: 2348243 - RNA, 19 nt, Artificial Sequence
  Description of Artificial Sequence: Synthetic oligonucleotide
caguggcuagaagaagaug

SEQ ID NO: 2348244 - RNA, 19 nt, Artificial Sequence
  Description of Artificial Sequence: Synthetic oligonucleotide
gcgcuugaagccucgcugc

SEQ ID NO: 2348245 - RNA, 19 nt, Artificial Sequence
  Description of Artificial Sequence: Synthetic oligonucleotide
ggaacucaaagcccaggaa

SEQ ID NO: 2348246 - RNA, 19 nt, Artificial Sequence
  Description of Artificial Sequence: Synthetic oligonucleotide
gugaagaguuggaacucuc

SEQ ID NO: 2348247 - RNA, 19 nt, Artificial Sequence
  Description of Artificial Sequence: Synthetic oligonucleotide
ggacggaacucaaagccca

SEQ ID NO: 2348248 - RNA, 19 nt, Artificial Sequence
  Description of Artificial Sequence: Synthetic oligonucleotide
gauccucguugcgcgcccg

SEQ ID NO: 2348249 - RNA, 19 nt, Artificial Sequence
  Description of Artificial Sequence: Synthetic oligonucleotide
  modified_base (8)..(8): a, c, u, g, unknown or other
ggggaggnuccaacgacag

SEQ ID NO: 2348250 - RNA, 19 nt, Artificial Sequence
  Description of Artificial Sequence: Synthetic oligonucleotide
gaugcguggcccucgccgu

SEQ ID NO: 2348251 - RNA, 19 nt, Artificial Sequence
  Description of Artificial Sequence: Synthetic oligonucleotide
cauuacuaggucacaugau

SEQ ID NO: 2348252 - RNA, 19 nt, Artificial Sequence
  Description of Artificial Sequence: Synthetic oligonucleotide
ggcgcugcaggccgguugc

SEQ ID NO: 2348253 - RNA, 19 nt, Artificial Sequence
  Description of Artificial Sequence: Synthetic oligonucleotide
accguuccaugcgcucggc

SEQ ID NO: 2348254 - RNA, 19 nt, Artificial Sequence
  Description of Artificial Sequence: Synthetic oligonucleotide
  modified_base (3)..(3): a, c, u, g, unknown or other
ggnuccaacgacagggaaa

SEQ ID NO: 2348255 - RNA, 19 nt, Artificial Sequence
  Description of Artificial Sequence: Synthetic oligonucleotide
ugcaggccgguugcauucc

SEQ ID NO: 2348256 - RNA, 19 nt, Artificial Sequence
  Description of Artificial Sequence: Synthetic oligonucleotide
cagcagcagcagcagcagc

SEQ ID NO: 2348257 - RNA, 19 nt, Artificial Sequence
  Description of Artificial Sequence: Synthetic oligonucleotide
ggcagcagcagcagcagca

SEQ ID NO: 2348258 - RNA, 19 nt, Artificial Sequence
  Description of Artificial Sequence: Synthetic oligonucleotide
ccucuuuuccccaaccaaa

SEQ ID NO: 2348259 - RNA, 19 nt, Artificial Sequence
  Description of Artificial Sequence: Synthetic oligonucleotide
ggcuagaagaagauguagu

SEQ ID NO: 2348260 - RNA, 19 nt, Artificial Sequence
  Description of Artificial Sequence: Synthetic oligonucleotide
agacugcguagcggucagc

SEQ ID NO: 2348261 - RNA, 19 nt, Artificial Sequence
  Description of Artificial Sequence: Synthetic oligonucleotide
cugaaaccugggguugcug

SEQ ID NO: 2348262 - RNA, 19 nt, Artificial Sequence
  Description of Artificial Sequence: Synthetic oligonucleotide
caggaugcguggcccucgc

SEQ ID NO: 2348263 - RNA, 19 nt, Artificial Sequence
  Description of Artificial Sequence: Synthetic oligonucleotide
cugcgcgggcgccauggcc

SEQ ID NO: 2348264 - RNA, 19 nt, Artificial Sequence
  Description of Artificial Sequence: Synthetic oligonucleotide
gcagcagcagcagcagcgg

SEQ ID NO: 2348265 - RNA, 19 nt, Artificial Sequence
  Description of Artificial Sequence: Synthetic oligonucleotide
uugugccugguggcggggc

SEQ ID NO: 2348266 - RNA, 19 nt, Artificial Sequence
  Description of Artificial Sequence: Synthetic oligonucleotide
ucuccggccgccgccuggc

SEQ ID NO: 2348267 - RNA, 19 nt, Artificial Sequence
  Description of Artificial Sequence: Synthetic oligonucleotide
ucgcugccgguggucacag

SEQ ID NO: 2348268 - RNA, 19 nt, Artificial Sequence
  Description of Artificial Sequence: Synthetic oligonucleotide
cgucuuccaggccuuagag

SEQ ID NO: 2348269 - RNA, 19 nt, Artificial Sequence
  Description of Artificial Sequence: Synthetic oligonucleotide
guggcccucgccguucacc

SEQ ID NO: 2348270 - RNA, 19 nt, Artificial Sequence
  Description of Artificial Sequence: Synthetic oligonucleotide
acucgugaccaggacggaa

SEQ ID NO: 2348271 - RNA, 19 nt, Artificial Sequence
  Description of Artificial Sequence: Synthetic oligonucleotide
gcgguuccaguagacugcg

SEQ ID NO: 2348272 - RNA, 19 nt, Artificial Sequence
  Description of Artificial Sequence: Synthetic oligonucleotide
ucccagcgcuugaagccuc

SEQ ID NO: 2348273 - RNA, 19 nt, Artificial Sequence
  Description of Artificial Sequence: Synthetic oligonucleotide
gcccaccugaaaccugggg

SEQ ID NO: 2348274 - RNA, 19 nt, Artificial Sequence
  Description of Artificial Sequence: Synthetic oligonucleotide
cacauuugcugguuucuau

SEQ ID NO: 2348275 - RNA, 19 nt, Artificial Sequence
  Description of Artificial Sequence: Synthetic oligonucleotide
uugaagccucgcugccggu

SEQ ID NO: 2348276 - RNA, 19 nt, Artificial Sequence
  Description of Artificial Sequence: Synthetic oligonucleotide
uccccucaaaucgcagguc

SEQ ID NO: 2348277 - RNA, 19 nt, Artificial Sequence
  Description of Artificial Sequence: Synthetic oligonucleotide
caguagauguccagauagu

SEQ ID NO: 2348278 - RNA, 19 nt, Artificial Sequence
  Description of Artificial Sequence: Synthetic oligonucleotide
auguaccguuccaugcgcu

SEQ ID NO: 2348279 - RNA, 19 nt, Artificial Sequence
  Description of Artificial Sequence: Synthetic oligonucleotide
gccgguugugccugguggc

SEQ ID NO: 2348280 - RNA, 19 nt, Artificial Sequence
  Description of Artificial Sequence: Synthetic oligonucleotide
ucgcucgcucuccggccgc

SEQ ID NO: 2348281 - RNA, 19 nt, Artificial Sequence
  Description of Artificial Sequence: Synthetic oligonucleotide
ccaccgucacccagggugc

SEQ ID NO: 2348282 - RNA, 19 nt, Artificial Sequence
  Description of Artificial Sequence: Synthetic oligonucleotide
uccucguugcgcgcccgca

SEQ ID NO: 2348283 - RNA, 19 nt, Artificial Sequence
  Description of Artificial Sequence: Synthetic oligonucleotide
cucaaaucgcaggucugaa

SEQ ID NO: 2348284 - RNA, 19 nt, Artificial Sequence
  Description of Artificial Sequence: Synthetic oligonucleotide
gcagcggagccccguagug

SEQ ID NO: 2348285 - RNA, 19 nt, Artificial Sequence
  Description of Artificial Sequence: Synthetic oligonucleotide
ugcgcgcccgcagcggcag

SEQ ID NO: 2348286 - RNA, 19 nt, Artificial Sequence
  Description of Artificial Sequence: Synthetic oligonucleotide
uugcgcgcccgcagcggca

SEQ ID NO: 2348287 - RNA, 19 nt, Artificial Sequence
  Description of Artificial Sequence: Synthetic oligonucleotide
guguagccaccaccgucac

SEQ ID NO: 2348288 - RNA, 19 nt, Artificial Sequence
  Description of Artificial Sequence: Synthetic oligonucleotide
gcagcagcagcagcagcag

SEQ ID NO: 2348289 - RNA, 19 nt, Artificial Sequence
  Description of Artificial Sequence: Synthetic oligonucleotide
gggugaagaguuggaacuc

SEQ ID NO: 2348290 - RNA, 19 nt, Artificial Sequence
  Description of Artificial Sequence: Synthetic oligonucleotide
cuacaaccuccacugugua

SEQ ID NO: 2348291 - RNA, 19 nt, Artificial Sequence
  Description of Artificial Sequence: Synthetic oligonucleotide
ggauccucguugcgcgccc

SEQ ID NO: 2348292 - RNA, 19 nt, Artificial Sequence
  Description of Artificial Sequence: Synthetic oligonucleotide
gagccccguagugugggca

SEQ ID NO: 2348293 - RNA, 19 nt, Artificial Sequence
  Description of Artificial Sequence: Synthetic oligonucleotide
uccaugcgcucggccgggg

SEQ ID NO: 2348294 - RNA, 19 nt, Artificial Sequence
  Description of Artificial Sequence: Synthetic oligonucleotide
aaacgucuuccaggccuua

SEQ ID NO: 2348295 - RNA, 19 nt, Artificial Sequence
  Description of Artificial Sequence: Synthetic oligonucleotide
gccguucaccauguacagg

SEQ ID NO: 2348296 - RNA, 19 nt, Artificial Sequence
  Description of Artificial Sequence: Synthetic oligonucleotide
gccuuagagccgguugugc

SEQ ID NO: 2348297 - RNA, 19 nt, Artificial Sequence
  Description of Artificial Sequence: Synthetic oligonucleotide
ggccggauccucguugcgc

SEQ ID NO: 2348298 - RNA, 19 nt, Artificial Sequence
  Description of Artificial Sequence: Synthetic oligonucleotide
gggguugcugcgguuccag

SEQ ID NO: 2348299 - RNA, 19 nt, Artificial Sequence
  Description of Artificial Sequence: Synthetic oligonucleotide
cugcguagcggucagcguu

SEQ ID NO: 2348300 - RNA, 19 nt, Artificial Sequence
  Description of Artificial Sequence: Synthetic oligonucleotide
agauguccagauagucauu

SEQ ID NO: 2348301 - RNA, 19 nt, Artificial Sequence
  Description of Artificial Sequence: Synthetic oligonucleotide
agccucgcugccggugguc

SEQ ID NO: 2348302 - RNA, 19 nt, Artificial Sequence
  Description of Artificial Sequence: Synthetic oligonucleotide
caggccgguugcauuccca

SEQ ID NO: 2348303 - RNA, 19 nt, Artificial Sequence
  Description of Artificial Sequence: Synthetic oligonucleotide
ccgguggucacaggaugcg

SEQ ID NO: 2348304 - RNA, 19 nt, Artificial Sequence
  Description of Artificial Sequence: Synthetic oligonucleotide
cauguacaggauguaccgu

SEQ ID NO: 2348305 - RNA, 19 nt, Artificial Sequence
  Description of Artificial Sequence: Synthetic oligonucleotide
gcagcgggcgcugcgcggg

SEQ ID NO: 2348306 - RNA, 19 nt, Artificial Sequence
  Description of Artificial Sequence: Synthetic oligonucleotide
gaccaggacggaacucaaa

SEQ ID NO: 2348307 - RNA, 19 nt, Artificial Sequence
  Description of Artificial Sequence: Synthetic oligonucleotide
ugcguggcccucgccguuc

SEQ ID NO: 2348308 - RNA, 19 nt, Artificial Sequence
  Description of Artificial Sequence: Synthetic oligonucleotide
gcgggccggauccucguug

SEQ ID NO: 2348309 - RNA, 19 nt, Artificial Sequence
  Description of Artificial Sequence: Synthetic oligonucleotide
cgccguucaccauguacag

SEQ ID NO: 2348310 - RNA, 19 nt, Artificial Sequence
  Description of Artificial Sequence: Synthetic oligonucleotide
ccgguugugccugguggcg

SEQ ID NO: 2348311 - RNA, 19 nt, Artificial Sequence
  Description of Artificial Sequence: Synthetic oligonucleotide
cagcguuggcgcgggccgg

SEQ ID NO: 2348312 - RNA, 19 nt, Artificial Sequence
  Description of Artificial Sequence: Synthetic oligonucleotide
cccagcgcuugaagccucg

SEQ ID NO: 2348313 - RNA, 19 nt, Artificial Sequence
  Description of Artificial Sequence: Synthetic oligonucleotide
cucgcugccgguggucaca

SEQ ID NO: 2348314 - RNA, 19 nt, Artificial Sequence
  Description of Artificial Sequence: Synthetic oligonucleotide
gggcaguagauguccagau

SEQ ID NO: 2348315 - RNA, 19 nt, Artificial Sequence
  Description of Artificial Sequence: Synthetic oligonucleotide
gggccggauccucguugcg

SEQ ID NO: 2348316 - RNA, 19 nt, Artificial Sequence
  Description of Artificial Sequence: Synthetic oligonucleotide
ccucguugcgcgcccgcag

SEQ ID NO: 2348317 - RNA, 19 nt, Artificial Sequence
  Description of Artificial Sequence: Synthetic oligonucleotide
ggagccccguagugugggc

SEQ ID NO: 2348318 - RNA, 19 nt, Artificial Sequence
  Description of Artificial Sequence: Synthetic oligonucleotide
ggcgcgggccggauccucg

SEQ ID NO: 2348319 - RNA, 19 nt, Artificial Sequence
  Description of Artificial Sequence: Synthetic oligonucleotide
gcaggccgguugcauuccc

SEQ ID NO: 2348320 - RNA, 19 nt, Artificial Sequence
  Description of Artificial Sequence: Synthetic oligonucleotide
augcguggcccucgccguu

SEQ ID NO: 2348321 - RNA, 19 nt, Artificial Sequence
  Description of Artificial Sequence: Synthetic oligonucleotide
gggaggagggcuugacagu

SEQ ID NO: 2348322 - RNA, 19 nt, Artificial Sequence
  Description of Artificial Sequence: Synthetic oligonucleotide
gggguggauugcagggcug

SEQ ID NO: 2348323 - RNA, 19 nt, Artificial Sequence
  Description of Artificial Sequence: Synthetic oligonucleotide
gggcuugacaguggcuaga

SEQ ID NO: 2348324 - RNA, 19 nt, Artificial Sequence
  Description of Artificial Sequence: Synthetic oligonucleotide
ccguagugugggcaguaga

SEQ ID NO: 2348325 - RNA, 19 nt, Artificial Sequence
  Description of Artificial Sequence: Synthetic oligonucleotide
cgggccggauccucguugc

SEQ ID NO: 2348326 - RNA, 19 nt, Artificial Sequence
  Description of Artificial Sequence: Synthetic oligonucleotide
gcguagcggucagcguugg

SEQ ID NO: 2348327 - RNA, 19 nt, Artificial Sequence
  Description of Artificial Sequence: Synthetic oligonucleotide
cccguagugugggcaguag

SEQ ID NO: 2348328 - RNA, 19 nt, Artificial Sequence
  Description of Artificial Sequence: Synthetic oligonucleotide
ccggauccucguugcgcgc

SEQ ID NO: 2348329 - RNA, 19 nt, Artificial Sequence
  Description of Artificial Sequence: Synthetic oligonucleotide
ggcggggcccggguugcgg

SEQ ID NO: 2348330 - RNA, 19 nt, Artificial Sequence
  Description of Artificial Sequence: Synthetic oligonucleotide
gcggagccccguagugugg

SEQ ID NO: 2348331 - RNA, 19 nt, Artificial Sequence
  Description of Artificial Sequence: Synthetic oligonucleotide
cagcgggcgcugcgcgggc

SEQ ID NO: 2348332 - RNA, 19 nt, Artificial Sequence
  Description of Artificial Sequence: Synthetic oligonucleotide
cggagccccguaguguggg

SEQ ID NO: 2348333 - RNA, 19 nt, Artificial Sequence
  Description of Artificial Sequence: Synthetic oligonucleotide
cgguugugccugguggcgg

SEQ ID NO: 2348334 - RNA, 19 nt, Artificial Sequence
  Description of Artificial Sequence: Synthetic oligonucleotide
cggauccucguugcgcgcc

SEQ ID NO: 2348335 - RNA, 19 nt, Artificial Sequence
  Description of Artificial Sequence: Synthetic oligonucleotide
ggccccggugcugccgccg

SEQ ID NO: 2348336 - RNA, 19 nt, Artificial Sequence
  Description of Artificial Sequence: Synthetic oligonucleotide
gcugcaggccgguugcauu

SEQ ID NO: 2348337 - RNA, 19 nt, Artificial Sequence
  Description of Artificial Sequence: Synthetic oligonucleotide
cagcggagccccguagugu

SEQ ID NO: 2348338 - RNA, 19 nt, Artificial Sequence
  Description of Artificial Sequence: Synthetic oligonucleotide
gcgggcgcugcgcgggcgc

SEQ ID NO: 2348339 - RNA, 19 nt, Artificial Sequence
  Description of Artificial Sequence: Synthetic oligonucleotide
gccccggugcugccgccgc

SEQ ID NO: 2348340 - RNA, 19 nt, Artificial Sequence
  Description of Artificial Sequence: Synthetic oligonucleotide
cccggugcugccgccgcgc

SEQ ID NO: 2348341 - RNA, 19 nt, Artificial Sequence
  Description of Artificial Sequence: Synthetic oligonucleotide
gcagggcugaagggcuuuc

SEQ ID NO: 2348342 - RNA, 19 nt, Artificial Sequence
  Description of Artificial Sequence: Synthetic oligonucleotide
cguugcgcgcccgcagcgg

SEQ ID NO: 2348343 - RNA, 19 nt, Artificial Sequence
  Description of Artificial Sequence: Synthetic oligonucleotide
cccagggugcccaccugaa

SEQ ID NO: 2348344 - RNA, 19 nt, Artificial Sequence
  Description of Artificial Sequence: Synthetic oligonucleotide
cguagcggucagcguuggc

SEQ ID NO: 2348345 - RNA, 19 nt, Artificial Sequence
  Description of Artificial Sequence: Synthetic oligonucleotide
cggcagcagcagcagcagc

SEQ ID NO: 2348346 - RNA, 19 nt, Artificial Sequence
  Description of Artificial Sequence: Synthetic oligonucleotide
cgccgucuccgccuccgcc

SEQ ID NO: 2348347 - RNA, 19 nt, Artificial Sequence
  Description of Artificial Sequence: Synthetic oligonucleotide
cggcgcugcaggccgguug

SEQ ID NO: 2348348 - RNA, 19 nt, Artificial Sequence
  Description of Artificial Sequence: Synthetic oligonucleotide
ucggcgcugcaggccgguu

SEQ ID NO: 2348349 - RNA, 19 nt, Artificial Sequence
  Description of Artificial Sequence: Synthetic oligonucleotide
cggucagcguuggcgcggg

SEQ ID NO: 2348350 - RNA, 19 nt, Artificial Sequence
  Description of Artificial Sequence: Synthetic oligonucleotide
gggcgccauggccccggug

SEQ ID NO: 2348351 - RNA, 19 nt, Artificial Sequence
  Description of Artificial Sequence: Synthetic oligonucleotide
gcucuccggccgccgccug

SEQ ID NO: 2348352 - RNA, 19 nt, Artificial Sequence
  Description of Artificial Sequence: Synthetic oligonucleotide
ccugaaaccugggguugcu

SEQ ID NO: 2348353 - RNA, 19 nt, Artificial Sequence
  Description of Artificial Sequence: Synthetic oligonucleotide
cccucgccguucaccaugu

SEQ ID NO: 2348354 - RNA, 19 nt, Artificial Sequence
  Description of Artificial Sequence: Synthetic oligonucleotide
ccgccgccuggccccgccg

SEQ ID NO: 2348355 - RNA, 19 nt, Artificial Sequence
  Description of Artificial Sequence: Synthetic oligonucleotide
cguuggcgcgggccggauc

SEQ ID NO: 2348356 - RNA, 19 nt, Artificial Sequence
  Description of Artificial Sequence: Synthetic oligonucleotide
cucggcgcugcaggccggu

SEQ ID NO: 2348357 - RNA, 19 nt, Artificial Sequence
  Description of Artificial Sequence: Synthetic oligonucleotide
caccaccgucacccagggu

SEQ ID NO: 2348358 - RNA, 19 nt, Artificial Sequence
  Description of Artificial Sequence: Synthetic oligonucleotide
gcccggguugcggggugga

SEQ ID NO: 2348359 - RNA, 19 nt, Artificial Sequence
  Description of Artificial Sequence: Synthetic oligonucleotide
gcgcgggccggauccucgu

SEQ ID NO: 2348360 - RNA, 19 nt, Artificial Sequence
  Description of Artificial Sequence: Synthetic oligonucleotide
cguggcccucgccguucac

SEQ ID NO: 2348361 - RNA, 19 nt, Artificial Sequence
  Description of Artificial Sequence: Synthetic oligonucleotide
ccccguagugugggcagua

SEQ ID NO: 2348362 - RNA, 19 nt, Artificial Sequence
  Description of Artificial Sequence: Synthetic oligonucleotide
gggcgcugcgcgggcgcca

SEQ ID NO: 2348363 - RNA, 19 nt, Artificial Sequence
  Description of Artificial Sequence: Synthetic oligonucleotide
gcgcugcgcgggcgccaug

SEQ ID NO: 2348364 - RNA, 19 nt, Artificial Sequence
  Description of Artificial Sequence: Synthetic oligonucleotide
gccccguagugugggcagu

SEQ ID NO: 2348365 - RNA, 19 nt, Artificial Sequence
  Description of Artificial Sequence: Synthetic oligonucleotide
ccggguugcgggguggauu

SEQ ID NO: 2348366 - RNA, 19 nt, Artificial Sequence
  Description of Artificial Sequence: Synthetic oligonucleotide
ccaggccuuagagccgguu

SEQ ID NO: 2348367 - RNA, 19 nt, Artificial Sequence
  Description of Artificial Sequence: Synthetic oligonucleotide
ccucgccguucaccaugua

SEQ ID NO: 2348368 - RNA, 19 nt, Artificial Sequence
  Description of Artificial Sequence: Synthetic oligonucleotide
ccggugcugccgccgcgcu

SEQ ID NO: 2348369 - RNA, 19 nt, Artificial Sequence
  Description of Artificial Sequence: Synthetic oligonucleotide
cgguuccaguagacugcgu

SEQ ID NO: 2348370 - RNA, 19 nt, Artificial Sequence
  Description of Artificial Sequence: Synthetic oligonucleotide
ccgccuggccccgccgucu

SEQ ID NO: 2348371 - RNA, 19 nt, Artificial Sequence
  Description of Artificial Sequence: Synthetic oligonucleotide
cgccgccuggccccgccgu

SEQ ID NO: 2348372 - RNA, 19 nt, Artificial Sequence
  Description of Artificial Sequence: Synthetic oligonucleotide
cccggguugcgggguggau

SEQ ID NO: 2348373 - RNA, 19 nt, Artificial Sequence
  Description of Artificial Sequence: Synthetic oligonucleotide
cgcgggccggauccucguu

SEQ ID NO: 2348374 - RNA, 19 nt, Artificial Sequence
  Description of Artificial Sequence: Synthetic oligonucleotide
cgggcgccauggccccggu

SEQ ID NO: 2348375 - RNA, 19 nt, Artificial Sequence
  Description of Artificial Sequence: Synthetic oligonucleotide
acaucuaacacacucagcc

SEQ ID NO: 2348376 - RNA, 19 nt, Artificial Sequence
  Description of Artificial Sequence: Synthetic oligonucleotide
gauuuaaagauccagcugc

SEQ ID NO: 2348377 - RNA, 19 nt, Artificial Sequence
  Description of Artificial Sequence: Synthetic oligonucleotide
aaguacaucuaacacacuc

SEQ ID NO: 2348378 - RNA, 19 nt, Artificial Sequence
  Description of Artificial Sequence: Synthetic oligonucleotide
gaaucgaugaaguaccucg

SEQ ID NO: 2348379 - RNA, 19 nt, Artificial Sequence
  Description of Artificial Sequence: Synthetic oligonucleotide
aauaucuagucuucguuuc

SEQ ID NO: 2348380 - RNA, 19 nt, Artificial Sequence
  Description of Artificial Sequence: Synthetic oligonucleotide
uuaaagauccagcugcccc

SEQ ID NO: 2348381 - RNA, 19 nt, Artificial Sequence
  Description of Artificial Sequence: Synthetic oligonucleotide
caaggcuuugccuacaugc

SEQ ID NO: 2348382 - RNA, 19 nt, Artificial Sequence
  Description of Artificial Sequence: Synthetic oligonucleotide
agguaaguacaucuaacac

SEQ ID NO: 2348383 - RNA, 19 nt, Artificial Sequence
  Description of Artificial Sequence: Synthetic oligonucleotide
ucaguggacacuucugugg

SEQ ID NO: 2348384 - RNA, 19 nt, Artificial Sequence
  Description of Artificial Sequence: Synthetic oligonucleotide
uaaagauccagcugccccg

SEQ ID NO: 2348385 - RNA, 19 nt, Artificial Sequence
  Description of Artificial Sequence: Synthetic oligonucleotide
ugaaccacuguccacgggc

SEQ ID NO: 2348386 - RNA, 19 nt, Artificial Sequence
  Description of Artificial Sequence: Synthetic oligonucleotide
ucuuguggucuuuggaucg

SEQ ID NO: 2348387 - RNA, 19 nt, Artificial Sequence
  Description of Artificial Sequence: Synthetic oligonucleotide
guaaguacaucuaacacac

SEQ ID NO: 2348388 - RNA, 19 nt, Artificial Sequence
  Description of Artificial Sequence: Synthetic oligonucleotide
aggucagggacuccuaugc

SEQ ID NO: 2348389 - RNA, 19 nt, Artificial Sequence
  Description of Artificial Sequence: Synthetic oligonucleotide
uaaggaaugugcccggugc

SEQ ID NO: 2348390 - RNA, 19 nt, Artificial Sequence
  Description of Artificial Sequence: Synthetic oligonucleotide
cucgcggugaaucucaucc

SEQ ID NO: 2348391 - RNA, 19 nt, Artificial Sequence
  Description of Artificial Sequence: Synthetic oligonucleotide
auuucgacgucugacuccc

SEQ ID NO: 2348392 - RNA, 19 nt, Artificial Sequence
  Description of Artificial Sequence: Synthetic oligonucleotide
aauggggaggagcugccuc

SEQ ID NO: 2348393 - RNA, 19 nt, Artificial Sequence
  Description of Artificial Sequence: Synthetic oligonucleotide
ugugggcacacucaggcgc

SEQ ID NO: 2348394 - RNA, 19 nt, Artificial Sequence
  Description of Artificial Sequence: Synthetic oligonucleotide
aaucgaugaaguaccucgc

SEQ ID NO: 2348395 - RNA, 19 nt, Artificial Sequence
  Description of Artificial Sequence: Synthetic oligonucleotide
uagacagcgaugccggccg

SEQ ID NO: 2348396 - RNA, 19 nt, Artificial Sequence
  Description of Artificial Sequence: Synthetic oligonucleotide
aaggaaugugcccggugcg

SEQ ID NO: 2348397 - RNA, 19 nt, Artificial Sequence
  Description of Artificial Sequence: Synthetic oligonucleotide
uggucuuuggaucggaagu

SEQ ID NO: 2348398 - RNA, 19 nt, Artificial Sequence
  Description of Artificial Sequence: Synthetic oligonucleotide
aaggcuuugccuacaugcc

SEQ ID NO: 2348399 - RNA, 19 nt, Artificial Sequence
  Description of Artificial Sequence: Synthetic oligonucleotide
ugaaguaccucgcgcaggc

SEQ ID NO: 2348400 - RNA, 19 nt, Artificial Sequence
  Description of Artificial Sequence: Synthetic oligonucleotide
agauuucgacgucugacuc

SEQ ID NO: 2348401 - RNA, 19 nt, Artificial Sequence
  Description of Artificial Sequence: Synthetic oligonucleotide
guacaucuaacacacucag

SEQ ID NO: 2348402 - RNA, 19 nt, Artificial Sequence
  Description of Artificial Sequence: Synthetic oligonucleotide
gugaaucucauccagaucu

SEQ ID NO: 2348403 - RNA, 19 nt, Artificial Sequence
  Description of Artificial Sequence: Synthetic oligonucleotide
uuugccuacaugccuggcc

SEQ ID NO: 2348404 - RNA, 19 nt, Artificial Sequence
  Description of Artificial Sequence: Synthetic oligonucleotide
uguggauguguccaucuca

SEQ ID NO: 2348405 - RNA, 19 nt, Artificial Sequence
  Description of Artificial Sequence: Synthetic oligonucleotide
uaugagauuucgacgucug

SEQ ID NO: 2348406 - RNA, 19 nt, Artificial Sequence
  Description of Artificial Sequence: Synthetic oligonucleotide
auuuaaagauccagcugcc

SEQ ID NO: 2348407 - RNA, 19 nt, Artificial Sequence
  Description of Artificial Sequence: Synthetic oligonucleotide
gguaaguacaucuaacaca

SEQ ID NO: 2348408 - RNA, 19 nt, Artificial Sequence
  Description of Artificial Sequence: Synthetic oligonucleotide
ucgaugaaguaccucgcgc

SEQ ID NO: 2348409 - RNA, 19 nt, Artificial Sequence
  Description of Artificial Sequence: Synthetic oligonucleotide
ugagauuucgacgucugac

SEQ ID NO: 2348410 - RNA, 19 nt, Artificial Sequence
  Description of Artificial Sequence: Synthetic oligonucleotide
acuccuaugcccuggucuc

SEQ ID NO: 2348411 - RNA, 19 nt, Artificial Sequence
  Description of Artificial Sequence: Synthetic oligonucleotide
uggcuguaggguucuaugg

SEQ ID NO: 2348412 - RNA, 19 nt, Artificial Sequence
  Description of Artificial Sequence: Synthetic oligonucleotide
aaagauccagcugccccgc

SEQ ID NO: 2348413 - RNA, 19 nt, Artificial Sequence
  Description of Artificial Sequence: Synthetic oligonucleotide
acagguaaguacaucuaac

SEQ ID NO: 2348414 - RNA, 19 nt, Artificial Sequence
  Description of Artificial Sequence: Synthetic oligonucleotide
uucgacgucugacucccgg

SEQ ID NO: 2348415 - RNA, 19 nt, Artificial Sequence
  Description of Artificial Sequence: Synthetic oligonucleotide
aucgaugaaguaccucgcg

SEQ ID NO: 2348416 - RNA, 19 nt, Artificial Sequence
  Description of Artificial Sequence: Synthetic oligonucleotide
gauuucgacgucugacucc

SEQ ID NO: 2348417 - RNA, 19 nt, Artificial Sequence
  Description of Artificial Sequence: Synthetic oligonucleotide
accagauuuaaagauccag

SEQ ID NO: 2348418 - RNA, 19 nt, Artificial Sequence
  Description of Artificial Sequence: Synthetic oligonucleotide
ugggaccagauuuaaagau

SEQ ID NO: 2348419 - RNA, 19 nt, Artificial Sequence
  Description of Artificial Sequence: Synthetic oligonucleotide
caucucagggaucucagug

SEQ ID NO: 2348420 - RNA, 19 nt, Artificial Sequence
  Description of Artificial Sequence: Synthetic oligonucleotide
cacugaaccacuguccacg

SEQ ID NO: 2348421 - RNA, 19 nt, Artificial Sequence
  Description of Artificial Sequence: Synthetic oligonucleotide
uagaugccuggacuugugg

SEQ ID NO: 2348422 - RNA, 19 nt, Artificial Sequence
  Description of Artificial Sequence: Synthetic oligonucleotide
uugccuacaugccuggccu

SEQ ID NO: 2348423 - RNA, 19 nt, Artificial Sequence
  Description of Artificial Sequence: Synthetic oligonucleotide
accuguuagaugccuggac

SEQ ID NO: 2348424 - RNA, 19 nt, Artificial Sequence
  Description of Artificial Sequence: Synthetic oligonucleotide
uuggcggaaucgaugaagu

SEQ ID NO: 2348425 - RNA, 19 nt, Artificial Sequence
  Description of Artificial Sequence: Synthetic oligonucleotide
ugaauccucaggccgcuca

SEQ ID NO: 2348426 - RNA, 19 nt, Artificial Sequence
  Description of Artificial Sequence: Synthetic oligonucleotide
uaacacacucagccuagcc

SEQ ID NO: 2348427 - RNA, 19 nt, Artificial Sequence
  Description of Artificial Sequence: Synthetic oligonucleotide
ugaaucucauccagaucug

SEQ ID NO: 2348428 - RNA, 19 nt, Artificial Sequence
  Description of Artificial Sequence: Synthetic oligonucleotide
acagcgagaccagcgaccc

SEQ ID NO: 2348429 - RNA, 19 nt, Artificial Sequence
  Description of Artificial Sequence: Synthetic oligonucleotide
gacuugugggcacugccag

SEQ ID NO: 2348430 - RNA, 19 nt, Artificial Sequence
  Description of Artificial Sequence: Synthetic oligonucleotide
uacaucuaacacacucagc

SEQ ID NO: 2348431 - RNA, 19 nt, Artificial Sequence
  Description of Artificial Sequence: Synthetic oligonucleotide
acuugggcgagccagcagu

SEQ ID NO: 2348432 - RNA, 19 nt, Artificial Sequence
  Description of Artificial Sequence: Synthetic oligonucleotide
uaccccaggcaauaucuag

SEQ ID NO: 2348433 - RNA, 19 nt, Artificial Sequence
  Description of Artificial Sequence: Synthetic oligonucleotide
gaaucucauccagaucugg

SEQ ID NO: 2348434 - RNA, 19 nt, Artificial Sequence
  Description of Artificial Sequence: Synthetic oligonucleotide
aaugugcccggugcgcgcc

SEQ ID NO: 2348435 - RNA, 19 nt, Artificial Sequence
  Description of Artificial Sequence: Synthetic oligonucleotide
auccugugugcacauagug

SEQ ID NO: 2348436 - RNA, 19 nt, Artificial Sequence
  Description of Artificial Sequence: Synthetic oligonucleotide
aucuaacacacucagccua

SEQ ID NO: 2348437 - RNA, 19 nt, Artificial Sequence
  Description of Artificial Sequence: Synthetic oligonucleotide
aguggacacuucugugggc

SEQ ID NO: 2348438 - RNA, 19 nt, Artificial Sequence
  Description of Artificial Sequence: Synthetic oligonucleotide
acuguccacgggcaguuuc

SEQ ID NO: 2348439 - RNA, 19 nt, Artificial Sequence
  Description of Artificial Sequence: Synthetic oligonucleotide
cugcccugaauccucaggc

SEQ ID NO: 2348440 - RNA, 19 nt, Artificial Sequence
  Description of Artificial Sequence: Synthetic oligonucleotide
gucagggacuccuaugccc

SEQ ID NO: 2348441 - RNA, 19 nt, Artificial Sequence
  Description of Artificial Sequence: Synthetic oligonucleotide
ccaguaugagauuucgacg

SEQ ID NO: 2348442 - RNA, 19 nt, Artificial Sequence
  Description of Artificial Sequence: Synthetic oligonucleotide
cagguaaguacaucuaaca

SEQ ID NO: 2348443 - RNA, 19 nt, Artificial Sequence
  Description of Artificial Sequence: Synthetic oligonucleotide
cauacgagcccaugccugc

SEQ ID NO: 2348444 - RNA, 19 nt, Artificial Sequence
  Description of Artificial Sequence: Synthetic oligonucleotide
uaucuagucuucguuucug

SEQ ID NO: 2348445 - RNA, 19 nt, Artificial Sequence
  Description of Artificial Sequence: Synthetic oligonucleotide
uccacgggcaguuucuccu

SEQ ID NO: 2348446 - RNA, 19 nt, Artificial Sequence
  Description of Artificial Sequence: Synthetic oligonucleotide
uguuagaugccuggacuug

SEQ ID NO: 2348447 - RNA, 19 nt, Artificial Sequence
  Description of Artificial Sequence: Synthetic oligonucleotide
guuggcggaaucgaugaag

SEQ ID NO: 2348448 - RNA, 19 nt, Artificial Sequence
  Description of Artificial Sequence: Synthetic oligonucleotide
aggcuagacagcgaugccg

SEQ ID NO: 2348449 - RNA, 19 nt, Artificial Sequence
  Description of Artificial Sequence: Synthetic oligonucleotide
ggaccagauuuaaagaucc

SEQ ID NO: 2348450 - RNA, 19 nt, Artificial Sequence
  Description of Artificial Sequence: Synthetic oligonucleotide
cccaguaugagauuucgac

SEQ ID NO: 2348451 - RNA, 19 nt, Artificial Sequence
  Description of Artificial Sequence: Synthetic oligonucleotide
guggucuuuggaucggaag

SEQ ID NO: 2348452 - RNA, 19 nt, Artificial Sequence
  Description of Artificial Sequence: Synthetic oligonucleotide
ugcuccuaaggcuggcaag

SEQ ID NO: 2348453 - RNA, 19 nt, Artificial Sequence
  Description of Artificial Sequence: Synthetic oligonucleotide
ucuggcgggcuaaggaaug

SEQ ID NO: 2348454 - RNA, 19 nt, Artificial Sequence
  Description of Artificial Sequence: Synthetic oligonucleotide
uuuggaucggaaguggguu

SEQ ID NO: 2348455 - RNA, 19 nt, Artificial Sequence
  Description of Artificial Sequence: Synthetic oligonucleotide
aaguaccucgcgcaggcua

SEQ ID NO: 2348456 - RNA, 19 nt, Artificial Sequence
  Description of Artificial Sequence: Synthetic oligonucleotide
ucuucguuucuguucccac

SEQ ID NO: 2348457 - RNA, 19 nt, Artificial Sequence
  Description of Artificial Sequence: Synthetic oligonucleotide
ucgggagacccuguggccg

SEQ ID NO: 2348458 - RNA, 19 nt, Artificial Sequence
  Description of Artificial Sequence: Synthetic oligonucleotide
gaugcugaucucuccugac

SEQ ID NO: 2348459 - RNA, 19 nt, Artificial Sequence
  Description of Artificial Sequence: Synthetic oligonucleotide
uuccgggugcuacagguaa

SEQ ID NO: 2348460 - RNA, 19 nt, Artificial Sequence
  Description of Artificial Sequence: Synthetic oligonucleotide
ucuugauaccccaggcaau

SEQ ID NO: 2348461 - RNA, 19 nt, Artificial Sequence
  Description of Artificial Sequence: Synthetic oligonucleotide
ugauaccccaggcaauauc

SEQ ID NO: 2348462 - RNA, 19 nt, Artificial Sequence
  Description of Artificial Sequence: Synthetic oligonucleotide
ugugugcacauagugccca

SEQ ID NO: 2348463 - RNA, 19 nt, Artificial Sequence
  Description of Artificial Sequence: Synthetic oligonucleotide
aggaaugugcccggugcgc

SEQ ID NO: 2348464 - RNA, 19 nt, Artificial Sequence
  Description of Artificial Sequence: Synthetic oligonucleotide
ucuccugacagcugcuccu

SEQ ID NO: 2348465 - RNA, 19 nt, Artificial Sequence
  Description of Artificial Sequence: Synthetic oligonucleotide
caguaugagauuucgacgu

SEQ ID NO: 2348466 - RNA, 19 nt, Artificial Sequence
  Description of Artificial Sequence: Synthetic oligonucleotide
cucaguggacacuucugug

SEQ ID NO: 2348467 - RNA, 19 nt, Artificial Sequence
  Description of Artificial Sequence: Synthetic oligonucleotide
gugaauggggaggagcugc

SEQ ID NO: 2348468 - RNA, 19 nt, Artificial Sequence
  Description of Artificial Sequence: Synthetic oligonucleotide
uacgagcccaugccugccg

SEQ ID NO: 2348469 - RNA, 19 nt, Artificial Sequence
  Description of Artificial Sequence: Synthetic oligonucleotide
gagauuucgacgucugacu

SEQ ID NO: 2348470 - RNA, 19 nt, Artificial Sequence
  Description of Artificial Sequence: Synthetic oligonucleotide
ugggcgagccagcagugug

SEQ ID NO: 2348471 - RNA, 19 nt, Artificial Sequence
  Description of Artificial Sequence: Synthetic oligonucleotide
gugcacauagugcccaggc

SEQ ID NO: 2348472 - RNA, 19 nt, Artificial Sequence
  Description of Artificial Sequence: Synthetic oligonucleotide
cucuugauaccccaggcaa

SEQ ID NO: 2348473 - RNA, 19 nt, Artificial Sequence
  Description of Artificial Sequence: Synthetic oligonucleotide
ugacagcgagaccagcgac

SEQ ID NO: 2348474 - RNA, 19 nt, Artificial Sequence
  Description of Artificial Sequence: Synthetic oligonucleotide
ucgggcuugggccucggga

SEQ ID NO: 2348475 - RNA, 19 nt, Artificial Sequence
  Description of Artificial Sequence: Synthetic oligonucleotide
acucccggcuacuuccggg

SEQ ID NO: 2348476 - RNA, 19 nt, Artificial Sequence
  Description of Artificial Sequence: Synthetic oligonucleotide
aucuagucuucguuucugu

SEQ ID NO: 2348477 - RNA, 19 nt, Artificial Sequence
  Description of Artificial Sequence: Synthetic oligonucleotide
ucgcgcaggcuagacagcg

SEQ ID NO: 2348478 - RNA, 19 nt, Artificial Sequence
  Description of Artificial Sequence: Synthetic oligonucleotide
augaaguaccucgcgcagg

SEQ ID NO: 2348479 - RNA, 19 nt, Artificial Sequence
  Description of Artificial Sequence: Synthetic oligonucleotide
caccucuugauaccccagg

SEQ ID NO: 2348480 - RNA, 19 nt, Artificial Sequence
  Description of Artificial Sequence: Synthetic oligonucleotide
ugacucccggcuacuuccg

SEQ ID NO: 2348481 - RNA, 19 nt, Artificial Sequence
  Description of Artificial Sequence: Synthetic oligonucleotide
cuagacagcgaugccggcc

SEQ ID NO: 2348482 - RNA, 19 nt, Artificial Sequence
  Description of Artificial Sequence: Synthetic oligonucleotide
acaugccuggccuggucuc

SEQ ID NO: 2348483 - RNA, 19 nt, Artificial Sequence
  Description of Artificial Sequence: Synthetic oligonucleotide
agucuucguuucuguuccc

SEQ ID NO: 2348484 - RNA, 19 nt, Artificial Sequence
  Description of Artificial Sequence: Synthetic oligonucleotide
uguaggguucuauggucaa

SEQ ID NO: 2348485 - RNA, 19 nt, Artificial Sequence
  Description of Artificial Sequence: Synthetic oligonucleotide
gacagcgagaccagcgacc

SEQ ID NO: 2348486 - RNA, 19 nt, Artificial Sequence
  Description of Artificial Sequence: Synthetic oligonucleotide
ucuggccgccgcuucuugg

SEQ ID NO: 2348487 - RNA, 19 nt, Artificial Sequence
  Description of Artificial Sequence: Synthetic oligonucleotide
acgggcaguuucuccugcc

SEQ ID NO: 2348488 - RNA, 19 nt, Artificial Sequence
  Description of Artificial Sequence: Synthetic oligonucleotide
ucuagucuucguuucuguu

SEQ ID NO: 2348489 - RNA, 19 nt, Artificial Sequence
  Description of Artificial Sequence: Synthetic oligonucleotide
gcauccugugugcacauag

SEQ ID NO: 2348490 - RNA, 19 nt, Artificial Sequence
  Description of Artificial Sequence: Synthetic oligonucleotide
cuaaggaaugugcccggug

SEQ ID NO: 2348491 - RNA, 19 nt, Artificial Sequence
  Description of Artificial Sequence: Synthetic oligonucleotide
ugcccugaauccucaggcc

SEQ ID NO: 2348492 - RNA, 19 nt, Artificial Sequence
  Description of Artificial Sequence: Synthetic oligonucleotide
uucaucuggcgggcuaagg

SEQ ID NO: 2348493 - RNA, 19 nt, Artificial Sequence
  Description of Artificial Sequence: Synthetic oligonucleotide
acgagcccaugccugccgc

SEQ ID NO: 2348494 - RNA, 19 nt, Artificial Sequence
  Description of Artificial Sequence: Synthetic oligonucleotide
ggcacauacgagcccaugc

SEQ ID NO: 2348495 - RNA, 19 nt, Artificial Sequence
  Description of Artificial Sequence: Synthetic oligonucleotide
cuggugaauggggaggagc

SEQ ID NO: 2348496 - RNA, 19 nt, Artificial Sequence
  Description of Artificial Sequence: Synthetic oligonucleotide
augcugaucucuccugaca

SEQ ID NO: 2348497 - RNA, 19 nt, Artificial Sequence
  Description of Artificial Sequence: Synthetic oligonucleotide
gacuccuaugcccuggucu

SEQ ID NO: 2348498 - RNA, 19 nt, Artificial Sequence
  Description of Artificial Sequence: Synthetic oligonucleotide
ucagguuggcggaaucgau

SEQ ID NO: 2348499 - RNA, 19 nt, Artificial Sequence
  Description of Artificial Sequence: Synthetic oligonucleotide
gcuacagguaaguacaucu

SEQ ID NO: 2348500 - RNA, 19 nt, Artificial Sequence
  Description of Artificial Sequence: Synthetic oligonucleotide
cugaugcugaucucuccug

SEQ ID NO: 2348501 - RNA, 19 nt, Artificial Sequence
  Description of Artificial Sequence: Synthetic oligonucleotide
gggcuaaggaaugugcccg

SEQ ID NO: 2348502 - RNA, 19 nt, Artificial Sequence
  Description of Artificial Sequence: Synthetic oligonucleotide
aggcaauaucuagucuucg

SEQ ID NO: 2348503 - RNA, 19 nt, Artificial Sequence
  Description of Artificial Sequence: Synthetic oligonucleotide
ucgacgucugacucccggc

SEQ ID NO: 2348504 - RNA, 19 nt, Artificial Sequence
  Description of Artificial Sequence: Synthetic oligonucleotide
ggcggaaucgaugaaguac

SEQ ID NO: 2348505 - RNA, 19 nt, Artificial Sequence
  Description of Artificial Sequence: Synthetic oligonucleotide
uaaguacaucuaacacacu

SEQ ID NO: 2348506 - RNA, 19 nt, Artificial Sequence
  Description of Artificial Sequence: Synthetic oligonucleotide
acagcgaugccggccgccc

SEQ ID NO: 2348507 - RNA, 19 nt, Artificial Sequence
  Description of Artificial Sequence: Synthetic oligonucleotide
cacuccacaggcugacagc

SEQ ID NO: 2348508 - RNA, 19 nt, Artificial Sequence
  Description of Artificial Sequence: Synthetic oligonucleotide
acauacgagcccaugccug

SEQ ID NO: 2348509 - RNA, 19 nt, Artificial Sequence
  Description of Artificial Sequence: Synthetic oligonucleotide
gcacauacgagcccaugcc

SEQ ID NO: 2348510 - RNA, 19 nt, Artificial Sequence
  Description of Artificial Sequence: Synthetic oligonucleotide
gcggaaucgaugaaguacc

SEQ ID NO: 2348511 - RNA, 19 nt, Artificial Sequence
  Description of Artificial Sequence: Synthetic oligonucleotide
gggugcuacagguaaguac

SEQ ID NO: 2348512 - RNA, 19 nt, Artificial Sequence
  Description of Artificial Sequence: Synthetic oligonucleotide
aggguucuauggucaacug

SEQ ID NO: 2348513 - RNA, 19 nt, Artificial Sequence
  Description of Artificial Sequence: Synthetic oligonucleotide
uccgggugcuacagguaag

SEQ ID NO: 2348514 - RNA, 19 nt, Artificial Sequence
  Description of Artificial Sequence: Synthetic oligonucleotide
acuucugugggcacacuca

SEQ ID NO: 2348515 - RNA, 19 nt, Artificial Sequence
  Description of Artificial Sequence: Synthetic oligonucleotide
gaaugugcccggugcgcgc

SEQ ID NO: 2348516 - RNA, 19 nt, Artificial Sequence
  Description of Artificial Sequence: Synthetic oligonucleotide
ggcuagacagcgaugccgg

SEQ ID NO: 2348517 - RNA, 19 nt, Artificial Sequence
  Description of Artificial Sequence: Synthetic oligonucleotide
auacgagcccaugccugcc

SEQ ID NO: 2348518 - RNA, 19 nt, Artificial Sequence
  Description of Artificial Sequence: Synthetic oligonucleotide
gcccugaauccucaggccg

SEQ ID NO: 2348519 - RNA, 19 nt, Artificial Sequence
  Description of Artificial Sequence: Synthetic oligonucleotide
cuuguggucuuuggaucgg

SEQ ID NO: 2348520 - RNA, 19 nt, Artificial Sequence
  Description of Artificial Sequence: Synthetic oligonucleotide
gcaggcuagacagcgaugc

SEQ ID NO: 2348521 - RNA, 19 nt, Artificial Sequence
  Description of Artificial Sequence: Synthetic oligonucleotide
ggucuccaccucuugauac

SEQ ID NO: 2348522 - RNA, 19 nt, Artificial Sequence
  Description of Artificial Sequence: Synthetic oligonucleotide
aguaccucgcgcaggcuag

SEQ ID NO: 2348523 - RNA, 19 nt, Artificial Sequence
  Description of Artificial Sequence: Synthetic oligonucleotide
ccucaggccgcucaugugg

SEQ ID NO: 2348524 - RNA, 19 nt, Artificial Sequence
  Description of Artificial Sequence: Synthetic oligonucleotide
gguucuauggucaacugcu

SEQ ID NO: 2348525 - RNA, 19 nt, Artificial Sequence
  Description of Artificial Sequence: Synthetic oligonucleotide
cugugggcacacucaggcg

SEQ ID NO: 2348526 - RNA, 19 nt, Artificial Sequence
  Description of Artificial Sequence: Synthetic oligonucleotide
cauagugcccaggcaaaac

SEQ ID NO: 2348527 - RNA, 19 nt, Artificial Sequence
  Description of Artificial Sequence: Synthetic oligonucleotide
cagacuugggcgagccagc

SEQ ID NO: 2348528 - RNA, 19 nt, Artificial Sequence
  Description of Artificial Sequence: Synthetic oligonucleotide
cucagccuagccacugaac

SEQ ID NO: 2348529 - RNA, 19 nt, Artificial Sequence
  Description of Artificial Sequence: Synthetic oligonucleotide
cuucuuguggucuuuggau

SEQ ID NO: 2348530 - RNA, 19 nt, Artificial Sequence
  Description of Artificial Sequence: Synthetic oligonucleotide
aguuucuccugcccugaau

SEQ ID NO: 2348531 - RNA, 19 nt, Artificial Sequence
  Description of Artificial Sequence: Synthetic oligonucleotide
uucccacuccacaggcuga

SEQ ID NO: 2348532 - RNA, 19 nt, Artificial Sequence
  Description of Artificial Sequence: Synthetic oligonucleotide
cucgggagacccuguggcc

SEQ ID NO: 2348533 - RNA, 19 nt, Artificial Sequence
  Description of Artificial Sequence: Synthetic oligonucleotide
uuggaucggaaguggguuu

SEQ ID NO: 2348534 - RNA, 19 nt, Artificial Sequence
  Description of Artificial Sequence: Synthetic oligonucleotide
cuaugcccuggucuccacc

SEQ ID NO: 2348535 - RNA, 19 nt, Artificial Sequence
  Description of Artificial Sequence: Synthetic oligonucleotide
aucucaguggacacuucug

SEQ ID NO: 2348536 - RNA, 19 nt, Artificial Sequence
  Description of Artificial Sequence: Synthetic oligonucleotide
caggucagggacuccuaug

SEQ ID NO: 2348537 - RNA, 19 nt, Artificial Sequence
  Description of Artificial Sequence: Synthetic oligonucleotide
ucgcggugaaucucaucca

SEQ ID NO: 2348538 - RNA, 19 nt, Artificial Sequence
  Description of Artificial Sequence: Synthetic oligonucleotide
ucgggcucggcguccagcu

SEQ ID NO: 2348539 - RNA, 19 nt, Artificial Sequence
  Description of Artificial Sequence: Synthetic oligonucleotide
uguggccgcagcucgcggu

SEQ ID NO: 2348540 - RNA, 19 nt, Artificial Sequence
  Description of Artificial Sequence: Synthetic oligonucleotide
uggucuccaccucuugaua

SEQ ID NO: 2348541 - RNA, 19 nt, Artificial Sequence
  Description of Artificial Sequence: Synthetic oligonucleotide
gugagcauccugugugcac

SEQ ID NO: 2348542 - RNA, 19 nt, Artificial Sequence
  Description of Artificial Sequence: Synthetic oligonucleotide
cuugggcgagccagcagug

SEQ ID NO: 2348543 - RNA, 19 nt, Artificial Sequence
  Description of Artificial Sequence: Synthetic oligonucleotide
caauaucuagucuucguuu

SEQ ID NO: 2348544 - RNA, 19 nt, Artificial Sequence
  Description of Artificial Sequence: Synthetic oligonucleotide
guggacacuucugugggca

SEQ ID NO: 2348545 - RNA, 19 nt, Artificial Sequence
  Description of Artificial Sequence: Synthetic oligonucleotide
ggcuaaggaaugugcccgg

SEQ ID NO: 2348546 - RNA, 19 nt, Artificial Sequence
  Description of Artificial Sequence: Synthetic oligonucleotide
gcuguaggguucuaugguc

SEQ ID NO: 2348547 - RNA, 19 nt, Artificial Sequence
  Description of Artificial Sequence: Synthetic oligonucleotide
gacucccggcuacuuccgg

SEQ ID NO: 2348548 - RNA, 19 nt, Artificial Sequence
  Description of Artificial Sequence: Synthetic oligonucleotide
ucuggugaauggggaggag

SEQ ID NO: 2348549 - RNA, 19 nt, Artificial Sequence
  Description of Artificial Sequence: Synthetic oligonucleotide
ucauguggauguguccauc

SEQ ID NO: 2348550 - RNA, 19 nt, Artificial Sequence
  Description of Artificial Sequence: Synthetic oligonucleotide
ggaaugugcccggugcgcg

SEQ ID NO: 2348551 - RNA, 19 nt, Artificial Sequence
  Description of Artificial Sequence: Synthetic oligonucleotide
uaccuguuagaugccugga

SEQ ID NO: 2348552 - RNA, 19 nt, Artificial Sequence
  Description of Artificial Sequence: Synthetic oligonucleotide
uuucgacgucugacucccg

SEQ ID NO: 2348553 - RNA, 19 nt, Artificial Sequence
  Description of Artificial Sequence: Synthetic oligonucleotide
cuaacacacucagccuagc

SEQ ID NO: 2348554 - RNA, 19 nt, Artificial Sequence
  Description of Artificial Sequence: Synthetic oligonucleotide
guccgggucgggcucggcg

SEQ ID NO: 2348555 - RNA, 19 nt, Artificial Sequence
  Description of Artificial Sequence: Synthetic oligonucleotide
caucuggcgggcuaaggaa

SEQ ID NO: 2348556 - RNA, 19 nt, Artificial Sequence
  Description of Artificial Sequence: Synthetic oligonucleotide
agacagcgaugccggccgc

SEQ ID NO: 2348557 - RNA, 19 nt, Artificial Sequence
  Description of Artificial Sequence: Synthetic oligonucleotide
cugaaccacuguccacggg

SEQ ID NO: 2348558 - RNA, 19 nt, Artificial Sequence
  Description of Artificial Sequence: Synthetic oligonucleotide
uccgggucgggcucggcgu

SEQ ID NO: 2348559 - RNA, 19 nt, Artificial Sequence
  Description of Artificial Sequence: Synthetic oligonucleotide
ugccagacuugggcgagcc

SEQ ID NO: 2348560 - RNA, 19 nt, Artificial Sequence
  Description of Artificial Sequence: Synthetic oligonucleotide
gcuccuaaggcuggcaagc

SEQ ID NO: 2348561 - RNA, 19 nt, Artificial Sequence
  Description of Artificial Sequence: Synthetic oligonucleotide
cucggcguccagcucgggc

SEQ ID NO: 2348562 - RNA, 19 nt, Artificial Sequence
  Description of Artificial Sequence: Synthetic oligonucleotide
uccuaugcccuggucucca

SEQ ID NO: 2348563 - RNA, 19 nt, Artificial Sequence
  Description of Artificial Sequence: Synthetic oligonucleotide
cuugauaccccaggcaaua

SEQ ID NO: 2348564 - RNA, 19 nt, Artificial Sequence
  Description of Artificial Sequence: Synthetic oligonucleotide
cuuuggaucggaagugggu

SEQ ID NO: 2348565 - RNA, 19 nt, Artificial Sequence
  Description of Artificial Sequence: Synthetic oligonucleotide
cacauagugcccaggcaaa

SEQ ID NO: 2348566 - RNA, 19 nt, Artificial Sequence
  Description of Artificial Sequence: Synthetic oligonucleotide
ugggccucgggagacccug

SEQ ID NO: 2348567 - RNA, 19 nt, Artificial Sequence
  Description of Artificial Sequence: Synthetic oligonucleotide
caggcuagacagcgaugcc

SEQ ID NO: 2348568 - RNA, 19 nt, Artificial Sequence
  Description of Artificial Sequence: Synthetic oligonucleotide
ccucgggagacccuguggc

SEQ ID NO: 2348569 - RNA, 19 nt, Artificial Sequence
  Description of Artificial Sequence: Synthetic oligonucleotide
augccuggacuugugggca

SEQ ID NO: 2348570 - RNA, 19 nt, Artificial Sequence
  Description of Artificial Sequence: Synthetic oligonucleotide
gggaccagauuuaaagauc

SEQ ID NO: 2348571 - RNA, 19 nt, Artificial Sequence
  Description of Artificial Sequence: Synthetic oligonucleotide
accccaggcaauaucuagu

SEQ ID NO: 2348572 - RNA, 19 nt, Artificial Sequence
  Description of Artificial Sequence: Synthetic oligonucleotide
cagccaaggcuuugccuac

SEQ ID NO: 2348573 - RNA, 19 nt, Artificial Sequence
  Description of Artificial Sequence: Synthetic oligonucleotide
guccacgggcaguuucucc

SEQ ID NO: 2348574 - RNA, 19 nt, Artificial Sequence
  Description of Artificial Sequence: Synthetic oligonucleotide
ggguuuucagguuggcgga

SEQ ID NO: 2348575 - RNA, 19 nt, Artificial Sequence
  Description of Artificial Sequence: Synthetic oligonucleotide
caucuaacacacucagccu

SEQ ID NO: 2348576 - RNA, 19 nt, Artificial Sequence
  Description of Artificial Sequence: Synthetic oligonucleotide
gagcccaugccugccgccc

SEQ ID NO: 2348577 - RNA, 19 nt, Artificial Sequence
  Description of Artificial Sequence: Synthetic oligonucleotide
cacgggcaguuucuccugc

SEQ ID NO: 2348578 - RNA, 19 nt, Artificial Sequence
  Description of Artificial Sequence: Synthetic oligonucleotide
guaugagauuucgacgucu

SEQ ID NO: 2348579 - RNA, 19 nt, Artificial Sequence
  Description of Artificial Sequence: Synthetic oligonucleotide
uggaucggaaguggguuuu

SEQ ID NO: 2348580 - RNA, 19 nt, Artificial Sequence
  Description of Artificial Sequence: Synthetic oligonucleotide
uggccuggucucucuggug

SEQ ID NO: 2348581 - RNA, 19 nt, Artificial Sequence
  Description of Artificial Sequence: Synthetic oligonucleotide
ggucagggacuccuaugcc

SEQ ID NO: 2348582 - RNA, 19 nt, Artificial Sequence
  Description of Artificial Sequence: Synthetic oligonucleotide
ucccggcuacuuccgggug

SEQ ID NO: 2348583 - RNA, 19 nt, Artificial Sequence
  Description of Artificial Sequence: Synthetic oligonucleotide
gaccagauuuaaagaucca

SEQ ID NO: 2348584 - RNA, 19 nt, Artificial Sequence
  Description of Artificial Sequence: Synthetic oligonucleotide
ccacuccacaggcugacag

SEQ ID NO: 2348585 - RNA, 19 nt, Artificial Sequence
  Description of Artificial Sequence: Synthetic oligonucleotide
cuacaugccuggccugguc

SEQ ID NO: 2348586 - RNA, 19 nt, Artificial Sequence
  Description of Artificial Sequence: Synthetic oligonucleotide
uugauaccccaggcaauau

SEQ ID NO: 2348587 - RNA, 19 nt, Artificial Sequence
  Description of Artificial Sequence: Synthetic oligonucleotide
agggaucucaguggacacu

SEQ ID NO: 2348588 - RNA, 19 nt, Artificial Sequence
  Description of Artificial Sequence: Synthetic oligonucleotide
gugcgcgccgguccggcgg

SEQ ID NO: 2348589 - RNA, 19 nt, Artificial Sequence
  Description of Artificial Sequence: Synthetic oligonucleotide
guaggguucuauggucaac

SEQ ID NO: 2348590 - RNA, 19 nt, Artificial Sequence
  Description of Artificial Sequence: Synthetic oligonucleotide
uggcgggcuaaggaaugug

SEQ ID NO: 2348591 - RNA, 19 nt, Artificial Sequence
  Description of Artificial Sequence: Synthetic oligonucleotide
cuucguuucuguucccacu

SEQ ID NO: 2348592 - RNA, 19 nt, Artificial Sequence
  Description of Artificial Sequence: Synthetic oligonucleotide
accucgcgcaggcuagaca

SEQ ID NO: 2348593 - RNA, 19 nt, Artificial Sequence
  Description of Artificial Sequence: Synthetic oligonucleotide
uggcggaaucgaugaagua

SEQ ID NO: 2348594 - RNA, 19 nt, Artificial Sequence
  Description of Artificial Sequence: Synthetic oligonucleotide
ucccacuccacaggcugac

SEQ ID NO: 2348595 - RNA, 19 nt, Artificial Sequence
  Description of Artificial Sequence: Synthetic oligonucleotide
ggcaauaucuagucuucgu

SEQ ID NO: 2348596 - RNA, 19 nt, Artificial Sequence
  Description of Artificial Sequence: Synthetic oligonucleotide
ccaggcaaaacaggucagg

SEQ ID NO: 2348597 - RNA, 19 nt, Artificial Sequence
  Description of Artificial Sequence: Synthetic oligonucleotide
ugccuggacuugugggcac

SEQ ID NO: 2348598 - RNA, 19 nt, Artificial Sequence
  Description of Artificial Sequence: Synthetic oligonucleotide
agacuugggcgagccagca

SEQ ID NO: 2348599 - RNA, 19 nt, Artificial Sequence
  Description of Artificial Sequence: Synthetic oligonucleotide
gcuacuuccgggugcuaca

SEQ ID NO: 2348600 - RNA, 19 nt, Artificial Sequence
  Description of Artificial Sequence: Synthetic oligonucleotide
guuagaugccuggacuugu

SEQ ID NO: 2348601 - RNA, 19 nt, Artificial Sequence
  Description of Artificial Sequence: Synthetic oligonucleotide
ggcgggcuaaggaaugugc

SEQ ID NO: 2348602 - RNA, 19 nt, Artificial Sequence
  Description of Artificial Sequence: Synthetic oligonucleotide
gacagcgaugccggccgcc

SEQ ID NO: 2348603 - RNA, 19 nt, Artificial Sequence
  Description of Artificial Sequence: Synthetic oligonucleotide
cucaggccgcucaugugga

SEQ ID NO: 2348604 - RNA, 19 nt, Artificial Sequence
  Description of Artificial Sequence: Synthetic oligonucleotide
aucuggcgggcuaaggaau

SEQ ID NO: 2348605 - RNA, 19 nt, Artificial Sequence
  Description of Artificial Sequence: Synthetic oligonucleotide
gcaauaucuagucuucguu

SEQ ID NO: 2348606 - RNA, 19 nt, Artificial Sequence
  Description of Artificial Sequence: Synthetic oligonucleotide
cugccgcccucucagcuuc

SEQ ID NO: 2348607 - RNA, 19 nt, Artificial Sequence
  Description of Artificial Sequence: Synthetic oligonucleotide
ggaaucgaugaaguaccuc

SEQ ID NO: 2348608 - RNA, 19 nt, Artificial Sequence
  Description of Artificial Sequence: Synthetic oligonucleotide
cucuggugaauggggagga

SEQ ID NO: 2348609 - RNA, 19 nt, Artificial Sequence
  Description of Artificial Sequence: Synthetic oligonucleotide
cuccuaugcccuggucucc

SEQ ID NO: 2348610 - RNA, 19 nt, Artificial Sequence
  Description of Artificial Sequence: Synthetic oligonucleotide
gcgggcuaaggaaugugcc

SEQ ID NO: 2348611 - RNA, 19 nt, Artificial Sequence
  Description of Artificial Sequence: Synthetic oligonucleotide
cgggcuaaggaaugugccc

SEQ ID NO: 2348612 - RNA, 19 nt, Artificial Sequence
  Description of Artificial Sequence: Synthetic oligonucleotide
gacgucugacucccggcua

SEQ ID NO: 2348613 - RNA, 19 nt, Artificial Sequence
  Description of Artificial Sequence: Synthetic oligonucleotide
cuguuagaugccuggacuu

SEQ ID NO: 2348614 - RNA, 19 nt, Artificial Sequence
  Description of Artificial Sequence: Synthetic oligonucleotide
cacauacgagcccaugccu

SEQ ID NO: 2348615 - RNA, 19 nt, Artificial Sequence
  Description of Artificial Sequence: Synthetic oligonucleotide
ccccaggcaauaucuaguc

SEQ ID NO: 2348616 - RNA, 19 nt, Artificial Sequence
  Description of Artificial Sequence: Synthetic oligonucleotide
gccuacaugccuggccugg

SEQ ID NO: 2348617 - RNA, 19 nt, Artificial Sequence
  Description of Artificial Sequence: Synthetic oligonucleotide
gccucgggagacccugugg

SEQ ID NO: 2348618 - RNA, 19 nt, Artificial Sequence
  Description of Artificial Sequence: Synthetic oligonucleotide
uguccacgggcaguuucuc

SEQ ID NO: 2348619 - RNA, 19 nt, Artificial Sequence
  Description of Artificial Sequence: Synthetic oligonucleotide
ugugcccggugcgcgccgg

SEQ ID NO: 2348620 - RNA, 19 nt, Artificial Sequence
  Description of Artificial Sequence: Synthetic oligonucleotide
augugcccggugcgcgccg

SEQ ID NO: 2348621 - RNA, 19 nt, Artificial Sequence
  Description of Artificial Sequence: Synthetic oligonucleotide
cgaugaaguaccucgcgca

SEQ ID NO: 2348622 - RNA, 19 nt, Artificial Sequence
  Description of Artificial Sequence: Synthetic oligonucleotide
gccugaugcugaucucucc

SEQ ID NO: 2348623 - RNA, 19 nt, Artificial Sequence
  Description of Artificial Sequence: Synthetic oligonucleotide
uugggcgagccagcagugu

SEQ ID NO: 2348624 - RNA, 19 nt, Artificial Sequence
  Description of Artificial Sequence: Synthetic oligonucleotide
ggugaauggggaggagcug

SEQ ID NO: 2348625 - RNA, 19 nt, Artificial Sequence
  Description of Artificial Sequence: Synthetic oligonucleotide
cuguggccgcagcucgcgg

SEQ ID NO: 2348626 - RNA, 19 nt, Artificial Sequence
  Description of Artificial Sequence: Synthetic oligonucleotide
gaauccucaggccgcucau

SEQ ID NO: 2348627 - RNA, 19 nt, Artificial Sequence
  Description of Artificial Sequence: Synthetic oligonucleotide
cccaggcaaaacaggucag

SEQ ID NO: 2348628 - RNA, 19 nt, Artificial Sequence
  Description of Artificial Sequence: Synthetic oligonucleotide
ggcuacuuccgggugcuac

SEQ ID NO: 2348629 - RNA, 19 nt, Artificial Sequence
  Description of Artificial Sequence: Synthetic oligonucleotide
caugccugccgcccucuca

SEQ ID NO: 2348630 - RNA, 19 nt, Artificial Sequence
  Description of Artificial Sequence: Synthetic oligonucleotide
ggacuugugggcacugcca

SEQ ID NO: 2348631 - RNA, 19 nt, Artificial Sequence
  Description of Artificial Sequence: Synthetic oligonucleotide
ccuguuagaugccuggacu

SEQ ID NO: 2348632 - RNA, 19 nt, Artificial Sequence
  Description of Artificial Sequence: Synthetic oligonucleotide
cauccugugugcacauagu

SEQ ID NO: 2348633 - RNA, 19 nt, Artificial Sequence
  Description of Artificial Sequence: Synthetic oligonucleotide
ucaggccgcucauguggau

SEQ ID NO: 2348634 - RNA, 19 nt, Artificial Sequence
  Description of Artificial Sequence: Synthetic oligonucleotide
ccuagccacugaaccacug

SEQ ID NO: 2348635 - RNA, 19 nt, Artificial Sequence
  Description of Artificial Sequence: Synthetic oligonucleotide
cgcggugaaucucauccag

SEQ ID NO: 2348636 - RNA, 19 nt, Artificial Sequence
  Description of Artificial Sequence: Synthetic oligonucleotide
gcacacucaggcgcugggg

SEQ ID NO: 2348637 - RNA, 19 nt, Artificial Sequence
  Description of Artificial Sequence: Synthetic oligonucleotide
gguccggcgggagcgaccc

SEQ ID NO: 2348638 - RNA, 19 nt, Artificial Sequence
  Description of Artificial Sequence: Synthetic oligonucleotide
ggcgagccagcagugugag

SEQ ID NO: 2348639 - RNA, 19 nt, Artificial Sequence
  Description of Artificial Sequence: Synthetic oligonucleotide
uaccucgcgcaggcuagac

SEQ ID NO: 2348640 - RNA, 19 nt, Artificial Sequence
  Description of Artificial Sequence: Synthetic oligonucleotide
ccucuugauaccccaggca

SEQ ID NO: 2348641 - RNA, 19 nt, Artificial Sequence
  Description of Artificial Sequence: Synthetic oligonucleotide
cuguccacgggcaguuucu

SEQ ID NO: 2348642 - RNA, 19 nt, Artificial Sequence
  Description of Artificial Sequence: Synthetic oligonucleotide
ccacugaaccacuguccac

SEQ ID NO: 2348643 - RNA, 19 nt, Artificial Sequence
  Description of Artificial Sequence: Synthetic oligonucleotide
auaccccaggcaauaucua

SEQ ID NO: 2348644 - RNA, 19 nt, Artificial Sequence
  Description of Artificial Sequence: Synthetic oligonucleotide
ccgcucauguggauguguc

SEQ ID NO: 2348645 - RNA, 19 nt, Artificial Sequence
  Description of Artificial Sequence: Synthetic oligonucleotide
cuuccgggugcuacaggua

SEQ ID NO: 2348646 - RNA, 19 nt, Artificial Sequence
  Description of Artificial Sequence: Synthetic oligonucleotide
cuccuaaggcuggcaagca

SEQ ID NO: 2348647 - RNA, 19 nt, Artificial Sequence
  Description of Artificial Sequence: Synthetic oligonucleotide
cgcucauguggaugugucc

SEQ ID NO: 2348648 - RNA, 19 nt, Artificial Sequence
  Description of Artificial Sequence: Synthetic oligonucleotide
cagcgaugccggccgcccc

SEQ ID NO: 2348649 - RNA, 19 nt, Artificial Sequence
  Description of Artificial Sequence: Synthetic oligonucleotide
cccggcuacuuccgggugc

SEQ ID NO: 2348650 - RNA, 19 nt, Artificial Sequence
  Description of Artificial Sequence: Synthetic oligonucleotide
cagcgagaccagcgacccc

SEQ ID NO: 2348651 - RNA, 19 nt, Artificial Sequence
  Description of Artificial Sequence: Synthetic oligonucleotide
ggacacuucugugggcaca

SEQ ID NO: 2348652 - RNA, 19 nt, Artificial Sequence
  Description of Artificial Sequence: Synthetic oligonucleotide
ccuguggccgcagcucgcg

SEQ ID NO: 2348653 - RNA, 19 nt, Artificial Sequence
  Description of Artificial Sequence: Synthetic oligonucleotide
cugccagacuugggcgagc

SEQ ID NO: 2348654 - RNA, 19 nt, Artificial Sequence
  Description of Artificial Sequence: Synthetic oligonucleotide
gaauggggaggagcugccu

SEQ ID NO: 2348655 - RNA, 19 nt, Artificial Sequence
  Description of Artificial Sequence: Synthetic oligonucleotide
cucccggcuacuuccgggu

SEQ ID NO: 2348656 - RNA, 19 nt, Artificial Sequence
  Description of Artificial Sequence: Synthetic oligonucleotide
ccugaugcugaucucuccu

SEQ ID NO: 2348657 - RNA, 19 nt, Artificial Sequence
  Description of Artificial Sequence: Synthetic oligonucleotide
ggaaguggguuuucagguu

SEQ ID NO: 2348658 - RNA, 19 nt, Artificial Sequence
  Description of Artificial Sequence: Synthetic oligonucleotide
guuuucagguuggcggaau

SEQ ID NO: 2348659 - RNA, 19 nt, Artificial Sequence
  Description of Artificial Sequence: Synthetic oligonucleotide
ccugccagacuugggcgag

SEQ ID NO: 2348660 - RNA, 19 nt, Artificial Sequence
  Description of Artificial Sequence: Synthetic oligonucleotide
ggugcgcgccgguccggcg

SEQ ID NO: 2348661 - RNA, 19 nt, Artificial Sequence
  Description of Artificial Sequence: Synthetic oligonucleotide
gggaugggaccagauuuaa

SEQ ID NO: 2348662 - RNA, 19 nt, Artificial Sequence
  Description of Artificial Sequence: Synthetic oligonucleotide
ggccucgggagacccugug

SEQ ID NO: 2348663 - RNA, 19 nt, Artificial Sequence
  Description of Artificial Sequence: Synthetic oligonucleotide
ggggaugggaccagauuua

SEQ ID NO: 2348664 - RNA, 19 nt, Artificial Sequence
  Description of Artificial Sequence: Synthetic oligonucleotide
gcggugaaucucauccaga

SEQ ID NO: 2348665 - RNA, 19 nt, Artificial Sequence
  Description of Artificial Sequence: Synthetic oligonucleotide
uggccgcagcucgcgguga

SEQ ID NO: 2348666 - RNA, 19 nt, Artificial Sequence
  Description of Artificial Sequence: Synthetic oligonucleotide
cugaauccucaggccgcuc

SEQ ID NO: 2348667 - RNA, 19 nt, Artificial Sequence
  Description of Artificial Sequence: Synthetic oligonucleotide
gggcaguuucuccugcccu

SEQ ID NO: 2348668 - RNA, 19 nt, Artificial Sequence
  Description of Artificial Sequence: Synthetic oligonucleotide
cgggcaguuucuccugccc

SEQ ID NO: 2348669 - RNA, 19 nt, Artificial Sequence
  Description of Artificial Sequence: Synthetic oligonucleotide
cuggcagguccgggucggg

SEQ ID NO: 2348670 - RNA, 19 nt, Artificial Sequence
  Description of Artificial Sequence: Synthetic oligonucleotide
ggaugggaccagauuuaaa

SEQ ID NO: 2348671 - RNA, 19 nt, Artificial Sequence
  Description of Artificial Sequence: Synthetic oligonucleotide
ggacuccuaugcccugguc

SEQ ID NO: 2348672 - RNA, 19 nt, Artificial Sequence
  Description of Artificial Sequence: Synthetic oligonucleotide
agguccgggucgggcucgg

SEQ ID NO: 2348673 - RNA, 19 nt, Artificial Sequence
  Description of Artificial Sequence: Synthetic oligonucleotide
gaaguaccucgcgcaggcu

SEQ ID NO: 2348674 - RNA, 19 nt, Artificial Sequence
  Description of Artificial Sequence: Synthetic oligonucleotide
gggaucucaguggacacuu

SEQ ID NO: 2348675 - RNA, 19 nt, Artificial Sequence
  Description of Artificial Sequence: Synthetic oligonucleotide
gggcuugggccucgggaga

SEQ ID NO: 2348676 - RNA, 19 nt, Artificial Sequence
  Description of Artificial Sequence: Synthetic oligonucleotide
caguuucuccugcccugaa

SEQ ID NO: 2348677 - RNA, 19 nt, Artificial Sequence
  Description of Artificial Sequence: Synthetic oligonucleotide
agcauccugugugcacaua

SEQ ID NO: 2348678 - RNA, 19 nt, Artificial Sequence
  Description of Artificial Sequence: Synthetic oligonucleotide
cccggugcgcgccgguccg

SEQ ID NO: 2348679 - RNA, 19 nt, Artificial Sequence
  Description of Artificial Sequence: Synthetic oligonucleotide
gggcgagccagcaguguga

SEQ ID NO: 2348680 - RNA, 19 nt, Artificial Sequence
  Description of Artificial Sequence: Synthetic oligonucleotide
ccuaugcccuggucuccac

SEQ ID NO: 2348681 - RNA, 19 nt, Artificial Sequence
  Description of Artificial Sequence: Synthetic oligonucleotide
ggaucucaguggacacuuc

SEQ ID NO: 2348682 - RNA, 19 nt, Artificial Sequence
  Description of Artificial Sequence: Synthetic oligonucleotide
guaccucgcgcaggcuaga

SEQ ID NO: 2348683 - RNA, 19 nt, Artificial Sequence
  Description of Artificial Sequence: Synthetic oligonucleotide
cgggagacccuguggccgc

SEQ ID NO: 2348684 - RNA, 19 nt, Artificial Sequence
  Description of Artificial Sequence: Synthetic oligonucleotide
ugcccggugcgcgccgguc

SEQ ID NO: 2348685 - RNA, 19 nt, Artificial Sequence
  Description of Artificial Sequence: Synthetic oligonucleotide
gccagccaaggcuuugccu

SEQ ID NO: 2348686 - RNA, 19 nt, Artificial Sequence
  Description of Artificial Sequence: Synthetic oligonucleotide
ccccaguaugagauuucga

SEQ ID NO: 2348687 - RNA, 19 nt, Artificial Sequence
  Description of Artificial Sequence: Synthetic oligonucleotide
gcucgcggugaaucucauc

SEQ ID NO: 2348688 - RNA, 19 nt, Artificial Sequence
  Description of Artificial Sequence: Synthetic oligonucleotide
cccugccagacuugggcga

SEQ ID NO: 2348689 - RNA, 19 nt, Artificial Sequence
  Description of Artificial Sequence: Synthetic oligonucleotide
ggggaggagcugccucuca

SEQ ID NO: 2348690 - RNA, 19 nt, Artificial Sequence
  Description of Artificial Sequence: Synthetic oligonucleotide
gcgcaggcuagacagcgau

SEQ ID NO: 2348691 - RNA, 19 nt, Artificial Sequence
  Description of Artificial Sequence: Synthetic oligonucleotide
ccgcagcucgcggugaauc

SEQ ID NO: 2348692 - RNA, 19 nt, Artificial Sequence
  Description of Artificial Sequence: Synthetic oligonucleotide
cgcaggcuagacagcgaug

SEQ ID NO: 2348693 - RNA, 19 nt, Artificial Sequence
  Description of Artificial Sequence: Synthetic oligonucleotide
cggugaaucucauccagau

SEQ ID NO: 2348694 - RNA, 19 nt, Artificial Sequence
  Description of Artificial Sequence: Synthetic oligonucleotide
gcgagccagcagugugagc

SEQ ID NO: 2348695 - RNA, 19 nt, Artificial Sequence
  Description of Artificial Sequence: Synthetic oligonucleotide
gggacuccuaugcccuggu

SEQ ID NO: 2348696 - RNA, 19 nt, Artificial Sequence
  Description of Artificial Sequence: Synthetic oligonucleotide
gcuaaggaaugugcccggu

SEQ ID NO: 2348697 - RNA, 19 nt, Artificial Sequence
  Description of Artificial Sequence: Synthetic oligonucleotide
cuggcgggcuaaggaaugu

SEQ ID NO: 2348698 - RNA, 19 nt, Artificial Sequence
  Description of Artificial Sequence: Synthetic oligonucleotide
gccagacuugggcgagcca

SEQ ID NO: 2348699 - RNA, 19 nt, Artificial Sequence
  Description of Artificial Sequence: Synthetic oligonucleotide
ggucgggcucggcguccag

SEQ ID NO: 2348700 - RNA, 19 nt, Artificial Sequence
  Description of Artificial Sequence: Synthetic oligonucleotide
uccuggcuguaggguucua

SEQ ID NO: 2348701 - RNA, 19 nt, Artificial Sequence
  Description of Artificial Sequence: Synthetic oligonucleotide
cccaggcaauaucuagucu

SEQ ID NO: 2348702 - RNA, 19 nt, Artificial Sequence
  Description of Artificial Sequence: Synthetic oligonucleotide
gccaaggcuuugccuacau

SEQ ID NO: 2348703 - RNA, 19 nt, Artificial Sequence
  Description of Artificial Sequence: Synthetic oligonucleotide
ggccgcucauguggaugug

SEQ ID NO: 2348704 - RNA, 19 nt, Artificial Sequence
  Description of Artificial Sequence: Synthetic oligonucleotide
gcccaugccugccgcccuc

SEQ ID NO: 2348705 - RNA, 19 nt, Artificial Sequence
  Description of Artificial Sequence: Synthetic oligonucleotide
ccggcgggagcgacccaug

SEQ ID NO: 2348706 - RNA, 19 nt, Artificial Sequence
  Description of Artificial Sequence: Synthetic oligonucleotide
gccgcucauguggaugugu

SEQ ID NO: 2348707 - RNA, 19 nt, Artificial Sequence
  Description of Artificial Sequence: Synthetic oligonucleotide
gcucgggcuugggccucgg

SEQ ID NO: 2348708 - RNA, 19 nt, Artificial Sequence
  Description of Artificial Sequence: Synthetic oligonucleotide
ccgggugcuacagguaagu

SEQ ID NO: 2348709 - RNA, 19 nt, Artificial Sequence
  Description of Artificial Sequence: Synthetic oligonucleotide
ccugaauccucaggccgcu

SEQ ID NO: 2348710 - RNA, 19 nt, Artificial Sequence
  Description of Artificial Sequence: Synthetic oligonucleotide
cggaaucgaugaaguaccu

SEQ ID NO: 2348711 - RNA, 19 nt, Artificial Sequence
  Description of Artificial Sequence: Synthetic oligonucleotide
guccggcgggagcgaccca

SEQ ID NO: 2348712 - RNA, 19 nt, Artificial Sequence
  Description of Artificial Sequence: Synthetic oligonucleotide
gggucgggcucggcgucca

SEQ ID NO: 2348713 - RNA, 19 nt, Artificial Sequence
  Description of Artificial Sequence: Synthetic oligonucleotide
gguccgggucgggcucggc

SEQ ID NO: 2348714 - RNA, 19 nt, Artificial Sequence
  Description of Artificial Sequence: Synthetic oligonucleotide
gccuggacuugugggcacu

SEQ ID NO: 2348715 - RNA, 19 nt, Artificial Sequence
  Description of Artificial Sequence: Synthetic oligonucleotide
cgcgcaggcuagacagcga

SEQ ID NO: 2348716 - RNA, 19 nt, Artificial Sequence
  Description of Artificial Sequence: Synthetic oligonucleotide
ccuacaugccuggccuggu

SEQ ID NO: 2348717 - RNA, 19 nt, Artificial Sequence
  Description of Artificial Sequence: Synthetic oligonucleotide
cccacuccacaggcugaca

SEQ ID NO: 2348718 - RNA, 19 nt, Artificial Sequence
  Description of Artificial Sequence: Synthetic oligonucleotide
ccggugcgcgccgguccgg

SEQ ID NO: 2348719 - RNA, 19 nt, Artificial Sequence
  Description of Artificial Sequence: Synthetic oligonucleotide
ccugccgcccucucagcuu

SEQ ID NO: 2348720 - RNA, 19 nt, Artificial Sequence
  Description of Artificial Sequence: Synthetic oligonucleotide
cgggucgggcucggcgucc

SEQ ID NO: 2348721 - RNA, 19 nt, Artificial Sequence
  Description of Artificial Sequence: Synthetic oligonucleotide
ccgguccggcgggagcgac

SEQ ID NO: 2348722 - RNA, 19 nt, Artificial Sequence
  Description of Artificial Sequence: Synthetic oligonucleotide
gccgccgcuucuuggccuu

SEQ ID NO: 2348723 - RNA, 19 nt, Artificial Sequence
  Description of Artificial Sequence: Synthetic oligonucleotide
cggugcgcgccgguccggc

SEQ ID NO: 2348724 - RNA, 19 nt, Artificial Sequence
  Description of Artificial Sequence: Synthetic oligonucleotide
ccacuguccacgggcaguu

SEQ ID NO: 2348725 - RNA, 19 nt, Artificial Sequence
  Description of Artificial Sequence: Synthetic oligonucleotide
cggcgggagcgacccauga

SEQ ID NO: 2348726 - RNA, 19 nt, Artificial Sequence
  Description of Artificial Sequence: Synthetic oligonucleotide
ccuggucucucuggugaau

SEQ ID NO: 2348727 - RNA, 19 nt, Artificial Sequence
  Description of Artificial Sequence: Synthetic oligonucleotide
gccgguccggcgggagcga

SEQ ID NO: 2348728 - RNA, 19 nt, Artificial Sequence
  Description of Artificial Sequence: Synthetic oligonucleotide
cgggugcuacagguaagua

SEQ ID NO: 2348729 - RNA, 19 nt, Artificial Sequence
  Description of Artificial Sequence: Synthetic oligonucleotide
gggccucgggagacccugu

SEQ ID NO: 2348730 - RNA, 19 nt, Artificial Sequence
  Description of Artificial Sequence: Synthetic oligonucleotide
cggcuacuuccgggugcua

SEQ ID NO: 2348731 - RNA, 19 nt, Artificial Sequence
  Description of Artificial Sequence: Synthetic oligonucleotide
aagacaaacaaagagacac

SEQ ID NO: 2348732 - RNA, 19 nt, Artificial Sequence
  Description of Artificial Sequence: Synthetic oligonucleotide
aaucuaugcagcuuggagc

SEQ ID NO: 2348733 - RNA, 19 nt, Artificial Sequence
  Description of Artificial Sequence: Synthetic oligonucleotide
aaugucauggaguagaaug

SEQ ID NO: 2348734 - RNA, 19 nt, Artificial Sequence
  Description of Artificial Sequence: Synthetic oligonucleotide
uuuauuauggaaucuaugc

SEQ ID NO: 2348735 - RNA, 19 nt, Artificial Sequence
  Description of Artificial Sequence: Synthetic oligonucleotide
aaugguauagucuaauuca

SEQ ID NO: 2348736 - RNA, 19 nt, Artificial Sequence
  Description of Artificial Sequence: Synthetic oligonucleotide
auuugugccauuuuauacc

SEQ ID NO: 2348737 - RNA, 19 nt, Artificial Sequence
  Description of Artificial Sequence: Synthetic oligonucleotide
agaaaauuuaaggugauac

SEQ ID NO: 2348738 - RNA, 19 nt, Artificial Sequence
  Description of Artificial Sequence: Synthetic oligonucleotide
uauuaggggauauacauag

SEQ ID NO: 2348739 - RNA, 19 nt, Artificial Sequence
  Description of Artificial Sequence: Synthetic oligonucleotide
aaaacuugcauuugccagg

SEQ ID NO: 2348740 - RNA, 19 nt, Artificial Sequence
  Description of Artificial Sequence: Synthetic oligonucleotide
auuuacuuggcuuauuagg

SEQ ID NO: 2348741 - RNA, 19 nt, Artificial Sequence
  Description of Artificial Sequence: Synthetic oligonucleotide
uuuacuuggcuuauuaggc

SEQ ID NO: 2348742 - RNA, 19 nt, Artificial Sequence
  Description of Artificial Sequence: Synthetic oligonucleotide
ucuuuguuuacucugcucc

SEQ ID NO: 2348743 - RNA, 19 nt, Artificial Sequence
  Description of Artificial Sequence: Synthetic oligonucleotide
acauuauauaacugcaggc

SEQ ID NO: 2348744 - RNA, 19 nt, Artificial Sequence
  Description of Artificial Sequence: Synthetic oligonucleotide
uuuuauaccacguaucuuc

SEQ ID NO: 2348745 - RNA, 19 nt, Artificial Sequence
  Description of Artificial Sequence: Synthetic oligonucleotide
uuuauuaggggauauacau

SEQ ID NO: 2348746 - RNA, 19 nt, Artificial Sequence
  Description of Artificial Sequence: Synthetic oligonucleotide
uuuaaggugauacuugugu

SEQ ID NO: 2348747 - RNA, 19 nt, Artificial Sequence
  Description of Artificial Sequence: Synthetic oligonucleotide
aauguuuugugcuuguagu

SEQ ID NO: 2348748 - RNA, 19 nt, Artificial Sequence
  Description of Artificial Sequence: Synthetic oligonucleotide
acuuggaacaccuuguggg

SEQ ID NO: 2348749 - RNA, 19 nt, Artificial Sequence
  Description of Artificial Sequence: Synthetic oligonucleotide
gacgguuugaauuugugcc

SEQ ID NO: 2348750 - RNA, 19 nt, Artificial Sequence
  Description of Artificial Sequence: Synthetic oligonucleotide
uggaaagacaucuuuaugu

SEQ ID NO: 2348751 - RNA, 19 nt, Artificial Sequence
  Description of Artificial Sequence: Synthetic oligonucleotide
uuuguggagacacauuucc

SEQ ID NO: 2348752 - RNA, 19 nt, Artificial Sequence
  Description of Artificial Sequence: Synthetic oligonucleotide
uugaggguaaagaacuucg

SEQ ID NO: 2348753 - RNA, 19 nt, Artificial Sequence
  Description of Artificial Sequence: Synthetic oligonucleotide
ugugcuuuacuuuugugcc

SEQ ID NO: 2348754 - RNA, 19 nt, Artificial Sequence
  Description of Artificial Sequence: Synthetic oligonucleotide
ugauaguugaugcaguucu

SEQ ID NO: 2348755 - RNA, 19 nt, Artificial Sequence
  Description of Artificial Sequence: Synthetic oligonucleotide
uucaguagaauucugccac

SEQ ID NO: 2348756 - RNA, 19 nt, Artificial Sequence
  Description of Artificial Sequence: Synthetic oligonucleotide
ugugccauuuuauaccacg

SEQ ID NO: 2348757 - RNA, 19 nt, Artificial Sequence
  Description of Artificial Sequence: Synthetic oligonucleotide
ugaaguugaccucuggugc

SEQ ID NO: 2348758 - RNA, 19 nt, Artificial Sequence
  Description of Artificial Sequence: Synthetic oligonucleotide
agacauaagucuuugauaa

SEQ ID NO: 2348759 - RNA, 19 nt, Artificial Sequence
  Description of Artificial Sequence: Synthetic oligonucleotide
uguagugguuccuucauag

SEQ ID NO: 2348760 - RNA, 19 nt, Artificial Sequence
  Description of Artificial Sequence: Synthetic oligonucleotide
cacauuauauaacugcagg

SEQ ID NO: 2348761 - RNA, 19 nt, Artificial Sequence
  Description of Artificial Sequence: Synthetic oligonucleotide
uagucuaauucaaugaagu

SEQ ID NO: 2348762 - RNA, 19 nt, Artificial Sequence
  Description of Artificial Sequence: Synthetic oligonucleotide
aguugaugcaguucucugc

SEQ ID NO: 2348763 - RNA, 19 nt, Artificial Sequence
  Description of Artificial Sequence: Synthetic oligonucleotide
uuuuggauaauuucuucca

SEQ ID NO: 2348764 - RNA, 19 nt, Artificial Sequence
  Description of Artificial Sequence: Synthetic oligonucleotide
aagucuuugauaaaaugug

SEQ ID NO: 2348765 - RNA, 19 nt, Artificial Sequence
  Description of Artificial Sequence: Synthetic oligonucleotide
aauucugccacauuauaua

SEQ ID NO: 2348766 - RNA, 19 nt, Artificial Sequence
  Description of Artificial Sequence: Synthetic oligonucleotide
cauuauauaacugcaggcc

SEQ ID NO: 2348767 - RNA, 19 nt, Artificial Sequence
  Description of Artificial Sequence: Synthetic oligonucleotide
ucugccacauuauauaacu

SEQ ID NO: 2348768 - RNA, 19 nt, Artificial Sequence
  Description of Artificial Sequence: Synthetic oligonucleotide
uuuuauuaggggauauaca

SEQ ID NO: 2348769 - RNA, 19 nt, Artificial Sequence
  Description of Artificial Sequence: Synthetic oligonucleotide
aguagaaugguauagucua

SEQ ID NO: 2348770 - RNA, 19 nt, Artificial Sequence
  Description of Artificial Sequence: Synthetic oligonucleotide
caaaacuugcauuugccag

SEQ ID NO: 2348771 - RNA, 19 nt, Artificial Sequence
  Description of Artificial Sequence: Synthetic oligonucleotide
agccaagacaaacaaagag

SEQ ID NO: 2348772 - RNA, 19 nt, Artificial Sequence
  Description of Artificial Sequence: Synthetic oligonucleotide
uauguaguaacacucuuua

SEQ ID NO: 2348773 - RNA, 19 nt, Artificial Sequence
  Description of Artificial Sequence: Synthetic oligonucleotide
gaauguuuugugcuuguag

SEQ ID NO: 2348774 - RNA, 19 nt, Artificial Sequence
  Description of Artificial Sequence: Synthetic oligonucleotide
auuauauaacugcaggcca

SEQ ID NO: 2348775 - RNA, 19 nt, Artificial Sequence
  Description of Artificial Sequence: Synthetic oligonucleotide
ggcuuauuaggcuagaugc

SEQ ID NO: 2348776 - RNA, 19 nt, Artificial Sequence
  Description of Artificial Sequence: Synthetic oligonucleotide
ugccacauuauauaacugc

SEQ ID NO: 2348777 - RNA, 19 nt, Artificial Sequence
  Description of Artificial Sequence: Synthetic oligonucleotide
guaacacucuuuauuaugg

SEQ ID NO: 2348778 - RNA, 19 nt, Artificial Sequence
  Description of Artificial Sequence: Synthetic oligonucleotide
aucauuucuuggcacuugc

SEQ ID NO: 2348779 - RNA, 19 nt, Artificial Sequence
  Description of Artificial Sequence: Synthetic oligonucleotide
uuuugugccguauugugga

SEQ ID NO: 2348780 - RNA, 19 nt, Artificial Sequence
  Description of Artificial Sequence: Synthetic oligonucleotide
gaaugguauagucuaauuc

SEQ ID NO: 2348781 - RNA, 19 nt, Artificial Sequence
  Description of Artificial Sequence: Synthetic oligonucleotide
uguuuugugcuuguagugg

SEQ ID NO: 2348782 - RNA, 19 nt, Artificial Sequence
  Description of Artificial Sequence: Synthetic oligonucleotide
auagacauaagucuuugau

SEQ ID NO: 2348783 - RNA, 19 nt, Artificial Sequence
  Description of Artificial Sequence: Synthetic oligonucleotide
auaguacuguuacuguugg

SEQ ID NO: 2348784 - RNA, 19 nt, Artificial Sequence
  Description of Artificial Sequence: Synthetic oligonucleotide
auaacugcaggccacccag

SEQ ID NO: 2348785 - RNA, 19 nt, Artificial Sequence
  Description of Artificial Sequence: Synthetic oligonucleotide
gauuuacuuggcuuauuag

SEQ ID NO: 2348786 - RNA, 19 nt, Artificial Sequence
  Description of Artificial Sequence: Synthetic oligonucleotide
auacauaguacuguuacug

SEQ ID NO: 2348787 - RNA, 19 nt, Artificial Sequence
  Description of Artificial Sequence: Synthetic oligonucleotide
agucuaauucaaugaaguc

SEQ ID NO: 2348788 - RNA, 19 nt, Artificial Sequence
  Description of Artificial Sequence: Synthetic oligonucleotide
uuacuuuugugccguauug

SEQ ID NO: 2348789 - RNA, 19 nt, Artificial Sequence
  Description of Artificial Sequence: Synthetic oligonucleotide
uacuguuacuguuggaaag

SEQ ID NO: 2348790 - RNA, 19 nt, Artificial Sequence
  Description of Artificial Sequence: Synthetic oligonucleotide
uuugauaaaauguguuauc

SEQ ID NO: 2348791 - RNA, 19 nt, Artificial Sequence
  Description of Artificial Sequence: Synthetic oligonucleotide
uuauauaacugcaggccac

SEQ ID NO: 2348792 - RNA, 19 nt, Artificial Sequence
  Description of Artificial Sequence: Synthetic oligonucleotide
aggguaaagaacuucggcu

SEQ ID NO: 2348793 - RNA, 19 nt, Artificial Sequence
  Description of Artificial Sequence: Synthetic oligonucleotide
uauaccacguaucuucagu

SEQ ID NO: 2348794 - RNA, 19 nt, Artificial Sequence
  Description of Artificial Sequence: Synthetic oligonucleotide
uuaggggauauacauagua

SEQ ID NO: 2348795 - RNA, 19 nt, Artificial Sequence
  Description of Artificial Sequence: Synthetic oligonucleotide
uugaauuugugccauuuua

SEQ ID NO: 2348796 - RNA, 19 nt, Artificial Sequence
  Description of Artificial Sequence: Synthetic oligonucleotide
gguauagucuaauucaaug

SEQ ID NO: 2348797 - RNA, 19 nt, Artificial Sequence
  Description of Artificial Sequence: Synthetic oligonucleotide
auggaaucuaugcagcuug

SEQ ID NO: 2348798 - RNA, 19 nt, Artificial Sequence
  Description of Artificial Sequence: Synthetic oligonucleotide
uuaggcuagaugccaauga

SEQ ID NO: 2348799 - RNA, 19 nt, Artificial Sequence
  Description of Artificial Sequence: Synthetic oligonucleotide
cuuuauuauggaaucuaug

SEQ ID NO: 2348800 - RNA, 19 nt, Artificial Sequence
  Description of Artificial Sequence: Synthetic oligonucleotide
cauaguacuguuacuguug

SEQ ID NO: 2348801 - RNA, 19 nt, Artificial Sequence
  Description of Artificial Sequence: Synthetic oligonucleotide
aagucaucauuucuuggca

SEQ ID NO: 2348802 - RNA, 19 nt, Artificial Sequence
  Description of Artificial Sequence: Synthetic oligonucleotide
ugaggguaaagaacuucgg

SEQ ID NO: 2348803 - RNA, 19 nt, Artificial Sequence
  Description of Artificial Sequence: Synthetic oligonucleotide
acuuguguccucuucccgg

SEQ ID NO: 2348804 - RNA, 19 nt, Artificial Sequence
  Description of Artificial Sequence: Synthetic oligonucleotide
uuuggauaauuucuuccac

SEQ ID NO: 2348805 - RNA, 19 nt, Artificial Sequence
  Description of Artificial Sequence: Synthetic oligonucleotide
aucuaugcagcuuggagcu

SEQ ID NO: 2348806 - RNA, 19 nt, Artificial Sequence
  Description of Artificial Sequence: Synthetic oligonucleotide
uauuguggaugccacaaaa

SEQ ID NO: 2348807 - RNA, 19 nt, Artificial Sequence
  Description of Artificial Sequence: Synthetic oligonucleotide
aucuuuauguaguaacacu

SEQ ID NO: 2348808 - RNA, 19 nt, Artificial Sequence
  Description of Artificial Sequence: Synthetic oligonucleotide
aacacucuuuauuauggaa

SEQ ID NO: 2348809 - RNA, 19 nt, Artificial Sequence
  Description of Artificial Sequence: Synthetic oligonucleotide
uuuauaccacguaucuuca

SEQ ID NO: 2348810 - RNA, 19 nt, Artificial Sequence
  Description of Artificial Sequence: Synthetic oligonucleotide
aggggauauacauaguacu

SEQ ID NO: 2348811 - RNA, 19 nt, Artificial Sequence
  Description of Artificial Sequence: Synthetic oligonucleotide
ucauggaguagaaugguau

SEQ ID NO: 2348812 - RNA, 19 nt, Artificial Sequence
  Description of Artificial Sequence: Synthetic oligonucleotide
uaggcuagaugccaaugag

SEQ ID NO: 2348813 - RNA, 19 nt, Artificial Sequence
  Description of Artificial Sequence: Synthetic oligonucleotide
guauagucuaauucaauga

SEQ ID NO: 2348814 - RNA, 19 nt, Artificial Sequence
  Description of Artificial Sequence: Synthetic oligonucleotide
aauauccuccuugcuggcc

SEQ ID NO: 2348815 - RNA, 19 nt, Artificial Sequence
  Description of Artificial Sequence: Synthetic oligonucleotide
cacagaaaauuuaagguga

SEQ ID NO: 2348816 - RNA, 19 nt, Artificial Sequence
  Description of Artificial Sequence: Synthetic oligonucleotide
uuggauaauuucuuccaca

SEQ ID NO: 2348817 - RNA, 19 nt, Artificial Sequence
  Description of Artificial Sequence: Synthetic oligonucleotide
aaacuugcauuugccaggg

SEQ ID NO: 2348818 - RNA, 19 nt, Artificial Sequence
  Description of Artificial Sequence: Synthetic oligonucleotide
acuggcuucauuuguggag

SEQ ID NO: 2348819 - RNA, 19 nt, Artificial Sequence
  Description of Artificial Sequence: Synthetic oligonucleotide
cauguuuccauuucaucug

SEQ ID NO: 2348820 - RNA, 19 nt, Artificial Sequence
  Description of Artificial Sequence: Synthetic oligonucleotide
uuggaaagacaucuuuaug

SEQ ID NO: 2348821 - RNA, 19 nt, Artificial Sequence
  Description of Artificial Sequence: Synthetic oligonucleotide
agucaucauuucuuggcac

SEQ ID NO: 2348822 - RNA, 19 nt, Artificial Sequence
  Description of Artificial Sequence: Synthetic oligonucleotide
cacaaaacuugcauuugcc

SEQ ID NO: 2348823 - RNA, 19 nt, Artificial Sequence
  Description of Artificial Sequence: Synthetic oligonucleotide
gaggguaaagaacuucggc

SEQ ID NO: 2348824 - RNA, 19 nt, Artificial Sequence
  Description of Artificial Sequence: Synthetic oligonucleotide
uaggggauauacauaguac

SEQ ID NO: 2348825 - RNA, 19 nt, Artificial Sequence
  Description of Artificial Sequence: Synthetic oligonucleotide
gaugcaaugucauggagua

SEQ ID NO: 2348826 - RNA, 19 nt, Artificial Sequence
  Description of Artificial Sequence: Synthetic oligonucleotide
gaacuggcuucauuugugg

SEQ ID NO: 2348827 - RNA, 19 nt, Artificial Sequence
  Description of Artificial Sequence: Synthetic oligonucleotide
ugacgguuugaauuugugc

SEQ ID NO: 2348828 - RNA, 19 nt, Artificial Sequence
  Description of Artificial Sequence: Synthetic oligonucleotide
aggaacauguuuccauuuc

SEQ ID NO: 2348829 - RNA, 19 nt, Artificial Sequence
  Description of Artificial Sequence: Synthetic oligonucleotide
gucuaauucaaugaaguca

SEQ ID NO: 2348830 - RNA, 19 nt, Artificial Sequence
  Description of Artificial Sequence: Synthetic oligonucleotide
acaaaacuugcauuugcca

SEQ ID NO: 2348831 - RNA, 19 nt, Artificial Sequence
  Description of Artificial Sequence: Synthetic oligonucleotide
augaagucaucauuucuug

SEQ ID NO: 2348832 - RNA, 19 nt, Artificial Sequence
  Description of Artificial Sequence: Synthetic oligonucleotide
cuuggaacaccuugugggg

SEQ ID NO: 2348833 - RNA, 19 nt, Artificial Sequence
  Description of Artificial Sequence: Synthetic oligonucleotide
ugugccguauuguggaugc

SEQ ID NO: 2348834 - RNA, 19 nt, Artificial Sequence
  Description of Artificial Sequence: Synthetic oligonucleotide
uguuggaaagacaucuuua

SEQ ID NO: 2348835 - RNA, 19 nt, Artificial Sequence
  Description of Artificial Sequence: Synthetic oligonucleotide
uuaaggugauacuuguguc

SEQ ID NO: 2348836 - RNA, 19 nt, Artificial Sequence
  Description of Artificial Sequence: Synthetic oligonucleotide
uuccuucauagacauaagu

SEQ ID NO: 2348837 - RNA, 19 nt, Artificial Sequence
  Description of Artificial Sequence: Synthetic oligonucleotide
uauacauaguacuguuacu

SEQ ID NO: 2348838 - RNA, 19 nt, Artificial Sequence
  Description of Artificial Sequence: Synthetic oligonucleotide
uagacauaagucuuugaua

SEQ ID NO: 2348839 - RNA, 19 nt, Artificial Sequence
  Description of Artificial Sequence: Synthetic oligonucleotide
ucuccugugaugcaauguc

SEQ ID NO: 2348840 - RNA, 19 nt, Artificial Sequence
  Description of Artificial Sequence: Synthetic oligonucleotide
uuuauguaguaacacucuu

SEQ ID NO: 2348841 - RNA, 19 nt, Artificial Sequence
  Description of Artificial Sequence: Synthetic oligonucleotide
ugcaguucacuguaacuug

SEQ ID NO: 2348842 - RNA, 19 nt, Artificial Sequence
  Description of Artificial Sequence: Synthetic oligonucleotide
gggaucuccaucuuugggg

SEQ ID NO: 2348843 - RNA, 19 nt, Artificial Sequence
  Description of Artificial Sequence: Synthetic oligonucleotide
uauugugcuuuacuuuugu

SEQ ID NO: 2348844 - RNA, 19 nt, Artificial Sequence
  Description of Artificial Sequence: Synthetic oligonucleotide
agacacauuuccaugacug

SEQ ID NO: 2348845 - RNA, 19 nt, Artificial Sequence
  Description of Artificial Sequence: Synthetic oligonucleotide
uucaaaugugaaguugacc

SEQ ID NO: 2348846 - RNA, 19 nt, Artificial Sequence
  Description of Artificial Sequence: Synthetic oligonucleotide
auuucaucugggucuuagg

SEQ ID NO: 2348847 - RNA, 19 nt, Artificial Sequence
  Description of Artificial Sequence: Synthetic oligonucleotide
uuuacuuuugugccguauu

SEQ ID NO: 2348848 - RNA, 19 nt, Artificial Sequence
  Description of Artificial Sequence: Synthetic oligonucleotide
auguuuugugcuuguagug

SEQ ID NO: 2348849 - RNA, 19 nt, Artificial Sequence
  Description of Artificial Sequence: Synthetic oligonucleotide
aguacuguuacuguuggaa

SEQ ID NO: 2348850 - RNA, 19 nt, Artificial Sequence
  Description of Artificial Sequence: Synthetic oligonucleotide
uacauaguacuguuacugu

SEQ ID NO: 2348851 - RNA, 19 nt, Artificial Sequence
  Description of Artificial Sequence: Synthetic oligonucleotide
auagucuaauucaaugaag

SEQ ID NO: 2348852 - RNA, 19 nt, Artificial Sequence
  Description of Artificial Sequence: Synthetic oligonucleotide
uucaucugggucuuagggu

SEQ ID NO: 2348853 - RNA, 19 nt, Artificial Sequence
  Description of Artificial Sequence: Synthetic oligonucleotide
augucauggaguagaaugg

SEQ ID NO: 2348854 - RNA, 19 nt, Artificial Sequence
  Description of Artificial Sequence: Synthetic oligonucleotide
uugcuugacgguuugaauu

SEQ ID NO: 2348855 - RNA, 19 nt, Artificial Sequence
  Description of Artificial Sequence: Synthetic oligonucleotide
uuauuaggggauauacaua

SEQ ID NO: 2348856 - RNA, 19 nt, Artificial Sequence
  Description of Artificial Sequence: Synthetic oligonucleotide
cacucuuuauuauggaauc

SEQ ID NO: 2348857 - RNA, 19 nt, Artificial Sequence
  Description of Artificial Sequence: Synthetic oligonucleotide
uauaacugcaggccaccca

SEQ ID NO: 2348858 - RNA, 19 nt, Artificial Sequence
  Description of Artificial Sequence: Synthetic oligonucleotide
uggagcuguagccaagaca

SEQ ID NO: 2348859 - RNA, 19 nt, Artificial Sequence
  Description of Artificial Sequence: Synthetic oligonucleotide
aaagaacuucggcugugca

SEQ ID NO: 2348860 - RNA, 19 nt, Artificial Sequence
  Description of Artificial Sequence: Synthetic oligonucleotide
aaggugauacuuguguccu

SEQ ID NO: 2348861 - RNA, 19 nt, Artificial Sequence
  Description of Artificial Sequence: Synthetic oligonucleotide
uuauggaaucuaugcagcu

SEQ ID NO: 2348862 - RNA, 19 nt, Artificial Sequence
  Description of Artificial Sequence: Synthetic oligonucleotide
uggaaucuaugcagcuugg

SEQ ID NO: 2348863 - RNA, 19 nt, Artificial Sequence
  Description of Artificial Sequence: Synthetic oligonucleotide
uuacuuggcuuauuaggcu

SEQ ID NO: 2348864 - RNA, 19 nt, Artificial Sequence
  Description of Artificial Sequence: Synthetic oligonucleotide
uauauaacugcaggccacc

SEQ ID NO: 2348865 - RNA, 19 nt, Artificial Sequence
  Description of Artificial Sequence: Synthetic oligonucleotide
auuguggaugccacaaaac

SEQ ID NO: 2348866 - RNA, 19 nt, Artificial Sequence
  Description of Artificial Sequence: Synthetic oligonucleotide
ugugcaguucacuguaacu

SEQ ID NO: 2348867 - RNA, 19 nt, Artificial Sequence
  Description of Artificial Sequence: Synthetic oligonucleotide
agggucuuuguuuacucug

SEQ ID NO: 2348868 - RNA, 19 nt, Artificial Sequence
  Description of Artificial Sequence: Synthetic oligonucleotide
uguuacuguuggaaagaca

SEQ ID NO: 2348869 - RNA, 19 nt, Artificial Sequence
  Description of Artificial Sequence: Synthetic oligonucleotide
ucauagacauaagucuuug

SEQ ID NO: 2348870 - RNA, 19 nt, Artificial Sequence
  Description of Artificial Sequence: Synthetic oligonucleotide
cagggaauaaucuccugug

SEQ ID NO: 2348871 - RNA, 19 nt, Artificial Sequence
  Description of Artificial Sequence: Synthetic oligonucleotide
acuugcauuugccagggaa

SEQ ID NO: 2348872 - RNA, 19 nt, Artificial Sequence
  Description of Artificial Sequence: Synthetic oligonucleotide
accgucugcacuuggaaca

SEQ ID NO: 2348873 - RNA, 19 nt, Artificial Sequence
  Description of Artificial Sequence: Synthetic oligonucleotide
ucccauuugaggguaaaga

SEQ ID NO: 2348874 - RNA, 19 nt, Artificial Sequence
  Description of Artificial Sequence: Synthetic oligonucleotide
ugugggauuuacuuggcuu

SEQ ID NO: 2348875 - RNA, 19 nt, Artificial Sequence
  Description of Artificial Sequence: Synthetic oligonucleotide
auggaguagaaugguauag

SEQ ID NO: 2348876 - RNA, 19 nt, Artificial Sequence
  Description of Artificial Sequence: Synthetic oligonucleotide
ggaauaaucuccugugaug

SEQ ID NO: 2348877 - RNA, 19 nt, Artificial Sequence
  Description of Artificial Sequence: Synthetic oligonucleotide
uuauuaggcuagaugccaa

SEQ ID NO: 2348878 - RNA, 19 nt, Artificial Sequence
  Description of Artificial Sequence: Synthetic oligonucleotide
ucggcugugcaguucacug

SEQ ID NO: 2348879 - RNA, 19 nt, Artificial Sequence
  Description of Artificial Sequence: Synthetic oligonucleotide
gaggcugcauagugggucg

SEQ ID NO: 2348880 - RNA, 19 nt, Artificial Sequence
  Description of Artificial Sequence: Synthetic oligonucleotide
ugccacaaaacuugcauuu

SEQ ID NO: 2348881 - RNA, 19 nt, Artificial Sequence
  Description of Artificial Sequence: Synthetic oligonucleotide
uaguugaugcaguucucug

SEQ ID NO: 2348882 - RNA, 19 nt, Artificial Sequence
  Description of Artificial Sequence: Synthetic oligonucleotide
uucauagacauaagucuuu

SEQ ID NO: 2348883 - RNA, 19 nt, Artificial Sequence
  Description of Artificial Sequence: Synthetic oligonucleotide
uaccacguaucuucaguag

SEQ ID NO: 2348884 - RNA, 19 nt, Artificial Sequence
  Description of Artificial Sequence: Synthetic oligonucleotide
uucauuuguggagacacau

SEQ ID NO: 2348885 - RNA, 19 nt, Artificial Sequence
  Description of Artificial Sequence: Synthetic oligonucleotide
gaauuugugccauuuuaua

SEQ ID NO: 2348886 - RNA, 19 nt, Artificial Sequence
  Description of Artificial Sequence: Synthetic oligonucleotide
uguagccaagacaaacaaa

SEQ ID NO: 2348887 - RNA, 19 nt, Artificial Sequence
  Description of Artificial Sequence: Synthetic oligonucleotide
ucccggaauauccuccuug

SEQ ID NO: 2348888 - RNA, 19 nt, Artificial Sequence
  Description of Artificial Sequence: Synthetic oligonucleotide
uuauaccacguaucuucag

SEQ ID NO: 2348889 - RNA, 19 nt, Artificial Sequence
  Description of Artificial Sequence: Synthetic oligonucleotide
caucuuuauguaguaacac

SEQ ID NO: 2348890 - RNA, 19 nt, Artificial Sequence
  Description of Artificial Sequence: Synthetic oligonucleotide
ccacagaaaauuuaaggug

SEQ ID NO: 2348891 - RNA, 19 nt, Artificial Sequence
  Description of Artificial Sequence: Synthetic oligonucleotide
ggguaaagaacuucggcug

SEQ ID NO: 2348892 - RNA, 19 nt, Artificial Sequence
  Description of Artificial Sequence: Synthetic oligonucleotide
agucccuugucccauuuga

SEQ ID NO: 2348893 - RNA, 19 nt, Artificial Sequence
  Description of Artificial Sequence: Synthetic oligonucleotide
uaacacucuuuauuaugga

SEQ ID NO: 2348894 - RNA, 19 nt, Artificial Sequence
  Description of Artificial Sequence: Synthetic oligonucleotide
auauaacugcaggccaccc

SEQ ID NO: 2348895 - RNA, 19 nt, Artificial Sequence
  Description of Artificial Sequence: Synthetic oligonucleotide
cuucaaaugugaaguugac

SEQ ID NO: 2348896 - RNA, 19 nt, Artificial Sequence
  Description of Artificial Sequence: Synthetic oligonucleotide
uuagggucuuuguuuacuc

SEQ ID NO: 2348897 - RNA, 19 nt, Artificial Sequence
  Description of Artificial Sequence: Synthetic oligonucleotide
uuccaugacugucuggaau

SEQ ID NO: 2348898 - RNA, 19 nt, Artificial Sequence
  Description of Artificial Sequence: Synthetic oligonucleotide
auauccuccuugcuggccu

SEQ ID NO: 2348899 - RNA, 19 nt, Artificial Sequence
  Description of Artificial Sequence: Synthetic oligonucleotide
guuacuguuggaaagacau

SEQ ID NO: 2348900 - RNA, 19 nt, Artificial Sequence
  Description of Artificial Sequence: Synthetic oligonucleotide
ugauacuuguguccucuuc

SEQ ID NO: 2348901 - RNA, 19 nt, Artificial Sequence
  Description of Artificial Sequence: Synthetic oligonucleotide
uuguggagacacauuucca

SEQ ID NO: 2348902 - RNA, 19 nt, Artificial Sequence
  Description of Artificial Sequence: Synthetic oligonucleotide
gaaguugaccucuggugca

SEQ ID NO: 2348903 - RNA, 19 nt, Artificial Sequence
  Description of Artificial Sequence: Synthetic oligonucleotide
cacuuggaacaccuugugg

SEQ ID NO: 2348904 - RNA, 19 nt, Artificial Sequence
  Description of Artificial Sequence: Synthetic oligonucleotide
uaaagaacuucggcugugc

SEQ ID NO: 2348905 - RNA, 19 nt, Artificial Sequence
  Description of Artificial Sequence: Synthetic oligonucleotide
accacguaucuucaguaga

SEQ ID NO: 2348906 - RNA, 19 nt, Artificial Sequence
  Description of Artificial Sequence: Synthetic oligonucleotide
acgguuugaauuugugcca

SEQ ID NO: 2348907 - RNA, 19 nt, Artificial Sequence
  Description of Artificial Sequence: Synthetic oligonucleotide
acaaagagacacuguggga

SEQ ID NO: 2348908 - RNA, 19 nt, Artificial Sequence
  Description of Artificial Sequence: Synthetic oligonucleotide
acuucggcugugcaguuca

SEQ ID NO: 2348909 - RNA, 19 nt, Artificial Sequence
  Description of Artificial Sequence: Synthetic oligonucleotide
cuuauuaggcuagaugcca

SEQ ID NO: 2348910 - RNA, 19 nt, Artificial Sequence
  Description of Artificial Sequence: Synthetic oligonucleotide
acauaguacuguuacuguu

SEQ ID NO: 2348911 - RNA, 19 nt, Artificial Sequence
  Description of Artificial Sequence: Synthetic oligonucleotide
gugcuuuacuuuugugccg

SEQ ID NO: 2348912 - RNA, 19 nt, Artificial Sequence
  Description of Artificial Sequence: Synthetic oligonucleotide
uccugugaugcaaugucau

SEQ ID NO: 2348913 - RNA, 19 nt, Artificial Sequence
  Description of Artificial Sequence: Synthetic oligonucleotide
auuuguggagacacauuuc

SEQ ID NO: 2348914 - RNA, 19 nt, Artificial Sequence
  Description of Artificial Sequence: Synthetic oligonucleotide
acuguuacuguuggaaaga

SEQ ID NO: 2348915 - RNA, 19 nt, Artificial Sequence
  Description of Artificial Sequence: Synthetic oligonucleotide
uggaguagaaugguauagu

SEQ ID NO: 2348916 - RNA, 19 nt, Artificial Sequence
  Description of Artificial Sequence: Synthetic oligonucleotide
acggcuauugugcuuuacu

SEQ ID NO: 2348917 - RNA, 19 nt, Artificial Sequence
  Description of Artificial Sequence: Synthetic oligonucleotide
ugcuugacgguuugaauuu

SEQ ID NO: 2348918 - RNA, 19 nt, Artificial Sequence
  Description of Artificial Sequence: Synthetic oligonucleotide
uugugcuuguagugguucc

SEQ ID NO: 2348919 - RNA, 19 nt, Artificial Sequence
  Description of Artificial Sequence: Synthetic oligonucleotide
cugcugauaguugaugcag

SEQ ID NO: 2348920 - RNA, 19 nt, Artificial Sequence
  Description of Artificial Sequence: Synthetic oligonucleotide
ugguauagucuaauucaau

SEQ ID NO: 2348921 - RNA, 19 nt, Artificial Sequence
  Description of Artificial Sequence: Synthetic oligonucleotide
uacuuggcuuauuaggcua

SEQ ID NO: 2348922 - RNA, 19 nt, Artificial Sequence
  Description of Artificial Sequence: Synthetic oligonucleotide
agaauucugccacauuaua

SEQ ID NO: 2348923 - RNA, 19 nt, Artificial Sequence
  Description of Artificial Sequence: Synthetic oligonucleotide
cauuuuauaccacguaucu

SEQ ID NO: 2348924 - RNA, 19 nt, Artificial Sequence
  Description of Artificial Sequence: Synthetic oligonucleotide
cuauugugcuuuacuuuug

SEQ ID NO: 2348925 - RNA, 19 nt, Artificial Sequence
  Description of Artificial Sequence: Synthetic oligonucleotide
ugcuuuacuuuugugccgu

SEQ ID NO: 2348926 - RNA, 19 nt, Artificial Sequence
  Description of Artificial Sequence: Synthetic oligonucleotide
acacucuuuauuauggaau

SEQ ID NO: 2348927 - RNA, 19 nt, Artificial Sequence
  Description of Artificial Sequence: Synthetic oligonucleotide
agggaauaaucuccuguga

SEQ ID NO: 2348928 - RNA, 19 nt, Artificial Sequence
  Description of Artificial Sequence: Synthetic oligonucleotide
cugcacuuggaacaccuug

SEQ ID NO: 2348929 - RNA, 19 nt, Artificial Sequence
  Description of Artificial Sequence: Synthetic oligonucleotide
uuacuguuggaaagacauc

SEQ ID NO: 2348930 - RNA, 19 nt, Artificial Sequence
  Description of Artificial Sequence: Synthetic oligonucleotide
cccuugucccauuugaggg

SEQ ID NO: 2348931 - RNA, 19 nt, Artificial Sequence
  Description of Artificial Sequence: Synthetic oligonucleotide
ugucauggaguagaauggu

SEQ ID NO: 2348932 - RNA, 19 nt, Artificial Sequence
  Description of Artificial Sequence: Synthetic oligonucleotide
uuacucugcuccugcuucc

SEQ ID NO: 2348933 - RNA, 19 nt, Artificial Sequence
  Description of Artificial Sequence: Synthetic oligonucleotide
aaguugaccucuggugcag

SEQ ID NO: 2348934 - RNA, 19 nt, Artificial Sequence
  Description of Artificial Sequence: Synthetic oligonucleotide
uacuuuugugccguauugu

SEQ ID NO: 2348935 - RNA, 19 nt, Artificial Sequence
  Description of Artificial Sequence: Synthetic oligonucleotide
auaccacguaucuucagua

SEQ ID NO: 2348936 - RNA, 19 nt, Artificial Sequence
  Description of Artificial Sequence: Synthetic oligonucleotide
ugccagggaauaaucuccu

SEQ ID NO: 2348937 - RNA, 19 nt, Artificial Sequence
  Description of Artificial Sequence: Synthetic oligonucleotide
uuucuccuucaaaugugaa

SEQ ID NO: 2348938 - RNA, 19 nt, Artificial Sequence
  Description of Artificial Sequence: Synthetic oligonucleotide
uggcgaacuggcuucauuu

SEQ ID NO: 2348939 - RNA, 19 nt, Artificial Sequence
  Description of Artificial Sequence: Synthetic oligonucleotide
gugaugcaaugucauggag

SEQ ID NO: 2348940 - RNA, 19 nt, Artificial Sequence
  Description of Artificial Sequence: Synthetic oligonucleotide
ugccauuuuauaccacgua

SEQ ID NO: 2348941 - RNA, 19 nt, Artificial Sequence
  Description of Artificial Sequence: Synthetic oligonucleotide
ggaguagaaugguauaguc

SEQ ID NO: 2348942 - RNA, 19 nt, Artificial Sequence
  Description of Artificial Sequence: Synthetic oligonucleotide
agugguuccuucauagaca

SEQ ID NO: 2348943 - RNA, 19 nt, Artificial Sequence
  Description of Artificial Sequence: Synthetic oligonucleotide
uagaaugguauagucuaau

SEQ ID NO: 2348944 - RNA, 19 nt, Artificial Sequence
  Description of Artificial Sequence: Synthetic oligonucleotide
acguaucuucaguagaauu

SEQ ID NO: 2348945 - RNA, 19 nt, Artificial Sequence
  Description of Artificial Sequence: Synthetic oligonucleotide
auaaucuccugugaugcaa

SEQ ID NO: 2348946 - RNA, 19 nt, Artificial Sequence
  Description of Artificial Sequence: Synthetic oligonucleotide
uagugggucgcugggaucu

SEQ ID NO: 2348947 - RNA, 19 nt, Artificial Sequence
  Description of Artificial Sequence: Synthetic oligonucleotide
aggcuagaugccaaugagg

SEQ ID NO: 2348948 - RNA, 19 nt, Artificial Sequence
  Description of Artificial Sequence: Synthetic oligonucleotide
uauuaggcuagaugccaau

SEQ ID NO: 2348949 - RNA, 19 nt, Artificial Sequence
  Description of Artificial Sequence: Synthetic oligonucleotide
cauuuccaugacugucugg

SEQ ID NO: 2348950 - RNA, 19 nt, Artificial Sequence
  Description of Artificial Sequence: Synthetic oligonucleotide
ucauuuguggagacacauu

SEQ ID NO: 2348951 - RNA, 19 nt, Artificial Sequence
  Description of Artificial Sequence: Synthetic oligonucleotide
cguaucuucaguagaauuc

SEQ ID NO: 2348952 - RNA, 19 nt, Artificial Sequence
  Description of Artificial Sequence: Synthetic oligonucleotide
guuggaaagacaucuuuau

SEQ ID NO: 2348953 - RNA, 19 nt, Artificial Sequence
  Description of Artificial Sequence: Synthetic oligonucleotide
uggaauguuuugugcuugu

SEQ ID NO: 2348954 - RNA, 19 nt, Artificial Sequence
  Description of Artificial Sequence: Synthetic oligonucleotide
caguucucugccaccgagg

SEQ ID NO: 2348955 - RNA, 19 nt, Artificial Sequence
  Description of Artificial Sequence: Synthetic oligonucleotide
ugcuuccuucgggagacgg

SEQ ID NO: 2348956 - RNA, 19 nt, Artificial Sequence
  Description of Artificial Sequence: Synthetic oligonucleotide
gaccgucugcacuuggaac

SEQ ID NO: 2348957 - RNA, 19 nt, Artificial Sequence
  Description of Artificial Sequence: Synthetic oligonucleotide
aguucacuguaacuuguuu

SEQ ID NO: 2348958 - RNA, 19 nt, Artificial Sequence
  Description of Artificial Sequence: Synthetic oligonucleotide
ugccguauuguggaugcca

SEQ ID NO: 2348959 - RNA, 19 nt, Artificial Sequence
  Description of Artificial Sequence: Synthetic oligonucleotide
uauggaaucuaugcagcuu

SEQ ID NO: 2348960 - RNA, 19 nt, Artificial Sequence
  Description of Artificial Sequence: Synthetic oligonucleotide
ggaacauguuuccauuuca

SEQ ID NO: 2348961 - RNA, 19 nt, Artificial Sequence
  Description of Artificial Sequence: Synthetic oligonucleotide
acucuuuauuauggaaucu

SEQ ID NO: 2348962 - RNA, 19 nt, Artificial Sequence
  Description of Artificial Sequence: Synthetic oligonucleotide
uugaccucuggugcagucc

SEQ ID NO: 2348963 - RNA, 19 nt, Artificial Sequence
  Description of Artificial Sequence: Synthetic oligonucleotide
aacuucggcugugcaguuc

SEQ ID NO: 2348964 - RNA, 19 nt, Artificial Sequence
  Description of Artificial Sequence: Synthetic oligonucleotide
guguuaucuucuucaucug

SEQ ID NO: 2348965 - RNA, 19 nt, Artificial Sequence
  Description of Artificial Sequence: Synthetic oligonucleotide
guacuguuacuguuggaaa

SEQ ID NO: 2348966 - RNA, 19 nt, Artificial Sequence
  Description of Artificial Sequence: Synthetic oligonucleotide
caagacaaacaaagagaca

SEQ ID NO: 2348967 - RNA, 19 nt, Artificial Sequence
  Description of Artificial Sequence: Synthetic oligonucleotide
ggaaagacaucuuuaugua

SEQ ID NO: 2348968 - RNA, 19 nt, Artificial Sequence
  Description of Artificial Sequence: Synthetic oligonucleotide
ggggauauacauaguacug

SEQ ID NO: 2348969 - RNA, 19 nt, Artificial Sequence
  Description of Artificial Sequence: Synthetic oligonucleotide
ucuuagggucuuuguuuac

SEQ ID NO: 2348970 - RNA, 19 nt, Artificial Sequence
  Description of Artificial Sequence: Synthetic oligonucleotide
uggaccgucugcacuugga

SEQ ID NO: 2348971 - RNA, 19 nt, Artificial Sequence
  Description of Artificial Sequence: Synthetic oligonucleotide
uuuugugcuuguagugguu

SEQ ID NO: 2348972 - RNA, 19 nt, Artificial Sequence
  Description of Artificial Sequence: Synthetic oligonucleotide
ugugcuuguagugguuccu

SEQ ID NO: 2348973 - RNA, 19 nt, Artificial Sequence
  Description of Artificial Sequence: Synthetic oligonucleotide
gugggauuuacuuggcuua

SEQ ID NO: 2348974 - RNA, 19 nt, Artificial Sequence
  Description of Artificial Sequence: Synthetic oligonucleotide
auguaguaacacucuuuau

SEQ ID NO: 2348975 - RNA, 19 nt, Artificial Sequence
  Description of Artificial Sequence: Synthetic oligonucleotide
cugccacauuauauaacug

SEQ ID NO: 2348976 - RNA, 19 nt, Artificial Sequence
  Description of Artificial Sequence: Synthetic oligonucleotide
gaguagaaugguauagucu

SEQ ID NO: 2348977 - RNA, 19 nt, Artificial Sequence
  Description of Artificial Sequence: Synthetic oligonucleotide
ugggucuuagggucuuugu

SEQ ID NO: 2348978 - RNA, 19 nt, Artificial Sequence
  Description of Artificial Sequence: Synthetic oligonucleotide
cugugcaguucacuguaac

SEQ ID NO: 2348979 - RNA, 19 nt, Artificial Sequence
  Description of Artificial Sequence: Synthetic oligonucleotide
ccuucaaaugugaaguuga

SEQ ID NO: 2348980 - RNA, 19 nt, Artificial Sequence
  Description of Artificial Sequence: Synthetic oligonucleotide
ccacaaaacuugcauuugc

SEQ ID NO: 2348981 - RNA, 19 nt, Artificial Sequence
  Description of Artificial Sequence: Synthetic oligonucleotide
uugcauuugccagggaaua

SEQ ID NO: 2348982 - RNA, 19 nt, Artificial Sequence
  Description of Artificial Sequence: Synthetic oligonucleotide
agacaaacaaagagacacu

SEQ ID NO: 2348983 - RNA, 19 nt, Artificial Sequence
  Description of Artificial Sequence: Synthetic oligonucleotide
cauuuguggagacacauuu

SEQ ID NO: 2348984 - RNA, 19 nt, Artificial Sequence
  Description of Artificial Sequence: Synthetic oligonucleotide
aguagaauucugccacauu

SEQ ID NO: 2348985 - RNA, 19 nt, Artificial Sequence
  Description of Artificial Sequence: Synthetic oligonucleotide
cugauaguugaugcaguuc

SEQ ID NO: 2348986 - RNA, 19 nt, Artificial Sequence
  Description of Artificial Sequence: Synthetic oligonucleotide
aggugauacuuguguccuc

SEQ ID NO: 2348987 - RNA, 19 nt, Artificial Sequence
  Description of Artificial Sequence: Synthetic oligonucleotide
uugugccguauuguggaug

SEQ ID NO: 2348988 - RNA, 19 nt, Artificial Sequence
  Description of Artificial Sequence: Synthetic oligonucleotide
cuguuacuguuggaaagac

SEQ ID NO: 2348989 - RNA, 19 nt, Artificial Sequence
  Description of Artificial Sequence: Synthetic oligonucleotide
ugcuuguagugguuccuuc

SEQ ID NO: 2348990 - RNA, 19 nt, Artificial Sequence
  Description of Artificial Sequence: Synthetic oligonucleotide
cauagacauaagucuuuga

SEQ ID NO: 2348991 - RNA, 19 nt, Artificial Sequence
  Description of Artificial Sequence: Synthetic oligonucleotide
gcuuauuaggcuagaugcc

SEQ ID NO: 2348992 - RNA, 19 nt, Artificial Sequence
  Description of Artificial Sequence: Synthetic oligonucleotide
gucgcugggaucuccaucu

SEQ ID NO: 2348993 - RNA, 19 nt, Artificial Sequence
  Description of Artificial Sequence: Synthetic oligonucleotide
guuuugugcuuguaguggu

SEQ ID NO: 2348994 - RNA, 19 nt, Artificial Sequence
  Description of Artificial Sequence: Synthetic oligonucleotide
ggauuuacuuggcuuauua

SEQ ID NO: 2348995 - RNA, 19 nt, Artificial Sequence
  Description of Artificial Sequence: Synthetic oligonucleotide
cuguagccaagacaaacaa

SEQ ID NO: 2348996 - RNA, 19 nt, Artificial Sequence
  Description of Artificial Sequence: Synthetic oligonucleotide
uaguacuguuacuguugga

SEQ ID NO: 2348997 - RNA, 19 nt, Artificial Sequence
  Description of Artificial Sequence: Synthetic oligonucleotide
caggcuaaguggcgaacug

SEQ ID NO: 2348998 - RNA, 19 nt, Artificial Sequence
  Description of Artificial Sequence: Synthetic oligonucleotide
gucaucauuucuuggcacu

SEQ ID NO: 2348999 - RNA, 19 nt, Artificial Sequence
  Description of Artificial Sequence: Synthetic oligonucleotide
cauaagucuuugauaaaau

SEQ ID NO: 2349000 - RNA, 19 nt, Artificial Sequence
  Description of Artificial Sequence: Synthetic oligonucleotide
guagugguuccuucauaga

SEQ ID NO: 2349001 - RNA, 19 nt, Artificial Sequence
  Description of Artificial Sequence: Synthetic oligonucleotide
uugugccauuuuauaccac

SEQ ID NO: 2349002 - RNA, 19 nt, Artificial Sequence
  Description of Artificial Sequence: Synthetic oligonucleotide
aagagacacugugggauuu

SEQ ID NO: 2349003 - RNA, 19 nt, Artificial Sequence
  Description of Artificial Sequence: Synthetic oligonucleotide
cauggaguagaaugguaua

SEQ ID NO: 2349004 - RNA, 19 nt, Artificial Sequence
  Description of Artificial Sequence: Synthetic oligonucleotide
agcuuggagcuguagccaa

SEQ ID NO: 2349005 - RNA, 19 nt, Artificial Sequence
  Description of Artificial Sequence: Synthetic oligonucleotide
uuggcacuugcuugacggu

SEQ ID NO: 2349006 - RNA, 19 nt, Artificial Sequence
  Description of Artificial Sequence: Synthetic oligonucleotide
ggcuaaguggcgaacuggc

SEQ ID NO: 2349007 - RNA, 19 nt, Artificial Sequence
  Description of Artificial Sequence: Synthetic oligonucleotide
ugcaguucucugccaccga

SEQ ID NO: 2349008 - RNA, 19 nt, Artificial Sequence
  Description of Artificial Sequence: Synthetic oligonucleotide
gccacauuauauaacugca

SEQ ID NO: 2349009 - RNA, 19 nt, Artificial Sequence
  Description of Artificial Sequence: Synthetic oligonucleotide
uuugugccguauuguggau

SEQ ID NO: 2349010 - RNA, 19 nt, Artificial Sequence
  Description of Artificial Sequence: Synthetic oligonucleotide
cuugcauuugccagggaau

SEQ ID NO: 2349011 - RNA, 19 nt, Artificial Sequence
  Description of Artificial Sequence: Synthetic oligonucleotide
ugggauuuacuuggcuuau

SEQ ID NO: 2349012 - RNA, 19 nt, Artificial Sequence
  Description of Artificial Sequence: Synthetic oligonucleotide
cggaauauccuccuugcug

SEQ ID NO: 2349013 - RNA, 19 nt, Artificial Sequence
  Description of Artificial Sequence: Synthetic oligonucleotide
ggauaauuucuuccacaga

SEQ ID NO: 2349014 - RNA, 19 nt, Artificial Sequence
  Description of Artificial Sequence: Synthetic oligonucleotide
agacaucuuuauguaguaa

SEQ ID NO: 2349015 - RNA, 19 nt, Artificial Sequence
  Description of Artificial Sequence: Synthetic oligonucleotide
cgggagacggcuauugugc

SEQ ID NO: 2349016 - RNA, 19 nt, Artificial Sequence
  Description of Artificial Sequence: Synthetic oligonucleotide
cccggaauauccuccuugc

SEQ ID NO: 2349017 - RNA, 19 nt, Artificial Sequence
  Description of Artificial Sequence: Synthetic oligonucleotide
ggcgaacuggcuucauuug

SEQ ID NO: 2349018 - RNA, 19 nt, Artificial Sequence
  Description of Artificial Sequence: Synthetic oligonucleotide
auuaggggauauacauagu

SEQ ID NO: 2349019 - RNA, 19 nt, Artificial Sequence
  Description of Artificial Sequence: Synthetic oligonucleotide
uggcuucauuuguggagac

SEQ ID NO: 2349020 - RNA, 19 nt, Artificial Sequence
  Description of Artificial Sequence: Synthetic oligonucleotide
gucccuugucccauuugag

SEQ ID NO: 2349021 - RNA, 19 nt, Artificial Sequence
  Description of Artificial Sequence: Synthetic oligonucleotide
guugaccucuggugcaguc

SEQ ID NO: 2349022 - RNA, 19 nt, Artificial Sequence
  Description of Artificial Sequence: Synthetic oligonucleotide
gcuauugugcuuuacuuuu

SEQ ID NO: 2349023 - RNA, 19 nt, Artificial Sequence
  Description of Artificial Sequence: Synthetic oligonucleotide
gggucuuuguuuacucugc

SEQ ID NO: 2349024 - RNA, 19 nt, Artificial Sequence
  Description of Artificial Sequence: Synthetic oligonucleotide
gaggacagucauccacauc

SEQ ID NO: 2349025 - RNA, 19 nt, Artificial Sequence
  Description of Artificial Sequence: Synthetic oligonucleotide
aacuugcauuugccaggga

SEQ ID NO: 2349026 - RNA, 19 nt, Artificial Sequence
  Description of Artificial Sequence: Synthetic oligonucleotide
uucggcugugcaguucacu

SEQ ID NO: 2349027 - RNA, 19 nt, Artificial Sequence
  Description of Artificial Sequence: Synthetic oligonucleotide
ucuaugcagcuuggagcug

SEQ ID NO: 2349028 - RNA, 19 nt, Artificial Sequence
  Description of Artificial Sequence: Synthetic oligonucleotide
guauuguggaugccacaaa

SEQ ID NO: 2349029 - RNA, 19 nt, Artificial Sequence
  Description of Artificial Sequence: Synthetic oligonucleotide
cccauuugaggguaaagaa

SEQ ID NO: 2349030 - RNA, 19 nt, Artificial Sequence
  Description of Artificial Sequence: Synthetic oligonucleotide
cuaaguggcgaacuggcuu

SEQ ID NO: 2349031 - RNA, 19 nt, Artificial Sequence
  Description of Artificial Sequence: Synthetic oligonucleotide
ugucccauuugaggguaaa

SEQ ID NO: 2349032 - RNA, 19 nt, Artificial Sequence
  Description of Artificial Sequence: Synthetic oligonucleotide
ggauauacauaguacuguu

SEQ ID NO: 2349033 - RNA, 19 nt, Artificial Sequence
  Description of Artificial Sequence: Synthetic oligonucleotide
ggaggcugcauaguggguc

SEQ ID NO: 2349034 - RNA, 19 nt, Artificial Sequence
  Description of Artificial Sequence: Synthetic oligonucleotide
cauuucuuggcacuugcuu

SEQ ID NO: 2349035 - RNA, 19 nt, Artificial Sequence
  Description of Artificial Sequence: Synthetic oligonucleotide
guagaaugguauagucuaa

SEQ ID NO: 2349036 - RNA, 19 nt, Artificial Sequence
  Description of Artificial Sequence: Synthetic oligonucleotide
aaguggcgaacuggcuuca

SEQ ID NO: 2349037 - RNA, 19 nt, Artificial Sequence
  Description of Artificial Sequence: Synthetic oligonucleotide
gguaaagaacuucggcugu

SEQ ID NO: 2349038 - RNA, 19 nt, Artificial Sequence
  Description of Artificial Sequence: Synthetic oligonucleotide
cuuggagcuguagccaaga

SEQ ID NO: 2349039 - RNA, 19 nt, Artificial Sequence
  Description of Artificial Sequence: Synthetic oligonucleotide
augcaaugucauggaguag

SEQ ID NO: 2349040 - RNA, 19 nt, Artificial Sequence
  Description of Artificial Sequence: Synthetic oligonucleotide
cuggaccgucugcacuugg

SEQ ID NO: 2349041 - RNA, 19 nt, Artificial Sequence
  Description of Artificial Sequence: Synthetic oligonucleotide
cugggucuuagggucuuug

SEQ ID NO: 2349042 - RNA, 19 nt, Artificial Sequence
  Description of Artificial Sequence: Synthetic oligonucleotide
uguccucuucccggaauau

SEQ ID NO: 2349043 - RNA, 19 nt, Artificial Sequence
  Description of Artificial Sequence: Synthetic oligonucleotide
ggucuuagggucuuuguuu

SEQ ID NO: 2349044 - RNA, 19 nt, Artificial Sequence
  Description of Artificial Sequence: Synthetic oligonucleotide
aggcugcauagugggucgc

SEQ ID NO: 2349045 - RNA, 19 nt, Artificial Sequence
  Description of Artificial Sequence: Synthetic oligonucleotide
uugucccauuugaggguaa

SEQ ID NO: 2349046 - RNA, 19 nt, Artificial Sequence
  Description of Artificial Sequence: Synthetic oligonucleotide
acuguuggaaagacaucuu

SEQ ID NO: 2349047 - RNA, 19 nt, Artificial Sequence
  Description of Artificial Sequence: Synthetic oligonucleotide
gagacggcuauugugcuuu

SEQ ID NO: 2349048 - RNA, 19 nt, Artificial Sequence
  Description of Artificial Sequence: Synthetic oligonucleotide
gccacaaaacuugcauuug

SEQ ID NO: 2349049 - RNA, 19 nt, Artificial Sequence
  Description of Artificial Sequence: Synthetic oligonucleotide
cuugcuugacgguuugaau

SEQ ID NO: 2349050 - RNA, 19 nt, Artificial Sequence
  Description of Artificial Sequence: Synthetic oligonucleotide
gccacccaggcuaaguggc

SEQ ID NO: 2349051 - RNA, 19 nt, Artificial Sequence
  Description of Artificial Sequence: Synthetic oligonucleotide
caaugaggacagucaucca

SEQ ID NO: 2349052 - RNA, 19 nt, Artificial Sequence
  Description of Artificial Sequence: Synthetic oligonucleotide
gacggcuauugugcuuuac

SEQ ID NO: 2349053 - RNA, 19 nt, Artificial Sequence
  Description of Artificial Sequence: Synthetic oligonucleotide
guguccucuucccggaaua

SEQ ID NO: 2349054 - RNA, 19 nt, Artificial Sequence
  Description of Artificial Sequence: Synthetic oligonucleotide
gucauggaguagaauggua

SEQ ID NO: 2349055 - RNA, 19 nt, Artificial Sequence
  Description of Artificial Sequence: Synthetic oligonucleotide
ggugauacuuguguccucu

SEQ ID NO: 2349056 - RNA, 19 nt, Artificial Sequence
  Description of Artificial Sequence: Synthetic oligonucleotide
acccaggcuaaguggcgaa

SEQ ID NO: 2349057 - RNA, 19 nt, Artificial Sequence
  Description of Artificial Sequence: Synthetic oligonucleotide
cuugucccauuugagggua

SEQ ID NO: 2349058 - RNA, 19 nt, Artificial Sequence
  Description of Artificial Sequence: Synthetic oligonucleotide
cagaaaauuuaaggugaua

SEQ ID NO: 2349059 - RNA, 19 nt, Artificial Sequence
  Description of Artificial Sequence: Synthetic oligonucleotide
ccacguaucuucaguagaa

SEQ ID NO: 2349060 - RNA, 19 nt, Artificial Sequence
  Description of Artificial Sequence: Synthetic oligonucleotide
cuucggcugugcaguucac

SEQ ID NO: 2349061 - RNA, 19 nt, Artificial Sequence
  Description of Artificial Sequence: Synthetic oligonucleotide
aguugaccucuggugcagu

SEQ ID NO: 2349062 - RNA, 19 nt, Artificial Sequence
  Description of Artificial Sequence: Synthetic oligonucleotide
cagcuuggagcuguagcca

SEQ ID NO: 2349063 - RNA, 19 nt, Artificial Sequence
  Description of Artificial Sequence: Synthetic oligonucleotide
cuuggcuuauuaggcuaga

SEQ ID NO: 2349064 - RNA, 19 nt, Artificial Sequence
  Description of Artificial Sequence: Synthetic oligonucleotide
cuaugcagcuuggagcugu

SEQ ID NO: 2349065 - RNA, 19 nt, Artificial Sequence
  Description of Artificial Sequence: Synthetic oligonucleotide
ggucgcugggaucuccauc

SEQ ID NO: 2349066 - RNA, 19 nt, Artificial Sequence
  Description of Artificial Sequence: Synthetic oligonucleotide
ggaaucuaugcagcuugga

SEQ ID NO: 2349067 - RNA, 19 nt, Artificial Sequence
  Description of Artificial Sequence: Synthetic oligonucleotide
agugggucgcugggaucuc

SEQ ID NO: 2349068 - RNA, 19 nt, Artificial Sequence
  Description of Artificial Sequence: Synthetic oligonucleotide
ggcuauugugcuuuacuuu

SEQ ID NO: 2349069 - RNA, 19 nt, Artificial Sequence
  Description of Artificial Sequence: Synthetic oligonucleotide
gccguauuguggaugccac

SEQ ID NO: 2349070 - RNA, 19 nt, Artificial Sequence
  Description of Artificial Sequence: Synthetic oligonucleotide
cccuggaggcugcauagug

SEQ ID NO: 2349071 - RNA, 19 nt, Artificial Sequence
  Description of Artificial Sequence: Synthetic oligonucleotide
ccacccaggcuaaguggcg

SEQ ID NO: 2349072 - RNA, 19 nt, Artificial Sequence
  Description of Artificial Sequence: Synthetic oligonucleotide
gcuugacgguuugaauuug

SEQ ID NO: 2349073 - RNA, 19 nt, Artificial Sequence
  Description of Artificial Sequence: Synthetic oligonucleotide
aucuggguucuugccaauu

SEQ ID NO: 2349074 - RNA, 19 nt, Artificial Sequence
  Description of Artificial Sequence: Synthetic oligonucleotide
gugccauuuuauaccacgu

SEQ ID NO: 2349075 - RNA, 19 nt, Artificial Sequence
  Description of Artificial Sequence: Synthetic oligonucleotide
gccagggaauaaucuccug

SEQ ID NO: 2349076 - RNA, 19 nt, Artificial Sequence
  Description of Artificial Sequence: Synthetic oligonucleotide
ggucuuuguuuacucugcu

SEQ ID NO: 2349077 - RNA, 19 nt, Artificial Sequence
  Description of Artificial Sequence: Synthetic oligonucleotide
ugcagucccuugucccauu

SEQ ID NO: 2349078 - RNA, 19 nt, Artificial Sequence
  Description of Artificial Sequence: Synthetic oligonucleotide
ccagggaauaaucuccugu

SEQ ID NO: 2349079 - RNA, 19 nt, Artificial Sequence
  Description of Artificial Sequence: Synthetic oligonucleotide
gugggucgcugggaucucc

SEQ ID NO: 2349080 - RNA, 19 nt, Artificial Sequence
  Description of Artificial Sequence: Synthetic oligonucleotide
gcuuggagcuguagccaag

SEQ ID NO: 2349081 - RNA, 19 nt, Artificial Sequence
  Description of Artificial Sequence: Synthetic oligonucleotide
gcgaacuggcuucauuugu

SEQ ID NO: 2349082 - RNA, 19 nt, Artificial Sequence
  Description of Artificial Sequence: Synthetic oligonucleotide
gccaaugaggacagucauc

SEQ ID NO: 2349083 - RNA, 19 nt, Artificial Sequence
  Description of Artificial Sequence: Synthetic oligonucleotide
cuuuacuuuugugccguau

SEQ ID NO: 2349084 - RNA, 19 nt, Artificial Sequence
  Description of Artificial Sequence: Synthetic oligonucleotide
ggaugccacaaaacuugca

SEQ ID NO: 2349085 - RNA, 19 nt, Artificial Sequence
  Description of Artificial Sequence: Synthetic oligonucleotide
cguauuguggaugccacaa

SEQ ID NO: 2349086 - RNA, 19 nt, Artificial Sequence
  Description of Artificial Sequence: Synthetic oligonucleotide
accucuggugcagucccuu

SEQ ID NO: 2349087 - RNA, 19 nt, Artificial Sequence
  Description of Artificial Sequence: Synthetic oligonucleotide
ucgcugggaucuccaucuu

SEQ ID NO: 2349088 - RNA, 19 nt, Artificial Sequence
  Description of Artificial Sequence: Synthetic oligonucleotide
gguccccugcugauaguug

SEQ ID NO: 2349089 - RNA, 19 nt, Artificial Sequence
  Description of Artificial Sequence: Synthetic oligonucleotide
cacccaggcuaaguggcga

SEQ ID NO: 2349090 - RNA, 19 nt, Artificial Sequence
  Description of Artificial Sequence: Synthetic oligonucleotide
cugugggauuuacuuggcu

SEQ ID NO: 2349091 - RNA, 19 nt, Artificial Sequence
  Description of Artificial Sequence: Synthetic oligonucleotide
aucugggucuuagggucuu

SEQ ID NO: 2349092 - RNA, 19 nt, Artificial Sequence
  Description of Artificial Sequence: Synthetic oligonucleotide
gcaaugucauggaguagaa

SEQ ID NO: 2349093 - RNA, 19 nt, Artificial Sequence
  Description of Artificial Sequence: Synthetic oligonucleotide
agacggcuauugugcuuua

SEQ ID NO: 2349094 - RNA, 19 nt, Artificial Sequence
  Description of Artificial Sequence: Synthetic oligonucleotide
cuccuucaaaugugaaguu

SEQ ID NO: 2349095 - RNA, 19 nt, Artificial Sequence
  Description of Artificial Sequence: Synthetic oligonucleotide
ggcuucauuuguggagaca

SEQ ID NO: 2349096 - RNA, 19 nt, Artificial Sequence
  Description of Artificial Sequence: Synthetic oligonucleotide
gugccguauuguggaugcc

SEQ ID NO: 2349097 - RNA, 19 nt, Artificial Sequence
  Description of Artificial Sequence: Synthetic oligonucleotide
gcaguucacuguaacuugu

SEQ ID NO: 2349098 - RNA, 19 nt, Artificial Sequence
  Description of Artificial Sequence: Synthetic oligonucleotide
gagcuguagccaagacaaa

SEQ ID NO: 2349099 - RNA, 19 nt, Artificial Sequence
  Description of Artificial Sequence: Synthetic oligonucleotide
caguagaauucugccacau

SEQ ID NO: 2349100 - RNA, 19 nt, Artificial Sequence
  Description of Artificial Sequence: Synthetic oligonucleotide
cugcuuccuucgggagacg

SEQ ID NO: 2349101 - RNA, 19 nt, Artificial Sequence
  Description of Artificial Sequence: Synthetic oligonucleotide
caguucacuguaacuuguu

SEQ ID NO: 2349102 - RNA, 19 nt, Artificial Sequence
  Description of Artificial Sequence: Synthetic oligonucleotide
gcauagugggucgcuggga

SEQ ID NO: 2349103 - RNA, 19 nt, Artificial Sequence
  Description of Artificial Sequence: Synthetic oligonucleotide
aguggcgaacuggcuucau

SEQ ID NO: 2349104 - RNA, 19 nt, Artificial Sequence
  Description of Artificial Sequence: Synthetic oligonucleotide
gggagacggcuauugugcu

SEQ ID NO: 2349105 - RNA, 19 nt, Artificial Sequence
  Description of Artificial Sequence: Synthetic oligonucleotide
cugccaccgaggcagcccu

SEQ ID NO: 2349106 - RNA, 19 nt, Artificial Sequence
  Description of Artificial Sequence: Synthetic oligonucleotide
cacguaucuucaguagaau

SEQ ID NO: 2349107 - RNA, 19 nt, Artificial Sequence
  Description of Artificial Sequence: Synthetic oligonucleotide
ccgucugcacuuggaacac

SEQ ID NO: 2349108 - RNA, 19 nt, Artificial Sequence
  Description of Artificial Sequence: Synthetic oligonucleotide
guggcgaacuggcuucauu

SEQ ID NO: 2349109 - RNA, 19 nt, Artificial Sequence
  Description of Artificial Sequence: Synthetic oligonucleotide
gugauacuuguguccucuu

SEQ ID NO: 2349110 - RNA, 19 nt, Artificial Sequence
  Description of Artificial Sequence: Synthetic oligonucleotide
ccguauuguggaugccaca

SEQ ID NO: 2349111 - RNA, 19 nt, Artificial Sequence
  Description of Artificial Sequence: Synthetic oligonucleotide
gcuggaccgucugcacuug

SEQ ID NO: 2349112 - RNA, 19 nt, Artificial Sequence
  Description of Artificial Sequence: Synthetic oligonucleotide
gcuaaguggcgaacuggcu

SEQ ID NO: 2349113 - RNA, 19 nt, Artificial Sequence
  Description of Artificial Sequence: Synthetic oligonucleotide
gguuugaauuugugccauu

SEQ ID NO: 2349114 - RNA, 19 nt, Artificial Sequence
  Description of Artificial Sequence: Synthetic oligonucleotide
cccaggcuaaguggcgaac

SEQ ID NO: 2349115 - RNA, 19 nt, Artificial Sequence
  Description of Artificial Sequence: Synthetic oligonucleotide
gcuuuacuuuugugccgua

SEQ ID NO: 2349116 - RNA, 19 nt, Artificial Sequence
  Description of Artificial Sequence: Synthetic oligonucleotide
ggagacggcuauugugcuu

SEQ ID NO: 2349117 - RNA, 19 nt, Artificial Sequence
  Description of Artificial Sequence: Synthetic oligonucleotide
ccaggcuaaguggcgaacu

SEQ ID NO: 2349118 - RNA, 19 nt, Artificial Sequence
  Description of Artificial Sequence: Synthetic oligonucleotide
cggcuauugugcuuuacuu

SEQ ID NO: 2349119 - RNA, 19 nt, Artificial Sequence
  Description of Artificial Sequence: Synthetic oligonucleotide
ggguccccugcugauaguu

SEQ ID NO: 2349120 - RNA, 19 nt, Artificial Sequence
  Description of Artificial Sequence: Synthetic oligonucleotide
gggauuuacuuggcuuauu

SEQ ID NO: 2349121 - RNA, 19 nt, Artificial Sequence
  Description of Artificial Sequence: Synthetic oligonucleotide
gcagucccuugucccauuu

SEQ ID NO: 2349122 - RNA, 19 nt, Artificial Sequence
  Description of Artificial Sequence: Synthetic oligonucleotide
gggucgcugggaucuccau

SEQ ID NO: 2349123 - RNA, 19 nt, Artificial Sequence
  Description of Artificial Sequence: Synthetic oligonucleotide
ccaccgaggcagcccugga

SEQ ID NO: 2349124 - RNA, 19 nt, Artificial Sequence
  Description of Artificial Sequence: Synthetic oligonucleotide
cgcugggaucuccaucuuu

SEQ ID NO: 2349125 - RNA, 19 nt, Artificial Sequence
  Description of Artificial Sequence: Synthetic oligonucleotide
ccuucgggagacggcuauu

SEQ ID NO: 2349126 - RNA, 19 nt, Artificial Sequence
  Description of Artificial Sequence: Synthetic oligonucleotide
aaaaccuaggcacaaaagc

SEQ ID NO: 2349127 - RNA, 19 nt, Artificial Sequence
  Description of Artificial Sequence: Synthetic oligonucleotide
uuuuaaaccacaaauagca

SEQ ID NO: 2349128 - RNA, 19 nt, Artificial Sequence
  Description of Artificial Sequence: Synthetic oligonucleotide
aaacuuuuaaagcaagggc

SEQ ID NO: 2349129 - RNA, 19 nt, Artificial Sequence
  Description of Artificial Sequence: Synthetic oligonucleotide
auaaugacuacguuggugc

SEQ ID NO: 2349130 - RNA, 19 nt, Artificial Sequence
  Description of Artificial Sequence: Synthetic oligonucleotide
aggacuaaacuuuuaaagc

SEQ ID NO: 2349131 - RNA, 19 nt, Artificial Sequence
  Description of Artificial Sequence: Synthetic oligonucleotide
uuuuaugccaacuaauaag

SEQ ID NO: 2349132 - RNA, 19 nt, Artificial Sequence
  Description of Artificial Sequence: Synthetic oligonucleotide
uuaaaccacaaauagcagg

SEQ ID NO: 2349133 - RNA, 19 nt, Artificial Sequence
  Description of Artificial Sequence: Synthetic oligonucleotide
ucacauaaaaccuaggcac

SEQ ID NO: 2349134 - RNA, 19 nt, Artificial Sequence
  Description of Artificial Sequence: Synthetic oligonucleotide
agcuuuuaaaaguuguccc

SEQ ID NO: 2349135 - RNA, 19 nt, Artificial Sequence
  Description of Artificial Sequence: Synthetic oligonucleotide
uuuaugccaacuaauaaga

SEQ ID NO: 2349136 - RNA, 19 nt, Artificial Sequence
  Description of Artificial Sequence: Synthetic oligonucleotide
uaucuauagacucaguucu

SEQ ID NO: 2349137 - RNA, 19 nt, Artificial Sequence
  Description of Artificial Sequence: Synthetic oligonucleotide
aaagcaacggucugggccg

SEQ ID NO: 2349138 - RNA, 19 nt, Artificial Sequence
  Description of Artificial Sequence: Synthetic oligonucleotide
aauucaaauaugcacagua

SEQ ID NO: 2349139 - RNA, 19 nt, Artificial Sequence
  Description of Artificial Sequence: Synthetic oligonucleotide
auuagcauuuacaaaauac

SEQ ID NO: 2349140 - RNA, 19 nt, Artificial Sequence
  Description of Artificial Sequence: Synthetic oligonucleotide
aaagcaagggcauggaaug

SEQ ID NO: 2349141 - RNA, 19 nt, Artificial Sequence
  Description of Artificial Sequence: Synthetic oligonucleotide
uaaauugguauuuauuuac

SEQ ID NO: 2349142 - RNA, 19 nt, Artificial Sequence
  Description of Artificial Sequence: Synthetic oligonucleotide
uaaagcaacggucugggcc

SEQ ID NO: 2349143 - RNA, 19 nt, Artificial Sequence
  Description of Artificial Sequence: Synthetic oligonucleotide
ugauuauugcucuagaaaa

SEQ ID NO: 2349144 - RNA, 19 nt, Artificial Sequence
  Description of Artificial Sequence: Synthetic oligonucleotide
aauucauucucccucauua

SEQ ID NO: 2349145 - RNA, 19 nt, Artificial Sequence
  Description of Artificial Sequence: Synthetic oligonucleotide
uauauuuuaugccaacuaa

SEQ ID NO: 2349146 - RNA, 19 nt, Artificial Sequence
  Description of Artificial Sequence: Synthetic oligonucleotide
gcauuuacaaaauacgugg

SEQ ID NO: 2349147 - RNA, 19 nt, Artificial Sequence
  Description of Artificial Sequence: Synthetic oligonucleotide
uaaaccacaaauagcaggu

SEQ ID NO: 2349148 - RNA, 19 nt, Artificial Sequence
  Description of Artificial Sequence: Synthetic oligonucleotide
aaccacaaauagcaggugg

SEQ ID NO: 2349149 - RNA, 19 nt, Artificial Sequence
  Description of Artificial Sequence: Synthetic oligonucleotide
uccgauauuaaauugguau

SEQ ID NO: 2349150 - RNA, 19 nt, Artificial Sequence
  Description of Artificial Sequence: Synthetic oligonucleotide
auuuuaaaccacaaauagc

SEQ ID NO: 2349151 - RNA, 19 nt, Artificial Sequence
  Description of Artificial Sequence: Synthetic oligonucleotide
agguacgugaaaucaaccc

SEQ ID NO: 2349152 - RNA, 19 nt, Artificial Sequence
  Description of Artificial Sequence: Synthetic oligonucleotide
aaaaucacauaaaaccuag

SEQ ID NO: 2349153 - RNA, 19 nt, Artificial Sequence
  Description of Artificial Sequence: Synthetic oligonucleotide
aacuuuuaaagcaagggca

SEQ ID NO: 2349154 - RNA, 19 nt, Artificial Sequence
  Description of Artificial Sequence: Synthetic oligonucleotide
uuucucuucggcauaauga

SEQ ID NO: 2349155 - RNA, 19 nt, Artificial Sequence
  Description of Artificial Sequence: Synthetic oligonucleotide
uuuuaaagcaagggcaugg

SEQ ID NO: 2349156 - RNA, 19 nt, Artificial Sequence
  Description of Artificial Sequence: Synthetic oligonucleotide
cugacaaucgggcugaccg

SEQ ID NO: 2349157 - RNA, 19 nt, Artificial Sequence
  Description of Artificial Sequence: Synthetic oligonucleotide
acuaauaagaguccuaaaa

SEQ ID NO: 2349158 - RNA, 19 nt, Artificial Sequence
  Description of Artificial Sequence: Synthetic oligonucleotide
aaaaguaaagcaacggucu

SEQ ID NO: 2349159 - RNA, 19 nt, Artificial Sequence
  Description of Artificial Sequence: Synthetic oligonucleotide
aaggaugauggaaauuucc

SEQ ID NO: 2349160 - RNA, 19 nt, Artificial Sequence
  Description of Artificial Sequence: Synthetic oligonucleotide
accauaagaggauaaaaug

SEQ ID NO: 2349161 - RNA, 19 nt, Artificial Sequence
  Description of Artificial Sequence: Synthetic oligonucleotide
uuuucuugguuuaggcucg

SEQ ID NO: 2349162 - RNA, 19 nt, Artificial Sequence
  Description of Artificial Sequence: Synthetic oligonucleotide
caggacuaaacuuuuaaag

SEQ ID NO: 2349163 - RNA, 19 nt, Artificial Sequence
  Description of Artificial Sequence: Synthetic oligonucleotide
acaaauagcagguggccac

SEQ ID NO: 2349164 - RNA, 19 nt, Artificial Sequence
  Description of Artificial Sequence: Synthetic oligonucleotide
uuaucuauagacucaguuc

SEQ ID NO: 2349165 - RNA, 19 nt, Artificial Sequence
  Description of Artificial Sequence: Synthetic oligonucleotide
uaagaggauaaaaugucca

SEQ ID NO: 2349166 - RNA, 19 nt, Artificial Sequence
  Description of Artificial Sequence: Synthetic oligonucleotide
cauaagaggauaaaauguc

SEQ ID NO: 2349167 - RNA, 19 nt, Artificial Sequence
  Description of Artificial Sequence: Synthetic oligonucleotide
uucaaauaugcacaguaaa

SEQ ID NO: 2349168 - RNA, 19 nt, Artificial Sequence
  Description of Artificial Sequence: Synthetic oligonucleotide
caaaaguaaagcaacgguc

SEQ ID NO: 2349169 - RNA, 19 nt, Artificial Sequence
  Description of Artificial Sequence: Synthetic oligonucleotide
auaagaggauaaaaugucc

SEQ ID NO: 2349170 - RNA, 19 nt, Artificial Sequence
  Description of Artificial Sequence: Synthetic oligonucleotide
uauuuuaugccaacuaaua

SEQ ID NO: 2349171 - RNA, 19 nt, Artificial Sequence
  Description of Artificial Sequence: Synthetic oligonucleotide
uuuaaaccacaaauagcag

SEQ ID NO: 2349172 - RNA, 19 nt, Artificial Sequence
  Description of Artificial Sequence: Synthetic oligonucleotide
uuaggcucggguuuuggcg

SEQ ID NO: 2349173 - RNA, 19 nt, Artificial Sequence
  Description of Artificial Sequence: Synthetic oligonucleotide
acagguuucgcugacaauc

SEQ ID NO: 2349174 - RNA, 19 nt, Artificial Sequence
  Description of Artificial Sequence: Synthetic oligonucleotide
uaaaaccuaggcacaaaag

SEQ ID NO: 2349175 - RNA, 19 nt, Artificial Sequence
  Description of Artificial Sequence: Synthetic oligonucleotide
ucuggagacuuucucuucg

SEQ ID NO: 2349176 - RNA, 19 nt, Artificial Sequence
  Description of Artificial Sequence: Synthetic oligonucleotide
uagcauuuacaaaauacgu

SEQ ID NO: 2349177 - RNA, 19 nt, Artificial Sequence
  Description of Artificial Sequence: Synthetic oligonucleotide
aucacauaaaaccuaggca

SEQ ID NO: 2349178 - RNA, 19 nt, Artificial Sequence
  Description of Artificial Sequence: Synthetic oligonucleotide
aauagcuuuuaaaaguugu

SEQ ID NO: 2349179 - RNA, 19 nt, Artificial Sequence
  Description of Artificial Sequence: Synthetic oligonucleotide
auuuugcagacaugaaaac

SEQ ID NO: 2349180 - RNA, 19 nt, Artificial Sequence
  Description of Artificial Sequence: Synthetic oligonucleotide
uauuaaauugguauuuauu

SEQ ID NO: 2349181 - RNA, 19 nt, Artificial Sequence
  Description of Artificial Sequence: Synthetic oligonucleotide
ugcugaauccauuuuacac

SEQ ID NO: 2349182 - RNA, 19 nt, Artificial Sequence
  Description of Artificial Sequence: Synthetic oligonucleotide
uuaaggaugauggaaauuu

SEQ ID NO: 2349183 - RNA, 19 nt, Artificial Sequence
  Description of Artificial Sequence: Synthetic oligonucleotide
ucauucucccucauuaucu

SEQ ID NO: 2349184 - RNA, 19 nt, Artificial Sequence
  Description of Artificial Sequence: Synthetic oligonucleotide
uaaagcaagggcauggaau

SEQ ID NO: 2349185 - RNA, 19 nt, Artificial Sequence
  Description of Artificial Sequence: Synthetic oligonucleotide
uuaaauugguauuuauuua

SEQ ID NO: 2349186 - RNA, 19 nt, Artificial Sequence
  Description of Artificial Sequence: Synthetic oligonucleotide
aaguugucccaagagguac

SEQ ID NO: 2349187 - RNA, 19 nt, Artificial Sequence
  Description of Artificial Sequence: Synthetic oligonucleotide
cugaauccauuuuacacgc

SEQ ID NO: 2349188 - RNA, 19 nt, Artificial Sequence
  Description of Artificial Sequence: Synthetic oligonucleotide
gcugaauccauuuuacacg

SEQ ID NO: 2349189 - RNA, 19 nt, Artificial Sequence
  Description of Artificial Sequence: Synthetic oligonucleotide
aaccuaggcacaaaagcac

SEQ ID NO: 2349190 - RNA, 19 nt, Artificial Sequence
  Description of Artificial Sequence: Synthetic oligonucleotide
uagcuuuuaaaaguugucc

SEQ ID NO: 2349191 - RNA, 19 nt, Artificial Sequence
  Description of Artificial Sequence: Synthetic oligonucleotide
uuuacuuaaggaugaugga

SEQ ID NO: 2349192 - RNA, 19 nt, Artificial Sequence
  Description of Artificial Sequence: Synthetic oligonucleotide
uccacgacaauucauucuc

SEQ ID NO: 2349193 - RNA, 19 nt, Artificial Sequence
  Description of Artificial Sequence: Synthetic oligonucleotide
uuuuccacgacaauucauu

SEQ ID NO: 2349194 - RNA, 19 nt, Artificial Sequence
  Description of Artificial Sequence: Synthetic oligonucleotide
aaacaucaccauaagagga

SEQ ID NO: 2349195 - RNA, 19 nt, Artificial Sequence
  Description of Artificial Sequence: Synthetic oligonucleotide
aaaauagcuuuuaaaaguu

SEQ ID NO: 2349196 - RNA, 19 nt, Artificial Sequence
  Description of Artificial Sequence: Synthetic oligonucleotide
acaaaagcaccacugauua

SEQ ID NO: 2349197 - RNA, 19 nt, Artificial Sequence
  Description of Artificial Sequence: Synthetic oligonucleotide
uucucuucggcauaaugac

SEQ ID NO: 2349198 - RNA, 19 nt, Artificial Sequence
  Description of Artificial Sequence: Synthetic oligonucleotide
uuaugccaacuaauaagag

SEQ ID NO: 2349199 - RNA, 19 nt, Artificial Sequence
  Description of Artificial Sequence: Synthetic oligonucleotide
ggcauaaugacuacguugg

SEQ ID NO: 2349200 - RNA, 19 nt, Artificial Sequence
  Description of Artificial Sequence: Synthetic oligonucleotide
gaugauggaaauuuccaaa

SEQ ID NO: 2349201 - RNA, 19 nt, Artificial Sequence
  Description of Artificial Sequence: Synthetic oligonucleotide
uauauauuuuaugccaacu

SEQ ID NO: 2349202 - RNA, 19 nt, Artificial Sequence
  Description of Artificial Sequence: Synthetic oligonucleotide
agcaaaaguaaagcaacgg

SEQ ID NO: 2349203 - RNA, 19 nt, Artificial Sequence
  Description of Artificial Sequence: Synthetic oligonucleotide
aagaggauaaaauguccau

SEQ ID NO: 2349204 - RNA, 19 nt, Artificial Sequence
  Description of Artificial Sequence: Synthetic oligonucleotide
uucggcauaaugacuacgu

SEQ ID NO: 2349205 - RNA, 19 nt, Artificial Sequence
  Description of Artificial Sequence: Synthetic oligonucleotide
ucaaccccaguuuuccacg

SEQ ID NO: 2349206 - RNA, 19 nt, Artificial Sequence
  Description of Artificial Sequence: Synthetic oligonucleotide
uggugcagcaaaaguaaag

SEQ ID NO: 2349207 - RNA, 19 nt, Artificial Sequence
  Description of Artificial Sequence: Synthetic oligonucleotide
uauagacucaguucucugu

SEQ ID NO: 2349208 - RNA, 19 nt, Artificial Sequence
  Description of Artificial Sequence: Synthetic oligonucleotide
agugucaccauuugcagau

SEQ ID NO: 2349209 - RNA, 19 nt, Artificial Sequence
  Description of Artificial Sequence: Synthetic oligonucleotide
auauauuuuaugccaacua

SEQ ID NO: 2349210 - RNA, 19 nt, Artificial Sequence
  Description of Artificial Sequence: Synthetic oligonucleotide
uucgcugacaaucgggcug

SEQ ID NO: 2349211 - RNA, 19 nt, Artificial Sequence
  Description of Artificial Sequence: Synthetic oligonucleotide
aauagcagguggccacaac

SEQ ID NO: 2349212 - RNA, 19 nt, Artificial Sequence
  Description of Artificial Sequence: Synthetic oligonucleotide
aagcaccacugauuauugc

SEQ ID NO: 2349213 - RNA, 19 nt, Artificial Sequence
  Description of Artificial Sequence: Synthetic oligonucleotide
ugaaaacuguuuuauuuua

SEQ ID NO: 2349214 - RNA, 19 nt, Artificial Sequence
  Description of Artificial Sequence: Synthetic oligonucleotide
uuacuuaaggaugauggaa

SEQ ID NO: 2349215 - RNA, 19 nt, Artificial Sequence
  Description of Artificial Sequence: Synthetic oligonucleotide
agaggauaaaauguccauc

SEQ ID NO: 2349216 - RNA, 19 nt, Artificial Sequence
  Description of Artificial Sequence: Synthetic oligonucleotide
auaaaaccuaggcacaaaa

SEQ ID NO: 2349217 - RNA, 19 nt, Artificial Sequence
  Description of Artificial Sequence: Synthetic oligonucleotide
augaaaacuguuuuauuuu

SEQ ID NO: 2349218 - RNA, 19 nt, Artificial Sequence
  Description of Artificial Sequence: Synthetic oligonucleotide
ugaaaucaaccccaguuuu

SEQ ID NO: 2349219 - RNA, 19 nt, Artificial Sequence
  Description of Artificial Sequence: Synthetic oligonucleotide
accacaaauagcagguggc

SEQ ID NO: 2349220 - RNA, 19 nt, Artificial Sequence
  Description of Artificial Sequence: Synthetic oligonucleotide
aauuagcauuuacaaaaua

SEQ ID NO: 2349221 - RNA, 19 nt, Artificial Sequence
  Description of Artificial Sequence: Synthetic oligonucleotide
auagcagguggccacaacu

SEQ ID NO: 2349222 - RNA, 19 nt, Artificial Sequence
  Description of Artificial Sequence: Synthetic oligonucleotide
aaauugguauuuauuuacu

SEQ ID NO: 2349223 - RNA, 19 nt, Artificial Sequence
  Description of Artificial Sequence: Synthetic oligonucleotide
agcauuuacaaaauacgug

SEQ ID NO: 2349224 - RNA, 19 nt, Artificial Sequence
  Description of Artificial Sequence: Synthetic oligonucleotide
gaggauaaaauguccaucu

SEQ ID NO: 2349225 - RNA, 19 nt, Artificial Sequence
  Description of Artificial Sequence: Synthetic oligonucleotide
uauuuacuuaaggaugaug

SEQ ID NO: 2349226 - RNA, 19 nt, Artificial Sequence
  Description of Artificial Sequence: Synthetic oligonucleotide
auagcuuuuaaaaguuguc

SEQ ID NO: 2349227 - RNA, 19 nt, Artificial Sequence
  Description of Artificial Sequence: Synthetic oligonucleotide
uaggcucggguuuuggcgg

SEQ ID NO: 2349228 - RNA, 19 nt, Artificial Sequence
  Description of Artificial Sequence: Synthetic oligonucleotide
ucuucgaccugcaccuccg

SEQ ID NO: 2349229 - RNA, 19 nt, Artificial Sequence
  Description of Artificial Sequence: Synthetic oligonucleotide
uuuuacacgcagcuuccga

SEQ ID NO: 2349230 - RNA, 19 nt, Artificial Sequence
  Description of Artificial Sequence: Synthetic oligonucleotide
agagguacgugaaaucaac

SEQ ID NO: 2349231 - RNA, 19 nt, Artificial Sequence
  Description of Artificial Sequence: Synthetic oligonucleotide
uuaguuugguuccaucuuu

SEQ ID NO: 2349232 - RNA, 19 nt, Artificial Sequence
  Description of Artificial Sequence: Synthetic oligonucleotide
ggacuaaacuuuuaaagca

SEQ ID NO: 2349233 - RNA, 19 nt, Artificial Sequence
  Description of Artificial Sequence: Synthetic oligonucleotide
ugcuaaucuuuguuccagg

SEQ ID NO: 2349234 - RNA, 19 nt, Artificial Sequence
  Description of Artificial Sequence: Synthetic oligonucleotide
cuuuagugucaccauuugc

SEQ ID NO: 2349235 - RNA, 19 nt, Artificial Sequence
  Description of Artificial Sequence: Synthetic oligonucleotide
ucuugguuuaggcucgggu

SEQ ID NO: 2349236 - RNA, 19 nt, Artificial Sequence
  Description of Artificial Sequence: Synthetic oligonucleotide
uucccuuuagcaccucugc

SEQ ID NO: 2349237 - RNA, 19 nt, Artificial Sequence
  Description of Artificial Sequence: Synthetic oligonucleotide
caguuuuccacgacaauuc

SEQ ID NO: 2349238 - RNA, 19 nt, Artificial Sequence
  Description of Artificial Sequence: Synthetic oligonucleotide
acuaaacuuuuaaagcaag

SEQ ID NO: 2349239 - RNA, 19 nt, Artificial Sequence
  Description of Artificial Sequence: Synthetic oligonucleotide
acuacguuggugcagcaaa

SEQ ID NO: 2349240 - RNA, 19 nt, Artificial Sequence
  Description of Artificial Sequence: Synthetic oligonucleotide
uuuaggcucggguuuuggc

SEQ ID NO: 2349241 - RNA, 19 nt, Artificial Sequence
  Description of Artificial Sequence: Synthetic oligonucleotide
aagcaagggcauggaaugc

SEQ ID NO: 2349242 - RNA, 19 nt, Artificial Sequence
  Description of Artificial Sequence: Synthetic oligonucleotide
uuuacacgcagcuuccgau

SEQ ID NO: 2349243 - RNA, 19 nt, Artificial Sequence
  Description of Artificial Sequence: Synthetic oligonucleotide
ucugcuaaucuuuguucca

SEQ ID NO: 2349244 - RNA, 19 nt, Artificial Sequence
  Description of Artificial Sequence: Synthetic oligonucleotide
aaauuagcauuuacaaaau

SEQ ID NO: 2349245 - RNA, 19 nt, Artificial Sequence
  Description of Artificial Sequence: Synthetic oligonucleotide
aguugcucccgcaaugggc

SEQ ID NO: 2349246 - RNA, 19 nt, Artificial Sequence
  Description of Artificial Sequence: Synthetic oligonucleotide
cauaaugacuacguuggug

SEQ ID NO: 2349247 - RNA, 19 nt, Artificial Sequence
  Description of Artificial Sequence: Synthetic oligonucleotide
acugauuauugcucuagaa

SEQ ID NO: 2349248 - RNA, 19 nt, Artificial Sequence
  Description of Artificial Sequence: Synthetic oligonucleotide
aacuaauaagaguccuaaa

SEQ ID NO: 2349249 - RNA, 19 nt, Artificial Sequence
  Description of Artificial Sequence: Synthetic oligonucleotide
uuaaagcaagggcauggaa

SEQ ID NO: 2349250 - RNA, 19 nt, Artificial Sequence
  Description of Artificial Sequence: Synthetic oligonucleotide
cagguuucgcugacaaucg

SEQ ID NO: 2349251 - RNA, 19 nt, Artificial Sequence
  Description of Artificial Sequence: Synthetic oligonucleotide
uugcagacaugaaaacugu

SEQ ID NO: 2349252 - RNA, 19 nt, Artificial Sequence
  Description of Artificial Sequence: Synthetic oligonucleotide
uuugcccucuguauucucu

SEQ ID NO: 2349253 - RNA, 19 nt, Artificial Sequence
  Description of Artificial Sequence: Synthetic oligonucleotide
uaaggaugauggaaauuuc

SEQ ID NO: 2349254 - RNA, 19 nt, Artificial Sequence
  Description of Artificial Sequence: Synthetic oligonucleotide
ugccaacuaauaagagucc

SEQ ID NO: 2349255 - RNA, 19 nt, Artificial Sequence
  Description of Artificial Sequence: Synthetic oligonucleotide
cacgacaauucauucuccc

SEQ ID NO: 2349256 - RNA, 19 nt, Artificial Sequence
  Description of Artificial Sequence: Synthetic oligonucleotide
ucucugugccucuucagcu

SEQ ID NO: 2349257 - RNA, 19 nt, Artificial Sequence
  Description of Artificial Sequence: Synthetic oligonucleotide
uacgugaaaucaaccccag

SEQ ID NO: 2349258 - RNA, 19 nt, Artificial Sequence
  Description of Artificial Sequence: Synthetic oligonucleotide
agcuuccgauauuaaauug

SEQ ID NO: 2349259 - RNA, 19 nt, Artificial Sequence
  Description of Artificial Sequence: Synthetic oligonucleotide
uuuagcaccucugcuaauc

SEQ ID NO: 2349260 - RNA, 19 nt, Artificial Sequence
  Description of Artificial Sequence: Synthetic oligonucleotide
uuuaaagcaagggcaugga

SEQ ID NO: 2349261 - RNA, 19 nt, Artificial Sequence
  Description of Artificial Sequence: Synthetic oligonucleotide
accuaggcacaaaagcacc

SEQ ID NO: 2349262 - RNA, 19 nt, Artificial Sequence
  Description of Artificial Sequence: Synthetic oligonucleotide
aguaugcacaggacuaaac

SEQ ID NO: 2349263 - RNA, 19 nt, Artificial Sequence
  Description of Artificial Sequence: Synthetic oligonucleotide
uuuggcggaacagguuucg

SEQ ID NO: 2349264 - RNA, 19 nt, Artificial Sequence
  Description of Artificial Sequence: Synthetic oligonucleotide
uuccacgacaauucauucu

SEQ ID NO: 2349265 - RNA, 19 nt, Artificial Sequence
  Description of Artificial Sequence: Synthetic oligonucleotide
uugguuuaggcucggguuu

SEQ ID NO: 2349266 - RNA, 19 nt, Artificial Sequence
  Description of Artificial Sequence: Synthetic oligonucleotide
aacaucaccauaagaggau

SEQ ID NO: 2349267 - RNA, 19 nt, Artificial Sequence
  Description of Artificial Sequence: Synthetic oligonucleotide
cuuucucuucggcauaaug

SEQ ID NO: 2349268 - RNA, 19 nt, Artificial Sequence
  Description of Artificial Sequence: Synthetic oligonucleotide
ucaccauaagaggauaaaa

SEQ ID NO: 2349269 - RNA, 19 nt, Artificial Sequence
  Description of Artificial Sequence: Synthetic oligonucleotide
acuuaaggaugauggaaau

SEQ ID NO: 2349270 - RNA, 19 nt, Artificial Sequence
  Description of Artificial Sequence: Synthetic oligonucleotide
gcuuccgauauuaaauugg

SEQ ID NO: 2349271 - RNA, 19 nt, Artificial Sequence
  Description of Artificial Sequence: Synthetic oligonucleotide
aguuuuccacgacaauuca

SEQ ID NO: 2349272 - RNA, 19 nt, Artificial Sequence
  Description of Artificial Sequence: Synthetic oligonucleotide
guuccagguucuuucuuag

SEQ ID NO: 2349273 - RNA, 19 nt, Artificial Sequence
  Description of Artificial Sequence: Synthetic oligonucleotide
aaucaaccccaguuuucca

SEQ ID NO: 2349274 - RNA, 19 nt, Artificial Sequence
  Description of Artificial Sequence: Synthetic oligonucleotide
uuuccacgacaauucauuc

SEQ ID NO: 2349275 - RNA, 19 nt, Artificial Sequence
  Description of Artificial Sequence: Synthetic oligonucleotide
uguuccagguucuuucuua

SEQ ID NO: 2349276 - RNA, 19 nt, Artificial Sequence
  Description of Artificial Sequence: Synthetic oligonucleotide
aaccccaguuuuccacgac

SEQ ID NO: 2349277 - RNA, 19 nt, Artificial Sequence
  Description of Artificial Sequence: Synthetic oligonucleotide
cuauagacucaguucucug

SEQ ID NO: 2349278 - RNA, 19 nt, Artificial Sequence
  Description of Artificial Sequence: Synthetic oligonucleotide
aacggucugggccgccugg

SEQ ID NO: 2349279 - RNA, 19 nt, Artificial Sequence
  Description of Artificial Sequence: Synthetic oligonucleotide
guuucgcugacaaucgggc

SEQ ID NO: 2349280 - RNA, 19 nt, Artificial Sequence
  Description of Artificial Sequence: Synthetic oligonucleotide
uagacucaguucucugugc

SEQ ID NO: 2349281 - RNA, 19 nt, Artificial Sequence
  Description of Artificial Sequence: Synthetic oligonucleotide
ucgugugggcuccuguuug

SEQ ID NO: 2349282 - RNA, 19 nt, Artificial Sequence
  Description of Artificial Sequence: Synthetic oligonucleotide
ucucuucggcauaaugacu

SEQ ID NO: 2349283 - RNA, 19 nt, Artificial Sequence
  Description of Artificial Sequence: Synthetic oligonucleotide
uaggcacaaaagcaccacu

SEQ ID NO: 2349284 - RNA, 19 nt, Artificial Sequence
  Description of Artificial Sequence: Synthetic oligonucleotide
acgacaauucauucucccu

SEQ ID NO: 2349285 - RNA, 19 nt, Artificial Sequence
  Description of Artificial Sequence: Synthetic oligonucleotide
uaaugacuacguuggugca

SEQ ID NO: 2349286 - RNA, 19 nt, Artificial Sequence
  Description of Artificial Sequence: Synthetic oligonucleotide
uucucccucauuaucuaua

SEQ ID NO: 2349287 - RNA, 19 nt, Artificial Sequence
  Description of Artificial Sequence: Synthetic oligonucleotide
aggaugauggaaauuucca

SEQ ID NO: 2349288 - RNA, 19 nt, Artificial Sequence
  Description of Artificial Sequence: Synthetic oligonucleotide
ccucauuaucuauagacuc

SEQ ID NO: 2349289 - RNA, 19 nt, Artificial Sequence
  Description of Artificial Sequence: Synthetic oligonucleotide
guucuuucuuagcagaugu

SEQ ID NO: 2349290 - RNA, 19 nt, Artificial Sequence
  Description of Artificial Sequence: Synthetic oligonucleotide
ucuguauucucuggagacu

SEQ ID NO: 2349291 - RNA, 19 nt, Artificial Sequence
  Description of Artificial Sequence: Synthetic oligonucleotide
caagagguacgugaaauca

SEQ ID NO: 2349292 - RNA, 19 nt, Artificial Sequence
  Description of Artificial Sequence: Synthetic oligonucleotide
gaaaucaaccccaguuuuc

SEQ ID NO: 2349293 - RNA, 19 nt, Artificial Sequence
  Description of Artificial Sequence: Synthetic oligonucleotide
aaaccacaaauagcaggug

SEQ ID NO: 2349294 - RNA, 19 nt, Artificial Sequence
  Description of Artificial Sequence: Synthetic oligonucleotide
cacauaaaaccuaggcaca

SEQ ID NO: 2349295 - RNA, 19 nt, Artificial Sequence
  Description of Artificial Sequence: Synthetic oligonucleotide
acuauccauauuucauuaa

SEQ ID NO: 2349296 - RNA, 19 nt, Artificial Sequence
  Description of Artificial Sequence: Synthetic oligonucleotide
guaugcacaggacuaaacu

SEQ ID NO: 2349297 - RNA, 19 nt, Artificial Sequence
  Description of Artificial Sequence: Synthetic oligonucleotide
cuucccuuuagcaccucug

SEQ ID NO: 2349298 - RNA, 19 nt, Artificial Sequence
  Description of Artificial Sequence: Synthetic oligonucleotide
ucccuuuagcaccucugcu

SEQ ID NO: 2349299 - RNA, 19 nt, Artificial Sequence
  Description of Artificial Sequence: Synthetic oligonucleotide
uuuuggcggaacagguuuc

SEQ ID NO: 2349300 - RNA, 19 nt, Artificial Sequence
  Description of Artificial Sequence: Synthetic oligonucleotide
gcuuuuaaaaguuguccca

SEQ ID NO: 2349301 - RNA, 19 nt, Artificial Sequence
  Description of Artificial Sequence: Synthetic oligonucleotide
guuggugcagcaaaaguaa

SEQ ID NO: 2349302 - RNA, 19 nt, Artificial Sequence
  Description of Artificial Sequence: Synthetic oligonucleotide
guacgugaaaucaacccca

SEQ ID NO: 2349303 - RNA, 19 nt, Artificial Sequence
  Description of Artificial Sequence: Synthetic oligonucleotide
gagguacgugaaaucaacc

SEQ ID NO: 2349304 - RNA, 19 nt, Artificial Sequence
  Description of Artificial Sequence: Synthetic oligonucleotide
agguuucgcugacaaucgg

SEQ ID NO: 2349305 - RNA, 19 nt, Artificial Sequence
  Description of Artificial Sequence: Synthetic oligonucleotide
uuucgcugacaaucgggcu

SEQ ID NO: 2349306 - RNA, 19 nt, Artificial Sequence
  Description of Artificial Sequence: Synthetic oligonucleotide
cuuuuaaagcaagggcaug

SEQ ID NO: 2349307 - RNA, 19 nt, Artificial Sequence
  Description of Artificial Sequence: Synthetic oligonucleotide
uacacgcagcuuccgauau

SEQ ID NO: 2349308 - RNA, 19 nt, Artificial Sequence
  Description of Artificial Sequence: Synthetic oligonucleotide
ugaauccauuuuacacgca

SEQ ID NO: 2349309 - RNA, 19 nt, Artificial Sequence
  Description of Artificial Sequence: Synthetic oligonucleotide
uuugguuaguuugguucca

SEQ ID NO: 2349310 - RNA, 19 nt, Artificial Sequence
  Description of Artificial Sequence: Synthetic oligonucleotide
cacaguaugcacaggacua

SEQ ID NO: 2349311 - RNA, 19 nt, Artificial Sequence
  Description of Artificial Sequence: Synthetic oligonucleotide
accacaguaugcacaggac

SEQ ID NO: 2349312 - RNA, 19 nt, Artificial Sequence
  Description of Artificial Sequence: Synthetic oligonucleotide
cugcuaaucuuuguuccag

SEQ ID NO: 2349313 - RNA, 19 nt, Artificial Sequence
  Description of Artificial Sequence: Synthetic oligonucleotide
ucggguuuuggcggaacag

SEQ ID NO: 2349314 - RNA, 19 nt, Artificial Sequence
  Description of Artificial Sequence: Synthetic oligonucleotide
ugggcuccuguuugguuag

SEQ ID NO: 2349315 - RNA, 19 nt, Artificial Sequence
  Description of Artificial Sequence: Synthetic oligonucleotide
aguugucccaagagguacg

SEQ ID NO: 2349316 - RNA, 19 nt, Artificial Sequence
  Description of Artificial Sequence: Synthetic oligonucleotide
caacuaauaagaguccuaa

SEQ ID NO: 2349317 - RNA, 19 nt, Artificial Sequence
  Description of Artificial Sequence: Synthetic oligonucleotide
uggcggaacagguuucgcu

SEQ ID NO: 2349318 - RNA, 19 nt, Artificial Sequence
  Description of Artificial Sequence: Synthetic oligonucleotide
uuggugcagcaaaaguaaa

SEQ ID NO: 2349319 - RNA, 19 nt, Artificial Sequence
  Description of Artificial Sequence: Synthetic oligonucleotide
cuucggcauaaugacuacg

SEQ ID NO: 2349320 - RNA, 19 nt, Artificial Sequence
  Description of Artificial Sequence: Synthetic oligonucleotide
uuccgauauuaaauuggua

SEQ ID NO: 2349321 - RNA, 19 nt, Artificial Sequence
  Description of Artificial Sequence: Synthetic oligonucleotide
gguuucgcugacaaucggg

SEQ ID NO: 2349322 - RNA, 19 nt, Artificial Sequence
  Description of Artificial Sequence: Synthetic oligonucleotide
aaaguugucccaagaggua

SEQ ID NO: 2349323 - RNA, 19 nt, Artificial Sequence
  Description of Artificial Sequence: Synthetic oligonucleotide
aucuauagacucaguucuc

SEQ ID NO: 2349324 - RNA, 19 nt, Artificial Sequence
  Description of Artificial Sequence: Synthetic oligonucleotide
uuacacgcagcuuccgaua

SEQ ID NO: 2349325 - RNA, 19 nt, Artificial Sequence
  Description of Artificial Sequence: Synthetic oligonucleotide
ggcggaacagguuucgcug

SEQ ID NO: 2349326 - RNA, 19 nt, Artificial Sequence
  Description of Artificial Sequence: Synthetic oligonucleotide
cucuucgaccugcaccucc

SEQ ID NO: 2349327 - RNA, 19 nt, Artificial Sequence
  Description of Artificial Sequence: Synthetic oligonucleotide
ugacaaucgggcugaccgu

SEQ ID NO: 2349328 - RNA, 19 nt, Artificial Sequence
  Description of Artificial Sequence: Synthetic oligonucleotide
cacaggacuaaacuuuuaa

SEQ ID NO: 2349329 - RNA, 19 nt, Artificial Sequence
  Description of Artificial Sequence: Synthetic oligonucleotide
aaucgggcugaccgucgug

SEQ ID NO: 2349330 - RNA, 19 nt, Artificial Sequence
  Description of Artificial Sequence: Synthetic oligonucleotide
cagguucuuucuuagcaga

SEQ ID NO: 2349331 - RNA, 19 nt, Artificial Sequence
  Description of Artificial Sequence: Synthetic oligonucleotide
acauaaaaccuaggcacaa

SEQ ID NO: 2349332 - RNA, 19 nt, Artificial Sequence
  Description of Artificial Sequence: Synthetic oligonucleotide
cuggcacgccacuggaugc

SEQ ID NO: 2349333 - RNA, 19 nt, Artificial Sequence
  Description of Artificial Sequence: Synthetic oligonucleotide
ugcagacaugaaaacuguu

SEQ ID NO: 2349334 - RNA, 19 nt, Artificial Sequence
  Description of Artificial Sequence: Synthetic oligonucleotide
cuuccgauauuaaauuggu

SEQ ID NO: 2349335 - RNA, 19 nt, Artificial Sequence
  Description of Artificial Sequence: Synthetic oligonucleotide
uucgaccugcaccuccgcu

SEQ ID NO: 2349336 - RNA, 19 nt, Artificial Sequence
  Description of Artificial Sequence: Synthetic oligonucleotide
uucuuucuuagcagauguu

SEQ ID NO: 2349337 - RNA, 19 nt, Artificial Sequence
  Description of Artificial Sequence: Synthetic oligonucleotide
ggagacuuucucuucggca

SEQ ID NO: 2349338 - RNA, 19 nt, Artificial Sequence
  Description of Artificial Sequence: Synthetic oligonucleotide
caccauaagaggauaaaau

SEQ ID NO: 2349339 - RNA, 19 nt, Artificial Sequence
  Description of Artificial Sequence: Synthetic oligonucleotide
gcaaaaguaaagcaacggu

SEQ ID NO: 2349340 - RNA, 19 nt, Artificial Sequence
  Description of Artificial Sequence: Synthetic oligonucleotide
ggaugauggaaauuuccaa

SEQ ID NO: 2349341 - RNA, 19 nt, Artificial Sequence
  Description of Artificial Sequence: Synthetic oligonucleotide
gguuaguuugguuccaucu

SEQ ID NO: 2349342 - RNA, 19 nt, Artificial Sequence
  Description of Artificial Sequence: Synthetic oligonucleotide
aucaccauaagaggauaaa

SEQ ID NO: 2349343 - RNA, 19 nt, Artificial Sequence
  Description of Artificial Sequence: Synthetic oligonucleotide
ugguuaguuugguuccauc

SEQ ID NO: 2349344 - RNA, 19 nt, Artificial Sequence
  Description of Artificial Sequence: Synthetic oligonucleotide
ucggcauaaugacuacguu

SEQ ID NO: 2349345 - RNA, 19 nt, Artificial Sequence
  Description of Artificial Sequence: Synthetic oligonucleotide
ccauaagaggauaaaaugu

SEQ ID NO: 2349346 - RNA, 19 nt, Artificial Sequence
  Description of Artificial Sequence: Synthetic oligonucleotide
uuucuugguuuaggcucgg

SEQ ID NO: 2349347 - RNA, 19 nt, Artificial Sequence
  Description of Artificial Sequence: Synthetic oligonucleotide
uguauucucuggagacuuu

SEQ ID NO: 2349348 - RNA, 19 nt, Artificial Sequence
  Description of Artificial Sequence: Synthetic oligonucleotide
ucuuugcccucuguauucu

SEQ ID NO: 2349349 - RNA, 19 nt, Artificial Sequence
  Description of Artificial Sequence: Synthetic oligonucleotide
guuuuggcggaacagguuu

SEQ ID NO: 2349350 - RNA, 19 nt, Artificial Sequence
  Description of Artificial Sequence: Synthetic oligonucleotide
ucgcugacaaucgggcuga

SEQ ID NO: 2349351 - RNA, 19 nt, Artificial Sequence
  Description of Artificial Sequence: Synthetic oligonucleotide
agcccggccucuucgaccu

SEQ ID NO: 2349352 - RNA, 19 nt, Artificial Sequence
  Description of Artificial Sequence: Synthetic oligonucleotide
uagcccggccucuucgacc

SEQ ID NO: 2349353 - RNA, 19 nt, Artificial Sequence
  Description of Artificial Sequence: Synthetic oligonucleotide
aagcaacggucugggccgc

SEQ ID NO: 2349354 - RNA, 19 nt, Artificial Sequence
  Description of Artificial Sequence: Synthetic oligonucleotide
ugcucccgcaaugggcucg

SEQ ID NO: 2349355 - RNA, 19 nt, Artificial Sequence
  Description of Artificial Sequence: Synthetic oligonucleotide
cugaccgucgugugggcuc

SEQ ID NO: 2349356 - RNA, 19 nt, Artificial Sequence
  Description of Artificial Sequence: Synthetic oligonucleotide
gccacaacuauccauauuu

SEQ ID NO: 2349357 - RNA, 19 nt, Artificial Sequence
  Description of Artificial Sequence: Synthetic oligonucleotide
caguugcucccgcaauggg

SEQ ID NO: 2349358 - RNA, 19 nt, Artificial Sequence
  Description of Artificial Sequence: Synthetic oligonucleotide
ggcaguaccuuccuuucca

SEQ ID NO: 2349359 - RNA, 19 nt, Artificial Sequence
  Description of Artificial Sequence: Synthetic oligonucleotide
aaauagcagguggccacaa

SEQ ID NO: 2349360 - RNA, 19 nt, Artificial Sequence
  Description of Artificial Sequence: Synthetic oligonucleotide
uucuugguuuaggcucggg

SEQ ID NO: 2349361 - RNA, 19 nt, Artificial Sequence
  Description of Artificial Sequence: Synthetic oligonucleotide
ucccaagagguacgugaaa

SEQ ID NO: 2349362 - RNA, 19 nt, Artificial Sequence
  Description of Artificial Sequence: Synthetic oligonucleotide
acaaucgggcugaccgucg

SEQ ID NO: 2349363 - RNA, 19 nt, Artificial Sequence
  Description of Artificial Sequence: Synthetic oligonucleotide
guuaguuugguuccaucuu

SEQ ID NO: 2349364 - RNA, 19 nt, Artificial Sequence
  Description of Artificial Sequence: Synthetic oligonucleotide
cacaaauagcagguggcca

SEQ ID NO: 2349365 - RNA, 19 nt, Artificial Sequence
  Description of Artificial Sequence: Synthetic oligonucleotide
ucccgcaaugggcucggcu

SEQ ID NO: 2349366 - RNA, 19 nt, Artificial Sequence
  Description of Artificial Sequence: Synthetic oligonucleotide
agcaccucugcuaaucuuu

SEQ ID NO: 2349367 - RNA, 19 nt, Artificial Sequence
  Description of Artificial Sequence: Synthetic oligonucleotide
cuugguuuaggcucggguu

SEQ ID NO: 2349368 - RNA, 19 nt, Artificial Sequence
  Description of Artificial Sequence: Synthetic oligonucleotide
cggcauaaugacuacguug

SEQ ID NO: 2349369 - RNA, 19 nt, Artificial Sequence
  Description of Artificial Sequence: Synthetic oligonucleotide
caucaccauaagaggauaa

SEQ ID NO: 2349370 - RNA, 19 nt, Artificial Sequence
  Description of Artificial Sequence: Synthetic oligonucleotide
uggaugcugccuagcugcu

SEQ ID NO: 2349371 - RNA, 19 nt, Artificial Sequence
  Description of Artificial Sequence: Synthetic oligonucleotide
aucgggcugaccgucgugu

SEQ ID NO: 2349372 - RNA, 19 nt, Artificial Sequence
  Description of Artificial Sequence: Synthetic oligonucleotide
acgugaaaucaaccccagu

SEQ ID NO: 2349373 - RNA, 19 nt, Artificial Sequence
  Description of Artificial Sequence: Synthetic oligonucleotide
cacugauuauugcucuaga

SEQ ID NO: 2349374 - RNA, 19 nt, Artificial Sequence
  Description of Artificial Sequence: Synthetic oligonucleotide
cgacaauucauucucccuc

SEQ ID NO: 2349375 - RNA, 19 nt, Artificial Sequence
  Description of Artificial Sequence: Synthetic oligonucleotide
ugaccgucgugugggcucc

SEQ ID NO: 2349376 - RNA, 19 nt, Artificial Sequence
  Description of Artificial Sequence: Synthetic oligonucleotide
agacuuucucuucggcaua

SEQ ID NO: 2349377 - RNA, 19 nt, Artificial Sequence
  Description of Artificial Sequence: Synthetic oligonucleotide
acaucaccauaagaggaua

SEQ ID NO: 2349378 - RNA, 19 nt, Artificial Sequence
  Description of Artificial Sequence: Synthetic oligonucleotide
ccaagagguacgugaaauc

SEQ ID NO: 2349379 - RNA, 19 nt, Artificial Sequence
  Description of Artificial Sequence: Synthetic oligonucleotide
guugcucccgcaaugggcu

SEQ ID NO: 2349380 - RNA, 19 nt, Artificial Sequence
  Description of Artificial Sequence: Synthetic oligonucleotide
ugugggcuccuguuugguu

SEQ ID NO: 2349381 - RNA, 19 nt, Artificial Sequence
  Description of Artificial Sequence: Synthetic oligonucleotide
ggcuagcccggccucuucg

SEQ ID NO: 2349382 - RNA, 19 nt, Artificial Sequence
  Description of Artificial Sequence: Synthetic oligonucleotide
gggcugaccgucguguggg

SEQ ID NO: 2349383 - RNA, 19 nt, Artificial Sequence
  Description of Artificial Sequence: Synthetic oligonucleotide
cuuugcccucuguauucuc

SEQ ID NO: 2349384 - RNA, 19 nt, Artificial Sequence
  Description of Artificial Sequence: Synthetic oligonucleotide
uggccacaacuauccauau

SEQ ID NO: 2349385 - RNA, 19 nt, Artificial Sequence
  Description of Artificial Sequence: Synthetic oligonucleotide
acggucugggccgccuggc

SEQ ID NO: 2349386 - RNA, 19 nt, Artificial Sequence
  Description of Artificial Sequence: Synthetic oligonucleotide
uuggcggaacagguuucgc

SEQ ID NO: 2349387 - RNA, 19 nt, Artificial Sequence
  Description of Artificial Sequence: Synthetic oligonucleotide
gcaguaccuuccuuuccag

SEQ ID NO: 2349388 - RNA, 19 nt, Artificial Sequence
  Description of Artificial Sequence: Synthetic oligonucleotide
ucgggcugaccgucgugug

SEQ ID NO: 2349389 - RNA, 19 nt, Artificial Sequence
  Description of Artificial Sequence: Synthetic oligonucleotide
ccuggcacgccacuggaug

SEQ ID NO: 2349390 - RNA, 19 nt, Artificial Sequence
  Description of Artificial Sequence: Synthetic oligonucleotide
ugacuacguuggugcagca

SEQ ID NO: 2349391 - RNA, 19 nt, Artificial Sequence
  Description of Artificial Sequence: Synthetic oligonucleotide
uagcaccucugcuaaucuu

SEQ ID NO: 2349392 - RNA, 19 nt, Artificial Sequence
  Description of Artificial Sequence: Synthetic oligonucleotide
cuacguuggugcagcaaaa

SEQ ID NO: 2349393 - RNA, 19 nt, Artificial Sequence
  Description of Artificial Sequence: Synthetic oligonucleotide
agggcauggaaugcugaau

SEQ ID NO: 2349394 - RNA, 19 nt, Artificial Sequence
  Description of Artificial Sequence: Synthetic oligonucleotide
cuagcccggccucuucgac

SEQ ID NO: 2349395 - RNA, 19 nt, Artificial Sequence
  Description of Artificial Sequence: Synthetic oligonucleotide
ccacugauuauugcucuag

SEQ ID NO: 2349396 - RNA, 19 nt, Artificial Sequence
  Description of Artificial Sequence: Synthetic oligonucleotide
gacucaguucucugugccu

SEQ ID NO: 2349397 - RNA, 19 nt, Artificial Sequence
  Description of Artificial Sequence: Synthetic oligonucleotide
uugucccaagagguacgug

SEQ ID NO: 2349398 - RNA, 19 nt, Artificial Sequence
  Description of Artificial Sequence: Synthetic oligonucleotide
caaauagcagguggccaca

SEQ ID NO: 2349399 - RNA, 19 nt, Artificial Sequence
  Description of Artificial Sequence: Synthetic oligonucleotide
ugguuuaggcucggguuuu

SEQ ID NO: 2349400 - RNA, 19 nt, Artificial Sequence
  Description of Artificial Sequence: Synthetic oligonucleotide
agguucuuucuuagcagau

SEQ ID NO: 2349401 - RNA, 19 nt, Artificial Sequence
  Description of Artificial Sequence: Synthetic oligonucleotide
gcuaaucuuuguuccaggu

SEQ ID NO: 2349402 - RNA, 19 nt, Artificial Sequence
  Description of Artificial Sequence: Synthetic oligonucleotide
cuucgaccugcaccuccgc

SEQ ID NO: 2349403 - RNA, 19 nt, Artificial Sequence
  Description of Artificial Sequence: Synthetic oligonucleotide
ccacgacaauucauucucc

SEQ ID NO: 2349404 - RNA, 19 nt, Artificial Sequence
  Description of Artificial Sequence: Synthetic oligonucleotide
uggcacgccacuggaugcu

SEQ ID NO: 2349405 - RNA, 19 nt, Artificial Sequence
  Description of Artificial Sequence: Synthetic oligonucleotide
gccuagcugcugcaguugc

SEQ ID NO: 2349406 - RNA, 19 nt, Artificial Sequence
  Description of Artificial Sequence: Synthetic oligonucleotide
cacgcagcuuccgauauua

SEQ ID NO: 2349407 - RNA, 19 nt, Artificial Sequence
  Description of Artificial Sequence: Synthetic oligonucleotide
gacuacguuggugcagcaa

SEQ ID NO: 2349408 - RNA, 19 nt, Artificial Sequence
  Description of Artificial Sequence: Synthetic oligonucleotide
cagcuuccgauauuaaauu

SEQ ID NO: 2349409 - RNA, 19 nt, Artificial Sequence
  Description of Artificial Sequence: Synthetic oligonucleotide
agcaacggucugggccgcc

SEQ ID NO: 2349410 - RNA, 19 nt, Artificial Sequence
  Description of Artificial Sequence: Synthetic oligonucleotide
gcaagggcauggaaugcug

SEQ ID NO: 2349411 - RNA, 19 nt, Artificial Sequence
  Description of Artificial Sequence: Synthetic oligonucleotide
gucccaagagguacgugaa

SEQ ID NO: 2349412 - RNA, 19 nt, Artificial Sequence
  Description of Artificial Sequence: Synthetic oligonucleotide
ccaacuaauaagaguccua

SEQ ID NO: 2349413 - RNA, 19 nt, Artificial Sequence
  Description of Artificial Sequence: Synthetic oligonucleotide
gcaccucugcuaaucuuug

SEQ ID NO: 2349414 - RNA, 19 nt, Artificial Sequence
  Description of Artificial Sequence: Synthetic oligonucleotide
cuuaaggaugauggaaauu

SEQ ID NO: 2349415 - RNA, 19 nt, Artificial Sequence
  Description of Artificial Sequence: Synthetic oligonucleotide
gcggaacagguuucgcuga

SEQ ID NO: 2349416 - RNA, 19 nt, Artificial Sequence
  Description of Artificial Sequence: Synthetic oligonucleotide
cccuuuagcaccucugcua

SEQ ID NO: 2349417 - RNA, 19 nt, Artificial Sequence
  Description of Artificial Sequence: Synthetic oligonucleotide
cacuggaugcugccuagcu

SEQ ID NO: 2349418 - RNA, 19 nt, Artificial Sequence
  Description of Artificial Sequence: Synthetic oligonucleotide
ccgauauuaaauugguauu

SEQ ID NO: 2349419 - RNA, 19 nt, Artificial Sequence
  Description of Artificial Sequence: Synthetic oligonucleotide
ccgcaaugggcucggcuag

SEQ ID NO: 2349420 - RNA, 19 nt, Artificial Sequence
  Description of Artificial Sequence: Synthetic oligonucleotide
acuuucucuucggcauaau

SEQ ID NO: 2349421 - RNA, 19 nt, Artificial Sequence
  Description of Artificial Sequence: Synthetic oligonucleotide
gccaacuaauaagaguccu

SEQ ID NO: 2349422 - RNA, 19 nt, Artificial Sequence
  Description of Artificial Sequence: Synthetic oligonucleotide
gguuuaggcucggguuuug

SEQ ID NO: 2349423 - RNA, 19 nt, Artificial Sequence
  Description of Artificial Sequence: Synthetic oligonucleotide
cucaguucucugugccucu

SEQ ID NO: 2349424 - RNA, 19 nt, Artificial Sequence
  Description of Artificial Sequence: Synthetic oligonucleotide
gcugacaaucgggcugacc

SEQ ID NO: 2349425 - RNA, 19 nt, Artificial Sequence
  Description of Artificial Sequence: Synthetic oligonucleotide
ggaacagguuucgcugaca

SEQ ID NO: 2349426 - RNA, 19 nt, Artificial Sequence
  Description of Artificial Sequence: Synthetic oligonucleotide
cccgcaaugggcucggcua

SEQ ID NO: 2349427 - RNA, 19 nt, Artificial Sequence
  Description of Artificial Sequence: Synthetic oligonucleotide
ccaucuuugcccucuguau

SEQ ID NO: 2349428 - RNA, 19 nt, Artificial Sequence
  Description of Artificial Sequence: Synthetic oligonucleotide
gucgugugggcuccuguuu

SEQ ID NO: 2349429 - RNA, 19 nt, Artificial Sequence
  Description of Artificial Sequence: Synthetic oligonucleotide
ccaguuuuccacgacaauu

SEQ ID NO: 2349430 - RNA, 19 nt, Artificial Sequence
  Description of Artificial Sequence: Synthetic oligonucleotide
gcuagcccggccucuucga

SEQ ID NO: 2349431 - RNA, 19 nt, Artificial Sequence
  Description of Artificial Sequence: Synthetic oligonucleotide
cugccuagcugcugcaguu

SEQ ID NO: 2349432 - RNA, 19 nt, Artificial Sequence
  Description of Artificial Sequence: Synthetic oligonucleotide
gcaccuccgcuuccauccc

SEQ ID NO: 2349433 - RNA, 19 nt, Artificial Sequence
  Description of Artificial Sequence: Synthetic oligonucleotide
gcucccgcaaugggcucgg

SEQ ID NO: 2349434 - RNA, 19 nt, Artificial Sequence
  Description of Artificial Sequence: Synthetic oligonucleotide
accgucgugugggcuccug

SEQ ID NO: 2349435 - RNA, 19 nt, Artificial Sequence
  Description of Artificial Sequence: Synthetic oligonucleotide
ucggcuagcccggccucuu

SEQ ID NO: 2349436 - RNA, 19 nt, Artificial Sequence
  Description of Artificial Sequence: Synthetic oligonucleotide
cgggcugaccgucgugugg

SEQ ID NO: 2349437 - RNA, 19 nt, Artificial Sequence
  Description of Artificial Sequence: Synthetic oligonucleotide
cuuuagcaccucugcuaau

SEQ ID NO: 2349438 - RNA, 19 nt, Artificial Sequence
  Description of Artificial Sequence: Synthetic oligonucleotide
ggcugaccgucgugugggc

SEQ ID NO: 2349439 - RNA, 19 nt, Artificial Sequence
  Description of Artificial Sequence: Synthetic oligonucleotide
caaucgggcugaccgucgu

SEQ ID NO: 2349440 - RNA, 19 nt, Artificial Sequence
  Description of Artificial Sequence: Synthetic oligonucleotide
cgauauuaaauugguauuu

SEQ ID NO: 2349441 - RNA, 19 nt, Artificial Sequence
  Description of Artificial Sequence: Synthetic oligonucleotide
gcuccuguuugguuaguuu

SEQ ID NO: 2349442 - RNA, 19 nt, Artificial Sequence
  Description of Artificial Sequence: Synthetic oligonucleotide
ggcacgccacuggaugcug

SEQ ID NO: 2349443 - RNA, 19 nt, Artificial Sequence
  Description of Artificial Sequence: Synthetic oligonucleotide
cugugccucuucagcuuua

SEQ ID NO: 2349444 - RNA, 19 nt, Artificial Sequence
  Description of Artificial Sequence: Synthetic oligonucleotide
cugcaguugcucccgcaau

SEQ ID NO: 2349445 - RNA, 19 nt, Artificial Sequence
  Description of Artificial Sequence: Synthetic oligonucleotide
cccaagagguacgugaaau

SEQ ID NO: 2349446 - RNA, 19 nt, Artificial Sequence
  Description of Artificial Sequence: Synthetic oligonucleotide
acgcagcuuccgauauuaa

SEQ ID NO: 2349447 - RNA, 19 nt, Artificial Sequence
  Description of Artificial Sequence: Synthetic oligonucleotide
cccggccucuucgaccugc

SEQ ID NO: 2349448 - RNA, 19 nt, Artificial Sequence
  Description of Artificial Sequence: Synthetic oligonucleotide
gguuuuggcggaacagguu

SEQ ID NO: 2349449 - RNA, 19 nt, Artificial Sequence
  Description of Artificial Sequence: Synthetic oligonucleotide
gcucggcuagcccggccuc

SEQ ID NO: 2349450 - RNA, 19 nt, Artificial Sequence
  Description of Artificial Sequence: Synthetic oligonucleotide
gugugggcuccuguuuggu

SEQ ID NO: 2349451 - RNA, 19 nt, Artificial Sequence
  Description of Artificial Sequence: Synthetic oligonucleotide
gggcucggcuagcccggcc

SEQ ID NO: 2349452 - RNA, 19 nt, Artificial Sequence
  Description of Artificial Sequence: Synthetic oligonucleotide
gcacaggacuaaacuuuua

SEQ ID NO: 2349453 - RNA, 19 nt, Artificial Sequence
  Description of Artificial Sequence: Synthetic oligonucleotide
ggccacaacuauccauauu

SEQ ID NO: 2349454 - RNA, 19 nt, Artificial Sequence
  Description of Artificial Sequence: Synthetic oligonucleotide
cgcaaugggcucggcuagc

SEQ ID NO: 2349455 - RNA, 19 nt, Artificial Sequence
  Description of Artificial Sequence: Synthetic oligonucleotide
cucggcuagcccggccucu

SEQ ID NO: 2349456 - RNA, 19 nt, Artificial Sequence
  Description of Artificial Sequence: Synthetic oligonucleotide
gcugaccgucgugugggcu

SEQ ID NO: 2349457 - RNA, 19 nt, Artificial Sequence
  Description of Artificial Sequence: Synthetic oligonucleotide
cccaguuuuccacgacaau

SEQ ID NO: 2349458 - RNA, 19 nt, Artificial Sequence
  Description of Artificial Sequence: Synthetic oligonucleotide
cgccacuggaugcugccua

SEQ ID NO: 2349459 - RNA, 19 nt, Artificial Sequence
  Description of Artificial Sequence: Synthetic oligonucleotide
ggcucggguuuuggcggaa

SEQ ID NO: 2349460 - RNA, 19 nt, Artificial Sequence
  Description of Artificial Sequence: Synthetic oligonucleotide
gaccgucgugugggcuccu

SEQ ID NO: 2349461 - RNA, 19 nt, Artificial Sequence
  Description of Artificial Sequence: Synthetic oligonucleotide
gcccggccucuucgaccug

SEQ ID NO: 2349462 - RNA, 19 nt, Artificial Sequence
  Description of Artificial Sequence: Synthetic oligonucleotide
ccgucgugugggcuccugu

SEQ ID NO: 2349463 - RNA, 19 nt, Artificial Sequence
  Description of Artificial Sequence: Synthetic oligonucleotide
cggcuagcccggccucuuc

SEQ ID NO: 2349464 - RNA, 19 nt, Artificial Sequence
  Description of Artificial Sequence: Synthetic oligonucleotide
gccuggcacgccacuggau

SEQ ID NO: 2349465 - RNA, 19 nt, Artificial Sequence
  Description of Artificial Sequence: Synthetic oligonucleotide
cgcugacaaucgggcugac

SEQ ID NO: 2349466 - RNA, 19 nt, Artificial Sequence
  Description of Artificial Sequence: Synthetic oligonucleotide
uuuaguaaaguucugagcg

SEQ ID NO: 2349467 - RNA, 19 nt, Artificial Sequence
  Description of Artificial Sequence: Synthetic oligonucleotide
uuuaaugacaccuuaaaga

SEQ ID NO: 2349468 - RNA, 19 nt, Artificial Sequence
  Description of Artificial Sequence: Synthetic oligonucleotide
uuuacugauauuuaguaag

SEQ ID NO: 2349469 - RNA, 19 nt, Artificial Sequence
  Description of Artificial Sequence: Synthetic oligonucleotide
aaguauaaaauaccucgcc

SEQ ID NO: 2349470 - RNA, 19 nt, Artificial Sequence
  Description of Artificial Sequence: Synthetic oligonucleotide
  modified_base (15)..(15): a, c, u, g, unknown or other
acauacuucacacunaagg

SEQ ID NO: 2349471 - RNA, 19 nt, Artificial Sequence
  Description of Artificial Sequence: Synthetic oligonucleotide
aagucuaugccgcauaagg

SEQ ID NO: 2349472 - RNA, 19 nt, Artificial Sequence
  Description of Artificial Sequence: Synthetic oligonucleotide
guuuagaacguccugagcg

SEQ ID NO: 2349473 - RNA, 19 nt, Artificial Sequence
  Description of Artificial Sequence: Synthetic oligonucleotide
ugaaguaauguuuugacac

SEQ ID NO: 2349474 - RNA, 19 nt, Artificial Sequence
  Description of Artificial Sequence: Synthetic oligonucleotide
gauaacaaaauguuuugcc

SEQ ID NO: 2349475 - RNA, 19 nt, Artificial Sequence
  Description of Artificial Sequence: Synthetic oligonucleotide
uuugaaguacaauaaaaca

SEQ ID NO: 2349476 - RNA, 19 nt, Artificial Sequence
  Description of Artificial Sequence: Synthetic oligonucleotide
uauaugauuucccacauuc

SEQ ID NO: 2349477 - RNA, 19 nt, Artificial Sequence
  Description of Artificial Sequence: Synthetic oligonucleotide
aauuguagagcuucacuuc

SEQ ID NO: 2349478 - RNA, 19 nt, Artificial Sequence
  Description of Artificial Sequence: Synthetic oligonucleotide
uauuucacgagcuguaggg

SEQ ID NO: 2349479 - RNA, 19 nt, Artificial Sequence
  Description of Artificial Sequence: Synthetic oligonucleotide
uauuuaguaagucuucagc

SEQ ID NO: 2349480 - RNA, 19 nt, Artificial Sequence
  Description of Artificial Sequence: Synthetic oligonucleotide
aauguuuugacacauuauu

SEQ ID NO: 2349481 - RNA, 19 nt, Artificial Sequence
  Description of Artificial Sequence: Synthetic oligonucleotide
ugaauuuacugauauuuag

SEQ ID NO: 2349482 - RNA, 19 nt, Artificial Sequence
  Description of Artificial Sequence: Synthetic oligonucleotide
aaugaccaagucuaugccg

SEQ ID NO: 2349483 - RNA, 19 nt, Artificial Sequence
  Description of Artificial Sequence: Synthetic oligonucleotide
aaaauaccucgccacauuc

SEQ ID NO: 2349484 - RNA, 19 nt, Artificial Sequence
  Description of Artificial Sequence: Synthetic oligonucleotide
uuucucuauaguaggaagg

SEQ ID NO: 2349485 - RNA, 19 nt, Artificial Sequence
  Description of Artificial Sequence: Synthetic oligonucleotide
acauuauuuacaucugugg

SEQ ID NO: 2349486 - RNA, 19 nt, Artificial Sequence
  Description of Artificial Sequence: Synthetic oligonucleotide
uuuguguagaguaagguau

SEQ ID NO: 2349487 - RNA, 19 nt, Artificial Sequence
  Description of Artificial Sequence: Synthetic oligonucleotide
uaugguucucucuagagug

SEQ ID NO: 2349488 - RNA, 19 nt, Artificial Sequence
  Description of Artificial Sequence: Synthetic oligonucleotide
uucacuauggaguaauuug

SEQ ID NO: 2349489 - RNA, 19 nt, Artificial Sequence
  Description of Artificial Sequence: Synthetic oligonucleotide
aauuuacugauauuuagua

SEQ ID NO: 2349490 - RNA, 19 nt, Artificial Sequence
  Description of Artificial Sequence: Synthetic oligonucleotide
uaggauuucucuauaguag

SEQ ID NO: 2349491 - RNA, 19 nt, Artificial Sequence
  Description of Artificial Sequence: Synthetic oligonucleotide
uuaaugacaccuuaaagau

SEQ ID NO: 2349492 - RNA, 19 nt, Artificial Sequence
  Description of Artificial Sequence: Synthetic oligonucleotide
ugauguuccuucaggaugg

SEQ ID NO: 2349493 - RNA, 19 nt, Artificial Sequence
  Description of Artificial Sequence: Synthetic oligonucleotide
ucagcaaguauaaaauacc

SEQ ID NO: 2349494 - RNA, 19 nt, Artificial Sequence
  Description of Artificial Sequence: Synthetic oligonucleotide
uguuuaguaaaguucugag

SEQ ID NO: 2349495 - RNA, 19 nt, Artificial Sequence
  Description of Artificial Sequence: Synthetic oligonucleotide
ugauguuccuuaaggagcg

SEQ ID NO: 2349496 - RNA, 19 nt, Artificial Sequence
  Description of Artificial Sequence: Synthetic oligonucleotide
uggaaggauaacaaaaugu

SEQ ID NO: 2349497 - RNA, 19 nt, Artificial Sequence
  Description of Artificial Sequence: Synthetic oligonucleotide
uauggaguaauuuguguag

SEQ ID NO: 2349498 - RNA, 19 nt, Artificial Sequence
  Description of Artificial Sequence: Synthetic oligonucleotide
cuucacuucagcaugaauc

SEQ ID NO: 2349499 - RNA, 19 nt, Artificial Sequence
  Description of Artificial Sequence: Synthetic oligonucleotide
uaauuuguguagaguaagg

SEQ ID NO: 2349500 - RNA, 19 nt, Artificial Sequence
  Description of Artificial Sequence: Synthetic oligonucleotide
uccagaaugaccaagucua

SEQ ID NO: 2349501 - RNA, 19 nt, Artificial Sequence
  Description of Artificial Sequence: Synthetic oligonucleotide
ucuauaguaggaaggaccu

SEQ ID NO: 2349502 - RNA, 19 nt, Artificial Sequence
  Description of Artificial Sequence: Synthetic oligonucleotide
ugaaguacaauaaaacauu

SEQ ID NO: 2349503 - RNA, 19 nt, Artificial Sequence
  Description of Artificial Sequence: Synthetic oligonucleotide
auaacaaaauguuuugcca

SEQ ID NO: 2349504 - RNA, 19 nt, Artificial Sequence
  Description of Artificial Sequence: Synthetic oligonucleotide
uugauguuccuucaggaug

SEQ ID NO: 2349505 - RNA, 19 nt, Artificial Sequence
  Description of Artificial Sequence: Synthetic oligonucleotide
uuaauaaagguaagguuuc

SEQ ID NO: 2349506 - RNA, 19 nt, Artificial Sequence
  Description of Artificial Sequence: Synthetic oligonucleotide
ucuucagcaaguauaaaau

SEQ ID NO: 2349507 - RNA, 19 nt, Artificial Sequence
  Description of Artificial Sequence: Synthetic oligonucleotide
acugauauuuaguaagucu

SEQ ID NO: 2349508 - RNA, 19 nt, Artificial Sequence
  Description of Artificial Sequence: Synthetic oligonucleotide
uauaaaauaccucgccaca

SEQ ID NO: 2349509 - RNA, 19 nt, Artificial Sequence
  Description of Artificial Sequence: Synthetic oligonucleotide
auuaauaaagguaagguuu

SEQ ID NO: 2349510 - RNA, 19 nt, Artificial Sequence
  Description of Artificial Sequence: Synthetic oligonucleotide
aguagaaaagccuuuucca

SEQ ID NO: 2349511 - RNA, 19 nt, Artificial Sequence
  Description of Artificial Sequence: Synthetic oligonucleotide
aggauuucucuauaguagg

SEQ ID NO: 2349512 - RNA, 19 nt, Artificial Sequence
  Description of Artificial Sequence: Synthetic oligonucleotide
gaguagaaaagccuuuucc

SEQ ID NO: 2349513 - RNA, 19 nt, Artificial Sequence
  Description of Artificial Sequence: Synthetic oligonucleotide
uguauguuuucuuaaaguu

SEQ ID NO: 2349514 - RNA, 19 nt, Artificial Sequence
  Description of Artificial Sequence: Synthetic oligonucleotide
uaacaaaauguuuugccac

SEQ ID NO: 2349515 - RNA, 19 nt, Artificial Sequence
  Description of Artificial Sequence: Synthetic oligonucleotide
auaaagguaagguuucucu

SEQ ID NO: 2349516 - RNA, 19 nt, Artificial Sequence
  Description of Artificial Sequence: Synthetic oligonucleotide
aaaguucugagcgaguucu

SEQ ID NO: 2349517 - RNA, 19 nt, Artificial Sequence
  Description of Artificial Sequence: Synthetic oligonucleotide
guuuaaugacaccuuaaag

SEQ ID NO: 2349518 - RNA, 19 nt, Artificial Sequence
  Description of Artificial Sequence: Synthetic oligonucleotide
aguauaaaauaccucgcca

SEQ ID NO: 2349519 - RNA, 19 nt, Artificial Sequence
  Description of Artificial Sequence: Synthetic oligonucleotide
auuucucuauaguaggaag

SEQ ID NO: 2349520 - RNA, 19 nt, Artificial Sequence
  Description of Artificial Sequence: Synthetic oligonucleotide
aauaaagguaagguuucuc

SEQ ID NO: 2349521 - RNA, 19 nt, Artificial Sequence
  Description of Artificial Sequence: Synthetic oligonucleotide
uguuuaaugacaccuuaaa

SEQ ID NO: 2349522 - RNA, 19 nt, Artificial Sequence
  Description of Artificial Sequence: Synthetic oligonucleotide
uagaguaagguaugaauga

SEQ ID NO: 2349523 - RNA, 19 nt, Artificial Sequence
  Description of Artificial Sequence: Synthetic oligonucleotide
uauaguaggaaggaccuug

SEQ ID NO: 2349524 - RNA, 19 nt, Artificial Sequence
  Description of Artificial Sequence: Synthetic oligonucleotide
cauacugccacauauuuca

SEQ ID NO: 2349525 - RNA, 19 nt, Artificial Sequence
  Description of Artificial Sequence: Synthetic oligonucleotide
ugagcgaguacaaaagacu

SEQ ID NO: 2349526 - RNA, 19 nt, Artificial Sequence
  Description of Artificial Sequence: Synthetic oligonucleotide
uguuuugacacauuauuua

SEQ ID NO: 2349527 - RNA, 19 nt, Artificial Sequence
  Description of Artificial Sequence: Synthetic oligonucleotide
uguagaguaagguaugaau

SEQ ID NO: 2349528 - RNA, 19 nt, Artificial Sequence
  Description of Artificial Sequence: Synthetic oligonucleotide
aauguuuugccacauucuu

SEQ ID NO: 2349529 - RNA, 19 nt, Artificial Sequence
  Description of Artificial Sequence: Synthetic oligonucleotide
uucacuauuguaugguucu

SEQ ID NO: 2349530 - RNA, 19 nt, Artificial Sequence
  Description of Artificial Sequence: Synthetic oligonucleotide
acaccuuaaagauuaauaa

SEQ ID NO: 2349531 - RNA, 19 nt, Artificial Sequence
  Description of Artificial Sequence: Synthetic oligonucleotide
  modified_base (4)..(4): a, c, u, g, unknown or other
acunaagggauucucuuga

SEQ ID NO: 2349532 - RNA, 19 nt, Artificial Sequence
  Description of Artificial Sequence: Synthetic oligonucleotide
uugguguuuaguaaaguuc

SEQ ID NO: 2349533 - RNA, 19 nt, Artificial Sequence
  Description of Artificial Sequence: Synthetic oligonucleotide
uuguauguuuucuuaaagu

SEQ ID NO: 2349534 - RNA, 19 nt, Artificial Sequence
  Description of Artificial Sequence: Synthetic oligonucleotide
uauuguaugguucucucua

SEQ ID NO: 2349535 - RNA, 19 nt, Artificial Sequence
  Description of Artificial Sequence: Synthetic oligonucleotide
guauaaaauaccucgccac

SEQ ID NO: 2349536 - RNA, 19 nt, Artificial Sequence
  Description of Artificial Sequence: Synthetic oligonucleotide
agaaugagcccuuuguaug

SEQ ID NO: 2349537 - RNA, 19 nt, Artificial Sequence
  Description of Artificial Sequence: Synthetic oligonucleotide
ucacuauggaguaauuugu

SEQ ID NO: 2349538 - RNA, 19 nt, Artificial Sequence
  Description of Artificial Sequence: Synthetic oligonucleotide
acuauuguaugguucucuc

SEQ ID NO: 2349539 - RNA, 19 nt, Artificial Sequence
  Description of Artificial Sequence: Synthetic oligonucleotide
ugccacauccuucacaucu

SEQ ID NO: 2349540 - RNA, 19 nt, Artificial Sequence
  Description of Artificial Sequence: Synthetic oligonucleotide
caaguauaaaauaccucgc

SEQ ID NO: 2349541 - RNA, 19 nt, Artificial Sequence
  Description of Artificial Sequence: Synthetic oligonucleotide
aauucuugauguuccuuca

SEQ ID NO: 2349542 - RNA, 19 nt, Artificial Sequence
  Description of Artificial Sequence: Synthetic oligonucleotide
aauuuguguagaguaaggu

SEQ ID NO: 2349543 - RNA, 19 nt, Artificial Sequence
  Description of Artificial Sequence: Synthetic oligonucleotide
guuuaguaaaguucugagc

SEQ ID NO: 2349544 - RNA, 19 nt, Artificial Sequence
  Description of Artificial Sequence: Synthetic oligonucleotide
ugauuucccacauucuuca

SEQ ID NO: 2349545 - RNA, 19 nt, Artificial Sequence
  Description of Artificial Sequence: Synthetic oligonucleotide
auauuuaguaagucuucag

SEQ ID NO: 2349546 - RNA, 19 nt, Artificial Sequence
  Description of Artificial Sequence: Synthetic oligonucleotide
agcuauaugauuucccaca

SEQ ID NO: 2349547 - RNA, 19 nt, Artificial Sequence
  Description of Artificial Sequence: Synthetic oligonucleotide
uguaggauuucucuauagu

SEQ ID NO: 2349548 - RNA, 19 nt, Artificial Sequence
  Description of Artificial Sequence: Synthetic oligonucleotide
aggauaacaaaauguuuug

SEQ ID NO: 2349549 - RNA, 19 nt, Artificial Sequence
  Description of Artificial Sequence: Synthetic oligonucleotide
guuugaaguacaauaaaac

SEQ ID NO: 2349550 - RNA, 19 nt, Artificial Sequence
  Description of Artificial Sequence: Synthetic oligonucleotide
aacauacugccacauauuu

SEQ ID NO: 2349551 - RNA, 19 nt, Artificial Sequence
  Description of Artificial Sequence: Synthetic oligonucleotide
auauuucacgagcuguagg

SEQ ID NO: 2349552 - RNA, 19 nt, Artificial Sequence
  Description of Artificial Sequence: Synthetic oligonucleotide
cauucuucccauuuguaug

SEQ ID NO: 2349553 - RNA, 19 nt, Artificial Sequence
  Description of Artificial Sequence: Synthetic oligonucleotide
uaugauuucccacauucuu

SEQ ID NO: 2349554 - RNA, 19 nt, Artificial Sequence
  Description of Artificial Sequence: Synthetic oligonucleotide
auuccucacaauuguagag

SEQ ID NO: 2349555 - RNA, 19 nt, Artificial Sequence
  Description of Artificial Sequence: Synthetic oligonucleotide
uuacugauauuuaguaagu

SEQ ID NO: 2349556 - RNA, 19 nt, Artificial Sequence
  Description of Artificial Sequence: Synthetic oligonucleotide
uccagcgugaauuuacuga

SEQ ID NO: 2349557 - RNA, 19 nt, Artificial Sequence
  Description of Artificial Sequence: Synthetic oligonucleotide
ucuugauguuccuucagga

SEQ ID NO: 2349558 - RNA, 19 nt, Artificial Sequence
  Description of Artificial Sequence: Synthetic oligonucleotide
gaguaauuuguguagagua

SEQ ID NO: 2349559 - RNA, 19 nt, Artificial Sequence
  Description of Artificial Sequence: Synthetic oligonucleotide
augaccaagucuaugccgc

SEQ ID NO: 2349560 - RNA, 19 nt, Artificial Sequence
  Description of Artificial Sequence: Synthetic oligonucleotide
ugccacauauuucacgagc

SEQ ID NO: 2349561 - RNA, 19 nt, Artificial Sequence
  Description of Artificial Sequence: Synthetic oligonucleotide
uccugagcgaguacaaaag

SEQ ID NO: 2349562 - RNA, 19 nt, Artificial Sequence
  Description of Artificial Sequence: Synthetic oligonucleotide
cacauuauuuacaucugug

SEQ ID NO: 2349563 - RNA, 19 nt, Artificial Sequence
  Description of Artificial Sequence: Synthetic oligonucleotide
uuuagaacguccugagcga

SEQ ID NO: 2349564 - RNA, 19 nt, Artificial Sequence
  Description of Artificial Sequence: Synthetic oligonucleotide
auucucugguguuuagaac

SEQ ID NO: 2349565 - RNA, 19 nt, Artificial Sequence
  Description of Artificial Sequence: Synthetic oligonucleotide
  modified_base (12)..(12): a, c, u, g, unknown or other
uacuucacacunaagggau

SEQ ID NO: 2349566 - RNA, 19 nt, Artificial Sequence
  Description of Artificial Sequence: Synthetic oligonucleotide
uuugguguuuaguaaaguu

SEQ ID NO: 2349567 - RNA, 19 nt, Artificial Sequence
  Description of Artificial Sequence: Synthetic oligonucleotide
auggaaggauaacaaaaug

SEQ ID NO: 2349568 - RNA, 19 nt, Artificial Sequence
  Description of Artificial Sequence: Synthetic oligonucleotide
uucuuaaaguuugaaguac

SEQ ID NO: 2349569 - RNA, 19 nt, Artificial Sequence
  Description of Artificial Sequence: Synthetic oligonucleotide
acaauuguagagcuucacu

SEQ ID NO: 2349570 - RNA, 19 nt, Artificial Sequence
  Description of Artificial Sequence: Synthetic oligonucleotide
  modified_base (2)..(2): a, c, u, g, unknown or other
unaagggauucucuugaga

SEQ ID NO: 2349571 - RNA, 19 nt, Artificial Sequence
  Description of Artificial Sequence: Synthetic oligonucleotide
gaaugaccaagucuaugcc

SEQ ID NO: 2349572 - RNA, 19 nt, Artificial Sequence
  Description of Artificial Sequence: Synthetic oligonucleotide
uuaguaaaguucugagcga

SEQ ID NO: 2349573 - RNA, 19 nt, Artificial Sequence
  Description of Artificial Sequence: Synthetic oligonucleotide
acuaccuugucacauacuu

SEQ ID NO: 2349574 - RNA, 19 nt, Artificial Sequence
  Description of Artificial Sequence: Synthetic oligonucleotide
uguguuuaaugacaccuua

SEQ ID NO: 2349575 - RNA, 19 nt, Artificial Sequence
  Description of Artificial Sequence: Synthetic oligonucleotide
cauuauuuacaucugugga

SEQ ID NO: 2349576 - RNA, 19 nt, Artificial Sequence
  Description of Artificial Sequence: Synthetic oligonucleotide
uaguaaaguucugagcgag

SEQ ID NO: 2349577 - RNA, 19 nt, Artificial Sequence
  Description of Artificial Sequence: Synthetic oligonucleotide
uucugagcgaguucuaaac

SEQ ID NO: 2349578 - RNA, 19 nt, Artificial Sequence
  Description of Artificial Sequence: Synthetic oligonucleotide
acuauggaguaauuugugu

SEQ ID NO: 2349579 - RNA, 19 nt, Artificial Sequence
  Description of Artificial Sequence: Synthetic oligonucleotide
aauaccucgccacauucuu

SEQ ID NO: 2349580 - RNA, 19 nt, Artificial Sequence
  Description of Artificial Sequence: Synthetic oligonucleotide
acacuaccuugucacauac

SEQ ID NO: 2349581 - RNA, 19 nt, Artificial Sequence
  Description of Artificial Sequence: Synthetic oligonucleotide
auuuguguagaguaaggua

SEQ ID NO: 2349582 - RNA, 19 nt, Artificial Sequence
  Description of Artificial Sequence: Synthetic oligonucleotide
uggaguaauuuguguagag

SEQ ID NO: 2349583 - RNA, 19 nt, Artificial Sequence
  Description of Artificial Sequence: Synthetic oligonucleotide
ucugagcgaguucuaaaca

SEQ ID NO: 2349584 - RNA, 19 nt, Artificial Sequence
  Description of Artificial Sequence: Synthetic oligonucleotide
uuuacaucuguggaguuuc

SEQ ID NO: 2349585 - RNA, 19 nt, Artificial Sequence
  Description of Artificial Sequence: Synthetic oligonucleotide
guagcuauaugauuuccca

SEQ ID NO: 2349586 - RNA, 19 nt, Artificial Sequence
  Description of Artificial Sequence: Synthetic oligonucleotide
auuguaugguucucucuag

SEQ ID NO: 2349587 - RNA, 19 nt, Artificial Sequence
  Description of Artificial Sequence: Synthetic oligonucleotide
aaggguagcuauaugauuu

SEQ ID NO: 2349588 - RNA, 19 nt, Artificial Sequence
  Description of Artificial Sequence: Synthetic oligonucleotide
gaaguaauguuuugacaca

SEQ ID NO: 2349589 - RNA, 19 nt, Artificial Sequence
  Description of Artificial Sequence: Synthetic oligonucleotide
aaagccugaaguaauguuu

SEQ ID NO: 2349590 - RNA, 19 nt, Artificial Sequence
  Description of Artificial Sequence: Synthetic oligonucleotide
uuguguagaguaagguaug

SEQ ID NO: 2349591 - RNA, 19 nt, Artificial Sequence
  Description of Artificial Sequence: Synthetic oligonucleotide
cucacaauuguagagcuuc

SEQ ID NO: 2349592 - RNA, 19 nt, Artificial Sequence
  Description of Artificial Sequence: Synthetic oligonucleotide
uaccucgccacauucuucc

SEQ ID NO: 2349593 - RNA, 19 nt, Artificial Sequence
  Description of Artificial Sequence: Synthetic oligonucleotide
ucuaugccgcauaagguau

SEQ ID NO: 2349594 - RNA, 19 nt, Artificial Sequence
  Description of Artificial Sequence: Synthetic oligonucleotide
cuuaaagauuaauaaaggu

SEQ ID NO: 2349595 - RNA, 19 nt, Artificial Sequence
  Description of Artificial Sequence: Synthetic oligonucleotide
cugagcgaguacaaaagac

SEQ ID NO: 2349596 - RNA, 19 nt, Artificial Sequence
  Description of Artificial Sequence: Synthetic oligonucleotide
uguuuagaacguccugagc

SEQ ID NO: 2349597 - RNA, 19 nt, Artificial Sequence
  Description of Artificial Sequence: Synthetic oligonucleotide
auuucacgagcuguagggc

SEQ ID NO: 2349598 - RNA, 19 nt, Artificial Sequence
  Description of Artificial Sequence: Synthetic oligonucleotide
cuuaaggagcgaaggguag

SEQ ID NO: 2349599 - RNA, 19 nt, Artificial Sequence
  Description of Artificial Sequence: Synthetic oligonucleotide
uuccucacaauuguagagc

SEQ ID NO: 2349600 - RNA, 19 nt, Artificial Sequence
  Description of Artificial Sequence: Synthetic oligonucleotide
gauuaauaaagguaagguu

SEQ ID NO: 2349601 - RNA, 19 nt, Artificial Sequence
  Description of Artificial Sequence: Synthetic oligonucleotide
uuucacgagcuguagggcu

SEQ ID NO: 2349602 - RNA, 19 nt, Artificial Sequence
  Description of Artificial Sequence: Synthetic oligonucleotide
agcgugaauuuacugauau

SEQ ID NO: 2349603 - RNA, 19 nt, Artificial Sequence
  Description of Artificial Sequence: Synthetic oligonucleotide
ugagaaugagcccuuugua

SEQ ID NO: 2349604 - RNA, 19 nt, Artificial Sequence
  Description of Artificial Sequence: Synthetic oligonucleotide
agcaaguauaaaauaccuc

SEQ ID NO: 2349605 - RNA, 19 nt, Artificial Sequence
  Description of Artificial Sequence: Synthetic oligonucleotide
guaauguuuugacacauua

SEQ ID NO: 2349606 - RNA, 19 nt, Artificial Sequence
  Description of Artificial Sequence: Synthetic oligonucleotide
aguuugaaguacaauaaaa

SEQ ID NO: 2349607 - RNA, 19 nt, Artificial Sequence
  Description of Artificial Sequence: Synthetic oligonucleotide
uccuuugguguuuaguaaa

SEQ ID NO: 2349608 - RNA, 19 nt, Artificial Sequence
  Description of Artificial Sequence: Synthetic oligonucleotide
gucuucagcaaguauaaaa

SEQ ID NO: 2349609 - RNA, 19 nt, Artificial Sequence
  Description of Artificial Sequence: Synthetic oligonucleotide
cuucacuauuguaugguuc

SEQ ID NO: 2349610 - RNA, 19 nt, Artificial Sequence
  Description of Artificial Sequence: Synthetic oligonucleotide
acacauuauuuacaucugu

SEQ ID NO: 2349611 - RNA, 19 nt, Artificial Sequence
  Description of Artificial Sequence: Synthetic oligonucleotide
uccucacaauuguagagcu

SEQ ID NO: 2349612 - RNA, 19 nt, Artificial Sequence
  Description of Artificial Sequence: Synthetic oligonucleotide
uucuaaacauacugccaca

SEQ ID NO: 2349613 - RNA, 19 nt, Artificial Sequence
  Description of Artificial Sequence: Synthetic oligonucleotide
ugccgcauaagguaugagu

SEQ ID NO: 2349614 - RNA, 19 nt, Artificial Sequence
  Description of Artificial Sequence: Synthetic oligonucleotide
uaaagguaagguuucucuu

SEQ ID NO: 2349615 - RNA, 19 nt, Artificial Sequence
  Description of Artificial Sequence: Synthetic oligonucleotide
guaggauuucucuauagua

SEQ ID NO: 2349616 - RNA, 19 nt, Artificial Sequence
  Description of Artificial Sequence: Synthetic oligonucleotide
ugaguagaaaagccuuuuc

SEQ ID NO: 2349617 - RNA, 19 nt, Artificial Sequence
  Description of Artificial Sequence: Synthetic oligonucleotide
uagagugggguuucucucc

SEQ ID NO: 2349618 - RNA, 19 nt, Artificial Sequence
  Description of Artificial Sequence: Synthetic oligonucleotide
gcgaguucuaaacauacug

SEQ ID NO: 2349619 - RNA, 19 nt, Artificial Sequence
  Description of Artificial Sequence: Synthetic oligonucleotide
  modified_base (5)..(5): a, c, u, g, unknown or other
cacunaagggauucucuug

SEQ ID NO: 2349620 - RNA, 19 nt, Artificial Sequence
  Description of Artificial Sequence: Synthetic oligonucleotide
aucuguaggauuucucuau

SEQ ID NO: 2349621 - RNA, 19 nt, Artificial Sequence
  Description of Artificial Sequence: Synthetic oligonucleotide
gacaccuuaaagauuaaua

SEQ ID NO: 2349622 - RNA, 19 nt, Artificial Sequence
  Description of Artificial Sequence: Synthetic oligonucleotide
auucuugauguuccuucag

SEQ ID NO: 2349623 - RNA, 19 nt, Artificial Sequence
  Description of Artificial Sequence: Synthetic oligonucleotide
uggaguuucucuccagcgu

SEQ ID NO: 2349624 - RNA, 19 nt, Artificial Sequence
  Description of Artificial Sequence: Synthetic oligonucleotide
aggguagcuauaugauuuc

SEQ ID NO: 2349625 - RNA, 19 nt, Artificial Sequence
  Description of Artificial Sequence: Synthetic oligonucleotide
uuguaugguucucucuaga

SEQ ID NO: 2349626 - RNA, 19 nt, Artificial Sequence
  Description of Artificial Sequence: Synthetic oligonucleotide
  modified_base (13)..(13): a, c, u, g, unknown or other
auacuucacacunaaggga

SEQ ID NO: 2349627 - RNA, 19 nt, Artificial Sequence
  Description of Artificial Sequence: Synthetic oligonucleotide
  modified_base (10)..(10): a, c, u, g, unknown or other
cuucacacunaagggauuc

SEQ ID NO: 2349628 - RNA, 19 nt, Artificial Sequence
  Description of Artificial Sequence: Synthetic oligonucleotide
uucucuucacuauggagua

SEQ ID NO: 2349629 - RNA, 19 nt, Artificial Sequence
  Description of Artificial Sequence: Synthetic oligonucleotide
uaaaauaccucgccacauu

SEQ ID NO: 2349630 - RNA, 19 nt, Artificial Sequence
  Description of Artificial Sequence: Synthetic oligonucleotide
gguaugagugaguagaaaa

SEQ ID NO: 2349631 - RNA, 19 nt, Artificial Sequence
  Description of Artificial Sequence: Synthetic oligonucleotide
uaaaguucugagcgaguuc

SEQ ID NO: 2349632 - RNA, 19 nt, Artificial Sequence
  Description of Artificial Sequence: Synthetic oligonucleotide
  modified_base (3)..(3): a, c, u, g, unknown or other
cunaagggauucucuugag

SEQ ID NO: 2349633 - RNA, 19 nt, Artificial Sequence
  Description of Artificial Sequence: Synthetic oligonucleotide
aagucuucagcaaguauaa

SEQ ID NO: 2349634 - RNA, 19 nt, Artificial Sequence
  Description of Artificial Sequence: Synthetic oligonucleotide
cacuuguagggauuuugag

SEQ ID NO: 2349635 - RNA, 19 nt, Artificial Sequence
  Description of Artificial Sequence: Synthetic oligonucleotide
aacguccugagcgaguaca

SEQ ID NO: 2349636 - RNA, 19 nt, Artificial Sequence
  Description of Artificial Sequence: Synthetic oligonucleotide
cacuauggaguaauuugug

SEQ ID NO: 2349637 - RNA, 19 nt, Artificial Sequence
  Description of Artificial Sequence: Synthetic oligonucleotide
cuguaggauuucucuauag

SEQ ID NO: 2349638 - RNA, 19 nt, Artificial Sequence
  Description of Artificial Sequence: Synthetic oligonucleotide
accuuguguuuaaugacac

SEQ ID NO: 2349639 - RNA, 19 nt, Artificial Sequence
  Description of Artificial Sequence: Synthetic oligonucleotide
  modified_base (16)..(16): a, c, u, g, unknown or other
cacauacuucacacunaag

SEQ ID NO: 2349640 - RNA, 19 nt, Artificial Sequence
  Description of Artificial Sequence: Synthetic oligonucleotide
uuaaggagcgaaggguagc

SEQ ID NO: 2349641 - RNA, 19 nt, Artificial Sequence
  Description of Artificial Sequence: Synthetic oligonucleotide
ugguguuuagaacguccug

SEQ ID NO: 2349642 - RNA, 19 nt, Artificial Sequence
  Description of Artificial Sequence: Synthetic oligonucleotide
cucuccagcgugaauuuac

SEQ ID NO: 2349643 - RNA, 19 nt, Artificial Sequence
  Description of Artificial Sequence: Synthetic oligonucleotide
ugagcgaguucuaaacaua

SEQ ID NO: 2349644 - RNA, 19 nt, Artificial Sequence
  Description of Artificial Sequence: Synthetic oligonucleotide
ucacaauuguagagcuuca

SEQ ID NO: 2349645 - RNA, 19 nt, Artificial Sequence
  Description of Artificial Sequence: Synthetic oligonucleotide
uuagaacguccugagcgag

SEQ ID NO: 2349646 - RNA, 19 nt, Artificial Sequence
  Description of Artificial Sequence: Synthetic oligonucleotide
ucuaaacauacugccacau

SEQ ID NO: 2349647 - RNA, 19 nt, Artificial Sequence
  Description of Artificial Sequence: Synthetic oligonucleotide
gaauuuacugauauuuagu

SEQ ID NO: 2349648 - RNA, 19 nt, Artificial Sequence
  Description of Artificial Sequence: Synthetic oligonucleotide
cuauggaguaauuugugua

SEQ ID NO: 2349649 - RNA, 19 nt, Artificial Sequence
  Description of Artificial Sequence: Synthetic oligonucleotide
ugguucucucuagaguggg

SEQ ID NO: 2349650 - RNA, 19 nt, Artificial Sequence
  Description of Artificial Sequence: Synthetic oligonucleotide
cauauuucacgagcuguag

SEQ ID NO: 2349651 - RNA, 19 nt, Artificial Sequence
  Description of Artificial Sequence: Synthetic oligonucleotide
aagccuuuuccacauucuu

SEQ ID NO: 2349652 - RNA, 19 nt, Artificial Sequence
  Description of Artificial Sequence: Synthetic oligonucleotide
uguguagaguaagguauga

SEQ ID NO: 2349653 - RNA, 19 nt, Artificial Sequence
  Description of Artificial Sequence: Synthetic oligonucleotide
uaaugacaccuuaaagauu

SEQ ID NO: 2349654 - RNA, 19 nt, Artificial Sequence
  Description of Artificial Sequence: Synthetic oligonucleotide
cuagagugggguuucucuc

SEQ ID NO: 2349655 - RNA, 19 nt, Artificial Sequence
  Description of Artificial Sequence: Synthetic oligonucleotide
auaaaauaccucgccacau

SEQ ID NO: 2349656 - RNA, 19 nt, Artificial Sequence
  Description of Artificial Sequence: Synthetic oligonucleotide
cuuaaaguuugaaguacaa

SEQ ID NO: 2349657 - RNA, 19 nt, Artificial Sequence
  Description of Artificial Sequence: Synthetic oligonucleotide
aaauaccucgccacauucu

SEQ ID NO: 2349658 - RNA, 19 nt, Artificial Sequence
  Description of Artificial Sequence: Synthetic oligonucleotide
aguaauuuguguagaguaa

SEQ ID NO: 2349659 - RNA, 19 nt, Artificial Sequence
  Description of Artificial Sequence: Synthetic oligonucleotide
acauacugccacauauuuc

SEQ ID NO: 2349660 - RNA, 19 nt, Artificial Sequence
  Description of Artificial Sequence: Synthetic oligonucleotide
ccugaaguaauguuuugac

SEQ ID NO: 2349661 - RNA, 19 nt, Artificial Sequence
  Description of Artificial Sequence: Synthetic oligonucleotide
ucuguaggauuucucuaua

SEQ ID NO: 2349662 - RNA, 19 nt, Artificial Sequence
  Description of Artificial Sequence: Synthetic oligonucleotide
cuuguguuuaaugacaccu

SEQ ID NO: 2349663 - RNA, 19 nt, Artificial Sequence
  Description of Artificial Sequence: Synthetic oligonucleotide
caccuuaaagauuaauaaa

SEQ ID NO: 2349664 - RNA, 19 nt, Artificial Sequence
  Description of Artificial Sequence: Synthetic oligonucleotide
cagcaugaauccuuuggug

SEQ ID NO: 2349665 - RNA, 19 nt, Artificial Sequence
  Description of Artificial Sequence: Synthetic oligonucleotide
aguucuaaacauacugcca

SEQ ID NO: 2349666 - RNA, 19 nt, Artificial Sequence
  Description of Artificial Sequence: Synthetic oligonucleotide
uuguguuuaaugacaccuu

SEQ ID NO: 2349667 - RNA, 19 nt, Artificial Sequence
  Description of Artificial Sequence: Synthetic oligonucleotide
gagcgaguucuaaacauac

SEQ ID NO: 2349668 - RNA, 19 nt, Artificial Sequence
  Description of Artificial Sequence: Synthetic oligonucleotide
  modified_base (6)..(6): a, c, u, g, unknown or other
acacunaagggauucucuu

SEQ ID NO: 2349669 - RNA, 19 nt, Artificial Sequence
  Description of Artificial Sequence: Synthetic oligonucleotide
uaauaaagguaagguuucu

SEQ ID NO: 2349670 - RNA, 19 nt, Artificial Sequence
  Description of Artificial Sequence: Synthetic oligonucleotide
guagagcuucacuucagca

SEQ ID NO: 2349671 - RNA, 19 nt, Artificial Sequence
  Description of Artificial Sequence: Synthetic oligonucleotide
gaccuuguguuuaaugaca

SEQ ID NO: 2349672 - RNA, 19 nt, Artificial Sequence
  Description of Artificial Sequence: Synthetic oligonucleotide
aggauggaaggauaacaaa

SEQ ID NO: 2349673 - RNA, 19 nt, Artificial Sequence
  Description of Artificial Sequence: Synthetic oligonucleotide
ggaguuucucuccagcgug

SEQ ID NO: 2349674 - RNA, 19 nt, Artificial Sequence
  Description of Artificial Sequence: Synthetic oligonucleotide
ucuccagaaugaccaaguc

SEQ ID NO: 2349675 - RNA, 19 nt, Artificial Sequence
  Description of Artificial Sequence: Synthetic oligonucleotide
cugauauuuaguaagucuu

SEQ ID NO: 2349676 - RNA, 19 nt, Artificial Sequence
  Description of Artificial Sequence: Synthetic oligonucleotide
ucuucacuauuguaugguu

SEQ ID NO: 2349677 - RNA, 19 nt, Artificial Sequence
  Description of Artificial Sequence: Synthetic oligonucleotide
ccagaaugaauucuugaug

SEQ ID NO: 2349678 - RNA, 19 nt, Artificial Sequence
  Description of Artificial Sequence: Synthetic oligonucleotide
uaguaggaaggaccuugug

SEQ ID NO: 2349679 - RNA, 19 nt, Artificial Sequence
  Description of Artificial Sequence: Synthetic oligonucleotide
gucuaugccgcauaaggua

SEQ ID NO: 2349680 - RNA, 19 nt, Artificial Sequence
  Description of Artificial Sequence: Synthetic oligonucleotide
uaaggagcgaaggguagcu

SEQ ID NO: 2349681 - RNA, 19 nt, Artificial Sequence
  Description of Artificial Sequence: Synthetic oligonucleotide
ggauaacaaaauguuuugc

SEQ ID NO: 2349682 - RNA, 19 nt, Artificial Sequence
  Description of Artificial Sequence: Synthetic oligonucleotide
gagaaugagcccuuuguau

SEQ ID NO: 2349683 - RNA, 19 nt, Artificial Sequence
  Description of Artificial Sequence: Synthetic oligonucleotide
ucucuauaguaggaaggac

SEQ ID NO: 2349684 - RNA, 19 nt, Artificial Sequence
  Description of Artificial Sequence: Synthetic oligonucleotide
uucaccccagaaugaauuc

SEQ ID NO: 2349685 - RNA, 19 nt, Artificial Sequence
  Description of Artificial Sequence: Synthetic oligonucleotide
cuaccuugucacauacuuc

SEQ ID NO: 2349686 - RNA, 19 nt, Artificial Sequence
  Description of Artificial Sequence: Synthetic oligonucleotide
aaacauacugccacauauu

SEQ ID NO: 2349687 - RNA, 19 nt, Artificial Sequence
  Description of Artificial Sequence: Synthetic oligonucleotide
agaaugaauucuugauguu

SEQ ID NO: 2349688 - RNA, 19 nt, Artificial Sequence
  Description of Artificial Sequence: Synthetic oligonucleotide
guaggaaggaccuuguguu

SEQ ID NO: 2349689 - RNA, 19 nt, Artificial Sequence
  Description of Artificial Sequence: Synthetic oligonucleotide
aagccugaaguaauguuuu

SEQ ID NO: 2349690 - RNA, 19 nt, Artificial Sequence
  Description of Artificial Sequence: Synthetic oligonucleotide
aggagcgaaggguagcuau

SEQ ID NO: 2349691 - RNA, 19 nt, Artificial Sequence
  Description of Artificial Sequence: Synthetic oligonucleotide
gauggaaggauaacaaaau

SEQ ID NO: 2349692 - RNA, 19 nt, Artificial Sequence
  Description of Artificial Sequence: Synthetic oligonucleotide
guguuuaguaaaguucuga

SEQ ID NO: 2349693 - RNA, 19 nt, Artificial Sequence
  Description of Artificial Sequence: Synthetic oligonucleotide
  modified_base (8)..(8): a, c, u, g, unknown or other
ucacacunaagggauucuc

SEQ ID NO: 2349694 - RNA, 19 nt, Artificial Sequence
  Description of Artificial Sequence: Synthetic oligonucleotide
uaugccgcauaagguauga

SEQ ID NO: 2349695 - RNA, 19 nt, Artificial Sequence
  Description of Artificial Sequence: Synthetic oligonucleotide
gaaugagcccuuuguaugu

SEQ ID NO: 2349696 - RNA, 19 nt, Artificial Sequence
  Description of Artificial Sequence: Synthetic oligonucleotide
cauaagguaugagugagua

SEQ ID NO: 2349697 - RNA, 19 nt, Artificial Sequence
  Description of Artificial Sequence: Synthetic oligonucleotide
gcgaaggguagcuauauga

SEQ ID NO: 2349698 - RNA, 19 nt, Artificial Sequence
  Description of Artificial Sequence: Synthetic oligonucleotide
gguagcuauaugauuuccc

SEQ ID NO: 2349699 - RNA, 19 nt, Artificial Sequence
  Description of Artificial Sequence: Synthetic oligonucleotide
gccgcauaagguaugagug

SEQ ID NO: 2349700 - RNA, 19 nt, Artificial Sequence
  Description of Artificial Sequence: Synthetic oligonucleotide
auguuuugacacauuauuu

SEQ ID NO: 2349701 - RNA, 19 nt, Artificial Sequence
  Description of Artificial Sequence: Synthetic oligonucleotide
ggaccuuguguuuaaugac

SEQ ID NO: 2349702 - RNA, 19 nt, Artificial Sequence
  Description of Artificial Sequence: Synthetic oligonucleotide
agucuaugccgcauaaggu

SEQ ID NO: 2349703 - RNA, 19 nt, Artificial Sequence
  Description of Artificial Sequence: Synthetic oligonucleotide
auaugauuucccacauucu

SEQ ID NO: 2349704 - RNA, 19 nt, Artificial Sequence
  Description of Artificial Sequence: Synthetic oligonucleotide
ggauggaaggauaacaaaa

SEQ ID NO: 2349705 - RNA, 19 nt, Artificial Sequence
  Description of Artificial Sequence: Synthetic oligonucleotide
ugagcccuuuguauguuuu

SEQ ID NO: 2349706 - RNA, 19 nt, Artificial Sequence
  Description of Artificial Sequence: Synthetic oligonucleotide
caauuguagagcuucacuu

SEQ ID NO: 2349707 - RNA, 19 nt, Artificial Sequence
  Description of Artificial Sequence: Synthetic oligonucleotide
auggaguaauuuguguaga

SEQ ID NO: 2349708 - RNA, 19 nt, Artificial Sequence
  Description of Artificial Sequence: Synthetic oligonucleotide
uucaggauggaaggauaac

SEQ ID NO: 2349709 - RNA, 19 nt, Artificial Sequence
  Description of Artificial Sequence: Synthetic oligonucleotide
uucacgagcuguagggcuu

SEQ ID NO: 2349710 - RNA, 19 nt, Artificial Sequence
  Description of Artificial Sequence: Synthetic oligonucleotide
  modified_base (7)..(7): a, c, u, g, unknown or other
cacacunaagggauucucu

SEQ ID NO: 2349711 - RNA, 19 nt, Artificial Sequence
  Description of Artificial Sequence: Synthetic oligonucleotide
augguucucucuagagugg

SEQ ID NO: 2349712 - RNA, 19 nt, Artificial Sequence
  Description of Artificial Sequence: Synthetic oligonucleotide
agagugggguuucucucca

SEQ ID NO: 2349713 - RNA, 19 nt, Artificial Sequence
  Description of Artificial Sequence: Synthetic oligonucleotide
uauuuacaucuguggaguu

SEQ ID NO: 2349714 - RNA, 19 nt, Artificial Sequence
  Description of Artificial Sequence: Synthetic oligonucleotide
uagaacguccugagcgagu

SEQ ID NO: 2349715 - RNA, 19 nt, Artificial Sequence
  Description of Artificial Sequence: Synthetic oligonucleotide
uuacaucuguggaguuucu

SEQ ID NO: 2349716 - RNA, 19 nt, Artificial Sequence
  Description of Artificial Sequence: Synthetic oligonucleotide
uccuucaggauggaaggau

SEQ ID NO: 2349717 - RNA, 19 nt, Artificial Sequence
  Description of Artificial Sequence: Synthetic oligonucleotide
  modified_base (9)..(9): a, c, u, g, unknown or other
uucacacunaagggauucu

SEQ ID NO: 2349718 - RNA, 19 nt, Artificial Sequence
  Description of Artificial Sequence: Synthetic oligonucleotide
agguaagguuucucuucag

SEQ ID NO: 2349719 - RNA, 19 nt, Artificial Sequence
  Description of Artificial Sequence: Synthetic oligonucleotide
cagaaugaccaagucuaug

SEQ ID NO: 2349720 - RNA, 19 nt, Artificial Sequence
  Description of Artificial Sequence: Synthetic oligonucleotide
acaaaauguuuugccacau

SEQ ID NO: 2349721 - RNA, 19 nt, Artificial Sequence
  Description of Artificial Sequence: Synthetic oligonucleotide
guccugagcgaguacaaaa

SEQ ID NO: 2349722 - RNA, 19 nt, Artificial Sequence
  Description of Artificial Sequence: Synthetic oligonucleotide
agccugaaguaauguuuug

SEQ ID NO: 2349723 - RNA, 19 nt, Artificial Sequence
  Description of Artificial Sequence: Synthetic oligonucleotide
guaugguucucucuagagu

SEQ ID NO: 2349724 - RNA, 19 nt, Artificial Sequence
  Description of Artificial Sequence: Synthetic oligonucleotide
cuaugccgcauaagguaug

SEQ ID NO: 2349725 - RNA, 19 nt, Artificial Sequence
  Description of Artificial Sequence: Synthetic oligonucleotide
accucgccacauucuuccc

SEQ ID NO: 2349726 - RNA, 19 nt, Artificial Sequence
  Description of Artificial Sequence: Synthetic oligonucleotide
uccuucacaucuguaggau

SEQ ID NO: 2349727 - RNA, 19 nt, Artificial Sequence
  Description of Artificial Sequence: Synthetic oligonucleotide
agcccuuuguauguuuucu

SEQ ID NO: 2349728 - RNA, 19 nt, Artificial Sequence
  Description of Artificial Sequence: Synthetic oligonucleotide
uagggauuuugagaaugaa

SEQ ID NO: 2349729 - RNA, 19 nt, Artificial Sequence
  Description of Artificial Sequence: Synthetic oligonucleotide
ugaccaagucuaugccgca

SEQ ID NO: 2349730 - RNA, 19 nt, Artificial Sequence
  Description of Artificial Sequence: Synthetic oligonucleotide
cacaauuguagagcuucac

SEQ ID NO: 2349731 - RNA, 19 nt, Artificial Sequence
  Description of Artificial Sequence: Synthetic oligonucleotide
agcgaaggguagcuauaug

SEQ ID NO: 2349732 - RNA, 19 nt, Artificial Sequence
  Description of Artificial Sequence: Synthetic oligonucleotide
gggauuuugagaaugaauu

SEQ ID NO: 2349733 - RNA, 19 nt, Artificial Sequence
  Description of Artificial Sequence: Synthetic oligonucleotide
gcgaguacaaaagacuuuc

SEQ ID NO: 2349734 - RNA, 19 nt, Artificial Sequence
  Description of Artificial Sequence: Synthetic oligonucleotide
acauauuucacgagcugua

SEQ ID NO: 2349735 - RNA, 19 nt, Artificial Sequence
  Description of Artificial Sequence: Synthetic oligonucleotide
ugacaccuuaaagauuaau

SEQ ID NO: 2349736 - RNA, 19 nt, Artificial Sequence
  Description of Artificial Sequence: Synthetic oligonucleotide
augaguagaaaagccuuuu

SEQ ID NO: 2349737 - RNA, 19 nt, Artificial Sequence
  Description of Artificial Sequence: Synthetic oligonucleotide
gaaggauaacaaaauguuu

SEQ ID NO: 2349738 - RNA, 19 nt, Artificial Sequence
  Description of Artificial Sequence: Synthetic oligonucleotide
gugaauuuacugauauuua

SEQ ID NO: 2349739 - RNA, 19 nt, Artificial Sequence
  Description of Artificial Sequence: Synthetic oligonucleotide
auaguaggaaggaccuugu

SEQ ID NO: 2349740 - RNA, 19 nt, Artificial Sequence
  Description of Artificial Sequence: Synthetic oligonucleotide
cugccacauauuucacgag

SEQ ID NO: 2349741 - RNA, 19 nt, Artificial Sequence
  Description of Artificial Sequence: Synthetic oligonucleotide
cuucacaucuguaggauuu

SEQ ID NO: 2349742 - RNA, 19 nt, Artificial Sequence
  Description of Artificial Sequence: Synthetic oligonucleotide
aguaagucuucagcaagua

SEQ ID NO: 2349743 - RNA, 19 nt, Artificial Sequence
  Description of Artificial Sequence: Synthetic oligonucleotide
guagggauuuugagaauga

SEQ ID NO: 2349744 - RNA, 19 nt, Artificial Sequence
  Description of Artificial Sequence: Synthetic oligonucleotide
ucacuucagcaugaauccu

SEQ ID NO: 2349745 - RNA, 19 nt, Artificial Sequence
  Description of Artificial Sequence: Synthetic oligonucleotide
caagucuaugccgcauaag

SEQ ID NO: 2349746 - RNA, 19 nt, Artificial Sequence
  Description of Artificial Sequence: Synthetic oligonucleotide
guucugagcgaguucuaaa

SEQ ID NO: 2349747 - RNA, 19 nt, Artificial Sequence
  Description of Artificial Sequence: Synthetic oligonucleotide
auaccucgccacauucuuc

SEQ ID NO: 2349748 - RNA, 19 nt, Artificial Sequence
  Description of Artificial Sequence: Synthetic oligonucleotide
gaaggguagcuauaugauu

SEQ ID NO: 2349749 - RNA, 19 nt, Artificial Sequence
  Description of Artificial Sequence: Synthetic oligonucleotide
gagcccuuuguauguuuuc

SEQ ID NO: 2349750 - RNA, 19 nt, Artificial Sequence
  Description of Artificial Sequence: Synthetic oligonucleotide
aaugagcccuuuguauguu

SEQ ID NO: 2349751 - RNA, 19 nt, Artificial Sequence
  Description of Artificial Sequence: Synthetic oligonucleotide
accaagucuaugccgcaua

SEQ ID NO: 2349752 - RNA, 19 nt, Artificial Sequence
  Description of Artificial Sequence: Synthetic oligonucleotide
aguaaaguucugagcgagu

SEQ ID NO: 2349753 - RNA, 19 nt, Artificial Sequence
  Description of Artificial Sequence: Synthetic oligonucleotide
gaauccuuugguguuuagu

SEQ ID NO: 2349754 - RNA, 19 nt, Artificial Sequence
  Description of Artificial Sequence: Synthetic oligonucleotide
agaacguccugagcgagua

SEQ ID NO: 2349755 - RNA, 19 nt, Artificial Sequence
  Description of Artificial Sequence: Synthetic oligonucleotide
ggaaggauaacaaaauguu

SEQ ID NO: 2349756 - RNA, 19 nt, Artificial Sequence
  Description of Artificial Sequence: Synthetic oligonucleotide
guguuuaaugacaccuuaa

SEQ ID NO: 2349757 - RNA, 19 nt, Artificial Sequence
  Description of Artificial Sequence: Synthetic oligonucleotide
cuaaacauacugccacaua

SEQ ID NO: 2349758 - RNA, 19 nt, Artificial Sequence
  Description of Artificial Sequence: Synthetic oligonucleotide
cacauauuucacgagcugu

SEQ ID NO: 2349759 - RNA, 19 nt, Artificial Sequence
  Description of Artificial Sequence: Synthetic oligonucleotide
aggaaggaccuuguguuua

SEQ ID NO: 2349760 - RNA, 19 nt, Artificial Sequence
  Description of Artificial Sequence: Synthetic oligonucleotide
cuauuguaugguucucucu

SEQ ID NO: 2349761 - RNA, 19 nt, Artificial Sequence
  Description of Artificial Sequence: Synthetic oligonucleotide
ccuuguguuuaaugacacc

SEQ ID NO: 2349762 - RNA, 19 nt, Artificial Sequence
  Description of Artificial Sequence: Synthetic oligonucleotide
cugagcgaguucuaaacau

SEQ ID NO: 2349763 - RNA, 19 nt, Artificial Sequence
  Description of Artificial Sequence: Synthetic oligonucleotide
gguguuuaguaaaguucug

SEQ ID NO: 2349764 - RNA, 19 nt, Artificial Sequence
  Description of Artificial Sequence: Synthetic oligonucleotide
cucuccagaaugaccaagu

SEQ ID NO: 2349765 - RNA, 19 nt, Artificial Sequence
  Description of Artificial Sequence: Synthetic oligonucleotide
agguaugagugaguagaaa

SEQ ID NO: 2349766 - RNA, 19 nt, Artificial Sequence
  Description of Artificial Sequence: Synthetic oligonucleotide
cucucuagagugggguuuc

SEQ ID NO: 2349767 - RNA, 19 nt, Artificial Sequence
  Description of Artificial Sequence: Synthetic oligonucleotide
aguaauguuuugacacauu

SEQ ID NO: 2349768 - RNA, 19 nt, Artificial Sequence
  Description of Artificial Sequence: Synthetic oligonucleotide
agcgaguucuaaacauacu

SEQ ID NO: 2349769 - RNA, 19 nt, Artificial Sequence
  Description of Artificial Sequence: Synthetic oligonucleotide
guaaaguucugagcgaguu

SEQ ID NO: 2349770 - RNA, 19 nt, Artificial Sequence
  Description of Artificial Sequence: Synthetic oligonucleotide
gagcgaguacaaaagacuu

SEQ ID NO: 2349771 - RNA, 19 nt, Artificial Sequence
  Description of Artificial Sequence: Synthetic oligonucleotide
cugguguuuagaacguccu

SEQ ID NO: 2349772 - RNA, 19 nt, Artificial Sequence
  Description of Artificial Sequence: Synthetic oligonucleotide
guaagucuucagcaaguau

SEQ ID NO: 2349773 - RNA, 19 nt, Artificial Sequence
  Description of Artificial Sequence: Synthetic oligonucleotide
ggauuucucuauaguagga

SEQ ID NO: 2349774 - RNA, 19 nt, Artificial Sequence
  Description of Artificial Sequence: Synthetic oligonucleotide
ggguagcuauaugauuucc

SEQ ID NO: 2349775 - RNA, 19 nt, Artificial Sequence
  Description of Artificial Sequence: Synthetic oligonucleotide
cgcauaagguaugagugag

SEQ ID NO: 2349776 - RNA, 19 nt, Artificial Sequence
  Description of Artificial Sequence: Synthetic oligonucleotide
augagcccuuuguauguuu

SEQ ID NO: 2349777 - RNA, 19 nt, Artificial Sequence
  Description of Artificial Sequence: Synthetic oligonucleotide
cacacacuaccuugucaca

SEQ ID NO: 2349778 - RNA, 19 nt, Artificial Sequence
  Description of Artificial Sequence: Synthetic oligonucleotide
gaacguccugagcgaguac

SEQ ID NO: 2349779 - RNA, 19 nt, Artificial Sequence
  Description of Artificial Sequence: Synthetic oligonucleotide
gguucucucuagagugggg

SEQ ID NO: 2349780 - RNA, 19 nt, Artificial Sequence
  Description of Artificial Sequence: Synthetic oligonucleotide
ucucuucacuauggaguaa

SEQ ID NO: 2349781 - RNA, 19 nt, Artificial Sequence
  Description of Artificial Sequence: Synthetic oligonucleotide
agcgaguacaaaagacuuu

SEQ ID NO: 2349782 - RNA, 19 nt, Artificial Sequence
  Description of Artificial Sequence: Synthetic oligonucleotide
cacacuaccuugucacaua

SEQ ID NO: 2349783 - RNA, 19 nt, Artificial Sequence
  Description of Artificial Sequence: Synthetic oligonucleotide
guguagaguaagguaugaa

SEQ ID NO: 2349784 - RNA, 19 nt, Artificial Sequence
  Description of Artificial Sequence: Synthetic oligonucleotide
cgagcuguagggcuucacc

SEQ ID NO: 2349785 - RNA, 19 nt, Artificial Sequence
  Description of Artificial Sequence: Synthetic oligonucleotide
gccugaaguaauguuuuga

SEQ ID NO: 2349786 - RNA, 19 nt, Artificial Sequence
  Description of Artificial Sequence: Synthetic oligonucleotide
ccuuaaggagcgaagggua

SEQ ID NO: 2349787 - RNA, 19 nt, Artificial Sequence
  Description of Artificial Sequence: Synthetic oligonucleotide
ggaguaauuuguguagagu

SEQ ID NO: 2349788 - RNA, 19 nt, Artificial Sequence
  Description of Artificial Sequence: Synthetic oligonucleotide
ucacgagcuguagggcuuc

SEQ ID NO: 2349789 - RNA, 19 nt, Artificial Sequence
  Description of Artificial Sequence: Synthetic oligonucleotide
cucuagagugggguuucuc

SEQ ID NO: 2349790 - RNA, 19 nt, Artificial Sequence
  Description of Artificial Sequence: Synthetic oligonucleotide
aaggagcgaaggguagcua

SEQ ID NO: 2349791 - RNA, 19 nt, Artificial Sequence
  Description of Artificial Sequence: Synthetic oligonucleotide
ucucuagagugggguuucu

SEQ ID NO: 2349792 - RNA, 19 nt, Artificial Sequence
  Description of Artificial Sequence: Synthetic oligonucleotide
cacuucagcaugaauccuu

SEQ ID NO: 2349793 - RNA, 19 nt, Artificial Sequence
  Description of Artificial Sequence: Synthetic oligonucleotide
gcuauaugauuucccacau

SEQ ID NO: 2349794 - RNA, 19 nt, Artificial Sequence
  Description of Artificial Sequence: Synthetic oligonucleotide
agucuucagcaaguauaaa

SEQ ID NO: 2349795 - RNA, 19 nt, Artificial Sequence
  Description of Artificial Sequence: Synthetic oligonucleotide
augccgcauaagguaugag

SEQ ID NO: 2349796 - RNA, 19 nt, Artificial Sequence
  Description of Artificial Sequence: Synthetic oligonucleotide
cacuauuguaugguucucu

SEQ ID NO: 2349797 - RNA, 19 nt, Artificial Sequence
  Description of Artificial Sequence: Synthetic oligonucleotide
gauguuccuucaggaugga

SEQ ID NO: 2349798 - RNA, 19 nt, Artificial Sequence
  Description of Artificial Sequence: Synthetic oligonucleotide
  modified_base (11)..(11): a, c, u, g, unknown or other
acuucacacunaagggauu

SEQ ID NO: 2349799 - RNA, 19 nt, Artificial Sequence
  Description of Artificial Sequence: Synthetic oligonucleotide
aaguucugagcgaguucua

SEQ ID NO: 2349800 - RNA, 19 nt, Artificial Sequence
  Description of Artificial Sequence: Synthetic oligonucleotide
cucgccacauucuucccau

SEQ ID NO: 2349801 - RNA, 19 nt, Artificial Sequence
  Description of Artificial Sequence: Synthetic oligonucleotide
ccgcauaagguaugaguga

SEQ ID NO: 2349802 - RNA, 19 nt, Artificial Sequence
  Description of Artificial Sequence: Synthetic oligonucleotide
gagcgaaggguagcuauau

SEQ ID NO: 2349803 - RNA, 19 nt, Artificial Sequence
  Description of Artificial Sequence: Synthetic oligonucleotide
gccacauauuucacgagcu

SEQ ID NO: 2349804 - RNA, 19 nt, Artificial Sequence
  Description of Artificial Sequence: Synthetic oligonucleotide
ccagcgugaauuuacugau

SEQ ID NO: 2349805 - RNA, 19 nt, Artificial Sequence
  Description of Artificial Sequence: Synthetic oligonucleotide
cagcgugaauuuacugaua

SEQ ID NO: 2349806 - RNA, 19 nt, Artificial Sequence
  Description of Artificial Sequence: Synthetic oligonucleotide
acguccugagcgaguacaa

SEQ ID NO: 2349807 - RNA, 19 nt, Artificial Sequence
  Description of Artificial Sequence: Synthetic oligonucleotide
cuauaugauuucccacauu

SEQ ID NO: 2349808 - RNA, 19 nt, Artificial Sequence
  Description of Artificial Sequence: Synthetic oligonucleotide
ggcuucaccccagaaugaa

SEQ ID NO: 2349809 - RNA, 19 nt, Artificial Sequence
  Description of Artificial Sequence: Synthetic oligonucleotide
ccuucaggauggaaggaua

SEQ ID NO: 2349810 - RNA, 19 nt, Artificial Sequence
  Description of Artificial Sequence: Synthetic oligonucleotide
augacaccuuaaagauuaa

SEQ ID NO: 2349811 - RNA, 19 nt, Artificial Sequence
  Description of Artificial Sequence: Synthetic oligonucleotide
ccaagucuaugccgcauaa

SEQ ID NO: 2349812 - RNA, 19 nt, Artificial Sequence
  Description of Artificial Sequence: Synthetic oligonucleotide
ucgccacauucuucccauu

SEQ ID NO: 2349813 - RNA, 19 nt, Artificial Sequence
  Description of Artificial Sequence: Synthetic oligonucleotide
cacuaccuugucacauacu

SEQ ID NO: 2349814 - RNA, 19 nt, Artificial Sequence
  Description of Artificial Sequence: Synthetic oligonucleotide
gaccaagucuaugccgcau

SEQ ID NO: 2349815 - RNA, 19 nt, Artificial Sequence
  Description of Artificial Sequence: Synthetic oligonucleotide
ggagcgaaggguagcuaua

SEQ ID NO: 2349816 - RNA, 19 nt, Artificial Sequence
  Description of Artificial Sequence: Synthetic oligonucleotide
ccucgccacauucuuccca

SEQ ID NO: 2349817 - RNA, 19 nt, Artificial Sequence
  Description of Artificial Sequence: Synthetic oligonucleotide
cgaaggguagcuauaugau

SEQ ID NO: 2349818 - RNA, 19 nt, Artificial Sequence
  Description of Artificial Sequence: Synthetic oligonucleotide
gcauaagguaugagugagu

SEQ ID NO: 2349819 - RNA, 19 nt, Artificial Sequence
  Description of Artificial Sequence: Synthetic oligonucleotide
cuauaguaggaaggaccuu

SEQ ID NO: 2349820 - RNA, 19 nt, Artificial Sequence
  Description of Artificial Sequence: Synthetic oligonucleotide
gcgugaauuuacugauauu

SEQ ID NO: 2349821 - RNA, 19 nt, Artificial Sequence
  Description of Artificial Sequence: Synthetic oligonucleotide
ccagaaugaccaagucuau

SEQ ID NO: 2349822 - RNA, 19 nt, Artificial Sequence
  Description of Artificial Sequence: Synthetic oligonucleotide
cacgagcuguagggcuuca

SEQ ID NO: 2349823 - RNA, 19 nt, Artificial Sequence
  Description of Artificial Sequence: Synthetic oligonucleotide
ccuucacaucuguaggauu

SEQ ID NO: 2349824 - RNA, 19 nt, Artificial Sequence
  Description of Artificial Sequence: Synthetic oligonucleotide
gcuucaccccagaaugaau

SEQ ID NO: 2349825 - RNA, 19 nt, Artificial Sequence
  Description of Artificial Sequence: Synthetic oligonucleotide
ccucacaauuguagagcuu

SEQ ID NO: 2349826 - RNA, 19 nt, Artificial Sequence
  Description of Artificial Sequence: Synthetic oligonucleotide
cguccugagcgaguacaaa

SEQ ID NO: 2349827 - RNA, 19 nt, Artificial Sequence
  Description of Artificial Sequence: Synthetic oligonucleotide
aauacaaucaaagaaaucc

SEQ ID NO: 2349828 - RNA, 19 nt, Artificial Sequence
  Description of Artificial Sequence: Synthetic oligonucleotide
aauagauccauacauuccc

SEQ ID NO: 2349829 - RNA, 19 nt, Artificial Sequence
  Description of Artificial Sequence: Synthetic oligonucleotide
acgauaaagacacuaaucc

SEQ ID NO: 2349830 - RNA, 19 nt, Artificial Sequence
  Description of Artificial Sequence: Synthetic oligonucleotide
aaaauaauaauaauaauaa

SEQ ID NO: 2349831 - RNA, 19 nt, Artificial Sequence
  Description of Artificial Sequence: Synthetic oligonucleotide
aauaauaauaauaauaaua

SEQ ID NO: 2349832 - RNA, 19 nt, Artificial Sequence
  Description of Artificial Sequence: Synthetic oligonucleotide
uauucaauagaauaguugu

SEQ ID NO: 2349833 - RNA, 19 nt, Artificial Sequence
  Description of Artificial Sequence: Synthetic oligonucleotide
ucuuguuucgccauggcgg

SEQ ID NO: 2349834 - RNA, 19 nt, Artificial Sequence
  Description of Artificial Sequence: Synthetic oligonucleotide
aauaauaucauuccauuua

SEQ ID NO: 2349835 - RNA, 19 nt, Artificial Sequence
  Description of Artificial Sequence: Synthetic oligonucleotide
aguucauacaaauacacug

SEQ ID NO: 2349836 - RNA, 19 nt, Artificial Sequence
  Description of Artificial Sequence: Synthetic oligonucleotide
aauaucauuccauuuagau

SEQ ID NO: 2349837 - RNA, 19 nt, Artificial Sequence
  Description of Artificial Sequence: Synthetic oligonucleotide
ucucauguaagcuccaugg

SEQ ID NO: 2349838 - RNA, 19 nt, Artificial Sequence
  Description of Artificial Sequence: Synthetic oligonucleotide
uggcucacaacuaagaugc

SEQ ID NO: 2349839 - RNA, 19 nt, Artificial Sequence
  Description of Artificial Sequence: Synthetic oligonucleotide
uccaaaaugccagauaugg

SEQ ID NO: 2349840 - RNA, 19 nt, Artificial Sequence
  Description of Artificial Sequence: Synthetic oligonucleotide
uuauucaauagaauaguug

SEQ ID NO: 2349841 - RNA, 19 nt, Artificial Sequence
  Description of Artificial Sequence: Synthetic oligonucleotide
auaauaauaauaauaauaa

SEQ ID NO: 2349842 - RNA, 19 nt, Artificial Sequence
  Description of Artificial Sequence: Synthetic oligonucleotide
auaauaauaauaauaauau

SEQ ID NO: 2349843 - RNA, 19 nt, Artificial Sequence
  Description of Artificial Sequence: Synthetic oligonucleotide
aaagaaauccuuugcacgu

SEQ ID NO: 2349844 - RNA, 19 nt, Artificial Sequence
  Description of Artificial Sequence: Synthetic oligonucleotide
aauagaauaguuguuacaa

SEQ ID NO: 2349845 - RNA, 19 nt, Artificial Sequence
  Description of Artificial Sequence: Synthetic oligonucleotide
cagucuacgauaaagacac

SEQ ID NO: 2349846 - RNA, 19 nt, Artificial Sequence
  Description of Artificial Sequence: Synthetic oligonucleotide
aaauagauccauacauucc

SEQ ID NO: 2349847 - RNA, 19 nt, Artificial Sequence
  Description of Artificial Sequence: Synthetic oligonucleotide
auuuagauguuccuggaag

SEQ ID NO: 2349848 - RNA, 19 nt, Artificial Sequence
  Description of Artificial Sequence: Synthetic oligonucleotide
auaauaucauuccauuuag

SEQ ID NO: 2349849 - RNA, 19 nt, Artificial Sequence
  Description of Artificial Sequence: Synthetic oligonucleotide
uauuaaaucuuguuucgcc

SEQ ID NO: 2349850 - RNA, 19 nt, Artificial Sequence
  Description of Artificial Sequence: Synthetic oligonucleotide
uauggguaaaauaauaaua

SEQ ID NO: 2349851 - RNA, 19 nt, Artificial Sequence
  Description of Artificial Sequence: Synthetic oligonucleotide
caaagaaauccuuugcacg

SEQ ID NO: 2349852 - RNA, 19 nt, Artificial Sequence
  Description of Artificial Sequence: Synthetic oligonucleotide
acgauuaguugacaaauac

SEQ ID NO: 2349853 - RNA, 19 nt, Artificial Sequence
  Description of Artificial Sequence: Synthetic oligonucleotide
cagaagguaaccaaagagg

SEQ ID NO: 2349854 - RNA, 19 nt, Artificial Sequence
  Description of Artificial Sequence: Synthetic oligonucleotide
aaauaauaauaauaauaau

SEQ ID NO: 2349855 - RNA, 19 nt, Artificial Sequence
  Description of Artificial Sequence: Synthetic oligonucleotide
aauaauaauaucauuccau

SEQ ID NO: 2349856 - RNA, 19 nt, Artificial Sequence
  Description of Artificial Sequence: Synthetic oligonucleotide
uaauaauaauaucauucca

SEQ ID NO: 2349857 - RNA, 19 nt, Artificial Sequence
  Description of Artificial Sequence: Synthetic oligonucleotide
caaacgguuuccuacaggg

SEQ ID NO: 2349858 - RNA, 19 nt, Artificial Sequence
  Description of Artificial Sequence: Synthetic oligonucleotide
caauuaaauagauccauac

SEQ ID NO: 2349859 - RNA, 19 nt, Artificial Sequence
  Description of Artificial Sequence: Synthetic oligonucleotide
gauauggucugcuuagucc

SEQ ID NO: 2349860 - RNA, 19 nt, Artificial Sequence
  Description of Artificial Sequence: Synthetic oligonucleotide
aauaaugucccaaacaaua

SEQ ID NO: 2349861 - RNA, 19 nt, Artificial Sequence
  Description of Artificial Sequence: Synthetic oligonucleotide
ucagaaagcggccagcagc

SEQ ID NO: 2349862 - RNA, 19 nt, Artificial Sequence
  Description of Artificial Sequence: Synthetic oligonucleotide
aaaggggcucaucuacucc

SEQ ID NO: 2349863 - RNA, 19 nt, Artificial Sequence
  Description of Artificial Sequence: Synthetic oligonucleotide
auaucauuccauuuagaug

SEQ ID NO: 2349864 - RNA, 19 nt, Artificial Sequence
  Description of Artificial Sequence: Synthetic oligonucleotide
gauuaguugacaaauacaa

SEQ ID NO: 2349865 - RNA, 19 nt, Artificial Sequence
  Description of Artificial Sequence: Synthetic oligonucleotide
ucaaagaaauccuuugcac

SEQ ID NO: 2349866 - RNA, 19 nt, Artificial Sequence
  Description of Artificial Sequence: Synthetic oligonucleotide
aaagacacuaaucccagua

SEQ ID NO: 2349867 - RNA, 19 nt, Artificial Sequence
  Description of Artificial Sequence: Synthetic oligonucleotide
uaauaauaauaauaauauc

SEQ ID NO: 2349868 - RNA, 19 nt, Artificial Sequence
  Description of Artificial Sequence: Synthetic oligonucleotide
ucuagugucucuccucccg

SEQ ID NO: 2349869 - RNA, 19 nt, Artificial Sequence
  Description of Artificial Sequence: Synthetic oligonucleotide
uaacggucagggcaaagcg

SEQ ID NO: 2349870 - RNA, 19 nt, Artificial Sequence
  Description of Artificial Sequence: Synthetic oligonucleotide
aguauugggagugacugac

SEQ ID NO: 2349871 - RNA, 19 nt, Artificial Sequence
  Description of Artificial Sequence: Synthetic oligonucleotide
uacgauaaagacacuaauc

SEQ ID NO: 2349872 - RNA, 19 nt, Artificial Sequence
  Description of Artificial Sequence: Synthetic oligonucleotide
auuaaaucuuguuucgcca

SEQ ID NO: 2349873 - RNA, 19 nt, Artificial Sequence
  Description of Artificial Sequence: Synthetic oligonucleotide
acaggggacacucuucccc

SEQ ID NO: 2349874 - RNA, 19 nt, Artificial Sequence
  Description of Artificial Sequence: Synthetic oligonucleotide
uucgccauggcggauaacg

SEQ ID NO: 2349875 - RNA, 19 nt, Artificial Sequence
  Description of Artificial Sequence: Synthetic oligonucleotide
ugacaaauacaaucaaaga

SEQ ID NO: 2349876 - RNA, 19 nt, Artificial Sequence
  Description of Artificial Sequence: Synthetic oligonucleotide
ucauguaagcuccauggcu

SEQ ID NO: 2349877 - RNA, 19 nt, Artificial Sequence
  Description of Artificial Sequence: Synthetic oligonucleotide
aucaaagaaauccuuugca

SEQ ID NO: 2349878 - RNA, 19 nt, Artificial Sequence
  Description of Artificial Sequence: Synthetic oligonucleotide
uaaugucccaaacaauaug

SEQ ID NO: 2349879 - RNA, 19 nt, Artificial Sequence
  Description of Artificial Sequence: Synthetic oligonucleotide
auaauaauaucauuccauu

SEQ ID NO: 2349880 - RNA, 19 nt, Artificial Sequence
  Description of Artificial Sequence: Synthetic oligonucleotide
aaaucuuguuucgccaugg

SEQ ID NO: 2349881 - RNA, 19 nt, Artificial Sequence
  Description of Artificial Sequence: Synthetic oligonucleotide
ugucuuugcaaaauuugcu

SEQ ID NO: 2349882 - RNA, 19 nt, Artificial Sequence
  Description of Artificial Sequence: Synthetic oligonucleotide
ucaauagaauaguuguuac

SEQ ID NO: 2349883 - RNA, 19 nt, Artificial Sequence
  Description of Artificial Sequence: Synthetic oligonucleotide
uccuuauuaaaucuuguuu

SEQ ID NO: 2349884 - RNA, 19 nt, Artificial Sequence
  Description of Artificial Sequence: Synthetic oligonucleotide
uaauaauaauaauaauaau

SEQ ID NO: 2349885 - RNA, 19 nt, Artificial Sequence
  Description of Artificial Sequence: Synthetic oligonucleotide
aacgguuuccuacagggaa

SEQ ID NO: 2349886 - RNA, 19 nt, Artificial Sequence
  Description of Artificial Sequence: Synthetic oligonucleotide
acguuguucagaaagcggc

SEQ ID NO: 2349887 - RNA, 19 nt, Artificial Sequence
  Description of Artificial Sequence: Synthetic oligonucleotide
uuugcacguacuuucaccu

SEQ ID NO: 2349888 - RNA, 19 nt, Artificial Sequence
  Description of Artificial Sequence: Synthetic oligonucleotide
gaaguucauacaaauacac

SEQ ID NO: 2349889 - RNA, 19 nt, Artificial Sequence
  Description of Artificial Sequence: Synthetic oligonucleotide
ucuacgauaaagacacuaa

SEQ ID NO: 2349890 - RNA, 19 nt, Artificial Sequence
  Description of Artificial Sequence: Synthetic oligonucleotide
guuguuacaauuaaauaga

SEQ ID NO: 2349891 - RNA, 19 nt, Artificial Sequence
  Description of Artificial Sequence: Synthetic oligonucleotide
auccuuugcacguacuuuc

SEQ ID NO: 2349892 - RNA, 19 nt, Artificial Sequence
  Description of Artificial Sequence: Synthetic oligonucleotide
uauugggagugacugacga

SEQ ID NO: 2349893 - RNA, 19 nt, Artificial Sequence
  Description of Artificial Sequence: Synthetic oligonucleotide
auauggguaaaauaauaau

SEQ ID NO: 2349894 - RNA, 19 nt, Artificial Sequence
  Description of Artificial Sequence: Synthetic oligonucleotide
cauacuuccuuucucgcag

SEQ ID NO: 2349895 - RNA, 19 nt, Artificial Sequence
  Description of Artificial Sequence: Synthetic oligonucleotide
auuugccuaguguugcugg

SEQ ID NO: 2349896 - RNA, 19 nt, Artificial Sequence
  Description of Artificial Sequence: Synthetic oligonucleotide
uucacguuguucagaaagc

SEQ ID NO: 2349897 - RNA, 19 nt, Artificial Sequence
  Description of Artificial Sequence: Synthetic oligonucleotide
aaaauuugcuuuucuccaa

SEQ ID NO: 2349898 - RNA, 19 nt, Artificial Sequence
  Description of Artificial Sequence: Synthetic oligonucleotide
auauggucugcuuaguccu

SEQ ID NO: 2349899 - RNA, 19 nt, Artificial Sequence
  Description of Artificial Sequence: Synthetic oligonucleotide
agcauuugaggucacucag

SEQ ID NO: 2349900 - RNA, 19 nt, Artificial Sequence
  Description of Artificial Sequence: Synthetic oligonucleotide
uaaacuucacguuguucag

SEQ ID NO: 2349901 - RNA, 19 nt, Artificial Sequence
  Description of Artificial Sequence: Synthetic oligonucleotide
aaugccagauauggucugc

SEQ ID NO: 2349902 - RNA, 19 nt, Artificial Sequence
  Description of Artificial Sequence: Synthetic oligonucleotide
caaaauuugcuuuucucca

SEQ ID NO: 2349903 - RNA, 19 nt, Artificial Sequence
  Description of Artificial Sequence: Synthetic oligonucleotide
uucauacaaauacacugaa

SEQ ID NO: 2349904 - RNA, 19 nt, Artificial Sequence
  Description of Artificial Sequence: Synthetic oligonucleotide
ugcacguacuuucaccugc

SEQ ID NO: 2349905 - RNA, 19 nt, Artificial Sequence
  Description of Artificial Sequence: Synthetic oligonucleotide
agauauggucugcuuaguc

SEQ ID NO: 2349906 - RNA, 19 nt, Artificial Sequence
  Description of Artificial Sequence: Synthetic oligonucleotide
aaucccaguauugggagug

SEQ ID NO: 2349907 - RNA, 19 nt, Artificial Sequence
  Description of Artificial Sequence: Synthetic oligonucleotide
cuuugcacguacuuucacc

SEQ ID NO: 2349908 - RNA, 19 nt, Artificial Sequence
  Description of Artificial Sequence: Synthetic oligonucleotide
uuauuaaaucuuguuucgc

SEQ ID NO: 2349909 - RNA, 19 nt, Artificial Sequence
  Description of Artificial Sequence: Synthetic oligonucleotide
ucaggaugcaacugcaaac

SEQ ID NO: 2349910 - RNA, 19 nt, Artificial Sequence
  Description of Artificial Sequence: Synthetic oligonucleotide
uucgcguccuuccucacag

SEQ ID NO: 2349911 - RNA, 19 nt, Artificial Sequence
  Description of Artificial Sequence: Synthetic oligonucleotide
aacaggggacacucuuccc

SEQ ID NO: 2349912 - RNA, 19 nt, Artificial Sequence
  Description of Artificial Sequence: Synthetic oligonucleotide
cauguaagcuccauggcuc

SEQ ID NO: 2349913 - RNA, 19 nt, Artificial Sequence
  Description of Artificial Sequence: Synthetic oligonucleotide
auggcucacaacuaagaug

SEQ ID NO: 2349914 - RNA, 19 nt, Artificial Sequence
  Description of Artificial Sequence: Synthetic oligonucleotide
auggguaaaauaauaauaa

SEQ ID NO: 2349915 - RNA, 19 nt, Artificial Sequence
  Description of Artificial Sequence: Synthetic oligonucleotide
ccuuauuaaaucuuguuuc

SEQ ID NO: 2349916 - RNA, 19 nt, Artificial Sequence
  Description of Artificial Sequence: Synthetic oligonucleotide
ucacguuguucagaaagcg

SEQ ID NO: 2349917 - RNA, 19 nt, Artificial Sequence
  Description of Artificial Sequence: Synthetic oligonucleotide
cuaauuugccuaguguugc

SEQ ID NO: 2349918 - RNA, 19 nt, Artificial Sequence
  Description of Artificial Sequence: Synthetic oligonucleotide
aaauuugcuuuucuccaaa

SEQ ID NO: 2349919 - RNA, 19 nt, Artificial Sequence
  Description of Artificial Sequence: Synthetic oligonucleotide
uaauaauaucauuccauuu

SEQ ID NO: 2349920 - RNA, 19 nt, Artificial Sequence
  Description of Artificial Sequence: Synthetic oligonucleotide
uaaaucuuguuucgccaug

SEQ ID NO: 2349921 - RNA, 19 nt, Artificial Sequence
  Description of Artificial Sequence: Synthetic oligonucleotide
aguucuaauuugccuagug

SEQ ID NO: 2349922 - RNA, 19 nt, Artificial Sequence
  Description of Artificial Sequence: Synthetic oligonucleotide
ucauccacgauuaguugac

SEQ ID NO: 2349923 - RNA, 19 nt, Artificial Sequence
  Description of Artificial Sequence: Synthetic oligonucleotide
gaagacgauuucucucugg

SEQ ID NO: 2349924 - RNA, 19 nt, Artificial Sequence
  Description of Artificial Sequence: Synthetic oligonucleotide
uaauaucauuccauuuaga

SEQ ID NO: 2349925 - RNA, 19 nt, Artificial Sequence
  Description of Artificial Sequence: Synthetic oligonucleotide
gaauaguuguuacaauuaa

SEQ ID NO: 2349926 - RNA, 19 nt, Artificial Sequence
  Description of Artificial Sequence: Synthetic oligonucleotide
ugucccaaacaauaugggu

SEQ ID NO: 2349927 - RNA, 19 nt, Artificial Sequence
  Description of Artificial Sequence: Synthetic oligonucleotide
aacggucagggcaaagcgc

SEQ ID NO: 2349928 - RNA, 19 nt, Artificial Sequence
  Description of Artificial Sequence: Synthetic oligonucleotide
aaggggcucaucuacuccu

SEQ ID NO: 2349929 - RNA, 19 nt, Artificial Sequence
  Description of Artificial Sequence: Synthetic oligonucleotide
aaauccuuugcacguacuu

SEQ ID NO: 2349930 - RNA, 19 nt, Artificial Sequence
  Description of Artificial Sequence: Synthetic oligonucleotide
gacacuaaucccaguauug

SEQ ID NO: 2349931 - RNA, 19 nt, Artificial Sequence
  Description of Artificial Sequence: Synthetic oligonucleotide
cacuaaucccaguauuggg

SEQ ID NO: 2349932 - RNA, 19 nt, Artificial Sequence
  Description of Artificial Sequence: Synthetic oligonucleotide
gaaacccagucucggaaag

SEQ ID NO: 2349933 - RNA, 19 nt, Artificial Sequence
  Description of Artificial Sequence: Synthetic oligonucleotide
ucccaaacaauauggguaa

SEQ ID NO: 2349934 - RNA, 19 nt, Artificial Sequence
  Description of Artificial Sequence: Synthetic oligonucleotide
uacaaucaaagaaauccuu

SEQ ID NO: 2349935 - RNA, 19 nt, Artificial Sequence
  Description of Artificial Sequence: Synthetic oligonucleotide
cacagucuacgauaaagac

SEQ ID NO: 2349936 - RNA, 19 nt, Artificial Sequence
  Description of Artificial Sequence: Synthetic oligonucleotide
ugacgagaguucuaauuug

SEQ ID NO: 2349937 - RNA, 19 nt, Artificial Sequence
  Description of Artificial Sequence: Synthetic oligonucleotide
aauaguuguuacaauuaaa

SEQ ID NO: 2349938 - RNA, 19 nt, Artificial Sequence
  Description of Artificial Sequence: Synthetic oligonucleotide
ucuccuuauuaaaucuugu

SEQ ID NO: 2349939 - RNA, 19 nt, Artificial Sequence
  Description of Artificial Sequence: Synthetic oligonucleotide
aaagcgugcguaaacuuca

SEQ ID NO: 2349940 - RNA, 19 nt, Artificial Sequence
  Description of Artificial Sequence: Synthetic oligonucleotide
caggaugcaacugcaaacg

SEQ ID NO: 2349941 - RNA, 19 nt, Artificial Sequence
  Description of Artificial Sequence: Synthetic oligonucleotide
ugcguaaacuucacguugu

SEQ ID NO: 2349942 - RNA, 19 nt, Artificial Sequence
  Description of Artificial Sequence: Synthetic oligonucleotide
uugggagugacugacgaga

SEQ ID NO: 2349943 - RNA, 19 nt, Artificial Sequence
  Description of Artificial Sequence: Synthetic oligonucleotide
uggguaaaauaauaauaau

SEQ ID NO: 2349944 - RNA, 19 nt, Artificial Sequence
  Description of Artificial Sequence: Synthetic oligonucleotide
uucucauguaagcuccaug

SEQ ID NO: 2349945 - RNA, 19 nt, Artificial Sequence
  Description of Artificial Sequence: Synthetic oligonucleotide
cacguuguucagaaagcgg

SEQ ID NO: 2349946 - RNA, 19 nt, Artificial Sequence
  Description of Artificial Sequence: Synthetic oligonucleotide
aaguucauacaaauacacu

SEQ ID NO: 2349947 - RNA, 19 nt, Artificial Sequence
  Description of Artificial Sequence: Synthetic oligonucleotide
uugcugaaacccagucucg

SEQ ID NO: 2349948 - RNA, 19 nt, Artificial Sequence
  Description of Artificial Sequence: Synthetic oligonucleotide
accuccgccaaacagcucu

SEQ ID NO: 2349949 - RNA, 19 nt, Artificial Sequence
  Description of Artificial Sequence: Synthetic oligonucleotide
gacgagaguucuaauuugc

SEQ ID NO: 2349950 - RNA, 19 nt, Artificial Sequence
  Description of Artificial Sequence: Synthetic oligonucleotide
ugcccuugaaugauuuucu

SEQ ID NO: 2349951 - RNA, 19 nt, Artificial Sequence
  Description of Artificial Sequence: Synthetic oligonucleotide
ugcaacugcaaacgguuuc

SEQ ID NO: 2349952 - RNA, 19 nt, Artificial Sequence
  Description of Artificial Sequence: Synthetic oligonucleotide
aauuugccuaguguugcug

SEQ ID NO: 2349953 - RNA, 19 nt, Artificial Sequence
  Description of Artificial Sequence: Synthetic oligonucleotide
auagaauaguuguuacaau

SEQ ID NO: 2349954 - RNA, 19 nt, Artificial Sequence
  Description of Artificial Sequence: Synthetic oligonucleotide
aggaugcaacugcaaacgg

SEQ ID NO: 2349955 - RNA, 19 nt, Artificial Sequence
  Description of Artificial Sequence: Synthetic oligonucleotide
acuaaucccaguauuggga

SEQ ID NO: 2349956 - RNA, 19 nt, Artificial Sequence
  Description of Artificial Sequence: Synthetic oligonucleotide
gugcguaaacuucacguug

SEQ ID NO: 2349957 - RNA, 19 nt, Artificial Sequence
  Description of Artificial Sequence: Synthetic oligonucleotide
ugcaaacgguuuccuacag

SEQ ID NO: 2349958 - RNA, 19 nt, Artificial Sequence
  Description of Artificial Sequence: Synthetic oligonucleotide
aucacuggagaaagcgugc

SEQ ID NO: 2349959 - RNA, 19 nt, Artificial Sequence
  Description of Artificial Sequence: Synthetic oligonucleotide
uucagaaagcggccagcag

SEQ ID NO: 2349960 - RNA, 19 nt, Artificial Sequence
  Description of Artificial Sequence: Synthetic oligonucleotide
acagggaauaccuccgcca

SEQ ID NO: 2349961 - RNA, 19 nt, Artificial Sequence
  Description of Artificial Sequence: Synthetic oligonucleotide
ggugccaccaucaggaugc

SEQ ID NO: 2349962 - RNA, 19 nt, Artificial Sequence
  Description of Artificial Sequence: Synthetic oligonucleotide
ucacucagaagguaaccaa

SEQ ID NO: 2349963 - RNA, 19 nt, Artificial Sequence
  Description of Artificial Sequence: Synthetic oligonucleotide
aucaggaugcaacugcaaa

SEQ ID NO: 2349964 - RNA, 19 nt, Artificial Sequence
  Description of Artificial Sequence: Synthetic oligonucleotide
uccacgauuaguugacaaa

SEQ ID NO: 2349965 - RNA, 19 nt, Artificial Sequence
  Description of Artificial Sequence: Synthetic oligonucleotide
uccucgugagaucacugga

SEQ ID NO: 2349966 - RNA, 19 nt, Artificial Sequence
  Description of Artificial Sequence: Synthetic oligonucleotide
caacuaagaugcuggcugc

SEQ ID NO: 2349967 - RNA, 19 nt, Artificial Sequence
  Description of Artificial Sequence: Synthetic oligonucleotide
acgagaguucuaauuugcc

SEQ ID NO: 2349968 - RNA, 19 nt, Artificial Sequence
  Description of Artificial Sequence: Synthetic oligonucleotide
guuuccuacagggaauacc

SEQ ID NO: 2349969 - RNA, 19 nt, Artificial Sequence
  Description of Artificial Sequence: Synthetic oligonucleotide
acagucuacgauaaagaca

SEQ ID NO: 2349970 - RNA, 19 nt, Artificial Sequence
  Description of Artificial Sequence: Synthetic oligonucleotide
ugcugaaacccagucucgg

SEQ ID NO: 2349971 - RNA, 19 nt, Artificial Sequence
  Description of Artificial Sequence: Synthetic oligonucleotide
uuugccuaguguugcuggc

SEQ ID NO: 2349972 - RNA, 19 nt, Artificial Sequence
  Description of Artificial Sequence: Synthetic oligonucleotide
uuccucacagucuacgaua

SEQ ID NO: 2349973 - RNA, 19 nt, Artificial Sequence
  Description of Artificial Sequence: Synthetic oligonucleotide
ugagcauuugaggucacuc

SEQ ID NO: 2349974 - RNA, 19 nt, Artificial Sequence
  Description of Artificial Sequence: Synthetic oligonucleotide
cucauguaagcuccauggc

SEQ ID NO: 2349975 - RNA, 19 nt, Artificial Sequence
  Description of Artificial Sequence: Synthetic oligonucleotide
ucgccauggcggauaacgg

SEQ ID NO: 2349976 - RNA, 19 nt, Artificial Sequence
  Description of Artificial Sequence: Synthetic oligonucleotide
gaaagcgugcguaaacuuc

SEQ ID NO: 2349977 - RNA, 19 nt, Artificial Sequence
  Description of Artificial Sequence: Synthetic oligonucleotide
acggucagggcaaagcgcg

SEQ ID NO: 2349978 - RNA, 19 nt, Artificial Sequence
  Description of Artificial Sequence: Synthetic oligonucleotide
auugggagugacugacgag

SEQ ID NO: 2349979 - RNA, 19 nt, Artificial Sequence
  Description of Artificial Sequence: Synthetic oligonucleotide
agaauaguuguuacaauua

SEQ ID NO: 2349980 - RNA, 19 nt, Artificial Sequence
  Description of Artificial Sequence: Synthetic oligonucleotide
ugcuuaguccucgugagau

SEQ ID NO: 2349981 - RNA, 19 nt, Artificial Sequence
  Description of Artificial Sequence: Synthetic oligonucleotide
uugcccuugaaugauuuuc

SEQ ID NO: 2349982 - RNA, 19 nt, Artificial Sequence
  Description of Artificial Sequence: Synthetic oligonucleotide
gagcauuugaggucacuca

SEQ ID NO: 2349983 - RNA, 19 nt, Artificial Sequence
  Description of Artificial Sequence: Synthetic oligonucleotide
gaaaggggcucaucuacuc

SEQ ID NO: 2349984 - RNA, 19 nt, Artificial Sequence
  Description of Artificial Sequence: Synthetic oligonucleotide
guccucgugagaucacugg

SEQ ID NO: 2349985 - RNA, 19 nt, Artificial Sequence
  Description of Artificial Sequence: Synthetic oligonucleotide
ugcuggcugcuaaaccagg

SEQ ID NO: 2349986 - RNA, 19 nt, Artificial Sequence
  Description of Artificial Sequence: Synthetic oligonucleotide
cucauccacgauuaguuga

SEQ ID NO: 2349987 - RNA, 19 nt, Artificial Sequence
  Description of Artificial Sequence: Synthetic oligonucleotide
acugaagugcugguucgcg

SEQ ID NO: 2349988 - RNA, 19 nt, Artificial Sequence
  Description of Artificial Sequence: Synthetic oligonucleotide
uuagcggcuugccuucuac

SEQ ID NO: 2349989 - RNA, 19 nt, Artificial Sequence
  Description of Artificial Sequence: Synthetic oligonucleotide
cuagugucucuccucccgg

SEQ ID NO: 2349990 - RNA, 19 nt, Artificial Sequence
  Description of Artificial Sequence: Synthetic oligonucleotide
uccuuugcacguacuuuca

SEQ ID NO: 2349991 - RNA, 19 nt, Artificial Sequence
  Description of Artificial Sequence: Synthetic oligonucleotide
agacacuaaucccaguauu

SEQ ID NO: 2349992 - RNA, 19 nt, Artificial Sequence
  Description of Artificial Sequence: Synthetic oligonucleotide
ccagauauggucugcuuag

SEQ ID NO: 2349993 - RNA, 19 nt, Artificial Sequence
  Description of Artificial Sequence: Synthetic oligonucleotide
aaacuucacguuguucaga

SEQ ID NO: 2349994 - RNA, 19 nt, Artificial Sequence
  Description of Artificial Sequence: Synthetic oligonucleotide
uaauuugccuaguguugcu

SEQ ID NO: 2349995 - RNA, 19 nt, Artificial Sequence
  Description of Artificial Sequence: Synthetic oligonucleotide
acaauauggguaaaauaau

SEQ ID NO: 2349996 - RNA, 19 nt, Artificial Sequence
  Description of Artificial Sequence: Synthetic oligonucleotide
ggguaaaauaauaauaaua

SEQ ID NO: 2349997 - RNA, 19 nt, Artificial Sequence
  Description of Artificial Sequence: Synthetic oligonucleotide
agucuggggucauacuuca

SEQ ID NO: 2349998 - RNA, 19 nt, Artificial Sequence
  Description of Artificial Sequence: Synthetic oligonucleotide
uccuggaaguucauacaaa

SEQ ID NO: 2349999 - RNA, 19 nt, Artificial Sequence
  Description of Artificial Sequence: Synthetic oligonucleotide
ugacugacgagaguucuaa

SEQ ID NO: 2350000 - RNA, 19 nt, Artificial Sequence
  Description of Artificial Sequence: Synthetic oligonucleotide
augucccaaacaauauggg

SEQ ID NO: 2350001 - RNA, 19 nt, Artificial Sequence
  Description of Artificial Sequence: Synthetic oligonucleotide
cuuaguccucgugagauca

SEQ ID NO: 2350002 - RNA, 19 nt, Artificial Sequence
  Description of Artificial Sequence: Synthetic oligonucleotide
agcgugcguaaacuucacg

SEQ ID NO: 2350003 - RNA, 19 nt, Artificial Sequence
  Description of Artificial Sequence: Synthetic oligonucleotide
acgauuucucucuggccug

SEQ ID NO: 2350004 - RNA, 19 nt, Artificial Sequence
  Description of Artificial Sequence: Synthetic oligonucleotide
ugguucgcguccuuccuca

SEQ ID NO: 2350005 - RNA, 19 nt, Artificial Sequence
  Description of Artificial Sequence: Synthetic oligonucleotide
gucugcuuaguccucguga

SEQ ID NO: 2350006 - RNA, 19 nt, Artificial Sequence
  Description of Artificial Sequence: Synthetic oligonucleotide
uaaagacacuaaucccagu

SEQ ID NO: 2350007 - RNA, 19 nt, Artificial Sequence
  Description of Artificial Sequence: Synthetic oligonucleotide
agaaagcgugcguaaacuu

SEQ ID NO: 2350008 - RNA, 19 nt, Artificial Sequence
  Description of Artificial Sequence: Synthetic oligonucleotide
gcggauaacggucagggca

SEQ ID NO: 2350009 - RNA, 19 nt, Artificial Sequence
  Description of Artificial Sequence: Synthetic oligonucleotide
ccuacagggaauaccuccg

SEQ ID NO: 2350010 - RNA, 19 nt, Artificial Sequence
  Description of Artificial Sequence: Synthetic oligonucleotide
caaugagcauuugagguca

SEQ ID NO: 2350011 - RNA, 19 nt, Artificial Sequence
  Description of Artificial Sequence: Synthetic oligonucleotide
auuaguugacaaauacaau

SEQ ID NO: 2350012 - RNA, 19 nt, Artificial Sequence
  Description of Artificial Sequence: Synthetic oligonucleotide
cgauaaagacacuaauccc

SEQ ID NO: 2350013 - RNA, 19 nt, Artificial Sequence
  Description of Artificial Sequence: Synthetic oligonucleotide
gucccaaacaauaugggua

SEQ ID NO: 2350014 - RNA, 19 nt, Artificial Sequence
  Description of Artificial Sequence: Synthetic oligonucleotide
auguaagcuccauggcuca

SEQ ID NO: 2350015 - RNA, 19 nt, Artificial Sequence
  Description of Artificial Sequence: Synthetic oligonucleotide
uccgccaaacagcucucca

SEQ ID NO: 2350016 - RNA, 19 nt, Artificial Sequence
  Description of Artificial Sequence: Synthetic oligonucleotide
aaugagcauuugaggucac

SEQ ID NO: 2350017 - RNA, 19 nt, Artificial Sequence
  Description of Artificial Sequence: Synthetic oligonucleotide
ucccgguggagugaacagg

SEQ ID NO: 2350018 - RNA, 19 nt, Artificial Sequence
  Description of Artificial Sequence: Synthetic oligonucleotide
guucuaauuugccuagugu

SEQ ID NO: 2350019 - RNA, 19 nt, Artificial Sequence
  Description of Artificial Sequence: Synthetic oligonucleotide
auccacgauuaguugacaa

SEQ ID NO: 2350020 - RNA, 19 nt, Artificial Sequence
  Description of Artificial Sequence: Synthetic oligonucleotide
cagucuggggucauacuuc

SEQ ID NO: 2350021 - RNA, 19 nt, Artificial Sequence
  Description of Artificial Sequence: Synthetic oligonucleotide
cagaaagcggccagcagca

SEQ ID NO: 2350022 - RNA, 19 nt, Artificial Sequence
  Description of Artificial Sequence: Synthetic oligonucleotide
cuuguuucgccauggcgga

SEQ ID NO: 2350023 - RNA, 19 nt, Artificial Sequence
  Description of Artificial Sequence: Synthetic oligonucleotide
cuacagggaauaccuccgc

SEQ ID NO: 2350024 - RNA, 19 nt, Artificial Sequence
  Description of Artificial Sequence: Synthetic oligonucleotide
ucgugagaucacuggagaa

SEQ ID NO: 2350025 - RNA, 19 nt, Artificial Sequence
  Description of Artificial Sequence: Synthetic oligonucleotide
aacuaagaugcuggcugcu

SEQ ID NO: 2350026 - RNA, 19 nt, Artificial Sequence
  Description of Artificial Sequence: Synthetic oligonucleotide
aggucacucagaagguaac

SEQ ID NO: 2350027 - RNA, 19 nt, Artificial Sequence
  Description of Artificial Sequence: Synthetic oligonucleotide
ucgcuuagcggcuugccuu

SEQ ID NO: 2350028 - RNA, 19 nt, Artificial Sequence
  Description of Artificial Sequence: Synthetic oligonucleotide
ccaguauugggagugacug

SEQ ID NO: 2350029 - RNA, 19 nt, Artificial Sequence
  Description of Artificial Sequence: Synthetic oligonucleotide
ugcuaaaccaggggugcca

SEQ ID NO: 2350030 - RNA, 19 nt, Artificial Sequence
  Description of Artificial Sequence: Synthetic oligonucleotide
uugcacguacuuucaccug

SEQ ID NO: 2350031 - RNA, 19 nt, Artificial Sequence
  Description of Artificial Sequence: Synthetic oligonucleotide
gauaacggucagggcaaag

SEQ ID NO: 2350032 - RNA, 19 nt, Artificial Sequence
  Description of Artificial Sequence: Synthetic oligonucleotide
guauugggagugacugacg

SEQ ID NO: 2350033 - RNA, 19 nt, Artificial Sequence
  Description of Artificial Sequence: Synthetic oligonucleotide
ggagaaagcgugcguaaac

SEQ ID NO: 2350034 - RNA, 19 nt, Artificial Sequence
  Description of Artificial Sequence: Synthetic oligonucleotide
aagcgugcguaaacuucac

SEQ ID NO: 2350035 - RNA, 19 nt, Artificial Sequence
  Description of Artificial Sequence: Synthetic oligonucleotide
agcggcuugccuucuacaa

SEQ ID NO: 2350036 - RNA, 19 nt, Artificial Sequence
  Description of Artificial Sequence: Synthetic oligonucleotide
gucacucagaagguaacca

SEQ ID NO: 2350037 - RNA, 19 nt, Artificial Sequence
  Description of Artificial Sequence: Synthetic oligonucleotide
aaacgguuuccuacaggga

SEQ ID NO: 2350038 - RNA, 19 nt, Artificial Sequence
  Description of Artificial Sequence: Synthetic oligonucleotide
gaugcaacugcaaacgguu

SEQ ID NO: 2350039 - RNA, 19 nt, Artificial Sequence
  Description of Artificial Sequence: Synthetic oligonucleotide
guacuuucaccugcucuag

SEQ ID NO: 2350040 - RNA, 19 nt, Artificial Sequence
  Description of Artificial Sequence: Synthetic oligonucleotide
aagaaauccuuugcacgua

SEQ ID NO: 2350041 - RNA, 19 nt, Artificial Sequence
  Description of Artificial Sequence: Synthetic oligonucleotide
gggacacucuuccccagcg

SEQ ID NO: 2350042 - RNA, 19 nt, Artificial Sequence
  Description of Artificial Sequence: Synthetic oligonucleotide
uuaguccucgugagaucac

SEQ ID NO: 2350043 - RNA, 19 nt, Artificial Sequence
  Description of Artificial Sequence: Synthetic oligonucleotide
cucgugagaucacuggaga

SEQ ID NO: 2350044 - RNA, 19 nt, Artificial Sequence
  Description of Artificial Sequence: Synthetic oligonucleotide
agaucacuggagaaagcgu

SEQ ID NO: 2350045 - RNA, 19 nt, Artificial Sequence
  Description of Artificial Sequence: Synthetic oligonucleotide
cuaaaccaggggugccacc

SEQ ID NO: 2350046 - RNA, 19 nt, Artificial Sequence
  Description of Artificial Sequence: Synthetic oligonucleotide
uacuuccuuucucgcaguc

SEQ ID NO: 2350047 - RNA, 19 nt, Artificial Sequence
  Description of Artificial Sequence: Synthetic oligonucleotide
gaggucacucagaagguaa

SEQ ID NO: 2350048 - RNA, 19 nt, Artificial Sequence
  Description of Artificial Sequence: Synthetic oligonucleotide
gcccgcaucucgcuuagcg

SEQ ID NO: 2350049 - RNA, 19 nt, Artificial Sequence
  Description of Artificial Sequence: Synthetic oligonucleotide
gucuacgauaaagacacua

SEQ ID NO: 2350050 - RNA, 19 nt, Artificial Sequence
  Description of Artificial Sequence: Synthetic oligonucleotide
auacuuccuuucucgcagu

SEQ ID NO: 2350051 - RNA, 19 nt, Artificial Sequence
  Description of Artificial Sequence: Synthetic oligonucleotide
cugcaaacgguuuccuaca

SEQ ID NO: 2350052 - RNA, 19 nt, Artificial Sequence
  Description of Artificial Sequence: Synthetic oligonucleotide
gagaaagcgugcguaaacu

SEQ ID NO: 2350053 - RNA, 19 nt, Artificial Sequence
  Description of Artificial Sequence: Synthetic oligonucleotide
cucaucuacuccuugcccu

SEQ ID NO: 2350054 - RNA, 19 nt, Artificial Sequence
  Description of Artificial Sequence: Synthetic oligonucleotide
cucuagugucucuccuccc

SEQ ID NO: 2350055 - RNA, 19 nt, Artificial Sequence
  Description of Artificial Sequence: Synthetic oligonucleotide
ucggaaaggggcucaucua

SEQ ID NO: 2350056 - RNA, 19 nt, Artificial Sequence
  Description of Artificial Sequence: Synthetic oligonucleotide
uuccuacagggaauaccuc

SEQ ID NO: 2350057 - RNA, 19 nt, Artificial Sequence
  Description of Artificial Sequence: Synthetic oligonucleotide
uggagaaagcgugcguaaa

SEQ ID NO: 2350058 - RNA, 19 nt, Artificial Sequence
  Description of Artificial Sequence: Synthetic oligonucleotide
uugccuaguguugcuggca

SEQ ID NO: 2350059 - RNA, 19 nt, Artificial Sequence
  Description of Artificial Sequence: Synthetic oligonucleotide
uguuucgccauggcggaua

SEQ ID NO: 2350060 - RNA, 19 nt, Artificial Sequence
  Description of Artificial Sequence: Synthetic oligonucleotide
uaguccucgugagaucacu

SEQ ID NO: 2350061 - RNA, 19 nt, Artificial Sequence
  Description of Artificial Sequence: Synthetic oligonucleotide
cauuuagauguuccuggaa

SEQ ID NO: 2350062 - RNA, 19 nt, Artificial Sequence
  Description of Artificial Sequence: Synthetic oligonucleotide
ccgcaucucgcuuagcggc

SEQ ID NO: 2350063 - RNA, 19 nt, Artificial Sequence
  Description of Artificial Sequence: Synthetic oligonucleotide
uggagccccggggaagacg

SEQ ID NO: 2350064 - RNA, 19 nt, Artificial Sequence
  Description of Artificial Sequence: Synthetic oligonucleotide
cugacgagaguucuaauuu

SEQ ID NO: 2350065 - RNA, 19 nt, Artificial Sequence
  Description of Artificial Sequence: Synthetic oligonucleotide
cucggaaaggggcucaucu

SEQ ID NO: 2350066 - RNA, 19 nt, Artificial Sequence
  Description of Artificial Sequence: Synthetic oligonucleotide
ucucgcuuagcggcuugcc

SEQ ID NO: 2350067 - RNA, 19 nt, Artificial Sequence
  Description of Artificial Sequence: Synthetic oligonucleotide
gcugcuaaaccaggggugc

SEQ ID NO: 2350068 - RNA, 19 nt, Artificial Sequence
  Description of Artificial Sequence: Synthetic oligonucleotide
gcucaucuacuccuugccc

SEQ ID NO: 2350069 - RNA, 19 nt, Artificial Sequence
  Description of Artificial Sequence: Synthetic oligonucleotide
ccucgugagaucacuggag

SEQ ID NO: 2350070 - RNA, 19 nt, Artificial Sequence
  Description of Artificial Sequence: Synthetic oligonucleotide
cuacgauaaagacacuaau

SEQ ID NO: 2350071 - RNA, 19 nt, Artificial Sequence
  Description of Artificial Sequence: Synthetic oligonucleotide
ucgcagucuggggucauac

SEQ ID NO: 2350072 - RNA, 19 nt, Artificial Sequence
  Description of Artificial Sequence: Synthetic oligonucleotide
ucuuccccagcggcucugg

SEQ ID NO: 2350073 - RNA, 19 nt, Artificial Sequence
  Description of Artificial Sequence: Synthetic oligonucleotide
ggccauggcccgcaucucg

SEQ ID NO: 2350074 - RNA, 19 nt, Artificial Sequence
  Description of Artificial Sequence: Synthetic oligonucleotide
cacgauuaguugacaaaua

SEQ ID NO: 2350075 - RNA, 19 nt, Artificial Sequence
  Description of Artificial Sequence: Synthetic oligonucleotide
gcucacaacuaagaugcug

SEQ ID NO: 2350076 - RNA, 19 nt, Artificial Sequence
  Description of Artificial Sequence: Synthetic oligonucleotide
uguaagcuccauggcucac

SEQ ID NO: 2350077 - RNA, 19 nt, Artificial Sequence
  Description of Artificial Sequence: Synthetic oligonucleotide
ggaagacgauuucucucug

SEQ ID NO: 2350078 - RNA, 19 nt, Artificial Sequence
  Description of Artificial Sequence: Synthetic oligonucleotide
ggucacucagaagguaacc

SEQ ID NO: 2350079 - RNA, 19 nt, Artificial Sequence
  Description of Artificial Sequence: Synthetic oligonucleotide
gggcucaucuacuccuugc

SEQ ID NO: 2350080 - RNA, 19 nt, Artificial Sequence
  Description of Artificial Sequence: Synthetic oligonucleotide
aguccucgugagaucacug

SEQ ID NO: 2350081 - RNA, 19 nt, Artificial Sequence
  Description of Artificial Sequence: Synthetic oligonucleotide
aagugcugguucgcguccu

SEQ ID NO: 2350082 - RNA, 19 nt, Artificial Sequence
  Description of Artificial Sequence: Synthetic oligonucleotide
ggacacucuuccccagcgg

SEQ ID NO: 2350083 - RNA, 19 nt, Artificial Sequence
  Description of Artificial Sequence: Synthetic oligonucleotide
guaagcuccauggcucaca

SEQ ID NO: 2350084 - RNA, 19 nt, Artificial Sequence
  Description of Artificial Sequence: Synthetic oligonucleotide
cuggagaaagcgugcguaa

SEQ ID NO: 2350085 - RNA, 19 nt, Artificial Sequence
  Description of Artificial Sequence: Synthetic oligonucleotide
cguuguucagaaagcggcc

SEQ ID NO: 2350086 - RNA, 19 nt, Artificial Sequence
  Description of Artificial Sequence: Synthetic oligonucleotide
caguauugggagugacuga

SEQ ID NO: 2350087 - RNA, 19 nt, Artificial Sequence
  Description of Artificial Sequence: Synthetic oligonucleotide
ccuaguguugcuggcaaug

SEQ ID NO: 2350088 - RNA, 19 nt, Artificial Sequence
  Description of Artificial Sequence: Synthetic oligonucleotide
ggcugcuaaaccaggggug

SEQ ID NO: 2350089 - RNA, 19 nt, Artificial Sequence
  Description of Artificial Sequence: Synthetic oligonucleotide
cgauuaguugacaaauaca

SEQ ID NO: 2350090 - RNA, 19 nt, Artificial Sequence
  Description of Artificial Sequence: Synthetic oligonucleotide
guggagugaacaggggaca

SEQ ID NO: 2350091 - RNA, 19 nt, Artificial Sequence
  Description of Artificial Sequence: Synthetic oligonucleotide
ucccaguauugggagugac

SEQ ID NO: 2350092 - RNA, 19 nt, Artificial Sequence
  Description of Artificial Sequence: Synthetic oligonucleotide
augccagauauggucugcu

SEQ ID NO: 2350093 - RNA, 19 nt, Artificial Sequence
  Description of Artificial Sequence: Synthetic oligonucleotide
acccagucucggaaagggg

SEQ ID NO: 2350094 - RNA, 19 nt, Artificial Sequence
  Description of Artificial Sequence: Synthetic oligonucleotide
agggaauaccuccgccaaa

SEQ ID NO: 2350095 - RNA, 19 nt, Artificial Sequence
  Description of Artificial Sequence: Synthetic oligonucleotide
uggucugcuuaguccucgu

SEQ ID NO: 2350096 - RNA, 19 nt, Artificial Sequence
  Description of Artificial Sequence: Synthetic oligonucleotide
cagggaauaccuccgccaa

SEQ ID NO: 2350097 - RNA, 19 nt, Artificial Sequence
  Description of Artificial Sequence: Synthetic oligonucleotide
ugccagauauggucugcuu

SEQ ID NO: 2350098 - RNA, 19 nt, Artificial Sequence
  Description of Artificial Sequence: Synthetic oligonucleotide
gcgugcguaaacuucacgu

SEQ ID NO: 2350099 - RNA, 19 nt, Artificial Sequence
  Description of Artificial Sequence: Synthetic oligonucleotide
uucucgcagucugggguca

SEQ ID NO: 2350100 - RNA, 19 nt, Artificial Sequence
  Description of Artificial Sequence: Synthetic oligonucleotide
cugcuaaaccaggggugcc

SEQ ID NO: 2350101 - RNA, 19 nt, Artificial Sequence
  Description of Artificial Sequence: Synthetic oligonucleotide
cugguucgcguccuuccuc

SEQ ID NO: 2350102 - RNA, 19 nt, Artificial Sequence
  Description of Artificial Sequence: Synthetic oligonucleotide
uccuugcccuugaaugauu

SEQ ID NO: 2350103 - RNA, 19 nt, Artificial Sequence
  Description of Artificial Sequence: Synthetic oligonucleotide
cuccuuauuaaaucuuguu

SEQ ID NO: 2350104 - RNA, 19 nt, Artificial Sequence
  Description of Artificial Sequence: Synthetic oligonucleotide
ccuuucucgcagucugggg

SEQ ID NO: 2350105 - RNA, 19 nt, Artificial Sequence
  Description of Artificial Sequence: Synthetic oligonucleotide
augagcauuugaggucacu

SEQ ID NO: 2350106 - RNA, 19 nt, Artificial Sequence
  Description of Artificial Sequence: Synthetic oligonucleotide
agucucggaaaggggcuca

SEQ ID NO: 2350107 - RNA, 19 nt, Artificial Sequence
  Description of Artificial Sequence: Synthetic oligonucleotide
caaagaggcuucucaugua

SEQ ID NO: 2350108 - RNA, 19 nt, Artificial Sequence
  Description of Artificial Sequence: Synthetic oligonucleotide
ccgccaaacagcucuccag

SEQ ID NO: 2350109 - RNA, 19 nt, Artificial Sequence
  Description of Artificial Sequence: Synthetic oligonucleotide
ucuccucccgguggaguga

SEQ ID NO: 2350110 - RNA, 19 nt, Artificial Sequence
  Description of Artificial Sequence: Synthetic oligonucleotide
cggaaaggggcucaucuac

SEQ ID NO: 2350111 - RNA, 19 nt, Artificial Sequence
  Description of Artificial Sequence: Synthetic oligonucleotide
guucgcguccuuccucaca

SEQ ID NO: 2350112 - RNA, 19 nt, Artificial Sequence
  Description of Artificial Sequence: Synthetic oligonucleotide
acgguuuccuacagggaau

SEQ ID NO: 2350113 - RNA, 19 nt, Artificial Sequence
  Description of Artificial Sequence: Synthetic oligonucleotide
gccagauauggucugcuua

SEQ ID NO: 2350114 - RNA, 19 nt, Artificial Sequence
  Description of Artificial Sequence: Synthetic oligonucleotide
gcugaaacccagucucgga

SEQ ID NO: 2350115 - RNA, 19 nt, Artificial Sequence
  Description of Artificial Sequence: Synthetic oligonucleotide
caucucgcuuagcggcuug

SEQ ID NO: 2350116 - RNA, 19 nt, Artificial Sequence
  Description of Artificial Sequence: Synthetic oligonucleotide
ggagugacugacgagaguu

SEQ ID NO: 2350117 - RNA, 19 nt, Artificial Sequence
  Description of Artificial Sequence: Synthetic oligonucleotide
cacguacuuucaccugcuc

SEQ ID NO: 2350118 - RNA, 19 nt, Artificial Sequence
  Description of Artificial Sequence: Synthetic oligonucleotide
gauuucucucuggccuguc

SEQ ID NO: 2350119 - RNA, 19 nt, Artificial Sequence
  Description of Artificial Sequence: Synthetic oligonucleotide
ccauacuuccuuucucgca

SEQ ID NO: 2350120 - RNA, 19 nt, Artificial Sequence
  Description of Artificial Sequence: Synthetic oligonucleotide
gccauggcggauaacgguc

SEQ ID NO: 2350121 - RNA, 19 nt, Artificial Sequence
  Description of Artificial Sequence: Synthetic oligonucleotide
ggucagggcaaagcgcggc

SEQ ID NO: 2350122 - RNA, 19 nt, Artificial Sequence
  Description of Artificial Sequence: Synthetic oligonucleotide
cuuccucacagucuacgau

SEQ ID NO: 2350123 - RNA, 19 nt, Artificial Sequence
  Description of Artificial Sequence: Synthetic oligonucleotide
ggcggauaacggucagggc

SEQ ID NO: 2350124 - RNA, 19 nt, Artificial Sequence
  Description of Artificial Sequence: Synthetic oligonucleotide
cguacuuucaccugcucua

SEQ ID NO: 2350125 - RNA, 19 nt, Artificial Sequence
  Description of Artificial Sequence: Synthetic oligonucleotide
gcggcuugccuucuacaac

SEQ ID NO: 2350126 - RNA, 19 nt, Artificial Sequence
  Description of Artificial Sequence: Synthetic oligonucleotide
ucucggaaaggggcucauc

SEQ ID NO: 2350127 - RNA, 19 nt, Artificial Sequence
  Description of Artificial Sequence: Synthetic oligonucleotide
caucaugucuuugcaaaau

SEQ ID NO: 2350128 - RNA, 19 nt, Artificial Sequence
  Description of Artificial Sequence: Synthetic oligonucleotide
cugcuuaguccucgugaga

SEQ ID NO: 2350129 - RNA, 19 nt, Artificial Sequence
  Description of Artificial Sequence: Synthetic oligonucleotide
ccuuugcacguacuuucac

SEQ ID NO: 2350130 - RNA, 19 nt, Artificial Sequence
  Description of Artificial Sequence: Synthetic oligonucleotide
cuccgccaaacagcucucc

SEQ ID NO: 2350131 - RNA, 19 nt, Artificial Sequence
  Description of Artificial Sequence: Synthetic oligonucleotide
gcuaaaccaggggugccac

SEQ ID NO: 2350132 - RNA, 19 nt, Artificial Sequence
  Description of Artificial Sequence: Synthetic oligonucleotide
aucccaguauugggaguga

SEQ ID NO: 2350133 - RNA, 19 nt, Artificial Sequence
  Description of Artificial Sequence: Synthetic oligonucleotide
cacaacuaagaugcuggcu

SEQ ID NO: 2350134 - RNA, 19 nt, Artificial Sequence
  Description of Artificial Sequence: Synthetic oligonucleotide
cagucucggaaaggggcuc

SEQ ID NO: 2350135 - RNA, 19 nt, Artificial Sequence
  Description of Artificial Sequence: Synthetic oligonucleotide
ggagccccggggaagacga

SEQ ID NO: 2350136 - RNA, 19 nt, Artificial Sequence
  Description of Artificial Sequence: Synthetic oligonucleotide
augcaacugcaaacgguuu

SEQ ID NO: 2350137 - RNA, 19 nt, Artificial Sequence
  Description of Artificial Sequence: Synthetic oligonucleotide
ugcuggcaaugagcauuug

SEQ ID NO: 2350138 - RNA, 19 nt, Artificial Sequence
  Description of Artificial Sequence: Synthetic oligonucleotide
cucgcuuagcggcuugccu

SEQ ID NO: 2350139 - RNA, 19 nt, Artificial Sequence
  Description of Artificial Sequence: Synthetic oligonucleotide
ucgcguccuuccucacagu

SEQ ID NO: 2350140 - RNA, 19 nt, Artificial Sequence
  Description of Artificial Sequence: Synthetic oligonucleotide
gguuuccuacagggaauac

SEQ ID NO: 2350141 - RNA, 19 nt, Artificial Sequence
  Description of Artificial Sequence: Synthetic oligonucleotide
gacugacgagaguucuaau

SEQ ID NO: 2350142 - RNA, 19 nt, Artificial Sequence
  Description of Artificial Sequence: Synthetic oligonucleotide
uaccuccgccaaacagcuc

SEQ ID NO: 2350143 - RNA, 19 nt, Artificial Sequence
  Description of Artificial Sequence: Synthetic oligonucleotide
cauccacgauuaguugaca

SEQ ID NO: 2350144 - RNA, 19 nt, Artificial Sequence
  Description of Artificial Sequence: Synthetic oligonucleotide
uuguuucgccauggcggau

SEQ ID NO: 2350145 - RNA, 19 nt, Artificial Sequence
  Description of Artificial Sequence: Synthetic oligonucleotide
gugacugacgagaguucua

SEQ ID NO: 2350146 - RNA, 19 nt, Artificial Sequence
  Description of Artificial Sequence: Synthetic oligonucleotide
ccaaaaugccagauauggu

SEQ ID NO: 2350147 - RNA, 19 nt, Artificial Sequence
  Description of Artificial Sequence: Synthetic oligonucleotide
ccauggcggauaacgguca

SEQ ID NO: 2350148 - RNA, 19 nt, Artificial Sequence
  Description of Artificial Sequence: Synthetic oligonucleotide
cgagaguucuaauuugccu

SEQ ID NO: 2350149 - RNA, 19 nt, Artificial Sequence
  Description of Artificial Sequence: Synthetic oligonucleotide
ggaaaggggcucaucuacu

SEQ ID NO: 2350150 - RNA, 19 nt, Artificial Sequence
  Description of Artificial Sequence: Synthetic oligonucleotide
uccucccgguggagugaac

SEQ ID NO: 2350151 - RNA, 19 nt, Artificial Sequence
  Description of Artificial Sequence: Synthetic oligonucleotide
cugcucuagugucucuccu

SEQ ID NO: 2350152 - RNA, 19 nt, Artificial Sequence
  Description of Artificial Sequence: Synthetic oligonucleotide
cggauaacggucagggcaa

SEQ ID NO: 2350153 - RNA, 19 nt, Artificial Sequence
  Description of Artificial Sequence: Synthetic oligonucleotide
ccacgauuaguugacaaau

SEQ ID NO: 2350154 - RNA, 19 nt, Artificial Sequence
  Description of Artificial Sequence: Synthetic oligonucleotide
gucuggggucauacuucac

SEQ ID NO: 2350155 - RNA, 19 nt, Artificial Sequence
  Description of Artificial Sequence: Synthetic oligonucleotide
cacuggagaaagcgugcgu

SEQ ID NO: 2350156 - RNA, 19 nt, Artificial Sequence
  Description of Artificial Sequence: Synthetic oligonucleotide
cuuagcggcuugccuucua

SEQ ID NO: 2350157 - RNA, 19 nt, Artificial Sequence
  Description of Artificial Sequence: Synthetic oligonucleotide
agccccggggaagacgauu

SEQ ID NO: 2350158 - RNA, 19 nt, Artificial Sequence
  Description of Artificial Sequence: Synthetic oligonucleotide
gguucgcguccuuccucac

SEQ ID NO: 2350159 - RNA, 19 nt, Artificial Sequence
  Description of Artificial Sequence: Synthetic oligonucleotide
ucucgcagucuggggucau

SEQ ID NO: 2350160 - RNA, 19 nt, Artificial Sequence
  Description of Artificial Sequence: Synthetic oligonucleotide
gguaaccaaagaggcuucu

SEQ ID NO: 2350161 - RNA, 19 nt, Artificial Sequence
  Description of Artificial Sequence: Synthetic oligonucleotide
cuugcccuugaaugauuuu

SEQ ID NO: 2350162 - RNA, 19 nt, Artificial Sequence
  Description of Artificial Sequence: Synthetic oligonucleotide
cgcguccuuccucacaguc

SEQ ID NO: 2350163 - RNA, 19 nt, Artificial Sequence
  Description of Artificial Sequence: Synthetic oligonucleotide
cuccuugcccuugaaugau

SEQ ID NO: 2350164 - RNA, 19 nt, Artificial Sequence
  Description of Artificial Sequence: Synthetic oligonucleotide
gcugguucgcguccuuccu

SEQ ID NO: 2350165 - RNA, 19 nt, Artificial Sequence
  Description of Artificial Sequence: Synthetic oligonucleotide
ccucccgguggagugaaca

SEQ ID NO: 2350166 - RNA, 19 nt, Artificial Sequence
  Description of Artificial Sequence: Synthetic oligonucleotide
cuggagccccggggaagac

SEQ ID NO: 2350167 - RNA, 19 nt, Artificial Sequence
  Description of Artificial Sequence: Synthetic oligonucleotide
cccaguauugggagugacu

SEQ ID NO: 2350168 - RNA, 19 nt, Artificial Sequence
  Description of Artificial Sequence: Synthetic oligonucleotide
ccuccgccaaacagcucuc

SEQ ID NO: 2350169 - RNA, 19 nt, Artificial Sequence
  Description of Artificial Sequence: Synthetic oligonucleotide
cggucagggcaaagcgcgg

SEQ ID NO: 2350170 - RNA, 19 nt, Artificial Sequence
  Description of Artificial Sequence: Synthetic oligonucleotide
cuccucccgguggagugaa

SEQ ID NO: 2350171 - RNA, 19 nt, Artificial Sequence
  Description of Artificial Sequence: Synthetic oligonucleotide
ggauaacggucagggcaaa

SEQ ID NO: 2350172 - RNA, 19 nt, Artificial Sequence
  Description of Artificial Sequence: Synthetic oligonucleotide
gcguccuuccucacagucu

SEQ ID NO: 2350173 - RNA, 19 nt, Artificial Sequence
  Description of Artificial Sequence: Synthetic oligonucleotide
gcacguacuuucaccugcu

SEQ ID NO: 2350174 - RNA, 19 nt, Artificial Sequence
  Description of Artificial Sequence: Synthetic oligonucleotide
cauggcccgcaucucgcuu

SEQ ID NO: 2350175 - RNA, 19 nt, Artificial Sequence
  Description of Artificial Sequence: Synthetic oligonucleotide
cgugcguaaacuucacguu

SEQ ID NO: 2350176 - RNA, 19 nt, Artificial Sequence
  Description of Artificial Sequence: Synthetic oligonucleotide
gcguaaacuucacguuguu

SEQ ID NO: 2350177 - RNA, 19 nt, Artificial Sequence
  Description of Artificial Sequence: Synthetic oligonucleotide
cucgcagucuggggucaua

SEQ ID NO: 2350178 - RNA, 19 nt, Artificial Sequence
  Description of Artificial Sequence: Synthetic oligonucleotide
cggggaagacgauuucucu

SEQ ID NO: 2350179 - RNA, 19 nt, Artificial Sequence
  Description of Artificial Sequence: Synthetic oligonucleotide
ccccggggaagacgauuuc

SEQ ID NO: 2350180 - RNA, 19 nt, Artificial Sequence
  Description of Artificial Sequence: Synthetic oligonucleotide
gucucggaaaggggcucau

SEQ ID NO: 2350181 - RNA, 19 nt, Artificial Sequence
  Description of Artificial Sequence: Synthetic oligonucleotide
ccucacagucuacgauaaa

SEQ ID NO: 2350182 - RNA, 19 nt, Artificial Sequence
  Description of Artificial Sequence: Synthetic oligonucleotide
cccaaacaauauggguaaa

SEQ ID NO: 2350183 - RNA, 19 nt, Artificial Sequence
  Description of Artificial Sequence: Synthetic oligonucleotide
gccuaguguugcuggcaau

SEQ ID NO: 2350184 - RNA, 19 nt, Artificial Sequence
  Description of Artificial Sequence: Synthetic oligonucleotide
cccggggaagacgauuucu

SEQ ID NO: 2350185 - RNA, 19 nt, Artificial Sequence
  Description of Artificial Sequence: Synthetic oligonucleotide
ggcucacaacuaagaugcu

SEQ ID NO: 2350186 - RNA, 19 nt, Artificial Sequence
  Description of Artificial Sequence: Synthetic oligonucleotide
cgcaucucgcuuagcggcu

SEQ ID NO: 2350187 - RNA, 19 nt, Artificial Sequence
  Description of Artificial Sequence: Synthetic oligonucleotide
gcuuagcggcuugccuucu

SEQ ID NO: 2350188 - RNA, 19 nt, Artificial Sequence
  Description of Artificial Sequence: Synthetic oligonucleotide
cgcagucuggggucauacu

SEQ ID NO: 2350189 - RNA, 19 nt, Artificial Sequence
  Description of Artificial Sequence: Synthetic oligonucleotide
cgauuucucucuggccugu

SEQ ID NO: 2350190 - RNA, 19 nt, Artificial Sequence
  Description of Artificial Sequence: Synthetic oligonucleotide
cauagcaagagguagaagg

SEQ ID NO: 2350191 - RNA, 19 nt, Artificial Sequence
  Description of Artificial Sequence: Synthetic oligonucleotide
agaauggacagcuauaagg

SEQ ID NO: 2350192 - RNA, 19 nt, Artificial Sequence
  Description of Artificial Sequence: Synthetic oligonucleotide
aaggauaauagcucagggc

SEQ ID NO: 2350193 - RNA, 19 nt, Artificial Sequence
  Description of Artificial Sequence: Synthetic oligonucleotide
acagggacaaaacagaggg

SEQ ID NO: 2350194 - RNA, 19 nt, Artificial Sequence
  Description of Artificial Sequence: Synthetic oligonucleotide
aguucuuuauuauagaccu

SEQ ID NO: 2350195 - RNA, 19 nt, Artificial Sequence
  Description of Artificial Sequence: Synthetic oligonucleotide
ugucuugaaagucaggucc

SEQ ID NO: 2350196 - RNA, 19 nt, Artificial Sequence
  Description of Artificial Sequence: Synthetic oligonucleotide
aagguuguugagcagacuc

SEQ ID NO: 2350197 - RNA, 19 nt, Artificial Sequence
  Description of Artificial Sequence: Synthetic oligonucleotide
aauagcucagggcugagag

SEQ ID NO: 2350198 - RNA, 19 nt, Artificial Sequence
  Description of Artificial Sequence: Synthetic oligonucleotide
auaauguucgggcugggcc

SEQ ID NO: 2350199 - RNA, 19 nt, Artificial Sequence
  Description of Artificial Sequence: Synthetic oligonucleotide
aaguauacauuacucucac

SEQ ID NO: 2350200 - RNA, 19 nt, Artificial Sequence
  Description of Artificial Sequence: Synthetic oligonucleotide
aguucuacuaggcuccucc

SEQ ID NO: 2350201 - RNA, 19 nt, Artificial Sequence
  Description of Artificial Sequence: Synthetic oligonucleotide
aucaauguccaccuuggcc

SEQ ID NO: 2350202 - RNA, 19 nt, Artificial Sequence
  Description of Artificial Sequence: Synthetic oligonucleotide
acagcuauaagguguaggg

SEQ ID NO: 2350203 - RNA, 19 nt, Artificial Sequence
  Description of Artificial Sequence: Synthetic oligonucleotide
gacaacucugucuugaaag

SEQ ID NO: 2350204 - RNA, 19 nt, Artificial Sequence
  Description of Artificial Sequence: Synthetic oligonucleotide
aaucaaggcccagauaacc

SEQ ID NO: 2350205 - RNA, 19 nt, Artificial Sequence
  Description of Artificial Sequence: Synthetic oligonucleotide
ucaauguccaccuuggcca

SEQ ID NO: 2350206 - RNA, 19 nt, Artificial Sequence
  Description of Artificial Sequence: Synthetic oligonucleotide
aggauaauagcucagggcu

SEQ ID NO: 2350207 - RNA, 19 nt, Artificial Sequence
  Description of Artificial Sequence: Synthetic oligonucleotide
ugucagaccaccaggauug

SEQ ID NO: 2350208 - RNA, 19 nt, Artificial Sequence
  Description of Artificial Sequence: Synthetic oligonucleotide
uuguguauaauguucgggc

SEQ ID NO: 2350209 - RNA, 19 nt, Artificial Sequence
  Description of Artificial Sequence: Synthetic oligonucleotide
aacaacugguguuucacug

SEQ ID NO: 2350210 - RNA, 19 nt, Artificial Sequence
  Description of Artificial Sequence: Synthetic oligonucleotide
ugguuguguauaauguucg

SEQ ID NO: 2350211 - RNA, 19 nt, Artificial Sequence
  Description of Artificial Sequence: Synthetic oligonucleotide
gaaggauaauagcucaggg

SEQ ID NO: 2350212 - RNA, 19 nt, Artificial Sequence
  Description of Artificial Sequence: Synthetic oligonucleotide
uagaaggucacauaaaguu

SEQ ID NO: 2350213 - RNA, 19 nt, Artificial Sequence
  Description of Artificial Sequence: Synthetic oligonucleotide
acauuaaagguuguugagc

SEQ ID NO: 2350214 - RNA, 19 nt, Artificial Sequence
  Description of Artificial Sequence: Synthetic oligonucleotide
cagggaaccagaaucaagg

SEQ ID NO: 2350215 - RNA, 19 nt, Artificial Sequence
  Description of Artificial Sequence: Synthetic oligonucleotide
gaauguuccugucagacca

SEQ ID NO: 2350216 - RNA, 19 nt, Artificial Sequence
  Description of Artificial Sequence: Synthetic oligonucleotide
agcuauaagguguagggug

SEQ ID NO: 2350217 - RNA, 19 nt, Artificial Sequence
  Description of Artificial Sequence: Synthetic oligonucleotide
gacaccucguacucgaugg

SEQ ID NO: 2350218 - RNA, 19 nt, Artificial Sequence
  Description of Artificial Sequence: Synthetic oligonucleotide
uguauaauguucgggcugg

SEQ ID NO: 2350219 - RNA, 19 nt, Artificial Sequence
  Description of Artificial Sequence: Synthetic oligonucleotide
uauacauuacucucacuug

SEQ ID NO: 2350220 - RNA, 19 nt, Artificial Sequence
  Description of Artificial Sequence: Synthetic oligonucleotide
aguucuucauagcaagagg

SEQ ID NO: 2350221 - RNA, 19 nt, Artificial Sequence
  Description of Artificial Sequence: Synthetic oligonucleotide
auccuugaugcccacaaac

SEQ ID NO: 2350222 - RNA, 19 nt, Artificial Sequence
  Description of Artificial Sequence: Synthetic oligonucleotide
uucuuuauuauagaccuac

SEQ ID NO: 2350223 - RNA, 19 nt, Artificial Sequence
  Description of Artificial Sequence: Synthetic oligonucleotide
gacauuaaagguuguugag

SEQ ID NO: 2350224 - RNA, 19 nt, Artificial Sequence
  Description of Artificial Sequence: Synthetic oligonucleotide
aaaacagagggagcagggc

SEQ ID NO: 2350225 - RNA, 19 nt, Artificial Sequence
  Description of Artificial Sequence: Synthetic oligonucleotide
uaauguucgggcugggccg

SEQ ID NO: 2350226 - RNA, 19 nt, Artificial Sequence
  Description of Artificial Sequence: Synthetic oligonucleotide
uugucagccaaucagcuuc

SEQ ID NO: 2350227 - RNA, 19 nt, Artificial Sequence
  Description of Artificial Sequence: Synthetic oligonucleotide
augaaaauccacaacaacu

SEQ ID NO: 2350228 - RNA, 19 nt, Artificial Sequence
  Description of Artificial Sequence: Synthetic oligonucleotide
uuuccuuuugacccacagg

SEQ ID NO: 2350229 - RNA, 19 nt, Artificial Sequence
  Description of Artificial Sequence: Synthetic oligonucleotide
ugcucagggaaccagaauc

SEQ ID NO: 2350230 - RNA, 19 nt, Artificial Sequence
  Description of Artificial Sequence: Synthetic oligonucleotide
uacucgauggcaagguccg

SEQ ID NO: 2350231 - RNA, 19 nt, Artificial Sequence
  Description of Artificial Sequence: Synthetic oligonucleotide
agagaaguauacauuacuc

SEQ ID NO: 2350232 - RNA, 19 nt, Artificial Sequence
  Description of Artificial Sequence: Synthetic oligonucleotide
uuaaagguuguugagcaga

SEQ ID NO: 2350233 - RNA, 19 nt, Artificial Sequence
  Description of Artificial Sequence: Synthetic oligonucleotide
ucugucuugaaagucaggu

SEQ ID NO: 2350234 - RNA, 19 nt, Artificial Sequence
  Description of Artificial Sequence: Synthetic oligonucleotide
uccuggacauuaaagguug

SEQ ID NO: 2350235 - RNA, 19 nt, Artificial Sequence
  Description of Artificial Sequence: Synthetic oligonucleotide
aauggacagcuauaaggug

SEQ ID NO: 2350236 - RNA, 19 nt, Artificial Sequence
  Description of Artificial Sequence: Synthetic oligonucleotide
uaaaguucuuuauuauaga

SEQ ID NO: 2350237 - RNA, 19 nt, Artificial Sequence
  Description of Artificial Sequence: Synthetic oligonucleotide
caagagaagccgcugagcc

SEQ ID NO: 2350238 - RNA, 19 nt, Artificial Sequence
  Description of Artificial Sequence: Synthetic oligonucleotide
aacuuguccaccacauccc

SEQ ID NO: 2350239 - RNA, 19 nt, Artificial Sequence
  Description of Artificial Sequence: Synthetic oligonucleotide
gguagaaggucacauaaag

SEQ ID NO: 2350240 - RNA, 19 nt, Artificial Sequence
  Description of Artificial Sequence: Synthetic oligonucleotide
auacauuacucucacuugu

SEQ ID NO: 2350241 - RNA, 19 nt, Artificial Sequence
  Description of Artificial Sequence: Synthetic oligonucleotide
aaauccacaacaacuggug

SEQ ID NO: 2350242 - RNA, 19 nt, Artificial Sequence
  Description of Artificial Sequence: Synthetic oligonucleotide
uguacuguggugucugcag

SEQ ID NO: 2350243 - RNA, 19 nt, Artificial Sequence
  Description of Artificial Sequence: Synthetic oligonucleotide
aaaaugagagaaguauaca

SEQ ID NO: 2350244 - RNA, 19 nt, Artificial Sequence
  Description of Artificial Sequence: Synthetic oligonucleotide
ugugcaugaaaauccacaa

SEQ ID NO: 2350245 - RNA, 19 nt, Artificial Sequence
  Description of Artificial Sequence: Synthetic oligonucleotide
cauuaaagguuguugagca

SEQ ID NO: 2350246 - RNA, 19 nt, Artificial Sequence
  Description of Artificial Sequence: Synthetic oligonucleotide
uugauggccagcacuguag

SEQ ID NO: 2350247 - RNA, 19 nt, Artificial Sequence
  Description of Artificial Sequence: Synthetic oligonucleotide
ucuacuaggcuccucccca

SEQ ID NO: 2350248 - RNA, 19 nt, Artificial Sequence
  Description of Artificial Sequence: Synthetic oligonucleotide
cuugaugcccacaaacuug

SEQ ID NO: 2350249 - RNA, 19 nt, Artificial Sequence
  Description of Artificial Sequence: Synthetic oligonucleotide
augagagaaguauacauua

SEQ ID NO: 2350250 - RNA, 19 nt, Artificial Sequence
  Description of Artificial Sequence: Synthetic oligonucleotide
uggacauuaaagguuguug

SEQ ID NO: 2350251 - RNA, 19 nt, Artificial Sequence
  Description of Artificial Sequence: Synthetic oligonucleotide
caaaacagagggagcaggg

SEQ ID NO: 2350252 - RNA, 19 nt, Artificial Sequence
  Description of Artificial Sequence: Synthetic oligonucleotide
guugagcagacucugguug

SEQ ID NO: 2350253 - RNA, 19 nt, Artificial Sequence
  Description of Artificial Sequence: Synthetic oligonucleotide
uguguauaauguucgggcu

SEQ ID NO: 2350254 - RNA, 19 nt, Artificial Sequence
  Description of Artificial Sequence: Synthetic oligonucleotide
acauuacucucacuuguuc

SEQ ID NO: 2350255 - RNA, 19 nt, Artificial Sequence
  Description of Artificial Sequence: Synthetic oligonucleotide
gaaggcuuccagcuggucc

SEQ ID NO: 2350256 - RNA, 19 nt, Artificial Sequence
  Description of Artificial Sequence: Synthetic oligonucleotide
uuccugucagaccaccagg

SEQ ID NO: 2350257 - RNA, 19 nt, Artificial Sequence
  Description of Artificial Sequence: Synthetic oligonucleotide
cugacuuguucacagcucc

SEQ ID NO: 2350258 - RNA, 19 nt, Artificial Sequence
  Description of Artificial Sequence: Synthetic oligonucleotide
ugcuugucagccaaucagc

SEQ ID NO: 2350259 - RNA, 19 nt, Artificial Sequence
  Description of Artificial Sequence: Synthetic oligonucleotide
caugaaaauccacaacaac

SEQ ID NO: 2350260 - RNA, 19 nt, Artificial Sequence
  Description of Artificial Sequence: Synthetic oligonucleotide
ucagggaaccagaaucaag

SEQ ID NO: 2350261 - RNA, 19 nt, Artificial Sequence
  Description of Artificial Sequence: Synthetic oligonucleotide
aauccacaacaacuggugu

SEQ ID NO: 2350262 - RNA, 19 nt, Artificial Sequence
  Description of Artificial Sequence: Synthetic oligonucleotide
ugguguuucacuguugaca

SEQ ID NO: 2350263 - RNA, 19 nt, Artificial Sequence
  Description of Artificial Sequence: Synthetic oligonucleotide
ggaaccagaaucaaggccc

SEQ ID NO: 2350264 - RNA, 19 nt, Artificial Sequence
  Description of Artificial Sequence: Synthetic oligonucleotide
guuguguauaauguucggg

SEQ ID NO: 2350265 - RNA, 19 nt, Artificial Sequence
  Description of Artificial Sequence: Synthetic oligonucleotide
ucacauaaaguucuuuauu

SEQ ID NO: 2350266 - RNA, 19 nt, Artificial Sequence
  Description of Artificial Sequence: Synthetic oligonucleotide
aggugagggaaguccaccc

SEQ ID NO: 2350267 - RNA, 19 nt, Artificial Sequence
  Description of Artificial Sequence: Synthetic oligonucleotide
aucuucucuaaccgcgggc

SEQ ID NO: 2350268 - RNA, 19 nt, Artificial Sequence
  Description of Artificial Sequence: Synthetic oligonucleotide
uugaugcccacaaacuugu

SEQ ID NO: 2350269 - RNA, 19 nt, Artificial Sequence
  Description of Artificial Sequence: Synthetic oligonucleotide
acucugguuguguauaaug

SEQ ID NO: 2350270 - RNA, 19 nt, Artificial Sequence
  Description of Artificial Sequence: Synthetic oligonucleotide
ugagagaaguauacauuac

SEQ ID NO: 2350271 - RNA, 19 nt, Artificial Sequence
  Description of Artificial Sequence: Synthetic oligonucleotide
gcccagauaacccagggcg

SEQ ID NO: 2350272 - RNA, 19 nt, Artificial Sequence
  Description of Artificial Sequence: Synthetic oligonucleotide
cugguuguguauaauguuc

SEQ ID NO: 2350273 - RNA, 19 nt, Artificial Sequence
  Description of Artificial Sequence: Synthetic oligonucleotide
gagaguucuacuaggcucc

SEQ ID NO: 2350274 - RNA, 19 nt, Artificial Sequence
  Description of Artificial Sequence: Synthetic oligonucleotide
acaaaacagagggagcagg

SEQ ID NO: 2350275 - RNA, 19 nt, Artificial Sequence
  Description of Artificial Sequence: Synthetic oligonucleotide
uaaagguuguugagcagac

SEQ ID NO: 2350276 - RNA, 19 nt, Artificial Sequence
  Description of Artificial Sequence: Synthetic oligonucleotide
gaaguauacauuacucuca

SEQ ID NO: 2350277 - RNA, 19 nt, Artificial Sequence
  Description of Artificial Sequence: Synthetic oligonucleotide
gagguagaaggucacauaa

SEQ ID NO: 2350278 - RNA, 19 nt, Artificial Sequence
  Description of Artificial Sequence: Synthetic oligonucleotide
cuagaggugagggaagucc

SEQ ID NO: 2350279 - RNA, 19 nt, Artificial Sequence
  Description of Artificial Sequence: Synthetic oligonucleotide
uccuugaugcccacaaacu

SEQ ID NO: 2350280 - RNA, 19 nt, Artificial Sequence
  Description of Artificial Sequence: Synthetic oligonucleotide
auuaaagguuguugagcag

SEQ ID NO: 2350281 - RNA, 19 nt, Artificial Sequence
  Description of Artificial Sequence: Synthetic oligonucleotide
ucacuguugacaacucugu

SEQ ID NO: 2350282 - RNA, 19 nt, Artificial Sequence
  Description of Artificial Sequence: Synthetic oligonucleotide
cagaccaccaggauuguac

SEQ ID NO: 2350283 - RNA, 19 nt, Artificial Sequence
  Description of Artificial Sequence: Synthetic oligonucleotide
ucuucucuaaccgcgggcc

SEQ ID NO: 2350284 - RNA, 19 nt, Artificial Sequence
  Description of Artificial Sequence: Synthetic oligonucleotide
cugcuugucagccaaucag

SEQ ID NO: 2350285 - RNA, 19 nt, Artificial Sequence
  Description of Artificial Sequence: Synthetic oligonucleotide
ugaaagucagguccauccu

SEQ ID NO: 2350286 - RNA, 19 nt, Artificial Sequence
  Description of Artificial Sequence: Synthetic oligonucleotide
agaggcuccagaaagcaag

SEQ ID NO: 2350287 - RNA, 19 nt, Artificial Sequence
  Description of Artificial Sequence: Synthetic oligonucleotide
cuuacagggaccacaccac

SEQ ID NO: 2350288 - RNA, 19 nt, Artificial Sequence
  Description of Artificial Sequence: Synthetic oligonucleotide
auuguacuguggugucugc

SEQ ID NO: 2350289 - RNA, 19 nt, Artificial Sequence
  Description of Artificial Sequence: Synthetic oligonucleotide
gagaaguauacauuacucu

SEQ ID NO: 2350290 - RNA, 19 nt, Artificial Sequence
  Description of Artificial Sequence: Synthetic oligonucleotide
cacagggacaaaacagagg

SEQ ID NO: 2350291 - RNA, 19 nt, Artificial Sequence
  Description of Artificial Sequence: Synthetic oligonucleotide
aaccuccucaagagaagcc

SEQ ID NO: 2350292 - RNA, 19 nt, Artificial Sequence
  Description of Artificial Sequence: Synthetic oligonucleotide
uucuacuaggcuccucccc

SEQ ID NO: 2350293 - RNA, 19 nt, Artificial Sequence
  Description of Artificial Sequence: Synthetic oligonucleotide
guauacauuacucucacuu

SEQ ID NO: 2350294 - RNA, 19 nt, Artificial Sequence
  Description of Artificial Sequence: Synthetic oligonucleotide
cuuuauuauagaccuacaa

SEQ ID NO: 2350295 - RNA, 19 nt, Artificial Sequence
  Description of Artificial Sequence: Synthetic oligonucleotide
guguauaauguucgggcug

SEQ ID NO: 2350296 - RNA, 19 nt, Artificial Sequence
  Description of Artificial Sequence: Synthetic oligonucleotide
aggauuguacugugguguc

SEQ ID NO: 2350297 - RNA, 19 nt, Artificial Sequence
  Description of Artificial Sequence: Synthetic oligonucleotide
gaccacaccacugugcaug

SEQ ID NO: 2350298 - RNA, 19 nt, Artificial Sequence
  Description of Artificial Sequence: Synthetic oligonucleotide
cuaggaucuuacagggacc

SEQ ID NO: 2350299 - RNA, 19 nt, Artificial Sequence
  Description of Artificial Sequence: Synthetic oligonucleotide
guggucaucaauguccacc

SEQ ID NO: 2350300 - RNA, 19 nt, Artificial Sequence
  Description of Artificial Sequence: Synthetic oligonucleotide
gucagguccauccuggaca

SEQ ID NO: 2350301 - RNA, 19 nt, Artificial Sequence
  Description of Artificial Sequence: Synthetic oligonucleotide
uccugucagaccaccagga

SEQ ID NO: 2350302 - RNA, 19 nt, Artificial Sequence
  Description of Artificial Sequence: Synthetic oligonucleotide
accugguuuuauuugucug

SEQ ID NO: 2350303 - RNA, 19 nt, Artificial Sequence
  Description of Artificial Sequence: Synthetic oligonucleotide
uucuucauagcaagaggua

SEQ ID NO: 2350304 - RNA, 19 nt, Artificial Sequence
  Description of Artificial Sequence: Synthetic oligonucleotide
cauuacucucacuuguuca

SEQ ID NO: 2350305 - RNA, 19 nt, Artificial Sequence
  Description of Artificial Sequence: Synthetic oligonucleotide
guuccugucagaccaccag

SEQ ID NO: 2350306 - RNA, 19 nt, Artificial Sequence
  Description of Artificial Sequence: Synthetic oligonucleotide
gagagaaguauacauuacu

SEQ ID NO: 2350307 - RNA, 19 nt, Artificial Sequence
  Description of Artificial Sequence: Synthetic oligonucleotide
ucugacuuguucacagcuc

SEQ ID NO: 2350308 - RNA, 19 nt, Artificial Sequence
  Description of Artificial Sequence: Synthetic oligonucleotide
gaauggacagcuauaaggu

SEQ ID NO: 2350309 - RNA, 19 nt, Artificial Sequence
  Description of Artificial Sequence: Synthetic oligonucleotide
ucuuuccugcuugucagcc

SEQ ID NO: 2350310 - RNA, 19 nt, Artificial Sequence
  Description of Artificial Sequence: Synthetic oligonucleotide
ggacauuaaagguuguuga

SEQ ID NO: 2350311 - RNA, 19 nt, Artificial Sequence
  Description of Artificial Sequence: Synthetic oligonucleotide
caguucuucauagcaagag

SEQ ID NO: 2350312 - RNA, 19 nt, Artificial Sequence
  Description of Artificial Sequence: Synthetic oligonucleotide
uguagggugggcucaguuc

SEQ ID NO: 2350313 - RNA, 19 nt, Artificial Sequence
  Description of Artificial Sequence: Synthetic oligonucleotide
gaucuuacagggaccacac

SEQ ID NO: 2350314 - RNA, 19 nt, Artificial Sequence
  Description of Artificial Sequence: Synthetic oligonucleotide
acaacugguguuucacugu

SEQ ID NO: 2350315 - RNA, 19 nt, Artificial Sequence
  Description of Artificial Sequence: Synthetic oligonucleotide
guacuguggugucugcagg

SEQ ID NO: 2350316 - RNA, 19 nt, Artificial Sequence
  Description of Artificial Sequence: Synthetic oligonucleotide
gggccuaggaucuuacagg

SEQ ID NO: 2350317 - RNA, 19 nt, Artificial Sequence
  Description of Artificial Sequence: Synthetic oligonucleotide
aauguuccugucagaccac

SEQ ID NO: 2350318 - RNA, 19 nt, Artificial Sequence
  Description of Artificial Sequence: Synthetic oligonucleotide
agggcucuagaggugaggg

SEQ ID NO: 2350319 - RNA, 19 nt, Artificial Sequence
  Description of Artificial Sequence: Synthetic oligonucleotide
uccccaaagaggcuccaga

SEQ ID NO: 2350320 - RNA, 19 nt, Artificial Sequence
  Description of Artificial Sequence: Synthetic oligonucleotide
ggaaggauaauagcucagg

SEQ ID NO: 2350321 - RNA, 19 nt, Artificial Sequence
  Description of Artificial Sequence: Synthetic oligonucleotide
ccacugugcaugaaaaucc

SEQ ID NO: 2350322 - RNA, 19 nt, Artificial Sequence
  Description of Artificial Sequence: Synthetic oligonucleotide
ucaagagaagccgcugagc

SEQ ID NO: 2350323 - RNA, 19 nt, Artificial Sequence
  Description of Artificial Sequence: Synthetic oligonucleotide
agggagagaauggacagcu

SEQ ID NO: 2350324 - RNA, 19 nt, Artificial Sequence
  Description of Artificial Sequence: Synthetic oligonucleotide
cuccagaaagcaagggcag

SEQ ID NO: 2350325 - RNA, 19 nt, Artificial Sequence
  Description of Artificial Sequence: Synthetic oligonucleotide
gaaccuccucaagagaagc

SEQ ID NO: 2350326 - RNA, 19 nt, Artificial Sequence
  Description of Artificial Sequence: Synthetic oligonucleotide
auagcaagagguagaaggu

SEQ ID NO: 2350327 - RNA, 19 nt, Artificial Sequence
  Description of Artificial Sequence: Synthetic oligonucleotide
uauaauguucgggcugggc

SEQ ID NO: 2350328 - RNA, 19 nt, Artificial Sequence
  Description of Artificial Sequence: Synthetic oligonucleotide
agggcaggaaggauaauag

SEQ ID NO: 2350329 - RNA, 19 nt, Artificial Sequence
  Description of Artificial Sequence: Synthetic oligonucleotide
uaagguguagggugggcuc

SEQ ID NO: 2350330 - RNA, 19 nt, Artificial Sequence
  Description of Artificial Sequence: Synthetic oligonucleotide
uuacagggaccacaccacu

SEQ ID NO: 2350331 - RNA, 19 nt, Artificial Sequence
  Description of Artificial Sequence: Synthetic oligonucleotide
acccacagggacaaaacag

SEQ ID NO: 2350332 - RNA, 19 nt, Artificial Sequence
  Description of Artificial Sequence: Synthetic oligonucleotide
gguuguguauaauguucgg

SEQ ID NO: 2350333 - RNA, 19 nt, Artificial Sequence
  Description of Artificial Sequence: Synthetic oligonucleotide
ucucacuuguucagccucu

SEQ ID NO: 2350334 - RNA, 19 nt, Artificial Sequence
  Description of Artificial Sequence: Synthetic oligonucleotide
uuuugacccacagggacaa

SEQ ID NO: 2350335 - RNA, 19 nt, Artificial Sequence
  Description of Artificial Sequence: Synthetic oligonucleotide
ugacaacucugucuugaaa

SEQ ID NO: 2350336 - RNA, 19 nt, Artificial Sequence
  Description of Artificial Sequence: Synthetic oligonucleotide
uuugucugacuuguucaca

SEQ ID NO: 2350337 - RNA, 19 nt, Artificial Sequence
  Description of Artificial Sequence: Synthetic oligonucleotide
agcaagagguagaagguca

SEQ ID NO: 2350338 - RNA, 19 nt, Artificial Sequence
  Description of Artificial Sequence: Synthetic oligonucleotide
gaaguccacccacucugag

SEQ ID NO: 2350339 - RNA, 19 nt, Artificial Sequence
  Description of Artificial Sequence: Synthetic oligonucleotide
gcuauaagguguagggugg

SEQ ID NO: 2350340 - RNA, 19 nt, Artificial Sequence
  Description of Artificial Sequence: Synthetic oligonucleotide
uacauuacucucacuuguu

SEQ ID NO: 2350341 - RNA, 19 nt, Artificial Sequence
  Description of Artificial Sequence: Synthetic oligonucleotide
ucagccaaucagcuucuuc

SEQ ID NO: 2350342 - RNA, 19 nt, Artificial Sequence
  Description of Artificial Sequence: Synthetic oligonucleotide
caggaaggauaauagcuca

SEQ ID NO: 2350343 - RNA, 19 nt, Artificial Sequence
  Description of Artificial Sequence: Synthetic oligonucleotide
ugagggaaguccacccacu

SEQ ID NO: 2350344 - RNA, 19 nt, Artificial Sequence
  Description of Artificial Sequence: Synthetic oligonucleotide
ugucugacuuguucacagc

SEQ ID NO: 2350345 - RNA, 19 nt, Artificial Sequence
  Description of Artificial Sequence: Synthetic oligonucleotide
gggaaccagaaucaaggcc

SEQ ID NO: 2350346 - RNA, 19 nt, Artificial Sequence
  Description of Artificial Sequence: Synthetic oligonucleotide
cacauccccauucuugaug

SEQ ID NO: 2350347 - RNA, 19 nt, Artificial Sequence
  Description of Artificial Sequence: Synthetic oligonucleotide
auaagguguagggugggcu

SEQ ID NO: 2350348 - RNA, 19 nt, Artificial Sequence
  Description of Artificial Sequence: Synthetic oligonucleotide
guccguguggucaucaaug

SEQ ID NO: 2350349 - RNA, 19 nt, Artificial Sequence
  Description of Artificial Sequence: Synthetic oligonucleotide
acuuguucagccucugguu

SEQ ID NO: 2350350 - RNA, 19 nt, Artificial Sequence
  Description of Artificial Sequence: Synthetic oligonucleotide
gguguuucacuguugacaa

SEQ ID NO: 2350351 - RNA, 19 nt, Artificial Sequence
  Description of Artificial Sequence: Synthetic oligonucleotide
gacaagggagagaauggac

SEQ ID NO: 2350352 - RNA, 19 nt, Artificial Sequence
  Description of Artificial Sequence: Synthetic oligonucleotide
gcaaaccugguuuuauuug

SEQ ID NO: 2350353 - RNA, 19 nt, Artificial Sequence
  Description of Artificial Sequence: Synthetic oligonucleotide
agagaagccgcugagccau

SEQ ID NO: 2350354 - RNA, 19 nt, Artificial Sequence
  Description of Artificial Sequence: Synthetic oligonucleotide
guugacaacucugucuuga

SEQ ID NO: 2350355 - RNA, 19 nt, Artificial Sequence
  Description of Artificial Sequence: Synthetic oligonucleotide
caucuucucuaaccgcggg

SEQ ID NO: 2350356 - RNA, 19 nt, Artificial Sequence
  Description of Artificial Sequence: Synthetic oligonucleotide
uauaagguguagggugggc

SEQ ID NO: 2350357 - RNA, 19 nt, Artificial Sequence
  Description of Artificial Sequence: Synthetic oligonucleotide
auccacaacaacugguguu

SEQ ID NO: 2350358 - RNA, 19 nt, Artificial Sequence
  Description of Artificial Sequence: Synthetic oligonucleotide
accaccaggauuguacugu

SEQ ID NO: 2350359 - RNA, 19 nt, Artificial Sequence
  Description of Artificial Sequence: Synthetic oligonucleotide
ggcugagaguucuacuagg

SEQ ID NO: 2350360 - RNA, 19 nt, Artificial Sequence
  Description of Artificial Sequence: Synthetic oligonucleotide
agaccaccaggauuguacu

SEQ ID NO: 2350361 - RNA, 19 nt, Artificial Sequence
  Description of Artificial Sequence: Synthetic oligonucleotide
gauggccagcacuguaggc

SEQ ID NO: 2350362 - RNA, 19 nt, Artificial Sequence
  Description of Artificial Sequence: Synthetic oligonucleotide
aggcccagauaacccaggg

SEQ ID NO: 2350363 - RNA, 19 nt, Artificial Sequence
  Description of Artificial Sequence: Synthetic oligonucleotide
aguauacauuacucucacu

SEQ ID NO: 2350364 - RNA, 19 nt, Artificial Sequence
  Description of Artificial Sequence: Synthetic oligonucleotide
ucuaaccgcgggccuagga

SEQ ID NO: 2350365 - RNA, 19 nt, Artificial Sequence
  Description of Artificial Sequence: Synthetic oligonucleotide
cuauaagguguaggguggg

SEQ ID NO: 2350366 - RNA, 19 nt, Artificial Sequence
  Description of Artificial Sequence: Synthetic oligonucleotide
ggggacaagggagagaaug

SEQ ID NO: 2350367 - RNA, 19 nt, Artificial Sequence
  Description of Artificial Sequence: Synthetic oligonucleotide
ucgauggcaagguccgugu

SEQ ID NO: 2350368 - RNA, 19 nt, Artificial Sequence
  Description of Artificial Sequence: Synthetic oligonucleotide
cuucccguguugcuuggcc

SEQ ID NO: 2350369 - RNA, 19 nt, Artificial Sequence
  Description of Artificial Sequence: Synthetic oligonucleotide
agggaccacaccacugugc

SEQ ID NO: 2350370 - RNA, 19 nt, Artificial Sequence
  Description of Artificial Sequence: Synthetic oligonucleotide
uguugagcagacucugguu

SEQ ID NO: 2350371 - RNA, 19 nt, Artificial Sequence
  Description of Artificial Sequence: Synthetic oligonucleotide
ucauagcaagagguagaag

SEQ ID NO: 2350372 - RNA, 19 nt, Artificial Sequence
  Description of Artificial Sequence: Synthetic oligonucleotide
gacccacagggacaaaaca

SEQ ID NO: 2350373 - RNA, 19 nt, Artificial Sequence
  Description of Artificial Sequence: Synthetic oligonucleotide
gugcaugaaaauccacaac

SEQ ID NO: 2350374 - RNA, 19 nt, Artificial Sequence
  Description of Artificial Sequence: Synthetic oligonucleotide
ggcuccagaaagcaagggc

SEQ ID NO: 2350375 - RNA, 19 nt, Artificial Sequence
  Description of Artificial Sequence: Synthetic oligonucleotide
ugguuuuauuugucugacu

SEQ ID NO: 2350376 - RNA, 19 nt, Artificial Sequence
  Description of Artificial Sequence: Synthetic oligonucleotide
ugucagccaaucagcuucu

SEQ ID NO: 2350377 - RNA, 19 nt, Artificial Sequence
  Description of Artificial Sequence: Synthetic oligonucleotide
guucuucauagcaagaggu

SEQ ID NO: 2350378 - RNA, 19 nt, Artificial Sequence
  Description of Artificial Sequence: Synthetic oligonucleotide
uguugacaacucugucuug

SEQ ID NO: 2350379 - RNA, 19 nt, Artificial Sequence
  Description of Artificial Sequence: Synthetic oligonucleotide
uaaccgcgggccuaggauc

SEQ ID NO: 2350380 - RNA, 19 nt, Artificial Sequence
  Description of Artificial Sequence: Synthetic oligonucleotide
ugacuuguucacagcuccu

SEQ ID NO: 2350381 - RNA, 19 nt, Artificial Sequence
  Description of Artificial Sequence: Synthetic oligonucleotide
ccuuuugacccacagggac

SEQ ID NO: 2350382 - RNA, 19 nt, Artificial Sequence
  Description of Artificial Sequence: Synthetic oligonucleotide
agagguagaaggucacaua

SEQ ID NO: 2350383 - RNA, 19 nt, Artificial Sequence
  Description of Artificial Sequence: Synthetic oligonucleotide
uugacaacucugucuugaa

SEQ ID NO: 2350384 - RNA, 19 nt, Artificial Sequence
  Description of Artificial Sequence: Synthetic oligonucleotide
ggucacauaaaguucuuua

SEQ ID NO: 2350385 - RNA, 19 nt, Artificial Sequence
  Description of Artificial Sequence: Synthetic oligonucleotide
gaaucaaggcccagauaac

SEQ ID NO: 2350386 - RNA, 19 nt, Artificial Sequence
  Description of Artificial Sequence: Synthetic oligonucleotide
aagucagguccauccugga

SEQ ID NO: 2350387 - RNA, 19 nt, Artificial Sequence
  Description of Artificial Sequence: Synthetic oligonucleotide
ccaccaucuucucuaaccg

SEQ ID NO: 2350388 - RNA, 19 nt, Artificial Sequence
  Description of Artificial Sequence: Synthetic oligonucleotide
aggaaccuccucaagagaa

SEQ ID NO: 2350389 - RNA, 19 nt, Artificial Sequence
  Description of Artificial Sequence: Synthetic oligonucleotide
guucuacuaggcuccuccc

SEQ ID NO: 2350390 - RNA, 19 nt, Artificial Sequence
  Description of Artificial Sequence: Synthetic oligonucleotide
aaagguuguugagcagacu

SEQ ID NO: 2350391 - RNA, 19 nt, Artificial Sequence
  Description of Artificial Sequence: Synthetic oligonucleotide
ggcucaguucuucauagca

SEQ ID NO: 2350392 - RNA, 19 nt, Artificial Sequence
  Description of Artificial Sequence: Synthetic oligonucleotide
cucguacucgauggcaagg

SEQ ID NO: 2350393 - RNA, 19 nt, Artificial Sequence
  Description of Artificial Sequence: Synthetic oligonucleotide
gaggugagggaaguccacc

SEQ ID NO: 2350394 - RNA, 19 nt, Artificial Sequence
  Description of Artificial Sequence: Synthetic oligonucleotide
gugagggaaguccacccac

SEQ ID NO: 2350395 - RNA, 19 nt, Artificial Sequence
  Description of Artificial Sequence: Synthetic oligonucleotide
gggacaagggagagaaugg

SEQ ID NO: 2350396 - RNA, 19 nt, Artificial Sequence
  Description of Artificial Sequence: Synthetic oligonucleotide
auagcucagggcugagagu

SEQ ID NO: 2350397 - RNA, 19 nt, Artificial Sequence
  Description of Artificial Sequence: Synthetic oligonucleotide
ggccgaauguuccugucag

SEQ ID NO: 2350398 - RNA, 19 nt, Artificial Sequence
  Description of Artificial Sequence: Synthetic oligonucleotide
ucucuaaccgcgggccuag

SEQ ID NO: 2350399 - RNA, 19 nt, Artificial Sequence
  Description of Artificial Sequence: Synthetic oligonucleotide
gaccaccaggauuguacug

SEQ ID NO: 2350400 - RNA, 19 nt, Artificial Sequence
  Description of Artificial Sequence: Synthetic oligonucleotide
guagggugggcucaguucu

SEQ ID NO: 2350401 - RNA, 19 nt, Artificial Sequence
  Description of Artificial Sequence: Synthetic oligonucleotide
cauccuggacauuaaaggu

SEQ ID NO: 2350402 - RNA, 19 nt, Artificial Sequence
  Description of Artificial Sequence: Synthetic oligonucleotide
gauaacccagggcggggac

SEQ ID NO: 2350403 - RNA, 19 nt, Artificial Sequence
  Description of Artificial Sequence: Synthetic oligonucleotide
uagcaagagguagaagguc

SEQ ID NO: 2350404 - RNA, 19 nt, Artificial Sequence
  Description of Artificial Sequence: Synthetic oligonucleotide
caaaccugguuuuauuugu

SEQ ID NO: 2350405 - RNA, 19 nt, Artificial Sequence
  Description of Artificial Sequence: Synthetic oligonucleotide
guaggcacagcugacaccu

SEQ ID NO: 2350406 - RNA, 19 nt, Artificial Sequence
  Description of Artificial Sequence: Synthetic oligonucleotide
agggaaguccacccacucu

SEQ ID NO: 2350407 - RNA, 19 nt, Artificial Sequence
  Description of Artificial Sequence: Synthetic oligonucleotide
ucagggcugagaguucuac

SEQ ID NO: 2350408 - RNA, 19 nt, Artificial Sequence
  Description of Artificial Sequence: Synthetic oligonucleotide
uuguacuguggugucugca

SEQ ID NO: 2350409 - RNA, 19 nt, Artificial Sequence
  Description of Artificial Sequence: Synthetic oligonucleotide
aggaaggauaauagcucag

SEQ ID NO: 2350410 - RNA, 19 nt, Artificial Sequence
  Description of Artificial Sequence: Synthetic oligonucleotide
aauguucgggcugggccga

SEQ ID NO: 2350411 - RNA, 19 nt, Artificial Sequence
  Description of Artificial Sequence: Synthetic oligonucleotide
agaggugagggaaguccac

SEQ ID NO: 2350412 - RNA, 19 nt, Artificial Sequence
  Description of Artificial Sequence: Synthetic oligonucleotide
cucugguuguguauaaugu

SEQ ID NO: 2350413 - RNA, 19 nt, Artificial Sequence
  Description of Artificial Sequence: Synthetic oligonucleotide
uaauagcucagggcugaga

SEQ ID NO: 2350414 - RNA, 19 nt, Artificial Sequence
  Description of Artificial Sequence: Synthetic oligonucleotide
caucaauguccaccuuggc

SEQ ID NO: 2350415 - RNA, 19 nt, Artificial Sequence
  Description of Artificial Sequence: Synthetic oligonucleotide
agugcaaaccugguuuuau

SEQ ID NO: 2350416 - RNA, 19 nt, Artificial Sequence
  Description of Artificial Sequence: Synthetic oligonucleotide
accagaaucaaggcccaga

SEQ ID NO: 2350417 - RNA, 19 nt, Artificial Sequence
  Description of Artificial Sequence: Synthetic oligonucleotide
ccaaucagcuucuucagga

SEQ ID NO: 2350418 - RNA, 19 nt, Artificial Sequence
  Description of Artificial Sequence: Synthetic oligonucleotide
ucccguguugcuuggccac

SEQ ID NO: 2350419 - RNA, 19 nt, Artificial Sequence
  Description of Artificial Sequence: Synthetic oligonucleotide
cucuuuccugcuugucagc

SEQ ID NO: 2350420 - RNA, 19 nt, Artificial Sequence
  Description of Artificial Sequence: Synthetic oligonucleotide
uucgggcugggccgaaugu

SEQ ID NO: 2350421 - RNA, 19 nt, Artificial Sequence
  Description of Artificial Sequence: Synthetic oligonucleotide
caaacuuguccaccacauc

SEQ ID NO: 2350422 - RNA, 19 nt, Artificial Sequence
  Description of Artificial Sequence: Synthetic oligonucleotide
aauguccaccuuggccauc

SEQ ID NO: 2350423 - RNA, 19 nt, Artificial Sequence
  Description of Artificial Sequence: Synthetic oligonucleotide
gagggaaguccacccacuc

SEQ ID NO: 2350424 - RNA, 19 nt, Artificial Sequence
  Description of Artificial Sequence: Synthetic oligonucleotide
gguuguugagcagacucug

SEQ ID NO: 2350425 - RNA, 19 nt, Artificial Sequence
  Description of Artificial Sequence: Synthetic oligonucleotide
gcuccagaaagcaagggca

SEQ ID NO: 2350426 - RNA, 19 nt, Artificial Sequence
  Description of Artificial Sequence: Synthetic oligonucleotide
aggucaggaaccuccucaa

SEQ ID NO: 2350427 - RNA, 19 nt, Artificial Sequence
  Description of Artificial Sequence: Synthetic oligonucleotide
caccuucccguguugcuug

SEQ ID NO: 2350428 - RNA, 19 nt, Artificial Sequence
  Description of Artificial Sequence: Synthetic oligonucleotide
aacugguguuucacuguug

SEQ ID NO: 2350429 - RNA, 19 nt, Artificial Sequence
  Description of Artificial Sequence: Synthetic oligonucleotide
gucugacuuguucacagcu

SEQ ID NO: 2350430 - RNA, 19 nt, Artificial Sequence
  Description of Artificial Sequence: Synthetic oligonucleotide
cagcugguccucauccuug

SEQ ID NO: 2350431 - RNA, 19 nt, Artificial Sequence
  Description of Artificial Sequence: Synthetic oligonucleotide
agguccauccuggacauua

SEQ ID NO: 2350432 - RNA, 19 nt, Artificial Sequence
  Description of Artificial Sequence: Synthetic oligonucleotide
cacuguugacaacucuguc

SEQ ID NO: 2350433 - RNA, 19 nt, Artificial Sequence
  Description of Artificial Sequence: Synthetic oligonucleotide
aggacucuuuccugcuugu

SEQ ID NO: 2350434 - RNA, 19 nt, Artificial Sequence
  Description of Artificial Sequence: Synthetic oligonucleotide
cucgauggcaagguccgug

SEQ ID NO: 2350435 - RNA, 19 nt, Artificial Sequence
  Description of Artificial Sequence: Synthetic oligonucleotide
ccacagggacaaaacagag

SEQ ID NO: 2350436 - RNA, 19 nt, Artificial Sequence
  Description of Artificial Sequence: Synthetic oligonucleotide
ggauaauagcucagggcug

SEQ ID NO: 2350437 - RNA, 19 nt, Artificial Sequence
  Description of Artificial Sequence: Synthetic oligonucleotide
auccuggacauuaaagguu

SEQ ID NO: 2350438 - RNA, 19 nt, Artificial Sequence
  Description of Artificial Sequence: Synthetic oligonucleotide
ugaggucaggaaccuccuc

SEQ ID NO: 2350439 - RNA, 19 nt, Artificial Sequence
  Description of Artificial Sequence: Synthetic oligonucleotide
cuugaaagucagguccauc

SEQ ID NO: 2350440 - RNA, 19 nt, Artificial Sequence
  Description of Artificial Sequence: Synthetic oligonucleotide
gagagaauggacagcuaua

SEQ ID NO: 2350441 - RNA, 19 nt, Artificial Sequence
  Description of Artificial Sequence: Synthetic oligonucleotide
gcaggaaggauaauagcuc

SEQ ID NO: 2350442 - RNA, 19 nt, Artificial Sequence
  Description of Artificial Sequence: Synthetic oligonucleotide
aagguccguguggucauca

SEQ ID NO: 2350443 - RNA, 19 nt, Artificial Sequence
  Description of Artificial Sequence: Synthetic oligonucleotide
agacucugguuguguauaa

SEQ ID NO: 2350444 - RNA, 19 nt, Artificial Sequence
  Description of Artificial Sequence: Synthetic oligonucleotide
gcugagaguucuacuaggc

SEQ ID NO: 2350445 - RNA, 19 nt, Artificial Sequence
  Description of Artificial Sequence: Synthetic oligonucleotide
guauaauguucgggcuggg

SEQ ID NO: 2350446 - RNA, 19 nt, Artificial Sequence
  Description of Artificial Sequence: Synthetic oligonucleotide
ucuagaggugagggaaguc

SEQ ID NO: 2350447 - RNA, 19 nt, Artificial Sequence
  Description of Artificial Sequence: Synthetic oligonucleotide
gucuugaaagucaggucca

SEQ ID NO: 2350448 - RNA, 19 nt, Artificial Sequence
  Description of Artificial Sequence: Synthetic oligonucleotide
cagauaacccagggcgggg

SEQ ID NO: 2350449 - RNA, 19 nt, Artificial Sequence
  Description of Artificial Sequence: Synthetic oligonucleotide
cacaacaacugguguuuca

SEQ ID NO: 2350450 - RNA, 19 nt, Artificial Sequence
  Description of Artificial Sequence: Synthetic oligonucleotide
gggcaggaaggauaauagc

SEQ ID NO: 2350451 - RNA, 19 nt, Artificial Sequence
  Description of Artificial Sequence: Synthetic oligonucleotide
ucuugaaagucagguccau

SEQ ID NO: 2350452 - RNA, 19 nt, Artificial Sequence
  Description of Artificial Sequence: Synthetic oligonucleotide
guagaaggucacauaaagu

SEQ ID NO: 2350453 - RNA, 19 nt, Artificial Sequence
  Description of Artificial Sequence: Synthetic oligonucleotide
gaaccagaaucaaggccca

SEQ ID NO: 2350454 - RNA, 19 nt, Artificial Sequence
  Description of Artificial Sequence: Synthetic oligonucleotide
uaacccagggcggggacaa

SEQ ID NO: 2350455 - RNA, 19 nt, Artificial Sequence
  Description of Artificial Sequence: Synthetic oligonucleotide
aaccgcgggccuaggaucu

SEQ ID NO: 2350456 - RNA, 19 nt, Artificial Sequence
  Description of Artificial Sequence: Synthetic oligonucleotide
caggauuguacuguggugu

SEQ ID NO: 2350457 - RNA, 19 nt, Artificial Sequence
  Description of Artificial Sequence: Synthetic oligonucleotide
guucgggcugggccgaaug

SEQ ID NO: 2350458 - RNA, 19 nt, Artificial Sequence
  Description of Artificial Sequence: Synthetic oligonucleotide
acccagggcggggacaagg

SEQ ID NO: 2350459 - RNA, 19 nt, Artificial Sequence
  Description of Artificial Sequence: Synthetic oligonucleotide
gccaucucccggcagcuag

SEQ ID NO: 2350460 - RNA, 19 nt, Artificial Sequence
  Description of Artificial Sequence: Synthetic oligonucleotide
cccagauaacccagggcgg

SEQ ID NO: 2350461 - RNA, 19 nt, Artificial Sequence
  Description of Artificial Sequence: Synthetic oligonucleotide
auguccaccuuggccauca

SEQ ID NO: 2350462 - RNA, 19 nt, Artificial Sequence
  Description of Artificial Sequence: Synthetic oligonucleotide
uccugcuugucagccaauc

SEQ ID NO: 2350463 - RNA, 19 nt, Artificial Sequence
  Description of Artificial Sequence: Synthetic oligonucleotide
accuucccguguugcuugg

SEQ ID NO: 2350464 - RNA, 19 nt, Artificial Sequence
  Description of Artificial Sequence: Synthetic oligonucleotide
ccgaauguuccugucagac

SEQ ID NO: 2350465 - RNA, 19 nt, Artificial Sequence
  Description of Artificial Sequence: Synthetic oligonucleotide
ggagagaauggacagcuau

SEQ ID NO: 2350466 - RNA, 19 nt, Artificial Sequence
  Description of Artificial Sequence: Synthetic oligonucleotide
aggcuccuccccaaagagg

SEQ ID NO: 2350467 - RNA, 19 nt, Artificial Sequence
  Description of Artificial Sequence: Synthetic oligonucleotide
cuuggccaucaccaccuuc

SEQ ID NO: 2350468 - RNA, 19 nt, Artificial Sequence
  Description of Artificial Sequence: Synthetic oligonucleotide
guuucacuguugacaacuc

SEQ ID NO: 2350469 - RNA, 19 nt, Artificial Sequence
  Description of Artificial Sequence: Synthetic oligonucleotide
ggaaccuccucaagagaag

SEQ ID NO: 2350470 - RNA, 19 nt, Artificial Sequence
  Description of Artificial Sequence: Synthetic oligonucleotide
cacuuguucagccucuggu

SEQ ID NO: 2350471 - RNA, 19 nt, Artificial Sequence
  Description of Artificial Sequence: Synthetic oligonucleotide
cagccaggacucuuuccug

SEQ ID NO: 2350472 - RNA, 19 nt, Artificial Sequence
  Description of Artificial Sequence: Synthetic oligonucleotide
gugucugcagggcucuaga

SEQ ID NO: 2350473 - RNA, 19 nt, Artificial Sequence
  Description of Artificial Sequence: Synthetic oligonucleotide
ccuccucaagagaagccgc

SEQ ID NO: 2350474 - RNA, 19 nt, Artificial Sequence
  Description of Artificial Sequence: Synthetic oligonucleotide
uucucuaaccgcgggccua

SEQ ID NO: 2350475 - RNA, 19 nt, Artificial Sequence
  Description of Artificial Sequence: Synthetic oligonucleotide
agccucugguuuccuuuug

SEQ ID NO: 2350476 - RNA, 19 nt, Artificial Sequence
  Description of Artificial Sequence: Synthetic oligonucleotide
ccagauaacccagggcggg

SEQ ID NO: 2350477 - RNA, 19 nt, Artificial Sequence
  Description of Artificial Sequence: Synthetic oligonucleotide
gggacaaaacagagggagc

SEQ ID NO: 2350478 - RNA, 19 nt, Artificial Sequence
  Description of Artificial Sequence: Synthetic oligonucleotide
ugguuuccuuuugacccac

SEQ ID NO: 2350479 - RNA, 19 nt, Artificial Sequence
  Description of Artificial Sequence: Synthetic oligonucleotide
cuuguucacagcuccuccu

SEQ ID NO: 2350480 - RNA, 19 nt, Artificial Sequence
  Description of Artificial Sequence: Synthetic oligonucleotide
ggcucuagaggugagggaa

SEQ ID NO: 2350481 - RNA, 19 nt, Artificial Sequence
  Description of Artificial Sequence: Synthetic oligonucleotide
ccaggauuguacuguggug

SEQ ID NO: 2350482 - RNA, 19 nt, Artificial Sequence
  Description of Artificial Sequence: Synthetic oligonucleotide
auaacccagggcggggaca

SEQ ID NO: 2350483 - RNA, 19 nt, Artificial Sequence
  Description of Artificial Sequence: Synthetic oligonucleotide
aaggucacauaaaguucuu

SEQ ID NO: 2350484 - RNA, 19 nt, Artificial Sequence
  Description of Artificial Sequence: Synthetic oligonucleotide
cuuccuggggauggcugag

SEQ ID NO: 2350485 - RNA, 19 nt, Artificial Sequence
  Description of Artificial Sequence: Synthetic oligonucleotide
ggcaagguccgugugguca

SEQ ID NO: 2350486 - RNA, 19 nt, Artificial Sequence
  Description of Artificial Sequence: Synthetic oligonucleotide
guguuucacuguugacaac

SEQ ID NO: 2350487 - RNA, 19 nt, Artificial Sequence
  Description of Artificial Sequence: Synthetic oligonucleotide
cgaauguuccugucagacc

SEQ ID NO: 2350488 - RNA, 19 nt, Artificial Sequence
  Description of Artificial Sequence: Synthetic oligonucleotide
agguagaaggucacauaaa

SEQ ID NO: 2350489 - RNA, 19 nt, Artificial Sequence
  Description of Artificial Sequence: Synthetic oligonucleotide
ggucaggaaccuccucaag

SEQ ID NO: 2350490 - RNA, 19 nt, Artificial Sequence
  Description of Artificial Sequence: Synthetic oligonucleotide
cagggcucuagaggugagg

SEQ ID NO: 2350491 - RNA, 19 nt, Artificial Sequence
  Description of Artificial Sequence: Synthetic oligonucleotide
ugggccgaauguuccuguc

SEQ ID NO: 2350492 - RNA, 19 nt, Artificial Sequence
  Description of Artificial Sequence: Synthetic oligonucleotide
caucucccggcagcuagag

SEQ ID NO: 2350493 - RNA, 19 nt, Artificial Sequence
  Description of Artificial Sequence: Synthetic oligonucleotide
cagggaccacaccacugug

SEQ ID NO: 2350494 - RNA, 19 nt, Artificial Sequence
  Description of Artificial Sequence: Synthetic oligonucleotide
ggcccagauaacccagggc

SEQ ID NO: 2350495 - RNA, 19 nt, Artificial Sequence
  Description of Artificial Sequence: Synthetic oligonucleotide
cugagaguucuacuaggcu

SEQ ID NO: 2350496 - RNA, 19 nt, Artificial Sequence
  Description of Artificial Sequence: Synthetic oligonucleotide
ggugagggaaguccaccca

SEQ ID NO: 2350497 - RNA, 19 nt, Artificial Sequence
  Description of Artificial Sequence: Synthetic oligonucleotide
cagggacaaaacagaggga

SEQ ID NO: 2350498 - RNA, 19 nt, Artificial Sequence
  Description of Artificial Sequence: Synthetic oligonucleotide
gccgcugagccaucucccg

SEQ ID NO: 2350499 - RNA, 19 nt, Artificial Sequence
  Description of Artificial Sequence: Synthetic oligonucleotide
cgggccuaggaucuuacag

SEQ ID NO: 2350500 - RNA, 19 nt, Artificial Sequence
  Description of Artificial Sequence: Synthetic oligonucleotide
ggacaagggagagaaugga

SEQ ID NO: 2350501 - RNA, 19 nt, Artificial Sequence
  Description of Artificial Sequence: Synthetic oligonucleotide
cagggcaggaaggauaaua

SEQ ID NO: 2350502 - RNA, 19 nt, Artificial Sequence
  Description of Artificial Sequence: Synthetic oligonucleotide
gugggcucaguucuucaua

SEQ ID NO: 2350503 - RNA, 19 nt, Artificial Sequence
  Description of Artificial Sequence: Synthetic oligonucleotide
gcagccaggacucuuuccu

SEQ ID NO: 2350504 - RNA, 19 nt, Artificial Sequence
  Description of Artificial Sequence: Synthetic oligonucleotide
cugcagggcucuagaggug

SEQ ID NO: 2350505 - RNA, 19 nt, Artificial Sequence
  Description of Artificial Sequence: Synthetic oligonucleotide
gcucagggaaccagaauca

SEQ ID NO: 2350506 - RNA, 19 nt, Artificial Sequence
  Description of Artificial Sequence: Synthetic oligonucleotide
ggugucugcagggcucuag

SEQ ID NO: 2350507 - RNA, 19 nt, Artificial Sequence
  Description of Artificial Sequence: Synthetic oligonucleotide
agaguucuacuaggcuccu

SEQ ID NO: 2350508 - RNA, 19 nt, Artificial Sequence
  Description of Artificial Sequence: Synthetic oligonucleotide
aggucacauaaaguucuuu

SEQ ID NO: 2350509 - RNA, 19 nt, Artificial Sequence
  Description of Artificial Sequence: Synthetic oligonucleotide
agguguagggugggcucag

SEQ ID NO: 2350510 - RNA, 19 nt, Artificial Sequence
  Description of Artificial Sequence: Synthetic oligonucleotide
ccucguacucgauggcaag

SEQ ID NO: 2350511 - RNA, 19 nt, Artificial Sequence
  Description of Artificial Sequence: Synthetic oligonucleotide
cuaaccgcgggccuaggau

SEQ ID NO: 2350512 - RNA, 19 nt, Artificial Sequence
  Description of Artificial Sequence: Synthetic oligonucleotide
gcaagagguagaaggucac

SEQ ID NO: 2350513 - RNA, 19 nt, Artificial Sequence
  Description of Artificial Sequence: Synthetic oligonucleotide
ucagaccaccaggauugua

SEQ ID NO: 2350514 - RNA, 19 nt, Artificial Sequence
  Description of Artificial Sequence: Synthetic oligonucleotide
uagggugggcucaguucuu

SEQ ID NO: 2350515 - RNA, 19 nt, Artificial Sequence
  Description of Artificial Sequence: Synthetic oligonucleotide
uguccaccacauccccauu

SEQ ID NO: 2350516 - RNA, 19 nt, Artificial Sequence
  Description of Artificial Sequence: Synthetic oligonucleotide
gcggggacaagggagagaa

SEQ ID NO: 2350517 - RNA, 19 nt, Artificial Sequence
  Description of Artificial Sequence: Synthetic oligonucleotide
ucgggcugggccgaauguu

SEQ ID NO: 2350518 - RNA, 19 nt, Artificial Sequence
  Description of Artificial Sequence: Synthetic oligonucleotide
cugucagaccaccaggauu

SEQ ID NO: 2350519 - RNA, 19 nt, Artificial Sequence
  Description of Artificial Sequence: Synthetic oligonucleotide
guucuuuauuauagaccua

SEQ ID NO: 2350520 - RNA, 19 nt, Artificial Sequence
  Description of Artificial Sequence: Synthetic oligonucleotide
ccaccaggauuguacugug

SEQ ID NO: 2350521 - RNA, 19 nt, Artificial Sequence
  Description of Artificial Sequence: Synthetic oligonucleotide
agguccguguggucaucaa

SEQ ID NO: 2350522 - RNA, 19 nt, Artificial Sequence
  Description of Artificial Sequence: Synthetic oligonucleotide
uguccaccuuggccaucac

SEQ ID NO: 2350523 - RNA, 19 nt, Artificial Sequence
  Description of Artificial Sequence: Synthetic oligonucleotide
cagaaucaaggcccagaua

SEQ ID NO: 2350524 - RNA, 19 nt, Artificial Sequence
  Description of Artificial Sequence: Synthetic oligonucleotide
gcucaguucuucauagcaa

SEQ ID NO: 2350525 - RNA, 19 nt, Artificial Sequence
  Description of Artificial Sequence: Synthetic oligonucleotide
cucagggaaccagaaucaa

SEQ ID NO: 2350526 - RNA, 19 nt, Artificial Sequence
  Description of Artificial Sequence: Synthetic oligonucleotide
cuccucaagagaagccgcu

SEQ ID NO: 2350527 - RNA, 19 nt, Artificial Sequence
  Description of Artificial Sequence: Synthetic oligonucleotide
gggccgaauguuccuguca

SEQ ID NO: 2350528 - RNA, 19 nt, Artificial Sequence
  Description of Artificial Sequence: Synthetic oligonucleotide
gaguucuacuaggcuccuc

SEQ ID NO: 2350529 - RNA, 19 nt, Artificial Sequence
  Description of Artificial Sequence: Synthetic oligonucleotide
cuugucagccaaucagcuu

SEQ ID NO: 2350530 - RNA, 19 nt, Artificial Sequence
  Description of Artificial Sequence: Synthetic oligonucleotide
uggcaagguccgugugguc

SEQ ID NO: 2350531 - RNA, 19 nt, Artificial Sequence
  Description of Artificial Sequence: Synthetic oligonucleotide
ucccggcagcuagagcgga

SEQ ID NO: 2350532 - RNA, 19 nt, Artificial Sequence
  Description of Artificial Sequence: Synthetic oligonucleotide
caacugguguuucacuguu

SEQ ID NO: 2350533 - RNA, 19 nt, Artificial Sequence
  Description of Artificial Sequence: Synthetic oligonucleotide
gcugggccgaauguuccug

SEQ ID NO: 2350534 - RNA, 19 nt, Artificial Sequence
  Description of Artificial Sequence: Synthetic oligonucleotide
ccggcagcuagagcggagg

SEQ ID NO: 2350535 - RNA, 19 nt, Artificial Sequence
  Description of Artificial Sequence: Synthetic oligonucleotide
cagcuauaagguguagggu

SEQ ID NO: 2350536 - RNA, 19 nt, Artificial Sequence
  Description of Artificial Sequence: Synthetic oligonucleotide
ccugcuugucagccaauca

SEQ ID NO: 2350537 - RNA, 19 nt, Artificial Sequence
  Description of Artificial Sequence: Synthetic oligonucleotide
cucuagaggugagggaagu

SEQ ID NO: 2350538 - RNA, 19 nt, Artificial Sequence
  Description of Artificial Sequence: Synthetic oligonucleotide
gggcugggccgaauguucc

SEQ ID NO: 2350539 - RNA, 19 nt, Artificial Sequence
  Description of Artificial Sequence: Synthetic oligonucleotide
cucuaaccgcgggccuagg

SEQ ID NO: 2350540 - RNA, 19 nt, Artificial Sequence
  Description of Artificial Sequence: Synthetic oligonucleotide
guugcuuggccaccaucuu

SEQ ID NO: 2350541 - RNA, 19 nt, Artificial Sequence
  Description of Artificial Sequence: Synthetic oligonucleotide
gggagcagggcaggaagga

SEQ ID NO: 2350542 - RNA, 19 nt, Artificial Sequence
  Description of Artificial Sequence: Synthetic oligonucleotide
gagcagacucugguugugu

SEQ ID NO: 2350543 - RNA, 19 nt, Artificial Sequence
  Description of Artificial Sequence: Synthetic oligonucleotide
ggaaguccacccacucuga

SEQ ID NO: 2350544 - RNA, 19 nt, Artificial Sequence
  Description of Artificial Sequence: Synthetic oligonucleotide
cagggcugagaguucuacu

SEQ ID NO: 2350545 - RNA, 19 nt, Artificial Sequence
  Description of Artificial Sequence: Synthetic oligonucleotide
ccccaaagaggcuccagaa

SEQ ID NO: 2350546 - RNA, 19 nt, Artificial Sequence
  Description of Artificial Sequence: Synthetic oligonucleotide
cuucucuaaccgcgggccu

SEQ ID NO: 2350547 - RNA, 19 nt, Artificial Sequence
  Description of Artificial Sequence: Synthetic oligonucleotide
gacucugguuguguauaau

SEQ ID NO: 2350548 - RNA, 19 nt, Artificial Sequence
  Description of Artificial Sequence: Synthetic oligonucleotide
acucgauggcaagguccgu

SEQ ID NO: 2350549 - RNA, 19 nt, Artificial Sequence
  Description of Artificial Sequence: Synthetic oligonucleotide
cccaaagaggcuccagaaa

SEQ ID NO: 2350550 - RNA, 19 nt, Artificial Sequence
  Description of Artificial Sequence: Synthetic oligonucleotide
ccguguggucaucaauguc

SEQ ID NO: 2350551 - RNA, 19 nt, Artificial Sequence
  Description of Artificial Sequence: Synthetic oligonucleotide
gccgaauguuccugucaga

SEQ ID NO: 2350552 - RNA, 19 nt, Artificial Sequence
  Description of Artificial Sequence: Synthetic oligonucleotide
guguagggugggcucaguu

SEQ ID NO: 2350553 - RNA, 19 nt, Artificial Sequence
  Description of Artificial Sequence: Synthetic oligonucleotide
caagguccguguggucauc

SEQ ID NO: 2350554 - RNA, 19 nt, Artificial Sequence
  Description of Artificial Sequence: Synthetic oligonucleotide
ccagaaucaaggcccagau

SEQ ID NO: 2350555 - RNA, 19 nt, Artificial Sequence
  Description of Artificial Sequence: Synthetic oligonucleotide
ggacucuuuccugcuuguc

SEQ ID NO: 2350556 - RNA, 19 nt, Artificial Sequence
  Description of Artificial Sequence: Synthetic oligonucleotide
cuggacauuaaagguuguu

SEQ ID NO: 2350557 - RNA, 19 nt, Artificial Sequence
  Description of Artificial Sequence: Synthetic oligonucleotide
gagaagccgcugagccauc

SEQ ID NO: 2350558 - RNA, 19 nt, Artificial Sequence
  Description of Artificial Sequence: Synthetic oligonucleotide
cgggcugggccgaauguuc

SEQ ID NO: 2350559 - RNA, 19 nt, Artificial Sequence
  Description of Artificial Sequence: Synthetic oligonucleotide
ccacaacaacugguguuuc

SEQ ID NO: 2350560 - RNA, 19 nt, Artificial Sequence
  Description of Artificial Sequence: Synthetic oligonucleotide
gcaagguccguguggucau

SEQ ID NO: 2350561 - RNA, 19 nt, Artificial Sequence
  Description of Artificial Sequence: Synthetic oligonucleotide
gguccauccuggacauuaa

SEQ ID NO: 2350562 - RNA, 19 nt, Artificial Sequence
  Description of Artificial Sequence: Synthetic oligonucleotide
cccggcagcuagagcggag

SEQ ID NO: 2350563 - RNA, 19 nt, Artificial Sequence
  Description of Artificial Sequence: Synthetic oligonucleotide
gggcggggacaagggagag

SEQ ID NO: 2350564 - RNA, 19 nt, Artificial Sequence
  Description of Artificial Sequence: Synthetic oligonucleotide
cugcucagggaaccagaau

SEQ ID NO: 2350565 - RNA, 19 nt, Artificial Sequence
  Description of Artificial Sequence: Synthetic oligonucleotide
cccguguugcuuggccacc

SEQ ID NO: 2350566 - RNA, 19 nt, Artificial Sequence
  Description of Artificial Sequence: Synthetic oligonucleotide
gccuaggaucuuacaggga

SEQ ID NO: 2350567 - RNA, 19 nt, Artificial Sequence
  Description of Artificial Sequence: Synthetic oligonucleotide
gcgggccuaggaucuuaca

SEQ ID NO: 2350568 - RNA, 19 nt, Artificial Sequence
  Description of Artificial Sequence: Synthetic oligonucleotide
ccaucucccggcagcuaga

SEQ ID NO: 2350569 - RNA, 19 nt, Artificial Sequence
  Description of Artificial Sequence: Synthetic oligonucleotide
ccagcacuguaggcacagc

SEQ ID NO: 2350570 - RNA, 19 nt, Artificial Sequence
  Description of Artificial Sequence: Synthetic oligonucleotide
ggcacagcugacaccucgu

SEQ ID NO: 2350571 - RNA, 19 nt, Artificial Sequence
  Description of Artificial Sequence: Synthetic oligonucleotide
ggcugggccgaauguuccu

SEQ ID NO: 2350572 - RNA, 19 nt, Artificial Sequence
  Description of Artificial Sequence: Synthetic oligonucleotide
agccaucucccggcagcua

SEQ ID NO: 2350573 - RNA, 19 nt, Artificial Sequence
  Description of Artificial Sequence: Synthetic oligonucleotide
ggcggggacaagggagaga

SEQ ID NO: 2350574 - RNA, 19 nt, Artificial Sequence
  Description of Artificial Sequence: Synthetic oligonucleotide
gucagaccaccaggauugu

SEQ ID NO: 2350575 - RNA, 19 nt, Artificial Sequence
  Description of Artificial Sequence: Synthetic oligonucleotide
cgcgggccuaggaucuuac

SEQ ID NO: 2350576 - RNA, 19 nt, Artificial Sequence
  Description of Artificial Sequence: Synthetic oligonucleotide
ggagcagggcaggaaggau

SEQ ID NO: 2350577 - RNA, 19 nt, Artificial Sequence
  Description of Artificial Sequence: Synthetic oligonucleotide
gggagagaauggacagcua

SEQ ID NO: 2350578 - RNA, 19 nt, Artificial Sequence
  Description of Artificial Sequence: Synthetic oligonucleotide
auguucgggcugggccgaa

SEQ ID NO: 2350579 - RNA, 19 nt, Artificial Sequence
  Description of Artificial Sequence: Synthetic oligonucleotide
ccuggacauuaaagguugu

SEQ ID NO: 2350580 - RNA, 19 nt, Artificial Sequence
  Description of Artificial Sequence: Synthetic oligonucleotide
ccugucagaccaccaggau

SEQ ID NO: 2350581 - RNA, 19 nt, Artificial Sequence
  Description of Artificial Sequence: Synthetic oligonucleotide
accgcgggccuaggaucuu

SEQ ID NO: 2350582 - RNA, 19 nt, Artificial Sequence
  Description of Artificial Sequence: Synthetic oligonucleotide
ccacauccccauucuugau

SEQ ID NO: 2350583 - RNA, 19 nt, Artificial Sequence
  Description of Artificial Sequence: Synthetic oligonucleotide
gcagggcaggaaggauaau

SEQ ID NO: 2350584 - RNA, 19 nt, Artificial Sequence
  Description of Artificial Sequence: Synthetic oligonucleotide
ccgcgggccuaggaucuua

SEQ ID NO: 2350585 - RNA, 19 nt, Artificial Sequence
  Description of Artificial Sequence: Synthetic oligonucleotide
cagguccauccuggacauu

SEQ ID NO: 2350586 - RNA, 19 nt, Artificial Sequence
  Description of Artificial Sequence: Synthetic oligonucleotide
aaccaaaccaugcuuuuag

SEQ ID NO: 2350587 - RNA, 19 nt, Artificial Sequence
  Description of Artificial Sequence: Synthetic oligonucleotide
caaaccaugcuuuuagggg

SEQ ID NO: 2350588 - RNA, 19 nt, Artificial Sequence
  Description of Artificial Sequence: Synthetic oligonucleotide
uauaacacucgccaacucu

SEQ ID NO: 2350589 - RNA, 19 nt, Artificial Sequence
  Description of Artificial Sequence: Synthetic oligonucleotide
ucgccaacucuccagaacu

SEQ ID NO: 2350590 - RNA, 19 nt, Artificial Sequence
  Description of Artificial Sequence: Synthetic oligonucleotide
auaacacucgccaacucuc

SEQ ID NO: 2350591 - RNA, 19 nt, Artificial Sequence
  Description of Artificial Sequence: Synthetic oligonucleotide
gguuauaacacucgccaac

SEQ ID NO: 2350592 - RNA, 19 nt, Artificial Sequence
  Description of Artificial Sequence: Synthetic oligonucleotide
uaacacucgccaacucucc

SEQ ID NO: 2350593 - RNA, 19 nt, Artificial Sequence
  Description of Artificial Sequence: Synthetic oligonucleotide
ccucuuuccucucaggucc

SEQ ID NO: 2350594 - RNA, 19 nt, Artificial Sequence
  Description of Artificial Sequence: Synthetic oligonucleotide
uuauaacacucgccaacuc

SEQ ID NO: 2350595 - RNA, 19 nt, Artificial Sequence
  Description of Artificial Sequence: Synthetic oligonucleotide
aacacucgccaacucucca

SEQ ID NO: 2350596 - RNA, 19 nt, Artificial Sequence
  Description of Artificial Sequence: Synthetic oligonucleotide
acacucgccaacucuccag

SEQ ID NO: 2350597 - RNA, 19 nt, Artificial Sequence
  Description of Artificial Sequence: Synthetic oligonucleotide
cacagaggccccucuuucc

SEQ ID NO: 2350598 - RNA, 19 nt, Artificial Sequence
  Description of Artificial Sequence: Synthetic oligonucleotide
guuauaacacucgccaacu

SEQ ID NO: 2350599 - RNA, 19 nt, Artificial Sequence
  Description of Artificial Sequence: Synthetic oligonucleotide
cucgccaacucuccagaac

SEQ ID NO: 2350600 - RNA, 19 nt, Artificial Sequence
  Description of Artificial Sequence: Synthetic oligonucleotide
agaggccccucuuuccucu

SEQ ID NO: 2350601 - RNA, 19 nt, Artificial Sequence
  Description of Artificial Sequence: Synthetic oligonucleotide
cacucgccaacucuccaga

SEQ ID NO: 2350602 - RNA, 19 nt, Artificial Sequence
  Description of Artificial Sequence: Synthetic oligonucleotide
acucgccaacucuccagaa

SEQ ID NO: 2350603 - RNA, 19 nt, Artificial Sequence
  Description of Artificial Sequence: Synthetic oligonucleotide
cagaggccccucuuuccuc

SEQ ID NO: 2350604 - RNA, 19 nt, Artificial Sequence
  Description of Artificial Sequence: Synthetic oligonucleotide
cccucuuuccucucagguc

SEQ ID NO: 2350605 - RNA, 19 nt, Artificial Sequence
  Description of Artificial Sequence: Synthetic oligonucleotide
aggccccucuuuccucuca

SEQ ID NO: 2350606 - RNA, 19 nt, Artificial Sequence
  Description of Artificial Sequence: Synthetic oligonucleotide
ggccccucuuuccucucag

SEQ ID NO: 2350607 - RNA, 19 nt, Artificial Sequence
  Description of Artificial Sequence: Synthetic oligonucleotide
ucuuuccucucagguccua

SEQ ID NO: 2350608 - RNA, 19 nt, Artificial Sequence
  Description of Artificial Sequence: Synthetic oligonucleotide
cuuuccucucagguccuaa

SEQ ID NO: 2350609 - RNA, 19 nt, Artificial Sequence
  Description of Artificial Sequence: Synthetic oligonucleotide
gaggccccucuuuccucuc

SEQ ID NO: 2350610 - RNA, 19 nt, Artificial Sequence
  Description of Artificial Sequence: Synthetic oligonucleotide
ccccucuuuccucucaggu

SEQ ID NO: 2350611 - RNA, 19 nt, Artificial Sequence
  Description of Artificial Sequence: Synthetic oligonucleotide
cgccaacucuccagaacua

SEQ ID NO: 2350612 - RNA, 19 nt, Artificial Sequence
  Description of Artificial Sequence: Synthetic oligonucleotide
uuaaauauccgauacaggg

SEQ ID NO: 2350613 - RNA, 19 nt, Artificial Sequence
  Description of Artificial Sequence: Synthetic oligonucleotide
acaaauucccaccacauuc

SEQ ID NO: 2350614 - RNA, 19 nt, Artificial Sequence
  Description of Artificial Sequence: Synthetic oligonucleotide
aaauauccgauacagggug

SEQ ID NO: 2350615 - RNA, 19 nt, Artificial Sequence
  Description of Artificial Sequence: Synthetic oligonucleotide
ugaacagucaacaaagaac

SEQ ID NO: 2350616 - RNA, 19 nt, Artificial Sequence
  Description of Artificial Sequence: Synthetic oligonucleotide
aaggucaucaccuccucgc

SEQ ID NO: 2350617 - RNA, 19 nt, Artificial Sequence
  Description of Artificial Sequence: Synthetic oligonucleotide
auagcaucaaacaaauucc

SEQ ID NO: 2350618 - RNA, 19 nt, Artificial Sequence
  Description of Artificial Sequence: Synthetic oligonucleotide
gauacagucguaaggaucg

SEQ ID NO: 2350619 - RNA, 19 nt, Artificial Sequence
  Description of Artificial Sequence: Synthetic oligonucleotide
aagagagcagccuucacag

SEQ ID NO: 2350620 - RNA, 19 nt, Artificial Sequence
  Description of Artificial Sequence: Synthetic oligonucleotide
aaagaugcucucaggaucc

SEQ ID NO: 2350621 - RNA, 19 nt, Artificial Sequence
  Description of Artificial Sequence: Synthetic oligonucleotide
aggaucgucagacagcucg

SEQ ID NO: 2350622 - RNA, 19 nt, Artificial Sequence
  Description of Artificial Sequence: Synthetic oligonucleotide
cucuuguuguuaaauaucc

SEQ ID NO: 2350623 - RNA, 19 nt, Artificial Sequence
  Description of Artificial Sequence: Synthetic oligonucleotide
aacgauguagaccuucuca

SEQ ID NO: 2350624 - RNA, 19 nt, Artificial Sequence
  Description of Artificial Sequence: Synthetic oligonucleotide
gauguagaccuucucagcc

SEQ ID NO: 2350625 - RNA, 19 nt, Artificial Sequence
  Description of Artificial Sequence: Synthetic oligonucleotide
uaagauguccgugugaccc

SEQ ID NO: 2350626 - RNA, 19 nt, Artificial Sequence
  Description of Artificial Sequence: Synthetic oligonucleotide
agcucgauguccuuugccc

SEQ ID NO: 2350627 - RNA, 19 nt, Artificial Sequence
  Description of Artificial Sequence: Synthetic oligonucleotide
ugugccaaggucaucaccu

SEQ ID NO: 2350628 - RNA, 19 nt, Artificial Sequence
  Description of Artificial Sequence: Synthetic oligonucleotide
accgguaguccucacagcc

SEQ ID NO: 2350629 - RNA, 19 nt, Artificial Sequence
  Description of Artificial Sequence: Synthetic oligonucleotide
auggaaauagcaucaaaca

SEQ ID NO: 2350630 - RNA, 19 nt, Artificial Sequence
  Description of Artificial Sequence: Synthetic oligonucleotide
acuaagauguccgugugac

SEQ ID NO: 2350631 - RNA, 19 nt, Artificial Sequence
  Description of Artificial Sequence: Synthetic oligonucleotide
acugacacuagcaagcugg

SEQ ID NO: 2350632 - RNA, 19 nt, Artificial Sequence
  Description of Artificial Sequence: Synthetic oligonucleotide
uucucuacacucaagcgga

SEQ ID NO: 2350633 - RNA, 19 nt, Artificial Sequence
  Description of Artificial Sequence: Synthetic oligonucleotide
ucuuguuguuaaauauccg

SEQ ID NO: 2350634 - RNA, 19 nt, Artificial Sequence
  Description of Artificial Sequence: Synthetic oligonucleotide
uaaauauccgauacagggu

SEQ ID NO: 2350635 - RNA, 19 nt, Artificial Sequence
  Description of Artificial Sequence: Synthetic oligonucleotide
ucuacacucaagcggauac

SEQ ID NO: 2350636 - RNA, 19 nt, Artificial Sequence
  Description of Artificial Sequence: Synthetic oligonucleotide
auguguagcacuuugccca

SEQ ID NO: 2350637 - RNA, 19 nt, Artificial Sequence
  Description of Artificial Sequence: Synthetic oligonucleotide
gguguuggacacuacaucg

SEQ ID NO: 2350638 - RNA, 19 nt, Artificial Sequence
  Description of Artificial Sequence: Synthetic oligonucleotide
gucaacaaagaacuccagg

SEQ ID NO: 2350639 - RNA, 19 nt, Artificial Sequence
  Description of Artificial Sequence: Synthetic oligonucleotide
acuacaucggucucuaccu

SEQ ID NO: 2350640 - RNA, 19 nt, Artificial Sequence
  Description of Artificial Sequence: Synthetic oligonucleotide
cuuguuguuaaauauccga

SEQ ID NO: 2350641 - RNA, 19 nt, Artificial Sequence
  Description of Artificial Sequence: Synthetic oligonucleotide
ugcagaacgcucugcaagg

SEQ ID NO: 2350642 - RNA, 19 nt, Artificial Sequence
  Description of Artificial Sequence: Synthetic oligonucleotide
uuguuguuaaauauccgau

SEQ ID NO: 2350643 - RNA, 19 nt, Artificial Sequence
  Description of Artificial Sequence: Synthetic oligonucleotide
uuggacacuacaucggucu

SEQ ID NO: 2350644 - RNA, 19 nt, Artificial Sequence
  Description of Artificial Sequence: Synthetic oligonucleotide
uagcaucaaacaaauuccc

SEQ ID NO: 2350645 - RNA, 19 nt, Artificial Sequence
  Description of Artificial Sequence: Synthetic oligonucleotide
agcggauacagucguaagg

SEQ ID NO: 2350646 - RNA, 19 nt, Artificial Sequence
  Description of Artificial Sequence: Synthetic oligonucleotide
ucgcccuucaaauucuggg

SEQ ID NO: 2350647 - RNA, 19 nt, Artificial Sequence
  Description of Artificial Sequence: Synthetic oligonucleotide
aacacgaacccgugguauc

SEQ ID NO: 2350648 - RNA, 19 nt, Artificial Sequence
  Description of Artificial Sequence: Synthetic oligonucleotide
caaauucccaccacauucc

SEQ ID NO: 2350649 - RNA, 19 nt, Artificial Sequence
  Description of Artificial Sequence: Synthetic oligonucleotide
uuccugcacuccaugaacg

SEQ ID NO: 2350650 - RNA, 19 nt, Artificial Sequence
  Description of Artificial Sequence: Synthetic oligonucleotide
uuguuaaauauccgauaca

SEQ ID NO: 2350651 - RNA, 19 nt, Artificial Sequence
  Description of Artificial Sequence: Synthetic oligonucleotide
ucggucucuaccucaaugc

SEQ ID NO: 2350652 - RNA, 19 nt, Artificial Sequence
  Description of Artificial Sequence: Synthetic oligonucleotide
uccuccagaacacgaaccc

SEQ ID NO: 2350653 - RNA, 19 nt, Artificial Sequence
  Description of Artificial Sequence: Synthetic oligonucleotide
ucuuccuugugcagaacgc

SEQ ID NO: 2350654 - RNA, 19 nt, Artificial Sequence
  Description of Artificial Sequence: Synthetic oligonucleotide
agcaagcuggccaaggagc

SEQ ID NO: 2350655 - RNA, 19 nt, Artificial Sequence
  Description of Artificial Sequence: Synthetic oligonucleotide
cacucaagcggauacaguc

SEQ ID NO: 2350656 - RNA, 19 nt, Artificial Sequence
  Description of Artificial Sequence: Synthetic oligonucleotide
guauccuuguguugaagag

SEQ ID NO: 2350657 - RNA, 19 nt, Artificial Sequence
  Description of Artificial Sequence: Synthetic oligonucleotide
agggagcucaagucuacgc

SEQ ID NO: 2350658 - RNA, 19 nt, Artificial Sequence
  Description of Artificial Sequence: Synthetic oligonucleotide
guuaaauauccgauacagg

SEQ ID NO: 2350659 - RNA, 19 nt, Artificial Sequence
  Description of Artificial Sequence: Synthetic oligonucleotide
uguuguuaaauauccgaua

SEQ ID NO: 2350660 - RNA, 19 nt, Artificial Sequence
  Description of Artificial Sequence: Synthetic oligonucleotide
cagccaaucuugcacaggg

SEQ ID NO: 2350661 - RNA, 19 nt, Artificial Sequence
  Description of Artificial Sequence: Synthetic oligonucleotide
uccaugaacgauguagacc

SEQ ID NO: 2350662 - RNA, 19 nt, Artificial Sequence
  Description of Artificial Sequence: Synthetic oligonucleotide
cacuacaucggucucuacc

SEQ ID NO: 2350663 - RNA, 19 nt, Artificial Sequence
  Description of Artificial Sequence: Synthetic oligonucleotide
uaaggaucgucagacagcu

SEQ ID NO: 2350664 - RNA, 19 nt, Artificial Sequence
  Description of Artificial Sequence: Synthetic oligonucleotide
guccgugugacccagcuug

SEQ ID NO: 2350665 - RNA, 19 nt, Artificial Sequence
  Description of Artificial Sequence: Synthetic oligonucleotide
guagccuucacuugguuuc

SEQ ID NO: 2350666 - RNA, 19 nt, Artificial Sequence
  Description of Artificial Sequence: Synthetic oligonucleotide
ugcaaggacauguguagca

SEQ ID NO: 2350667 - RNA, 19 nt, Artificial Sequence
  Description of Artificial Sequence: Synthetic oligonucleotide
aagucuacgcugcucuugu

SEQ ID NO: 2350668 - RNA, 19 nt, Artificial Sequence
  Description of Artificial Sequence: Synthetic oligonucleotide
cuuguguugaagagagcag

SEQ ID NO: 2350669 - RNA, 19 nt, Artificial Sequence
  Description of Artificial Sequence: Synthetic oligonucleotide
uguuggacacuacaucggu

SEQ ID NO: 2350670 - RNA, 19 nt, Artificial Sequence
  Description of Artificial Sequence: Synthetic oligonucleotide
agcgcaaccgacgccaugc

SEQ ID NO: 2350671 - RNA, 19 nt, Artificial Sequence
  Description of Artificial Sequence: Synthetic oligonucleotide
uaccucaaugcaccgguag

SEQ ID NO: 2350672 - RNA, 19 nt, Artificial Sequence
  Description of Artificial Sequence: Synthetic oligonucleotide
acagccacggccaucuacc

SEQ ID NO: 2350673 - RNA, 19 nt, Artificial Sequence
  Description of Artificial Sequence: Synthetic oligonucleotide
uugcacagggugacgaugc

SEQ ID NO: 2350674 - RNA, 19 nt, Artificial Sequence
  Description of Artificial Sequence: Synthetic oligonucleotide
gacgaugcagggcacauuc

SEQ ID NO: 2350675 - RNA, 19 nt, Artificial Sequence
  Description of Artificial Sequence: Synthetic oligonucleotide
agggugacgaugcagggca

SEQ ID NO: 2350676 - RNA, 19 nt, Artificial Sequence
  Description of Artificial Sequence: Synthetic oligonucleotide
uguuagcgaucucugugcc

SEQ ID NO: 2350677 - RNA, 19 nt, Artificial Sequence
  Description of Artificial Sequence: Synthetic oligonucleotide
aaauucccaccacauucca

SEQ ID NO: 2350678 - RNA, 19 nt, Artificial Sequence
  Description of Artificial Sequence: Synthetic oligonucleotide
aaauucugggguggcauug

SEQ ID NO: 2350679 - RNA, 19 nt, Artificial Sequence
  Description of Artificial Sequence: Synthetic oligonucleotide
auccuuguguugaagagag

SEQ ID NO: 2350680 - RNA, 19 nt, Artificial Sequence
  Description of Artificial Sequence: Synthetic oligonucleotide
cagcaauggaaauagcauc

SEQ ID NO: 2350681 - RNA, 19 nt, Artificial Sequence
  Description of Artificial Sequence: Synthetic oligonucleotide
aaacaaauucccaccacau

SEQ ID NO: 2350682 - RNA, 19 nt, Artificial Sequence
  Description of Artificial Sequence: Synthetic oligonucleotide
guguuagcgaucucugugc

SEQ ID NO: 2350683 - RNA, 19 nt, Artificial Sequence
  Description of Artificial Sequence: Synthetic oligonucleotide
uuagcgaucucugugccaa

SEQ ID NO: 2350684 - RNA, 19 nt, Artificial Sequence
  Description of Artificial Sequence: Synthetic oligonucleotide
gugcagaacgcucugcaag

SEQ ID NO: 2350685 - RNA, 19 nt, Artificial Sequence
  Description of Artificial Sequence: Synthetic oligonucleotide
aagcggauacagucguaag

SEQ ID NO: 2350686 - RNA, 19 nt, Artificial Sequence
  Description of Artificial Sequence: Synthetic oligonucleotide
acagagaacccagcagugc

SEQ ID NO: 2350687 - RNA, 19 nt, Artificial Sequence
  Description of Artificial Sequence: Synthetic oligonucleotide
aggacugaugcagagggag

SEQ ID NO: 2350688 - RNA, 19 nt, Artificial Sequence
  Description of Artificial Sequence: Synthetic oligonucleotide
gucguaaggaucgucagac

SEQ ID NO: 2350689 - RNA, 19 nt, Artificial Sequence
  Description of Artificial Sequence: Synthetic oligonucleotide
acucccacuaagauguccg

SEQ ID NO: 2350690 - RNA, 19 nt, Artificial Sequence
  Description of Artificial Sequence: Synthetic oligonucleotide
uauccuuguguugaagaga

SEQ ID NO: 2350691 - RNA, 19 nt, Artificial Sequence
  Description of Artificial Sequence: Synthetic oligonucleotide
caaccuucggccucuuggg

SEQ ID NO: 2350692 - RNA, 19 nt, Artificial Sequence
  Description of Artificial Sequence: Synthetic oligonucleotide
aucggucucuaccucaaug

SEQ ID NO: 2350693 - RNA, 19 nt, Artificial Sequence
  Description of Artificial Sequence: Synthetic oligonucleotide
ugcacuccaugaacgaugu

SEQ ID NO: 2350694 - RNA, 19 nt, Artificial Sequence
  Description of Artificial Sequence: Synthetic oligonucleotide
acggccaucuacccggagg

SEQ ID NO: 2350695 - RNA, 19 nt, Artificial Sequence
  Description of Artificial Sequence: Synthetic oligonucleotide
ugcucccgaggacugaugc

SEQ ID NO: 2350696 - RNA, 19 nt, Artificial Sequence
  Description of Artificial Sequence: Synthetic oligonucleotide
ugguguuggacacuacauc

SEQ ID NO: 2350697 - RNA, 19 nt, Artificial Sequence
  Description of Artificial Sequence: Synthetic oligonucleotide
acacgaacccgugguaucc

SEQ ID NO: 2350698 - RNA, 19 nt, Artificial Sequence
  Description of Artificial Sequence: Synthetic oligonucleotide
aaaucaucccaggaaccca

SEQ ID NO: 2350699 - RNA, 19 nt, Artificial Sequence
  Description of Artificial Sequence: Synthetic oligonucleotide
caugcaggucacaacuccc

SEQ ID NO: 2350700 - RNA, 19 nt, Artificial Sequence
  Description of Artificial Sequence: Synthetic oligonucleotide
caggucacaacucccuugc

SEQ ID NO: 2350701 - RNA, 19 nt, Artificial Sequence
  Description of Artificial Sequence: Synthetic oligonucleotide
augaacgauguagaccuuc

SEQ ID NO: 2350702 - RNA, 19 nt, Artificial Sequence
  Description of Artificial Sequence: Synthetic oligonucleotide
cagucaacaaagaacucca

SEQ ID NO: 2350703 - RNA, 19 nt, Artificial Sequence
  Description of Artificial Sequence: Synthetic oligonucleotide
cugaaguguggcauccacc

SEQ ID NO: 2350704 - RNA, 19 nt, Artificial Sequence
  Description of Artificial Sequence: Synthetic oligonucleotide
acaacucccuugcugguca

SEQ ID NO: 2350705 - RNA, 19 nt, Artificial Sequence
  Description of Artificial Sequence: Synthetic oligonucleotide
ucaaauucugggguggcau

SEQ ID NO: 2350706 - RNA, 19 nt, Artificial Sequence
  Description of Artificial Sequence: Synthetic oligonucleotide
cuuccugcacuccaugaac

SEQ ID NO: 2350707 - RNA, 19 nt, Artificial Sequence
  Description of Artificial Sequence: Synthetic oligonucleotide
guaguccucacagccacgg

SEQ ID NO: 2350708 - RNA, 19 nt, Artificial Sequence
  Description of Artificial Sequence: Synthetic oligonucleotide
cugcacuccaugaacgaug

SEQ ID NO: 2350709 - RNA, 19 nt, Artificial Sequence
  Description of Artificial Sequence: Synthetic oligonucleotide
uccgauacaggguguuagc

SEQ ID NO: 2350710 - RNA, 19 nt, Artificial Sequence
  Description of Artificial Sequence: Synthetic oligonucleotide
uucgggguccccauuucug

SEQ ID NO: 2350711 - RNA, 19 nt, Artificial Sequence
  Description of Artificial Sequence: Synthetic oligonucleotide
acucaagcggauacagucg

SEQ ID NO: 2350712 - RNA, 19 nt, Artificial Sequence
  Description of Artificial Sequence: Synthetic oligonucleotide
cccagcuugacucuggcgg

SEQ ID NO: 2350713 - RNA, 19 nt, Artificial Sequence
  Description of Artificial Sequence: Synthetic oligonucleotide
uugcccacucgcuugcugc

SEQ ID NO: 2350714 - RNA, 19 nt, Artificial Sequence
  Description of Artificial Sequence: Synthetic oligonucleotide
guaaggaucgucagacagc

SEQ ID NO: 2350715 - RNA, 19 nt, Artificial Sequence
  Description of Artificial Sequence: Synthetic oligonucleotide
uccagaacacgaacccgug

SEQ ID NO: 2350716 - RNA, 19 nt, Artificial Sequence
  Description of Artificial Sequence: Synthetic oligonucleotide
ugacccagcuugacucugg

SEQ ID NO: 2350717 - RNA, 19 nt, Artificial Sequence
  Description of Artificial Sequence: Synthetic oligonucleotide
gucuacgcugcucuuguug

SEQ ID NO: 2350718 - RNA, 19 nt, Artificial Sequence
  Description of Artificial Sequence: Synthetic oligonucleotide
uacaggguguuagcgaucu

SEQ ID NO: 2350719 - RNA, 19 nt, Artificial Sequence
  Description of Artificial Sequence: Synthetic oligonucleotide
aaucuugcacagggugacg

SEQ ID NO: 2350720 - RNA, 19 nt, Artificial Sequence
  Description of Artificial Sequence: Synthetic oligonucleotide
gauacaggguguuagcgau

SEQ ID NO: 2350721 - RNA, 19 nt, Artificial Sequence
  Description of Artificial Sequence: Synthetic oligonucleotide
gacauguguagcacuuugc

SEQ ID NO: 2350722 - RNA, 19 nt, Artificial Sequence
  Description of Artificial Sequence: Synthetic oligonucleotide
aauucccaccacauuccag

SEQ ID NO: 2350723 - RNA, 19 nt, Artificial Sequence
  Description of Artificial Sequence: Synthetic oligonucleotide
aaugcaccgguaguccuca

SEQ ID NO: 2350724 - RNA, 19 nt, Artificial Sequence
  Description of Artificial Sequence: Synthetic oligonucleotide
cucaaugcaccgguagucc

SEQ ID NO: 2350725 - RNA, 19 nt, Artificial Sequence
  Description of Artificial Sequence: Synthetic oligonucleotide
auccgauacaggguguuag

SEQ ID NO: 2350726 - RNA, 19 nt, Artificial Sequence
  Description of Artificial Sequence: Synthetic oligonucleotide
gaacccagcagugcucccg

SEQ ID NO: 2350727 - RNA, 19 nt, Artificial Sequence
  Description of Artificial Sequence: Synthetic oligonucleotide
acagucguaaggaucguca

SEQ ID NO: 2350728 - RNA, 19 nt, Artificial Sequence
  Description of Artificial Sequence: Synthetic oligonucleotide
uacccggaggucuuccugc

SEQ ID NO: 2350729 - RNA, 19 nt, Artificial Sequence
  Description of Artificial Sequence: Synthetic oligonucleotide
gacucuggcggacccacug

SEQ ID NO: 2350730 - RNA, 19 nt, Artificial Sequence
  Description of Artificial Sequence: Synthetic oligonucleotide
agucguaaggaucgucaga

SEQ ID NO: 2350731 - RNA, 19 nt, Artificial Sequence
  Description of Artificial Sequence: Synthetic oligonucleotide
caggaacccaaccuucggc

SEQ ID NO: 2350732 - RNA, 19 nt, Artificial Sequence
  Description of Artificial Sequence: Synthetic oligonucleotide
caaucuugcacagggugac

SEQ ID NO: 2350733 - RNA, 19 nt, Artificial Sequence
  Description of Artificial Sequence: Synthetic oligonucleotide
caaggucaucaccuccucg

SEQ ID NO: 2350734 - RNA, 19 nt, Artificial Sequence
  Description of Artificial Sequence: Synthetic oligonucleotide
gagaacccagcagugcucc

SEQ ID NO: 2350735 - RNA, 19 nt, Artificial Sequence
  Description of Artificial Sequence: Synthetic oligonucleotide
guguuggacacuacaucgg

SEQ ID NO: 2350736 - RNA, 19 nt, Artificial Sequence
  Description of Artificial Sequence: Synthetic oligonucleotide
ucccuugcuggucacugac

SEQ ID NO: 2350737 - RNA, 19 nt, Artificial Sequence
  Description of Artificial Sequence: Synthetic oligonucleotide
gccacggccaucuacccgg

SEQ ID NO: 2350738 - RNA, 19 nt, Artificial Sequence
  Description of Artificial Sequence: Synthetic oligonucleotide
cacauucucuacacucaag

SEQ ID NO: 2350739 - RNA, 19 nt, Artificial Sequence
  Description of Artificial Sequence: Synthetic oligonucleotide
ucgggguccccauuucugc

SEQ ID NO: 2350740 - RNA, 19 nt, Artificial Sequence
  Description of Artificial Sequence: Synthetic oligonucleotide
aauauccgauacagggugu

SEQ ID NO: 2350741 - RNA, 19 nt, Artificial Sequence
  Description of Artificial Sequence: Synthetic oligonucleotide
uguguagcacuuugcccac

SEQ ID NO: 2350742 - RNA, 19 nt, Artificial Sequence
  Description of Artificial Sequence: Synthetic oligonucleotide
acuccagguagccuucacu

SEQ ID NO: 2350743 - RNA, 19 nt, Artificial Sequence
  Description of Artificial Sequence: Synthetic oligonucleotide
ggagcucaagucuacgcug

SEQ ID NO: 2350744 - RNA, 19 nt, Artificial Sequence
  Description of Artificial Sequence: Synthetic oligonucleotide
accucaaugcaccgguagu

SEQ ID NO: 2350745 - RNA, 19 nt, Artificial Sequence
  Description of Artificial Sequence: Synthetic oligonucleotide
aaucaucccaggaacccaa

SEQ ID NO: 2350746 - RNA, 19 nt, Artificial Sequence
  Description of Artificial Sequence: Synthetic oligonucleotide
gccaaucuugcacagggug

SEQ ID NO: 2350747 - RNA, 19 nt, Artificial Sequence
  Description of Artificial Sequence: Synthetic oligonucleotide
agaacgcucugcaaggaca

SEQ ID NO: 2350748 - RNA, 19 nt, Artificial Sequence
  Description of Artificial Sequence: Synthetic oligonucleotide
cucccgaggacugaugcag

SEQ ID NO: 2350749 - RNA, 19 nt, Artificial Sequence
  Description of Artificial Sequence: Synthetic oligonucleotide
cugacacuagcaagcuggc

SEQ ID NO: 2350750 - RNA, 19 nt, Artificial Sequence
  Description of Artificial Sequence: Synthetic oligonucleotide
acuccaugaacgauguaga

SEQ ID NO: 2350751 - RNA, 19 nt, Artificial Sequence
  Description of Artificial Sequence: Synthetic oligonucleotide
cuccaugaacgauguagac

SEQ ID NO: 2350752 - RNA, 19 nt, Artificial Sequence
  Description of Artificial Sequence: Synthetic oligonucleotide
gaccuucucagccucgcuc

SEQ ID NO: 2350753 - RNA, 19 nt, Artificial Sequence
  Description of Artificial Sequence: Synthetic oligonucleotide
cucucaggauccaggcugc

SEQ ID NO: 2350754 - RNA, 19 nt, Artificial Sequence
  Description of Artificial Sequence: Synthetic oligonucleotide
aacccagcagugcucccga

SEQ ID NO: 2350755 - RNA, 19 nt, Artificial Sequence
  Description of Artificial Sequence: Synthetic oligonucleotide
uucaaauucugggguggca

SEQ ID NO: 2350756 - RNA, 19 nt, Artificial Sequence
  Description of Artificial Sequence: Synthetic oligonucleotide
ugugcagaacgcucugcaa

SEQ ID NO: 2350757 - RNA, 19 nt, Artificial Sequence
  Description of Artificial Sequence: Synthetic oligonucleotide
uccugcacuccaugaacga

SEQ ID NO: 2350758 - RNA, 19 nt, Artificial Sequence
  Description of Artificial Sequence: Synthetic oligonucleotide
gaugcagagggagcucaag

SEQ ID NO: 2350759 - RNA, 19 nt, Artificial Sequence
  Description of Artificial Sequence: Synthetic oligonucleotide
ggacauguguagcacuuug

SEQ ID NO: 2350760 - RNA, 19 nt, Artificial Sequence
  Description of Artificial Sequence: Synthetic oligonucleotide
cucgcccuucaaauucugg

SEQ ID NO: 2350761 - RNA, 19 nt, Artificial Sequence
  Description of Artificial Sequence: Synthetic oligonucleotide
uugguuucuccagcuucgg

SEQ ID NO: 2350762 - RNA, 19 nt, Artificial Sequence
  Description of Artificial Sequence: Synthetic oligonucleotide
ugcaccgguaguccucaca

SEQ ID NO: 2350763 - RNA, 19 nt, Artificial Sequence
  Description of Artificial Sequence: Synthetic oligonucleotide
uuucugcuuucacucccac

SEQ ID NO: 2350764 - RNA, 19 nt, Artificial Sequence
  Description of Artificial Sequence: Synthetic oligonucleotide
cauuggcugaacagucaac

SEQ ID NO: 2350765 - RNA, 19 nt, Artificial Sequence
  Description of Artificial Sequence: Synthetic oligonucleotide
agcgaucucugugccaagg

SEQ ID NO: 2350766 - RNA, 19 nt, Artificial Sequence
  Description of Artificial Sequence: Synthetic oligonucleotide
acccgugguauccuugugu

SEQ ID NO: 2350767 - RNA, 19 nt, Artificial Sequence
  Description of Artificial Sequence: Synthetic oligonucleotide
gcaccgguaguccucacag

SEQ ID NO: 2350768 - RNA, 19 nt, Artificial Sequence
  Description of Artificial Sequence: Synthetic oligonucleotide
cuucauccuccagaacacg

SEQ ID NO: 2350769 - RNA, 19 nt, Artificial Sequence
  Description of Artificial Sequence: Synthetic oligonucleotide
aucuacccggaggucuucc

SEQ ID NO: 2350770 - RNA, 19 nt, Artificial Sequence
  Description of Artificial Sequence: Synthetic oligonucleotide
cucaugcaggucacaacuc

SEQ ID NO: 2350771 - RNA, 19 nt, Artificial Sequence
  Description of Artificial Sequence: Synthetic oligonucleotide
agagaacccagcagugcuc

SEQ ID NO: 2350772 - RNA, 19 nt, Artificial Sequence
  Description of Artificial Sequence: Synthetic oligonucleotide
agcagugcucccgaggacu

SEQ ID NO: 2350773 - RNA, 19 nt, Artificial Sequence
  Description of Artificial Sequence: Synthetic oligonucleotide
ucccacuaagauguccgug

SEQ ID NO: 2350774 - RNA, 19 nt, Artificial Sequence
  Description of Artificial Sequence: Synthetic oligonucleotide
gcaaccgacgccaugcugc

SEQ ID NO: 2350775 - RNA, 19 nt, Artificial Sequence
  Description of Artificial Sequence: Synthetic oligonucleotide
agagggagcucaagucuac

SEQ ID NO: 2350776 - RNA, 19 nt, Artificial Sequence
  Description of Artificial Sequence: Synthetic oligonucleotide
agccacggccaucuacccg

SEQ ID NO: 2350777 - RNA, 19 nt, Artificial Sequence
  Description of Artificial Sequence: Synthetic oligonucleotide
ucguaaggaucgucagaca

SEQ ID NO: 2350778 - RNA, 19 nt, Artificial Sequence
  Description of Artificial Sequence: Synthetic oligonucleotide
gggcacauucucuacacuc

SEQ ID NO: 2350779 - RNA, 19 nt, Artificial Sequence
  Description of Artificial Sequence: Synthetic oligonucleotide
gaaguguggcauccaccac

SEQ ID NO: 2350780 - RNA, 19 nt, Artificial Sequence
  Description of Artificial Sequence: Synthetic oligonucleotide
aucccaggaacccaaccuu

SEQ ID NO: 2350781 - RNA, 19 nt, Artificial Sequence
  Description of Artificial Sequence: Synthetic oligonucleotide
acugaugcagagggagcuc

SEQ ID NO: 2350782 - RNA, 19 nt, Artificial Sequence
  Description of Artificial Sequence: Synthetic oligonucleotide
caacaaagaacuccaggua

SEQ ID NO: 2350783 - RNA, 19 nt, Artificial Sequence
  Description of Artificial Sequence: Synthetic oligonucleotide
uugacucuggcggacccac

SEQ ID NO: 2350784 - RNA, 19 nt, Artificial Sequence
  Description of Artificial Sequence: Synthetic oligonucleotide
cugugccaaggucaucacc

SEQ ID NO: 2350785 - RNA, 19 nt, Artificial Sequence
  Description of Artificial Sequence: Synthetic oligonucleotide
caaugcaccgguaguccuc

SEQ ID NO: 2350786 - RNA, 19 nt, Artificial Sequence
  Description of Artificial Sequence: Synthetic oligonucleotide
aucuugcacagggugacga

SEQ ID NO: 2350787 - RNA, 19 nt, Artificial Sequence
  Description of Artificial Sequence: Synthetic oligonucleotide
caggccuccuccugaagug

SEQ ID NO: 2350788 - RNA, 19 nt, Artificial Sequence
  Description of Artificial Sequence: Synthetic oligonucleotide
uccccauuucugcuuucac

SEQ ID NO: 2350789 - RNA, 19 nt, Artificial Sequence
  Description of Artificial Sequence: Synthetic oligonucleotide
caaccgacgccaugcugcc

SEQ ID NO: 2350790 - RNA, 19 nt, Artificial Sequence
  Description of Artificial Sequence: Synthetic oligonucleotide
caagucuacgcugcucuug

SEQ ID NO: 2350791 - RNA, 19 nt, Artificial Sequence
  Description of Artificial Sequence: Synthetic oligonucleotide
acgccaugcugcccgcucg

SEQ ID NO: 2350792 - RNA, 19 nt, Artificial Sequence
  Description of Artificial Sequence: Synthetic oligonucleotide
acccagcuugacucuggcg

SEQ ID NO: 2350793 - RNA, 19 nt, Artificial Sequence
  Description of Artificial Sequence: Synthetic oligonucleotide
uggacacuacaucggucuc

SEQ ID NO: 2350794 - RNA, 19 nt, Artificial Sequence
  Description of Artificial Sequence: Synthetic oligonucleotide
cagaacgcucugcaaggac

SEQ ID NO: 2350795 - RNA, 19 nt, Artificial Sequence
  Description of Artificial Sequence: Synthetic oligonucleotide
agaacacgaacccguggua

SEQ ID NO: 2350796 - RNA, 19 nt, Artificial Sequence
  Description of Artificial Sequence: Synthetic oligonucleotide
cuccugaaguguggcaucc

SEQ ID NO: 2350797 - RNA, 19 nt, Artificial Sequence
  Description of Artificial Sequence: Synthetic oligonucleotide
ggauacagucguaaggauc

SEQ ID NO: 2350798 - RNA, 19 nt, Artificial Sequence
  Description of Artificial Sequence: Synthetic oligonucleotide
cuagcaagcuggccaagga

SEQ ID NO: 2350799 - RNA, 19 nt, Artificial Sequence
  Description of Artificial Sequence: Synthetic oligonucleotide
ucuacccggaggucuuccu

SEQ ID NO: 2350800 - RNA, 19 nt, Artificial Sequence
  Description of Artificial Sequence: Synthetic oligonucleotide
ucuugcacagggugacgau

SEQ ID NO: 2350801 - RNA, 19 nt, Artificial Sequence
  Description of Artificial Sequence: Synthetic oligonucleotide
ugcacagggugacgaugca

SEQ ID NO: 2350802 - RNA, 19 nt, Artificial Sequence
  Description of Artificial Sequence: Synthetic oligonucleotide
ccuuguguugaagagagca

SEQ ID NO: 2350803 - RNA, 19 nt, Artificial Sequence
  Description of Artificial Sequence: Synthetic oligonucleotide
agcacuuugcccacucgcu

SEQ ID NO: 2350804 - RNA, 19 nt, Artificial Sequence
  Description of Artificial Sequence: Synthetic oligonucleotide
augcagggcacauucucua

SEQ ID NO: 2350805 - RNA, 19 nt, Artificial Sequence
  Description of Artificial Sequence: Synthetic oligonucleotide
uaguccucacagccacggc

SEQ ID NO: 2350806 - RNA, 19 nt, Artificial Sequence
  Description of Artificial Sequence: Synthetic oligonucleotide
cucgcucagcgcaaccgac

SEQ ID NO: 2350807 - RNA, 19 nt, Artificial Sequence
  Description of Artificial Sequence: Synthetic oligonucleotide
agauguccgugugacccag

SEQ ID NO: 2350808 - RNA, 19 nt, Artificial Sequence
  Description of Artificial Sequence: Synthetic oligonucleotide
ugcaggucacaacucccuu

SEQ ID NO: 2350809 - RNA, 19 nt, Artificial Sequence
  Description of Artificial Sequence: Synthetic oligonucleotide
aggguguuagcgaucucug

SEQ ID NO: 2350810 - RNA, 19 nt, Artificial Sequence
  Description of Artificial Sequence: Synthetic oligonucleotide
acacuacaucggucucuac

SEQ ID NO: 2350811 - RNA, 19 nt, Artificial Sequence
  Description of Artificial Sequence: Synthetic oligonucleotide
ccuugcuggucacugacac

SEQ ID NO: 2350812 - RNA, 19 nt, Artificial Sequence
  Description of Artificial Sequence: Synthetic oligonucleotide
cucagcgcaaccgacgcca

SEQ ID NO: 2350813 - RNA, 19 nt, Artificial Sequence
  Description of Artificial Sequence: Synthetic oligonucleotide
acucgcuugcugcucucca

SEQ ID NO: 2350814 - RNA, 19 nt, Artificial Sequence
  Description of Artificial Sequence: Synthetic oligonucleotide
guuagcgaucucugugcca

SEQ ID NO: 2350815 - RNA, 19 nt, Artificial Sequence
  Description of Artificial Sequence: Synthetic oligonucleotide
ucccgaggacugaugcaga

SEQ ID NO: 2350816 - RNA, 19 nt, Artificial Sequence
  Description of Artificial Sequence: Synthetic oligonucleotide
cuacccggaggucuuccug

SEQ ID NO: 2350817 - RNA, 19 nt, Artificial Sequence
  Description of Artificial Sequence: Synthetic oligonucleotide
aaccgacgccaugcugccc

SEQ ID NO: 2350818 - RNA, 19 nt, Artificial Sequence
  Description of Artificial Sequence: Synthetic oligonucleotide
gcggauacagucguaagga

SEQ ID NO: 2350819 - RNA, 19 nt, Artificial Sequence
  Description of Artificial Sequence: Synthetic oligonucleotide
uacagucguaaggaucguc

SEQ ID NO: 2350820 - RNA, 19 nt, Artificial Sequence
  Description of Artificial Sequence: Synthetic oligonucleotide
ugcccuuccccaccuuccu

SEQ ID NO: 2350821 - RNA, 19 nt, Artificial Sequence
  Description of Artificial Sequence: Synthetic oligonucleotide
augccggcagccaaucuug

SEQ ID NO: 2350822 - RNA, 19 nt, Artificial Sequence
  Description of Artificial Sequence: Synthetic oligonucleotide
ucaagcggauacagucgua

SEQ ID NO: 2350823 - RNA, 19 nt, Artificial Sequence
  Description of Artificial Sequence: Synthetic oligonucleotide
cuacaucggucucuaccuc

SEQ ID NO: 2350824 - RNA, 19 nt, Artificial Sequence
  Description of Artificial Sequence: Synthetic oligonucleotide
auacaggguguuagcgauc

SEQ ID NO: 2350825 - RNA, 19 nt, Artificial Sequence
  Description of Artificial Sequence: Synthetic oligonucleotide
agggcacauucucuacacu

SEQ ID NO: 2350826 - RNA, 19 nt, Artificial Sequence
  Description of Artificial Sequence: Synthetic oligonucleotide
gcaggucacaacucccuug

SEQ ID NO: 2350827 - RNA, 19 nt, Artificial Sequence
  Description of Artificial Sequence: Synthetic oligonucleotide
cauuccagcagcagcacau

SEQ ID NO: 2350828 - RNA, 19 nt, Artificial Sequence
  Description of Artificial Sequence: Synthetic oligonucleotide
gacacuacaucggucucua

SEQ ID NO: 2350829 - RNA, 19 nt, Artificial Sequence
  Description of Artificial Sequence: Synthetic oligonucleotide
ggucaucaccuccucgccc

SEQ ID NO: 2350830 - RNA, 19 nt, Artificial Sequence
  Description of Artificial Sequence: Synthetic oligonucleotide
gaugcagggcacauucucu

SEQ ID NO: 2350831 - RNA, 19 nt, Artificial Sequence
  Description of Artificial Sequence: Synthetic oligonucleotide
ucaagucuacgcugcucuu

SEQ ID NO: 2350832 - RNA, 19 nt, Artificial Sequence
  Description of Artificial Sequence: Synthetic oligonucleotide
cagggugacgaugcagggc

SEQ ID NO: 2350833 - RNA, 19 nt, Artificial Sequence
  Description of Artificial Sequence: Synthetic oligonucleotide
cuuucacucccacuaagau

SEQ ID NO: 2350834 - RNA, 19 nt, Artificial Sequence
  Description of Artificial Sequence: Synthetic oligonucleotide
agcucaagucuacgcugcu

SEQ ID NO: 2350835 - RNA, 19 nt, Artificial Sequence
  Description of Artificial Sequence: Synthetic oligonucleotide
caagcggauacagucguaa

SEQ ID NO: 2350836 - RNA, 19 nt, Artificial Sequence
  Description of Artificial Sequence: Synthetic oligonucleotide
cccaggaacccaaccuucg

SEQ ID NO: 2350837 - RNA, 19 nt, Artificial Sequence
  Description of Artificial Sequence: Synthetic oligonucleotide
cacugacacuagcaagcug

SEQ ID NO: 2350838 - RNA, 19 nt, Artificial Sequence
  Description of Artificial Sequence: Synthetic oligonucleotide
caucccaggaacccaaccu

SEQ ID NO: 2350839 - RNA, 19 nt, Artificial Sequence
  Description of Artificial Sequence: Synthetic oligonucleotide
ccgauacaggguguuagcg

SEQ ID NO: 2350840 - RNA, 19 nt, Artificial Sequence
  Description of Artificial Sequence: Synthetic oligonucleotide
cgcccuucaaauucugggg

SEQ ID NO: 2350841 - RNA, 19 nt, Artificial Sequence
  Description of Artificial Sequence: Synthetic oligonucleotide
aacgcucugcaaggacaug

SEQ ID NO: 2350842 - RNA, 19 nt, Artificial Sequence
  Description of Artificial Sequence: Synthetic oligonucleotide
cacuaagauguccguguga

SEQ ID NO: 2350843 - RNA, 19 nt, Artificial Sequence
  Description of Artificial Sequence: Synthetic oligonucleotide
auauccgauacaggguguu

SEQ ID NO: 2350844 - RNA, 19 nt, Artificial Sequence
  Description of Artificial Sequence: Synthetic oligonucleotide
ugcccacucgcuugcugcu

SEQ ID NO: 2350845 - RNA, 19 nt, Artificial Sequence
  Description of Artificial Sequence: Synthetic oligonucleotide
caccgguaguccucacagc

SEQ ID NO: 2350846 - RNA, 19 nt, Artificial Sequence
  Description of Artificial Sequence: Synthetic oligonucleotide
cagagaacccagcagugcu

SEQ ID NO: 2350847 - RNA, 19 nt, Artificial Sequence
  Description of Artificial Sequence: Synthetic oligonucleotide
aaggaucgucagacagcuc

SEQ ID NO: 2350848 - RNA, 19 nt, Artificial Sequence
  Description of Artificial Sequence: Synthetic oligonucleotide
gcucuccaucaucucaaag

SEQ ID NO: 2350849 - RNA, 19 nt, Artificial Sequence
  Description of Artificial Sequence: Synthetic oligonucleotide
ccagaacacgaacccgugg

SEQ ID NO: 2350850 - RNA, 19 nt, Artificial Sequence
  Description of Artificial Sequence: Synthetic oligonucleotide
uauccgauacaggguguua

SEQ ID NO: 2350851 - RNA, 19 nt, Artificial Sequence
  Description of Artificial Sequence: Synthetic oligonucleotide
ggcagccaaucuugcacag

SEQ ID NO: 2350852 - RNA, 19 nt, Artificial Sequence
  Description of Artificial Sequence: Synthetic oligonucleotide
uagcgaucucugugccaag

SEQ ID NO: 2350853 - RNA, 19 nt, Artificial Sequence
  Description of Artificial Sequence: Synthetic oligonucleotide
cugaugcagagggagcuca

SEQ ID NO: 2350854 - RNA, 19 nt, Artificial Sequence
  Description of Artificial Sequence: Synthetic oligonucleotide
ccggcagccaaucuugcac

SEQ ID NO: 2350855 - RNA, 19 nt, Artificial Sequence
  Description of Artificial Sequence: Synthetic oligonucleotide
ccaaucuugcacaggguga

SEQ ID NO: 2350856 - RNA, 19 nt, Artificial Sequence
  Description of Artificial Sequence: Synthetic oligonucleotide
cagagggagcucaagucua

SEQ ID NO: 2350857 - RNA, 19 nt, Artificial Sequence
  Description of Artificial Sequence: Synthetic oligonucleotide
cucaagcggauacagucgu

SEQ ID NO: 2350858 - RNA, 19 nt, Artificial Sequence
  Description of Artificial Sequence: Synthetic oligonucleotide
cagccacggccaucuaccc

SEQ ID NO: 2350859 - RNA, 19 nt, Artificial Sequence
  Description of Artificial Sequence: Synthetic oligonucleotide
gcaaggacauguguagcac

SEQ ID NO: 2350860 - RNA, 19 nt, Artificial Sequence
  Description of Artificial Sequence: Synthetic oligonucleotide
aacucccuugcuggucacu

SEQ ID NO: 2350861 - RNA, 19 nt, Artificial Sequence
  Description of Artificial Sequence: Synthetic oligonucleotide
cccuucaaauucuggggug

SEQ ID NO: 2350862 - RNA, 19 nt, Artificial Sequence
  Description of Artificial Sequence: Synthetic oligonucleotide
cacauuccagcagcagcac

SEQ ID NO: 2350863 - RNA, 19 nt, Artificial Sequence
  Description of Artificial Sequence: Synthetic oligonucleotide
cugguguuggacacuacau

SEQ ID NO: 2350864 - RNA, 19 nt, Artificial Sequence
  Description of Artificial Sequence: Synthetic oligonucleotide
gaacacgaacccgugguau

SEQ ID NO: 2350865 - RNA, 19 nt, Artificial Sequence
  Description of Artificial Sequence: Synthetic oligonucleotide
gcuugacucuggcggaccc

SEQ ID NO: 2350866 - RNA, 19 nt, Artificial Sequence
  Description of Artificial Sequence: Synthetic oligonucleotide
cuccagguagccuucacuu

SEQ ID NO: 2350867 - RNA, 19 nt, Artificial Sequence
  Description of Artificial Sequence: Synthetic oligonucleotide
acaugccggcagccaaucu

SEQ ID NO: 2350868 - RNA, 19 nt, Artificial Sequence
  Description of Artificial Sequence: Synthetic oligonucleotide
acgcugcucuuguuguuaa

SEQ ID NO: 2350869 - RNA, 19 nt, Artificial Sequence
  Description of Artificial Sequence: Synthetic oligonucleotide
uccugaaguguggcaucca

SEQ ID NO: 2350870 - RNA, 19 nt, Artificial Sequence
  Description of Artificial Sequence: Synthetic oligonucleotide
agugcucccgaggacugau

SEQ ID NO: 2350871 - RNA, 19 nt, Artificial Sequence
  Description of Artificial Sequence: Synthetic oligonucleotide
aggucacaacucccuugcu

SEQ ID NO: 2350872 - RNA, 19 nt, Artificial Sequence
  Description of Artificial Sequence: Synthetic oligonucleotide
gcagagggagcucaagucu

SEQ ID NO: 2350873 - RNA, 19 nt, Artificial Sequence
  Description of Artificial Sequence: Synthetic oligonucleotide
gugccaaggucaucaccuc

SEQ ID NO: 2350874 - RNA, 19 nt, Artificial Sequence
  Description of Artificial Sequence: Synthetic oligonucleotide
cuacacucaagcggauaca

SEQ ID NO: 2350875 - RNA, 19 nt, Artificial Sequence
  Description of Artificial Sequence: Synthetic oligonucleotide
ggacugaugcagagggagc

SEQ ID NO: 2350876 - RNA, 19 nt, Artificial Sequence
  Description of Artificial Sequence: Synthetic oligonucleotide
caggguguuagcgaucucu

SEQ ID NO: 2350877 - RNA, 19 nt, Artificial Sequence
  Description of Artificial Sequence: Synthetic oligonucleotide
ucagcgcaaccgacgccau

SEQ ID NO: 2350878 - RNA, 19 nt, Artificial Sequence
  Description of Artificial Sequence: Synthetic oligonucleotide
acaucggucucuaccucaa

SEQ ID NO: 2350879 - RNA, 19 nt, Artificial Sequence
  Description of Artificial Sequence: Synthetic oligonucleotide
ggagcaggccuccuccuga

SEQ ID NO: 2350880 - RNA, 19 nt, Artificial Sequence
  Description of Artificial Sequence: Synthetic oligonucleotide
gggagcucaagucuacgcu

SEQ ID NO: 2350881 - RNA, 19 nt, Artificial Sequence
  Description of Artificial Sequence: Synthetic oligonucleotide
gcagggcacauucucuaca

SEQ ID NO: 2350882 - RNA, 19 nt, Artificial Sequence
  Description of Artificial Sequence: Synthetic oligonucleotide
auacagucguaaggaucgu

SEQ ID NO: 2350883 - RNA, 19 nt, Artificial Sequence
  Description of Artificial Sequence: Synthetic oligonucleotide
cacucgcuugcugcucucc

SEQ ID NO: 2350884 - RNA, 19 nt, Artificial Sequence
  Description of Artificial Sequence: Synthetic oligonucleotide
ccacuaagauguccgugug

SEQ ID NO: 2350885 - RNA, 19 nt, Artificial Sequence
  Description of Artificial Sequence: Synthetic oligonucleotide
augcaccgguaguccucac

SEQ ID NO: 2350886 - RNA, 19 nt, Artificial Sequence
  Description of Artificial Sequence: Synthetic oligonucleotide
ccucaaugcaccgguaguc

SEQ ID NO: 2350887 - RNA, 19 nt, Artificial Sequence
  Description of Artificial Sequence: Synthetic oligonucleotide
gauguccgugugacccagc

SEQ ID NO: 2350888 - RNA, 19 nt, Artificial Sequence
  Description of Artificial Sequence: Synthetic oligonucleotide
gguaguccucacagccacg

SEQ ID NO: 2350889 - RNA, 19 nt, Artificial Sequence
  Description of Artificial Sequence: Synthetic oligonucleotide
gaacgcucugcaaggacau

SEQ ID NO: 2350890 - RNA, 19 nt, Artificial Sequence
  Description of Artificial Sequence: Synthetic oligonucleotide
cgugguauccuuguguuga

SEQ ID NO: 2350891 - RNA, 19 nt, Artificial Sequence
  Description of Artificial Sequence: Synthetic oligonucleotide
gugguauccuuguguugaa

SEQ ID NO: 2350892 - RNA, 19 nt, Artificial Sequence
  Description of Artificial Sequence: Synthetic oligonucleotide
cuuccuugugcagaacgcu

SEQ ID NO: 2350893 - RNA, 19 nt, Artificial Sequence
  Description of Artificial Sequence: Synthetic oligonucleotide
cacaugccggcagccaauc

SEQ ID NO: 2350894 - RNA, 19 nt, Artificial Sequence
  Description of Artificial Sequence: Synthetic oligonucleotide
ccuucacuugguuucucca

SEQ ID NO: 2350895 - RNA, 19 nt, Artificial Sequence
  Description of Artificial Sequence: Synthetic oligonucleotide
acgaacccgugguauccuu

SEQ ID NO: 2350896 - RNA, 19 nt, Artificial Sequence
  Description of Artificial Sequence: Synthetic oligonucleotide
caacucccuugcuggucac

SEQ ID NO: 2350897 - RNA, 19 nt, Artificial Sequence
  Description of Artificial Sequence: Synthetic oligonucleotide
uggcggacccacugguguu

SEQ ID NO: 2350898 - RNA, 19 nt, Artificial Sequence
  Description of Artificial Sequence: Synthetic oligonucleotide
cacugguguuggacacuac

SEQ ID NO: 2350899 - RNA, 19 nt, Artificial Sequence
  Description of Artificial Sequence: Synthetic oligonucleotide
guccccauuucugcuuuca

SEQ ID NO: 2350900 - RNA, 19 nt, Artificial Sequence
  Description of Artificial Sequence: Synthetic oligonucleotide
gcaagcuggccaaggagca

SEQ ID NO: 2350901 - RNA, 19 nt, Artificial Sequence
  Description of Artificial Sequence: Synthetic oligonucleotide
ucuugggccccaggcuuuc

SEQ ID NO: 2350902 - RNA, 19 nt, Artificial Sequence
  Description of Artificial Sequence: Synthetic oligonucleotide
cagcagugcucccgaggac

SEQ ID NO: 2350903 - RNA, 19 nt, Artificial Sequence
  Description of Artificial Sequence: Synthetic oligonucleotide
agccaaucuugcacagggu

SEQ ID NO: 2350904 - RNA, 19 nt, Artificial Sequence
  Description of Artificial Sequence: Synthetic oligonucleotide
cagcuugacucuggcggac

SEQ ID NO: 2350905 - RNA, 19 nt, Artificial Sequence
  Description of Artificial Sequence: Synthetic oligonucleotide
cccacuaagauguccgugu

SEQ ID NO: 2350906 - RNA, 19 nt, Artificial Sequence
  Description of Artificial Sequence: Synthetic oligonucleotide
cgaugcagggcacauucuc

SEQ ID NO: 2350907 - RNA, 19 nt, Artificial Sequence
  Description of Artificial Sequence: Synthetic oligonucleotide
agucuacgcugcucuuguu

SEQ ID NO: 2350908 - RNA, 19 nt, Artificial Sequence
  Description of Artificial Sequence: Synthetic oligonucleotide
ugacgaugcagggcacauu

SEQ ID NO: 2350909 - RNA, 19 nt, Artificial Sequence
  Description of Artificial Sequence: Synthetic oligonucleotide
ggcauuggcugaacaguca

SEQ ID NO: 2350910 - RNA, 19 nt, Artificial Sequence
  Description of Artificial Sequence: Synthetic oligonucleotide
cgguaguccucacagccac

SEQ ID NO: 2350911 - RNA, 19 nt, Artificial Sequence
  Description of Artificial Sequence: Synthetic oligonucleotide
cuugacucuggcggaccca

SEQ ID NO: 2350912 - RNA, 19 nt, Artificial Sequence
  Description of Artificial Sequence: Synthetic oligonucleotide
gcccuucaaauucuggggu

SEQ ID NO: 2350913 - RNA, 19 nt, Artificial Sequence
  Description of Artificial Sequence: Synthetic oligonucleotide
gguagccuucacuugguuu

SEQ ID NO: 2350914 - RNA, 19 nt, Artificial Sequence
  Description of Artificial Sequence: Synthetic oligonucleotide
cgaucucugugccaagguc

SEQ ID NO: 2350915 - RNA, 19 nt, Artificial Sequence
  Description of Artificial Sequence: Synthetic oligonucleotide
caaauucugggguggcauu

SEQ ID NO: 2350916 - RNA, 19 nt, Artificial Sequence
  Description of Artificial Sequence: Synthetic oligonucleotide
ccaaggagcaggccuccuc

SEQ ID NO: 2350917 - RNA, 19 nt, Artificial Sequence
  Description of Artificial Sequence: Synthetic oligonucleotide
ggaucgucagacagcucga

SEQ ID NO: 2350918 - RNA, 19 nt, Artificial Sequence
  Description of Artificial Sequence: Synthetic oligonucleotide
cuaccucaaugcaccggua

SEQ ID NO: 2350919 - RNA, 19 nt, Artificial Sequence
  Description of Artificial Sequence: Synthetic oligonucleotide
ggugacgaugcagggcaca

SEQ ID NO: 2350920 - RNA, 19 nt, Artificial Sequence
  Description of Artificial Sequence: Synthetic oligonucleotide
cagcgcaaccgacgccaug

SEQ ID NO: 2350921 - RNA, 19 nt, Artificial Sequence
  Description of Artificial Sequence: Synthetic oligonucleotide
cuucgggguccccauuucu

SEQ ID NO: 2350922 - RNA, 19 nt, Artificial Sequence
  Description of Artificial Sequence: Synthetic oligonucleotide
ccagcuugacucuggcgga

SEQ ID NO: 2350923 - RNA, 19 nt, Artificial Sequence
  Description of Artificial Sequence: Synthetic oligonucleotide
gcucagcgcaaccgacgcc

SEQ ID NO: 2350924 - RNA, 19 nt, Artificial Sequence
  Description of Artificial Sequence: Synthetic oligonucleotide
gcagugcucccgaggacug

SEQ ID NO: 2350925 - RNA, 19 nt, Artificial Sequence
  Description of Artificial Sequence: Synthetic oligonucleotide
cacggccaucuacccggag

SEQ ID NO: 2350926 - RNA, 19 nt, Artificial Sequence
  Description of Artificial Sequence: Synthetic oligonucleotide
ccgugguauccuuguguug

SEQ ID NO: 2350927 - RNA, 19 nt, Artificial Sequence
  Description of Artificial Sequence: Synthetic oligonucleotide
cagguagccuucacuuggu

SEQ ID NO: 2350928 - RNA, 19 nt, Artificial Sequence
  Description of Artificial Sequence: Synthetic oligonucleotide
ggcggacccacugguguug

SEQ ID NO: 2350929 - RNA, 19 nt, Artificial Sequence
  Description of Artificial Sequence: Synthetic oligonucleotide
cgaacccgugguauccuug

SEQ ID NO: 2350930 - RNA, 19 nt, Artificial Sequence
  Description of Artificial Sequence: Synthetic oligonucleotide
cgcucugcaaggacaugug

SEQ ID NO: 2350931 - RNA, 19 nt, Artificial Sequence
  Description of Artificial Sequence: Synthetic oligonucleotide
cucccacuaagauguccgu

SEQ ID NO: 2350932 - RNA, 19 nt, Artificial Sequence
  Description of Artificial Sequence: Synthetic oligonucleotide
gccaucuacccggaggucu

SEQ ID NO: 2350933 - RNA, 19 nt, Artificial Sequence
  Description of Artificial Sequence: Synthetic oligonucleotide
cgucagacagcucgauguc

SEQ ID NO: 2350934 - RNA, 19 nt, Artificial Sequence
  Description of Artificial Sequence: Synthetic oligonucleotide
gugcucccgaggacugaug

SEQ ID NO: 2350935 - RNA, 19 nt, Artificial Sequence
  Description of Artificial Sequence: Synthetic oligonucleotide
gcagaacgcucugcaagga

SEQ ID NO: 2350936 - RNA, 19 nt, Artificial Sequence
  Description of Artificial Sequence: Synthetic oligonucleotide
gcggacccacugguguugg

SEQ ID NO: 2350937 - RNA, 19 nt, Artificial Sequence
  Description of Artificial Sequence: Synthetic oligonucleotide
ggguguuagcgaucucugu

SEQ ID NO: 2350938 - RNA, 19 nt, Artificial Sequence
  Description of Artificial Sequence: Synthetic oligonucleotide
ggacacuacaucggucucu

SEQ ID NO: 2350939 - RNA, 19 nt, Artificial Sequence
  Description of Artificial Sequence: Synthetic oligonucleotide
caccacaugccggcagcca

SEQ ID NO: 2350940 - RNA, 19 nt, Artificial Sequence
  Description of Artificial Sequence: Synthetic oligonucleotide
ccccauuucugcuuucacu

SEQ ID NO: 2350941 - RNA, 19 nt, Artificial Sequence
  Description of Artificial Sequence: Synthetic oligonucleotide
ggccaaggagcaggccucc

SEQ ID NO: 2350942 - RNA, 19 nt, Artificial Sequence
  Description of Artificial Sequence: Synthetic oligonucleotide
cauccaccacaugccggca

SEQ ID NO: 2350943 - RNA, 19 nt, Artificial Sequence
  Description of Artificial Sequence: Synthetic oligonucleotide
uucggccucuugggcccca

SEQ ID NO: 2350944 - RNA, 19 nt, Artificial Sequence
  Description of Artificial Sequence: Synthetic oligonucleotide
gcgaucucugugccaaggu

SEQ ID NO: 2350945 - RNA, 19 nt, Artificial Sequence
  Description of Artificial Sequence: Synthetic oligonucleotide
gguccccauuucugcuuuc

SEQ ID NO: 2350946 - RNA, 19 nt, Artificial Sequence
  Description of Artificial Sequence: Synthetic oligonucleotide
caccuuccucaugcagguc

SEQ ID NO: 2350947 - RNA, 19 nt, Artificial Sequence
  Description of Artificial Sequence: Synthetic oligonucleotide
caugaacgauguagaccuu

SEQ ID NO: 2350948 - RNA, 19 nt, Artificial Sequence
  Description of Artificial Sequence: Synthetic oligonucleotide
cgcaaccgacgccaugcug

SEQ ID NO: 2350949 - RNA, 19 nt, Artificial Sequence
  Description of Artificial Sequence: Synthetic oligonucleotide
cucuugggccccaggcuuu

SEQ ID NO: 2350950 - RNA, 19 nt, Artificial Sequence
  Description of Artificial Sequence: Synthetic oligonucleotide
gcccuuccccaccuuccuc

SEQ ID NO: 2350951 - RNA, 19 nt, Artificial Sequence
  Description of Artificial Sequence: Synthetic oligonucleotide
ccggaggucuuccugcacu

SEQ ID NO: 2350952 - RNA, 19 nt, Artificial Sequence
  Description of Artificial Sequence: Synthetic oligonucleotide
cacgaacccgugguauccu

SEQ ID NO: 2350953 - RNA, 19 nt, Artificial Sequence
  Description of Artificial Sequence: Synthetic oligonucleotide
cccgugguauccuuguguu

SEQ ID NO: 2350954 - RNA, 19 nt, Artificial Sequence
  Description of Artificial Sequence: Synthetic oligonucleotide
ccgugugacccagcuugac

SEQ ID NO: 2350955 - RNA, 19 nt, Artificial Sequence
  Description of Artificial Sequence: Synthetic oligonucleotide
gggugacgaugcagggcac

SEQ ID NO: 2350956 - RNA, 19 nt, Artificial Sequence
  Description of Artificial Sequence: Synthetic oligonucleotide
ccgacgccaugcugcccgc

SEQ ID NO: 2350957 - RNA, 19 nt, Artificial Sequence
  Description of Artificial Sequence: Synthetic oligonucleotide
ccacugguguuggacacua

SEQ ID NO: 2350958 - RNA, 19 nt, Artificial Sequence
  Description of Artificial Sequence: Synthetic oligonucleotide
cgccaugcugcccgcucgc

SEQ ID NO: 2350959 - RNA, 19 nt, Artificial Sequence
  Description of Artificial Sequence: Synthetic oligonucleotide
ggccccaggcuuucuuccu

SEQ ID NO: 2350960 - RNA, 19 nt, Artificial Sequence
  Description of Artificial Sequence: Synthetic oligonucleotide
cgugugacccagcuugacu

SEQ ID NO: 2350961 - RNA, 19 nt, Artificial Sequence
  Description of Artificial Sequence: Synthetic oligonucleotide
caucggucucuaccucaau

SEQ ID NO: 2350962 - RNA, 19 nt, Artificial Sequence
  Description of Artificial Sequence: Synthetic oligonucleotide
ggguccccauuucugcuuu

SEQ ID NO: 2350963 - RNA, 19 nt, Artificial Sequence
  Description of Artificial Sequence: Synthetic oligonucleotide
gggguccccauuucugcuu

SEQ ID NO: 2350964 - RNA, 19 nt, Artificial Sequence
  Description of Artificial Sequence: Synthetic oligonucleotide
guguagcacuuugcccacu

SEQ ID NO: 2350965 - RNA, 19 nt, Artificial Sequence
  Description of Artificial Sequence: Synthetic oligonucleotide
ccucuugggccccaggcuu

SEQ ID NO: 2350966 - RNA, 19 nt, Artificial Sequence
  Description of Artificial Sequence: Synthetic oligonucleotide
caggauccaggcugcccuu

SEQ ID NO: 2350967 - RNA, 19 nt, Artificial Sequence
  Description of Artificial Sequence: Synthetic oligonucleotide
cuuugcccacucgcuugcu

SEQ ID NO: 2350968 - RNA, 19 nt, Artificial Sequence
  Description of Artificial Sequence: Synthetic oligonucleotide
ccaucuacccggaggucuu

SEQ ID NO: 2350969 - RNA, 19 nt, Artificial Sequence
  Description of Artificial Sequence: Synthetic oligonucleotide
gcccacucgcuugcugcuc

SEQ ID NO: 2350970 - RNA, 19 nt, Artificial Sequence
  Description of Artificial Sequence: Synthetic oligonucleotide
cccacucgcuugcugcucu

SEQ ID NO: 2350971 - RNA, 19 nt, Artificial Sequence
  Description of Artificial Sequence: Synthetic oligonucleotide
ccugcacuccaugaacgau

SEQ ID NO: 2350972 - RNA, 19 nt, Artificial Sequence
  Description of Artificial Sequence: Synthetic oligonucleotide
gcacuccaugaacgaugua

SEQ ID NO: 2350973 - RNA, 19 nt, Artificial Sequence
  Description of Artificial Sequence: Synthetic oligonucleotide
cggauacagucguaaggau

SEQ ID NO: 2350974 - RNA, 19 nt, Artificial Sequence
  Description of Artificial Sequence: Synthetic oligonucleotide
ccacaugccggcagccaau

SEQ ID NO: 2350975 - RNA, 19 nt, Artificial Sequence
  Description of Artificial Sequence: Synthetic oligonucleotide
gcgcaaccgacgccaugcu

SEQ ID NO: 2350976 - RNA, 19 nt, Artificial Sequence
  Description of Artificial Sequence: Synthetic oligonucleotide
cuugggccccaggcuuucu

SEQ ID NO: 2350977 - RNA, 19 nt, Artificial Sequence
  Description of Artificial Sequence: Synthetic oligonucleotide
cccaggcuuucuuccuugu

SEQ ID NO: 2350978 - RNA, 19 nt, Artificial Sequence
  Description of Artificial Sequence: Synthetic oligonucleotide
ccacggccaucuacccgga

SEQ ID NO: 2350979 - RNA, 19 nt, Artificial Sequence
  Description of Artificial Sequence: Synthetic oligonucleotide
acccaaccuucggccucuu

SEQ ID NO: 2350980 - RNA, 19 nt, Artificial Sequence
  Description of Artificial Sequence: Synthetic oligonucleotide
gccaaggagcaggccuccu

SEQ ID NO: 2350981 - RNA, 19 nt, Artificial Sequence
  Description of Artificial Sequence: Synthetic oligonucleotide
cggacccacugguguugga

SEQ ID NO: 2350982 - RNA, 19 nt, Artificial Sequence
  Description of Artificial Sequence: Synthetic oligonucleotide
aaaaguuuagaacagguac

SEQ ID NO: 2350983 - RNA, 19 nt, Artificial Sequence
  Description of Artificial Sequence: Synthetic oligonucleotide
agaacagguaccuagagac

SEQ ID NO: 2350984 - RNA, 19 nt, Artificial Sequence
  Description of Artificial Sequence: Synthetic oligonucleotide
uguguugugagcauuggcg

SEQ ID NO: 2350985 - RNA, 19 nt, Artificial Sequence
  Description of Artificial Sequence: Synthetic oligonucleotide
aaaguuuagaacagguacc

SEQ ID NO: 2350986 - RNA, 19 nt, Artificial Sequence
  Description of Artificial Sequence: Synthetic oligonucleotide
aacaaagucucacacaaga

SEQ ID NO: 2350987 - RNA, 19 nt, Artificial Sequence
  Description of Artificial Sequence: Synthetic oligonucleotide
aauuggguuaccauacugc

SEQ ID NO: 2350988 - RNA, 19 nt, Artificial Sequence
  Description of Artificial Sequence: Synthetic oligonucleotide
augaagauaccuuccaugg

SEQ ID NO: 2350989 - RNA, 19 nt, Artificial Sequence
  Description of Artificial Sequence: Synthetic oligonucleotide
ucauaaaggcacuugagga

SEQ ID NO: 2350990 - RNA, 19 nt, Artificial Sequence
  Description of Artificial Sequence: Synthetic oligonucleotide
guaacuauuggcaucgucg

SEQ ID NO: 2350991 - RNA, 19 nt, Artificial Sequence
  Description of Artificial Sequence: Synthetic oligonucleotide
uggguuaccauacugcuca

SEQ ID NO: 2350992 - RNA, 19 nt, Artificial Sequence
  Description of Artificial Sequence: Synthetic oligonucleotide
uaaucauaaaggcacuuga

SEQ ID NO: 2350993 - RNA, 19 nt, Artificial Sequence
  Description of Artificial Sequence: Synthetic oligonucleotide
uaacuauuggcaucgucgg

SEQ ID NO: 2350994 - RNA, 19 nt, Artificial Sequence
  Description of Artificial Sequence: Synthetic oligonucleotide
uuguagagagaucugcucc

SEQ ID NO: 2350995 - RNA, 19 nt, Artificial Sequence
  Description of Artificial Sequence: Synthetic oligonucleotide
acagaaucccuacccagcc

SEQ ID NO: 2350996 - RNA, 19 nt, Artificial Sequence
  Description of Artificial Sequence: Synthetic oligonucleotide
gagauggcaacauggacag

SEQ ID NO: 2350997 - RNA, 19 nt, Artificial Sequence
  Description of Artificial Sequence: Synthetic oligonucleotide
uuacagcaaauauaaacac

SEQ ID NO: 2350998 - RNA, 19 nt, Artificial Sequence
  Description of Artificial Sequence: Synthetic oligonucleotide
agaaucccuacccagccac

SEQ ID NO: 2350999 - RNA, 19 nt, Artificial Sequence
  Description of Artificial Sequence: Synthetic oligonucleotide
gaggacucuacaaacaaag

SEQ ID NO: 2351000 - RNA, 19 nt, Artificial Sequence
  Description of Artificial Sequence: Synthetic oligonucleotide
ucuacaaacaaagucucac

SEQ ID NO: 2351001 - RNA, 19 nt, Artificial Sequence
  Description of Artificial Sequence: Synthetic oligonucleotide
uucucagaguucaucauga

SEQ ID NO: 2351002 - RNA, 19 nt, Artificial Sequence
  Description of Artificial Sequence: Synthetic oligonucleotide
acuauuggcaucgucggac

SEQ ID NO: 2351003 - RNA, 19 nt, Artificial Sequence
  Description of Artificial Sequence: Synthetic oligonucleotide
augacuuguagagagaucu

SEQ ID NO: 2351004 - RNA, 19 nt, Artificial Sequence
  Description of Artificial Sequence: Synthetic oligonucleotide
uuaaucauaaaggcacuug

SEQ ID NO: 2351005 - RNA, 19 nt, Artificial Sequence
  Description of Artificial Sequence: Synthetic oligonucleotide
uuuuaaucauaaaggcacu

SEQ ID NO: 2351006 - RNA, 19 nt, Artificial Sequence
  Description of Artificial Sequence: Synthetic oligonucleotide
gauggcaacauggacagac

SEQ ID NO: 2351007 - RNA, 19 nt, Artificial Sequence
  Description of Artificial Sequence: Synthetic oligonucleotide
cauaaaggcacuugaggac

SEQ ID NO: 2351008 - RNA, 19 nt, Artificial Sequence
  Description of Artificial Sequence: Synthetic oligonucleotide
ucaccagugaccgacagga

SEQ ID NO: 2351009 - RNA, 19 nt, Artificial Sequence
  Description of Artificial Sequence: Synthetic oligonucleotide
aaguuuagaacagguaccu

SEQ ID NO: 2351010 - RNA, 19 nt, Artificial Sequence
  Description of Artificial Sequence: Synthetic oligonucleotide
ucucacacaagaguggccc

SEQ ID NO: 2351011 - RNA, 19 nt, Artificial Sequence
  Description of Artificial Sequence: Synthetic oligonucleotide
auguguugugagcauuggc

SEQ ID NO: 2351012 - RNA, 19 nt, Artificial Sequence
  Description of Artificial Sequence: Synthetic oligonucleotide
aaucccuacccagccaccc

SEQ ID NO: 2351013 - RNA, 19 nt, Artificial Sequence
  Description of Artificial Sequence: Synthetic oligonucleotide
aguaacuauuggcaucguc

SEQ ID NO: 2351014 - RNA, 19 nt, Artificial Sequence
  Description of Artificial Sequence: Synthetic oligonucleotide
gaauuggguuaccauacug

SEQ ID NO: 2351015 - RNA, 19 nt, Artificial Sequence
  Description of Artificial Sequence: Synthetic oligonucleotide
uccgccaguaacuauuggc

SEQ ID NO: 2351016 - RNA, 19 nt, Artificial Sequence
  Description of Artificial Sequence: Synthetic oligonucleotide
acgaauuggguuaccauac

SEQ ID NO: 2351017 - RNA, 19 nt, Artificial Sequence
  Description of Artificial Sequence: Synthetic oligonucleotide
uguagagagaucugcucca

SEQ ID NO: 2351018 - RNA, 19 nt, Artificial Sequence
  Description of Artificial Sequence: Synthetic oligonucleotide
uaccauacugcucaccagu

SEQ ID NO: 2351019 - RNA, 19 nt, Artificial Sequence
  Description of Artificial Sequence: Synthetic oligonucleotide
caugccgugcaccucaugc

SEQ ID NO: 2351020 - RNA, 19 nt, Artificial Sequence
  Description of Artificial Sequence: Synthetic oligonucleotide
uacugcucaccagugaccg

SEQ ID NO: 2351021 - RNA, 19 nt, Artificial Sequence
  Description of Artificial Sequence: Synthetic oligonucleotide
ucguacuguccacaggucc

SEQ ID NO: 2351022 - RNA, 19 nt, Artificial Sequence
  Description of Artificial Sequence: Synthetic oligonucleotide
cacagaggugcccacaugc

SEQ ID NO: 2351023 - RNA, 19 nt, Artificial Sequence
  Description of Artificial Sequence: Synthetic oligonucleotide
cauacugcucaccagugac

SEQ ID NO: 2351024 - RNA, 19 nt, Artificial Sequence
  Description of Artificial Sequence: Synthetic oligonucleotide
caugcuguccacgaauugg

SEQ ID NO: 2351025 - RNA, 19 nt, Artificial Sequence
  Description of Artificial Sequence: Synthetic oligonucleotide
gacucuacaaacaaagucu

SEQ ID NO: 2351026 - RNA, 19 nt, Artificial Sequence
  Description of Artificial Sequence: Synthetic oligonucleotide
gguaccuagagacagguga

SEQ ID NO: 2351027 - RNA, 19 nt, Artificial Sequence
  Description of Artificial Sequence: Synthetic oligonucleotide
acaagaguggcccuacaga

SEQ ID NO: 2351028 - RNA, 19 nt, Artificial Sequence
  Description of Artificial Sequence: Synthetic oligonucleotide
ccaggcuugaugaagauac

SEQ ID NO: 2351029 - RNA, 19 nt, Artificial Sequence
  Description of Artificial Sequence: Synthetic oligonucleotide
ugggguuacagcaaauaua

SEQ ID NO: 2351030 - RNA, 19 nt, Artificial Sequence
  Description of Artificial Sequence: Synthetic oligonucleotide
auaaaggcacuugaggacu

SEQ ID NO: 2351031 - RNA, 19 nt, Artificial Sequence
  Description of Artificial Sequence: Synthetic oligonucleotide
uccccgaaagcacucaccu

SEQ ID NO: 2351032 - RNA, 19 nt, Artificial Sequence
  Description of Artificial Sequence: Synthetic oligonucleotide
aggugagauggcaacaugg

SEQ ID NO: 2351033 - RNA, 19 nt, Artificial Sequence
  Description of Artificial Sequence: Synthetic oligonucleotide
uguuggagagcggcgacgg

SEQ ID NO: 2351034 - RNA, 19 nt, Artificial Sequence
  Description of Artificial Sequence: Synthetic oligonucleotide
ugucgugugagugcagccg

SEQ ID NO: 2351035 - RNA, 19 nt, Artificial Sequence
  Description of Artificial Sequence: Synthetic oligonucleotide
uauuugaugucgugugagu

SEQ ID NO: 2351036 - RNA, 19 nt, Artificial Sequence
  Description of Artificial Sequence: Synthetic oligonucleotide
auuugaugucgugugagug

SEQ ID NO: 2351037 - RNA, 19 nt, Artificial Sequence
  Description of Artificial Sequence: Synthetic oligonucleotide
agagcaucguacuguccac

SEQ ID NO: 2351038 - RNA, 19 nt, Artificial Sequence
  Description of Artificial Sequence: Synthetic oligonucleotide
uugccggugagcacaugcg

SEQ ID NO: 2351039 - RNA, 19 nt, Artificial Sequence
  Description of Artificial Sequence: Synthetic oligonucleotide
agcacugacccgcagguga

SEQ ID NO: 2351040 - RNA, 19 nt, Artificial Sequence
  Description of Artificial Sequence: Synthetic oligonucleotide
gugaccgacaggaacacag

SEQ ID NO: 2351041 - RNA, 19 nt, Artificial Sequence
  Description of Artificial Sequence: Synthetic oligonucleotide
cuauuggcaucgucggacg

SEQ ID NO: 2351042 - RNA, 19 nt, Artificial Sequence
  Description of Artificial Sequence: Synthetic oligonucleotide
uagagagaucugcuccagg

SEQ ID NO: 2351043 - RNA, 19 nt, Artificial Sequence
  Description of Artificial Sequence: Synthetic oligonucleotide
uuaccauacugcucaccag

SEQ ID NO: 2351044 - RNA, 19 nt, Artificial Sequence
  Description of Artificial Sequence: Synthetic oligonucleotide
ugaugaagauaccuuccau

SEQ ID NO: 2351045 - RNA, 19 nt, Artificial Sequence
  Description of Artificial Sequence: Synthetic oligonucleotide
agaggugcccacaugcugg

SEQ ID NO: 2351046 - RNA, 19 nt, Artificial Sequence
  Description of Artificial Sequence: Synthetic oligonucleotide
gaccgacaggaacacagag

SEQ ID NO: 2351047 - RNA, 19 nt, Artificial Sequence
  Description of Artificial Sequence: Synthetic oligonucleotide
ggacucuacaaacaaaguc

SEQ ID NO: 2351048 - RNA, 19 nt, Artificial Sequence
  Description of Artificial Sequence: Synthetic oligonucleotide
acaugcgugagccgcacug

SEQ ID NO: 2351049 - RNA, 19 nt, Artificial Sequence
  Description of Artificial Sequence: Synthetic oligonucleotide
ucaugacuuguagagagau

SEQ ID NO: 2351050 - RNA, 19 nt, Artificial Sequence
  Description of Artificial Sequence: Synthetic oligonucleotide
agcaucguacuguccacag

SEQ ID NO: 2351051 - RNA, 19 nt, Artificial Sequence
  Description of Artificial Sequence: Synthetic oligonucleotide
gugagcacaugcgugagcc

SEQ ID NO: 2351052 - RNA, 19 nt, Artificial Sequence
  Description of Artificial Sequence: Synthetic oligonucleotide
acccucgccaucuuccccg

SEQ ID NO: 2351053 - RNA, 19 nt, Artificial Sequence
  Description of Artificial Sequence: Synthetic oligonucleotide
uccguauuugaugucgugu

SEQ ID NO: 2351054 - RNA, 19 nt, Artificial Sequence
  Description of Artificial Sequence: Synthetic oligonucleotide
aacuauuggcaucgucgga

SEQ ID NO: 2351055 - RNA, 19 nt, Artificial Sequence
  Description of Artificial Sequence: Synthetic oligonucleotide
gaugucgugugagugcagc

SEQ ID NO: 2351056 - RNA, 19 nt, Artificial Sequence
  Description of Artificial Sequence: Synthetic oligonucleotide
ugacuuguagagagaucug

SEQ ID NO: 2351057 - RNA, 19 nt, Artificial Sequence
  Description of Artificial Sequence: Synthetic oligonucleotide
ggauccguauuugaugucg

SEQ ID NO: 2351058 - RNA, 19 nt, Artificial Sequence
  Description of Artificial Sequence: Synthetic oligonucleotide
acaaagucucacacaagag

SEQ ID NO: 2351059 - RNA, 19 nt, Artificial Sequence
  Description of Artificial Sequence: Synthetic oligonucleotide
cacaagaguggcccuacag

SEQ ID NO: 2351060 - RNA, 19 nt, Artificial Sequence
  Description of Artificial Sequence: Synthetic oligonucleotide
aguguugcccagagcaucg

SEQ ID NO: 2351061 - RNA, 19 nt, Artificial Sequence
  Description of Artificial Sequence: Synthetic oligonucleotide
ugugagugcagccgcacuu

SEQ ID NO: 2351062 - RNA, 19 nt, Artificial Sequence
  Description of Artificial Sequence: Synthetic oligonucleotide
cccgaaagcacucaccucc

SEQ ID NO: 2351063 - RNA, 19 nt, Artificial Sequence
  Description of Artificial Sequence: Synthetic oligonucleotide
agagaucugcuccaggcuu

SEQ ID NO: 2351064 - RNA, 19 nt, Artificial Sequence
  Description of Artificial Sequence: Synthetic oligonucleotide
guuaccgacuguuggccgc

SEQ ID NO: 2351065 - RNA, 19 nt, Artificial Sequence
  Description of Artificial Sequence: Synthetic oligonucleotide
gguaccuccagaucuuccc

SEQ ID NO: 2351066 - RNA, 19 nt, Artificial Sequence
  Description of Artificial Sequence: Synthetic oligonucleotide
auggcugguaccuccagau

SEQ ID NO: 2351067 - RNA, 19 nt, Artificial Sequence
  Description of Artificial Sequence: Synthetic oligonucleotide
ucgucggacgccuccacgc

SEQ ID NO: 2351068 - RNA, 19 nt, Artificial Sequence
  Description of Artificial Sequence: Synthetic oligonucleotide
uauuggcaucgucggacgc

SEQ ID NO: 2351069 - RNA, 19 nt, Artificial Sequence
  Description of Artificial Sequence: Synthetic oligonucleotide
aaguggugcgugugcaggu

SEQ ID NO: 2351070 - RNA, 19 nt, Artificial Sequence
  Description of Artificial Sequence: Synthetic oligonucleotide
caagaguggcccuacagaa

SEQ ID NO: 2351071 - RNA, 19 nt, Artificial Sequence
  Description of Artificial Sequence: Synthetic oligonucleotide
uuccccgaaagcacucacc

SEQ ID NO: 2351072 - RNA, 19 nt, Artificial Sequence
  Description of Artificial Sequence: Synthetic oligonucleotide
uuggcgcuagccaugccgu

SEQ ID NO: 2351073 - RNA, 19 nt, Artificial Sequence
  Description of Artificial Sequence: Synthetic oligonucleotide
ccaguaacuauuggcaucg

SEQ ID NO: 2351074 - RNA, 19 nt, Artificial Sequence
  Description of Artificial Sequence: Synthetic oligonucleotide
guaccuagagacaggugag

SEQ ID NO: 2351075 - RNA, 19 nt, Artificial Sequence
  Description of Artificial Sequence: Synthetic oligonucleotide
uggcaacauggacagacau

SEQ ID NO: 2351076 - RNA, 19 nt, Artificial Sequence
  Description of Artificial Sequence: Synthetic oligonucleotide
uuggacgcgucaccgcugc

SEQ ID NO: 2351077 - RNA, 19 nt, Artificial Sequence
  Description of Artificial Sequence: Synthetic oligonucleotide
gagcacaugcgugagccgc

SEQ ID NO: 2351078 - RNA, 19 nt, Artificial Sequence
  Description of Artificial Sequence: Synthetic oligonucleotide
ucggacgccuccacgccgg

SEQ ID NO: 2351079 - RNA, 19 nt, Artificial Sequence
  Description of Artificial Sequence: Synthetic oligonucleotide
cucggagccgccacgaauc

SEQ ID NO: 2351080 - RNA, 19 nt, Artificial Sequence
  Description of Artificial Sequence: Synthetic oligonucleotide
gugagauggcaacauggac

SEQ ID NO: 2351081 - RNA, 19 nt, Artificial Sequence
  Description of Artificial Sequence: Synthetic oligonucleotide
uuggguuaccauacugcuc

SEQ ID NO: 2351082 - RNA, 19 nt, Artificial Sequence
  Description of Artificial Sequence: Synthetic oligonucleotide
aauccgccaguaacuauug

SEQ ID NO: 2351083 - RNA, 19 nt, Artificial Sequence
  Description of Artificial Sequence: Synthetic oligonucleotide
ugagcacaugcgugagccg

SEQ ID NO: 2351084 - RNA, 19 nt, Artificial Sequence
  Description of Artificial Sequence: Synthetic oligonucleotide
uuguuggagagcggcgacg

SEQ ID NO: 2351085 - RNA, 19 nt, Artificial Sequence
  Description of Artificial Sequence: Synthetic oligonucleotide
ugaccgacaggaacacaga

SEQ ID NO: 2351086 - RNA, 19 nt, Artificial Sequence
  Description of Artificial Sequence: Synthetic oligonucleotide
aguagcgccccggcuaccc

SEQ ID NO: 2351087 - RNA, 19 nt, Artificial Sequence
  Description of Artificial Sequence: Synthetic oligonucleotide
aguucucagaguucaucau

SEQ ID NO: 2351088 - RNA, 19 nt, Artificial Sequence
  Description of Artificial Sequence: Synthetic oligonucleotide
agaucuucccugggguuac

SEQ ID NO: 2351089 - RNA, 19 nt, Artificial Sequence
  Description of Artificial Sequence: Synthetic oligonucleotide
uuggagagcggcgacggga

SEQ ID NO: 2351090 - RNA, 19 nt, Artificial Sequence
  Description of Artificial Sequence: Synthetic oligonucleotide
ugguaccuccagaucuucc

SEQ ID NO: 2351091 - RNA, 19 nt, Artificial Sequence
  Description of Artificial Sequence: Synthetic oligonucleotide
gggguuacagcaaauauaa

SEQ ID NO: 2351092 - RNA, 19 nt, Artificial Sequence
  Description of Artificial Sequence: Synthetic oligonucleotide
gacagacauggcugguacc

SEQ ID NO: 2351093 - RNA, 19 nt, Artificial Sequence
  Description of Artificial Sequence: Synthetic oligonucleotide
acugccugcccacaacgca

SEQ ID NO: 2351094 - RNA, 19 nt, Artificial Sequence
  Description of Artificial Sequence: Synthetic oligonucleotide
gaagcggacgcuggccucg

SEQ ID NO: 2351095 - RNA, 19 nt, Artificial Sequence
  Description of Artificial Sequence: Synthetic oligonucleotide
uugcccagagcaucguacu

SEQ ID NO: 2351096 - RNA, 19 nt, Artificial Sequence
  Description of Artificial Sequence: Synthetic oligonucleotide
gucgugugagugcagccgc

SEQ ID NO: 2351097 - RNA, 19 nt, Artificial Sequence
  Description of Artificial Sequence: Synthetic oligonucleotide
aucgucggacgccuccacg

SEQ ID NO: 2351098 - RNA, 19 nt, Artificial Sequence
  Description of Artificial Sequence: Synthetic oligonucleotide
aggcuugaugaagauaccu

SEQ ID NO: 2351099 - RNA, 19 nt, Artificial Sequence
  Description of Artificial Sequence: Synthetic oligonucleotide
cacagguccaggucgucac

SEQ ID NO: 2351100 - RNA, 19 nt, Artificial Sequence
  Description of Artificial Sequence: Synthetic oligonucleotide
cucaccagugaccgacagg

SEQ ID NO: 2351101 - RNA, 19 nt, Artificial Sequence
  Description of Artificial Sequence: Synthetic oligonucleotide
caugacuuguagagagauc

SEQ ID NO: 2351102 - RNA, 19 nt, Artificial Sequence
  Description of Artificial Sequence: Synthetic oligonucleotide
auccguauuugaugucgug

SEQ ID NO: 2351103 - RNA, 19 nt, Artificial Sequence
  Description of Artificial Sequence: Synthetic oligonucleotide
agccaugccgugcaccuca

SEQ ID NO: 2351104 - RNA, 19 nt, Artificial Sequence
  Description of Artificial Sequence: Synthetic oligonucleotide
guucuugccggugagcaca

SEQ ID NO: 2351105 - RNA, 19 nt, Artificial Sequence
  Description of Artificial Sequence: Synthetic oligonucleotide
accgacuguuggccgcugc

SEQ ID NO: 2351106 - RNA, 19 nt, Artificial Sequence
  Description of Artificial Sequence: Synthetic oligonucleotide
gccgguuaccgacuguugg

SEQ ID NO: 2351107 - RNA, 19 nt, Artificial Sequence
  Description of Artificial Sequence: Synthetic oligonucleotide
ugccggugagcacaugcgu

SEQ ID NO: 2351108 - RNA, 19 nt, Artificial Sequence
  Description of Artificial Sequence: Synthetic oligonucleotide
ugccggauccguauuugau

SEQ ID NO: 2351109 - RNA, 19 nt, Artificial Sequence
  Description of Artificial Sequence: Synthetic oligonucleotide
uggagagcggcgacgggaa

SEQ ID NO: 2351110 - RNA, 19 nt, Artificial Sequence
  Description of Artificial Sequence: Synthetic oligonucleotide
aacgcacugggagcccgcg

SEQ ID NO: 2351111 - RNA, 19 nt, Artificial Sequence
  Description of Artificial Sequence: Synthetic oligonucleotide
cccuacagaaucccuaccc

SEQ ID NO: 2351112 - RNA, 19 nt, Artificial Sequence
  Description of Artificial Sequence: Synthetic oligonucleotide
cugcucaccagugaccgac

SEQ ID NO: 2351113 - RNA, 19 nt, Artificial Sequence
  Description of Artificial Sequence: Synthetic oligonucleotide
gguuaccgacuguuggccg

SEQ ID NO: 2351114 - RNA, 19 nt, Artificial Sequence
  Description of Artificial Sequence: Synthetic oligonucleotide
ucacccucgccaucuuccc

SEQ ID NO: 2351115 - RNA, 19 nt, Artificial Sequence
  Description of Artificial Sequence: Synthetic oligonucleotide
caggucgucacccucgcca

SEQ ID NO: 2351116 - RNA, 19 nt, Artificial Sequence
  Description of Artificial Sequence: Synthetic oligonucleotide
ccguauuugaugucgugug

SEQ ID NO: 2351117 - RNA, 19 nt, Artificial Sequence
  Description of Artificial Sequence: Synthetic oligonucleotide
uggcccuacagaaucccua

SEQ ID NO: 2351118 - RNA, 19 nt, Artificial Sequence
  Description of Artificial Sequence: Synthetic oligonucleotide
guuguuggagagcggcgac

SEQ ID NO: 2351119 - RNA, 19 nt, Artificial Sequence
  Description of Artificial Sequence: Synthetic oligonucleotide
ugcuguccacgaauugggu

SEQ ID NO: 2351120 - RNA, 19 nt, Artificial Sequence
  Description of Artificial Sequence: Synthetic oligonucleotide
guagagagaucugcuccag

SEQ ID NO: 2351121 - RNA, 19 nt, Artificial Sequence
  Description of Artificial Sequence: Synthetic oligonucleotide
aggcacuugaggacucuac

SEQ ID NO: 2351122 - RNA, 19 nt, Artificial Sequence
  Description of Artificial Sequence: Synthetic oligonucleotide
ugaugucgugugagugcag

SEQ ID NO: 2351123 - RNA, 19 nt, Artificial Sequence
  Description of Artificial Sequence: Synthetic oligonucleotide
caggcuugaugaagauacc

SEQ ID NO: 2351124 - RNA, 19 nt, Artificial Sequence
  Description of Artificial Sequence: Synthetic oligonucleotide
uggugcgugugcagguucu

SEQ ID NO: 2351125 - RNA, 19 nt, Artificial Sequence
  Description of Artificial Sequence: Synthetic oligonucleotide
acaacgcacugggagcccg

SEQ ID NO: 2351126 - RNA, 19 nt, Artificial Sequence
  Description of Artificial Sequence: Synthetic oligonucleotide
auccgccaguaacuauugg

SEQ ID NO: 2351127 - RNA, 19 nt, Artificial Sequence
  Description of Artificial Sequence: Synthetic oligonucleotide
cuuugugguggguguucag

SEQ ID NO: 2351128 - RNA, 19 nt, Artificial Sequence
  Description of Artificial Sequence: Synthetic oligonucleotide
cacaugcuggaagcggacg

SEQ ID NO: 2351129 - RNA, 19 nt, Artificial Sequence
  Description of Artificial Sequence: Synthetic oligonucleotide
uucccugggguuacagcaa

SEQ ID NO: 2351130 - RNA, 19 nt, Artificial Sequence
  Description of Artificial Sequence: Synthetic oligonucleotide
ugugcagguucuugccggu

SEQ ID NO: 2351131 - RNA, 19 nt, Artificial Sequence
  Description of Artificial Sequence: Synthetic oligonucleotide
agaguucaucaugacuugu

SEQ ID NO: 2351132 - RNA, 19 nt, Artificial Sequence
  Description of Artificial Sequence: Synthetic oligonucleotide
uuggcaucgucggacgccu

SEQ ID NO: 2351133 - RNA, 19 nt, Artificial Sequence
  Description of Artificial Sequence: Synthetic oligonucleotide
ucggagccgccacgaaucc

SEQ ID NO: 2351134 - RNA, 19 nt, Artificial Sequence
  Description of Artificial Sequence: Synthetic oligonucleotide
ggacagacauggcugguac

SEQ ID NO: 2351135 - RNA, 19 nt, Artificial Sequence
  Description of Artificial Sequence: Synthetic oligonucleotide
uaccccgccgcgacucgcg

SEQ ID NO: 2351136 - RNA, 19 nt, Artificial Sequence
  Description of Artificial Sequence: Synthetic oligonucleotide
agcaccaguagcgccccgg

SEQ ID NO: 2351137 - RNA, 19 nt, Artificial Sequence
  Description of Artificial Sequence: Synthetic oligonucleotide
ccuuccauguguugugagc

SEQ ID NO: 2351138 - RNA, 19 nt, Artificial Sequence
  Description of Artificial Sequence: Synthetic oligonucleotide
ucccuacccagccacccuc

SEQ ID NO: 2351139 - RNA, 19 nt, Artificial Sequence
  Description of Artificial Sequence: Synthetic oligonucleotide
acaggugagauggcaacau

SEQ ID NO: 2351140 - RNA, 19 nt, Artificial Sequence
  Description of Artificial Sequence: Synthetic oligonucleotide
gucggacgccuccacgccg

SEQ ID NO: 2351141 - RNA, 19 nt, Artificial Sequence
  Description of Artificial Sequence: Synthetic oligonucleotide
ugcgugagccgcacugccu

SEQ ID NO: 2351142 - RNA, 19 nt, Artificial Sequence
  Description of Artificial Sequence: Synthetic oligonucleotide
agccgcacugccugcccac

SEQ ID NO: 2351143 - RNA, 19 nt, Artificial Sequence
  Description of Artificial Sequence: Synthetic oligonucleotide
gccggauccguauuugaug

SEQ ID NO: 2351144 - RNA, 19 nt, Artificial Sequence
  Description of Artificial Sequence: Synthetic oligonucleotide
aagaguggcccuacagaau

SEQ ID NO: 2351145 - RNA, 19 nt, Artificial Sequence
  Description of Artificial Sequence: Synthetic oligonucleotide
guuggccgcugccggaucc

SEQ ID NO: 2351146 - RNA, 19 nt, Artificial Sequence
  Description of Artificial Sequence: Synthetic oligonucleotide
ccacgaauccgccaguaac

SEQ ID NO: 2351147 - RNA, 19 nt, Artificial Sequence
  Description of Artificial Sequence: Synthetic oligonucleotide
ucccugggguuacagcaaa

SEQ ID NO: 2351148 - RNA, 19 nt, Artificial Sequence
  Description of Artificial Sequence: Synthetic oligonucleotide
gaacagguaccuagagaca

SEQ ID NO: 2351149 - RNA, 19 nt, Artificial Sequence
  Description of Artificial Sequence: Synthetic oligonucleotide
ucuuccccgaaagcacuca

SEQ ID NO: 2351150 - RNA, 19 nt, Artificial Sequence
  Description of Artificial Sequence: Synthetic oligonucleotide
caccgcugcgcaccgacag

SEQ ID NO: 2351151 - RNA, 19 nt, Artificial Sequence
  Description of Artificial Sequence: Synthetic oligonucleotide
aggacucuacaaacaaagu

SEQ ID NO: 2351152 - RNA, 19 nt, Artificial Sequence
  Description of Artificial Sequence: Synthetic oligonucleotide
gacgcgucaccgcugcgca

SEQ ID NO: 2351153 - RNA, 19 nt, Artificial Sequence
  Description of Artificial Sequence: Synthetic oligonucleotide
uccacgccgguuaccgacu

SEQ ID NO: 2351154 - RNA, 19 nt, Artificial Sequence
  Description of Artificial Sequence: Synthetic oligonucleotide
ucgugugagugcagccgca

SEQ ID NO: 2351155 - RNA, 19 nt, Artificial Sequence
  Description of Artificial Sequence: Synthetic oligonucleotide
aucguacuguccacagguc

SEQ ID NO: 2351156 - RNA, 19 nt, Artificial Sequence
  Description of Artificial Sequence: Synthetic oligonucleotide
caggugagauggcaacaug

SEQ ID NO: 2351157 - RNA, 19 nt, Artificial Sequence
  Description of Artificial Sequence: Synthetic oligonucleotide
ugccugcccacaacgcacu

SEQ ID NO: 2351158 - RNA, 19 nt, Artificial Sequence
  Description of Artificial Sequence: Synthetic oligonucleotide
cuuccccgaaagcacucac

SEQ ID NO: 2351159 - RNA, 19 nt, Artificial Sequence
  Description of Artificial Sequence: Synthetic oligonucleotide
acacagaggugcccacaug

SEQ ID NO: 2351160 - RNA, 19 nt, Artificial Sequence
  Description of Artificial Sequence: Synthetic oligonucleotide
gacgccuccacgccgguua

SEQ ID NO: 2351161 - RNA, 19 nt, Artificial Sequence
  Description of Artificial Sequence: Synthetic oligonucleotide
guuggagagcggcgacggg

SEQ ID NO: 2351162 - RNA, 19 nt, Artificial Sequence
  Description of Artificial Sequence: Synthetic oligonucleotide
cuuggacgcgucaccgcug

SEQ ID NO: 2351163 - RNA, 19 nt, Artificial Sequence
  Description of Artificial Sequence: Synthetic oligonucleotide
ccauguguugugagcauug

SEQ ID NO: 2351164 - RNA, 19 nt, Artificial Sequence
  Description of Artificial Sequence: Synthetic oligonucleotide
gccgccacgaauccgccag

SEQ ID NO: 2351165 - RNA, 19 nt, Artificial Sequence
  Description of Artificial Sequence: Synthetic oligonucleotide
gucaccgcugcgcaccgac

SEQ ID NO: 2351166 - RNA, 19 nt, Artificial Sequence
  Description of Artificial Sequence: Synthetic oligonucleotide
cacgaauccgccaguaacu

SEQ ID NO: 2351167 - RNA, 19 nt, Artificial Sequence
  Description of Artificial Sequence: Synthetic oligonucleotide
ggaaguggugcgugugcag

SEQ ID NO: 2351168 - RNA, 19 nt, Artificial Sequence
  Description of Artificial Sequence: Synthetic oligonucleotide
gccaguaacuauuggcauc

SEQ ID NO: 2351169 - RNA, 19 nt, Artificial Sequence
  Description of Artificial Sequence: Synthetic oligonucleotide
aagcggacgcuggccucgc

SEQ ID NO: 2351170 - RNA, 19 nt, Artificial Sequence
  Description of Artificial Sequence: Synthetic oligonucleotide
gaaucccuacccagccacc

SEQ ID NO: 2351171 - RNA, 19 nt, Artificial Sequence
  Description of Artificial Sequence: Synthetic oligonucleotide
ccagugaccgacaggaaca

SEQ ID NO: 2351172 - RNA, 19 nt, Artificial Sequence
  Description of Artificial Sequence: Synthetic oligonucleotide
aucuuccccgaaagcacuc

SEQ ID NO: 2351173 - RNA, 19 nt, Artificial Sequence
  Description of Artificial Sequence: Synthetic oligonucleotide
gcaucguacuguccacagg

SEQ ID NO: 2351174 - RNA, 19 nt, Artificial Sequence
  Description of Artificial Sequence: Synthetic oligonucleotide
agcauuggcgcuagccaug

SEQ ID NO: 2351175 - RNA, 19 nt, Artificial Sequence
  Description of Artificial Sequence: Synthetic oligonucleotide
uccauguguugugagcauu

SEQ ID NO: 2351176 - RNA, 19 nt, Artificial Sequence
  Description of Artificial Sequence: Synthetic oligonucleotide
gacgcuggccucgcgcucc

SEQ ID NO: 2351177 - RNA, 19 nt, Artificial Sequence
  Description of Artificial Sequence: Synthetic oligonucleotide
gaguggcccuacagaaucc

SEQ ID NO: 2351178 - RNA, 19 nt, Artificial Sequence
  Description of Artificial Sequence: Synthetic oligonucleotide
gugcaccucaugcugucca

SEQ ID NO: 2351179 - RNA, 19 nt, Artificial Sequence
  Description of Artificial Sequence: Synthetic oligonucleotide
cucgcgcucccaguguugc

SEQ ID NO: 2351180 - RNA, 19 nt, Artificial Sequence
  Description of Artificial Sequence: Synthetic oligonucleotide
ggcccuacagaaucccuac

SEQ ID NO: 2351181 - RNA, 19 nt, Artificial Sequence
  Description of Artificial Sequence: Synthetic oligonucleotide
gaacacagaggugcccaca

SEQ ID NO: 2351182 - RNA, 19 nt, Artificial Sequence
  Description of Artificial Sequence: Synthetic oligonucleotide
ccgguuaccgacuguuggc

SEQ ID NO: 2351183 - RNA, 19 nt, Artificial Sequence
  Description of Artificial Sequence: Synthetic oligonucleotide
acugacccgcaggugacga

SEQ ID NO: 2351184 - RNA, 19 nt, Artificial Sequence
  Description of Artificial Sequence: Synthetic oligonucleotide
uuggccgcugccggauccg

SEQ ID NO: 2351185 - RNA, 19 nt, Artificial Sequence
  Description of Artificial Sequence: Synthetic oligonucleotide
cuagccaugccgugcaccu

SEQ ID NO: 2351186 - RNA, 19 nt, Artificial Sequence
  Description of Artificial Sequence: Synthetic oligonucleotide
aucccuacccagccacccu

SEQ ID NO: 2351187 - RNA, 19 nt, Artificial Sequence
  Description of Artificial Sequence: Synthetic oligonucleotide
cacccucccucccuucacc

SEQ ID NO: 2351188 - RNA, 19 nt, Artificial Sequence
  Description of Artificial Sequence: Synthetic oligonucleotide
acacaagaguggcccuaca

SEQ ID NO: 2351189 - RNA, 19 nt, Artificial Sequence
  Description of Artificial Sequence: Synthetic oligonucleotide
acgccuccacgccgguuac

SEQ ID NO: 2351190 - RNA, 19 nt, Artificial Sequence
  Description of Artificial Sequence: Synthetic oligonucleotide
ucaccgcugcgcaccgaca

SEQ ID NO: 2351191 - RNA, 19 nt, Artificial Sequence
  Description of Artificial Sequence: Synthetic oligonucleotide
ccggcgcuggccuuggacg

SEQ ID NO: 2351192 - RNA, 19 nt, Artificial Sequence
  Description of Artificial Sequence: Synthetic oligonucleotide
cugcgcaccgacagcacca

SEQ ID NO: 2351193 - RNA, 19 nt, Artificial Sequence
  Description of Artificial Sequence: Synthetic oligonucleotide
ugugagcauuggcgcuagc

SEQ ID NO: 2351194 - RNA, 19 nt, Artificial Sequence
  Description of Artificial Sequence: Synthetic oligonucleotide
ggcaucgucggacgccucc

SEQ ID NO: 2351195 - RNA, 19 nt, Artificial Sequence
  Description of Artificial Sequence: Synthetic oligonucleotide
cauggcugguaccuccaga

SEQ ID NO: 2351196 - RNA, 19 nt, Artificial Sequence
  Description of Artificial Sequence: Synthetic oligonucleotide
ccgccaguaacuauuggca

SEQ ID NO: 2351197 - RNA, 19 nt, Artificial Sequence
  Description of Artificial Sequence: Synthetic oligonucleotide
gagcaucguacuguccaca

SEQ ID NO: 2351198 - RNA, 19 nt, Artificial Sequence
  Description of Artificial Sequence: Synthetic oligonucleotide
acgaauccgccaguaacua

SEQ ID NO: 2351199 - RNA, 19 nt, Artificial Sequence
  Description of Artificial Sequence: Synthetic oligonucleotide
ggugagcacaugcgugagc

SEQ ID NO: 2351200 - RNA, 19 nt, Artificial Sequence
  Description of Artificial Sequence: Synthetic oligonucleotide
cacuuugugguggguguuc

SEQ ID NO: 2351201 - RNA, 19 nt, Artificial Sequence
  Description of Artificial Sequence: Synthetic oligonucleotide
ucccuucacccauccaguu

SEQ ID NO: 2351202 - RNA, 19 nt, Artificial Sequence
  Description of Artificial Sequence: Synthetic oligonucleotide
caacgcacugggagcccgc

SEQ ID NO: 2351203 - RNA, 19 nt, Artificial Sequence
  Description of Artificial Sequence: Synthetic oligonucleotide
acgggaaguggugcgugug

SEQ ID NO: 2351204 - RNA, 19 nt, Artificial Sequence
  Description of Artificial Sequence: Synthetic oligonucleotide
gguuguuggagagcggcga

SEQ ID NO: 2351205 - RNA, 19 nt, Artificial Sequence
  Description of Artificial Sequence: Synthetic oligonucleotide
acucaccuccugguuguug

SEQ ID NO: 2351206 - RNA, 19 nt, Artificial Sequence
  Description of Artificial Sequence: Synthetic oligonucleotide
ggccuuggacgcgucaccg

SEQ ID NO: 2351207 - RNA, 19 nt, Artificial Sequence
  Description of Artificial Sequence: Synthetic oligonucleotide
cugacccgcaggugacgag

SEQ ID NO: 2351208 - RNA, 19 nt, Artificial Sequence
  Description of Artificial Sequence: Synthetic oligonucleotide
gcgugagccgcacugccug

SEQ ID NO: 2351209 - RNA, 19 nt, Artificial Sequence
  Description of Artificial Sequence: Synthetic oligonucleotide
gguuaccauacugcucacc

SEQ ID NO: 2351210 - RNA, 19 nt, Artificial Sequence
  Description of Artificial Sequence: Synthetic oligonucleotide
gcgugugcagguucuugcc

SEQ ID NO: 2351211 - RNA, 19 nt, Artificial Sequence
  Description of Artificial Sequence: Synthetic oligonucleotide
cugggguuacagcaaauau

SEQ ID NO: 2351212 - RNA, 19 nt, Artificial Sequence
  Description of Artificial Sequence: Synthetic oligonucleotide
gacucgcgccccgcaaucc

SEQ ID NO: 2351213 - RNA, 19 nt, Artificial Sequence
  Description of Artificial Sequence: Synthetic oligonucleotide
agcggcgacgggaaguggu

SEQ ID NO: 2351214 - RNA, 19 nt, Artificial Sequence
  Description of Artificial Sequence: Synthetic oligonucleotide
guggugcgugugcagguuc

SEQ ID NO: 2351215 - RNA, 19 nt, Artificial Sequence
  Description of Artificial Sequence: Synthetic oligonucleotide
caucuuccccgaaagcacu

SEQ ID NO: 2351216 - RNA, 19 nt, Artificial Sequence
  Description of Artificial Sequence: Synthetic oligonucleotide
gcugcgcaccgacagcacc

SEQ ID NO: 2351217 - RNA, 19 nt, Artificial Sequence
  Description of Artificial Sequence: Synthetic oligonucleotide
gauccguauuugaugucgu

SEQ ID NO: 2351218 - RNA, 19 nt, Artificial Sequence
  Description of Artificial Sequence: Synthetic oligonucleotide
uguuggccgcugccggauc

SEQ ID NO: 2351219 - RNA, 19 nt, Artificial Sequence
  Description of Artificial Sequence: Synthetic oligonucleotide
uggcgcuagccaugccgug

SEQ ID NO: 2351220 - RNA, 19 nt, Artificial Sequence
  Description of Artificial Sequence: Synthetic oligonucleotide
acgcgucaccgcugcgcac

SEQ ID NO: 2351221 - RNA, 19 nt, Artificial Sequence
  Description of Artificial Sequence: Synthetic oligonucleotide
gcucaccagugaccgacag

SEQ ID NO: 2351222 - RNA, 19 nt, Artificial Sequence
  Description of Artificial Sequence: Synthetic oligonucleotide
cagaaucccuacccagcca

SEQ ID NO: 2351223 - RNA, 19 nt, Artificial Sequence
  Description of Artificial Sequence: Synthetic oligonucleotide
gccuuccauguguugugag

SEQ ID NO: 2351224 - RNA, 19 nt, Artificial Sequence
  Description of Artificial Sequence: Synthetic oligonucleotide
cacccguccucggagccgc

SEQ ID NO: 2351225 - RNA, 19 nt, Artificial Sequence
  Description of Artificial Sequence: Synthetic oligonucleotide
cgugugcagguucuugccg

SEQ ID NO: 2351226 - RNA, 19 nt, Artificial Sequence
  Description of Artificial Sequence: Synthetic oligonucleotide
cacugacccgcaggugacg

SEQ ID NO: 2351227 - RNA, 19 nt, Artificial Sequence
  Description of Artificial Sequence: Synthetic oligonucleotide
guagcgccccggcuacccc

SEQ ID NO: 2351228 - RNA, 19 nt, Artificial Sequence
  Description of Artificial Sequence: Synthetic oligonucleotide
caucgucggacgccuccac

SEQ ID NO: 2351229 - RNA, 19 nt, Artificial Sequence
  Description of Artificial Sequence: Synthetic oligonucleotide
agugaccgacaggaacaca

SEQ ID NO: 2351230 - RNA, 19 nt, Artificial Sequence
  Description of Artificial Sequence: Synthetic oligonucleotide
cugccggauccguauuuga

SEQ ID NO: 2351231 - RNA, 19 nt, Artificial Sequence
  Description of Artificial Sequence: Synthetic oligonucleotide
gcuagccaugccgugcacc

SEQ ID NO: 2351232 - RNA, 19 nt, Artificial Sequence
  Description of Artificial Sequence: Synthetic oligonucleotide
cgcacugggagcccgcgcg

SEQ ID NO: 2351233 - RNA, 19 nt, Artificial Sequence
  Description of Artificial Sequence: Synthetic oligonucleotide
agguaccuagagacaggug

SEQ ID NO: 2351234 - RNA, 19 nt, Artificial Sequence
  Description of Artificial Sequence: Synthetic oligonucleotide
ucgcgcucccaguguugcc

SEQ ID NO: 2351235 - RNA, 19 nt, Artificial Sequence
  Description of Artificial Sequence: Synthetic oligonucleotide
agcacaugcgugagccgca

SEQ ID NO: 2351236 - RNA, 19 nt, Artificial Sequence
  Description of Artificial Sequence: Synthetic oligonucleotide
cugguaccuccagaucuuc

SEQ ID NO: 2351237 - RNA, 19 nt, Artificial Sequence
  Description of Artificial Sequence: Synthetic oligonucleotide
cccagagcaucguacuguc

SEQ ID NO: 2351238 - RNA, 19 nt, Artificial Sequence
  Description of Artificial Sequence: Synthetic oligonucleotide
cacugggagcccgcgcggg

SEQ ID NO: 2351239 - RNA, 19 nt, Artificial Sequence
  Description of Artificial Sequence: Synthetic oligonucleotide
cauuggcgcuagccaugcc

SEQ ID NO: 2351240 - RNA, 19 nt, Artificial Sequence
  Description of Artificial Sequence: Synthetic oligonucleotide
cacaacgcacugggagccc

SEQ ID NO: 2351241 - RNA, 19 nt, Artificial Sequence
  Description of Artificial Sequence: Synthetic oligonucleotide
ggcgcuagccaugccgugc

SEQ ID NO: 2351242 - RNA, 19 nt, Artificial Sequence
  Description of Artificial Sequence: Synthetic oligonucleotide
ggacgcgucaccgcugcgc

SEQ ID NO: 2351243 - RNA, 19 nt, Artificial Sequence
  Description of Artificial Sequence: Synthetic oligonucleotide
acgccgguuaccgacuguu

SEQ ID NO: 2351244 - RNA, 19 nt, Artificial Sequence
  Description of Artificial Sequence: Synthetic oligonucleotide
cagaucuucccugggguua

SEQ ID NO: 2351245 - RNA, 19 nt, Artificial Sequence
  Description of Artificial Sequence: Synthetic oligonucleotide
gacgagcccggcgcuggcc

SEQ ID NO: 2351246 - RNA, 19 nt, Artificial Sequence
  Description of Artificial Sequence: Synthetic oligonucleotide
gccggugagcacaugcgug

SEQ ID NO: 2351247 - RNA, 19 nt, Artificial Sequence
  Description of Artificial Sequence: Synthetic oligonucleotide
aguggugcgugugcagguu

SEQ ID NO: 2351248 - RNA, 19 nt, Artificial Sequence
  Description of Artificial Sequence: Synthetic oligonucleotide
ccgacuguuggccgcugcc

SEQ ID NO: 2351249 - RNA, 19 nt, Artificial Sequence
  Description of Artificial Sequence: Synthetic oligonucleotide
ccagagcaucguacugucc

SEQ ID NO: 2351250 - RNA, 19 nt, Artificial Sequence
  Description of Artificial Sequence: Synthetic oligonucleotide
gcccuacagaaucccuacc

SEQ ID NO: 2351251 - RNA, 19 nt, Artificial Sequence
  Description of Artificial Sequence: Synthetic oligonucleotide
gcaccaguagcgccccggc

SEQ ID NO: 2351252 - RNA, 19 nt, Artificial Sequence
  Description of Artificial Sequence: Synthetic oligonucleotide
agcggacgcuggccucgcg

SEQ ID NO: 2351253 - RNA, 19 nt, Artificial Sequence
  Description of Artificial Sequence: Synthetic oligonucleotide
gucgucacccucgccaucu

SEQ ID NO: 2351254 - RNA, 19 nt, Artificial Sequence
  Description of Artificial Sequence: Synthetic oligonucleotide
gcugccggauccguauuug

SEQ ID NO: 2351255 - RNA, 19 nt, Artificial Sequence
  Description of Artificial Sequence: Synthetic oligonucleotide
agccgccacgaauccgcca

SEQ ID NO: 2351256 - RNA, 19 nt, Artificial Sequence
  Description of Artificial Sequence: Synthetic oligonucleotide
gagcggcgacgggaagugg

SEQ ID NO: 2351257 - RNA, 19 nt, Artificial Sequence
  Description of Artificial Sequence: Synthetic oligonucleotide
ccaguagcgccccggcuac

SEQ ID NO: 2351258 - RNA, 19 nt, Artificial Sequence
  Description of Artificial Sequence: Synthetic oligonucleotide
gcacugggagcccgcgcgg

SEQ ID NO: 2351259 - RNA, 19 nt, Artificial Sequence
  Description of Artificial Sequence: Synthetic oligonucleotide
gagccgccacgaauccgcc

SEQ ID NO: 2351260 - RNA, 19 nt, Artificial Sequence
  Description of Artificial Sequence: Synthetic oligonucleotide
gcggacgcuggccucgcgc

SEQ ID NO: 2351261 - RNA, 19 nt, Artificial Sequence
  Description of Artificial Sequence: Synthetic oligonucleotide
ccggauccguauuugaugu

SEQ ID NO: 2351262 - RNA, 19 nt, Artificial Sequence
  Description of Artificial Sequence: Synthetic oligonucleotide
ccggugagcacaugcguga

SEQ ID NO: 2351263 - RNA, 19 nt, Artificial Sequence
  Description of Artificial Sequence: Synthetic oligonucleotide
ggagagcggcgacgggaag

SEQ ID NO: 2351264 - RNA, 19 nt, Artificial Sequence
  Description of Artificial Sequence: Synthetic oligonucleotide
cguauuugaugucguguga

SEQ ID NO: 2351265 - RNA, 19 nt, Artificial Sequence
  Description of Artificial Sequence: Synthetic oligonucleotide
cucacacaagaguggcccu

SEQ ID NO: 2351266 - RNA, 19 nt, Artificial Sequence
  Description of Artificial Sequence: Synthetic oligonucleotide
cuaccccgccgcgacucgc

SEQ ID NO: 2351267 - RNA, 19 nt, Artificial Sequence
  Description of Artificial Sequence: Synthetic oligonucleotide
ucuugccggugagcacaug

SEQ ID NO: 2351268 - RNA, 19 nt, Artificial Sequence
  Description of Artificial Sequence: Synthetic oligonucleotide
gccuuggacgcgucaccgc

SEQ ID NO: 2351269 - RNA, 19 nt, Artificial Sequence
  Description of Artificial Sequence: Synthetic oligonucleotide
gcuaccccgccgcgacucg

SEQ ID NO: 2351270 - RNA, 19 nt, Artificial Sequence
  Description of Artificial Sequence: Synthetic oligonucleotide
cgguuaccgacuguuggcc

SEQ ID NO: 2351271 - RNA, 19 nt, Artificial Sequence
  Description of Artificial Sequence: Synthetic oligonucleotide
cccuacccagccacccucc

SEQ ID NO: 2351272 - RNA, 19 nt, Artificial Sequence
  Description of Artificial Sequence: Synthetic oligonucleotide
uaccgacuguuggccgcug

SEQ ID NO: 2351273 - RNA, 19 nt, Artificial Sequence
  Description of Artificial Sequence: Synthetic oligonucleotide
agauggcaacauggacaga

SEQ ID NO: 2351274 - RNA, 19 nt, Artificial Sequence
  Description of Artificial Sequence: Synthetic oligonucleotide
ggguuaccauacugcucac

SEQ ID NO: 2351275 - RNA, 19 nt, Artificial Sequence
  Description of Artificial Sequence: Synthetic oligonucleotide
caugcuggaagcggacgcu

SEQ ID NO: 2351276 - RNA, 19 nt, Artificial Sequence
  Description of Artificial Sequence: Synthetic oligonucleotide
guccucggagccgccacga

SEQ ID NO: 2351277 - RNA, 19 nt, Artificial Sequence
  Description of Artificial Sequence: Synthetic oligonucleotide
ucgucacccucgccaucuu

SEQ ID NO: 2351278 - RNA, 19 nt, Artificial Sequence
  Description of Artificial Sequence: Synthetic oligonucleotide
cgggaaguggugcgugugc

SEQ ID NO: 2351279 - RNA, 19 nt, Artificial Sequence
  Description of Artificial Sequence: Synthetic oligonucleotide
gcgcuagccaugccgugca

SEQ ID NO: 2351280 - RNA, 19 nt, Artificial Sequence
  Description of Artificial Sequence: Synthetic oligonucleotide
ggcgcuggccuuggacgcg

SEQ ID NO: 2351281 - RNA, 19 nt, Artificial Sequence
  Description of Artificial Sequence: Synthetic oligonucleotide
cgacuguuggccgcugccg

SEQ ID NO: 2351282 - RNA, 19 nt, Artificial Sequence
  Description of Artificial Sequence: Synthetic oligonucleotide
gcuguccacgaauuggguu

SEQ ID NO: 2351283 - RNA, 19 nt, Artificial Sequence
  Description of Artificial Sequence: Synthetic oligonucleotide
ccuacccagccacccuccc

SEQ ID NO: 2351284 - RNA, 19 nt, Artificial Sequence
  Description of Artificial Sequence: Synthetic oligonucleotide
uggcaucgucggacgccuc

SEQ ID NO: 2351285 - RNA, 19 nt, Artificial Sequence
  Description of Artificial Sequence: Synthetic oligonucleotide
gcgucaccgcugcgcaccg

SEQ ID NO: 2351286 - RNA, 19 nt, Artificial Sequence
  Description of Artificial Sequence: Synthetic oligonucleotide
gcacccguccucggagccg

SEQ ID NO: 2351287 - RNA, 19 nt, Artificial Sequence
  Description of Artificial Sequence: Synthetic oligonucleotide
gccccggcuaccccgccgc

SEQ ID NO: 2351288 - RNA, 19 nt, Artificial Sequence
  Description of Artificial Sequence: Synthetic oligonucleotide
gcacugacccgcaggugac

SEQ ID NO: 2351289 - RNA, 19 nt, Artificial Sequence
  Description of Artificial Sequence: Synthetic oligonucleotide
ccgcacuuuguggugggug

SEQ ID NO: 2351290 - RNA, 19 nt, Artificial Sequence
  Description of Artificial Sequence: Synthetic oligonucleotide
ccggcuaccccgccgcgac

SEQ ID NO: 2351291 - RNA, 19 nt, Artificial Sequence
  Description of Artificial Sequence: Synthetic oligonucleotide
gccacgaauccgccaguaa

SEQ ID NO: 2351292 - RNA, 19 nt, Artificial Sequence
  Description of Artificial Sequence: Synthetic oligonucleotide
caccagugaccgacaggaa

SEQ ID NO: 2351293 - RNA, 19 nt, Artificial Sequence
  Description of Artificial Sequence: Synthetic oligonucleotide
ggcuaccccgccgcgacuc

SEQ ID NO: 2351294 - RNA, 19 nt, Artificial Sequence
  Description of Artificial Sequence: Synthetic oligonucleotide
uggccgcugccggauccgu

SEQ ID NO: 2351295 - RNA, 19 nt, Artificial Sequence
  Description of Artificial Sequence: Synthetic oligonucleotide
gcggcgacgggaaguggug

SEQ ID NO: 2351296 - RNA, 19 nt, Artificial Sequence
  Description of Artificial Sequence: Synthetic oligonucleotide
cgcgucaccgcugcgcacc

SEQ ID NO: 2351297 - RNA, 19 nt, Artificial Sequence
  Description of Artificial Sequence: Synthetic oligonucleotide
agcccgcgcgggcacccgu

SEQ ID NO: 2351298 - RNA, 19 nt, Artificial Sequence
  Description of Artificial Sequence: Synthetic oligonucleotide
ccccgaaagcacucaccuc

SEQ ID NO: 2351299 - RNA, 19 nt, Artificial Sequence
  Description of Artificial Sequence: Synthetic oligonucleotide
cuacccagccacccucccu

SEQ ID NO: 2351300 - RNA, 19 nt, Artificial Sequence
  Description of Artificial Sequence: Synthetic oligonucleotide
gagcccgcgcgggcacccg

SEQ ID NO: 2351301 - RNA, 19 nt, Artificial Sequence
  Description of Artificial Sequence: Synthetic oligonucleotide
ccgugcaccucaugcuguc

SEQ ID NO: 2351302 - RNA, 19 nt, Artificial Sequence
  Description of Artificial Sequence: Synthetic oligonucleotide
gccacccucccucccuuca

SEQ ID NO: 2351303 - RNA, 19 nt, Artificial Sequence
  Description of Artificial Sequence: Synthetic oligonucleotide
ccugggguuacagcaaaua

SEQ ID NO: 2351304 - RNA, 19 nt, Artificial Sequence
  Description of Artificial Sequence: Synthetic oligonucleotide
cgucggacgccuccacgcc

SEQ ID NO: 2351305 - RNA, 19 nt, Artificial Sequence
  Description of Artificial Sequence: Synthetic oligonucleotide
caguagcgccccggcuacc

SEQ ID NO: 2351306 - RNA, 19 nt, Artificial Sequence
  Description of Artificial Sequence: Synthetic oligonucleotide
cccggcgcuggccuuggac

SEQ ID NO: 2351307 - RNA, 19 nt, Artificial Sequence
  Description of Artificial Sequence: Synthetic oligonucleotide
gugagugcagccgcacuuu

SEQ ID NO: 2351308 - RNA, 19 nt, Artificial Sequence
  Description of Artificial Sequence: Synthetic oligonucleotide
cuccaggcuugaugaagau

SEQ ID NO: 2351309 - RNA, 19 nt, Artificial Sequence
  Description of Artificial Sequence: Synthetic oligonucleotide
ccucaugcuguccacgaau

SEQ ID NO: 2351310 - RNA, 19 nt, Artificial Sequence
  Description of Artificial Sequence: Synthetic oligonucleotide
ccucgcgcucccaguguug

SEQ ID NO: 2351311 - RNA, 19 nt, Artificial Sequence
  Description of Artificial Sequence: Synthetic oligonucleotide
gcccagagcaucguacugu

SEQ ID NO: 2351312 - RNA, 19 nt, Artificial Sequence
  Description of Artificial Sequence: Synthetic oligonucleotide
ccuuggacgcgucaccgcu

SEQ ID NO: 2351313 - RNA, 19 nt, Artificial Sequence
  Description of Artificial Sequence: Synthetic oligonucleotide
gcacaugcgugagccgcac

SEQ ID NO: 2351314 - RNA, 19 nt, Artificial Sequence
  Description of Artificial Sequence: Synthetic oligonucleotide
ggucgucacccucgccauc

SEQ ID NO: 2351315 - RNA, 19 nt, Artificial Sequence
  Description of Artificial Sequence: Synthetic oligonucleotide
cgggcacccguccucggag

SEQ ID NO: 2351316 - RNA, 19 nt, Artificial Sequence
  Description of Artificial Sequence: Synthetic oligonucleotide
gcgcgggcacccguccucg

SEQ ID NO: 2351317 - RNA, 19 nt, Artificial Sequence
  Description of Artificial Sequence: Synthetic oligonucleotide
cgugagccgcacugccugc

SEQ ID NO: 2351318 - RNA, 19 nt, Artificial Sequence
  Description of Artificial Sequence: Synthetic oligonucleotide
cguccucggagccgccacg

SEQ ID NO: 2351319 - RNA, 19 nt, Artificial Sequence
  Description of Artificial Sequence: Synthetic oligonucleotide
ccguccucggagccgccac

SEQ ID NO: 2351320 - RNA, 19 nt, Artificial Sequence
  Description of Artificial Sequence: Synthetic oligonucleotide
cgugugagugcagccgcac

SEQ ID NO: 2351321 - RNA, 19 nt, Artificial Sequence
  Description of Artificial Sequence: Synthetic oligonucleotide
gcgcucccaguguugccca

SEQ ID NO: 2351322 - RNA, 19 nt, Artificial Sequence
  Description of Artificial Sequence: Synthetic oligonucleotide
ccacgccgguuaccgacug

SEQ ID NO: 2351323 - RNA, 19 nt, Artificial Sequence
  Description of Artificial Sequence: Synthetic oligonucleotide
ggagcccgcgcgggcaccc

SEQ ID NO: 2351324 - RNA, 19 nt, Artificial Sequence
  Description of Artificial Sequence: Synthetic oligonucleotide
ccacagguccaggucguca

SEQ ID NO: 2351325 - RNA, 19 nt, Artificial Sequence
  Description of Artificial Sequence: Synthetic oligonucleotide
cggauccguauuugauguc

SEQ ID NO: 2351326 - RNA, 19 nt, Artificial Sequence
  Description of Artificial Sequence: Synthetic oligonucleotide
gccgcugccggauccguau

SEQ ID NO: 2351327 - RNA, 19 nt, Artificial Sequence
  Description of Artificial Sequence: Synthetic oligonucleotide
cgugcaccucaugcugucc

SEQ ID NO: 2351328 - RNA, 19 nt, Artificial Sequence
  Description of Artificial Sequence: Synthetic oligonucleotide
gcucccaguguugcccaga

SEQ ID NO: 2351329 - RNA, 19 nt, Artificial Sequence
  Description of Artificial Sequence: Synthetic oligonucleotide
gcgggcacccguccucgga

SEQ ID NO: 2351330 - RNA, 19 nt, Artificial Sequence
  Description of Artificial Sequence: Synthetic oligonucleotide
cgccgguuaccgacuguug

SEQ ID NO: 2351331 - RNA, 19 nt, Artificial Sequence
  Description of Artificial Sequence: Synthetic oligonucleotide
cggugagcacaugcgugag

SEQ ID NO: 2351332 - RNA, 19 nt, Artificial Sequence
  Description of Artificial Sequence: Synthetic oligonucleotide
guguugcccagagcaucgu

SEQ ID NO: 2351333 - RNA, 19 nt, Artificial Sequence
  Description of Artificial Sequence: Synthetic oligonucleotide
ccgaaagcacucaccuccu

SEQ ID NO: 2351334 - RNA, 19 nt, Artificial Sequence
  Description of Artificial Sequence: Synthetic oligonucleotide
ccaugccgugcaccucaug

SEQ ID NO: 2351335 - RNA, 19 nt, Artificial Sequence
  Description of Artificial Sequence: Synthetic oligonucleotide
cacaugcgugagccgcacu

SEQ ID NO: 2351336 - RNA, 19 nt, Artificial Sequence
  Description of Artificial Sequence: Synthetic oligonucleotide
cuguuggccgcugccggau

SEQ ID NO: 2351337 - RNA, 19 nt, Artificial Sequence
  Description of Artificial Sequence: Synthetic oligonucleotide
cgaauuggguuaccauacu

SEQ ID NO: 2351338 - RNA, 19 nt, Artificial Sequence
  Description of Artificial Sequence: Synthetic oligonucleotide
caguaacuauuggcaucgu

SEQ ID NO: 2351339 - RNA, 19 nt, Artificial Sequence
  Description of Artificial Sequence: Synthetic oligonucleotide
cggcgacgggaaguggugc

SEQ ID NO: 2351340 - RNA, 19 nt, Artificial Sequence
  Description of Artificial Sequence: Synthetic oligonucleotide
cacgccgguuaccgacugu

SEQ ID NO: 2351341 - RNA, 19 nt, Artificial Sequence
  Description of Artificial Sequence: Synthetic oligonucleotide
gccgugcaccucaugcugu

SEQ ID NO: 2351342 - RNA, 19 nt, Artificial Sequence
  Description of Artificial Sequence: Synthetic oligonucleotide
gccgcgacucgcgccccgc

SEQ ID NO: 2351343 - RNA, 19 nt, Artificial Sequence
  Description of Artificial Sequence: Synthetic oligonucleotide
cgccaguaacuauuggcau

SEQ ID NO: 2351344 - RNA, 19 nt, Artificial Sequence
  Description of Artificial Sequence: Synthetic oligonucleotide
gcgacucgcgccccgcaau

SEQ ID NO: 2351345 - RNA, 19 nt, Artificial Sequence
  Description of Artificial Sequence: Synthetic oligonucleotide
gggagcccgcgcgggcacc

SEQ ID NO: 2351346 - RNA, 19 nt, Artificial Sequence
  Description of Artificial Sequence: Synthetic oligonucleotide
ccuccacgccgguuaccga

SEQ ID NO: 2351347 - RNA, 19 nt, Artificial Sequence
  Description of Artificial Sequence: Synthetic oligonucleotide
ggccucgcgcucccagugu

SEQ ID NO: 2351348 - RNA, 19 nt, Artificial Sequence
  Description of Artificial Sequence: Synthetic oligonucleotide
gcgacgggaaguggugcgu

SEQ ID NO: 2351349 - RNA, 19 nt, Artificial Sequence
  Description of Artificial Sequence: Synthetic oligonucleotide
ccucggagccgccacgaau

SEQ ID NO: 2351350 - RNA, 19 nt, Artificial Sequence
  Description of Artificial Sequence: Synthetic oligonucleotide
gccgcacugccugcccaca

SEQ ID NO: 2351351 - RNA, 19 nt, Artificial Sequence
  Description of Artificial Sequence: Synthetic oligonucleotide
cgccccggcuaccccgccg

SEQ ID NO: 2351352 - RNA, 19 nt, Artificial Sequence
  Description of Artificial Sequence: Synthetic oligonucleotide
cgcgcgggcacccguccuc

SEQ ID NO: 2351353 - RNA, 19 nt, Artificial Sequence
  Description of Artificial Sequence: Synthetic oligonucleotide
cccucgccaucuuccccga

SEQ ID NO: 2351354 - RNA, 19 nt, Artificial Sequence
  Description of Artificial Sequence: Synthetic oligonucleotide
gccucgcgcucccaguguu

SEQ ID NO: 2351355 - RNA, 19 nt, Artificial Sequence
  Description of Artificial Sequence: Synthetic oligonucleotide
cgaauccgccaguaacuau

SEQ ID NO: 2351356 - RNA, 19 nt, Artificial Sequence
  Description of Artificial Sequence: Synthetic oligonucleotide
cgcuagccaugccgugcac

SEQ ID NO: 2351357 - RNA, 19 nt, Artificial Sequence
  Description of Artificial Sequence: Synthetic oligonucleotide
cgcgggcacccguccucgg

SEQ ID NO: 2351358 - RNA, 19 nt, Artificial Sequence
  Description of Artificial Sequence: Synthetic oligonucleotide
cccucccuucacccaucca

SEQ ID NO: 2351359 - RNA, 19 nt, Artificial Sequence
  Description of Artificial Sequence: Synthetic oligonucleotide
ccgcacugccugcccacaa

SEQ ID NO: 2351360 - RNA, 19 nt, Artificial Sequence
  Description of Artificial Sequence: Synthetic oligonucleotide
cgccgcgacucgcgccccg

SEQ ID NO: 2351361 - RNA, 19 nt, Artificial Sequence
  Description of Artificial Sequence: Synthetic oligonucleotide
gcccgcgcgggcacccguc

SEQ ID NO: 2351362 - RNA, 19 nt, Artificial Sequence
  Description of Artificial Sequence: Synthetic oligonucleotide
cccguccucggagccgcca

SEQ ID NO: 2351363 - RNA, 19 nt, Artificial Sequence
  Description of Artificial Sequence: Synthetic oligonucleotide
ggccgcugccggauccgua

SEQ ID NO: 2351364 - RNA, 19 nt, Artificial Sequence
  Description of Artificial Sequence: Synthetic oligonucleotide
cgccuccacgccgguuacc

SEQ ID NO: 2351365 - RNA, 19 nt, Artificial Sequence
  Description of Artificial Sequence: Synthetic oligonucleotide
gcgcuggccuuggacgcgu

SEQ ID NO: 2351366 - RNA, 19 nt, Artificial Sequence
  Description of Artificial Sequence: Synthetic oligonucleotide
cgcgacucgcgccccgcaa

SEQ ID NO: 2351367 - RNA, 19 nt, Artificial Sequence
  Description of Artificial Sequence: Synthetic oligonucleotide
gccgcacuuuguggugggu

SEQ ID NO: 2351368 - RNA, 19 nt, Artificial Sequence
  Description of Artificial Sequence: Synthetic oligonucleotide
ccgccgcgacucgcgcccc

SEQ ID NO: 2351369 - RNA, 19 nt, Artificial Sequence
  Description of Artificial Sequence: Synthetic oligonucleotide
cgccacgaauccgccagua

SEQ ID NO: 2351370 - RNA, 19 nt, Artificial Sequence
  Description of Artificial Sequence: Synthetic oligonucleotide
gccaugccgugcaccucau

SEQ ID NO: 2351371 - RNA, 19 nt, Artificial Sequence
  Description of Artificial Sequence: Synthetic oligonucleotide
ccgccacgaauccgccagu

SEQ ID NO: 2351372 - RNA, 19 nt, Artificial Sequence
  Description of Artificial Sequence: Synthetic oligonucleotide
cgcugccggauccguauuu

SEQ ID NO: 2351373 - RNA, 19 nt, Artificial Sequence
  Description of Artificial Sequence: Synthetic oligonucleotide
ggacgccuccacgccgguu

SEQ ID NO: 2351374 - RNA, 19 nt, Artificial Sequence
  Description of Artificial Sequence: Synthetic oligonucleotide
gcccggcgcuggccuugga

SEQ ID NO: 2351375 - RNA, 19 nt, Artificial Sequence
  Description of Artificial Sequence: Synthetic oligonucleotide
ccgcugccggauccguauu

SEQ ID NO: 2351376 - RNA, 19 nt, Artificial Sequence
  Description of Artificial Sequence: Synthetic oligonucleotide
ccgcgcgggcacccguccu

SEQ ID NO: 2351377 - RNA, 19 nt, Artificial Sequence
  Description of Artificial Sequence: Synthetic oligonucleotide
cgucaccgcugcgcaccga

SEQ ID NO: 2351378 - RNA, 19 nt, Artificial Sequence
  Description of Artificial Sequence: Synthetic oligonucleotide
cggcuaccccgccgcgacu

SEQ ID NO: 2351379 - RNA, 19 nt, Artificial Sequence
  Description of Artificial Sequence: Synthetic oligonucleotide
cggacgccuccacgccggu

SEQ ID NO: 2351380 - RNA, 19 nt, Artificial Sequence
  Description of Artificial Sequence: Synthetic oligonucleotide
ugagcaugcacauacaaag

SEQ ID NO: 2351381 - RNA, 19 nt, Artificial Sequence
  Description of Artificial Sequence: Synthetic oligonucleotide
uauccgguaacccuggucg

SEQ ID NO: 2351382 - RNA, 19 nt, Artificial Sequence
  Description of Artificial Sequence: Synthetic oligonucleotide
ugcugaacuauacugacag

SEQ ID NO: 2351383 - RNA, 19 nt, Artificial Sequence
  Description of Artificial Sequence: Synthetic oligonucleotide
gacuacacgauccagcuag

SEQ ID NO: 2351384 - RNA, 19 nt, Artificial Sequence
  Description of Artificial Sequence: Synthetic oligonucleotide
cugacaguucacuagagcc

SEQ ID NO: 2351385 - RNA, 19 nt, Artificial Sequence
  Description of Artificial Sequence: Synthetic oligonucleotide
acacgauccagcuagagug

SEQ ID NO: 2351386 - RNA, 19 nt, Artificial Sequence
  Description of Artificial Sequence: Synthetic oligonucleotide
uccauuacugccagcgugg

SEQ ID NO: 2351387 - RNA, 19 nt, Artificial Sequence
  Description of Artificial Sequence: Synthetic oligonucleotide
uuggaucuugcgcagcucg

SEQ ID NO: 2351388 - RNA, 19 nt, Artificial Sequence
  Description of Artificial Sequence: Synthetic oligonucleotide
acugacaguucacuagagc

SEQ ID NO: 2351389 - RNA, 19 nt, Artificial Sequence
  Description of Artificial Sequence: Synthetic oligonucleotide
agcugcuuccuccacaugg

SEQ ID NO: 2351390 - RNA, 19 nt, Artificial Sequence
  Description of Artificial Sequence: Synthetic oligonucleotide
aaggcucgagaccuggaac

SEQ ID NO: 2351391 - RNA, 19 nt, Artificial Sequence
  Description of Artificial Sequence: Synthetic oligonucleotide
cucgauauaagccgagccg

SEQ ID NO: 2351392 - RNA, 19 nt, Artificial Sequence
  Description of Artificial Sequence: Synthetic oligonucleotide
uucacuagagcccggucag

SEQ ID NO: 2351393 - RNA, 19 nt, Artificial Sequence
  Description of Artificial Sequence: Synthetic oligonucleotide
aggcucgagaccuggaacc

SEQ ID NO: 2351394 - RNA, 19 nt, Artificial Sequence
  Description of Artificial Sequence: Synthetic oligonucleotide
uuuggauaugggugguugg

SEQ ID NO: 2351395 - RNA, 19 nt, Artificial Sequence
  Description of Artificial Sequence: Synthetic oligonucleotide
auuacugccagcguggcug

SEQ ID NO: 2351396 - RNA, 19 nt, Artificial Sequence
  Description of Artificial Sequence: Synthetic oligonucleotide
uagaccaccgccaacgccu

SEQ ID NO: 2351397 - RNA, 19 nt, Artificial Sequence
  Description of Artificial Sequence: Synthetic oligonucleotide
cugcauuuacacaugcugc

SEQ ID NO: 2351398 - RNA, 19 nt, Artificial Sequence
  Description of Artificial Sequence: Synthetic oligonucleotide
ugaacuauacugacaguuc

SEQ ID NO: 2351399 - RNA, 19 nt, Artificial Sequence
  Description of Artificial Sequence: Synthetic oligonucleotide
ugcauuuacacaugcugca

SEQ ID NO: 2351400 - RNA, 19 nt, Artificial Sequence
  Description of Artificial Sequence: Synthetic oligonucleotide
ugcgcaaacacgcccauac

SEQ ID NO: 2351401 - RNA, 19 nt, Artificial Sequence
  Description of Artificial Sequence: Synthetic oligonucleotide
aguccggccauguuguacg

SEQ ID NO: 2351402 - RNA, 19 nt, Artificial Sequence
  Description of Artificial Sequence: Synthetic oligonucleotide
aacuauacugacaguucac

SEQ ID NO: 2351403 - RNA, 19 nt, Artificial Sequence
  Description of Artificial Sequence: Synthetic oligonucleotide
uguuguacgaccccagcuc

SEQ ID NO: 2351404 - RNA, 19 nt, Artificial Sequence
  Description of Artificial Sequence: Synthetic oligonucleotide
gugguuggcacucaguccc

SEQ ID NO: 2351405 - RNA, 19 nt, Artificial Sequence
  Description of Artificial Sequence: Synthetic oligonucleotide
aacgccuugguguugcccu

SEQ ID NO: 2351406 - RNA, 19 nt, Artificial Sequence
  Description of Artificial Sequence: Synthetic oligonucleotide
gaacuauacugacaguuca

SEQ ID NO: 2351407 - RNA, 19 nt, Artificial Sequence
  Description of Artificial Sequence: Synthetic oligonucleotide
accaucugccugcaguacc

SEQ ID NO: 2351408 - RNA, 19 nt, Artificial Sequence
  Description of Artificial Sequence: Synthetic oligonucleotide
gauauaagccgagccgucg

SEQ ID NO: 2351409 - RNA, 19 nt, Artificial Sequence
  Description of Artificial Sequence: Synthetic oligonucleotide
auauaagccgagccgucgg

SEQ ID NO: 2351410 - RNA, 19 nt, Artificial Sequence
  Description of Artificial Sequence: Synthetic oligonucleotide
uuuuggauaugggugguug

SEQ ID NO: 2351411 - RNA, 19 nt, Artificial Sequence
  Description of Artificial Sequence: Synthetic oligonucleotide
uagagugugcacaucucug

SEQ ID NO: 2351412 - RNA, 19 nt, Artificial Sequence
  Description of Artificial Sequence: Synthetic oligonucleotide
aauccaucucaagcagugc

SEQ ID NO: 2351413 - RNA, 19 nt, Artificial Sequence
  Description of Artificial Sequence: Synthetic oligonucleotide
agugcaaucuggccugagg

SEQ ID NO: 2351414 - RNA, 19 nt, Artificial Sequence
  Description of Artificial Sequence: Synthetic oligonucleotide
ucggccugcgcaaacacgc

SEQ ID NO: 2351415 - RNA, 19 nt, Artificial Sequence
  Description of Artificial Sequence: Synthetic oligonucleotide
agacuuacgguccccauga

SEQ ID NO: 2351416 - RNA, 19 nt, Artificial Sequence
  Description of Artificial Sequence: Synthetic oligonucleotide
acauacaaagucccgcaug

SEQ ID NO: 2351417 - RNA, 19 nt, Artificial Sequence
  Description of Artificial Sequence: Synthetic oligonucleotide
ugucaaucugagagcgugg

SEQ ID NO: 2351418 - RNA, 19 nt, Artificial Sequence
  Description of Artificial Sequence: Synthetic oligonucleotide
gaauccaucucaagcagug

SEQ ID NO: 2351419 - RNA, 19 nt, Artificial Sequence
  Description of Artificial Sequence: Synthetic oligonucleotide
uccaccaucugccugcagu

SEQ ID NO: 2351420 - RNA, 19 nt, Artificial Sequence
  Description of Artificial Sequence: Synthetic oligonucleotide
uggcaauagggccagggcu

SEQ ID NO: 2351421 - RNA, 19 nt, Artificial Sequence
  Description of Artificial Sequence: Synthetic oligonucleotide
uucgcuugcgcucaccagu

SEQ ID NO: 2351422 - RNA, 19 nt, Artificial Sequence
  Description of Artificial Sequence: Synthetic oligonucleotide
acuuacgguccccaugagg

SEQ ID NO: 2351423 - RNA, 19 nt, Artificial Sequence
  Description of Artificial Sequence: Synthetic oligonucleotide
accgccaacgccuuggugu

SEQ ID NO: 2351424 - RNA, 19 nt, Artificial Sequence
  Description of Artificial Sequence: Synthetic oligonucleotide
agauagaggccuccugcac

SEQ ID NO: 2351425 - RNA, 19 nt, Artificial Sequence
  Description of Artificial Sequence: Synthetic oligonucleotide
ucucaagcagugcaaucug

SEQ ID NO: 2351426 - RNA, 19 nt, Artificial Sequence
  Description of Artificial Sequence: Synthetic oligonucleotide
auccauuacugccagcgug

SEQ ID NO: 2351427 - RNA, 19 nt, Artificial Sequence
  Description of Artificial Sequence: Synthetic oligonucleotide
uacacgauccagcuagagu

SEQ ID NO: 2351428 - RNA, 19 nt, Artificial Sequence
  Description of Artificial Sequence: Synthetic oligonucleotide
agcuagagugugcacaucu

SEQ ID NO: 2351429 - RNA, 19 nt, Artificial Sequence
  Description of Artificial Sequence: Synthetic oligonucleotide
acauagaugucaaucugag

SEQ ID NO: 2351430 - RNA, 19 nt, Artificial Sequence
  Description of Artificial Sequence: Synthetic oligonucleotide
ucgauauaagccgagccgu

SEQ ID NO: 2351431 - RNA, 19 nt, Artificial Sequence
  Description of Artificial Sequence: Synthetic oligonucleotide
acgcgcuuggaucuugcgc

SEQ ID NO: 2351432 - RNA, 19 nt, Artificial Sequence
  Description of Artificial Sequence: Synthetic oligonucleotide
caaucugagagcgugggug

SEQ ID NO: 2351433 - RNA, 19 nt, Artificial Sequence
  Description of Artificial Sequence: Synthetic oligonucleotide
gugcaaucuggccugaggc

SEQ ID NO: 2351434 - RNA, 19 nt, Artificial Sequence
  Description of Artificial Sequence: Synthetic oligonucleotide
aggcccguagaccaccgcc

SEQ ID NO: 2351435 - RNA, 19 nt, Artificial Sequence
  Description of Artificial Sequence: Synthetic oligonucleotide
ccuugaauccaucucaagc

SEQ ID NO: 2351436 - RNA, 19 nt, Artificial Sequence
  Description of Artificial Sequence: Synthetic oligonucleotide
ugaauccaucucaagcagu

SEQ ID NO: 2351437 - RNA, 19 nt, Artificial Sequence
  Description of Artificial Sequence: Synthetic oligonucleotide
augucaaucugagagcgug

SEQ ID NO: 2351438 - RNA, 19 nt, Artificial Sequence
  Description of Artificial Sequence: Synthetic oligonucleotide
ugcccugcucgauauaagc

SEQ ID NO: 2351439 - RNA, 19 nt, Artificial Sequence
  Description of Artificial Sequence: Synthetic oligonucleotide
gauagaggccuccugcaca

SEQ ID NO: 2351440 - RNA, 19 nt, Artificial Sequence
  Description of Artificial Sequence: Synthetic oligonucleotide
uuuacacaugcugcauagg

SEQ ID NO: 2351441 - RNA, 19 nt, Artificial Sequence
  Description of Artificial Sequence: Synthetic oligonucleotide
cucaagcagugcaaucugg

SEQ ID NO: 2351442 - RNA, 19 nt, Artificial Sequence
  Description of Artificial Sequence: Synthetic oligonucleotide
aucucaagcagugcaaucu

SEQ ID NO: 2351443 - RNA, 19 nt, Artificial Sequence
  Description of Artificial Sequence: Synthetic oligonucleotide
cagcugagcaugcacauac

SEQ ID NO: 2351444 - RNA, 19 nt, Artificial Sequence
  Description of Artificial Sequence: Synthetic oligonucleotide
uccaguccggccauguugu

SEQ ID NO: 2351445 - RNA, 19 nt, Artificial Sequence
  Description of Artificial Sequence: Synthetic oligonucleotide
caaacacgcccauacgcgc

SEQ ID NO: 2351446 - RNA, 19 nt, Artificial Sequence
  Description of Artificial Sequence: Synthetic oligonucleotide
gaucucgugaggcccguag

SEQ ID NO: 2351447 - RNA, 19 nt, Artificial Sequence
  Description of Artificial Sequence: Synthetic oligonucleotide
ucgugaggcccguagacca

SEQ ID NO: 2351448 - RNA, 19 nt, Artificial Sequence
  Description of Artificial Sequence: Synthetic oligonucleotide
cauggguaucccagcaucc

SEQ ID NO: 2351449 - RNA, 19 nt, Artificial Sequence
  Description of Artificial Sequence: Synthetic oligonucleotide
uauaagccgagccgucggc

SEQ ID NO: 2351450 - RNA, 19 nt, Artificial Sequence
  Description of Artificial Sequence: Synthetic oligonucleotide
uccagcuagagugugcaca

SEQ ID NO: 2351451 - RNA, 19 nt, Artificial Sequence
  Description of Artificial Sequence: Synthetic oligonucleotide
aggccuuuauuuuggauau

SEQ ID NO: 2351452 - RNA, 19 nt, Artificial Sequence
  Description of Artificial Sequence: Synthetic oligonucleotide
acuauacugacaguucacu

SEQ ID NO: 2351453 - RNA, 19 nt, Artificial Sequence
  Description of Artificial Sequence: Synthetic oligonucleotide
ggaacaggccuuuauuuug

SEQ ID NO: 2351454 - RNA, 19 nt, Artificial Sequence
  Description of Artificial Sequence: Synthetic oligonucleotide
ugaagguugcugaacuaua

SEQ ID NO: 2351455 - RNA, 19 nt, Artificial Sequence
  Description of Artificial Sequence: Synthetic oligonucleotide
uuggauaugggugguuggc

SEQ ID NO: 2351456 - RNA, 19 nt, Artificial Sequence
  Description of Artificial Sequence: Synthetic oligonucleotide
gcauccauuacugccagcg

SEQ ID NO: 2351457 - RNA, 19 nt, Artificial Sequence
  Description of Artificial Sequence: Synthetic oligonucleotide
ucacaagacuuacgguccc

SEQ ID NO: 2351458 - RNA, 19 nt, Artificial Sequence
  Description of Artificial Sequence: Synthetic oligonucleotide
ucucgugaggcccguagac

SEQ ID NO: 2351459 - RNA, 19 nt, Artificial Sequence
  Description of Artificial Sequence: Synthetic oligonucleotide
gaagguugcugaacuauac

SEQ ID NO: 2351460 - RNA, 19 nt, Artificial Sequence
  Description of Artificial Sequence: Synthetic oligonucleotide
auguuguacgaccccagcu

SEQ ID NO: 2351461 - RNA, 19 nt, Artificial Sequence
  Description of Artificial Sequence: Synthetic oligonucleotide
uugcugaacuauacugaca

SEQ ID NO: 2351462 - RNA, 19 nt, Artificial Sequence
  Description of Artificial Sequence: Synthetic oligonucleotide
uuguacgaccccagcuccg

SEQ ID NO: 2351463 - RNA, 19 nt, Artificial Sequence
  Description of Artificial Sequence: Synthetic oligonucleotide
auaagccgagccgucggcc

SEQ ID NO: 2351464 - RNA, 19 nt, Artificial Sequence
  Description of Artificial Sequence: Synthetic oligonucleotide
uccaucucaagcagugcaa

SEQ ID NO: 2351465 - RNA, 19 nt, Artificial Sequence
  Description of Artificial Sequence: Synthetic oligonucleotide
cugcaguaccugcacauag

SEQ ID NO: 2351466 - RNA, 19 nt, Artificial Sequence
  Description of Artificial Sequence: Synthetic oligonucleotide
gaucuugcgcagcucgccc

SEQ ID NO: 2351467 - RNA, 19 nt, Artificial Sequence
  Description of Artificial Sequence: Synthetic oligonucleotide
auaugggugguuggcacuc

SEQ ID NO: 2351468 - RNA, 19 nt, Artificial Sequence
  Description of Artificial Sequence: Synthetic oligonucleotide
ugcaaucuggccugaggcu

SEQ ID NO: 2351469 - RNA, 19 nt, Artificial Sequence
  Description of Artificial Sequence: Synthetic oligonucleotide
ccugaggcuggcaauaggg

SEQ ID NO: 2351470 - RNA, 19 nt, Artificial Sequence
  Description of Artificial Sequence: Synthetic oligonucleotide
uacacaugcugcauagguu

SEQ ID NO: 2351471 - RNA, 19 nt, Artificial Sequence
  Description of Artificial Sequence: Synthetic oligonucleotide
agagcgugggugcagcugu

SEQ ID NO: 2351472 - RNA, 19 nt, Artificial Sequence
  Description of Artificial Sequence: Synthetic oligonucleotide
aguucacuagagcccgguc

SEQ ID NO: 2351473 - RNA, 19 nt, Artificial Sequence
  Description of Artificial Sequence: Synthetic oligonucleotide
cugaggcuggcaauagggc

SEQ ID NO: 2351474 - RNA, 19 nt, Artificial Sequence
  Description of Artificial Sequence: Synthetic oligonucleotide
uagaggaacaggccuuuau

SEQ ID NO: 2351475 - RNA, 19 nt, Artificial Sequence
  Description of Artificial Sequence: Synthetic oligonucleotide
aguugcagccccaucucac

SEQ ID NO: 2351476 - RNA, 19 nt, Artificial Sequence
  Description of Artificial Sequence: Synthetic oligonucleotide
augcugcauagguuccacc

SEQ ID NO: 2351477 - RNA, 19 nt, Artificial Sequence
  Description of Artificial Sequence: Synthetic oligonucleotide
agguccgacagugcugugc

SEQ ID NO: 2351478 - RNA, 19 nt, Artificial Sequence
  Description of Artificial Sequence: Synthetic oligonucleotide
cauguuguacgaccccagc

SEQ ID NO: 2351479 - RNA, 19 nt, Artificial Sequence
  Description of Artificial Sequence: Synthetic oligonucleotide
aggagcuccaguccggcca

SEQ ID NO: 2351480 - RNA, 19 nt, Artificial Sequence
  Description of Artificial Sequence: Synthetic oligonucleotide
accgucuauccgguaaccc

SEQ ID NO: 2351481 - RNA, 19 nt, Artificial Sequence
  Description of Artificial Sequence: Synthetic oligonucleotide
aucuugcgcagcucgcccg

SEQ ID NO: 2351482 - RNA, 19 nt, Artificial Sequence
  Description of Artificial Sequence: Synthetic oligonucleotide
uggcugcauuuacacaugc

SEQ ID NO: 2351483 - RNA, 19 nt, Artificial Sequence
  Description of Artificial Sequence: Synthetic oligonucleotide
ugcagccuugaauccaucu

SEQ ID NO: 2351484 - RNA, 19 nt, Artificial Sequence
  Description of Artificial Sequence: Synthetic oligonucleotide
aggaacaggccuuuauuuu

SEQ ID NO: 2351485 - RNA, 19 nt, Artificial Sequence
  Description of Artificial Sequence: Synthetic oligonucleotide
aucucacaagacuuacggu

SEQ ID NO: 2351486 - RNA, 19 nt, Artificial Sequence
  Description of Artificial Sequence: Synthetic oligonucleotide
gaaccccggaucucgugag

SEQ ID NO: 2351487 - RNA, 19 nt, Artificial Sequence
  Description of Artificial Sequence: Synthetic oligonucleotide
cuggcaauagggccagggc

SEQ ID NO: 2351488 - RNA, 19 nt, Artificial Sequence
  Description of Artificial Sequence: Synthetic oligonucleotide
gcaaacacgcccauacgcg

SEQ ID NO: 2351489 - RNA, 19 nt, Artificial Sequence
  Description of Artificial Sequence: Synthetic oligonucleotide
uagcuggggaccuccagcu

SEQ ID NO: 2351490 - RNA, 19 nt, Artificial Sequence
  Description of Artificial Sequence: Synthetic oligonucleotide
aaccccggaucucgugagg

SEQ ID NO: 2351491 - RNA, 19 nt, Artificial Sequence
  Description of Artificial Sequence: Synthetic oligonucleotide
auagaggccuccugcacau

SEQ ID NO: 2351492 - RNA, 19 nt, Artificial Sequence
  Description of Artificial Sequence: Synthetic oligonucleotide
cuccaguccggccauguug

SEQ ID NO: 2351493 - RNA, 19 nt, Artificial Sequence
  Description of Artificial Sequence: Synthetic oligonucleotide
ugugcacaucucuggcugc

SEQ ID NO: 2351494 - RNA, 19 nt, Artificial Sequence
  Description of Artificial Sequence: Synthetic oligonucleotide
ggacaggagcuccaguccg

SEQ ID NO: 2351495 - RNA, 19 nt, Artificial Sequence
  Description of Artificial Sequence: Synthetic oligonucleotide
ugaggcccguagaccaccg

SEQ ID NO: 2351496 - RNA, 19 nt, Artificial Sequence
  Description of Artificial Sequence: Synthetic oligonucleotide
agucagucuccagagcgag

SEQ ID NO: 2351497 - RNA, 19 nt, Artificial Sequence
  Description of Artificial Sequence: Synthetic oligonucleotide
uuacgguccccaugaggcc

SEQ ID NO: 2351498 - RNA, 19 nt, Artificial Sequence
  Description of Artificial Sequence: Synthetic oligonucleotide
ucuggcguaguugcagccc

SEQ ID NO: 2351499 - RNA, 19 nt, Artificial Sequence
  Description of Artificial Sequence: Synthetic oligonucleotide
uggauaugggugguuggca

SEQ ID NO: 2351500 - RNA, 19 nt, Artificial Sequence
  Description of Artificial Sequence: Synthetic oligonucleotide
gcucgauauaagccgagcc

SEQ ID NO: 2351501 - RNA, 19 nt, Artificial Sequence
  Description of Artificial Sequence: Synthetic oligonucleotide
cuggcguaguugcagcccc

SEQ ID NO: 2351502 - RNA, 19 nt, Artificial Sequence
  Description of Artificial Sequence: Synthetic oligonucleotide
ucuugcgcagcucgcccgc

SEQ ID NO: 2351503 - RNA, 19 nt, Artificial Sequence
  Description of Artificial Sequence: Synthetic oligonucleotide
uacgcgcuuggaucuugcg

SEQ ID NO: 2351504 - RNA, 19 nt, Artificial Sequence
  Description of Artificial Sequence: Synthetic oligonucleotide
uugcccugcucgauauaag

SEQ ID NO: 2351505 - RNA, 19 nt, Artificial Sequence
  Description of Artificial Sequence: Synthetic oligonucleotide
augaggccuucgcuugcgc

SEQ ID NO: 2351506 - RNA, 19 nt, Artificial Sequence
  Description of Artificial Sequence: Synthetic oligonucleotide
auacaaagucccgcauggg

SEQ ID NO: 2351507 - RNA, 19 nt, Artificial Sequence
  Description of Artificial Sequence: Synthetic oligonucleotide
auccgguaacccuggucgg

SEQ ID NO: 2351508 - RNA, 19 nt, Artificial Sequence
  Description of Artificial Sequence: Synthetic oligonucleotide
uguacgaccccagcuccgc

SEQ ID NO: 2351509 - RNA, 19 nt, Artificial Sequence
  Description of Artificial Sequence: Synthetic oligonucleotide
ugcgcagcucgcccgcgcg

SEQ ID NO: 2351510 - RNA, 19 nt, Artificial Sequence
  Description of Artificial Sequence: Synthetic oligonucleotide
cugcauagguuccaccauc

SEQ ID NO: 2351511 - RNA, 19 nt, Artificial Sequence
  Description of Artificial Sequence: Synthetic oligonucleotide
ugcucgauauaagccgagc

SEQ ID NO: 2351512 - RNA, 19 nt, Artificial Sequence
  Description of Artificial Sequence: Synthetic oligonucleotide
uaagccgagccgucggccu

SEQ ID NO: 2351513 - RNA, 19 nt, Artificial Sequence
  Description of Artificial Sequence: Synthetic oligonucleotide
agcccggucaggcaaggcu

SEQ ID NO: 2351514 - RNA, 19 nt, Artificial Sequence
  Description of Artificial Sequence: Synthetic oligonucleotide
guagaccaccgccaacgcc

SEQ ID NO: 2351515 - RNA, 19 nt, Artificial Sequence
  Description of Artificial Sequence: Synthetic oligonucleotide
caucucaagcagugcaauc

SEQ ID NO: 2351516 - RNA, 19 nt, Artificial Sequence
  Description of Artificial Sequence: Synthetic oligonucleotide
gucaggcaaggcucgagac

SEQ ID NO: 2351517 - RNA, 19 nt, Artificial Sequence
  Description of Artificial Sequence: Synthetic oligonucleotide
aaacacgcccauacgcgcu

SEQ ID NO: 2351518 - RNA, 19 nt, Artificial Sequence
  Description of Artificial Sequence: Synthetic oligonucleotide
gacaggagcuccaguccgg

SEQ ID NO: 2351519 - RNA, 19 nt, Artificial Sequence
  Description of Artificial Sequence: Synthetic oligonucleotide
uugguguugcccugcucga

SEQ ID NO: 2351520 - RNA, 19 nt, Artificial Sequence
  Description of Artificial Sequence: Synthetic oligonucleotide
guaguugcagccccaucuc

SEQ ID NO: 2351521 - RNA, 19 nt, Artificial Sequence
  Description of Artificial Sequence: Synthetic oligonucleotide
aaagccagcugagcaugca

SEQ ID NO: 2351522 - RNA, 19 nt, Artificial Sequence
  Description of Artificial Sequence: Synthetic oligonucleotide
ugaggccuucgcuugcgcu

SEQ ID NO: 2351523 - RNA, 19 nt, Artificial Sequence
  Description of Artificial Sequence: Synthetic oligonucleotide
gguccgacagugcugugcc

SEQ ID NO: 2351524 - RNA, 19 nt, Artificial Sequence
  Description of Artificial Sequence: Synthetic oligonucleotide
ggugguuggcacucagucc

SEQ ID NO: 2351525 - RNA, 19 nt, Artificial Sequence
  Description of Artificial Sequence: Synthetic oligonucleotide
cacuagagcccggucaggc

SEQ ID NO: 2351526 - RNA, 19 nt, Artificial Sequence
  Description of Artificial Sequence: Synthetic oligonucleotide
ggauaugggugguuggcac

SEQ ID NO: 2351527 - RNA, 19 nt, Artificial Sequence
  Description of Artificial Sequence: Synthetic oligonucleotide
cuauacugacaguucacua

SEQ ID NO: 2351528 - RNA, 19 nt, Artificial Sequence
  Description of Artificial Sequence: Synthetic oligonucleotide
acuagagcccggucaggca

SEQ ID NO: 2351529 - RNA, 19 nt, Artificial Sequence
  Description of Artificial Sequence: Synthetic oligonucleotide
caguaccugcacauagaug

SEQ ID NO: 2351530 - RNA, 19 nt, Artificial Sequence
  Description of Artificial Sequence: Synthetic oligonucleotide
cugagcaugcacauacaaa

SEQ ID NO: 2351531 - RNA, 19 nt, Artificial Sequence
  Description of Artificial Sequence: Synthetic oligonucleotide
cauagaugucaaucugaga

SEQ ID NO: 2351532 - RNA, 19 nt, Artificial Sequence
  Description of Artificial Sequence: Synthetic oligonucleotide
ucgagaccuggaaccccgg

SEQ ID NO: 2351533 - RNA, 19 nt, Artificial Sequence
  Description of Artificial Sequence: Synthetic oligonucleotide
aggucuggcguaguugcag

SEQ ID NO: 2351534 - RNA, 19 nt, Artificial Sequence
  Description of Artificial Sequence: Synthetic oligonucleotide
augcacauacaaagucccg

SEQ ID NO: 2351535 - RNA, 19 nt, Artificial Sequence
  Description of Artificial Sequence: Synthetic oligonucleotide
cuucgcuugcgcucaccag

SEQ ID NO: 2351536 - RNA, 19 nt, Artificial Sequence
  Description of Artificial Sequence: Synthetic oligonucleotide
cuauccgguaacccugguc

SEQ ID NO: 2351537 - RNA, 19 nt, Artificial Sequence
  Description of Artificial Sequence: Synthetic oligonucleotide
acaaagucccgcaugggua

SEQ ID NO: 2351538 - RNA, 19 nt, Artificial Sequence
  Description of Artificial Sequence: Synthetic oligonucleotide
uugcagccccaucucacaa

SEQ ID NO: 2351539 - RNA, 19 nt, Artificial Sequence
  Description of Artificial Sequence: Synthetic oligonucleotide
gguugcugaacuauacuga

SEQ ID NO: 2351540 - RNA, 19 nt, Artificial Sequence
  Description of Artificial Sequence: Synthetic oligonucleotide
acaggccuuuauuuuggau

SEQ ID NO: 2351541 - RNA, 19 nt, Artificial Sequence
  Description of Artificial Sequence: Synthetic oligonucleotide
gucuauccgguaacccugg

SEQ ID NO: 2351542 - RNA, 19 nt, Artificial Sequence
  Description of Artificial Sequence: Synthetic oligonucleotide
aucucgugaggcccguaga

SEQ ID NO: 2351543 - RNA, 19 nt, Artificial Sequence
  Description of Artificial Sequence: Synthetic oligonucleotide
caguaagauagaggccucc

SEQ ID NO: 2351544 - RNA, 19 nt, Artificial Sequence
  Description of Artificial Sequence: Synthetic oligonucleotide
gauaugggugguuggcacu

SEQ ID NO: 2351545 - RNA, 19 nt, Artificial Sequence
  Description of Artificial Sequence: Synthetic oligonucleotide
cucgugaggcccguagacc

SEQ ID NO: 2351546 - RNA, 19 nt, Artificial Sequence
  Description of Artificial Sequence: Synthetic oligonucleotide
uacgaccccagcuccgccu

SEQ ID NO: 2351547 - RNA, 19 nt, Artificial Sequence
  Description of Artificial Sequence: Synthetic oligonucleotide
auacgcgcuuggaucuugc

SEQ ID NO: 2351548 - RNA, 19 nt, Artificial Sequence
  Description of Artificial Sequence: Synthetic oligonucleotide
uacgguccccaugaggccu

SEQ ID NO: 2351549 - RNA, 19 nt, Artificial Sequence
  Description of Artificial Sequence: Synthetic oligonucleotide
guugcagccccaucucaca

SEQ ID NO: 2351550 - RNA, 19 nt, Artificial Sequence
  Description of Artificial Sequence: Synthetic oligonucleotide
aacacgcccauacgcgcuu

SEQ ID NO: 2351551 - RNA, 19 nt, Artificial Sequence
  Description of Artificial Sequence: Synthetic oligonucleotide
caugaggccuucgcuugcg

SEQ ID NO: 2351552 - RNA, 19 nt, Artificial Sequence
  Description of Artificial Sequence: Synthetic oligonucleotide
acgaccccagcuccgccuc

SEQ ID NO: 2351553 - RNA, 19 nt, Artificial Sequence
  Description of Artificial Sequence: Synthetic oligonucleotide
acauggcugagguccgaca

SEQ ID NO: 2351554 - RNA, 19 nt, Artificial Sequence
  Description of Artificial Sequence: Synthetic oligonucleotide
gggugguuggcacucaguc

SEQ ID NO: 2351555 - RNA, 19 nt, Artificial Sequence
  Description of Artificial Sequence: Synthetic oligonucleotide
uccgacagugcugugccau

SEQ ID NO: 2351556 - RNA, 19 nt, Artificial Sequence
  Description of Artificial Sequence: Synthetic oligonucleotide
guccccaugaggccuucgc

SEQ ID NO: 2351557 - RNA, 19 nt, Artificial Sequence
  Description of Artificial Sequence: Synthetic oligonucleotide
gucuggcguaguugcagcc

SEQ ID NO: 2351558 - RNA, 19 nt, Artificial Sequence
  Description of Artificial Sequence: Synthetic oligonucleotide
cugcucgauauaagccgag

SEQ ID NO: 2351559 - RNA, 19 nt, Artificial Sequence
  Description of Artificial Sequence: Synthetic oligonucleotide
gcgccgaccgucuauccgg

SEQ ID NO: 2351560 - RNA, 19 nt, Artificial Sequence
  Description of Artificial Sequence: Synthetic oligonucleotide
uggaaccccggaucucgug

SEQ ID NO: 2351561 - RNA, 19 nt, Artificial Sequence
  Description of Artificial Sequence: Synthetic oligonucleotide
cuacacgauccagcuagag

SEQ ID NO: 2351562 - RNA, 19 nt, Artificial Sequence
  Description of Artificial Sequence: Synthetic oligonucleotide
ucuauccgguaacccuggu

SEQ ID NO: 2351563 - RNA, 19 nt, Artificial Sequence
  Description of Artificial Sequence: Synthetic oligonucleotide
gacuuacgguccccaugag

SEQ ID NO: 2351564 - RNA, 19 nt, Artificial Sequence
  Description of Artificial Sequence: Synthetic oligonucleotide
ccaaguggucuucaugcag

SEQ ID NO: 2351565 - RNA, 19 nt, Artificial Sequence
  Description of Artificial Sequence: Synthetic oligonucleotide
guaacccuggucggacagg

SEQ ID NO: 2351566 - RNA, 19 nt, Artificial Sequence
  Description of Artificial Sequence: Synthetic oligonucleotide
cugaacuauacugacaguu

SEQ ID NO: 2351567 - RNA, 19 nt, Artificial Sequence
  Description of Artificial Sequence: Synthetic oligonucleotide
gcacauacaaagucccgca

SEQ ID NO: 2351568 - RNA, 19 nt, Artificial Sequence
  Description of Artificial Sequence: Synthetic oligonucleotide
cgcaaacacgcccauacgc

SEQ ID NO: 2351569 - RNA, 19 nt, Artificial Sequence
  Description of Artificial Sequence: Synthetic oligonucleotide
ccaucucacaagacuuacg

SEQ ID NO: 2351570 - RNA, 19 nt, Artificial Sequence
  Description of Artificial Sequence: Synthetic oligonucleotide
caugcugcauagguuccac

SEQ ID NO: 2351571 - RNA, 19 nt, Artificial Sequence
  Description of Artificial Sequence: Synthetic oligonucleotide
ccguagaccaccgccaacg

SEQ ID NO: 2351572 - RNA, 19 nt, Artificial Sequence
  Description of Artificial Sequence: Synthetic oligonucleotide
auggguaucccagcaucca

SEQ ID NO: 2351573 - RNA, 19 nt, Artificial Sequence
  Description of Artificial Sequence: Synthetic oligonucleotide
guugcccugcucgauauaa

SEQ ID NO: 2351574 - RNA, 19 nt, Artificial Sequence
  Description of Artificial Sequence: Synthetic oligonucleotide
uugcgcucaccagugcuga

SEQ ID NO: 2351575 - RNA, 19 nt, Artificial Sequence
  Description of Artificial Sequence: Synthetic oligonucleotide
ccggccauguuguacgacc

SEQ ID NO: 2351576 - RNA, 19 nt, Artificial Sequence
  Description of Artificial Sequence: Synthetic oligonucleotide
gagagcgugggugcagcug

SEQ ID NO: 2351577 - RNA, 19 nt, Artificial Sequence
  Description of Artificial Sequence: Synthetic oligonucleotide
gcuggcaauagggccaggg

SEQ ID NO: 2351578 - RNA, 19 nt, Artificial Sequence
  Description of Artificial Sequence: Synthetic oligonucleotide
gcauggguaucccagcauc

SEQ ID NO: 2351579 - RNA, 19 nt, Artificial Sequence
  Description of Artificial Sequence: Synthetic oligonucleotide
ccggacuacacgauccagc

SEQ ID NO: 2351580 - RNA, 19 nt, Artificial Sequence
  Description of Artificial Sequence: Synthetic oligonucleotide
gcuccaaguggucuucaug

SEQ ID NO: 2351581 - RNA, 19 nt, Artificial Sequence
  Description of Artificial Sequence: Synthetic oligonucleotide
gacagugcugugccaucca

SEQ ID NO: 2351582 - RNA, 19 nt, Artificial Sequence
  Description of Artificial Sequence: Synthetic oligonucleotide
gaccgucuauccgguaacc

SEQ ID NO: 2351583 - RNA, 19 nt, Artificial Sequence
  Description of Artificial Sequence: Synthetic oligonucleotide
cuggucggacaggagcucc

SEQ ID NO: 2351584 - RNA, 19 nt, Artificial Sequence
  Description of Artificial Sequence: Synthetic oligonucleotide
ggucuggcguaguugcagc

SEQ ID NO: 2351585 - RNA, 19 nt, Artificial Sequence
  Description of Artificial Sequence: Synthetic oligonucleotide
ugaggauggcugccucaaa

SEQ ID NO: 2351586 - RNA, 19 nt, Artificial Sequence
  Description of Artificial Sequence: Synthetic oligonucleotide
uccgguaacccuggucgga

SEQ ID NO: 2351587 - RNA, 19 nt, Artificial Sequence
  Description of Artificial Sequence: Synthetic oligonucleotide
acccugucuagaggaacag

SEQ ID NO: 2351588 - RNA, 19 nt, Artificial Sequence
  Description of Artificial Sequence: Synthetic oligonucleotide
ugagagcgugggugcagcu

SEQ ID NO: 2351589 - RNA, 19 nt, Artificial Sequence
  Description of Artificial Sequence: Synthetic oligonucleotide
gucggccugcgcaaacacg

SEQ ID NO: 2351590 - RNA, 19 nt, Artificial Sequence
  Description of Artificial Sequence: Synthetic oligonucleotide
ccuggaaccccggaucucg

SEQ ID NO: 2351591 - RNA, 19 nt, Artificial Sequence
  Description of Artificial Sequence: Synthetic oligonucleotide
acgauccagcuagagugug

SEQ ID NO: 2351592 - RNA, 19 nt, Artificial Sequence
  Description of Artificial Sequence: Synthetic oligonucleotide
gcccauacgcgcuuggauc

SEQ ID NO: 2351593 - RNA, 19 nt, Artificial Sequence
  Description of Artificial Sequence: Synthetic oligonucleotide
ggaaccccggaucucguga

SEQ ID NO: 2351594 - RNA, 19 nt, Artificial Sequence
  Description of Artificial Sequence: Synthetic oligonucleotide
acaugcugcauagguucca

SEQ ID NO: 2351595 - RNA, 19 nt, Artificial Sequence
  Description of Artificial Sequence: Synthetic oligonucleotide
guggcugcauuuacacaug

SEQ ID NO: 2351596 - RNA, 19 nt, Artificial Sequence
  Description of Artificial Sequence: Synthetic oligonucleotide
cagucagucuccagagcga

SEQ ID NO: 2351597 - RNA, 19 nt, Artificial Sequence
  Description of Artificial Sequence: Synthetic oligonucleotide
uaugggugguuggcacuca

SEQ ID NO: 2351598 - RNA, 19 nt, Artificial Sequence
  Description of Artificial Sequence: Synthetic oligonucleotide
uggcguaguugcagcccca

SEQ ID NO: 2351599 - RNA, 19 nt, Artificial Sequence
  Description of Artificial Sequence: Synthetic oligonucleotide
caaggcucgagaccuggaa

SEQ ID NO: 2351600 - RNA, 19 nt, Artificial Sequence
  Description of Artificial Sequence: Synthetic oligonucleotide
ggcaaggcucgagaccugg

SEQ ID NO: 2351601 - RNA, 19 nt, Artificial Sequence
  Description of Artificial Sequence: Synthetic oligonucleotide
caacgccuugguguugccc

SEQ ID NO: 2351602 - RNA, 19 nt, Artificial Sequence
  Description of Artificial Sequence: Synthetic oligonucleotide
gcugagcaugcacauacaa

SEQ ID NO: 2351603 - RNA, 19 nt, Artificial Sequence
  Description of Artificial Sequence: Synthetic oligonucleotide
cauacgcgcuuggaucuug

SEQ ID NO: 2351604 - RNA, 19 nt, Artificial Sequence
  Description of Artificial Sequence: Synthetic oligonucleotide
gccuugaauccaucucaag

SEQ ID NO: 2351605 - RNA, 19 nt, Artificial Sequence
  Description of Artificial Sequence: Synthetic oligonucleotide
gagaccuggaaccccggau

SEQ ID NO: 2351606 - RNA, 19 nt, Artificial Sequence
  Description of Artificial Sequence: Synthetic oligonucleotide
ggucaggcaaggcucgaga

SEQ ID NO: 2351607 - RNA, 19 nt, Artificial Sequence
  Description of Artificial Sequence: Synthetic oligonucleotide
caggagcuccaguccggcc

SEQ ID NO: 2351608 - RNA, 19 nt, Artificial Sequence
  Description of Artificial Sequence: Synthetic oligonucleotide
caggcaaggcucgagaccu

SEQ ID NO: 2351609 - RNA, 19 nt, Artificial Sequence
  Description of Artificial Sequence: Synthetic oligonucleotide
gaaccugcuccaagugguc

SEQ ID NO: 2351610 - RNA, 19 nt, Artificial Sequence
  Description of Artificial Sequence: Synthetic oligonucleotide
ugcugccggacuacacgau

SEQ ID NO: 2351611 - RNA, 19 nt, Artificial Sequence
  Description of Artificial Sequence: Synthetic oligonucleotide
gcgcaaacacgcccauacg

SEQ ID NO: 2351612 - RNA, 19 nt, Artificial Sequence
  Description of Artificial Sequence: Synthetic oligonucleotide
gugaggcccguagaccacc

SEQ ID NO: 2351613 - RNA, 19 nt, Artificial Sequence
  Description of Artificial Sequence: Synthetic oligonucleotide
agcuggggaccuccagcug

SEQ ID NO: 2351614 - RNA, 19 nt, Artificial Sequence
  Description of Artificial Sequence: Synthetic oligonucleotide
caguccggccauguuguac

SEQ ID NO: 2351615 - RNA, 19 nt, Artificial Sequence
  Description of Artificial Sequence: Synthetic oligonucleotide
aggcuggcaauagggccag

SEQ ID NO: 2351616 - RNA, 19 nt, Artificial Sequence
  Description of Artificial Sequence: Synthetic oligonucleotide
cacgcccauacgcgcuugg

SEQ ID NO: 2351617 - RNA, 19 nt, Artificial Sequence
  Description of Artificial Sequence: Synthetic oligonucleotide
aguggucuucaugcagccu

SEQ ID NO: 2351618 - RNA, 19 nt, Artificial Sequence
  Description of Artificial Sequence: Synthetic oligonucleotide
accuggaaccccggaucuc

SEQ ID NO: 2351619 - RNA, 19 nt, Artificial Sequence
  Description of Artificial Sequence: Synthetic oligonucleotide
acgccuugguguugcccug

SEQ ID NO: 2351620 - RNA, 19 nt, Artificial Sequence
  Description of Artificial Sequence: Synthetic oligonucleotide
gcccugcucgauauaagcc

SEQ ID NO: 2351621 - RNA, 19 nt, Artificial Sequence
  Description of Artificial Sequence: Synthetic oligonucleotide
uggccugaggcuggcaaua

SEQ ID NO: 2351622 - RNA, 19 nt, Artificial Sequence
  Description of Artificial Sequence: Synthetic oligonucleotide
aacccuggucggacaggag

SEQ ID NO: 2351623 - RNA, 19 nt, Artificial Sequence
  Description of Artificial Sequence: Synthetic oligonucleotide
agccuugaauccaucucaa

SEQ ID NO: 2351624 - RNA, 19 nt, Artificial Sequence
  Description of Artificial Sequence: Synthetic oligonucleotide
ggccauguuguacgacccc

SEQ ID NO: 2351625 - RNA, 19 nt, Artificial Sequence
  Description of Artificial Sequence: Synthetic oligonucleotide
gaggcccguagaccaccgc

SEQ ID NO: 2351626 - RNA, 19 nt, Artificial Sequence
  Description of Artificial Sequence: Synthetic oligonucleotide
ccccaguaagauagaggcc

SEQ ID NO: 2351627 - RNA, 19 nt, Artificial Sequence
  Description of Artificial Sequence: Synthetic oligonucleotide
ggccugcgcaaacacgccc

SEQ ID NO: 2351628 - RNA, 19 nt, Artificial Sequence
  Description of Artificial Sequence: Synthetic oligonucleotide
ggauggcugccucaaaggu

SEQ ID NO: 2351629 - RNA, 19 nt, Artificial Sequence
  Description of Artificial Sequence: Synthetic oligonucleotide
cuugggcagcagccucuag

SEQ ID NO: 2351630 - RNA, 19 nt, Artificial Sequence
  Description of Artificial Sequence: Synthetic oligonucleotide
gcaauagggccagggcuag

SEQ ID NO: 2351631 - RNA, 19 nt, Artificial Sequence
  Description of Artificial Sequence: Synthetic oligonucleotide
cugaagguugcugaacuau

SEQ ID NO: 2351632 - RNA, 19 nt, Artificial Sequence
  Description of Artificial Sequence: Synthetic oligonucleotide
caccaucugccugcaguac

SEQ ID NO: 2351633 - RNA, 19 nt, Artificial Sequence
  Description of Artificial Sequence: Synthetic oligonucleotide
acuacacgauccagcuaga

SEQ ID NO: 2351634 - RNA, 19 nt, Artificial Sequence
  Description of Artificial Sequence: Synthetic oligonucleotide
ggcaauagggccagggcua

SEQ ID NO: 2351635 - RNA, 19 nt, Artificial Sequence
  Description of Artificial Sequence: Synthetic oligonucleotide
gcugccggacuacacgauc

SEQ ID NO: 2351636 - RNA, 19 nt, Artificial Sequence
  Description of Artificial Sequence: Synthetic oligonucleotide
ggcucgagaccuggaaccc

SEQ ID NO: 2351637 - RNA, 19 nt, Artificial Sequence
  Description of Artificial Sequence: Synthetic oligonucleotide
gccaacgccuugguguugc

SEQ ID NO: 2351638 - RNA, 19 nt, Artificial Sequence
  Description of Artificial Sequence: Synthetic oligonucleotide
agcucgcccgcgcgccgac

SEQ ID NO: 2351639 - RNA, 19 nt, Artificial Sequence
  Description of Artificial Sequence: Synthetic oligonucleotide
cccggucaggcaaggcucg

SEQ ID NO: 2351640 - RNA, 19 nt, Artificial Sequence
  Description of Artificial Sequence: Synthetic oligonucleotide
gagccgucggccugcgcaa

SEQ ID NO: 2351641 - RNA, 19 nt, Artificial Sequence
  Description of Artificial Sequence: Synthetic oligonucleotide
uccggccauguuguacgac

SEQ ID NO: 2351642 - RNA, 19 nt, Artificial Sequence
  Description of Artificial Sequence: Synthetic oligonucleotide
agggcuagcuggggaccuc

SEQ ID NO: 2351643 - RNA, 19 nt, Artificial Sequence
  Description of Artificial Sequence: Synthetic oligonucleotide
agcugagcaugcacauaca

SEQ ID NO: 2351644 - RNA, 19 nt, Artificial Sequence
  Description of Artificial Sequence: Synthetic oligonucleotide
ccggaucucgugaggcccg

SEQ ID NO: 2351645 - RNA, 19 nt, Artificial Sequence
  Description of Artificial Sequence: Synthetic oligonucleotide
gccauguuguacgacccca

SEQ ID NO: 2351646 - RNA, 19 nt, Artificial Sequence
  Description of Artificial Sequence: Synthetic oligonucleotide
cacgauccagcuagagugu

SEQ ID NO: 2351647 - RNA, 19 nt, Artificial Sequence
  Description of Artificial Sequence: Synthetic oligonucleotide
cccgcauggguaucccagc

SEQ ID NO: 2351648 - RNA, 19 nt, Artificial Sequence
  Description of Artificial Sequence: Synthetic oligonucleotide
ccucaaaggucuggcguag

SEQ ID NO: 2351649 - RNA, 19 nt, Artificial Sequence
  Description of Artificial Sequence: Synthetic oligonucleotide
gcuagagugugcacaucuc

SEQ ID NO: 2351650 - RNA, 19 nt, Artificial Sequence
  Description of Artificial Sequence: Synthetic oligonucleotide
gcgugggugcagcugugug

SEQ ID NO: 2351651 - RNA, 19 nt, Artificial Sequence
  Description of Artificial Sequence: Synthetic oligonucleotide
cgauccagcuagagugugc

SEQ ID NO: 2351652 - RNA, 19 nt, Artificial Sequence
  Description of Artificial Sequence: Synthetic oligonucleotide
gcgcuuggaucuugcgcag

SEQ ID NO: 2351653 - RNA, 19 nt, Artificial Sequence
  Description of Artificial Sequence: Synthetic oligonucleotide
cguaguugcagccccaucu

SEQ ID NO: 2351654 - RNA, 19 nt, Artificial Sequence
  Description of Artificial Sequence: Synthetic oligonucleotide
cguggcugcauuuacacau

SEQ ID NO: 2351655 - RNA, 19 nt, Artificial Sequence
  Description of Artificial Sequence: Synthetic oligonucleotide
cacauacaaagucccgcau

SEQ ID NO: 2351656 - RNA, 19 nt, Artificial Sequence
  Description of Artificial Sequence: Synthetic oligonucleotide
cagugcaaucuggccugag

SEQ ID NO: 2351657 - RNA, 19 nt, Artificial Sequence
  Description of Artificial Sequence: Synthetic oligonucleotide
cgauauaagccgagccguc

SEQ ID NO: 2351658 - RNA, 19 nt, Artificial Sequence
  Description of Artificial Sequence: Synthetic oligonucleotide
cauccauuacugccagcgu

SEQ ID NO: 2351659 - RNA, 19 nt, Artificial Sequence
  Description of Artificial Sequence: Synthetic oligonucleotide
cucaccagugcugaagguu

SEQ ID NO: 2351660 - RNA, 19 nt, Artificial Sequence
  Description of Artificial Sequence: Synthetic oligonucleotide
gaccaccgccaacgccuug

SEQ ID NO: 2351661 - RNA, 19 nt, Artificial Sequence
  Description of Artificial Sequence: Synthetic oligonucleotide
caccgccaacgccuuggug

SEQ ID NO: 2351662 - RNA, 19 nt, Artificial Sequence
  Description of Artificial Sequence: Synthetic oligonucleotide
gagcgugggugcagcugug

SEQ ID NO: 2351663 - RNA, 19 nt, Artificial Sequence
  Description of Artificial Sequence: Synthetic oligonucleotide
ccauuacugccagcguggc

SEQ ID NO: 2351664 - RNA, 19 nt, Artificial Sequence
  Description of Artificial Sequence: Synthetic oligonucleotide
cacaugcugccggacuaca

SEQ ID NO: 2351665 - RNA, 19 nt, Artificial Sequence
  Description of Artificial Sequence: Synthetic oligonucleotide
gucccgcauggguauccca

SEQ ID NO: 2351666 - RNA, 19 nt, Artificial Sequence
  Description of Artificial Sequence: Synthetic oligonucleotide
acgcccauacgcgcuugga

SEQ ID NO: 2351667 - RNA, 19 nt, Artificial Sequence
  Description of Artificial Sequence: Synthetic oligonucleotide
ccuucgcuugcgcucacca

SEQ ID NO: 2351668 - RNA, 19 nt, Artificial Sequence
  Description of Artificial Sequence: Synthetic oligonucleotide
acacgcccauacgcgcuug

SEQ ID NO: 2351669 - RNA, 19 nt, Artificial Sequence
  Description of Artificial Sequence: Synthetic oligonucleotide
cugcacaugcugccggacu

SEQ ID NO: 2351670 - RNA, 19 nt, Artificial Sequence
  Description of Artificial Sequence: Synthetic oligonucleotide
gccggacuacacgauccag

SEQ ID NO: 2351671 - RNA, 19 nt, Artificial Sequence
  Description of Artificial Sequence: Synthetic oligonucleotide
gagcccggucaggcaaggc

SEQ ID NO: 2351672 - RNA, 19 nt, Artificial Sequence
  Description of Artificial Sequence: Synthetic oligonucleotide
cguagaccaccgccaacgc

SEQ ID NO: 2351673 - RNA, 19 nt, Artificial Sequence
  Description of Artificial Sequence: Synthetic oligonucleotide
gggcuagcuggggaccucc

SEQ ID NO: 2351674 - RNA, 19 nt, Artificial Sequence
  Description of Artificial Sequence: Synthetic oligonucleotide
ggccuuuauuuuggauaug

SEQ ID NO: 2351675 - RNA, 19 nt, Artificial Sequence
  Description of Artificial Sequence: Synthetic oligonucleotide
cauuacugccagcguggcu

SEQ ID NO: 2351676 - RNA, 19 nt, Artificial Sequence
  Description of Artificial Sequence: Synthetic oligonucleotide
cagcuagagugugcacauc

SEQ ID NO: 2351677 - RNA, 19 nt, Artificial Sequence
  Description of Artificial Sequence: Synthetic oligonucleotide
cgaccgucuauccgguaac

SEQ ID NO: 2351678 - RNA, 19 nt, Artificial Sequence
  Description of Artificial Sequence: Synthetic oligonucleotide
cccauacgcgcuuggaucu

SEQ ID NO: 2351679 - RNA, 19 nt, Artificial Sequence
  Description of Artificial Sequence: Synthetic oligonucleotide
ccgucuauccgguaacccu

SEQ ID NO: 2351680 - RNA, 19 nt, Artificial Sequence
  Description of Artificial Sequence: Synthetic oligonucleotide
guccgacagugcugugcca

SEQ ID NO: 2351681 - RNA, 19 nt, Artificial Sequence
  Description of Artificial Sequence: Synthetic oligonucleotide
cgagccgucggccugcgca

SEQ ID NO: 2351682 - RNA, 19 nt, Artificial Sequence
  Description of Artificial Sequence: Synthetic oligonucleotide
cgcgccgaccgucuauccg

SEQ ID NO: 2351683 - RNA, 19 nt, Artificial Sequence
  Description of Artificial Sequence: Synthetic oligonucleotide
ccgguaacccuggucggac

SEQ ID NO: 2351684 - RNA, 19 nt, Artificial Sequence
  Description of Artificial Sequence: Synthetic oligonucleotide
ccgaccgucuauccgguaa

SEQ ID NO: 2351685 - RNA, 19 nt, Artificial Sequence
  Description of Artificial Sequence: Synthetic oligonucleotide
ggacuacacgauccagcua

SEQ ID NO: 2351686 - RNA, 19 nt, Artificial Sequence
  Description of Artificial Sequence: Synthetic oligonucleotide
gucggacaggagcuccagu

SEQ ID NO: 2351687 - RNA, 19 nt, Artificial Sequence
  Description of Artificial Sequence: Synthetic oligonucleotide
cuagaggaacaggccuuua

SEQ ID NO: 2351688 - RNA, 19 nt, Artificial Sequence
  Description of Artificial Sequence: Synthetic oligonucleotide
ccgacagugcugugccauc

SEQ ID NO: 2351689 - RNA, 19 nt, Artificial Sequence
  Description of Artificial Sequence: Synthetic oligonucleotide
gguccccaugaggccuucg

SEQ ID NO: 2351690 - RNA, 19 nt, Artificial Sequence
  Description of Artificial Sequence: Synthetic oligonucleotide
cggacuacacgauccagcu

SEQ ID NO: 2351691 - RNA, 19 nt, Artificial Sequence
  Description of Artificial Sequence: Synthetic oligonucleotide
caguucacuagagcccggu

SEQ ID NO: 2351692 - RNA, 19 nt, Artificial Sequence
  Description of Artificial Sequence: Synthetic oligonucleotide
ccaacgccuugguguugcc

SEQ ID NO: 2351693 - RNA, 19 nt, Artificial Sequence
  Description of Artificial Sequence: Synthetic oligonucleotide
gcguaguugcagccccauc

SEQ ID NO: 2351694 - RNA, 19 nt, Artificial Sequence
  Description of Artificial Sequence: Synthetic oligonucleotide
cuggaaccccggaucucgu

SEQ ID NO: 2351695 - RNA, 19 nt, Artificial Sequence
  Description of Artificial Sequence: Synthetic oligonucleotide
cccguagaccaccgccaac

SEQ ID NO: 2351696 - RNA, 19 nt, Artificial Sequence
  Description of Artificial Sequence: Synthetic oligonucleotide
cgucggccugcgcaaacac

SEQ ID NO: 2351697 - RNA, 19 nt, Artificial Sequence
  Description of Artificial Sequence: Synthetic oligonucleotide
cccuggucggacaggagcu

SEQ ID NO: 2351698 - RNA, 19 nt, Artificial Sequence
  Description of Artificial Sequence: Synthetic oligonucleotide
gccccaucucacaagacuu

SEQ ID NO: 2351699 - RNA, 19 nt, Artificial Sequence
  Description of Artificial Sequence: Synthetic oligonucleotide
gcugcuugggcagcagccu

SEQ ID NO: 2351700 - RNA, 19 nt, Artificial Sequence
  Description of Artificial Sequence: Synthetic oligonucleotide
ccccaucucacaagacuua

SEQ ID NO: 2351701 - RNA, 19 nt, Artificial Sequence
  Description of Artificial Sequence: Synthetic oligonucleotide
gcaaggcucgagaccugga

SEQ ID NO: 2351702 - RNA, 19 nt, Artificial Sequence
  Description of Artificial Sequence: Synthetic oligonucleotide
cucaaaggucuggcguagu

SEQ ID NO: 2351703 - RNA, 19 nt, Artificial Sequence
  Description of Artificial Sequence: Synthetic oligonucleotide
ggguaucccagcauccauu

SEQ ID NO: 2351704 - RNA, 19 nt, Artificial Sequence
  Description of Artificial Sequence: Synthetic oligonucleotide
gcgcgccgaccgucuaucc

SEQ ID NO: 2351705 - RNA, 19 nt, Artificial Sequence
  Description of Artificial Sequence: Synthetic oligonucleotide
gcucaccagugcugaaggu

SEQ ID NO: 2351706 - RNA, 19 nt, Artificial Sequence
  Description of Artificial Sequence: Synthetic oligonucleotide
cggccugcgcaaacacgcc

SEQ ID NO: 2351707 - RNA, 19 nt, Artificial Sequence
  Description of Artificial Sequence: Synthetic oligonucleotide
acgguccccaugaggccuu

SEQ ID NO: 2351708 - RNA, 19 nt, Artificial Sequence
  Description of Artificial Sequence: Synthetic oligonucleotide
ccuggucggacaggagcuc

SEQ ID NO: 2351709 - RNA, 19 nt, Artificial Sequence
  Description of Artificial Sequence: Synthetic oligonucleotide
gccagcguggcugcauuua

SEQ ID NO: 2351710 - RNA, 19 nt, Artificial Sequence
  Description of Artificial Sequence: Synthetic oligonucleotide
uggggaccuccagcugcuu

SEQ ID NO: 2351711 - RNA, 19 nt, Artificial Sequence
  Description of Artificial Sequence: Synthetic oligonucleotide
cagggcuagcuggggaccu

SEQ ID NO: 2351712 - RNA, 19 nt, Artificial Sequence
  Description of Artificial Sequence: Synthetic oligonucleotide
gccuucgcuugcgcucacc

SEQ ID NO: 2351713 - RNA, 19 nt, Artificial Sequence
  Description of Artificial Sequence: Synthetic oligonucleotide
cgcuuggaucuugcgcagc

SEQ ID NO: 2351714 - RNA, 19 nt, Artificial Sequence
  Description of Artificial Sequence: Synthetic oligonucleotide
cugcgcaaacacgcccaua

SEQ ID NO: 2351715 - RNA, 19 nt, Artificial Sequence
  Description of Artificial Sequence: Synthetic oligonucleotide
cugccagcguggcugcauu

SEQ ID NO: 2351716 - RNA, 19 nt, Artificial Sequence
  Description of Artificial Sequence: Synthetic oligonucleotide
ccugcaguaccugcacaua

SEQ ID NO: 2351717 - RNA, 19 nt, Artificial Sequence
  Description of Artificial Sequence: Synthetic oligonucleotide
ccaucucaagcagugcaau

SEQ ID NO: 2351718 - RNA, 19 nt, Artificial Sequence
  Description of Artificial Sequence: Synthetic oligonucleotide
ggcuggcaauagggccagg

SEQ ID NO: 2351719 - RNA, 19 nt, Artificial Sequence
  Description of Artificial Sequence: Synthetic oligonucleotide
cgcuugcgcucaccagugc

SEQ ID NO: 2351720 - RNA, 19 nt, Artificial Sequence
  Description of Artificial Sequence: Synthetic oligonucleotide
cagcucgcccgcgcgccga

SEQ ID NO: 2351721 - RNA, 19 nt, Artificial Sequence
  Description of Artificial Sequence: Synthetic oligonucleotide
ggccuucgcuugcgcucac

SEQ ID NO: 2351722 - RNA, 19 nt, Artificial Sequence
  Description of Artificial Sequence: Synthetic oligonucleotide
cgguaacccuggucggaca

SEQ ID NO: 2351723 - RNA, 19 nt, Artificial Sequence
  Description of Artificial Sequence: Synthetic oligonucleotide
ccgucggccugcgcaaaca

SEQ ID NO: 2351724 - RNA, 19 nt, Artificial Sequence
  Description of Artificial Sequence: Synthetic oligonucleotide
cgcgcgccgaccgucuauc

SEQ ID NO: 2351725 - RNA, 19 nt, Artificial Sequence
  Description of Artificial Sequence: Synthetic oligonucleotide
ggaucucgugaggcccgua

SEQ ID NO: 2351726 - RNA, 19 nt, Artificial Sequence
  Description of Artificial Sequence: Synthetic oligonucleotide
gccgaccgucuauccggua

SEQ ID NO: 2351727 - RNA, 19 nt, Artificial Sequence
  Description of Artificial Sequence: Synthetic oligonucleotide
ccgccaacgccuugguguu

SEQ ID NO: 2351728 - RNA, 19 nt, Artificial Sequence
  Description of Artificial Sequence: Synthetic oligonucleotide
ccugcgcaaacacgcccau

SEQ ID NO: 2351729 - RNA, 19 nt, Artificial Sequence
  Description of Artificial Sequence: Synthetic oligonucleotide
ccgagccgucggccugcgc

SEQ ID NO: 2351730 - RNA, 19 nt, Artificial Sequence
  Description of Artificial Sequence: Synthetic oligonucleotide
ccaguccggccauguugua

SEQ ID NO: 2351731 - RNA, 19 nt, Artificial Sequence
  Description of Artificial Sequence: Synthetic oligonucleotide
cgcccauacgcgcuuggau

SEQ ID NO: 2351732 - RNA, 19 nt, Artificial Sequence
  Description of Artificial Sequence: Synthetic oligonucleotide
cgcauggguaucccagcau

SEQ ID NO: 2351733 - RNA, 19 nt, Artificial Sequence
  Description of Artificial Sequence: Synthetic oligonucleotide
ccggucaggcaaggcucga

SEQ ID NO: 2351734 - RNA, 19 nt, Artificial Sequence
  Description of Artificial Sequence: Synthetic oligonucleotide
cgccaacgccuugguguug

SEQ ID NO: 2351735 - RNA, 19 nt, Artificial Sequence
  Description of Artificial Sequence: Synthetic oligonucleotide
ccaccgccaacgccuuggu

SEQ ID NO: 2351736 - RNA, 19 nt, Artificial Sequence
  Description of Artificial Sequence: Synthetic oligonucleotide
cgccgaccgucuauccggu

SEQ ID NO: 2351737 - RNA, 19 nt, Artificial Sequence
  Description of Artificial Sequence: Synthetic oligonucleotide
ccauacgcgcuuggaucuu

SEQ ID NO: 2351738 - RNA, 19 nt, Artificial Sequence
  Description of Artificial Sequence: Synthetic oligonucleotide
gcccgcgcgccgaccgucu

SEQ ID NO: 2351739 - RNA, 19 nt, Artificial Sequence
  Description of Artificial Sequence: Synthetic oligonucleotide
cgguccccaugaggccuuc

SEQ ID NO: 2351740 - RNA, 19 nt, Artificial Sequence
  Description of Artificial Sequence: Synthetic oligonucleotide
cccgcgcgccgaccgucua

SEQ ID NO: 2351741 - RNA, 19 nt, Artificial Sequence
  Description of Artificial Sequence: Synthetic oligonucleotide
ccgcgcgccgaccgucuau

SEQ ID NO: 2351742 - RNA, 19 nt, Artificial Sequence
  Description of Artificial Sequence: Synthetic oligonucleotide
cggaucucgugaggcccgu

SEQ ID NO: 2351743 - RNA, 19 nt, Artificial Sequence
  Description of Artificial Sequence: Synthetic oligonucleotide
aaaugcuuguguuugaagc

SEQ ID NO: 2351744 - RNA, 19 nt, Artificial Sequence
  Description of Artificial Sequence: Synthetic oligonucleotide
aaggauaauaaaauuaugc

SEQ ID NO: 2351745 - RNA, 19 nt, Artificial Sequence
  Description of Artificial Sequence: Synthetic oligonucleotide
aauaugccaauauguaccc

SEQ ID NO: 2351746 - RNA, 19 nt, Artificial Sequence
  Description of Artificial Sequence: Synthetic oligonucleotide
ucuauaacaugucaccugg

SEQ ID NO: 2351747 - RNA, 19 nt, Artificial Sequence
  Description of Artificial Sequence: Synthetic oligonucleotide
uuaucuauaucaaauauuu

SEQ ID NO: 2351748 - RNA, 19 nt, Artificial Sequence
  Description of Artificial Sequence: Synthetic oligonucleotide
auauuuuggauucuucaac

SEQ ID NO: 2351749 - RNA, 19 nt, Artificial Sequence
  Description of Artificial Sequence: Synthetic oligonucleotide
aaauauuucaucagcuagg

SEQ ID NO: 2351750 - RNA, 19 nt, Artificial Sequence
  Description of Artificial Sequence: Synthetic oligonucleotide
ucaaggauaauaaaauuau

SEQ ID NO: 2351751 - RNA, 19 nt, Artificial Sequence
  Description of Artificial Sequence: Synthetic oligonucleotide
uaucuguaauuucagagug

SEQ ID NO: 2351752 - RNA, 19 nt, Artificial Sequence
  Description of Artificial Sequence: Synthetic oligonucleotide
aaagugaagaucaucaacu

SEQ ID NO: 2351753 - RNA, 19 nt, Artificial Sequence
  Description of Artificial Sequence: Synthetic oligonucleotide
aaugcugaauauauaguac

SEQ ID NO: 2351754 - RNA, 19 nt, Artificial Sequence
  Description of Artificial Sequence: Synthetic oligonucleotide
gaauaugccaauauguacc

SEQ ID NO: 2351755 - RNA, 19 nt, Artificial Sequence
  Description of Artificial Sequence: Synthetic oligonucleotide
uuauauuuuggauucuuca

SEQ ID NO: 2351756 - RNA, 19 nt, Artificial Sequence
  Description of Artificial Sequence: Synthetic oligonucleotide
agugaacagaugcaggggc

SEQ ID NO: 2351757 - RNA, 19 nt, Artificial Sequence
  Description of Artificial Sequence: Synthetic oligonucleotide
aggauaauaaaauuaugcu

SEQ ID NO: 2351758 - RNA, 19 nt, Artificial Sequence
  Description of Artificial Sequence: Synthetic oligonucleotide
uucgcuuccaaccugcucc

SEQ ID NO: 2351759 - RNA, 19 nt, Artificial Sequence
  Description of Artificial Sequence: Synthetic oligonucleotide
uauucugcaaaccauacuu

SEQ ID NO: 2351760 - RNA, 19 nt, Artificial Sequence
  Description of Artificial Sequence: Synthetic oligonucleotide
caaauauuucaucagcuag

SEQ ID NO: 2351761 - RNA, 19 nt, Artificial Sequence
  Description of Artificial Sequence: Synthetic oligonucleotide
ucuauaucaaauauuucau

SEQ ID NO: 2351762 - RNA, 19 nt, Artificial Sequence
  Description of Artificial Sequence: Synthetic oligonucleotide
agagugaacagaugcaggg

SEQ ID NO: 2351763 - RNA, 19 nt, Artificial Sequence
  Description of Artificial Sequence: Synthetic oligonucleotide
ugaauauauaguacaaauc

SEQ ID NO: 2351764 - RNA, 19 nt, Artificial Sequence
  Description of Artificial Sequence: Synthetic oligonucleotide
auaucaaauauuucaucag

SEQ ID NO: 2351765 - RNA, 19 nt, Artificial Sequence
  Description of Artificial Sequence: Synthetic oligonucleotide
auuuuggauucuucaacgc

SEQ ID NO: 2351766 - RNA, 19 nt, Artificial Sequence
  Description of Artificial Sequence: Synthetic oligonucleotide
agacuaauuuucuauaaca

SEQ ID NO: 2351767 - RNA, 19 nt, Artificial Sequence
  Description of Artificial Sequence: Synthetic oligonucleotide
aauauguacccaguuaucu

SEQ ID NO: 2351768 - RNA, 19 nt, Artificial Sequence
  Description of Artificial Sequence: Synthetic oligonucleotide
uuugcucuuauuuugcaga

SEQ ID NO: 2351769 - RNA, 19 nt, Artificial Sequence
  Description of Artificial Sequence: Synthetic oligonucleotide
uuugagacuaauuuucuau

SEQ ID NO: 2351770 - RNA, 19 nt, Artificial Sequence
  Description of Artificial Sequence: Synthetic oligonucleotide
ugaauaugccaauauguac

SEQ ID NO: 2351771 - RNA, 19 nt, Artificial Sequence
  Description of Artificial Sequence: Synthetic oligonucleotide
uaaaauuaugcuccacuac

SEQ ID NO: 2351772 - RNA, 19 nt, Artificial Sequence
  Description of Artificial Sequence: Synthetic oligonucleotide
uguguuugaagccuuggcu

SEQ ID NO: 2351773 - RNA, 19 nt, Artificial Sequence
  Description of Artificial Sequence: Synthetic oligonucleotide
uuucuuaucaaggcgaaga

SEQ ID NO: 2351774 - RNA, 19 nt, Artificial Sequence
  Description of Artificial Sequence: Synthetic oligonucleotide
uuuacugcaguuauuucaa

SEQ ID NO: 2351775 - RNA, 19 nt, Artificial Sequence
  Description of Artificial Sequence: Synthetic oligonucleotide
aagaucaucaacugaggau

SEQ ID NO: 2351776 - RNA, 19 nt, Artificial Sequence
  Description of Artificial Sequence: Synthetic oligonucleotide
aauuaugcuccacuacuca

SEQ ID NO: 2351777 - RNA, 19 nt, Artificial Sequence
  Description of Artificial Sequence: Synthetic oligonucleotide
ucugucuuuauauuuugga

SEQ ID NO: 2351778 - RNA, 19 nt, Artificial Sequence
  Description of Artificial Sequence: Synthetic oligonucleotide
gcaaaugcugaauauauag

SEQ ID NO: 2351779 - RNA, 19 nt, Artificial Sequence
  Description of Artificial Sequence: Synthetic oligonucleotide
uguccgucgaagcugaagc

SEQ ID NO: 2351780 - RNA, 19 nt, Artificial Sequence
  Description of Artificial Sequence: Synthetic oligonucleotide
aaaucuuucagaggcuuag

SEQ ID NO: 2351781 - RNA, 19 nt, Artificial Sequence
  Description of Artificial Sequence: Synthetic oligonucleotide
auuaugcuccacuacucac

SEQ ID NO: 2351782 - RNA, 19 nt, Artificial Sequence
  Description of Artificial Sequence: Synthetic oligonucleotide
ucguauuuucuuuaguugu

SEQ ID NO: 2351783 - RNA, 19 nt, Artificial Sequence
  Description of Artificial Sequence: Synthetic oligonucleotide
agaucaucaacugaggaug

SEQ ID NO: 2351784 - RNA, 19 nt, Artificial Sequence
  Description of Artificial Sequence: Synthetic oligonucleotide
aauauuucaucagcuagga

SEQ ID NO: 2351785 - RNA, 19 nt, Artificial Sequence
  Description of Artificial Sequence: Synthetic oligonucleotide
uucccuguccccaagcccg

SEQ ID NO: 2351786 - RNA, 19 nt, Artificial Sequence
  Description of Artificial Sequence: Synthetic oligonucleotide
aguuaucuauaucaaauau

SEQ ID NO: 2351787 - RNA, 19 nt, Artificial Sequence
  Description of Artificial Sequence: Synthetic oligonucleotide
uuuuggauucuucaacgcu

SEQ ID NO: 2351788 - RNA, 19 nt, Artificial Sequence
  Description of Artificial Sequence: Synthetic oligonucleotide
aaauuaugcuccacuacuc

SEQ ID NO: 2351789 - RNA, 19 nt, Artificial Sequence
  Description of Artificial Sequence: Synthetic oligonucleotide
auauaguacaaaucaacau

SEQ ID NO: 2351790 - RNA, 19 nt, Artificial Sequence
  Description of Artificial Sequence: Synthetic oligonucleotide
aucaacauucuucacagaa

SEQ ID NO: 2351791 - RNA, 19 nt, Artificial Sequence
  Description of Artificial Sequence: Synthetic oligonucleotide
uuuaguugucuuuucuucu

SEQ ID NO: 2351792 - RNA, 19 nt, Artificial Sequence
  Description of Artificial Sequence: Synthetic oligonucleotide
ugucuuuauauuuuggauu

SEQ ID NO: 2351793 - RNA, 19 nt, Artificial Sequence
  Description of Artificial Sequence: Synthetic oligonucleotide
gucuuuauauuuuggauuc

SEQ ID NO: 2351794 - RNA, 19 nt, Artificial Sequence
  Description of Artificial Sequence: Synthetic oligonucleotide
ugucacauuucucuggcac

SEQ ID NO: 2351795 - RNA, 19 nt, Artificial Sequence
  Description of Artificial Sequence: Synthetic oligonucleotide
uucuauaacaugucaccug

SEQ ID NO: 2351796 - RNA, 19 nt, Artificial Sequence
  Description of Artificial Sequence: Synthetic oligonucleotide
uauaacaugucaccugguc

SEQ ID NO: 2351797 - RNA, 19 nt, Artificial Sequence
  Description of Artificial Sequence: Synthetic oligonucleotide
uguauucugcaaaccauac

SEQ ID NO: 2351798 - RNA, 19 nt, Artificial Sequence
  Description of Artificial Sequence: Synthetic oligonucleotide
cuuauuuugcagaaaguga

SEQ ID NO: 2351799 - RNA, 19 nt, Artificial Sequence
  Description of Artificial Sequence: Synthetic oligonucleotide
auaacaugucaccugguca

SEQ ID NO: 2351800 - RNA, 19 nt, Artificial Sequence
  Description of Artificial Sequence: Synthetic oligonucleotide
uaaugcuggccaacaaagg

SEQ ID NO: 2351801 - RNA, 19 nt, Artificial Sequence
  Description of Artificial Sequence: Synthetic oligonucleotide
gcuaucuguaauuucagag

SEQ ID NO: 2351802 - RNA, 19 nt, Artificial Sequence
  Description of Artificial Sequence: Synthetic oligonucleotide
aguuauuucaaggauaaua

SEQ ID NO: 2351803 - RNA, 19 nt, Artificial Sequence
  Description of Artificial Sequence: Synthetic oligonucleotide
aauuucagagugaacagau

SEQ ID NO: 2351804 - RNA, 19 nt, Artificial Sequence
  Description of Artificial Sequence: Synthetic oligonucleotide
gcuaggaaaacaccaaagg

SEQ ID NO: 2351805 - RNA, 19 nt, Artificial Sequence
  Description of Artificial Sequence: Synthetic oligonucleotide
acauuucucuggcacaauc

SEQ ID NO: 2351806 - RNA, 19 nt, Artificial Sequence
  Description of Artificial Sequence: Synthetic oligonucleotide
uuuggauucuucaacgcuu

SEQ ID NO: 2351807 - RNA, 19 nt, Artificial Sequence
  Description of Artificial Sequence: Synthetic oligonucleotide
ucccaauuuguuuugcucu

SEQ ID NO: 2351808 - RNA, 19 nt, Artificial Sequence
  Description of Artificial Sequence: Synthetic oligonucleotide
uacuuuacucguauuuucu

SEQ ID NO: 2351809 - RNA, 19 nt, Artificial Sequence
  Description of Artificial Sequence: Synthetic oligonucleotide
uccguaauccacacuagcu

SEQ ID NO: 2351810 - RNA, 19 nt, Artificial Sequence
  Description of Artificial Sequence: Synthetic oligonucleotide
ucaaauauuucaucagcua

SEQ ID NO: 2351811 - RNA, 19 nt, Artificial Sequence
  Description of Artificial Sequence: Synthetic oligonucleotide
cauuucucuggcacaaucc

SEQ ID NO: 2351812 - RNA, 19 nt, Artificial Sequence
  Description of Artificial Sequence: Synthetic oligonucleotide
cuauaucaaauauuucauc

SEQ ID NO: 2351813 - RNA, 19 nt, Artificial Sequence
  Description of Artificial Sequence: Synthetic oligonucleotide
gagacuaauuuucuauaac

SEQ ID NO: 2351814 - RNA, 19 nt, Artificial Sequence
  Description of Artificial Sequence: Synthetic oligonucleotide
ugagacuaauuuucuauaa

SEQ ID NO: 2351815 - RNA, 19 nt, Artificial Sequence
  Description of Artificial Sequence: Synthetic oligonucleotide
cucguauuuucuuuaguug

SEQ ID NO: 2351816 - RNA, 19 nt, Artificial Sequence
  Description of Artificial Sequence: Synthetic oligonucleotide
uccuccuuacuuaaugcug

SEQ ID NO: 2351817 - RNA, 19 nt, Artificial Sequence
  Description of Artificial Sequence: Synthetic oligonucleotide
aacaccaaaggcaaaugcu

SEQ ID NO: 2351818 - RNA, 19 nt, Artificial Sequence
  Description of Artificial Sequence: Synthetic oligonucleotide
ucugcaaaccauacuuuac

SEQ ID NO: 2351819 - RNA, 19 nt, Artificial Sequence
  Description of Artificial Sequence: Synthetic oligonucleotide
ugguguuuaucaaaacuaa

SEQ ID NO: 2351820 - RNA, 19 nt, Artificial Sequence
  Description of Artificial Sequence: Synthetic oligonucleotide
agguucaccuuucuuauca

SEQ ID NO: 2351821 - RNA, 19 nt, Artificial Sequence
  Description of Artificial Sequence: Synthetic oligonucleotide
ucuguaauuucagagugaa

SEQ ID NO: 2351822 - RNA, 19 nt, Artificial Sequence
  Description of Artificial Sequence: Synthetic oligonucleotide
uuuguugcuaucuguaauu

SEQ ID NO: 2351823 - RNA, 19 nt, Artificial Sequence
  Description of Artificial Sequence: Synthetic oligonucleotide
uuuacucguauuuucuuua

SEQ ID NO: 2351824 - RNA, 19 nt, Artificial Sequence
  Description of Artificial Sequence: Synthetic oligonucleotide
uuucaaggauaauaaaauu

SEQ ID NO: 2351825 - RNA, 19 nt, Artificial Sequence
  Description of Artificial Sequence: Synthetic oligonucleotide
uaacaugucaccuggucau

SEQ ID NO: 2351826 - RNA, 19 nt, Artificial Sequence
  Description of Artificial Sequence: Synthetic oligonucleotide
caaggauaauaaaauuaug

SEQ ID NO: 2351827 - RNA, 19 nt, Artificial Sequence
  Description of Artificial Sequence: Synthetic oligonucleotide
ucaucucuuuggaaagucc

SEQ ID NO: 2351828 - RNA, 19 nt, Artificial Sequence
  Description of Artificial Sequence: Synthetic oligonucleotide
ugcaguuauuucaaggaua

SEQ ID NO: 2351829 - RNA, 19 nt, Artificial Sequence
  Description of Artificial Sequence: Synthetic oligonucleotide
aaaacaccaaaggcaaaug

SEQ ID NO: 2351830 - RNA, 19 nt, Artificial Sequence
  Description of Artificial Sequence: Synthetic oligonucleotide
uuucuauaacaugucaccu

SEQ ID NO: 2351831 - RNA, 19 nt, Artificial Sequence
  Description of Artificial Sequence: Synthetic oligonucleotide
aaccauacuuuacucguau

SEQ ID NO: 2351832 - RNA, 19 nt, Artificial Sequence
  Description of Artificial Sequence: Synthetic oligonucleotide
uggaucggaguuuucauuc

SEQ ID NO: 2351833 - RNA, 19 nt, Artificial Sequence
  Description of Artificial Sequence: Synthetic oligonucleotide
uuacucguauuuucuuuag

SEQ ID NO: 2351834 - RNA, 19 nt, Artificial Sequence
  Description of Artificial Sequence: Synthetic oligonucleotide
ugcugaauauauaguacaa

SEQ ID NO: 2351835 - RNA, 19 nt, Artificial Sequence
  Description of Artificial Sequence: Synthetic oligonucleotide
acucguauuuucuuuaguu

SEQ ID NO: 2351836 - RNA, 19 nt, Artificial Sequence
  Description of Artificial Sequence: Synthetic oligonucleotide
auugcauuugaagacauuu

SEQ ID NO: 2351837 - RNA, 19 nt, Artificial Sequence
  Description of Artificial Sequence: Synthetic oligonucleotide
aacucuuuuccuccuuacu

SEQ ID NO: 2351838 - RNA, 19 nt, Artificial Sequence
  Description of Artificial Sequence: Synthetic oligonucleotide
uagcacacugaauaugcca

SEQ ID NO: 2351839 - RNA, 19 nt, Artificial Sequence
  Description of Artificial Sequence: Synthetic oligonucleotide
ucugcaaaccucucucgug

SEQ ID NO: 2351840 - RNA, 19 nt, Artificial Sequence
  Description of Artificial Sequence: Synthetic oligonucleotide
aucaaggcgaagaugagcu

SEQ ID NO: 2351841 - RNA, 19 nt, Artificial Sequence
  Description of Artificial Sequence: Synthetic oligonucleotide
gcaaaccauacuuuacucg

SEQ ID NO: 2351842 - RNA, 19 nt, Artificial Sequence
  Description of Artificial Sequence: Synthetic oligonucleotide
uuugucccaauuuguuuug

SEQ ID NO: 2351843 - RNA, 19 nt, Artificial Sequence
  Description of Artificial Sequence: Synthetic oligonucleotide
agcugucacauuucucugg

SEQ ID NO: 2351844 - RNA, 19 nt, Artificial Sequence
  Description of Artificial Sequence: Synthetic oligonucleotide
uugagacuaauuuucuaua

SEQ ID NO: 2351845 - RNA, 19 nt, Artificial Sequence
  Description of Artificial Sequence: Synthetic oligonucleotide
aagccuuggcuccguaauc

SEQ ID NO: 2351846 - RNA, 19 nt, Artificial Sequence
  Description of Artificial Sequence: Synthetic oligonucleotide
cagagugaacagaugcagg

SEQ ID NO: 2351847 - RNA, 19 nt, Artificial Sequence
  Description of Artificial Sequence: Synthetic oligonucleotide
aaaacaguuugagacuaau

SEQ ID NO: 2351848 - RNA, 19 nt, Artificial Sequence
  Description of Artificial Sequence: Synthetic oligonucleotide
uaucaaggcgaagaugagc

SEQ ID NO: 2351849 - RNA, 19 nt, Artificial Sequence
  Description of Artificial Sequence: Synthetic oligonucleotide
cugcaaaccucucucgugc

SEQ ID NO: 2351850 - RNA, 19 nt, Artificial Sequence
  Description of Artificial Sequence: Synthetic oligonucleotide
ucuuaucaaggcgaagaug

SEQ ID NO: 2351851 - RNA, 19 nt, Artificial Sequence
  Description of Artificial Sequence: Synthetic oligonucleotide
ugcaaaccauacuuuacuc

SEQ ID NO: 2351852 - RNA, 19 nt, Artificial Sequence
  Description of Artificial Sequence: Synthetic oligonucleotide
uuucucuggcacaauccca

SEQ ID NO: 2351853 - RNA, 19 nt, Artificial Sequence
  Description of Artificial Sequence: Synthetic oligonucleotide
cucugucuuuauauuuugg

SEQ ID NO: 2351854 - RNA, 19 nt, Artificial Sequence
  Description of Artificial Sequence: Synthetic oligonucleotide
aacaaagguucaccuuucu

SEQ ID NO: 2351855 - RNA, 19 nt, Artificial Sequence
  Description of Artificial Sequence: Synthetic oligonucleotide
caaagguucaccuuucuua

SEQ ID NO: 2351856 - RNA, 19 nt, Artificial Sequence
  Description of Artificial Sequence: Synthetic oligonucleotide
uucuuaucaaggcgaagau

SEQ ID NO: 2351857 - RNA, 19 nt, Artificial Sequence
  Description of Artificial Sequence: Synthetic oligonucleotide
agccuuggcuccguaaucc

SEQ ID NO: 2351858 - RNA, 19 nt, Artificial Sequence
  Description of Artificial Sequence: Synthetic oligonucleotide
uuucccuguccccaagccc

SEQ ID NO: 2351859 - RNA, 19 nt, Artificial Sequence
  Description of Artificial Sequence: Synthetic oligonucleotide
gaucaucaacugaggaugg

SEQ ID NO: 2351860 - RNA, 19 nt, Artificial Sequence
  Description of Artificial Sequence: Synthetic oligonucleotide
cuucauagucuguauucug

SEQ ID NO: 2351861 - RNA, 19 nt, Artificial Sequence
  Description of Artificial Sequence: Synthetic oligonucleotide
aucagcuaggaaaacacca

SEQ ID NO: 2351862 - RNA, 19 nt, Artificial Sequence
  Description of Artificial Sequence: Synthetic oligonucleotide
ucaacugaggaugguuucc

SEQ ID NO: 2351863 - RNA, 19 nt, Artificial Sequence
  Description of Artificial Sequence: Synthetic oligonucleotide
caucagcuaggaaaacacc

SEQ ID NO: 2351864 - RNA, 19 nt, Artificial Sequence
  Description of Artificial Sequence: Synthetic oligonucleotide
uuccuccuuacuuaaugcu

SEQ ID NO: 2351865 - RNA, 19 nt, Artificial Sequence
  Description of Artificial Sequence: Synthetic oligonucleotide
cuuuggaaagucccuucgc

SEQ ID NO: 2351866 - RNA, 19 nt, Artificial Sequence
  Description of Artificial Sequence: Synthetic oligonucleotide
gagugaacagaugcagggg

SEQ ID NO: 2351867 - RNA, 19 nt, Artificial Sequence
  Description of Artificial Sequence: Synthetic oligonucleotide
caggaaaugcuuguguuug

SEQ ID NO: 2351868 - RNA, 19 nt, Artificial Sequence
  Description of Artificial Sequence: Synthetic oligonucleotide
ucugugaaguuuucugcaa

SEQ ID NO: 2351869 - RNA, 19 nt, Artificial Sequence
  Description of Artificial Sequence: Synthetic oligonucleotide
gaagcugaagcuggaucgg

SEQ ID NO: 2351870 - RNA, 19 nt, Artificial Sequence
  Description of Artificial Sequence: Synthetic oligonucleotide
ugcuccacuacucaccguu

SEQ ID NO: 2351871 - RNA, 19 nt, Artificial Sequence
  Description of Artificial Sequence: Synthetic oligonucleotide
acuacucaccguuucuaca

SEQ ID NO: 2351872 - RNA, 19 nt, Artificial Sequence
  Description of Artificial Sequence: Synthetic oligonucleotide
ugcuaucuguaauuucaga

SEQ ID NO: 2351873 - RNA, 19 nt, Artificial Sequence
  Description of Artificial Sequence: Synthetic oligonucleotide
agcuaggaaaacaccaaag

SEQ ID NO: 2351874 - RNA, 19 nt, Artificial Sequence
  Description of Artificial Sequence: Synthetic oligonucleotide
aguuuucauuccuccacca

SEQ ID NO: 2351875 - RNA, 19 nt, Artificial Sequence
  Description of Artificial Sequence: Synthetic oligonucleotide
cuagcacacugaauaugcc

SEQ ID NO: 2351876 - RNA, 19 nt, Artificial Sequence
  Description of Artificial Sequence: Synthetic oligonucleotide
caucuuccggccuuuguug

SEQ ID NO: 2351877 - RNA, 19 nt, Artificial Sequence
  Description of Artificial Sequence: Synthetic oligonucleotide
aaucaacauucuucacaga

SEQ ID NO: 2351878 - RNA, 19 nt, Artificial Sequence
  Description of Artificial Sequence: Synthetic oligonucleotide
agaaaacaguuugagacua

SEQ ID NO: 2351879 - RNA, 19 nt, Artificial Sequence
  Description of Artificial Sequence: Synthetic oligonucleotide
cugaauaugccaauaugua

SEQ ID NO: 2351880 - RNA, 19 nt, Artificial Sequence
  Description of Artificial Sequence: Synthetic oligonucleotide
uguugcuaucuguaauuuc

SEQ ID NO: 2351881 - RNA, 19 nt, Artificial Sequence
  Description of Artificial Sequence: Synthetic oligonucleotide
uacucguauuuucuuuagu

SEQ ID NO: 2351882 - RNA, 19 nt, Artificial Sequence
  Description of Artificial Sequence: Synthetic oligonucleotide
caauauguacccaguuauc

SEQ ID NO: 2351883 - RNA, 19 nt, Artificial Sequence
  Description of Artificial Sequence: Synthetic oligonucleotide
uccacuacucaccguuucu

SEQ ID NO: 2351884 - RNA, 19 nt, Artificial Sequence
  Description of Artificial Sequence: Synthetic oligonucleotide
uacuuaaugcuggccaaca

SEQ ID NO: 2351885 - RNA, 19 nt, Artificial Sequence
  Description of Artificial Sequence: Synthetic oligonucleotide
auauguacccaguuaucua

SEQ ID NO: 2351886 - RNA, 19 nt, Artificial Sequence
  Description of Artificial Sequence: Synthetic oligonucleotide
ccuccuuacuuaaugcugg

SEQ ID NO: 2351887 - RNA, 19 nt, Artificial Sequence
  Description of Artificial Sequence: Synthetic oligonucleotide
cuaucuguaauuucagagu

SEQ ID NO: 2351888 - RNA, 19 nt, Artificial Sequence
  Description of Artificial Sequence: Synthetic oligonucleotide
gaggcuuaguuucugugaa

SEQ ID NO: 2351889 - RNA, 19 nt, Artificial Sequence
  Description of Artificial Sequence: Synthetic oligonucleotide
ugcuuugucccaauuuguu

SEQ ID NO: 2351890 - RNA, 19 nt, Artificial Sequence
  Description of Artificial Sequence: Synthetic oligonucleotide
caaaccauacuuuacucgu

SEQ ID NO: 2351891 - RNA, 19 nt, Artificial Sequence
  Description of Artificial Sequence: Synthetic oligonucleotide
cuuaaugcuggccaacaaa

SEQ ID NO: 2351892 - RNA, 19 nt, Artificial Sequence
  Description of Artificial Sequence: Synthetic oligonucleotide
accuuucuuaucaaggcga

SEQ ID NO: 2351893 - RNA, 19 nt, Artificial Sequence
  Description of Artificial Sequence: Synthetic oligonucleotide
gugaaguuuucugcaaacc

SEQ ID NO: 2351894 - RNA, 19 nt, Artificial Sequence
  Description of Artificial Sequence: Synthetic oligonucleotide
uguacccaguuaucuauau

SEQ ID NO: 2351895 - RNA, 19 nt, Artificial Sequence
  Description of Artificial Sequence: Synthetic oligonucleotide
uccucaauuuacugcaguu

SEQ ID NO: 2351896 - RNA, 19 nt, Artificial Sequence
  Description of Artificial Sequence: Synthetic oligonucleotide
gaugguuucccugucccca

SEQ ID NO: 2351897 - RNA, 19 nt, Artificial Sequence
  Description of Artificial Sequence: Synthetic oligonucleotide
gcuagcacacugaauaugc

SEQ ID NO: 2351898 - RNA, 19 nt, Artificial Sequence
  Description of Artificial Sequence: Synthetic oligonucleotide
uugcucuuauuuugcagaa

SEQ ID NO: 2351899 - RNA, 19 nt, Artificial Sequence
  Description of Artificial Sequence: Synthetic oligonucleotide
ugcguuuuccagcucuguc

SEQ ID NO: 2351900 - RNA, 19 nt, Artificial Sequence
  Description of Artificial Sequence: Synthetic oligonucleotide
ugcuagcacacugaauaug

SEQ ID NO: 2351901 - RNA, 19 nt, Artificial Sequence
  Description of Artificial Sequence: Synthetic oligonucleotide
ggcaucaucucuuuggaaa

SEQ ID NO: 2351902 - RNA, 19 nt, Artificial Sequence
  Description of Artificial Sequence: Synthetic oligonucleotide
acuuuacucguauuuucuu

SEQ ID NO: 2351903 - RNA, 19 nt, Artificial Sequence
  Description of Artificial Sequence: Synthetic oligonucleotide
ucacauuucucuggcacaa

SEQ ID NO: 2351904 - RNA, 19 nt, Artificial Sequence
  Description of Artificial Sequence: Synthetic oligonucleotide
uuggauucuucaacgcuuu

SEQ ID NO: 2351905 - RNA, 19 nt, Artificial Sequence
  Description of Artificial Sequence: Synthetic oligonucleotide
caaugguguuuaucaaaac

SEQ ID NO: 2351906 - RNA, 19 nt, Artificial Sequence
  Description of Artificial Sequence: Synthetic oligonucleotide
uggccaacaaagguucacc

SEQ ID NO: 2351907 - RNA, 19 nt, Artificial Sequence
  Description of Artificial Sequence: Synthetic oligonucleotide
uccacacuagcugucacau

SEQ ID NO: 2351908 - RNA, 19 nt, Artificial Sequence
  Description of Artificial Sequence: Synthetic oligonucleotide
uccgucgaagcugaagcug

SEQ ID NO: 2351909 - RNA, 19 nt, Artificial Sequence
  Description of Artificial Sequence: Synthetic oligonucleotide
cuuacuuaaugcuggccaa

SEQ ID NO: 2351910 - RNA, 19 nt, Artificial Sequence
  Description of Artificial Sequence: Synthetic oligonucleotide
uuccaaccugcucccugcg

SEQ ID NO: 2351911 - RNA, 19 nt, Artificial Sequence
  Description of Artificial Sequence: Synthetic oligonucleotide
gacuaauuuucuauaacau

SEQ ID NO: 2351912 - RNA, 19 nt, Artificial Sequence
  Description of Artificial Sequence: Synthetic oligonucleotide
cacuacucaccguuucuac

SEQ ID NO: 2351913 - RNA, 19 nt, Artificial Sequence
  Description of Artificial Sequence: Synthetic oligonucleotide
ucuuuauauuuuggauucu

SEQ ID NO: 2351914 - RNA, 19 nt, Artificial Sequence
  Description of Artificial Sequence: Synthetic oligonucleotide
cuacucaccguuucuacaa

SEQ ID NO: 2351915 - RNA, 19 nt, Artificial Sequence
  Description of Artificial Sequence: Synthetic oligonucleotide
uccuuacuuaaugcuggcc

SEQ ID NO: 2351916 - RNA, 19 nt, Artificial Sequence
  Description of Artificial Sequence: Synthetic oligonucleotide
caugucaccuggucaucag

SEQ ID NO: 2351917 - RNA, 19 nt, Artificial Sequence
  Description of Artificial Sequence: Synthetic oligonucleotide
caacaaagguucaccuuuc

SEQ ID NO: 2351918 - RNA, 19 nt, Artificial Sequence
  Description of Artificial Sequence: Synthetic oligonucleotide
ucaucaacugaggaugguu

SEQ ID NO: 2351919 - RNA, 19 nt, Artificial Sequence
  Description of Artificial Sequence: Synthetic oligonucleotide
cuuggcuccguaauccaca

SEQ ID NO: 2351920 - RNA, 19 nt, Artificial Sequence
  Description of Artificial Sequence: Synthetic oligonucleotide
cucuggcacaaucccauug

SEQ ID NO: 2351921 - RNA, 19 nt, Artificial Sequence
  Description of Artificial Sequence: Synthetic oligonucleotide
gucacauuucucuggcaca

SEQ ID NO: 2351922 - RNA, 19 nt, Artificial Sequence
  Description of Artificial Sequence: Synthetic oligonucleotide
cuccuuacuuaaugcuggc

SEQ ID NO: 2351923 - RNA, 19 nt, Artificial Sequence
  Description of Artificial Sequence: Synthetic oligonucleotide
acuuaaugcuggccaacaa

SEQ ID NO: 2351924 - RNA, 19 nt, Artificial Sequence
  Description of Artificial Sequence: Synthetic oligonucleotide
aggcuuaguuucugugaag

SEQ ID NO: 2351925 - RNA, 19 nt, Artificial Sequence
  Description of Artificial Sequence: Synthetic oligonucleotide
uucuccaacccaucuucuc

SEQ ID NO: 2351926 - RNA, 19 nt, Artificial Sequence
  Description of Artificial Sequence: Synthetic oligonucleotide
aaggcgaagaugagcucug

SEQ ID NO: 2351927 - RNA, 19 nt, Artificial Sequence
  Description of Artificial Sequence: Synthetic oligonucleotide
caguuaucuauaucaaaua

SEQ ID NO: 2351928 - RNA, 19 nt, Artificial Sequence
  Description of Artificial Sequence: Synthetic oligonucleotide
accguuucuacaaaacuua

SEQ ID NO: 2351929 - RNA, 19 nt, Artificial Sequence
  Description of Artificial Sequence: Synthetic oligonucleotide
guuugaagccuuggcuccg

SEQ ID NO: 2351930 - RNA, 19 nt, Artificial Sequence
  Description of Artificial Sequence: Synthetic oligonucleotide
uuggcuccguaauccacac

SEQ ID NO: 2351931 - RNA, 19 nt, Artificial Sequence
  Description of Artificial Sequence: Synthetic oligonucleotide
augcuuguguuugaagccu

SEQ ID NO: 2351932 - RNA, 19 nt, Artificial Sequence
  Description of Artificial Sequence: Synthetic oligonucleotide
cucaauuuacugcaguuau

SEQ ID NO: 2351933 - RNA, 19 nt, Artificial Sequence
  Description of Artificial Sequence: Synthetic oligonucleotide
cuguauucugcaaaccaua

SEQ ID NO: 2351934 - RNA, 19 nt, Artificial Sequence
  Description of Artificial Sequence: Synthetic oligonucleotide
guuugagacuaauuuucua

SEQ ID NO: 2351935 - RNA, 19 nt, Artificial Sequence
  Description of Artificial Sequence: Synthetic oligonucleotide
cuuucuuaucaaggcgaag

SEQ ID NO: 2351936 - RNA, 19 nt, Artificial Sequence
  Description of Artificial Sequence: Synthetic oligonucleotide
uguccccaagcccgcaugu

SEQ ID NO: 2351937 - RNA, 19 nt, Artificial Sequence
  Description of Artificial Sequence: Synthetic oligonucleotide
ugaagccuuggcuccguaa

SEQ ID NO: 2351938 - RNA, 19 nt, Artificial Sequence
  Description of Artificial Sequence: Synthetic oligonucleotide
ucucucgugcuuuguccca

SEQ ID NO: 2351939 - RNA, 19 nt, Artificial Sequence
  Description of Artificial Sequence: Synthetic oligonucleotide
auauuucaucagcuaggaa

SEQ ID NO: 2351940 - RNA, 19 nt, Artificial Sequence
  Description of Artificial Sequence: Synthetic oligonucleotide
ccuuacuuaaugcuggcca

SEQ ID NO: 2351941 - RNA, 19 nt, Artificial Sequence
  Description of Artificial Sequence: Synthetic oligonucleotide
uacucaccguuucuacaaa

SEQ ID NO: 2351942 - RNA, 19 nt, Artificial Sequence
  Description of Artificial Sequence: Synthetic oligonucleotide
uuguugcuaucuguaauuu

SEQ ID NO: 2351943 - RNA, 19 nt, Artificial Sequence
  Description of Artificial Sequence: Synthetic oligonucleotide
ggaaagucccuucgcuucc

SEQ ID NO: 2351944 - RNA, 19 nt, Artificial Sequence
  Description of Artificial Sequence: Synthetic oligonucleotide
acucaccguuucuacaaaa

SEQ ID NO: 2351945 - RNA, 19 nt, Artificial Sequence
  Description of Artificial Sequence: Synthetic oligonucleotide
uucauuccuccaccauccu

SEQ ID NO: 2351946 - RNA, 19 nt, Artificial Sequence
  Description of Artificial Sequence: Synthetic oligonucleotide
ucgcuuccaaccugcuccc

SEQ ID NO: 2351947 - RNA, 19 nt, Artificial Sequence
  Description of Artificial Sequence: Synthetic oligonucleotide
uaguuucugugaaguuuuc

SEQ ID NO: 2351948 - RNA, 19 nt, Artificial Sequence
  Description of Artificial Sequence: Synthetic oligonucleotide
augcaggggcaucaucucu

SEQ ID NO: 2351949 - RNA, 19 nt, Artificial Sequence
  Description of Artificial Sequence: Synthetic oligonucleotide
uuccaacucuuuuccuccu

SEQ ID NO: 2351950 - RNA, 19 nt, Artificial Sequence
  Description of Artificial Sequence: Synthetic oligonucleotide
ggaucggaguuuucauucc

SEQ ID NO: 2351951 - RNA, 19 nt, Artificial Sequence
  Description of Artificial Sequence: Synthetic oligonucleotide
ccguaauccacacuagcug

SEQ ID NO: 2351952 - RNA, 19 nt, Artificial Sequence
  Description of Artificial Sequence: Synthetic oligonucleotide
ggcuccguaauccacacua

SEQ ID NO: 2351953 - RNA, 19 nt, Artificial Sequence
  Description of Artificial Sequence: Synthetic oligonucleotide
uugucccaauuuguuuugc

SEQ ID NO: 2351954 - RNA, 19 nt, Artificial Sequence
  Description of Artificial Sequence: Synthetic oligonucleotide
ucuuccggccuuuguugcu

SEQ ID NO: 2351955 - RNA, 19 nt, Artificial Sequence
  Description of Artificial Sequence: Synthetic oligonucleotide
ugguuucccuguccccaag

SEQ ID NO: 2351956 - RNA, 19 nt, Artificial Sequence
  Description of Artificial Sequence: Synthetic oligonucleotide
cgugcuuugucccaauuug

SEQ ID NO: 2351957 - RNA, 19 nt, Artificial Sequence
  Description of Artificial Sequence: Synthetic oligonucleotide
guacccaguuaucuauauc

SEQ ID NO: 2351958 - RNA, 19 nt, Artificial Sequence
  Description of Artificial Sequence: Synthetic oligonucleotide
ucccuucgcuuccaaccug

SEQ ID NO: 2351959 - RNA, 19 nt, Artificial Sequence
  Description of Artificial Sequence: Synthetic oligonucleotide
aucuguaauuucagaguga

SEQ ID NO: 2351960 - RNA, 19 nt, Artificial Sequence
  Description of Artificial Sequence: Synthetic oligonucleotide
aagcccgcauguguccguc

SEQ ID NO: 2351961 - RNA, 19 nt, Artificial Sequence
  Description of Artificial Sequence: Synthetic oligonucleotide
ccgucgaagcugaagcugg

SEQ ID NO: 2351962 - RNA, 19 nt, Artificial Sequence
  Description of Artificial Sequence: Synthetic oligonucleotide
ucaaggcgaagaugagcuc

SEQ ID NO: 2351963 - RNA, 19 nt, Artificial Sequence
  Description of Artificial Sequence: Synthetic oligonucleotide
cugcaaaccauacuuuacu

SEQ ID NO: 2351964 - RNA, 19 nt, Artificial Sequence
  Description of Artificial Sequence: Synthetic oligonucleotide
caauuuacugcaguuauuu

SEQ ID NO: 2351965 - RNA, 19 nt, Artificial Sequence
  Description of Artificial Sequence: Synthetic oligonucleotide
ugaagcuggaucggaguuu

SEQ ID NO: 2351966 - RNA, 19 nt, Artificial Sequence
  Description of Artificial Sequence: Synthetic oligonucleotide
cuuaguuucugugaaguuu

SEQ ID NO: 2351967 - RNA, 19 nt, Artificial Sequence
  Description of Artificial Sequence: Synthetic oligonucleotide
agcucugucuuuauauuuu

SEQ ID NO: 2351968 - RNA, 19 nt, Artificial Sequence
  Description of Artificial Sequence: Synthetic oligonucleotide
uccaaccugcucccugcgu

SEQ ID NO: 2351969 - RNA, 19 nt, Artificial Sequence
  Description of Artificial Sequence: Synthetic oligonucleotide
guauucugcaaaccauacu

SEQ ID NO: 2351970 - RNA, 19 nt, Artificial Sequence
  Description of Artificial Sequence: Synthetic oligonucleotide
auugccugcaaugguguuu

SEQ ID NO: 2351971 - RNA, 19 nt, Artificial Sequence
  Description of Artificial Sequence: Synthetic oligonucleotide
ccaguuaucuauaucaaau

SEQ ID NO: 2351972 - RNA, 19 nt, Artificial Sequence
  Description of Artificial Sequence: Synthetic oligonucleotide
uuugaagccuuggcuccgu

SEQ ID NO: 2351973 - RNA, 19 nt, Artificial Sequence
  Description of Artificial Sequence: Synthetic oligonucleotide
cuccacuacucaccguuuc

SEQ ID NO: 2351974 - RNA, 19 nt, Artificial Sequence
  Description of Artificial Sequence: Synthetic oligonucleotide
cuuuguugcuaucuguaau

SEQ ID NO: 2351975 - RNA, 19 nt, Artificial Sequence
  Description of Artificial Sequence: Synthetic oligonucleotide
cuggccaacaaagguucac

SEQ ID NO: 2351976 - RNA, 19 nt, Artificial Sequence
  Description of Artificial Sequence: Synthetic oligonucleotide
cuuuacucguauuuucuuu

SEQ ID NO: 2351977 - RNA, 19 nt, Artificial Sequence
  Description of Artificial Sequence: Synthetic oligonucleotide
uccaacucuuuuccuccuu

SEQ ID NO: 2351978 - RNA, 19 nt, Artificial Sequence
  Description of Artificial Sequence: Synthetic oligonucleotide
gcauuugaagacauuucca

SEQ ID NO: 2351979 - RNA, 19 nt, Artificial Sequence
  Description of Artificial Sequence: Synthetic oligonucleotide
accauacuuuacucguauu

SEQ ID NO: 2351980 - RNA, 19 nt, Artificial Sequence
  Description of Artificial Sequence: Synthetic oligonucleotide
auucugcaaaccauacuuu

SEQ ID NO: 2351981 - RNA, 19 nt, Artificial Sequence
  Description of Artificial Sequence: Synthetic oligonucleotide
cuucgcuuccaaccugcuc

SEQ ID NO: 2351982 - RNA, 19 nt, Artificial Sequence
  Description of Artificial Sequence: Synthetic oligonucleotide
gaaaacaguuugagacuaa

SEQ ID NO: 2351983 - RNA, 19 nt, Artificial Sequence
  Description of Artificial Sequence: Synthetic oligonucleotide
guguccgucgaagcugaag

SEQ ID NO: 2351984 - RNA, 19 nt, Artificial Sequence
  Description of Artificial Sequence: Synthetic oligonucleotide
aucaucaacugaggauggu

SEQ ID NO: 2351985 - RNA, 19 nt, Artificial Sequence
  Description of Artificial Sequence: Synthetic oligonucleotide
gguguuuaucaaaacuaaa

SEQ ID NO: 2351986 - RNA, 19 nt, Artificial Sequence
  Description of Artificial Sequence: Synthetic oligonucleotide
caccguuucuacaaaacuu

SEQ ID NO: 2351987 - RNA, 19 nt, Artificial Sequence
  Description of Artificial Sequence: Synthetic oligonucleotide
auaugccaauauguaccca

SEQ ID NO: 2351988 - RNA, 19 nt, Artificial Sequence
  Description of Artificial Sequence: Synthetic oligonucleotide
ggaugguuucccugucccc

SEQ ID NO: 2351989 - RNA, 19 nt, Artificial Sequence
  Description of Artificial Sequence: Synthetic oligonucleotide
gguuucccuguccccaagc

SEQ ID NO: 2351990 - RNA, 19 nt, Artificial Sequence
  Description of Artificial Sequence: Synthetic oligonucleotide
caucaacugaggaugguuu

SEQ ID NO: 2351991 - RNA, 19 nt, Artificial Sequence
  Description of Artificial Sequence: Synthetic oligonucleotide
gcagaaagugaagaucauc

SEQ ID NO: 2351992 - RNA, 19 nt, Artificial Sequence
  Description of Artificial Sequence: Synthetic oligonucleotide
gcugaauauauaguacaaa

SEQ ID NO: 2351993 - RNA, 19 nt, Artificial Sequence
  Description of Artificial Sequence: Synthetic oligonucleotide
caggcccucuccuuuucuc

SEQ ID NO: 2351994 - RNA, 19 nt, Artificial Sequence
  Description of Artificial Sequence: Synthetic oligonucleotide
auguguccgucgaagcuga

SEQ ID NO: 2351995 - RNA, 19 nt, Artificial Sequence
  Description of Artificial Sequence: Synthetic oligonucleotide
ucccuguccccaagcccgc

SEQ ID NO: 2351996 - RNA, 19 nt, Artificial Sequence
  Description of Artificial Sequence: Synthetic oligonucleotide
cugcaaugguguuuaucaa

SEQ ID NO: 2351997 - RNA, 19 nt, Artificial Sequence
  Description of Artificial Sequence: Synthetic oligonucleotide
caaggcgaagaugagcucu

SEQ ID NO: 2351998 - RNA, 19 nt, Artificial Sequence
  Description of Artificial Sequence: Synthetic oligonucleotide
ggggcaucaucucuuugga

SEQ ID NO: 2351999 - RNA, 19 nt, Artificial Sequence
  Description of Artificial Sequence: Synthetic oligonucleotide
agcccgcauguguccgucg

SEQ ID NO: 2352000 - RNA, 19 nt, Artificial Sequence
  Description of Artificial Sequence: Synthetic oligonucleotide
cagaugcaggggcaucauc

SEQ ID NO: 2352001 - RNA, 19 nt, Artificial Sequence
  Description of Artificial Sequence: Synthetic oligonucleotide
cccuucgcuuccaaccugc

SEQ ID NO: 2352002 - RNA, 19 nt, Artificial Sequence
  Description of Artificial Sequence: Synthetic oligonucleotide
gaagcuggaucggaguuuu

SEQ ID NO: 2352003 - RNA, 19 nt, Artificial Sequence
  Description of Artificial Sequence: Synthetic oligonucleotide
ucucgugcuuugucccaau

SEQ ID NO: 2352004 - RNA, 19 nt, Artificial Sequence
  Description of Artificial Sequence: Synthetic oligonucleotide
ggcuuaguuucugugaagu

SEQ ID NO: 2352005 - RNA, 19 nt, Artificial Sequence
  Description of Artificial Sequence: Synthetic oligonucleotide
uugaagccuuggcuccgua

SEQ ID NO: 2352006 - RNA, 19 nt, Artificial Sequence
  Description of Artificial Sequence: Synthetic oligonucleotide
uggcuccguaauccacacu

SEQ ID NO: 2352007 - RNA, 19 nt, Artificial Sequence
  Description of Artificial Sequence: Synthetic oligonucleotide
cugcaguuauuucaaggau

SEQ ID NO: 2352008 - RNA, 19 nt, Artificial Sequence
  Description of Artificial Sequence: Synthetic oligonucleotide
cgaagaugagcucugaccu

SEQ ID NO: 2352009 - RNA, 19 nt, Artificial Sequence
  Description of Artificial Sequence: Synthetic oligonucleotide
gucccuucgcuuccaaccu

SEQ ID NO: 2352010 - RNA, 19 nt, Artificial Sequence
  Description of Artificial Sequence: Synthetic oligonucleotide
cuauaacaugucaccuggu

SEQ ID NO: 2352011 - RNA, 19 nt, Artificial Sequence
  Description of Artificial Sequence: Synthetic oligonucleotide
cugucacauuucucuggca

SEQ ID NO: 2352012 - RNA, 19 nt, Artificial Sequence
  Description of Artificial Sequence: Synthetic oligonucleotide
cucccugcguuuuccagcu

SEQ ID NO: 2352013 - RNA, 19 nt, Artificial Sequence
  Description of Artificial Sequence: Synthetic oligonucleotide
ccaacaaagguucaccuuu

SEQ ID NO: 2352014 - RNA, 19 nt, Artificial Sequence
  Description of Artificial Sequence: Synthetic oligonucleotide
cacuagcugucacauuucu

SEQ ID NO: 2352015 - RNA, 19 nt, Artificial Sequence
  Description of Artificial Sequence: Synthetic oligonucleotide
uuccggccuuuguugcuau

SEQ ID NO: 2352016 - RNA, 19 nt, Artificial Sequence
  Description of Artificial Sequence: Synthetic oligonucleotide
gguucaccuuucuuaucaa

SEQ ID NO: 2352017 - RNA, 19 nt, Artificial Sequence
  Description of Artificial Sequence: Synthetic oligonucleotide
auguacccaguuaucuaua

SEQ ID NO: 2352018 - RNA, 19 nt, Artificial Sequence
  Description of Artificial Sequence: Synthetic oligonucleotide
ggccaacaaagguucaccu

SEQ ID NO: 2352019 - RNA, 19 nt, Artificial Sequence
  Description of Artificial Sequence: Synthetic oligonucleotide
aaccugcucccugcguuuu

SEQ ID NO: 2352020 - RNA, 19 nt, Artificial Sequence
  Description of Artificial Sequence: Synthetic oligonucleotide
ccuuuguugcuaucuguaa

SEQ ID NO: 2352021 - RNA, 19 nt, Artificial Sequence
  Description of Artificial Sequence: Synthetic oligonucleotide
augcuccacuacucaccgu

SEQ ID NO: 2352022 - RNA, 19 nt, Artificial Sequence
  Description of Artificial Sequence: Synthetic oligonucleotide
uguguccgucgaagcugaa

SEQ ID NO: 2352023 - RNA, 19 nt, Artificial Sequence
  Description of Artificial Sequence: Synthetic oligonucleotide
cagcucugucuuuauauuu

SEQ ID NO: 2352024 - RNA, 19 nt, Artificial Sequence
  Description of Artificial Sequence: Synthetic oligonucleotide
ccugcguuuuccagcucug

SEQ ID NO: 2352025 - RNA, 19 nt, Artificial Sequence
  Description of Artificial Sequence: Synthetic oligonucleotide
guccgucgaagcugaagcu

SEQ ID NO: 2352026 - RNA, 19 nt, Artificial Sequence
  Description of Artificial Sequence: Synthetic oligonucleotide
cuggaucggaguuuucauu

SEQ ID NO: 2352027 - RNA, 19 nt, Artificial Sequence
  Description of Artificial Sequence: Synthetic oligonucleotide
gcuuugucccaauuuguuu

SEQ ID NO: 2352028 - RNA, 19 nt, Artificial Sequence
  Description of Artificial Sequence: Synthetic oligonucleotide
cguaauccacacuagcugu

SEQ ID NO: 2352029 - RNA, 19 nt, Artificial Sequence
  Description of Artificial Sequence: Synthetic oligonucleotide
ccgcauguguccgucgaag

SEQ ID NO: 2352030 - RNA, 19 nt, Artificial Sequence
  Description of Artificial Sequence: Synthetic oligonucleotide
ggccuuuguugcuaucugu

SEQ ID NO: 2352031 - RNA, 19 nt, Artificial Sequence
  Description of Artificial Sequence: Synthetic oligonucleotide
ccguuucuacaaaacuuaa

SEQ ID NO: 2352032 - RNA, 19 nt, Artificial Sequence
  Description of Artificial Sequence: Synthetic oligonucleotide
ccucaauuuacugcaguua

SEQ ID NO: 2352033 - RNA, 19 nt, Artificial Sequence
  Description of Artificial Sequence: Synthetic oligonucleotide
gcuggaucggaguuuucau

SEQ ID NO: 2352034 - RNA, 19 nt, Artificial Sequence
  Description of Artificial Sequence: Synthetic oligonucleotide
cuuccggccuuuguugcua

SEQ ID NO: 2352035 - RNA, 19 nt, Artificial Sequence
  Description of Artificial Sequence: Synthetic oligonucleotide
gccuuggcuccguaaucca

SEQ ID NO: 2352036 - RNA, 19 nt, Artificial Sequence
  Description of Artificial Sequence: Synthetic oligonucleotide
gccugcaaugguguuuauc

SEQ ID NO: 2352037 - RNA, 19 nt, Artificial Sequence
  Description of Artificial Sequence: Synthetic oligonucleotide
cugcucccugcguuuucca

SEQ ID NO: 2352038 - RNA, 19 nt, Artificial Sequence
  Description of Artificial Sequence: Synthetic oligonucleotide
cucucgugcuuugucccaa

SEQ ID NO: 2352039 - RNA, 19 nt, Artificial Sequence
  Description of Artificial Sequence: Synthetic oligonucleotide
ugccugcaaugguguuuau

SEQ ID NO: 2352040 - RNA, 19 nt, Artificial Sequence
  Description of Artificial Sequence: Synthetic oligonucleotide
gccaacaaagguucaccuu

SEQ ID NO: 2352041 - RNA, 19 nt, Artificial Sequence
  Description of Artificial Sequence: Synthetic oligonucleotide
cggaguuuucauuccucca

SEQ ID NO: 2352042 - RNA, 19 nt, Artificial Sequence
  Description of Artificial Sequence: Synthetic oligonucleotide
gcccgcauguguccgucga

SEQ ID NO: 2352043 - RNA, 19 nt, Artificial Sequence
  Description of Artificial Sequence: Synthetic oligonucleotide
cggccuuuguugcuaucug

SEQ ID NO: 2352044 - RNA, 19 nt, Artificial Sequence
  Description of Artificial Sequence: Synthetic oligonucleotide
ccaggaaaugcuuguguuu

SEQ ID NO: 2352045 - RNA, 19 nt, Artificial Sequence
  Description of Artificial Sequence: Synthetic oligonucleotide
caaccugcucccugcguuu

SEQ ID NO: 2352046 - RNA, 19 nt, Artificial Sequence
  Description of Artificial Sequence: Synthetic oligonucleotide
cauugccugcaaugguguu

SEQ ID NO: 2352047 - RNA, 19 nt, Artificial Sequence
  Description of Artificial Sequence: Synthetic oligonucleotide
caagcccgcauguguccgu

SEQ ID NO: 2352048 - RNA, 19 nt, Artificial Sequence
  Description of Artificial Sequence: Synthetic oligonucleotide
cccugcguuuuccagcucu

SEQ ID NO: 2352049 - RNA, 19 nt, Artificial Sequence
  Description of Artificial Sequence: Synthetic oligonucleotide
ccaauuuguuuugcucuua

SEQ ID NO: 2352050 - RNA, 19 nt, Artificial Sequence
  Description of Artificial Sequence: Synthetic oligonucleotide
ccacuacucaccguuucua

SEQ ID NO: 2352051 - RNA, 19 nt, Artificial Sequence
  Description of Artificial Sequence: Synthetic oligonucleotide
cucgugcuuugucccaauu

SEQ ID NO: 2352052 - RNA, 19 nt, Artificial Sequence
  Description of Artificial Sequence: Synthetic oligonucleotide
ccaaccugcucccugcguu

SEQ ID NO: 2352053 - RNA, 19 nt, Artificial Sequence
  Description of Artificial Sequence: Synthetic oligonucleotide
gcaaaccucucucgugcuu

SEQ ID NO: 2352054 - RNA, 19 nt, Artificial Sequence
  Description of Artificial Sequence: Synthetic oligonucleotide
cacauuucucuggcacaau

SEQ ID NO: 2352055 - RNA, 19 nt, Artificial Sequence
  Description of Artificial Sequence: Synthetic oligonucleotide
ccggccuuuguugcuaucu

SEQ ID NO: 2352056 - RNA, 19 nt, Artificial Sequence
  Description of Artificial Sequence: Synthetic oligonucleotide
cccgcauguguccgucgaa

SEQ ID NO: 2352057 - RNA, 19 nt, Artificial Sequence
  Description of Artificial Sequence: Synthetic oligonucleotide
ccuucgcuuccaaccugcu

SEQ ID NO: 2352058 - RNA, 19 nt, Artificial Sequence
  Description of Artificial Sequence: Synthetic oligonucleotide
gcuccacuacucaccguuu

SEQ ID NO: 2352059 - RNA, 19 nt, Artificial Sequence
  Description of Artificial Sequence: Synthetic oligonucleotide
aaaucaucguaguagaagg

SEQ ID NO: 2352060 - RNA, 19 nt, Artificial Sequence
  Description of Artificial Sequence: Synthetic oligonucleotide
aaaaggugccaccaucccc

SEQ ID NO: 2352061 - RNA, 19 nt, Artificial Sequence
  Description of Artificial Sequence: Synthetic oligonucleotide
ucugucaccggauuggugg

SEQ ID NO: 2352062 - RNA, 19 nt, Artificial Sequence
  Description of Artificial Sequence: Synthetic oligonucleotide
ucuccuucgagucuugugg

SEQ ID NO: 2352063 - RNA, 19 nt, Artificial Sequence
  Description of Artificial Sequence: Synthetic oligonucleotide
agugaaaucaucguaguag

SEQ ID NO: 2352064 - RNA, 19 nt, Artificial Sequence
  Description of Artificial Sequence: Synthetic oligonucleotide
gaaccaggcacccucaggg

SEQ ID NO: 2352065 - RNA, 19 nt, Artificial Sequence
  Description of Artificial Sequence: Synthetic oligonucleotide
gaaaucaucguaguagaag

SEQ ID NO: 2352066 - RNA, 19 nt, Artificial Sequence
  Description of Artificial Sequence: Synthetic oligonucleotide
aaagaaaacccgaaccauc

SEQ ID NO: 2352067 - RNA, 19 nt, Artificial Sequence
  Description of Artificial Sequence: Synthetic oligonucleotide
aggacggugacaucugugc

SEQ ID NO: 2352068 - RNA, 19 nt, Artificial Sequence
  Description of Artificial Sequence: Synthetic oligonucleotide
guguugaccacucuguagg

SEQ ID NO: 2352069 - RNA, 19 nt, Artificial Sequence
  Description of Artificial Sequence: Synthetic oligonucleotide
uuuguguugaccacucugu

SEQ ID NO: 2352070 - RNA, 19 nt, Artificial Sequence
  Description of Artificial Sequence: Synthetic oligonucleotide
aguccuuuuguguugacca

SEQ ID NO: 2352071 - RNA, 19 nt, Artificial Sequence
  Description of Artificial Sequence: Synthetic oligonucleotide
gaaaacccgaaccaucagc

SEQ ID NO: 2352072 - RNA, 19 nt, Artificial Sequence
  Description of Artificial Sequence: Synthetic oligonucleotide
ucaucguaguagaaggggc

SEQ ID NO: 2352073 - RNA, 19 nt, Artificial Sequence
  Description of Artificial Sequence: Synthetic oligonucleotide
gucguauucacagaagucc

SEQ ID NO: 2352074 - RNA, 19 nt, Artificial Sequence
  Description of Artificial Sequence: Synthetic oligonucleotide
ucguauucacagaaguccc

SEQ ID NO: 2352075 - RNA, 19 nt, Artificial Sequence
  Description of Artificial Sequence: Synthetic oligonucleotide
gauucaggcacauucggga

SEQ ID NO: 2352076 - RNA, 19 nt, Artificial Sequence
  Description of Artificial Sequence: Synthetic oligonucleotide
cugacucuccucucgaugg

SEQ ID NO: 2352077 - RNA, 19 nt, Artificial Sequence
  Description of Artificial Sequence: Synthetic oligonucleotide
aaaacccgaaccaucagcu

SEQ ID NO: 2352078 - RNA, 19 nt, Artificial Sequence
  Description of Artificial Sequence: Synthetic oligonucleotide
uguguugaccacucuguag

SEQ ID NO: 2352079 - RNA, 19 nt, Artificial Sequence
  Description of Artificial Sequence: Synthetic oligonucleotide
aacccgaaccaucagcuga

SEQ ID NO: 2352080 - RNA, 19 nt, Artificial Sequence
  Description of Artificial Sequence: Synthetic oligonucleotide
guccauuucugucaguugc

SEQ ID NO: 2352081 - RNA, 19 nt, Artificial Sequence
  Description of Artificial Sequence: Synthetic oligonucleotide
aucaucguaguagaagggg

SEQ ID NO: 2352082 - RNA, 19 nt, Artificial Sequence
  Description of Artificial Sequence: Synthetic oligonucleotide
aaucaucguaguagaaggg

SEQ ID NO: 2352083 - RNA, 19 nt, Artificial Sequence
  Description of Artificial Sequence: Synthetic oligonucleotide
ucuuccgugagcugauucc

SEQ ID NO: 2352084 - RNA, 19 nt, Artificial Sequence
  Description of Artificial Sequence: Synthetic oligonucleotide
auucaggcacauucgggac

SEQ ID NO: 2352085 - RNA, 19 nt, Artificial Sequence
  Description of Artificial Sequence: Synthetic oligonucleotide
uggcgauucaggcacauuc

SEQ ID NO: 2352086 - RNA, 19 nt, Artificial Sequence
  Description of Artificial Sequence: Synthetic oligonucleotide
uacacuucccacuggugag

SEQ ID NO: 2352087 - RNA, 19 nt, Artificial Sequence
  Description of Artificial Sequence: Synthetic oligonucleotide
gcugcugucguauucacag

SEQ ID NO: 2352088 - RNA, 19 nt, Artificial Sequence
  Description of Artificial Sequence: Synthetic oligonucleotide
agagcugacucuccucucg

SEQ ID NO: 2352089 - RNA, 19 nt, Artificial Sequence
  Description of Artificial Sequence: Synthetic oligonucleotide
ugugcgaccgaguggagga

SEQ ID NO: 2352090 - RNA, 19 nt, Artificial Sequence
  Description of Artificial Sequence: Synthetic oligonucleotide
uucgguugggcuuggagac

SEQ ID NO: 2352091 - RNA, 19 nt, Artificial Sequence
  Description of Artificial Sequence: Synthetic oligonucleotide
agugucuacacuucccacu

SEQ ID NO: 2352092 - RNA, 19 nt, Artificial Sequence
  Description of Artificial Sequence: Synthetic oligonucleotide
gacaagugucuacacuucc

SEQ ID NO: 2352093 - RNA, 19 nt, Artificial Sequence
  Description of Artificial Sequence: Synthetic oligonucleotide
ggugaggagacacaggcgc

SEQ ID NO: 2352094 - RNA, 19 nt, Artificial Sequence
  Description of Artificial Sequence: Synthetic oligonucleotide
aggagaagccgcucacugc

SEQ ID NO: 2352095 - RNA, 19 nt, Artificial Sequence
  Description of Artificial Sequence: Synthetic oligonucleotide
gagaccggaucccagggag

SEQ ID NO: 2352096 - RNA, 19 nt, Artificial Sequence
  Description of Artificial Sequence: Synthetic oligonucleotide
gacacaggcgccaggacgg

SEQ ID NO: 2352097 - RNA, 19 nt, Artificial Sequence
  Description of Artificial Sequence: Synthetic oligonucleotide
guagaacuggacguggccg

SEQ ID NO: 2352098 - RNA, 19 nt, Artificial Sequence
  Description of Artificial Sequence: Synthetic oligonucleotide
augaugaucccggugauga

SEQ ID NO: 2352099 - RNA, 19 nt, Artificial Sequence
  Description of Artificial Sequence: Synthetic oligonucleotide
ugucguauucacagaaguc

SEQ ID NO: 2352100 - RNA, 19 nt, Artificial Sequence
  Description of Artificial Sequence: Synthetic oligonucleotide
gaaaaggugccaccauccc

SEQ ID NO: 2352101 - RNA, 19 nt, Artificial Sequence
  Description of Artificial Sequence: Synthetic oligonucleotide
accccugaggaggagaagc

SEQ ID NO: 2352102 - RNA, 19 nt, Artificial Sequence
  Description of Artificial Sequence: Synthetic oligonucleotide
gcugagcagaaucagggcg

SEQ ID NO: 2352103 - RNA, 19 nt, Artificial Sequence
  Description of Artificial Sequence: Synthetic oligonucleotide
gugaugaacagcacagcgg

SEQ ID NO: 2352104 - RNA, 19 nt, Artificial Sequence
  Description of Artificial Sequence: Synthetic oligonucleotide
agagugaaaucaucguagu

SEQ ID NO: 2352105 - RNA, 19 nt, Artificial Sequence
  Description of Artificial Sequence: Synthetic oligonucleotide
uggagaccggaucccaggg

SEQ ID NO: 2352106 - RNA, 19 nt, Artificial Sequence
  Description of Artificial Sequence: Synthetic oligonucleotide
uuggagaguccuuuugugu

SEQ ID NO: 2352107 - RNA, 19 nt, Artificial Sequence
  Description of Artificial Sequence: Synthetic oligonucleotide
ugcugucguauucacagaa

SEQ ID NO: 2352108 - RNA, 19 nt, Artificial Sequence
  Description of Artificial Sequence: Synthetic oligonucleotide
gacaaaggugaggagacac

SEQ ID NO: 2352109 - RNA, 19 nt, Artificial Sequence
  Description of Artificial Sequence: Synthetic oligonucleotide
auucgggacaagugucuac

SEQ ID NO: 2352110 - RNA, 19 nt, Artificial Sequence
  Description of Artificial Sequence: Synthetic oligonucleotide
uccagcagggugucggccg

SEQ ID NO: 2352111 - RNA, 19 nt, Artificial Sequence
  Description of Artificial Sequence: Synthetic oligonucleotide
uugaccacucuguaggcuc

SEQ ID NO: 2352112 - RNA, 19 nt, Artificial Sequence
  Description of Artificial Sequence: Synthetic oligonucleotide
uggaucugucaccggauug

SEQ ID NO: 2352113 - RNA, 19 nt, Artificial Sequence
  Description of Artificial Sequence: Synthetic oligonucleotide
ucccaaagaaaacccgaac

SEQ ID NO: 2352114 - RNA, 19 nt, Artificial Sequence
  Description of Artificial Sequence: Synthetic oligonucleotide
ggugacaucugugcgaccg

SEQ ID NO: 2352115 - RNA, 19 nt, Artificial Sequence
  Description of Artificial Sequence: Synthetic oligonucleotide
cccaaagaaaacccgaacc

SEQ ID NO: 2352116 - RNA, 19 nt, Artificial Sequence
  Description of Artificial Sequence: Synthetic oligonucleotide
ucuacacuucccacuggug

SEQ ID NO: 2352117 - RNA, 19 nt, Artificial Sequence
  Description of Artificial Sequence: Synthetic oligonucleotide
uucccaaagaaaacccgaa

SEQ ID NO: 2352118 - RNA, 19 nt, Artificial Sequence
  Description of Artificial Sequence: Synthetic oligonucleotide
cuguaggcucuguaggagg

SEQ ID NO: 2352119 - RNA, 19 nt, Artificial Sequence
  Description of Artificial Sequence: Synthetic oligonucleotide
aaccuuucccaguagucuu

SEQ ID NO: 2352120 - RNA, 19 nt, Artificial Sequence
  Description of Artificial Sequence: Synthetic oligonucleotide
agaaccuuucccaguaguc

SEQ ID NO: 2352121 - RNA, 19 nt, Artificial Sequence
  Description of Artificial Sequence: Synthetic oligonucleotide
aaacccgaaccaucagcug

SEQ ID NO: 2352122 - RNA, 19 nt, Artificial Sequence
  Description of Artificial Sequence: Synthetic oligonucleotide
aguagucuucgguugggcu

SEQ ID NO: 2352123 - RNA, 19 nt, Artificial Sequence
  Description of Artificial Sequence: Synthetic oligonucleotide
cuucgagucuuguggcucg

SEQ ID NO: 2352124 - RNA, 19 nt, Artificial Sequence
  Description of Artificial Sequence: Synthetic oligonucleotide
ugguguccauuucugucag

SEQ ID NO: 2352125 - RNA, 19 nt, Artificial Sequence
  Description of Artificial Sequence: Synthetic oligonucleotide
cccacuguagaacuggacg

SEQ ID NO: 2352126 - RNA, 19 nt, Artificial Sequence
  Description of Artificial Sequence: Synthetic oligonucleotide
aucagcugagccuggccuc

SEQ ID NO: 2352127 - RNA, 19 nt, Artificial Sequence
  Description of Artificial Sequence: Synthetic oligonucleotide
agugccuggggaaccaggc

SEQ ID NO: 2352128 - RNA, 19 nt, Artificial Sequence
  Description of Artificial Sequence: Synthetic oligonucleotide
uggagaguccuuuuguguu

SEQ ID NO: 2352129 - RNA, 19 nt, Artificial Sequence
  Description of Artificial Sequence: Synthetic oligonucleotide
ucguggaagaagaaccuuu

SEQ ID NO: 2352130 - RNA, 19 nt, Artificial Sequence
  Description of Artificial Sequence: Synthetic oligonucleotide
acagaagucccgcccacug

SEQ ID NO: 2352131 - RNA, 19 nt, Artificial Sequence
  Description of Artificial Sequence: Synthetic oligonucleotide
uucgggacaagugucuaca

SEQ ID NO: 2352132 - RNA, 19 nt, Artificial Sequence
  Description of Artificial Sequence: Synthetic oligonucleotide
gaugaucccggugaugaac

SEQ ID NO: 2352133 - RNA, 19 nt, Artificial Sequence
  Description of Artificial Sequence: Synthetic oligonucleotide
uggaggaaaaggugccacc

SEQ ID NO: 2352134 - RNA, 19 nt, Artificial Sequence
  Description of Artificial Sequence: Synthetic oligonucleotide
ugucuacacuucccacugg

SEQ ID NO: 2352135 - RNA, 19 nt, Artificial Sequence
  Description of Artificial Sequence: Synthetic oligonucleotide
aucugugcgaccgagugga

SEQ ID NO: 2352136 - RNA, 19 nt, Artificial Sequence
  Description of Artificial Sequence: Synthetic oligonucleotide
guagaaggggcuguucucc

SEQ ID NO: 2352137 - RNA, 19 nt, Artificial Sequence
  Description of Artificial Sequence: Synthetic oligonucleotide
uucuccuucgagucuugug

SEQ ID NO: 2352138 - RNA, 19 nt, Artificial Sequence
  Description of Artificial Sequence: Synthetic oligonucleotide
agggcgacaaaggugagga

SEQ ID NO: 2352139 - RNA, 19 nt, Artificial Sequence
  Description of Artificial Sequence: Synthetic oligonucleotide
cucgaugguucccuggcag

SEQ ID NO: 2352140 - RNA, 19 nt, Artificial Sequence
  Description of Artificial Sequence: Synthetic oligonucleotide
uggggaaccaggcacccuc

SEQ ID NO: 2352141 - RNA, 19 nt, Artificial Sequence
  Description of Artificial Sequence: Synthetic oligonucleotide
uagaacuggacguggccgu

SEQ ID NO: 2352142 - RNA, 19 nt, Artificial Sequence
  Description of Artificial Sequence: Synthetic oligonucleotide
cuacacuucccacugguga

SEQ ID NO: 2352143 - RNA, 19 nt, Artificial Sequence
  Description of Artificial Sequence: Synthetic oligonucleotide
agcagaaucagggcgacaa

SEQ ID NO: 2352144 - RNA, 19 nt, Artificial Sequence
  Description of Artificial Sequence: Synthetic oligonucleotide
guggaagaagaaccuuucc

SEQ ID NO: 2352145 - RNA, 19 nt, Artificial Sequence
  Description of Artificial Sequence: Synthetic oligonucleotide
cuucgguugggcuuggaga

SEQ ID NO: 2352146 - RNA, 19 nt, Artificial Sequence
  Description of Artificial Sequence: Synthetic oligonucleotide
ugggcuuggagaccggauc

SEQ ID NO: 2352147 - RNA, 19 nt, Artificial Sequence
  Description of Artificial Sequence: Synthetic oligonucleotide
auucccaaagaaaacccga

SEQ ID NO: 2352148 - RNA, 19 nt, Artificial Sequence
  Description of Artificial Sequence: Synthetic oligonucleotide
ccggagagugaaaucaucg

SEQ ID NO: 2352149 - RNA, 19 nt, Artificial Sequence
  Description of Artificial Sequence: Synthetic oligonucleotide
gagccuggccuccugacac

SEQ ID NO: 2352150 - RNA, 19 nt, Artificial Sequence
  Description of Artificial Sequence: Synthetic oligonucleotide
ugugcuauggaggcuccca

SEQ ID NO: 2352151 - RNA, 19 nt, Artificial Sequence
  Description of Artificial Sequence: Synthetic oligonucleotide
aggguggugagcuggugug

SEQ ID NO: 2352152 - RNA, 19 nt, Artificial Sequence
  Description of Artificial Sequence: Synthetic oligonucleotide
gaagccagagcugacucuc

SEQ ID NO: 2352153 - RNA, 19 nt, Artificial Sequence
  Description of Artificial Sequence: Synthetic oligonucleotide
ggaucugucaccggauugg

SEQ ID NO: 2352154 - RNA, 19 nt, Artificial Sequence
  Description of Artificial Sequence: Synthetic oligonucleotide
gacggugacaucugugcga

SEQ ID NO: 2352155 - RNA, 19 nt, Artificial Sequence
  Description of Artificial Sequence: Synthetic oligonucleotide
ggcucguggaagaagaacc

SEQ ID NO: 2352156 - RNA, 19 nt, Artificial Sequence
  Description of Artificial Sequence: Synthetic oligonucleotide
aguugcuggaacucaguuu

SEQ ID NO: 2352157 - RNA, 19 nt, Artificial Sequence
  Description of Artificial Sequence: Synthetic oligonucleotide
cuccuucgagucuuguggc

SEQ ID NO: 2352158 - RNA, 19 nt, Artificial Sequence
  Description of Artificial Sequence: Synthetic oligonucleotide
uagucuucgguugggcuug

SEQ ID NO: 2352159 - RNA, 19 nt, Artificial Sequence
  Description of Artificial Sequence: Synthetic oligonucleotide
gacguggccguuucuggug

SEQ ID NO: 2352160 - RNA, 19 nt, Artificial Sequence
  Description of Artificial Sequence: Synthetic oligonucleotide
gggacuggaggccagagca

SEQ ID NO: 2352161 - RNA, 19 nt, Artificial Sequence
  Description of Artificial Sequence: Synthetic oligonucleotide
ugucaguugcuggaacuca

SEQ ID NO: 2352162 - RNA, 19 nt, Artificial Sequence
  Description of Artificial Sequence: Synthetic oligonucleotide
gaguccuuuuguguugacc

SEQ ID NO: 2352163 - RNA, 19 nt, Artificial Sequence
  Description of Artificial Sequence: Synthetic oligonucleotide
accagccuuaggccuggcc

SEQ ID NO: 2352164 - RNA, 19 nt, Artificial Sequence
  Description of Artificial Sequence: Synthetic oligonucleotide
ccuuuggcgauucaggcac

SEQ ID NO: 2352165 - RNA, 19 nt, Artificial Sequence
  Description of Artificial Sequence: Synthetic oligonucleotide
aucccggugaugaacagca

SEQ ID NO: 2352166 - RNA, 19 nt, Artificial Sequence
  Description of Artificial Sequence: Synthetic oligonucleotide
caagugucuacacuuccca

SEQ ID NO: 2352167 - RNA, 19 nt, Artificial Sequence
  Description of Artificial Sequence: Synthetic oligonucleotide
cuuggagaccggaucccag

SEQ ID NO: 2352168 - RNA, 19 nt, Artificial Sequence
  Description of Artificial Sequence: Synthetic oligonucleotide
ugaacagcacagcggccac

SEQ ID NO: 2352169 - RNA, 19 nt, Artificial Sequence
  Description of Artificial Sequence: Synthetic oligonucleotide
agucuuguggcucguggaa

SEQ ID NO: 2352170 - RNA, 19 nt, Artificial Sequence
  Description of Artificial Sequence: Synthetic oligonucleotide
uccggagagugaaaucauc

SEQ ID NO: 2352171 - RNA, 19 nt, Artificial Sequence
  Description of Artificial Sequence: Synthetic oligonucleotide
ugagccuggccuccugaca

SEQ ID NO: 2352172 - RNA, 19 nt, Artificial Sequence
  Description of Artificial Sequence: Synthetic oligonucleotide
cugagcagaaucagggcga

SEQ ID NO: 2352173 - RNA, 19 nt, Artificial Sequence
  Description of Artificial Sequence: Synthetic oligonucleotide
cuuaggccuggccuccucc

SEQ ID NO: 2352174 - RNA, 19 nt, Artificial Sequence
  Description of Artificial Sequence: Synthetic oligonucleotide
accaggcacccucagggug

SEQ ID NO: 2352175 - RNA, 19 nt, Artificial Sequence
  Description of Artificial Sequence: Synthetic oligonucleotide
agaagucccgcccacugua

SEQ ID NO: 2352176 - RNA, 19 nt, Artificial Sequence
  Description of Artificial Sequence: Synthetic oligonucleotide
gaggcuaaggguggugagc

SEQ ID NO: 2352177 - RNA, 19 nt, Artificial Sequence
  Description of Artificial Sequence: Synthetic oligonucleotide
gcuaaggguggugagcugg

SEQ ID NO: 2352178 - RNA, 19 nt, Artificial Sequence
  Description of Artificial Sequence: Synthetic oligonucleotide
accgaguggaggaaaaggu

SEQ ID NO: 2352179 - RNA, 19 nt, Artificial Sequence
  Description of Artificial Sequence: Synthetic oligonucleotide
aaccaggcacccucagggu

SEQ ID NO: 2352180 - RNA, 19 nt, Artificial Sequence
  Description of Artificial Sequence: Synthetic oligonucleotide
ugaccacucuguaggcucu

SEQ ID NO: 2352181 - RNA, 19 nt, Artificial Sequence
  Description of Artificial Sequence: Synthetic oligonucleotide
gagucuuguggcucgugga

SEQ ID NO: 2352182 - RNA, 19 nt, Artificial Sequence
  Description of Artificial Sequence: Synthetic oligonucleotide
ucgaugguucccuggcaga

SEQ ID NO: 2352183 - RNA, 19 nt, Artificial Sequence
  Description of Artificial Sequence: Synthetic oligonucleotide
gaggaggagaagccgcuca

SEQ ID NO: 2352184 - RNA, 19 nt, Artificial Sequence
  Description of Artificial Sequence: Synthetic oligonucleotide
ccugacaccccugaggagg

SEQ ID NO: 2352185 - RNA, 19 nt, Artificial Sequence
  Description of Artificial Sequence: Synthetic oligonucleotide
ccggugaugaacagcacag

SEQ ID NO: 2352186 - RNA, 19 nt, Artificial Sequence
  Description of Artificial Sequence: Synthetic oligonucleotide
uggugugcuauggaggcuc

SEQ ID NO: 2352187 - RNA, 19 nt, Artificial Sequence
  Description of Artificial Sequence: Synthetic oligonucleotide
gcgauucaggcacauucgg

SEQ ID NO: 2352188 - RNA, 19 nt, Artificial Sequence
  Description of Artificial Sequence: Synthetic oligonucleotide
ugaggaugaugaucccggu

SEQ ID NO: 2352189 - RNA, 19 nt, Artificial Sequence
  Description of Artificial Sequence: Synthetic oligonucleotide
aagucccgcccacuguaga

SEQ ID NO: 2352190 - RNA, 19 nt, Artificial Sequence
  Description of Artificial Sequence: Synthetic oligonucleotide
aggcuaaggguggugagcu

SEQ ID NO: 2352191 - RNA, 19 nt, Artificial Sequence
  Description of Artificial Sequence: Synthetic oligonucleotide
gucaguugcuggaacucag

SEQ ID NO: 2352192 - RNA, 19 nt, Artificial Sequence
  Description of Artificial Sequence: Synthetic oligonucleotide
ugugugucccuggaucugu

SEQ ID NO: 2352193 - RNA, 19 nt, Artificial Sequence
  Description of Artificial Sequence: Synthetic oligonucleotide
uuccgugagcugauuccca

SEQ ID NO: 2352194 - RNA, 19 nt, Artificial Sequence
  Description of Artificial Sequence: Synthetic oligonucleotide
uuccggagagugaaaucau

SEQ ID NO: 2352195 - RNA, 19 nt, Artificial Sequence
  Description of Artificial Sequence: Synthetic oligonucleotide
uagaaggggcuguucuccu

SEQ ID NO: 2352196 - RNA, 19 nt, Artificial Sequence
  Description of Artificial Sequence: Synthetic oligonucleotide
agaguccuuuuguguugac

SEQ ID NO: 2352197 - RNA, 19 nt, Artificial Sequence
  Description of Artificial Sequence: Synthetic oligonucleotide
ggacggugacaucugugcg

SEQ ID NO: 2352198 - RNA, 19 nt, Artificial Sequence
  Description of Artificial Sequence: Synthetic oligonucleotide
acacuucccacuggugagg

SEQ ID NO: 2352199 - RNA, 19 nt, Artificial Sequence
  Description of Artificial Sequence: Synthetic oligonucleotide
ggagaguccuuuuguguug

SEQ ID NO: 2352200 - RNA, 19 nt, Artificial Sequence
  Description of Artificial Sequence: Synthetic oligonucleotide
gugcuauggaggcucccag

SEQ ID NO: 2352201 - RNA, 19 nt, Artificial Sequence
  Description of Artificial Sequence: Synthetic oligonucleotide
guuuccggagagugaaauc

SEQ ID NO: 2352202 - RNA, 19 nt, Artificial Sequence
  Description of Artificial Sequence: Synthetic oligonucleotide
augaucccggugaugaaca

SEQ ID NO: 2352203 - RNA, 19 nt, Artificial Sequence
  Description of Artificial Sequence: Synthetic oligonucleotide
gagugaaaucaucguagua

SEQ ID NO: 2352204 - RNA, 19 nt, Artificial Sequence
  Description of Artificial Sequence: Synthetic oligonucleotide
ggcgauucaggcacauucg

SEQ ID NO: 2352205 - RNA, 19 nt, Artificial Sequence
  Description of Artificial Sequence: Synthetic oligonucleotide
uccgugagcugauucccaa

SEQ ID NO: 2352206 - RNA, 19 nt, Artificial Sequence
  Description of Artificial Sequence: Synthetic oligonucleotide
uccuucgagucuuguggcu

SEQ ID NO: 2352207 - RNA, 19 nt, Artificial Sequence
  Description of Artificial Sequence: Synthetic oligonucleotide
cuggaacucaguuuuggcu

SEQ ID NO: 2352208 - RNA, 19 nt, Artificial Sequence
  Description of Artificial Sequence: Synthetic oligonucleotide
uugcuggaacucaguuuug

SEQ ID NO: 2352209 - RNA, 19 nt, Artificial Sequence
  Description of Artificial Sequence: Synthetic oligonucleotide
ggagagugaaaucaucgua

SEQ ID NO: 2352210 - RNA, 19 nt, Artificial Sequence
  Description of Artificial Sequence: Synthetic oligonucleotide
cacuguagaacuggacgug

SEQ ID NO: 2352211 - RNA, 19 nt, Artificial Sequence
  Description of Artificial Sequence: Synthetic oligonucleotide
ugucggccgccacucaccu

SEQ ID NO: 2352212 - RNA, 19 nt, Artificial Sequence
  Description of Artificial Sequence: Synthetic oligonucleotide
ugccggggucccuuccucg

SEQ ID NO: 2352213 - RNA, 19 nt, Artificial Sequence
  Description of Artificial Sequence: Synthetic oligonucleotide
uggcucguggaagaagaac

SEQ ID NO: 2352214 - RNA, 19 nt, Artificial Sequence
  Description of Artificial Sequence: Synthetic oligonucleotide
cucccucggggacuggagg

SEQ ID NO: 2352215 - RNA, 19 nt, Artificial Sequence
  Description of Artificial Sequence: Synthetic oligonucleotide
gucuuguggcucguggaag

SEQ ID NO: 2352216 - RNA, 19 nt, Artificial Sequence
  Description of Artificial Sequence: Synthetic oligonucleotide
acaaaggugaggagacaca

SEQ ID NO: 2352217 - RNA, 19 nt, Artificial Sequence
  Description of Artificial Sequence: Synthetic oligonucleotide
ugagcagaaucagggcgac

SEQ ID NO: 2352218 - RNA, 19 nt, Artificial Sequence
  Description of Artificial Sequence: Synthetic oligonucleotide
caggacggugacaucugug

SEQ ID NO: 2352219 - RNA, 19 nt, Artificial Sequence
  Description of Artificial Sequence: Synthetic oligonucleotide
acauucgggacaagugucu

SEQ ID NO: 2352220 - RNA, 19 nt, Artificial Sequence
  Description of Artificial Sequence: Synthetic oligonucleotide
cugucguauucacagaagu

SEQ ID NO: 2352221 - RNA, 19 nt, Artificial Sequence
  Description of Artificial Sequence: Synthetic oligonucleotide
ucgggacaagugucuacac

SEQ ID NO: 2352222 - RNA, 19 nt, Artificial Sequence
  Description of Artificial Sequence: Synthetic oligonucleotide
ucccgcccacuguagaacu

SEQ ID NO: 2352223 - RNA, 19 nt, Artificial Sequence
  Description of Artificial Sequence: Synthetic oligonucleotide
accuuucccaguagucuuc

SEQ ID NO: 2352224 - RNA, 19 nt, Artificial Sequence
  Description of Artificial Sequence: Synthetic oligonucleotide
gaagucccgcccacuguag

SEQ ID NO: 2352225 - RNA, 19 nt, Artificial Sequence
  Description of Artificial Sequence: Synthetic oligonucleotide
gggcuuggagaccggaucc

SEQ ID NO: 2352226 - RNA, 19 nt, Artificial Sequence
  Description of Artificial Sequence: Synthetic oligonucleotide
cugugcgaccgaguggagg

SEQ ID NO: 2352227 - RNA, 19 nt, Artificial Sequence
  Description of Artificial Sequence: Synthetic oligonucleotide
uugugugucccuggaucug

SEQ ID NO: 2352228 - RNA, 19 nt, Artificial Sequence
  Description of Artificial Sequence: Synthetic oligonucleotide
uccugacaccccugaggag

SEQ ID NO: 2352229 - RNA, 19 nt, Artificial Sequence
  Description of Artificial Sequence: Synthetic oligonucleotide
accggauugguggugucca

SEQ ID NO: 2352230 - RNA, 19 nt, Artificial Sequence
  Description of Artificial Sequence: Synthetic oligonucleotide
ccuggccuccuccagaggc

SEQ ID NO: 2352231 - RNA, 19 nt, Artificial Sequence
  Description of Artificial Sequence: Synthetic oligonucleotide
ucuccucucgaugguuccc

SEQ ID NO: 2352232 - RNA, 19 nt, Artificial Sequence
  Description of Artificial Sequence: Synthetic oligonucleotide
cuugugugucccuggaucu

SEQ ID NO: 2352233 - RNA, 19 nt, Artificial Sequence
  Description of Artificial Sequence: Synthetic oligonucleotide
gcugacucuccucucgaug

SEQ ID NO: 2352234 - RNA, 19 nt, Artificial Sequence
  Description of Artificial Sequence: Synthetic oligonucleotide
ccgccacucaccuuuggcg

SEQ ID NO: 2352235 - RNA, 19 nt, Artificial Sequence
  Description of Artificial Sequence: Synthetic oligonucleotide
ggcgacaaaggugaggaga

SEQ ID NO: 2352236 - RNA, 19 nt, Artificial Sequence
  Description of Artificial Sequence: Synthetic oligonucleotide
acccgaaccaucagcugag

SEQ ID NO: 2352237 - RNA, 19 nt, Artificial Sequence
  Description of Artificial Sequence: Synthetic oligonucleotide
agucccgcccacuguagaa

SEQ ID NO: 2352238 - RNA, 19 nt, Artificial Sequence
  Description of Artificial Sequence: Synthetic oligonucleotide
uucccuggcagaggaaguc

SEQ ID NO: 2352239 - RNA, 19 nt, Artificial Sequence
  Description of Artificial Sequence: Synthetic oligonucleotide
cguauucacagaagucccg

SEQ ID NO: 2352240 - RNA, 19 nt, Artificial Sequence
  Description of Artificial Sequence: Synthetic oligonucleotide
uccugaagccagagcugac

SEQ ID NO: 2352241 - RNA, 19 nt, Artificial Sequence
  Description of Artificial Sequence: Synthetic oligonucleotide
ucugugcgaccgaguggag

SEQ ID NO: 2352242 - RNA, 19 nt, Artificial Sequence
  Description of Artificial Sequence: Synthetic oligonucleotide
uggugagcuggugugcuau

SEQ ID NO: 2352243 - RNA, 19 nt, Artificial Sequence
  Description of Artificial Sequence: Synthetic oligonucleotide
caucguaguagaaggggcu

SEQ ID NO: 2352244 - RNA, 19 nt, Artificial Sequence
  Description of Artificial Sequence: Synthetic oligonucleotide
ggaggcuaaggguggugag

SEQ ID NO: 2352245 - RNA, 19 nt, Artificial Sequence
  Description of Artificial Sequence: Synthetic oligonucleotide
agugccggggucccuuccu

SEQ ID NO: 2352246 - RNA, 19 nt, Artificial Sequence
  Description of Artificial Sequence: Synthetic oligonucleotide
ccuuuuguguugaccacuc

SEQ ID NO: 2352247 - RNA, 19 nt, Artificial Sequence
  Description of Artificial Sequence: Synthetic oligonucleotide
ggaggaaaaggugccacca

SEQ ID NO: 2352248 - RNA, 19 nt, Artificial Sequence
  Description of Artificial Sequence: Synthetic oligonucleotide
ggagaagccgcucacugcu

SEQ ID NO: 2352249 - RNA, 19 nt, Artificial Sequence
  Description of Artificial Sequence: Synthetic oligonucleotide
gucuacacuucccacuggu

SEQ ID NO: 2352250 - RNA, 19 nt, Artificial Sequence
  Description of Artificial Sequence: Synthetic oligonucleotide
ccgaguggaggaaaaggug

SEQ ID NO: 2352251 - RNA, 19 nt, Artificial Sequence
  Description of Artificial Sequence: Synthetic oligonucleotide
gcgacaaaggugaggagac

SEQ ID NO: 2352252 - RNA, 19 nt, Artificial Sequence
  Description of Artificial Sequence: Synthetic oligonucleotide
uccucucgaugguucccug

SEQ ID NO: 2352253 - RNA, 19 nt, Artificial Sequence
  Description of Artificial Sequence: Synthetic oligonucleotide
accggaucccagggagugc

SEQ ID NO: 2352254 - RNA, 19 nt, Artificial Sequence
  Description of Artificial Sequence: Synthetic oligonucleotide
uaaggguggugagcuggug

SEQ ID NO: 2352255 - RNA, 19 nt, Artificial Sequence
  Description of Artificial Sequence: Synthetic oligonucleotide
caguagucuucgguugggc

SEQ ID NO: 2352256 - RNA, 19 nt, Artificial Sequence
  Description of Artificial Sequence: Synthetic oligonucleotide
uuuggcgauucaggcacau

SEQ ID NO: 2352257 - RNA, 19 nt, Artificial Sequence
  Description of Artificial Sequence: Synthetic oligonucleotide
gggacaagugucuacacuu

SEQ ID NO: 2352258 - RNA, 19 nt, Artificial Sequence
  Description of Artificial Sequence: Synthetic oligonucleotide
cccaguagucuucgguugg

SEQ ID NO: 2352259 - RNA, 19 nt, Artificial Sequence
  Description of Artificial Sequence: Synthetic oligonucleotide
cgugagcugauucccaaag

SEQ ID NO: 2352260 - RNA, 19 nt, Artificial Sequence
  Description of Artificial Sequence: Synthetic oligonucleotide
guagucuucgguugggcuu

SEQ ID NO: 2352261 - RNA, 19 nt, Artificial Sequence
  Description of Artificial Sequence: Synthetic oligonucleotide
ugucaccggauugguggug

SEQ ID NO: 2352262 - RNA, 19 nt, Artificial Sequence
  Description of Artificial Sequence: Synthetic oligonucleotide
acaggcgccaggacgguga

SEQ ID NO: 2352263 - RNA, 19 nt, Artificial Sequence
  Description of Artificial Sequence: Synthetic oligonucleotide
ccaccauccccuucuuccg

SEQ ID NO: 2352264 - RNA, 19 nt, Artificial Sequence
  Description of Artificial Sequence: Synthetic oligonucleotide
caucagcugagccuggccu

SEQ ID NO: 2352265 - RNA, 19 nt, Artificial Sequence
  Description of Artificial Sequence: Synthetic oligonucleotide
gcugucguauucacagaag

SEQ ID NO: 2352266 - RNA, 19 nt, Artificial Sequence
  Description of Artificial Sequence: Synthetic oligonucleotide
caccggauugguggugucc

SEQ ID NO: 2352267 - RNA, 19 nt, Artificial Sequence
  Description of Artificial Sequence: Synthetic oligonucleotide
cuuccucgcugcucuugug

SEQ ID NO: 2352268 - RNA, 19 nt, Artificial Sequence
  Description of Artificial Sequence: Synthetic oligonucleotide
ucgguugggcuuggagacc

SEQ ID NO: 2352269 - RNA, 19 nt, Artificial Sequence
  Description of Artificial Sequence: Synthetic oligonucleotide
aggugccaccauccccuuc

SEQ ID NO: 2352270 - RNA, 19 nt, Artificial Sequence
  Description of Artificial Sequence: Synthetic oligonucleotide
cugacaccccugaggagga

SEQ ID NO: 2352271 - RNA, 19 nt, Artificial Sequence
  Description of Artificial Sequence: Synthetic oligonucleotide
ugcccucugcugagcagaa

SEQ ID NO: 2352272 - RNA, 19 nt, Artificial Sequence
  Description of Artificial Sequence: Synthetic oligonucleotide
agcugacucuccucucgau

SEQ ID NO: 2352273 - RNA, 19 nt, Artificial Sequence
  Description of Artificial Sequence: Synthetic oligonucleotide
gagugccggggucccuucc

SEQ ID NO: 2352274 - RNA, 19 nt, Artificial Sequence
  Description of Artificial Sequence: Synthetic oligonucleotide
ugcgaccgaguggaggaaa

SEQ ID NO: 2352275 - RNA, 19 nt, Artificial Sequence
  Description of Artificial Sequence: Synthetic oligonucleotide
gaggaaaaggugccaccau

SEQ ID NO: 2352276 - RNA, 19 nt, Artificial Sequence
  Description of Artificial Sequence: Synthetic oligonucleotide
ggcucuguaggagggagga

SEQ ID NO: 2352277 - RNA, 19 nt, Artificial Sequence
  Description of Artificial Sequence: Synthetic oligonucleotide
ccgaaccaucagcugagcc

SEQ ID NO: 2352278 - RNA, 19 nt, Artificial Sequence
  Description of Artificial Sequence: Synthetic oligonucleotide
gugucggccgccacucacc

SEQ ID NO: 2352279 - RNA, 19 nt, Artificial Sequence
  Description of Artificial Sequence: Synthetic oligonucleotide
ggugucggccgccacucac

SEQ ID NO: 2352280 - RNA, 19 nt, Artificial Sequence
  Description of Artificial Sequence: Synthetic oligonucleotide
ugcucccucggggacugga

SEQ ID NO: 2352281 - RNA, 19 nt, Artificial Sequence
  Description of Artificial Sequence: Synthetic oligonucleotide
ggacaagugucuacacuuc

SEQ ID NO: 2352282 - RNA, 19 nt, Artificial Sequence
  Description of Artificial Sequence: Synthetic oligonucleotide
ucgagucuuguggcucgug

SEQ ID NO: 2352283 - RNA, 19 nt, Artificial Sequence
  Description of Artificial Sequence: Synthetic oligonucleotide
gccguuucuggugucugcc

SEQ ID NO: 2352284 - RNA, 19 nt, Artificial Sequence
  Description of Artificial Sequence: Synthetic oligonucleotide
gacuggaggccagagcagu

SEQ ID NO: 2352285 - RNA, 19 nt, Artificial Sequence
  Description of Artificial Sequence: Synthetic oligonucleotide
ucaccggauuggugguguc

SEQ ID NO: 2352286 - RNA, 19 nt, Artificial Sequence
  Description of Artificial Sequence: Synthetic oligonucleotide
gccgccacucaccuuuggc

SEQ ID NO: 2352287 - RNA, 19 nt, Artificial Sequence
  Description of Artificial Sequence: Synthetic oligonucleotide
uucgagucuuguggcucgu

SEQ ID NO: 2352288 - RNA, 19 nt, Artificial Sequence
  Description of Artificial Sequence: Synthetic oligonucleotide
gcacccucaggguggggag

SEQ ID NO: 2352289 - RNA, 19 nt, Artificial Sequence
  Description of Artificial Sequence: Synthetic oligonucleotide
cugcccucugcugagcaga

SEQ ID NO: 2352290 - RNA, 19 nt, Artificial Sequence
  Description of Artificial Sequence: Synthetic oligonucleotide
gucccgcccacuguagaac

SEQ ID NO: 2352291 - RNA, 19 nt, Artificial Sequence
  Description of Artificial Sequence: Synthetic oligonucleotide
gcggugucugcucccucgg

SEQ ID NO: 2352292 - RNA, 19 nt, Artificial Sequence
  Description of Artificial Sequence: Synthetic oligonucleotide
aggggcuguucuccuucga

SEQ ID NO: 2352293 - RNA, 19 nt, Artificial Sequence
  Description of Artificial Sequence: Synthetic oligonucleotide
guugggcuuggagaccgga

SEQ ID NO: 2352294 - RNA, 19 nt, Artificial Sequence
  Description of Artificial Sequence: Synthetic oligonucleotide
cugcugucguauucacaga

SEQ ID NO: 2352295 - RNA, 19 nt, Artificial Sequence
  Description of Artificial Sequence: Synthetic oligonucleotide
gaccacucuguaggcucug

SEQ ID NO: 2352296 - RNA, 19 nt, Artificial Sequence
  Description of Artificial Sequence: Synthetic oligonucleotide
ggccguuucuggugucugc

SEQ ID NO: 2352297 - RNA, 19 nt, Artificial Sequence
  Description of Artificial Sequence: Synthetic oligonucleotide
ccaguagucuucgguuggg

SEQ ID NO: 2352298 - RNA, 19 nt, Artificial Sequence
  Description of Artificial Sequence: Synthetic oligonucleotide
ggccagagcaguggggccc

SEQ ID NO: 2352299 - RNA, 19 nt, Artificial Sequence
  Description of Artificial Sequence: Synthetic oligonucleotide
acucaccuuuggcgauuca

SEQ ID NO: 2352300 - RNA, 19 nt, Artificial Sequence
  Description of Artificial Sequence: Synthetic oligonucleotide
cuaaggguggugagcuggu

SEQ ID NO: 2352301 - RNA, 19 nt, Artificial Sequence
  Description of Artificial Sequence: Synthetic oligonucleotide
guugaccacucuguaggcu

SEQ ID NO: 2352302 - RNA, 19 nt, Artificial Sequence
  Description of Artificial Sequence: Synthetic oligonucleotide
ccucugcugagcagaauca

SEQ ID NO: 2352303 - RNA, 19 nt, Artificial Sequence
  Description of Artificial Sequence: Synthetic oligonucleotide
ggacuggaggccagagcag

SEQ ID NO: 2352304 - RNA, 19 nt, Artificial Sequence
  Description of Artificial Sequence: Synthetic oligonucleotide
ccguuucuggugucugccc

SEQ ID NO: 2352305 - RNA, 19 nt, Artificial Sequence
  Description of Artificial Sequence: Synthetic oligonucleotide
caggcacccucaggguggg

SEQ ID NO: 2352306 - RNA, 19 nt, Artificial Sequence
  Description of Artificial Sequence: Synthetic oligonucleotide
cacucaccuuuggcgauuc

SEQ ID NO: 2352307 - RNA, 19 nt, Artificial Sequence
  Description of Artificial Sequence: Synthetic oligonucleotide
ccacuguagaacuggacgu

SEQ ID NO: 2352308 - RNA, 19 nt, Artificial Sequence
  Description of Artificial Sequence: Synthetic oligonucleotide
cccggugaugaacagcaca

SEQ ID NO: 2352309 - RNA, 19 nt, Artificial Sequence
  Description of Artificial Sequence: Synthetic oligonucleotide
ggcuuggagaccggauccc

SEQ ID NO: 2352310 - RNA, 19 nt, Artificial Sequence
  Description of Artificial Sequence: Synthetic oligonucleotide
ggagaccggaucccaggga

SEQ ID NO: 2352311 - RNA, 19 nt, Artificial Sequence
  Description of Artificial Sequence: Synthetic oligonucleotide
ccuucgagucuuguggcuc

SEQ ID NO: 2352312 - RNA, 19 nt, Artificial Sequence
  Description of Artificial Sequence: Synthetic oligonucleotide
cgcggugucugcucccucg

SEQ ID NO: 2352313 - RNA, 19 nt, Artificial Sequence
  Description of Artificial Sequence: Synthetic oligonucleotide
ccgcccacuguagaacugg

SEQ ID NO: 2352314 - RNA, 19 nt, Artificial Sequence
  Description of Artificial Sequence: Synthetic oligonucleotide
agaacuggacguggccguu

SEQ ID NO: 2352315 - RNA, 19 nt, Artificial Sequence
  Description of Artificial Sequence: Synthetic oligonucleotide
gugugcuauggaggcuccc

SEQ ID NO: 2352316 - RNA, 19 nt, Artificial Sequence
  Description of Artificial Sequence: Synthetic oligonucleotide
ggugugcuauggaggcucc

SEQ ID NO: 2352317 - RNA, 19 nt, Artificial Sequence
  Description of Artificial Sequence: Synthetic oligonucleotide
cacuucccacuggugagga

SEQ ID NO: 2352318 - RNA, 19 nt, Artificial Sequence
  Description of Artificial Sequence: Synthetic oligonucleotide
cauucgggacaagugucua

SEQ ID NO: 2352319 - RNA, 19 nt, Artificial Sequence
  Description of Artificial Sequence: Synthetic oligonucleotide
ggcuaaggguggugagcug

SEQ ID NO: 2352320 - RNA, 19 nt, Artificial Sequence
  Description of Artificial Sequence: Synthetic oligonucleotide
uuggcgauucaggcacauu

SEQ ID NO: 2352321 - RNA, 19 nt, Artificial Sequence
  Description of Artificial Sequence: Synthetic oligonucleotide
ccagggagugccggggucc

SEQ ID NO: 2352322 - RNA, 19 nt, Artificial Sequence
  Description of Artificial Sequence: Synthetic oligonucleotide
gggcgacaaaggugaggag

SEQ ID NO: 2352323 - RNA, 19 nt, Artificial Sequence
  Description of Artificial Sequence: Synthetic oligonucleotide
caggcgccaggacggugac

SEQ ID NO: 2352324 - RNA, 19 nt, Artificial Sequence
  Description of Artificial Sequence: Synthetic oligonucleotide
gucaccggauugguggugu

SEQ ID NO: 2352325 - RNA, 19 nt, Artificial Sequence
  Description of Artificial Sequence: Synthetic oligonucleotide
ccgcucacugcuccugaag

SEQ ID NO: 2352326 - RNA, 19 nt, Artificial Sequence
  Description of Artificial Sequence: Synthetic oligonucleotide
gccggggucccuuccucgc

SEQ ID NO: 2352327 - RNA, 19 nt, Artificial Sequence
  Description of Artificial Sequence: Synthetic oligonucleotide
cugucaccggauugguggu

SEQ ID NO: 2352328 - RNA, 19 nt, Artificial Sequence
  Description of Artificial Sequence: Synthetic oligonucleotide
cgaugguucccuggcagag

SEQ ID NO: 2352329 - RNA, 19 nt, Artificial Sequence
  Description of Artificial Sequence: Synthetic oligonucleotide
gagcagaaucagggcgaca

SEQ ID NO: 2352330 - RNA, 19 nt, Artificial Sequence
  Description of Artificial Sequence: Synthetic oligonucleotide
cuggccuccugacaccccu

SEQ ID NO: 2352331 - RNA, 19 nt, Artificial Sequence
  Description of Artificial Sequence: Synthetic oligonucleotide
cagaagucccgcccacugu

SEQ ID NO: 2352332 - RNA, 19 nt, Artificial Sequence
  Description of Artificial Sequence: Synthetic oligonucleotide
gcuguucuccuucgagucu

SEQ ID NO: 2352333 - RNA, 19 nt, Artificial Sequence
  Description of Artificial Sequence: Synthetic oligonucleotide
cacaggcgccaggacggug

SEQ ID NO: 2352334 - RNA, 19 nt, Artificial Sequence
  Description of Artificial Sequence: Synthetic oligonucleotide
guggugagcuggugugcua

SEQ ID NO: 2352335 - RNA, 19 nt, Artificial Sequence
  Description of Artificial Sequence: Synthetic oligonucleotide
ggccgccacucaccuuugg

SEQ ID NO: 2352336 - RNA, 19 nt, Artificial Sequence
  Description of Artificial Sequence: Synthetic oligonucleotide
acacaggcgccaggacggu

SEQ ID NO: 2352337 - RNA, 19 nt, Artificial Sequence
  Description of Artificial Sequence: Synthetic oligonucleotide
caggguggggaggccacca

SEQ ID NO: 2352338 - RNA, 19 nt, Artificial Sequence
  Description of Artificial Sequence: Synthetic oligonucleotide
cccguuuccggagagugaa

SEQ ID NO: 2352339 - RNA, 19 nt, Artificial Sequence
  Description of Artificial Sequence: Synthetic oligonucleotide
guggcucguggaagaagaa

SEQ ID NO: 2352340 - RNA, 19 nt, Artificial Sequence
  Description of Artificial Sequence: Synthetic oligonucleotide
gcucccucggggacuggag

SEQ ID NO: 2352341 - RNA, 19 nt, Artificial Sequence
  Description of Artificial Sequence: Synthetic oligonucleotide
aguggggcccggaggggaa

SEQ ID NO: 2352342 - RNA, 19 nt, Artificial Sequence
  Description of Artificial Sequence: Synthetic oligonucleotide
caguggggcccggagggga

SEQ ID NO: 2352343 - RNA, 19 nt, Artificial Sequence
  Description of Artificial Sequence: Synthetic oligonucleotide
cuggaucugucaccggauu

SEQ ID NO: 2352344 - RNA, 19 nt, Artificial Sequence
  Description of Artificial Sequence: Synthetic oligonucleotide
cgccacucaccuuuggcga

SEQ ID NO: 2352345 - RNA, 19 nt, Artificial Sequence
  Description of Artificial Sequence: Synthetic oligonucleotide
guggggaggccaccagccu

SEQ ID NO: 2352346 - RNA, 19 nt, Artificial Sequence
  Description of Artificial Sequence: Synthetic oligonucleotide
gcccacuguagaacuggac

SEQ ID NO: 2352347 - RNA, 19 nt, Artificial Sequence
  Description of Artificial Sequence: Synthetic oligonucleotide
gacucuccucucgaugguu

SEQ ID NO: 2352348 - RNA, 19 nt, Artificial Sequence
  Description of Artificial Sequence: Synthetic oligonucleotide
cuccucucgaugguucccu

SEQ ID NO: 2352349 - RNA, 19 nt, Artificial Sequence
  Description of Artificial Sequence: Synthetic oligonucleotide
cagggugucggccgccacu

SEQ ID NO: 2352350 - RNA, 19 nt, Artificial Sequence
  Description of Artificial Sequence: Synthetic oligonucleotide
cucuugugugucccuggau

SEQ ID NO: 2352351 - RNA, 19 nt, Artificial Sequence
  Description of Artificial Sequence: Synthetic oligonucleotide
ggagugccggggucccuuc

SEQ ID NO: 2352352 - RNA, 19 nt, Artificial Sequence
  Description of Artificial Sequence: Synthetic oligonucleotide
cucguggaagaagaaccuu

SEQ ID NO: 2352353 - RNA, 19 nt, Artificial Sequence
  Description of Artificial Sequence: Synthetic oligonucleotide
cccgcccacuguagaacug

SEQ ID NO: 2352354 - RNA, 19 nt, Artificial Sequence
  Description of Artificial Sequence: Synthetic oligonucleotide
caccauccccuucuuccgu

SEQ ID NO: 2352355 - RNA, 19 nt, Artificial Sequence
  Description of Artificial Sequence: Synthetic oligonucleotide
guggccguuucuggugucu

SEQ ID NO: 2352356 - RNA, 19 nt, Artificial Sequence
  Description of Artificial Sequence: Synthetic oligonucleotide
caggcacauucgggacaag

SEQ ID NO: 2352357 - RNA, 19 nt, Artificial Sequence
  Description of Artificial Sequence: Synthetic oligonucleotide
ggaggagaagccgcucacu

SEQ ID NO: 2352358 - RNA, 19 nt, Artificial Sequence
  Description of Artificial Sequence: Synthetic oligonucleotide
cgcugcucuuguguguccc

SEQ ID NO: 2352359 - RNA, 19 nt, Artificial Sequence
  Description of Artificial Sequence: Synthetic oligonucleotide
gaacuggacguggccguuu

SEQ ID NO: 2352360 - RNA, 19 nt, Artificial Sequence
  Description of Artificial Sequence: Synthetic oligonucleotide
ggggaaccaggcacccuca

SEQ ID NO: 2352361 - RNA, 19 nt, Artificial Sequence
  Description of Artificial Sequence: Synthetic oligonucleotide
cggagagugaaaucaucgu

SEQ ID NO: 2352362 - RNA, 19 nt, Artificial Sequence
  Description of Artificial Sequence: Synthetic oligonucleotide
cgaccgaguggaggaaaag

SEQ ID NO: 2352363 - RNA, 19 nt, Artificial Sequence
  Description of Artificial Sequence: Synthetic oligonucleotide
cccgaaccaucagcugagc

SEQ ID NO: 2352364 - RNA, 19 nt, Artificial Sequence
  Description of Artificial Sequence: Synthetic oligonucleotide
ccuuaggccuggccuccuc

SEQ ID NO: 2352365 - RNA, 19 nt, Artificial Sequence
  Description of Artificial Sequence: Synthetic oligonucleotide
gcgaccgaguggaggaaaa

SEQ ID NO: 2352366 - RNA, 19 nt, Artificial Sequence
  Description of Artificial Sequence: Synthetic oligonucleotide
cagagcaguggggcccgga

SEQ ID NO: 2352367 - RNA, 19 nt, Artificial Sequence
  Description of Artificial Sequence: Synthetic oligonucleotide
agggagugccggggucccu

SEQ ID NO: 2352368 - RNA, 19 nt, Artificial Sequence
  Description of Artificial Sequence: Synthetic oligonucleotide
gcugcucuugugugucccu

SEQ ID NO: 2352369 - RNA, 19 nt, Artificial Sequence
  Description of Artificial Sequence: Synthetic oligonucleotide
cggugucugcucccucggg

SEQ ID NO: 2352370 - RNA, 19 nt, Artificial Sequence
  Description of Artificial Sequence: Synthetic oligonucleotide
gguguccauuucugucagu

SEQ ID NO: 2352371 - RNA, 19 nt, Artificial Sequence
  Description of Artificial Sequence: Synthetic oligonucleotide
gugcgaccgaguggaggaa

SEQ ID NO: 2352372 - RNA, 19 nt, Artificial Sequence
  Description of Artificial Sequence: Synthetic oligonucleotide
aggcgccaggacggugaca

SEQ ID NO: 2352373 - RNA, 19 nt, Artificial Sequence
  Description of Artificial Sequence: Synthetic oligonucleotide
ccuggaucugucaccggau

SEQ ID NO: 2352374 - RNA, 19 nt, Artificial Sequence
  Description of Artificial Sequence: Synthetic oligonucleotide
cuggugugcuauggaggcu

SEQ ID NO: 2352375 - RNA, 19 nt, Artificial Sequence
  Description of Artificial Sequence: Synthetic oligonucleotide
cguuucuggugucugcccu

SEQ ID NO: 2352376 - RNA, 19 nt, Artificial Sequence
  Description of Artificial Sequence: Synthetic oligonucleotide
ccgugagcugauucccaaa

SEQ ID NO: 2352377 - RNA, 19 nt, Artificial Sequence
  Description of Artificial Sequence: Synthetic oligonucleotide
ccccguuuccggagaguga

SEQ ID NO: 2352378 - RNA, 19 nt, Artificial Sequence
  Description of Artificial Sequence: Synthetic oligonucleotide
caccagccuuaggccuggc

SEQ ID NO: 2352379 - RNA, 19 nt, Artificial Sequence
  Description of Artificial Sequence: Synthetic oligonucleotide
ccccgcggugucugcuccc

SEQ ID NO: 2352380 - RNA, 19 nt, Artificial Sequence
  Description of Artificial Sequence: Synthetic oligonucleotide
gggugucggccgccacuca

SEQ ID NO: 2352381 - RNA, 19 nt, Artificial Sequence
  Description of Artificial Sequence: Synthetic oligonucleotide
cgggacaagugucuacacu

SEQ ID NO: 2352382 - RNA, 19 nt, Artificial Sequence
  Description of Artificial Sequence: Synthetic oligonucleotide
cggugacaucugugcgacc

SEQ ID NO: 2352383 - RNA, 19 nt, Artificial Sequence
  Description of Artificial Sequence: Synthetic oligonucleotide
cguuuccggagagugaaau

SEQ ID NO: 2352384 - RNA, 19 nt, Artificial Sequence
  Description of Artificial Sequence: Synthetic oligonucleotide
ccucggggacuggaggcca

SEQ ID NO: 2352385 - RNA, 19 nt, Artificial Sequence
  Description of Artificial Sequence: Synthetic oligonucleotide
cgcccacuguagaacugga

SEQ ID NO: 2352386 - RNA, 19 nt, Artificial Sequence
  Description of Artificial Sequence: Synthetic oligonucleotide
ccaggacggugacaucugu

SEQ ID NO: 2352387 - RNA, 19 nt, Artificial Sequence
  Description of Artificial Sequence: Synthetic oligonucleotide
cgccaggacggugacaucu

SEQ ID NO: 2352388 - RNA, 19 nt, Artificial Sequence
  Description of Artificial Sequence: Synthetic oligonucleotide
ccguuuccggagagugaaa

SEQ ID NO: 2352389 - RNA, 19 nt, Artificial Sequence
  Description of Artificial Sequence: Synthetic oligonucleotide
cguggccguuucugguguc

SEQ ID NO: 2352390 - RNA, 19 nt, Artificial Sequence
  Description of Artificial Sequence: Synthetic oligonucleotide
cuucuuccgugagcugauu

SEQ ID NO: 2352391 - RNA, 19 nt, Artificial Sequence
  Description of Artificial Sequence: Synthetic oligonucleotide
gcgccaggacggugacauc

SEQ ID NO: 2352392 - RNA, 19 nt, Artificial Sequence
  Description of Artificial Sequence: Synthetic oligonucleotide
gggagugccggggucccuu

SEQ ID NO: 2352393 - RNA, 19 nt, Artificial Sequence
  Description of Artificial Sequence: Synthetic oligonucleotide
ccgcggugucugcucccuc

SEQ ID NO: 2352394 - RNA, 19 nt, Artificial Sequence
  Description of Artificial Sequence: Synthetic oligonucleotide
ccggauuggugguguccau

SEQ ID NO: 2352395 - RNA, 19 nt, Artificial Sequence
  Description of Artificial Sequence: Synthetic oligonucleotide
ccggggucccuuccucgcu

SEQ ID NO: 2352396 - RNA, 19 nt, Artificial Sequence
  Description of Artificial Sequence: Synthetic oligonucleotide
gccuuaggccuggccuccu

SEQ ID NO: 2352397 - RNA, 19 nt, Artificial Sequence
  Description of Artificial Sequence: Synthetic oligonucleotide
ccacucaccuuuggcgauu

SEQ ID NO: 2352398 - RNA, 19 nt, Artificial Sequence
  Description of Artificial Sequence: Synthetic oligonucleotide
gcccucugcugagcagaau

SEQ ID NO: 2352399 - RNA, 19 nt, Artificial Sequence
  Description of Artificial Sequence: Synthetic oligonucleotide
acuuauacaaaguagaaag

SEQ ID NO: 2352400 - RNA, 19 nt, Artificial Sequence
  Description of Artificial Sequence: Synthetic oligonucleotide
uuuuaaacaggucugaacc

SEQ ID NO: 2352401 - RNA, 19 nt, Artificial Sequence
  Description of Artificial Sequence: Synthetic oligonucleotide
aaaaucuucaaauugcagu

SEQ ID NO: 2352402 - RNA, 19 nt, Artificial Sequence
  Description of Artificial Sequence: Synthetic oligonucleotide
uucuacuugauucagacgc

SEQ ID NO: 2352403 - RNA, 19 nt, Artificial Sequence
  Description of Artificial Sequence: Synthetic oligonucleotide
  modified_base (5)..(5): a, c, u, g, unknown or other
aaacncaugccuuaaagcu

SEQ ID NO: 2352404 - RNA, 19 nt, Artificial Sequence
  Description of Artificial Sequence: Synthetic oligonucleotide
ucugguauuucaaacaagc

SEQ ID NO: 2352405 - RNA, 19 nt, Artificial Sequence
  Description of Artificial Sequence: Synthetic oligonucleotide
ugucacaucauuuucuagg

SEQ ID NO: 2352406 - RNA, 19 nt, Artificial Sequence
  Description of Artificial Sequence: Synthetic oligonucleotide
aaaucuucauguaugauag

SEQ ID NO: 2352407 - RNA, 19 nt, Artificial Sequence
  Description of Artificial Sequence: Synthetic oligonucleotide
aaagggaucaaauccagca

SEQ ID NO: 2352408 - RNA, 19 nt, Artificial Sequence
  Description of Artificial Sequence: Synthetic oligonucleotide
  modified_base (7)..(7): a, c, u, g, unknown or other
ucaaacncaugccuuaaag

SEQ ID NO: 2352409 - RNA, 19 nt, Artificial Sequence
  Description of Artificial Sequence: Synthetic oligonucleotide
auaaucugguauuucaaac

SEQ ID NO: 2352410 - RNA, 19 nt, Artificial Sequence
  Description of Artificial Sequence: Synthetic oligonucleotide
guuaguaugguccagcuug

SEQ ID NO: 2352411 - RNA, 19 nt, Artificial Sequence
  Description of Artificial Sequence: Synthetic oligonucleotide
  modified_base (19)..(19): a, c, u, g, unknown or other
aauuuugucuuaucaaacn

SEQ ID NO: 2352412 - RNA, 19 nt, Artificial Sequence
  Description of Artificial Sequence: Synthetic oligonucleotide
agucuuaugacucagacuu

SEQ ID NO: 2352413 - RNA, 19 nt, Artificial Sequence
  Description of Artificial Sequence: Synthetic oligonucleotide
ucuauuguagaaaucuggc

SEQ ID NO: 2352414 - RNA, 19 nt, Artificial Sequence
  Description of Artificial Sequence: Synthetic oligonucleotide
ucagacuuauacaaaguag

SEQ ID NO: 2352415 - RNA, 19 nt, Artificial Sequence
  Description of Artificial Sequence: Synthetic oligonucleotide
ugguauuucaaacaagcca

SEQ ID NO: 2352416 - RNA, 19 nt, Artificial Sequence
  Description of Artificial Sequence: Synthetic oligonucleotide
aauaaccccaaacuugcag

SEQ ID NO: 2352417 - RNA, 19 nt, Artificial Sequence
  Description of Artificial Sequence: Synthetic oligonucleotide
auucguuuuaaacaggucu

SEQ ID NO: 2352418 - RNA, 19 nt, Artificial Sequence
  Description of Artificial Sequence: Synthetic oligonucleotide
ugauagggagaucaagucg

SEQ ID NO: 2352419 - RNA, 19 nt, Artificial Sequence
  Description of Artificial Sequence: Synthetic oligonucleotide
augccuuaaagcuggaagc

SEQ ID NO: 2352420 - RNA, 19 nt, Artificial Sequence
  Description of Artificial Sequence: Synthetic oligonucleotide
agucgaauucguuuuaaac

SEQ ID NO: 2352421 - RNA, 19 nt, Artificial Sequence
  Description of Artificial Sequence: Synthetic oligonucleotide
ugcaguuuggggaauagcc

SEQ ID NO: 2352422 - RNA, 19 nt, Artificial Sequence
  Description of Artificial Sequence: Synthetic oligonucleotide
uauuguagaaaucuggcua

SEQ ID NO: 2352423 - RNA, 19 nt, Artificial Sequence
  Description of Artificial Sequence: Synthetic oligonucleotide
uaugauagggagaucaagu

SEQ ID NO: 2352424 - RNA, 19 nt, Artificial Sequence
  Description of Artificial Sequence: Synthetic oligonucleotide
caaauaaccccaaacuugc

SEQ ID NO: 2352425 - RNA, 19 nt, Artificial Sequence
  Description of Artificial Sequence: Synthetic oligonucleotide
aaaucuucaaauugcaguu

SEQ ID NO: 2352426 - RNA, 19 nt, Artificial Sequence
  Description of Artificial Sequence: Synthetic oligonucleotide
gaaguuaaucucuucauca

SEQ ID NO: 2352427 - RNA, 19 nt, Artificial Sequence
  Description of Artificial Sequence: Synthetic oligonucleotide
cuguguuuaauccacuugg

SEQ ID NO: 2352428 - RNA, 19 nt, Artificial Sequence
  Description of Artificial Sequence: Synthetic oligonucleotide
ugaauuuugucuuaucaaa

SEQ ID NO: 2352429 - RNA, 19 nt, Artificial Sequence
  Description of Artificial Sequence: Synthetic oligonucleotide
uggggaauagccuaugugc

SEQ ID NO: 2352430 - RNA, 19 nt, Artificial Sequence
  Description of Artificial Sequence: Synthetic oligonucleotide
agccucaugaccuuucccc

SEQ ID NO: 2352431 - RNA, 19 nt, Artificial Sequence
  Description of Artificial Sequence: Synthetic oligonucleotide
  modified_base (12)..(12): a, c, u, g, unknown or other
ucuuaucaaacncaugccu

SEQ ID NO: 2352432 - RNA, 19 nt, Artificial Sequence
  Description of Artificial Sequence: Synthetic oligonucleotide
uguuuaauccacuuggcuc

SEQ ID NO: 2352433 - RNA, 19 nt, Artificial Sequence
  Description of Artificial Sequence: Synthetic oligonucleotide
uuucaaacaagccauucuc

SEQ ID NO: 2352434 - RNA, 19 nt, Artificial Sequence
  Description of Artificial Sequence: Synthetic oligonucleotide
agaaggaacaucauguggg

SEQ ID NO: 2352435 - RNA, 19 nt, Artificial Sequence
  Description of Artificial Sequence: Synthetic oligonucleotide
cuucauguaugauagggag

SEQ ID NO: 2352436 - RNA, 19 nt, Artificial Sequence
  Description of Artificial Sequence: Synthetic oligonucleotide
gacucagacuuauacaaag

SEQ ID NO: 2352437 - RNA, 19 nt, Artificial Sequence
  Description of Artificial Sequence: Synthetic oligonucleotide
agaaguuaaucucuucauc

SEQ ID NO: 2352438 - RNA, 19 nt, Artificial Sequence
  Description of Artificial Sequence: Synthetic oligonucleotide
aguuaaucucuucaucagg

SEQ ID NO: 2352439 - RNA, 19 nt, Artificial Sequence
  Description of Artificial Sequence: Synthetic oligonucleotide
uaaucugguauuucaaaca

SEQ ID NO: 2352440 - RNA, 19 nt, Artificial Sequence
  Description of Artificial Sequence: Synthetic oligonucleotide
uuuggaauauuucuggauu

SEQ ID NO: 2352441 - RNA, 19 nt, Artificial Sequence
  Description of Artificial Sequence: Synthetic oligonucleotide
aaucugguauuucaaacaa

SEQ ID NO: 2352442 - RNA, 19 nt, Artificial Sequence
  Description of Artificial Sequence: Synthetic oligonucleotide
ucugauuagcguuuucaag

SEQ ID NO: 2352443 - RNA, 19 nt, Artificial Sequence
  Description of Artificial Sequence: Synthetic oligonucleotide
agaaagauuuacaaauaac

SEQ ID NO: 2352444 - RNA, 19 nt, Artificial Sequence
  Description of Artificial Sequence: Synthetic oligonucleotide
auuagucuguguuaguaug

SEQ ID NO: 2352445 - RNA, 19 nt, Artificial Sequence
  Description of Artificial Sequence: Synthetic oligonucleotide
uagaaagauuuacaaauaa

SEQ ID NO: 2352446 - RNA, 19 nt, Artificial Sequence
  Description of Artificial Sequence: Synthetic oligonucleotide
auuuuaagcaggaauccac

SEQ ID NO: 2352447 - RNA, 19 nt, Artificial Sequence
  Description of Artificial Sequence: Synthetic oligonucleotide
  modified_base (6)..(6): a, c, u, g, unknown or other
caaacncaugccuuaaagc

SEQ ID NO: 2352448 - RNA, 19 nt, Artificial Sequence
  Description of Artificial Sequence: Synthetic oligonucleotide
augauagggagaucaaguc

SEQ ID NO: 2352449 - RNA, 19 nt, Artificial Sequence
  Description of Artificial Sequence: Synthetic oligonucleotide
ucagacgccaacuucuugc

SEQ ID NO: 2352450 - RNA, 19 nt, Artificial Sequence
  Description of Artificial Sequence: Synthetic oligonucleotide
ugucaauaaaaucuucaaa

SEQ ID NO: 2352451 - RNA, 19 nt, Artificial Sequence
  Description of Artificial Sequence: Synthetic oligonucleotide
ucuguuaggcuucuacuug

SEQ ID NO: 2352452 - RNA, 19 nt, Artificial Sequence
  Description of Artificial Sequence: Synthetic oligonucleotide
cacaucauuuucuagggac

SEQ ID NO: 2352453 - RNA, 19 nt, Artificial Sequence
  Description of Artificial Sequence: Synthetic oligonucleotide
gucgaauucguuuuaaaca

SEQ ID NO: 2352454 - RNA, 19 nt, Artificial Sequence
  Description of Artificial Sequence: Synthetic oligonucleotide
auuacucaguagcuuugcc

SEQ ID NO: 2352455 - RNA, 19 nt, Artificial Sequence
  Description of Artificial Sequence: Synthetic oligonucleotide
augacucagacuuauacaa

SEQ ID NO: 2352456 - RNA, 19 nt, Artificial Sequence
  Description of Artificial Sequence: Synthetic oligonucleotide
ucaauaaaaucuucaaauu

SEQ ID NO: 2352457 - RNA, 19 nt, Artificial Sequence
  Description of Artificial Sequence: Synthetic oligonucleotide
uugaauuuugucuuaucaa

SEQ ID NO: 2352458 - RNA, 19 nt, Artificial Sequence
  Description of Artificial Sequence: Synthetic oligonucleotide
uauuaguuucuucaacuuc

SEQ ID NO: 2352459 - RNA, 19 nt, Artificial Sequence
  Description of Artificial Sequence: Synthetic oligonucleotide
cauuauugcuaacaaaauc

SEQ ID NO: 2352460 - RNA, 19 nt, Artificial Sequence
  Description of Artificial Sequence: Synthetic oligonucleotide
uuccccuugaauuuugucu

SEQ ID NO: 2352461 - RNA, 19 nt, Artificial Sequence
  Description of Artificial Sequence: Synthetic oligonucleotide
uuauuucucucaauucucu

SEQ ID NO: 2352462 - RNA, 19 nt, Artificial Sequence
  Description of Artificial Sequence: Synthetic oligonucleotide
ucuucuguuaggcuucuac

SEQ ID NO: 2352463 - RNA, 19 nt, Artificial Sequence
  Description of Artificial Sequence: Synthetic oligonucleotide
aaaagggaucaaauccagc

SEQ ID NO: 2352464 - RNA, 19 nt, Artificial Sequence
  Description of Artificial Sequence: Synthetic oligonucleotide
acuugauucagacgccaac

SEQ ID NO: 2352465 - RNA, 19 nt, Artificial Sequence
  Description of Artificial Sequence: Synthetic oligonucleotide
ucaacucugucaauaaaau

SEQ ID NO: 2352466 - RNA, 19 nt, Artificial Sequence
  Description of Artificial Sequence: Synthetic oligonucleotide
uguguuuaauccacuuggc

SEQ ID NO: 2352467 - RNA, 19 nt, Artificial Sequence
  Description of Artificial Sequence: Synthetic oligonucleotide
uccaugugucugauuagcg

SEQ ID NO: 2352468 - RNA, 19 nt, Artificial Sequence
  Description of Artificial Sequence: Synthetic oligonucleotide
uuuguauuggcagaaggaa

SEQ ID NO: 2352469 - RNA, 19 nt, Artificial Sequence
  Description of Artificial Sequence: Synthetic oligonucleotide
aaagcuggaagcccucucu

SEQ ID NO: 2352470 - RNA, 19 nt, Artificial Sequence
  Description of Artificial Sequence: Synthetic oligonucleotide
ucauguaugauagggagau

SEQ ID NO: 2352471 - RNA, 19 nt, Artificial Sequence
  Description of Artificial Sequence: Synthetic oligonucleotide
gaauauuucuggauuaguc

SEQ ID NO: 2352472 - RNA, 19 nt, Artificial Sequence
  Description of Artificial Sequence: Synthetic oligonucleotide
cagacuuauacaaaguaga

SEQ ID NO: 2352473 - RNA, 19 nt, Artificial Sequence
  Description of Artificial Sequence: Synthetic oligonucleotide
aagucuuaugacucagacu

SEQ ID NO: 2352474 - RNA, 19 nt, Artificial Sequence
  Description of Artificial Sequence: Synthetic oligonucleotide
aacuugcaggauucuauug

SEQ ID NO: 2352475 - RNA, 19 nt, Artificial Sequence
  Description of Artificial Sequence: Synthetic oligonucleotide
uauuuggaauauuucugga

SEQ ID NO: 2352476 - RNA, 19 nt, Artificial Sequence
  Description of Artificial Sequence: Synthetic oligonucleotide
aaucuggcuauuuggaaua

SEQ ID NO: 2352477 - RNA, 19 nt, Artificial Sequence
  Description of Artificial Sequence: Synthetic oligonucleotide
uugauccucaccaguacug

SEQ ID NO: 2352478 - RNA, 19 nt, Artificial Sequence
  Description of Artificial Sequence: Synthetic oligonucleotide
auuguagaaaucuggcuau

SEQ ID NO: 2352479 - RNA, 19 nt, Artificial Sequence
  Description of Artificial Sequence: Synthetic oligonucleotide
uuguauuggcagaaggaac

SEQ ID NO: 2352480 - RNA, 19 nt, Artificial Sequence
  Description of Artificial Sequence: Synthetic oligonucleotide
uauugcuaacaaaaucuuc

SEQ ID NO: 2352481 - RNA, 19 nt, Artificial Sequence
  Description of Artificial Sequence: Synthetic oligonucleotide
acaugaagucuuaugacuc

SEQ ID NO: 2352482 - RNA, 19 nt, Artificial Sequence
  Description of Artificial Sequence: Synthetic oligonucleotide
auguaugauagggagauca

SEQ ID NO: 2352483 - RNA, 19 nt, Artificial Sequence
  Description of Artificial Sequence: Synthetic oligonucleotide
uuacucaguagcuuugccu

SEQ ID NO: 2352484 - RNA, 19 nt, Artificial Sequence
  Description of Artificial Sequence: Synthetic oligonucleotide
aaucuucauguaugauagg

SEQ ID NO: 2352485 - RNA, 19 nt, Artificial Sequence
  Description of Artificial Sequence: Synthetic oligonucleotide
  modified_base (4)..(4): a, c, u, g, unknown or other
aacncaugccuuaaagcug

SEQ ID NO: 2352486 - RNA, 19 nt, Artificial Sequence
  Description of Artificial Sequence: Synthetic oligonucleotide
ugcuaacaaaaucuucaug

SEQ ID NO: 2352487 - RNA, 19 nt, Artificial Sequence
  Description of Artificial Sequence: Synthetic oligonucleotide
uuuucuagggacuggcuau

SEQ ID NO: 2352488 - RNA, 19 nt, Artificial Sequence
  Description of Artificial Sequence: Synthetic oligonucleotide
ucauaaucugguauuucaa

SEQ ID NO: 2352489 - RNA, 19 nt, Artificial Sequence
  Description of Artificial Sequence: Synthetic oligonucleotide
aguagcuuugccugccuuc

SEQ ID NO: 2352490 - RNA, 19 nt, Artificial Sequence
  Description of Artificial Sequence: Synthetic oligonucleotide
ucuacuugauucagacgcc

SEQ ID NO: 2352491 - RNA, 19 nt, Artificial Sequence
  Description of Artificial Sequence: Synthetic oligonucleotide
guauuuuaagcaggaaucc

SEQ ID NO: 2352492 - RNA, 19 nt, Artificial Sequence
  Description of Artificial Sequence: Synthetic oligonucleotide
aggaacaucaugugggcca

SEQ ID NO: 2352493 - RNA, 19 nt, Artificial Sequence
  Description of Artificial Sequence: Synthetic oligonucleotide
auuggcagaaggaacauca

SEQ ID NO: 2352494 - RNA, 19 nt, Artificial Sequence
  Description of Artificial Sequence: Synthetic oligonucleotide
uucauguaugauagggaga

SEQ ID NO: 2352495 - RNA, 19 nt, Artificial Sequence
  Description of Artificial Sequence: Synthetic oligonucleotide
ugcaggauucuauuguaga

SEQ ID NO: 2352496 - RNA, 19 nt, Artificial Sequence
  Description of Artificial Sequence: Synthetic oligonucleotide
agcguuuucaagucuucag

SEQ ID NO: 2352497 - RNA, 19 nt, Artificial Sequence
  Description of Artificial Sequence: Synthetic oligonucleotide
  modified_base (3)..(3): a, c, u, g, unknown or other
acncaugccuuaaagcugg

SEQ ID NO: 2352498 - RNA, 19 nt, Artificial Sequence
  Description of Artificial Sequence: Synthetic oligonucleotide
auuuggaauauuucuggau

SEQ ID NO: 2352499 - RNA, 19 nt, Artificial Sequence
  Description of Artificial Sequence: Synthetic oligonucleotide
cugguauuucaaacaagcc

SEQ ID NO: 2352500 - RNA, 19 nt, Artificial Sequence
  Description of Artificial Sequence: Synthetic oligonucleotide
uuuccuagguuuucaacuc

SEQ ID NO: 2352501 - RNA, 19 nt, Artificial Sequence
  Description of Artificial Sequence: Synthetic oligonucleotide
aggauucuauuguagaaau

SEQ ID NO: 2352502 - RNA, 19 nt, Artificial Sequence
  Description of Artificial Sequence: Synthetic oligonucleotide
uguucuucuguuaggcuuc

SEQ ID NO: 2352503 - RNA, 19 nt, Artificial Sequence
  Description of Artificial Sequence: Synthetic oligonucleotide
ucauuuucuagggacuggc

SEQ ID NO: 2352504 - RNA, 19 nt, Artificial Sequence
  Description of Artificial Sequence: Synthetic oligonucleotide
gcuaacaaaaucuucaugu

SEQ ID NO: 2352505 - RNA, 19 nt, Artificial Sequence
  Description of Artificial Sequence: Synthetic oligonucleotide
agcaggaauccacaugaag

SEQ ID NO: 2352506 - RNA, 19 nt, Artificial Sequence
  Description of Artificial Sequence: Synthetic oligonucleotide
uguguuaguaugguccagc

SEQ ID NO: 2352507 - RNA, 19 nt, Artificial Sequence
  Description of Artificial Sequence: Synthetic oligonucleotide
uugcaggauucuauuguag

SEQ ID NO: 2352508 - RNA, 19 nt, Artificial Sequence
  Description of Artificial Sequence: Synthetic oligonucleotide
ucucaauucucuguugcug

SEQ ID NO: 2352509 - RNA, 19 nt, Artificial Sequence
  Description of Artificial Sequence: Synthetic oligonucleotide
ucuugcugucagaugagcu

SEQ ID NO: 2352510 - RNA, 19 nt, Artificial Sequence
  Description of Artificial Sequence: Synthetic oligonucleotide
aaacuugcaggauucuauu

SEQ ID NO: 2352511 - RNA, 19 nt, Artificial Sequence
  Description of Artificial Sequence: Synthetic oligonucleotide
aucaagucgaauucguuuu

SEQ ID NO: 2352512 - RNA, 19 nt, Artificial Sequence
  Description of Artificial Sequence: Synthetic oligonucleotide
ugauuagcguuuucaaguc

SEQ ID NO: 2352513 - RNA, 19 nt, Artificial Sequence
  Description of Artificial Sequence: Synthetic oligonucleotide
caggaauccacaugaaguc

SEQ ID NO: 2352514 - RNA, 19 nt, Artificial Sequence
  Description of Artificial Sequence: Synthetic oligonucleotide
acucaguagcuuugccugc

SEQ ID NO: 2352515 - RNA, 19 nt, Artificial Sequence
  Description of Artificial Sequence: Synthetic oligonucleotide
uggcagaaggaacaucaug

SEQ ID NO: 2352516 - RNA, 19 nt, Artificial Sequence
  Description of Artificial Sequence: Synthetic oligonucleotide
ugauucagacgccaacuuc

SEQ ID NO: 2352517 - RNA, 19 nt, Artificial Sequence
  Description of Artificial Sequence: Synthetic oligonucleotide
aagccauucucuucuugcu

SEQ ID NO: 2352518 - RNA, 19 nt, Artificial Sequence
  Description of Artificial Sequence: Synthetic oligonucleotide
uuggaauauuucuggauua

SEQ ID NO: 2352519 - RNA, 19 nt, Artificial Sequence
  Description of Artificial Sequence: Synthetic oligonucleotide
uuaaacaggucugaaccuc

SEQ ID NO: 2352520 - RNA, 19 nt, Artificial Sequence
  Description of Artificial Sequence: Synthetic oligonucleotide
auuuguauuggcagaagga

SEQ ID NO: 2352521 - RNA, 19 nt, Artificial Sequence
  Description of Artificial Sequence: Synthetic oligonucleotide
ugaacuguuccucuucauu

SEQ ID NO: 2352522 - RNA, 19 nt, Artificial Sequence
  Description of Artificial Sequence: Synthetic oligonucleotide
cuucuacuugauucagacg

SEQ ID NO: 2352523 - RNA, 19 nt, Artificial Sequence
  Description of Artificial Sequence: Synthetic oligonucleotide
ugcaucgaggguauuaguu

SEQ ID NO: 2352524 - RNA, 19 nt, Artificial Sequence
  Description of Artificial Sequence: Synthetic oligonucleotide
aacuucuugcugucagaug

SEQ ID NO: 2352525 - RNA, 19 nt, Artificial Sequence
  Description of Artificial Sequence: Synthetic oligonucleotide
uagggacuggcuauuacuc

SEQ ID NO: 2352526 - RNA, 19 nt, Artificial Sequence
  Description of Artificial Sequence: Synthetic oligonucleotide
cuauuacucaguagcuuug

SEQ ID NO: 2352527 - RNA, 19 nt, Artificial Sequence
  Description of Artificial Sequence: Synthetic oligonucleotide
ucuugauccucaccaguac

SEQ ID NO: 2352528 - RNA, 19 nt, Artificial Sequence
  Description of Artificial Sequence: Synthetic oligonucleotide
uguaugauagggagaucaa

SEQ ID NO: 2352529 - RNA, 19 nt, Artificial Sequence
  Description of Artificial Sequence: Synthetic oligonucleotide
cuggauuagucuguguuag

SEQ ID NO: 2352530 - RNA, 19 nt, Artificial Sequence
  Description of Artificial Sequence: Synthetic oligonucleotide
uagccuaugugcccagugc

SEQ ID NO: 2352531 - RNA, 19 nt, Artificial Sequence
  Description of Artificial Sequence: Synthetic oligonucleotide
uucuguuaggcuucuacuu

SEQ ID NO: 2352532 - RNA, 19 nt, Artificial Sequence
  Description of Artificial Sequence: Synthetic oligonucleotide
auguucauaaucugguauu

SEQ ID NO: 2352533 - RNA, 19 nt, Artificial Sequence
  Description of Artificial Sequence: Synthetic oligonucleotide
aaguuucaucuucuacaug

SEQ ID NO: 2352534 - RNA, 19 nt, Artificial Sequence
  Description of Artificial Sequence: Synthetic oligonucleotide
cugauuagcguuuucaagu

SEQ ID NO: 2352535 - RNA, 19 nt, Artificial Sequence
  Description of Artificial Sequence: Synthetic oligonucleotide
uauuacucaguagcuuugc

SEQ ID NO: 2352536 - RNA, 19 nt, Artificial Sequence
  Description of Artificial Sequence: Synthetic oligonucleotide
uucauuuguauuggcagaa

SEQ ID NO: 2352537 - RNA, 19 nt, Artificial Sequence
  Description of Artificial Sequence: Synthetic oligonucleotide
ugccuuaaagcuggaagcc

SEQ ID NO: 2352538 - RNA, 19 nt, Artificial Sequence
  Description of Artificial Sequence: Synthetic oligonucleotide
uuaguaugguccagcuugu

SEQ ID NO: 2352539 - RNA, 19 nt, Artificial Sequence
  Description of Artificial Sequence: Synthetic oligonucleotide
agucuguguuaguaugguc

SEQ ID NO: 2352540 - RNA, 19 nt, Artificial Sequence
  Description of Artificial Sequence: Synthetic oligonucleotide
ucuuaugacucagacuuau

SEQ ID NO: 2352541 - RNA, 19 nt, Artificial Sequence
  Description of Artificial Sequence: Synthetic oligonucleotide
uaaccccaaacuugcagga

SEQ ID NO: 2352542 - RNA, 19 nt, Artificial Sequence
  Description of Artificial Sequence: Synthetic oligonucleotide
agaaaucuggcuauuugga

SEQ ID NO: 2352543 - RNA, 19 nt, Artificial Sequence
  Description of Artificial Sequence: Synthetic oligonucleotide
gaucaaauccagcagcagu

SEQ ID NO: 2352544 - RNA, 19 nt, Artificial Sequence
  Description of Artificial Sequence: Synthetic oligonucleotide
gaucucucucaggagaggc

SEQ ID NO: 2352545 - RNA, 19 nt, Artificial Sequence
  Description of Artificial Sequence: Synthetic oligonucleotide
aaauccagcagcaguugca

SEQ ID NO: 2352546 - RNA, 19 nt, Artificial Sequence
  Description of Artificial Sequence: Synthetic oligonucleotide
aagucgaauucguuuuaaa

SEQ ID NO: 2352547 - RNA, 19 nt, Artificial Sequence
  Description of Artificial Sequence: Synthetic oligonucleotide
caucgaggguauuaguuuc

SEQ ID NO: 2352548 - RNA, 19 nt, Artificial Sequence
  Description of Artificial Sequence: Synthetic oligonucleotide
acuggcuauuacucaguag

SEQ ID NO: 2352549 - RNA, 19 nt, Artificial Sequence
  Description of Artificial Sequence: Synthetic oligonucleotide
uggcuauuacucaguagcu

SEQ ID NO: 2352550 - RNA, 19 nt, Artificial Sequence
  Description of Artificial Sequence: Synthetic oligonucleotide
  modified_base (13)..(13): a, c, u, g, unknown or other
gucuuaucaaacncaugcc

SEQ ID NO: 2352551 - RNA, 19 nt, Artificial Sequence
  Description of Artificial Sequence: Synthetic oligonucleotide
gcuauuuggaauauuucug

SEQ ID NO: 2352552 - RNA, 19 nt, Artificial Sequence
  Description of Artificial Sequence: Synthetic oligonucleotide
uugcuaacaaaaucuucau

SEQ ID NO: 2352553 - RNA, 19 nt, Artificial Sequence
  Description of Artificial Sequence: Synthetic oligonucleotide
uggcuauuuggaauauuuc

SEQ ID NO: 2352554 - RNA, 19 nt, Artificial Sequence
  Description of Artificial Sequence: Synthetic oligonucleotide
ucacaucauuuucuaggga

SEQ ID NO: 2352555 - RNA, 19 nt, Artificial Sequence
  Description of Artificial Sequence: Synthetic oligonucleotide
ucuagggacuggcuauuac

SEQ ID NO: 2352556 - RNA, 19 nt, Artificial Sequence
  Description of Artificial Sequence: Synthetic oligonucleotide
ucagccucaugaccuuucc

SEQ ID NO: 2352557 - RNA, 19 nt, Artificial Sequence
  Description of Artificial Sequence: Synthetic oligonucleotide
gaagcccucucucagaagu

SEQ ID NO: 2352558 - RNA, 19 nt, Artificial Sequence
  Description of Artificial Sequence: Synthetic oligonucleotide
cuagguuuucaacucuguc

SEQ ID NO: 2352559 - RNA, 19 nt, Artificial Sequence
  Description of Artificial Sequence: Synthetic oligonucleotide
ggaaaguuucaucuucuac

SEQ ID NO: 2352560 - RNA, 19 nt, Artificial Sequence
  Description of Artificial Sequence: Synthetic oligonucleotide
uccucaccaguacugcucu

SEQ ID NO: 2352561 - RNA, 19 nt, Artificial Sequence
  Description of Artificial Sequence: Synthetic oligonucleotide
ucauuuguauuggcagaag

SEQ ID NO: 2352562 - RNA, 19 nt, Artificial Sequence
  Description of Artificial Sequence: Synthetic oligonucleotide
uuccuagguuuucaacucu

SEQ ID NO: 2352563 - RNA, 19 nt, Artificial Sequence
  Description of Artificial Sequence: Synthetic oligonucleotide
gguauuaguuucuucaacu

SEQ ID NO: 2352564 - RNA, 19 nt, Artificial Sequence
  Description of Artificial Sequence: Synthetic oligonucleotide
gauucagacgccaacuucu

SEQ ID NO: 2352565 - RNA, 19 nt, Artificial Sequence
  Description of Artificial Sequence: Synthetic oligonucleotide
uugauucagacgccaacuu

SEQ ID NO: 2352566 - RNA, 19 nt, Artificial Sequence
  Description of Artificial Sequence: Synthetic oligonucleotide
cugucaauaaaaucuucaa

SEQ ID NO: 2352567 - RNA, 19 nt, Artificial Sequence
  Description of Artificial Sequence: Synthetic oligonucleotide
acugucacaucauuuucua

SEQ ID NO: 2352568 - RNA, 19 nt, Artificial Sequence
  Description of Artificial Sequence: Synthetic oligonucleotide
ucguuuuaaacaggucuga

SEQ ID NO: 2352569 - RNA, 19 nt, Artificial Sequence
  Description of Artificial Sequence: Synthetic oligonucleotide
ugauccucaccaguacugc

SEQ ID NO: 2352570 - RNA, 19 nt, Artificial Sequence
  Description of Artificial Sequence: Synthetic oligonucleotide
ucucagaaguuaaucucuu

SEQ ID NO: 2352571 - RNA, 19 nt, Artificial Sequence
  Description of Artificial Sequence: Synthetic oligonucleotide
cuacugucacaucauuuuc

SEQ ID NO: 2352572 - RNA, 19 nt, Artificial Sequence
  Description of Artificial Sequence: Synthetic oligonucleotide
gaauucguuuuaaacaggu

SEQ ID NO: 2352573 - RNA, 19 nt, Artificial Sequence
  Description of Artificial Sequence: Synthetic oligonucleotide
agccuaugugcccagugcu

SEQ ID NO: 2352574 - RNA, 19 nt, Artificial Sequence
  Description of Artificial Sequence: Synthetic oligonucleotide
gaucaagucgaauucguuu

SEQ ID NO: 2352575 - RNA, 19 nt, Artificial Sequence
  Description of Artificial Sequence: Synthetic oligonucleotide
uucagacgccaacuucuug

SEQ ID NO: 2352576 - RNA, 19 nt, Artificial Sequence
  Description of Artificial Sequence: Synthetic oligonucleotide
aguaugguccagcuuguuu

SEQ ID NO: 2352577 - RNA, 19 nt, Artificial Sequence
  Description of Artificial Sequence: Synthetic oligonucleotide
uguucauaaucugguauuu

SEQ ID NO: 2352578 - RNA, 19 nt, Artificial Sequence
  Description of Artificial Sequence: Synthetic oligonucleotide
aggguauuaguuucuucaa

SEQ ID NO: 2352579 - RNA, 19 nt, Artificial Sequence
  Description of Artificial Sequence: Synthetic oligonucleotide
ucaagucgaauucguuuua

SEQ ID NO: 2352580 - RNA, 19 nt, Artificial Sequence
  Description of Artificial Sequence: Synthetic oligonucleotide
guuaaucucuucaucaggu

SEQ ID NO: 2352581 - RNA, 19 nt, Artificial Sequence
  Description of Artificial Sequence: Synthetic oligonucleotide
ugcucucuucuacugucac

SEQ ID NO: 2352582 - RNA, 19 nt, Artificial Sequence
  Description of Artificial Sequence: Synthetic oligonucleotide
gcguuuucaagucuucagc

SEQ ID NO: 2352583 - RNA, 19 nt, Artificial Sequence
  Description of Artificial Sequence: Synthetic oligonucleotide
  modified_base (9)..(9): a, c, u, g, unknown or other
uaucaaacncaugccuuaa

SEQ ID NO: 2352584 - RNA, 19 nt, Artificial Sequence
  Description of Artificial Sequence: Synthetic oligonucleotide
auugcaguuuggggaauag

SEQ ID NO: 2352585 - RNA, 19 nt, Artificial Sequence
  Description of Artificial Sequence: Synthetic oligonucleotide
gacgccaacuucuugcugu

SEQ ID NO: 2352586 - RNA, 19 nt, Artificial Sequence
  Description of Artificial Sequence: Synthetic oligonucleotide
uguuaguaugguccagcuu

SEQ ID NO: 2352587 - RNA, 19 nt, Artificial Sequence
  Description of Artificial Sequence: Synthetic oligonucleotide
acaucauuuucuagggacu

SEQ ID NO: 2352588 - RNA, 19 nt, Artificial Sequence
  Description of Artificial Sequence: Synthetic oligonucleotide
agacuuauacaaaguagaa

SEQ ID NO: 2352589 - RNA, 19 nt, Artificial Sequence
  Description of Artificial Sequence: Synthetic oligonucleotide
ggcuauuuggaauauuucu

SEQ ID NO: 2352590 - RNA, 19 nt, Artificial Sequence
  Description of Artificial Sequence: Synthetic oligonucleotide
uuuccccuugaauuuuguc

SEQ ID NO: 2352591 - RNA, 19 nt, Artificial Sequence
  Description of Artificial Sequence: Synthetic oligonucleotide
gauuagucuguguuaguau

SEQ ID NO: 2352592 - RNA, 19 nt, Artificial Sequence
  Description of Artificial Sequence: Synthetic oligonucleotide
caucauuauugcuaacaaa

SEQ ID NO: 2352593 - RNA, 19 nt, Artificial Sequence
  Description of Artificial Sequence: Synthetic oligonucleotide
gguauuucaaacaagccau

SEQ ID NO: 2352594 - RNA, 19 nt, Artificial Sequence
  Description of Artificial Sequence: Synthetic oligonucleotide
uagucuguguuaguauggu

SEQ ID NO: 2352595 - RNA, 19 nt, Artificial Sequence
  Description of Artificial Sequence: Synthetic oligonucleotide
auuagcguuuucaagucuu

SEQ ID NO: 2352596 - RNA, 19 nt, Artificial Sequence
  Description of Artificial Sequence: Synthetic oligonucleotide
uguuaggcuucuacuugau

SEQ ID NO: 2352597 - RNA, 19 nt, Artificial Sequence
  Description of Artificial Sequence: Synthetic oligonucleotide
cuauuguagaaaucuggcu

SEQ ID NO: 2352598 - RNA, 19 nt, Artificial Sequence
  Description of Artificial Sequence: Synthetic oligonucleotide
cuguuaggcuucuacuuga

SEQ ID NO: 2352599 - RNA, 19 nt, Artificial Sequence
  Description of Artificial Sequence: Synthetic oligonucleotide
aaauaaccccaaacuugca

SEQ ID NO: 2352600 - RNA, 19 nt, Artificial Sequence
  Description of Artificial Sequence: Synthetic oligonucleotide
  modified_base (11)..(11): a, c, u, g, unknown or other
cuuaucaaacncaugccuu

SEQ ID NO: 2352601 - RNA, 19 nt, Artificial Sequence
  Description of Artificial Sequence: Synthetic oligonucleotide
aucugguauuucaaacaag

SEQ ID NO: 2352602 - RNA, 19 nt, Artificial Sequence
  Description of Artificial Sequence: Synthetic oligonucleotide
gucugauuagcguuuucaa

SEQ ID NO: 2352603 - RNA, 19 nt, Artificial Sequence
  Description of Artificial Sequence: Synthetic oligonucleotide
aggaucucucucaggagag

SEQ ID NO: 2352604 - RNA, 19 nt, Artificial Sequence
  Description of Artificial Sequence: Synthetic oligonucleotide
uuucuggauuagucugugu

SEQ ID NO: 2352605 - RNA, 19 nt, Artificial Sequence
  Description of Artificial Sequence: Synthetic oligonucleotide
gggaauagccuaugugccc

SEQ ID NO: 2352606 - RNA, 19 nt, Artificial Sequence
  Description of Artificial Sequence: Synthetic oligonucleotide
  modified_base (8)..(8): a, c, u, g, unknown or other
aucaaacncaugccuuaaa

SEQ ID NO: 2352607 - RNA, 19 nt, Artificial Sequence
  Description of Artificial Sequence: Synthetic oligonucleotide
guaugguccagcuuguuuu

SEQ ID NO: 2352608 - RNA, 19 nt, Artificial Sequence
  Description of Artificial Sequence: Synthetic oligonucleotide
uagcguuuucaagucuuca

SEQ ID NO: 2352609 - RNA, 19 nt, Artificial Sequence
  Description of Artificial Sequence: Synthetic oligonucleotide
acgccaacuucuugcuguc

SEQ ID NO: 2352610 - RNA, 19 nt, Artificial Sequence
  Description of Artificial Sequence: Synthetic oligonucleotide
ggguauuaguuucuucaac

SEQ ID NO: 2352611 - RNA, 19 nt, Artificial Sequence
  Description of Artificial Sequence: Synthetic oligonucleotide
ucaauucucuguugcuguu

SEQ ID NO: 2352612 - RNA, 19 nt, Artificial Sequence
  Description of Artificial Sequence: Synthetic oligonucleotide
uggauuagucuguguuagu

SEQ ID NO: 2352613 - RNA, 19 nt, Artificial Sequence
  Description of Artificial Sequence: Synthetic oligonucleotide
uuggcagaaggaacaucau

SEQ ID NO: 2352614 - RNA, 19 nt, Artificial Sequence
  Description of Artificial Sequence: Synthetic oligonucleotide
caaacuugcaggauucuau

SEQ ID NO: 2352615 - RNA, 19 nt, Artificial Sequence
  Description of Artificial Sequence: Synthetic oligonucleotide
cuugcaggauucuauugua

SEQ ID NO: 2352616 - RNA, 19 nt, Artificial Sequence
  Description of Artificial Sequence: Synthetic oligonucleotide
aacaggucugaaccuccuu

SEQ ID NO: 2352617 - RNA, 19 nt, Artificial Sequence
  Description of Artificial Sequence: Synthetic oligonucleotide
aauccacaugaagucuuau

SEQ ID NO: 2352618 - RNA, 19 nt, Artificial Sequence
  Description of Artificial Sequence: Synthetic oligonucleotide
uugcaucgaggguauuagu

SEQ ID NO: 2352619 - RNA, 19 nt, Artificial Sequence
  Description of Artificial Sequence: Synthetic oligonucleotide
uugaacuguuccucuucau

SEQ ID NO: 2352620 - RNA, 19 nt, Artificial Sequence
  Description of Artificial Sequence: Synthetic oligonucleotide
guguuuaauccacuuggcu

SEQ ID NO: 2352621 - RNA, 19 nt, Artificial Sequence
  Description of Artificial Sequence: Synthetic oligonucleotide
cagcuguuuauuucucuca

SEQ ID NO: 2352622 - RNA, 19 nt, Artificial Sequence
  Description of Artificial Sequence: Synthetic oligonucleotide
aauagccuaugugcccagu

SEQ ID NO: 2352623 - RNA, 19 nt, Artificial Sequence
  Description of Artificial Sequence: Synthetic oligonucleotide
cucaauucucuguugcugu

SEQ ID NO: 2352624 - RNA, 19 nt, Artificial Sequence
  Description of Artificial Sequence: Synthetic oligonucleotide
ugcugucagaugagcuugu

SEQ ID NO: 2352625 - RNA, 19 nt, Artificial Sequence
  Description of Artificial Sequence: Synthetic oligonucleotide
cuucuguuaggcuucuacu

SEQ ID NO: 2352626 - RNA, 19 nt, Artificial Sequence
  Description of Artificial Sequence: Synthetic oligonucleotide
aguugcaucgaggguauua

SEQ ID NO: 2352627 - RNA, 19 nt, Artificial Sequence
  Description of Artificial Sequence: Synthetic oligonucleotide
guauuaguuucuucaacuu

SEQ ID NO: 2352628 - RNA, 19 nt, Artificial Sequence
  Description of Artificial Sequence: Synthetic oligonucleotide
cuagggacuggcuauuacu

SEQ ID NO: 2352629 - RNA, 19 nt, Artificial Sequence
  Description of Artificial Sequence: Synthetic oligonucleotide
uuccucugcuuugaacugu

SEQ ID NO: 2352630 - RNA, 19 nt, Artificial Sequence
  Description of Artificial Sequence: Synthetic oligonucleotide
ucaugaccuuuccccuuga

SEQ ID NO: 2352631 - RNA, 19 nt, Artificial Sequence
  Description of Artificial Sequence: Synthetic oligonucleotide
caguuuggggaauagccua

SEQ ID NO: 2352632 - RNA, 19 nt, Artificial Sequence
  Description of Artificial Sequence: Synthetic oligonucleotide
cuggcuauuuggaauauuu

SEQ ID NO: 2352633 - RNA, 19 nt, Artificial Sequence
  Description of Artificial Sequence: Synthetic oligonucleotide
gcagugucuguguuuaauc

SEQ ID NO: 2352634 - RNA, 19 nt, Artificial Sequence
  Description of Artificial Sequence: Synthetic oligonucleotide
uccucugcuuugaacuguu

SEQ ID NO: 2352635 - RNA, 19 nt, Artificial Sequence
  Description of Artificial Sequence: Synthetic oligonucleotide
caggauucuauuguagaaa

SEQ ID NO: 2352636 - RNA, 19 nt, Artificial Sequence
  Description of Artificial Sequence: Synthetic oligonucleotide
ucaccaguacugcucucuu

SEQ ID NO: 2352637 - RNA, 19 nt, Artificial Sequence
  Description of Artificial Sequence: Synthetic oligonucleotide
cuugauucagacgccaacu

SEQ ID NO: 2352638 - RNA, 19 nt, Artificial Sequence
  Description of Artificial Sequence: Synthetic oligonucleotide
gagaucaagucgaauucgu

SEQ ID NO: 2352639 - RNA, 19 nt, Artificial Sequence
  Description of Artificial Sequence: Synthetic oligonucleotide
agacgccaacuucuugcug

SEQ ID NO: 2352640 - RNA, 19 nt, Artificial Sequence
  Description of Artificial Sequence: Synthetic oligonucleotide
ggaauagccuaugugccca

SEQ ID NO: 2352641 - RNA, 19 nt, Artificial Sequence
  Description of Artificial Sequence: Synthetic oligonucleotide
aggcuucuacuugauucag

SEQ ID NO: 2352642 - RNA, 19 nt, Artificial Sequence
  Description of Artificial Sequence: Synthetic oligonucleotide
gcaggauucuauuguagaa

SEQ ID NO: 2352643 - RNA, 19 nt, Artificial Sequence
  Description of Artificial Sequence: Synthetic oligonucleotide
gacuggcuauuacucagua

SEQ ID NO: 2352644 - RNA, 19 nt, Artificial Sequence
  Description of Artificial Sequence: Synthetic oligonucleotide
cgaauucguuuuaaacagg

SEQ ID NO: 2352645 - RNA, 19 nt, Artificial Sequence
  Description of Artificial Sequence: Synthetic oligonucleotide
cuacuugauucagacgcca

SEQ ID NO: 2352646 - RNA, 19 nt, Artificial Sequence
  Description of Artificial Sequence: Synthetic oligonucleotide
ccuaugugcccagugcucc

SEQ ID NO: 2352647 - RNA, 19 nt, Artificial Sequence
  Description of Artificial Sequence: Synthetic oligonucleotide
aaccccaaacuugcaggau

SEQ ID NO: 2352648 - RNA, 19 nt, Artificial Sequence
  Description of Artificial Sequence: Synthetic oligonucleotide
uuucuagggacuggcuauu

SEQ ID NO: 2352649 - RNA, 19 nt, Artificial Sequence
  Description of Artificial Sequence: Synthetic oligonucleotide
aguuuggggaauagccuau

SEQ ID NO: 2352650 - RNA, 19 nt, Artificial Sequence
  Description of Artificial Sequence: Synthetic oligonucleotide
aucgaggguauuaguuucu

SEQ ID NO: 2352651 - RNA, 19 nt, Artificial Sequence
  Description of Artificial Sequence: Synthetic oligonucleotide
gcuauuacucaguagcuuu

SEQ ID NO: 2352652 - RNA, 19 nt, Artificial Sequence
  Description of Artificial Sequence: Synthetic oligonucleotide
ggauuagucuguguuagua

SEQ ID NO: 2352653 - RNA, 19 nt, Artificial Sequence
  Description of Artificial Sequence: Synthetic oligonucleotide
ugugucugauuagcguuuu

SEQ ID NO: 2352654 - RNA, 19 nt, Artificial Sequence
  Description of Artificial Sequence: Synthetic oligonucleotide
cuugcugucagaugagcuu

SEQ ID NO: 2352655 - RNA, 19 nt, Artificial Sequence
  Description of Artificial Sequence: Synthetic oligonucleotide
guguuaguaugguccagcu

SEQ ID NO: 2352656 - RNA, 19 nt, Artificial Sequence
  Description of Artificial Sequence: Synthetic oligonucleotide
cuguguuaguaugguccag

SEQ ID NO: 2352657 - RNA, 19 nt, Artificial Sequence
  Description of Artificial Sequence: Synthetic oligonucleotide
agguggaagggaggaaagu

SEQ ID NO: 2352658 - RNA, 19 nt, Artificial Sequence
  Description of Artificial Sequence: Synthetic oligonucleotide
gcuccaugugucugauuag

SEQ ID NO: 2352659 - RNA, 19 nt, Artificial Sequence
  Description of Artificial Sequence: Synthetic oligonucleotide
caccaguacugcucucuuc

SEQ ID NO: 2352660 - RNA, 19 nt, Artificial Sequence
  Description of Artificial Sequence: Synthetic oligonucleotide
cuuaugacucagacuuaua

SEQ ID NO: 2352661 - RNA, 19 nt, Artificial Sequence
  Description of Artificial Sequence: Synthetic oligonucleotide
uuguagaaaucuggcuauu

SEQ ID NO: 2352662 - RNA, 19 nt, Artificial Sequence
  Description of Artificial Sequence: Synthetic oligonucleotide
gccuuaaagcuggaagccc

SEQ ID NO: 2352663 - RNA, 19 nt, Artificial Sequence
  Description of Artificial Sequence: Synthetic oligonucleotide
uaugugcccagugcuccau

SEQ ID NO: 2352664 - RNA, 19 nt, Artificial Sequence
  Description of Artificial Sequence: Synthetic oligonucleotide
ucgaggguauuaguuucuu

SEQ ID NO: 2352665 - RNA, 19 nt, Artificial Sequence
  Description of Artificial Sequence: Synthetic oligonucleotide
augugucugauuagcguuu

SEQ ID NO: 2352666 - RNA, 19 nt, Artificial Sequence
  Description of Artificial Sequence: Synthetic oligonucleotide
cagugcuccaugugucuga

SEQ ID NO: 2352667 - RNA, 19 nt, Artificial Sequence
  Description of Artificial Sequence: Synthetic oligonucleotide
cucucaauucucuguugcu

SEQ ID NO: 2352668 - RNA, 19 nt, Artificial Sequence
  Description of Artificial Sequence: Synthetic oligonucleotide
cuaugugcccagugcucca

SEQ ID NO: 2352669 - RNA, 19 nt, Artificial Sequence
  Description of Artificial Sequence: Synthetic oligonucleotide
ccccaaacuugcaggauuc

SEQ ID NO: 2352670 - RNA, 19 nt, Artificial Sequence
  Description of Artificial Sequence: Synthetic oligonucleotide
ccucuucauuuguauuggc

SEQ ID NO: 2352671 - RNA, 19 nt, Artificial Sequence
  Description of Artificial Sequence: Synthetic oligonucleotide
caagucgaauucguuuuaa

SEQ ID NO: 2352672 - RNA, 19 nt, Artificial Sequence
  Description of Artificial Sequence: Synthetic oligonucleotide
uucuagggacuggcuauua

SEQ ID NO: 2352673 - RNA, 19 nt, Artificial Sequence
  Description of Artificial Sequence: Synthetic oligonucleotide
auagggagaucaagucgaa

SEQ ID NO: 2352674 - RNA, 19 nt, Artificial Sequence
  Description of Artificial Sequence: Synthetic oligonucleotide
gugucugauuagcguuuuc

SEQ ID NO: 2352675 - RNA, 19 nt, Artificial Sequence
  Description of Artificial Sequence: Synthetic oligonucleotide
caugugggccaucugcagu

SEQ ID NO: 2352676 - RNA, 19 nt, Artificial Sequence
  Description of Artificial Sequence: Synthetic oligonucleotide
auucagacgccaacuucuu

SEQ ID NO: 2352677 - RNA, 19 nt, Artificial Sequence
  Description of Artificial Sequence: Synthetic oligonucleotide
aucuggcuauuuggaauau

SEQ ID NO: 2352678 - RNA, 19 nt, Artificial Sequence
  Description of Artificial Sequence: Synthetic oligonucleotide
ggaauauuucuggauuagu

SEQ ID NO: 2352679 - RNA, 19 nt, Artificial Sequence
  Description of Artificial Sequence: Synthetic oligonucleotide
agcccucucucagaaguua

SEQ ID NO: 2352680 - RNA, 19 nt, Artificial Sequence
  Description of Artificial Sequence: Synthetic oligonucleotide
ccuuaaagcuggaagcccu

SEQ ID NO: 2352681 - RNA, 19 nt, Artificial Sequence
  Description of Artificial Sequence: Synthetic oligonucleotide
gcucucuucuacugucaca

SEQ ID NO: 2352682 - RNA, 19 nt, Artificial Sequence
  Description of Artificial Sequence: Synthetic oligonucleotide
caacuucuugcugucagau

SEQ ID NO: 2352683 - RNA, 19 nt, Artificial Sequence
  Description of Artificial Sequence: Synthetic oligonucleotide
cagacgccaacuucuugcu

SEQ ID NO: 2352684 - RNA, 19 nt, Artificial Sequence
  Description of Artificial Sequence: Synthetic oligonucleotide
gcaucgaggguauuaguuu

SEQ ID NO: 2352685 - RNA, 19 nt, Artificial Sequence
  Description of Artificial Sequence: Synthetic oligonucleotide
guuaggcuucuacuugauu

SEQ ID NO: 2352686 - RNA, 19 nt, Artificial Sequence
  Description of Artificial Sequence: Synthetic oligonucleotide
gcaguuuggggaauagccu

SEQ ID NO: 2352687 - RNA, 19 nt, Artificial Sequence
  Description of Artificial Sequence: Synthetic oligonucleotide
ccaacuucuugcugucaga

SEQ ID NO: 2352688 - RNA, 19 nt, Artificial Sequence
  Description of Artificial Sequence: Synthetic oligonucleotide
gguggaagggaggaaaguu

SEQ ID NO: 2352689 - RNA, 19 nt, Artificial Sequence
  Description of Artificial Sequence: Synthetic oligonucleotide
cuucuacugucacaucauu

SEQ ID NO: 2352690 - RNA, 19 nt, Artificial Sequence
  Description of Artificial Sequence: Synthetic oligonucleotide
guauuucaaacaagccauu

SEQ ID NO: 2352691 - RNA, 19 nt, Artificial Sequence
  Description of Artificial Sequence: Synthetic oligonucleotide
ccaugugucugauuagcgu

SEQ ID NO: 2352692 - RNA, 19 nt, Artificial Sequence
  Description of Artificial Sequence: Synthetic oligonucleotide
gucuuaugacucagacuua

SEQ ID NO: 2352693 - RNA, 19 nt, Artificial Sequence
  Description of Artificial Sequence: Synthetic oligonucleotide
ggaauccacaugaagucuu

SEQ ID NO: 2352694 - RNA, 19 nt, Artificial Sequence
  Description of Artificial Sequence: Synthetic oligonucleotide
  modified_base (2)..(2): a, c, u, g, unknown or other
cncaugccuuaaagcugga

SEQ ID NO: 2352695 - RNA, 19 nt, Artificial Sequence
  Description of Artificial Sequence: Synthetic oligonucleotide
gccucaugaccuuuccccu

SEQ ID NO: 2352696 - RNA, 19 nt, Artificial Sequence
  Description of Artificial Sequence: Synthetic oligonucleotide
gccuaugugcccagugcuc

SEQ ID NO: 2352697 - RNA, 19 nt, Artificial Sequence
  Description of Artificial Sequence: Synthetic oligonucleotide
gcugucagaugagcuuguc

SEQ ID NO: 2352698 - RNA, 19 nt, Artificial Sequence
  Description of Artificial Sequence: Synthetic oligonucleotide
ggcuauuacucaguagcuu

SEQ ID NO: 2352699 - RNA, 19 nt, Artificial Sequence
  Description of Artificial Sequence: Synthetic oligonucleotide
ccaaacuugcaggauucua

SEQ ID NO: 2352700 - RNA, 19 nt, Artificial Sequence
  Description of Artificial Sequence: Synthetic oligonucleotide
ggaacaucaugugggccau

SEQ ID NO: 2352701 - RNA, 19 nt, Artificial Sequence
  Description of Artificial Sequence: Synthetic oligonucleotide
cguuuuaaacaggucugaa

SEQ ID NO: 2352702 - RNA, 19 nt, Artificial Sequence
  Description of Artificial Sequence: Synthetic oligonucleotide
ggacuggcuauuacucagu

SEQ ID NO: 2352703 - RNA, 19 nt, Artificial Sequence
  Description of Artificial Sequence: Synthetic oligonucleotide
gcaguugcaucgaggguau

SEQ ID NO: 2352704 - RNA, 19 nt, Artificial Sequence
  Description of Artificial Sequence: Synthetic oligonucleotide
ccaguacugcucucuucua

SEQ ID NO: 2352705 - RNA, 19 nt, Artificial Sequence
  Description of Artificial Sequence: Synthetic oligonucleotide
ccccuugaauuuugucuua

SEQ ID NO: 2352706 - RNA, 19 nt, Artificial Sequence
  Description of Artificial Sequence: Synthetic oligonucleotide
cccucucucagaaguuaau

SEQ ID NO: 2352707 - RNA, 19 nt, Artificial Sequence
  Description of Artificial Sequence: Synthetic oligonucleotide
cccuugaauuuugucuuau

SEQ ID NO: 2352708 - RNA, 19 nt, Artificial Sequence
  Description of Artificial Sequence: Synthetic oligonucleotide
cccaaacuugcaggauucu

SEQ ID NO: 2352709 - RNA, 19 nt, Artificial Sequence
  Description of Artificial Sequence: Synthetic oligonucleotide
caguugcaucgaggguauu

SEQ ID NO: 2352710 - RNA, 19 nt, Artificial Sequence
  Description of Artificial Sequence: Synthetic oligonucleotide
  modified_base (1)..(1): a, c, u, g, unknown or other
ncaugccuuaaagcuggaa

SEQ ID NO: 2352711 - RNA, 19 nt, Artificial Sequence
  Description of Artificial Sequence: Synthetic oligonucleotide
aaccagauaguccagcucc

SEQ ID NO: 2352712 - RNA, 19 nt, Artificial Sequence
  Description of Artificial Sequence: Synthetic oligonucleotide
ugggcuauggaaaugagug

SEQ ID NO: 2352713 - RNA, 19 nt, Artificial Sequence
  Description of Artificial Sequence: Synthetic oligonucleotide
gaugauauuucgcacgccg

SEQ ID NO: 2352714 - RNA, 19 nt, Artificial Sequence
  Description of Artificial Sequence: Synthetic oligonucleotide
uucucuaugaccccuauga

SEQ ID NO: 2352715 - RNA, 19 nt, Artificial Sequence
  Description of Artificial Sequence: Synthetic oligonucleotide
ucuaugaccccuaugaccu

SEQ ID NO: 2352716 - RNA, 19 nt, Artificial Sequence
  Description of Artificial Sequence: Synthetic oligonucleotide
aaaugagugcagaauacgc

SEQ ID NO: 2352717 - RNA, 19 nt, Artificial Sequence
  Description of Artificial Sequence: Synthetic oligonucleotide
acaucuaagacuccccacc

SEQ ID NO: 2352718 - RNA, 19 nt, Artificial Sequence
  Description of Artificial Sequence: Synthetic oligonucleotide
gaucuagcggaacagagcc

SEQ ID NO: 2352719 - RNA, 19 nt, Artificial Sequence
  Description of Artificial Sequence: Synthetic oligonucleotide
gaugguacuuuucccaacg

SEQ ID NO: 2352720 - RNA, 19 nt, Artificial Sequence
  Description of Artificial Sequence: Synthetic oligonucleotide
gacauuggugcacucagcg

SEQ ID NO: 2352721 - RNA, 19 nt, Artificial Sequence
  Description of Artificial Sequence: Synthetic oligonucleotide
uauaggcuguaacagagca

SEQ ID NO: 2352722 - RNA, 19 nt, Artificial Sequence
  Description of Artificial Sequence: Synthetic oligonucleotide
auaggucuacaucuaagac

SEQ ID NO: 2352723 - RNA, 19 nt, Artificial Sequence
  Description of Artificial Sequence: Synthetic oligonucleotide
aagacaggcacccagcccu

SEQ ID NO: 2352724 - RNA, 19 nt, Artificial Sequence
  Description of Artificial Sequence: Synthetic oligonucleotide
aggaugauauuucgcacgc

SEQ ID NO: 2352725 - RNA, 19 nt, Artificial Sequence
  Description of Artificial Sequence: Synthetic oligonucleotide
agugcauguuucuugggac

SEQ ID NO: 2352726 - RNA, 19 nt, Artificial Sequence
  Description of Artificial Sequence: Synthetic oligonucleotide
aagcccacagacaugaggg

SEQ ID NO: 2352727 - RNA, 19 nt, Artificial Sequence
  Description of Artificial Sequence: Synthetic oligonucleotide
aggucuacaucuaagacuc

SEQ ID NO: 2352728 - RNA, 19 nt, Artificial Sequence
  Description of Artificial Sequence: Synthetic oligonucleotide
aucagugcauguuucuugg

SEQ ID NO: 2352729 - RNA, 19 nt, Artificial Sequence
  Description of Artificial Sequence: Synthetic oligonucleotide
accgcauaggucuacaucu

SEQ ID NO: 2352730 - RNA, 19 nt, Artificial Sequence
  Description of Artificial Sequence: Synthetic oligonucleotide
aaaaggggacuccugccag

SEQ ID NO: 2352731 - RNA, 19 nt, Artificial Sequence
  Description of Artificial Sequence: Synthetic oligonucleotide
uggaaaugagugcagaaua

SEQ ID NO: 2352732 - RNA, 19 nt, Artificial Sequence
  Description of Artificial Sequence: Synthetic oligonucleotide
ugauauuucgcacgccggc

SEQ ID NO: 2352733 - RNA, 19 nt, Artificial Sequence
  Description of Artificial Sequence: Synthetic oligonucleotide
cucuaugaccccuaugacc

SEQ ID NO: 2352734 - RNA, 19 nt, Artificial Sequence
  Description of Artificial Sequence: Synthetic oligonucleotide
uugggaaacuccuggauga

SEQ ID NO: 2352735 - RNA, 19 nt, Artificial Sequence
  Description of Artificial Sequence: Synthetic oligonucleotide
ucuacaucuaagacucccc

SEQ ID NO: 2352736 - RNA, 19 nt, Artificial Sequence
  Description of Artificial Sequence: Synthetic oligonucleotide
gaauacgcagugcucuugg

SEQ ID NO: 2352737 - RNA, 19 nt, Artificial Sequence
  Description of Artificial Sequence: Synthetic oligonucleotide
aaaggggacuccugccagc

SEQ ID NO: 2352738 - RNA, 19 nt, Artificial Sequence
  Description of Artificial Sequence: Synthetic oligonucleotide
guaagcuggggaucuagcg

SEQ ID NO: 2352739 - RNA, 19 nt, Artificial Sequence
  Description of Artificial Sequence: Synthetic oligonucleotide
ugauccacaaagacaggca

SEQ ID NO: 2352740 - RNA, 19 nt, Artificial Sequence
  Description of Artificial Sequence: Synthetic oligonucleotide
agaacuuucugggcuaugg

SEQ ID NO: 2352741 - RNA, 19 nt, Artificial Sequence
  Description of Artificial Sequence: Synthetic oligonucleotide
aaugagugcagaauacgca

SEQ ID NO: 2352742 - RNA, 19 nt, Artificial Sequence
  Description of Artificial Sequence: Synthetic oligonucleotide
uuccuauaggcuguaacag

SEQ ID NO: 2352743 - RNA, 19 nt, Artificial Sequence
  Description of Artificial Sequence: Synthetic oligonucleotide
acauuggugcacucagcgc

SEQ ID NO: 2352744 - RNA, 19 nt, Artificial Sequence
  Description of Artificial Sequence: Synthetic oligonucleotide
acagaaagucagcucccgc

SEQ ID NO: 2352745 - RNA, 19 nt, Artificial Sequence
  Description of Artificial Sequence: Synthetic oligonucleotide
cagaaagucagcucccgcc

SEQ ID NO: 2352746 - RNA, 19 nt, Artificial Sequence
  Description of Artificial Sequence: Synthetic oligonucleotide
ugguacuuuucccaacgcc

SEQ ID NO: 2352747 - RNA, 19 nt, Artificial Sequence
  Description of Artificial Sequence: Synthetic oligonucleotide
ugugcacggagcaugcgug

SEQ ID NO: 2352748 - RNA, 19 nt, Artificial Sequence
  Description of Artificial Sequence: Synthetic oligonucleotide
ucuaagacuccccaccuuu

SEQ ID NO: 2352749 - RNA, 19 nt, Artificial Sequence
  Description of Artificial Sequence: Synthetic oligonucleotide
ucccacuacaguccugagg

SEQ ID NO: 2352750 - RNA, 19 nt, Artificial Sequence
  Description of Artificial Sequence: Synthetic oligonucleotide
augugcucaucagaagucc

SEQ ID NO: 2352751 - RNA, 19 nt, Artificial Sequence
  Description of Artificial Sequence: Synthetic oligonucleotide
uaagacuccccaccuuucc

SEQ ID NO: 2352752 - RNA, 19 nt, Artificial Sequence
  Description of Artificial Sequence: Synthetic oligonucleotide
cuugggaaacuccuggaug

SEQ ID NO: 2352753 - RNA, 19 nt, Artificial Sequence
  Description of Artificial Sequence: Synthetic oligonucleotide
gguguggugaccacgaggg

SEQ ID NO: 2352754 - RNA, 19 nt, Artificial Sequence
  Description of Artificial Sequence: Synthetic oligonucleotide
cuuccuacagaaagucagc

SEQ ID NO: 2352755 - RNA, 19 nt, Artificial Sequence
  Description of Artificial Sequence: Synthetic oligonucleotide
ugugcucaucagaaguccc

SEQ ID NO: 2352756 - RNA, 19 nt, Artificial Sequence
  Description of Artificial Sequence: Synthetic oligonucleotide
augcgugggaugcugggac

SEQ ID NO: 2352757 - RNA, 19 nt, Artificial Sequence
  Description of Artificial Sequence: Synthetic oligonucleotide
cauaggucuacaucuaaga

SEQ ID NO: 2352758 - RNA, 19 nt, Artificial Sequence
  Description of Artificial Sequence: Synthetic oligonucleotide
uggagaugguacuuuuccc

SEQ ID NO: 2352759 - RNA, 19 nt, Artificial Sequence
  Description of Artificial Sequence: Synthetic oligonucleotide
agugcucuugggaaacucc

SEQ ID NO: 2352760 - RNA, 19 nt, Artificial Sequence
  Description of Artificial Sequence: Synthetic oligonucleotide
acuccguuggagaugguac

SEQ ID NO: 2352761 - RNA, 19 nt, Artificial Sequence
  Description of Artificial Sequence: Synthetic oligonucleotide
uccuauaggcuguaacaga

SEQ ID NO: 2352762 - RNA, 19 nt, Artificial Sequence
  Description of Artificial Sequence: Synthetic oligonucleotide
uacgcagugcucuugggaa

SEQ ID NO: 2352763 - RNA, 19 nt, Artificial Sequence
  Description of Artificial Sequence: Synthetic oligonucleotide
cugauccacaaagacaggc

SEQ ID NO: 2352764 - RNA, 19 nt, Artificial Sequence
  Description of Artificial Sequence: Synthetic oligonucleotide
gaugcugggaccgcauagg

SEQ ID NO: 2352765 - RNA, 19 nt, Artificial Sequence
  Description of Artificial Sequence: Synthetic oligonucleotide
agugcagaauacgcagugc

SEQ ID NO: 2352766 - RNA, 19 nt, Artificial Sequence
  Description of Artificial Sequence: Synthetic oligonucleotide
gauauuucgcacgccggcc

SEQ ID NO: 2352767 - RNA, 19 nt, Artificial Sequence
  Description of Artificial Sequence: Synthetic oligonucleotide
gacaaggaugauauuucgc

SEQ ID NO: 2352768 - RNA, 19 nt, Artificial Sequence
  Description of Artificial Sequence: Synthetic oligonucleotide
cauuggugcacucagcgca

SEQ ID NO: 2352769 - RNA, 19 nt, Artificial Sequence
  Description of Artificial Sequence: Synthetic oligonucleotide
ccuauaggcuguaacagag

SEQ ID NO: 2352770 - RNA, 19 nt, Artificial Sequence
  Description of Artificial Sequence: Synthetic oligonucleotide
aggaccucugcucccagag

SEQ ID NO: 2352771 - RNA, 19 nt, Artificial Sequence
  Description of Artificial Sequence: Synthetic oligonucleotide
ggacaaggaugauauuucg

SEQ ID NO: 2352772 - RNA, 19 nt, Artificial Sequence
  Description of Artificial Sequence: Synthetic oligonucleotide
uggagaagacauuggugca

SEQ ID NO: 2352773 - RNA, 19 nt, Artificial Sequence
  Description of Artificial Sequence: Synthetic oligonucleotide
ucuugggaaacuccuggau

SEQ ID NO: 2352774 - RNA, 19 nt, Artificial Sequence
  Description of Artificial Sequence: Synthetic oligonucleotide
aagacuccccaccuuuccu

SEQ ID NO: 2352775 - RNA, 19 nt, Artificial Sequence
  Description of Artificial Sequence: Synthetic oligonucleotide
caugugcucaucagaaguc

SEQ ID NO: 2352776 - RNA, 19 nt, Artificial Sequence
  Description of Artificial Sequence: Synthetic oligonucleotide
auccggguuuuccagcagg

SEQ ID NO: 2352777 - RNA, 19 nt, Artificial Sequence
  Description of Artificial Sequence: Synthetic oligonucleotide
ugaccugcaguccagucuu

SEQ ID NO: 2352778 - RNA, 19 nt, Artificial Sequence
  Description of Artificial Sequence: Synthetic oligonucleotide
ucauccggguuuuccagca

SEQ ID NO: 2352779 - RNA, 19 nt, Artificial Sequence
  Description of Artificial Sequence: Synthetic oligonucleotide
acuggugcacugccuugcc

SEQ ID NO: 2352780 - RNA, 19 nt, Artificial Sequence
  Description of Artificial Sequence: Synthetic oligonucleotide
gucuacaucuaagacuccc

SEQ ID NO: 2352781 - RNA, 19 nt, Artificial Sequence
  Description of Artificial Sequence: Synthetic oligonucleotide
ucaggagagcagagcaggc

SEQ ID NO: 2352782 - RNA, 19 nt, Artificial Sequence
  Description of Artificial Sequence: Synthetic oligonucleotide
augauauuucgcacgccgg

SEQ ID NO: 2352783 - RNA, 19 nt, Artificial Sequence
  Description of Artificial Sequence: Synthetic oligonucleotide
ugcagaauacgcagugcuc

SEQ ID NO: 2352784 - RNA, 19 nt, Artificial Sequence
  Description of Artificial Sequence: Synthetic oligonucleotide
auacgcagugcucuuggga

SEQ ID NO: 2352785 - RNA, 19 nt, Artificial Sequence
  Description of Artificial Sequence: Synthetic oligonucleotide
auauuucgcacgccggcca

SEQ ID NO: 2352786 - RNA, 19 nt, Artificial Sequence
  Description of Artificial Sequence: Synthetic oligonucleotide
ucuagcggaacagagccua

SEQ ID NO: 2352787 - RNA, 19 nt, Artificial Sequence
  Description of Artificial Sequence: Synthetic oligonucleotide
cacuacaguccugaggacc

SEQ ID NO: 2352788 - RNA, 19 nt, Artificial Sequence
  Description of Artificial Sequence: Synthetic oligonucleotide
uuccuacagaaagucagcu

SEQ ID NO: 2352789 - RNA, 19 nt, Artificial Sequence
  Description of Artificial Sequence: Synthetic oligonucleotide
gaggcucucugucaggaga

SEQ ID NO: 2352790 - RNA, 19 nt, Artificial Sequence
  Description of Artificial Sequence: Synthetic oligonucleotide
gugcauguuucuugggacc

SEQ ID NO: 2352791 - RNA, 19 nt, Artificial Sequence
  Description of Artificial Sequence: Synthetic oligonucleotide
cuugggaccucuccacacc

SEQ ID NO: 2352792 - RNA, 19 nt, Artificial Sequence
  Description of Artificial Sequence: Synthetic oligonucleotide
ucucugucaggagagcaga

SEQ ID NO: 2352793 - RNA, 19 nt, Artificial Sequence
  Description of Artificial Sequence: Synthetic oligonucleotide
ggagaugguacuuuuccca

SEQ ID NO: 2352794 - RNA, 19 nt, Artificial Sequence
  Description of Artificial Sequence: Synthetic oligonucleotide
uucuugggaccucuccaca

SEQ ID NO: 2352795 - RNA, 19 nt, Artificial Sequence
  Description of Artificial Sequence: Synthetic oligonucleotide
uccuacagaaagucagcuc

SEQ ID NO: 2352796 - RNA, 19 nt, Artificial Sequence
  Description of Artificial Sequence: Synthetic oligonucleotide
ugccuugccuugugcacgg

SEQ ID NO: 2352797 - RNA, 19 nt, Artificial Sequence
  Description of Artificial Sequence: Synthetic oligonucleotide
auaggcuguaacagagcac

SEQ ID NO: 2352798 - RNA, 19 nt, Artificial Sequence
  Description of Artificial Sequence: Synthetic oligonucleotide
uccccaacagacacugccu

SEQ ID NO: 2352799 - RNA, 19 nt, Artificial Sequence
  Description of Artificial Sequence: Synthetic oligonucleotide
ccagaguuccuauaggcug

SEQ ID NO: 2352800 - RNA, 19 nt, Artificial Sequence
  Description of Artificial Sequence: Synthetic oligonucleotide
agaagacauuggugcacuc

SEQ ID NO: 2352801 - RNA, 19 nt, Artificial Sequence
  Description of Artificial Sequence: Synthetic oligonucleotide
ugcauguuucuugggaccu

SEQ ID NO: 2352802 - RNA, 19 nt, Artificial Sequence
  Description of Artificial Sequence: Synthetic oligonucleotide
cuguaacagagcacacagc

SEQ ID NO: 2352803 - RNA, 19 nt, Artificial Sequence
  Description of Artificial Sequence: Synthetic oligonucleotide
agucccugguggugugucc

SEQ ID NO: 2352804 - RNA, 19 nt, Artificial Sequence
  Description of Artificial Sequence: Synthetic oligonucleotide
gaagacauuggugcacuca

SEQ ID NO: 2352805 - RNA, 19 nt, Artificial Sequence
  Description of Artificial Sequence: Synthetic oligonucleotide
acgucagacacaaacugcu

SEQ ID NO: 2352806 - RNA, 19 nt, Artificial Sequence
  Description of Artificial Sequence: Synthetic oligonucleotide
ugcuuuaucagugcauguu

SEQ ID NO: 2352807 - RNA, 19 nt, Artificial Sequence
  Description of Artificial Sequence: Synthetic oligonucleotide
uccggguuuuccagcagga

SEQ ID NO: 2352808 - RNA, 19 nt, Artificial Sequence
  Description of Artificial Sequence: Synthetic oligonucleotide
acuacaguccugaggaccu

SEQ ID NO: 2352809 - RNA, 19 nt, Artificial Sequence
  Description of Artificial Sequence: Synthetic oligonucleotide
cacgagggcucccaggggc

SEQ ID NO: 2352810 - RNA, 19 nt, Artificial Sequence
  Description of Artificial Sequence: Synthetic oligonucleotide
aggcauccugugcagaacu

SEQ ID NO: 2352811 - RNA, 19 nt, Artificial Sequence
  Description of Artificial Sequence: Synthetic oligonucleotide
gaccgcauaggucuacauc

SEQ ID NO: 2352812 - RNA, 19 nt, Artificial Sequence
  Description of Artificial Sequence: Synthetic oligonucleotide
gaacuuucugggcuaugga

SEQ ID NO: 2352813 - RNA, 19 nt, Artificial Sequence
  Description of Artificial Sequence: Synthetic oligonucleotide
uggggaucuagcggaacag

SEQ ID NO: 2352814 - RNA, 19 nt, Artificial Sequence
  Description of Artificial Sequence: Synthetic oligonucleotide
agacauuggugcacucagc

SEQ ID NO: 2352815 - RNA, 19 nt, Artificial Sequence
  Description of Artificial Sequence: Synthetic oligonucleotide
cucauccggguuuuccagc

SEQ ID NO: 2352816 - RNA, 19 nt, Artificial Sequence
  Description of Artificial Sequence: Synthetic oligonucleotide
ugguaagcuggggaucuag

SEQ ID NO: 2352817 - RNA, 19 nt, Artificial Sequence
  Description of Artificial Sequence: Synthetic oligonucleotide
cuacaucuaagacucccca

SEQ ID NO: 2352818 - RNA, 19 nt, Artificial Sequence
  Description of Artificial Sequence: Synthetic oligonucleotide
gugcacucagcgcagugug

SEQ ID NO: 2352819 - RNA, 19 nt, Artificial Sequence
  Description of Artificial Sequence: Synthetic oligonucleotide
gaccacgagggcucccagg

SEQ ID NO: 2352820 - RNA, 19 nt, Artificial Sequence
  Description of Artificial Sequence: Synthetic oligonucleotide
agcggaacagagccuaaaa

SEQ ID NO: 2352821 - RNA, 19 nt, Artificial Sequence
  Description of Artificial Sequence: Synthetic oligonucleotide
cccacuacaguccugagga

SEQ ID NO: 2352822 - RNA, 19 nt, Artificial Sequence
  Description of Artificial Sequence: Synthetic oligonucleotide
aacugcuuuaucagugcau

SEQ ID NO: 2352823 - RNA, 19 nt, Artificial Sequence
  Description of Artificial Sequence: Synthetic oligonucleotide
gcucccagaguuccuauag

SEQ ID NO: 2352824 - RNA, 19 nt, Artificial Sequence
  Description of Artificial Sequence: Synthetic oligonucleotide
ugcacggagcaugcguggg

SEQ ID NO: 2352825 - RNA, 19 nt, Artificial Sequence
  Description of Artificial Sequence: Synthetic oligonucleotide
ccuuuccuugcccuggucg

SEQ ID NO: 2352826 - RNA, 19 nt, Artificial Sequence
  Description of Artificial Sequence: Synthetic oligonucleotide
uuccuugcccuggucggcg

SEQ ID NO: 2352827 - RNA, 19 nt, Artificial Sequence
  Description of Artificial Sequence: Synthetic oligonucleotide
ggccaguuccucuccaccg

SEQ ID NO: 2352828 - RNA, 19 nt, Artificial Sequence
  Description of Artificial Sequence: Synthetic oligonucleotide
agaauacgcagugcucuug

SEQ ID NO: 2352829 - RNA, 19 nt, Artificial Sequence
  Description of Artificial Sequence: Synthetic oligonucleotide
agggccaacuccguuggag

SEQ ID NO: 2352830 - RNA, 19 nt, Artificial Sequence
  Description of Artificial Sequence: Synthetic oligonucleotide
cacaaccagauaguccagc

SEQ ID NO: 2352831 - RNA, 19 nt, Artificial Sequence
  Description of Artificial Sequence: Synthetic oligonucleotide
aacuccguuggagauggua

SEQ ID NO: 2352832 - RNA, 19 nt, Artificial Sequence
  Description of Artificial Sequence: Synthetic oligonucleotide
caguccagucuuccuacag

SEQ ID NO: 2352833 - RNA, 19 nt, Artificial Sequence
  Description of Artificial Sequence: Synthetic oligonucleotide
cucagcgcagugugggcag

SEQ ID NO: 2352834 - RNA, 19 nt, Artificial Sequence
  Description of Artificial Sequence: Synthetic oligonucleotide
ggaugcugggaccgcauag

SEQ ID NO: 2352835 - RNA, 19 nt, Artificial Sequence
  Description of Artificial Sequence: Synthetic oligonucleotide
uccagucuuccuacagaaa

SEQ ID NO: 2352836 - RNA, 19 nt, Artificial Sequence
  Description of Artificial Sequence: Synthetic oligonucleotide
ccaacuccguuggagaugg

SEQ ID NO: 2352837 - RNA, 19 nt, Artificial Sequence
  Description of Artificial Sequence: Synthetic oligonucleotide
cagugcauguuucuuggga

SEQ ID NO: 2352838 - RNA, 19 nt, Artificial Sequence
  Description of Artificial Sequence: Synthetic oligonucleotide
gugguguguccacaaccag

SEQ ID NO: 2352839 - RNA, 19 nt, Artificial Sequence
  Description of Artificial Sequence: Synthetic oligonucleotide
caaccagauaguccagcuc

SEQ ID NO: 2352840 - RNA, 19 nt, Artificial Sequence
  Description of Artificial Sequence: Synthetic oligonucleotide
ccuggagaagacauuggug

SEQ ID NO: 2352841 - RNA, 19 nt, Artificial Sequence
  Description of Artificial Sequence: Synthetic oligonucleotide
ucacacuggugcacugccu

SEQ ID NO: 2352842 - RNA, 19 nt, Artificial Sequence
  Description of Artificial Sequence: Synthetic oligonucleotide
agaagucccugguggugug

SEQ ID NO: 2352843 - RNA, 19 nt, Artificial Sequence
  Description of Artificial Sequence: Synthetic oligonucleotide
gugcacggagcaugcgugg

SEQ ID NO: 2352844 - RNA, 19 nt, Artificial Sequence
  Description of Artificial Sequence: Synthetic oligonucleotide
ugcgugggaugcugggacc

SEQ ID NO: 2352845 - RNA, 19 nt, Artificial Sequence
  Description of Artificial Sequence: Synthetic oligonucleotide
gggaucuagcggaacagag

SEQ ID NO: 2352846 - RNA, 19 nt, Artificial Sequence
  Description of Artificial Sequence: Synthetic oligonucleotide
uggugcacucagcgcagug

SEQ ID NO: 2352847 - RNA, 19 nt, Artificial Sequence
  Description of Artificial Sequence: Synthetic oligonucleotide
acgccggccagguucccgg

SEQ ID NO: 2352848 - RNA, 19 nt, Artificial Sequence
  Description of Artificial Sequence: Synthetic oligonucleotide
gcugggaccgcauaggucu

SEQ ID NO: 2352849 - RNA, 19 nt, Artificial Sequence
  Description of Artificial Sequence: Synthetic oligonucleotide
gugcagaauacgcagugcu

SEQ ID NO: 2352850 - RNA, 19 nt, Artificial Sequence
  Description of Artificial Sequence: Synthetic oligonucleotide
ugcugggaccgcauagguc

SEQ ID NO: 2352851 - RNA, 19 nt, Artificial Sequence
  Description of Artificial Sequence: Synthetic oligonucleotide
gcauaggucuacaucuaag

SEQ ID NO: 2352852 - RNA, 19 nt, Artificial Sequence
  Description of Artificial Sequence: Synthetic oligonucleotide
aggggcgcagggcuuccac

SEQ ID NO: 2352853 - RNA, 19 nt, Artificial Sequence
  Description of Artificial Sequence: Synthetic oligonucleotide
ugaccacgagggcucccag

SEQ ID NO: 2352854 - RNA, 19 nt, Artificial Sequence
  Description of Artificial Sequence: Synthetic oligonucleotide
cugugguguggugaccacg

SEQ ID NO: 2352855 - RNA, 19 nt, Artificial Sequence
  Description of Artificial Sequence: Synthetic oligonucleotide
gggcuauggaaaugagugc

SEQ ID NO: 2352856 - RNA, 19 nt, Artificial Sequence
  Description of Artificial Sequence: Synthetic oligonucleotide
uauaggggcgcagggcuuc

SEQ ID NO: 2352857 - RNA, 19 nt, Artificial Sequence
  Description of Artificial Sequence: Synthetic oligonucleotide
gcucccaggggccuauagg

SEQ ID NO: 2352858 - RNA, 19 nt, Artificial Sequence
  Description of Artificial Sequence: Synthetic oligonucleotide
uccccaccuuuccuugccc

SEQ ID NO: 2352859 - RNA, 19 nt, Artificial Sequence
  Description of Artificial Sequence: Synthetic oligonucleotide
ucugcucccagaguuccua

SEQ ID NO: 2352860 - RNA, 19 nt, Artificial Sequence
  Description of Artificial Sequence: Synthetic oligonucleotide
cuggggaucuagcggaaca

SEQ ID NO: 2352861 - RNA, 19 nt, Artificial Sequence
  Description of Artificial Sequence: Synthetic oligonucleotide
cacuggugcacugccuugc

SEQ ID NO: 2352862 - RNA, 19 nt, Artificial Sequence
  Description of Artificial Sequence: Synthetic oligonucleotide
acucagcgcagugugggca

SEQ ID NO: 2352863 - RNA, 19 nt, Artificial Sequence
  Description of Artificial Sequence: Synthetic oligonucleotide
gcacucagcgcaguguggg

SEQ ID NO: 2352864 - RNA, 19 nt, Artificial Sequence
  Description of Artificial Sequence: Synthetic oligonucleotide
gcuauggaaaugagugcag

SEQ ID NO: 2352865 - RNA, 19 nt, Artificial Sequence
  Description of Artificial Sequence: Synthetic oligonucleotide
ggagaagacauuggugcac

SEQ ID NO: 2352866 - RNA, 19 nt, Artificial Sequence
  Description of Artificial Sequence: Synthetic oligonucleotide
acgagggcucccaggggcc

SEQ ID NO: 2352867 - RNA, 19 nt, Artificial Sequence
  Description of Artificial Sequence: Synthetic oligonucleotide
gagcaugcgugggaugcug

SEQ ID NO: 2352868 - RNA, 19 nt, Artificial Sequence
  Description of Artificial Sequence: Synthetic oligonucleotide
uuucgcacgccggccaggu

SEQ ID NO: 2352869 - RNA, 19 nt, Artificial Sequence
  Description of Artificial Sequence: Synthetic oligonucleotide
ggugguguguccacaacca

SEQ ID NO: 2352870 - RNA, 19 nt, Artificial Sequence
  Description of Artificial Sequence: Synthetic oligonucleotide
cacucagcgcagugugggc

SEQ ID NO: 2352871 - RNA, 19 nt, Artificial Sequence
  Description of Artificial Sequence: Synthetic oligonucleotide
auaggggcgcagggcuucc

SEQ ID NO: 2352872 - RNA, 19 nt, Artificial Sequence
  Description of Artificial Sequence: Synthetic oligonucleotide
auuucgcacgccggccagg

SEQ ID NO: 2352873 - RNA, 19 nt, Artificial Sequence
  Description of Artificial Sequence: Synthetic oligonucleotide
ugggccaguuccucuccac

SEQ ID NO: 2352874 - RNA, 19 nt, Artificial Sequence
  Description of Artificial Sequence: Synthetic oligonucleotide
gcaugcgugggaugcuggg

SEQ ID NO: 2352875 - RNA, 19 nt, Artificial Sequence
  Description of Artificial Sequence: Synthetic oligonucleotide
ggccuauaggggcgcaggg

SEQ ID NO: 2352876 - RNA, 19 nt, Artificial Sequence
  Description of Artificial Sequence: Synthetic oligonucleotide
cuaugaccccuaugaccug

SEQ ID NO: 2352877 - RNA, 19 nt, Artificial Sequence
  Description of Artificial Sequence: Synthetic oligonucleotide
ucagcgcagugugggcagg

SEQ ID NO: 2352878 - RNA, 19 nt, Artificial Sequence
  Description of Artificial Sequence: Synthetic oligonucleotide
cacaguggccaugugcuca

SEQ ID NO: 2352879 - RNA, 19 nt, Artificial Sequence
  Description of Artificial Sequence: Synthetic oligonucleotide
gccaugugcucaucagaag

SEQ ID NO: 2352880 - RNA, 19 nt, Artificial Sequence
  Description of Artificial Sequence: Synthetic oligonucleotide
ugggaugcugggaccgcau

SEQ ID NO: 2352881 - RNA, 19 nt, Artificial Sequence
  Description of Artificial Sequence: Synthetic oligonucleotide
cuggugguguguccacaac

SEQ ID NO: 2352882 - RNA, 19 nt, Artificial Sequence
  Description of Artificial Sequence: Synthetic oligonucleotide
uccguuggagaugguacuu

SEQ ID NO: 2352883 - RNA, 19 nt, Artificial Sequence
  Description of Artificial Sequence: Synthetic oligonucleotide
auccugugcagaacuuucu

SEQ ID NO: 2352884 - RNA, 19 nt, Artificial Sequence
  Description of Artificial Sequence: Synthetic oligonucleotide
ugcucccagaguuccuaua

SEQ ID NO: 2352885 - RNA, 19 nt, Artificial Sequence
  Description of Artificial Sequence: Synthetic oligonucleotide
ugggaaacuccuggaugaa

SEQ ID NO: 2352886 - RNA, 19 nt, Artificial Sequence
  Description of Artificial Sequence: Synthetic oligonucleotide
cauccggguuuuccagcag

SEQ ID NO: 2352887 - RNA, 19 nt, Artificial Sequence
  Description of Artificial Sequence: Synthetic oligonucleotide
caucuaagacuccccaccu

SEQ ID NO: 2352888 - RNA, 19 nt, Artificial Sequence
  Description of Artificial Sequence: Synthetic oligonucleotide
uagcggaacagagccuaaa

SEQ ID NO: 2352889 - RNA, 19 nt, Artificial Sequence
  Description of Artificial Sequence: Synthetic oligonucleotide
gugguguggugaccacgag

SEQ ID NO: 2352890 - RNA, 19 nt, Artificial Sequence
  Description of Artificial Sequence: Synthetic oligonucleotide
gccccuggagaagacauug

SEQ ID NO: 2352891 - RNA, 19 nt, Artificial Sequence
  Description of Artificial Sequence: Synthetic oligonucleotide
caggccacgucagacacaa

SEQ ID NO: 2352892 - RNA, 19 nt, Artificial Sequence
  Description of Artificial Sequence: Synthetic oligonucleotide
cauccccaacagacacugc

SEQ ID NO: 2352893 - RNA, 19 nt, Artificial Sequence
  Description of Artificial Sequence: Synthetic oligonucleotide
acggagcaugcgugggaug

SEQ ID NO: 2352894 - RNA, 19 nt, Artificial Sequence
  Description of Artificial Sequence: Synthetic oligonucleotide
gccaguuccucuccaccgc

SEQ ID NO: 2352895 - RNA, 19 nt, Artificial Sequence
  Description of Artificial Sequence: Synthetic oligonucleotide
gcagaauacgcagugcucu

SEQ ID NO: 2352896 - RNA, 19 nt, Artificial Sequence
  Description of Artificial Sequence: Synthetic oligonucleotide
cugggcuauggaaaugagu

SEQ ID NO: 2352897 - RNA, 19 nt, Artificial Sequence
  Description of Artificial Sequence: Synthetic oligonucleotide
gggccaguuccucuccacc

SEQ ID NO: 2352898 - RNA, 19 nt, Artificial Sequence
  Description of Artificial Sequence: Synthetic oligonucleotide
gggccuauaggggcgcagg

SEQ ID NO: 2352899 - RNA, 19 nt, Artificial Sequence
  Description of Artificial Sequence: Synthetic oligonucleotide
cugcaguccagucuuccua

SEQ ID NO: 2352900 - RNA, 19 nt, Artificial Sequence
  Description of Artificial Sequence: Synthetic oligonucleotide
ccugauccacaaagacagg

SEQ ID NO: 2352901 - RNA, 19 nt, Artificial Sequence
  Description of Artificial Sequence: Synthetic oligonucleotide
gcucccgccucacaucccc

SEQ ID NO: 2352902 - RNA, 19 nt, Artificial Sequence
  Description of Artificial Sequence: Synthetic oligonucleotide
caggcauccugugcagaac

SEQ ID NO: 2352903 - RNA, 19 nt, Artificial Sequence
  Description of Artificial Sequence: Synthetic oligonucleotide
cuugcccuggucggcgcag

SEQ ID NO: 2352904 - RNA, 19 nt, Artificial Sequence
  Description of Artificial Sequence: Synthetic oligonucleotide
ggaugauauuucgcacgcc

SEQ ID NO: 2352905 - RNA, 19 nt, Artificial Sequence
  Description of Artificial Sequence: Synthetic oligonucleotide
gggccaacuccguuggaga

SEQ ID NO: 2352906 - RNA, 19 nt, Artificial Sequence
  Description of Artificial Sequence: Synthetic oligonucleotide
gcuuuaucagugcauguuu

SEQ ID NO: 2352907 - RNA, 19 nt, Artificial Sequence
  Description of Artificial Sequence: Synthetic oligonucleotide
gucggcgcagcgccagggc

SEQ ID NO: 2352908 - RNA, 19 nt, Artificial Sequence
  Description of Artificial Sequence: Synthetic oligonucleotide
uccacaccacugccucauc

SEQ ID NO: 2352909 - RNA, 19 nt, Artificial Sequence
  Description of Artificial Sequence: Synthetic oligonucleotide
aucuagcggaacagagccu

SEQ ID NO: 2352910 - RNA, 19 nt, Artificial Sequence
  Description of Artificial Sequence: Synthetic oligonucleotide
ccaugugcucaucagaagu

SEQ ID NO: 2352911 - RNA, 19 nt, Artificial Sequence
  Description of Artificial Sequence: Synthetic oligonucleotide
gguguguccacaaccagau

SEQ ID NO: 2352912 - RNA, 19 nt, Artificial Sequence
  Description of Artificial Sequence: Synthetic oligonucleotide
gugaccacgagggcuccca

SEQ ID NO: 2352913 - RNA, 19 nt, Artificial Sequence
  Description of Artificial Sequence: Synthetic oligonucleotide
cuccguuggagaugguacu

SEQ ID NO: 2352914 - RNA, 19 nt, Artificial Sequence
  Description of Artificial Sequence: Synthetic oligonucleotide
caugcgugggaugcuggga

SEQ ID NO: 2352915 - RNA, 19 nt, Artificial Sequence
  Description of Artificial Sequence: Synthetic oligonucleotide
agcaggcauccugugcaga

SEQ ID NO: 2352916 - RNA, 19 nt, Artificial Sequence
  Description of Artificial Sequence: Synthetic oligonucleotide
cuggucggcgcagcgccag

SEQ ID NO: 2352917 - RNA, 19 nt, Artificial Sequence
  Description of Artificial Sequence: Synthetic oligonucleotide
gcaggcauccugugcagaa

SEQ ID NO: 2352918 - RNA, 19 nt, Artificial Sequence
  Description of Artificial Sequence: Synthetic oligonucleotide
ccucugcucccagaguucc

SEQ ID NO: 2352919 - RNA, 19 nt, Artificial Sequence
  Description of Artificial Sequence: Synthetic oligonucleotide
uuggugcacucagcgcagu

SEQ ID NO: 2352920 - RNA, 19 nt, Artificial Sequence
  Description of Artificial Sequence: Synthetic oligonucleotide
ccgcucauguucucuauga

SEQ ID NO: 2352921 - RNA, 19 nt, Artificial Sequence
  Description of Artificial Sequence: Synthetic oligonucleotide
ugggaccgcauaggucuac

SEQ ID NO: 2352922 - RNA, 19 nt, Artificial Sequence
  Description of Artificial Sequence: Synthetic oligonucleotide
uggugaccacgagggcucc

SEQ ID NO: 2352923 - RNA, 19 nt, Artificial Sequence
  Description of Artificial Sequence: Synthetic oligonucleotide
gccuauaggggcgcagggc

SEQ ID NO: 2352924 - RNA, 19 nt, Artificial Sequence
  Description of Artificial Sequence: Synthetic oligonucleotide
ggcucccaggggccuauag

SEQ ID NO: 2352925 - RNA, 19 nt, Artificial Sequence
  Description of Artificial Sequence: Synthetic oligonucleotide
cugcuuuaucagugcaugu

SEQ ID NO: 2352926 - RNA, 19 nt, Artificial Sequence
  Description of Artificial Sequence: Synthetic oligonucleotide
cuccugguaagcuggggau

SEQ ID NO: 2352927 - RNA, 19 nt, Artificial Sequence
  Description of Artificial Sequence: Synthetic oligonucleotide
cuuccacaguggccaugug

SEQ ID NO: 2352928 - RNA, 19 nt, Artificial Sequence
  Description of Artificial Sequence: Synthetic oligonucleotide
agaguuccuauaggcugua

SEQ ID NO: 2352929 - RNA, 19 nt, Artificial Sequence
  Description of Artificial Sequence: Synthetic oligonucleotide
ugccuugugcacggagcau

SEQ ID NO: 2352930 - RNA, 19 nt, Artificial Sequence
  Description of Artificial Sequence: Synthetic oligonucleotide
cggagcaugcgugggaugc

SEQ ID NO: 2352931 - RNA, 19 nt, Artificial Sequence
  Description of Artificial Sequence: Synthetic oligonucleotide
acuccuggaugaagucaca

SEQ ID NO: 2352932 - RNA, 19 nt, Artificial Sequence
  Description of Artificial Sequence: Synthetic oligonucleotide
cuagcggaacagagccuaa

SEQ ID NO: 2352933 - RNA, 19 nt, Artificial Sequence
  Description of Artificial Sequence: Synthetic oligonucleotide
aggcgaagccgcucauguu

SEQ ID NO: 2352934 - RNA, 19 nt, Artificial Sequence
  Description of Artificial Sequence: Synthetic oligonucleotide
gccaacuccguuggagaug

SEQ ID NO: 2352935 - RNA, 19 nt, Artificial Sequence
  Description of Artificial Sequence: Synthetic oligonucleotide
ccuauaggggcgcagggcu

SEQ ID NO: 2352936 - RNA, 19 nt, Artificial Sequence
  Description of Artificial Sequence: Synthetic oligonucleotide
cacgccggccagguucccg

SEQ ID NO: 2352937 - RNA, 19 nt, Artificial Sequence
  Description of Artificial Sequence: Synthetic oligonucleotide
gcucucugucaggagagca

SEQ ID NO: 2352938 - RNA, 19 nt, Artificial Sequence
  Description of Artificial Sequence: Synthetic oligonucleotide
cccuaugaccugcagucca

SEQ ID NO: 2352939 - RNA, 19 nt, Artificial Sequence
  Description of Artificial Sequence: Synthetic oligonucleotide
agacaggcacccagcccug

SEQ ID NO: 2352940 - RNA, 19 nt, Artificial Sequence
  Description of Artificial Sequence: Synthetic oligonucleotide
auguucucuaugaccccua

SEQ ID NO: 2352941 - RNA, 19 nt, Artificial Sequence
  Description of Artificial Sequence: Synthetic oligonucleotide
caggggccuauaggggcgc

SEQ ID NO: 2352942 - RNA, 19 nt, Artificial Sequence
  Description of Artificial Sequence: Synthetic oligonucleotide
ggggaucuagcggaacaga

SEQ ID NO: 2352943 - RNA, 19 nt, Artificial Sequence
  Description of Artificial Sequence: Synthetic oligonucleotide
gccugugguguggugacca

SEQ ID NO: 2352944 - RNA, 19 nt, Artificial Sequence
  Description of Artificial Sequence: Synthetic oligonucleotide
ggucuacaucuaagacucc

SEQ ID NO: 2352945 - RNA, 19 nt, Artificial Sequence
  Description of Artificial Sequence: Synthetic oligonucleotide
cagacaugagggagauggu

SEQ ID NO: 2352946 - RNA, 19 nt, Artificial Sequence
  Description of Artificial Sequence: Synthetic oligonucleotide
cuccaccgccccuggagaa

SEQ ID NO: 2352947 - RNA, 19 nt, Artificial Sequence
  Description of Artificial Sequence: Synthetic oligonucleotide
cagaauacgcagugcucuu

SEQ ID NO: 2352948 - RNA, 19 nt, Artificial Sequence
  Description of Artificial Sequence: Synthetic oligonucleotide
ggaugaagucacagcccuc

SEQ ID NO: 2352949 - RNA, 19 nt, Artificial Sequence
  Description of Artificial Sequence: Synthetic oligonucleotide
cccagaguuccuauaggcu

SEQ ID NO: 2352950 - RNA, 19 nt, Artificial Sequence
  Description of Artificial Sequence: Synthetic oligonucleotide
ccacuacaguccugaggac

SEQ ID NO: 2352951 - RNA, 19 nt, Artificial Sequence
  Description of Artificial Sequence: Synthetic oligonucleotide
gcacggagcaugcguggga

SEQ ID NO: 2352952 - RNA, 19 nt, Artificial Sequence
  Description of Artificial Sequence: Synthetic oligonucleotide
uucgcacgccggccagguu

SEQ ID NO: 2352953 - RNA, 19 nt, Artificial Sequence
  Description of Artificial Sequence: Synthetic oligonucleotide
ggugcacucagcgcagugu

SEQ ID NO: 2352954 - RNA, 19 nt, Artificial Sequence
  Description of Artificial Sequence: Synthetic oligonucleotide
ccacgagggcucccagggg

SEQ ID NO: 2352955 - RNA, 19 nt, Artificial Sequence
  Description of Artificial Sequence: Synthetic oligonucleotide
gcaggcgaagccgcucaug

SEQ ID NO: 2352956 - RNA, 19 nt, Artificial Sequence
  Description of Artificial Sequence: Synthetic oligonucleotide
ggggcgcagggcuuccaca

SEQ ID NO: 2352957 - RNA, 19 nt, Artificial Sequence
  Description of Artificial Sequence: Synthetic oligonucleotide
gaagucccugguggugugu

SEQ ID NO: 2352958 - RNA, 19 nt, Artificial Sequence
  Description of Artificial Sequence: Synthetic oligonucleotide
ccuggugguguguccacaa

SEQ ID NO: 2352959 - RNA, 19 nt, Artificial Sequence
  Description of Artificial Sequence: Synthetic oligonucleotide
ccccuaugaccugcagucc

SEQ ID NO: 2352960 - RNA, 19 nt, Artificial Sequence
  Description of Artificial Sequence: Synthetic oligonucleotide
cuaugaccugcaguccagu

SEQ ID NO: 2352961 - RNA, 19 nt, Artificial Sequence
  Description of Artificial Sequence: Synthetic oligonucleotide
ggggccuauaggggcgcag

SEQ ID NO: 2352962 - RNA, 19 nt, Artificial Sequence
  Description of Artificial Sequence: Synthetic oligonucleotide
aggucccacuacaguccug

SEQ ID NO: 2352963 - RNA, 19 nt, Artificial Sequence
  Description of Artificial Sequence: Synthetic oligonucleotide
cuauaggggcgcagggcuu

SEQ ID NO: 2352964 - RNA, 19 nt, Artificial Sequence
  Description of Artificial Sequence: Synthetic oligonucleotide
cccuggagaagacauuggu

SEQ ID NO: 2352965 - RNA, 19 nt, Artificial Sequence
  Description of Artificial Sequence: Synthetic oligonucleotide
cucccgccucacaucccca

SEQ ID NO: 2352966 - RNA, 19 nt, Artificial Sequence
  Description of Artificial Sequence: Synthetic oligonucleotide
cgcagugcucuugggaaac

SEQ ID NO: 2352967 - RNA, 19 nt, Artificial Sequence
  Description of Artificial Sequence: Synthetic oligonucleotide
gcuggggaucuagcggaac

SEQ ID NO: 2352968 - RNA, 19 nt, Artificial Sequence
  Description of Artificial Sequence: Synthetic oligonucleotide
ccgccucacauccccaaca

SEQ ID NO: 2352969 - RNA, 19 nt, Artificial Sequence
  Description of Artificial Sequence: Synthetic oligonucleotide
ggccaacuccguuggagau

SEQ ID NO: 2352970 - RNA, 19 nt, Artificial Sequence
  Description of Artificial Sequence: Synthetic oligonucleotide
gggaccgcauaggucuaca

SEQ ID NO: 2352971 - RNA, 19 nt, Artificial Sequence
  Description of Artificial Sequence: Synthetic oligonucleotide
cuggugcacugccuugccu

SEQ ID NO: 2352972 - RNA, 19 nt, Artificial Sequence
  Description of Artificial Sequence: Synthetic oligonucleotide
cugggaccgcauaggucua

SEQ ID NO: 2352973 - RNA, 19 nt, Artificial Sequence
  Description of Artificial Sequence: Synthetic oligonucleotide
ggugaccacgagggcuccc

SEQ ID NO: 2352974 - RNA, 19 nt, Artificial Sequence
  Description of Artificial Sequence: Synthetic oligonucleotide
gggaugcugggaccgcaua

SEQ ID NO: 2352975 - RNA, 19 nt, Artificial Sequence
  Description of Artificial Sequence: Synthetic oligonucleotide
ccugguaagcuggggaucu

SEQ ID NO: 2352976 - RNA, 19 nt, Artificial Sequence
  Description of Artificial Sequence: Synthetic oligonucleotide
cacggagcaugcgugggau

SEQ ID NO: 2352977 - RNA, 19 nt, Artificial Sequence
  Description of Artificial Sequence: Synthetic oligonucleotide
cccgccucacauccccaac

SEQ ID NO: 2352978 - RNA, 19 nt, Artificial Sequence
  Description of Artificial Sequence: Synthetic oligonucleotide
aggggccuauaggggcgca

SEQ ID NO: 2352979 - RNA, 19 nt, Artificial Sequence
  Description of Artificial Sequence: Synthetic oligonucleotide
ccccaggccacgucagaca

SEQ ID NO: 2352980 - RNA, 19 nt, Artificial Sequence
  Description of Artificial Sequence: Synthetic oligonucleotide
caccuuuccuugcccuggu

SEQ ID NO: 2352981 - RNA, 19 nt, Artificial Sequence
  Description of Artificial Sequence: Synthetic oligonucleotide
cgcauaggucuacaucuaa

SEQ ID NO: 2352982 - RNA, 19 nt, Artificial Sequence
  Description of Artificial Sequence: Synthetic oligonucleotide
ggaccgcauaggucuacau

SEQ ID NO: 2352983 - RNA, 19 nt, Artificial Sequence
  Description of Artificial Sequence: Synthetic oligonucleotide
cugcucccagaguuccuau

SEQ ID NO: 2352984 - RNA, 19 nt, Artificial Sequence
  Description of Artificial Sequence: Synthetic oligonucleotide
ccgcauaggucuacaucua

SEQ ID NO: 2352985 - RNA, 19 nt, Artificial Sequence
  Description of Artificial Sequence: Synthetic oligonucleotide
gcauccugugcagaacuuu

SEQ ID NO: 2352986 - RNA, 19 nt, Artificial Sequence
  Description of Artificial Sequence: Synthetic oligonucleotide
cugguaagcuggggaucua

SEQ ID NO: 2352987 - RNA, 19 nt, Artificial Sequence
  Description of Artificial Sequence: Synthetic oligonucleotide
gugcacugccuugccuugu

SEQ ID NO: 2352988 - RNA, 19 nt, Artificial Sequence
  Description of Artificial Sequence: Synthetic oligonucleotide
ccaggccacgucagacaca

SEQ ID NO: 2352989 - RNA, 19 nt, Artificial Sequence
  Description of Artificial Sequence: Synthetic oligonucleotide
ggagcaugcgugggaugcu

SEQ ID NO: 2352990 - RNA, 19 nt, Artificial Sequence
  Description of Artificial Sequence: Synthetic oligonucleotide
ggcgcagggcuuccacagu

SEQ ID NO: 2352991 - RNA, 19 nt, Artificial Sequence
  Description of Artificial Sequence: Synthetic oligonucleotide
gcagaacuuucugggcuau

SEQ ID NO: 2352992 - RNA, 19 nt, Artificial Sequence
  Description of Artificial Sequence: Synthetic oligonucleotide
ccgccccuggagaagacau

SEQ ID NO: 2352993 - RNA, 19 nt, Artificial Sequence
  Description of Artificial Sequence: Synthetic oligonucleotide
cguuggagaugguacuuuu

SEQ ID NO: 2352994 - RNA, 19 nt, Artificial Sequence
  Description of Artificial Sequence: Synthetic oligonucleotide
ccuugcccuggucggcgca

SEQ ID NO: 2352995 - RNA, 19 nt, Artificial Sequence
  Description of Artificial Sequence: Synthetic oligonucleotide
ggcgcagcgccagggccaa

SEQ ID NO: 2352996 - RNA, 19 nt, Artificial Sequence
  Description of Artificial Sequence: Synthetic oligonucleotide
ggcauccugugcagaacuu

SEQ ID NO: 2352997 - RNA, 19 nt, Artificial Sequence
  Description of Artificial Sequence: Synthetic oligonucleotide
ccggguuuuccagcaggaa

SEQ ID NO: 2352998 - RNA, 19 nt, Artificial Sequence
  Description of Artificial Sequence: Synthetic oligonucleotide
ggcaggcgaagccgcucau

SEQ ID NO: 2352999 - RNA, 19 nt, Artificial Sequence
  Description of Artificial Sequence: Synthetic oligonucleotide
caacuccguuggagauggu

SEQ ID NO: 2353000 - RNA, 19 nt, Artificial Sequence
  Description of Artificial Sequence: Synthetic oligonucleotide
ccguuggagaugguacuuu

SEQ ID NO: 2353001 - RNA, 19 nt, Artificial Sequence
  Description of Artificial Sequence: Synthetic oligonucleotide
gcacgccggccagguuccc

SEQ ID NO: 2353002 - RNA, 19 nt, Artificial Sequence
  Description of Artificial Sequence: Synthetic oligonucleotide
gccuugccuugugcacgga

SEQ ID NO: 2353003 - RNA, 19 nt, Artificial Sequence
  Description of Artificial Sequence: Synthetic oligonucleotide
cgccccuggagaagacauu

SEQ ID NO: 2353004 - RNA, 19 nt, Artificial Sequence
  Description of Artificial Sequence: Synthetic oligonucleotide
uguggaaaugaauacaugg

SEQ ID NO: 2353005 - RNA, 19 nt, Artificial Sequence
  Description of Artificial Sequence: Synthetic oligonucleotide
  modified_base (9)..(9): a, c, u, g, unknown or other
aaguagagnacauguaggc

SEQ ID NO: 2353006 - RNA, 19 nt, Artificial Sequence
  Description of Artificial Sequence: Synthetic oligonucleotide
aacguuugaagucuuggcc

SEQ ID NO: 2353007 - RNA, 19 nt, Artificial Sequence
  Description of Artificial Sequence: Synthetic oligonucleotide
aauacauggucuucaggcc

SEQ ID NO: 2353008 - RNA, 19 nt, Artificial Sequence
  Description of Artificial Sequence: Synthetic oligonucleotide
aaaccaaucaaugaagcgg

SEQ ID NO: 2353009 - RNA, 19 nt, Artificial Sequence
  Description of Artificial Sequence: Synthetic oligonucleotide
gaauacauggucuucaggc

SEQ ID NO: 2353010 - RNA, 19 nt, Artificial Sequence
  Description of Artificial Sequence: Synthetic oligonucleotide
aaacguuugaagucuuggc

SEQ ID NO: 2353011 - RNA, 19 nt, Artificial Sequence
  Description of Artificial Sequence: Synthetic oligonucleotide
  modified_base (13)..(13): a, c, u, g, unknown or other
uaagaaguagagnacaugu

SEQ ID NO: 2353012 - RNA, 19 nt, Artificial Sequence
  Description of Artificial Sequence: Synthetic oligonucleotide
  modified_base (11)..(11): a, c, u, g, unknown or other
agaaguagagnacauguag

SEQ ID NO: 2353013 - RNA, 19 nt, Artificial Sequence
  Description of Artificial Sequence: Synthetic oligonucleotide
  modified_base (7)..(7): a, c, u, g, unknown or other
guagagnacauguaggcag

SEQ ID NO: 2353014 - RNA, 19 nt, Artificial Sequence
  Description of Artificial Sequence: Synthetic oligonucleotide
aaugaagcgguccuuacca

SEQ ID NO: 2353015 - RNA, 19 nt, Artificial Sequence
  Description of Artificial Sequence: Synthetic oligonucleotide
gauagagccaccccaacgg

SEQ ID NO: 2353016 - RNA, 19 nt, Artificial Sequence
  Description of Artificial Sequence: Synthetic oligonucleotide
  modified_base (10)..(10): a, c, u, g, unknown or other
gaaguagagnacauguagg

SEQ ID NO: 2353017 - RNA, 19 nt, Artificial Sequence
  Description of Artificial Sequence: Synthetic oligonucleotide
ugugcauguaaccugcuag

SEQ ID NO: 2353018 - RNA, 19 nt, Artificial Sequence
  Description of Artificial Sequence: Synthetic oligonucleotide
aaguacucaacagaguagg

SEQ ID NO: 2353019 - RNA, 19 nt, Artificial Sequence
  Description of Artificial Sequence: Synthetic oligonucleotide
auacuucuacaccaggugc

SEQ ID NO: 2353020 - RNA, 19 nt, Artificial Sequence
  Description of Artificial Sequence: Synthetic oligonucleotide
uaaaccaaucaaugaagcg

SEQ ID NO: 2353021 - RNA, 19 nt, Artificial Sequence
  Description of Artificial Sequence: Synthetic oligonucleotide
uuugguguggaaaugaaua

SEQ ID NO: 2353022 - RNA, 19 nt, Artificial Sequence
  Description of Artificial Sequence: Synthetic oligonucleotide
aaaacguuugaagucuugg

SEQ ID NO: 2353023 - RNA, 19 nt, Artificial Sequence
  Description of Artificial Sequence: Synthetic oligonucleotide
ucaccauccucauagagug

SEQ ID NO: 2353024 - RNA, 19 nt, Artificial Sequence
  Description of Artificial Sequence: Synthetic oligonucleotide
auaaaccaaucaaugaagc

SEQ ID NO: 2353025 - RNA, 19 nt, Artificial Sequence
  Description of Artificial Sequence: Synthetic oligonucleotide
aagagagauaaaccaauca

SEQ ID NO: 2353026 - RNA, 19 nt, Artificial Sequence
  Description of Artificial Sequence: Synthetic oligonucleotide
auagagugcagccacuggg

SEQ ID NO: 2353027 - RNA, 19 nt, Artificial Sequence
  Description of Artificial Sequence: Synthetic oligonucleotide
gacaguauacuucuacacc

SEQ ID NO: 2353028 - RNA, 19 nt, Artificial Sequence
  Description of Artificial Sequence: Synthetic oligonucleotide
acaguauacuucuacacca

SEQ ID NO: 2353029 - RNA, 19 nt, Artificial Sequence
  Description of Artificial Sequence: Synthetic oligonucleotide
aaugaauacauggucuuca

SEQ ID NO: 2353030 - RNA, 19 nt, Artificial Sequence
  Description of Artificial Sequence: Synthetic oligonucleotide
ugauagagccaccccaacg

SEQ ID NO: 2353031 - RNA, 19 nt, Artificial Sequence
  Description of Artificial Sequence: Synthetic oligonucleotide
ugucuuauugcugaagacc

SEQ ID NO: 2353032 - RNA, 19 nt, Artificial Sequence
  Description of Artificial Sequence: Synthetic oligonucleotide
agagagauaaaccaaucaa

SEQ ID NO: 2353033 - RNA, 19 nt, Artificial Sequence
  Description of Artificial Sequence: Synthetic oligonucleotide
uggaaaugaauacaugguc

SEQ ID NO: 2353034 - RNA, 19 nt, Artificial Sequence
  Description of Artificial Sequence: Synthetic oligonucleotide
cauacagacaguauacuuc

SEQ ID NO: 2353035 - RNA, 19 nt, Artificial Sequence
  Description of Artificial Sequence: Synthetic oligonucleotide
uauucauccugcuggcugg

SEQ ID NO: 2353036 - RNA, 19 nt, Artificial Sequence
  Description of Artificial Sequence: Synthetic oligonucleotide
ucauagauguaugugugag

SEQ ID NO: 2353037 - RNA, 19 nt, Artificial Sequence
  Description of Artificial Sequence: Synthetic oligonucleotide
auaaggaagacaggcuucc

SEQ ID NO: 2353038 - RNA, 19 nt, Artificial Sequence
  Description of Artificial Sequence: Synthetic oligonucleotide
guuaaccagauucuguacc

SEQ ID NO: 2353039 - RNA, 19 nt, Artificial Sequence
  Description of Artificial Sequence: Synthetic oligonucleotide
ucucaucccgcacauaccc

SEQ ID NO: 2353040 - RNA, 19 nt, Artificial Sequence
  Description of Artificial Sequence: Synthetic oligonucleotide
ugaauacauggucuucagg

SEQ ID NO: 2353041 - RNA, 19 nt, Artificial Sequence
  Description of Artificial Sequence: Synthetic oligonucleotide
auacagacaguauacuucu

SEQ ID NO: 2353042 - RNA, 19 nt, Artificial Sequence
  Description of Artificial Sequence: Synthetic oligonucleotide
acauguaccauccgucuuc

SEQ ID NO: 2353043 - RNA, 19 nt, Artificial Sequence
  Description of Artificial Sequence: Synthetic oligonucleotide
agagauaaaccaaucaaug

SEQ ID NO: 2353044 - RNA, 19 nt, Artificial Sequence
  Description of Artificial Sequence: Synthetic oligonucleotide
uaggucuugccaaagccag

SEQ ID NO: 2353045 - RNA, 19 nt, Artificial Sequence
  Description of Artificial Sequence: Synthetic oligonucleotide
cuuaccaggacugaggcug

SEQ ID NO: 2353046 - RNA, 19 nt, Artificial Sequence
  Description of Artificial Sequence: Synthetic oligonucleotide
aaaugaauacauggucuuc

SEQ ID NO: 2353047 - RNA, 19 nt, Artificial Sequence
  Description of Artificial Sequence: Synthetic oligonucleotide
uacaccaggagcauuggac

SEQ ID NO: 2353048 - RNA, 19 nt, Artificial Sequence
  Description of Artificial Sequence: Synthetic oligonucleotide
gagauaaaccaaucaauga

SEQ ID NO: 2353049 - RNA, 19 nt, Artificial Sequence
  Description of Artificial Sequence: Synthetic oligonucleotide
uaaccugcuagcuuguugu

SEQ ID NO: 2353050 - RNA, 19 nt, Artificial Sequence
  Description of Artificial Sequence: Synthetic oligonucleotide
auguugagauguucugucc

SEQ ID NO: 2353051 - RNA, 19 nt, Artificial Sequence
  Description of Artificial Sequence: Synthetic oligonucleotide
aguauacuucuacaccagg

SEQ ID NO: 2353052 - RNA, 19 nt, Artificial Sequence
  Description of Artificial Sequence: Synthetic oligonucleotide
acauguaggcagccaaggc

SEQ ID NO: 2353053 - RNA, 19 nt, Artificial Sequence
  Description of Artificial Sequence: Synthetic oligonucleotide
aacacggaucuguacacca

SEQ ID NO: 2353054 - RNA, 19 nt, Artificial Sequence
  Description of Artificial Sequence: Synthetic oligonucleotide
agauguaugugugaggugu

SEQ ID NO: 2353055 - RNA, 19 nt, Artificial Sequence
  Description of Artificial Sequence: Synthetic oligonucleotide
augucuuauugcugaagac

SEQ ID NO: 2353056 - RNA, 19 nt, Artificial Sequence
  Description of Artificial Sequence: Synthetic oligonucleotide
cuucaggccauacuuggcg

SEQ ID NO: 2353057 - RNA, 19 nt, Artificial Sequence
  Description of Artificial Sequence: Synthetic oligonucleotide
acuguagccacauguacca

SEQ ID NO: 2353058 - RNA, 19 nt, Artificial Sequence
  Description of Artificial Sequence: Synthetic oligonucleotide
uguaccauccgucuucaaa

SEQ ID NO: 2353059 - RNA, 19 nt, Artificial Sequence
  Description of Artificial Sequence: Synthetic oligonucleotide
uuauugcugaagaccaugu

SEQ ID NO: 2353060 - RNA, 19 nt, Artificial Sequence
  Description of Artificial Sequence: Synthetic oligonucleotide
auucaugggcaucaggugu

SEQ ID NO: 2353061 - RNA, 19 nt, Artificial Sequence
  Description of Artificial Sequence: Synthetic oligonucleotide
caacggagccccaagagag

SEQ ID NO: 2353062 - RNA, 19 nt, Artificial Sequence
  Description of Artificial Sequence: Synthetic oligonucleotide
aggaacacggaucuguaca

SEQ ID NO: 2353063 - RNA, 19 nt, Artificial Sequence
  Description of Artificial Sequence: Synthetic oligonucleotide
uuguuaaccagauucugua

SEQ ID NO: 2353064 - RNA, 19 nt, Artificial Sequence
  Description of Artificial Sequence: Synthetic oligonucleotide
ucuugccaaagccaggaac

SEQ ID NO: 2353065 - RNA, 19 nt, Artificial Sequence
  Description of Artificial Sequence: Synthetic oligonucleotide
  modified_base (6)..(6): a, c, u, g, unknown or other
uagagnacauguaggcagc

SEQ ID NO: 2353066 - RNA, 19 nt, Artificial Sequence
  Description of Artificial Sequence: Synthetic oligonucleotide
ugaagcgguccuuaccagg

SEQ ID NO: 2353067 - RNA, 19 nt, Artificial Sequence
  Description of Artificial Sequence: Synthetic oligonucleotide
uccuuaccaggacugaggc

SEQ ID NO: 2353068 - RNA, 19 nt, Artificial Sequence
  Description of Artificial Sequence: Synthetic oligonucleotide
uaauugaaguuuggugugg

SEQ ID NO: 2353069 - RNA, 19 nt, Artificial Sequence
  Description of Artificial Sequence: Synthetic oligonucleotide
uucuacaccaggugcuggg

SEQ ID NO: 2353070 - RNA, 19 nt, Artificial Sequence
  Description of Artificial Sequence: Synthetic oligonucleotide
ugacgcaguaagaaguaga

SEQ ID NO: 2353071 - RNA, 19 nt, Artificial Sequence
  Description of Artificial Sequence: Synthetic oligonucleotide
aaccaaucaaugaagcggu

SEQ ID NO: 2353072 - RNA, 19 nt, Artificial Sequence
  Description of Artificial Sequence: Synthetic oligonucleotide
gacgcaguaagaaguagag

SEQ ID NO: 2353073 - RNA, 19 nt, Artificial Sequence
  Description of Artificial Sequence: Synthetic oligonucleotide
uguguaauugaaguuuggu

SEQ ID NO: 2353074 - RNA, 19 nt, Artificial Sequence
  Description of Artificial Sequence: Synthetic oligonucleotide
acguuugaagucuuggccu

SEQ ID NO: 2353075 - RNA, 19 nt, Artificial Sequence
  Description of Artificial Sequence: Synthetic oligonucleotide
uacuucuacaccaggugcu

SEQ ID NO: 2353076 - RNA, 19 nt, Artificial Sequence
  Description of Artificial Sequence: Synthetic oligonucleotide
guauucauccugcuggcug

SEQ ID NO: 2353077 - RNA, 19 nt, Artificial Sequence
  Description of Artificial Sequence: Synthetic oligonucleotide
uugguguggaaaugaauac

SEQ ID NO: 2353078 - RNA, 19 nt, Artificial Sequence
  Description of Artificial Sequence: Synthetic oligonucleotide
cauguugagauguucuguc

SEQ ID NO: 2353079 - RNA, 19 nt, Artificial Sequence
  Description of Artificial Sequence: Synthetic oligonucleotide
cuaaguacucaacagagua

SEQ ID NO: 2353080 - RNA, 19 nt, Artificial Sequence
  Description of Artificial Sequence: Synthetic oligonucleotide
uacaggcugugauuggcgg

SEQ ID NO: 2353081 - RNA, 19 nt, Artificial Sequence
  Description of Artificial Sequence: Synthetic oligonucleotide
uucaggccauacuuggcgg

SEQ ID NO: 2353082 - RNA, 19 nt, Artificial Sequence
  Description of Artificial Sequence: Synthetic oligonucleotide
uaagcagcauacaucuccu

SEQ ID NO: 2353083 - RNA, 19 nt, Artificial Sequence
  Description of Artificial Sequence: Synthetic oligonucleotide
  modified_base (3)..(3): a, c, u, g, unknown or other
agnacauguaggcagccaa

SEQ ID NO: 2353084 - RNA, 19 nt, Artificial Sequence
  Description of Artificial Sequence: Synthetic oligonucleotide
cacauacccauuguuaacc

SEQ ID NO: 2353085 - RNA, 19 nt, Artificial Sequence
  Description of Artificial Sequence: Synthetic oligonucleotide
ugagagaauggcauugaua

SEQ ID NO: 2353086 - RNA, 19 nt, Artificial Sequence
  Description of Artificial Sequence: Synthetic oligonucleotide
ugauuggcggccaugccac

SEQ ID NO: 2353087 - RNA, 19 nt, Artificial Sequence
  Description of Artificial Sequence: Synthetic oligonucleotide
uggacacgugcccagagcu

SEQ ID NO: 2353088 - RNA, 19 nt, Artificial Sequence
  Description of Artificial Sequence: Synthetic oligonucleotide
ugacuguagccacauguac

SEQ ID NO: 2353089 - RNA, 19 nt, Artificial Sequence
  Description of Artificial Sequence: Synthetic oligonucleotide
cuggcuggguuccagacgc

SEQ ID NO: 2353090 - RNA, 19 nt, Artificial Sequence
  Description of Artificial Sequence: Synthetic oligonucleotide
uuggccuguguaauugaag

SEQ ID NO: 2353091 - RNA, 19 nt, Artificial Sequence
  Description of Artificial Sequence: Synthetic oligonucleotide
uguggucauagauguaugu

SEQ ID NO: 2353092 - RNA, 19 nt, Artificial Sequence
  Description of Artificial Sequence: Synthetic oligonucleotide
agcauacaucuccucuacc

SEQ ID NO: 2353093 - RNA, 19 nt, Artificial Sequence
  Description of Artificial Sequence: Synthetic oligonucleotide
ucuucaaaaugaagauccu

SEQ ID NO: 2353094 - RNA, 19 nt, Artificial Sequence
  Description of Artificial Sequence: Synthetic oligonucleotide
cugugccccaauaaggaag

SEQ ID NO: 2353095 - RNA, 19 nt, Artificial Sequence
  Description of Artificial Sequence: Synthetic oligonucleotide
gacuguagccacauguacc

SEQ ID NO: 2353096 - RNA, 19 nt, Artificial Sequence
  Description of Artificial Sequence: Synthetic oligonucleotide
aagacaggcuucccauaag

SEQ ID NO: 2353097 - RNA, 19 nt, Artificial Sequence
  Description of Artificial Sequence: Synthetic oligonucleotide
cuguacaccaggagcauug

SEQ ID NO: 2353098 - RNA, 19 nt, Artificial Sequence
  Description of Artificial Sequence: Synthetic oligonucleotide
acagaguaggucuugccaa

SEQ ID NO: 2353099 - RNA, 19 nt, Artificial Sequence
  Description of Artificial Sequence: Synthetic oligonucleotide
guaugugugaggugugggc

SEQ ID NO: 2353100 - RNA, 19 nt, Artificial Sequence
  Description of Artificial Sequence: Synthetic oligonucleotide
ccagacgccagucauaggg

SEQ ID NO: 2353101 - RNA, 19 nt, Artificial Sequence
  Description of Artificial Sequence: Synthetic oligonucleotide
aauugaaguuuggugugga

SEQ ID NO: 2353102 - RNA, 19 nt, Artificial Sequence
  Description of Artificial Sequence: Synthetic oligonucleotide
ucugucccauucaugggca

SEQ ID NO: 2353103 - RNA, 19 nt, Artificial Sequence
  Description of Artificial Sequence: Synthetic oligonucleotide
acaccaggagcauuggaca

SEQ ID NO: 2353104 - RNA, 19 nt, Artificial Sequence
  Description of Artificial Sequence: Synthetic oligonucleotide
  modified_base (5)..(5): a, c, u, g, unknown or other
agagnacauguaggcagcc

SEQ ID NO: 2353105 - RNA, 19 nt, Artificial Sequence
  Description of Artificial Sequence: Synthetic oligonucleotide
auacaucuccucuaccagu

SEQ ID NO: 2353106 - RNA, 19 nt, Artificial Sequence
  Description of Artificial Sequence: Synthetic oligonucleotide
guagccacauguaccaucc

SEQ ID NO: 2353107 - RNA, 19 nt, Artificial Sequence
  Description of Artificial Sequence: Synthetic oligonucleotide
gucuuauugcugaagacca

SEQ ID NO: 2353108 - RNA, 19 nt, Artificial Sequence
  Description of Artificial Sequence: Synthetic oligonucleotide
agagccaccccaacggagc

SEQ ID NO: 2353109 - RNA, 19 nt, Artificial Sequence
  Description of Artificial Sequence: Synthetic oligonucleotide
auuguuaaccagauucugu

SEQ ID NO: 2353110 - RNA, 19 nt, Artificial Sequence
  Description of Artificial Sequence: Synthetic oligonucleotide
cauucaugggcaucaggug

SEQ ID NO: 2353111 - RNA, 19 nt, Artificial Sequence
  Description of Artificial Sequence: Synthetic oligonucleotide
cuguguaauugaaguuugg

SEQ ID NO: 2353112 - RNA, 19 nt, Artificial Sequence
  Description of Artificial Sequence: Synthetic oligonucleotide
aggucacgugacuguagcc

SEQ ID NO: 2353113 - RNA, 19 nt, Artificial Sequence
  Description of Artificial Sequence: Synthetic oligonucleotide
uguagccacauguaccauc

SEQ ID NO: 2353114 - RNA, 19 nt, Artificial Sequence
  Description of Artificial Sequence: Synthetic oligonucleotide
ugguguggaaaugaauaca

SEQ ID NO: 2353115 - RNA, 19 nt, Artificial Sequence
  Description of Artificial Sequence: Synthetic oligonucleotide
cccaauaaggaagacaggc

SEQ ID NO: 2353116 - RNA, 19 nt, Artificial Sequence
  Description of Artificial Sequence: Synthetic oligonucleotide
guagggaaagcugugguca

SEQ ID NO: 2353117 - RNA, 19 nt, Artificial Sequence
  Description of Artificial Sequence: Synthetic oligonucleotide
gaagucuuggccuguguaa

SEQ ID NO: 2353118 - RNA, 19 nt, Artificial Sequence
  Description of Artificial Sequence: Synthetic oligonucleotide
aaccugcuagcuuguuguc

SEQ ID NO: 2353119 - RNA, 19 nt, Artificial Sequence
  Description of Artificial Sequence: Synthetic oligonucleotide
gugcauguaaccugcuagc

SEQ ID NO: 2353120 - RNA, 19 nt, Artificial Sequence
  Description of Artificial Sequence: Synthetic oligonucleotide
caguauacuucuacaccag

SEQ ID NO: 2353121 - RNA, 19 nt, Artificial Sequence
  Description of Artificial Sequence: Synthetic oligonucleotide
guaaccugcuagcuuguug

SEQ ID NO: 2353122 - RNA, 19 nt, Artificial Sequence
  Description of Artificial Sequence: Synthetic oligonucleotide
  modified_base (2)..(2): a, c, u, g, unknown or other
gnacauguaggcagccaag

SEQ ID NO: 2353123 - RNA, 19 nt, Artificial Sequence
  Description of Artificial Sequence: Synthetic oligonucleotide
cacggaucuguacaccagg

SEQ ID NO: 2353124 - RNA, 19 nt, Artificial Sequence
  Description of Artificial Sequence: Synthetic oligonucleotide
cugaggcugacgcaguaag

SEQ ID NO: 2353125 - RNA, 19 nt, Artificial Sequence
  Description of Artificial Sequence: Synthetic oligonucleotide
ucaacagaguaggucuugc

SEQ ID NO: 2353126 - RNA, 19 nt, Artificial Sequence
  Description of Artificial Sequence: Synthetic oligonucleotide
  modified_base (8)..(8): a, c, u, g, unknown or other
aguagagnacauguaggca

SEQ ID NO: 2353127 - RNA, 19 nt, Artificial Sequence
  Description of Artificial Sequence: Synthetic oligonucleotide
gagcauuggacacgugccc

SEQ ID NO: 2353128 - RNA, 19 nt, Artificial Sequence
  Description of Artificial Sequence: Synthetic oligonucleotide
ucauagagugcagccacug

SEQ ID NO: 2353129 - RNA, 19 nt, Artificial Sequence
  Description of Artificial Sequence: Synthetic oligonucleotide
uacuuggcgggcuggaaac

SEQ ID NO: 2353130 - RNA, 19 nt, Artificial Sequence
  Description of Artificial Sequence: Synthetic oligonucleotide
aagcgguccuuaccaggac

SEQ ID NO: 2353131 - RNA, 19 nt, Artificial Sequence
  Description of Artificial Sequence: Synthetic oligonucleotide
gaguaggucuugccaaagc

SEQ ID NO: 2353132 - RNA, 19 nt, Artificial Sequence
  Description of Artificial Sequence: Synthetic oligonucleotide
gcauugauauguuccaaug

SEQ ID NO: 2353133 - RNA, 19 nt, Artificial Sequence
  Description of Artificial Sequence: Synthetic oligonucleotide
ugggucuuuguagggaaag

SEQ ID NO: 2353134 - RNA, 19 nt, Artificial Sequence
  Description of Artificial Sequence: Synthetic oligonucleotide
auuggacacgugcccagag

SEQ ID NO: 2353135 - RNA, 19 nt, Artificial Sequence
  Description of Artificial Sequence: Synthetic oligonucleotide
cauuguuaaccagauucug

SEQ ID NO: 2353136 - RNA, 19 nt, Artificial Sequence
  Description of Artificial Sequence: Synthetic oligonucleotide
gguaguauucauccugcug

SEQ ID NO: 2353137 - RNA, 19 nt, Artificial Sequence
  Description of Artificial Sequence: Synthetic oligonucleotide
gaaguuugguguggaaaug

SEQ ID NO: 2353138 - RNA, 19 nt, Artificial Sequence
  Description of Artificial Sequence: Synthetic oligonucleotide
uacccauuguuaaccagau

SEQ ID NO: 2353139 - RNA, 19 nt, Artificial Sequence
  Description of Artificial Sequence: Synthetic oligonucleotide
uuggacacgugcccagagc

SEQ ID NO: 2353140 - RNA, 19 nt, Artificial Sequence
  Description of Artificial Sequence: Synthetic oligonucleotide
gacacgugcccagagcugc

SEQ ID NO: 2353141 - RNA, 19 nt, Artificial Sequence
  Description of Artificial Sequence: Synthetic oligonucleotide
gaaaugaauacauggucuu

SEQ ID NO: 2353142 - RNA, 19 nt, Artificial Sequence
  Description of Artificial Sequence: Synthetic oligonucleotide
gauauguuccaaugucuua

SEQ ID NO: 2353143 - RNA, 19 nt, Artificial Sequence
  Description of Artificial Sequence: Synthetic oligonucleotide
agccacauguaccauccgu

SEQ ID NO: 2353144 - RNA, 19 nt, Artificial Sequence
  Description of Artificial Sequence: Synthetic oligonucleotide
caggucacgugacuguagc

SEQ ID NO: 2353145 - RNA, 19 nt, Artificial Sequence
  Description of Artificial Sequence: Synthetic oligonucleotide
aggcugacgcaguaagaag

SEQ ID NO: 2353146 - RNA, 19 nt, Artificial Sequence
  Description of Artificial Sequence: Synthetic oligonucleotide
guugagauguucuguccca

SEQ ID NO: 2353147 - RNA, 19 nt, Artificial Sequence
  Description of Artificial Sequence: Synthetic oligonucleotide
uugauagagccaccccaac

SEQ ID NO: 2353148 - RNA, 19 nt, Artificial Sequence
  Description of Artificial Sequence: Synthetic oligonucleotide
ucuaccaguccugccagcu

SEQ ID NO: 2353149 - RNA, 19 nt, Artificial Sequence
  Description of Artificial Sequence: Synthetic oligonucleotide
auguaugugugaggugugg

SEQ ID NO: 2353150 - RNA, 19 nt, Artificial Sequence
  Description of Artificial Sequence: Synthetic oligonucleotide
guccuuaccaggacugagg

SEQ ID NO: 2353151 - RNA, 19 nt, Artificial Sequence
  Description of Artificial Sequence: Synthetic oligonucleotide
  modified_base (12)..(12): a, c, u, g, unknown or other
aagaaguagagnacaugua

SEQ ID NO: 2353152 - RNA, 19 nt, Artificial Sequence
  Description of Artificial Sequence: Synthetic oligonucleotide
ugcauguaaccugcuagcu

SEQ ID NO: 2353153 - RNA, 19 nt, Artificial Sequence
  Description of Artificial Sequence: Synthetic oligonucleotide
agaccauguugagauguuc

SEQ ID NO: 2353154 - RNA, 19 nt, Artificial Sequence
  Description of Artificial Sequence: Synthetic oligonucleotide
agagcugcgguuguagaca

SEQ ID NO: 2353155 - RNA, 19 nt, Artificial Sequence
  Description of Artificial Sequence: Synthetic oligonucleotide
agacgccagucauagggug

SEQ ID NO: 2353156 - RNA, 19 nt, Artificial Sequence
  Description of Artificial Sequence: Synthetic oligonucleotide
ucaucccgcacauacccau

SEQ ID NO: 2353157 - RNA, 19 nt, Artificial Sequence
  Description of Artificial Sequence: Synthetic oligonucleotide
ucuuggccuguguaauuga

SEQ ID NO: 2353158 - RNA, 19 nt, Artificial Sequence
  Description of Artificial Sequence: Synthetic oligonucleotide
accugagagaauggcauug

SEQ ID NO: 2353159 - RNA, 19 nt, Artificial Sequence
  Description of Artificial Sequence: Synthetic oligonucleotide
gaagaccauguugagaugu

SEQ ID NO: 2353160 - RNA, 19 nt, Artificial Sequence
  Description of Artificial Sequence: Synthetic oligonucleotide
gauguaugugugaggugug

SEQ ID NO: 2353161 - RNA, 19 nt, Artificial Sequence
  Description of Artificial Sequence: Synthetic oligonucleotide
ugcguguggcuacaguguc

SEQ ID NO: 2353162 - RNA, 19 nt, Artificial Sequence
  Description of Artificial Sequence: Synthetic oligonucleotide
augaagcgguccuuaccag

SEQ ID NO: 2353163 - RNA, 19 nt, Artificial Sequence
  Description of Artificial Sequence: Synthetic oligonucleotide
cagagcugcgguuguagac

SEQ ID NO: 2353164 - RNA, 19 nt, Artificial Sequence
  Description of Artificial Sequence: Synthetic oligonucleotide
auacuuggcgggcuggaaa

SEQ ID NO: 2353165 - RNA, 19 nt, Artificial Sequence
  Description of Artificial Sequence: Synthetic oligonucleotide
cuugauagagccaccccaa

SEQ ID NO: 2353166 - RNA, 19 nt, Artificial Sequence
  Description of Artificial Sequence: Synthetic oligonucleotide
ugccccaauaaggaagaca

SEQ ID NO: 2353167 - RNA, 19 nt, Artificial Sequence
  Description of Artificial Sequence: Synthetic oligonucleotide
gucacgugacuguagccac

SEQ ID NO: 2353168 - RNA, 19 nt, Artificial Sequence
  Description of Artificial Sequence: Synthetic oligonucleotide
accaggagcauuggacacg

SEQ ID NO: 2353169 - RNA, 19 nt, Artificial Sequence
  Description of Artificial Sequence: Synthetic oligonucleotide
auagagccaccccaacgga

SEQ ID NO: 2353170 - RNA, 19 nt, Artificial Sequence
  Description of Artificial Sequence: Synthetic oligonucleotide
gaagcgguccuuaccagga

SEQ ID NO: 2353171 - RNA, 19 nt, Artificial Sequence
  Description of Artificial Sequence: Synthetic oligonucleotide
uauguuccaaugucuuauu

SEQ ID NO: 2353172 - RNA, 19 nt, Artificial Sequence
  Description of Artificial Sequence: Synthetic oligonucleotide
  modified_base (18)..(18): a, c, u, g, unknown or other
cgcaguaagaaguagagna

SEQ ID NO: 2353173 - RNA, 19 nt, Artificial Sequence
  Description of Artificial Sequence: Synthetic oligonucleotide
uggcuacagugucaucacc

SEQ ID NO: 2353174 - RNA, 19 nt, Artificial Sequence
  Description of Artificial Sequence: Synthetic oligonucleotide
gaggcugacgcaguaagaa

SEQ ID NO: 2353175 - RNA, 19 nt, Artificial Sequence
  Description of Artificial Sequence: Synthetic oligonucleotide
aucccgcacauacccauug

SEQ ID NO: 2353176 - RNA, 19 nt, Artificial Sequence
  Description of Artificial Sequence: Synthetic oligonucleotide
ggagcauuggacacgugcc

SEQ ID NO: 2353177 - RNA, 19 nt, Artificial Sequence
  Description of Artificial Sequence: Synthetic oligonucleotide
cagcaugggcuugauagag

SEQ ID NO: 2353178 - RNA, 19 nt, Artificial Sequence
  Description of Artificial Sequence: Synthetic oligonucleotide
guguacaggcugugauugg

SEQ ID NO: 2353179 - RNA, 19 nt, Artificial Sequence
  Description of Artificial Sequence: Synthetic oligonucleotide
ggaacacggaucuguacac

SEQ ID NO: 2353180 - RNA, 19 nt, Artificial Sequence
  Description of Artificial Sequence: Synthetic oligonucleotide
auuggcggccaugccaccg

SEQ ID NO: 2353181 - RNA, 19 nt, Artificial Sequence
  Description of Artificial Sequence: Synthetic oligonucleotide
gaacacggaucuguacacc

SEQ ID NO: 2353182 - RNA, 19 nt, Artificial Sequence
  Description of Artificial Sequence: Synthetic oligonucleotide
gcuugauagagccacccca

SEQ ID NO: 2353183 - RNA, 19 nt, Artificial Sequence
  Description of Artificial Sequence: Synthetic oligonucleotide
gucuuggccuguguaauug

SEQ ID NO: 2353184 - RNA, 19 nt, Artificial Sequence
  Description of Artificial Sequence: Synthetic oligonucleotide
ccuguguaauugaaguuug

SEQ ID NO: 2353185 - RNA, 19 nt, Artificial Sequence
  Description of Artificial Sequence: Synthetic oligonucleotide
caggcugugauuggcggcc

SEQ ID NO: 2353186 - RNA, 19 nt, Artificial Sequence
  Description of Artificial Sequence: Synthetic oligonucleotide
ggaaaugaauacauggucu

SEQ ID NO: 2353187 - RNA, 19 nt, Artificial Sequence
  Description of Artificial Sequence: Synthetic oligonucleotide
uguaggcagccaaggcugu

SEQ ID NO: 2353188 - RNA, 19 nt, Artificial Sequence
  Description of Artificial Sequence: Synthetic oligonucleotide
acgccagucauagggugcg

SEQ ID NO: 2353189 - RNA, 19 nt, Artificial Sequence
  Description of Artificial Sequence: Synthetic oligonucleotide
ucuccucuaccaguccugc

SEQ ID NO: 2353190 - RNA, 19 nt, Artificial Sequence
  Description of Artificial Sequence: Synthetic oligonucleotide
agaguaggucuugccaaag

SEQ ID NO: 2353191 - RNA, 19 nt, Artificial Sequence
  Description of Artificial Sequence: Synthetic oligonucleotide
gcaucagguguacaggcug

SEQ ID NO: 2353192 - RNA, 19 nt, Artificial Sequence
  Description of Artificial Sequence: Synthetic oligonucleotide
acuucuacaccaggugcug

SEQ ID NO: 2353193 - RNA, 19 nt, Artificial Sequence
  Description of Artificial Sequence: Synthetic oligonucleotide
ucacgugacuguagccaca

SEQ ID NO: 2353194 - RNA, 19 nt, Artificial Sequence
  Description of Artificial Sequence: Synthetic oligonucleotide
caccaggagcauuggacac

SEQ ID NO: 2353195 - RNA, 19 nt, Artificial Sequence
  Description of Artificial Sequence: Synthetic oligonucleotide
agcgguccuuaccaggacu

SEQ ID NO: 2353196 - RNA, 19 nt, Artificial Sequence
  Description of Artificial Sequence: Synthetic oligonucleotide
cagucauagggugcggccc

SEQ ID NO: 2353197 - RNA, 19 nt, Artificial Sequence
  Description of Artificial Sequence: Synthetic oligonucleotide
gacgccagucauagggugc

SEQ ID NO: 2353198 - RNA, 19 nt, Artificial Sequence
  Description of Artificial Sequence: Synthetic oligonucleotide
ccauccgucuucaaaauga

SEQ ID NO: 2353199 - RNA, 19 nt, Artificial Sequence
  Description of Artificial Sequence: Synthetic oligonucleotide
uaccauccgucuucaaaau

SEQ ID NO: 2353200 - RNA, 19 nt, Artificial Sequence
  Description of Artificial Sequence: Synthetic oligonucleotide
caaucaaugaagcgguccu

SEQ ID NO: 2353201 - RNA, 19 nt, Artificial Sequence
  Description of Artificial Sequence: Synthetic oligonucleotide
cuucuacaccaggugcugg

SEQ ID NO: 2353202 - RNA, 19 nt, Artificial Sequence
  Description of Artificial Sequence: Synthetic oligonucleotide
ucuacaccaggugcuggga

SEQ ID NO: 2353203 - RNA, 19 nt, Artificial Sequence
  Description of Artificial Sequence: Synthetic oligonucleotide
ucagguguacaggcuguga

SEQ ID NO: 2353204 - RNA, 19 nt, Artificial Sequence
  Description of Artificial Sequence: Synthetic oligonucleotide
ugggcuugauagagccacc

SEQ ID NO: 2353205 - RNA, 19 nt, Artificial Sequence
  Description of Artificial Sequence: Synthetic oligonucleotide
agcauuggacacgugccca

SEQ ID NO: 2353206 - RNA, 19 nt, Artificial Sequence
  Description of Artificial Sequence: Synthetic oligonucleotide
ccaaucaaugaagcggucc

SEQ ID NO: 2353207 - RNA, 19 nt, Artificial Sequence
  Description of Artificial Sequence: Synthetic oligonucleotide
guguggaaaugaauacaug

SEQ ID NO: 2353208 - RNA, 19 nt, Artificial Sequence
  Description of Artificial Sequence: Synthetic oligonucleotide
  modified_base (4)..(4): a, c, u, g, unknown or other
gagnacauguaggcagcca

SEQ ID NO: 2353209 - RNA, 19 nt, Artificial Sequence
  Description of Artificial Sequence: Synthetic oligonucleotide
cugacgcaguaagaaguag

SEQ ID NO: 2353210 - RNA, 19 nt, Artificial Sequence
  Description of Artificial Sequence: Synthetic oligonucleotide
ugugugaggugugggcaga

SEQ ID NO: 2353211 - RNA, 19 nt, Artificial Sequence
  Description of Artificial Sequence: Synthetic oligonucleotide
ugugaggugugggcagacc

SEQ ID NO: 2353212 - RNA, 19 nt, Artificial Sequence
  Description of Artificial Sequence: Synthetic oligonucleotide
ccgguaguauucauccugc

SEQ ID NO: 2353213 - RNA, 19 nt, Artificial Sequence
  Description of Artificial Sequence: Synthetic oligonucleotide
gagccaccccaacggagcc

SEQ ID NO: 2353214 - RNA, 19 nt, Artificial Sequence
  Description of Artificial Sequence: Synthetic oligonucleotide
ccccaagagagauaaacca

SEQ ID NO: 2353215 - RNA, 19 nt, Artificial Sequence
  Description of Artificial Sequence: Synthetic oligonucleotide
ccagugugugcauguaacc

SEQ ID NO: 2353216 - RNA, 19 nt, Artificial Sequence
  Description of Artificial Sequence: Synthetic oligonucleotide
auccgucuucaaaaugaag

SEQ ID NO: 2353217 - RNA, 19 nt, Artificial Sequence
  Description of Artificial Sequence: Synthetic oligonucleotide
aguacucaacagaguaggu

SEQ ID NO: 2353218 - RNA, 19 nt, Artificial Sequence
  Description of Artificial Sequence: Synthetic oligonucleotide
ucccgcacauacccauugu

SEQ ID NO: 2353219 - RNA, 19 nt, Artificial Sequence
  Description of Artificial Sequence: Synthetic oligonucleotide
accaggacugaggcugacg

SEQ ID NO: 2353220 - RNA, 19 nt, Artificial Sequence
  Description of Artificial Sequence: Synthetic oligonucleotide
aguuugguguggaaaugaa

SEQ ID NO: 2353221 - RNA, 19 nt, Artificial Sequence
  Description of Artificial Sequence: Synthetic oligonucleotide
accccaacggagccccaag

SEQ ID NO: 2353222 - RNA, 19 nt, Artificial Sequence
  Description of Artificial Sequence: Synthetic oligonucleotide
ggucacgugacuguagcca

SEQ ID NO: 2353223 - RNA, 19 nt, Artificial Sequence
  Description of Artificial Sequence: Synthetic oligonucleotide
gcuggcuggguuccagacg

SEQ ID NO: 2353224 - RNA, 19 nt, Artificial Sequence
  Description of Artificial Sequence: Synthetic oligonucleotide
acacggaucuguacaccag

SEQ ID NO: 2353225 - RNA, 19 nt, Artificial Sequence
  Description of Artificial Sequence: Synthetic oligonucleotide
cauccgucuucaaaaugaa

SEQ ID NO: 2353226 - RNA, 19 nt, Artificial Sequence
  Description of Artificial Sequence: Synthetic oligonucleotide
uuggcgggcuggaaacauc

SEQ ID NO: 2353227 - RNA, 19 nt, Artificial Sequence
  Description of Artificial Sequence: Synthetic oligonucleotide
  modified_base (19)..(19): a, c, u, g, unknown or other
acgcaguaagaaguagagn

SEQ ID NO: 2353228 - RNA, 19 nt, Artificial Sequence
  Description of Artificial Sequence: Synthetic oligonucleotide
ccagucauagggugcggcc

SEQ ID NO: 2353229 - RNA, 19 nt, Artificial Sequence
  Description of Artificial Sequence: Synthetic oligonucleotide
accugcuagcuuguuguca

SEQ ID NO: 2353230 - RNA, 19 nt, Artificial Sequence
  Description of Artificial Sequence: Synthetic oligonucleotide
aagaccauguugagauguu

SEQ ID NO: 2353231 - RNA, 19 nt, Artificial Sequence
  Description of Artificial Sequence: Synthetic oligonucleotide
accaaucaaugaagcgguc

SEQ ID NO: 2353232 - RNA, 19 nt, Artificial Sequence
  Description of Artificial Sequence: Synthetic oligonucleotide
gcacauacccauuguuaac

SEQ ID NO: 2353233 - RNA, 19 nt, Artificial Sequence
  Description of Artificial Sequence: Synthetic oligonucleotide
ggcuacagugucaucacca

SEQ ID NO: 2353234 - RNA, 19 nt, Artificial Sequence
  Description of Artificial Sequence: Synthetic oligonucleotide
ugucccauucaugggcauc

SEQ ID NO: 2353235 - RNA, 19 nt, Artificial Sequence
  Description of Artificial Sequence: Synthetic oligonucleotide
augaccagcaugggcuuga

SEQ ID NO: 2353236 - RNA, 19 nt, Artificial Sequence
  Description of Artificial Sequence: Synthetic oligonucleotide
caccauccucauagagugc

SEQ ID NO: 2353237 - RNA, 19 nt, Artificial Sequence
  Description of Artificial Sequence: Synthetic oligonucleotide
aacggagccccaagagaga

SEQ ID NO: 2353238 - RNA, 19 nt, Artificial Sequence
  Description of Artificial Sequence: Synthetic oligonucleotide
gcauuggacacgugcccag

SEQ ID NO: 2353239 - RNA, 19 nt, Artificial Sequence
  Description of Artificial Sequence: Synthetic oligonucleotide
gauuggcggccaugccacc

SEQ ID NO: 2353240 - RNA, 19 nt, Artificial Sequence
  Description of Artificial Sequence: Synthetic oligonucleotide
ggccaugaccagcaugggc

SEQ ID NO: 2353241 - RNA, 19 nt, Artificial Sequence
  Description of Artificial Sequence: Synthetic oligonucleotide
caaggcugugccccaauaa

SEQ ID NO: 2353242 - RNA, 19 nt, Artificial Sequence
  Description of Artificial Sequence: Synthetic oligonucleotide
ccauucaugggcaucaggu

SEQ ID NO: 2353243 - RNA, 19 nt, Artificial Sequence
  Description of Artificial Sequence: Synthetic oligonucleotide
caggccauacuuggcgggc

SEQ ID NO: 2353244 - RNA, 19 nt, Artificial Sequence
  Description of Artificial Sequence: Synthetic oligonucleotide
ggucuucaggccauacuug

SEQ ID NO: 2353245 - RNA, 19 nt, Artificial Sequence
  Description of Artificial Sequence: Synthetic oligonucleotide
gguccuuaccaggacugag

SEQ ID NO: 2353246 - RNA, 19 nt, Artificial Sequence
  Description of Artificial Sequence: Synthetic oligonucleotide
cagugcugcguguggcuac

SEQ ID NO: 2353247 - RNA, 19 nt, Artificial Sequence
  Description of Artificial Sequence: Synthetic oligonucleotide
cgggcuggaaacauccagg

SEQ ID NO: 2353248 - RNA, 19 nt, Artificial Sequence
  Description of Artificial Sequence: Synthetic oligonucleotide
cauagggugcggcccgcac

SEQ ID NO: 2353249 - RNA, 19 nt, Artificial Sequence
  Description of Artificial Sequence: Synthetic oligonucleotide
cucuaccaguccugccagc

SEQ ID NO: 2353250 - RNA, 19 nt, Artificial Sequence
  Description of Artificial Sequence: Synthetic oligonucleotide
ucuguacaccaggagcauu

SEQ ID NO: 2353251 - RNA, 19 nt, Artificial Sequence
  Description of Artificial Sequence: Synthetic oligonucleotide
acggaucuguacaccagga

SEQ ID NO: 2353252 - RNA, 19 nt, Artificial Sequence
  Description of Artificial Sequence: Synthetic oligonucleotide
cauggucuucaggccauac

SEQ ID NO: 2353253 - RNA, 19 nt, Artificial Sequence
  Description of Artificial Sequence: Synthetic oligonucleotide
guacaccaggagcauugga

SEQ ID NO: 2353254 - RNA, 19 nt, Artificial Sequence
  Description of Artificial Sequence: Synthetic oligonucleotide
gguguggaaaugaauacau

SEQ ID NO: 2353255 - RNA, 19 nt, Artificial Sequence
  Description of Artificial Sequence: Synthetic oligonucleotide
gugacuguagccacaugua

SEQ ID NO: 2353256 - RNA, 19 nt, Artificial Sequence
  Description of Artificial Sequence: Synthetic oligonucleotide
uggguuccagacgccaguc

SEQ ID NO: 2353257 - RNA, 19 nt, Artificial Sequence
  Description of Artificial Sequence: Synthetic oligonucleotide
cauguaccauccgucuuca

SEQ ID NO: 2353258 - RNA, 19 nt, Artificial Sequence
  Description of Artificial Sequence: Synthetic oligonucleotide
gcagcauacaucuccucua

SEQ ID NO: 2353259 - RNA, 19 nt, Artificial Sequence
  Description of Artificial Sequence: Synthetic oligonucleotide
cccaacggagccccaagag

SEQ ID NO: 2353260 - RNA, 19 nt, Artificial Sequence
  Description of Artificial Sequence: Synthetic oligonucleotide
acggagccccaagagagau

SEQ ID NO: 2353261 - RNA, 19 nt, Artificial Sequence
  Description of Artificial Sequence: Synthetic oligonucleotide
ggcugugccccaauaagga

SEQ ID NO: 2353262 - RNA, 19 nt, Artificial Sequence
  Description of Artificial Sequence: Synthetic oligonucleotide
aucuguacaccaggagcau

SEQ ID NO: 2353263 - RNA, 19 nt, Artificial Sequence
  Description of Artificial Sequence: Synthetic oligonucleotide
cuguaccagugugugcaug

SEQ ID NO: 2353264 - RNA, 19 nt, Artificial Sequence
  Description of Artificial Sequence: Synthetic oligonucleotide
gccacauguaccauccguc

SEQ ID NO: 2353265 - RNA, 19 nt, Artificial Sequence
  Description of Artificial Sequence: Synthetic oligonucleotide
cccgcacugucucaucccg

SEQ ID NO: 2353266 - RNA, 19 nt, Artificial Sequence
  Description of Artificial Sequence: Synthetic oligonucleotide
ggucuuuguagggaaagcu

SEQ ID NO: 2353267 - RNA, 19 nt, Artificial Sequence
  Description of Artificial Sequence: Synthetic oligonucleotide
gggcuugauagagccaccc

SEQ ID NO: 2353268 - RNA, 19 nt, Artificial Sequence
  Description of Artificial Sequence: Synthetic oligonucleotide
cccauucaugggcaucagg

SEQ ID NO: 2353269 - RNA, 19 nt, Artificial Sequence
  Description of Artificial Sequence: Synthetic oligonucleotide
uguaaccugcuagcuuguu

SEQ ID NO: 2353270 - RNA, 19 nt, Artificial Sequence
  Description of Artificial Sequence: Synthetic oligonucleotide
ggcauugauauguuccaau

SEQ ID NO: 2353271 - RNA, 19 nt, Artificial Sequence
  Description of Artificial Sequence: Synthetic oligonucleotide
uggcuggguuccagacgcc

SEQ ID NO: 2353272 - RNA, 19 nt, Artificial Sequence
  Description of Artificial Sequence: Synthetic oligonucleotide
cagugugugcauguaaccu

SEQ ID NO: 2353273 - RNA, 19 nt, Artificial Sequence
  Description of Artificial Sequence: Synthetic oligonucleotide
ggcaccugagagaauggca

SEQ ID NO: 2353274 - RNA, 19 nt, Artificial Sequence
  Description of Artificial Sequence: Synthetic oligonucleotide
ucauagggugcggcccgca

SEQ ID NO: 2353275 - RNA, 19 nt, Artificial Sequence
  Description of Artificial Sequence: Synthetic oligonucleotide
acgugcccagagcugcggu

SEQ ID NO: 2353276 - RNA, 19 nt, Artificial Sequence
  Description of Artificial Sequence: Synthetic oligonucleotide
caucagguguacaggcugu

SEQ ID NO: 2353277 - RNA, 19 nt, Artificial Sequence
  Description of Artificial Sequence: Synthetic oligonucleotide
ccacugggucuuuguaggg

SEQ ID NO: 2353278 - RNA, 19 nt, Artificial Sequence
  Description of Artificial Sequence: Synthetic oligonucleotide
auguaaccugcuagcuugu

SEQ ID NO: 2353279 - RNA, 19 nt, Artificial Sequence
  Description of Artificial Sequence: Synthetic oligonucleotide
agcaggucacgugacugua

SEQ ID NO: 2353280 - RNA, 19 nt, Artificial Sequence
  Description of Artificial Sequence: Synthetic oligonucleotide
agcuuccgguaguauucau

SEQ ID NO: 2353281 - RNA, 19 nt, Artificial Sequence
  Description of Artificial Sequence: Synthetic oligonucleotide
ccaagagagauaaaccaau

SEQ ID NO: 2353282 - RNA, 19 nt, Artificial Sequence
  Description of Artificial Sequence: Synthetic oligonucleotide
cacugggucuuuguaggga

SEQ ID NO: 2353283 - RNA, 19 nt, Artificial Sequence
  Description of Artificial Sequence: Synthetic oligonucleotide
acucaacagaguaggucuu

SEQ ID NO: 2353284 - RNA, 19 nt, Artificial Sequence
  Description of Artificial Sequence: Synthetic oligonucleotide
acuuggcgggcuggaaaca

SEQ ID NO: 2353285 - RNA, 19 nt, Artificial Sequence
  Description of Artificial Sequence: Synthetic oligonucleotide
ggcugacgcaguaagaagu

SEQ ID NO: 2353286 - RNA, 19 nt, Artificial Sequence
  Description of Artificial Sequence: Synthetic oligonucleotide
guuugguguggaaaugaau

SEQ ID NO: 2353287 - RNA, 19 nt, Artificial Sequence
  Description of Artificial Sequence: Synthetic oligonucleotide
cugcguguggcuacagugu

SEQ ID NO: 2353288 - RNA, 19 nt, Artificial Sequence
  Description of Artificial Sequence: Synthetic oligonucleotide
ccaauaaggaagacaggcu

SEQ ID NO: 2353289 - RNA, 19 nt, Artificial Sequence
  Description of Artificial Sequence: Synthetic oligonucleotide
caggacugaggcugacgca

SEQ ID NO: 2353290 - RNA, 19 nt, Artificial Sequence
  Description of Artificial Sequence: Synthetic oligonucleotide
acgugacuguagccacaug

SEQ ID NO: 2353291 - RNA, 19 nt, Artificial Sequence
  Description of Artificial Sequence: Synthetic oligonucleotide
ccauuguuaaccagauucu

SEQ ID NO: 2353292 - RNA, 19 nt, Artificial Sequence
  Description of Artificial Sequence: Synthetic oligonucleotide
cacaccauacagacaguau

SEQ ID NO: 2353293 - RNA, 19 nt, Artificial Sequence
  Description of Artificial Sequence: Synthetic oligonucleotide
gggcagacccacaccauac

SEQ ID NO: 2353294 - RNA, 19 nt, Artificial Sequence
  Description of Artificial Sequence: Synthetic oligonucleotide
gguuccagacgccagucau

SEQ ID NO: 2353295 - RNA, 19 nt, Artificial Sequence
  Description of Artificial Sequence: Synthetic oligonucleotide
gcgguccuuaccaggacug

SEQ ID NO: 2353296 - RNA, 19 nt, Artificial Sequence
  Description of Artificial Sequence: Synthetic oligonucleotide
ccaacggagccccaagaga

SEQ ID NO: 2353297 - RNA, 19 nt, Artificial Sequence
  Description of Artificial Sequence: Synthetic oligonucleotide
ggcagacccacaccauaca

SEQ ID NO: 2353298 - RNA, 19 nt, Artificial Sequence
  Description of Artificial Sequence: Synthetic oligonucleotide
cagguguacaggcugugau

SEQ ID NO: 2353299 - RNA, 19 nt, Artificial Sequence
  Description of Artificial Sequence: Synthetic oligonucleotide
cgcacauacccauuguuaa

SEQ ID NO: 2353300 - RNA, 19 nt, Artificial Sequence
  Description of Artificial Sequence: Synthetic oligonucleotide
gccauacuuggcgggcugg

SEQ ID NO: 2353301 - RNA, 19 nt, Artificial Sequence
  Description of Artificial Sequence: Synthetic oligonucleotide
ggccauacuuggcgggcug

SEQ ID NO: 2353302 - RNA, 19 nt, Artificial Sequence
  Description of Artificial Sequence: Synthetic oligonucleotide
aggccauacuuggcgggcu

SEQ ID NO: 2353303 - RNA, 19 nt, Artificial Sequence
  Description of Artificial Sequence: Synthetic oligonucleotide
cugggucuuuguagggaaa

SEQ ID NO: 2353304 - RNA, 19 nt, Artificial Sequence
  Description of Artificial Sequence: Synthetic oligonucleotide
cucauagagugcagccacu

SEQ ID NO: 2353305 - RNA, 19 nt, Artificial Sequence
  Description of Artificial Sequence: Synthetic oligonucleotide
ggaaagcuguggucauaga

SEQ ID NO: 2353306 - RNA, 19 nt, Artificial Sequence
  Description of Artificial Sequence: Synthetic oligonucleotide
cauuggacacgugcccaga

SEQ ID NO: 2353307 - RNA, 19 nt, Artificial Sequence
  Description of Artificial Sequence: Synthetic oligonucleotide
cagacgccagucauagggu

SEQ ID NO: 2353308 - RNA, 19 nt, Artificial Sequence
  Description of Artificial Sequence: Synthetic oligonucleotide
gucauagggugcggcccgc

SEQ ID NO: 2353309 - RNA, 19 nt, Artificial Sequence
  Description of Artificial Sequence: Synthetic oligonucleotide
gucuugccaaagccaggaa

SEQ ID NO: 2353310 - RNA, 19 nt, Artificial Sequence
  Description of Artificial Sequence: Synthetic oligonucleotide
gcaggucacgugacuguag

SEQ ID NO: 2353311 - RNA, 19 nt, Artificial Sequence
  Description of Artificial Sequence: Synthetic oligonucleotide
gccagucauagggugcggc

SEQ ID NO: 2353312 - RNA, 19 nt, Artificial Sequence
  Description of Artificial Sequence: Synthetic oligonucleotide
gcugugauuggcggccaug

SEQ ID NO: 2353313 - RNA, 19 nt, Artificial Sequence
  Description of Artificial Sequence: Synthetic oligonucleotide
cggaucuguacaccaggag

SEQ ID NO: 2353314 - RNA, 19 nt, Artificial Sequence
  Description of Artificial Sequence: Synthetic oligonucleotide
gccuguguaauugaaguuu

SEQ ID NO: 2353315 - RNA, 19 nt, Artificial Sequence
  Description of Artificial Sequence: Synthetic oligonucleotide
guuccagacgccagucaua

SEQ ID NO: 2353316 - RNA, 19 nt, Artificial Sequence
  Description of Artificial Sequence: Synthetic oligonucleotide
auguaccauccgucuucaa

SEQ ID NO: 2353317 - RNA, 19 nt, Artificial Sequence
  Description of Artificial Sequence: Synthetic oligonucleotide
ggacacgugcccagagcug

SEQ ID NO: 2353318 - RNA, 19 nt, Artificial Sequence
  Description of Artificial Sequence: Synthetic oligonucleotide
gugugaggugugggcagac

SEQ ID NO: 2353319 - RNA, 19 nt, Artificial Sequence
  Description of Artificial Sequence: Synthetic oligonucleotide
gugcggcccgcacugucuc

SEQ ID NO: 2353320 - RNA, 19 nt, Artificial Sequence
  Description of Artificial Sequence: Synthetic oligonucleotide
cauacuuggcgggcuggaa

SEQ ID NO: 2353321 - RNA, 19 nt, Artificial Sequence
  Description of Artificial Sequence: Synthetic oligonucleotide
gcccgcacugucucauccc

SEQ ID NO: 2353322 - RNA, 19 nt, Artificial Sequence
  Description of Artificial Sequence: Synthetic oligonucleotide
gccaggaacacggaucugu

SEQ ID NO: 2353323 - RNA, 19 nt, Artificial Sequence
  Description of Artificial Sequence: Synthetic oligonucleotide
agggaaagcuguggucaua

SEQ ID NO: 2353324 - RNA, 19 nt, Artificial Sequence
  Description of Artificial Sequence: Synthetic oligonucleotide
guuugaagucuuggccugu

SEQ ID NO: 2353325 - RNA, 19 nt, Artificial Sequence
  Description of Artificial Sequence: Synthetic oligonucleotide
gcuagcuuguugucaucua

SEQ ID NO: 2353326 - RNA, 19 nt, Artificial Sequence
  Description of Artificial Sequence: Synthetic oligonucleotide
ccauacagacaguauacuu

SEQ ID NO: 2353327 - RNA, 19 nt, Artificial Sequence
  Description of Artificial Sequence: Synthetic oligonucleotide
ugaccagcaugggcuugau

SEQ ID NO: 2353328 - RNA, 19 nt, Artificial Sequence
  Description of Artificial Sequence: Synthetic oligonucleotide
gcugacgcaguaagaagua

SEQ ID NO: 2353329 - RNA, 19 nt, Artificial Sequence
  Description of Artificial Sequence: Synthetic oligonucleotide
gaccagcaugggcuugaua

SEQ ID NO: 2353330 - RNA, 19 nt, Artificial Sequence
  Description of Artificial Sequence: Synthetic oligonucleotide
caggagcauuggacacgug

SEQ ID NO: 2353331 - RNA, 19 nt, Artificial Sequence
  Description of Artificial Sequence: Synthetic oligonucleotide
ugccagcuuccgguaguau

SEQ ID NO: 2353332 - RNA, 19 nt, Artificial Sequence
  Description of Artificial Sequence: Synthetic oligonucleotide
gggaggucgugggaggcca

SEQ ID NO: 2353333 - RNA, 19 nt, Artificial Sequence
  Description of Artificial Sequence: Synthetic oligonucleotide
gcauguaaccugcuagcuu

SEQ ID NO: 2353334 - RNA, 19 nt, Artificial Sequence
  Description of Artificial Sequence: Synthetic oligonucleotide
cacauguaccauccgucuu

SEQ ID NO: 2353335 - RNA, 19 nt, Artificial Sequence
  Description of Artificial Sequence: Synthetic oligonucleotide
ccugcuagcuuguugucau

SEQ ID NO: 2353336 - RNA, 19 nt, Artificial Sequence
  Description of Artificial Sequence: Synthetic oligonucleotide
ccacauguaccauccgucu

SEQ ID NO: 2353337 - RNA, 19 nt, Artificial Sequence
  Description of Artificial Sequence: Synthetic oligonucleotide
ccgcacugucucaucccgc

SEQ ID NO: 2353338 - RNA, 19 nt, Artificial Sequence
  Description of Artificial Sequence: Synthetic oligonucleotide
ggcuggguuccagacgcca

SEQ ID NO: 2353339 - RNA, 19 nt, Artificial Sequence
  Description of Artificial Sequence: Synthetic oligonucleotide
gccagcuuccgguaguauu

SEQ ID NO: 2353340 - RNA, 19 nt, Artificial Sequence
  Description of Artificial Sequence: Synthetic oligonucleotide
ggccuguguaauugaaguu

SEQ ID NO: 2353341 - RNA, 19 nt, Artificial Sequence
  Description of Artificial Sequence: Synthetic oligonucleotide
cuuggcgggcuggaaacau

SEQ ID NO: 2353342 - RNA, 19 nt, Artificial Sequence
  Description of Artificial Sequence: Synthetic oligonucleotide
cacgugacuguagccacau

SEQ ID NO: 2353343 - RNA, 19 nt, Artificial Sequence
  Description of Artificial Sequence: Synthetic oligonucleotide
caccugagagaauggcauu

SEQ ID NO: 2353344 - RNA, 19 nt, Artificial Sequence
  Description of Artificial Sequence: Synthetic oligonucleotide
gggugcggcccgcacuguc

SEQ ID NO: 2353345 - RNA, 19 nt, Artificial Sequence
  Description of Artificial Sequence: Synthetic oligonucleotide
agccaaggcugugccccaa

SEQ ID NO: 2353346 - RNA, 19 nt, Artificial Sequence
  Description of Artificial Sequence: Synthetic oligonucleotide
gcguguggcuacaguguca

SEQ ID NO: 2353347 - RNA, 19 nt, Artificial Sequence
  Description of Artificial Sequence: Synthetic oligonucleotide
cuaccaguccugccagcuu

SEQ ID NO: 2353348 - RNA, 19 nt, Artificial Sequence
  Description of Artificial Sequence: Synthetic oligonucleotide
ggcggccaugccaccggcc

SEQ ID NO: 2353349 - RNA, 19 nt, Artificial Sequence
  Description of Artificial Sequence: Synthetic oligonucleotide
cugccagcuuccgguagua

SEQ ID NO: 2353350 - RNA, 19 nt, Artificial Sequence
  Description of Artificial Sequence: Synthetic oligonucleotide
caucccgcacauacccauu

SEQ ID NO: 2353351 - RNA, 19 nt, Artificial Sequence
  Description of Artificial Sequence: Synthetic oligonucleotide
ggccugccagcaggucacg

SEQ ID NO: 2353352 - RNA, 19 nt, Artificial Sequence
  Description of Artificial Sequence: Synthetic oligonucleotide
caccccaacggagccccaa

SEQ ID NO: 2353353 - RNA, 19 nt, Artificial Sequence
  Description of Artificial Sequence: Synthetic oligonucleotide
ccauacuuggcgggcugga

SEQ ID NO: 2353354 - RNA, 19 nt, Artificial Sequence
  Description of Artificial Sequence: Synthetic oligonucleotide
cugucccauucaugggcau

SEQ ID NO: 2353355 - RNA, 19 nt, Artificial Sequence
  Description of Artificial Sequence: Synthetic oligonucleotide
ccccaacggagccccaaga

SEQ ID NO: 2353356 - RNA, 19 nt, Artificial Sequence
  Description of Artificial Sequence: Synthetic oligonucleotide
gagccccaagagagauaaa

SEQ ID NO: 2353357 - RNA, 19 nt, Artificial Sequence
  Description of Artificial Sequence: Synthetic oligonucleotide
ccaggagcauuggacacgu

SEQ ID NO: 2353358 - RNA, 19 nt, Artificial Sequence
  Description of Artificial Sequence: Synthetic oligonucleotide
ccuuaccaggacugaggcu

SEQ ID NO: 2353359 - RNA, 19 nt, Artificial Sequence
  Description of Artificial Sequence: Synthetic oligonucleotide
ccaaggcugugccccaaua

SEQ ID NO: 2353360 - RNA, 19 nt, Artificial Sequence
  Description of Artificial Sequence: Synthetic oligonucleotide
cccgcacauacccauuguu

SEQ ID NO: 2353361 - RNA, 19 nt, Artificial Sequence
  Description of Artificial Sequence: Synthetic oligonucleotide
cggccaugccaccggccac

SEQ ID NO: 2353362 - RNA, 19 nt, Artificial Sequence
  Description of Artificial Sequence: Synthetic oligonucleotide
ggcugugauuggcggccau

SEQ ID NO: 2353363 - RNA, 19 nt, Artificial Sequence
  Description of Artificial Sequence: Synthetic oligonucleotide
cgguaguauucauccugcu

SEQ ID NO: 2353364 - RNA, 19 nt, Artificial Sequence
  Description of Artificial Sequence: Synthetic oligonucleotide
gcggcccgcacugucucau

SEQ ID NO: 2353365 - RNA, 19 nt, Artificial Sequence
  Description of Artificial Sequence: Synthetic oligonucleotide
ccaccccaacggagcccca

SEQ ID NO: 2353366 - RNA, 19 nt, Artificial Sequence
  Description of Artificial Sequence: Synthetic oligonucleotide
aaugaauugaaguugccag

SEQ ID NO: 2353367 - RNA, 19 nt, Artificial Sequence
  Description of Artificial Sequence: Synthetic oligonucleotide
aaauccacuaaguaauggc

SEQ ID NO: 2353368 - RNA, 19 nt, Artificial Sequence
  Description of Artificial Sequence: Synthetic oligonucleotide
ugcagaaagagcaacagcg

SEQ ID NO: 2353369 - RNA, 19 nt, Artificial Sequence
  Description of Artificial Sequence: Synthetic oligonucleotide
uguaccuaaauucugaaca

SEQ ID NO: 2353370 - RNA, 19 nt, Artificial Sequence
  Description of Artificial Sequence: Synthetic oligonucleotide
aucgauaccauucuuuucc

SEQ ID NO: 2353371 - RNA, 19 nt, Artificial Sequence
  Description of Artificial Sequence: Synthetic oligonucleotide
auaucguugaaauacaaag

SEQ ID NO: 2353372 - RNA, 19 nt, Artificial Sequence
  Description of Artificial Sequence: Synthetic oligonucleotide
aaagugauaacauuucuga

SEQ ID NO: 2353373 - RNA, 19 nt, Artificial Sequence
  Description of Artificial Sequence: Synthetic oligonucleotide
aauacauuggugccaaagg

SEQ ID NO: 2353374 - RNA, 19 nt, Artificial Sequence
  Description of Artificial Sequence: Synthetic oligonucleotide
uuauaaaccaaauaauaca

SEQ ID NO: 2353375 - RNA, 19 nt, Artificial Sequence
  Description of Artificial Sequence: Synthetic oligonucleotide
uaaguaauggcauuuacug

SEQ ID NO: 2353376 - RNA, 19 nt, Artificial Sequence
  Description of Artificial Sequence: Synthetic oligonucleotide
aauaguuuggcucccgagg

SEQ ID NO: 2353377 - RNA, 19 nt, Artificial Sequence
  Description of Artificial Sequence: Synthetic oligonucleotide
guguaguucacauauaccg

SEQ ID NO: 2353378 - RNA, 19 nt, Artificial Sequence
  Description of Artificial Sequence: Synthetic oligonucleotide
gaaguugccaguuaucagg

SEQ ID NO: 2353379 - RNA, 19 nt, Artificial Sequence
  Description of Artificial Sequence: Synthetic oligonucleotide
auauaccguauacugaucc

SEQ ID NO: 2353380 - RNA, 19 nt, Artificial Sequence
  Description of Artificial Sequence: Synthetic oligonucleotide
ucuggauacaaaucaaggg

SEQ ID NO: 2353381 - RNA, 19 nt, Artificial Sequence
  Description of Artificial Sequence: Synthetic oligonucleotide
ugucaauauaucuggaagg

SEQ ID NO: 2353382 - RNA, 19 nt, Artificial Sequence
  Description of Artificial Sequence: Synthetic oligonucleotide
aagucagcucagcagaacc

SEQ ID NO: 2353383 - RNA, 19 nt, Artificial Sequence
  Description of Artificial Sequence: Synthetic oligonucleotide
aaugacaagagcccaaaca

SEQ ID NO: 2353384 - RNA, 19 nt, Artificial Sequence
  Description of Artificial Sequence: Synthetic oligonucleotide
ucucaugguauccaaaucc

SEQ ID NO: 2353385 - RNA, 19 nt, Artificial Sequence
  Description of Artificial Sequence: Synthetic oligonucleotide
aaccaaauaauacauuggu

SEQ ID NO: 2353386 - RNA, 19 nt, Artificial Sequence
  Description of Artificial Sequence: Synthetic oligonucleotide
cuggauacaaaucaagggg

SEQ ID NO: 2353387 - RNA, 19 nt, Artificial Sequence
  Description of Artificial Sequence: Synthetic oligonucleotide
uguuggaugaauaguuugg

SEQ ID NO: 2353388 - RNA, 19 nt, Artificial Sequence
  Description of Artificial Sequence: Synthetic oligonucleotide
aauucgguaaaauucugga

SEQ ID NO: 2353389 - RNA, 19 nt, Artificial Sequence
  Description of Artificial Sequence: Synthetic oligonucleotide
uggaugaagaaaauuauaa

SEQ ID NO: 2353390 - RNA, 19 nt, Artificial Sequence
  Description of Artificial Sequence: Synthetic oligonucleotide
ucacauauaccguauacug

SEQ ID NO: 2353391 - RNA, 19 nt, Artificial Sequence
  Description of Artificial Sequence: Synthetic oligonucleotide
cauauaaguggauauacug

SEQ ID NO: 2353392 - RNA, 19 nt, Artificial Sequence
  Description of Artificial Sequence: Synthetic oligonucleotide
augacaagagcccaaacag

SEQ ID NO: 2353393 - RNA, 19 nt, Artificial Sequence
  Description of Artificial Sequence: Synthetic oligonucleotide
aucguugaaauacaaagug

SEQ ID NO: 2353394 - RNA, 19 nt, Artificial Sequence
  Description of Artificial Sequence: Synthetic oligonucleotide
cacagagacauauaagugg

SEQ ID NO: 2353395 - RNA, 19 nt, Artificial Sequence
  Description of Artificial Sequence: Synthetic oligonucleotide
agaaccacuaauuaacaug

SEQ ID NO: 2353396 - RNA, 19 nt, Artificial Sequence
  Description of Artificial Sequence: Synthetic oligonucleotide
cugaugucaauauaucugg

SEQ ID NO: 2353397 - RNA, 19 nt, Artificial Sequence
  Description of Artificial Sequence: Synthetic oligonucleotide
uccaaauccacuaaguaau

SEQ ID NO: 2353398 - RNA, 19 nt, Artificial Sequence
  Description of Artificial Sequence: Synthetic oligonucleotide
aaugcuccaggcgauaucg

SEQ ID NO: 2353399 - RNA, 19 nt, Artificial Sequence
  Description of Artificial Sequence: Synthetic oligonucleotide
ccaaauaauacauuggugc

SEQ ID NO: 2353400 - RNA, 19 nt, Artificial Sequence
  Description of Artificial Sequence: Synthetic oligonucleotide
aauacaaagugauaacauu

SEQ ID NO: 2353401 - RNA, 19 nt, Artificial Sequence
  Description of Artificial Sequence: Synthetic oligonucleotide
caaauaauacauuggugcc

SEQ ID NO: 2353402 - RNA, 19 nt, Artificial Sequence
  Description of Artificial Sequence: Synthetic oligonucleotide
augucaauauaucuggaag

SEQ ID NO: 2353403 - RNA, 19 nt, Artificial Sequence
  Description of Artificial Sequence: Synthetic oligonucleotide
ccacuaauuaacaugaugg

SEQ ID NO: 2353404 - RNA, 19 nt, Artificial Sequence
  Description of Artificial Sequence: Synthetic oligonucleotide
aaaccaaauaauacauugg

SEQ ID NO: 2353405 - RNA, 19 nt, Artificial Sequence
  Description of Artificial Sequence: Synthetic oligonucleotide
gucaauuggagccacgggg

SEQ ID NO: 2353406 - RNA, 19 nt, Artificial Sequence
  Description of Artificial Sequence: Synthetic oligonucleotide
ugggaaaagaaaccguucc

SEQ ID NO: 2353407 - RNA, 19 nt, Artificial Sequence
  Description of Artificial Sequence: Synthetic oligonucleotide
uucgguaaaauucuggaua

SEQ ID NO: 2353408 - RNA, 19 nt, Artificial Sequence
  Description of Artificial Sequence: Synthetic oligonucleotide
aguaauggcauuuacugau

SEQ ID NO: 2353409 - RNA, 19 nt, Artificial Sequence
  Description of Artificial Sequence: Synthetic oligonucleotide
uggaaugaauugaaguugc

SEQ ID NO: 2353410 - RNA, 19 nt, Artificial Sequence
  Description of Artificial Sequence: Synthetic oligonucleotide
agcagaaccacuaauuaac

SEQ ID NO: 2353411 - RNA, 19 nt, Artificial Sequence
  Description of Artificial Sequence: Synthetic oligonucleotide
ccaguuaucaggcagaagg

SEQ ID NO: 2353412 - RNA, 19 nt, Artificial Sequence
  Description of Artificial Sequence: Synthetic oligonucleotide
auauaaguggauauacugg

SEQ ID NO: 2353413 - RNA, 19 nt, Artificial Sequence
  Description of Artificial Sequence: Synthetic oligonucleotide
aguguaaugcuccaggcga

SEQ ID NO: 2353414 - RNA, 19 nt, Artificial Sequence
  Description of Artificial Sequence: Synthetic oligonucleotide
cugcaaaaggcuuugguag

SEQ ID NO: 2353415 - RNA, 19 nt, Artificial Sequence
  Description of Artificial Sequence: Synthetic oligonucleotide
aaccguuccucuuugugag

SEQ ID NO: 2353416 - RNA, 19 nt, Artificial Sequence
  Description of Artificial Sequence: Synthetic oligonucleotide
aauggcauuuacugauguc

SEQ ID NO: 2353417 - RNA, 19 nt, Artificial Sequence
  Description of Artificial Sequence: Synthetic oligonucleotide
agcaggaacaauccgagug

SEQ ID NO: 2353418 - RNA, 19 nt, Artificial Sequence
  Description of Artificial Sequence: Synthetic oligonucleotide
uaucguugaaauacaaagu

SEQ ID NO: 2353419 - RNA, 19 nt, Artificial Sequence
  Description of Artificial Sequence: Synthetic oligonucleotide
cuaaccuccacuuuucuuc

SEQ ID NO: 2353420 - RNA, 19 nt, Artificial Sequence
  Description of Artificial Sequence: Synthetic oligonucleotide
uguuccuaaugccagccag

SEQ ID NO: 2353421 - RNA, 19 nt, Artificial Sequence
  Description of Artificial Sequence: Synthetic oligonucleotide
ugacaagagcccaaacagg

SEQ ID NO: 2353422 - RNA, 19 nt, Artificial Sequence
  Description of Artificial Sequence: Synthetic oligonucleotide
gauaccauucuuuucccac

SEQ ID NO: 2353423 - RNA, 19 nt, Artificial Sequence
  Description of Artificial Sequence: Synthetic oligonucleotide
ugucacaguguaaugcucc

SEQ ID NO: 2353424 - RNA, 19 nt, Artificial Sequence
  Description of Artificial Sequence: Synthetic oligonucleotide
auuggugccaaagguaagc

SEQ ID NO: 2353425 - RNA, 19 nt, Artificial Sequence
  Description of Artificial Sequence: Synthetic oligonucleotide
aaaccguuccucuuuguga

SEQ ID NO: 2353426 - RNA, 19 nt, Artificial Sequence
  Description of Artificial Sequence: Synthetic oligonucleotide
acauauaccguauacugau

SEQ ID NO: 2353427 - RNA, 19 nt, Artificial Sequence
  Description of Artificial Sequence: Synthetic oligonucleotide
uauaccguauacugauccg

SEQ ID NO: 2353428 - RNA, 19 nt, Artificial Sequence
  Description of Artificial Sequence: Synthetic oligonucleotide
uaauacauuggugccaaag

SEQ ID NO: 2353429 - RNA, 19 nt, Artificial Sequence
  Description of Artificial Sequence: Synthetic oligonucleotide
ucaggcagaaggaagcuac

SEQ ID NO: 2353430 - RNA, 19 nt, Artificial Sequence
  Description of Artificial Sequence: Synthetic oligonucleotide
uguaguucacauauaccgu

SEQ ID NO: 2353431 - RNA, 19 nt, Artificial Sequence
  Description of Artificial Sequence: Synthetic oligonucleotide
aaguugccaguuaucaggc

SEQ ID NO: 2353432 - RNA, 19 nt, Artificial Sequence
  Description of Artificial Sequence: Synthetic oligonucleotide
ucguugaaauacaaaguga

SEQ ID NO: 2353433 - RNA, 19 nt, Artificial Sequence
  Description of Artificial Sequence: Synthetic oligonucleotide
aaugccagccagcuggaug

SEQ ID NO: 2353434 - RNA, 19 nt, Artificial Sequence
  Description of Artificial Sequence: Synthetic oligonucleotide
ucugauggaaugaauugaa

SEQ ID NO: 2353435 - RNA, 19 nt, Artificial Sequence
  Description of Artificial Sequence: Synthetic oligonucleotide
aauaauacauuggugccaa

SEQ ID NO: 2353436 - RNA, 19 nt, Artificial Sequence
  Description of Artificial Sequence: Synthetic oligonucleotide
accuaaauucugaacaugg

SEQ ID NO: 2353437 - RNA, 19 nt, Artificial Sequence
  Description of Artificial Sequence: Synthetic oligonucleotide
caugugagcaggaacaauc

SEQ ID NO: 2353438 - RNA, 19 nt, Artificial Sequence
  Description of Artificial Sequence: Synthetic oligonucleotide
ugauauccucugaacagag

SEQ ID NO: 2353439 - RNA, 19 nt, Artificial Sequence
  Description of Artificial Sequence: Synthetic oligonucleotide
cacuaauuaacaugauggc

SEQ ID NO: 2353440 - RNA, 19 nt, Artificial Sequence
  Description of Artificial Sequence: Synthetic oligonucleotide
aagguaagccaauauggau

SEQ ID NO: 2353441 - RNA, 19 nt, Artificial Sequence
  Description of Artificial Sequence: Synthetic oligonucleotide
aaagaaaccguuccucuuu

SEQ ID NO: 2353442 - RNA, 19 nt, Artificial Sequence
  Description of Artificial Sequence: Synthetic oligonucleotide
ucgguaaaauucuggauac

SEQ ID NO: 2353443 - RNA, 19 nt, Artificial Sequence
  Description of Artificial Sequence: Synthetic oligonucleotide
gaagacuguuccuaaugcc

SEQ ID NO: 2353444 - RNA, 19 nt, Artificial Sequence
  Description of Artificial Sequence: Synthetic oligonucleotide
aagagcaacagcgccacag

SEQ ID NO: 2353445 - RNA, 19 nt, Artificial Sequence
  Description of Artificial Sequence: Synthetic oligonucleotide
auagaaugcccgaagcagc

SEQ ID NO: 2353446 - RNA, 19 nt, Artificial Sequence
  Description of Artificial Sequence: Synthetic oligonucleotide
acugaugucaauauaucug

SEQ ID NO: 2353447 - RNA, 19 nt, Artificial Sequence
  Description of Artificial Sequence: Synthetic oligonucleotide
accacuaauuaacaugaug

SEQ ID NO: 2353448 - RNA, 19 nt, Artificial Sequence
  Description of Artificial Sequence: Synthetic oligonucleotide
gacauagaaugcccgaagc

SEQ ID NO: 2353449 - RNA, 19 nt, Artificial Sequence
  Description of Artificial Sequence: Synthetic oligonucleotide
gaaccacuaauuaacauga

SEQ ID NO: 2353450 - RNA, 19 nt, Artificial Sequence
  Description of Artificial Sequence: Synthetic oligonucleotide
cuugaugcauccaggaaug

SEQ ID NO: 2353451 - RNA, 19 nt, Artificial Sequence
  Description of Artificial Sequence: Synthetic oligonucleotide
auguaccuaaauucugaac

SEQ ID NO: 2353452 - RNA, 19 nt, Artificial Sequence
  Description of Artificial Sequence: Synthetic oligonucleotide
aacagcgccacagagacau

SEQ ID NO: 2353453 - RNA, 19 nt, Artificial Sequence
  Description of Artificial Sequence: Synthetic oligonucleotide
ucaauuggagccacggggu

SEQ ID NO: 2353454 - RNA, 19 nt, Artificial Sequence
  Description of Artificial Sequence: Synthetic oligonucleotide
uggggaaucgauaccauuc

SEQ ID NO: 2353455 - RNA, 19 nt, Artificial Sequence
  Description of Artificial Sequence: Synthetic oligonucleotide
uaauuaacaugauggcugu

SEQ ID NO: 2353456 - RNA, 19 nt, Artificial Sequence
  Description of Artificial Sequence: Synthetic oligonucleotide
acuaauuaacaugauggcu

SEQ ID NO: 2353457 - RNA, 19 nt, Artificial Sequence
  Description of Artificial Sequence: Synthetic oligonucleotide
gagagaaugacaagagccc

SEQ ID NO: 2353458 - RNA, 19 nt, Artificial Sequence
  Description of Artificial Sequence: Synthetic oligonucleotide
uauccaaauccacuaagua

SEQ ID NO: 2353459 - RNA, 19 nt, Artificial Sequence
  Description of Artificial Sequence: Synthetic oligonucleotide
ugucaauuggagccacggg

SEQ ID NO: 2353460 - RNA, 19 nt, Artificial Sequence
  Description of Artificial Sequence: Synthetic oligonucleotide
cacaguguaaugcuccagg

SEQ ID NO: 2353461 - RNA, 19 nt, Artificial Sequence
  Description of Artificial Sequence: Synthetic oligonucleotide
acaaagugauaacauuucu

SEQ ID NO: 2353462 - RNA, 19 nt, Artificial Sequence
  Description of Artificial Sequence: Synthetic oligonucleotide
auggaaugaauugaaguug

SEQ ID NO: 2353463 - RNA, 19 nt, Artificial Sequence
  Description of Artificial Sequence: Synthetic oligonucleotide
aaagguaagccaauaugga

SEQ ID NO: 2353464 - RNA, 19 nt, Artificial Sequence
  Description of Artificial Sequence: Synthetic oligonucleotide
aagacuguuccuaaugcca

SEQ ID NO: 2353465 - RNA, 19 nt, Artificial Sequence
  Description of Artificial Sequence: Synthetic oligonucleotide
gucaauauaucuggaaggc

SEQ ID NO: 2353466 - RNA, 19 nt, Artificial Sequence
  Description of Artificial Sequence: Synthetic oligonucleotide
auuaacaugauggcuguca

SEQ ID NO: 2353467 - RNA, 19 nt, Artificial Sequence
  Description of Artificial Sequence: Synthetic oligonucleotide
ucagcagaaccacuaauua

SEQ ID NO: 2353468 - RNA, 19 nt, Artificial Sequence
  Description of Artificial Sequence: Synthetic oligonucleotide
auauggauguaccuaaauu

SEQ ID NO: 2353469 - RNA, 19 nt, Artificial Sequence
  Description of Artificial Sequence: Synthetic oligonucleotide
caagagcccaaacaggaag

SEQ ID NO: 2353470 - RNA, 19 nt, Artificial Sequence
  Description of Artificial Sequence: Synthetic oligonucleotide
uggauguaccuaaauucug

SEQ ID NO: 2353471 - RNA, 19 nt, Artificial Sequence
  Description of Artificial Sequence: Synthetic oligonucleotide
aagaaaccguuccucuuug

SEQ ID NO: 2353472 - RNA, 19 nt, Artificial Sequence
  Description of Artificial Sequence: Synthetic oligonucleotide
auggcauuuacugauguca

SEQ ID NO: 2353473 - RNA, 19 nt, Artificial Sequence
  Description of Artificial Sequence: Synthetic oligonucleotide
aaaagaaaccguuccucuu

SEQ ID NO: 2353474 - RNA, 19 nt, Artificial Sequence
  Description of Artificial Sequence: Synthetic oligonucleotide
auucaugugagcaggaaca

SEQ ID NO: 2353475 - RNA, 19 nt, Artificial Sequence
  Description of Artificial Sequence: Synthetic oligonucleotide
uuggaugaagaaaauuaua

SEQ ID NO: 2353476 - RNA, 19 nt, Artificial Sequence
  Description of Artificial Sequence: Synthetic oligonucleotide
ggaugaauaguuuggcucc

SEQ ID NO: 2353477 - RNA, 19 nt, Artificial Sequence
  Description of Artificial Sequence: Synthetic oligonucleotide
cagaaagagcaacagcgcc

SEQ ID NO: 2353478 - RNA, 19 nt, Artificial Sequence
  Description of Artificial Sequence: Synthetic oligonucleotide
guuaucaggcagaaggaag

SEQ ID NO: 2353479 - RNA, 19 nt, Artificial Sequence
  Description of Artificial Sequence: Synthetic oligonucleotide
aagugauaacauuucugaa

SEQ ID NO: 2353480 - RNA, 19 nt, Artificial Sequence
  Description of Artificial Sequence: Synthetic oligonucleotide
uucacauauaccguauacu

SEQ ID NO: 2353481 - RNA, 19 nt, Artificial Sequence
  Description of Artificial Sequence: Synthetic oligonucleotide
aggaagacuguuccuaaug

SEQ ID NO: 2353482 - RNA, 19 nt, Artificial Sequence
  Description of Artificial Sequence: Synthetic oligonucleotide
uuaacaugauggcugucaa

SEQ ID NO: 2353483 - RNA, 19 nt, Artificial Sequence
  Description of Artificial Sequence: Synthetic oligonucleotide
uaauggcauuuacugaugu

SEQ ID NO: 2353484 - RNA, 19 nt, Artificial Sequence
  Description of Artificial Sequence: Synthetic oligonucleotide
uggucauucaugugagcag

SEQ ID NO: 2353485 - RNA, 19 nt, Artificial Sequence
  Description of Artificial Sequence: Synthetic oligonucleotide
gaugucaauauaucuggaa

SEQ ID NO: 2353486 - RNA, 19 nt, Artificial Sequence
  Description of Artificial Sequence: Synthetic oligonucleotide
ggcgauaucguugaaauac

SEQ ID NO: 2353487 - RNA, 19 nt, Artificial Sequence
  Description of Artificial Sequence: Synthetic oligonucleotide
auaucuggaaggcuccucu

SEQ ID NO: 2353488 - RNA, 19 nt, Artificial Sequence
  Description of Artificial Sequence: Synthetic oligonucleotide
gaugcauccaggaaugguc

SEQ ID NO: 2353489 - RNA, 19 nt, Artificial Sequence
  Description of Artificial Sequence: Synthetic oligonucleotide
guucacauauaccguauac

SEQ ID NO: 2353490 - RNA, 19 nt, Artificial Sequence
  Description of Artificial Sequence: Synthetic oligonucleotide
gaaggggacauagaaugcc

SEQ ID NO: 2353491 - RNA, 19 nt, Artificial Sequence
  Description of Artificial Sequence: Synthetic oligonucleotide
augaauugaaguugccagu

SEQ ID NO: 2353492 - RNA, 19 nt, Artificial Sequence
  Description of Artificial Sequence: Synthetic oligonucleotide
uugguucuggucauucaug

SEQ ID NO: 2353493 - RNA, 19 nt, Artificial Sequence
  Description of Artificial Sequence: Synthetic oligonucleotide
gcagaaggaagcuacuggg

SEQ ID NO: 2353494 - RNA, 19 nt, Artificial Sequence
  Description of Artificial Sequence: Synthetic oligonucleotide
agcccaaacaggaagacug

SEQ ID NO: 2353495 - RNA, 19 nt, Artificial Sequence
  Description of Artificial Sequence: Synthetic oligonucleotide
cuguuggaugaauaguuug

SEQ ID NO: 2353496 - RNA, 19 nt, Artificial Sequence
  Description of Artificial Sequence: Synthetic oligonucleotide
agguaagccaauauggaug

SEQ ID NO: 2353497 - RNA, 19 nt, Artificial Sequence
  Description of Artificial Sequence: Synthetic oligonucleotide
cgagagaaugacaagagcc

SEQ ID NO: 2353498 - RNA, 19 nt, Artificial Sequence
  Description of Artificial Sequence: Synthetic oligonucleotide
augugagcaggaacaaucc

SEQ ID NO: 2353499 - RNA, 19 nt, Artificial Sequence
  Description of Artificial Sequence: Synthetic oligonucleotide
gaacaauccgaguggcaag

SEQ ID NO: 2353500 - RNA, 19 nt, Artificial Sequence
  Description of Artificial Sequence: Synthetic oligonucleotide
gaaugaauugaaguugcca

SEQ ID NO: 2353501 - RNA, 19 nt, Artificial Sequence
  Description of Artificial Sequence: Synthetic oligonucleotide
uugggucuguggcaauucg

SEQ ID NO: 2353502 - RNA, 19 nt, Artificial Sequence
  Description of Artificial Sequence: Synthetic oligonucleotide
ugggucuguggcaauucgg

SEQ ID NO: 2353503 - RNA, 19 nt, Artificial Sequence
  Description of Artificial Sequence: Synthetic oligonucleotide
uuugguagcugaccucuga

SEQ ID NO: 2353504 - RNA, 19 nt, Artificial Sequence
  Description of Artificial Sequence: Synthetic oligonucleotide
gugauaacauuucugaagu

SEQ ID NO: 2353505 - RNA, 19 nt, Artificial Sequence
  Description of Artificial Sequence: Synthetic oligonucleotide
acacaaacauucacaggcc

SEQ ID NO: 2353506 - RNA, 19 nt, Artificial Sequence
  Description of Artificial Sequence: Synthetic oligonucleotide
gacaagagcccaaacagga

SEQ ID NO: 2353507 - RNA, 19 nt, Artificial Sequence
  Description of Artificial Sequence: Synthetic oligonucleotide
uuggaugaauaguuuggcu

SEQ ID NO: 2353508 - RNA, 19 nt, Artificial Sequence
  Description of Artificial Sequence: Synthetic oligonucleotide
cagaaggaagcuacugggg

SEQ ID NO: 2353509 - RNA, 19 nt, Artificial Sequence
  Description of Artificial Sequence: Synthetic oligonucleotide
uuugugagguuggaugaag

SEQ ID NO: 2353510 - RNA, 19 nt, Artificial Sequence
  Description of Artificial Sequence: Synthetic oligonucleotide
ugaauaguuuggcucccga

SEQ ID NO: 2353511 - RNA, 19 nt, Artificial Sequence
  Description of Artificial Sequence: Synthetic oligonucleotide
ugaugucaauauaucugga

SEQ ID NO: 2353512 - RNA, 19 nt, Artificial Sequence
  Description of Artificial Sequence: Synthetic oligonucleotide
auacaaagugauaacauuu

SEQ ID NO: 2353513 - RNA, 19 nt, Artificial Sequence
  Description of Artificial Sequence: Synthetic oligonucleotide
uggauauacugggaaaaga

SEQ ID NO: 2353514 - RNA, 19 nt, Artificial Sequence
  Description of Artificial Sequence: Synthetic oligonucleotide
agaaaauuauaaaccaaau

SEQ ID NO: 2353515 - RNA, 19 nt, Artificial Sequence
  Description of Artificial Sequence: Synthetic oligonucleotide
caguguaaugcuccaggcg

SEQ ID NO: 2353516 - RNA, 19 nt, Artificial Sequence
  Description of Artificial Sequence: Synthetic oligonucleotide
uacuggggaaucgauacca

SEQ ID NO: 2353517 - RNA, 19 nt, Artificial Sequence
  Description of Artificial Sequence: Synthetic oligonucleotide
ucaugguauccaaauccac

SEQ ID NO: 2353518 - RNA, 19 nt, Artificial Sequence
  Description of Artificial Sequence: Synthetic oligonucleotide
ucuguggcaauucgguaaa

SEQ ID NO: 2353519 - RNA, 19 nt, Artificial Sequence
  Description of Artificial Sequence: Synthetic oligonucleotide
aauccgaguggcaaguggu

SEQ ID NO: 2353520 - RNA, 19 nt, Artificial Sequence
  Description of Artificial Sequence: Synthetic oligonucleotide
gguauccaaauccacuaag

SEQ ID NO: 2353521 - RNA, 19 nt, Artificial Sequence
  Description of Artificial Sequence: Synthetic oligonucleotide
guuggaugaauaguuuggc

SEQ ID NO: 2353522 - RNA, 19 nt, Artificial Sequence
  Description of Artificial Sequence: Synthetic oligonucleotide
acugauccgacaggaaggg

SEQ ID NO: 2353523 - RNA, 19 nt, Artificial Sequence
  Description of Artificial Sequence: Synthetic oligonucleotide
uugugagguuggaugaaga

SEQ ID NO: 2353524 - RNA, 19 nt, Artificial Sequence
  Description of Artificial Sequence: Synthetic oligonucleotide
ggaagacuguuccuaaugc

SEQ ID NO: 2353525 - RNA, 19 nt, Artificial Sequence
  Description of Artificial Sequence: Synthetic oligonucleotide
aacaauccgaguggcaagu

SEQ ID NO: 2353526 - RNA, 19 nt, Artificial Sequence
  Description of Artificial Sequence: Synthetic oligonucleotide
ucaauauaucuggaaggcu

SEQ ID NO: 2353527 - RNA, 19 nt, Artificial Sequence
  Description of Artificial Sequence: Synthetic oligonucleotide
auggauguaccuaaauucu

SEQ ID NO: 2353528 - RNA, 19 nt, Artificial Sequence
  Description of Artificial Sequence: Synthetic oligonucleotide
gaugucacaguguaaugcu

SEQ ID NO: 2353529 - RNA, 19 nt, Artificial Sequence
  Description of Artificial Sequence: Synthetic oligonucleotide
ucuguuggaugaauaguuu

SEQ ID NO: 2353530 - RNA, 19 nt, Artificial Sequence
  Description of Artificial Sequence: Synthetic oligonucleotide
accaaauaauacauuggug

SEQ ID NO: 2353531 - RNA, 19 nt, Artificial Sequence
  Description of Artificial Sequence: Synthetic oligonucleotide
caauccgaguggcaagugg

SEQ ID NO: 2353532 - RNA, 19 nt, Artificial Sequence
  Description of Artificial Sequence: Synthetic oligonucleotide
auaccauucuuuucccaca

SEQ ID NO: 2353533 - RNA, 19 nt, Artificial Sequence
  Description of Artificial Sequence: Synthetic oligonucleotide
caaggggcccaugauaucc

SEQ ID NO: 2353534 - RNA, 19 nt, Artificial Sequence
  Description of Artificial Sequence: Synthetic oligonucleotide
ugaacucugauggaaugaa

SEQ ID NO: 2353535 - RNA, 19 nt, Artificial Sequence
  Description of Artificial Sequence: Synthetic oligonucleotide
auugaaguugccaguuauc

SEQ ID NO: 2353536 - RNA, 19 nt, Artificial Sequence
  Description of Artificial Sequence: Synthetic oligonucleotide
uaccauucuuuucccacac

SEQ ID NO: 2353537 - RNA, 19 nt, Artificial Sequence
  Description of Artificial Sequence: Synthetic oligonucleotide
ucgauaccauucuuuuccc

SEQ ID NO: 2353538 - RNA, 19 nt, Artificial Sequence
  Description of Artificial Sequence: Synthetic oligonucleotide
agagcgagagaaugacaag

SEQ ID NO: 2353539 - RNA, 19 nt, Artificial Sequence
  Description of Artificial Sequence: Synthetic oligonucleotide
ugaauugaaguugccaguu

SEQ ID NO: 2353540 - RNA, 19 nt, Artificial Sequence
  Description of Artificial Sequence: Synthetic oligonucleotide
gauguaccuaaauucugaa

SEQ ID NO: 2353541 - RNA, 19 nt, Artificial Sequence
  Description of Artificial Sequence: Synthetic oligonucleotide
gcuacuggggaaucgauac

SEQ ID NO: 2353542 - RNA, 19 nt, Artificial Sequence
  Description of Artificial Sequence: Synthetic oligonucleotide
uguuucucucaugguaucc

SEQ ID NO: 2353543 - RNA, 19 nt, Artificial Sequence
  Description of Artificial Sequence: Synthetic oligonucleotide
cugucaauuggagccacgg

SEQ ID NO: 2353544 - RNA, 19 nt, Artificial Sequence
  Description of Artificial Sequence: Synthetic oligonucleotide
uauacugauccgacaggaa

SEQ ID NO: 2353545 - RNA, 19 nt, Artificial Sequence
  Description of Artificial Sequence: Synthetic oligonucleotide
uaccguauacugauccgac

SEQ ID NO: 2353546 - RNA, 19 nt, Artificial Sequence
  Description of Artificial Sequence: Synthetic oligonucleotide
ucucuguuggaugaauagu

SEQ ID NO: 2353547 - RNA, 19 nt, Artificial Sequence
  Description of Artificial Sequence: Synthetic oligonucleotide
aguggauauacugggaaaa

SEQ ID NO: 2353548 - RNA, 19 nt, Artificial Sequence
  Description of Artificial Sequence: Synthetic oligonucleotide
uggcauuuacugaugucaa

SEQ ID NO: 2353549 - RNA, 19 nt, Artificial Sequence
  Description of Artificial Sequence: Synthetic oligonucleotide
gcaacagcgccacagagac

SEQ ID NO: 2353550 - RNA, 19 nt, Artificial Sequence
  Description of Artificial Sequence: Synthetic oligonucleotide
gagacauauaaguggauau

SEQ ID NO: 2353551 - RNA, 19 nt, Artificial Sequence
  Description of Artificial Sequence: Synthetic oligonucleotide
auuuacugaugucaauaua

SEQ ID NO: 2353552 - RNA, 19 nt, Artificial Sequence
  Description of Artificial Sequence: Synthetic oligonucleotide
agguguuucucucauggua

SEQ ID NO: 2353553 - RNA, 19 nt, Artificial Sequence
  Description of Artificial Sequence: Synthetic oligonucleotide
gagcaacagcgccacagag

SEQ ID NO: 2353554 - RNA, 19 nt, Artificial Sequence
  Description of Artificial Sequence: Synthetic oligonucleotide
auacaaaucaaggggccca

SEQ ID NO: 2353555 - RNA, 19 nt, Artificial Sequence
  Description of Artificial Sequence: Synthetic oligonucleotide
gauaucguugaaauacaaa

SEQ ID NO: 2353556 - RNA, 19 nt, Artificial Sequence
  Description of Artificial Sequence: Synthetic oligonucleotide
cuaaguaauggcauuuacu

SEQ ID NO: 2353557 - RNA, 19 nt, Artificial Sequence
  Description of Artificial Sequence: Synthetic oligonucleotide
ggucauucaugugagcagg

SEQ ID NO: 2353558 - RNA, 19 nt, Artificial Sequence
  Description of Artificial Sequence: Synthetic oligonucleotide
gagcgagagaaugacaaga

SEQ ID NO: 2353559 - RNA, 19 nt, Artificial Sequence
  Description of Artificial Sequence: Synthetic oligonucleotide
gaugaauaguuuggcuccc

SEQ ID NO: 2353560 - RNA, 19 nt, Artificial Sequence
  Description of Artificial Sequence: Synthetic oligonucleotide
cugggaaaagaaaccguuc

SEQ ID NO: 2353561 - RNA, 19 nt, Artificial Sequence
  Description of Artificial Sequence: Synthetic oligonucleotide
aagugcagaaagagcaaca

SEQ ID NO: 2353562 - RNA, 19 nt, Artificial Sequence
  Description of Artificial Sequence: Synthetic oligonucleotide
agagaaugacaagagccca

SEQ ID NO: 2353563 - RNA, 19 nt, Artificial Sequence
  Description of Artificial Sequence: Synthetic oligonucleotide
agaaagagcaacagcgcca

SEQ ID NO: 2353564 - RNA, 19 nt, Artificial Sequence
  Description of Artificial Sequence: Synthetic oligonucleotide
ucuugguucuggucauuca

SEQ ID NO: 2353565 - RNA, 19 nt, Artificial Sequence
  Description of Artificial Sequence: Synthetic oligonucleotide
agagacauauaaguggaua

SEQ ID NO: 2353566 - RNA, 19 nt, Artificial Sequence
  Description of Artificial Sequence: Synthetic oligonucleotide
agcgagagaaugacaagag

SEQ ID NO: 2353567 - RNA, 19 nt, Artificial Sequence
  Description of Artificial Sequence: Synthetic oligonucleotide
agagcccaaacaggaagac

SEQ ID NO: 2353568 - RNA, 19 nt, Artificial Sequence
  Description of Artificial Sequence: Synthetic oligonucleotide
uugguagcugaccucugaa

SEQ ID NO: 2353569 - RNA, 19 nt, Artificial Sequence
  Description of Artificial Sequence: Synthetic oligonucleotide
ugguauccaaauccacuaa

SEQ ID NO: 2353570 - RNA, 19 nt, Artificial Sequence
  Description of Artificial Sequence: Synthetic oligonucleotide
aauuggagccacggggugu

SEQ ID NO: 2353571 - RNA, 19 nt, Artificial Sequence
  Description of Artificial Sequence: Synthetic oligonucleotide
caaaucaaggggcccauga

SEQ ID NO: 2353572 - RNA, 19 nt, Artificial Sequence
  Description of Artificial Sequence: Synthetic oligonucleotide
gaaugacaagagcccaaac

SEQ ID NO: 2353573 - RNA, 19 nt, Artificial Sequence
  Description of Artificial Sequence: Synthetic oligonucleotide
gacuguuccuaaugccagc

SEQ ID NO: 2353574 - RNA, 19 nt, Artificial Sequence
  Description of Artificial Sequence: Synthetic oligonucleotide
uugcuaaccuccacuuuuc

SEQ ID NO: 2353575 - RNA, 19 nt, Artificial Sequence
  Description of Artificial Sequence: Synthetic oligonucleotide
auaccguauacugauccga

SEQ ID NO: 2353576 - RNA, 19 nt, Artificial Sequence
  Description of Artificial Sequence: Synthetic oligonucleotide
agacuguuccuaaugccag

SEQ ID NO: 2353577 - RNA, 19 nt, Artificial Sequence
  Description of Artificial Sequence: Synthetic oligonucleotide
gaccuugaugcauccagga

SEQ ID NO: 2353578 - RNA, 19 nt, Artificial Sequence
  Description of Artificial Sequence: Synthetic oligonucleotide
guggauauacugggaaaag

SEQ ID NO: 2353579 - RNA, 19 nt, Artificial Sequence
  Description of Artificial Sequence: Synthetic oligonucleotide
caggaauggucugugggcc

SEQ ID NO: 2353580 - RNA, 19 nt, Artificial Sequence
  Description of Artificial Sequence: Synthetic oligonucleotide
guagcugaccucugaacuc

SEQ ID NO: 2353581 - RNA, 19 nt, Artificial Sequence
  Description of Artificial Sequence: Synthetic oligonucleotide
uuccuaaugccagccagcu

SEQ ID NO: 2353582 - RNA, 19 nt, Artificial Sequence
  Description of Artificial Sequence: Synthetic oligonucleotide
ugaugcauccaggaauggu

SEQ ID NO: 2353583 - RNA, 19 nt, Artificial Sequence
  Description of Artificial Sequence: Synthetic oligonucleotide
agccaauauggauguaccu

SEQ ID NO: 2353584 - RNA, 19 nt, Artificial Sequence
  Description of Artificial Sequence: Synthetic oligonucleotide
ugguagcugaccucugaac

SEQ ID NO: 2353585 - RNA, 19 nt, Artificial Sequence
  Description of Artificial Sequence: Synthetic oligonucleotide
gaaucgauaccauucuuuu

SEQ ID NO: 2353586 - RNA, 19 nt, Artificial Sequence
  Description of Artificial Sequence: Synthetic oligonucleotide
ggacauagaaugcccgaag

SEQ ID NO: 2353587 - RNA, 19 nt, Artificial Sequence
  Description of Artificial Sequence: Synthetic oligonucleotide
gucuguggcaauucgguaa

SEQ ID NO: 2353588 - RNA, 19 nt, Artificial Sequence
  Description of Artificial Sequence: Synthetic oligonucleotide
aucaaggggcccaugauau

SEQ ID NO: 2353589 - RNA, 19 nt, Artificial Sequence
  Description of Artificial Sequence: Synthetic oligonucleotide
uucucucaugguauccaaa

SEQ ID NO: 2353590 - RNA, 19 nt, Artificial Sequence
  Description of Artificial Sequence: Synthetic oligonucleotide
cuggucauucaugugagca

SEQ ID NO: 2353591 - RNA, 19 nt, Artificial Sequence
  Description of Artificial Sequence: Synthetic oligonucleotide
uccgaguggcaaguggucc

SEQ ID NO: 2353592 - RNA, 19 nt, Artificial Sequence
  Description of Artificial Sequence: Synthetic oligonucleotide
gaagcuacuggggaaucga

SEQ ID NO: 2353593 - RNA, 19 nt, Artificial Sequence
  Description of Artificial Sequence: Synthetic oligonucleotide
cauauaccguauacugauc

SEQ ID NO: 2353594 - RNA, 19 nt, Artificial Sequence
  Description of Artificial Sequence: Synthetic oligonucleotide
cgagguguuucucucaugg

SEQ ID NO: 2353595 - RNA, 19 nt, Artificial Sequence
  Description of Artificial Sequence: Synthetic oligonucleotide
ugcuuugcuuuccggggcu

SEQ ID NO: 2353596 - RNA, 19 nt, Artificial Sequence
  Description of Artificial Sequence: Synthetic oligonucleotide
caugguauccaaauccacu

SEQ ID NO: 2353597 - RNA, 19 nt, Artificial Sequence
  Description of Artificial Sequence: Synthetic oligonucleotide
ggaaaagaaaccguuccuc

SEQ ID NO: 2353598 - RNA, 19 nt, Artificial Sequence
  Description of Artificial Sequence: Synthetic oligonucleotide
ccguauacugauccgacag

SEQ ID NO: 2353599 - RNA, 19 nt, Artificial Sequence
  Description of Artificial Sequence: Synthetic oligonucleotide
ggauauacugggaaaagaa

SEQ ID NO: 2353600 - RNA, 19 nt, Artificial Sequence
  Description of Artificial Sequence: Synthetic oligonucleotide
aguuaucaggcagaaggaa

SEQ ID NO: 2353601 - RNA, 19 nt, Artificial Sequence
  Description of Artificial Sequence: Synthetic oligonucleotide
gugagcaggaacaauccga

SEQ ID NO: 2353602 - RNA, 19 nt, Artificial Sequence
  Description of Artificial Sequence: Synthetic oligonucleotide
guaauggcauuuacugaug

SEQ ID NO: 2353603 - RNA, 19 nt, Artificial Sequence
  Description of Artificial Sequence: Synthetic oligonucleotide
ucuggucauucaugugagc

SEQ ID NO: 2353604 - RNA, 19 nt, Artificial Sequence
  Description of Artificial Sequence: Synthetic oligonucleotide
uaaugcuccaggcgauauc

SEQ ID NO: 2353605 - RNA, 19 nt, Artificial Sequence
  Description of Artificial Sequence: Synthetic oligonucleotide
uugaugcauccaggaaugg

SEQ ID NO: 2353606 - RNA, 19 nt, Artificial Sequence
  Description of Artificial Sequence: Synthetic oligonucleotide
acugggaaaagaaaccguu

SEQ ID NO: 2353607 - RNA, 19 nt, Artificial Sequence
  Description of Artificial Sequence: Synthetic oligonucleotide
augaauaguuuggcucccg

SEQ ID NO: 2353608 - RNA, 19 nt, Artificial Sequence
  Description of Artificial Sequence: Synthetic oligonucleotide
ugcuaaccuccacuuuucu

SEQ ID NO: 2353609 - RNA, 19 nt, Artificial Sequence
  Description of Artificial Sequence: Synthetic oligonucleotide
cuacuggggaaucgauacc

SEQ ID NO: 2353610 - RNA, 19 nt, Artificial Sequence
  Description of Artificial Sequence: Synthetic oligonucleotide
cucucaugguauccaaauc

SEQ ID NO: 2353611 - RNA, 19 nt, Artificial Sequence
  Description of Artificial Sequence: Synthetic oligonucleotide
uaucaggcagaaggaagcu

SEQ ID NO: 2353612 - RNA, 19 nt, Artificial Sequence
  Description of Artificial Sequence: Synthetic oligonucleotide
agacauauaaguggauaua

SEQ ID NO: 2353613 - RNA, 19 nt, Artificial Sequence
  Description of Artificial Sequence: Synthetic oligonucleotide
accguauacugauccgaca

SEQ ID NO: 2353614 - RNA, 19 nt, Artificial Sequence
  Description of Artificial Sequence: Synthetic oligonucleotide
cucugauggaaugaauuga

SEQ ID NO: 2353615 - RNA, 19 nt, Artificial Sequence
  Description of Artificial Sequence: Synthetic oligonucleotide
aggggacauagaaugcccg

SEQ ID NO: 2353616 - RNA, 19 nt, Artificial Sequence
  Description of Artificial Sequence: Synthetic oligonucleotide
guuccuaaugccagccagc

SEQ ID NO: 2353617 - RNA, 19 nt, Artificial Sequence
  Description of Artificial Sequence: Synthetic oligonucleotide
uguugcuaaccuccacuuu

SEQ ID NO: 2353618 - RNA, 19 nt, Artificial Sequence
  Description of Artificial Sequence: Synthetic oligonucleotide
uucaugugagcaggaacaa

SEQ ID NO: 2353619 - RNA, 19 nt, Artificial Sequence
  Description of Artificial Sequence: Synthetic oligonucleotide
gguguaguucacauauacc

SEQ ID NO: 2353620 - RNA, 19 nt, Artificial Sequence
  Description of Artificial Sequence: Synthetic oligonucleotide
ccaggaauggucugugggc

SEQ ID NO: 2353621 - RNA, 19 nt, Artificial Sequence
  Description of Artificial Sequence: Synthetic oligonucleotide
uccuaaugccagccagcug

SEQ ID NO: 2353622 - RNA, 19 nt, Artificial Sequence
  Description of Artificial Sequence: Synthetic oligonucleotide
uauaucuggaaggcuccuc

SEQ ID NO: 2353623 - RNA, 19 nt, Artificial Sequence
  Description of Artificial Sequence: Synthetic oligonucleotide
ccacagagacauauaagug

SEQ ID NO: 2353624 - RNA, 19 nt, Artificial Sequence
  Description of Artificial Sequence: Synthetic oligonucleotide
guugcuaaccuccacuuuu

SEQ ID NO: 2353625 - RNA, 19 nt, Artificial Sequence
  Description of Artificial Sequence: Synthetic oligonucleotide
gcccgaagcagcuuugaag

SEQ ID NO: 2353626 - RNA, 19 nt, Artificial Sequence
  Description of Artificial Sequence: Synthetic oligonucleotide
aaugcccgaagcagcuuug

SEQ ID NO: 2353627 - RNA, 19 nt, Artificial Sequence
  Description of Artificial Sequence: Synthetic oligonucleotide
aguggucccucugcaaaag

SEQ ID NO: 2353628 - RNA, 19 nt, Artificial Sequence
  Description of Artificial Sequence: Synthetic oligonucleotide
guuucucucaugguaucca

SEQ ID NO: 2353629 - RNA, 19 nt, Artificial Sequence
  Description of Artificial Sequence: Synthetic oligonucleotide
gguaagccaauauggaugu

SEQ ID NO: 2353630 - RNA, 19 nt, Artificial Sequence
  Description of Artificial Sequence: Synthetic oligonucleotide
gaagucagcucagcagaac

SEQ ID NO: 2353631 - RNA, 19 nt, Artificial Sequence
  Description of Artificial Sequence: Synthetic oligonucleotide
caauuggagccacggggug

SEQ ID NO: 2353632 - RNA, 19 nt, Artificial Sequence
  Description of Artificial Sequence: Synthetic oligonucleotide
gaaggcuccucuugguucu

SEQ ID NO: 2353633 - RNA, 19 nt, Artificial Sequence
  Description of Artificial Sequence: Synthetic oligonucleotide
cccgaagcagcuuugaaga

SEQ ID NO: 2353634 - RNA, 19 nt, Artificial Sequence
  Description of Artificial Sequence: Synthetic oligonucleotide
ggauguaccuaaauucuga

SEQ ID NO: 2353635 - RNA, 19 nt, Artificial Sequence
  Description of Artificial Sequence: Synthetic oligonucleotide
auccacuaaguaauggcau

SEQ ID NO: 2353636 - RNA, 19 nt, Artificial Sequence
  Description of Artificial Sequence: Synthetic oligonucleotide
cauuuacugaugucaauau

SEQ ID NO: 2353637 - RNA, 19 nt, Artificial Sequence
  Description of Artificial Sequence: Synthetic oligonucleotide
agaaaccguuccucuuugu

SEQ ID NO: 2353638 - RNA, 19 nt, Artificial Sequence
  Description of Artificial Sequence: Synthetic oligonucleotide
gucacaguguaaugcucca

SEQ ID NO: 2353639 - RNA, 19 nt, Artificial Sequence
  Description of Artificial Sequence: Synthetic oligonucleotide
cauucacaggccugccuuc

SEQ ID NO: 2353640 - RNA, 19 nt, Artificial Sequence
  Description of Artificial Sequence: Synthetic oligonucleotide
cagcagaaccacuaauuaa

SEQ ID NO: 2353641 - RNA, 19 nt, Artificial Sequence
  Description of Artificial Sequence: Synthetic oligonucleotide
cagagccacagagcgagag

SEQ ID NO: 2353642 - RNA, 19 nt, Artificial Sequence
  Description of Artificial Sequence: Synthetic oligonucleotide
cuucaggaugguguaguuc

SEQ ID NO: 2353643 - RNA, 19 nt, Artificial Sequence
  Description of Artificial Sequence: Synthetic oligonucleotide
guaccuaaauucugaacau

SEQ ID NO: 2353644 - RNA, 19 nt, Artificial Sequence
  Description of Artificial Sequence: Synthetic oligonucleotide
cucuguuggaugaauaguu

SEQ ID NO: 2353645 - RNA, 19 nt, Artificial Sequence
  Description of Artificial Sequence: Synthetic oligonucleotide
gcgagagaaugacaagagc

SEQ ID NO: 2353646 - RNA, 19 nt, Artificial Sequence
  Description of Artificial Sequence: Synthetic oligonucleotide
cuccaggcgauaucguuga

SEQ ID NO: 2353647 - RNA, 19 nt, Artificial Sequence
  Description of Artificial Sequence: Synthetic oligonucleotide
ggugccaaagguaagccaa

SEQ ID NO: 2353648 - RNA, 19 nt, Artificial Sequence
  Description of Artificial Sequence: Synthetic oligonucleotide
accucugaacucugaugga

SEQ ID NO: 2353649 - RNA, 19 nt, Artificial Sequence
  Description of Artificial Sequence: Synthetic oligonucleotide
auauaucuggaaggcuccu

SEQ ID NO: 2353650 - RNA, 19 nt, Artificial Sequence
  Description of Artificial Sequence: Synthetic oligonucleotide
guauccaaauccacuaagu

SEQ ID NO: 2353651 - RNA, 19 nt, Artificial Sequence
  Description of Artificial Sequence: Synthetic oligonucleotide
cuuugguagcugaccucug

SEQ ID NO: 2353652 - RNA, 19 nt, Artificial Sequence
  Description of Artificial Sequence: Synthetic oligonucleotide
caggcgauaucguugaaau

SEQ ID NO: 2353653 - RNA, 19 nt, Artificial Sequence
  Description of Artificial Sequence: Synthetic oligonucleotide
ggaagcuacuggggaaucg

SEQ ID NO: 2353654 - RNA, 19 nt, Artificial Sequence
  Description of Artificial Sequence: Synthetic oligonucleotide
gagaaugacaagagcccaa

SEQ ID NO: 2353655 - RNA, 19 nt, Artificial Sequence
  Description of Artificial Sequence: Synthetic oligonucleotide
accauucuuuucccacaca

SEQ ID NO: 2353656 - RNA, 19 nt, Artificial Sequence
  Description of Artificial Sequence: Synthetic oligonucleotide
ucaugugagcaggaacaau

SEQ ID NO: 2353657 - RNA, 19 nt, Artificial Sequence
  Description of Artificial Sequence: Synthetic oligonucleotide
uacaaaucaaggggcccau

SEQ ID NO: 2353658 - RNA, 19 nt, Artificial Sequence
  Description of Artificial Sequence: Synthetic oligonucleotide
caaaaggcuuugguagcug

SEQ ID NO: 2353659 - RNA, 19 nt, Artificial Sequence
  Description of Artificial Sequence: Synthetic oligonucleotide
aguugccaguuaucaggca

SEQ ID NO: 2353660 - RNA, 19 nt, Artificial Sequence
  Description of Artificial Sequence: Synthetic oligonucleotide
cccaugauauccucugaac

SEQ ID NO: 2353661 - RNA, 19 nt, Artificial Sequence
  Description of Artificial Sequence: Synthetic oligonucleotide
agcucagcagaaccacuaa

SEQ ID NO: 2353662 - RNA, 19 nt, Artificial Sequence
  Description of Artificial Sequence: Synthetic oligonucleotide
cugaacucugauggaauga

SEQ ID NO: 2353663 - RNA, 19 nt, Artificial Sequence
  Description of Artificial Sequence: Synthetic oligonucleotide
guggcaauucgguaaaauu

SEQ ID NO: 2353664 - RNA, 19 nt, Artificial Sequence
  Description of Artificial Sequence: Synthetic oligonucleotide
auccgaguggcaagugguc

SEQ ID NO: 2353665 - RNA, 19 nt, Artificial Sequence
  Description of Artificial Sequence: Synthetic oligonucleotide
ucccgagguguuucucuca

SEQ ID NO: 2353666 - RNA, 19 nt, Artificial Sequence
  Description of Artificial Sequence: Synthetic oligonucleotide
cucuugguucuggucauuc

SEQ ID NO: 2353667 - RNA, 19 nt, Artificial Sequence
  Description of Artificial Sequence: Synthetic oligonucleotide
ugcccgaagcagcuuugaa

SEQ ID NO: 2353668 - RNA, 19 nt, Artificial Sequence
  Description of Artificial Sequence: Synthetic oligonucleotide
gcauuuacugaugucaaua

SEQ ID NO: 2353669 - RNA, 19 nt, Artificial Sequence
  Description of Artificial Sequence: Synthetic oligonucleotide
gggcccaugauauccucug

SEQ ID NO: 2353670 - RNA, 19 nt, Artificial Sequence
  Description of Artificial Sequence: Synthetic oligonucleotide
ggcaauucgguaaaauucu

SEQ ID NO: 2353671 - RNA, 19 nt, Artificial Sequence
  Description of Artificial Sequence: Synthetic oligonucleotide
ccaaauccacuaaguaaug

SEQ ID NO: 2353672 - RNA, 19 nt, Artificial Sequence
  Description of Artificial Sequence: Synthetic oligonucleotide
caauauggauguaccuaaa

SEQ ID NO: 2353673 - RNA, 19 nt, Artificial Sequence
  Description of Artificial Sequence: Synthetic oligonucleotide
ggaaggggacauagaaugc

SEQ ID NO: 2353674 - RNA, 19 nt, Artificial Sequence
  Description of Artificial Sequence: Synthetic oligonucleotide
aaggggcccaugauauccu

SEQ ID NO: 2353675 - RNA, 19 nt, Artificial Sequence
  Description of Artificial Sequence: Synthetic oligonucleotide
ccuaaauucugaacaugga

SEQ ID NO: 2353676 - RNA, 19 nt, Artificial Sequence
  Description of Artificial Sequence: Synthetic oligonucleotide
cguauacugauccgacagg

SEQ ID NO: 2353677 - RNA, 19 nt, Artificial Sequence
  Description of Artificial Sequence: Synthetic oligonucleotide
agccacgggguguugcuaa

SEQ ID NO: 2353678 - RNA, 19 nt, Artificial Sequence
  Description of Artificial Sequence: Synthetic oligonucleotide
uuggcucccgagguguuuc

SEQ ID NO: 2353679 - RNA, 19 nt, Artificial Sequence
  Description of Artificial Sequence: Synthetic oligonucleotide
ggcugauccauucuucucu

SEQ ID NO: 2353680 - RNA, 19 nt, Artificial Sequence
  Description of Artificial Sequence: Synthetic oligonucleotide
cuugguucuggucauucau

SEQ ID NO: 2353681 - RNA, 19 nt, Artificial Sequence
  Description of Artificial Sequence: Synthetic oligonucleotide
uggagccacgggguguugc

SEQ ID NO: 2353682 - RNA, 19 nt, Artificial Sequence
  Description of Artificial Sequence: Synthetic oligonucleotide
auaauacauuggugccaaa

SEQ ID NO: 2353683 - RNA, 19 nt, Artificial Sequence
  Description of Artificial Sequence: Synthetic oligonucleotide
gaaugcccgaagcagcuuu

SEQ ID NO: 2353684 - RNA, 19 nt, Artificial Sequence
  Description of Artificial Sequence: Synthetic oligonucleotide
acaaaucaaggggcccaug

SEQ ID NO: 2353685 - RNA, 19 nt, Artificial Sequence
  Description of Artificial Sequence: Synthetic oligonucleotide
cacaaacauucacaggccu

SEQ ID NO: 2353686 - RNA, 19 nt, Artificial Sequence
  Description of Artificial Sequence: Synthetic oligonucleotide
gcaauucgguaaaauucug

SEQ ID NO: 2353687 - RNA, 19 nt, Artificial Sequence
  Description of Artificial Sequence: Synthetic oligonucleotide
cugauccgacaggaagggg

SEQ ID NO: 2353688 - RNA, 19 nt, Artificial Sequence
  Description of Artificial Sequence: Synthetic oligonucleotide
gcuccaggcgauaucguug

SEQ ID NO: 2353689 - RNA, 19 nt, Artificial Sequence
  Description of Artificial Sequence: Synthetic oligonucleotide
cucugaacagagccacaga

SEQ ID NO: 2353690 - RNA, 19 nt, Artificial Sequence
  Description of Artificial Sequence: Synthetic oligonucleotide
gccaauauggauguaccua

SEQ ID NO: 2353691 - RNA, 19 nt, Artificial Sequence
  Description of Artificial Sequence: Synthetic oligonucleotide
aggcgauaucguugaaaua

SEQ ID NO: 2353692 - RNA, 19 nt, Artificial Sequence
  Description of Artificial Sequence: Synthetic oligonucleotide
cucugcaaaaggcuuuggu

SEQ ID NO: 2353693 - RNA, 19 nt, Artificial Sequence
  Description of Artificial Sequence: Synthetic oligonucleotide
gggaaaagaaaccguuccu

SEQ ID NO: 2353694 - RNA, 19 nt, Artificial Sequence
  Description of Artificial Sequence: Synthetic oligonucleotide
ggggacauagaaugcccga

SEQ ID NO: 2353695 - RNA, 19 nt, Artificial Sequence
  Description of Artificial Sequence: Synthetic oligonucleotide
ccgaguggcaagugguccc

SEQ ID NO: 2353696 - RNA, 19 nt, Artificial Sequence
  Description of Artificial Sequence: Synthetic oligonucleotide
cagcucagcagaaccacua

SEQ ID NO: 2353697 - RNA, 19 nt, Artificial Sequence
  Description of Artificial Sequence: Synthetic oligonucleotide
ugggccaggcugauccauu

SEQ ID NO: 2353698 - RNA, 19 nt, Artificial Sequence
  Description of Artificial Sequence: Synthetic oligonucleotide
uguggaugguugggucugu

SEQ ID NO: 2353699 - RNA, 19 nt, Artificial Sequence
  Description of Artificial Sequence: Synthetic oligonucleotide
aucaggcagaaggaagcua

SEQ ID NO: 2353700 - RNA, 19 nt, Artificial Sequence
  Description of Artificial Sequence: Synthetic oligonucleotide
gguguuucucucaugguau

SEQ ID NO: 2353701 - RNA, 19 nt, Artificial Sequence
  Description of Artificial Sequence: Synthetic oligonucleotide
cuguuccuaaugccagcca

SEQ ID NO: 2353702 - RNA, 19 nt, Artificial Sequence
  Description of Artificial Sequence: Synthetic oligonucleotide
agcuacuggggaaucgaua

SEQ ID NO: 2353703 - RNA, 19 nt, Artificial Sequence
  Description of Artificial Sequence: Synthetic oligonucleotide
gcgccacagagacauauaa

SEQ ID NO: 2353704 - RNA, 19 nt, Artificial Sequence
  Description of Artificial Sequence: Synthetic oligonucleotide
ggggaaucgauaccauucu

SEQ ID NO: 2353705 - RNA, 19 nt, Artificial Sequence
  Description of Artificial Sequence: Synthetic oligonucleotide
ccuugaugcauccaggaau

SEQ ID NO: 2353706 - RNA, 19 nt, Artificial Sequence
  Description of Artificial Sequence: Synthetic oligonucleotide
cacuaaguaauggcauuua

SEQ ID NO: 2353707 - RNA, 19 nt, Artificial Sequence
  Description of Artificial Sequence: Synthetic oligonucleotide
gcgauaucguugaaauaca

SEQ ID NO: 2353708 - RNA, 19 nt, Artificial Sequence
  Description of Artificial Sequence: Synthetic oligonucleotide
gcccaugauauccucugaa

SEQ ID NO: 2353709 - RNA, 19 nt, Artificial Sequence
  Description of Artificial Sequence: Synthetic oligonucleotide
gcuuugguagcugaccucu

SEQ ID NO: 2353710 - RNA, 19 nt, Artificial Sequence
  Description of Artificial Sequence: Synthetic oligonucleotide
ggcuuugguagcugaccuc

SEQ ID NO: 2353711 - RNA, 19 nt, Artificial Sequence
  Description of Artificial Sequence: Synthetic oligonucleotide
ggaaucgauaccauucuuu

SEQ ID NO: 2353712 - RNA, 19 nt, Artificial Sequence
  Description of Artificial Sequence: Synthetic oligonucleotide
uccaggcgauaucguugaa

SEQ ID NO: 2353713 - RNA, 19 nt, Artificial Sequence
  Description of Artificial Sequence: Synthetic oligonucleotide
acuggggaaucgauaccau

SEQ ID NO: 2353714 - RNA, 19 nt, Artificial Sequence
  Description of Artificial Sequence: Synthetic oligonucleotide
gcugucaauuggagccacg

SEQ ID NO: 2353715 - RNA, 19 nt, Artificial Sequence
  Description of Artificial Sequence: Synthetic oligonucleotide
gaacucugauggaaugaau

SEQ ID NO: 2353716 - RNA, 19 nt, Artificial Sequence
  Description of Artificial Sequence: Synthetic oligonucleotide
gggacauagaaugcccgaa

SEQ ID NO: 2353717 - RNA, 19 nt, Artificial Sequence
  Description of Artificial Sequence: Synthetic oligonucleotide
gagcaggaacaauccgagu

SEQ ID NO: 2353718 - RNA, 19 nt, Artificial Sequence
  Description of Artificial Sequence: Synthetic oligonucleotide
gagcccaaacaggaagacu

SEQ ID NO: 2353719 - RNA, 19 nt, Artificial Sequence
  Description of Artificial Sequence: Synthetic oligonucleotide
ccgaagcagcuuugaagac

SEQ ID NO: 2353720 - RNA, 19 nt, Artificial Sequence
  Description of Artificial Sequence: Synthetic oligonucleotide
guaaugcuccaggcgauau

SEQ ID NO: 2353721 - RNA, 19 nt, Artificial Sequence
  Description of Artificial Sequence: Synthetic oligonucleotide
cacgggguguugcuaaccu

SEQ ID NO: 2353722 - RNA, 19 nt, Artificial Sequence
  Description of Artificial Sequence: Synthetic oligonucleotide
ggguguugcuaaccuccac

SEQ ID NO: 2353723 - RNA, 19 nt, Artificial Sequence
  Description of Artificial Sequence: Synthetic oligonucleotide
agaaugcccgaagcagcuu

SEQ ID NO: 2353724 - RNA, 19 nt, Artificial Sequence
  Description of Artificial Sequence: Synthetic oligonucleotide
ugguugggucuguggcaau

SEQ ID NO: 2353725 - RNA, 19 nt, Artificial Sequence
  Description of Artificial Sequence: Synthetic oligonucleotide
augguguaguucacauaua

SEQ ID NO: 2353726 - RNA, 19 nt, Artificial Sequence
  Description of Artificial Sequence: Synthetic oligonucleotide
gccaaagguaagccaauau

SEQ ID NO: 2353727 - RNA, 19 nt, Artificial Sequence
  Description of Artificial Sequence: Synthetic oligonucleotide
ggucccucugcaaaaggcu

SEQ ID NO: 2353728 - RNA, 19 nt, Artificial Sequence
  Description of Artificial Sequence: Synthetic oligonucleotide
agcgccacagagacauaua

SEQ ID NO: 2353729 - RNA, 19 nt, Artificial Sequence
  Description of Artificial Sequence: Synthetic oligonucleotide
uuggagccacgggguguug

SEQ ID NO: 2353730 - RNA, 19 nt, Artificial Sequence
  Description of Artificial Sequence: Synthetic oligonucleotide
ggcccaugauauccucuga

SEQ ID NO: 2353731 - RNA, 19 nt, Artificial Sequence
  Description of Artificial Sequence: Synthetic oligonucleotide
ggcugucaauuggagccac

SEQ ID NO: 2353732 - RNA, 19 nt, Artificial Sequence
  Description of Artificial Sequence: Synthetic oligonucleotide
caggaagacuguuccuaau

SEQ ID NO: 2353733 - RNA, 19 nt, Artificial Sequence
  Description of Artificial Sequence: Synthetic oligonucleotide
gaguggcaaguggucccuc

SEQ ID NO: 2353734 - RNA, 19 nt, Artificial Sequence
  Description of Artificial Sequence: Synthetic oligonucleotide
cuggggaaucgauaccauu

SEQ ID NO: 2353735 - RNA, 19 nt, Artificial Sequence
  Description of Artificial Sequence: Synthetic oligonucleotide
agccacagagcgagagaau

SEQ ID NO: 2353736 - RNA, 19 nt, Artificial Sequence
  Description of Artificial Sequence: Synthetic oligonucleotide
ccucugcaaaaggcuuugg

SEQ ID NO: 2353737 - RNA, 19 nt, Artificial Sequence
  Description of Artificial Sequence: Synthetic oligonucleotide
gcucccgagguguuucucu

SEQ ID NO: 2353738 - RNA, 19 nt, Artificial Sequence
  Description of Artificial Sequence: Synthetic oligonucleotide
gucccucugcaaaaggcuu

SEQ ID NO: 2353739 - RNA, 19 nt, Artificial Sequence
  Description of Artificial Sequence: Synthetic oligonucleotide
ggagccacgggguguugcu

SEQ ID NO: 2353740 - RNA, 19 nt, Artificial Sequence
  Description of Artificial Sequence: Synthetic oligonucleotide
gccacgggguguugcuaac

SEQ ID NO: 2353741 - RNA, 19 nt, Artificial Sequence
  Description of Artificial Sequence: Synthetic oligonucleotide
gcauccaggaauggucugu

SEQ ID NO: 2353742 - RNA, 19 nt, Artificial Sequence
  Description of Artificial Sequence: Synthetic oligonucleotide
guaagccaauauggaugua

SEQ ID NO: 2353743 - RNA, 19 nt, Artificial Sequence
  Description of Artificial Sequence: Synthetic oligonucleotide
ccaggcgauaucguugaaa

SEQ ID NO: 2353744 - RNA, 19 nt, Artificial Sequence
  Description of Artificial Sequence: Synthetic oligonucleotide
gugccaaagguaagccaau

SEQ ID NO: 2353745 - RNA, 19 nt, Artificial Sequence
  Description of Artificial Sequence: Synthetic oligonucleotide
gagccacgggguguugcua

SEQ ID NO: 2353746 - RNA, 19 nt, Artificial Sequence
  Description of Artificial Sequence: Synthetic oligonucleotide
gcuggaugucacaguguaa

SEQ ID NO: 2353747 - RNA, 19 nt, Artificial Sequence
  Description of Artificial Sequence: Synthetic oligonucleotide
ccacuaaguaauggcauuu

SEQ ID NO: 2353748 - RNA, 19 nt, Artificial Sequence
  Description of Artificial Sequence: Synthetic oligonucleotide
gugggccaggcugauccau

SEQ ID NO: 2353749 - RNA, 19 nt, Artificial Sequence
  Description of Artificial Sequence: Synthetic oligonucleotide
gguugggucuguggcaauu

SEQ ID NO: 2353750 - RNA, 19 nt, Artificial Sequence
  Description of Artificial Sequence: Synthetic oligonucleotide
ccguuccucuuugugaggu

SEQ ID NO: 2353751 - RNA, 19 nt, Artificial Sequence
  Description of Artificial Sequence: Synthetic oligonucleotide
ggggcccaugauauccucu

SEQ ID NO: 2353752 - RNA, 19 nt, Artificial Sequence
  Description of Artificial Sequence: Synthetic oligonucleotide
cccgagguguuucucucau

SEQ ID NO: 2353753 - RNA, 19 nt, Artificial Sequence
  Description of Artificial Sequence: Synthetic oligonucleotide
ccggggcuucaggauggug

SEQ ID NO: 2353754 - RNA, 19 nt, Artificial Sequence
  Description of Artificial Sequence: Synthetic oligonucleotide
cugggacaguguggauggu

SEQ ID NO: 2353755 - RNA, 19 nt, Artificial Sequence
  Description of Artificial Sequence: Synthetic oligonucleotide
ccgacaggaaggggacaua

SEQ ID NO: 2353756 - RNA, 19 nt, Artificial Sequence
  Description of Artificial Sequence: Synthetic oligonucleotide
cgaguggcaaguggucccu

SEQ ID NO: 2353757 - RNA, 19 nt, Artificial Sequence
  Description of Artificial Sequence: Synthetic oligonucleotide
aaugaaggacaucagcccc

SEQ ID NO: 2353758 - RNA, 19 nt, Artificial Sequence
  Description of Artificial Sequence: Synthetic oligonucleotide
uuaaugaaggacaucagcc

SEQ ID NO: 2353759 - RNA, 19 nt, Artificial Sequence
  Description of Artificial Sequence: Synthetic oligonucleotide
uguugaugaaagaagggcg

SEQ ID NO: 2353760 - RNA, 19 nt, Artificial Sequence
  Description of Artificial Sequence: Synthetic oligonucleotide
acgaaguacuccuugacgc

SEQ ID NO: 2353761 - RNA, 19 nt, Artificial Sequence
  Description of Artificial Sequence: Synthetic oligonucleotide
gaugaagucguauuugcag

SEQ ID NO: 2353762 - RNA, 19 nt, Artificial Sequence
  Description of Artificial Sequence: Synthetic oligonucleotide
uuguuaaugaaggacauca

SEQ ID NO: 2353763 - RNA, 19 nt, Artificial Sequence
  Description of Artificial Sequence: Synthetic oligonucleotide
aaccccaaagccuucucgc

SEQ ID NO: 2353764 - RNA, 19 nt, Artificial Sequence
  Description of Artificial Sequence: Synthetic oligonucleotide
uguugagcgacuugggagg

SEQ ID NO: 2353765 - RNA, 19 nt, Artificial Sequence
  Description of Artificial Sequence: Synthetic oligonucleotide
uuccaauuggcacagagau

SEQ ID NO: 2353766 - RNA, 19 nt, Artificial Sequence
  Description of Artificial Sequence: Synthetic oligonucleotide
aaugaagguggcauagggc

SEQ ID NO: 2353767 - RNA, 19 nt, Artificial Sequence
  Description of Artificial Sequence: Synthetic oligonucleotide
ucguauuugcagaugagca

SEQ ID NO: 2353768 - RNA, 19 nt, Artificial Sequence
  Description of Artificial Sequence: Synthetic oligonucleotide
cauggaguaacccagcuug

SEQ ID NO: 2353769 - RNA, 19 nt, Artificial Sequence
  Description of Artificial Sequence: Synthetic oligonucleotide
uucuugacagcuuggauca

SEQ ID NO: 2353770 - RNA, 19 nt, Artificial Sequence
  Description of Artificial Sequence: Synthetic oligonucleotide
uaaugaaggacaucagccc

SEQ ID NO: 2353771 - RNA, 19 nt, Artificial Sequence
  Description of Artificial Sequence: Synthetic oligonucleotide
gaucaggagagucuggaag

SEQ ID NO: 2353772 - RNA, 19 nt, Artificial Sequence
  Description of Artificial Sequence: Synthetic oligonucleotide
uuguugagcgacuugggag

SEQ ID NO: 2353773 - RNA, 19 nt, Artificial Sequence
  Description of Artificial Sequence: Synthetic oligonucleotide
aaagccuucucgcuuguug

SEQ ID NO: 2353774 - RNA, 19 nt, Artificial Sequence
  Description of Artificial Sequence: Synthetic oligonucleotide
uucauuguuaaugaaggac

SEQ ID NO: 2353775 - RNA, 19 nt, Artificial Sequence
  Description of Artificial Sequence: Synthetic oligonucleotide
aagucguauuugcagauga

SEQ ID NO: 2353776 - RNA, 19 nt, Artificial Sequence
  Description of Artificial Sequence: Synthetic oligonucleotide
ugucuagaagccuaucuug

SEQ ID NO: 2353777 - RNA, 19 nt, Artificial Sequence
  Description of Artificial Sequence: Synthetic oligonucleotide
gaaugcgaaccccaaagcc

SEQ ID NO: 2353778 - RNA, 19 nt, Artificial Sequence
  Description of Artificial Sequence: Synthetic oligonucleotide
acuggaauucuccacagga

SEQ ID NO: 2353779 - RNA, 19 nt, Artificial Sequence
  Description of Artificial Sequence: Synthetic oligonucleotide
uggucauggaguaacccag

SEQ ID NO: 2353780 - RNA, 19 nt, Artificial Sequence
  Description of Artificial Sequence: Synthetic oligonucleotide
auguuuguggaccaggggu

SEQ ID NO: 2353781 - RNA, 19 nt, Artificial Sequence
  Description of Artificial Sequence: Synthetic oligonucleotide
uguuaaugaaggacaucag

SEQ ID NO: 2353782 - RNA, 19 nt, Artificial Sequence
  Description of Artificial Sequence: Synthetic oligonucleotide
auccaugccagccaucggg

SEQ ID NO: 2353783 - RNA, 19 nt, Artificial Sequence
  Description of Artificial Sequence: Synthetic oligonucleotide
cugaaugcgaaccccaaag

SEQ ID NO: 2353784 - RNA, 19 nt, Artificial Sequence
  Description of Artificial Sequence: Synthetic oligonucleotide
ucauccaugccagccaucg

SEQ ID NO: 2353785 - RNA, 19 nt, Artificial Sequence
  Description of Artificial Sequence: Synthetic oligonucleotide
uuugcagaugagcagcgac

SEQ ID NO: 2353786 - RNA, 19 nt, Artificial Sequence
  Description of Artificial Sequence: Synthetic oligonucleotide
gacagcuuggaucaggaga

SEQ ID NO: 2353787 - RNA, 19 nt, Artificial Sequence
  Description of Artificial Sequence: Synthetic oligonucleotide
gaugucgccguccuccacg

SEQ ID NO: 2353788 - RNA, 19 nt, Artificial Sequence
  Description of Artificial Sequence: Synthetic oligonucleotide
ugaaugcgaaccccaaagc

SEQ ID NO: 2353789 - RNA, 19 nt, Artificial Sequence
  Description of Artificial Sequence: Synthetic oligonucleotide
uuuccaauuggcacagaga

SEQ ID NO: 2353790 - RNA, 19 nt, Artificial Sequence
  Description of Artificial Sequence: Synthetic oligonucleotide
aaugcgaaccccaaagccu

SEQ ID NO: 2353791 - RNA, 19 nt, Artificial Sequence
  Description of Artificial Sequence: Synthetic oligonucleotide
gaugagcagcgacuggucg

SEQ ID NO: 2353792 - RNA, 19 nt, Artificial Sequence
  Description of Artificial Sequence: Synthetic oligonucleotide
cuuuccaauuggcacagag

SEQ ID NO: 2353793 - RNA, 19 nt, Artificial Sequence
  Description of Artificial Sequence: Synthetic oligonucleotide
aacuggaauucuccacagg

SEQ ID NO: 2353794 - RNA, 19 nt, Artificial Sequence
  Description of Artificial Sequence: Synthetic oligonucleotide
cuagaagccuaucuugccc

SEQ ID NO: 2353795 - RNA, 19 nt, Artificial Sequence
  Description of Artificial Sequence: Synthetic oligonucleotide
ucuagaagccuaucuugcc

SEQ ID NO: 2353796 - RNA, 19 nt, Artificial Sequence
  Description of Artificial Sequence: Synthetic oligonucleotide
uaggucucgaugaggagug

SEQ ID NO: 2353797 - RNA, 19 nt, Artificial Sequence
  Description of Artificial Sequence: Synthetic oligonucleotide
guuuucuugaggaaacagc

SEQ ID NO: 2353798 - RNA, 19 nt, Artificial Sequence
  Description of Artificial Sequence: Synthetic oligonucleotide
acaccgagucccuaccacc

SEQ ID NO: 2353799 - RNA, 19 nt, Artificial Sequence
  Description of Artificial Sequence: Synthetic oligonucleotide
augaagucguauuugcaga

SEQ ID NO: 2353800 - RNA, 19 nt, Artificial Sequence
  Description of Artificial Sequence: Synthetic oligonucleotide
agaagggcggcucugcuug

SEQ ID NO: 2353801 - RNA, 19 nt, Artificial Sequence
  Description of Artificial Sequence: Synthetic oligonucleotide
ugaugaagucguauuugca

SEQ ID NO: 2353802 - RNA, 19 nt, Artificial Sequence
  Description of Artificial Sequence: Synthetic oligonucleotide
acacgaaguacuccuugac

SEQ ID NO: 2353803 - RNA, 19 nt, Artificial Sequence
  Description of Artificial Sequence: Synthetic oligonucleotide
gaaccccaaagccuucucg

SEQ ID NO: 2353804 - RNA, 19 nt, Artificial Sequence
  Description of Artificial Sequence: Synthetic oligonucleotide
accaccuugguuuucuuga

SEQ ID NO: 2353805 - RNA, 19 nt, Artificial Sequence
  Description of Artificial Sequence: Synthetic oligonucleotide
cacgaaguacuccuugacg

SEQ ID NO: 2353806 - RNA, 19 nt, Artificial Sequence
  Description of Artificial Sequence: Synthetic oligonucleotide
aagccuucucgcuuguuga

SEQ ID NO: 2353807 - RNA, 19 nt, Artificial Sequence
  Description of Artificial Sequence: Synthetic oligonucleotide
gaggaaacuggaauucucc

SEQ ID NO: 2353808 - RNA, 19 nt, Artificial Sequence
  Description of Artificial Sequence: Synthetic oligonucleotide
gaaguacuccuugacgcgg

SEQ ID NO: 2353809 - RNA, 19 nt, Artificial Sequence
  Description of Artificial Sequence: Synthetic oligonucleotide
agcaugggguugcacaccg

SEQ ID NO: 2353810 - RNA, 19 nt, Artificial Sequence
  Description of Artificial Sequence: Synthetic oligonucleotide
uugacagcuuggaucagga

SEQ ID NO: 2353811 - RNA, 19 nt, Artificial Sequence
  Description of Artificial Sequence: Synthetic oligonucleotide
augagcagcgacuggucgg

SEQ ID NO: 2353812 - RNA, 19 nt, Artificial Sequence
  Description of Artificial Sequence: Synthetic oligonucleotide
ucucgaugaggagugggcg

SEQ ID NO: 2353813 - RNA, 19 nt, Artificial Sequence
  Description of Artificial Sequence: Synthetic oligonucleotide
gaacacgaaguacuccuug

SEQ ID NO: 2353814 - RNA, 19 nt, Artificial Sequence
  Description of Artificial Sequence: Synthetic oligonucleotide
uccacgggccguacgacgg

SEQ ID NO: 2353815 - RNA, 19 nt, Artificial Sequence
  Description of Artificial Sequence: Synthetic oligonucleotide
uggaccagggguuccaucu

SEQ ID NO: 2353816 - RNA, 19 nt, Artificial Sequence
  Description of Artificial Sequence: Synthetic oligonucleotide
ggguguucaaugaaggugg

SEQ ID NO: 2353817 - RNA, 19 nt, Artificial Sequence
  Description of Artificial Sequence: Synthetic oligonucleotide
uguucgccuguccuggcag

SEQ ID NO: 2353818 - RNA, 19 nt, Artificial Sequence
  Description of Artificial Sequence: Synthetic oligonucleotide
cuggaauucuccacaggag

SEQ ID NO: 2353819 - RNA, 19 nt, Artificial Sequence
  Description of Artificial Sequence: Synthetic oligonucleotide
uugcagaugagcagcgacu

SEQ ID NO: 2353820 - RNA, 19 nt, Artificial Sequence
  Description of Artificial Sequence: Synthetic oligonucleotide
caucggguguucaaugaag

SEQ ID NO: 2353821 - RNA, 19 nt, Artificial Sequence
  Description of Artificial Sequence: Synthetic oligonucleotide
ugcuugucccacugaaugc

SEQ ID NO: 2353822 - RNA, 19 nt, Artificial Sequence
  Description of Artificial Sequence: Synthetic oligonucleotide
aaagaagggcggcucugcu

SEQ ID NO: 2353823 - RNA, 19 nt, Artificial Sequence
  Description of Artificial Sequence: Synthetic oligonucleotide
uggaggcugaugaagucgu

SEQ ID NO: 2353824 - RNA, 19 nt, Artificial Sequence
  Description of Artificial Sequence: Synthetic oligonucleotide
ugaagucguauuugcagau

SEQ ID NO: 2353825 - RNA, 19 nt, Artificial Sequence
  Description of Artificial Sequence: Synthetic oligonucleotide
cuuggaucaggagagucug

SEQ ID NO: 2353826 - RNA, 19 nt, Artificial Sequence
  Description of Artificial Sequence: Synthetic oligonucleotide
cucguuguuccaguggucc

SEQ ID NO: 2353827 - RNA, 19 nt, Artificial Sequence
  Description of Artificial Sequence: Synthetic oligonucleotide
gucguggacgcucagcggc

SEQ ID NO: 2353828 - RNA, 19 nt, Artificial Sequence
  Description of Artificial Sequence: Synthetic oligonucleotide
aucggguguucaaugaagg

SEQ ID NO: 2353829 - RNA, 19 nt, Artificial Sequence
  Description of Artificial Sequence: Synthetic oligonucleotide
agugggcuuuccuucuggg

SEQ ID NO: 2353830 - RNA, 19 nt, Artificial Sequence
  Description of Artificial Sequence: Synthetic oligonucleotide
ggagaugguguccaccgcg

SEQ ID NO: 2353831 - RNA, 19 nt, Artificial Sequence
  Description of Artificial Sequence: Synthetic oligonucleotide
uugggaggaaacuggaauu

SEQ ID NO: 2353832 - RNA, 19 nt, Artificial Sequence
  Description of Artificial Sequence: Synthetic oligonucleotide
cuugacagcuuggaucagg

SEQ ID NO: 2353833 - RNA, 19 nt, Artificial Sequence
  Description of Artificial Sequence: Synthetic oligonucleotide
gucuagaagccuaucuugc

SEQ ID NO: 2353834 - RNA, 19 nt, Artificial Sequence
  Description of Artificial Sequence: Synthetic oligonucleotide
cucgaugaggagugggcgc

SEQ ID NO: 2353835 - RNA, 19 nt, Artificial Sequence
  Description of Artificial Sequence: Synthetic oligonucleotide
ucccacugaaugcgaaccc

SEQ ID NO: 2353836 - RNA, 19 nt, Artificial Sequence
  Description of Artificial Sequence: Synthetic oligonucleotide
ugcacaccgagucccuacc

SEQ ID NO: 2353837 - RNA, 19 nt, Artificial Sequence
  Description of Artificial Sequence: Synthetic oligonucleotide
ugcagcaucgcgccgccac

SEQ ID NO: 2353838 - RNA, 19 nt, Artificial Sequence
  Description of Artificial Sequence: Synthetic oligonucleotide
augaaagaagggcggcucu

SEQ ID NO: 2353839 - RNA, 19 nt, Artificial Sequence
  Description of Artificial Sequence: Synthetic oligonucleotide
cauagggcauguuugugga

SEQ ID NO: 2353840 - RNA, 19 nt, Artificial Sequence
  Description of Artificial Sequence: Synthetic oligonucleotide
gguagcaugggguugcaca

SEQ ID NO: 2353841 - RNA, 19 nt, Artificial Sequence
  Description of Artificial Sequence: Synthetic oligonucleotide
uccaccgugucccgcagcu

SEQ ID NO: 2353842 - RNA, 19 nt, Artificial Sequence
  Description of Artificial Sequence: Synthetic oligonucleotide
ugaugaaagaagggcggcu

SEQ ID NO: 2353843 - RNA, 19 nt, Artificial Sequence
  Description of Artificial Sequence: Synthetic oligonucleotide
gacggcgcggaucuccucc

SEQ ID NO: 2353844 - RNA, 19 nt, Artificial Sequence
  Description of Artificial Sequence: Synthetic oligonucleotide
gggucguggacgcucagcg

SEQ ID NO: 2353845 - RNA, 19 nt, Artificial Sequence
  Description of Artificial Sequence: Synthetic oligonucleotide
agucuggaagcuuuccaau

SEQ ID NO: 2353846 - RNA, 19 nt, Artificial Sequence
  Description of Artificial Sequence: Synthetic oligonucleotide
agcuuggaucaggagaguc

SEQ ID NO: 2353847 - RNA, 19 nt, Artificial Sequence
  Description of Artificial Sequence: Synthetic oligonucleotide
gagugggcgcuccagcacc

SEQ ID NO: 2353848 - RNA, 19 nt, Artificial Sequence
  Description of Artificial Sequence: Synthetic oligonucleotide
uccaucuguugaugaaaga

SEQ ID NO: 2353849 - RNA, 19 nt, Artificial Sequence
  Description of Artificial Sequence: Synthetic oligonucleotide
cuggucauggaguaaccca

SEQ ID NO: 2353850 - RNA, 19 nt, Artificial Sequence
  Description of Artificial Sequence: Synthetic oligonucleotide
uaccaccuugguuuucuug

SEQ ID NO: 2353851 - RNA, 19 nt, Artificial Sequence
  Description of Artificial Sequence: Synthetic oligonucleotide
gaagguggcauagggcaug

SEQ ID NO: 2353852 - RNA, 19 nt, Artificial Sequence
  Description of Artificial Sequence: Synthetic oligonucleotide
agggcggcucugcuugucc

SEQ ID NO: 2353853 - RNA, 19 nt, Artificial Sequence
  Description of Artificial Sequence: Synthetic oligonucleotide
uuccagugguccaccucgg

SEQ ID NO: 2353854 - RNA, 19 nt, Artificial Sequence
  Description of Artificial Sequence: Synthetic oligonucleotide
gauggugccgggccggaac

SEQ ID NO: 2353855 - RNA, 19 nt, Artificial Sequence
  Description of Artificial Sequence: Synthetic oligonucleotide
uggcauagggcauguuugu

SEQ ID NO: 2353856 - RNA, 19 nt, Artificial Sequence
  Description of Artificial Sequence: Synthetic oligonucleotide
ucggguguucaaugaaggu

SEQ ID NO: 2353857 - RNA, 19 nt, Artificial Sequence
  Description of Artificial Sequence: Synthetic oligonucleotide
ugggaggaaacuggaauuc

SEQ ID NO: 2353858 - RNA, 19 nt, Artificial Sequence
  Description of Artificial Sequence: Synthetic oligonucleotide
cuugccccuggucauggag

SEQ ID NO: 2353859 - RNA, 19 nt, Artificial Sequence
  Description of Artificial Sequence: Synthetic oligonucleotide
accgccugcucgauggugc

SEQ ID NO: 2353860 - RNA, 19 nt, Artificial Sequence
  Description of Artificial Sequence: Synthetic oligonucleotide
uggaguaacccagcuuggc

SEQ ID NO: 2353861 - RNA, 19 nt, Artificial Sequence
  Description of Artificial Sequence: Synthetic oligonucleotide
caccgugucccgcagcugc

SEQ ID NO: 2353862 - RNA, 19 nt, Artificial Sequence
  Description of Artificial Sequence: Synthetic oligonucleotide
ccuucucgcuuguugagcg

SEQ ID NO: 2353863 - RNA, 19 nt, Artificial Sequence
  Description of Artificial Sequence: Synthetic oligonucleotide
cuuguugagcgacuuggga

SEQ ID NO: 2353864 - RNA, 19 nt, Artificial Sequence
  Description of Artificial Sequence: Synthetic oligonucleotide
gucccuaccaccuugguuu

SEQ ID NO: 2353865 - RNA, 19 nt, Artificial Sequence
  Description of Artificial Sequence: Synthetic oligonucleotide
gcuugucccacugaaugcg

SEQ ID NO: 2353866 - RNA, 19 nt, Artificial Sequence
  Description of Artificial Sequence: Synthetic oligonucleotide
gucccacugaaugcgaacc

SEQ ID NO: 2353867 - RNA, 19 nt, Artificial Sequence
  Description of Artificial Sequence: Synthetic oligonucleotide
augucgccguccuccacgg

SEQ ID NO: 2353868 - RNA, 19 nt, Artificial Sequence
  Description of Artificial Sequence: Synthetic oligonucleotide
agccaucggguguucaaug

SEQ ID NO: 2353869 - RNA, 19 nt, Artificial Sequence
  Description of Artificial Sequence: Synthetic oligonucleotide
acguaggucucgaugagga

SEQ ID NO: 2353870 - RNA, 19 nt, Artificial Sequence
  Description of Artificial Sequence: Synthetic oligonucleotide
acugaaugcgaaccccaaa

SEQ ID NO: 2353871 - RNA, 19 nt, Artificial Sequence
  Description of Artificial Sequence: Synthetic oligonucleotide
gaggagugggcgcuccagc

SEQ ID NO: 2353872 - RNA, 19 nt, Artificial Sequence
  Description of Artificial Sequence: Synthetic oligonucleotide
gucggugaugagcaccagc

SEQ ID NO: 2353873 - RNA, 19 nt, Artificial Sequence
  Description of Artificial Sequence: Synthetic oligonucleotide
agggguuccaucuguugau

SEQ ID NO: 2353874 - RNA, 19 nt, Artificial Sequence
  Description of Artificial Sequence: Synthetic oligonucleotide
accagcacgcuguucgccu

SEQ ID NO: 2353875 - RNA, 19 nt, Artificial Sequence
  Description of Artificial Sequence: Synthetic oligonucleotide
gagaugguguccaccgcgc

SEQ ID NO: 2353876 - RNA, 19 nt, Artificial Sequence
  Description of Artificial Sequence: Synthetic oligonucleotide
uucucgcuuguugagcgac

SEQ ID NO: 2353877 - RNA, 19 nt, Artificial Sequence
  Description of Artificial Sequence: Synthetic oligonucleotide
ucguuguuccaguggucca

SEQ ID NO: 2353878 - RNA, 19 nt, Artificial Sequence
  Description of Artificial Sequence: Synthetic oligonucleotide
ugagcgacuugggaggaaa

SEQ ID NO: 2353879 - RNA, 19 nt, Artificial Sequence
  Description of Artificial Sequence: Synthetic oligonucleotide
uacgacggcgcggaucucc

SEQ ID NO: 2353880 - RNA, 19 nt, Artificial Sequence
  Description of Artificial Sequence: Synthetic oligonucleotide
cuccacgggccguacgacg

SEQ ID NO: 2353881 - RNA, 19 nt, Artificial Sequence
  Description of Artificial Sequence: Synthetic oligonucleotide
accgcgcugagcgccaccc

SEQ ID NO: 2353882 - RNA, 19 nt, Artificial Sequence
  Description of Artificial Sequence: Synthetic oligonucleotide
uccuucucguuguuccagu

SEQ ID NO: 2353883 - RNA, 19 nt, Artificial Sequence
  Description of Artificial Sequence: Synthetic oligonucleotide
ugagcagcgacuggucggu

SEQ ID NO: 2353884 - RNA, 19 nt, Artificial Sequence
  Description of Artificial Sequence: Synthetic oligonucleotide
gcugaugaagucguauuug

SEQ ID NO: 2353885 - RNA, 19 nt, Artificial Sequence
  Description of Artificial Sequence: Synthetic oligonucleotide
cguauuugcagaugagcag

SEQ ID NO: 2353886 - RNA, 19 nt, Artificial Sequence
  Description of Artificial Sequence: Synthetic oligonucleotide
agggcauguuuguggacca

SEQ ID NO: 2353887 - RNA, 19 nt, Artificial Sequence
  Description of Artificial Sequence: Synthetic oligonucleotide
auggaguaacccagcuugg

SEQ ID NO: 2353888 - RNA, 19 nt, Artificial Sequence
  Description of Artificial Sequence: Synthetic oligonucleotide
gugggcuuuccuucugggc

SEQ ID NO: 2353889 - RNA, 19 nt, Artificial Sequence
  Description of Artificial Sequence: Synthetic oligonucleotide
agcgacuggucggugauga

SEQ ID NO: 2353890 - RNA, 19 nt, Artificial Sequence
  Description of Artificial Sequence: Synthetic oligonucleotide
gaugaggagugggcgcucc

SEQ ID NO: 2353891 - RNA, 19 nt, Artificial Sequence
  Description of Artificial Sequence: Synthetic oligonucleotide
ugaaggacaucagccccac

SEQ ID NO: 2353892 - RNA, 19 nt, Artificial Sequence
  Description of Artificial Sequence: Synthetic oligonucleotide
ucgcuuguugagcgacuug

SEQ ID NO: 2353893 - RNA, 19 nt, Artificial Sequence
  Description of Artificial Sequence: Synthetic oligonucleotide
cacaccgagucccuaccac

SEQ ID NO: 2353894 - RNA, 19 nt, Artificial Sequence
  Description of Artificial Sequence: Synthetic oligonucleotide
ccuaucuugccccugguca

SEQ ID NO: 2353895 - RNA, 19 nt, Artificial Sequence
  Description of Artificial Sequence: Synthetic oligonucleotide
ucucguuguuccagugguc

SEQ ID NO: 2353896 - RNA, 19 nt, Artificial Sequence
  Description of Artificial Sequence: Synthetic oligonucleotide
ucucgcuuguugagcgacu

SEQ ID NO: 2353897 - RNA, 19 nt, Artificial Sequence
  Description of Artificial Sequence: Synthetic oligonucleotide
cagggguuccaucuguuga

SEQ ID NO: 2353898 - RNA, 19 nt, Artificial Sequence
  Description of Artificial Sequence: Synthetic oligonucleotide
uugacgcgggcgcggcgcg

SEQ ID NO: 2353899 - RNA, 19 nt, Artificial Sequence
  Description of Artificial Sequence: Synthetic oligonucleotide
acagcugucuagaagccua

SEQ ID NO: 2353900 - RNA, 19 nt, Artificial Sequence
  Description of Artificial Sequence: Synthetic oligonucleotide
agucccuaccaccuugguu

SEQ ID NO: 2353901 - RNA, 19 nt, Artificial Sequence
  Description of Artificial Sequence: Synthetic oligonucleotide
agcgacuugggaggaaacu

SEQ ID NO: 2353902 - RNA, 19 nt, Artificial Sequence
  Description of Artificial Sequence: Synthetic oligonucleotide
cuugacgcgggcgcggcgc

SEQ ID NO: 2353903 - RNA, 19 nt, Artificial Sequence
  Description of Artificial Sequence: Synthetic oligonucleotide
agcagcgacuggucgguga

SEQ ID NO: 2353904 - RNA, 19 nt, Artificial Sequence
  Description of Artificial Sequence: Synthetic oligonucleotide
guuguuccagugguccacc

SEQ ID NO: 2353905 - RNA, 19 nt, Artificial Sequence
  Description of Artificial Sequence: Synthetic oligonucleotide
aggacaucagccccacgua

SEQ ID NO: 2353906 - RNA, 19 nt, Artificial Sequence
  Description of Artificial Sequence: Synthetic oligonucleotide
cagcgucuggcgcagcggc

SEQ ID NO: 2353907 - RNA, 19 nt, Artificial Sequence
  Description of Artificial Sequence: Synthetic oligonucleotide
gcgcggaucuccuccaccg

SEQ ID NO: 2353908 - RNA, 19 nt, Artificial Sequence
  Description of Artificial Sequence: Synthetic oligonucleotide
guaggucucgaugaggagu

SEQ ID NO: 2353909 - RNA, 19 nt, Artificial Sequence
  Description of Artificial Sequence: Synthetic oligonucleotide
cgacuugggaggaaacugg

SEQ ID NO: 2353910 - RNA, 19 nt, Artificial Sequence
  Description of Artificial Sequence: Synthetic oligonucleotide
aagguggcauagggcaugu

SEQ ID NO: 2353911 - RNA, 19 nt, Artificial Sequence
  Description of Artificial Sequence: Synthetic oligonucleotide
cauccaugccagccaucgg

SEQ ID NO: 2353912 - RNA, 19 nt, Artificial Sequence
  Description of Artificial Sequence: Synthetic oligonucleotide
cgaaguacuccuugacgcg

SEQ ID NO: 2353913 - RNA, 19 nt, Artificial Sequence
  Description of Artificial Sequence: Synthetic oligonucleotide
ggaagcuuuccaauuggca

SEQ ID NO: 2353914 - RNA, 19 nt, Artificial Sequence
  Description of Artificial Sequence: Synthetic oligonucleotide
acuccuugacgcgggcgcg

SEQ ID NO: 2353915 - RNA, 19 nt, Artificial Sequence
  Description of Artificial Sequence: Synthetic oligonucleotide
uccagugguccaccucggu

SEQ ID NO: 2353916 - RNA, 19 nt, Artificial Sequence
  Description of Artificial Sequence: Synthetic oligonucleotide
ucgccuguccuggcagugg

SEQ ID NO: 2353917 - RNA, 19 nt, Artificial Sequence
  Description of Artificial Sequence: Synthetic oligonucleotide
uuguuccagugguccaccu

SEQ ID NO: 2353918 - RNA, 19 nt, Artificial Sequence
  Description of Artificial Sequence: Synthetic oligonucleotide
uccagccacaguggguagc

SEQ ID NO: 2353919 - RNA, 19 nt, Artificial Sequence
  Description of Artificial Sequence: Synthetic oligonucleotide
gcgacuugggaggaaacug

SEQ ID NO: 2353920 - RNA, 19 nt, Artificial Sequence
  Description of Artificial Sequence: Synthetic oligonucleotide
auuugcagaugagcagcga

SEQ ID NO: 2353921 - RNA, 19 nt, Artificial Sequence
  Description of Artificial Sequence: Synthetic oligonucleotide
agcugucuagaagccuauc

SEQ ID NO: 2353922 - RNA, 19 nt, Artificial Sequence
  Description of Artificial Sequence: Synthetic oligonucleotide
uucgccuguccuggcagug

SEQ ID NO: 2353923 - RNA, 19 nt, Artificial Sequence
  Description of Artificial Sequence: Synthetic oligonucleotide
gccgaguccaccguguccc

SEQ ID NO: 2353924 - RNA, 19 nt, Artificial Sequence
  Description of Artificial Sequence: Synthetic oligonucleotide
gagcgccacccucaccacc

SEQ ID NO: 2353925 - RNA, 19 nt, Artificial Sequence
  Description of Artificial Sequence: Synthetic oligonucleotide
gcuuguugagcgacuuggg

SEQ ID NO: 2353926 - RNA, 19 nt, Artificial Sequence
  Description of Artificial Sequence: Synthetic oligonucleotide
gguuccaucuguugaugaa

SEQ ID NO: 2353927 - RNA, 19 nt, Artificial Sequence
  Description of Artificial Sequence: Synthetic oligonucleotide
guuuguggaccagggguuc

SEQ ID NO: 2353928 - RNA, 19 nt, Artificial Sequence
  Description of Artificial Sequence: Synthetic oligonucleotide
ggguugcacaccgaguccc

SEQ ID NO: 2353929 - RNA, 19 nt, Artificial Sequence
  Description of Artificial Sequence: Synthetic oligonucleotide
gcacuggaggcugaugaag

SEQ ID NO: 2353930 - RNA, 19 nt, Artificial Sequence
  Description of Artificial Sequence: Synthetic oligonucleotide
gcgcguagggucguggacg

SEQ ID NO: 2353931 - RNA, 19 nt, Artificial Sequence
  Description of Artificial Sequence: Synthetic oligonucleotide
uguccaccgcgcugagcgc

SEQ ID NO: 2353932 - RNA, 19 nt, Artificial Sequence
  Description of Artificial Sequence: Synthetic oligonucleotide
cuugaggaaacagcugucu

SEQ ID NO: 2353933 - RNA, 19 nt, Artificial Sequence
  Description of Artificial Sequence: Synthetic oligonucleotide
augcgaaccccaaagccuu

SEQ ID NO: 2353934 - RNA, 19 nt, Artificial Sequence
  Description of Artificial Sequence: Synthetic oligonucleotide
gcugucuagaagccuaucu

SEQ ID NO: 2353935 - RNA, 19 nt, Artificial Sequence
  Description of Artificial Sequence: Synthetic oligonucleotide
ugucgccguccuccacggg

SEQ ID NO: 2353936 - RNA, 19 nt, Artificial Sequence
  Description of Artificial Sequence: Synthetic oligonucleotide
ugagcgccacccucaccac

SEQ ID NO: 2353937 - RNA, 19 nt, Artificial Sequence
  Description of Artificial Sequence: Synthetic oligonucleotide
ugcgaaccccaaagccuuc

SEQ ID NO: 2353938 - RNA, 19 nt, Artificial Sequence
  Description of Artificial Sequence: Synthetic oligonucleotide
gggguugcacaccgagucc

SEQ ID NO: 2353939 - RNA, 19 nt, Artificial Sequence
  Description of Artificial Sequence: Synthetic oligonucleotide
ggaguaacccagcuuggcu

SEQ ID NO: 2353940 - RNA, 19 nt, Artificial Sequence
  Description of Artificial Sequence: Synthetic oligonucleotide
uggacgcucagcggccaca

SEQ ID NO: 2353941 - RNA, 19 nt, Artificial Sequence
  Description of Artificial Sequence: Synthetic oligonucleotide
ugguguccaccgcgcugag

SEQ ID NO: 2353942 - RNA, 19 nt, Artificial Sequence
  Description of Artificial Sequence: Synthetic oligonucleotide
ucuugccccuggucaugga

SEQ ID NO: 2353943 - RNA, 19 nt, Artificial Sequence
  Description of Artificial Sequence: Synthetic oligonucleotide
uccuugacgcgggcgcggc

SEQ ID NO: 2353944 - RNA, 19 nt, Artificial Sequence
  Description of Artificial Sequence: Synthetic oligonucleotide
ccuggucauggaguaaccc

SEQ ID NO: 2353945 - RNA, 19 nt, Artificial Sequence
  Description of Artificial Sequence: Synthetic oligonucleotide
cuccagccacaguggguag

SEQ ID NO: 2353946 - RNA, 19 nt, Artificial Sequence
  Description of Artificial Sequence: Synthetic oligonucleotide
caccagcacgcuguucgcc

SEQ ID NO: 2353947 - RNA, 19 nt, Artificial Sequence
  Description of Artificial Sequence: Synthetic oligonucleotide
ggcauagggcauguuugug

SEQ ID NO: 2353948 - RNA, 19 nt, Artificial Sequence
  Description of Artificial Sequence: Synthetic oligonucleotide
gagcgacuugggaggaaac

SEQ ID NO: 2353949 - RNA, 19 nt, Artificial Sequence
  Description of Artificial Sequence: Synthetic oligonucleotide
cccacugaaugcgaacccc

SEQ ID NO: 2353950 - RNA, 19 nt, Artificial Sequence
  Description of Artificial Sequence: Synthetic oligonucleotide
guggggcucgugcccgccg

SEQ ID NO: 2353951 - RNA, 19 nt, Artificial Sequence
  Description of Artificial Sequence: Synthetic oligonucleotide
guugagcgacuugggagga

SEQ ID NO: 2353952 - RNA, 19 nt, Artificial Sequence
  Description of Artificial Sequence: Synthetic oligonucleotide
cacgggccguacgacggcg

SEQ ID NO: 2353953 - RNA, 19 nt, Artificial Sequence
  Description of Artificial Sequence: Synthetic oligonucleotide
cuccuugacgcgggcgcgg

SEQ ID NO: 2353954 - RNA, 19 nt, Artificial Sequence
  Description of Artificial Sequence: Synthetic oligonucleotide
gccaucggguguucaauga

SEQ ID NO: 2353955 - RNA, 19 nt, Artificial Sequence
  Description of Artificial Sequence: Synthetic oligonucleotide
ugucccgcagcugcagcau

SEQ ID NO: 2353956 - RNA, 19 nt, Artificial Sequence
  Description of Artificial Sequence: Synthetic oligonucleotide
ggagugggcgcuccagcac

SEQ ID NO: 2353957 - RNA, 19 nt, Artificial Sequence
  Description of Artificial Sequence: Synthetic oligonucleotide
agcacgcuguucgccuguc

SEQ ID NO: 2353958 - RNA, 19 nt, Artificial Sequence
  Description of Artificial Sequence: Synthetic oligonucleotide
cuucucgcuuguugagcga

SEQ ID NO: 2353959 - RNA, 19 nt, Artificial Sequence
  Description of Artificial Sequence: Synthetic oligonucleotide
ucccuaccaccuugguuuu

SEQ ID NO: 2353960 - RNA, 19 nt, Artificial Sequence
  Description of Artificial Sequence: Synthetic oligonucleotide
acgggccguacgacggcgc

SEQ ID NO: 2353961 - RNA, 19 nt, Artificial Sequence
  Description of Artificial Sequence: Synthetic oligonucleotide
ccuucucguuguuccagug

SEQ ID NO: 2353962 - RNA, 19 nt, Artificial Sequence
  Description of Artificial Sequence: Synthetic oligonucleotide
guagggucguggacgcuca

SEQ ID NO: 2353963 - RNA, 19 nt, Artificial Sequence
  Description of Artificial Sequence: Synthetic oligonucleotide
ggugccgggccggaacacg

SEQ ID NO: 2353964 - RNA, 19 nt, Artificial Sequence
  Description of Artificial Sequence: Synthetic oligonucleotide
cacgcuguucgccuguccu

SEQ ID NO: 2353965 - RNA, 19 nt, Artificial Sequence
  Description of Artificial Sequence: Synthetic oligonucleotide
cuguucgccuguccuggca

SEQ ID NO: 2353966 - RNA, 19 nt, Artificial Sequence
  Description of Artificial Sequence: Synthetic oligonucleotide
cgagucccuaccaccuugg

SEQ ID NO: 2353967 - RNA, 19 nt, Artificial Sequence
  Description of Artificial Sequence: Synthetic oligonucleotide
caccgagucccuaccaccu

SEQ ID NO: 2353968 - RNA, 19 nt, Artificial Sequence
  Description of Artificial Sequence: Synthetic oligonucleotide
gccuucucgcuuguugagc

SEQ ID NO: 2353969 - RNA, 19 nt, Artificial Sequence
  Description of Artificial Sequence: Synthetic oligonucleotide
uugagcgacuugggaggaa

SEQ ID NO: 2353970 - RNA, 19 nt, Artificial Sequence
  Description of Artificial Sequence: Synthetic oligonucleotide
ccacugaaugcgaacccca

SEQ ID NO: 2353971 - RNA, 19 nt, Artificial Sequence
  Description of Artificial Sequence: Synthetic oligonucleotide
gggguuccaucuguugaug

SEQ ID NO: 2353972 - RNA, 19 nt, Artificial Sequence
  Description of Artificial Sequence: Synthetic oligonucleotide
caucagccccacguagguc

SEQ ID NO: 2353973 - RNA, 19 nt, Artificial Sequence
  Description of Artificial Sequence: Synthetic oligonucleotide
accgagucccuaccaccuu

SEQ ID NO: 2353974 - RNA, 19 nt, Artificial Sequence
  Description of Artificial Sequence: Synthetic oligonucleotide
augccagccaucggguguu

SEQ ID NO: 2353975 - RNA, 19 nt, Artificial Sequence
  Description of Artificial Sequence: Synthetic oligonucleotide
cucgugcccgccgagucca

SEQ ID NO: 2353976 - RNA, 19 nt, Artificial Sequence
  Description of Artificial Sequence: Synthetic oligonucleotide
uaacccagcuuggcuucau

SEQ ID NO: 2353977 - RNA, 19 nt, Artificial Sequence
  Description of Artificial Sequence: Synthetic oligonucleotide
ccgagucccuaccaccuug

SEQ ID NO: 2353978 - RNA, 19 nt, Artificial Sequence
  Description of Artificial Sequence: Synthetic oligonucleotide
ggccggaacacgaaguacu

SEQ ID NO: 2353979 - RNA, 19 nt, Artificial Sequence
  Description of Artificial Sequence: Synthetic oligonucleotide
ggcgcguagggucguggac

SEQ ID NO: 2353980 - RNA, 19 nt, Artificial Sequence
  Description of Artificial Sequence: Synthetic oligonucleotide
guaacccagcuuggcuuca

SEQ ID NO: 2353981 - RNA, 19 nt, Artificial Sequence
  Description of Artificial Sequence: Synthetic oligonucleotide
ggcugaugaagucguauuu

SEQ ID NO: 2353982 - RNA, 19 nt, Artificial Sequence
  Description of Artificial Sequence: Synthetic oligonucleotide
gcucgugcccgccgagucc

SEQ ID NO: 2353983 - RNA, 19 nt, Artificial Sequence
  Description of Artificial Sequence: Synthetic oligonucleotide
ggcacuggaggcugaugaa

SEQ ID NO: 2353984 - RNA, 19 nt, Artificial Sequence
  Description of Artificial Sequence: Synthetic oligonucleotide
ccggaacacgaaguacucc

SEQ ID NO: 2353985 - RNA, 19 nt, Artificial Sequence
  Description of Artificial Sequence: Synthetic oligonucleotide
gccuaucuugccccugguc

SEQ ID NO: 2353986 - RNA, 19 nt, Artificial Sequence
  Description of Artificial Sequence: Synthetic oligonucleotide
cggugaugagcaccagccg

SEQ ID NO: 2353987 - RNA, 19 nt, Artificial Sequence
  Description of Artificial Sequence: Synthetic oligonucleotide
ggcgcagcggcguccccgc

SEQ ID NO: 2353988 - RNA, 19 nt, Artificial Sequence
  Description of Artificial Sequence: Synthetic oligonucleotide
ggcucgugcccgccgaguc

SEQ ID NO: 2353989 - RNA, 19 nt, Artificial Sequence
  Description of Artificial Sequence: Synthetic oligonucleotide
caccgccugcucgauggug

SEQ ID NO: 2353990 - RNA, 19 nt, Artificial Sequence
  Description of Artificial Sequence: Synthetic oligonucleotide
gcgggcgcggcgcguaggg

SEQ ID NO: 2353991 - RNA, 19 nt, Artificial Sequence
  Description of Artificial Sequence: Synthetic oligonucleotide
cgcuguucgccuguccugg

SEQ ID NO: 2353992 - RNA, 19 nt, Artificial Sequence
  Description of Artificial Sequence: Synthetic oligonucleotide
acgacggcgcggaucuccu

SEQ ID NO: 2353993 - RNA, 19 nt, Artificial Sequence
  Description of Artificial Sequence: Synthetic oligonucleotide
gucuggcgcagcggcgucc

SEQ ID NO: 2353994 - RNA, 19 nt, Artificial Sequence
  Description of Artificial Sequence: Synthetic oligonucleotide
gcuguucgccuguccuggc

SEQ ID NO: 2353995 - RNA, 19 nt, Artificial Sequence
  Description of Artificial Sequence: Synthetic oligonucleotide
cggaacacgaaguacuccu

SEQ ID NO: 2353996 - RNA, 19 nt, Artificial Sequence
  Description of Artificial Sequence: Synthetic oligonucleotide
cgcguagggucguggacgc

SEQ ID NO: 2353997 - RNA, 19 nt, Artificial Sequence
  Description of Artificial Sequence: Synthetic oligonucleotide
gggccggaacacgaaguac

SEQ ID NO: 2353998 - RNA, 19 nt, Artificial Sequence
  Description of Artificial Sequence: Synthetic oligonucleotide
gccggaacacgaaguacuc

SEQ ID NO: 2353999 - RNA, 19 nt, Artificial Sequence
  Description of Artificial Sequence: Synthetic oligonucleotide
gagucccuaccaccuuggu

SEQ ID NO: 2354000 - RNA, 19 nt, Artificial Sequence
  Description of Artificial Sequence: Synthetic oligonucleotide
gccguggggcucgugcccg

SEQ ID NO: 2354001 - RNA, 19 nt, Artificial Sequence
  Description of Artificial Sequence: Synthetic oligonucleotide
gugccgggccggaacacga

SEQ ID NO: 2354002 - RNA, 19 nt, Artificial Sequence
  Description of Artificial Sequence: Synthetic oligonucleotide
gcgacuggucggugaugag

SEQ ID NO: 2354003 - RNA, 19 nt, Artificial Sequence
  Description of Artificial Sequence: Synthetic oligonucleotide
caguggguagcaugggguu

SEQ ID NO: 2354004 - RNA, 19 nt, Artificial Sequence
  Description of Artificial Sequence: Synthetic oligonucleotide
gagcagcgacuggucggug

SEQ ID NO: 2354005 - RNA, 19 nt, Artificial Sequence
  Description of Artificial Sequence: Synthetic oligonucleotide
guucgccuguccuggcagu

SEQ ID NO: 2354006 - RNA, 19 nt, Artificial Sequence
  Description of Artificial Sequence: Synthetic oligonucleotide
gcacaccgagucccuacca

SEQ ID NO: 2354007 - RNA, 19 nt, Artificial Sequence
  Description of Artificial Sequence: Synthetic oligonucleotide
gcucagcggccacagcguc

SEQ ID NO: 2354008 - RNA, 19 nt, Artificial Sequence
  Description of Artificial Sequence: Synthetic oligonucleotide
cguagggucguggacgcuc

SEQ ID NO: 2354009 - RNA, 19 nt, Artificial Sequence
  Description of Artificial Sequence: Synthetic oligonucleotide
cgccuguccuggcaguggg

SEQ ID NO: 2354010 - RNA, 19 nt, Artificial Sequence
  Description of Artificial Sequence: Synthetic oligonucleotide
guugcacaccgagucccua

SEQ ID NO: 2354011 - RNA, 19 nt, Artificial Sequence
  Description of Artificial Sequence: Synthetic oligonucleotide
ggaugucgccguccuccac

SEQ ID NO: 2354012 - RNA, 19 nt, Artificial Sequence
  Description of Artificial Sequence: Synthetic oligonucleotide
gaagggcggcucugcuugu

SEQ ID NO: 2354013 - RNA, 19 nt, Artificial Sequence
  Description of Artificial Sequence: Synthetic oligonucleotide
gcacgcuguucgccugucc

SEQ ID NO: 2354014 - RNA, 19 nt, Artificial Sequence
  Description of Artificial Sequence: Synthetic oligonucleotide
gcugagcgccacccucacc

SEQ ID NO: 2354015 - RNA, 19 nt, Artificial Sequence
  Description of Artificial Sequence: Synthetic oligonucleotide
cagcgacuggucggugaug

SEQ ID NO: 2354016 - RNA, 19 nt, Artificial Sequence
  Description of Artificial Sequence: Synthetic oligonucleotide
cucagcggccacagcgucu

SEQ ID NO: 2354017 - RNA, 19 nt, Artificial Sequence
  Description of Artificial Sequence: Synthetic oligonucleotide
ggccguacgacggcgcgga

SEQ ID NO: 2354018 - RNA, 19 nt, Artificial Sequence
  Description of Artificial Sequence: Synthetic oligonucleotide
caccgcgcugagcgccacc

SEQ ID NO: 2354019 - RNA, 19 nt, Artificial Sequence
  Description of Artificial Sequence: Synthetic oligonucleotide
cguacgacggcgcggaucu

SEQ ID NO: 2354020 - RNA, 19 nt, Artificial Sequence
  Description of Artificial Sequence: Synthetic oligonucleotide
ucgugcccgccgaguccac

SEQ ID NO: 2354021 - RNA, 19 nt, Artificial Sequence
  Description of Artificial Sequence: Synthetic oligonucleotide
ccgaguccaccgugucccg

SEQ ID NO: 2354022 - RNA, 19 nt, Artificial Sequence
  Description of Artificial Sequence: Synthetic oligonucleotide
ccgccugcucgauggugcc

SEQ ID NO: 2354023 - RNA, 19 nt, Artificial Sequence
  Description of Artificial Sequence: Synthetic oligonucleotide
ccagccaucggguguucaa

SEQ ID NO: 2354024 - RNA, 19 nt, Artificial Sequence
  Description of Artificial Sequence: Synthetic oligonucleotide
gguguccaccgcgcugagc

SEQ ID NO: 2354025 - RNA, 19 nt, Artificial Sequence
  Description of Artificial Sequence: Synthetic oligonucleotide
ggucggugaugagcaccag

SEQ ID NO: 2354026 - RNA, 19 nt, Artificial Sequence
  Description of Artificial Sequence: Synthetic oligonucleotide
gugguccaccucggucagc

SEQ ID NO: 2354027 - RNA, 19 nt, Artificial Sequence
  Description of Artificial Sequence: Synthetic oligonucleotide
cagcugucuagaagccuau

SEQ ID NO: 2354028 - RNA, 19 nt, Artificial Sequence
  Description of Artificial Sequence: Synthetic oligonucleotide
ccuugacgcgggcgcggcg

SEQ ID NO: 2354029 - RNA, 19 nt, Artificial Sequence
  Description of Artificial Sequence: Synthetic oligonucleotide
cgugucccgcagcugcagc

SEQ ID NO: 2354030 - RNA, 19 nt, Artificial Sequence
  Description of Artificial Sequence: Synthetic oligonucleotide
gcggcgcguagggucgugg

SEQ ID NO: 2354031 - RNA, 19 nt, Artificial Sequence
  Description of Artificial Sequence: Synthetic oligonucleotide
gcagcgacuggucggugau

SEQ ID NO: 2354032 - RNA, 19 nt, Artificial Sequence
  Description of Artificial Sequence: Synthetic oligonucleotide
ccacgggccguacgacggc

SEQ ID NO: 2354033 - RNA, 19 nt, Artificial Sequence
  Description of Artificial Sequence: Synthetic oligonucleotide
gccgcgcccgcauccucgc

SEQ ID NO: 2354034 - RNA, 19 nt, Artificial Sequence
  Description of Artificial Sequence: Synthetic oligonucleotide
ugacgcgggcgcggcgcgu

SEQ ID NO: 2354035 - RNA, 19 nt, Artificial Sequence
  Description of Artificial Sequence: Synthetic oligonucleotide
cgccgaguccaccgugucc

SEQ ID NO: 2354036 - RNA, 19 nt, Artificial Sequence
  Description of Artificial Sequence: Synthetic oligonucleotide
cucgcuuguugagcgacuu

SEQ ID NO: 2354037 - RNA, 19 nt, Artificial Sequence
  Description of Artificial Sequence: Synthetic oligonucleotide
cgggccguacgacggcgcg

SEQ ID NO: 2354038 - RNA, 19 nt, Artificial Sequence
  Description of Artificial Sequence: Synthetic oligonucleotide
cgaaccccaaagccuucuc

SEQ ID NO: 2354039 - RNA, 19 nt, Artificial Sequence
  Description of Artificial Sequence: Synthetic oligonucleotide
cgcgcugagcgccacccuc

SEQ ID NO: 2354040 - RNA, 19 nt, Artificial Sequence
  Description of Artificial Sequence: Synthetic oligonucleotide
ugccagccaucggguguuc

SEQ ID NO: 2354041 - RNA, 19 nt, Artificial Sequence
  Description of Artificial Sequence: Synthetic oligonucleotide
ccgggccgcgcccgcaucc

SEQ ID NO: 2354042 - RNA, 19 nt, Artificial Sequence
  Description of Artificial Sequence: Synthetic oligonucleotide
ccguacgacggcgcggauc

SEQ ID NO: 2354043 - RNA, 19 nt, Artificial Sequence
  Description of Artificial Sequence: Synthetic oligonucleotide
cagccaucggguguucaau

SEQ ID NO: 2354044 - RNA, 19 nt, Artificial Sequence
  Description of Artificial Sequence: Synthetic oligonucleotide
gacgcgggcgcggcgcgua

SEQ ID NO: 2354045 - RNA, 19 nt, Artificial Sequence
  Description of Artificial Sequence: Synthetic oligonucleotide
ggaacacgaaguacuccuu

SEQ ID NO: 2354046 - RNA, 19 nt, Artificial Sequence
  Description of Artificial Sequence: Synthetic oligonucleotide
gcgcugagcgccacccuca

SEQ ID NO: 2354047 - RNA, 19 nt, Artificial Sequence
  Description of Artificial Sequence: Synthetic oligonucleotide
ccuggaugucgccguccuc

SEQ ID NO: 2354048 - RNA, 19 nt, Artificial Sequence
  Description of Artificial Sequence: Synthetic oligonucleotide
ccuccacgggccguacgac

SEQ ID NO: 2354049 - RNA, 19 nt, Artificial Sequence
  Description of Artificial Sequence: Synthetic oligonucleotide
ccccuggaugucgccgucc

SEQ ID NO: 2354050 - RNA, 19 nt, Artificial Sequence
  Description of Artificial Sequence: Synthetic oligonucleotide
gccacccucaccaccugcu

SEQ ID NO: 2354051 - RNA, 19 nt, Artificial Sequence
  Description of Artificial Sequence: Synthetic oligonucleotide
cgccguggggcucgugccc

SEQ ID NO: 2354052 - RNA, 19 nt, Artificial Sequence
  Description of Artificial Sequence: Synthetic oligonucleotide
cgccacccucaccaccugc

SEQ ID NO: 2354053 - RNA, 19 nt, Artificial Sequence
  Description of Artificial Sequence: Synthetic oligonucleotide
agguggcauagggcauguu

SEQ ID NO: 2354054 - RNA, 19 nt, Artificial Sequence
  Description of Artificial Sequence: Synthetic oligonucleotide
gcgaaccccaaagccuucu

SEQ ID NO: 2354055 - RNA, 19 nt, Artificial Sequence
  Description of Artificial Sequence: Synthetic oligonucleotide
ccgccgaguccaccguguc

SEQ ID NO: 2354056 - RNA, 19 nt, Artificial Sequence
  Description of Artificial Sequence: Synthetic oligonucleotide
ccuggcagugggcuuuccu

SEQ ID NO: 2354057 - RNA, 19 nt, Artificial Sequence
  Description of Artificial Sequence: Synthetic oligonucleotide
ccgggccggaacacgaagu

SEQ ID NO: 2354058 - RNA, 19 nt, Artificial Sequence
  Description of Artificial Sequence: Synthetic oligonucleotide
guacgacggcgcggaucuc

SEQ ID NO: 2354059 - RNA, 19 nt, Artificial Sequence
  Description of Artificial Sequence: Synthetic oligonucleotide
gccagccaucggguguuca

SEQ ID NO: 2354060 - RNA, 19 nt, Artificial Sequence
  Description of Artificial Sequence: Synthetic oligonucleotide
cgcugagcgccacccucac

SEQ ID NO: 2354061 - RNA, 19 nt, Artificial Sequence
  Description of Artificial Sequence: Synthetic oligonucleotide
gcaugggguugcacaccga

SEQ ID NO: 2354062 - RNA, 19 nt, Artificial Sequence
  Description of Artificial Sequence: Synthetic oligonucleotide
ccgcauccucgccggccgc

SEQ ID NO: 2354063 - RNA, 19 nt, Artificial Sequence
  Description of Artificial Sequence: Synthetic oligonucleotide
gcgucuggcgcagcggcgu

SEQ ID NO: 2354064 - RNA, 19 nt, Artificial Sequence
  Description of Artificial Sequence: Synthetic oligonucleotide
ccaccgugucccgcagcug

SEQ ID NO: 2354065 - RNA, 19 nt, Artificial Sequence
  Description of Artificial Sequence: Synthetic oligonucleotide
cgccugcucgauggugccg

SEQ ID NO: 2354066 - RNA, 19 nt, Artificial Sequence
  Description of Artificial Sequence: Synthetic oligonucleotide
cgggccggaacacgaagua

SEQ ID NO: 2354067 - RNA, 19 nt, Artificial Sequence
  Description of Artificial Sequence: Synthetic oligonucleotide
ccaaagccuucucgcuugu

SEQ ID NO: 2354068 - RNA, 19 nt, Artificial Sequence
  Description of Artificial Sequence: Synthetic oligonucleotide
cccuaccaccuugguuuuc

SEQ ID NO: 2354069 - RNA, 19 nt, Artificial Sequence
  Description of Artificial Sequence: Synthetic oligonucleotide
cugcagcaucgcgccgcca

SEQ ID NO: 2354070 - RNA, 19 nt, Artificial Sequence
  Description of Artificial Sequence: Synthetic oligonucleotide
gggccgcgcccgcauccuc

SEQ ID NO: 2354071 - RNA, 19 nt, Artificial Sequence
  Description of Artificial Sequence: Synthetic oligonucleotide
cccgccgaguccaccgugu

SEQ ID NO: 2354072 - RNA, 19 nt, Artificial Sequence
  Description of Artificial Sequence: Synthetic oligonucleotide
cguggggcucgugcccgcc

SEQ ID NO: 2354073 - RNA, 19 nt, Artificial Sequence
  Description of Artificial Sequence: Synthetic oligonucleotide
cgcucagcggccacagcgu

SEQ ID NO: 2354074 - RNA, 19 nt, Artificial Sequence
  Description of Artificial Sequence: Synthetic oligonucleotide
cgucuggcgcagcggcguc

SEQ ID NO: 2354075 - RNA, 19 nt, Artificial Sequence
  Description of Artificial Sequence: Synthetic oligonucleotide
cggcgcguagggucgugga

SEQ ID NO: 2354076 - RNA, 19 nt, Artificial Sequence
  Description of Artificial Sequence: Synthetic oligonucleotide
gccccuggucauggaguaa

SEQ ID NO: 2354077 - RNA, 19 nt, Artificial Sequence
  Description of Artificial Sequence: Synthetic oligonucleotide
gccgggccgcgcccgcauc

SEQ ID NO: 2354078 - RNA, 19 nt, Artificial Sequence
  Description of Artificial Sequence: Synthetic oligonucleotide
ccacagcgucuggcgcagc

SEQ ID NO: 2354079 - RNA, 19 nt, Artificial Sequence
  Description of Artificial Sequence: Synthetic oligonucleotide
ggccgccagcagcgccgug

SEQ ID NO: 2354080 - RNA, 19 nt, Artificial Sequence
  Description of Artificial Sequence: Synthetic oligonucleotide
cgacggcgcggaucuccuc

SEQ ID NO: 2354081 - RNA, 19 nt, Artificial Sequence
  Description of Artificial Sequence: Synthetic oligonucleotide
cagcgccguggggcucgug

SEQ ID NO: 2354082 - RNA, 19 nt, Artificial Sequence
  Description of Artificial Sequence: Synthetic oligonucleotide
gggcucgugcccgccgagu

SEQ ID NO: 2354083 - RNA, 19 nt, Artificial Sequence
  Description of Artificial Sequence: Synthetic oligonucleotide
cguccuccacgggccguac

SEQ ID NO: 2354084 - RNA, 19 nt, Artificial Sequence
  Description of Artificial Sequence: Synthetic oligonucleotide
ccaccgcgcugagcgccac

SEQ ID NO: 2354085 - RNA, 19 nt, Artificial Sequence
  Description of Artificial Sequence: Synthetic oligonucleotide
cgcgggcgcggcgcguagg

SEQ ID NO: 2354086 - RNA, 19 nt, Artificial Sequence
  Description of Artificial Sequence: Synthetic oligonucleotide
gccccacguaggucucgau

SEQ ID NO: 2354087 - RNA, 19 nt, Artificial Sequence
  Description of Artificial Sequence: Synthetic oligonucleotide
gcguagggucguggacgcu

SEQ ID NO: 2354088 - RNA, 19 nt, Artificial Sequence
  Description of Artificial Sequence: Synthetic oligonucleotide
ccaccgccugcucgauggu

SEQ ID NO: 2354089 - RNA, 19 nt, Artificial Sequence
  Description of Artificial Sequence: Synthetic oligonucleotide
cgcggcgcguagggucgug

SEQ ID NO: 2354090 - RNA, 19 nt, Artificial Sequence
  Description of Artificial Sequence: Synthetic oligonucleotide
gccguacgacggcgcggau

SEQ ID NO: 2354091 - RNA, 19 nt, Artificial Sequence
  Description of Artificial Sequence: Synthetic oligonucleotide
cgauggugccgggccggaa

SEQ ID NO: 2354092 - RNA, 19 nt, Artificial Sequence
  Description of Artificial Sequence: Synthetic oligonucleotide
ccgcgcugagcgccacccu

SEQ ID NO: 2354093 - RNA, 19 nt, Artificial Sequence
  Description of Artificial Sequence: Synthetic oligonucleotide
gcagcgccguggggcucgu

SEQ ID NO: 2354094 - RNA, 19 nt, Artificial Sequence
  Description of Artificial Sequence: Synthetic oligonucleotide
gcgcggcgcguagggucgu

SEQ ID NO: 2354095 - RNA, 19 nt, Artificial Sequence
  Description of Artificial Sequence: Synthetic oligonucleotide
caaagacagcagccuuaga

SEQ ID NO: 2354096 - RNA, 19 nt, Artificial Sequence
  Description of Artificial Sequence: Synthetic oligonucleotide
gccaaagacagcagccuua

SEQ ID NO: 2354097 - RNA, 19 nt, Artificial Sequence
  Description of Artificial Sequence: Synthetic oligonucleotide
aauucaacuuucccgcgcc

SEQ ID NO: 2354098 - RNA, 19 nt, Artificial Sequence
  Description of Artificial Sequence: Synthetic oligonucleotide
aaauucaacuuucccgcgc

SEQ ID NO: 2354099 - RNA, 19 nt, Artificial Sequence
  Description of Artificial Sequence: Synthetic oligonucleotide
guaaauucaacuuucccgc

SEQ ID NO: 2354100 - RNA, 19 nt, Artificial Sequence
  Description of Artificial Sequence: Synthetic oligonucleotide
gguaaauucaacuuucccg

SEQ ID NO: 2354101 - RNA, 19 nt, Artificial Sequence
  Description of Artificial Sequence: Synthetic oligonucleotide
aauaguuccacaaggcggg

SEQ ID NO: 2354102 - RNA, 19 nt, Artificial Sequence
  Description of Artificial Sequence: Synthetic oligonucleotide
gaauaguuccacaaggcgg

SEQ ID NO: 2354103 - RNA, 19 nt, Artificial Sequence
  Description of Artificial Sequence: Synthetic oligonucleotide
guuucacucaauuucauca

SEQ ID NO: 2354104 - RNA, 19 nt, Artificial Sequence
  Description of Artificial Sequence: Synthetic oligonucleotide
caaaagagccugcagacag

SEQ ID NO: 2354105 - RNA, 19 nt, Artificial Sequence
  Description of Artificial Sequence: Synthetic oligonucleotide
cagucuacggugcagagcc

SEQ ID NO: 2354106 - RNA, 19 nt, Artificial Sequence
  Description of Artificial Sequence: Synthetic oligonucleotide
uucaccgcgccuaaggaag

SEQ ID NO: 2354107 - RNA, 19 nt, Artificial Sequence
  Description of Artificial Sequence: Synthetic oligonucleotide
ggagaauaguuccacaagg

SEQ ID NO: 2354108 - RNA, 19 nt, Artificial Sequence
  Description of Artificial Sequence: Synthetic oligonucleotide
cuugguaaauucaacuuuc

SEQ ID NO: 2354109 - RNA, 19 nt, Artificial Sequence
  Description of Artificial Sequence: Synthetic oligonucleotide
ucucaguugcucuuggacc

SEQ ID NO: 2354110 - RNA, 19 nt, Artificial Sequence
  Description of Artificial Sequence: Synthetic oligonucleotide
uucagagccggccauggag

SEQ ID NO: 2354111 - RNA, 19 nt, Artificial Sequence
  Description of Artificial Sequence: Synthetic oligonucleotide
ugguaaauucaacuuuccc

SEQ ID NO: 2354112 - RNA, 19 nt, Artificial Sequence
  Description of Artificial Sequence: Synthetic oligonucleotide
uaaauucaacuuucccgcg

SEQ ID NO: 2354113 - RNA, 19 nt, Artificial Sequence
  Description of Artificial Sequence: Synthetic oligonucleotide
gaccaacuguucuagacgc

SEQ ID NO: 2354114 - RNA, 19 nt, Artificial Sequence
  Description of Artificial Sequence: Synthetic oligonucleotide
caaggguaaguucaagucc

SEQ ID NO: 2354115 - RNA, 19 nt, Artificial Sequence
  Description of Artificial Sequence: Synthetic oligonucleotide
aacuguucuagacgcuggg

SEQ ID NO: 2354116 - RNA, 19 nt, Artificial Sequence
  Description of Artificial Sequence: Synthetic oligonucleotide
cacaaggcgggcaaaagag

SEQ ID NO: 2354117 - RNA, 19 nt, Artificial Sequence
  Description of Artificial Sequence: Synthetic oligonucleotide
ucacucaauuucaucaaac

SEQ ID NO: 2354118 - RNA, 19 nt, Artificial Sequence
  Description of Artificial Sequence: Synthetic oligonucleotide
aaagagccugcagacaguc

SEQ ID NO: 2354119 - RNA, 19 nt, Artificial Sequence
  Description of Artificial Sequence: Synthetic oligonucleotide
cacgguuucacucaauuuc

SEQ ID NO: 2354120 - RNA, 19 nt, Artificial Sequence
  Description of Artificial Sequence: Synthetic oligonucleotide
uguacaugcuccacgcuga

SEQ ID NO: 2354121 - RNA, 19 nt, Artificial Sequence
  Description of Artificial Sequence: Synthetic oligonucleotide
uuuugguugaugacuucug

SEQ ID NO: 2354122 - RNA, 19 nt, Artificial Sequence
  Description of Artificial Sequence: Synthetic oligonucleotide
ugguugaugacuucugccu

SEQ ID NO: 2354123 - RNA, 19 nt, Artificial Sequence
  Description of Artificial Sequence: Synthetic oligonucleotide
caaggcgggcaaaagagcc

SEQ ID NO: 2354124 - RNA, 19 nt, Artificial Sequence
  Description of Artificial Sequence: Synthetic oligonucleotide
caggaaaucuguuggcucc

SEQ ID NO: 2354125 - RNA, 19 nt, Artificial Sequence
  Description of Artificial Sequence: Synthetic oligonucleotide
aaggcgcaaagcuguguac

SEQ ID NO: 2354126 - RNA, 19 nt, Artificial Sequence
  Description of Artificial Sequence: Synthetic oligonucleotide
uaaguguguccucucggag

SEQ ID NO: 2354127 - RNA, 19 nt, Artificial Sequence
  Description of Artificial Sequence: Synthetic oligonucleotide
gagaauaguuccacaaggc

SEQ ID NO: 2354128 - RNA, 19 nt, Artificial Sequence
  Description of Artificial Sequence: Synthetic oligonucleotide
ggacccagcagcuucaccg

SEQ ID NO: 2354129 - RNA, 19 nt, Artificial Sequence
  Description of Artificial Sequence: Synthetic oligonucleotide
ucaucaaacuuuucuuggu

SEQ ID NO: 2354130 - RNA, 19 nt, Artificial Sequence
  Description of Artificial Sequence: Synthetic oligonucleotide
uucuugguaaauucaacuu

SEQ ID NO: 2354131 - RNA, 19 nt, Artificial Sequence
  Description of Artificial Sequence: Synthetic oligonucleotide
uccaaggguaaguucaagu

SEQ ID NO: 2354132 - RNA, 19 nt, Artificial Sequence
  Description of Artificial Sequence: Synthetic oligonucleotide
aacuuucccgcgccugcgc

SEQ ID NO: 2354133 - RNA, 19 nt, Artificial Sequence
  Description of Artificial Sequence: Synthetic oligonucleotide
gaagacaucuucggaggcg

SEQ ID NO: 2354134 - RNA, 19 nt, Artificial Sequence
  Description of Artificial Sequence: Synthetic oligonucleotide
agggcuuccuuuucugugg

SEQ ID NO: 2354135 - RNA, 19 nt, Artificial Sequence
  Description of Artificial Sequence: Synthetic oligonucleotide
ucuugggcaggguuccugg

SEQ ID NO: 2354136 - RNA, 19 nt, Artificial Sequence
  Description of Artificial Sequence: Synthetic oligonucleotide
uggaccaacuguucuagac

SEQ ID NO: 2354137 - RNA, 19 nt, Artificial Sequence
  Description of Artificial Sequence: Synthetic oligonucleotide
uuucacucaauuucaucaa

SEQ ID NO: 2354138 - RNA, 19 nt, Artificial Sequence
  Description of Artificial Sequence: Synthetic oligonucleotide
aggaugccugcccagcccc

SEQ ID NO: 2354139 - RNA, 19 nt, Artificial Sequence
  Description of Artificial Sequence: Synthetic oligonucleotide
cuguguacaugcuccacgc

SEQ ID NO: 2354140 - RNA, 19 nt, Artificial Sequence
  Description of Artificial Sequence: Synthetic oligonucleotide
cuagcuuuugguugaugac

SEQ ID NO: 2354141 - RNA, 19 nt, Artificial Sequence
  Description of Artificial Sequence: Synthetic oligonucleotide
ucaggaaaucuguuggcuc

SEQ ID NO: 2354142 - RNA, 19 nt, Artificial Sequence
  Description of Artificial Sequence: Synthetic oligonucleotide
cacacgccggcuuagcucc

SEQ ID NO: 2354143 - RNA, 19 nt, Artificial Sequence
  Description of Artificial Sequence: Synthetic oligonucleotide
uuuggggaggagcugacuu

SEQ ID NO: 2354144 - RNA, 19 nt, Artificial Sequence
  Description of Artificial Sequence: Synthetic oligonucleotide
uagcuuuugguugaugacu

SEQ ID NO: 2354145 - RNA, 19 nt, Artificial Sequence
  Description of Artificial Sequence: Synthetic oligonucleotide
ggaccaacuguucuagacg

SEQ ID NO: 2354146 - RNA, 19 nt, Artificial Sequence
  Description of Artificial Sequence: Synthetic oligonucleotide
uucacucaauuucaucaaa

SEQ ID NO: 2354147 - RNA, 19 nt, Artificial Sequence
  Description of Artificial Sequence: Synthetic oligonucleotide
agugguuccggggauggcg

SEQ ID NO: 2354148 - RNA, 19 nt, Artificial Sequence
  Description of Artificial Sequence: Synthetic oligonucleotide
gaagucugaagaagcuggg

SEQ ID NO: 2354149 - RNA, 19 nt, Artificial Sequence
  Description of Artificial Sequence: Synthetic oligonucleotide
ucuucagagccggccaugg

SEQ ID NO: 2354150 - RNA, 19 nt, Artificial Sequence
  Description of Artificial Sequence: Synthetic oligonucleotide
acuguucuagacgcugggc

SEQ ID NO: 2354151 - RNA, 19 nt, Artificial Sequence
  Description of Artificial Sequence: Synthetic oligonucleotide
uguucuagacgcugggcaa

SEQ ID NO: 2354152 - RNA, 19 nt, Artificial Sequence
  Description of Artificial Sequence: Synthetic oligonucleotide
ucggaggcggcucaggaaa

SEQ ID NO: 2354153 - RNA, 19 nt, Artificial Sequence
  Description of Artificial Sequence: Synthetic oligonucleotide
caaaacccuaagugugucc

SEQ ID NO: 2354154 - RNA, 19 nt, Artificial Sequence
  Description of Artificial Sequence: Synthetic oligonucleotide
agacagucgagccagucua

SEQ ID NO: 2354155 - RNA, 19 nt, Artificial Sequence
  Description of Artificial Sequence: Synthetic oligonucleotide
agucgagccagucuacggu

SEQ ID NO: 2354156 - RNA, 19 nt, Artificial Sequence
  Description of Artificial Sequence: Synthetic oligonucleotide
cuuggaccaacuguucuag

SEQ ID NO: 2354157 - RNA, 19 nt, Artificial Sequence
  Description of Artificial Sequence: Synthetic oligonucleotide
ugggcggagaucucaguug

SEQ ID NO: 2354158 - RNA, 19 nt, Artificial Sequence
  Description of Artificial Sequence: Synthetic oligonucleotide
acaaggcgggcaaaagagc

SEQ ID NO: 2354159 - RNA, 19 nt, Artificial Sequence
  Description of Artificial Sequence: Synthetic oligonucleotide
ucugcucuagucgcgccgg

SEQ ID NO: 2354160 - RNA, 19 nt, Artificial Sequence
  Description of Artificial Sequence: Synthetic oligonucleotide
ucuuggaccaacuguucua

SEQ ID NO: 2354161 - RNA, 19 nt, Artificial Sequence
  Description of Artificial Sequence: Synthetic oligonucleotide
acuuuucuugguaaauuca

SEQ ID NO: 2354162 - RNA, 19 nt, Artificial Sequence
  Description of Artificial Sequence: Synthetic oligonucleotide
gaggcuagcuuuugguuga

SEQ ID NO: 2354163 - RNA, 19 nt, Artificial Sequence
  Description of Artificial Sequence: Synthetic oligonucleotide
uccuggguggaguuggaac

SEQ ID NO: 2354164 - RNA, 19 nt, Artificial Sequence
  Description of Artificial Sequence: Synthetic oligonucleotide
auagaagucugaagaagcu

SEQ ID NO: 2354165 - RNA, 19 nt, Artificial Sequence
  Description of Artificial Sequence: Synthetic oligonucleotide
cucaguugcucuuggacca

SEQ ID NO: 2354166 - RNA, 19 nt, Artificial Sequence
  Description of Artificial Sequence: Synthetic oligonucleotide
aaguucaaguccacaggug

SEQ ID NO: 2354167 - RNA, 19 nt, Artificial Sequence
  Description of Artificial Sequence: Synthetic oligonucleotide
gcuguguacaugcuccacg

SEQ ID NO: 2354168 - RNA, 19 nt, Artificial Sequence
  Description of Artificial Sequence: Synthetic oligonucleotide
gucagaggcuagcuuuugg

SEQ ID NO: 2354169 - RNA, 19 nt, Artificial Sequence
  Description of Artificial Sequence: Synthetic oligonucleotide
ugacuucccgacuggagaa

SEQ ID NO: 2354170 - RNA, 19 nt, Artificial Sequence
  Description of Artificial Sequence: Synthetic oligonucleotide
ggaacucugggcugggcgg

SEQ ID NO: 2354171 - RNA, 19 nt, Artificial Sequence
  Description of Artificial Sequence: Synthetic oligonucleotide
caggcugggagccauagca

SEQ ID NO: 2354172 - RNA, 19 nt, Artificial Sequence
  Description of Artificial Sequence: Synthetic oligonucleotide
gucugaagaagcugggcca

SEQ ID NO: 2354173 - RNA, 19 nt, Artificial Sequence
  Description of Artificial Sequence: Synthetic oligonucleotide
guuggaacaggggacccag

SEQ ID NO: 2354174 - RNA, 19 nt, Artificial Sequence
  Description of Artificial Sequence: Synthetic oligonucleotide
cuggagaauaguuccacaa

SEQ ID NO: 2354175 - RNA, 19 nt, Artificial Sequence
  Description of Artificial Sequence: Synthetic oligonucleotide
cuaaguguguccucucgga

SEQ ID NO: 2354176 - RNA, 19 nt, Artificial Sequence
  Description of Artificial Sequence: Synthetic oligonucleotide
cuguucuagacgcugggca

SEQ ID NO: 2354177 - RNA, 19 nt, Artificial Sequence
  Description of Artificial Sequence: Synthetic oligonucleotide
guaggggaaggaagcaggg

SEQ ID NO: 2354178 - RNA, 19 nt, Artificial Sequence
  Description of Artificial Sequence: Synthetic oligonucleotide
ugcugggcauggcagcgag

SEQ ID NO: 2354179 - RNA, 19 nt, Artificial Sequence
  Description of Artificial Sequence: Synthetic oligonucleotide
ucaccgcgccuaaggaagg

SEQ ID NO: 2354180 - RNA, 19 nt, Artificial Sequence
  Description of Artificial Sequence: Synthetic oligonucleotide
cagucgagccagucuacgg

SEQ ID NO: 2354181 - RNA, 19 nt, Artificial Sequence
  Description of Artificial Sequence: Synthetic oligonucleotide
uguguacaugcuccacgcu

SEQ ID NO: 2354182 - RNA, 19 nt, Artificial Sequence
  Description of Artificial Sequence: Synthetic oligonucleotide
gacuggagaauaguuccac

SEQ ID NO: 2354183 - RNA, 19 nt, Artificial Sequence
  Description of Artificial Sequence: Synthetic oligonucleotide
uucaacuuucccgcgccug

SEQ ID NO: 2354184 - RNA, 19 nt, Artificial Sequence
  Description of Artificial Sequence: Synthetic oligonucleotide
gcauagaagucugaagaag

SEQ ID NO: 2354185 - RNA, 19 nt, Artificial Sequence
  Description of Artificial Sequence: Synthetic oligonucleotide
acaucuucggaggcggcuc

SEQ ID NO: 2354186 - RNA, 19 nt, Artificial Sequence
  Description of Artificial Sequence: Synthetic oligonucleotide
ucgagccagucuacggugc

SEQ ID NO: 2354187 - RNA, 19 nt, Artificial Sequence
  Description of Artificial Sequence: Synthetic oligonucleotide
ccaaggguaaguucaaguc

SEQ ID NO: 2354188 - RNA, 19 nt, Artificial Sequence
  Description of Artificial Sequence: Synthetic oligonucleotide
guccacaggugacauggcc

SEQ ID NO: 2354189 - RNA, 19 nt, Artificial Sequence
  Description of Artificial Sequence: Synthetic oligonucleotide
gacccuggaacucugggcu

SEQ ID NO: 2354190 - RNA, 19 nt, Artificial Sequence
  Description of Artificial Sequence: Synthetic oligonucleotide
ggaagcagggccgagagga

SEQ ID NO: 2354191 - RNA, 19 nt, Artificial Sequence
  Description of Artificial Sequence: Synthetic oligonucleotide
cugacuucccgacuggaga

SEQ ID NO: 2354192 - RNA, 19 nt, Artificial Sequence
  Description of Artificial Sequence: Synthetic oligonucleotide
gucgagccagucuacggug

SEQ ID NO: 2354193 - RNA, 19 nt, Artificial Sequence
  Description of Artificial Sequence: Synthetic oligonucleotide
acgguuucacucaauuuca

SEQ ID NO: 2354194 - RNA, 19 nt, Artificial Sequence
  Description of Artificial Sequence: Synthetic oligonucleotide
cacgcugaggccagccagg

SEQ ID NO: 2354195 - RNA, 19 nt, Artificial Sequence
  Description of Artificial Sequence: Synthetic oligonucleotide
cuucccgacuggagaauag

SEQ ID NO: 2354196 - RNA, 19 nt, Artificial Sequence
  Description of Artificial Sequence: Synthetic oligonucleotide
uccacaaggcgggcaaaag

SEQ ID NO: 2354197 - RNA, 19 nt, Artificial Sequence
  Description of Artificial Sequence: Synthetic oligonucleotide
cucugcucuagucgcgccg

SEQ ID NO: 2354198 - RNA, 19 nt, Artificial Sequence
  Description of Artificial Sequence: Synthetic oligonucleotide
auaguuccacaaggcgggc

SEQ ID NO: 2354199 - RNA, 19 nt, Artificial Sequence
  Description of Artificial Sequence: Synthetic oligonucleotide
uguguccucucggagcccc

SEQ ID NO: 2354200 - RNA, 19 nt, Artificial Sequence
  Description of Artificial Sequence: Synthetic oligonucleotide
auccaaggcgcaaagcugu

SEQ ID NO: 2354201 - RNA, 19 nt, Artificial Sequence
  Description of Artificial Sequence: Synthetic oligonucleotide
gagaggacuccaggggagg

SEQ ID NO: 2354202 - RNA, 19 nt, Artificial Sequence
  Description of Artificial Sequence: Synthetic oligonucleotide
gagcugacuucccgacugg

SEQ ID NO: 2354203 - RNA, 19 nt, Artificial Sequence
  Description of Artificial Sequence: Synthetic oligonucleotide
aaggcagccaaaacccuaa

SEQ ID NO: 2354204 - RNA, 19 nt, Artificial Sequence
  Description of Artificial Sequence: Synthetic oligonucleotide
uucuagacgcugggcaacc

SEQ ID NO: 2354205 - RNA, 19 nt, Artificial Sequence
  Description of Artificial Sequence: Synthetic oligonucleotide
cuggauccaaggcgcaaag

SEQ ID NO: 2354206 - RNA, 19 nt, Artificial Sequence
  Description of Artificial Sequence: Synthetic oligonucleotide
uccaaggcgcaaagcugug

SEQ ID NO: 2354207 - RNA, 19 nt, Artificial Sequence
  Description of Artificial Sequence: Synthetic oligonucleotide
ucuagucgcgccggcgccg

SEQ ID NO: 2354208 - RNA, 19 nt, Artificial Sequence
  Description of Artificial Sequence: Synthetic oligonucleotide
uacggugcagagccggguc

SEQ ID NO: 2354209 - RNA, 19 nt, Artificial Sequence
  Description of Artificial Sequence: Synthetic oligonucleotide
gccgagaggacuccagggg

SEQ ID NO: 2354210 - RNA, 19 nt, Artificial Sequence
  Description of Artificial Sequence: Synthetic oligonucleotide
agcuguguacaugcuccac

SEQ ID NO: 2354211 - RNA, 19 nt, Artificial Sequence
  Description of Artificial Sequence: Synthetic oligonucleotide
ucccgacuggagaauaguu

SEQ ID NO: 2354212 - RNA, 19 nt, Artificial Sequence
  Description of Artificial Sequence: Synthetic oligonucleotide
ugcucuagucgcgccggcg

SEQ ID NO: 2354213 - RNA, 19 nt, Artificial Sequence
  Description of Artificial Sequence: Synthetic oligonucleotide
gccccagaucuucagagcc

SEQ ID NO: 2354214 - RNA, 19 nt, Artificial Sequence
  Description of Artificial Sequence: Synthetic oligonucleotide
ggaagacaucuucggaggc

SEQ ID NO: 2354215 - RNA, 19 nt, Artificial Sequence
  Description of Artificial Sequence: Synthetic oligonucleotide
ggauccaaggcgcaaagcu

SEQ ID NO: 2354216 - RNA, 19 nt, Artificial Sequence
  Description of Artificial Sequence: Synthetic oligonucleotide
cugguuuggggcucugcuc

SEQ ID NO: 2354217 - RNA, 19 nt, Artificial Sequence
  Description of Artificial Sequence: Synthetic oligonucleotide
cucucccaaggggacaagg

SEQ ID NO: 2354218 - RNA, 19 nt, Artificial Sequence
  Description of Artificial Sequence: Synthetic oligonucleotide
aacaggggacccagcagcu

SEQ ID NO: 2354219 - RNA, 19 nt, Artificial Sequence
  Description of Artificial Sequence: Synthetic oligonucleotide
aagcagggccgagaggacu

SEQ ID NO: 2354220 - RNA, 19 nt, Artificial Sequence
  Description of Artificial Sequence: Synthetic oligonucleotide
ggccgagaggacuccaggg

SEQ ID NO: 2354221 - RNA, 19 nt, Artificial Sequence
  Description of Artificial Sequence: Synthetic oligonucleotide
aguuuggggaggagcugac

SEQ ID NO: 2354222 - RNA, 19 nt, Artificial Sequence
  Description of Artificial Sequence: Synthetic oligonucleotide
uggauccaaggcgcaaagc

SEQ ID NO: 2354223 - RNA, 19 nt, Artificial Sequence
  Description of Artificial Sequence: Synthetic oligonucleotide
guacaugcuccacgcugag

SEQ ID NO: 2354224 - RNA, 19 nt, Artificial Sequence
  Description of Artificial Sequence: Synthetic oligonucleotide
gugguuccggggauggcgg

SEQ ID NO: 2354225 - RNA, 19 nt, Artificial Sequence
  Description of Artificial Sequence: Synthetic oligonucleotide
guuccggggauggcggugg

SEQ ID NO: 2354226 - RNA, 19 nt, Artificial Sequence
  Description of Artificial Sequence: Synthetic oligonucleotide
gaaggaagcagggccgaga

SEQ ID NO: 2354227 - RNA, 19 nt, Artificial Sequence
  Description of Artificial Sequence: Synthetic oligonucleotide
cacaguuuggggaggagcu

SEQ ID NO: 2354228 - RNA, 19 nt, Artificial Sequence
  Description of Artificial Sequence: Synthetic oligonucleotide
aggcgcaaagcuguguaca

SEQ ID NO: 2354229 - RNA, 19 nt, Artificial Sequence
  Description of Artificial Sequence: Synthetic oligonucleotide
agcuccauggccagggcca

SEQ ID NO: 2354230 - RNA, 19 nt, Artificial Sequence
  Description of Artificial Sequence: Synthetic oligonucleotide
uucccgacuggagaauagu

SEQ ID NO: 2354231 - RNA, 19 nt, Artificial Sequence
  Description of Artificial Sequence: Synthetic oligonucleotide
ggcauagaagucugaagaa

SEQ ID NO: 2354232 - RNA, 19 nt, Artificial Sequence
  Description of Artificial Sequence: Synthetic oligonucleotide
acuuucccgcgccugcgca

SEQ ID NO: 2354233 - RNA, 19 nt, Artificial Sequence
  Description of Artificial Sequence: Synthetic oligonucleotide
gaguuggaacaggggaccc

SEQ ID NO: 2354234 - RNA, 19 nt, Artificial Sequence
  Description of Artificial Sequence: Synthetic oligonucleotide
gggcggagaucucaguugc

SEQ ID NO: 2354235 - RNA, 19 nt, Artificial Sequence
  Description of Artificial Sequence: Synthetic oligonucleotide
ugggcaaccagggcauaga

SEQ ID NO: 2354236 - RNA, 19 nt, Artificial Sequence
  Description of Artificial Sequence: Synthetic oligonucleotide
ggacccuggaacucugggc

SEQ ID NO: 2354237 - RNA, 19 nt, Artificial Sequence
  Description of Artificial Sequence: Synthetic oligonucleotide
auggcagcgaggggcuggc

SEQ ID NO: 2354238 - RNA, 19 nt, Artificial Sequence
  Description of Artificial Sequence: Synthetic oligonucleotide
gggacccuggaacucuggg

SEQ ID NO: 2354239 - RNA, 19 nt, Artificial Sequence
  Description of Artificial Sequence: Synthetic oligonucleotide
aggguaaguucaaguccac

SEQ ID NO: 2354240 - RNA, 19 nt, Artificial Sequence
  Description of Artificial Sequence: Synthetic oligonucleotide
caaggggacaaggaagaca

SEQ ID NO: 2354241 - RNA, 19 nt, Artificial Sequence
  Description of Artificial Sequence: Synthetic oligonucleotide
cucuagucgcgccggcgcc

SEQ ID NO: 2354242 - RNA, 19 nt, Artificial Sequence
  Description of Artificial Sequence: Synthetic oligonucleotide
aggcgggcaaaagagccug

SEQ ID NO: 2354243 - RNA, 19 nt, Artificial Sequence
  Description of Artificial Sequence: Synthetic oligonucleotide
guucuagacgcugggcaac

SEQ ID NO: 2354244 - RNA, 19 nt, Artificial Sequence
  Description of Artificial Sequence: Synthetic oligonucleotide
cuuuugguugaugacuucu

SEQ ID NO: 2354245 - RNA, 19 nt, Artificial Sequence
  Description of Artificial Sequence: Synthetic oligonucleotide
aguccacaggugacauggc

SEQ ID NO: 2354246 - RNA, 19 nt, Artificial Sequence
  Description of Artificial Sequence: Synthetic oligonucleotide
auggaggcaccugguuugg

SEQ ID NO: 2354247 - RNA, 19 nt, Artificial Sequence
  Description of Artificial Sequence: Synthetic oligonucleotide
agacaucuucggaggcggc

SEQ ID NO: 2354248 - RNA, 19 nt, Artificial Sequence
  Description of Artificial Sequence: Synthetic oligonucleotide
uuccacaaggcgggcaaaa

SEQ ID NO: 2354249 - RNA, 19 nt, Artificial Sequence
  Description of Artificial Sequence: Synthetic oligonucleotide
aggcagccaaaacccuaag

SEQ ID NO: 2354250 - RNA, 19 nt, Artificial Sequence
  Description of Artificial Sequence: Synthetic oligonucleotide
aggaaaucuguuggcuccu

SEQ ID NO: 2354251 - RNA, 19 nt, Artificial Sequence
  Description of Artificial Sequence: Synthetic oligonucleotide
ccggcuuagcuccauggcc

SEQ ID NO: 2354252 - RNA, 19 nt, Artificial Sequence
  Description of Artificial Sequence: Synthetic oligonucleotide
agccgggucagaggcuagc

SEQ ID NO: 2354253 - RNA, 19 nt, Artificial Sequence
  Description of Artificial Sequence: Synthetic oligonucleotide
uccucucccaaggggacaa

SEQ ID NO: 2354254 - RNA, 19 nt, Artificial Sequence
  Description of Artificial Sequence: Synthetic oligonucleotide
cuucaccgcgccuaaggaa

SEQ ID NO: 2354255 - RNA, 19 nt, Artificial Sequence
  Description of Artificial Sequence: Synthetic oligonucleotide
caaggcgcaaagcugugua

SEQ ID NO: 2354256 - RNA, 19 nt, Artificial Sequence
  Description of Artificial Sequence: Synthetic oligonucleotide
acccuggaacucugggcug

SEQ ID NO: 2354257 - RNA, 19 nt, Artificial Sequence
  Description of Artificial Sequence: Synthetic oligonucleotide
cuuucccgcgccugcgcac

SEQ ID NO: 2354258 - RNA, 19 nt, Artificial Sequence
  Description of Artificial Sequence: Synthetic oligonucleotide
cccgacuggagaauaguuc

SEQ ID NO: 2354259 - RNA, 19 nt, Artificial Sequence
  Description of Artificial Sequence: Synthetic oligonucleotide
agccagucuacggugcaga

SEQ ID NO: 2354260 - RNA, 19 nt, Artificial Sequence
  Description of Artificial Sequence: Synthetic oligonucleotide
ucuagacgcugggcaacca

SEQ ID NO: 2354261 - RNA, 19 nt, Artificial Sequence
  Description of Artificial Sequence: Synthetic oligonucleotide
gacagucgagccagucuac

SEQ ID NO: 2354262 - RNA, 19 nt, Artificial Sequence
  Description of Artificial Sequence: Synthetic oligonucleotide
gagccagucuacggugcag

SEQ ID NO: 2354263 - RNA, 19 nt, Artificial Sequence
  Description of Artificial Sequence: Synthetic oligonucleotide
ccaacuguucuagacgcug

SEQ ID NO: 2354264 - RNA, 19 nt, Artificial Sequence
  Description of Artificial Sequence: Synthetic oligonucleotide
ggcuggcacaguuugggga

SEQ ID NO: 2354265 - RNA, 19 nt, Artificial Sequence
  Description of Artificial Sequence: Synthetic oligonucleotide
cugggcaaccagggcauag

SEQ ID NO: 2354266 - RNA, 19 nt, Artificial Sequence
  Description of Artificial Sequence: Synthetic oligonucleotide
gcucuagucgcgccggcgc

SEQ ID NO: 2354267 - RNA, 19 nt, Artificial Sequence
  Description of Artificial Sequence: Synthetic oligonucleotide
uggaggcaccugguuuggg

SEQ ID NO: 2354268 - RNA, 19 nt, Artificial Sequence
  Description of Artificial Sequence: Synthetic oligonucleotide
ggggacaaggaagacaucu

SEQ ID NO: 2354269 - RNA, 19 nt, Artificial Sequence
  Description of Artificial Sequence: Synthetic oligonucleotide
aguugcucuuggaccaacu

SEQ ID NO: 2354270 - RNA, 19 nt, Artificial Sequence
  Description of Artificial Sequence: Synthetic oligonucleotide
caguuuggggaggagcuga

SEQ ID NO: 2354271 - RNA, 19 nt, Artificial Sequence
  Description of Artificial Sequence: Synthetic oligonucleotide
ggcuuagcuccauggccag

SEQ ID NO: 2354272 - RNA, 19 nt, Artificial Sequence
  Description of Artificial Sequence: Synthetic oligonucleotide
caggcgggccagugguucc

SEQ ID NO: 2354273 - RNA, 19 nt, Artificial Sequence
  Description of Artificial Sequence: Synthetic oligonucleotide
agagccgggucagaggcua

SEQ ID NO: 2354274 - RNA, 19 nt, Artificial Sequence
  Description of Artificial Sequence: Synthetic oligonucleotide
ucaguugcucuuggaccaa

SEQ ID NO: 2354275 - RNA, 19 nt, Artificial Sequence
  Description of Artificial Sequence: Synthetic oligonucleotide
gcugacuucccgacuggag

SEQ ID NO: 2354276 - RNA, 19 nt, Artificial Sequence
  Description of Artificial Sequence: Synthetic oligonucleotide
gcucccacgguuucacuca

SEQ ID NO: 2354277 - RNA, 19 nt, Artificial Sequence
  Description of Artificial Sequence: Synthetic oligonucleotide
cuagucgcgccggcgccgg

SEQ ID NO: 2354278 - RNA, 19 nt, Artificial Sequence
  Description of Artificial Sequence: Synthetic oligonucleotide
uccggggauggcggugggg

SEQ ID NO: 2354279 - RNA, 19 nt, Artificial Sequence
  Description of Artificial Sequence: Synthetic oligonucleotide
aggguuccuggguggaguu

SEQ ID NO: 2354280 - RNA, 19 nt, Artificial Sequence
  Description of Artificial Sequence: Synthetic oligonucleotide
gacuccaggggaggggcuc

SEQ ID NO: 2354281 - RNA, 19 nt, Artificial Sequence
  Description of Artificial Sequence: Synthetic oligonucleotide
gccggcuuagcuccauggc

SEQ ID NO: 2354282 - RNA, 19 nt, Artificial Sequence
  Description of Artificial Sequence: Synthetic oligonucleotide
acuucccgacuggagaaua

SEQ ID NO: 2354283 - RNA, 19 nt, Artificial Sequence
  Description of Artificial Sequence: Synthetic oligonucleotide
cagggcauagaagucugaa

SEQ ID NO: 2354284 - RNA, 19 nt, Artificial Sequence
  Description of Artificial Sequence: Synthetic oligonucleotide
gcuucaccgcgccuaagga

SEQ ID NO: 2354285 - RNA, 19 nt, Artificial Sequence
  Description of Artificial Sequence: Synthetic oligonucleotide
agcugacuucccgacugga

SEQ ID NO: 2354286 - RNA, 19 nt, Artificial Sequence
  Description of Artificial Sequence: Synthetic oligonucleotide
accaacuguucuagacgcu

SEQ ID NO: 2354287 - RNA, 19 nt, Artificial Sequence
  Description of Artificial Sequence: Synthetic oligonucleotide
ccacgcugaggccagccag

SEQ ID NO: 2354288 - RNA, 19 nt, Artificial Sequence
  Description of Artificial Sequence: Synthetic oligonucleotide
cagacagucgagccagucu

SEQ ID NO: 2354289 - RNA, 19 nt, Artificial Sequence
  Description of Artificial Sequence: Synthetic oligonucleotide
uuccuggguggaguuggaa

SEQ ID NO: 2354290 - RNA, 19 nt, Artificial Sequence
  Description of Artificial Sequence: Synthetic oligonucleotide
caucuucggaggcggcuca

SEQ ID NO: 2354291 - RNA, 19 nt, Artificial Sequence
  Description of Artificial Sequence: Synthetic oligonucleotide
gcgccuaaggaaggcagcc

SEQ ID NO: 2354292 - RNA, 19 nt, Artificial Sequence
  Description of Artificial Sequence: Synthetic oligonucleotide
agggccgagaggacuccag

SEQ ID NO: 2354293 - RNA, 19 nt, Artificial Sequence
  Description of Artificial Sequence: Synthetic oligonucleotide
gccauagcaggggcguagg

SEQ ID NO: 2354294 - RNA, 19 nt, Artificial Sequence
  Description of Artificial Sequence: Synthetic oligonucleotide
aggggcguaggggaaggaa

SEQ ID NO: 2354295 - RNA, 19 nt, Artificial Sequence
  Description of Artificial Sequence: Synthetic oligonucleotide
aggcggcucaggaaaucug

SEQ ID NO: 2354296 - RNA, 19 nt, Artificial Sequence
  Description of Artificial Sequence: Synthetic oligonucleotide
accgcgccuaaggaaggca

SEQ ID NO: 2354297 - RNA, 19 nt, Artificial Sequence
  Description of Artificial Sequence: Synthetic oligonucleotide
ccacacgccggcuuagcuc

SEQ ID NO: 2354298 - RNA, 19 nt, Artificial Sequence
  Description of Artificial Sequence: Synthetic oligonucleotide
caguugcucuuggaccaac

SEQ ID NO: 2354299 - RNA, 19 nt, Artificial Sequence
  Description of Artificial Sequence: Synthetic oligonucleotide
ccgcgccuaaggaaggcag

SEQ ID NO: 2354300 - RNA, 19 nt, Artificial Sequence
  Description of Artificial Sequence: Synthetic oligonucleotide
gcggagaucucaguugcuc

SEQ ID NO: 2354301 - RNA, 19 nt, Artificial Sequence
  Description of Artificial Sequence: Synthetic oligonucleotide
ccagucuacggugcagagc

SEQ ID NO: 2354302 - RNA, 19 nt, Artificial Sequence
  Description of Artificial Sequence: Synthetic oligonucleotide
cugcucuagucgcgccggc

SEQ ID NO: 2354303 - RNA, 19 nt, Artificial Sequence
  Description of Artificial Sequence: Synthetic oligonucleotide
ucccacgguuucacucaau

SEQ ID NO: 2354304 - RNA, 19 nt, Artificial Sequence
  Description of Artificial Sequence: Synthetic oligonucleotide
ggcucugcucuagucgcgc

SEQ ID NO: 2354305 - RNA, 19 nt, Artificial Sequence
  Description of Artificial Sequence: Synthetic oligonucleotide
acgccggcuuagcuccaug

SEQ ID NO: 2354306 - RNA, 19 nt, Artificial Sequence
  Description of Artificial Sequence: Synthetic oligonucleotide
ccagccccgccacacgccg

SEQ ID NO: 2354307 - RNA, 19 nt, Artificial Sequence
  Description of Artificial Sequence: Synthetic oligonucleotide
caccgcgccuaaggaaggc

SEQ ID NO: 2354308 - RNA, 19 nt, Artificial Sequence
  Description of Artificial Sequence: Synthetic oligonucleotide
ggucagaggcuagcuuuug

SEQ ID NO: 2354309 - RNA, 19 nt, Artificial Sequence
  Description of Artificial Sequence: Synthetic oligonucleotide
cagaggcuagcuuuugguu

SEQ ID NO: 2354310 - RNA, 19 nt, Artificial Sequence
  Description of Artificial Sequence: Synthetic oligonucleotide
ggaaggaagcagggccgag

SEQ ID NO: 2354311 - RNA, 19 nt, Artificial Sequence
  Description of Artificial Sequence: Synthetic oligonucleotide
uucccgcgccugcgcacug

SEQ ID NO: 2354312 - RNA, 19 nt, Artificial Sequence
  Description of Artificial Sequence: Synthetic oligonucleotide
gggcaaccagggcauagaa

SEQ ID NO: 2354313 - RNA, 19 nt, Artificial Sequence
  Description of Artificial Sequence: Synthetic oligonucleotide
ccgagaggacuccagggga

SEQ ID NO: 2354314 - RNA, 19 nt, Artificial Sequence
  Description of Artificial Sequence: Synthetic oligonucleotide
gggacccagcagcuucacc

SEQ ID NO: 2354315 - RNA, 19 nt, Artificial Sequence
  Description of Artificial Sequence: Synthetic oligonucleotide
gcgcaaagcuguguacaug

SEQ ID NO: 2354316 - RNA, 19 nt, Artificial Sequence
  Description of Artificial Sequence: Synthetic oligonucleotide
cagccccgccacacgccgg

SEQ ID NO: 2354317 - RNA, 19 nt, Artificial Sequence
  Description of Artificial Sequence: Synthetic oligonucleotide
ggcugggcggagaucucag

SEQ ID NO: 2354318 - RNA, 19 nt, Artificial Sequence
  Description of Artificial Sequence: Synthetic oligonucleotide
gccaggaugccugcccagc

SEQ ID NO: 2354319 - RNA, 19 nt, Artificial Sequence
  Description of Artificial Sequence: Synthetic oligonucleotide
cgccggcuuagcuccaugg

SEQ ID NO: 2354320 - RNA, 19 nt, Artificial Sequence
  Description of Artificial Sequence: Synthetic oligonucleotide
ggcacaguuuggggaggag

SEQ ID NO: 2354321 - RNA, 19 nt, Artificial Sequence
  Description of Artificial Sequence: Synthetic oligonucleotide
cggcuuagcuccauggcca

SEQ ID NO: 2354322 - RNA, 19 nt, Artificial Sequence
  Description of Artificial Sequence: Synthetic oligonucleotide
cugggcggagaucucaguu

SEQ ID NO: 2354323 - RNA, 19 nt, Artificial Sequence
  Description of Artificial Sequence: Synthetic oligonucleotide
agucgcgccggcgccggcu

SEQ ID NO: 2354324 - RNA, 19 nt, Artificial Sequence
  Description of Artificial Sequence: Synthetic oligonucleotide
gggcucugcucuagucgcg

SEQ ID NO: 2354325 - RNA, 19 nt, Artificial Sequence
  Description of Artificial Sequence: Synthetic oligonucleotide
ggcguaggggaaggaagca

SEQ ID NO: 2354326 - RNA, 19 nt, Artificial Sequence
  Description of Artificial Sequence: Synthetic oligonucleotide
gcucuuggaccaacuguuc

SEQ ID NO: 2354327 - RNA, 19 nt, Artificial Sequence
  Description of Artificial Sequence: Synthetic oligonucleotide
cgcgccuaaggaaggcagc

SEQ ID NO: 2354328 - RNA, 19 nt, Artificial Sequence
  Description of Artificial Sequence: Synthetic oligonucleotide
gcagacagucgagccaguc

SEQ ID NO: 2354329 - RNA, 19 nt, Artificial Sequence
  Description of Artificial Sequence: Synthetic oligonucleotide
gggaaggaagcagggccga

SEQ ID NO: 2354330 - RNA, 19 nt, Artificial Sequence
  Description of Artificial Sequence: Synthetic oligonucleotide
cucccacgguuucacucaa

SEQ ID NO: 2354331 - RNA, 19 nt, Artificial Sequence
  Description of Artificial Sequence: Synthetic oligonucleotide
ggcgcaaagcuguguacau

SEQ ID NO: 2354332 - RNA, 19 nt, Artificial Sequence
  Description of Artificial Sequence: Synthetic oligonucleotide
guuccacaaggcgggcaaa

SEQ ID NO: 2354333 - RNA, 19 nt, Artificial Sequence
  Description of Artificial Sequence: Synthetic oligonucleotide
gcaggguuccuggguggag

SEQ ID NO: 2354334 - RNA, 19 nt, Artificial Sequence
  Description of Artificial Sequence: Synthetic oligonucleotide
guguguccucucggagccc

SEQ ID NO: 2354335 - RNA, 19 nt, Artificial Sequence
  Description of Artificial Sequence: Synthetic oligonucleotide
uagucgcgccggcgccggc

SEQ ID NO: 2354336 - RNA, 19 nt, Artificial Sequence
  Description of Artificial Sequence: Synthetic oligonucleotide
acaggggacccagcagcuu

SEQ ID NO: 2354337 - RNA, 19 nt, Artificial Sequence
  Description of Artificial Sequence: Synthetic oligonucleotide
guuuggggaggagcugacu

SEQ ID NO: 2354338 - RNA, 19 nt, Artificial Sequence
  Description of Artificial Sequence: Synthetic oligonucleotide
ggcggcucaggaaaucugu

SEQ ID NO: 2354339 - RNA, 19 nt, Artificial Sequence
  Description of Artificial Sequence: Synthetic oligonucleotide
ccugguuuggggcucugcu

SEQ ID NO: 2354340 - RNA, 19 nt, Artificial Sequence
  Description of Artificial Sequence: Synthetic oligonucleotide
gccagugguuccggggaug

SEQ ID NO: 2354341 - RNA, 19 nt, Artificial Sequence
  Description of Artificial Sequence: Synthetic oligonucleotide
ccggcgccggcucccacgg

SEQ ID NO: 2354342 - RNA, 19 nt, Artificial Sequence
  Description of Artificial Sequence: Synthetic oligonucleotide
ggaggcggcucaggaaauc

SEQ ID NO: 2354343 - RNA, 19 nt, Artificial Sequence
  Description of Artificial Sequence: Synthetic oligonucleotide
ccuccuuagcagggcuucc

SEQ ID NO: 2354344 - RNA, 19 nt, Artificial Sequence
  Description of Artificial Sequence: Synthetic oligonucleotide
gcgggccagugguuccggg

SEQ ID NO: 2354345 - RNA, 19 nt, Artificial Sequence
  Description of Artificial Sequence: Synthetic oligonucleotide
agccuccuuagcagggcuu

SEQ ID NO: 2354346 - RNA, 19 nt, Artificial Sequence
  Description of Artificial Sequence: Synthetic oligonucleotide
cccagccccgccacacgcc

SEQ ID NO: 2354347 - RNA, 19 nt, Artificial Sequence
  Description of Artificial Sequence: Synthetic oligonucleotide
gacuucccgacuggagaau

SEQ ID NO: 2354348 - RNA, 19 nt, Artificial Sequence
  Description of Artificial Sequence: Synthetic oligonucleotide
ggcaccugguuuggggcuc

SEQ ID NO: 2354349 - RNA, 19 nt, Artificial Sequence
  Description of Artificial Sequence: Synthetic oligonucleotide
aggcuagcuuuugguugau

SEQ ID NO: 2354350 - RNA, 19 nt, Artificial Sequence
  Description of Artificial Sequence: Synthetic oligonucleotide
ccaggcgggccagugguuc

SEQ ID NO: 2354351 - RNA, 19 nt, Artificial Sequence
  Description of Artificial Sequence: Synthetic oligonucleotide
ggcgggcaaaagagccugc

SEQ ID NO: 2354352 - RNA, 19 nt, Artificial Sequence
  Description of Artificial Sequence: Synthetic oligonucleotide
ggcgggccagugguuccgg

SEQ ID NO: 2354353 - RNA, 19 nt, Artificial Sequence
  Description of Artificial Sequence: Synthetic oligonucleotide
gcagggccgagaggacucc

SEQ ID NO: 2354354 - RNA, 19 nt, Artificial Sequence
  Description of Artificial Sequence: Synthetic oligonucleotide
agcgaggggcuggcacagu

SEQ ID NO: 2354355 - RNA, 19 nt, Artificial Sequence
  Description of Artificial Sequence: Synthetic oligonucleotide
gcaaagcuguguacaugcu

SEQ ID NO: 2354356 - RNA, 19 nt, Artificial Sequence
  Description of Artificial Sequence: Synthetic oligonucleotide
caggugacauggccaggau

SEQ ID NO: 2354357 - RNA, 19 nt, Artificial Sequence
  Description of Artificial Sequence: Synthetic oligonucleotide
caccugguuuggggcucug

SEQ ID NO: 2354358 - RNA, 19 nt, Artificial Sequence
  Description of Artificial Sequence: Synthetic oligonucleotide
cccacgguuucacucaauu

SEQ ID NO: 2354359 - RNA, 19 nt, Artificial Sequence
  Description of Artificial Sequence: Synthetic oligonucleotide
cggagaucucaguugcucu

SEQ ID NO: 2354360 - RNA, 19 nt, Artificial Sequence
  Description of Artificial Sequence: Synthetic oligonucleotide
cagggccgagaggacucca

SEQ ID NO: 2354361 - RNA, 19 nt, Artificial Sequence
  Description of Artificial Sequence: Synthetic oligonucleotide
ccggccauggaggcaccug

SEQ ID NO: 2354362 - RNA, 19 nt, Artificial Sequence
  Description of Artificial Sequence: Synthetic oligonucleotide
ccacgguuucacucaauuu

SEQ ID NO: 2354363 - RNA, 19 nt, Artificial Sequence
  Description of Artificial Sequence: Synthetic oligonucleotide
acacgccggcuuagcucca

SEQ ID NO: 2354364 - RNA, 19 nt, Artificial Sequence
  Description of Artificial Sequence: Synthetic oligonucleotide
gcugggcggagaucucagu

SEQ ID NO: 2354365 - RNA, 19 nt, Artificial Sequence
  Description of Artificial Sequence: Synthetic oligonucleotide
gccauggaggcaccugguu

SEQ ID NO: 2354366 - RNA, 19 nt, Artificial Sequence
  Description of Artificial Sequence: Synthetic oligonucleotide
ccuuagcagggcuuccuuu

SEQ ID NO: 2354367 - RNA, 19 nt, Artificial Sequence
  Description of Artificial Sequence: Synthetic oligonucleotide
cgagccagucuacggugca

SEQ ID NO: 2354368 - RNA, 19 nt, Artificial Sequence
  Description of Artificial Sequence: Synthetic oligonucleotide
ggccuggauccaaggcgca

SEQ ID NO: 2354369 - RNA, 19 nt, Artificial Sequence
  Description of Artificial Sequence: Synthetic oligonucleotide
caggggcguaggggaagga

SEQ ID NO: 2354370 - RNA, 19 nt, Artificial Sequence
  Description of Artificial Sequence: Synthetic oligonucleotide
gcgaggggcuggcacaguu

SEQ ID NO: 2354371 - RNA, 19 nt, Artificial Sequence
  Description of Artificial Sequence: Synthetic oligonucleotide
ccgcgccugcgcacugggc

SEQ ID NO: 2354372 - RNA, 19 nt, Artificial Sequence
  Description of Artificial Sequence: Synthetic oligonucleotide
ggccauggaggcaccuggu

SEQ ID NO: 2354373 - RNA, 19 nt, Artificial Sequence
  Description of Artificial Sequence: Synthetic oligonucleotide
gccgggucagaggcuagcu

SEQ ID NO: 2354374 - RNA, 19 nt, Artificial Sequence
  Description of Artificial Sequence: Synthetic oligonucleotide
ggcggagaucucaguugcu

SEQ ID NO: 2354375 - RNA, 19 nt, Artificial Sequence
  Description of Artificial Sequence: Synthetic oligonucleotide
ccgccacacgccggcuuag

SEQ ID NO: 2354376 - RNA, 19 nt, Artificial Sequence
  Description of Artificial Sequence: Synthetic oligonucleotide
gcuccacgcugaggccagc

SEQ ID NO: 2354377 - RNA, 19 nt, Artificial Sequence
  Description of Artificial Sequence: Synthetic oligonucleotide
ccaaggcgcaaagcugugu

SEQ ID NO: 2354378 - RNA, 19 nt, Artificial Sequence
  Description of Artificial Sequence: Synthetic oligonucleotide
gcggcucaggaaaucuguu

SEQ ID NO: 2354379 - RNA, 19 nt, Artificial Sequence
  Description of Artificial Sequence: Synthetic oligonucleotide
cgccacacgccggcuuagc

SEQ ID NO: 2354380 - RNA, 19 nt, Artificial Sequence
  Description of Artificial Sequence: Synthetic oligonucleotide
cgguuucacucaauuucau

SEQ ID NO: 2354381 - RNA, 19 nt, Artificial Sequence
  Description of Artificial Sequence: Synthetic oligonucleotide
cacgccggcuuagcuccau

SEQ ID NO: 2354382 - RNA, 19 nt, Artificial Sequence
  Description of Artificial Sequence: Synthetic oligonucleotide
gccugcgcacugggccgac

SEQ ID NO: 2354383 - RNA, 19 nt, Artificial Sequence
  Description of Artificial Sequence: Synthetic oligonucleotide
ccgggucagaggcuagcuu

SEQ ID NO: 2354384 - RNA, 19 nt, Artificial Sequence
  Description of Artificial Sequence: Synthetic oligonucleotide
cgcgccggcgccggcuccc

SEQ ID NO: 2354385 - RNA, 19 nt, Artificial Sequence
  Description of Artificial Sequence: Synthetic oligonucleotide
ccugcgcacugggccgaca

SEQ ID NO: 2354386 - RNA, 19 nt, Artificial Sequence
  Description of Artificial Sequence: Synthetic oligonucleotide
cgaggggcuggcacaguuu

SEQ ID NO: 2354387 - RNA, 19 nt, Artificial Sequence
  Description of Artificial Sequence: Synthetic oligonucleotide
gcgccggcucccacgguuu

SEQ ID NO: 2354388 - RNA, 19 nt, Artificial Sequence
  Description of Artificial Sequence: Synthetic oligonucleotide
cgccugcgcacugggccga

SEQ ID NO: 2354389 - RNA, 19 nt, Artificial Sequence
  Description of Artificial Sequence: Synthetic oligonucleotide
gccaggcgggccagugguu

SEQ ID NO: 2354390 - RNA, 19 nt, Artificial Sequence
  Description of Artificial Sequence: Synthetic oligonucleotide
ccccgccacacgccggcuu

SEQ ID NO: 2354391 - RNA, 19 nt, Artificial Sequence
  Description of Artificial Sequence: Synthetic oligonucleotide
gccccgccacacgccggcu

SEQ ID NO: 2354392 - RNA, 19 nt, Artificial Sequence
  Description of Artificial Sequence: Synthetic oligonucleotide
gaaauuacuauguacaggg

SEQ ID NO: 2354393 - RNA, 19 nt, Artificial Sequence
  Description of Artificial Sequence: Synthetic oligonucleotide
aaggaaauaaaguucaaug

SEQ ID NO: 2354394 - RNA, 19 nt, Artificial Sequence
  Description of Artificial Sequence: Synthetic oligonucleotide
aacggaaggacucuugccc

SEQ ID NO: 2354395 - RNA, 19 nt, Artificial Sequence
  Description of Artificial Sequence: Synthetic oligonucleotide
ucaauguugaccauacggg

SEQ ID NO: 2354396 - RNA, 19 nt, Artificial Sequence
  Description of Artificial Sequence: Synthetic oligonucleotide
uuuugagucagucaggcca

SEQ ID NO: 2354397 - RNA, 19 nt, Artificial Sequence
  Description of Artificial Sequence: Synthetic oligonucleotide
aauauaaggccaugcuccc

SEQ ID NO: 2354398 - RNA, 19 nt, Artificial Sequence
  Description of Artificial Sequence: Synthetic oligonucleotide
uaugaaaugacaagcaggu

SEQ ID NO: 2354399 - RNA, 19 nt, Artificial Sequence
  Description of Artificial Sequence: Synthetic oligonucleotide
aaucuugaugccauuagcc

SEQ ID NO: 2354400 - RNA, 19 nt, Artificial Sequence
  Description of Artificial Sequence: Synthetic oligonucleotide
uuaggugaggaacagaugu

SEQ ID NO: 2354401 - RNA, 19 nt, Artificial Sequence
  Description of Artificial Sequence: Synthetic oligonucleotide
aucaaauaagcccugcugg

SEQ ID NO: 2354402 - RNA, 19 nt, Artificial Sequence
  Description of Artificial Sequence: Synthetic oligonucleotide
uugaaauugacuguugggg

SEQ ID NO: 2354403 - RNA, 19 nt, Artificial Sequence
  Description of Artificial Sequence: Synthetic oligonucleotide
gaauauaaggccaugcucc

SEQ ID NO: 2354404 - RNA, 19 nt, Artificial Sequence
  Description of Artificial Sequence: Synthetic oligonucleotide
cuauauauuucuuuggcug

SEQ ID NO: 2354405 - RNA, 19 nt, Artificial Sequence
  Description of Artificial Sequence: Synthetic oligonucleotide
gucaauguugaccauacgg

SEQ ID NO: 2354406 - RNA, 19 nt, Artificial Sequence
  Description of Artificial Sequence: Synthetic oligonucleotide
cugauguugaaauugacug

SEQ ID NO: 2354407 - RNA, 19 nt, Artificial Sequence
  Description of Artificial Sequence: Synthetic oligonucleotide
uaucaccuaaguuauacag

SEQ ID NO: 2354408 - RNA, 19 nt, Artificial Sequence
  Description of Artificial Sequence: Synthetic oligonucleotide
uguugaaauugacuguugg

SEQ ID NO: 2354409 - RNA, 19 nt, Artificial Sequence
  Description of Artificial Sequence: Synthetic oligonucleotide
uucuagaucacucuuauuu

SEQ ID NO: 2354410 - RNA, 19 nt, Artificial Sequence
  Description of Artificial Sequence: Synthetic oligonucleotide
aucagaacauccuucacuc

SEQ ID NO: 2354411 - RNA, 19 nt, Artificial Sequence
  Description of Artificial Sequence: Synthetic oligonucleotide
auaaccauguuugagcucg

SEQ ID NO: 2354412 - RNA, 19 nt, Artificial Sequence
  Description of Artificial Sequence: Synthetic oligonucleotide
aagaguuccgcugagauga

SEQ ID NO: 2354413 - RNA, 19 nt, Artificial Sequence
  Description of Artificial Sequence: Synthetic oligonucleotide
uuauacagauucauagucc

SEQ ID NO: 2354414 - RNA, 19 nt, Artificial Sequence
  Description of Artificial Sequence: Synthetic oligonucleotide
aaauaagcccugcuggauc

SEQ ID NO: 2354415 - RNA, 19 nt, Artificial Sequence
  Description of Artificial Sequence: Synthetic oligonucleotide
aauuacuauguacagggau

SEQ ID NO: 2354416 - RNA, 19 nt, Artificial Sequence
  Description of Artificial Sequence: Synthetic oligonucleotide
aguucaaugaaauuacuau

SEQ ID NO: 2354417 - RNA, 19 nt, Artificial Sequence
  Description of Artificial Sequence: Synthetic oligonucleotide
uccuauauauuucuuuggc

SEQ ID NO: 2354418 - RNA, 19 nt, Artificial Sequence
  Description of Artificial Sequence: Synthetic oligonucleotide
uuuccgucaauguugacca

SEQ ID NO: 2354419 - RNA, 19 nt, Artificial Sequence
  Description of Artificial Sequence: Synthetic oligonucleotide
aggaaauaaaguucaauga

SEQ ID NO: 2354420 - RNA, 19 nt, Artificial Sequence
  Description of Artificial Sequence: Synthetic oligonucleotide
ugaaauuacuauguacagg

SEQ ID NO: 2354421 - RNA, 19 nt, Artificial Sequence
  Description of Artificial Sequence: Synthetic oligonucleotide
uccgcugagaugaauuugg

SEQ ID NO: 2354422 - RNA, 19 nt, Artificial Sequence
  Description of Artificial Sequence: Synthetic oligonucleotide
agggauaucaccuaaguua

SEQ ID NO: 2354423 - RNA, 19 nt, Artificial Sequence
  Description of Artificial Sequence: Synthetic oligonucleotide
ugaaauugacuguuggggc

SEQ ID NO: 2354424 - RNA, 19 nt, Artificial Sequence
  Description of Artificial Sequence: Synthetic oligonucleotide
uauacagauucauaguccu

SEQ ID NO: 2354425 - RNA, 19 nt, Artificial Sequence
  Description of Artificial Sequence: Synthetic oligonucleotide
aaauugacuguuggggccc

SEQ ID NO: 2354426 - RNA, 19 nt, Artificial Sequence
  Description of Artificial Sequence: Synthetic oligonucleotide
aggaacgggugauagaacg

SEQ ID NO: 2354427 - RNA, 19 nt, Artificial Sequence
  Description of Artificial Sequence: Synthetic oligonucleotide
uuauaaccauguuugagcu

SEQ ID NO: 2354428 - RNA, 19 nt, Artificial Sequence
  Description of Artificial Sequence: Synthetic oligonucleotide
ugaauauaaggccaugcuc

SEQ ID NO: 2354429 - RNA, 19 nt, Artificial Sequence
  Description of Artificial Sequence: Synthetic oligonucleotide
agaacggaaggacucuugc

SEQ ID NO: 2354430 - RNA, 19 nt, Artificial Sequence
  Description of Artificial Sequence: Synthetic oligonucleotide
uccaaucagcauuauaacc

SEQ ID NO: 2354431 - RNA, 19 nt, Artificial Sequence
  Description of Artificial Sequence: Synthetic oligonucleotide
uguucaaucagaacauccu

SEQ ID NO: 2354432 - RNA, 19 nt, Artificial Sequence
  Description of Artificial Sequence: Synthetic oligonucleotide
guugaaauugacuguuggg

SEQ ID NO: 2354433 - RNA, 19 nt, Artificial Sequence
  Description of Artificial Sequence: Synthetic oligonucleotide
uauaggaacuccuaugaaa

SEQ ID NO: 2354434 - RNA, 19 nt, Artificial Sequence
  Description of Artificial Sequence: Synthetic oligonucleotide
cuuccuauauauuucuuug

SEQ ID NO: 2354435 - RNA, 19 nt, Artificial Sequence
  Description of Artificial Sequence: Synthetic oligonucleotide
uccuaaauguucaaucaga

SEQ ID NO: 2354436 - RNA, 19 nt, Artificial Sequence
  Description of Artificial Sequence: Synthetic oligonucleotide
gaaauugacuguuggggcc

SEQ ID NO: 2354437 - RNA, 19 nt, Artificial Sequence
  Description of Artificial Sequence: Synthetic oligonucleotide
ucaaucagaacauccuuca

SEQ ID NO: 2354438 - RNA, 19 nt, Artificial Sequence
  Description of Artificial Sequence: Synthetic oligonucleotide
uuuuccgucaauguugacc

SEQ ID NO: 2354439 - RNA, 19 nt, Artificial Sequence
  Description of Artificial Sequence: Synthetic oligonucleotide
gauaucaccuaaguuauac

SEQ ID NO: 2354440 - RNA, 19 nt, Artificial Sequence
  Description of Artificial Sequence: Synthetic oligonucleotide
uauauauuucuuuggcugu

SEQ ID NO: 2354441 - RNA, 19 nt, Artificial Sequence
  Description of Artificial Sequence: Synthetic oligonucleotide
uuaucggugaacugcagga

SEQ ID NO: 2354442 - RNA, 19 nt, Artificial Sequence
  Description of Artificial Sequence: Synthetic oligonucleotide
cuagaucacucuuauuucc

SEQ ID NO: 2354443 - RNA, 19 nt, Artificial Sequence
  Description of Artificial Sequence: Synthetic oligonucleotide
acucuuauuuccaaucagc

SEQ ID NO: 2354444 - RNA, 19 nt, Artificial Sequence
  Description of Artificial Sequence: Synthetic oligonucleotide
aauaagcccugcuggaucu

SEQ ID NO: 2354445 - RNA, 19 nt, Artificial Sequence
  Description of Artificial Sequence: Synthetic oligonucleotide
uucuauaggaacuccuaug

SEQ ID NO: 2354446 - RNA, 19 nt, Artificial Sequence
  Description of Artificial Sequence: Synthetic oligonucleotide
ucaccuaaguuauacagau

SEQ ID NO: 2354447 - RNA, 19 nt, Artificial Sequence
  Description of Artificial Sequence: Synthetic oligonucleotide
acuccuaugaaaugacaag

SEQ ID NO: 2354448 - RNA, 19 nt, Artificial Sequence
  Description of Artificial Sequence: Synthetic oligonucleotide
aguuauacagauucauagu

SEQ ID NO: 2354449 - RNA, 19 nt, Artificial Sequence
  Description of Artificial Sequence: Synthetic oligonucleotide
gaagguuucacgucuugug

SEQ ID NO: 2354450 - RNA, 19 nt, Artificial Sequence
  Description of Artificial Sequence: Synthetic oligonucleotide
auguucaaucagaacaucc

SEQ ID NO: 2354451 - RNA, 19 nt, Artificial Sequence
  Description of Artificial Sequence: Synthetic oligonucleotide
uuugagucagucaggccag

SEQ ID NO: 2354452 - RNA, 19 nt, Artificial Sequence
  Description of Artificial Sequence: Synthetic oligonucleotide
aguccuaaauguucaauca

SEQ ID NO: 2354453 - RNA, 19 nt, Artificial Sequence
  Description of Artificial Sequence: Synthetic oligonucleotide
uauaaggccaugcucccga

SEQ ID NO: 2354454 - RNA, 19 nt, Artificial Sequence
  Description of Artificial Sequence: Synthetic oligonucleotide
augaauauaaggccaugcu

SEQ ID NO: 2354455 - RNA, 19 nt, Artificial Sequence
  Description of Artificial Sequence: Synthetic oligonucleotide
cuuuucacaucccuucggg

SEQ ID NO: 2354456 - RNA, 19 nt, Artificial Sequence
  Description of Artificial Sequence: Synthetic oligonucleotide
uauguacagggauaucacc

SEQ ID NO: 2354457 - RNA, 19 nt, Artificial Sequence
  Description of Artificial Sequence: Synthetic oligonucleotide
aauguucaaucagaacauc

SEQ ID NO: 2354458 - RNA, 19 nt, Artificial Sequence
  Description of Artificial Sequence: Synthetic oligonucleotide
augaauuuggucccgcuga

SEQ ID NO: 2354459 - RNA, 19 nt, Artificial Sequence
  Description of Artificial Sequence: Synthetic oligonucleotide
ucauuauggacaucaaaua

SEQ ID NO: 2354460 - RNA, 19 nt, Artificial Sequence
  Description of Artificial Sequence: Synthetic oligonucleotide
cuaaccaugaggucaggug

SEQ ID NO: 2354461 - RNA, 19 nt, Artificial Sequence
  Description of Artificial Sequence: Synthetic oligonucleotide
uccucuaaccaugagguca

SEQ ID NO: 2354462 - RNA, 19 nt, Artificial Sequence
  Description of Artificial Sequence: Synthetic oligonucleotide
cauccuucacucuagcuac

SEQ ID NO: 2354463 - RNA, 19 nt, Artificial Sequence
  Description of Artificial Sequence: Synthetic oligonucleotide
auuuguuuuccgucaaugu

SEQ ID NO: 2354464 - RNA, 19 nt, Artificial Sequence
  Description of Artificial Sequence: Synthetic oligonucleotide
uguuuuccgucaauguuga

SEQ ID NO: 2354465 - RNA, 19 nt, Artificial Sequence
  Description of Artificial Sequence: Synthetic oligonucleotide
ugcaggaggagacaugacu

SEQ ID NO: 2354466 - RNA, 19 nt, Artificial Sequence
  Description of Artificial Sequence: Synthetic oligonucleotide
guuaaugaaggccucuuca

SEQ ID NO: 2354467 - RNA, 19 nt, Artificial Sequence
  Description of Artificial Sequence: Synthetic oligonucleotide
gaugaauuuggucccgcug

SEQ ID NO: 2354468 - RNA, 19 nt, Artificial Sequence
  Description of Artificial Sequence: Synthetic oligonucleotide
gauuuguuuuccgucaaug

SEQ ID NO: 2354469 - RNA, 19 nt, Artificial Sequence
  Description of Artificial Sequence: Synthetic oligonucleotide
auguugaccauacgggcuc

SEQ ID NO: 2354470 - RNA, 19 nt, Artificial Sequence
  Description of Artificial Sequence: Synthetic oligonucleotide
cuuaucggugaacugcagg

SEQ ID NO: 2354471 - RNA, 19 nt, Artificial Sequence
  Description of Artificial Sequence: Synthetic oligonucleotide
cugagaugaauuugguccc

SEQ ID NO: 2354472 - RNA, 19 nt, Artificial Sequence
  Description of Artificial Sequence: Synthetic oligonucleotide
cuaaauguucaaucagaac

SEQ ID NO: 2354473 - RNA, 19 nt, Artificial Sequence
  Description of Artificial Sequence: Synthetic oligonucleotide
cauuauaaccauguuugag

SEQ ID NO: 2354474 - RNA, 19 nt, Artificial Sequence
  Description of Artificial Sequence: Synthetic oligonucleotide
cauacgggcuccaaacucc

SEQ ID NO: 2354475 - RNA, 19 nt, Artificial Sequence
  Description of Artificial Sequence: Synthetic oligonucleotide
caucaaauaagcccugcug

SEQ ID NO: 2354476 - RNA, 19 nt, Artificial Sequence
  Description of Artificial Sequence: Synthetic oligonucleotide
uucacgucuugugaugucg

SEQ ID NO: 2354477 - RNA, 19 nt, Artificial Sequence
  Description of Artificial Sequence: Synthetic oligonucleotide
aucggugaacugcaggagg

SEQ ID NO: 2354478 - RNA, 19 nt, Artificial Sequence
  Description of Artificial Sequence: Synthetic oligonucleotide
aguuugauuuguuuuccgu

SEQ ID NO: 2354479 - RNA, 19 nt, Artificial Sequence
  Description of Artificial Sequence: Synthetic oligonucleotide
agcaaaggccucuccuucc

SEQ ID NO: 2354480 - RNA, 19 nt, Artificial Sequence
  Description of Artificial Sequence: Synthetic oligonucleotide
aaaugacaagcagguuucc

SEQ ID NO: 2354481 - RNA, 19 nt, Artificial Sequence
  Description of Artificial Sequence: Synthetic oligonucleotide
agacaugacuucccacacc

SEQ ID NO: 2354482 - RNA, 19 nt, Artificial Sequence
  Description of Artificial Sequence: Synthetic oligonucleotide
uuucacaucccuucgggau

SEQ ID NO: 2354483 - RNA, 19 nt, Artificial Sequence
  Description of Artificial Sequence: Synthetic oligonucleotide
ugccauuagccucauuaug

SEQ ID NO: 2354484 - RNA, 19 nt, Artificial Sequence
  Description of Artificial Sequence: Synthetic oligonucleotide
agauuugcaguuugauuug

SEQ ID NO: 2354485 - RNA, 19 nt, Artificial Sequence
  Description of Artificial Sequence: Synthetic oligonucleotide
uacagauucauaguccuaa

SEQ ID NO: 2354486 - RNA, 19 nt, Artificial Sequence
  Description of Artificial Sequence: Synthetic oligonucleotide
auuagccucauuauggaca

SEQ ID NO: 2354487 - RNA, 19 nt, Artificial Sequence
  Description of Artificial Sequence: Synthetic oligonucleotide
agccguaucccagauuugc

SEQ ID NO: 2354488 - RNA, 19 nt, Artificial Sequence
  Description of Artificial Sequence: Synthetic oligonucleotide
ugagcucgagugcuggcgg

SEQ ID NO: 2354489 - RNA, 19 nt, Artificial Sequence
  Description of Artificial Sequence: Synthetic oligonucleotide
caaucuugaugccauuagc

SEQ ID NO: 2354490 - RNA, 19 nt, Artificial Sequence
  Description of Artificial Sequence: Synthetic oligonucleotide
aucacaagaguuccgcuga

SEQ ID NO: 2354491 - RNA, 19 nt, Artificial Sequence
  Description of Artificial Sequence: Synthetic oligonucleotide
uuccaaucagcauuauaac

SEQ ID NO: 2354492 - RNA, 19 nt, Artificial Sequence
  Description of Artificial Sequence: Synthetic oligonucleotide
uauugugaggucgugcaca

SEQ ID NO: 2354493 - RNA, 19 nt, Artificial Sequence
  Description of Artificial Sequence: Synthetic oligonucleotide
ugugucuccgaugaugaug

SEQ ID NO: 2354494 - RNA, 19 nt, Artificial Sequence
  Description of Artificial Sequence: Synthetic oligonucleotide
acauccuucacucuagcua

SEQ ID NO: 2354495 - RNA, 19 nt, Artificial Sequence
  Description of Artificial Sequence: Synthetic oligonucleotide
cauguuugagcucgagugc

SEQ ID NO: 2354496 - RNA, 19 nt, Artificial Sequence
  Description of Artificial Sequence: Synthetic oligonucleotide
gaccauacgggcuccaaac

SEQ ID NO: 2354497 - RNA, 19 nt, Artificial Sequence
  Description of Artificial Sequence: Synthetic oligonucleotide
acaccugugucuccgauga

SEQ ID NO: 2354498 - RNA, 19 nt, Artificial Sequence
  Description of Artificial Sequence: Synthetic oligonucleotide
ucgugcacaggcuggaacc

SEQ ID NO: 2354499 - RNA, 19 nt, Artificial Sequence
  Description of Artificial Sequence: Synthetic oligonucleotide
aacauccuucacucuagcu

SEQ ID NO: 2354500 - RNA, 19 nt, Artificial Sequence
  Description of Artificial Sequence: Synthetic oligonucleotide
uacagggauaucaccuaag

SEQ ID NO: 2354501 - RNA, 19 nt, Artificial Sequence
  Description of Artificial Sequence: Synthetic oligonucleotide
aacuccuaugaaaugacaa

SEQ ID NO: 2354502 - RNA, 19 nt, Artificial Sequence
  Description of Artificial Sequence: Synthetic oligonucleotide
aucagcauuauaaccaugu

SEQ ID NO: 2354503 - RNA, 19 nt, Artificial Sequence
  Description of Artificial Sequence: Synthetic oligonucleotide
acaagaguuccgcugagau

SEQ ID NO: 2354504 - RNA, 19 nt, Artificial Sequence
  Description of Artificial Sequence: Synthetic oligonucleotide
aggaggagacaugacuucc

SEQ ID NO: 2354505 - RNA, 19 nt, Artificial Sequence
  Description of Artificial Sequence: Synthetic oligonucleotide
caucacaagaguuccgcug

SEQ ID NO: 2354506 - RNA, 19 nt, Artificial Sequence
  Description of Artificial Sequence: Synthetic oligonucleotide
auugugaggucgugcacag

SEQ ID NO: 2354507 - RNA, 19 nt, Artificial Sequence
  Description of Artificial Sequence: Synthetic oligonucleotide
cauuauggacaucaaauaa

SEQ ID NO: 2354508 - RNA, 19 nt, Artificial Sequence
  Description of Artificial Sequence: Synthetic oligonucleotide
gaaggccucuucaacauug

SEQ ID NO: 2354509 - RNA, 19 nt, Artificial Sequence
  Description of Artificial Sequence: Synthetic oligonucleotide
uuuggucccgcugauguug

SEQ ID NO: 2354510 - RNA, 19 nt, Artificial Sequence
  Description of Artificial Sequence: Synthetic oligonucleotide
auaggaacuccuaugaaau

SEQ ID NO: 2354511 - RNA, 19 nt, Artificial Sequence
  Description of Artificial Sequence: Synthetic oligonucleotide
cucauuauggacaucaaau

SEQ ID NO: 2354512 - RNA, 19 nt, Artificial Sequence
  Description of Artificial Sequence: Synthetic oligonucleotide
uguuaaugaaggccucuuc

SEQ ID NO: 2354513 - RNA, 19 nt, Artificial Sequence
  Description of Artificial Sequence: Synthetic oligonucleotide
acagggauaucaccuaagu

SEQ ID NO: 2354514 - RNA, 19 nt, Artificial Sequence
  Description of Artificial Sequence: Synthetic oligonucleotide
cacaccuauugugaggucg

SEQ ID NO: 2354515 - RNA, 19 nt, Artificial Sequence
  Description of Artificial Sequence: Synthetic oligonucleotide
aaggacucuugcccagccg

SEQ ID NO: 2354516 - RNA, 19 nt, Artificial Sequence
  Description of Artificial Sequence: Synthetic oligonucleotide
aguacagaggugcccagcu

SEQ ID NO: 2354517 - RNA, 19 nt, Artificial Sequence
  Description of Artificial Sequence: Synthetic oligonucleotide
uuagccucauuauggacau

SEQ ID NO: 2354518 - RNA, 19 nt, Artificial Sequence
  Description of Artificial Sequence: Synthetic oligonucleotide
gcauccucuaaccaugagg

SEQ ID NO: 2354519 - RNA, 19 nt, Artificial Sequence
  Description of Artificial Sequence: Synthetic oligonucleotide
aggaacuccuaugaaauga

SEQ ID NO: 2354520 - RNA, 19 nt, Artificial Sequence
  Description of Artificial Sequence: Synthetic oligonucleotide
gccauuagccucauuaugg

SEQ ID NO: 2354521 - RNA, 19 nt, Artificial Sequence
  Description of Artificial Sequence: Synthetic oligonucleotide
uccaugaauauaaggccau

SEQ ID NO: 2354522 - RNA, 19 nt, Artificial Sequence
  Description of Artificial Sequence: Synthetic oligonucleotide
uuuucacaucccuucggga

SEQ ID NO: 2354523 - RNA, 19 nt, Artificial Sequence
  Description of Artificial Sequence: Synthetic oligonucleotide
ucggugaacugcaggagga

SEQ ID NO: 2354524 - RNA, 19 nt, Artificial Sequence
  Description of Artificial Sequence: Synthetic oligonucleotide
cucuuuucacaucccuucg

SEQ ID NO: 2354525 - RNA, 19 nt, Artificial Sequence
  Description of Artificial Sequence: Synthetic oligonucleotide
uugagcucgagugcuggcg

SEQ ID NO: 2354526 - RNA, 19 nt, Artificial Sequence
  Description of Artificial Sequence: Synthetic oligonucleotide
uaguaggaacgggugauag

SEQ ID NO: 2354527 - RNA, 19 nt, Artificial Sequence
  Description of Artificial Sequence: Synthetic oligonucleotide
ucgggauucuagaucacuc

SEQ ID NO: 2354528 - RNA, 19 nt, Artificial Sequence
  Description of Artificial Sequence: Synthetic oligonucleotide
acaucaaauaagcccugcu

SEQ ID NO: 2354529 - RNA, 19 nt, Artificial Sequence
  Description of Artificial Sequence: Synthetic oligonucleotide
auaucaccuaaguuauaca

SEQ ID NO: 2354530 - RNA, 19 nt, Artificial Sequence
  Description of Artificial Sequence: Synthetic oligonucleotide
uuacuauguacagggauau

SEQ ID NO: 2354531 - RNA, 19 nt, Artificial Sequence
  Description of Artificial Sequence: Synthetic oligonucleotide
accuauugugaggucgugc

SEQ ID NO: 2354532 - RNA, 19 nt, Artificial Sequence
  Description of Artificial Sequence: Synthetic oligonucleotide
auugcaggcugucuuggcu

SEQ ID NO: 2354533 - RNA, 19 nt, Artificial Sequence
  Description of Artificial Sequence: Synthetic oligonucleotide
uguaguaggaacgggugau

SEQ ID NO: 2354534 - RNA, 19 nt, Artificial Sequence
  Description of Artificial Sequence: Synthetic oligonucleotide
aggagacaugacuucccac

SEQ ID NO: 2354535 - RNA, 19 nt, Artificial Sequence
  Description of Artificial Sequence: Synthetic oligonucleotide
caguuugauuuguuuuccg

SEQ ID NO: 2354536 - RNA, 19 nt, Artificial Sequence
  Description of Artificial Sequence: Synthetic oligonucleotide
gagacaugacuucccacac

SEQ ID NO: 2354537 - RNA, 19 nt, Artificial Sequence
  Description of Artificial Sequence: Synthetic oligonucleotide
uuccaaggcaaggaaauaa

SEQ ID NO: 2354538 - RNA, 19 nt, Artificial Sequence
  Description of Artificial Sequence: Synthetic oligonucleotide
auguacagggauaucaccu

SEQ ID NO: 2354539 - RNA, 19 nt, Artificial Sequence
  Description of Artificial Sequence: Synthetic oligonucleotide
uagaacggaaggacucuug

SEQ ID NO: 2354540 - RNA, 19 nt, Artificial Sequence
  Description of Artificial Sequence: Synthetic oligonucleotide
gacaugacuucccacaccu

SEQ ID NO: 2354541 - RNA, 19 nt, Artificial Sequence
  Description of Artificial Sequence: Synthetic oligonucleotide
aggcuggaaccgcuuaucg

SEQ ID NO: 2354542 - RNA, 19 nt, Artificial Sequence
  Description of Artificial Sequence: Synthetic oligonucleotide
auuacuauguacagggaua

SEQ ID NO: 2354543 - RNA, 19 nt, Artificial Sequence
  Description of Artificial Sequence: Synthetic oligonucleotide
uugauuuguuuuccgucaa

SEQ ID NO: 2354544 - RNA, 19 nt, Artificial Sequence
  Description of Artificial Sequence: Synthetic oligonucleotide
uugaagguuucacgucuug

SEQ ID NO: 2354545 - RNA, 19 nt, Artificial Sequence
  Description of Artificial Sequence: Synthetic oligonucleotide
aaauuaggugaggaacaga

SEQ ID NO: 2354546 - RNA, 19 nt, Artificial Sequence
  Description of Artificial Sequence: Synthetic oligonucleotide
aaccgcuuaucggugaacu

SEQ ID NO: 2354547 - RNA, 19 nt, Artificial Sequence
  Description of Artificial Sequence: Synthetic oligonucleotide
acgucuugugaugucguac

SEQ ID NO: 2354548 - RNA, 19 nt, Artificial Sequence
  Description of Artificial Sequence: Synthetic oligonucleotide
cuacaucacaagaguuccg

SEQ ID NO: 2354549 - RNA, 19 nt, Artificial Sequence
  Description of Artificial Sequence: Synthetic oligonucleotide
aggacucuugcccagccgu

SEQ ID NO: 2354550 - RNA, 19 nt, Artificial Sequence
  Description of Artificial Sequence: Synthetic oligonucleotide
acugcaggaggagacauga

SEQ ID NO: 2354551 - RNA, 19 nt, Artificial Sequence
  Description of Artificial Sequence: Synthetic oligonucleotide
uguuggggcccaaucuuga

SEQ ID NO: 2354552 - RNA, 19 nt, Artificial Sequence
  Description of Artificial Sequence: Synthetic oligonucleotide
ugacuucccacaccugugu

SEQ ID NO: 2354553 - RNA, 19 nt, Artificial Sequence
  Description of Artificial Sequence: Synthetic oligonucleotide
cauuagccucauuauggac

SEQ ID NO: 2354554 - RNA, 19 nt, Artificial Sequence
  Description of Artificial Sequence: Synthetic oligonucleotide
guaggaacgggugauagaa

SEQ ID NO: 2354555 - RNA, 19 nt, Artificial Sequence
  Description of Artificial Sequence: Synthetic oligonucleotide
uguuugagcucgagugcug

SEQ ID NO: 2354556 - RNA, 19 nt, Artificial Sequence
  Description of Artificial Sequence: Synthetic oligonucleotide
ggagacaugacuucccaca

SEQ ID NO: 2354557 - RNA, 19 nt, Artificial Sequence
  Description of Artificial Sequence: Synthetic oligonucleotide
aaauuacuauguacaggga

SEQ ID NO: 2354558 - RNA, 19 nt, Artificial Sequence
  Description of Artificial Sequence: Synthetic oligonucleotide
uccccuguaguaggaacgg

SEQ ID NO: 2354559 - RNA, 19 nt, Artificial Sequence
  Description of Artificial Sequence: Synthetic oligonucleotide
uaucggugaacugcaggag

SEQ ID NO: 2354560 - RNA, 19 nt, Artificial Sequence
  Description of Artificial Sequence: Synthetic oligonucleotide
ucacaagaguuccgcugag

SEQ ID NO: 2354561 - RNA, 19 nt, Artificial Sequence
  Description of Artificial Sequence: Synthetic oligonucleotide
ugaagguuucacgucuugu

SEQ ID NO: 2354562 - RNA, 19 nt, Artificial Sequence
  Description of Artificial Sequence: Synthetic oligonucleotide
ugaauuuggucccgcugau

SEQ ID NO: 2354563 - RNA, 19 nt, Artificial Sequence
  Description of Artificial Sequence: Synthetic oligonucleotide
gaacauccuucacucuagc

SEQ ID NO: 2354564 - RNA, 19 nt, Artificial Sequence
  Description of Artificial Sequence: Synthetic oligonucleotide
uauaaccauguuugagcuc

SEQ ID NO: 2354565 - RNA, 19 nt, Artificial Sequence
  Description of Artificial Sequence: Synthetic oligonucleotide
ugcuggaucuuccuauaua

SEQ ID NO: 2354566 - RNA, 19 nt, Artificial Sequence
  Description of Artificial Sequence: Synthetic oligonucleotide
aguaggaacgggugauaga

SEQ ID NO: 2354567 - RNA, 19 nt, Artificial Sequence
  Description of Artificial Sequence: Synthetic oligonucleotide
caagaguuccgcugagaug

SEQ ID NO: 2354568 - RNA, 19 nt, Artificial Sequence
  Description of Artificial Sequence: Synthetic oligonucleotide
aucccuucgggauucuaga

SEQ ID NO: 2354569 - RNA, 19 nt, Artificial Sequence
  Description of Artificial Sequence: Synthetic oligonucleotide
uucacaucccuucgggauu

SEQ ID NO: 2354570 - RNA, 19 nt, Artificial Sequence
  Description of Artificial Sequence: Synthetic oligonucleotide
aggugcccagcuucuauag

SEQ ID NO: 2354571 - RNA, 19 nt, Artificial Sequence
  Description of Artificial Sequence: Synthetic oligonucleotide
aaucagcauuauaaccaug

SEQ ID NO: 2354572 - RNA, 19 nt, Artificial Sequence
  Description of Artificial Sequence: Synthetic oligonucleotide
agaugaauuuggucccgcu

SEQ ID NO: 2354573 - RNA, 19 nt, Artificial Sequence
  Description of Artificial Sequence: Synthetic oligonucleotide
aucaccuaaguuauacaga

SEQ ID NO: 2354574 - RNA, 19 nt, Artificial Sequence
  Description of Artificial Sequence: Synthetic oligonucleotide
uuugagcucgagugcuggc

SEQ ID NO: 2354575 - RNA, 19 nt, Artificial Sequence
  Description of Artificial Sequence: Synthetic oligonucleotide
agguuucacgucuugugau

SEQ ID NO: 2354576 - RNA, 19 nt, Artificial Sequence
  Description of Artificial Sequence: Synthetic oligonucleotide
auauaaggccaugcucccg

SEQ ID NO: 2354577 - RNA, 19 nt, Artificial Sequence
  Description of Artificial Sequence: Synthetic oligonucleotide
ugauuuguuuuccgucaau

SEQ ID NO: 2354578 - RNA, 19 nt, Artificial Sequence
  Description of Artificial Sequence: Synthetic oligonucleotide
gugaggaacagauguaugu

SEQ ID NO: 2354579 - RNA, 19 nt, Artificial Sequence
  Description of Artificial Sequence: Synthetic oligonucleotide
ugguugaagguuucacguc

SEQ ID NO: 2354580 - RNA, 19 nt, Artificial Sequence
  Description of Artificial Sequence: Synthetic oligonucleotide
ccuacaucacaagaguucc

SEQ ID NO: 2354581 - RNA, 19 nt, Artificial Sequence
  Description of Artificial Sequence: Synthetic oligonucleotide
ucuaaccaugaggucaggu

SEQ ID NO: 2354582 - RNA, 19 nt, Artificial Sequence
  Description of Artificial Sequence: Synthetic oligonucleotide
agaucacucuuauuuccaa

SEQ ID NO: 2354583 - RNA, 19 nt, Artificial Sequence
  Description of Artificial Sequence: Synthetic oligonucleotide
aagcagguuuccaaggcaa

SEQ ID NO: 2354584 - RNA, 19 nt, Artificial Sequence
  Description of Artificial Sequence: Synthetic oligonucleotide
uaggugaggaacagaugua

SEQ ID NO: 2354585 - RNA, 19 nt, Artificial Sequence
  Description of Artificial Sequence: Synthetic oligonucleotide
gaacgggugauagaacgga

SEQ ID NO: 2354586 - RNA, 19 nt, Artificial Sequence
  Description of Artificial Sequence: Synthetic oligonucleotide
uucgggauucuagaucacu

SEQ ID NO: 2354587 - RNA, 19 nt, Artificial Sequence
  Description of Artificial Sequence: Synthetic oligonucleotide
gaggucgugcacaggcugg

SEQ ID NO: 2354588 - RNA, 19 nt, Artificial Sequence
  Description of Artificial Sequence: Synthetic oligonucleotide
accugugucuccgaugaug

SEQ ID NO: 2354589 - RNA, 19 nt, Artificial Sequence
  Description of Artificial Sequence: Synthetic oligonucleotide
accauacgggcuccaaacu

SEQ ID NO: 2354590 - RNA, 19 nt, Artificial Sequence
  Description of Artificial Sequence: Synthetic oligonucleotide
aggcccuacaucacaagag

SEQ ID NO: 2354591 - RNA, 19 nt, Artificial Sequence
  Description of Artificial Sequence: Synthetic oligonucleotide
uaggaacgggugauagaac

SEQ ID NO: 2354592 - RNA, 19 nt, Artificial Sequence
  Description of Artificial Sequence: Synthetic oligonucleotide
uccucucuuuucacauccc

SEQ ID NO: 2354593 - RNA, 19 nt, Artificial Sequence
  Description of Artificial Sequence: Synthetic oligonucleotide
aaccaugaggucagguggu

SEQ ID NO: 2354594 - RNA, 19 nt, Artificial Sequence
  Description of Artificial Sequence: Synthetic oligonucleotide
gguuucacgucuugugaug

SEQ ID NO: 2354595 - RNA, 19 nt, Artificial Sequence
  Description of Artificial Sequence: Synthetic oligonucleotide
auaguccuaaauguucaau

SEQ ID NO: 2354596 - RNA, 19 nt, Artificial Sequence
  Description of Artificial Sequence: Synthetic oligonucleotide
cuguuggggcccaaucuug

SEQ ID NO: 2354597 - RNA, 19 nt, Artificial Sequence
  Description of Artificial Sequence: Synthetic oligonucleotide
auuaggugaggaacagaug

SEQ ID NO: 2354598 - RNA, 19 nt, Artificial Sequence
  Description of Artificial Sequence: Synthetic oligonucleotide
cuauugugaggucgugcac

SEQ ID NO: 2354599 - RNA, 19 nt, Artificial Sequence
  Description of Artificial Sequence: Synthetic oligonucleotide
aaccauguuugagcucgag

SEQ ID NO: 2354600 - RNA, 19 nt, Artificial Sequence
  Description of Artificial Sequence: Synthetic oligonucleotide
ccaaucuugaugccauuag

SEQ ID NO: 2354601 - RNA, 19 nt, Artificial Sequence
  Description of Artificial Sequence: Synthetic oligonucleotide
ggcuggaaccgcuuaucgg

SEQ ID NO: 2354602 - RNA, 19 nt, Artificial Sequence
  Description of Artificial Sequence: Synthetic oligonucleotide
uggaaccgcuuaucgguga

SEQ ID NO: 2354603 - RNA, 19 nt, Artificial Sequence
  Description of Artificial Sequence: Synthetic oligonucleotide
auaaggccaugcucccgag

SEQ ID NO: 2354604 - RNA, 19 nt, Artificial Sequence
  Description of Artificial Sequence: Synthetic oligonucleotide
gaggaacagauguauguau

SEQ ID NO: 2354605 - RNA, 19 nt, Artificial Sequence
  Description of Artificial Sequence: Synthetic oligonucleotide
gcugcuccccuguaguagg

SEQ ID NO: 2354606 - RNA, 19 nt, Artificial Sequence
  Description of Artificial Sequence: Synthetic oligonucleotide
acgggugauagaacggaag

SEQ ID NO: 2354607 - RNA, 19 nt, Artificial Sequence
  Description of Artificial Sequence: Synthetic oligonucleotide
cuggaaccgcuuaucggug

SEQ ID NO: 2354608 - RNA, 19 nt, Artificial Sequence
  Description of Artificial Sequence: Synthetic oligonucleotide
accgcuuaucggugaacug

SEQ ID NO: 2354609 - RNA, 19 nt, Artificial Sequence
  Description of Artificial Sequence: Synthetic oligonucleotide
gagcucgagugcuggcggg

SEQ ID NO: 2354610 - RNA, 19 nt, Artificial Sequence
  Description of Artificial Sequence: Synthetic oligonucleotide
uuggucccgcugauguuga

SEQ ID NO: 2354611 - RNA, 19 nt, Artificial Sequence
  Description of Artificial Sequence: Synthetic oligonucleotide
ggaacgggugauagaacgg

SEQ ID NO: 2354612 - RNA, 19 nt, Artificial Sequence
  Description of Artificial Sequence: Synthetic oligonucleotide
ccuguaguaggaacgggug

SEQ ID NO: 2354613 - RNA, 19 nt, Artificial Sequence
  Description of Artificial Sequence: Synthetic oligonucleotide
uuucacgucuugugauguc

SEQ ID NO: 2354614 - RNA, 19 nt, Artificial Sequence
  Description of Artificial Sequence: Synthetic oligonucleotide
gaacuccuaugaaaugaca

SEQ ID NO: 2354615 - RNA, 19 nt, Artificial Sequence
  Description of Artificial Sequence: Synthetic oligonucleotide
cacaccugugucuccgaug

SEQ ID NO: 2354616 - RNA, 19 nt, Artificial Sequence
  Description of Artificial Sequence: Synthetic oligonucleotide
cuaaguuauacagauucau

SEQ ID NO: 2354617 - RNA, 19 nt, Artificial Sequence
  Description of Artificial Sequence: Synthetic oligonucleotide
caugacuucccacaccugu

SEQ ID NO: 2354618 - RNA, 19 nt, Artificial Sequence
  Description of Artificial Sequence: Synthetic oligonucleotide
ccucuaaccaugaggucag

SEQ ID NO: 2354619 - RNA, 19 nt, Artificial Sequence
  Description of Artificial Sequence: Synthetic oligonucleotide
cccuacaucacaagaguuc

SEQ ID NO: 2354620 - RNA, 19 nt, Artificial Sequence
  Description of Artificial Sequence: Synthetic oligonucleotide
gauagaacggaaggacucu

SEQ ID NO: 2354621 - RNA, 19 nt, Artificial Sequence
  Description of Artificial Sequence: Synthetic oligonucleotide
ccuauugugaggucgugca

SEQ ID NO: 2354622 - RNA, 19 nt, Artificial Sequence
  Description of Artificial Sequence: Synthetic oligonucleotide
aguuccgcugagaugaauu

SEQ ID NO: 2354623 - RNA, 19 nt, Artificial Sequence
  Description of Artificial Sequence: Synthetic oligonucleotide
ccuaaauguucaaucagaa

SEQ ID NO: 2354624 - RNA, 19 nt, Artificial Sequence
  Description of Artificial Sequence: Synthetic oligonucleotide
augacuucccacaccugug

SEQ ID NO: 2354625 - RNA, 19 nt, Artificial Sequence
  Description of Artificial Sequence: Synthetic oligonucleotide
uguugaccauacgggcucc

SEQ ID NO: 2354626 - RNA, 19 nt, Artificial Sequence
  Description of Artificial Sequence: Synthetic oligonucleotide
gguugaagguuucacgucu

SEQ ID NO: 2354627 - RNA, 19 nt, Artificial Sequence
  Description of Artificial Sequence: Synthetic oligonucleotide
cuguaguaggaacggguga

SEQ ID NO: 2354628 - RNA, 19 nt, Artificial Sequence
  Description of Artificial Sequence: Synthetic oligonucleotide
gucuugugaugucguacac

SEQ ID NO: 2354629 - RNA, 19 nt, Artificial Sequence
  Description of Artificial Sequence: Synthetic oligonucleotide
ggaacuccuaugaaaugac

SEQ ID NO: 2354630 - RNA, 19 nt, Artificial Sequence
  Description of Artificial Sequence: Synthetic oligonucleotide
cuauaggaacuccuaugaa

SEQ ID NO: 2354631 - RNA, 19 nt, Artificial Sequence
  Description of Artificial Sequence: Synthetic oligonucleotide
aggaacagauguauguauu

SEQ ID NO: 2354632 - RNA, 19 nt, Artificial Sequence
  Description of Artificial Sequence: Synthetic oligonucleotide
aauugacuguuggggccca

SEQ ID NO: 2354633 - RNA, 19 nt, Artificial Sequence
  Description of Artificial Sequence: Synthetic oligonucleotide
ucacaucccuucgggauuc

SEQ ID NO: 2354634 - RNA, 19 nt, Artificial Sequence
  Description of Artificial Sequence: Synthetic oligonucleotide
cgggugauagaacggaagg

SEQ ID NO: 2354635 - RNA, 19 nt, Artificial Sequence
  Description of Artificial Sequence: Synthetic oligonucleotide
uaaccauguuugagcucga

SEQ ID NO: 2354636 - RNA, 19 nt, Artificial Sequence
  Description of Artificial Sequence: Synthetic oligonucleotide
guacagggauaucaccuaa

SEQ ID NO: 2354637 - RNA, 19 nt, Artificial Sequence
  Description of Artificial Sequence: Synthetic oligonucleotide
gaucacucuuauuuccaau

SEQ ID NO: 2354638 - RNA, 19 nt, Artificial Sequence
  Description of Artificial Sequence: Synthetic oligonucleotide
gcuggaaccgcuuaucggu

SEQ ID NO: 2354639 - RNA, 19 nt, Artificial Sequence
  Description of Artificial Sequence: Synthetic oligonucleotide
ggugcccagcuucuauagg

SEQ ID NO: 2354640 - RNA, 19 nt, Artificial Sequence
  Description of Artificial Sequence: Synthetic oligonucleotide
aacgggugauagaacggaa

SEQ ID NO: 2354641 - RNA, 19 nt, Artificial Sequence
  Description of Artificial Sequence: Synthetic oligonucleotide
ccgucaauguugaccauac

SEQ ID NO: 2354642 - RNA, 19 nt, Artificial Sequence
  Description of Artificial Sequence: Synthetic oligonucleotide
acaccuauugugaggucgu

SEQ ID NO: 2354643 - RNA, 19 nt, Artificial Sequence
  Description of Artificial Sequence: Synthetic oligonucleotide
ucccuucgggauucuagau

SEQ ID NO: 2354644 - RNA, 19 nt, Artificial Sequence
  Description of Artificial Sequence: Synthetic oligonucleotide
aggccucuucaacauugca

SEQ ID NO: 2354645 - RNA, 19 nt, Artificial Sequence
  Description of Artificial Sequence: Synthetic oligonucleotide
caggcccuacaucacaaga

SEQ ID NO: 2354646 - RNA, 19 nt, Artificial Sequence
  Description of Artificial Sequence: Synthetic oligonucleotide
ccgcuuaucggugaacugc

SEQ ID NO: 2354647 - RNA, 19 nt, Artificial Sequence
  Description of Artificial Sequence: Synthetic oligonucleotide
gcuggaucuuccuauauau

SEQ ID NO: 2354648 - RNA, 19 nt, Artificial Sequence
  Description of Artificial Sequence: Synthetic oligonucleotide
cagcuucuauaggaacucc

SEQ ID NO: 2354649 - RNA, 19 nt, Artificial Sequence
  Description of Artificial Sequence: Synthetic oligonucleotide
gcauuauaaccauguuuga

SEQ ID NO: 2354650 - RNA, 19 nt, Artificial Sequence
  Description of Artificial Sequence: Synthetic oligonucleotide
cccgcugauguugaaauug

SEQ ID NO: 2354651 - RNA, 19 nt, Artificial Sequence
  Description of Artificial Sequence: Synthetic oligonucleotide
cagcauuauaaccauguuu

SEQ ID NO: 2354652 - RNA, 19 nt, Artificial Sequence
  Description of Artificial Sequence: Synthetic oligonucleotide
cuucgggauucuagaucac

SEQ ID NO: 2354653 - RNA, 19 nt, Artificial Sequence
  Description of Artificial Sequence: Synthetic oligonucleotide
gaacagauguauguauuuu

SEQ ID NO: 2354654 - RNA, 19 nt, Artificial Sequence
  Description of Artificial Sequence: Synthetic oligonucleotide
ccuaaguuauacagauuca

SEQ ID NO: 2354655 - RNA, 19 nt, Artificial Sequence
  Description of Artificial Sequence: Synthetic oligonucleotide
cuucuauaggaacuccuau

SEQ ID NO: 2354656 - RNA, 19 nt, Artificial Sequence
  Description of Artificial Sequence: Synthetic oligonucleotide
caguacagaggugcccagc

SEQ ID NO: 2354657 - RNA, 19 nt, Artificial Sequence
  Description of Artificial Sequence: Synthetic oligonucleotide
auagaacggaaggacucuu

SEQ ID NO: 2354658 - RNA, 19 nt, Artificial Sequence
  Description of Artificial Sequence: Synthetic oligonucleotide
gaggugcccagcuucuaua

SEQ ID NO: 2354659 - RNA, 19 nt, Artificial Sequence
  Description of Artificial Sequence: Synthetic oligonucleotide
ggaggagacaugacuuccc

SEQ ID NO: 2354660 - RNA, 19 nt, Artificial Sequence
  Description of Artificial Sequence: Synthetic oligonucleotide
gauuugcaguuugauuugu

SEQ ID NO: 2354661 - RNA, 19 nt, Artificial Sequence
  Description of Artificial Sequence: Synthetic oligonucleotide
uacuauguacagggauauc

SEQ ID NO: 2354662 - RNA, 19 nt, Artificial Sequence
  Description of Artificial Sequence: Synthetic oligonucleotide
ggcuccaaacuccacaccu

SEQ ID NO: 2354663 - RNA, 19 nt, Artificial Sequence
  Description of Artificial Sequence: Synthetic oligonucleotide
ccucuucaacauugcaggc

SEQ ID NO: 2354664 - RNA, 19 nt, Artificial Sequence
  Description of Artificial Sequence: Synthetic oligonucleotide
ugagucagucaggccagau

SEQ ID NO: 2354665 - RNA, 19 nt, Artificial Sequence
  Description of Artificial Sequence: Synthetic oligonucleotide
ccauacgggcuccaaacuc

SEQ ID NO: 2354666 - RNA, 19 nt, Artificial Sequence
  Description of Artificial Sequence: Synthetic oligonucleotide
uccuucacucuagcuacua

SEQ ID NO: 2354667 - RNA, 19 nt, Artificial Sequence
  Description of Artificial Sequence: Synthetic oligonucleotide
guuucacgucuugugaugu

SEQ ID NO: 2354668 - RNA, 19 nt, Artificial Sequence
  Description of Artificial Sequence: Synthetic oligonucleotide
uugaccauacgggcuccaa

SEQ ID NO: 2354669 - RNA, 19 nt, Artificial Sequence
  Description of Artificial Sequence: Synthetic oligonucleotide
gucaggccagauguucagc

SEQ ID NO: 2354670 - RNA, 19 nt, Artificial Sequence
  Description of Artificial Sequence: Synthetic oligonucleotide
gagucaggcccuacaucac

SEQ ID NO: 2354671 - RNA, 19 nt, Artificial Sequence
  Description of Artificial Sequence: Synthetic oligonucleotide
gaaccgcuuaucggugaac

SEQ ID NO: 2354672 - RNA, 19 nt, Artificial Sequence
  Description of Artificial Sequence: Synthetic oligonucleotide
caaacuccacaccuauugu

SEQ ID NO: 2354673 - RNA, 19 nt, Artificial Sequence
  Description of Artificial Sequence: Synthetic oligonucleotide
ccuauauauuucuuuggcu

SEQ ID NO: 2354674 - RNA, 19 nt, Artificial Sequence
  Description of Artificial Sequence: Synthetic oligonucleotide
augaaaugacaagcagguu

SEQ ID NO: 2354675 - RNA, 19 nt, Artificial Sequence
  Description of Artificial Sequence: Synthetic oligonucleotide
uugacuguuggggcccaau

SEQ ID NO: 2354676 - RNA, 19 nt, Artificial Sequence
  Description of Artificial Sequence: Synthetic oligonucleotide
cugcaggaggagacaugac

SEQ ID NO: 2354677 - RNA, 19 nt, Artificial Sequence
  Description of Artificial Sequence: Synthetic oligonucleotide
auacgggcuccaaacucca

SEQ ID NO: 2354678 - RNA, 19 nt, Artificial Sequence
  Description of Artificial Sequence: Synthetic oligonucleotide
ccauuagccucauuaugga

SEQ ID NO: 2354679 - RNA, 19 nt, Artificial Sequence
  Description of Artificial Sequence: Synthetic oligonucleotide
gggauaucaccuaaguuau

SEQ ID NO: 2354680 - RNA, 19 nt, Artificial Sequence
  Description of Artificial Sequence: Synthetic oligonucleotide
gggugauagaacggaagga

SEQ ID NO: 2354681 - RNA, 19 nt, Artificial Sequence
  Description of Artificial Sequence: Synthetic oligonucleotide
ccagcuucuauaggaacuc

SEQ ID NO: 2354682 - RNA, 19 nt, Artificial Sequence
  Description of Artificial Sequence: Synthetic oligonucleotide
auacagauucauaguccua

SEQ ID NO: 2354683 - RNA, 19 nt, Artificial Sequence
  Description of Artificial Sequence: Synthetic oligonucleotide
guuuuccgucaauguugac

SEQ ID NO: 2354684 - RNA, 19 nt, Artificial Sequence
  Description of Artificial Sequence: Synthetic oligonucleotide
ucccgcugauguugaaauu

SEQ ID NO: 2354685 - RNA, 19 nt, Artificial Sequence
  Description of Artificial Sequence: Synthetic oligonucleotide
ggauucuagaucacucuua

SEQ ID NO: 2354686 - RNA, 19 nt, Artificial Sequence
  Description of Artificial Sequence: Synthetic oligonucleotide
ggacaucaaauaagcccug

SEQ ID NO: 2354687 - RNA, 19 nt, Artificial Sequence
  Description of Artificial Sequence: Synthetic oligonucleotide
cucuaaccaugaggucagg

SEQ ID NO: 2354688 - RNA, 19 nt, Artificial Sequence
  Description of Artificial Sequence: Synthetic oligonucleotide
ucgagugcuggcgggcauc

SEQ ID NO: 2354689 - RNA, 19 nt, Artificial Sequence
  Description of Artificial Sequence: Synthetic oligonucleotide
ggcccuacaucacaagagu

SEQ ID NO: 2354690 - RNA, 19 nt, Artificial Sequence
  Description of Artificial Sequence: Synthetic oligonucleotide
gaacugcaggaggagacau

SEQ ID NO: 2354691 - RNA, 19 nt, Artificial Sequence
  Description of Artificial Sequence: Synthetic oligonucleotide
cccuucgggauucuagauc

SEQ ID NO: 2354692 - RNA, 19 nt, Artificial Sequence
  Description of Artificial Sequence: Synthetic oligonucleotide
gcuucuauaggaacuccua

SEQ ID NO: 2354693 - RNA, 19 nt, Artificial Sequence
  Description of Artificial Sequence: Synthetic oligonucleotide
cgggcauccucuaaccaug

SEQ ID NO: 2354694 - RNA, 19 nt, Artificial Sequence
  Description of Artificial Sequence: Synthetic oligonucleotide
aggucgugcacaggcugga

SEQ ID NO: 2354695 - RNA, 19 nt, Artificial Sequence
  Description of Artificial Sequence: Synthetic oligonucleotide
augaggucaggugguugaa

SEQ ID NO: 2354696 - RNA, 19 nt, Artificial Sequence
  Description of Artificial Sequence: Synthetic oligonucleotide
uuccgucaauguugaccau

SEQ ID NO: 2354697 - RNA, 19 nt, Artificial Sequence
  Description of Artificial Sequence: Synthetic oligonucleotide
ccucauuauggacaucaaa

SEQ ID NO: 2354698 - RNA, 19 nt, Artificial Sequence
  Description of Artificial Sequence: Synthetic oligonucleotide
cgucuugugaugucguaca

SEQ ID NO: 2354699 - RNA, 19 nt, Artificial Sequence
  Description of Artificial Sequence: Synthetic oligonucleotide
ggccagauguucagcagca

SEQ ID NO: 2354700 - RNA, 19 nt, Artificial Sequence
  Description of Artificial Sequence: Synthetic oligonucleotide
cacaagaguuccgcugaga

SEQ ID NO: 2354701 - RNA, 19 nt, Artificial Sequence
  Description of Artificial Sequence: Synthetic oligonucleotide
caccuauugugaggucgug

SEQ ID NO: 2354702 - RNA, 19 nt, Artificial Sequence
  Description of Artificial Sequence: Synthetic oligonucleotide
guaguaggaacgggugaua

SEQ ID NO: 2354703 - RNA, 19 nt, Artificial Sequence
  Description of Artificial Sequence: Synthetic oligonucleotide
ggaaccgcuuaucggugaa

SEQ ID NO: 2354704 - RNA, 19 nt, Artificial Sequence
  Description of Artificial Sequence: Synthetic oligonucleotide
cgggcuccaaacuccacac

SEQ ID NO: 2354705 - RNA, 19 nt, Artificial Sequence
  Description of Artificial Sequence: Synthetic oligonucleotide
cagggauaucaccuaaguu

SEQ ID NO: 2354706 - RNA, 19 nt, Artificial Sequence
  Description of Artificial Sequence: Synthetic oligonucleotide
gcuuaucggugaacugcag

SEQ ID NO: 2354707 - RNA, 19 nt, Artificial Sequence
  Description of Artificial Sequence: Synthetic oligonucleotide
auccuucacucuagcuacu

SEQ ID NO: 2354708 - RNA, 19 nt, Artificial Sequence
  Description of Artificial Sequence: Synthetic oligonucleotide
cacgucuugugaugucgua

SEQ ID NO: 2354709 - RNA, 19 nt, Artificial Sequence
  Description of Artificial Sequence: Synthetic oligonucleotide
ucccgagcaaaggccucuc

SEQ ID NO: 2354710 - RNA, 19 nt, Artificial Sequence
  Description of Artificial Sequence: Synthetic oligonucleotide
cuggaucuuccuauauauu

SEQ ID NO: 2354711 - RNA, 19 nt, Artificial Sequence
  Description of Artificial Sequence: Synthetic oligonucleotide
cuucaacauugcaggcugu

SEQ ID NO: 2354712 - RNA, 19 nt, Artificial Sequence
  Description of Artificial Sequence: Synthetic oligonucleotide
guugaccauacgggcucca

SEQ ID NO: 2354713 - RNA, 19 nt, Artificial Sequence
  Description of Artificial Sequence: Synthetic oligonucleotide
caggugguugaagguuuca

SEQ ID NO: 2354714 - RNA, 19 nt, Artificial Sequence
  Description of Artificial Sequence: Synthetic oligonucleotide
cgcuuaucggugaacugca

SEQ ID NO: 2354715 - RNA, 19 nt, Artificial Sequence
  Description of Artificial Sequence: Synthetic oligonucleotide
guuggggcccaaucuugau

SEQ ID NO: 2354716 - RNA, 19 nt, Artificial Sequence
  Description of Artificial Sequence: Synthetic oligonucleotide
gccagauguucagcagcag

SEQ ID NO: 2354717 - RNA, 19 nt, Artificial Sequence
  Description of Artificial Sequence: Synthetic oligonucleotide
gacucuugcccagccguau

SEQ ID NO: 2354718 - RNA, 19 nt, Artificial Sequence
  Description of Artificial Sequence: Synthetic oligonucleotide
gccguaucccagauuugca

SEQ ID NO: 2354719 - RNA, 19 nt, Artificial Sequence
  Description of Artificial Sequence: Synthetic oligonucleotide
ccagauuugcaguuugauu

SEQ ID NO: 2354720 - RNA, 19 nt, Artificial Sequence
  Description of Artificial Sequence: Synthetic oligonucleotide
auugacuguuggggcccaa

SEQ ID NO: 2354721 - RNA, 19 nt, Artificial Sequence
  Description of Artificial Sequence: Synthetic oligonucleotide
cccgagcaaaggccucucc

SEQ ID NO: 2354722 - RNA, 19 nt, Artificial Sequence
  Description of Artificial Sequence: Synthetic oligonucleotide
ggucaggugguugaagguu

SEQ ID NO: 2354723 - RNA, 19 nt, Artificial Sequence
  Description of Artificial Sequence: Synthetic oligonucleotide
ggucccgcugauguugaaa

SEQ ID NO: 2354724 - RNA, 19 nt, Artificial Sequence
  Description of Artificial Sequence: Synthetic oligonucleotide
agaguuccgcugagaugaa

SEQ ID NO: 2354725 - RNA, 19 nt, Artificial Sequence
  Description of Artificial Sequence: Synthetic oligonucleotide
guacagaggugcccagcuu

SEQ ID NO: 2354726 - RNA, 19 nt, Artificial Sequence
  Description of Artificial Sequence: Synthetic oligonucleotide
caccuaaguuauacagauu

SEQ ID NO: 2354727 - RNA, 19 nt, Artificial Sequence
  Description of Artificial Sequence: Synthetic oligonucleotide
ccuucacucuagcuacuaa

SEQ ID NO: 2354728 - RNA, 19 nt, Artificial Sequence
  Description of Artificial Sequence: Synthetic oligonucleotide
cugcuggaucuuccuauau

SEQ ID NO: 2354729 - RNA, 19 nt, Artificial Sequence
  Description of Artificial Sequence: Synthetic oligonucleotide
ccugcuggaucuuccuaua

SEQ ID NO: 2354730 - RNA, 19 nt, Artificial Sequence
  Description of Artificial Sequence: Synthetic oligonucleotide
gggcauccucuaaccauga

SEQ ID NO: 2354731 - RNA, 19 nt, Artificial Sequence
  Description of Artificial Sequence: Synthetic oligonucleotide
ggauaucaccuaaguuaua

SEQ ID NO: 2354732 - RNA, 19 nt, Artificial Sequence
  Description of Artificial Sequence: Synthetic oligonucleotide
gaguuccgcugagaugaau

SEQ ID NO: 2354733 - RNA, 19 nt, Artificial Sequence
  Description of Artificial Sequence: Synthetic oligonucleotide
cucccgagcaaaggccucu

SEQ ID NO: 2354734 - RNA, 19 nt, Artificial Sequence
  Description of Artificial Sequence: Synthetic oligonucleotide
ccacaccuauugugagguc

SEQ ID NO: 2354735 - RNA, 19 nt, Artificial Sequence
  Description of Artificial Sequence: Synthetic oligonucleotide
cgggauucuagaucacucu

SEQ ID NO: 2354736 - RNA, 19 nt, Artificial Sequence
  Description of Artificial Sequence: Synthetic oligonucleotide
ccagagucaggcccuacau

SEQ ID NO: 2354737 - RNA, 19 nt, Artificial Sequence
  Description of Artificial Sequence: Synthetic oligonucleotide
gcucgagugcuggcgggca

SEQ ID NO: 2354738 - RNA, 19 nt, Artificial Sequence
  Description of Artificial Sequence: Synthetic oligonucleotide
gccucauuauggacaucaa

SEQ ID NO: 2354739 - RNA, 19 nt, Artificial Sequence
  Description of Artificial Sequence: Synthetic oligonucleotide
gucagucaggccagauguu

SEQ ID NO: 2354740 - RNA, 19 nt, Artificial Sequence
  Description of Artificial Sequence: Synthetic oligonucleotide
ggacucuugcccagccgua

SEQ ID NO: 2354741 - RNA, 19 nt, Artificial Sequence
  Description of Artificial Sequence: Synthetic oligonucleotide
cucgagugcuggcgggcau

SEQ ID NO: 2354742 - RNA, 19 nt, Artificial Sequence
  Description of Artificial Sequence: Synthetic oligonucleotide
gcccuacaucacaagaguu

SEQ ID NO: 2354743 - RNA, 19 nt, Artificial Sequence
  Description of Artificial Sequence: Synthetic oligonucleotide
ggucgugcacaggcuggaa

SEQ ID NO: 2354744 - RNA, 19 nt, Artificial Sequence
  Description of Artificial Sequence: Synthetic oligonucleotide
ccgcugagaugaauuuggu

SEQ ID NO: 2354745 - RNA, 19 nt, Artificial Sequence
  Description of Artificial Sequence: Synthetic oligonucleotide
caccugugucuccgaugau

SEQ ID NO: 2354746 - RNA, 19 nt, Artificial Sequence
  Description of Artificial Sequence: Synthetic oligonucleotide
cacaucccuucgggauucu

SEQ ID NO: 2354747 - RNA, 19 nt, Artificial Sequence
  Description of Artificial Sequence: Synthetic oligonucleotide
gcccaaucuugaugccauu

SEQ ID NO: 2354748 - RNA, 19 nt, Artificial Sequence
  Description of Artificial Sequence: Synthetic oligonucleotide
aaugagauaauguguaugg

SEQ ID NO: 2354749 - RNA, 19 nt, Artificial Sequence
  Description of Artificial Sequence: Synthetic oligonucleotide
uuauaggauauuuuaaggg

SEQ ID NO: 2354750 - RNA, 19 nt, Artificial Sequence
  Description of Artificial Sequence: Synthetic oligonucleotide
ucaguaacgaucaucuugg

SEQ ID NO: 2354751 - RNA, 19 nt, Artificial Sequence
  Description of Artificial Sequence: Synthetic oligonucleotide
gugauaaugacaaagacag

SEQ ID NO: 2354752 - RNA, 19 nt, Artificial Sequence
  Description of Artificial Sequence: Synthetic oligonucleotide
uuuucaguaacgaucaucu

SEQ ID NO: 2354753 - RNA, 19 nt, Artificial Sequence
  Description of Artificial Sequence: Synthetic oligonucleotide
aaggggaaaagcaagauuc

SEQ ID NO: 2354754 - RNA, 19 nt, Artificial Sequence
  Description of Artificial Sequence: Synthetic oligonucleotide
uauaggauauuuuaagggc

SEQ ID NO: 2354755 - RNA, 19 nt, Artificial Sequence
  Description of Artificial Sequence: Synthetic oligonucleotide
uucucaaaauugaagagag

SEQ ID NO: 2354756 - RNA, 19 nt, Artificial Sequence
  Description of Artificial Sequence: Synthetic oligonucleotide
uguagucucauucaccagg

SEQ ID NO: 2354757 - RNA, 19 nt, Artificial Sequence
  Description of Artificial Sequence: Synthetic oligonucleotide
aaauugaagagagggaaac

SEQ ID NO: 2354758 - RNA, 19 nt, Artificial Sequence
  Description of Artificial Sequence: Synthetic oligonucleotide
cucaaaauugaagagaggg

SEQ ID NO: 2354759 - RNA, 19 nt, Artificial Sequence
  Description of Artificial Sequence: Synthetic oligonucleotide
cuuauaggauauuuuaagg

SEQ ID NO: 2354760 - RNA, 19 nt, Artificial Sequence
  Description of Artificial Sequence: Synthetic oligonucleotide
agcaacauuuucucuaucc

SEQ ID NO: 2354761 - RNA, 19 nt, Artificial Sequence
  Description of Artificial Sequence: Synthetic oligonucleotide
uugauuuucaguaacgauc

SEQ ID NO: 2354762 - RNA, 19 nt, Artificial Sequence
  Description of Artificial Sequence: Synthetic oligonucleotide
ugauuuucaguaacgauca

SEQ ID NO: 2354763 - RNA, 19 nt, Artificial Sequence
  Description of Artificial Sequence: Synthetic oligonucleotide
uauuuuaagggcucaauga

SEQ ID NO: 2354764 - RNA, 19 nt, Artificial Sequence
  Description of Artificial Sequence: Synthetic oligonucleotide
guaacgaucaucuugguga

SEQ ID NO: 2354765 - RNA, 19 nt, Artificial Sequence
  Description of Artificial Sequence: Synthetic oligonucleotide
auuuuaagggcucaaugag

SEQ ID NO: 2354766 - RNA, 19 nt, Artificial Sequence
  Description of Artificial Sequence: Synthetic oligonucleotide
acuuguuaggccucuaugg

SEQ ID NO: 2354767 - RNA, 19 nt, Artificial Sequence
  Description of Artificial Sequence: Synthetic oligonucleotide
uuugcaaagggacggauac

SEQ ID NO: 2354768 - RNA, 19 nt, Artificial Sequence
  Description of Artificial Sequence: Synthetic oligonucleotide
aacggcaugucuuuauguc

SEQ ID NO: 2354769 - RNA, 19 nt, Artificial Sequence
  Description of Artificial Sequence: Synthetic oligonucleotide
uuagugggaaguauuaccu

SEQ ID NO: 2354770 - RNA, 19 nt, Artificial Sequence
  Description of Artificial Sequence: Synthetic oligonucleotide
uaauguguauggaagugcc

SEQ ID NO: 2354771 - RNA, 19 nt, Artificial Sequence
  Description of Artificial Sequence: Synthetic oligonucleotide
aguauuaccugucugcuga

SEQ ID NO: 2354772 - RNA, 19 nt, Artificial Sequence
  Description of Artificial Sequence: Synthetic oligonucleotide
aagggacggauacugcugc

SEQ ID NO: 2354773 - RNA, 19 nt, Artificial Sequence
  Description of Artificial Sequence: Synthetic oligonucleotide
gagauaauguguauggaag

SEQ ID NO: 2354774 - RNA, 19 nt, Artificial Sequence
  Description of Artificial Sequence: Synthetic oligonucleotide
uucucuauccuuugcaaag

SEQ ID NO: 2354775 - RNA, 19 nt, Artificial Sequence
  Description of Artificial Sequence: Synthetic oligonucleotide
cuuagugggaaguauuacc

SEQ ID NO: 2354776 - RNA, 19 nt, Artificial Sequence
  Description of Artificial Sequence: Synthetic oligonucleotide
auauuuuaagggcucaaug

SEQ ID NO: 2354777 - RNA, 19 nt, Artificial Sequence
  Description of Artificial Sequence: Synthetic oligonucleotide
uugcauuugauuuucagua

SEQ ID NO: 2354778 - RNA, 19 nt, Artificial Sequence
  Description of Artificial Sequence: Synthetic oligonucleotide
auaauguguauggaagugc

SEQ ID NO: 2354779 - RNA, 19 nt, Artificial Sequence
  Description of Artificial Sequence: Synthetic oligonucleotide
ucaaaauugaagagaggga

SEQ ID NO: 2354780 - RNA, 19 nt, Artificial Sequence
  Description of Artificial Sequence: Synthetic oligonucleotide
uuuaagggcucaaugagau

SEQ ID NO: 2354781 - RNA, 19 nt, Artificial Sequence
  Description of Artificial Sequence: Synthetic oligonucleotide
cauuugcccagacagagcg

SEQ ID NO: 2354782 - RNA, 19 nt, Artificial Sequence
  Description of Artificial Sequence: Synthetic oligonucleotide
uauccuuugcaaagggacg

SEQ ID NO: 2354783 - RNA, 19 nt, Artificial Sequence
  Description of Artificial Sequence: Synthetic oligonucleotide
cuugaugaaaauagugaag

SEQ ID NO: 2354784 - RNA, 19 nt, Artificial Sequence
  Description of Artificial Sequence: Synthetic oligonucleotide
cauuugauuuucaguaacg

SEQ ID NO: 2354785 - RNA, 19 nt, Artificial Sequence
  Description of Artificial Sequence: Synthetic oligonucleotide
cuguaguucacacagcggc

SEQ ID NO: 2354786 - RNA, 19 nt, Artificial Sequence
  Description of Artificial Sequence: Synthetic oligonucleotide
uuggcugucaaguugggca

SEQ ID NO: 2354787 - RNA, 19 nt, Artificial Sequence
  Description of Artificial Sequence: Synthetic oligonucleotide
agcuguaguucacacagcg

SEQ ID NO: 2354788 - RNA, 19 nt, Artificial Sequence
  Description of Artificial Sequence: Synthetic oligonucleotide
aguguagucucauucacca

SEQ ID NO: 2354789 - RNA, 19 nt, Artificial Sequence
  Description of Artificial Sequence: Synthetic oligonucleotide
cuaagggugagcaugggac

SEQ ID NO: 2354790 - RNA, 19 nt, Artificial Sequence
  Description of Artificial Sequence: Synthetic oligonucleotide
gucuuuauguccuuggcug

SEQ ID NO: 2354791 - RNA, 19 nt, Artificial Sequence
  Description of Artificial Sequence: Synthetic oligonucleotide
uuggugauaaugacaaaga

SEQ ID NO: 2354792 - RNA, 19 nt, Artificial Sequence
  Description of Artificial Sequence: Synthetic oligonucleotide
aauugaagagagggaaacg

SEQ ID NO: 2354793 - RNA, 19 nt, Artificial Sequence
  Description of Artificial Sequence: Synthetic oligonucleotide
uuuuaagggcucaaugaga

SEQ ID NO: 2354794 - RNA, 19 nt, Artificial Sequence
  Description of Artificial Sequence: Synthetic oligonucleotide
ugagauaauguguauggaa

SEQ ID NO: 2354795 - RNA, 19 nt, Artificial Sequence
  Description of Artificial Sequence: Synthetic oligonucleotide
cuggcugucagacacacag

SEQ ID NO: 2354796 - RNA, 19 nt, Artificial Sequence
  Description of Artificial Sequence: Synthetic oligonucleotide
uguuaggccucuaugggug

SEQ ID NO: 2354797 - RNA, 19 nt, Artificial Sequence
  Description of Artificial Sequence: Synthetic oligonucleotide
uccuuggcugucaaguugg

SEQ ID NO: 2354798 - RNA, 19 nt, Artificial Sequence
  Description of Artificial Sequence: Synthetic oligonucleotide
uccacggguauccacuucg

SEQ ID NO: 2354799 - RNA, 19 nt, Artificial Sequence
  Description of Artificial Sequence: Synthetic oligonucleotide
uuucccuucucaaaauuga

SEQ ID NO: 2354800 - RNA, 19 nt, Artificial Sequence
  Description of Artificial Sequence: Synthetic oligonucleotide
acggcaugucuuuaugucc

SEQ ID NO: 2354801 - RNA, 19 nt, Artificial Sequence
  Description of Artificial Sequence: Synthetic oligonucleotide
augaaaauagugaaguucu

SEQ ID NO: 2354802 - RNA, 19 nt, Artificial Sequence
  Description of Artificial Sequence: Synthetic oligonucleotide
cuuguuaggccucuauggg

SEQ ID NO: 2354803 - RNA, 19 nt, Artificial Sequence
  Description of Artificial Sequence: Synthetic oligonucleotide
uacccuagcaacauuuucu

SEQ ID NO: 2354804 - RNA, 19 nt, Artificial Sequence
  Description of Artificial Sequence: Synthetic oligonucleotide
auuuucaguaacgaucauc

SEQ ID NO: 2354805 - RNA, 19 nt, Artificial Sequence
  Description of Artificial Sequence: Synthetic oligonucleotide
agucuuauaggauauuuua

SEQ ID NO: 2354806 - RNA, 19 nt, Artificial Sequence
  Description of Artificial Sequence: Synthetic oligonucleotide
auacugcugccccaggacc

SEQ ID NO: 2354807 - RNA, 19 nt, Artificial Sequence
  Description of Artificial Sequence: Synthetic oligonucleotide
agagcggcccauuggaggc

SEQ ID NO: 2354808 - RNA, 19 nt, Artificial Sequence
  Description of Artificial Sequence: Synthetic oligonucleotide
uguguauggaagugccugg

SEQ ID NO: 2354809 - RNA, 19 nt, Artificial Sequence
  Description of Artificial Sequence: Synthetic oligonucleotide
uaagggcucaaugagauaa

SEQ ID NO: 2354810 - RNA, 19 nt, Artificial Sequence
  Description of Artificial Sequence: Synthetic oligonucleotide
uuugauuuucaguaacgau

SEQ ID NO: 2354811 - RNA, 19 nt, Artificial Sequence
  Description of Artificial Sequence: Synthetic oligonucleotide
uggugauaaugacaaagac

SEQ ID NO: 2354812 - RNA, 19 nt, Artificial Sequence
  Description of Artificial Sequence: Synthetic oligonucleotide
aagggugagcaugggaccc

SEQ ID NO: 2354813 - RNA, 19 nt, Artificial Sequence
  Description of Artificial Sequence: Synthetic oligonucleotide
ugucuuuauguccuuggcu

SEQ ID NO: 2354814 - RNA, 19 nt, Artificial Sequence
  Description of Artificial Sequence: Synthetic oligonucleotide
uuaccugucugcugaacag

SEQ ID NO: 2354815 - RNA, 19 nt, Artificial Sequence
  Description of Artificial Sequence: Synthetic oligonucleotide
ucauucucugggcagaauc

SEQ ID NO: 2354816 - RNA, 19 nt, Artificial Sequence
  Description of Artificial Sequence: Synthetic oligonucleotide
ggaaguauuaccugucugc

SEQ ID NO: 2354817 - RNA, 19 nt, Artificial Sequence
  Description of Artificial Sequence: Synthetic oligonucleotide
uguaguucacacagcggcc

SEQ ID NO: 2354818 - RNA, 19 nt, Artificial Sequence
  Description of Artificial Sequence: Synthetic oligonucleotide
gaggcagugcccuucagug

SEQ ID NO: 2354819 - RNA, 19 nt, Artificial Sequence
  Description of Artificial Sequence: Synthetic oligonucleotide
ugcaaagggacggauacug

SEQ ID NO: 2354820 - RNA, 19 nt, Artificial Sequence
  Description of Artificial Sequence: Synthetic oligonucleotide
uacuuguuaggccucuaug

SEQ ID NO: 2354821 - RNA, 19 nt, Artificial Sequence
  Description of Artificial Sequence: Synthetic oligonucleotide
aaacggaugcuguucuuga

SEQ ID NO: 2354822 - RNA, 19 nt, Artificial Sequence
  Description of Artificial Sequence: Synthetic oligonucleotide
aaacggcaugucuuuaugu

SEQ ID NO: 2354823 - RNA, 19 nt, Artificial Sequence
  Description of Artificial Sequence: Synthetic oligonucleotide
cauucucugggcagaaucc

SEQ ID NO: 2354824 - RNA, 19 nt, Artificial Sequence
  Description of Artificial Sequence: Synthetic oligonucleotide
uuucaggugagcagcagaa

SEQ ID NO: 2354825 - RNA, 19 nt, Artificial Sequence
  Description of Artificial Sequence: Synthetic oligonucleotide
uguuacccuagcaacauuu

SEQ ID NO: 2354826 - RNA, 19 nt, Artificial Sequence
  Description of Artificial Sequence: Synthetic oligonucleotide
aauccuugcauuugauuuu

SEQ ID NO: 2354827 - RNA, 19 nt, Artificial Sequence
  Description of Artificial Sequence: Synthetic oligonucleotide
auuaccugucugcugaaca

SEQ ID NO: 2354828 - RNA, 19 nt, Artificial Sequence
  Description of Artificial Sequence: Synthetic oligonucleotide
uuuucucuauccuuugcaa

SEQ ID NO: 2354829 - RNA, 19 nt, Artificial Sequence
  Description of Artificial Sequence: Synthetic oligonucleotide
ucaggugagcagcagaaau

SEQ ID NO: 2354830 - RNA, 19 nt, Artificial Sequence
  Description of Artificial Sequence: Synthetic oligonucleotide
aaguauuaccugucugcug

SEQ ID NO: 2354831 - RNA, 19 nt, Artificial Sequence
  Description of Artificial Sequence: Synthetic oligonucleotide
aagacagaggugcccuggg

SEQ ID NO: 2354832 - RNA, 19 nt, Artificial Sequence
  Description of Artificial Sequence: Synthetic oligonucleotide
aguaacgaucaucuuggug

SEQ ID NO: 2354833 - RNA, 19 nt, Artificial Sequence
  Description of Artificial Sequence: Synthetic oligonucleotide
aggcucugcagccuaaggg

SEQ ID NO: 2354834 - RNA, 19 nt, Artificial Sequence
  Description of Artificial Sequence: Synthetic oligonucleotide
uagugaaguucucagcuuc

SEQ ID NO: 2354835 - RNA, 19 nt, Artificial Sequence
  Description of Artificial Sequence: Synthetic oligonucleotide
cuucaguguagucucauuc

SEQ ID NO: 2354836 - RNA, 19 nt, Artificial Sequence
  Description of Artificial Sequence: Synthetic oligonucleotide
acccuagcaacauuuucuc

SEQ ID NO: 2354837 - RNA, 19 nt, Artificial Sequence
  Description of Artificial Sequence: Synthetic oligonucleotide
ucucuauccuuugcaaagg

SEQ ID NO: 2354838 - RNA, 19 nt, Artificial Sequence
  Description of Artificial Sequence: Synthetic oligonucleotide
ucuauggguguuacccuag

SEQ ID NO: 2354839 - RNA, 19 nt, Artificial Sequence
  Description of Artificial Sequence: Synthetic oligonucleotide
caugacaggcaucuccacg

SEQ ID NO: 2354840 - RNA, 19 nt, Artificial Sequence
  Description of Artificial Sequence: Synthetic oligonucleotide
uggguguuacccuagcaac

SEQ ID NO: 2354841 - RNA, 19 nt, Artificial Sequence
  Description of Artificial Sequence: Synthetic oligonucleotide
uaggauauuuuaagggcuc

SEQ ID NO: 2354842 - RNA, 19 nt, Artificial Sequence
  Description of Artificial Sequence: Synthetic oligonucleotide
auuugauuuucaguaacga

SEQ ID NO: 2354843 - RNA, 19 nt, Artificial Sequence
  Description of Artificial Sequence: Synthetic oligonucleotide
ugucugcugaacagugagg

SEQ ID NO: 2354844 - RNA, 19 nt, Artificial Sequence
  Description of Artificial Sequence: Synthetic oligonucleotide
gaaacggcaugucuuuaug

SEQ ID NO: 2354845 - RNA, 19 nt, Artificial Sequence
  Description of Artificial Sequence: Synthetic oligonucleotide
acggguauccacuucggug

SEQ ID NO: 2354846 - RNA, 19 nt, Artificial Sequence
  Description of Artificial Sequence: Synthetic oligonucleotide
uauggaagugccugguacu

SEQ ID NO: 2354847 - RNA, 19 nt, Artificial Sequence
  Description of Artificial Sequence: Synthetic oligonucleotide
uggccgauggaguaggcgc

SEQ ID NO: 2354848 - RNA, 19 nt, Artificial Sequence
  Description of Artificial Sequence: Synthetic oligonucleotide
auaggauauuuuaagggcu

SEQ ID NO: 2354849 - RNA, 19 nt, Artificial Sequence
  Description of Artificial Sequence: Synthetic oligonucleotide
aacagugagggccuagaua

SEQ ID NO: 2354850 - RNA, 19 nt, Artificial Sequence
  Description of Artificial Sequence: Synthetic oligonucleotide
acagcggccagugaggauc

SEQ ID NO: 2354851 - RNA, 19 nt, Artificial Sequence
  Description of Artificial Sequence: Synthetic oligonucleotide
uaagggugagcaugggacc

SEQ ID NO: 2354852 - RNA, 19 nt, Artificial Sequence
  Description of Artificial Sequence: Synthetic oligonucleotide
caaaauugaagagagggaa

SEQ ID NO: 2354853 - RNA, 19 nt, Artificial Sequence
  Description of Artificial Sequence: Synthetic oligonucleotide
gauacugcugccccaggac

SEQ ID NO: 2354854 - RNA, 19 nt, Artificial Sequence
  Description of Artificial Sequence: Synthetic oligonucleotide
auccuuugcaaagggacgg

SEQ ID NO: 2354855 - RNA, 19 nt, Artificial Sequence
  Description of Artificial Sequence: Synthetic oligonucleotide
uuucucuauccuuugcaaa

SEQ ID NO: 2354856 - RNA, 19 nt, Artificial Sequence
  Description of Artificial Sequence: Synthetic oligonucleotide
aucuuggugauaaugacaa

SEQ ID NO: 2354857 - RNA, 19 nt, Artificial Sequence
  Description of Artificial Sequence: Synthetic oligonucleotide
agcagcagaaaugagaguu

SEQ ID NO: 2354858 - RNA, 19 nt, Artificial Sequence
  Description of Artificial Sequence: Synthetic oligonucleotide
aaaauugaagagagggaaa

SEQ ID NO: 2354859 - RNA, 19 nt, Artificial Sequence
  Description of Artificial Sequence: Synthetic oligonucleotide
ucagaucuuagugggaagu

SEQ ID NO: 2354860 - RNA, 19 nt, Artificial Sequence
  Description of Artificial Sequence: Synthetic oligonucleotide
uucagaucuuagugggaag

SEQ ID NO: 2354861 - RNA, 19 nt, Artificial Sequence
  Description of Artificial Sequence: Synthetic oligonucleotide
agugaaguucucagcuucc

SEQ ID NO: 2354862 - RNA, 19 nt, Artificial Sequence
  Description of Artificial Sequence: Synthetic oligonucleotide
cacacagcgguacuucucc

SEQ ID NO: 2354863 - RNA, 19 nt, Artificial Sequence
  Description of Artificial Sequence: Synthetic oligonucleotide
ugaaaauagugaaguucuc

SEQ ID NO: 2354864 - RNA, 19 nt, Artificial Sequence
  Description of Artificial Sequence: Synthetic oligonucleotide
uuacccuagcaacauuuuc

SEQ ID NO: 2354865 - RNA, 19 nt, Artificial Sequence
  Description of Artificial Sequence: Synthetic oligonucleotide
uuguuaggccucuaugggu

SEQ ID NO: 2354866 - RNA, 19 nt, Artificial Sequence
  Description of Artificial Sequence: Synthetic oligonucleotide
gaaacggaugcuguucuug

SEQ ID NO: 2354867 - RNA, 19 nt, Artificial Sequence
  Description of Artificial Sequence: Synthetic oligonucleotide
cucuauccuuugcaaaggg

SEQ ID NO: 2354868 - RNA, 19 nt, Artificial Sequence
  Description of Artificial Sequence: Synthetic oligonucleotide
aaagggacggauacugcug

SEQ ID NO: 2354869 - RNA, 19 nt, Artificial Sequence
  Description of Artificial Sequence: Synthetic oligonucleotide
gaugggaggcaugcaaggg

SEQ ID NO: 2354870 - RNA, 19 nt, Artificial Sequence
  Description of Artificial Sequence: Synthetic oligonucleotide
gaaaugagaguucccucuc

SEQ ID NO: 2354871 - RNA, 19 nt, Artificial Sequence
  Description of Artificial Sequence: Synthetic oligonucleotide
ugggaggcaugcaagggga

SEQ ID NO: 2354872 - RNA, 19 nt, Artificial Sequence
  Description of Artificial Sequence: Synthetic oligonucleotide
uauggguguuacccuagca

SEQ ID NO: 2354873 - RNA, 19 nt, Artificial Sequence
  Description of Artificial Sequence: Synthetic oligonucleotide
ucuuuauguccuuggcugu

SEQ ID NO: 2354874 - RNA, 19 nt, Artificial Sequence
  Description of Artificial Sequence: Synthetic oligonucleotide
ugacaaagacagaggugcc

SEQ ID NO: 2354875 - RNA, 19 nt, Artificial Sequence
  Description of Artificial Sequence: Synthetic oligonucleotide
ugagggccuagauaccugc

SEQ ID NO: 2354876 - RNA, 19 nt, Artificial Sequence
  Description of Artificial Sequence: Synthetic oligonucleotide
gaaaagcaagauucagauc

SEQ ID NO: 2354877 - RNA, 19 nt, Artificial Sequence
  Description of Artificial Sequence: Synthetic oligonucleotide
ugauaaugacaaagacaga

SEQ ID NO: 2354878 - RNA, 19 nt, Artificial Sequence
  Description of Artificial Sequence: Synthetic oligonucleotide
agacagagcggcccauugg

SEQ ID NO: 2354879 - RNA, 19 nt, Artificial Sequence
  Description of Artificial Sequence: Synthetic oligonucleotide
ugggaaguauuaccugucu

SEQ ID NO: 2354880 - RNA, 19 nt, Artificial Sequence
  Description of Artificial Sequence: Synthetic oligonucleotide
agguccggaggacagagcu

SEQ ID NO: 2354881 - RNA, 19 nt, Artificial Sequence
  Description of Artificial Sequence: Synthetic oligonucleotide
uagugggaaguauuaccug

SEQ ID NO: 2354882 - RNA, 19 nt, Artificial Sequence
  Description of Artificial Sequence: Synthetic oligonucleotide
ugaugaaaauagugaaguu

SEQ ID NO: 2354883 - RNA, 19 nt, Artificial Sequence
  Description of Artificial Sequence: Synthetic oligonucleotide
gggaacacuggguugguag

SEQ ID NO: 2354884 - RNA, 19 nt, Artificial Sequence
  Description of Artificial Sequence: Synthetic oligonucleotide
acccgggaagcgcucaggc

SEQ ID NO: 2354885 - RNA, 19 nt, Artificial Sequence
  Description of Artificial Sequence: Synthetic oligonucleotide
ugacaggcaucuccacggg

SEQ ID NO: 2354886 - RNA, 19 nt, Artificial Sequence
  Description of Artificial Sequence: Synthetic oligonucleotide
caguguagucucauucacc

SEQ ID NO: 2354887 - RNA, 19 nt, Artificial Sequence
  Description of Artificial Sequence: Synthetic oligonucleotide
cagagcggcccauuggagg

SEQ ID NO: 2354888 - RNA, 19 nt, Artificial Sequence
  Description of Artificial Sequence: Synthetic oligonucleotide
ucuuagugggaaguauuac

SEQ ID NO: 2354889 - RNA, 19 nt, Artificial Sequence
  Description of Artificial Sequence: Synthetic oligonucleotide
auucagaucuuagugggaa

SEQ ID NO: 2354890 - RNA, 19 nt, Artificial Sequence
  Description of Artificial Sequence: Synthetic oligonucleotide
acgaucaucuuggugauaa

SEQ ID NO: 2354891 - RNA, 19 nt, Artificial Sequence
  Description of Artificial Sequence: Synthetic oligonucleotide
ugcagccuaagggugagca

SEQ ID NO: 2354892 - RNA, 19 nt, Artificial Sequence
  Description of Artificial Sequence: Synthetic oligonucleotide
acagcgguacuucuccuca

SEQ ID NO: 2354893 - RNA, 19 nt, Artificial Sequence
  Description of Artificial Sequence: Synthetic oligonucleotide
uucccuucucaaaauugaa

SEQ ID NO: 2354894 - RNA, 19 nt, Artificial Sequence
  Description of Artificial Sequence: Synthetic oligonucleotide
uggaguaggcgccggaguc

SEQ ID NO: 2354895 - RNA, 19 nt, Artificial Sequence
  Description of Artificial Sequence: Synthetic oligonucleotide
cuggggaacacuggguugg

SEQ ID NO: 2354896 - RNA, 19 nt, Artificial Sequence
  Description of Artificial Sequence: Synthetic oligonucleotide
ggacccagagucuuauagg

SEQ ID NO: 2354897 - RNA, 19 nt, Artificial Sequence
  Description of Artificial Sequence: Synthetic oligonucleotide
agcuuccaucaugacaggc

SEQ ID NO: 2354898 - RNA, 19 nt, Artificial Sequence
  Description of Artificial Sequence: Synthetic oligonucleotide
agcaagauucagaucuuag

SEQ ID NO: 2354899 - RNA, 19 nt, Artificial Sequence
  Description of Artificial Sequence: Synthetic oligonucleotide
aggugagcagcagaaauga

SEQ ID NO: 2354900 - RNA, 19 nt, Artificial Sequence
  Description of Artificial Sequence: Synthetic oligonucleotide
uuuauguccuuggcuguca

SEQ ID NO: 2354901 - RNA, 19 nt, Artificial Sequence
  Description of Artificial Sequence: Synthetic oligonucleotide
agaauccuugcauuugauu

SEQ ID NO: 2354902 - RNA, 19 nt, Artificial Sequence
  Description of Artificial Sequence: Synthetic oligonucleotide
gaugcuguucuugaugaaa

SEQ ID NO: 2354903 - RNA, 19 nt, Artificial Sequence
  Description of Artificial Sequence: Synthetic oligonucleotide
cauucaccaggguggaaac

SEQ ID NO: 2354904 - RNA, 19 nt, Artificial Sequence
  Description of Artificial Sequence: Synthetic oligonucleotide
aauguguauggaagugccu

SEQ ID NO: 2354905 - RNA, 19 nt, Artificial Sequence
  Description of Artificial Sequence: Synthetic oligonucleotide
acuggggaacacuggguug

SEQ ID NO: 2354906 - RNA, 19 nt, Artificial Sequence
  Description of Artificial Sequence: Synthetic oligonucleotide
ucugggcagaauccuugca

SEQ ID NO: 2354907 - RNA, 19 nt, Artificial Sequence
  Description of Artificial Sequence: Synthetic oligonucleotide
uugguagaggcagugcccu

SEQ ID NO: 2354908 - RNA, 19 nt, Artificial Sequence
  Description of Artificial Sequence: Synthetic oligonucleotide
gcauuugauuuucaguaac

SEQ ID NO: 2354909 - RNA, 19 nt, Artificial Sequence
  Description of Artificial Sequence: Synthetic oligonucleotide
uaacgaucaucuuggugau

SEQ ID NO: 2354910 - RNA, 19 nt, Artificial Sequence
  Description of Artificial Sequence: Synthetic oligonucleotide
ugccugguacuuguuaggc

SEQ ID NO: 2354911 - RNA, 19 nt, Artificial Sequence
  Description of Artificial Sequence: Synthetic oligonucleotide
agaggcagugcccuucagu

SEQ ID NO: 2354912 - RNA, 19 nt, Artificial Sequence
  Description of Artificial Sequence: Synthetic oligonucleotide
gaggacagagcuguaguuc

SEQ ID NO: 2354913 - RNA, 19 nt, Artificial Sequence
  Description of Artificial Sequence: Synthetic oligonucleotide
gccucuauggguguuaccc

SEQ ID NO: 2354914 - RNA, 19 nt, Artificial Sequence
  Description of Artificial Sequence: Synthetic oligonucleotide
auagugaaguucucagcuu

SEQ ID NO: 2354915 - RNA, 19 nt, Artificial Sequence
  Description of Artificial Sequence: Synthetic oligonucleotide
augcaaggggaaaagcaag

SEQ ID NO: 2354916 - RNA, 19 nt, Artificial Sequence
  Description of Artificial Sequence: Synthetic oligonucleotide
ucacuggggaacacugggu

SEQ ID NO: 2354917 - RNA, 19 nt, Artificial Sequence
  Description of Artificial Sequence: Synthetic oligonucleotide
agggacggauacugcugcc

SEQ ID NO: 2354918 - RNA, 19 nt, Artificial Sequence
  Description of Artificial Sequence: Synthetic oligonucleotide
uaguggccgauggaguagg

SEQ ID NO: 2354919 - RNA, 19 nt, Artificial Sequence
  Description of Artificial Sequence: Synthetic oligonucleotide
ucaccaggguggaaacggc

SEQ ID NO: 2354920 - RNA, 19 nt, Artificial Sequence
  Description of Artificial Sequence: Synthetic oligonucleotide
uguauggaagugccuggua

SEQ ID NO: 2354921 - RNA, 19 nt, Artificial Sequence
  Description of Artificial Sequence: Synthetic oligonucleotide
agugagggccuagauaccu

SEQ ID NO: 2354922 - RNA, 19 nt, Artificial Sequence
  Description of Artificial Sequence: Synthetic oligonucleotide
guugguagaggcagugccc

SEQ ID NO: 2354923 - RNA, 19 nt, Artificial Sequence
  Description of Artificial Sequence: Synthetic oligonucleotide
aacggaugcuguucuugau

SEQ ID NO: 2354924 - RNA, 19 nt, Artificial Sequence
  Description of Artificial Sequence: Synthetic oligonucleotide
aggcccuaguggccgaugg

SEQ ID NO: 2354925 - RNA, 19 nt, Artificial Sequence
  Description of Artificial Sequence: Synthetic oligonucleotide
aguugggcaggagguuucc

SEQ ID NO: 2354926 - RNA, 19 nt, Artificial Sequence
  Description of Artificial Sequence: Synthetic oligonucleotide
cagccuaagggugagcaug

SEQ ID NO: 2354927 - RNA, 19 nt, Artificial Sequence
  Description of Artificial Sequence: Synthetic oligonucleotide
gaguaggcgccggaguccg

SEQ ID NO: 2354928 - RNA, 19 nt, Artificial Sequence
  Description of Artificial Sequence: Synthetic oligonucleotide
agugcccuucaguguaguc

SEQ ID NO: 2354929 - RNA, 19 nt, Artificial Sequence
  Description of Artificial Sequence: Synthetic oligonucleotide
cuagauaccugccuguggu

SEQ ID NO: 2354930 - RNA, 19 nt, Artificial Sequence
  Description of Artificial Sequence: Synthetic oligonucleotide
gaaguauuaccugucugcu

SEQ ID NO: 2354931 - RNA, 19 nt, Artificial Sequence
  Description of Artificial Sequence: Synthetic oligonucleotide
acagguccggaggacagag

SEQ ID NO: 2354932 - RNA, 19 nt, Artificial Sequence
  Description of Artificial Sequence: Synthetic oligonucleotide
augagauaauguguaugga

SEQ ID NO: 2354933 - RNA, 19 nt, Artificial Sequence
  Description of Artificial Sequence: Synthetic oligonucleotide
gucuuauaggauauuuuaa

SEQ ID NO: 2354934 - RNA, 19 nt, Artificial Sequence
  Description of Artificial Sequence: Synthetic oligonucleotide
cuauggguguuacccuagc

SEQ ID NO: 2354935 - RNA, 19 nt, Artificial Sequence
  Description of Artificial Sequence: Synthetic oligonucleotide
agggccuagauaccugccu

SEQ ID NO: 2354936 - RNA, 19 nt, Artificial Sequence
  Description of Artificial Sequence: Synthetic oligonucleotide
agaucuuagugggaaguau

SEQ ID NO: 2354937 - RNA, 19 nt, Artificial Sequence
  Description of Artificial Sequence: Synthetic oligonucleotide
auucaccaggguggaaacg

SEQ ID NO: 2354938 - RNA, 19 nt, Artificial Sequence
  Description of Artificial Sequence: Synthetic oligonucleotide
uuauguccuuggcugucaa

SEQ ID NO: 2354939 - RNA, 19 nt, Artificial Sequence
  Description of Artificial Sequence: Synthetic oligonucleotide
ucucauucaccagggugga

SEQ ID NO: 2354940 - RNA, 19 nt, Artificial Sequence
  Description of Artificial Sequence: Synthetic oligonucleotide
auggaguaggcgccggagu

SEQ ID NO: 2354941 - RNA, 19 nt, Artificial Sequence
  Description of Artificial Sequence: Synthetic oligonucleotide
gggaaguauuaccugucug

SEQ ID NO: 2354942 - RNA, 19 nt, Artificial Sequence
  Description of Artificial Sequence: Synthetic oligonucleotide
ugucagacacacagcggua

SEQ ID NO: 2354943 - RNA, 19 nt, Artificial Sequence
  Description of Artificial Sequence: Synthetic oligonucleotide
aggauauuuuaagggcuca

SEQ ID NO: 2354944 - RNA, 19 nt, Artificial Sequence
  Description of Artificial Sequence: Synthetic oligonucleotide
uggguugguagaggcagug

SEQ ID NO: 2354945 - RNA, 19 nt, Artificial Sequence
  Description of Artificial Sequence: Synthetic oligonucleotide
guguagucucauucaccag

SEQ ID NO: 2354946 - RNA, 19 nt, Artificial Sequence
  Description of Artificial Sequence: Synthetic oligonucleotide
cugucagacacacagcggu

SEQ ID NO: 2354947 - RNA, 19 nt, Artificial Sequence
  Description of Artificial Sequence: Synthetic oligonucleotide
agggcucaaugagauaaug

SEQ ID NO: 2354948 - RNA, 19 nt, Artificial Sequence
  Description of Artificial Sequence: Synthetic oligonucleotide
aucuccacggguauccacu

SEQ ID NO: 2354949 - RNA, 19 nt, Artificial Sequence
  Description of Artificial Sequence: Synthetic oligonucleotide
cuggaucucacagguccgg

SEQ ID NO: 2354950 - RNA, 19 nt, Artificial Sequence
  Description of Artificial Sequence: Synthetic oligonucleotide
agagggaaacggaugcugu

SEQ ID NO: 2354951 - RNA, 19 nt, Artificial Sequence
  Description of Artificial Sequence: Synthetic oligonucleotide
ugcccagacagagcggccc

SEQ ID NO: 2354952 - RNA, 19 nt, Artificial Sequence
  Description of Artificial Sequence: Synthetic oligonucleotide
cuaguggccgauggaguag

SEQ ID NO: 2354953 - RNA, 19 nt, Artificial Sequence
  Description of Artificial Sequence: Synthetic oligonucleotide
guaguucacacagcggcca

SEQ ID NO: 2354954 - RNA, 19 nt, Artificial Sequence
  Description of Artificial Sequence: Synthetic oligonucleotide
aagcaagauucagaucuua

SEQ ID NO: 2354955 - RNA, 19 nt, Artificial Sequence
  Description of Artificial Sequence: Synthetic oligonucleotide
uuaagggcucaaugagaua

SEQ ID NO: 2354956 - RNA, 19 nt, Artificial Sequence
  Description of Artificial Sequence: Synthetic oligonucleotide
cuuggcugucaaguugggc

SEQ ID NO: 2354957 - RNA, 19 nt, Artificial Sequence
  Description of Artificial Sequence: Synthetic oligonucleotide
uagauaccugccugugguc

SEQ ID NO: 2354958 - RNA, 19 nt, Artificial Sequence
  Description of Artificial Sequence: Synthetic oligonucleotide
acggauacugcugccccag

SEQ ID NO: 2354959 - RNA, 19 nt, Artificial Sequence
  Description of Artificial Sequence: Synthetic oligonucleotide
cagacagagcggcccauug

SEQ ID NO: 2354960 - RNA, 19 nt, Artificial Sequence
  Description of Artificial Sequence: Synthetic oligonucleotide
aagcgcucaggcccacacu

SEQ ID NO: 2354961 - RNA, 19 nt, Artificial Sequence
  Description of Artificial Sequence: Synthetic oligonucleotide
aggcaugcaaggggaaaag

SEQ ID NO: 2354962 - RNA, 19 nt, Artificial Sequence
  Description of Artificial Sequence: Synthetic oligonucleotide
aucuuagugggaaguauua

SEQ ID NO: 2354963 - RNA, 19 nt, Artificial Sequence
  Description of Artificial Sequence: Synthetic oligonucleotide
caaagggacggauacugcu

SEQ ID NO: 2354964 - RNA, 19 nt, Artificial Sequence
  Description of Artificial Sequence: Synthetic oligonucleotide
uaggcgccggaguccgugg

SEQ ID NO: 2354965 - RNA, 19 nt, Artificial Sequence
  Description of Artificial Sequence: Synthetic oligonucleotide
ggacggauacugcugcccc

SEQ ID NO: 2354966 - RNA, 19 nt, Artificial Sequence
  Description of Artificial Sequence: Synthetic oligonucleotide
uagucucauucaccagggu

SEQ ID NO: 2354967 - RNA, 19 nt, Artificial Sequence
  Description of Artificial Sequence: Synthetic oligonucleotide
uagcaacauuuucucuauc

SEQ ID NO: 2354968 - RNA, 19 nt, Artificial Sequence
  Description of Artificial Sequence: Synthetic oligonucleotide
cuuugcaaagggacggaua

SEQ ID NO: 2354969 - RNA, 19 nt, Artificial Sequence
  Description of Artificial Sequence: Synthetic oligonucleotide
aggggaaaagcaagauuca

SEQ ID NO: 2354970 - RNA, 19 nt, Artificial Sequence
  Description of Artificial Sequence: Synthetic oligonucleotide
cacagcgguacuucuccuc

SEQ ID NO: 2354971 - RNA, 19 nt, Artificial Sequence
  Description of Artificial Sequence: Synthetic oligonucleotide
guggccgauggaguaggcg

SEQ ID NO: 2354972 - RNA, 19 nt, Artificial Sequence
  Description of Artificial Sequence: Synthetic oligonucleotide
gucaaguugggcaggaggu

SEQ ID NO: 2354973 - RNA, 19 nt, Artificial Sequence
  Description of Artificial Sequence: Synthetic oligonucleotide
cccauuugcccagacagag

SEQ ID NO: 2354974 - RNA, 19 nt, Artificial Sequence
  Description of Artificial Sequence: Synthetic oligonucleotide
auuugcccagacagagcgg

SEQ ID NO: 2354975 - RNA, 19 nt, Artificial Sequence
  Description of Artificial Sequence: Synthetic oligonucleotide
ccuagcaacauuuucucua

SEQ ID NO: 2354976 - RNA, 19 nt, Artificial Sequence
  Description of Artificial Sequence: Synthetic oligonucleotide
ccuagauaccugccugugg

SEQ ID NO: 2354977 - RNA, 19 nt, Artificial Sequence
  Description of Artificial Sequence: Synthetic oligonucleotide
uccuuugcaaagggacgga

SEQ ID NO: 2354978 - RNA, 19 nt, Artificial Sequence
  Description of Artificial Sequence: Synthetic oligonucleotide
aggccucuauggguguuac

SEQ ID NO: 2354979 - RNA, 19 nt, Artificial Sequence
  Description of Artificial Sequence: Synthetic oligonucleotide
uguggucuuucaggugagc

SEQ ID NO: 2354980 - RNA, 19 nt, Artificial Sequence
  Description of Artificial Sequence: Synthetic oligonucleotide
cugguacuuguuaggccuc

SEQ ID NO: 2354981 - RNA, 19 nt, Artificial Sequence
  Description of Artificial Sequence: Synthetic oligonucleotide
caugggacccugggaagag

SEQ ID NO: 2354982 - RNA, 19 nt, Artificial Sequence
  Description of Artificial Sequence: Synthetic oligonucleotide
ggaacacuggguugguaga

SEQ ID NO: 2354983 - RNA, 19 nt, Artificial Sequence
  Description of Artificial Sequence: Synthetic oligonucleotide
ucaaguugggcaggagguu

SEQ ID NO: 2354984 - RNA, 19 nt, Artificial Sequence
  Description of Artificial Sequence: Synthetic oligonucleotide
gacggauacugcugcccca

SEQ ID NO: 2354985 - RNA, 19 nt, Artificial Sequence
  Description of Artificial Sequence: Synthetic oligonucleotide
cuagcaacauuuucucuau

SEQ ID NO: 2354986 - RNA, 19 nt, Artificial Sequence
  Description of Artificial Sequence: Synthetic oligonucleotide
uugcaaagggacggauacu

SEQ ID NO: 2354987 - RNA, 19 nt, Artificial Sequence
  Description of Artificial Sequence: Synthetic oligonucleotide
gggccuagauaccugccug

SEQ ID NO: 2354988 - RNA, 19 nt, Artificial Sequence
  Description of Artificial Sequence: Synthetic oligonucleotide
gcuguaguucacacagcgg

SEQ ID NO: 2354989 - RNA, 19 nt, Artificial Sequence
  Description of Artificial Sequence: Synthetic oligonucleotide
caguggccuggucacuggg

SEQ ID NO: 2354990 - RNA, 19 nt, Artificial Sequence
  Description of Artificial Sequence: Synthetic oligonucleotide
cucuauggguguuacccua

SEQ ID NO: 2354991 - RNA, 19 nt, Artificial Sequence
  Description of Artificial Sequence: Synthetic oligonucleotide
gugggaaguauuaccuguc

SEQ ID NO: 2354992 - RNA, 19 nt, Artificial Sequence
  Description of Artificial Sequence: Synthetic oligonucleotide
aggguggaaacggcauguc

SEQ ID NO: 2354993 - RNA, 19 nt, Artificial Sequence
  Description of Artificial Sequence: Synthetic oligonucleotide
ugguacuuguuaggccucu

SEQ ID NO: 2354994 - RNA, 19 nt, Artificial Sequence
  Description of Artificial Sequence: Synthetic oligonucleotide
gaucuuagugggaaguauu

SEQ ID NO: 2354995 - RNA, 19 nt, Artificial Sequence
  Description of Artificial Sequence: Synthetic oligonucleotide
cagcuuccaucaugacagg

SEQ ID NO: 2354996 - RNA, 19 nt, Artificial Sequence
  Description of Artificial Sequence: Synthetic oligonucleotide
cucugcagccuaaggguga

SEQ ID NO: 2354997 - RNA, 19 nt, Artificial Sequence
  Description of Artificial Sequence: Synthetic oligonucleotide
gaguccguggacuguuucu

SEQ ID NO: 2354998 - RNA, 19 nt, Artificial Sequence
  Description of Artificial Sequence: Synthetic oligonucleotide
aagggcucaaugagauaau

SEQ ID NO: 2354999 - RNA, 19 nt, Artificial Sequence
  Description of Artificial Sequence: Synthetic oligonucleotide
gagggccuagauaccugcc

SEQ ID NO: 2355000 - RNA, 19 nt, Artificial Sequence
  Description of Artificial Sequence: Synthetic oligonucleotide
acacagcgguacuucuccu

SEQ ID NO: 2355001 - RNA, 19 nt, Artificial Sequence
  Description of Artificial Sequence: Synthetic oligonucleotide
gagcuguaguucacacagc

SEQ ID NO: 2355002 - RNA, 19 nt, Artificial Sequence
  Description of Artificial Sequence: Synthetic oligonucleotide
gcugucagacacacagcgg

SEQ ID NO: 2355003 - RNA, 19 nt, Artificial Sequence
  Description of Artificial Sequence: Synthetic oligonucleotide
augggacccugggaagagg

SEQ ID NO: 2355004 - RNA, 19 nt, Artificial Sequence
  Description of Artificial Sequence: Synthetic oligonucleotide
gagucuuauaggauauuuu

SEQ ID NO: 2355005 - RNA, 19 nt, Artificial Sequence
  Description of Artificial Sequence: Synthetic oligonucleotide
guaggcgccggaguccgug

SEQ ID NO: 2355006 - RNA, 19 nt, Artificial Sequence
  Description of Artificial Sequence: Synthetic oligonucleotide
cccauuggaggcucugcag

SEQ ID NO: 2355007 - RNA, 19 nt, Artificial Sequence
  Description of Artificial Sequence: Synthetic oligonucleotide
ggcaugcaaggggaaaagc

SEQ ID NO: 2355008 - RNA, 19 nt, Artificial Sequence
  Description of Artificial Sequence: Synthetic oligonucleotide
ggcagugcccuucagugua

SEQ ID NO: 2355009 - RNA, 19 nt, Artificial Sequence
  Description of Artificial Sequence: Synthetic oligonucleotide
uggaaacggcaugucuuua

SEQ ID NO: 2355010 - RNA, 19 nt, Artificial Sequence
  Description of Artificial Sequence: Synthetic oligonucleotide
gcucaaugagauaaugugu

SEQ ID NO: 2355011 - RNA, 19 nt, Artificial Sequence
  Description of Artificial Sequence: Synthetic oligonucleotide
guauuaccugucugcugaa

SEQ ID NO: 2355012 - RNA, 19 nt, Artificial Sequence
  Description of Artificial Sequence: Synthetic oligonucleotide
cucacagguccggaggaca

SEQ ID NO: 2355013 - RNA, 19 nt, Artificial Sequence
  Description of Artificial Sequence: Synthetic oligonucleotide
ggugagcagcagaaaugag

SEQ ID NO: 2355014 - RNA, 19 nt, Artificial Sequence
  Description of Artificial Sequence: Synthetic oligonucleotide
ggaguaggcgccggagucc

SEQ ID NO: 2355015 - RNA, 19 nt, Artificial Sequence
  Description of Artificial Sequence: Synthetic oligonucleotide
gggacggauacugcugccc

SEQ ID NO: 2355016 - RNA, 19 nt, Artificial Sequence
  Description of Artificial Sequence: Synthetic oligonucleotide
gguagaggcagugcccuuc

SEQ ID NO: 2355017 - RNA, 19 nt, Artificial Sequence
  Description of Artificial Sequence: Synthetic oligonucleotide
guacuuguuaggccucuau

SEQ ID NO: 2355018 - RNA, 19 nt, Artificial Sequence
  Description of Artificial Sequence: Synthetic oligonucleotide
agcggcccauuggaggcuc

SEQ ID NO: 2355019 - RNA, 19 nt, Artificial Sequence
  Description of Artificial Sequence: Synthetic oligonucleotide
guggaaacggcaugucuuu

SEQ ID NO: 2355020 - RNA, 19 nt, Artificial Sequence
  Description of Artificial Sequence: Synthetic oligonucleotide
gguauccacuucggugggg

SEQ ID NO: 2355021 - RNA, 19 nt, Artificial Sequence
  Description of Artificial Sequence: Synthetic oligonucleotide
gcgguacuucuccucauuc

SEQ ID NO: 2355022 - RNA, 19 nt, Artificial Sequence
  Description of Artificial Sequence: Synthetic oligonucleotide
gcaaagggacggauacugc

SEQ ID NO: 2355023 - RNA, 19 nt, Artificial Sequence
  Description of Artificial Sequence: Synthetic oligonucleotide
cugggcagaauccuugcau

SEQ ID NO: 2355024 - RNA, 19 nt, Artificial Sequence
  Description of Artificial Sequence: Synthetic oligonucleotide
ggguguuacccuagcaaca

SEQ ID NO: 2355025 - RNA, 19 nt, Artificial Sequence
  Description of Artificial Sequence: Synthetic oligonucleotide
ggauauuuuaagggcucaa

SEQ ID NO: 2355026 - RNA, 19 nt, Artificial Sequence
  Description of Artificial Sequence: Synthetic oligonucleotide
agcagaugggaggcaugca

SEQ ID NO: 2355027 - RNA, 19 nt, Artificial Sequence
  Description of Artificial Sequence: Synthetic oligonucleotide
aacgaucaucuuggugaua

SEQ ID NO: 2355028 - RNA, 19 nt, Artificial Sequence
  Description of Artificial Sequence: Synthetic oligonucleotide
uaggccucuauggguguua

SEQ ID NO: 2355029 - RNA, 19 nt, Artificial Sequence
  Description of Artificial Sequence: Synthetic oligonucleotide
gcagcagaaaugagaguuc

SEQ ID NO: 2355030 - RNA, 19 nt, Artificial Sequence
  Description of Artificial Sequence: Synthetic oligonucleotide
gggaaacggaugcuguucu

SEQ ID NO: 2355031 - RNA, 19 nt, Artificial Sequence
  Description of Artificial Sequence: Synthetic oligonucleotide
gcucugcagccuaagggug

SEQ ID NO: 2355032 - RNA, 19 nt, Artificial Sequence
  Description of Artificial Sequence: Synthetic oligonucleotide
uuaggccucuauggguguu

SEQ ID NO: 2355033 - RNA, 19 nt, Artificial Sequence
  Description of Artificial Sequence: Synthetic oligonucleotide
ccacggguauccacuucgg

SEQ ID NO: 2355034 - RNA, 19 nt, Artificial Sequence
  Description of Artificial Sequence: Synthetic oligonucleotide
ggaguccguggacuguuuc

SEQ ID NO: 2355035 - RNA, 19 nt, Artificial Sequence
  Description of Artificial Sequence: Synthetic oligonucleotide
caggacccugggaagcaga

SEQ ID NO: 2355036 - RNA, 19 nt, Artificial Sequence
  Description of Artificial Sequence: Synthetic oligonucleotide
ggcugucaaguugggcagg

SEQ ID NO: 2355037 - RNA, 19 nt, Artificial Sequence
  Description of Artificial Sequence: Synthetic oligonucleotide
guuaggccucuaugggugu

SEQ ID NO: 2355038 - RNA, 19 nt, Artificial Sequence
  Description of Artificial Sequence: Synthetic oligonucleotide
cagaucuuagugggaagua

SEQ ID NO: 2355039 - RNA, 19 nt, Artificial Sequence
  Description of Artificial Sequence: Synthetic oligonucleotide
ggaaacggcaugucuuuau

SEQ ID NO: 2355040 - RNA, 19 nt, Artificial Sequence
  Description of Artificial Sequence: Synthetic oligonucleotide
uggggaacacuggguuggu

SEQ ID NO: 2355041 - RNA, 19 nt, Artificial Sequence
  Description of Artificial Sequence: Synthetic oligonucleotide
gguggaaacggcaugucuu

SEQ ID NO: 2355042 - RNA, 19 nt, Artificial Sequence
  Description of Artificial Sequence: Synthetic oligonucleotide
ccuaagggugagcauggga

SEQ ID NO: 2355043 - RNA, 19 nt, Artificial Sequence
  Description of Artificial Sequence: Synthetic oligonucleotide
ggguugguagaggcagugc

SEQ ID NO: 2355044 - RNA, 19 nt, Artificial Sequence
  Description of Artificial Sequence: Synthetic oligonucleotide
gaggcccuaguggccgaug

SEQ ID NO: 2355045 - RNA, 19 nt, Artificial Sequence
  Description of Artificial Sequence: Synthetic oligonucleotide
guguauggaagugccuggu

SEQ ID NO: 2355046 - RNA, 19 nt, Artificial Sequence
  Description of Artificial Sequence: Synthetic oligonucleotide
gccgauggaguaggcgccg

SEQ ID NO: 2355047 - RNA, 19 nt, Artificial Sequence
  Description of Artificial Sequence: Synthetic oligonucleotide
gguguuacccuagcaacau

SEQ ID NO: 2355048 - RNA, 19 nt, Artificial Sequence
  Description of Artificial Sequence: Synthetic oligonucleotide
cccgggaagcgcucaggcc

SEQ ID NO: 2355049 - RNA, 19 nt, Artificial Sequence
  Description of Artificial Sequence: Synthetic oligonucleotide
aggcgccggaguccgugga

SEQ ID NO: 2355050 - RNA, 19 nt, Artificial Sequence
  Description of Artificial Sequence: Synthetic oligonucleotide
uccggaggacagagcugua

SEQ ID NO: 2355051 - RNA, 19 nt, Artificial Sequence
  Description of Artificial Sequence: Synthetic oligonucleotide
ccuaguggccgauggagua

SEQ ID NO: 2355052 - RNA, 19 nt, Artificial Sequence
  Description of Artificial Sequence: Synthetic oligonucleotide
agcggccagugaggauccc

SEQ ID NO: 2355053 - RNA, 19 nt, Artificial Sequence
  Description of Artificial Sequence: Synthetic oligonucleotide
gccccaggacccugggaag

SEQ ID NO: 2355054 - RNA, 19 nt, Artificial Sequence
  Description of Artificial Sequence: Synthetic oligonucleotide
guuacccuagcaacauuuu

SEQ ID NO: 2355055 - RNA, 19 nt, Artificial Sequence
  Description of Artificial Sequence: Synthetic oligonucleotide
ggguggaaacggcaugucu

SEQ ID NO: 2355056 - RNA, 19 nt, Artificial Sequence
  Description of Artificial Sequence: Synthetic oligonucleotide
caggguggaaacggcaugu

SEQ ID NO: 2355057 - RNA, 19 nt, Artificial Sequence
  Description of Artificial Sequence: Synthetic oligonucleotide
gggcucaaugagauaaugu

SEQ ID NO: 2355058 - RNA, 19 nt, Artificial Sequence
  Description of Artificial Sequence: Synthetic oligonucleotide
ggcccacacuggcugucag

SEQ ID NO: 2355059 - RNA, 19 nt, Artificial Sequence
  Description of Artificial Sequence: Synthetic oligonucleotide
ggccucuauggguguuacc

SEQ ID NO: 2355060 - RNA, 19 nt, Artificial Sequence
  Description of Artificial Sequence: Synthetic oligonucleotide
gguccggaggacagagcug

SEQ ID NO: 2355061 - RNA, 19 nt, Artificial Sequence
  Description of Artificial Sequence: Synthetic oligonucleotide
ccggaggacagagcuguag

SEQ ID NO: 2355062 - RNA, 19 nt, Artificial Sequence
  Description of Artificial Sequence: Synthetic oligonucleotide
ggaggcaugcaaggggaaa

SEQ ID NO: 2355063 - RNA, 19 nt, Artificial Sequence
  Description of Artificial Sequence: Synthetic oligonucleotide
ggcccauuggaggcucugc

SEQ ID NO: 2355064 - RNA, 19 nt, Artificial Sequence
  Description of Artificial Sequence: Synthetic oligonucleotide
aggcccacacuggcuguca

SEQ ID NO: 2355065 - RNA, 19 nt, Artificial Sequence
  Description of Artificial Sequence: Synthetic oligonucleotide
caggcccacacuggcuguc

SEQ ID NO: 2355066 - RNA, 19 nt, Artificial Sequence
  Description of Artificial Sequence: Synthetic oligonucleotide
ggaagcagaugggaggcau

SEQ ID NO: 2355067 - RNA, 19 nt, Artificial Sequence
  Description of Artificial Sequence: Synthetic oligonucleotide
cacggguauccacuucggu

SEQ ID NO: 2355068 - RNA, 19 nt, Artificial Sequence
  Description of Artificial Sequence: Synthetic oligonucleotide
gggugagcaugggacccug

SEQ ID NO: 2355069 - RNA, 19 nt, Artificial Sequence
  Description of Artificial Sequence: Synthetic oligonucleotide
cacagguccggaggacaga

SEQ ID NO: 2355070 - RNA, 19 nt, Artificial Sequence
  Description of Artificial Sequence: Synthetic oligonucleotide
ggcgccggaguccguggac

SEQ ID NO: 2355071 - RNA, 19 nt, Artificial Sequence
  Description of Artificial Sequence: Synthetic oligonucleotide
caguaacgaucaucuuggu

SEQ ID NO: 2355072 - RNA, 19 nt, Artificial Sequence
  Description of Artificial Sequence: Synthetic oligonucleotide
aggugcccugggguggggu

SEQ ID NO: 2355073 - RNA, 19 nt, Artificial Sequence
  Description of Artificial Sequence: Synthetic oligonucleotide
ggcccuaguggccgaugga

SEQ ID NO: 2355074 - RNA, 19 nt, Artificial Sequence
  Description of Artificial Sequence: Synthetic oligonucleotide
ccccauuugcccagacaga

SEQ ID NO: 2355075 - RNA, 19 nt, Artificial Sequence
  Description of Artificial Sequence: Synthetic oligonucleotide
guguuacccuagcaacauu

SEQ ID NO: 2355076 - RNA, 19 nt, Artificial Sequence
  Description of Artificial Sequence: Synthetic oligonucleotide
ccgauggaguaggcgccgg

SEQ ID NO: 2355077 - RNA, 19 nt, Artificial Sequence
  Description of Artificial Sequence: Synthetic oligonucleotide
ccucuauggguguuacccu

SEQ ID NO: 2355078 - RNA, 19 nt, Artificial Sequence
  Description of Artificial Sequence: Synthetic oligonucleotide
cucauucaccaggguggaa

SEQ ID NO: 2355079 - RNA, 19 nt, Artificial Sequence
  Description of Artificial Sequence: Synthetic oligonucleotide
gguacuuguuaggccucua

SEQ ID NO: 2355080 - RNA, 19 nt, Artificial Sequence
  Description of Artificial Sequence: Synthetic oligonucleotide
ggaaacggaugcuguucuu

SEQ ID NO: 2355081 - RNA, 19 nt, Artificial Sequence
  Description of Artificial Sequence: Synthetic oligonucleotide
gccuggucacuggggaaca

SEQ ID NO: 2355082 - RNA, 19 nt, Artificial Sequence
  Description of Artificial Sequence: Synthetic oligonucleotide
aguaggcgccggaguccgu

SEQ ID NO: 2355083 - RNA, 19 nt, Artificial Sequence
  Description of Artificial Sequence: Synthetic oligonucleotide
cccuagcaacauuuucucu

SEQ ID NO: 2355084 - RNA, 19 nt, Artificial Sequence
  Description of Artificial Sequence: Synthetic oligonucleotide
ccuggucacuggggaacac

SEQ ID NO: 2355085 - RNA, 19 nt, Artificial Sequence
  Description of Artificial Sequence: Synthetic oligonucleotide
gcagccuaagggugagcau

SEQ ID NO: 2355086 - RNA, 19 nt, Artificial Sequence
  Description of Artificial Sequence: Synthetic oligonucleotide
cccuaguggccgauggagu

SEQ ID NO: 2355087 - RNA, 19 nt, Artificial Sequence
  Description of Artificial Sequence: Synthetic oligonucleotide
gagcggcccauuggaggcu

SEQ ID NO: 2355088 - RNA, 19 nt, Artificial Sequence
  Description of Artificial Sequence: Synthetic oligonucleotide
cagagucuuauaggauauu

SEQ ID NO: 2355089 - RNA, 19 nt, Artificial Sequence
  Description of Artificial Sequence: Synthetic oligonucleotide
cagcgguacuucuccucau

SEQ ID NO: 2355090 - RNA, 19 nt, Artificial Sequence
  Description of Artificial Sequence: Synthetic oligonucleotide
ggcaugucuuuauguccuu

SEQ ID NO: 2355091 - RNA, 19 nt, Artificial Sequence
  Description of Artificial Sequence: Synthetic oligonucleotide
cucauucucugggcagaau

SEQ ID NO: 2355092 - RNA, 19 nt, Artificial Sequence
  Description of Artificial Sequence: Synthetic oligonucleotide
cgccggaguccguggacug

SEQ ID NO: 2355093 - RNA, 19 nt, Artificial Sequence
  Description of Artificial Sequence: Synthetic oligonucleotide
cccugggaagaggcccuag

SEQ ID NO: 2355094 - RNA, 19 nt, Artificial Sequence
  Description of Artificial Sequence: Synthetic oligonucleotide
cacagcggccagugaggau

SEQ ID NO: 2355095 - RNA, 19 nt, Artificial Sequence
  Description of Artificial Sequence: Synthetic oligonucleotide
ccucauucucugggcagaa

SEQ ID NO: 2355096 - RNA, 19 nt, Artificial Sequence
  Description of Artificial Sequence: Synthetic oligonucleotide
cgggaagcgcucaggccca

SEQ ID NO: 2355097 - RNA, 19 nt, Artificial Sequence
  Description of Artificial Sequence: Synthetic oligonucleotide
cagugcccuucaguguagu

SEQ ID NO: 2355098 - RNA, 19 nt, Artificial Sequence
  Description of Artificial Sequence: Synthetic oligonucleotide
gggaagcgcucaggcccac

SEQ ID NO: 2355099 - RNA, 19 nt, Artificial Sequence
  Description of Artificial Sequence: Synthetic oligonucleotide
ccuuugcaaagggacggau

SEQ ID NO: 2355100 - RNA, 19 nt, Artificial Sequence
  Description of Artificial Sequence: Synthetic oligonucleotide
gcgccggaguccguggacu

SEQ ID NO: 2355101 - RNA, 19 nt, Artificial Sequence
  Description of Artificial Sequence: Synthetic oligonucleotide
cccacccgggaagcgcuca

SEQ ID NO: 2355102 - RNA, 19 nt, Artificial Sequence
  Description of Artificial Sequence: Synthetic oligonucleotide
gccggaguccguggacugu

SEQ ID NO: 2355103 - RNA, 19 nt, Artificial Sequence
  Description of Artificial Sequence: Synthetic oligonucleotide
ccggaguccguggacuguu

SEQ ID NO: 2355104 - RNA, 19 nt, Artificial Sequence
  Description of Artificial Sequence: Synthetic oligonucleotide
cccugggguggggucacau

SEQ ID NO: 2355105 - RNA, 19 nt, Artificial Sequence
  Description of Artificial Sequence: Synthetic oligonucleotide
gcggcccauuggaggcucu

SEQ ID NO: 2355106 - RNA, 19 nt, Artificial Sequence
  Description of Artificial Sequence: Synthetic oligonucleotide
cccagacagagcggcccau

SEQ ID NO: 2355107 - RNA, 19 nt, Artificial Sequence
  Description of Artificial Sequence: Synthetic oligonucleotide
cggaguccguggacuguuu

SEQ ID NO: 2355108 - RNA, 19 nt, Artificial Sequence
  Description of Artificial Sequence: Synthetic oligonucleotide
acuuauuccaguucuagcc

SEQ ID NO: 2355109 - RNA, 19 nt, Artificial Sequence
  Description of Artificial Sequence: Synthetic oligonucleotide
cacuaaauagucuucaucg

SEQ ID NO: 2355110 - RNA, 19 nt, Artificial Sequence
  Description of Artificial Sequence: Synthetic oligonucleotide
auaaucgucccauaauucc

SEQ ID NO: 2355111 - RNA, 19 nt, Artificial Sequence
  Description of Artificial Sequence: Synthetic oligonucleotide
aaacucguccacuaaauag

SEQ ID NO: 2355112 - RNA, 19 nt, Artificial Sequence
  Description of Artificial Sequence: Synthetic oligonucleotide
uucuucaccacuaaaccgg

SEQ ID NO: 2355113 - RNA, 19 nt, Artificial Sequence
  Description of Artificial Sequence: Synthetic oligonucleotide
ucugcauaagcucugugcg

SEQ ID NO: 2355114 - RNA, 19 nt, Artificial Sequence
  Description of Artificial Sequence: Synthetic oligonucleotide
aauacugcccgugagugcc

SEQ ID NO: 2355115 - RNA, 19 nt, Artificial Sequence
  Description of Artificial Sequence: Synthetic oligonucleotide
aaguucaccaucugagacc

SEQ ID NO: 2355116 - RNA, 19 nt, Artificial Sequence
  Description of Artificial Sequence: Synthetic oligonucleotide
uuuggucggaucuucacgg

SEQ ID NO: 2355117 - RNA, 19 nt, Artificial Sequence
  Description of Artificial Sequence: Synthetic oligonucleotide
aaguucuccuccaacaagc

SEQ ID NO: 2355118 - RNA, 19 nt, Artificial Sequence
  Description of Artificial Sequence: Synthetic oligonucleotide
aucuagcacacugagagcc

SEQ ID NO: 2355119 - RNA, 19 nt, Artificial Sequence
  Description of Artificial Sequence: Synthetic oligonucleotide
uuugcagucugcaggauug

SEQ ID NO: 2355120 - RNA, 19 nt, Artificial Sequence
  Description of Artificial Sequence: Synthetic oligonucleotide
aauaaucgucccauaauuc

SEQ ID NO: 2355121 - RNA, 19 nt, Artificial Sequence
  Description of Artificial Sequence: Synthetic oligonucleotide
acuagcuuccaagagacac

SEQ ID NO: 2355122 - RNA, 19 nt, Artificial Sequence
  Description of Artificial Sequence: Synthetic oligonucleotide
uccaagagacaccggaucg

SEQ ID NO: 2355123 - RNA, 19 nt, Artificial Sequence
  Description of Artificial Sequence: Synthetic oligonucleotide
aucugcuugacguuguagg

SEQ ID NO: 2355124 - RNA, 19 nt, Artificial Sequence
  Description of Artificial Sequence: Synthetic oligonucleotide
cugaccagaauaaucgucc

SEQ ID NO: 2355125 - RNA, 19 nt, Artificial Sequence
  Description of Artificial Sequence: Synthetic oligonucleotide
aagccuuucagccaauccu

SEQ ID NO: 2355126 - RNA, 19 nt, Artificial Sequence
  Description of Artificial Sequence: Synthetic oligonucleotide
ucucucaagccuuucagcc

SEQ ID NO: 2355127 - RNA, 19 nt, Artificial Sequence
  Description of Artificial Sequence: Synthetic oligonucleotide
aggagauuuugcuggaugg

SEQ ID NO: 2355128 - RNA, 19 nt, Artificial Sequence
  Description of Artificial Sequence: Synthetic oligonucleotide
ugcaggauugaauacugcc

SEQ ID NO: 2355129 - RNA, 19 nt, Artificial Sequence
  Description of Artificial Sequence: Synthetic oligonucleotide
uucaagaacauccccuucu

SEQ ID NO: 2355130 - RNA, 19 nt, Artificial Sequence
  Description of Artificial Sequence: Synthetic oligonucleotide
uaaucgucccauaauuccc

SEQ ID NO: 2355131 - RNA, 19 nt, Artificial Sequence
  Description of Artificial Sequence: Synthetic oligonucleotide
ucauagucuagacucguga

SEQ ID NO: 2355132 - RNA, 19 nt, Artificial Sequence
  Description of Artificial Sequence: Synthetic oligonucleotide
ucugcuugacguuguaggg

SEQ ID NO: 2355133 - RNA, 19 nt, Artificial Sequence
  Description of Artificial Sequence: Synthetic oligonucleotide
aaucgucccauaauucccc

SEQ ID NO: 2355134 - RNA, 19 nt, Artificial Sequence
  Description of Artificial Sequence: Synthetic oligonucleotide
caggauugaauacugcccg

SEQ ID NO: 2355135 - RNA, 19 nt, Artificial Sequence
  Description of Artificial Sequence: Synthetic oligonucleotide
auaccauccacaucuagca

SEQ ID NO: 2355136 - RNA, 19 nt, Artificial Sequence
  Description of Artificial Sequence: Synthetic oligonucleotide
uguaggguuuacuuauucc

SEQ ID NO: 2355137 - RNA, 19 nt, Artificial Sequence
  Description of Artificial Sequence: Synthetic oligonucleotide
auccugaccagaauaaucg

SEQ ID NO: 2355138 - RNA, 19 nt, Artificial Sequence
  Description of Artificial Sequence: Synthetic oligonucleotide
acuaaaccggcuuuguaug

SEQ ID NO: 2355139 - RNA, 19 nt, Artificial Sequence
  Description of Artificial Sequence: Synthetic oligonucleotide
uaggguuuacuuauuccag

SEQ ID NO: 2355140 - RNA, 19 nt, Artificial Sequence
  Description of Artificial Sequence: Synthetic oligonucleotide
uccuccaacaagcaggagu

SEQ ID NO: 2355141 - RNA, 19 nt, Artificial Sequence
  Description of Artificial Sequence: Synthetic oligonucleotide
uccacuagcuuccaagaga

SEQ ID NO: 2355142 - RNA, 19 nt, Artificial Sequence
  Description of Artificial Sequence: Synthetic oligonucleotide
aaauucguucuccucuucu

SEQ ID NO: 2355143 - RNA, 19 nt, Artificial Sequence
  Description of Artificial Sequence: Synthetic oligonucleotide
gaacccuaggagcaggccg

SEQ ID NO: 2355144 - RNA, 19 nt, Artificial Sequence
  Description of Artificial Sequence: Synthetic oligonucleotide
ucugcgaaggucaccagca

SEQ ID NO: 2355145 - RNA, 19 nt, Artificial Sequence
  Description of Artificial Sequence: Synthetic oligonucleotide
gaagucgaaguucuccucc

SEQ ID NO: 2355146 - RNA, 19 nt, Artificial Sequence
  Description of Artificial Sequence: Synthetic oligonucleotide
auagucuagacucgugaag

SEQ ID NO: 2355147 - RNA, 19 nt, Artificial Sequence
  Description of Artificial Sequence: Synthetic oligonucleotide
ucuagacucgugaagucga

SEQ ID NO: 2355148 - RNA, 19 nt, Artificial Sequence
  Description of Artificial Sequence: Synthetic oligonucleotide
agaagagucaucuccgcca

SEQ ID NO: 2355149 - RNA, 19 nt, Artificial Sequence
  Description of Artificial Sequence: Synthetic oligonucleotide
cuucauaccauccacaucu

SEQ ID NO: 2355150 - RNA, 19 nt, Artificial Sequence
  Description of Artificial Sequence: Synthetic oligonucleotide
auugaauacugcccgugag

SEQ ID NO: 2355151 - RNA, 19 nt, Artificial Sequence
  Description of Artificial Sequence: Synthetic oligonucleotide
cuaaauagucuucaucguc

SEQ ID NO: 2355152 - RNA, 19 nt, Artificial Sequence
  Description of Artificial Sequence: Synthetic oligonucleotide
ugaauacugcccgugagug

SEQ ID NO: 2355153 - RNA, 19 nt, Artificial Sequence
  Description of Artificial Sequence: Synthetic oligonucleotide
gauaccuccacuagcuucc

SEQ ID NO: 2355154 - RNA, 19 nt, Artificial Sequence
  Description of Artificial Sequence: Synthetic oligonucleotide
gaaguuuugcagucugcag

SEQ ID NO: 2355155 - RNA, 19 nt, Artificial Sequence
  Description of Artificial Sequence: Synthetic oligonucleotide
aucugcgaaggucaccagc

SEQ ID NO: 2355156 - RNA, 19 nt, Artificial Sequence
  Description of Artificial Sequence: Synthetic oligonucleotide
ucguucuccucuucuaggg

SEQ ID NO: 2355157 - RNA, 19 nt, Artificial Sequence
  Description of Artificial Sequence: Synthetic oligonucleotide
ucugggauaccuccacuag

SEQ ID NO: 2355158 - RNA, 19 nt, Artificial Sequence
  Description of Artificial Sequence: Synthetic oligonucleotide
ugggauaccuccacuagcu

SEQ ID NO: 2355159 - RNA, 19 nt, Artificial Sequence
  Description of Artificial Sequence: Synthetic oligonucleotide
uggcuuagaagacccuugg

SEQ ID NO: 2355160 - RNA, 19 nt, Artificial Sequence
  Description of Artificial Sequence: Synthetic oligonucleotide
ucgaaguucuccuccaaca

SEQ ID NO: 2355161 - RNA, 19 nt, Artificial Sequence
  Description of Artificial Sequence: Synthetic oligonucleotide
uccaguucuagccuugggu

SEQ ID NO: 2355162 - RNA, 19 nt, Artificial Sequence
  Description of Artificial Sequence: Synthetic oligonucleotide
aggcuggccaaacucgucc

SEQ ID NO: 2355163 - RNA, 19 nt, Artificial Sequence
  Description of Artificial Sequence: Synthetic oligonucleotide
uucguucuccucuucuagg

SEQ ID NO: 2355164 - RNA, 19 nt, Artificial Sequence
  Description of Artificial Sequence: Synthetic oligonucleotide
ugagugccagaggagaugg

SEQ ID NO: 2355165 - RNA, 19 nt, Artificial Sequence
  Description of Artificial Sequence: Synthetic oligonucleotide
uuuagcuagugcaggagau

SEQ ID NO: 2355166 - RNA, 19 nt, Artificial Sequence
  Description of Artificial Sequence: Synthetic oligonucleotide
cuuuggucggaucuucacg

SEQ ID NO: 2355167 - RNA, 19 nt, Artificial Sequence
  Description of Artificial Sequence: Synthetic oligonucleotide
auaauuccccaacgucugc

SEQ ID NO: 2355168 - RNA, 19 nt, Artificial Sequence
  Description of Artificial Sequence: Synthetic oligonucleotide
gagauggaagcauccgagg

SEQ ID NO: 2355169 - RNA, 19 nt, Artificial Sequence
  Description of Artificial Sequence: Synthetic oligonucleotide
ucuucaucgucuucaagaa

SEQ ID NO: 2355170 - RNA, 19 nt, Artificial Sequence
  Description of Artificial Sequence: Synthetic oligonucleotide
uacuuauuccaguucuagc

SEQ ID NO: 2355171 - RNA, 19 nt, Artificial Sequence
  Description of Artificial Sequence: Synthetic oligonucleotide
aguuuugcagucugcagga

SEQ ID NO: 2355172 - RNA, 19 nt, Artificial Sequence
  Description of Artificial Sequence: Synthetic oligonucleotide
agaauaaucgucccauaau

SEQ ID NO: 2355173 - RNA, 19 nt, Artificial Sequence
  Description of Artificial Sequence: Synthetic oligonucleotide
guauguuggauguugcuuc

SEQ ID NO: 2355174 - RNA, 19 nt, Artificial Sequence
  Description of Artificial Sequence: Synthetic oligonucleotide
gauaucagaagagucaucu

SEQ ID NO: 2355175 - RNA, 19 nt, Artificial Sequence
  Description of Artificial Sequence: Synthetic oligonucleotide
uugaauacugcccgugagu

SEQ ID NO: 2355176 - RNA, 19 nt, Artificial Sequence
  Description of Artificial Sequence: Synthetic oligonucleotide
agucaucuccgccaaguuc

SEQ ID NO: 2355177 - RNA, 19 nt, Artificial Sequence
  Description of Artificial Sequence: Synthetic oligonucleotide
guuuugaucugcuugacgu

SEQ ID NO: 2355178 - RNA, 19 nt, Artificial Sequence
  Description of Artificial Sequence: Synthetic oligonucleotide
acuaaauagucuucaucgu

SEQ ID NO: 2355179 - RNA, 19 nt, Artificial Sequence
  Description of Artificial Sequence: Synthetic oligonucleotide
gucugcauaagcucugugc

SEQ ID NO: 2355180 - RNA, 19 nt, Artificial Sequence
  Description of Artificial Sequence: Synthetic oligonucleotide
ucuagcacacugagagccg

SEQ ID NO: 2355181 - RNA, 19 nt, Artificial Sequence
  Description of Artificial Sequence: Synthetic oligonucleotide
aaaccggcuuuguauguug

SEQ ID NO: 2355182 - RNA, 19 nt, Artificial Sequence
  Description of Artificial Sequence: Synthetic oligonucleotide
ucgucuucaagaacauccc

SEQ ID NO: 2355183 - RNA, 19 nt, Artificial Sequence
  Description of Artificial Sequence: Synthetic oligonucleotide
caauccuuggucuuugguc

SEQ ID NO: 2355184 - RNA, 19 nt, Artificial Sequence
  Description of Artificial Sequence: Synthetic oligonucleotide
gcuuagaagacccuuggcc

SEQ ID NO: 2355185 - RNA, 19 nt, Artificial Sequence
  Description of Artificial Sequence: Synthetic oligonucleotide
auucguucuccucuucuag

SEQ ID NO: 2355186 - RNA, 19 nt, Artificial Sequence
  Description of Artificial Sequence: Synthetic oligonucleotide
gauggcaggaacccuagga

SEQ ID NO: 2355187 - RNA, 19 nt, Artificial Sequence
  Description of Artificial Sequence: Synthetic oligonucleotide
aucugcccuugguugaucc

SEQ ID NO: 2355188 - RNA, 19 nt, Artificial Sequence
  Description of Artificial Sequence: Synthetic oligonucleotide
auccccuucugacucauag

SEQ ID NO: 2355189 - RNA, 19 nt, Artificial Sequence
  Description of Artificial Sequence: Synthetic oligonucleotide
uggcuaucugcgaagguca

SEQ ID NO: 2355190 - RNA, 19 nt, Artificial Sequence
  Description of Artificial Sequence: Synthetic oligonucleotide
ggugguuuugaucugcuug

SEQ ID NO: 2355191 - RNA, 19 nt, Artificial Sequence
  Description of Artificial Sequence: Synthetic oligonucleotide
uagucuagacucgugaagu

SEQ ID NO: 2355192 - RNA, 19 nt, Artificial Sequence
  Description of Artificial Sequence: Synthetic oligonucleotide
agucugcaggauugaauac

SEQ ID NO: 2355193 - RNA, 19 nt, Artificial Sequence
  Description of Artificial Sequence: Synthetic oligonucleotide
aucuccgccaaguucacca

SEQ ID NO: 2355194 - RNA, 19 nt, Artificial Sequence
  Description of Artificial Sequence: Synthetic oligonucleotide
accuccacuagcuuccaag

SEQ ID NO: 2355195 - RNA, 19 nt, Artificial Sequence
  Description of Artificial Sequence: Synthetic oligonucleotide
ugaggagcucaugauauca

SEQ ID NO: 2355196 - RNA, 19 nt, Artificial Sequence
  Description of Artificial Sequence: Synthetic oligonucleotide
ucauaccauccacaucuag

SEQ ID NO: 2355197 - RNA, 19 nt, Artificial Sequence
  Description of Artificial Sequence: Synthetic oligonucleotide
gaggcugacuucuucacca

SEQ ID NO: 2355198 - RNA, 19 nt, Artificial Sequence
  Description of Artificial Sequence: Synthetic oligonucleotide
uagugcaggagauuuugcu

SEQ ID NO: 2355199 - RNA, 19 nt, Artificial Sequence
  Description of Artificial Sequence: Synthetic oligonucleotide
guuuacuuauuccaguucu

SEQ ID NO: 2355200 - RNA, 19 nt, Artificial Sequence
  Description of Artificial Sequence: Synthetic oligonucleotide
aauucguucuccucuucua

SEQ ID NO: 2355201 - RNA, 19 nt, Artificial Sequence
  Description of Artificial Sequence: Synthetic oligonucleotide
uggaagaaguuuugcaguc

SEQ ID NO: 2355202 - RNA, 19 nt, Artificial Sequence
  Description of Artificial Sequence: Synthetic oligonucleotide
uccucuucuaggguuggcg

SEQ ID NO: 2355203 - RNA, 19 nt, Artificial Sequence
  Description of Artificial Sequence: Synthetic oligonucleotide
ugcauaagcucugugcgca

SEQ ID NO: 2355204 - RNA, 19 nt, Artificial Sequence
  Description of Artificial Sequence: Synthetic oligonucleotide
acaagcaggaguuggcggu

SEQ ID NO: 2355205 - RNA, 19 nt, Artificial Sequence
  Description of Artificial Sequence: Synthetic oligonucleotide
gagauuuugcuggauggug

SEQ ID NO: 2355206 - RNA, 19 nt, Artificial Sequence
  Description of Artificial Sequence: Synthetic oligonucleotide
agucuagacucgugaaguc

SEQ ID NO: 2355207 - RNA, 19 nt, Artificial Sequence
  Description of Artificial Sequence: Synthetic oligonucleotide
uauuccaguucuagccuug

SEQ ID NO: 2355208 - RNA, 19 nt, Artificial Sequence
  Description of Artificial Sequence: Synthetic oligonucleotide
gaacauccccuucugacuc

SEQ ID NO: 2355209 - RNA, 19 nt, Artificial Sequence
  Description of Artificial Sequence: Synthetic oligonucleotide
aacccuaggagcaggccgg

SEQ ID NO: 2355210 - RNA, 19 nt, Artificial Sequence
  Description of Artificial Sequence: Synthetic oligonucleotide
uuuacuuauuccaguucua

SEQ ID NO: 2355211 - RNA, 19 nt, Artificial Sequence
  Description of Artificial Sequence: Synthetic oligonucleotide
uuggcggugggagacacag

SEQ ID NO: 2355212 - RNA, 19 nt, Artificial Sequence
  Description of Artificial Sequence: Synthetic oligonucleotide
uccgccaaguucaccaucu

SEQ ID NO: 2355213 - RNA, 19 nt, Artificial Sequence
  Description of Artificial Sequence: Synthetic oligonucleotide
uuccaagagacaccggauc

SEQ ID NO: 2355214 - RNA, 19 nt, Artificial Sequence
  Description of Artificial Sequence: Synthetic oligonucleotide
ucagaagagucaucuccgc

SEQ ID NO: 2355215 - RNA, 19 nt, Artificial Sequence
  Description of Artificial Sequence: Synthetic oligonucleotide
agaaguuuugcagucugca

SEQ ID NO: 2355216 - RNA, 19 nt, Artificial Sequence
  Description of Artificial Sequence: Synthetic oligonucleotide
ucccgcuuccgaaugagcu

SEQ ID NO: 2355217 - RNA, 19 nt, Artificial Sequence
  Description of Artificial Sequence: Synthetic oligonucleotide
gaauaaucgucccauaauu

SEQ ID NO: 2355218 - RNA, 19 nt, Artificial Sequence
  Description of Artificial Sequence: Synthetic oligonucleotide
gaggccucuggcuuagaag

SEQ ID NO: 2355219 - RNA, 19 nt, Artificial Sequence
  Description of Artificial Sequence: Synthetic oligonucleotide
ucaggggcauggcaccugg

SEQ ID NO: 2355220 - RNA, 19 nt, Artificial Sequence
  Description of Artificial Sequence: Synthetic oligonucleotide
ucccauaauuccccaacgu

SEQ ID NO: 2355221 - RNA, 19 nt, Artificial Sequence
  Description of Artificial Sequence: Synthetic oligonucleotide
gauugaauacugcccguga

SEQ ID NO: 2355222 - RNA, 19 nt, Artificial Sequence
  Description of Artificial Sequence: Synthetic oligonucleotide
uuguaggguuuacuuauuc

SEQ ID NO: 2355223 - RNA, 19 nt, Artificial Sequence
  Description of Artificial Sequence: Synthetic oligonucleotide
caguucuagccuugggugg

SEQ ID NO: 2355224 - RNA, 19 nt, Artificial Sequence
  Description of Artificial Sequence: Synthetic oligonucleotide
ugagcauuggugguuuuga

SEQ ID NO: 2355225 - RNA, 19 nt, Artificial Sequence
  Description of Artificial Sequence: Synthetic oligonucleotide
gacucauagucuagacucg

SEQ ID NO: 2355226 - RNA, 19 nt, Artificial Sequence
  Description of Artificial Sequence: Synthetic oligonucleotide
uuagaagacccuuggccuc

SEQ ID NO: 2355227 - RNA, 19 nt, Artificial Sequence
  Description of Artificial Sequence: Synthetic oligonucleotide
gucuagacucgugaagucg

SEQ ID NO: 2355228 - RNA, 19 nt, Artificial Sequence
  Description of Artificial Sequence: Synthetic oligonucleotide
gucccauaauuccccaacg

SEQ ID NO: 2355229 - RNA, 19 nt, Artificial Sequence
  Description of Artificial Sequence: Synthetic oligonucleotide
uguauguuggauguugcuu

SEQ ID NO: 2355230 - RNA, 19 nt, Artificial Sequence
  Description of Artificial Sequence: Synthetic oligonucleotide
uauguuggauguugcuucu

SEQ ID NO: 2355231 - RNA, 19 nt, Artificial Sequence
  Description of Artificial Sequence: Synthetic oligonucleotide
cucucucaagccuuucagc

SEQ ID NO: 2355232 - RNA, 19 nt, Artificial Sequence
  Description of Artificial Sequence: Synthetic oligonucleotide
aagcauccgaggcugacuu

SEQ ID NO: 2355233 - RNA, 19 nt, Artificial Sequence
  Description of Artificial Sequence: Synthetic oligonucleotide
guugauccugaccagaaua

SEQ ID NO: 2355234 - RNA, 19 nt, Artificial Sequence
  Description of Artificial Sequence: Synthetic oligonucleotide
uccucgggaaauucguucu

SEQ ID NO: 2355235 - RNA, 19 nt, Artificial Sequence
  Description of Artificial Sequence: Synthetic oligonucleotide
aggguuuacuuauuccagu

SEQ ID NO: 2355236 - RNA, 19 nt, Artificial Sequence
  Description of Artificial Sequence: Synthetic oligonucleotide
gauccugaccagaauaauc

SEQ ID NO: 2355237 - RNA, 19 nt, Artificial Sequence
  Description of Artificial Sequence: Synthetic oligonucleotide
uuguauguuggauguugcu

SEQ ID NO: 2355238 - RNA, 19 nt, Artificial Sequence
  Description of Artificial Sequence: Synthetic oligonucleotide
uccgaaugagcuccucucu

SEQ ID NO: 2355239 - RNA, 19 nt, Artificial Sequence
  Description of Artificial Sequence: Synthetic oligonucleotide
cuuagaagacccuuggccu

SEQ ID NO: 2355240 - RNA, 19 nt, Artificial Sequence
  Description of Artificial Sequence: Synthetic oligonucleotide
gaauacugcccgugagugc

SEQ ID NO: 2355241 - RNA, 19 nt, Artificial Sequence
  Description of Artificial Sequence: Synthetic oligonucleotide
gagccgaguggcuaucugc

SEQ ID NO: 2355242 - RNA, 19 nt, Artificial Sequence
  Description of Artificial Sequence: Synthetic oligonucleotide
uguuggauguugcuucuuu

SEQ ID NO: 2355243 - RNA, 19 nt, Artificial Sequence
  Description of Artificial Sequence: Synthetic oligonucleotide
uuccgaaugagcuccucuc

SEQ ID NO: 2355244 - RNA, 19 nt, Artificial Sequence
  Description of Artificial Sequence: Synthetic oligonucleotide
aauuccccaacgucugcau

SEQ ID NO: 2355245 - RNA, 19 nt, Artificial Sequence
  Description of Artificial Sequence: Synthetic oligonucleotide
gguuuugaucugcuugacg

SEQ ID NO: 2355246 - RNA, 19 nt, Artificial Sequence
  Description of Artificial Sequence: Synthetic oligonucleotide
uccgaggcugacuucuuca

SEQ ID NO: 2355247 - RNA, 19 nt, Artificial Sequence
  Description of Artificial Sequence: Synthetic oligonucleotide
cuaggguuggcgacugaag

SEQ ID NO: 2355248 - RNA, 19 nt, Artificial Sequence
  Description of Artificial Sequence: Synthetic oligonucleotide
caacaagcaggaguuggcg

SEQ ID NO: 2355249 - RNA, 19 nt, Artificial Sequence
  Description of Artificial Sequence: Synthetic oligonucleotide
cuagugcaggagauuuugc

SEQ ID NO: 2355250 - RNA, 19 nt, Artificial Sequence
  Description of Artificial Sequence: Synthetic oligonucleotide
accagaauaaucgucccau

SEQ ID NO: 2355251 - RNA, 19 nt, Artificial Sequence
  Description of Artificial Sequence: Synthetic oligonucleotide
cugggauaccuccacuagc

SEQ ID NO: 2355252 - RNA, 19 nt, Artificial Sequence
  Description of Artificial Sequence: Synthetic oligonucleotide
accuucauaccauccacau

SEQ ID NO: 2355253 - RNA, 19 nt, Artificial Sequence
  Description of Artificial Sequence: Synthetic oligonucleotide
cuggcuuagaagacccuug

SEQ ID NO: 2355254 - RNA, 19 nt, Artificial Sequence
  Description of Artificial Sequence: Synthetic oligonucleotide
caggagauuuugcuggaug

SEQ ID NO: 2355255 - RNA, 19 nt, Artificial Sequence
  Description of Artificial Sequence: Synthetic oligonucleotide
uaauuccccaacgucugca

SEQ ID NO: 2355256 - RNA, 19 nt, Artificial Sequence
  Description of Artificial Sequence: Synthetic oligonucleotide
auaagcucugugcgcaggu

SEQ ID NO: 2355257 - RNA, 19 nt, Artificial Sequence
  Description of Artificial Sequence: Synthetic oligonucleotide
uucugggauaccuccacua

SEQ ID NO: 2355258 - RNA, 19 nt, Artificial Sequence
  Description of Artificial Sequence: Synthetic oligonucleotide
cagguccucgggaaauucg

SEQ ID NO: 2355259 - RNA, 19 nt, Artificial Sequence
  Description of Artificial Sequence: Synthetic oligonucleotide
cagcaucugcccuugguug

SEQ ID NO: 2355260 - RNA, 19 nt, Artificial Sequence
  Description of Artificial Sequence: Synthetic oligonucleotide
cuaucugcgaaggucacca

SEQ ID NO: 2355261 - RNA, 19 nt, Artificial Sequence
  Description of Artificial Sequence: Synthetic oligonucleotide
cuucugacucauagucuag

SEQ ID NO: 2355262 - RNA, 19 nt, Artificial Sequence
  Description of Artificial Sequence: Synthetic oligonucleotide
gauggugcugaggagcuca

SEQ ID NO: 2355263 - RNA, 19 nt, Artificial Sequence
  Description of Artificial Sequence: Synthetic oligonucleotide
ucuucuaggguuggcgacu

SEQ ID NO: 2355264 - RNA, 19 nt, Artificial Sequence
  Description of Artificial Sequence: Synthetic oligonucleotide
ugugcgcagguccucggga

SEQ ID NO: 2355265 - RNA, 19 nt, Artificial Sequence
  Description of Artificial Sequence: Synthetic oligonucleotide
uccacuaaauagucuucau

SEQ ID NO: 2355266 - RNA, 19 nt, Artificial Sequence
  Description of Artificial Sequence: Synthetic oligonucleotide
ugcgaaggucaccagcauc

SEQ ID NO: 2355267 - RNA, 19 nt, Artificial Sequence
  Description of Artificial Sequence: Synthetic oligonucleotide
cacggcucugccuuucacc

SEQ ID NO: 2355268 - RNA, 19 nt, Artificial Sequence
  Description of Artificial Sequence: Synthetic oligonucleotide
ggagauggaagcauccgag

SEQ ID NO: 2355269 - RNA, 19 nt, Artificial Sequence
  Description of Artificial Sequence: Synthetic oligonucleotide
gaggagcucaugauaucag

SEQ ID NO: 2355270 - RNA, 19 nt, Artificial Sequence
  Description of Artificial Sequence: Synthetic oligonucleotide
gauggaagcauccgaggcu

SEQ ID NO: 2355271 - RNA, 19 nt, Artificial Sequence
  Description of Artificial Sequence: Synthetic oligonucleotide
gaguggcuaucugcgaagg

SEQ ID NO: 2355272 - RNA, 19 nt, Artificial Sequence
  Description of Artificial Sequence: Synthetic oligonucleotide
cagucugcaggauugaaua

SEQ ID NO: 2355273 - RNA, 19 nt, Artificial Sequence
  Description of Artificial Sequence: Synthetic oligonucleotide
aacauccccuucugacuca

SEQ ID NO: 2355274 - RNA, 19 nt, Artificial Sequence
  Description of Artificial Sequence: Synthetic oligonucleotide
uggucggaucuucacggcu

SEQ ID NO: 2355275 - RNA, 19 nt, Artificial Sequence
  Description of Artificial Sequence: Synthetic oligonucleotide
ucuagccuugggugguugc

SEQ ID NO: 2355276 - RNA, 19 nt, Artificial Sequence
  Description of Artificial Sequence: Synthetic oligonucleotide
uccugaccagaauaaucgu

SEQ ID NO: 2355277 - RNA, 19 nt, Artificial Sequence
  Description of Artificial Sequence: Synthetic oligonucleotide
ucgggaaauucguucuccu

SEQ ID NO: 2355278 - RNA, 19 nt, Artificial Sequence
  Description of Artificial Sequence: Synthetic oligonucleotide
cucauagucuagacucgug

SEQ ID NO: 2355279 - RNA, 19 nt, Artificial Sequence
  Description of Artificial Sequence: Synthetic oligonucleotide
cucuucuaggguuggcgac

SEQ ID NO: 2355280 - RNA, 19 nt, Artificial Sequence
  Description of Artificial Sequence: Synthetic oligonucleotide
auccuuggucuuuggucgg

SEQ ID NO: 2355281 - RNA, 19 nt, Artificial Sequence
  Description of Artificial Sequence: Synthetic oligonucleotide
cagaauaaucgucccauaa

SEQ ID NO: 2355282 - RNA, 19 nt, Artificial Sequence
  Description of Artificial Sequence: Synthetic oligonucleotide
agccgaguggcuaucugcg

SEQ ID NO: 2355283 - RNA, 19 nt, Artificial Sequence
  Description of Artificial Sequence: Synthetic oligonucleotide
ccaguucuagccuugggug

SEQ ID NO: 2355284 - RNA, 19 nt, Artificial Sequence
  Description of Artificial Sequence: Synthetic oligonucleotide
cauagucuagacucgugaa

SEQ ID NO: 2355285 - RNA, 19 nt, Artificial Sequence
  Description of Artificial Sequence: Synthetic oligonucleotide
uuuugauggcaggaacccu

SEQ ID NO: 2355286 - RNA, 19 nt, Artificial Sequence
  Description of Artificial Sequence: Synthetic oligonucleotide
cuccacuagcuuccaagag

SEQ ID NO: 2355287 - RNA, 19 nt, Artificial Sequence
  Description of Artificial Sequence: Synthetic oligonucleotide
ccacuagcuuccaagagac

SEQ ID NO: 2355288 - RNA, 19 nt, Artificial Sequence
  Description of Artificial Sequence: Synthetic oligonucleotide
cucgggaaauucguucucc

SEQ ID NO: 2355289 - RNA, 19 nt, Artificial Sequence
  Description of Artificial Sequence: Synthetic oligonucleotide
cuucaucgucuucaagaac

SEQ ID NO: 2355290 - RNA, 19 nt, Artificial Sequence
  Description of Artificial Sequence: Synthetic oligonucleotide
cauaagcucugugcgcagg

SEQ ID NO: 2355291 - RNA, 19 nt, Artificial Sequence
  Description of Artificial Sequence: Synthetic oligonucleotide
ugcaggagauuuugcugga

SEQ ID NO: 2355292 - RNA, 19 nt, Artificial Sequence
  Description of Artificial Sequence: Synthetic oligonucleotide
gaccagaauaaucguccca

SEQ ID NO: 2355293 - RNA, 19 nt, Artificial Sequence
  Description of Artificial Sequence: Synthetic oligonucleotide
aggauugaauacugcccgu

SEQ ID NO: 2355294 - RNA, 19 nt, Artificial Sequence
  Description of Artificial Sequence: Synthetic oligonucleotide
gaaauucguucuccucuuc

SEQ ID NO: 2355295 - RNA, 19 nt, Artificial Sequence
  Description of Artificial Sequence: Synthetic oligonucleotide
uagcuagugcaggagauuu

SEQ ID NO: 2355296 - RNA, 19 nt, Artificial Sequence
  Description of Artificial Sequence: Synthetic oligonucleotide
guggcuaucugcgaagguc

SEQ ID NO: 2355297 - RNA, 19 nt, Artificial Sequence
  Description of Artificial Sequence: Synthetic oligonucleotide
gcucaugauaucagaagag

SEQ ID NO: 2355298 - RNA, 19 nt, Artificial Sequence
  Description of Artificial Sequence: Synthetic oligonucleotide
auccgaggcugacuucuuc

SEQ ID NO: 2355299 - RNA, 19 nt, Artificial Sequence
  Description of Artificial Sequence: Synthetic oligonucleotide
auuccaguucuagccuugg

SEQ ID NO: 2355300 - RNA, 19 nt, Artificial Sequence
  Description of Artificial Sequence: Synthetic oligonucleotide
gucgaaguucuccuccaac

SEQ ID NO: 2355301 - RNA, 19 nt, Artificial Sequence
  Description of Artificial Sequence: Synthetic oligonucleotide
gacguuguaggguuuacuu

SEQ ID NO: 2355302 - RNA, 19 nt, Artificial Sequence
  Description of Artificial Sequence: Synthetic oligonucleotide
gaucgcugcuucugccucc

SEQ ID NO: 2355303 - RNA, 19 nt, Artificial Sequence
  Description of Artificial Sequence: Synthetic oligonucleotide
acguuguaggguuuacuua

SEQ ID NO: 2355304 - RNA, 19 nt, Artificial Sequence
  Description of Artificial Sequence: Synthetic oligonucleotide
caccaucugagaccacagg

SEQ ID NO: 2355305 - RNA, 19 nt, Artificial Sequence
  Description of Artificial Sequence: Synthetic oligonucleotide
uuggucggaucuucacggc

SEQ ID NO: 2355306 - RNA, 19 nt, Artificial Sequence
  Description of Artificial Sequence: Synthetic oligonucleotide
ggauaccuccacuagcuuc

SEQ ID NO: 2355307 - RNA, 19 nt, Artificial Sequence
  Description of Artificial Sequence: Synthetic oligonucleotide
aguuggcggugggagacac

SEQ ID NO: 2355308 - RNA, 19 nt, Artificial Sequence
  Description of Artificial Sequence: Synthetic oligonucleotide
ugcccuugguugauccuga

SEQ ID NO: 2355309 - RNA, 19 nt, Artificial Sequence
  Description of Artificial Sequence: Synthetic oligonucleotide
guccucgggaaauucguuc

SEQ ID NO: 2355310 - RNA, 19 nt, Artificial Sequence
  Description of Artificial Sequence: Synthetic oligonucleotide
gguuuacuuauuccaguuc

SEQ ID NO: 2355311 - RNA, 19 nt, Artificial Sequence
  Description of Artificial Sequence: Synthetic oligonucleotide
ugucccgcuuccgaaugag

SEQ ID NO: 2355312 - RNA, 19 nt, Artificial Sequence
  Description of Artificial Sequence: Synthetic oligonucleotide
aggaacccuaggagcaggc

SEQ ID NO: 2355313 - RNA, 19 nt, Artificial Sequence
  Description of Artificial Sequence: Synthetic oligonucleotide
aguucuagccuuggguggu

SEQ ID NO: 2355314 - RNA, 19 nt, Artificial Sequence
  Description of Artificial Sequence: Synthetic oligonucleotide
acucauagucuagacucgu

SEQ ID NO: 2355315 - RNA, 19 nt, Artificial Sequence
  Description of Artificial Sequence: Synthetic oligonucleotide
uaucugcgaaggucaccag

SEQ ID NO: 2355316 - RNA, 19 nt, Artificial Sequence
  Description of Artificial Sequence: Synthetic oligonucleotide
gcuagugcaggagauuuug

SEQ ID NO: 2355317 - RNA, 19 nt, Artificial Sequence
  Description of Artificial Sequence: Synthetic oligonucleotide
cacuaaaccggcuuuguau

SEQ ID NO: 2355318 - RNA, 19 nt, Artificial Sequence
  Description of Artificial Sequence: Synthetic oligonucleotide
ugacguuguaggguuuacu

SEQ ID NO: 2355319 - RNA, 19 nt, Artificial Sequence
  Description of Artificial Sequence: Synthetic oligonucleotide
ccaacaagcaggaguuggc

SEQ ID NO: 2355320 - RNA, 19 nt, Artificial Sequence
  Description of Artificial Sequence: Synthetic oligonucleotide
ccaacgucugcauaagcuc

SEQ ID NO: 2355321 - RNA, 19 nt, Artificial Sequence
  Description of Artificial Sequence: Synthetic oligonucleotide
cauuggugguuuugaucug

SEQ ID NO: 2355322 - RNA, 19 nt, Artificial Sequence
  Description of Artificial Sequence: Synthetic oligonucleotide
uccccuucugacucauagu

SEQ ID NO: 2355323 - RNA, 19 nt, Artificial Sequence
  Description of Artificial Sequence: Synthetic oligonucleotide
agagccgaguggcuaucug

SEQ ID NO: 2355324 - RNA, 19 nt, Artificial Sequence
  Description of Artificial Sequence: Synthetic oligonucleotide
ugcccgugagugccagagg

SEQ ID NO: 2355325 - RNA, 19 nt, Artificial Sequence
  Description of Artificial Sequence: Synthetic oligonucleotide
guccacuaaauagucuuca

SEQ ID NO: 2355326 - RNA, 19 nt, Artificial Sequence
  Description of Artificial Sequence: Synthetic oligonucleotide
aguggcuaucugcgaaggu

SEQ ID NO: 2355327 - RNA, 19 nt, Artificial Sequence
  Description of Artificial Sequence: Synthetic oligonucleotide
cucucaagccuuucagcca

SEQ ID NO: 2355328 - RNA, 19 nt, Artificial Sequence
  Description of Artificial Sequence: Synthetic oligonucleotide
uucauaccauccacaucua

SEQ ID NO: 2355329 - RNA, 19 nt, Artificial Sequence
  Description of Artificial Sequence: Synthetic oligonucleotide
uggccaaacucguccacua
